United States Patent Application Publication US 2018/0126003 A1 - sequence listing, part 144

SEQ ID NO: 252975 - protein, 187 aa, Artificial Sequence
  derived and/or modified sequence
MGAFLDKPKMEKHNAQGQGNGLRYGLSSMQGWRVEMEDAHTAVIGLPSGLESWSFFAVYDGHAGSQVAKYCCEHLLDHITNNQDFKGSAGAPSVENVKNGIRTGFLEIDEHMRVMSEKKHGADRSGSTAVGVLISPQHTYFINCGDSRGLLCRNRKVHFFTQDHKPSNPLEKERIQNAGGSVMIQRV

SEQ ID NO: 252976 - protein, 129 aa, Artificial Sequence
  derived and/or modified sequence
MGAFLDKPKMEKHNAQGQGNGLRYGLSSMQGWRVEMEDAHTAVIGLPSGLESWSFFAVYDGHAGSQVAKYCCEHLLDHITNNQDFKGSAGAPSVENVKNGIRTGFLEIDEHMRVMSEKKHGADRSGSTA

SEQ ID NO: 252977 - protein, 148 aa, Artificial Sequence
  derived and/or modified sequence
MGAFLDKPKMEKHNAQGQGNGLRYGLSSMQGWRVEMEDAHTAVIGLPSGLESWSFFAVYDGHAGSQVAKYCCEHLLDHITNNQDFKGSAGAPSVENVKNGIRTGFLEIDEHMRVMSEKKHGADRSGSTAVGVLISPQHTYFINCGDSR

SEQ ID NO: 252978 - DNA, 1368 bp, Artificial Sequence
  derived and/or modified sequence
atgttctgcagcggcagaaagtgggtggccgaggccaccatctgcaccaagctgatgaagagagagaagagaagaatgggcaagagaagagccaagaaggccaagagagaggagaagaagaagggcggcgagagaagaagaaacgagaagagaggcaaccagatgaagagaatgtgcgagagaaagaagtacgagaccgacctggaggaccaggacatcatgggcgccttcctggacaagcccaagatggagaagcacaacgcccagggccagggcaacggcctgagatacggcctgagcagcatgcagggctggagagtggagatggaggacgcccacaccgccgtgatcggcctgcccagcggcctggagagctggagcttcttcgccgtgtacgacggccacgccggcagccaggtggccaagtactgctgcgagcacctgctggaccacatcaccaacaaccaggacttcaagggcagcgccggcgcccccagcgtggagaacgtgaagaacggcatcagaaccggcttcctggagatcgacgagcacatgagagtgatgagcgagaagaagcacggcgccgacagaagcggcagcaccgccgtgggcgtgctgatcagcccccagcacacctacttcatcaactgcggcgacagcagaggcctgctgtgcagaaacagaaaggtgcacttcttcacccaggaccacaagcccagcaaccccctggagaaggagagaatccagaacgccggcggcagcgtgatgatccagagagtgaacggcagcctggccgtgagcagagccctgggcgacttcgactacaagtgcgtgcacggcaagggccccaccgagcagctggtgagccccgagcccgaggtgcacgacatcgagagaagcgaggaggacgaccagttcatcatcctggcctgcgacggcatctgggacgtgatgggcaacgaggagctgtgcgacttcgtgagaagcagactggaggtgaccgacgacctggagaaggtgtgcaacgaggtggtggacacctgcctgtacaagggcagcagagacaacatgagcgtgatcctgatctgcttccccaacgcccccaaggtgagccccgaggccgtgaagaaggaggccgagctggacaagtacctggagtgcagagtggaggagatcatcaagaagcagggcgagggcgtgcccgacctggtgcacgtgatgagaaccctggccagcgagaacatccccagcctgccccccggcggcgagctggccagcaagagaaacgtgatcgaggccgtgtacaacagactgaacccctacaagaacgacgacaccgacagcaccagcaccgacgacatgtggtag

SEQ ID NO: 252979 - DNA, 1368 bp, Artificial Sequence
  derived and/or modified sequence
atgttctgttccgggcgaaagtgggtggccgaggcaactatttgtactaagctcatgaagagagagaagcggcgaatggggaagagacgggccaaaaaagcaaaacgggaagaaaagaagaagggtggcgagcgtcggcggaacgaaaagaggggtaaccagatgaaacgcatgtgcgaaaggaagaaatacgagactgatcttgaggatcaggatatcatgggggcgtttcttgataagcctaaaatggagaagcacaatgcacaggggcaagggaacggattgaggtacgggttatcttcaatgcagggttggagggtggaaatggaggacgctcacaccgctgtgatcggcctgccctctggcctggaatcctggtctttttttgcagtgtacgacgggcatgcaggttctcaggtcgcaaagtactgttgtgagcacttgttagaccacatcaccaataaccaggacttcaagggaagtgccggtgcccctagcgtggaaaacgtcaagaacgggattcggacaggtttcctcgagatagatgaacatatgagggtgatgtcagaaaaaaagcatggggctgatcgttcgggcagtactgctgttggagtgctgatttcaccacaacacacctacttcatcaactgcggcgactcacggggccttctgtgccggaataggaaagttcacttttttacacaagatcataagccctcaaaccccctggagaaggagcgcattcaaaatgctggaggaagcgtgatgattcagagagtgaacggaagtctcgccgtttctagagcactcggggatttcgactacaaatgtgtacacgggaaaggtccaacggagcagctggtgtctccagagccagaagtgcatgacatagaacgcagtgaagaggacgaccagttcatcattttggcttgcgatggcatatgggatgtgatgggcaatgaggaactctgtgacttcgtaagatctaggctggaagtgacagacgaccttgagaaggtgtgcaacgaagtggttgatacttgcctttacaaaggatcgagagacaacatgagtgtgattctcatatgtttccccaatgctccgaaggtttcgccagaggctgttaagaaagaggcagaactggacaagtacctcgaatgtcgtgtggaggagattatcaaaaagcagggggagggcgtgccagatctggtgcacgtgatgcggacattggcaagcgaaaacatcccctctctgccacccggaggcgaactcgcgtccaagcgtaatgtcatagaggcggtatataatagactgaatccatataagaacgacgacaccgactcgaccagtaccgacgatatgtggtag

SEQ ID NO: 252980 - DNA, 1368 bp, Artificial Sequence
  derived and/or modified sequence
atgttctgcagcggcaggaagtgggtggccgaggccaccatctgcaccaagctgatgaagcgggagaagaggaggatgggcaagagaagagccaagaaggccaagcgggaggagaagaagaagggcggggagaggagaagaaatgagaagaggggcaaccagatgaagaggatgtgtgagaggaagaagtatgaaacagacctggaggaccaggacatcatgggcgccttcctggacaagcccaagatggagaagcacaatgcccagggccagggcaatggcctgcgctatggcctgagctccatgcagggctggagggtggagatggaggatgcccacacagctgtgattggcctgcccagcggcctggagagctggagcttctttgctgtgtatgatggccacgccggcagccaggtggccaagtactgctgtgagcacctgctggaccacatcaccaacaaccaggacttcaagggcagcgctggggcccccagcgtggagaatgtgaagaatggcatcagaacaggcttcctggagattgatgagcacatgagggtgatgtctgagaagaagcatggagctgacaggagcggcagcacagctgtgggcgtgctgatcagcccccagcacacctacttcatcaactgtggggacagccggggcctgctgtgcaggaacaggaaggtgcacttcttcacccaggaccacaagcccagcaaccccctggagaaggagcgcatccagaatgccggcggctctgtgatgatccagagggtgaatggcagcctggccgtgtcccgggccctgggggactttgactacaagtgtgtgcacggcaagggccccacagagcagctggtgtccccagagcctgaggtgcatgacatcgagaggtctgaggaggatgaccagttcatcatcctggcctgtgatggcatctgggatgtgatgggaaatgaggagctgtgtgactttgtgcgcagccggctggaggtgacagatgacctggagaaggtgtgcaatgaggtggtggacacctgcctgtacaagggcagccgggacaacatgtctgtcatcctgatctgcttccccaatgcccccaaggtgtccccagaggccgtgaagaaggaggccgagctggacaagtacctggagtgccgggtggaggagatcatcaagaagcagggcgagggcgtgcctgacctggtgcacgtgatgaggaccctggccagcgagaacatccccagcctgcccccaggaggagagctggccagcaagagaaatgtgattgaagctgtgtacaaccggctgaacccctacaagaatgatgacacagacagcaccagcacagatgacatgtggtag

SEQ ID NO: 252981 - DNA, 1368 bp, Artificial Sequence
  derived and/or modified sequence
atgttctgcagcggccggaagtgggtggccgaggccaccatctgcacaaaactgatgaaaagagagaagcgacgtatgggtaaacgccgagcaaagaaggcaaagcgggaggaaaaaaagaagggtggagagaggcgaaggaacgagaaacgaggaaaccagatgaaaagaatgtgcgaaagaaagaaatacgagacggatctggaagaccaggacataatgggggcttttctcgataagcccaagatggaaaaacataatgctcagggacagggtaatggccttagatacgggcttagttcaatgcaaggatggcgagtggaaatggaggatgcccatactgctgtcatcggcctaccaagtggactggagagctggagcttctttgcagtatatgacggacacgccggtagccaggtggccaagtattgttgtgaacacttgttggatcatataacgaacaaccaggattttaaaggcagcgcgggggccccatctgttgaaaacgtgaagaacggcatccgcactggctttctggaaatagacgaacatatgagggtcatgtccgaaaagaaacacggcgctgacagaagtgggtccaccgccgttggtgttctgatatctccacagcacacatactttattaactgcggagactctaggggcctgttgtgccggaatcggaaagttcatttcttcactcaggaccataagccctcaaaccctttggaaaaggaacggatacagaatgccggagggagtgtgatgatacagcgggtgaatgggtctctcgccgtctcccgagcactcggcgactttgactataagtgcgtacacgggaaggggcctaccgaacagctggtttcccctgagccagaggttcatgatatcgagaggagcgaggaagacgatcaatttattatcctcgcctgtgacggcatctgggacgtaatggggaatgaagaattgtgcgattttgtccggagcagactcgaggtgacagatgacctggaaaaggtttgcaatgaggtggtggatacgtgtttgtataaagggagtagagacaacatgagtgtaatcttgatctgctttccaaacgcccccaaggtgagtccagaggccgtgaagaaagaggcggagctggacaagtatctagagtgtcgagtggaagaaattatcaagaagcagggcgagggcgtaccagacctcgtgcacgtgatgcgtaccctggcatccgagaatatcccctcattaccacctggaggggagctggcttccaagagaaatgtgatcgaggctgtgtacaaccgcttaaatccatataagaatgatgacacagattctacatcaaccgacgatatgtggtag

SEQ ID NO: 252982 - DNA, 1713 bp, Artificial Sequence
  derived and/or modified sequence
aatgtattatgatgtaggggagggaggaaggagggccagggtagggggcacaccctctccctgaatgaaattcatttaggggcactgtctgctcgcatgttctgttctgggagaaaatgggtagcagaagctacaatttgtactaagctaatgaaaagagagaaaagaagaatggggaagagaagggcaaagaaggcaaaaagagaagagaagaaaaagggaggagagagaaggagaaatgagaaaagaggaaaccaaatgaagaggatgtgtgagagaaaaaaatatgaaacagacctagaggatcaagacataatgggagcatttttagacaagccaaagatggaaaagcataatgcccaggggcagggtaatgggttgcgatatgggctaagcagcatgcaaggctggcgtgttgaaatggaggatgcacatacggctgtgatcggtttgccaagtggacttgaatcgtggtcattctttgctgtgtatgatgggcatgctggttctcaggttgccaaatactgctgtgagcatttgttagatcacatcaccaataaccaggattttaaagggtctgcaggagcaccttctgtggaaaatgtaaagaatggaatcagaacaggttttctggagattgatgaacacatgagagttatgtcagagaagaaacatggtgcagatagaagtgggtcaacagctgtaggtgtcttaatttctccccaacatacttatttcattaactgtggagactcaagaggtttactttgtaggaacaggaaagttcatttcttcacacaagatcacaaaccaagtaatccgctggagaaagaacgaattcagaatgcaggtggctctgtaatgattcagcgtgtgaatggctctctggctgtatcgagggcccttggggattttgattacaaatgtgtccatggaaaaggtcctactgagcagcttgtctcaccagagcctgaagtccatgatattgaaagatctgaagaagatgatcagttcattatccttgcatgtgatggtatctgggatgttatgggaaatgaagagctctgtgattttgtaagatccagacttgaagtcactgatgaccttgagaaagtttgcaatgaagtagtcgacacctgtttgtataagggaagtcgagacaacatgagtgtgattttgatctgttttccaaatgcacccaaagtatcgccagaagcagtgaagaaggaggcagagttggacaagtacctggaatgcagagtagaagaaatcataaagaagcagggggaaggcgtccccgacttagtccatgtgatgcgcacattagcgagtgagaacatccccagcctcccaccagggggtgaattggcaagcaagaggaatgttattgaagccgtttacaatagactgaatccttacaaaaatgacgacactgactctacatcaacagatgatatgtggtaaaactgctcatctagccatggagtttaccttcacctccaaaggagagtacagctcaactttgttgaaacttttaacatccatcctcaactttaaggaaggggatatgacatgggtgagaatgattacatcagagaacttcagcagtacaacagctagcccagaactgatttttttttttttttttgtaaatttgagacttatgtaagcgtgatttcaaaccataattcgtgttgtaaatcagactccagc

SEQ ID NO: 252983 - DNA, 8184 bp, Artificial Sequence
  derived and/or modified sequence
cgggagctagagagcagtggtctcggcgctcgtccggcccgcagcttcgggtcctcaggcggctgttgctccggaacgggtggttggggaggggggggtggggggactctagacagctgaggcgcgaaagcgatgagtcctcggctcttcctcctccttctccgggacccgctctctgcctccctctccaacgcccggatgatctgagccgcgagggcgccgacagccgggggcccggacgcagcccggctcctcccctcctccgccccttccccagcctgacctggcccgccgctgcagcggtgacccctcccccggctgccgccgtcgccgccgcggtgaccccctccccggctgccgccgccgccgcctcggccgaccagggacctgcccgcctgcggctgctccggacctagaggatcaagacataatgggagcatttttagacaagccaaagatggaaaagcataatgcccaggggcagggtaatgggttgcgatatgggctaagcagcatgcaaggctggcgtgttgaaatggaggatgcacatacggctgtgatcggtttgccaagtggacttgaatcgtggtcattctttgctgtgtatgatgggcatgctggttctcaggttgccaaatactgctgtgagcatttgttagatcacatcaccaataaccaggattttaaagggtctgcaggagcaccttctgtggaaaatgtaaagaatggaatcagaacaggttttctggagattgatgaacacatgagagttatgtcagagaagaaacatggtgcagatagaagtgggtcaacagctgtaggtgtcttaatttctccccaacatacttatttcattaactgtggagactcaagaggtttactttgtaggaacaggaaagttcatttcttcacacaagatcacaaaccaagtaatccgctggagaaagaacgaattcagaatgcaggtggctctgtaatgattcagcgtgtgaatggctctctggctgtatcgagggcccttggggattttgattacaaatgtgtccatggaaaaggtcctactgagcagcttgtctcaccagagcctgaagtccatgatattgaaagatctgaagaagatgatcagttcattatccttgcatgtgatggtatctgggatgttatgggaaatgaagagctctgtgattttgtaagatccagacttgaagtcactgatgaccttgagaaagtttgcaatgaagtagtcgacacctgtttgtataagggaagtcgagacaacatgagtgtgattttgatctgttttccaaatgcacccaaagtatcgccagaagcagtgaagaaggaggcagagttggacaagtacctggaatgcagagtagaagaaatcataaagaagcagggggaaggcgtccccgacttagtccatgtgatgcgcacattagcgagtgagaacatccccagcctcccaccagggggtgaattggcaagcaagaggaatgttattgaagccgtttacaatagactgaatccttacaaaaatgacgacactgactctacatcaacagatgatatgtggtaaaactgctcatctagccatggagtttaccttcacctccaaaggagagtacagctcaactttgttgaaacttttaacatccatcctcaactttaaggaaggggatatgacatgggtgagaatgattacatcagagaacttcagcagtacaacagctagcccagaactgatttttttttttttttttgtaaatttgagacttatgtaagcgtgatttcaaaccataattcgtgttgtaaatcagactccagcaatttttgttgtatgattttgtttttttgtaaagtgtaattgtccttgtacaaaatgctcatatttaattatgaactgctttaaatcactatcaaagttacaagaaatgtttggcttattgtgtgatgcaacagatatatagccctttcaagtcatgttgtgtttggacttggggttggaacagggagagcagcagccatgtcagctacacgctcaaatgtgcagatgattatggaaaataacctcaaaatcttacaaagctgaacatccaaggagttattgaaaactatcttaaatgttcttggtaggggagttggcattgttgataaagccagtcccttcatttaactgtctttcaggatgttccttcgttgtttccatgagtattgcaggtaataatacagtgtattcataagaatctcaatcttggggctaaatgccttgtttctttgcacctcttttcaagtccttacatttaattactaattgataagcagcagcttcctacatatagtaggaaactgccacatttttgctatcatgattggctgggcctgctgctgttcctagtaagatattctgaattccattttatcaataaagcttgatttaacaaacaagaaacttaatcatgtatgtgtaattcctcttttaccctggccttttaaaacactgtgccgttgtaatgagacgtttctcatagggaaagatgttagtctcttttaattggacaacactgtcactcaaggcatagatgaaactttccttccattagaaagactaaaagatttaattcttggttgtaccttaatctattttttaaataggtttctttcaggctgcttatttttcattaagatgtgtatcagcttggatttgcctactgtttaattaaaatatttattgtcaaagtttgacaatctaacactctatggtaggggtgtgtgtgtgtgtgtttgtgagtgtgtgtttgcctgtgatttttaattggcccatgtctttagaatccaagtggttaagatgtatttgtgatttgaaatatagcatgttgataatatttagctgttggcctttacaaataactttcaaagcttaaggaattgtagatataaaaataacctaatttaatttaggcttaaattcctctgattaagcatgtgaaagtaagttttaaaatctgtcgcattgaaaagattactgttccgtgcccttctgtatttttgtctctttaggttgaatattgtatttatcaccatgtaatcattcagtaggcagattcccactagaaaactgttgaaatgtaagactaaaatacaacattgaatacaaaatcaaaattttgtgtataaaaaccagtatagtccattttgttatatttgttttttccctaacttggaaatatacatatttgtatatatagccttaaaattaatgtaaagttaggggagtagtggggaaagtaatgtgaaatgtctcagatttaagtagttaaataccagcaaaatcttttcattatccctcttattttgtgaggtgattaaatgtaacttaattgtatttaatttatatcttattccagcatgaatgaggaaaaactgaagtactatttatatttagaaattcatatcagttgaaattacagaaccaattccatacttacaataaatacttaatgtctaaatctgtggtagagtgcgaagtatgataatgttctaagttatggctttgcaagcatctaaatgtgcatttaatgaataccagtgcttctagtatagactaattaccagacatactggtactgaaagctaaatccctattataacaaaccagttccttaatattttaagtagactgacaactttagttccagaaattgcaaaactttgaactggactgtgtaatcttttgagatgcaaaacttaagtcacaagtagagtatgtgatggaaagctgtatttcaaaccataacagcatatttagagccttttttttttgagtctttaaacaagagaaaattaaaatattcctgtcaaaattattagtattgaaattaggcttggacacgagagagaaccgtatttgagtgatgtgagaagactaaatcttttccacatgagtcagcactgccatactaataatttttttactataaaaatacaggaaggaagtatacattataacagcagactgtgtgtgttcctgattcctggaggtaatagtggggggaaaccaaccatactttttaaaggcacttttgcacctctattgtgcacttcattcttgtaccacttaaattcttcacccccatcccctttttttgtgctaattagcatctcagggcaatgcctcaaaaatgtttgatgtgttctgttctttggagggaaaaagttcttatgtgatgataatatagtactcaaaatatacttttatcatttaaatgtcttatttgctgctatgaataggaaataacattttgtatagcaggctctgttttaccctaacattaaaaaatttcactgatctttctttcattaacagggtagaatctcctaatttccactttcttgggaatatacttttatagacaatagaagcagttctcaatattagcatatactttaaaaaatcaaagtgataacttaattcagctttggaagtatctcaaacatatttttactttatagtgcattaacttgcttctagagtacttaatgcaactgctctagccacttaattttttatactaatctcaacattaagaaatttggattaagtaataaattagttatgtaattcaagtaatctgaattacagcagtacttttagtgatcattcataggactatatattaacccagctaataactcagtttttttacaaaatgtttcgagtattattggtaaaacactgttctaggctaagcacattgggactgtaaagaaatgagtagatccttggcttcaagtttacatctggacaatttataatctagtgtatgttagtattataactggatcactcatcaaaaaatatatatatatatctattgcccacctgctatctaccaggtacttagctgatcaaggcaggcccctgccctaaagaccttgtttatacttcctttactcacctgaaaactgttctccagtttattttcttctctctaaagttaaagagtaattcagaagaaaattttgcttagcataagaataaaattggactgaagaggcttaagcccattcagtatccttgattgcatttatccaacggcctttattcttcctgctgacagcagtaactcagaggaataggtagtagatttctgaaaattatccagccatggaaatgtaggtggggtttgagtttaaggcatttaaaaatgtaaatatctctagctaaatttatcttaagtagaactctgtgtttttgtaacacactgccagtgttaatatcaaattttagccaaattattactatgtgttttaatattttaaaataatttcactgcccatctttactggacaaactcatttggagttcaacttgtgatttctgaaagaactgatgaaattgggtactgctttttttctccatttttcgttttgttttaattttgaatttcatggtatatacttttagttcaaactcagctgtttgtacagtattgtattaggatttggtattagaaaagatgtgtaaatatcttagtatataattgtttctcatttgaggtttttcttctaagggaccttaaagagttttatatacttttgctcacagaaactgctggtgagattaccattttttgagtatctagtcttctagtttttcttttaggcattaggaagccttctttagagttcaaaattttagaagcctaatttgctcttacttccttcaattatgtgccatgtgttttggtttgtatatgttttaaattgtatatttccttggaatatgcttgaaatatttaagaatacattttcaaaatgtataatactgtattgttttgttgatcagaataataagtctcagttaaatgtttgttattactgatagtcaaaatgctcaatagaaatgatgagaggcattggttccaattcattgtcaaatgaacgttttctaattttgttcacagattctttccctttcgattgttctgtatgttaagatagtggcttctgctctcactgttttcctatttatattactagcaggtaggagtgctaattagaaaaacttagatggtattgaaattacagttgacaacttatatttttatgagatggagaaaaaagattaagttgatataacaacaaagtggactttttttcttccttatcctgcacgaaatattgcccttgtttcctctactttcctcttggtgttttctctttttttcaaacagaaacaggccaattccattttcttgagcaagaaagcttagtgtgttacttcatcaaggccagctaatactgtgttaaaccgggctgaaaatgagaaaacttgggagatggaggaatggggaaatggcagtgggataggtagggaaggattactcttaattgttttaaaagccataggaaagtcttccttgtacgtggctgtaaatttataagaactattgtgtcacataaaccaacaagaatgaacctttgctgcttcagataatttgatttttccagcaaggaaattaataagttactgattcttcagcatagaaacaactgagaagaattaatgcaatgtttcttcactagaaaacccaacccttcatttcttttcattgctccaaaacccagttttcaactaatggttttctcattaaactaaatgtttagaaaagttgtttagagtttttctttttcttttacatagtcctcctgatccagtataagactatttagtaacgtgcatttgtatggtactatctaaagtaagttagattgatgtaagagatcgggtagctgcggaacaaaattagttatatcctaattaggtacagtgaatgacacaaaatcattttagcaatgcttcttaaccttttggggtcacaggcgttttgagactgatgaatcctagggacttatttacccaggaaaatgcgtatataacatacatatctccctaaagtttacaatattgtagtggttcatgggccccctggttaagagcccattctaaagtacaatagggcatcatcccttttcctgcaaagcccaaaagtatatttctagggcatgaaaataacttgagtctattttaaggaattgtttcactctagaggtagataggggacctggctagaatctgacattaaaatatactttttaaaaaatattatatttggggtggggaaagtgattaaaaggtgaaaaaaaaacatagtattcagaagttttggaggttaatgtctttctctaagatttgccactttagaaattcaacagaaaagaggtaaaacagaaatggaatgtatctggaacatttttggcctccatagtgcagatatactatattaacaagtaatacatttatttacctgtcagatctccaggttttaagattttgagctttctagtattaggattcattaaatgttcaattcatttcatattctaaggaattaggttatttacttactaattcaggatgttaaaataacatccaagtcggacaaccaccaccaatgcacacagttaatgagatttctaaaatataataagtacaatgtaacaaacgtatagaattttgcatttgttgccaaaattagatgtttaatgacagcttatttaattcccatttgtgggacttctggaacatagaaaccattatcttacctggttatcccttgactaaatagcatatctgcaggaaaatatcttgtttgtagtgatatgccccaatagtgattgatttcactcttgaaatgagttatatcacttaatttgtataaatgttatgagtggagagacatgtacatgttaaaagcatgttgcattatatattcattttttaaactctataaatgttaagaataatataattgcagaaatatttttcttaaatacaatgtgtaacaaaattctccgtagcaactcacccactttgcagtttatgtgatccacacttttaaagaaattccataaatgtatattttgtattatgtattatttcctggtccaaagaaaatatgtgaattcagttctaactttaagaatgtactgtttgttttcaagttcattgaaaaattgcattcagcctgcgaatggttgcagattgtatgttagatgaaaagtagaaataatttctagtttggaaaactggtgccactaaataaacaggcaattacataa

SEQ ID NO: 252984 - DNA, 854 bp, Artificial Sequence
  derived and/or modified sequence
ccttctaccaactgcagttttagatacgttttgaaaatttcatcacctgagggataagagttggtgtccttgttcttttttctttcctgggaattgttctagtactgagatttcctctttggcttgaagtttctggtcttcactctagcactaattgaaaaaaaaaaaatttgttttccgagaactgttactttcctccatattttcaaatttattaacagagaattgtacagagtgatttattttacaacaataaaattctatttgtgagacctagaggatcaagacataatgggagcatttttagacaagccaaagatggaaaagcataatgcccaggggcagggtaatgggttgcgatatgggctaagcagcatgcaaggctggcgtgttgaaatggaggatgcacatacggctgtgatcggtttgccaagtggacttgaatcgtggtcattctttgctgtgtatgatgggcatgctggttctcaggttgccaaatactgctgtgagcatttgttagatcacatcaccaataaccaggattttaaagggtctgcaggagcaccttctgtggaaaatgtaaagaatggaatcagaacaggttttctggagattgatgaacacatgagagttatgtcagagaagaaacatggtgcagatagaagtgggtcaacagctgtaggtgtcttaatttctccccaacatacttatttcattaactgtggagactcaagaggtttactttgtaggaacaggaaagttcatttcttcacacaagatcacaaaccaagtaatccgctggagaaagaacgaattcagaatgcaggtggctctgtaatgattcagcgtgtgaa

SEQ ID NO: 252985 - DNA, 564 bp, Artificial Sequence
  derived and/or modified sequence
cgcctgcggctgctccggtactttgttttgaaaagttcagatcaactgataatactagtgctgtgatgagactcagcttgtactcaagaacagatttatgactagcttatagttggctgcttcaccaggactctacaaattgctcagaacccaaggagacctagaggatcaagacataatgggagcatttttagacaagccaaagatggaaaagcataatgcccaggggcagggtaatgggttgcgatatgggctaagcagcatgcaaggctggcgtgttgaaatggaggatgcacatacggctgtgatcggtttgccaagtggacttgaatcgtggtcattctttgctgtgtatgatgggcatgctggttctcaggttgccaaatactgctgtgagcatttgttagatcacatcaccaataaccaggattttaaagggtctgcaggagcaccttctgtggaaaatgtaaagaatggaatcagaacaggttttctggagattgatgaacacatgagagttatgtcagagaagaaacatggtgcagatagaagtgggtcaacagc

SEQ ID NO: 252986 - DNA, 1546 bp, Artificial Sequence
  derived and/or modified sequence
attatgatgtaggggagggaggaaggagggccagggtagggggcacaccctctccctgaatgaaattcatttaggggcactgtctgctcgcatgttctgttctgggagaaaatgggtagcagaagctacaatttgtactaagctaatgaaaagagagaaaagaagaatggggaagagaagggcaaagaaggcaaaaagagaagagaagaaaaagggaggagagagaaggagaaatgagaaaagaggaaaccaaatgaagaggatgtgtgagagaaaaaaatatgaaacagtactttgttttgaaaagttcagatcaactgataatactagtgctgtgatgagactcagcttgtactcaagaacagatttatgactagacctagaggatcaagacataatgggagcatttttagacaagccaaagatggaaaagcataatgcccaggggcagggtaatgggttgcgatatgggctaagcagcatgcaaggctggcgtgttgaaatggaggatgcacatacggctgtgatcggtttgccaagtggacttgaatcgtggtcattctttgctgtgtatgatgggcatgctggttctcaggttgccaaatactgctgtgagcatttgttagatcacatcaccaataaccaggattttaaagggtctgcaggagcaccttctgtggaaaatgtaaagaatggaatcagaacaggttttctggagattgatgaacacatgagagttatgtcagagaagaaacatggtgcagatagaagtgggtcaacagctgtaggtgtcttaatttctccccaacatacttatttcattaactgtggagactcaagaggtttactttgtaggaacaggaaagttcatttcttcacacaagatcacaaaccaagtaatccgctggagaaagaacgaattcagaatgcaggtggctctgtaatgattcagcgtgtgaatggctctctggctgtatcgagggcccttggggattttgattacaaatgtgtccatggaaaaggtcctactgagcagcttgtctcaccagagcctgaagtccatgatattgaaagatctgaagaagatgatcagttcattatccttgcatgtgatggtatctgggatgttatgggaaatgaagagctctgtgattttgtaagatccagacttgaagtcactgatgaccttgagaaagtttgcaatgaagtagtcgacacctgtttgtataagggaagtcgagacaacatgagtgtgattttgatctgttttccaaatgcacccaaagtatcgccagaagcagtgaagaaggaggcagagttggacaagtacctggaatgcagagtagaagaaatcataaagaagcagggggaaggcgtccccgacttagtccatgtgatgcgcacattagcgagtgagaacatccccagcctcccaccagggggtgaattggcaagcaagaggaatgttattgaagccgtttacaatagactgaatccttacaaaaatgacgacactgactctacatcaacagatgatatgtggtaa

SEQ ID NO: 252987 - DNA, 1368 bp, Artificial Sequence
  derived and/or modified sequence
atgttttgctcaggccgtaaatgggtggccgaagccactatctgcactaaactcatgaagcgcgagaagagacgtatgggaaagcgtcgggcaaagaaggcaaagcgcgaggagaaaaagaaggggggagaacgacgccgaaatgagaagcgtgggaatcaaatgaaacgcatgtgcgaacggaagaagtacgagacggatctggaagaccaggacataatgggagcgttcctggataagcctaaaatggagaaacataatgcacagggccaaggcaacgggctaagatacggactcagctcaatgcaagggtggagagtggagatggaagacgcccatacagctgtaattgggctgccaagcggcctggaatcttggtcattttttgctgtctacgatggccacgccggatctcaggtggccaagtactgctgcgagcatctgctggaccatatcacgaacaaccaagattttaaaggtagcgcaggagcgccaagtgtcgagaatgttaagaacggaatccgaaccggctttttagagatcgatgagcacatgcgagttatgtccgagaaaaagcacggtgccgataggagcggcagcacagccgtgggcgtgctgattagtccgcagcatacttactttattaattgcggggatagtcggggtctgctgtgtcggaacaggaaggtgcatttcttcacccaagaccacaagcccagtaaccccttggagaaggaaaggattcaaaatgcagggggaagcgtgatgatccagcgcgtgaacggaagcctggctgtgtcaagagcccttggggacttcgactacaagtgtgtgcatggaaaaggcccaacggaacaactggtgagcccggagcctgaggtccatgacattgaacgctctgaagaggacgaccagtttataattctcgcctgcgacggtatatgggacgtcatgggcaacgaggaactctgcgactttgtccgctctaggctggaggtcacagatgatctggagaaagtttgtaacgaggtggtagatacatgcctttacaaaggttccagggataacatgagtgtcatattaatctgctttcccaatgccccaaaggtaagtcctgaagccgtgaagaaggaagctgagctcgacaaatacctggagtgtcgcgtcgaggagataattaagaaacagggtgaaggcgtgccagatctcgtacatgtcatgcgtaccctggcctctgaaaatatcccctccctgccacccggaggggaactagcatctaaacgcaacgtaattgaagccgtctacaaccgcctgaacccgtataagaacgacgatacagatagcacatcgacggacgatatgtggtag

SEQ ID NO: 252988 - protein, 207 aa, Artificial Sequence
  derived and/or modified sequence
MAEDLDELLDEVESKFCTPDLLRRGMVEQPKGCGGGTHSSDRNQAKAKETLRSTETFKKEDDLDSLINEILEEPNLDKKPSKLKSKSSGNTSVRASIEGLGKSCSPVYLGGSSIPCGIGTNISWRACDHLRCIACDFLVVSYDDYMWDKSCDYLFFRNNMPEFHKLKAKLIKKKGTRAYACQCSWRTIEEVTDLQTDHQLRWVCGKH

SEQ ID NO: 252989 - DNA, 624 bp, Artificial Sequence
  derived and/or modified sequence
atggccgaggacctggacgagctgctggacgaggtggagagcaagttctgcacccccgacctgctgagaagaggcatggtggagcagcccaagggctgcggcggcggcacccacagcagcgacagaaaccaggccaaggccaaggagaccctgagaagcaccgagaccttcaagaaggaggacgacctggacagcctgatcaacgagatcctggaggagcccaacctggacaagaagcccagcaagctgaagagcaagagcagcggcaacaccagcgtgagagccagcatcgagggcctgggcaagagctgcagccccgtgtacctgggcggcagcagcatcccctgcggcatcggcaccaacatcagctggagagcctgcgaccacctgagatgcatcgcctgcgacttcctggtggtgagctacgacgactacatgtgggacaagagctgcgactacctgttcttcagaaacaacatgcccgagttccacaagctgaaggccaagctgatcaagaagaagggcaccagagcctacgcctgccagtgcagctggagaaccatcgaggaggtgaccgacctgcagaccgaccaccagctgagatgggtgtgcggcaagcactag

SEQ ID NO: 252990 - DNA, 3334 bp, Artificial Sequence
  derived and/or modified sequence
aggcgattcaagatggcggaggacctggacgagctcttggatgaagtcgagtccaagttttgcacacctgaccttctaagacggggtatggtcgagcagcccaaaggctgcggcggcggcacccacagtagcgaccggaaccaagccaaggcgaaagagacgctcagatcaacagaaacatttaaaaaagaagatgatcttgacagtcttattaatgaaatacttgaagagcccaacttggacaaaaaaccctctaaattaaaatctaaatcttcaggtaacacatctgtcagagcttccattgaaggccttggtaaaagttgcagtccggtgtaccttggtggaagctctattccatgtgggattggaacaaatatttcatggagagcatgtgaccatctgcgttgtatagcctgtgatttcttggtagtcagctatgatgactatatgtgggacaaatcgtgtgattatctgtttttcaggaacaacatgccagaatttcacaaattaaaagcaaagttgataaagaagaaaggaacacgggcatatgcctgccagtgtagctggagaactattgaagaagtgactgaccttcagacagatcatcagcttcgctgggtttgtggtaaacattaagaatgcagactgcacattcggacagatgcatccatgagagtggtctccatgaatcatcatcatgtttagacaatagtccctagcaataccattccctgtgggaaaaggcagtgaattttattgatacaactacatacatttttgaagaccaaatggactaaggaagatcatgtattataacactttggaattattcctgatacatggatgtttcacttagtaacaggcatctacattctttactaatctgtcttctgtttaatagaggtttgattatggagttccatacaaatatctagtttttcattagcaactgcaatattgattgctaatacgtttagcaaatcattccccaacttgtagcagttaaagtggataaagccggccagggcaaagagatcatttaggggtgtctacaacacttcttccagtcagatcttttgttgccaaagatcataatttggacatggcagaaaccaggtgatcagtggctgactgaagggtgttcagaagtagttacaggtattttgcaaaaacactgcctcatagctgatcttacctcatcaactcaaagcaatgttatgcacaatattaaatacatgttaccagttttagcttatttttccctcttttgttcatttaactatcaaaagttattttctattttgattacccaataatatataaaaagagtttgatgcacccaaaatcacaaaaatcctaatacatacaggttattgttggattttccaagtactttctatcctttaatgcctaaaactccatcaagggaagtaaacagcaagtaatataatttttcaggcagcctgtggacttctctggtaggatcaggttgacatatcgtttattaggtgagtaagtgaaaagacaagtaaagcataactgaaccaacaggtaacctgttgggctccttcctgacatcactgagatctgaggagccctacaatagcagcacattcaggaaatcaggtccctcaaaatttctagctcccaaccccattgagagattttgggagctttccaatctgccacaaactccctgctacatatgtactatatagttcaaatgtgtgatacagagcaccctgaaagggaataattgaaacaaagttataatcttcttagtcttatgctaaatttattccagccaccctactgaagggaggaagatctgatcattagaatccttttcctagccatgacacatttacatacttgtaaaatttattgtagtaagtctagcattgcaacagaatagatcttataatggccaatcctcacacttttgtattaaggatattatgacagactaagcatggtagctcacgcctgtaatcccagcactttgggaggctgaggcaggcagatcagctgaggtcaggagttcaagaccagcctggccaacatgataaaacaccatctctactaaaaatacaaaaattagctgggcgcggtggtgcatgcctgtaatcccaactactcgggaggccgaggcaggaaaatttattgaacctgggaggcagaggttgtagtgagccaaggtcgcgccactgcgctccagcctggacaacacagtgagactctgtctcaaaaaaaaaaaaaagacattatgacagattttatcttttaataaaaatgtattatatccctaaagttatatctatatgtaattgagtcagaaacctagggggatgtcgattgaagtcgactgctggaaaaaaatagcagagcaacaagatccacacatttagaacctcatagaatttgacacattattcataatggtgcaattctttcttttttattccagtaagcaaatttactaaatcactaatttgaaaaaaaaaattttttttttgagatggagtgtcactctgttgccgggctggagtgcagtggcacgatctctgctcactgcaacctccgcctcgcagcttcaagtgattgtcctgcctcagcctccccagtagctgggattacaggcacacaccaccacgcccagctaatttttgtatttttaatagagacagggtttcaccatgttggccagaatgatgtcgatctcctgaactcgtgatccgcccgcctcagcctcccaaagtagcctacattgcctctactttgaagggacaaagttgtcctggtttttttttcccttttattatttcattataactatcctaaaacttacatacattgcctatgtttggcattccataacataataattataataatcccccaatgtcagaaatgtatgtgtgagttcccatgtttattggcaatttataagctttttaatattgtactattttaaactaaaatgtagaaagaatattatgtttatatacagtcagataaattattaactgttgtaatttaagctgaaaatgaaactattttagtatcagtatagaagaaaagtatagtttctaatcatctataattttaaaatgcaaagcctataaaactttcaagatgttttgcctgtttgtttttaagatttataataattttctatctttagcaagtagctatttttaagccaggtaacttctttatttgaactgtattatactctcagaccctcatcctgcctagaaatgaataagtaataaataattactctgtattatttacttcttttattttatagtaaaatattcatttggatgga

SEQ ID NO: 252991 - DNA, 624 bp, Artificial Sequence
  derived and/or modified sequence
atggccgaagatctggatgaattattagacgaagtggaatccaaattctgtaccccggatttgttgaggcgaggaatggtcgaacaacccaagggctgcggtggcgggactcatagttccgacagaaaccaggcgaaggcgaaagagactttgcgctctacggaaaccttcaagaaggaagatgacttggacagtctgataaacgagatcctggaagagcctaaccttgacaaaaagccttccaaattgaaaagtaagagcagcgggaacacttccgtgcgggcttcaattgagggtctggggaaaagttgctcccccgtgtacttgggcggcagtagcattccatgtgggatcggcacgaatatctcttggagagcgtgtgatcatctccggtgtattgcctgtgacttcctcgtggtgagttacgatgactatatgtgggacaagtcttgtgactacttattcttccggaacaatatgcccgaatttcataagttaaaggccaagctcattaagaaaaaaggtactagggcctatgcgtgccagtgttcatggcgaacaattgaagaagtgactgatttgcagactgaccaccagttacgctgggtgtgtggaaagcattag

SEQ ID NO: 252992 - DNA, 624 bp, Artificial Sequence
  derived and/or modified sequence
atggccgaggacctggatgagctgctggatgaggtggagagcaagttctgcaccccagacctgctgcggcggggcatggtggagcagcccaagggctgcggcggcggcacccacagcagtgacaggaaccaggccaaggccaaggagaccctgcggagcacagagaccttcaagaaggaggatgacctggacagcctcatcaatgagatcctggaggagcccaacctggacaagaagcccagcaagctgaagagcaagagcagcggcaacacctctgtgcgggccagcattgagggcctgggcaagagctgcagccctgtgtacctgggcggcagcagcatcccctgtggcatcggcaccaacatctcctggagggcctgtgaccacctgcgctgcatcgcctgtgacttcctggtggtgtcctatgatgactacatgtgggacaagagctgtgactacctgttcttcaggaacaacatgcctgagttccacaagctgaaggccaagctgatcaagaagaagggcacccgggcctatgcctgccagtgctcctggaggaccatcgaggaggtgacagacctgcagacagaccaccagctgcgctgggtgtgtgggaagcactag

SEQ ID NO: 252993 - DNA, 624 bp, Artificial Sequence
  derived and/or modified sequence
atggccgaggacctggacgagctgctggacgaggtggagagcaagttctgcactcctgacctcctgagacggggaatggtggaacagcctaaggggtgtggggggggtacccactcatcagacaggaaccaggccaaggctaaggagaccctgcgcagcactgaaacattcaagaaagaagacgatctggactcgctgattaacgaaatcctagaagaacctaatctggacaagaagccttcaaagctgaagagcaagtctagcggaaatacttctgtaagggcctccatcgagggcctgggaaagtcctgctctcccgtttatctcggagggtcctccatcccctgtggcattggcacaaatatctcttggcgtgcatgcgatcacctgcggtgtatcgcctgcgactttcttgtggtcagctacgacgattacatgtgggacaagtcttgcgactacctgttttttcgaaacaatatgcctgaattccataagctgaaggcaaagctgattaaaaagaaagggactcgcgcttatgcttgccaatgctcttggcgcactatagaagaggtaaccgaccttcagaccgatcaccaactgcgctgggtgtgcggaaaacactag

SEQ ID NO: 252994 - DNA, 624 bp, Artificial Sequence
  derived and/or modified sequence
atggcggaagatctggacgaactgctcgacgaggtcgaatctaaattttgcacccctgaccttctccgcagaggtatggttgaacagccaaaagggtgcgggggaggcacccactccagtgatcgaaaccaggccaaggcaaaagagaccctgcggtccaccgagaccttcaagaaggaggacgacctggattctcttatcaacgagatcctggaggagccaaacctagacaagaaaccaagtaaactgaagagtaagtcttcaggcaatacttctgttagggcctccatcgagggcctgggaaagagctgcagtcccgtctatctgggtggcagctcaattccttgcgggattgggaccaatatttcgtggagggcttgcgatcatctgagatgtatagcctgcgacttcctcgtggtgtcgtacgatgattacatgtgggataagagctgcgattacctgttcttccggaataacatgccagagttccacaagctcaaggctaagctcattaagaaaaaagggacgagagcatacgcatgccagtgtagctggcggacaatcgaggaagtgacagacctccagaccgatcaccagctacggtgggtctgtgggaaacactag

SEQ ID NO: 252995 - protein, 609 aa, Artificial Sequence
  derived and/or modified sequence
MWRLPGARAALRVIRTAVEKLSRAEAGSQTAAGAMERAVVRCVPSEPKLSLSFALADGSHKNMQRDQSEPLGRVLSRIATNALKGHAKAAAAKKSRKSRPNASGGAACSGPGPEPAVFCEPVVKLYYREEAVAEDVLNVDAWQDGAVLQIGDVKYKVERNPPAFTELQLPRYIMAGFPVCPKLSLEFGDPASSLFRWYKEAKPGAAEPEVGVPSSLSPSSPSSSWTETDVEERVYTPSNADIGLRLKLHCTPGDGQRFGHSRELESVCVVEAGPGTCTFDHRHLYTKKVTEDALIRTVSYNILADTYAQTEFSRTVLYPYCAPYALELDYRQNLIQKELTGYNADVICLQEVDRAVFSDSLVPALEAFGLEGVFRIKQHEGLATFYRKSKFSLLSQHDISFYEALESDPLHKELLEKLVLYPSAQEKVLQRSSVLQVSVLQSTKDSSKRICVANTHLYWHPKGGYIRLIQMAVALAHIRHVSCDLYPGIPVIFCGDFNSTPSTGMYHFVINGSIPEDHEDWASNGEEERCNMSLTHFFKLKSACGEPAYTNYVGGFHGCLDYIFIDLNALEVEQVIPLPSHEEVTTHQALPSVSHPSDHIALVCDLKWK

SEQ ID NO: 252996 - DNA, 1830 bp, Artificial Sequence
  derived and/or modified sequence
atgtggagactgcccggcgccagagccgccctgagagtgatcagaaccgccgtggagaagctgagcagagccgaggccggcagccagaccgccgccggcgccatggagagagccgtggtgagatgcgtgcccagcgagcccaagctgagcctgagcttcgccctggccgacggcagccacaagaacatgcagagagaccagagcgagcccctgggcagagtgctgagcagaatcgccaccaacgccctgaagggccacgccaaggccgccgccgccaagaagagcagaaagagcagacccaacgccagcggcggcgccgcctgcagcggccccggccccgagcccgccgtgttctgcgagcccgtggtgaagctgtactacagagaggaggccgtggccgaggacgtgctgaacgtggacgcctggcaggacggcgccgtgctgcagatcggcgacgtgaagtacaaggtggagagaaacccccccgccttcaccgagctgcagctgcccagatacatcatggccggcttccccgtgtgccccaagctgagcctggagttcggcgaccccgccagcagcctgttcagatggtacaaggaggccaagcccggcgccgccgagcccgaggtgggcgtgcccagcagcctgagccccagcagccccagcagcagctggaccgagaccgacgtggaggagagagtgtacacccccagcaacgccgacatcggcctgagactgaagctgcactgcacccccggcgacggccagagattcggccacagcagagagctggagagcgtgtgcgtggtggaggccggccccggcacctgcaccttcgaccacagacacctgtacaccaagaaggtgaccgaggacgccctgatcagaaccgtgagctacaacatcctggccgacacctacgcccagaccgagttcagcagaaccgtgctgtacccctactgcgccccctacgccctggagctggactacagacagaacctgatccagaaggagctgaccggctacaacgccgacgtgatctgcctgcaggaggtggacagagccgtgttcagcgacagcctggtgcccgccctggaggccttcggcctggagggcgtgttcagaatcaagcagcacgagggcctggccaccttctacagaaagagcaagttcagcctgctgagccagcacgacatcagcttctacgaggccctggagagcgaccccctgcacaaggagctgctggagaagctggtgctgtaccccagcgcccaggagaaggtgctgcagagaagcagcgtgctgcaggtgagcgtgctgcagagcaccaaggacagcagcaagagaatctgcgtggccaacacccacctgtactggcaccccaagggcggctacatcagactgatccagatggccgtggccctggcccacatcagacacgtgagctgcgacctgtaccccggcatccccgtgatcttctgcggcgacttcaacagcacccccagcaccggcatgtaccacttcgtgatcaacggcagcatccccgaggaccacgaggactgggccagcaacggcgaggaggagagatgcaacatgagcctgacccacttcttcaagctgaagagcgcctgcggcgagcccgcctacaccaactacgtgggcggcttccacggctgcctggactacatcttcatcgacctgaacgccctggaggtggagcaggtgatccccctgcccagccacgaggaggtgaccacccaccaggccctgcccagcgtgagccaccccagcgaccacatcgccctggtgtgcgacctgaagtggaagtag

SEQ ID NO: 252997 - DNA, 1830 bp, Artificial Sequence
  derived and/or modified sequence
atgtggagacttcctggtgcgagggccgccctcagagtgattcggaccgccgttgaaaaactaagtagagcagaagccggctcgcaaaccgctgctggagctatggagcgggcagttgtgcgctgtgtgccatcggaacctaaactctctctctcttttgcgttagctgatgggtctcataagaatatgcaacgcgatcagagcgagcctttgggacgagtgctatcaaggattgccacaaacgctctgaagggtcacgcaaaagctgctgccgctaagaagtcccgtaaaagccgccccaacgcctcaggaggagccgcctgttccggacctggccccgagccagctgttttttgcgaaccagtcgtcaagctgtattatcgagaagaggccgtggctgaagatgtactgaatgtagacgcctggcaggacggggcggtgctgcagattggggatgtaaaatacaaagtcgagcgcaatccaccagcttttacagagctgcaactaccacgctacatcatggcgggatttcctgtctgccccaagctttccctggagttcggagatccagcgtcctccctattcagatggtataaagaagctaaacccggcgcagcagagccggaggtaggtgtgccctcttccctgtctccttctagcccaagcagctcatggaccgaaactgatgtagaggagcgggtgtacacaccaagtaacgcagatatagggcttagactaaaacttcactgcacccctggggacggccagagattcggtcattccagggagctcgaaagtgtgtgtgtggttgaggcagggcccggcacatgcacctttgatcacaggcacctgtacaccaaaaaggtcaccgaagatgctcttattcgaacggtgtcttataatatcctcgctgatacatacgcacagacagagttttcccgtactgtgctgtacccatattgcgccccctatgcattagaactggactatcgccaaaacctgattcagaaggaactgactggctataatgctgacgtcatctgcttgcaggaggtggatcgggctgtgtttagcgatagcctggtgccggctctggaagccttcggcctggagggagtgttcagaattaaacaacacgaaggcctcgcgacattctacagaaagtctaagttcagtctgttgtctcaacacgacataagcttctacgaggccctcgagagcgatcctcttcacaaggagctgctcgagaagttggtcctttacccctctgcccaggagaaggtcctccaacgttccagcgttcttcaggttagcgtcctccagtccacaaaagattcaagtaagcggatatgtgtggcgaatacgcatctgtactggcaccccaaaggtggatacattagattaatccagatggctgtcgctctggcgcacatcagacatgtgagttgcgatctatacccgggcatccccgtcatcttctgcggggattttaacagcacaccatcaacaggcatgtaccactttgtgattaatggcagcattcctgaggaccatgaggactgggctagcaacggtgaagaggaacggtgcaatatgtccctcacacacttttttaagctgaagtcagcctgtggcgaacctgcttacactaattatgttggcggatttcatggttgcctcgattatatcttcatagacctcaacgcgctagaggtcgagcaagtgattccattgccatcccacgaggaggttacaacccatcaggccctgcccagtgtgtctcatcctagtgatcatatcgccttggtgtgcgatttgaaatggaagtag

SEQ ID NO: 252998 - DNA, 1830 bp, Artificial Sequence
  derived and/or modified sequence
atgtggaggctgcccggggcccgggccgccctgcgggtcatcagaacagctgtggagaagctgagcagagctgaggccggcagccagacagctgctggggccatggagagagctgtggtgcgctgtgtgcccagcgagcccaagctgagcctgagctttgccctggctgatggcagccacaagaacatgcagagggaccagagcgagcccctgggccgggtgctgagccgcatcgccaccaatgccctgaagggccacgccaaggctgctgctgccaagaagagcaggaagagccggcccaatgccagcggcggggccgcctgcagcggccctggccctgagcctgctgtgttctgtgagcctgtggtgaagctgtactaccgggaggaggccgtggccgaggatgtgctgaatgtggatgcctggcaggatggagctgtgctgcagattggagatgtgaagtacaaggtggagagaaatcctccagccttcacagagctgcagctgccccgctacatcatggccggcttccctgtgtgccccaagctgagcctggagtttggagaccctgccagcagcctcttccgctggtacaaggaggccaagccaggagctgctgagcctgaggtgggcgtgcccagcagcctgagccccagcagccccagcagctcctggacagaaacagatgtggaggagcgggtgtacacccccagcaatgctgacatcggcctgcggctgaagctgcactgcaccccaggagatggccagcgcttcggccacagccgggagctggagagcgtgtgtgtggtggaggccggccctggcacctgcacctttgaccaccgccacctgtacaccaagaaggtgacagaagatgccctgatcagaacagtgtcctacaacatcctggccgacacctacgcccagacagagttcagcaggacagtgctgtacccctactgtgccccctatgccctggagctggactaccggcagaacctgatccagaaggagctgaccggctacaatgctgatgtgatctgcctgcaggaggtggacagagctgtgttcagtgacagcctggtgcctgccctggaggccttcggcctggagggcgtcttccgcatcaagcagcacgagggcctggccaccttctacaggaagagcaagttcagcctgctgagccagcacgacatctccttctatgaggccctggagagtgaccccctgcacaaggagctgctggagaagctggtgctgtaccccagcgcccaggagaaggtgctgcagaggagctctgtgctgcaggtgtctgtgctgcagagcaccaaggacagcagcaagaggatctgtgtggccaacacccacctgtactggcaccccaagggcggctacatccgcctcatccagatggctgtggccctggcccacatccgccacgtgtcctgtgacctgtacccaggcatccctgtgatcttctgtggggacttcaacagcacccccagcacaggcatgtaccacttcgtcatcaatggcagcatccctgaggaccacgaggactgggccagcaatggagaggaggagcgctgcaacatgagcctgacccacttcttcaagctgaagagcgcctgtggggagcccgcctacaccaactacgtgggcggcttccacggctgcctggactacatcttcatcgacctgaatgccctggaggtggagcaggtgatccccctgcccagccatgaggaggtgaccacccaccaggccctgcccagcgtgagccaccccagcgaccacatcgccctggtgtgtgacctgaagtggaagtag

SEQ ID NO: 252999 - DNA, 1830 bp, Artificial Sequence
  derived and/or modified sequence
atgtggcggctgcccggcgcccgggccgccctgcgggtgatccggaccgcagtggaaaaactctcccgcgccgaggcgggctcccagaccgctgcaggggccatggaaagggctgtagtgcgatgcgtgccttctgagcccaaattgagtctctcctttgccctggcagatggttctcataaaaacatgcagagggaccagagtgagccacttggtagggtcttgtctaggattgccaccaacgccttaaagggacatgccaaggctgcggctgctaaaaaaagtaggaagagtcgcccaaatgcctctggcggcgctgcatgctctggaccaggtccagagcctgccgtgttctgcgagccagtggtcaagctctattacagggaggaagctgtggccgaggacgttctgaacgtggacgcatggcaggacggggcagtcctccaaattggggacgtgaaatataaagttgagcggaacccccctgcgttcaccgagttgcagctgcccagatatatcatggcaggcttccccgtctgcccgaagctgtcactcgagttcggtgacccggcatcgagcctgtttcgttggtataaagaggctaaacctggggccgccgagcctgaggtgggcgtcccgagctccctgagtccctcttcaccatcttctagctggacggagaccgatgtggaagaaagagtgtatacaccatcgaacgccgatatcggacttcggctgaagctgcattgtacacccggggatggtcaacgttttggccactctcgcgagttggagagtgtgtgtgttgtagaggcaggccctggaacatgcacttttgaccaccgacatctctacacgaaaaaggtgaccgaagacgctcttattcgcaccgtgtcttataatatcctggctgacacttatgcccagacagaattctcgaggacagtgttgtacccatattgcgccccctacgcgttggagctggattatagacaaaaccttatccagaaggagcttacaggatataatgcagatgtcatctgtctgcaggaggtggaccgtgccgtgttttccgattctctggttcctgccctggaagcgtttggcctggagggcgtgttcaggataaagcagcatgaggggctggctaccttctatagaaaaagcaagttttctctgctgtcccaacatgatatttctttttatgaggcgcttgagtctgaccctctccataaagagcttctagaaaaactggttctgtacccgtccgcccaggagaaagtcctgcagagaagttccgtcctgcaagtgtccgtactgcagtctacgaaagattccagcaaaaggatctgtgtcgctaacactcatttatactggcaccccaaaggcgggtacatccgactgatccaaatggccgtcgcgttggcacatatccgccatgtatcctgtgatttatacccgggcattccggtgatattctgtggagatttcaattcgacacctagtaccgggatgtatcacttcgtcatcaacggctctatccccgaggatcacgaggattgggctagcaacggggaggaagagagatgcaacatgtcgctcacgcacttctttaagctcaagtccgcttgtggcgagccagcgtatacaaattacgtgggcggctttcacggatgcctggactacatcttcatcgacctgaacgccctcgaggtggagcaggttattccactgccctcccacgaggaggtcaccactcaccaggccctaccctctgtctcccatccatccgatcatatcgccctggtgtgtgatctgaagtggaagtag

SEQ ID NO: 253000 - DNA, 3886 bp, Artificial Sequence
  derived and/or modified sequence
agatctgaatgagtcaaagccggcggcctcggctcctcagctccacctgacagtaggccgctgatcggccgcgggtcttgtcgaccgctaggccaccaggttcatgtggaggctcccaggcgcccgcgccgcgcttcgggtgatccggacggcggtggagaagctgagccgggctgaagcggggagccagacagcggcgggagcgatggagcgcgctgtagtgcgctgcgtaccttcggaacccaagctgagcctgtcattcgctttggctgatggtagccacaagaacatgcagcgcgaccagagcgagccgctgggtcgagtcctcagccgcatcgctaccaatgccctaaagggtcacgctaaggcggccgccgccaagaagagcaggaagagccggccgaatgctagcggcggtgcggcctgttcagggccggggcctgagccggctgtgttctgcgagcccgtggtgaagctgtactaccgggaagaggcagtggctgaggacgtgctcaacgtggatgcctggcaagacggcgcggtgctgcagatcggcgatgttaagtacaaggtggagcgcaacccgcccgccttcaccgaactgcagttgccgcgctacatcatggccgggttccctgtgtgccccaaactcagcctcgaatttggggatcccgccagctcccttttccgctggtataaggaagccaagcccggagcggcggagcccgaggtcggtgtcccctcgtcattgtctccctcctcaccttcttcttcttggactgagactgatgtggaggagcgtgtctacaccccgtccaatgccgacatcgggctaaggctcaagcttcactgcaccccaggcgatgggcagcgctttgggcacagccgggagttggaaagtgtgtgtgtggtagaggctgggcctggcacctgcacttttgaccaccggcatctctacacgaagaaggtgactgaggacgctctcatccgcactgtctcttacaacatcctggcagacacgtacgcgcagactgagttctcgcgaacggttctgtacccatactgtgccccctacgccctggagctcgactaccgccagaaccttatccagaaggaactcaccggctacaacgccgatgtcatctgtttgcaggaggttgaccgcgcagtgttttctgacagcttggtacccgccctagaggccttcgggctcgagggggtgtttcgaatcaagcagcacgaaggcctggccactttctaccgaaagtctaagttcagccttcttagccagcatgacatttcattctacgaagccctcgagtccgacccacttcacaaagaactgctggagaaactagttttgtacccatcagcgcaggagaaggtgctccagagatcttctgttcttcaggtttcagttcttcagtctacaaaggactcttctaaaaggatatgtgttgctaatacccatctttactggcatcctaaaggtgggtatattcgcctcattcaaatggcagtagccttggctcacataagacatgtttcatgtgatctgtatcctggcataccagttatattttgtggggactttaatagtacaccatcaacaggaatgtatcattttgtcatcaatggcagcattccagaggatcatgaagactgggcttccaatggggaggaggaaagatgcaatatgtctcttacacatttcttcaagctgaaaagtgcttgtggtgaacctgcttacacaaattatgttggtggctttcatggatgtctagattacattttcattgacttaaatgctttagaggttgaacaggtgattccattacctagtcatgaagaagttaccacccaccaggccttacctagtgtttcccatccctctgatcacatagcacttgtatgtgatttaaaatggaaatagatgtgtgtttaatggaattgaagtctgaaaaggaagtagttattttagcagaaaatttaatatgaatcaaagcttatatgtaaacttcaaggaggaatggtaaaatgttcagccctcctagttatgttcctgatgtcttcgttatgaaactgttgatgtttgcatcatacatcttctctttccttgttttcctctacaattggaggagaaacaaatatatttcttactagcaaaatagaaaattgaattatttttctccaaattgagactctcagaaaaggaagattgaattagcgtgttttttgtttgtttgtttttgtttttgtttttgtttttttgagatggagtttcactcttgttgcccaggctggagtgcaatggcacaatctcggctcactgcaacctccgccccctgggtttaagcgattctcctgcctcagcttcccgagtagctgggattacaggcgtgcgccaacatgtctggctaatttttgtatttttagtagaaatggggtttcgccacgttggccaggctggtcttgaactcctgacctcaggtgatccacccacctcggcctcccaaagtgttgggattacaggcgtgagccaccgcacccggcccttgtgtacatttttataagagaatttttttagctaggagttcagaatttttaaagtaccatttgaatgatcttaatttttctttcatgacaacacattccaaaatgaatcatgcttatgtactaagagggaaaatgtatttaagttaagggtgagagacttaagttataggtgaccttagagacctaaggtgagagacttgacacatggaaggagtaacattagggtctacctctacctcaatttagttagcgatttactacaatttcagagctttaacaaaagataaaaataaatcgtcaccaattgttattgcttctcatctttcatttttcaatgaacaagtaaggtattttcattcttatttttaggattttagtttttagtgtatggtacaaatgaacacagtttatattctaattcttactgcagctcattttaatttttaggatgcaagcacaatttagtattcaaagtgagtagcaacatattcaacttgatcccattgtcttcagttactcttgcccatgaaaaatgttcataaatgaacagggtatttgaccatatgatattagaaaatacagcacattactttatgagaaactacctactgatatgggcttgaaattttggatgaatcattgagcatttctacactagaagtaatttcaaaattgttggtttttataaacaggaaaaaggttgagtagtgggacttttaagcatctctgaaataaaaaacttctttttacagacaagcattatagtttgagttacagacaacagtgtgtatatatgtaatatatatatagtaaaatgaaatttaaatatgaagccaaactttttaaaattagaaactacaaatggttatactgattagtgtctagcctagagtggtaaccatgctttactaattcagttatgaaatacattatttataatgcattagctgtattagctgttgcttttttgatgttcaggataactatgttatctcatttctgcatttaattaatagctcgagtattaaaagcccactcccttcaagaaaagctttgattttccccagtcatgaaagcccttgtttcaaattctttaatctctgaacctagtatcataagaatttcctcttttgataacatctgtactttcatattctgctcactatcaaatgtattgttaacacttagtaagtttgaaaatgaaggggttttatctgcatttgacattgaaccttgaagtactttaagtactccaaggggaaaattaaagtggaagtttcttcggatcttgtttagaaaaaactataaataaaaaattgatgctaccaaa

SEQ ID NO: 253001 - DNA, 1830 bp, Artificial Sequence
  derived and/or modified sequence
atgtggcggctgcctggcgctcgtgcagccctgcgcgttatccggaccgccgtggagaagctcagccgtgcagaagccggttcccagactgctgccggagccatggaaagggctgttgtccgctgtgtgccttcagaacctaaactctcccttagctttgcactcgctgatggctcacataagaacatgcaacgcgatcagagcgaaccactcgggagggtattaagtagaatcgccacaaatgctctgaaaggccacgcaaaagccgcagccgcaaaaaagtcaagaaaatcccgcccaaatgcgagcggcggtgccgcatgctcaggaccaggaccagaacctgccgtgttctgcgagcctgtggtcaagctttactatcgagaggaggctgtggccgaggatgtcctgaacgtcgacgcttggcaggatggcgcagtcttgcagattggcgatgttaagtacaaggttgaacgaaacccaccggcatttactgagctccagctgcccaggtatatcatggcagggttccccgtgtgccctaagctatcccttgagttcggagaccctgcatcctcgctcttcaggtggtacaaagaagcgaagcccggagccgctgaacctgaggttggagtgccaagctcattgtcaccgtcctccccctcatccagctggaccgagaccgacgtggaggaaagggtgtacacaccatctaatgccgacatcgggttacgacttaaacttcattgtacacctggcgatgggcaaaggttcggtcacagtagagaactggaaagtgtttgcgttgtggaggctggtccgggaacatgtacttttgaccacaggcacctgtacactaaaaaggtgaccgaagatgcccttatcaggacagtgtcatataatattctcgctgacacttatgcccagacagagttctccaggaccgttctgtacccttactgcgctccatacgcgctggaactggactataggcaaaatttaattcagaaggaactgactgggtacaacgctgatgttatctgcctgcaagaggtggatcgggctgtattcagcgacagcctggtgccagcgctggaggccttcgggcttgagggggtgtttaggatcaagcagcacgaggggctggccacattttatcggaaatccaagttctctcttctctcacaacatgatatctccttttatgaggcgctggaatctgacccgttgcacaaagaactgttggaaaagcttgtgctgtaccccagcgcacaggaaaaagtgctccagaggagtagcgttctgcaggtgtcagttctacaaagcacgaaagactccagtaagcgaatttgtgtcgccaacacacacctatattggcatcccaagggcggatacatcaggctgatccagatggccgtagccctggctcatattagacacgtgtcttgtgacctatacccaggtatcccggtcatattttgtggcgatttcaacagtacccctagcaccgggatgtatcattttgtgattaacggctccatccccgaagaccacgaagactgggcgtccaacggggaagaagagagatgcaatatgagcctgacacatttcttcaaacttaagtctgcctgtggtgagcccgcttacacgaactatgtcgggggattccacggctgtctcgactacattttcattgacctgaacgctctagaagttgagcaagtgattcctttgccctcacacgaggaggtgaccacccatcaggccctgcctagtgtgagtcatccatccgaccacatcgccttggtgtgtgacctgaagtggaaatag

SEQ ID NO: 253002 - protein, 309 aa, Artificial Sequence
  derived and/or modified sequence
MCFFFSLQEEFLDKHTLMRVLSSGGKLGSRGEGAQLCCWMLLFSWRVSGGQQTRRLCRRAFCWSPVPSPSCSPSSCLTARSSLCMTFTQSRTTSSLAPVFALFVPFYCSIPRVQVAQILGPLSITNKTLIYILGLQLFTSGSYIWIVAISGLMSGLCYDSKMFQVHQVLCIPSWMAKFFSWTLEPIFSSSEPTSEARIGMGATLDIQRQQRMELLDRQLMFSQFAQGRRQRQQQGGMINWNRLFPPLRQRQNVNYQGGRQSEPAAPPLEVSEEQVARLMEMGFSRGDALEALRASNNDLNVATNFLLQH

SEQ ID NO: 253003 - DNA, 930 bp, Artificial Sequence
  derived and/or modified sequence
atgtgcttcttcttcagcctgcaggaggagttcctggacaagcacaccctgatgagagtgctgagcagcggcggcaagctgggcagcagaggcgagggcgcccagctgtgctgctggatgctgctgttcagctggagagtgagcggcggccagcagaccagaagactgtgcagaagagccttctgctggagccccgtgcccagccccagctgcagccccagcagctgcctgaccgccagaagcagcctgtgcatgaccttcacccagagcagaaccaccagcagcctggcccccgtgttcgccctgttcgtgcccttctactgcagcatccccagagtgcaggtggcccagatcctgggccccctgagcatcaccaacaagaccctgatctacatcctgggcctgcagctgttcaccagcggcagctacatctggatcgtggccatcagcggcctgatgagcggcctgtgctacgacagcaagatgttccaggtgcaccaggtgctgtgcatccccagctggatggccaagttcttcagctggaccctggagcccatcttcagcagcagcgagcccaccagcgaggccagaatcggcatgggcgccaccctggacatccagagacagcagagaatggagctgctggacagacagctgatgttcagccagttcgcccagggcagaagacagagacagcagcagggcggcatgatcaactggaacagactgttcccccccctgagacagagacagaacgtgaactaccagggcggcagacagagcgagcccgccgccccccccctggaggtgagcgaggagcaggtggccagactgatggagatgggcttcagcagaggcgacgccctggaggccctgagagccagcaacaacgacctgaacgtggccaccaacttcctgctgcagcactag

SEQ ID NO: 253004 - DNA, 930 bp, Artificial Sequence
  derived and/or modified sequence
atgtgcttctttttctccttacaggaagaattcttggataagcacaccttgatgcgggtgctctcgtctggcgggaagctcggatctcgtggcgaaggcgcacagctgtgttgttggatgttgctctttagctggagggtgtcaggaggacagcagacgcggcggctctgcaggcgcgcattttgttggtcacccgtgccctcgccatcatgttccccttcttcctgtttgacagctcgcagttctttatgcatgacattcactcagagcaggaccacatccagccttgcaccggtattcgccctcttcgtgccattctactgcagcattccccgcgtacaggttgcccagatcctggggcctctgtccattaccaacaaaacactgatatacatcttgggactccagttgtttacatctggatcttacatttggatcgtggccataagcggactcatgtccggactttgttacgattctaaaatgtttcaggttcaccaggtgctctgtatcccatcgtggatggctaagttcttttcctggacactggaacccattttctcaagctctgaacccacctccgaagctcgtatcggaatgggggctactctagacatccagaggcagcaacggatggaactgttggatcggcaattgatgttcagtcagttcgcacagggtcggagacagcggcaacagcaaggtggcatgattaactggaataggctgtttcctcctcttcgacagagacaaaacgtcaactaccaggggggtaggcagagcgaacctgcagcccctcccctggaggtttccgaggaacaagtggcccgccttatggaaatgggattctcccggggagatgccttggaagccctgcgcgctagcaacaatgacctgaatgtcgccaccaacttcttgctccaacactag

SEQ ID NO: 253005 - DNA, 930 bp, Artificial Sequence
  derived and/or modified sequence
atgtgcttcttcttcagcctgcaggaggagttcctggacaagcacaccctgatgagggtgctgagcagcggcggcaagctgggcagcagaggagagggcgcccagctgtgctgctggatgctgctcttctcctggagggtgtctgggggccagcagacccggcggctgtgccggcgggccttctgctggagccctgtgcccagccccagctgcagccccagcagctgcctgacagcccggagcagcctgtgcatgaccttcacccagagcaggaccaccagcagcctggcccctgtgtttgccctgtttgtgcccttctactgcagcatcccccgggtgcaggtggcccagatcctgggccccctgagcatcaccaacaagaccctcatctacatcctgggcctgcagctgttcaccagcggcagctacatctggatcgtggccatcagcggcctgatgagcggcctgtgctatgacagcaagatgttccaggtgcaccaggtgctgtgcatccccagctggatggccaagttcttctcctggaccctggagcccatcttcagcagcagcgagcccaccagcgaggcccgcatcggcatgggcgccaccctggacatccagaggcagcagaggatggagctgctggaccggcagctgatgttcagccagtttgcccagggccggcggcagaggcagcagcagggcggcatgatcaactggaacagactcttcccccccctgcggcagaggcagaatgtgaactaccagggcggccggcagagcgagcctgctgccccacccctggaggtgtctgaggagcaggtggcccggctgatggagatgggcttcagcagaggagatgccctggaggccctgcgggccagcaacaatgacctgaatgtggccaccaacttcctgctgcagcactag

SEQ ID NO: 253006 - DNA, 930 bp, Artificial Sequence
  derived and/or modified sequence
atgtgcttcttcttcagcctgcaggaggagttcctggacaagcacaccctcatgcgagtgctgagctcaggcggcaagctgggcagccgcggagagggagctcaactgtgttgctggatgctgctgttttcctggagagtctcaggaggtcagcaaacacgtaggctgtgcagaagagcattctgttggagccccgtgccgtcgccttcgtgttctcccagctcctgcctgaccgctcgcagcagcctttgtatgacattcacacagagccgtacaaccagctctctggccccagtcttcgcgttgttcgtccctttttactgttctattcctcgagtgcaagtagcacagattctcggacctctctccattaccaacaagactctgatctacatcctgggcctacagctcttcacctccgggtcgtacatttggatcgtcgccatttcaggactgatgagtggcctgtgttatgattctaagatgttccaggttcaccaagtgctgtgtattccctcttggatggccaagttcttctcatggacgctggaacccatcttttcctcttcagaacctacaagtgaggccagaataggaatgggagccaccctggatatccagcgtcaacagcgtatggagctcctggatcggcagctcatgttctcccagtttgctcagggacgccgacaacgtcaacagcagggtgggatgattaattggaatcggttgttccctccgctgcgccagagacagaatgttaactaccaaggcggaaggcagtctgagccagcggcccctcctttagaggtcagcgaggagcaggtggcaagactcatggagatgggcttctcaagaggcgacgccctggaggcactgcgcgcctctaataacgacctcaatgtggccactaatttccttctgcaacactag

SEQ ID NO: 253007 - DNA, 930 bp, Artificial Sequence
  derived and/or modified sequence
atgtgtttcttcttcagtctgcaagaagagttcctggataaacatactctgatgcgagtgctctcaagtgggggaaagctgggaagtaggggggaaggtgcccagttgtgttgctggatgctcctctttagttggcgcgtatcgggagggcaacagacgcggcgactatgtagacgagctttctgctggtcacccgtcccgtctcccagctgctccccttcctcctgtctgacagctcggagtagtctgtgcatgactttcacacagtcaaggaccactagctcacttgctccggtcttcgccctgtttgtccccttttattgttcaatcccgagagtgcaagtggctcagatcttgggtcctctgtccatcaccaataaaaccctgatctatatactcgggctgcagctgttcacctctggtagctatatctggatcgtggcaataagcggcctgatgagcggcctgtgctacgatagtaagatgttccaggttcaccaggttctttgtattccatcttggatggcgaaattttttagttggactctggaacccatcttcagttcatcagaacccaccagcgaggcaagaatcggaatgggggctaccctagacatccagcgccagcaaagaatggagctgttggataggcaactgatgttctctcagttcgctcagggcaggagacagagacagcaacaaggaggcatgatcaactggaatcggctgtttccaccacttcgccagcgccagaacgtgaattaccaggggggtcgccagagcgagccggcagccccacccctggaagtgtctgaggagcaggtggcccgactgatggagatggggtttagcaggggggatgctttagaggcgctgagagcctcaaacaacgacttaaatgtggccactaactttctgcttcagcattag

SEQ ID NO: 253008 - DNA, 2525 bp, Artificial Sequence
  derived and/or modified sequence
atgttcaccagcaccggctccagtgggctctgtgagtaccggcctccgccatcctggctgccccctacacgccaccctaggcacctctttgaggaggctggggcagcggggaccctcgggtttgccggaggtggtggggccgaccctccagacccgcgtccgaaccctgctagttcccggtcttgggggtcagcggaaaccgcccccatttcggcctggaggggcgaatggggacaaagccccgccgcccgccccgaccccacctggtatccccaggtgctctgcccaggagtctcttggggccgctgcaagtgggcaggtgccctggtgttctcgtgggccggccccaggccctttgcggagcgtgtgccgcgctgaaggaaggggccgtcccccttaccatgccccattcttttaggcttgggggaccgaactaactccccccgcccccacttgcaaagttcagcctccgctttagaagctgacctctcagtttcacttggatgtgtttcttcttcagtctccaagaagagtttttagacaaacacacactgatgagagtgctttcaagtggagggaagttaggaagtcgtggcgagggagcgcagctgtgctgctggatgttgctgttttcctggcgtgttagcggtggtcagcagacaaggcgcctctgtcgaagagccttctgctggtccccagtgccctctccctcctgctcgccctcctcctgcctcactgccagaagctctttgtgtatgaccttcacgcagtcaagaacgacttccagcctggcacctgtgtttgctctgtttgtaccattttactgctccataccaagagtccaagtggcacaaattctgggtccgttgtccatcacaaacaagacattgatttatatattgggactgcagcttttcacctctggttcctacatctggattgtagccataagtggacttatgtccggtctgtgctacgacagcaaaatgttccaggtgcatcaggtgctctgcatccccagctggatggcaaaattcttttcttggacacttgaacccatcttctcttcttcagaacccaccagcgaagccagaattgggatgggagccacgctggacatccagagacagcagagaatggagctgctggaccggcagctgatgttctctcagtttgcacaagggaggcgacagagacagcagcagggaggaatgatcaattggaatcgtctttttcctcctttacgtcagcgacaaaacgtaaactatcagggcggtcggcagtctgagccagcagcgccccctctagaagtttctgaggaacaggtcgcccggctcatggagatgggattttccagaggtgatgctttggaagccctgagagcttcaaacaatgacctcaatgtcgccaccaacttcctgctgcagcactgatagtcccaggccaacactgggaccggaccggcagccgagtgacagtgcgtggtccccaccatcagatcagcccggggaccgagcatctctggtgctgatgttcttgtgggaagagggaggttccaccgcacccctgccctcaaccgcaagactgttgccgttttagtgtggagataagtttgccattacattagcatgtattttctatctatattttttattgggcattttccctaggttggagagtcagcactcgttttgaatgtgtttaaaatgcattaaaatggaagatttctgcaggcagttgaatggcactccagatggggaattgctgtaaccctcttactgtaacatgtcatctcctgcgtcgtgatggggagagggtaatgttacttcacaaaggacatgtcagatccttcttcatggacttttttagttactgttttttctctcaaacttgttttcgaatctcctgggagtgagggagaaacagggagctgaatcctcccccaagctgttccaggccagaggactctgcagtaccttctcctacatctagtaacaaagaatggtgataaccatgcactggttcaaggttctggagttctccatgaaacttgggttaattttgctcagagtatccagagttagccactaggctgcgggtgaaatgggatggagaagaacaacagcaggcttcctggagccacatgggctgactagggcactctgtggctggcctggcatgggctcagcccaggaagaggagaaacgatcccttgcctgcccctccctgtggcagggctaactgcctggccctcctggctcgcagccagccagccccctggcagcaggttctcctcagggcttgggtcttcaacctgtggcgacaggaggcagggcagactgtggaggacaggatgcaggtcagggagagggaaggcaggggtggaccgccatgagcatgaaaagacccgaagcaagttgactcttgcaatgtgcaactgttatgttctgcaaaatgagcaacgatgtatcaaattgatgcaaatttagatgttgatacttacaataaagtttttaatgtgtttt

SEQ ID NO: 253009 - protein, 387 aa, Artificial Sequence
  derived and/or modified sequence
MGAFLDKPKTEKHNAHGAGNGLRYGLSSMQGWRVEMEDAHTAVVGIPHGLEDWSFFAVYDGHAGSRVANYCSTHLLEHITTNEDFRAAGKSGSALELSVENVKNGIRTGFLKIDEYMRNFSDLRNGMDRSGSTAVGVMISPKHIYFINCGDSRAVLYRNGQVCFSTQDHKPCNPREKERIQNAGGSVMIQRVNGSLAVSRALGDYDYKCVDGKGPTEQLVSPEPEVYEILRAEEDEFIILACDGIWDVMSNEELCEYVKSRLEVSDDLENVCNWVVDTCLHKGSRDNMSIVLVCFSNAPKVSDEAVKKDSELDKHLESRVEEIMEKSGEEGMPDLAHVMRILSAENIPNLPPGGGLAGKRNVIEAVYSRLNPHRESDGGAGDLEDPW

SEQ ID NO: 253010 - DNA, 1164 bp, Artificial Sequence
  derived and/or modified sequence
atgggtgcttttttggataagcccaaaacagagaagcacaatgcccatggcgctggcaacgggctgcgctatggtctgagcagcatgcagggctggcgcgttgagatggaggacgcgcatacggctgtggtgggcattcctcacggcttagaggactggtcattctttgctgtttatgatggccatgcgggctcacgcgtcgccaattattgttccacccacctactggagcacatcaccactaacgaggactttcgcgcagcagggaaatcagggagcgcactcgagctgtctgtggagaacgtcaagaatggaattcgcaccggatttcttaaaattgatgagtatatgcgcaatttctctgacctgcggaatggcatggatcggagcggctccacagctgttggtgtcatgataagcccaaagcacatttacttcattaactgtggcgacagtcgcgccgtgctttaccgtaatggccaggtgtgctttagcactcaggaccacaagccctgcaaccctcgagaaaaagagcgaattcagaatgccgggggttccgtgatgatccagagggtcaacggttcacttgcagtgtccagggcactgggggattatgattataaatgcgtcgacggcaaaggacccactgaacagctagtgagtcccgagcctgaggtatatgagatactcagagcagaagaggacgagttcataatactggcatgcgacggtatctgggacgtgatgagtaacgaagaactatgcgaatatgtgaaaagccggctggaagttagcgatgatctggagaatgtctgtaactgggttgtcgatacctgcctgcacaagggctcccgggataacatgtcaattgtgctggtgtgctttagcaatgctccgaaggtaagtgacgaagcagtgaagaaggactcagaattggacaagcacctggagtctagggtcgaggagatcatggaaaaatctggggaagaaggcatgcccgatctcgctcatgttatgcggatcctgtccgcagagaatatccctaacctgcccccaggtgggggcctggctgggaaacggaacgtgatagaagccgtgtattctcggctgaacccacatagggagtcagacggtggcgccggggatctggaggatccttggtag

SEQ ID NO: 253011 - DNA, 1164 bp, Artificial Sequence
  derived and/or modified sequence
atgggcgccttcctggacaagcccaagacagagaagcacaatgcccacggggctggaaatggcctgcgctatggcctgagctccatgcagggctggagggtggagatggaggatgcccacacagctgtggtgggcatcccccacggcctggaggactggagcttctttgctgtgtatgatggccatgctggcagccgggtggccaactactgcagcacccacctgctggagcacatcaccaccaatgaagacttccgggccgccggcaagagcggcagcgccctggagctgtctgtggagaatgtgaagaatggcatcagaacaggcttcctgaagattgatgagtacatgaggaacttcagtgacctgagaaatggcatggacaggagcggcagcacagctgtgggcgtgatgatcagccccaagcacatctacttcatcaactgtggggacagcagagctgtgctgtacagaaatggccaggtgtgcttcagcacccaggaccacaagccctgcaacccccgggagaaggagcgcatccagaatgccggcggctctgtgatgatccagagggtgaatggcagcctggccgtgtcccgggccctgggggactatgactacaagtgtgtggatggcaagggccccacagagcagctggtgtccccagagcctgaggtgtatgagatcctgcgggcagaggaggatgagttcatcatcctggcctgtgatggcatctgggatgtgatgagcaatgaggagctgtgtgaatatgtgaagagccggctggaggtgtctgatgacctggagaatgtgtgcaactgggtggtggacacctgcctgcacaagggcagccgggacaacatgagcatcgtgctggtgtgcttcagcaatgcccccaaggtgtctgatgaagctgtgaagaaggacagcgagctggacaagcacctggagagccgggtggaggagatcatggagaagtctggagaggagggcatgccagacctggcccacgtgatgaggatcctgtctgctgagaacatccccaacctgcccccaggcggcggcctggccggcaagagaaatgtgattgaagctgtgtacagccggctgaacccccaccgggagagtgatggaggagctggggacctggaggacccctggtag

SEQ ID NO: 253012 - DNA, 1164 bp, Artificial Sequence
  derived and/or modified sequence
atgggcgccttcctggacaagcccaagaccgagaagcacaacgcccatggggctgggaatggtctccggtatgggctatcatctatgcagggatggagagtggagatggaagacgcacatacagccgttgtggggataccccacggcctggaggactggtcctttttcgccgtctacgacgggcatgctggttctcgggtggccaactactgctccacacatctgttggagcatattacaacaaatgaagattttcgggctgctggaaagtccgggtctgccctcgagctgtcagttgagaacgtgaagaacggaatccggacaggttttctcaagatcgacgaatacatgcgaaacttctcggatttgagaaacggtatggatcgttccgggtcaaccgccgtgggggtgatgatctcaccaaagcatatatacttcatcaactgcggagacagccgcgccgtactgtatcggaacggccaggtctgttttagcacacaggatcacaaaccctgtaatccgcgtgaaaaagagcgcatccaaaacgcgggaggctcagtgatgatccagcgggttaacgggagtcttgcggtgtctcgggcattaggtgactacgattacaaatgcgtagacgggaagggccctacagagcagcttgtttcacctgagccagaggtgtatgagattctccgcgccgaagaggacgagtttatcattttagcttgtgacgggatatgggatgtgatgagcaatgaggaactctgcgaatatgtgaaaagcagactggaagtttctgacgatttggaaaacgtgtgtaactgggttgttgatacttgcctgcataaggggagtagggataatatgagtatcgttctggtatgcttttcaaacgcccccaaagtgtcagacgaggccgtcaaaaaagactccgaactagataaacatctcgaaagccgtgtagaggagatcatggaaaaatctggagaggagggcatgcctgacctggctcacgtcatgcggatcctgagtgccgagaatatcccgaatctccctcctggcgggggacttgccgggaaacgaaatgtgattgaagcagtatattcacggttaaatccccaccgagagtcagatgggggggccggcgacttggaggacccctggtag

SEQ ID NO: 253013 - DNA, 1164 bp, Artificial Sequence
  derived and/or modified sequence
atgggggctttcctggacaaacctaaaaccgagaaacataacgcacatggggctggaaacggtctgcgatatggtctgtctagcatgcagggttggcgcgtggagatggaagatgcacacaccgctgtggtgggcatccctcacgggctggaagactggagtttcttcgcggtgtatgacggtcatgcaggcagcagggtcgcgaactactgtagtacccatctgctggagcatatcaccactaacgaggactttcgcgctgctggtaagtccggaagtgccttagagttatcagttgagaacgtcaaaaacgggatccgcactggtttcttaaagatcgacgaatacatgaggaacttttcagatctacgcaatggaatggatcgatctgggtccaccgctgtcggggtgatgatcagcccaaagcacatatacttcatcaattgcggggattcacgcgcagttctttacagaaatggccaggtctgcttttcaacgcaggaccacaagccctgcaatccccgagagaaggaacgcatacagaatgcagggggtagcgtgatgattcaacgggtgaatggctctctagccgtaagcagggccttgggagattacgactataagtgtgtcgatggcaagggaccaaccgagcaactggttagcccagagcctgaagtgtacgaaattctgcgggctgaagaagatgagtttattattctcgcctgtgacggcatctgggatgtcatgagcaacgaggagctgtgcgagtatgtaaagtctcgcctcgaggtgagcgatgatctagagaatgtctgcaactgggtggtagatacttgcctgcacaaagggtcccgcgataatatgtccattgtacttgtgtgcttctccaatgcacctaaagtgagcgacgaggctgtcaagaaagactcagaactggataagcatctggaaagccgggtggaggagattatggaaaaatccggcgaggagggtatgccggatcttgcccacgtgatgcgaattctcagcgccgaaaacatccccaatctgccacctggaggcggactcgcaggaaagcggaacgtcatcgaggcagtgtacagcaggctcaaccctcatcgagaaagcgatggcggagcgggagacctggaagatccttggtag

SEQ ID NO: 253014 - DNA, 3877 bp, Artificial Sequence
  derived and/or modified sequence
aaaaggagccgagcggcttctgctcaatggcggaaaagccgccggtgctctgacggcctcgttcccctagcagttgcgggggagtttcctgccggcgcggctggagtctctgattctcagggttcggtggttggaagatgctccagagagacgaggctgcggcggaggaggtggcggcggccgaatcggcaacggcgctagggtggagagaaggcggcatcggcggcggcggcggcgtgaggggccgggcggtgtaaacagccccggaggcggcggtcgagaccccgagggggaagcggcggctgagtcagggtcgcgcctccgttggaaacttgggctgagtaccgcggcgggcgcgagcgaggcgccctagacatcttctccctcccttgcctcagatttattgctaaacatgggtgcatttttggataaacccaaaactgaaaaacataatgctcatggtgctgggaatggtttacgttatggcctgagcagcatgcaaggatggagagtggaaatggaagatgcacacacagctgttgtaggtattcctcacggcttggaagactggtcattttttgcagtttatgatggtcatgctggatcccgagtggcaaattactgctcaacacatttattagaacacatcactactaacgaagactttagggcagctggaaaatcaggatctgctcttgagctttcagtggaaaatgttaagaatggtatcagaactggatttttgaaaattgatgaatacatgcgtaacttttcagacctcagaaacgggatggacaggagtggttcaactgcagtgggagttatgatttcacctaagcatatctactttatcaactgtggtgattcacgtgctgttctgtataggaatggacaagtctgcttttctacccaggatcacaaaccttgcaatccaagggaaaaggagcgaatccaaaatgcaggaggcagcgtgatgatacaacgtgttaatggttcattagcagtatctcgtgctctgggggactatgattacaagtgtgttgatggcaagggcccaacagaacaacttgtttctccagagcctgaggtttatgaaattttaagagcagaagaggatgaatttatcatcttggcttgtgatgggatctgggatgttatgagtaatgaggagctctgtgaatatgttaaatctaggcttgaggtatctgatgacctggaaaatgtgtgcaattgggtagtggacacttgtttacacaagggaagtcgagataacatgagtattgtactagtttgcttttcaaatgctcccaaggtctcagatgaagcggtgaaaaaagattcagagttggataagcacttggaatcacgggttgaagagattatggagaagtctggcgaggaaggaatgcctgatcttgcccatgtcatgcgcatcttgtctgcagaaaatatcccaaatttgcctcctgggggaggtcttgctggcaagcgtaatgttattgaagctgtttatagtagactgaatccacatagagaaagtgatgggggtgctggagatctagaagacccatggtagccttaaaaaccttctaaaatgcttttgattctgaaaattgggggaaaaaacttttaatcacaattttcttcaatacaaggggaaaatattcttgcggattcccaacgttttgtgatatgagcagaaaatcattagcatttcccatcatttgttcatatttgtgttttctgacagttgccacttgtagcattgcctgtactacagtattttttgccaacctcaggcatactcgttacatctgtattgaactttcggccctagaaaccagtggagttatttcaccacaaatcaacaatgtgcctgaggtgcatgggaaatatagttagctatactctgaaaatacattatgttttttttctttaaacaaaacacacaacatgtaagcatgtaagagtaaagaattgtatgatatgttccttttttcagttcaccaagttggaagccttttgcagctctgtggcttggaatttcatttgagcaatttctataggatatgtatttattattgattgttatttaatttttttccaattttacctgtattaccaaactgggttctccaataatgtccaaattgtaatgttgccttgcttcaagataaagtgtatttgggaataatattataaacccttacaaattttatgcatgtatctactgcatccttcaactctcactagaaaatcttttgaaaccaaatggattaatttatggctatttataatttgctttgacatctcactgttggaaattttttaaagatgagatttgcctttataatgtaaattgtgatttttgttttacatgtgggtttctatagttttaattttttcagcttttaagatacgagttttgtgtaatttggtatttttaatcatttatgttattttaaaagctcagaatatcacattgaaattactataaatacatttaaaattatctattttagatctaaggaaatactacagagatattttcatgggttcagtaacttttcattttataacattgggcacggtacagagtgattgtcacataaggtacttgaagatttattagtttaattctatttttacagtaaccttgaattcttctgagttttgcatgtattaaattcaattaatgctgaacatgaagagtaaagtatttatctgaaagaagtttctgggttaggagaagtaatgaatgtatccatttgtacatggtttacatgttgtggatgctttgtaaacattttcctgtatgtttaaattgtgtttcagcaggatgtaattgcccttgtgtgtagttaaaatgagtcatcatctggtcctttgtgaaatggaattcatggtattttctgtaacgttttcctgaagctgtttctggagagccacacatttaaatacagacagctttcctgatcatttgatttattgtgcacctgatttttggtctaaaaggaattattgccacaatatattttatttattctttagattttagccttgtaagttaaagtgctttacatgatgatgtgaaaagctgtttgtccctttactgggtttggggggttgttaaaagatagggaatgaagaatgcaaaatggtttatcgttcaaactgtccactctgatccaaccctgtactgatagtacttcccagtatgatattgtgatgtttcatacaatgcagtgaacataaccaacttgttacctaaataaagaattgataaaaacagtgtgacatattactatttggtatgattcagtttttaatgttattttaaacttcttatatggttggcatatttctgaaaatttaattccaaagaggaattaaccaaactgtacaggacaatattaaccccttctgtactctagaaatatttatactccttttaaaaaaacctgcctttggccgggtgcattggctcacacctgtaatcccagcactttgggaggccaaggcgggtggatcacgaggtcaagagatcgtgaccatcctggccaacacggtgaaaccctgcctctactaaaaatacaaagattagctgggcatggtggtgcttgcctgtaatcccagctgcttgggaggctgaggcagaagaattgcttgaacccaggaggcggaggttgcagtgagctaagatcgcgccactgcactccagcctggcgacagagcgagactccgtctcaaaaaaaaaaaaaaagaaaaaaaaaaacttttccggcagggggcagggtgggggttactggtgcttgaaacagaaataatgtatgagttagtaaaagaaaaacccatattcagtgttgactcatctgaa

SEQ ID NO: 253015 - DNA, 1164 bp, Artificial Sequence
  derived and/or modified sequence
atgggcgccttcctggacaagcccaagaccgagaagcacaacgcccacggcgccggcaacggcctgagatacggcctgagcagcatgcagggctggagagtggagatggaggacgcccacaccgccgtggtgggcatcccccacggcctggaggactggagcttcttcgccgtgtacgacggccacgccggcagcagagtggccaactactgcagcacccacctgctggagcacatcaccaccaacgaggacttcagagccgccggcaagagcggcagcgccctggagctgagcgtggagaacgtgaagaacggcatcagaaccggcttcctgaagatcgacgagtacatgagaaacttcagcgacctgagaaacggcatggacagaagcggcagcaccgccgtgggcgtgatgatcagccccaagcacatctacttcatcaactgcggcgacagcagagccgtgctgtacagaaacggccaggtgtgcttcagcacccaggaccacaagccctgcaaccccagagagaaggagagaatccagaacgccggcggcagcgtgatgatccagagagtgaacggcagcctggccgtgagcagagccctgggcgactacgactacaagtgcgtggacggcaagggccccaccgagcagctggtgagccccgagcccgaggtgtacgagatcctgagagccgaggaggacgagttcatcatcctggcctgcgacggcatctgggacgtgatgagcaacgaggagctgtgcgagtacgtgaagagcagactggaggtgagcgacgacctggagaacgtgtgcaactgggtggtggacacctgcctgcacaagggcagcagagacaacatgagcatcgtgctggtgtgcttcagcaacgcccccaaggtgagcgacgaggccgtgaagaaggacagcgagctggacaagcacctggagagcagagtggaggagatcatggagaagagcggcgaggagggcatgcccgacctggcccacgtgatgagaatcctgagcgccgagaacatccccaacctgccccccggcggcggcctggccggcaagagaaacgtgatcgaggccgtgtacagcagactgaacccccacagagagagcgacggcggcgccggcgacctggaggacccctggtag

SEQ ID NO: 253016 - protein, 192 aa, Artificial Sequence
  derived and/or modified sequence
MSIVLVCFSNAPKVSDEAVKKDSELDKHLESRVEEIMEKSGEEGMPDLAHVMRILSAENIPNLPPGGGLAGKRNVIEAVYSRLNPHRESDGASDEAEESGSQGKLVEALRQMRINHRGNYRQLLEEMLTSYRLAKVEGEESPAEPAATATSSNSDAGNPVTMQESHTESESGLAELDSSNEDAGTKMSGEKI

SEQ ID NO: 253017 - DNA, 579 bp, Artificial Sequence
  derived and/or modified sequence
atgagcattgtactggtgtgcttttccaatgcgcctaaagtttctgatgaagccgtgaagaaagattcagagctggataaacaccttgagagtcgagtggaggagataatggaaaaaagtggtgaagagggaatgccagatttggcccacgtaatgagaatactttctgccgagaatattcccaacttgccaccaggcggaggcctggctgggaaaagaaatgtgatcgaggcggtgtattcacgccttaacccacatagggagtccgacggagcgagtgatgaggctgaggagtccggctctcaaggaaaactcgtggaggctctccggcaaatgcggataaaccatagaggcaactaccggcagctgctggaagagatgctcacttcctacaggttggctaaggtcgagggggaagaaagccctgcagaacccgcagccacggcaacttcttccaattctgacgccgggaatcccgtaactatgcaggagtcccacaccgagtccgagtcagggcttgctgaattggatagcagcaacgaggacgcaggaacaaagatgtctggggaaaaaatctag

SEQ ID NO: 253018 - DNA, 579 bp, Artificial Sequence
  derived and/or modified sequence
atgagcatcgtgctggtgtgcttcagcaatgcccccaaggtgtctgatgaggccgtgaagaaggacagcgagctggacaagcacctggagagccgggtggaggagatcatggagaagagcggggaggagggcatgccagacctggcccacgtgatgaggatcctgtctgctgagaacatccccaacctgcccccaggcggcggcctggccggcaagagaaatgtcatcgaggccgtgtacagccggctgaacccccaccgggagagtgatggagccagtgatgaggccgaggagagcggcagccagggcaagctggtggaggccctgcggcagatgaggatcaaccaccggggcaactaccggcagctgctggaggagatgctgaccagctaccgcctggccaaggtggagggggaggagagccctgctgagcctgctgccacagccaccagcagcaacagtgatgctggcaaccctgtgaccatgcaggagagccacacagaaagtgaaagtggcctggccgagctggacagcagcaatgaagatgctggcaccaagatgtctggagagaagatctag

SEQ ID NO: 253019 - DNA, 579 bp, Artificial Sequence
  derived and/or modified sequence
atgagcatcgtgctggtgtgcttcagcaacgcccccaaggtgagcgatgaagccgtcaaaaaggacagcgaactggataaacacctggagtctagagtggaggaaattatggagaagtctggcgaagaaggcatgcccgacctggcacacgtcatgaggatcctgagcgccgaaaacattcccaatttacctcccggcggcgggctggccggcaagagaaacgtgattgaagctgtttactcgcgtcttaatccccatcgtgagtcggacggcgcaagcgacgaagccgaggaaagcggatctcaggggaagcttgtagaagccctgcgccagatgcggatcaatcatcggggcaactaccggcagttgctggaagagatgctcaccagttacaggctggctaaggtcgagggagaagagtcccctgcagagcctgctgcaactgctacctcttcaaactccgacgctgggaatcctgtaacgatgcaagagtcacacacagaatctgagtccggcttggccgagctggactcaagcaatgaagacgcggggacaaagatgtccggcgagaagatttag

SEQ ID NO: 253020 - DNA, 579 bp, Artificial Sequence
  derived and/or modified sequence
atgagcatcgtgttggtgtgtttcagcaatgcccctaaggtgagcgatgaggccgtaaagaaagatagcgagttggacaaacatttggaatcaagggtggaagagatcatggagaagtcaggggaggagggtatgccggacctcgctcatgtaatgaggatcctcagtgccgaaaacattcccaatctgcctcctggcggtggcttggctggcaaacggaacgtcatcgaggccgtttactcacgcctgaatccacaccgggagtccgacggcgcttctgatgaagcagaagagtcaggttctcaggggaaactcgtggaagccttaagacagatgaggatcaaccatagaggtaactatcgtcagctgctggaagaaatgctgacatcataccggctggcaaaggtggaaggggaggagagtcccgctgaacctgccgcaactgccaccagctccaatagtgacgccggaaatccagtcacaatgcaggaatctcacactgaaagtgagtcggggctagcagaactggactcttctaatgaagacgccggtacaaaaatgtcaggcgagaaaatatag

SEQ ID NO: 253021 - DNA, 579 bp, Artificial Sequence
  derived and/or modified sequence
atgagcatcgtgctggtgtgcttcagcaacgcccccaaggtgagcgacgaggccgtgaagaaggacagcgagctggacaagcacctggagagcagagtggaggagatcatggagaagagcggcgaggagggcatgcccgacctggcccacgtgatgagaatcctgagcgccgagaacatccccaacctgccccccggcggcggcctggccggcaagagaaacgtgatcgaggccgtgtacagcagactgaacccccacagagagagcgacggcgccagcgacgaggccgaggagagcggcagccagggcaagctggtggaggccctgagacagatgagaatcaaccacagaggcaactacagacagctgctggaggagatgctgaccagctacagactggccaaggtggagggcgaggagagccccgccgagcccgccgccaccgccaccagcagcaacagcgacgccggcaaccccgtgaccatgcaggagagccacaccgagagcgagagcggcctggccgagctggacagcagcaacgaggacgccggcaccaagatgagcggcgagaagatctag

SEQ ID NO: 253022 - protein, 506 aa, Artificial Sequence
  derived and/or modified sequence
MTSKPHSDWIPYSVLDDEGRNLRQQKLDRQRALLEQKQKKKRQEPLMVQANADGRPRSRRARQSEEQAPLVESYLSSSGSTSYQVQEADSLASVQLGATRPTAPASAKRTKAAATAGGQGGAARKEKKGKHKGTSGPAALAEDKSEAQGPVQILTVGQSDHAQDAGETAAGGGERPSGQDLRATMQRKGISSSMSFDEDEEDEEENSSSSSQLNSNTRPSSATSRKSVREAASAPSPTAPEQPVDVEVQDLEEFALRPAPQGITIKCRITRDKKGMDRGMYPTYFLHLDREDGKKVFLLAGRKRKKSKTSNYLISVDPTDLSRGGDSYIGKLRSNLMGTKFTVYDNGVNPQKASSSTLESGTLRQELAAVCYETNVLGFKGPRKMSVIVPGMNMVHERVSIRPRNEHETLLARWQNKNTESIIELQNKTPVWNDDTQSYVLNFHGRVTQASVKNFQIIHGNDPDYIVMQFGRVAEDVFTMDYNYPLCALQAFAIALSSFDSKLACE

SEQ ID NO: 253023 - DNA, 1521 bp, Artificial Sequence
  derived and/or modified sequence
atgacaagcaagccccattccgattggataccatacagtgtcctcgatgacgagggacggaacttaaggcagcagaagcttgaccggcagcgggctcttctggagcagaagcagaagaagaagcgccaggaacccctgatggtgcaggccaatgcagacggacgtcctaggagtcgaagagctcggcagtctgaggagcaggcacccctggtagagtcatacctttcttcatccggcagcacatcttatcaggtccaagaggcagactcactggcctccgtgcaactgggtgcaactaggccaactgcacccgctagcgcgaagcggacaaaggcagcagcaactgcgggtggacagggcggtgcggcaagaaaggagaaaaagggtaaacataaagggacttctggcccagccgctttagctgaggataagtctgaggcacagggtccagtacagattctgacagtgggtcaatcggatcatgcccaggatgcgggagagaccgccgcagggggtggagaacggccatctggccaagacctgagggccactatgcagcggaaaggaatctcctccagtatgtcgttcgacgaggatgaggaggacgaggaagagaatagctcatcctcttcacagttgaatagcaacaccaggccatctagcgccacgtcaagaaaatccgtacgcgaggctgcctcagcccctagtccaacagccccagaacagcccgtagacgtggaagtgcaggacctggaggagtttgcacttcgcccagccccacagggaatcaccatcaaatgccgaattacccgggataagaaaggtatggaccgtggtatgtatcccacttacttcctgcatctggatcgagaagacgggaaaaaagtgttcctgttagcgggaagaaaaagaaagaagagcaagacgtctaattacctgattagtgtcgacccgacggatctatcccgaggaggggacagttatattggcaagctgaggtccaatctgatgggtaccaagtttaccgtctatgacaacggcgtgaacccccagaaggcctcctcttccacccttgagtctgggactttgcgacaggagctcgccgctgtgtgttatgaaacaaatgtactcgggttcaaggggcctaggaagatgtctgtcattgtcccgggaatgaacatggtgcacgagcgggtgtcaatcaggcccaggaacgaacacgagacgcttcttgccaggtggcaaaataaaaacaccgaatctataatagagttgcagaacaaaactcccgtgtggaatgacgacacccaatcttacgtgctgaactttcacggcagggtgactcaggcctcagtgaaaaacttccagattatccacggcaatgatcctgactacattgtgatgcaattcggcagggtcgcggaggacgttttcactatggactataactacccactctgtgctctccaggcctttgcaattgcactttccagctttgactccaaacttgcttgcgagtag

SEQ ID NO: 253024 - DNA, 1521 bp, Artificial Sequence
  derived and/or modified sequence
atgacaagcaagcctcatagcgactggatcccatactcagtcctggacgatgaggggcgcaatctccgtcagcaaaaattggatagacagagagcactcttagaacagaaacaaaaaaaaaagcgccaagaacccctgatggtgcaggctaatgccgacggaaggcctcgttcacgaagggcaaggcagagcgaagaacaagcacctctggtggagtcatatttaagcagctcagggagcacgtcataccaagtgcaggaagccgacagtctcgcatcagtccagcttggtgcaaccagacccacggcaccggcgtcagcaaaaagaacaaaggcagccgctacagctgggggccagggcggagcagcacggaaagaaaaaaaaggaaaacacaagggtacctctggcccggccgccctggccgaggacaaaagtgaggcacaaggacctgttcaaattttgacagtgggacagtctgaccacgcacaggacgccggtgagactgctgccggtgggggcgaaagacccagtgggcaggatctcagagctaccatgcagcgcaaggggatttcttctagcatgtccttcgacgaggatgaggaagatgaagaggagaattccagttccagcagtcagttaaactctaacacaaggccatcatcagccacatctcgcaagagtgtcagagaagccgccagtgcgcctagccctaccgcccctgagcagcctgtcgatgtggaagtgcaggacctcgaggagttcgcacttagacccgcccctcaaggaattactatcaaatgcaggatcactagagataaaaagggaatggatcggggcatgtatcccacatattttctgcacttggacagggaagatggaaaaaaagtattcttgctggccggtaggaagaggaaaaaatcaaaaaccagcaactatcttatctccgtagatcctacggacctcagcagaggcggggacagttacattggaaagctccgaagcaacctcatggggaccaaatttacggtctacgacaacggtgtgaatccccagaaagctagttcatctaccctggaatccgggacattacggcaggaactcgctgctgtatgctacgaaacgaacgttctcgggtttaaaggcccaagaaaaatgtcagtcatcgtccctgggatgaacatggtccacgaacgagtgagcatccgccccaggaacgagcacgagactctgctcgcccgctggcagaacaaaaacacagagagcattattgaactccagaataaaacacccgtttggaatgacgacacccaaagctatgtcctgaactttcatggccgggtgacccaggcctccgttaaaaatttccagatcatacacggaaacgaccctgactatattgttatgcaatttggaagagtggctgaggatgtgtttactatggattacaactatcccttatgtgcactgcaagcctttgctattgccctgtctagttttgactcaaaattagcctgtgagtag

SEQ ID NO: 253025 - DNA, 1521 bp, Artificial Sequence
  derived and/or modified sequence
atgacaagcaagcctcatagcgactggatcccatactcagtcctggacgatgaggggcgcaatctccgtcagcaaaaattggatagacagagagcactcttagaacagaaacaaaaaaaaaagcgccaagaacccctgatggtgcaggctaatgccgacggaaggcctcgttcacgaagggcaaggcagagcgaagaacaagcacctctggtggagtcatatttaagcagctcagggagcacgtcataccaagtgcaggaagccgacagtctcgcatcagtccagcttggtgcaaccagacctactgcaccagcttctgcgaaacgtactaaggcagccgccaccgccggtggacaaggaggggctgcaaggaaagaaaagaaaggcaagcacaagggcacaagtggtcctgcagccctggcggaggataagtctgaggcccagggaccagtgcagattctcacagtcggacagtctgatcatgcccaggatgcaggcgaaacagctgcgggcgggggagagagaccatctggtcaggatttacgcgctactatgcagcggaagggaatttcttctagcatgagttttgatgaagacgaggaagatgaagaggagaattccagttccagcagtcagttaaactctaacacaaggccatcatcagccacatctcgcaagagtgtcagagaagccgccagtgcgcctagccctaccgcccctgagcagcctgtcgatgtggaagtgcaggacctcgaggagttcgcacttagacccgcccctcaaggaattactatcaaatgcaggatcactagagataaaaagggaatggatcggggcatgtatcccacatattttctgcacttggacagggaagatggaaaaaaagtattcttgctggccggtaggaagaggaaaaaatcaaagacaagcaattacttgatcagcgttgatcccaccgatttgtctagaggcggtgatagttatattgggaaactcaggtcaaaccttatgggcacaaagtttacagtctacgataatggagtgaacccgcagaaggctagctcctccaccctagaatccggcacacttaggcaagaactggctgccgtctgttacgaaactaatgtattagggttcaaaggtccaaggaagatgtccgtcattgtcccgggtatgaatatggtacatgagcgcgtgagcatccgtccacgtaacgaacatgagacgttattagccaggtggcagaacaaaaacacagagtccattatagaactgcaaaataaaactcccgtttggaacgacgacacacagtcgtatgtgctaaattttcacggtagagtgacgcaggcatccgttaaaaattttcagatcatccatgggaacgatcctgattatatcgtgatgcaatttggccgggttgcagaggacgtctttactatggattataactatcccttgtgcgcactgcaagctttcgccattgcccttagctcttttgactctaagctggcatgtgaatag

SEQ ID NO: 253026 - DNA, 2019 bp, Artificial Sequence
  derived and/or modified sequence
tggcgtgcagcgcgggcctcggcggggcccagcgccccggcccgggaggatgcggcccggggcggcccgggagctgagcagggcccccgcgccggcccctccgggccccggcctccagagccgcagccaccgccccgcccccgagagacatgacttccaagccgcattccgactggattccctacagtgtcttagatgatgagggcagaaacctgaggcagcagaagcttgatcggcagcgggccctgctggagcagaagcagaagaagaagcgccaggagcccctgatggtgcaggccaatgcagatgggcggccccggagccggcgggcccggcagtcagaggaacaagcccccctggtggagtcctacctcagcagcagtggcagcaccagctaccaagttcaagaggccgactcactcgccagtgtgcagctgggagccacgcgcccaacagcaccagcttcagccaagagaaccaaggcggcagctacagcagggggccagggtggcgccgctaggaaggagaagaagggaaagcacaaaggcaccagcgggccagcagcactggcagaagacaagtctgaggcccaaggcccagtgcagattctgactgtgggccagtcagaccacgcccaggacgcaggggagacggcagctggtgggggcgaacggcccagcgggcaggatctccgtgccacgatgcagaggaagggcatctccagcagcatgagctttgacgaggatgaggaggatgaggaggagaatagctccagctcctcccagctaaatagtaacacccgccccagctctgctactagcaggaagtccgtcagggaggcagcctcagcccctagcccaacagctccagagcaaccagtggacgttgaggtccaggatcttgaggagtttgcactgaggccggccccccagggtatcaccatcaaatgccgcatcactcgggacaagaaagggatggaccggggcatgtaccccacctactttctgcacctggaccgtgaggatgggaagaaggtgttcctcctggcgggaaggaagagaaagaagagtaaaacttccaattacctcatctctgtggacccaacagacttgtctcgaggaggggacagctatatcgggaaactgcggtccaacttgatgggcaccaagttcactgtttatgacaatggagtcaaccctcagaaggcctcatcctccactttggaaagtggaaccttacgtcaggagctggcagctgtgtgctacgagacaaacgtcttaggcttcaaggggcctcggaagatgagcgtgattgtcccaggcatgaacatggttcatgagagagtctctatccgcccccgcaacgagcatgagacactgctagcacgctggcagaataagaacacggagagtatcatcgagctgcaaaacaagacacctgtctggaatgatgacacacagtcctatgtactcaacttccatgggcgcgtcacacaggcctccgtgaagaacttccagatcatccatggcaatgacccggactacatcgtgatgcagtttggccgggtagcagaggatgtgttcaccatggattacaactacccgctgtgtgcactgcaggcctttgccattgccctgtccagcttcgacagcaagctggcgtgcgagtagaggcctcttcgtgccctttggggttgcccagcctggagcggagcttgcctgcctgcctgtggagacagccctgcctatcctctgtatataggccttccgccagatgaagctttggccctcagtgggctccctggcccagccagccaggaactggctcctttgcctctgctactgaggcaggggagtagtggagagcgggtgggtgggtgtgaagggatgagaataattctttccatgccacgagatcaacacacactcccacccttggggtagtagtgtgttgtagtcgtacttaccaagctgagcaacctcttcagctgggaaggccgcaagaggcatagagggagag

SEQ ID NO: 253027 - DNA, 1521 bp, Artificial Sequence
  derived and/or modified sequence
atgaccagcaagccccacagcgactggatcccctacagcgtgctggacgacgagggcagaaacctgagacagcagaagctggacagacagagagccctgctggagcagaagcagaagaagaagagacaggagcccctgatggtgcaggccaacgccgacggcagacccagaagcagaagagccagacagagcgaggagcaggcccccctggtggagagctacctgagcagcagcggcagcaccagctaccaggtgcaggaggccgacagcctggccagcgtgcagctgggcgccaccagacccaccgcccccgccagcgccaagagaaccaaggccgccgccaccgccggcggccagggcggcgccgccagaaaggagaagaagggcaagcacaagggcaccagcggccccgccgccctggccgaggacaagagcgaggcccagggccccgtgcagatcctgaccgtgggccagagcgaccacgcccaggacgccggcgagaccgccgccggcggcggcgagagacccagcggccaggacctgagagccaccatgcagagaaagggcatcagcagcagcatgagcttcgacgaggacgaggaggacgaggaggagaacagcagcagcagcagccagctgaacagcaacaccagacccagcagcgccaccagcagaaagagcgtgagagaggccgccagcgcccccagccccaccgcccccgagcagcccgtggacgtggaggtgcaggacctggaggagttcgccctgagacccgccccccagggcatcaccatcaagtgcagaatcaccagagacaagaagggcatggacagaggcatgtaccccacctacttcctgcacctggacagagaggacggcaagaaggtgttcctgctggccggcagaaagagaaagaagagcaagaccagcaactacctgatcagcgtggaccccaccgacctgagcagaggcggcgacagctacatcggcaagctgagaagcaacctgatgggcaccaagttcaccgtgtacgacaacggcgtgaacccccagaaggccagcagcagcaccctggagagcggcaccctgagacaggagctggccgccgtgtgctacgagaccaacgtgctgggcttcaagggccccagaaagatgagcgtgatcgtgcccggcatgaacatggtgcacgagagagtgagcatcagacccagaaacgagcacgagaccctgctggccagatggcagaacaagaacaccgagagcatcatcgagctgcagaacaagacccccgtgtggaacgacgacacccagagctacgtgctgaacttccacggcagagtgacccaggccagcgtgaagaacttccagatcatccacggcaacgaccccgactacatcgtgatgcagttcggcagagtggccgaggacgtgttcaccatggactacaactaccccctgtgcgccctgcaggccttcgccatcgccctgagcagcttcgacagcaagctggcctgcgagtag

SEQ ID NO: 253028 - DNA, 1521 bp, Artificial Sequence
  derived and/or modified sequence
atgacgtctaagcctcactccgactggatcccttactctgtcctagacgacgaaggccgcaatctgcggcagcaaaaactggatcgtcagcgcgctcttctcgaacaaaagcagaagaagaaacgtcaggagccacttatggtgcaggccaatgctgatggtcggccgagatctcggcgcgcaaggcagagcgaagagcaagctccattggtggaatcctacttgtcctcttctggatcaacatcataccaagtacaggaggccgactcattggcgagcgtgcagctgggcgccacccggcctaccgcacccgcatctgcgaaaaggacaaaggccgccgcaacagcaggagggcagggtggcgctgctcgcaaggagaagaaaggcaaacacaaaggcacgtccggcccagcagcactggccgaagacaagagcgaggcccagggacccgtgcagattctcacagtaggacagtcagaccacgcgcaagacgctggcgaaacagctgccggcggcggcgagcgacccagcggccaggacttacgagccaccatgcagaggaaggggattagctcatccatgtcttttgatgaggacgaagaagatgaggaggagaactccagctcatcatcgcagctcaatagtaatacacgcccttcgagtgccacctctcgaaagtccgtgcgcgaagctgcatccgctccaagtcccacggccccggaacagccggttgacgtggaggtccaggacttggaggaatttgctctgagaccagcacctcagggcatcacaattaaatgtagaatcactcgtgataagaagggcatggatagaggcatgtaccccacatacttcctgcacctcgatcgggaggatgggaagaaagtgtttttgctagctggaagaaagcgaaaaaagagcaagacaagcaactatctgatctcagttgaccccacagacctaagcaggggcggcgatagttacatcgggaagctgaggagcaatctaatgggaacgaaattcacagtctacgataatggagtaaatccacagaaggcgagttcttccacccttgaaagcggcaccctaagacaggagttggcagctgtgtgttacgagaccaacgtgctcgggtttaagggcccaaggaagatgagtgttatcgttccagggatgaacatggtgcatgagagagtgtctatcaggcctcggaatgagcacgagacactcttggccaggtggcaaaacaagaacactgagtctataatcgagttgcagaataagacccccgtctggaacgacgatacacagtcctacgtattaaacttccacggcagggtcactcaagcttccgtcaaaaatttccagatcatacacgggaatgaccccgattatatcgttatgcagtttggccgtgtggccgaggacgtgttcaccatggattacaattatccgttgtgcgccttgcaggcatttgctatcgcgctgagtagcttcgactctaagctcgcctgcgagtag

SEQ ID NO: 253029 - DNA, 1521 bp, Artificial Sequence
  derived and/or modified sequence
atgaccagcaagccccacagcgactggatcccctacagcgtgctggatgatgagggcaggaacctgcggcagcagaagctggaccggcagagggccctgctggagcagaagcagaagaagaagaggcaggagcccctgatggtgcaggccaatgctgatggccggcccaggagcagaagagcccggcagagcgaggagcaggcccccctggtggagagctacctgagcagcagcggcagcaccagctaccaggtgcaggaggccgacagcctggcctctgtgcagctgggcgccacccggcccacagccccagccagcgccaagaggaccaaggctgctgccacagctgggggccagggcggggccgccaggaaggagaagaagggcaagcacaagggcaccagcggccctgctgccctggccgaggacaagtctgaggcccagggccctgtgcagatcctgactgtgggccagagcgaccacgcccaggatgctggggagacagctgctgggggcggggagcggcccagcggccaggacctgcgggccaccatgcagaggaagggcatcagcagctccatgagctttgatgaagatgaagaagatgaggaggagaacagcagcagcagcagccagctgaacagcaacacccggcccagcagcgccaccagcaggaagtctgtgcgggaggccgccagcgcccccagccccacagcccctgagcagcctgtggatgtggaggtgcaggacctggaggagtttgccctgcggcctgccccccagggcatcaccatcaagtgccgcatcacccgggacaagaagggcatggaccggggcatgtaccccacctacttcctgcacctggacagagaagatggcaagaaggtgttcctgctggccggcaggaagaggaagaagagcaagaccagcaactacctgatctctgtggaccccacagacctgagccggggcggggacagctacatcggcaagctgcggagcaacctgatgggcaccaagttcaccgtgtatgacaacggggtgaacccccagaaggccagcagcagcaccctggagagcggcaccctgcggcaggagctggccgctgtgtgctatgagaccaacgtgctgggcttcaagggccccaggaagatgtctgtcatcgtgcccggcatgaacatggtgcatgagcgggtgtccatccggcccagaaatgaacatgagaccctgctggcccgctggcagaacaagaacacagagagcatcatcgagctgcagaacaagacccctgtgtggaatgatgacacccagagctatgtgctgaacttccacggccgggtgacccaggcctctgtgaagaacttccagatcatccatggaaatgaccctgactacatcgtgatgcagtttggccgggtggctgaagatgtgttcaccatggactacaactaccccctgtgtgccctgcaggcctttgccatcgccctgagcagctttgacagcaagctggcctgtgagtag

SEQ ID NO: 253030 - DNA, 1521 bp, Artificial Sequence
  derived and/or modified sequence
atgaccagcaagccccacagcgactggatcccctacagcgtgctggacgacgagggacgcaatctccggcagcaaaaactggacaggcagcgcgctttgctggagcagaaacaaaagaaaaagcgccaggagccactgatggtccaggccaacgccgatggacgccctcgcagcaggagggcccgtcagagtgaagaacaggccccgctggtagagtcttacctgtcttctagtggctctacttcataccaggtccaggaggctgattctctggcgtccgtgcagctgggggcgacccggccaacagcgcccgcttctgctaagcgcacaaaggccgctgccaccgccggcgggcagggcggagccgcgcgcaaagaaaaaaaagggaagcataagggaacctccggacctgcagccctcgccgaggataaaagcgaggcacaggggcccgtgcagatacttacggttggccagtcagatcacgctcaggacgctggcgaaactgccgctggaggcggtgaaagaccatctggacaagacctgcgggccaccatgcagagaaagggcatcagcagtagtatgtctttcgatgaagacgaggaagacgaagaggagaactcctctagcagctcacaactgaacagtaacacgcggccaagcagcgccacttccaggaagagcgtgcgagaagctgcttccgcacccagtcctaccgcgcccgaacaacctgtggatgtcgaggtgcaggacctggaggagtttgcgctgcgtcctgctcctcaaggaattacgataaagtgcaggatcactcgcgataaaaaggggatggatcgtggaatgtaccccacatactttctgcacctggacagggaagacggaaaaaaagtctttctgctggctggaaggaaacgaaaaaagagcaaaactagtaactacttgatttccgtggacccaaccgatctgagtcgcgggggtgattcttatatcgggaagctgaggtcgaatttgatgggcaccaagttcacagtgtacgataatggcgtgaatcctcagaaagcctcaagctccactctggaatcgggcaccctgcggcaggagctggcagccgtgtgttacgagacaaacgtgctggggttcaaaggacccaggaagatgagcgtcattgtgcccgggatgaatatggtgcatgaacgagtatctatacggcctaggaacgagcacgagactctcctagctcggtggcaaaataagaataccgaaagcattatcgaactgcagaacaaaaccccagtatggaacgacgacacgcagtcctacgtgttaaactttcacggccgggtcacgcaggccagtgtcaaaaactttcaaataatccacggaaacgacccagattatattgtgatgcagttcgggcgtgtggctgaagacgtgtttacaatggactacaactatcccttgtgtgcactgcaagcatttgcaattgctctcagctcgttcgacagcaaattagcctgcgaatag

SEQ ID NO: 253031 - RNA, 1521 nt, Artificial Sequence
  derived and/or modified sequence
augacaagcaagccucauagcgacuggaucccauacucaguccuggacgaugaggggcgcaaucuccgucagcaaaaauuggauagacagagagcacucuuagaacagaaacaaaaaaaaaagcgccaagaaccccugauggugcaggcuaaugccgacggaaggccucguucacgaagggcaaggcagagcgaagaacaagcaccucugguggagucauauuuaagcagcucagggagcacgucauaccaagugcaggaagccgacagucucgcaucaguccagcuuggugcaaccagacccacggcaccggcgucagcaaaaagaacaaaggcagccgcuacagcugggggccagggcggagcagcacggaaagaaaaaaaaggaaaacacaaggguaccucuggcccggccgcccuggccgaggacaaaagugaggcacaaggaccuguucaaauuuugacagugggacagucugaccacgcacaggacgccggugagacugcugccggugggggcgaaagacccagugggcaggaucucagagcuaccaugcagcgcaaggggauuucuucuagcauguccuucgacgaggaugaggaagaugaagaggagaauuccaguuccagcagucaguuaaacucuaacacaaggccaucaucagccacaucucgcaagagugucagagaagccgccagugcgccuagcccuaccgccccugagcagccugucgauguggaagugcaggaccucgaggaguucgcacuuagacccgccccucaaggaauuacuaucaaaugcaggaucacuagagauaaaaagggaauggaucggggcauguaucccacauauuuucugcacuuggacagggaagauggaaaaaaaguauucuugcuggccgguaggaagaggaaaaaaucaaaaaccagcaacuaucuuaucuccguagauccuacggaccucagcagaggcggggacaguuacauuggaaagcuccgaagcaaccucauggggaccaaauuuacggucuacgacaacggugugaauccccagaaagcuaguucaucuacccuggaauccgggacauuacggcaggaacucgcugcuguaugcuacgaaacgaacguucucggguuuaaaggcccaagaaaaaugucagucaucgucccugggaugaacaugguccacgaacgagugagcauccgccccaggaacgagcacgagacucugcucgcccgcuggcagaacaaaaacacagagagcauuauugaacuccagaauaaaacacccguuuggaaugacgacacccaaagcuauguccugaacuuucauggccgggugacccaggccuccguuaaaaauuuccagaucauacacggaaacgacccugacuauauuguuaugcaauuuggaagaguggcugaggauguguuuacuauggauuacaacuaucccuuaugugcacugcaagccuuugcuauugcccugucuaguuuugacucaaaauuagccugugaguag

SEQ ID NO: 253032 - RNA, 1521 nt, Artificial Sequence
  derived and/or modified sequence
augacaagcaagccucauagcgacuggaucccauacucaguccuggacgaugaggggcgcaaucuccgucagcaaaaauuggauagacagagagcacucuuagaacagaaacaaaaaaaaaagcgccaagaaccccugauggugcaggcuaaugccgacggaaggccucguucacgaagggcaaggcagagcgaagaacaagcaccucugguggagucauauuuaagcagcucagggagcacgucauaccaagugcaggaagccgacagucucgcaucaguccagcuuggugcaaccagaccuacugcaccagcuucugcgaaacguacuaaggcagccgccaccgccgguggacaaggaggggcugcaaggaaagaaaagaaaggcaagcacaagggcacaagugguccugcagcccuggcggaggauaagucugaggcccagggaccagugcagauucucacagucggacagucugaucaugcccaggaugcaggcgaaacagcugcgggcgggggagagagaccaucuggucaggauuuacgcgcuacuaugcagcggaagggaauuucuucuagcaugaguuuugaugaagacgaggaagaugaagaggagaauuccaguuccagcagucaguuaaacucuaacacaaggccaucaucagccacaucucgcaagagugucagagaagccgccagugcgccuagcccuaccgccccugagcagccugucgauguggaagugcaggaccucgaggaguucgcacuuagacccgccccucaaggaauuacuaucaaaugcaggaucacuagagauaaaaagggaauggaucggggcauguaucccacauauuuucugcacuuggacagggaagauggaaaaaaaguauucuugcuggccgguaggaagaggaaaaaaucaaagacaagcaauuacuugaucagcguugaucccaccgauuugucuagaggcggugauaguuauauugggaaacucaggucaaaccuuaugggcacaaaguuuacagucuacgauaauggagugaacccgcagaaggcuagcuccuccacccuagaauccggcacacuuaggcaagaacuggcugccgucuguuacgaaacuaauguauuaggguucaaagguccaaggaagauguccgucauugucccggguaugaauaugguacaugagcgcgugagcauccguccacguaacgaacaugagacguuauuagccagguggcagaacaaaaacacagaguccauuauagaacugcaaaauaaaacucccguuuggaacgacgacacacagucguaugugcuaaauuuucacgguagagugacgcaggcauccguuaaaaauuuucagaucauccaugggaacgauccugauuauaucgugaugcaauuuggccggguugcagaggacgucuuuacuauggauuauaacuaucccuugugcgcacugcaagcuuucgccauugcccuuagcucuuuugacucuaagcuggcaugugaauag

SEQ ID NO: 253033 - protein, 365 aa, Artificial Sequence
  derived and/or modified sequence
MDGPAEPQIPGLWDTYEDDISEISQKLPGEYFRYKGVPFPVGLYSLESISLAENTQDVRDDDIFIITYPKSGTTWMIEIICLILKEGDPSWIRSVPIWERAPWCETIVGAFSLPDQYSPRLMSSHLPIQIFTKAFFSSKAKVIYMGRNPRDVVVSLYHYSKIAGQLKDPGTPDQFLRDFLKGEVQFGSWFDHIKGWLRMKGKDNFLFITYEELQQDLQGSVERICGFLGRPLGKEALGSVVAHSTFSAMKANTMSNYTLLPPSLLDHRRGAFLRKGVCGDWKNHFTVAQSEAFDRAYRKQMRGMPTFPWDEDPEEDGSPDPEPSPEPEPKPSLEPNTSLEREPRPNSSPSPSPGQASETPHPRPS

SEQ ID NO: 253034 - DNA, 1098 bp, Artificial Sequence
  derived and/or modified sequence
atggacggccccgccgagccccagatccccggcctgtgggacacctacgaggacgacatcagcgagatcagccagaagctgcccggcgagtacttcagatacaagggcgtgcccttccccgtgggcctgtacagcctggagagcatcagcctggccgagaacacccaggacgtgagagacgacgacatcttcatcatcacctaccccaagagcggcaccacctggatgatcgagatcatctgcctgatcctgaaggagggcgaccccagctggatcagaagcgtgcccatctgggagagagccccctggtgcgagaccatcgtgggcgccttcagcctgcccgaccagtacagccccagactgatgagcagccacctgcccatccagatcttcaccaaggccttcttcagcagcaaggccaaggtgatctacatgggcagaaaccccagagacgtggtggtgagcctgtaccactacagcaagatcgccggccagctgaaggaccccggcacccccgaccagttcctgagagacttcctgaagggcgaggtgcagttcggcagctggttcgaccacatcaagggctggctgagaatgaagggcaaggacaacttcctgttcatcacctacgaggagctgcagcaggacctgcagggcagcgtggagagaatctgcggcttcctgggcagacccctgggcaaggaggccctgggcagcgtggtggcccacagcaccttcagcgccatgaaggccaacaccatgagcaactacaccctgctgccccccagcctgctggaccacagaagaggcgccttcctgagaaagggcgtgtgcggcgactggaagaaccacttcaccgtggcccagagcgaggccttcgacagagcctacagaaagcagatgagaggcatgcccaccttcccctgggacgaggaccccgaggaggacggcagccccgaccccgagcccagccccgagcccgagcccaagcccagcctggagcccaacaccagcctggagagagagcccagacccaacagcagccccagccccagccccggccaggccagcgagaccccccaccccagacccagctag

SEQ ID NO: 253035 - DNA, 1098 bp, Artificial Sequence
  derived and/or modified sequence
atggacggccctgcagaaccgcaaatacctggcctgtgggatacttacgaagacgatatttccgagatttctcagaagctcccaggcgaatactttcgatataagggtgtgccattccctgtggggctgtactctctggagtcaattagtttggcagagaatactcaggatgtgcgtgacgacgacatattcatcataacttatcccaaatccgggaccacttggatgattgaaatcatatgccttattctcaaagagggtgatccttcctggatccgtagcgtgcccatctgggagcgggccccctggtgcgaaactatagtgggcgcattttctctgcctgatcagtattctccccgcctaatgtcctcccacctccctatccagatatttacgaaagcattctttagttccaaggcaaaagtgatatatatggggcggaatcctcgagatgtggtggtctctctgtatcactattctaaaatagccggacagctgaaggatcctggcactcccgatcagtttctgcgggatttccttaagggtgaggttcagttcgggagctggtttgaccacattaaaggctggctaaggatgaaagggaaagacaactttctatttatcacctatgaagagctccagcaagacctccaggggtctgtggaaaggatctgcggttttctgggtagacctctggggaaggaggctctggggtcagtggtggcccacagcaccttcagcgccatgaaggccaataccatgtcaaattatacattgctacccccctcgttgctggatcatcgcaggggtgccttcttgcggaagggcgtctgtggggactggaaaaatcattttaccgtggcccagagtgaagctttcgatagggcatataggaaacaaatgcgaggtatgcccacttttccatgggatgaggacccagaggaagatggatcccctgatccagagccatccccagagcctgagccaaagccatcattagaaccaaacacatccctggaaagagaaccaaggccaaactcgtcaccaagccccagtcctggacaggcgtctgagacgccccatccccgcccatcatag

SEQ ID NO: 253036 - DNA, 1098 bp, Artificial Sequence
  derived and/or modified sequence
atggatggccctgctgagccccagatccctggcctgtgggacacctatgaagatgacatcagcgagatcagccagaagctgcccggggagtacttccgctacaagggcgtgcccttccctgtgggcctgtacagcctggagagcatcagcctggccgagaacacccaggatgtgagagatgatgacatcttcatcatcacctaccccaagagcggcaccacctggatgattgagatcatctgcctgatcctgaaggagggggaccccagctggatccgctctgtgcccatctgggagcgggccccctggtgtgagaccatcgtgggcgccttcagcctgcctgaccagtacagcccccggctgatgagcagccacctgcccatccagatcttcaccaaggccttcttcagcagcaaggccaaggtgatctacatgggcaggaaccccagagatgtggtggtgtccctgtaccactacagcaagattgctggccagctgaaggaccccggcaccccagaccagttcctgcgggacttcctgaagggggaggtgcagtttggctcctggtttgaccacatcaagggctggctgaggatgaagggcaaggacaacttcctgttcatcacctatgaggagctgcagcaggacctgcagggctctgtggagcgcatctgtggcttcctgggccggcccctgggcaaggaggccctgggctctgtggtggcccacagcaccttcagcgccatgaaggccaacaccatgagcaactacaccctgctgccccccagcctgctggaccaccggcggggggccttcctgaggaaaggagtgtgtggggactggaagaaccacttcaccgtggcccagagcgaggcctttgaccgggcctacaggaagcagatgaggggcatgcccaccttcccctgggatgaagatcctgaagaagatggcagcccagaccctgagcccagccctgagcctgagcccaagcccagcctggagcccaacaccagcctggagcgggagccccggcccaacagcagccccagccccagccctggccaggccagcgagaccccccacccccggcccagctag

SEQ ID NO: 253037 - DNA, 1098 bp, Artificial Sequence
  derived and/or modified sequence
atggacggccccgccgagccccagatccccggcctgtgggacacctacgaggatgatattagtgaaatctctcagaaattgcccggggagtacttccggtataagggcgtgccatttcctgtggggctttattcgctcgagagtatctccttggccgagaacacccaggacgtgcgagacgatgatatttttattatcacatatccgaaatccgggactacatggatgattgaaataatctgtctgattttgaaagaaggagacccctcttggatcagatcggttcctatatgggagcgtgcgccgtggtgtgagacaatcgttggtgcattcagccttcctgatcagtacagtcccaggctgatgtcatctcatctgcctatccagatttttaccaaggcatttttttcttctaaggccaaggtgatatacatggggagaaatccacgcgacgttgtcgtgagtctatatcattacagcaaaattgcaggccagctgaaggatcctggcacccctgaccagtttctgcgcgactttcttaaaggcgaggtccagttcggatcctggttcgaccacataaagggatggttgcgaatgaagggcaaagataatttcctcttcataacatacgaggagctacaacaggatctgcagggcagtgttgagcgcatatgtggctttctgggccggcccttaggcaaggaggctctcggatccgtggtggcacattctactttcagcgccatgaaagctaataccatgagcaattatactttgctacctccgtcattgctggatcatagacgtggtgcattcctgcgcaaaggagtctgtggggactggaagaaccattttactgtggcgcagagcgaggcttttgaccgggcatacagaaaacagatgaggggcatgcctacctttccctgggacgaagatcccgaggaagacggtagccccgatcccgaacctagccccgaacccgagcccaaacccagcttagagcctaatacctcattggaaagggaaccccgcccaaactcctctccgagtccatccccaggtcaggcttcagaaacccctcatcccagaccctcatag

SEQ ID NO: 253038 - DNA, 1098 bp, Artificial Sequence
  derived and/or modified sequence
atggacggcccagccgagcctcagatacctggcctatgggatacctatgaagacgacatctctgaaatatcccagaagctccctggtgagtactttagatacaaaggtgtgcccttcccggtggggctgtacagtctggagagcatcagcctggctgaaaatacacaagacgttcgtgatgacgacatattcataatcacctaccccaagtctggtaccacatggatgatagaaattatttgcctgatccttaaagagggtgatccctcctggattcgctctgtcccgatttgggaacgcgcaccttggtgtgagaccattgtgggcgcatttagtcttcctgatcagtactctcctagactcatgtcctcacatctgccgatacaaatctttaccaaagccttctttagttcgaaggctaaggtgatttatatgggacggaacccccgagacgtggtggtcagtttgtaccattactccaagattgccggtcagctgaaggaccctggaacacccgatcagttcttacgggactttctgaaaggagaagtccagtttggctcctggtttgatcacattaaaggctggctgcgtatgaagggcaaggacaacttcctttttatcacctacgaggagctccagcaggacctccagggatccgtcgaaaggatttgtggcttcctggggagaccactcggcaaggaggcgttgggctcagtcgtagcccactccaccttttccgctatgaaggccaacaccatgtctaattatactctgttgcccccatcactgctcgatcaccgaaggggggcattcctgcggaaaggggtgtgtggagactggaagaatcacttcactgtcgctcaaagcgaggccttcgatcgggcttatagaaagcagatgagagggatgcctacgttcccctgggacgaagaccccgaggaagacggcagtcctgatcctgagccgtctccagaacctgagcccaagccctctttggaacccaacaccagcctggagagggaaccacggccaaacagcagcccatctcctagtccaggccaagcatctgagacgccacatccaaggcctagctag

SEQ ID NO: 253039 - DNA, 1199 bp, Artificial Sequence
  derived and/or modified sequence
agacgctgtcgctgcgcacacctggcctctgtgccgcctgctccctgctcgtcctcccctccccaccctcacccacctgccatggacgggcccgccgagccccagatcccgggcttgtgggacacctatgaagatgacatctcggaaatcagccagaagttgccaggtgaatacttccggtacaagggcgtccccttccccgtcggcctgtactcgctcgagagcatcagcttggcggagaacacccaagatgtgcgggacgacgacatctttatcatcacctaccccaagtcaggcacgacctggatgatcgagatcatctgcttaatcctgaaggaaggggatccatcctggatccgctccgtgcccatctgggagcgggcaccctggtgtgagaccattgtgggtgccttcagcctcccggaccagtacagcccccgcctcatgagctcccatcttcccatccagatcttcaccaaggccttcttcagctccaaggccaaggtgatctacatgggccgcaacccccgggacgttgtggtctccctctatcattactccaagatcgccgggcagttaaaggacccgggcacacccgaccagttcctgagggacttcctcaaaggcgaagtgcagtttggctcctggttcgaccacattaagggctggcttcggatgaagggcaaagacaacttcctatttatcacctacgaggagctgcagcaggacttacagggctccgtggagcgcatctgtgggttcctgggccgtccgctgggcaaggaggcactgggctccgtcgtggcacactcaaccttcagcgccatgaaggccaacaccatgtccaactacacgctgctgcctcccagcctgctggaccaccgtcgcggggccttcctccggaaaggggtctgcggcgactggaagaaccacttcacggtggcccagagcgaagccttcgatcgtgcctaccgcaagcagatgcgggggatgccgaccttcccctgggatgaagacccggaggaggacggcagcccagatcctgagcccagccctgagcctgagcccaagcccagccttgagcccaacaccagcctggagcgtgagcccagacccaactccagccccagccccagccccggccaggcctctgagaccccgcacccacgaccctcataataaacacgtcgattctgtcc

SEQ ID NO: 253040 - protein, 380 aa, Artificial Sequence
  derived and/or modified sequence
MVGFGANRRAGRLPSLVLVVLLVVIVVLAFNYWSISSRHVLLQEEVAELQGQVQRTEVARGRLEKRNSDLLLLVDTHKKQIDQKEADYGRLSSRLQAREGLGKRCEDDKVKLQNNISYQMADIHHLKEQLAELRQEFLRQEDQLQDYRKNNTYLVKRLEYESFQCGQQMKELRAQHEENIKKLADQFLEEQKQETQKIQSNDGKELDINNQVVPKNIPKVAENVADKNEEPSSNHIPHGKEQIKRGGDAGMPGIEENDLAKVDDLPPALRKPPISVSQHESHQAISHLPTGQPLSPNMPPDSHINHNGNPGTSKQNPSSPLQRLIPGSNLDSEPRIQTDILKQATKDRVSDFHKLKQNDEERELQMDPADYGKQHFNDVL

SEQ ID NO: 253041 - DNA, 1143 bp, Artificial Sequence
  derived and/or modified sequence
atggtgggcttcggcgccaacagaagagccggcagactgcccagcctggtgctggtggtgctgctggtggtgatcgtggtgctggccttcaactactggagcatcagcagcagacacgtgctgctgcaggaggaggtggccgagctgcagggccaggtgcagagaaccgaggtggccagaggcagactggagaagagaaacagcgacctgctgctgctggtggacacccacaagaagcagatcgaccagaaggaggccgactacggcagactgagcagcagactgcaggccagagagggcctgggcaagagatgcgaggacgacaaggtgaagctgcagaacaacatcagctaccagatggccgacatccaccacctgaaggagcagctggccgagctgagacaggagttcctgagacaggaggaccagctgcaggactacagaaagaacaacacctacctggtgaagagactggagtacgagagcttccagtgcggccagcagatgaaggagctgagagcccagcacgaggagaacatcaagaagctggccgaccagttcctggaggagcagaagcaggagacccagaagatccagagcaacgacggcaaggagctggacatcaacaaccaggtggtgcccaagaacatccccaaggtggccgagaacgtggccgacaagaacgaggagcccagcagcaaccacatcccccacggcaaggagcagatcaagagaggcggcgacgccggcatgcccggcatcgaggagaacgacctggccaaggtggacgacctgccccccgccctgagaaagccccccatcagcgtgagccagcacgagagccaccaggccatcagccacctgcccaccggccagcccctgagccccaacatgccccccgacagccacatcaaccacaacggcaaccccggcaccagcaagcagaaccccagcagccccctgcagagactgatccccggcagcaacctggacagcgagcccagaatccagaccgacatcctgaagcaggccaccaaggacagagtgagcgacttccacaagctgaagcagaacgacgaggagagagagctgcagatggaccccgccgactacggcaagcagcacttcaacgacgtgctgtag

SEQ ID NO: 253042 - DNA, 1143 bp, Artificial Sequence
  derived and/or modified sequence
atggtgggttttggcgccaacagacgggccggtagactgccatcactggtcctggtggtactgttggtagtaatcgttgtcttggcttttaattactggtctatttcctctcgacacgtgctccttcaggaagaagttgctgaactgcaaggtcaggtccagaggactgaagtggcacggggtagattggagaaacggaacagcgatctgctgctgctggtggatacccataagaaacaaattgatcaaaaggaggcagattatggcaggttgagcagtagacttcaggcaagagaagggctcgggaaacgctgtgaggacgacaaagtgaaactgcagaataacatctcctatcaaatggctgacatccaccatctcaaagagcaactcgcggagctcagacaggagtttttgaggcaagaggatcaactacaggactatagaaaaaacaatacgtatcttgtgaaacggctggagtacgagagctttcagtgtggacagcaaatgaaggagctgcgcgctcagcatgaggagaatatcaagaagttggccgatcagttcttggaagagcagaagcaggaaactcagaagatacagagtaacgacggcaaggaactggacataaacaatcaagtcgtcccaaaaaatattcccaaggtggctgagaacgtcgcagacaagaacgaagagccgtcaagtaatcatattcctcacgggaaagagcagatcaagcgggggggcgacgctggcatgccagggatcgaggagaacgacctggccaaggtagatgacctgccccccgcgctgaggaagcccccaatctcagtctctcagcacgaaagccatcaggcaatcagtcacttgccaacgggtcaacctctctccccaaacatgcctcctgattcccatataaaccacaacggaaaccccgggacttctaaacagaatccttcctcccctctccagcgcctgatcccgggctcaaatctggacagcgagcctaggattcagacagatattttgaagcaggctactaaagaccgtgtgtcagacttccacaaactgaaacagaacgacgaagagcgcgagctgcagatggaccctgcggactatggcaaacagcatttcaacgatgtgctctag

SEQ ID NO: 253043 - DNA, 1143 bp, Artificial Sequence
  derived and/or modified sequence
atggtgggctttggagccaacagaagagctggccgcctgcccagcctggtgctggtggtgctgctggtggtgattgtggtgctggccttcaactactggagcatcagcagcagacatgtgctgctgcaggaggaggtggccgagctgcagggccaggtgcagaggacagaggtggcccggggccgcctggagaagaggaacagcgacctgctgctgctggtggacacccacaagaagcagattgaccagaaggaggccgactatggccgcctgagcagccggctgcaggcccgggagggcctgggcaagagatgtgaagatgacaaggtgaagctgcagaacaacatctcctaccagatggctgacatccaccacctgaaggagcagctggccgagctgcggcaggagttcctgcggcaggaggaccagctgcaggactacaggaagaacaacacctacctggtgaagaggctggagtatgagagcttccagtgtggccagcagatgaaggagctgcgggcccagcacgaggagaacatcaagaagctggccgaccagttcctggaggagcagaagcaggagacccagaagatccagagcaatgatggcaaggagctggacatcaacaaccaggtggtgcccaagaacatccccaaggtggccgagaatgtggccgacaagaatgaggagcccagcagcaaccacatcccccacggcaaggagcagatcaagagaggaggagatgctggcatgcctggcatcgaggagaatgacctggccaaggtggatgacctgcccccagccctgaggaagccacccatctctgtgtcccagcacgagagccaccaggccatcagccacctgcccaccggccagcccctgagccccaacatgcccccagacagccacatcaaccacaatggaaatcctggcaccagcaagcagaaccccagcagccccctgcagaggctcatccctggcagcaacctggacagcgagccccgcatccagacagacatcctgaagcaggccaccaaggacagagtgtctgacttccacaagctgaagcagaatgatgaggagcgggagctgcagatggaccctgctgactatggcaagcagcacttcaatgatgtgctgtag

SEQ ID NO: 253044 - DNA, 1143 bp, Artificial Sequence
  derived and/or modified sequence
atggtgggcttcggcgccaaccggcgggccggccggctgcccagcttagtgctggtagtcctcctggtggtaatcgtggtgctcgcctttaactattggtccattagctctcgccatgttctgttacaggaagaggttgcggaactgcaaggccaggtgcagcgcaccgaagttgcccgaggcaggctagaaaagaggaacagcgatcttctcctgttagtggatactcacaagaagcaaatcgaccaaaaagaagctgactatggtcggctgtcaagtcgcttacaggcccgtgagggcttagggaaaagatgcgaggacgacaaagtgaaactccagaataacatcagttaccagatggcggacatccatcatctgaaggagcaactggcggaactcagacaagaatttctgagacaggaggatcaactgcaagactatcgtaaaaacaatacgtacctggtcaaacggctcgagtatgaatcctttcagtgcgggcagcaaatgaaagagctgagagctcagcacgaagaaaacataaaaaaacttgcggaccaatttctggaggaacagaagcaggaaacccagaaaatccaatctaatgatggaaaggaattggatattaataaccaagttgtgcctaagaatattcccaaggtggctgaaaacgtggcagacaagaacgaagaaccctcaagcaatcacatacctcatggtaaggaacagataaaacgaggtggcgacgcagggatgcccggcatcgaggagaacgacctggccaaagtcgatgacctcccacccgccctcagaaagccaccaatctctgtgtcacaacatgaatcccaccaggccataagtcacctcccaaccggccaaccactcagcccaaatatgcctccggactctcacataaaccacaacgggaacccaggcaccagtaaacaaaacccctcctcccctctccagcgactcatcccagggagcaatctcgatagcgagccccgcatccagacagatatccttaagcaggctacaaaagacagagtatctgacttccacaagctcaagcaaaacgacgaagagagggaattgcagatggatcccgcggattacgggaagcagcacttcaacgacgtgctctag

SEQ ID NO: 253045 - DNA, 1143 bp, Artificial Sequence
  derived and/or modified sequence
atggtgggattcggagccaatcgacgcgctggcaggctgccatcactggtcttagtcgttctactcgtggttattgttgttctcgcctttaactactggtcaatctcaagccgccatgtcttactgcaggaagaggtggctgaattgcagggccaagtccagagaactgaggtggccagaggcagactggaaaaaaggaatagcgatctacttcttctcgtggatacccataaaaagcagatcgatcaaaaagaggctgactacggacgactgagctcccggctccaggctcgggagggcctgggtaaacgttgcgaagacgataaggtcaaacttcagaataatatctcataccagatggctgacattcaccatctgaaggagcagctcgctgagttacggcaggagtttctgagacaggaggaccaacttcaggattaccgcaaaaataatacttacctcgtgaaacggcttgaatatgaaagcttccagtgtggacagcagatgaaggaactgcgagcccaacacgaggaaaacatcaagaaactcgccgaccagttcttagaagaacagaaacaagagacccagaagatccagtccaacgatggtaaagagttagatatcaataaccaagtcgtgcccaagaatataccgaaggtggcagaaaatgtggctgataaaaacgaggagcccagcagcaatcacattcctcatggaaaagaacagataaagcgaggcggtgacgccggaatgccgggaatagaagagaacgatttggccaaggtcgacgatctgccaccagcactccggaaaccacccataagcgtgtcccagcatgagtcacaccaggcaatttcccacctccctactggccaacccctgagtccaaatatgcctcccgattcccacattaatcacaatggcaaccccggtacttcaaagcaaaatccatcttcccccctgcaaaggctaattccagggtctaaccttgatagcgagccacgtatacagacggacattttaaagcaggcaaccaaagatcgagtttccgacttccataaactgaagcagaacgatgaagaaagggaattgcagatggatcccgctgactatgggaagcagcatttcaatgacgtcttgtag

SEQ ID NO: 253046 - DNA, 3764 bp, Artificial Sequence
  derived and/or modified sequence
gcagctgggttctcccggttcccttgggcaggtgcagggtcgggttcaaagcctccggaacgcgttttggcctgatttgaggaggggggcggggagggacctgcggcttgcggccccgcccccttctccggctcgcagccgaccggtaagcccgcctcctccctcggccggccctggggccgtgtccgccgggcaactccagccgaggcctgggcttctgcctgcaggtgtctgcggcgaggcccctagggtacagcccgatttggccccatggtgggtttcggggccaaccggcgggctggccgcctgccctctctcgtgctggtggtgctgctggtggtgatcgtcgtcctcgccttcaactactggagcatctcctcccgccacgtcctgcttcaggaggaggtggccgagctgcagggccaggtccagcgcaccgaagtggcccgcgggcggctggaaaagcgcaattcggacctcttgctgttggtggacacgcacaagaaacagatcgaccagaaggaggccgactacggccgcctcagcagccggctgcaggccagagagggcctcgggaagagatgcgaggatgacaaggttaaactacagaacaacatatcgtatcagatggcagacatacatcatttaaaggagcaacttgctgagcttcgtcaggaatttcttcgacaagaagaccagcttcaggactataggaagaacaatacttaccttgtgaagaggttagaatatgaaagttttcagtgtggacagcagatgaaggaattgagagcacagcatgaagaaaatattaaaaagttagcagaccagtttttagaggaacaaaagcaagagacccaaaagattcaatcaaatgatggaaaggaattggatataaacaatcaagtagtacctaaaaatattccaaaagtagctgagaatgttgcagataagaatgaagaaccctcaagcaatcatattccacatgggaaagaacaaatcaaaagaggtggtgatgcagggatgcctggaatagaagagaatgacctagcaaaagttgatgatcttccccctgctttaaggaagcctcctatttcagtttctcaacatgaaagtcatcaagcaatctcccatcttccaactggacaacctctctccccaaatatgcctccagattcacacataaaccacaatggaaaccccggtacttcaaaacagaatccttccagtcctcttcagcgtttaattccaggctcaaacttggacagtgaacccagaattcaaacagatatactaaagcaggctaccaaggacagagtcagtgatttccataaattgaagcaaaatgatgaagaacgagagcttcaaatggatcctgcagactatggaaagcaacatttcaatgatgtcctttaagtcctaaaggaatgcttcagaaaacctaaagtgctgtaaaatgaaatcattctactttgtcctttctgacttttgttgtaaagacgaattgtatcagttgtaaagatacattgagatagaattaaggaaaaactttaatgaaggaatgtacccatgtacatatgtgaactttttcatattgtattatcaaggtatagacttttttggttatgatacagttaagccaaaaacagctaatctttgcatctaaagcaaactaatgtatatttcacattttattgagccgacttatttccacaaatagataaacaggacaaaatagttgtacaggttatatgtggcatagcataaccacagtaagaacagaacagatattcagcagaaaactttttatactctaattctttttttttttttttttgagacagagttttagtcttgtttcccaggctggagtgcaatggcacaatcttggctcactgcaacctccgcctcctgggttcaggcaattttcctgcctcagcctcccaagtagctgggattacaggcacccaccaccatgcccagctaatttttgtatttttaatagagagctaataattgtatatttaataaagacgggtttcaccatgttggccaggctggtcttgaactcctgacctcaggtgatcctcctgcattggcctcccaaagtgctggaattccaggcatgagccactgcgcccagtctacacactaattcttgttagcccaacagctgttctgttctatctacccctcatttcacgctcaaggagtcatacctagaatagttacacacaagagggaaactggaagccaaacactgtacagtattgtgtagaaagtcacctccctactccttttattttacatgagtgctgatgtgttttggcagatgagctttcagctgaggcctgatggaaattgagataacctgcaaagacataacagtatttatgagttatatcttagttcttgaaattgtggaatgcatgattgacaatatatttttaatttttattttttcaagtaataccagtactgtttaactatagccagaactggctaaaatttttatattttcagagttgaagttggtgaagacattcatgatttaaacaccagatcctgaaaggggttaaatctactttgaaatgaatctgcaatcagtatttcaaagcttttctggtaattttagtgatcttatttgattagactttttcagaagtactaaataaggaattttaacaggtttttattaatgcacagataaatagaagtacagtgaggtctatagccattttattaaaatagcttaaaagtttgtaaaaaaatgaatctttgtaattacttaatatgttagttaagaacccgtcaagcttatatttgctagacttacaaattattttaaatgcatttatcttttttgacactattcagtggaatgtgtaagctagctaattcttgttttctgatttaaagcacttttaaatcttatcctgccccctaaaaacaaaaggttttgatcacaaggggaaatttaagattgttaaccctgtttttcagaagggctactgttaattgcacataaacatgaaatgtgttttcccctgtgtactaacacattctaggcaaaattcaaacttatagtggtaaagaaacaggttgttcacttgctgaggtgcaaaaattcttaagacttctgtttgaaattgctcaatgactaggaaaagatgtagtagtttactaaaattgtttttctaccatatcaaattaaacaattcatgcctttatagggtcaggcctacaatgaataggtatggtggtttcacagaattttaaaatagagttaaagggaagtgatgtacatttcgggggcattagggtagggagatgaatcaaaaaatacccctagtaatgctttatattttaatactgcaaaagctttacaaatggaaaccatgcaattacctgccttagttcttttgtcataaaaacaatcacttggttggttgtattgtagctattacttatacagcaacatttcttcaattagcagtctagacattttataaacagaaatcttggaccaattgataatatttctgactgtattaatattttagtgctataaaatactatgtgaatctcttaaaaatctgacattttacagtctgtattagacatactgtttttataatgttttacttctgccttaagatttaggttttttaaatgtatttttgccctgaattaagtgttaatttgatggaaactctgcttttaaaatcatcatttactgggttctaataaattaaaaattaaacttg

SEQ ID NO: 253047 - DNA, 3673 bp, Artificial Sequence
  derived and/or modified sequence
gcagctgggttctcccggttcccttgggcaggtgcagggtcgggttcaaagcctccggaacgcgttttggcctgatttgaggaggggggcggggagggacctgcggcttgcggccccgcccccttctccggctcgcagccgaccggtaagcccgcctcctccctcggccggccctggggccgtgtccgccgggcaactccagccgaggcctgggcttctgcctgcaggtgtctgcggcgaggcccctagggtacagcccgatttggccccatggtgggtttcggggccaaccggcgggctggccgcctgccctctctcgtgctggtggtgctgctggtggtgatcgtcgtcctcgccttcaactactggagcatctcctcccgccacgtcctgcttcaggaggaggtggccgagctgcagggccaggtccagcgcaccgaagtggcccgcgggcggctggaaaagcgcaattcggacctcttgctgttggtggacacgcacaagaaacagatcgaccagaaggaggccgactacggccgcctcagcagccggctgcaggccagagagggcctcgggaagagatgcgaggatgacaaggttaaactacagaacaacatatcgtatcagatggcagacatacatcatttaaaggagcaacttgctgagcttcgtcaggaatttcttcgacaagaagaccagcttcaggactataggaagaacaatacttaccttgtgaagaggttagaatatgaaagcaagagacccaaaagattcaatcaaatgatggaaaggaattggatataaacaatcaagtagtacctaaaaatattccaaaagtagctgagaatgttgcagataagaatgaagaaccctcaagcaatcatattccacatgggaaagaacaaatcaaaagaggtggtgatgcagggatgcctggaatagaagagaatgacctagcaaaagttgatgatcttccccctgctttaaggaagcctcctatttcagtttctcaacatgaaagtcatcaagcaatctcccatcttccaactggacaacctctctccccaaatatgcctccagattcacacataaaccacaatggaaaccccggtacttcaaaacagaatccttccagtcctcttcagcgtttaattccaggctcaaacttggacagtgaacccagaattcaaacagatatactaaagcaggctaccaaggacagagtcagtgatttccataaattgaagcaaaatgatgaagaacgagagcttcaaatggatcctgcagactatggaaagcaacatttcaatgatgtcctttaagtcctaaaggaatgcttcagaaaacctaaagtgctgtaaaatgaaatcattctactttgtcctttctgacttttgttgtaaagacgaattgtatcagttgtaaagatacattgagatagaattaaggaaaaactttaatgaaggaatgtacccatgtacatatgtgaactttttcatattgtattatcaaggtatagacttttttggttatgatacagttaagccaaaaacagctaatctttgcatctaaagcaaactaatgtatatttcacattttattgagccgacttatttccacaaatagataaacaggacaaaatagttgtacaggttatatgtggcatagcataaccacagtaagaacagaacagatattcagcagaaaactttttatactctaattctttttttttttttttttgagacagagttttagtcttgtttcccaggctggagtgcaatggcacaatcttggctcactgcaacctccgcctcctgggttcaggcaattttcctgcctcagcctcccaagtagctgggattacaggcacccaccaccatgcccagctaatttttgtatttttaatagagagctaataattgtatatttaataaagacgggtttcaccatgttggccaggctggtcttgaactcctgacctcaggtgatcctcctgcattggcctcccaaagtgctggaattccaggcatgagccactgcgcccagtctacacactaattcttgttagcccaacagctgttctgttctatctacccctcatttcacgctcaaggagtcatacctagaatagttacacacaagagggaaactggaagccaaacactgtacagtattgtgtagaaagtcacctccctactccttttattttacatgagtgctgatgtgttttggcagatgagctttcagctgaggcctgatggaaattgagataacctgcaaagacataacagtatttatgagttatatcttagttcttgaaattgtggaatgcatgattgacaatatatttttaatttttattttttcaagtaataccagtactgtttaactatagccagaactggctaaaatttttatattttcagagttgaagttggtgaagacattcatgatttaaacaccagatcctgaaaggggttaaatctactttgaaatgaatctgcaatcagtatttcaaagcttttctggtaattttagtgatcttatttgattagactttttcagaagtactaaataaggaattttaacaggtttttattaatgcacagataaatagaagtacagtgaggtctatagccattttattaaaatagcttaaaagtttgtaaaaaaatgaatctttgtaattacttaatatgttagttaagaacccgtcaagcttatatttgctagacttacaaattattttaaatgcatttatcttttttgacactattcagtggaatgtgtaagctagctaattcttgttttctgatttaaagcacttttaaatcttatcctgccccctaaaaacaaaaggttttgatcacaaggggaaatttaagattgttaaccctgtttttcagaagggctactgttaattgcacataaacatgaaatgtgttttcccctgtgtactaacacattctaggcaaaattcaaacttatagtggtaaagaaacaggttgttcacttgctgaggtgcaaaaattcttaagacttctgtttgaaattgctcaatgactaggaaaagatgtagtagtttactaaaattgtttttctaccatatcaaattaaacaattcatgcctttatagggtcaggcctacaatgaataggtatggtggtttcacagaattttaaaatagagttaaagggaagtgatgtacatttcgggggcattagggtagggagatgaatcaaaaaatacccctagtaatgctttatattttaatactgcaaaagctttacaaatggaaaccatgcaattacctgccttagttcttttgtcataaaaacaatcacttggttggttgtattgtagctattacttatacagcaacatttcttcaattagcagtctagacattttataaacagaaatcttggaccaattgataatatttctgactgtattaatattttagtgctataaaatactatgtgaatctcttaaaaatctgacattttacagtctgtattagacatactgtttttataatgttttacttctgccttaagatttaggttttttaaatgtatttttgccctgaattaagtgttaatttgatggaaactctgcttttaaaatcatcatttactgggttctaataaattaaaaattaaacttg

SEQ ID NO: 253048 - protein, 186 aa, Artificial Sequence
  derived and/or modified sequence
MGLLDRLSVLLGLKKKEVHVLCLGLDNSGKTTIINKLKPSNAQSQNILPTIGFSIEKFKSSSLSFTVFDMSGQGRYRNLWEHYYKEGQAIIFVIDSSDRLRMVVAKEELDTLLNHPDIKHRRIPILFFANKMDLRDAVTSVKVSQLLCLENIKDKPWHICASDAIKGEGLQEGVDWLQDQIQTVKT

SEQ ID NO: 253049 - protein, 121 aa, Artificial Sequence
  derived and/or modified sequence
MGLLDRLSVLLGLKKKEVHVLCLGLDNSGKTTIINKLKPSNAQSQNILPTIGFSIEKFKSSSLSFTVFDMSGQGRYRNLWEHYYKEGQAIIFVIDSSDRLRMVVAKEELDTLLNHPDIKHR

SEQ ID NO: 253050 - DNA, 561 bp, Artificial Sequence
  derived and/or modified sequence
atgggcctactggaccggctctcagtgctgcttgggctgaaaaagaaggaggtgcacgtgctctgtctgggactggataatagcggaaaaaccaccatcatcaacaagttgaagccatcaaacgctcagagtcagaacatccttcctaccataggattcagtattgaaaaatttaaatctagcagcttaagttttaccgtgttcgatatgagcggccagggcaggtatcggaacctgtgggagcattactataaagagggccaggccatcatcttcgtcatcgatagctcagaccgtttgcgaatggtggttgccaaggaagagctggacaccctgctcaaccatcccgatatcaagcatagacgcattccgattctcttcttcgccaacaagatggacctgagagacgctgtgaccagcgtgaaagtctcccagctcctgtgcctagaaaatattaaagacaagccgtggcacatttgcgcctccgacgccatcaaaggtgagggcctgcaagagggggtggactggctgcaagaccaaattcagactgttaagacttag

SEQ ID NO: 253051 - DNA, 561 bp, Artificial Sequence
  derived and/or modified sequence
atgggcctgcttgataggctgagcgtactcctgggactgaagaagaaagaagtgcacgtcttgtgtttggggctggataactcgggcaaaacaacaatcatcaacaaactcaagccttccaatgctcagtcgcagaacatcttacccaccataggcttttcaattgagaagttcaaaagcagctccctttccttcaccgtattcgacatgtctggtcaaggtcggtacagaaacctgtgggagcactactataaagaaggccaagccatcatcttcgtcatcgattctagcgacagactccggatggttgtagctaaggaagaactggatacactgctaaatcacccagatatcaagcaccgccggattcctatcctctttttcgcaaataagatggatctgagggacgctgtcacaagtgtaaaagtaagtcaactgctgtgcttggagaacatcaaggacaagccctggcatatttgcgcgtccgatgctatcaaaggcgagggcttacaggaaggggtggattggctccaagatcaaattcaaactgttaagacatag

SEQ ID NO: 253052 - DNA, 561 bp, Artificial Sequence
  derived and/or modified sequence
atgggcctcttagacaggctgagcgtacttttgggactcaaaaaaaaggaggtccacgtgttgtgcctgggtctggacaatagcggcaagaccaccattattaataagctgaagccttcaaacgcccagtcccagaacatcctccccactatcggcttcagcatcgagaaatttaagagtagctccctgagtttcacagtgttcgatatgagtggccaggggcgatatagaaacctttgggagcactattacaaggaggggcaggcaattatctttgtgattgactcctcggataggctccggatggtggtcgccaaagaggagcttgacacactcctcaatcacccggacatcaaacaccgacggattcctattctgttcttcgccaataaaatggacctgcgcgatgcagtgacttcagttaaagtgtctcagctgctgtgtcttgagaacattaaagataagccttggcacatctgcgctagcgacgcaatcaaaggcgagggtctgcaggaaggcgtcgactggctccaggatcagatacagacggtgaagacctag

SEQ ID NO: 253053 - DNA, 561 bp, Artificial Sequence
  derived and/or modified sequence
atgggacttctggacaggctgtctgtgttgctgggccttaaaaagaaggaggtacatgtcctgtgtcttggcctggataattcaggtaaaactaccataattaacaaactgaaaccatctaatgctcaatcgcaaaatatccttcctactatcggctttagcattgagaaattcaaatccagcagcttgagttttactgtatttgacatgtctggacaggggcgatacaggaacctctgggaacactattacaaagagggacaggcaatcatttttgtcatcgattctagcgatcggctcaggatggtcgtggcgaaagaggaattggatacccttctcaaccacccggacattaagcaccgccggataccaattctattcttcgctaacaaaatggatctcagggatgctgtaacaagcgtcaaggtgtcccaactgctgtgccttgaaaatatcaaagacaaaccctggcacatctgtgccagcgacgcgataaaaggagagggactccaagagggggtggattggctgcaggaccagatccagacagtgaagacctag

SEQ ID NO: 253054 - DNA, 1390 bp, Artificial Sequence
  derived and/or modified sequence
gcctgccaaggcgcctgctcagcgactgatgcacagactgctgcagaggctgccggttttcccaacttctagagacggctttgctcattaccaggcatccttcccatgtaggcatcgagaagaaggctgagggaccctcgcaccagatttccatcccggagaccgatacgagtgcgtccattcctgttgccagctcctgcgccctccggactaacctcaaaaaccagaaaaactgcctgctcttctaaattgtgtgtcccaaaatatttcattaacaagtatcaagtgataatccatggaaaagtgatggaaagtcacaatacaagctggtttgtaaatatttgaatcacattatgggattgctagacagactttcagtcttgcttggcctgaagaagaaggaggttcatgttttgtgccttgggctagataatagtggcaaaacgacgatcattaacaaacttaaaccttcaaatgctcaatctcaaaatatccttccaacaataggattcagcatagagaaattcaaatcatccagtttgtcatttacagtgtttgacatgtcaggtcaaggaagatacagaaatctctgggaacactattataaagaaggccaagctattatttttgtcattgatagtagtgatagattaagaatggttgtggccaaagaagaactcgatactcttctgaatcatccagatattaaacaccgtcgaattccaatcttattctttgcaaataaaatggatcttagagatgcagtgacatctgtaaaagtgtctcagttgctgtgtttagagaacatcaaagataaaccctggcatatttgtgctagtgatgccataaaaggagaaggcttgcaagaaggtgtagactggcttcaagatcagatccagactgtgaagacatgaaaagataatagttggaaacctcagcaattttcaattcaaggaatctatctaagacaaatagaatacattttgtaaaagatgtttatgcatcaaaaaatataattttctgcttgcatttatggactctgacctttttaagaacataggacttcaggtatgctaatttggccattaattatttaaaaactaaatattccctcaaaagggctccctagaattatcaagttcttagtgaaggtctacatttgattgtacgtagaatgtttaaaagtcagttataagccatctcatcccatcataatttatgatatgtttaatatattttattttttaattgtctttttaaaaaatttagtttatgactttgcagtatgaattgtgcttgtgaaaaagaactttaaatatttataagggaccatgggtaattaatatatattcaatttttactatgtgtcactgtcaataaaatgtaaaat

SEQ ID NO: 253055 - DNA, 1350 bp, Artificial Sequence
  derived and/or modified sequence
gcctgccaaggcgcctgctcagcgactgatgcacagactgctgcagaggctgccggttttcccaacttctagagacggctttgctcattaccaggcatccttcccatgtaggcatcgagaagaaggctgagggaccctcgcaccagatttccatcccggagaccgatacgagtgcgtccattcctgttgccagctcctgcgccctccggactaacctcaaaaaccagatacagttgtcttggaagcctgttattgataaagttgctgcagcctcacatccttcaagctggtttgtaaatatttgaatcacattatgggattgctagacagactttcagtcttgcttggcctgaagaagaaggaggttcatgttttgtgccttgggctagataatagtggcaaaacgacgatcattaacaaacttaaaccttcaaatgctcaatctcaaaatatccttccaacaataggattcagcatagagaaattcaaatcatccagtttgtcatttacagtgtttgacatgtcaggtcaaggaagatacagaaatctctgggaacactattataaagaaggccaagctattatttttgtcattgatagtagtgatagattaagaatggttgtggccaaagaagaactcgatactcttctgaatcatccagatattaaacaccgtcgaattccaatcttattctttgcaaataaaatggatcttagagatgcagtgacatctgtaaaagtgtctcagttgctgtgtttagagaacatcaaagataaaccctggcatatttgtgctagtgatgccataaaaggagaaggcttgcaagaaggtgtagactggcttcaagatcagatccagactgtgaagacatgaaaagataatagttggaaacctcagcaattttcaattcaaggaatctatctaagacaaatagaatacattttgtaaaagatgtttatgcatcaaaaaatataattttctgcttgcatttatggactctgacctttttaagaacataggacttcaggtatgctaatttggccattaattatttaaaaactaaatattccctcaaaagggctccctagaattatcaagttcttagtgaaggtctacatttgattgtacgtagaatgtttaaaagtcagttataagccatctcatcccatcataatttatgatatgtttaatatattttattttttaattgtctttttaaaaaatttagtttatgactttgcagtatgaattgtgcttgtgaaaaagaactttaaatatttataagggaccatgggtaattaatatatattcaatttttactatgtgtcactgtcaataaaatgtaaaat

SEQ ID NO: 253056 - DNA, 1518 bp, Artificial Sequence
  derived and/or modified sequence
atgatgctacgccgggaactgcccggctcctcgcaggaaataggcagctcaccctgccacctgtgcacacatttttcttcaatgtatagttcctcggcgcgcctctgaccttttcccggagctcttcaatcccagaagctatagcacaacggctgaatcgccaggacccccggggaggcgtggcttcaggaccggaagaagctcctgttgccaagggaacggtgcctgccaaggcgcctgctcagcgactgatgcacagactgctgcagaggctgccggttttcccaacttctagagacggctttgctcattaccaggcatccttcccatgtaggcatcgagaagaaggctgagggaccctcgcaccagatttccatcccggagaccgatacgagtgcgtccattcctgttgccagctcctgcgccctccggactaacctcaaaaaccagctggtttgtaaatatttgaatcacattatgggattgctagacagactttcagtcttgcttggcctgaagaagaaggaggttcatgttttgtgccttgggctagataatagtggcaaaacgacgatcattaacaaacttaaaccttcaaatgctcaatctcaaaatatccttccaacaataggattcagcatagagaaattcaaatcatccagtttgtcatttacagtgtttgacatgtcaggtcaaggaagatacagaaatctctgggaacactattataaagaaggccaagctattatttttgtcattgatagtagtgatagattaagaatggttgtggccaaagaagaactcgatactcttctgaatcatccagatattaaacaccgtcgaattccaatcttattctttgcaaataaaatggatcttagagatgcagtgacatctgtaaaagtgtctcagttgctgtgtttagagaacatcaaagataaaccctggcatatttgtgctagtgatgccataaaaggagaaggcttgcaagaaggtgtagactggcttcaagatcagatccagactgtgaagacatgaaaagataatagttggaaacctcagcaattttcaattcaaggaatctatctaagacaaatagaatacattttgtaaaagatgtttatgcatcaaaaaatataattttctgcttgcatttatggactctgacctttttaagaacataggacttcaggtatgctaatttggccattaattatttaaaaactaaatattccctcaaaagggctccctagaattatcaagttcttagtgaaggtctacatttgattgtacgtagaatgtttaaaagtcagttataagccatctcatcccatcataatttatgatatgtttaatatattttattttttaattgtctttttaaaaaatttagtttatgactttgcagtatgaattgtgcttgtgaaaaagaactttaaatatttataagggaccatgggtaattaatatatattcaatttttactatgtgtcactgtcaataaaatgtaaaatataa

SEQ ID NO: 253057 - DNA, 1705 bp, Artificial Sequence
  derived and/or modified sequence
aactcccatgatgctacgccgggaactgcccggctcctcgcaggaaataggcagctcaccctgccacctgtgcacacatttttcttcaatgtatagttcctcggcgcgcctctgaccttttcccggagctcttcaatcccagaagctatagcacaacggctgaatcgccaggacccccggggaggcgtggcttcaggaccggaagaagctcctgttgccaagggaacggtgcctgccaaggcgcctgctcagcgactgatgcacagactgctgcagaggctgccggttttcccaacttctagagacggctttgctcattaccaggcatccttcccatgtaggcatcgagaagaaggctgagggaccctcgcaccagatttccatcccggagaccgatacgagtgcgtccattcctgttgccagctcctgcgccctccggactaacctcaaaaaccagaaaaactgcctgctcttctaaattgtgtgtcccaaaatatttcattaacaagtatcaagtgataatccatggaaaagtgatggaaagtcacaatacaagctggtttgtaaatatttgaatcacattatgggattgctagacagactttcagtcttgcttggcctgaagaagaaggaggttcatgttttgtgccttgggctagataatagtggcaaaacgacgatcattaacaaacttaaaccttcaaatgctcaatctcaaaatatccttccaacaataggattcagcatagagaaattcaaatcatccagtttgtcatttacagtgtttgacatgtcaggtcaaggaagatacagaaatctctgggaacactattataaagaaggccaagctattatttttgtcattgatagtagtgatagattaagaatggttgtggccaaagaagaactcgatactcttctgaatcatccagatattaaacaccgtcgaattccaatcttattctttgcaaataaaatggatcttagagatgcagtgacatctgtaaaagtgtctcagttgctgtgtttagagaacatcaaagataaaccctggcatatttgtgctagtgatgccataaaaggagaaggcttgcaagaaggtgtagactggcttcaagatcagatccagactgtgaagacatgaaaagataatagttggaaacctcagcaattttcaattcaaggaatctatctaagacaaatagaatacattttgtaaaagatgtttatgcatcaaaaaatataattttctgcttgcatttatggactctgacctttttaagaacataggacttcaggttgctataacaaagtaccatagactgggtggcttataaacgacagaaatttatttcttacagctctggagctggaagtctgagatcagattaccagcatggttgggttctggtgagagccgtcttggttgcagactgccatcttcttgtatcctcacatggccaaaagaggacaagagaactctctggagtctgtttgataagagcatgaatcccattacatcttcacatggctcctcccaaagaccccacctcctaatatcatcacatgtcatcacatagggggttagaatttcaacatagaaattttgggagaacacaaacattcagtcagttgcaatacttaaggcaaattcatcttgcttataactctggtgcatgtgcattaaaatactattgcattgtaa

SEQ ID NO: 253058 - DNA, 561 bp, Artificial Sequence
  derived and/or modified sequence
atgggcctgctggaccggctgtctgtgctgctgggcctgaagaagaaggaggtgcacgtgctgtgcctgggcctggacaacagcggcaagaccaccatcatcaacaagctgaagcccagcaatgcccagagccagaacatcctgcccaccatcggcttcagcattgagaagttcaagagcagcagcctgtccttcaccgtgtttgacatgagcggccagggccgctacagaaacctgtgggagcactactacaaggagggccaggccatcatcttcgtcatcgacagcagtgaccggctgaggatggtggtggccaaggaggagctggacaccctgctgaaccacccagacatcaagcaccggcgcatccccatcctcttctttgccaacaagatggacctgagagatgctgtgacctctgtgaaggtgtcccagctgctgtgcctggagaacatcaaggacaagccctggcacatctgtgccagtgatgccatcaagggggagggcctgcaggagggcgtggactggctgcaggaccagatccagacagtgaagacctag

SEQ ID NO: 253059 - DNA, 561 bp, Artificial Sequence
  derived and/or modified sequence
atgggcctgctggaccggctgagcgtgctgctgggcctgaagaagaaggaggtccatgtgctgtgcttaggactcgataacagtggtaagactacaatcatcaacaaactcaaaccctctaatgcccagagccaaaatattctgccaacaatagggttcagcatagagaagtttaagtctagctctttgtctttcacggtgtttgatatgtcaggacaagggagataccggaatctgtgggagcattactacaaggagggacaggcaatcatattcgtgatagacagctcggatcgccttagaatggtggtagcgaaggaggaactcgacactctgctcaatcaccccgatataaaacaccggcgtatccccatcctcttctttgctaacaagatggatctgagagatgccgtcacatcagtgaaggtgagccagcttctctgcttagaaaatatcaaggataaaccctggcacatttgcgcctcggatgccattaagggggagggtcttcaggagggtgtcgattggctgcaagaccagatccagactgtgaagacctag

SEQ ID NO: 253060 - DNA, 561 bp, Artificial Sequence
  derived and/or modified sequence
atgggcctgctggaccggctgagcgtgctgctgggcctgaagaagaaggaggttcacgtgctctgccttggtctggacaatagtgggaagaccacaattatcaacaaactgaaaccctccaatgcacagagccagaatatcctccctactatcggctttagcattgagaaatttaaatcttcctccctgtccttcactgtgtttgatatgagcggccagggacggtatagaaacctgtgggaacattactataaagaaggtcaggccattatttttgtgatcgattcaagcgaccggctgcgcatggtcgtcgcaaaagaggaactggacaccctgcttaatcacccagatatcaagcatcggcggattcccattctgttctttgccaacaagatggacctgcgtgacgcggttaccagcgtgaaggtgtcacaattactgtgcttggaaaacattaaagataaaccttggcacatctgtgccagcgatgccattaagggcgaaggtttgcaggaaggcgtggactggctgcaggaccagattcagaccgtcaagacctag

SEQ ID NO: 253061 - DNA, 561 bp, Artificial Sequence
  derived and/or modified sequence
atgggcctgctggaccggctgagcgtgctgctgggcctgaagaagaaagaggtgcacgtactctgcctcggcctggataactccggcaagacgacaatcatcaataagttgaaaccatccaacgcccagagccagaatattttacccaccattggattcagcatagaaaaattcaaaagttccagcctctccttcactgtgttcgatatgagtggacagggtcgatataggaatctgtgggagcactattataaagaagggcaggcaattatcttcgtgatcgatagctccgatcgtttgcggatggtggttgccaaagaggagctggacactttactcaatcatccagacataaagcatcgcaggatacctatactgtttttcgcaaacaaaatggaccttcgggacgcggttacgtccgtcaaggtgtcccagctgctttgtctggagaacataaaagataaaccatggcacatatgcgcttccgacgccatcaagggtgaagggctccaggagggcgttgattggttacaggaccagatccagacagttaaaacctag

SEQ ID NO: 253062 - DNA, 561 bp, Artificial Sequence
  derived and/or modified sequence
atgggcctgctggaccggctgagcgtgctgctgggcctgaagaagaaagaggtccacgtgctatgcctgggcctcgataattcagggaaaacgactattatcaacaagctgaaacccagcaacgctcagtcgcagaacattcttccaactattggcttttctatagaaaagttcaaatcatcatcactttcttttaccgtcttcgacatgtctggccagggtagatacaggaacctctgggagcattactataaagagggtcaagccattatttttgtcattgactcatccgatcgcctcagaatggttgtcgccaaggaagaactggataccctcttaaatcatcccgacatcaaacatcgcaggatccccatactgttctttgccaataagatggacctgagagacgcggtgacatctgtcaaagtctcccagctgctctgcctagaaaacatcaaggacaagccgtggcacatctgcgcctctgacgctatcaaaggagaaggactgcaagagggtgtggactggctccaagatcaaatacagacagttaagacctag

SEQ ID NO: 253063 - DNA, 561 bp, Artificial Sequence
  derived and/or modified sequence
atggggctcttagaccgcctctcagtcctcctgggtctgaagaagaaggaggtccatgtcctctgtctcggactggacaactccggcaagaccaccatcattaacaaattgaaaccttccaacgcacagtcccagaatatcttaccaaccataggcttttcaatcgagaagttcaaatcatcttctttgtcatttaccgttttcgacatgagcggacagggacggtaccgtaacctctgggagcactactataaggaaggccaagctataatctttgtcatagacagttctgaccgactgcgcatggtggtggcaaaagaggagttggataccctgttgaaccatccggatattaagcaccgaagaatccctattctgttcttcgcgaataaaatggacctgcgcgacgcggtaacctctgtgaaagtgagccagctactatgtctggagaatatcaaagataaaccctggcacatttgcgcaagcgacgccatcaagggggagggtcttcaggaaggggttgattggcttcaggaccaaattcagactgtgaaaacttag

SEQ ID NO: 253064 - DNA, 561 bp, Artificial Sequence
  derived and/or modified sequence
atgggcctgctggatcgtctgtcagtattgcttgggctgaaaaaaaaagaggtacacgttttatgccttggcttagacaattctggaaagaccacaattatcaacaaacttaagcctagtaacgctcagagccaaaacattctacctacaatcggttttagtatcgagaagtttaaatcatcttctctgagctttactgtgttcgacatgtctggacagggtagatacaggaatctgtgggagcattactataaagagggccaggctattattttcgttattgatagctctgaccgcttgcgtatggtggttgccaaagaggagctggacacgctgcttaaccatcccgacattaaacatcgacgtatcccaattctgttctttgcgaacaaaatggacctgagagatgccgtgacctcagtgaaagtgagtcagctcctgtgtctggagaacattaaagacaagccttggcatatctgtgcctcggatgccataaaaggcgaaggcctccaagaaggcgtcgactggctgcaggatcagattcagacggttaagacttag

SEQ ID NO: 253065 - DNA, 561 bp, Artificial Sequence
  derived and/or modified sequence
atgggccttcttgaccggttgagcgtcctgctgggtctgaagaagaaggaagttcacgtgctttgccttggcctggacaatagcggcaagactacgataatcaataagttaaaaccttccaatgcacagagccagaatattttgcccacaattggctttagcatcgagaaatttaagtccagttcactgagctttacagttttcgacatgtcaggccaggggagatacagaaacctgtgggagcattattacaaggagggtcaagccatcatcttcgtgatcgactcatccgatcgactcagaatggttgtagcaaaagaggaactggatactctcctaaaccatccagatatcaaacatcgtagaataccaatcctcttctttgcgaacaagatggatctaagggatgctgtgacatctgtgaaagtctctcagctcctctgcttagaaaatatcaaggacaaaccgtggcacatctgcgcctcagacgccattaaaggagaagggctgcaggaaggagtggattggttacaagaccagattcagacagtgaaaacctag

SEQ ID NO: 253066 - DNA, 561 bp, Artificial Sequence
  derived and/or modified sequence
atgggactgctggataggttgtcagtgctgctgggactcaaaaagaaagaggtgcacgttctatgtctggggttggataacagcggaaagaccacaatcatcaacaagctaaagccctccaatgctcagtcgcaaaacatcttaccaacgatcggcttttctattgaaaaatttaagtcttcctccctgtcctttacagtgttcgatatgagcggtcagggacggtatcgcaacttgtgggagcattactacaaagaaggacaagcaattatttttgtgattgacagcagcgacaggttgcgcatggtcgttgcaaaagaagagcttgacacattgcttaatcacccagacattaaacacaggcggatcccaatcttgttctttgctaacaagatggatctgagagacgctgtgaccagcgtgaaagtcagccaactgctttgcttagaaaatatcaaggacaaaccctggcacatttgcgctagtgatgcgattaaaggcgagggtttgcaggagggcgtggattggttgcaggatcagatacagactgtgaaaacctag

SEQ ID NO: 253067 - DNA, 561 bp, Artificial Sequence
  derived and/or modified sequence
atgggcctgctggacagactgagcgtgctgctgggcctgaagaagaaggaggtgcacgtgctgtgcctgggcctggacaacagcggcaagaccaccatcatcaacaagctgaagcccagcaacgcccagagccagaacatcctgcccaccatcggcttcagcatcgagaagttcaagagcagcagcctgagcttcaccgtgttcgacatgagcggccagggcagatacagaaacctgtgggagcactactacaaggagggccaggccatcatcttcgtgatcgacagcagcgacagactgagaatggtggtggccaaggaggagctggacaccctgctgaaccaccccgacatcaagcacagaagaatccccatcctgttcttcgccaacaagatggacctgagagacgccgtgaccagcgtgaaggtgagccagctgctgtgcctggagaacatcaaggacaagccctggcacatctgcgccagcgacgccatcaagggcgagggcctgcaggagggcgtggactggctgcaggaccagatccagaccgtgaagacctag

SEQ ID NO: 253068 - protein, 671 aa, Artificial Sequence
  derived and/or modified sequence
MRPKRLGRCCAGSRLGPGDPAALTCAPSPSASPAPEPSAQPQARGTGQRVGSRATSGSQFLSEARTGARPASEAGAKAGARRPSAFSAIQGDVRSMPDNSDAPWTRFVFQGPFGSRATGRGTGKAAGIWKTPAAYVGRRPGVSGPERAAFIRELEEALCPNLPPPVKKITQEDVKVMLYLLEELLPPVWESVTYGMVLQRERDLNTAARIGQSLVKQNSVLMEENSKLEALLGSAKEEILYLRHQVNLRDELLQLYSDSDEEDEDEEEEEEEKEAEEEQEEEEAEEDLQCAHPCDAPKLISQEALLHQHHCPQLEALQEKLRLLEEENHQLREEASQLDTLEDEEQMLILECVEQFSEASQQMAELSEVLVLRLENYERQQQEVARLQAQVLKLQQRCRMYGAETEKLQKQLASEKEIQMQLQEESVWVGSQLQDLREKYMDCGGMLIEMQEEVKTLRQQPPVSTGSATHYPYSVPLETLPGFQETLAEELRTSLRRMISDPVYFMERNYEMPRGDTSSLRYDFRYSEDREQVRGFEAEEGLMLAADIMRGEDFTPAEEFVPQEELGAAKKVPAEEGVMEEAELVSEETEGWEEVELELDEATRMNVVTSALEASGLGPSHLDMNYVLQQLANWQDAHYRRQLRWKMLQKGECPHGALPAASRTSCRSSCR

SEQ ID NO: 253069 - protein, 619 aa, Artificial Sequence
  derived and/or modified sequence
MRPKRLGRCCAGSRLGPGDPAALTCAPSPSASPAPEPSAQPQARGTGQRVGSRATSGSQFLSEARTGARPASEAGAKAGARRPSAFSAIQGDVRSMPDNSDAPWTRFVFQGPFGSRATGRGTGKAAGIWKTPAAYVGRRPGVSGPERAAFIRELEEALCPNLPPPVKKITQEDVKVMLYLLEELLPPVWESVTYGMVLQRERDLNTAARIGQSLVKQNSVLMEENSKLEALLGSAKEEILYLRHQVNLRDELLQLYSDSDEEDEDEEEEEEEKEAEEEQEEEEAEEDLQCAHPCDAPKLISQEALLHQHHCPQLEALQEKLRLLEEENHQLREEASQLDTLEDEEQMLILECVEQFSEASQQMAELSEVLVLRLENYERQQQEVARLQAQVLKLQQRCRMYGAETEKLQKQLASEKEIQMQLQEEETLPGFQETLAEELRTSLRRMISDPVYFMERNYEMPRGDTSSLRYDFRYSEDREQVRGFEAEEGLMLAADIMRGEDFTPAEEFVPQEELGAAKKVPAEEGVMEEAELVSEETEGWEEVELELDEATRMNVVTSALEASGLGPSHLDMNYVLQQLANWQDAHYRRQLRWKMLQKGECPHGALPAASRTSCRSSCR

SEQ ID NO: 253070 - DNA, 2016 bp, Artificial Sequence
  derived and/or modified sequence
atgcgcccaaagcggttgggaagatgctgcgcaggttctcgtttaggccccggggacccagccgccctgacatgtgcccccagccccagcgcatccccagcacctgagccaagtgcccagccacaggcacgaggcaccgggcagagagtggggtcacgagccacctcgggctcacagttcttatcagaggcccgcaccggcgcccgacccgcctcagaagcgggggccaaagcaggagctaggaggccatcggccttctcggcaattcaaggcgacgtgagatctatgcctgataatagcgatgcaccatggacacgtttcgtgtttcagggcccatttggctcacgtgcaaccgggcgtggcacaggcaaagcagcaggcatttggaagaccccagccgcttatgtggggagacgtcccggagtctcagggccagagagagcggcatttatcagggagctggaagaggcactgtgccctaacttaccacctcccgtgaaaaagatcactcaggaggacgtcaaggtaatgctgtaccttctcgaagagctgctgccccccgtgtgggaatccgtaacttacggaatggtactacaaagggagcgggatttgaatactgccgcccgtattggacagtcactggttaagcagaatagcgtcctgatggaggagaatagtaaattggaagccctcttggggtcagcaaaagaggagatcctctatctgagacaccaggtcaatttgagggatgagctgcttcagctgtattccgactcagatgaggaggatgaggatgaagaggaagaagaagaggaaaaggaagccgaagaggaacaggaagaggaagaagctgaggaagatttgcagtgtgcccatccttgtgacgccccaaagctaataagtcaggaggcactgcttcatcaacaccactgtccccagttagaggccctccaggagaagctacggctcctggaagaggaaaatcaccaactcagagaggaagcaagccagctggacacactagaggacgaggagcagatgctaatcttagagtgtgtggaacaatttagtgaggctagtcagcaaatggctgagttatctgaggtgctggtcctgagattggaaaactatgagcggcagcagcaagaagtcgcccgactgcaagcccaggtgctaaagcttcagcagagatgtagaatgtacggagctgaaaccgaaaaactccagaaacagttggcctcagagaaggaaatccaaatgcagcttcaggaggagagtgtatgggtcgggtctcagctacaggatctgagagagaagtatatggattgtgggggcatgttaatagagatgcaagaagaagtcaagaccctgcgccagcagccaccagtaagcacaggatcagcaacgcactacccatacagcgtgcccctcgagacattgcctggcttccaggagactctggccgaggaactgcggacaagcctaaggcgcatgatttcagacccagtgtattttatggagaggaattatgagatgccacgtggagacactagttcccttaggtatgacttcaggtactctgaagacagagagcaagtgcggggctttgaagctgaagaagggctgatgctcgcggctgatattatgcggggcgaagattttacaccagcagaagagttcgtgccccaagaagagctgggagccgctaaaaaggtgcctgcagaggaaggagttatggaagaggcagaactggtaagcgaggaaacagaagggtgggaggaggtcgaattggagctggatgaagcaacacggatgaatgtggttacttccgcgctggaggcgtccggactgggacctagtcatctggatatgaattatgttttgcagcagctcgccaattggcaagacgcccactaccgacgtcagttgcggtggaagatgctgcagaagggcgaatgcccccatggtgctctgcctgctgccagcagaacatcctgcaggtccagttgtcggtag

SEQ ID NO: 253071 - DNA, 1860 bp, Artificial Sequence
  derived and/or modified sequence
atgcgtccaaaacgactgggtagatgctgcgctgggtcccggctgggacctggcgaccctgccgccttgacatgtgcgccgtcaccatcagcttcaccagcccctgaaccatctgcccagccccaagcgcgcggcaccggccaaagagtggggtccagagcaaccagtggctcccaattcttgtcggaggctagaacaggcgcccgccccgcctctgaggcaggtgccaaggcaggagctagacggccatctgccttcagcgctatccagggggatgtgagatcaatgccagataactccgacgcaccctggactcgctttgtgttccaggggcccttcgggtctcgcgctacaggacgggggaccgggaaggctgctggtatctggaagactcctgccgcgtatgtcgggagaagacctggtgtgagcgggcccgaacgtgccgcattcattagagagctagaagaagccttatgcccaaatctcccaccgcccgtcaagaagatcacacaagaggatgttaaagtgatgctctatttgctggaagagctgttgccgcccgtgtgggaatccgttacatatggcatggtgctacaaagagaaagggacctcaacacagccgcacgcatcggccagtccctggtcaagcagaactcagttctgatggaggaaaatagcaagctggaagctctgctaggatctgccaaagaggaaattctgtacttaagacaccaggtgaatctgagagatgaattgctgcagctctactccgactctgatgaagaagatgaggacgaagaagaggaagaagaagaaaaggaagcagaggaggaacaagaagaggaggaggctgaggaggatctgcagtgcgcccacccatgcgatgctcccaaattaatctctcaggaggctctgctgcatcagcatcattgccctcagctggaagccctacaggagaaactccgtctgctggaagaagaaaaccatcagctacgggaagaggcttcacagctggacaccctggaagacgaggagcaaatgctgatactggagtgcgtggagcagttctctgaagcctctcagcagatggctgagcttagcgaggtgctggttctgcgtttggagaattacgaaagacagcagcaagaggtggccagattacaggcacaggtgctaaagctgcagcagcggtgtcgaatgtacggggccgaaacagagaagctgcagaaacagttagcctcagagaaggaaatccagatgcagctacaggaggaggaaaccctgcccggttttcaggagacactggccgaggagcttcggacgtcactccggaggatgatcagcgaccccgtttacttcatggaaagaaactacgaaatgcccaggggcgacacaagttccttgaggtatgatttcaggtattcggaagacagagaacaggtgagggggtttgaagccgaggagggcctgatgctggccgccgatattatgcgaggggaagatttcacacccgccgaggagtttgtgcctcaggaggagctcggagcagctaagaaagtgcctgccgaagaaggtgttatggaggaggccgagctcgtatccgaagagaccgagggatgggaagaggtggaactggaacttgacgaagccactaggatgaacgtggtaactagcgcgctggaggcatcaggcctaggtccttctcatctggacatgaactacgtgttacaacaattggccaattggcaggatgctcattaccgacgtcagctgcgatggaagatgcttcagaagggtgaatgtccccacggcgccctaccggcagcgtcccgaacttcttgtagaagctcctgcaggtag

SEQ ID NO: 253072 - DNA, 4087 bp, Artificial Sequence
  derived and/or modified sequence
cagactcgagatgcgcccgaagaggttgggccggtgctgcgcggggagccggctcggacccggggacccagcagcactcacctgtgcaccttcgccctcagccagtcccgctccggagccctctgcgcagccgcaggcacggggcactggacagagagtaggatcccgagccacctctggatcccagttcctctcggaagcccgcaccggagctcgcccggcctcggaggctggagccaaggcaggagcccggcgcccgtccgcattctcggccatccaaggggatgtccggtctatgcccgacaattcggacgcgccgtggacccgcttcgtattccaagggccgtttggttcccgggccactggccgggggactggaaaggcagcgggcatctggaagacgccagccgcctacgttggccggcgacccggggtgtccggccctgagcgcgccgcctttattcgggagctggaggaagcactgtgtcctaacctacctccgccagtcaaaaagatcacccaggaagacgtcaaagtgatgttatatttgctggaggagcttctcccacctgtctgggagagcgttacctatgggatggtcctgcagagagagagggacctgaacactgcagctcgcatcggccagtccctggtgaaacagaacagtgttttgatggaggagaacagcaagctggaagccctgctgggctcagccaaggaggagattttatacctcagacaccaggtgaacttgcgggatgagctcctccagctctactcagattctgatgaggaggatgaggatgaagaagaggaggaggaagaaaaggaggcagaagaggaacaggaagaagaagaagcagaggaagacctgcagtgtgctcatccctgtgatgcccctaagctgatttcgcaggaggcattgctgcaccagcaccactgcccacagctggaagccttgcaggagaagctgaggctgctggaggaggagaatcatcagctgagagaagaggcctctcaactcgacactcttgaggatgaggaacagatgctcattctggagtgtgtggagcagttttcggaggccagccaacagatggctgagctgtcggaggtgctggtgctcaggctggaaaactatgaacggcagcagcaggaggtcgctcggctgcaggcccaggtgctgaagctgcagcagcgctgccggatgtatggggctgagactgaaaagttgcagaagcagctggcttcggagaaggaaatccagatgcagctccaggaagagagcgtgtgggtgggttcccagctgcaggacctgcgggagaagtacatggattgtgggggcatgctgattgagatgcaggaggaggtgaagaccctccgccagcaacccccagtgtccactgggtctgccacccattacccatacagcgtgcctctggagactcttcctggtttccaggagacgctggctgaggagctcagaacgtctctaaggaggatgatctcagaccctgtgtattttatggagaggaattatgagatgcccagaggggacacatccagcctaaggtatgattttcgctacagtgaggatcgagagcaggtgcgggggtttgaggctgaggaagggttgatgctggcagcggatatcatgcggggggaagatttcacgcctgcggaggagttcgtgccccaggaggagctgggggctgccaagaaggtgccggctgaggaaggggtgatggaagaggcagagctggtgtcagaggagaccgagggctgggaggaggtggaactggagctggatgaggcaacgcggatgaacgtggtgacatcagccctggaggccagcggcttgggcccttcacacctggacatgaattatgtcctccagcagctggccaactggcaagatgcccattacaggcggcagctgaggtggaagatgctccagaaaggtgagtgcccccacggggccctccctgccgccagccggacaagctgcagatcgtcgtgccgatgaaaagagagggtggataagctccccgagtgctcacctgccccagcctggctctacctgctgtgcttatttgcatggactttgcatatcatttgcatagacacctctgatccccttcagtgggaaccgtagtgtcagtgctcatttatgtggcatttgcttaggattccagatctccatccacttttctcctgggggctgggctgggggttagggctgggactgtgcccccacactgcgcctcagcttcccatctctgcccgcttgcttcccctgcccccaacccctgcctcctctatcccccaggctctccaactctgcagcagtggcagcagcagtcaaaacaaacacggggggcggtgggtgggatggtggagcagcccgggggctgacccaggctggaggacagggccagccaccctcccacggcctgggaggaagagaggccttctgggactgcccaggctatggggacaaaggccttcaccagcaagggccacagttggaacagtcccctgggtgtcagaaggtgggctagggcctcctgcagggttgtggggtggaacagggtctcctctccccagccagaaaccccaaagtctgggagctgcaccttccgagtgcaggccatgtgagccctgcctctttaaggagccgcaggacatgaaagatgaccttgtgacactcatgcacagcagccattgcacgtgcatcagctcccatcagcctcattccgtggcaggtgatgtgtccccattggttaggtgaggagggtgaggctcagagagctaaggacacttgtttggggccacacagccggggtagatctgagcccgtcctctctactcctgtgctgtagcaccttcactggcccatccctcccctctagtgctgtcctggtacccgtcccagcctgtccccattctcatggccctttggtcactgccgggtggaatagcactggcttcagcaggcgtgtcatgtaagcttgtgcaggttataaactgaaccatgacctttatggcgcatgcagggggcaacctgcataattatcaatggcgactttccgtgtccttctgatacagttgatcagacccctgcccaccgcccaggccaggcctgtggtcatcaatgccccagttcacatccacctgcttctcttccaggctttgctgttccccagcagcctgcagaggccccacagacagcttgaggcccctccttctgctgcctggccaagccccacacccgcagaccctccttcccatcctctgaaatgggaccctgtgtctgtcaccagcccaccctctgtgttcatgaacctgggctggagcttggggacccctccctgcccctggcttcctcttccatgttctgccctttcccacatgttggaggcttttccaacgtcttcagggacaggcggtaggaaccccggccctcgctctgcagctggtgcaaaagctgtggctgccaggtctgggccacatggcagcccagggggcaggagaagcccgggagaggcccactggctaccagactcagccctgagcagggaacagggcccagcttccaccggcagggagttgtgagcgccttcccaacaatgtgcccctcaccccttgatgcccatgctaatggtagccaccctggttcttgttgacttgagggacctggctgtcttccctgttcttcatcctttcttctcagtccctacctactgtttgtaaccacaagtgtctctgtgtgtgggtgggtgagggcccctctgcccagtggtgtgtctcctctccctccctccctcttctgccagtggcctgggggtgtccaggctcccatccgtggcccagcccctctcccctctgtcttgatccccccctccctgcccctggcttcctcttccatgttctgccctttcccacacctttgttcctcaatagctgggggctgggactgaggcctcctgcaggtacctgccccccttcacacagcacctctcaatctcctattgcttgtcagcctgtgtgcgtgtggtgcaggaaataaaggatctataccctcctg

SEQ ID NO: 253073 - DNA, 3931 bp, Artificial Sequence
  derived and/or modified sequence
cagactcgagatgcgcccgaagaggttgggccggtgctgcgcggggagccggctcggacccggggacccagcagcactcacctgtgcaccttcgccctcagccagtcccgctccggagccctctgcgcagccgcaggcacggggcactggacagagagtaggatcccgagccacctctggatcccagttcctctcggaagcccgcaccggagctcgcccggcctcggaggctggagccaaggcaggagcccggcgcccgtccgcattctcggccatccaaggggatgtccggtctatgcccgacaattcggacgcgccgtggacccgcttcgtattccaagggccgtttggttcccgggccactggccgggggactggaaaggcagcgggcatctggaagacgccagccgcctacgttggccggcgacccggggtgtccggccctgagcgcgccgcctttattcgggagctggaggaagcactgtgtcctaacctacctccgccagtcaaaaagatcacccaggaagacgtcaaagtgatgttatatttgctggaggagcttctcccacctgtctgggagagcgttacctatgggatggtcctgcagagagagagggacctgaacactgcagctcgcatcggccagtccctggtgaaacagaacagtgttttgatggaggagaacagcaagctggaagccctgctgggctcagccaaggaggagattttatacctcagacaccaggtgaacttgcgggatgagctcctccagctctactcagattctgatgaggaggatgaggatgaagaagaggaggaggaagaaaaggaggcagaagaggaacaggaagaagaagaagcagaggaagacctgcagtgtgctcatccctgtgatgcccctaagctgatttcgcaggaggcattgctgcaccagcaccactgcccacagctggaagccttgcaggagaagctgaggctgctggaggaggagaatcatcagctgagagaagaggcctctcaactcgacactcttgaggatgaggaacagatgctcattctggagtgtgtggagcagttttcggaggccagccaacagatggctgagctgtcggaggtgctggtgctcaggctggaaaactatgaacggcagcagcaggaggtcgctcggctgcaggcccaggtgctgaagctgcagcagcgctgccggatgtatggggctgagactgaaaagttgcagaagcagctggcttcggagaaggaaatccagatgcagctccaggaagaggagactcttcctggtttccaggagacgctggctgaggagctcagaacgtctctaaggaggatgatctcagaccctgtgtattttatggagaggaattatgagatgcccagaggggacacatccagcctaaggtatgattttcgctacagtgaggatcgagagcaggtgcgggggtttgaggctgaggaagggttgatgctggcagcggatatcatgcggggggaagatttcacgcctgcggaggagttcgtgccccaggaggagctgggggctgccaagaaggtgccggctgaggaaggggtgatggaagaggcagagctggtgtcagaggagaccgagggctgggaggaggtggaactggagctggatgaggcaacgcggatgaacgtggtgacatcagccctggaggccagcggcttgggcccttcacacctggacatgaattatgtcctccagcagctggccaactggcaagatgcccattacaggcggcagctgaggtggaagatgctccagaaaggtgagtgcccccacggggccctccctgccgccagccggacaagctgcagatcgtcgtgccgatgaaaagagagggtggataagctccccgagtgctcacctgccccagcctggctctacctgctgtgcttatttgcatggactttgcatatcatttgcatagacacctctgatccccttcagtgggaaccgtagtgtcagtgctcatttatgtggcatttgcttaggattccagatctccatccacttttctcctgggggctgggctgggggttagggctgggactgtgcccccacactgcgcctcagcttcccatctctgcccgcttgcttcccctgcccccaacccctgcctcctctatcccccaggctctccaactctgcagcagtggcagcagcagtcaaaacaaacacggggggcggtgggtgggatggtggagcagcccgggggctgacccaggctggaggacagggccagccaccctcccacggcctgggaggaagagaggccttctgggactgcccaggctatggggacaaaggccttcaccagcaagggccacagttggaacagtcccctgggtgtcagaaggtgggctagggcctcctgcagggttgtggggtggaacagggtctcctctccccagccagaaaccccaaagtctgggagctgcaccttccgagtgcaggccatgtgagccctgcctctttaaggagccgcaggacatgaaagatgaccttgtgacactcatgcacagcagccattgcacgtgcatcagctcccatcagcctcattccgtggcaggtgatgtgtccccattggttaggtgaggagggtgaggctcagagagctaaggacacttgtttggggccacacagccggggtagatctgagcccgtcctctctactcctgtgctgtagcaccttcactggcccatccctcccctctagtgctgtcctggtacccgtcccagcctgtccccattctcatggccctttggtcactgccgggtggaatagcactggcttcagcaggcgtgtcatgtaagcttgtgcaggttataaactgaaccatgacctttatggcgcatgcagggggcaacctgcataattatcaatggcgactttccgtgtccttctgatacagttgatcagacccctgcccaccgcccaggccaggcctgtggtcatcaatgccccagttcacatccacctgcttctcttccaggctttgctgttccccagcagcctgcagaggccccacagacagcttgaggcccctccttctgctgcctggccaagccccacacccgcagaccctccttcccatcctctgaaatgggaccctgtgtctgtcaccagcccaccctctgtgttcatgaacctgggctggagcttggggacccctccctgcccctggcttcctcttccatgttctgccctttcccacatgttggaggcttttccaacgtcttcagggacaggcggtaggaaccccggccctcgctctgcagctggtgcaaaagctgtggctgccaggtctgggccacatggcagcccagggggcaggagaagcccgggagaggcccactggctaccagactcagccctgagcagggaacagggcccagcttccaccggcagggagttgtgagcgccttcccaacaatgtgcccctcaccccttgatgcccatgctaatggtagccaccctggttcttgttgacttgagggacctggctgtcttccctgttcttcatcctttcttctcagtccctacctactgtttgtaaccacaagtgtctctgtgtgtgggtgggtgagggcccctctgcccagtggtgtgtctcctctccctccctccctcttctgccagtggcctgggggtgtccaggctcccatccgtggcccagcccctctcccctctgtcttgatccccccctccctgcccctggcttcctcttccatgttctgccctttcccacacctttgttcctcaatagctgggggctgggactgaggcctcctgcaggtacctgccccccttcacacagcacctctcaatctcctattgcttgtcagcctgtgtgcgtgtggtgcaggaaataaaggatctataccctcctg

SEQ ID NO: 253074 - DNA, 2016 bp, Artificial Sequence
  derived and/or modified sequence
atgaggcccaagaggctgggccgctgctgtgccggcagccggctgggccctggggaccctgctgccctgacctgtgcccccagccccagcgccagccctgcccctgagcccagcgcccagccccaggcccggggcaccggccagagggtgggcagccgggccaccagcggcagccagttcctgtctgaggccaggactggagcccggcctgccagcgaggccggggccaaggccggggcccggcggcccagcgccttcagcgccatccagggagatgtgcgctccatgccagacaacagtgatgccccctggaccaggtttgtgttccagggccccttcggcagccgggccaccggccggggcaccgggaaggccgccggcatctggaagaccccagctgcctacgtgggccggcggcctggggtgtctggccctgagcgggccgccttcatccgggagctggaggaggccctgtgccccaacctgcccccacctgtgaagaagatcacccaggaggatgtgaaggtgatgctgtacctgctggaggagctgctgccccctgtgtgggagagcgtgacctacggcatggtgctgcagcgggagcgggacctgaacacagctgcccgcatcggccagagcctggtgaagcagaacagcgtgctgatggaggagaacagcaagctggaggccctgctgggcagcgccaaggaggagatcctgtacctgcggcaccaggtgaacctgagagatgagctgctgcagctgtacagcgacagtgatgaggaggatgaagatgaggaggaggaggaggaggagaaggaggccgaggaggagcaggaggaggaggaggccgaggaggacctgcagtgtgcccacccctgtgatgcccccaagctgatcagccaggaggccctgctgcaccagcaccactgcccccagctggaggccctgcaggagaagctgcggctgctggaggaggagaaccaccagctgcgggaggaggccagccagctggacaccctggaggatgaggagcagatgctgatcctggagtgtgtggagcagttcagcgaggccagccagcagatggccgagctgtctgaggtgctggtgctgcggctggagaactatgagcggcagcagcaggaggtggcccggctgcaggcccaggtgctgaagctgcagcagcgctgcaggatgtatggagctgagacagagaagctgcagaagcagctggccagcgagaaggagatccagatgcagctgcaggaggagagcgtgtgggtgggcagccagctgcaggacctgcgggagaagtacatggactgtggcggcatgctgattgagatgcaggaggaggtgaagaccctgcggcagcagccccctgtgtccactggaagtgccacccactacccctacagcgtgcccctggagaccctgcccggcttccaggagaccctggccgaggagctgcggaccagcctgcggaggatgatcagtgaccctgtgtacttcatggagaggaactatgagatgcccaggggggacaccagcagcctgcgctatgacttccgctacagcgaggaccgggagcaggtgcggggctttgaggccgaggagggcctgatgctggccgctgacatcatgagaggagaggacttcaccccagctgaggagtttgtgccccaggaggagctgggcgccgccaagaaggtgcctgctgaggagggcgtgatggaggaggccgagctggtgtctgaggagacagagggctgggaggaggtggagctggagctggatgaggccaccaggatgaatgtggtgaccagcgccctggaggccagcggcctgggccccagccacctggacatgaactacgtgctgcagcagctggccaactggcaggatgcccactaccgccggcagctgcgctggaagatgctgcagaagggggagtgcccccatggagccctgcctgctgccagcaggaccagctgccgcagcagctgcaggtag

SEQ ID NO: 253075 - DNA, 1860 bp, Artificial Sequence
  derived and/or modified sequence
atgaggcccaagaggctgggccgctgctgtgccggcagccggctgggccctggggaccctgctgccctgacctgtgcccccagccccagcgccagccctgcccctgagcccagcgcccagccccaggcccggggcaccggccagagggtgggcagccgggccaccagcggcagccagttcctgtctgaggccaggactggagcccggcctgccagcgaggccggggccaaggccggggcccggcggcccagcgccttcagcgccatccagggagatgtgcgctccatgccagacaacagtgatgccccctggaccaggtttgtgttccagggccccttcggcagccgggccaccggccggggcaccgggaaggccgccggcatctggaagaccccagctgcctacgtgggccggcggcctggggtgtctggccctgagcgggccgccttcatccgggagctggaggaggccctgtgccccaacctgcccccacctgtgaagaagatcacccaggaggatgtgaaggtgatgctgtacctgctggaggagctgctgccccctgtgtgggagagcgtgacctacggcatggtgctgcagcgggagcgggacctgaacacagctgcccgcatcggccagagcctggtgaagcagaacagcgtgctgatggaggagaacagcaagctggaggccctgctgggcagcgccaaggaggagatcctgtacctgcggcaccaggtgaacctgagagatgagctgctgcagctgtacagcgacagtgatgaggaggatgaagatgaggaggaggaggaggaggagaaggaggccgaggaggagcaggaggaggaggaggccgaggaggacctgcagtgtgcccacccctgtgatgcccccaagctgatcagccaggaggccctgctgcaccagcaccactgcccccagctggaggccctgcaggagaagctgcggctgctggaggaggagaaccaccagctgcgggaggaggccagccagctggacaccctggaggatgaggagcagatgctgatcctggagtgtgtggagcagttcagcgaggccagccagcagatggccgagctgtctgaggtgctggtgctgcggctggagaactatgagcggcagcagcaggaggtggcccggctgcaggcccaggtgctgaagctgcagcagcgctgcaggatgtatggagctgagacagagaagctgcagaagcagctggccagcgagaaggagatccagatgcagctgcaggaggaggagaccctgcccggcttccaggagaccctggccgaggagctgcggaccagcctgcggaggatgatcagtgaccctgtgtacttcatggagaggaactatgagatgcccaggggggacaccagcagcctgcgctatgacttccgctacagcgaggaccgggagcaggtgcggggctttgaggccgaggagggcctgatgctggccgctgacatcatgagaggagaggacttcaccccagctgaggagtttgtgccccaggaggagctgggcgccgccaagaaggtgcctgctgaggagggcgtgatggaggaggccgagctggtgtctgaggagacagagggctgggaggaggtggagctggagctggatgaggccaccaggatgaatgtggtgaccagcgccctggaggccagcggcctgggccccagccacctggacatgaactacgtgctgcagcagctggccaactggcaggatgcccactaccgccggcagctgcgctggaagatgctgcagaagggggagtgcccccatggagccctgcctgctgccagcaggaccagctgccgcagcagctgcaggtag

SEQ ID NO: 253076 - DNA, 2016 bp, Artificial Sequence
  derived and/or modified sequence
atgcggcccaagcggctgggccggtgctgcgccggcagccggctgggaccgggagacccggccgcactgacatgcgcccccagcccatctgcatcacccgcgccagaaccatcggcccagccacaggcacggggcacgggccagagagttggatcccgcgctacttcaggatcccagttcttatcagaggcacgcaccggagctcgtcccgccagtgaagcaggcgccaaagccggcgcaaggcgcccatccgctttcagcgcgatccagggcgatgttaggtctatgccagataatagtgacgccccctggacgcgcttcgtgttccaggggccctttggcagcagagcgaccggtaggggaacaggtaaggcggccgggatctggaagacccccgcggcttacgtggggcggcgcccaggcgtcagcggtcccgaaagagccgctttcatcagggaactggaagaggcactctgcccaaaccttccacctccagtcaaaaagatcacgcaagaggacgtcaaggtgatgctctacctgttggaagaacttctcccgcccgtctgggaaagcgtgacctacgggatggtgctgcaacgggagagagatcttaatactgcagcccggatcgggcagagcctggtaaaacagaactcggtgttgatggaagagaacagcaaactggaggccctactgggatccgcgaaggaagagatcctctacctgaggcaccaagtcaacctcagggatgagctcttgcagctctactctgactccgatgaagaggatgaagatgaagaagaagaggaggaagagaaggaggcagaggaagagcaggaggaagaagaggccgaagaagacctgcaatgcgcccatccatgcgacgcccccaaactgataagccaggaagctctgctacaccagcaccactgccctcaactagaagcgcttcaggaaaaactgaggttgctggaagaggagaaccatcagctccgcgaagaagctagccagctggacaccttggaggacgaggagcagatgctgatactagagtgcgtggagcagttttccgaggcatcccagcagatggcggaactaagtgaagtcttggtgctgagattagagaattacgagcgtcaacagcaagaggtagctcggttgcaggctcaggtgttgaagcttcagcagaggtgtcggatgtatggtgccgaaaccgagaaactgcaaaagcagctggctagtgagaaggaaattcagatgcagttgcaggaggaatccgtatgggtcggatcacagctgcaggacttgcgcgaaaagtacatggactgtggaggcatgctcatagaaatgcaggaagaagtgaagacacttagacaacagcctccagtgtccaccgggtccgccacacactatccatattcggtaccactggaaacgcttccaggctttcaggagactctggcagaggagttgcgcacaagtcttcgtaggatgatctccgatcctgtgtactttatggagcggaactacgagatgccaagaggggacacctcatctctgcggtacgacttcagatattcagaggatcgggaacaagtgaggggatttgaggctgaagaaggcctgatgctcgccgctgacatcatgagaggagaggattttacacctgcagaagaattcgtccctcaggaggagttaggagctgccaaaaaggttccagctgaggagggcgtaatggaggaagccgaactagtctccgaggagacagagggatgggaagaagtggaattggaacttgacgaagctaccagaatgaatgtggttacctctgcactagaagcatctggcttgggccctagccatctggacatgaactacgtgctccagcagctggcgaactggcaggacgctcattaccgacgacagttaagatggaagatgctccaaaagggcgaatgtccacacggggctttgcccgcggcatctaggacctcatgcaggagctcttgccgctag

SEQ ID NO: 253077 - DNA, 1860 bp, Artificial Sequence
  derived and/or modified sequence
atgcggcccaagcggctgggccggtgctgcgccggcagccggctgggcccgggtgatccagctgcattgacctgtgccccatcaccctccgcttccccagcgccagaacccagcgcacagccacaagctcgaggcaccggtcagagggtgggatccagagcgacctctggaagtcagttcctgagcgaagccaggactggtgcaaggccagcctccgaggccggagccaaggcgggtgcacgcagacctagtgccttttcagcaattcagggggacgttcgcagcatgccggacaacagtgacgccccttggacccggtttgttttccagggcccattcggttcacgggcaacaggcagagggacagggaaagccgcggggatctggaaaacacccgccgcatatgttggccgcagacccggggtctctggtcccgaacgggcggctttcatccgagaactagaggaggcgctatgtcccaatcttccaccccctgttaagaagattacacaagaggacgttaaggtgatgctctatttgttagaggagttactgccccccgtgtgggaatccgtaacttacggcatggtgctgcagagggagcgggacctgaacaccgccgctaggattggccagagtctggtgaaacagaattccgtcctgatggaggaaaatagcaaattagaagctctgctgggaagcgccaaggaagaaattttgtacctaagacatcaggtcaatctgcgggacgagctcttgcagctgtattccgactcagacgaagaggacgaagatgaagaggaagaggaggaagaaaaggaggccgaggaggaacaggaggaggaggaggcagaagaagatcttcaatgtgcccacccatgcgatgctcctaagctgatttcccaggaagctctattacaccagcaccactgcccccagctggaggcgcttcaagaaaagttgcggcttcttgaagaagagaaccaccagctacgcgaggaagcttctcagttagacacactcgaagacgaggaacaaatgctaatactcgaatgtgttgaacagttctccgaggcgagccaacagatggccgaactcagtgaagtcctggtgttgagactcgagaattatgagcggcagcagcaggaggtggctcggctccaggctcaagttctgaagctgcagcagaggtgccgcatgtatggcgcagagacagagaaactgcagaagcagctggcctccgagaaggagatccagatgcagctgcaagaagaggagacccttcccgggtttcaggagaccctcgccgaggaacttcgcacaagcctgaggagaatgatcagcgaccctgtgtatttcatggagcggaattacgaaatgcctcgtggagatacaagctccctcaggtatgattttcggtactccgaagaccgagaacaggtacgggggttcgaagctgaggaagggctgatgctggccgccgatatcatgcgcggagaagattttactcctgcagaggagttcgtgccacaggaggagctcggcgccgccaagaaggtgccggccgaagagggagtcatggaagaagctgagttggtgtccgaagagaccgaagggtgggaagaggttgagctcgaattggacgaagccaccaggatgaacgtcgttaccagcgcgttggaagcctccggcctcgggccaagccaccttgatatgaattatgtactccagcagctagccaactggcaggacgcacactatcgaagacaattacggtggaagatgctacagaagggagaatgcccgcatggcgccctccccgccgcgagtcggacatcttgccgctcctcatgtcgctag

SEQ ID NO: 253078 - DNA, 2016 bp, Artificial Sequence
  derived and/or modified sequence
atgcggccaaagcgattgggcagatgttgcgccggatcccgcctgggcccaggcgaccctgctgctttaacttgcgccccatctccttcagcaagcccagctcctgagcccagcgcgcagcctcaggcgagggggacaggccagagggtgggctcccgcgctacatctgggagccagtttctctccgaggctagaacaggagcaaggccagcctctgaggctggcgcaaaagccggagcgaggagaccaagtgcttttagtgctattcagggcgacgttagaagcatgccagacaattccgacgcaccatggacccgcttcgtattccaaggcccttttggaagcagggcaactggacggggaacaggcaaggcagcgggaatctggaagacccccgcagcctacgttggcagacgcccaggggtgagtggcccagagcgggctgccttcatccgagaacttgaggaagcattatgccctaacctccctccacctgttaagaaaataacccaggaggatgtgaaagtgatgctgtacctgcttgaggagctcctaccccctgtgtgggagagcgttacctacggaatggtgctccagcgagagagggacctgaataccgcagctcgtatcggccagtcactggtcaaacagaatagcgttctgatggaagaaaactcaaagctggaggccctgttaggttcagcaaaggaggagattttgtacctacgccaccaggttaacctccgcgatgagctactgcagctgtattcagatagcgatgaggaagatgaggatgaggaagaagaagaagaggagaaggaggctgaagaggagcaggaggaagaggaagccgaagaagatctacagtgcgcccacccatgtgacgcccctaagctgatctctcaagaggccttgctccaccagcatcactgcccccagctcgaagccctccaagaaaagttaagactcctcgaagaggaaaaccatcagctgcgggaagaagcaagccaactcgatacactcgaggatgaggaacagatgctaattctagagtgcgtggaacagttttcagaagccagtcagcagatggctgaactgtcagaagtcctggtgttgcggctggagaactatgaacgacagcagcaggaagtcgccagacttcaggctcaagtcctgaaactgcagcaacgatgccgaatgtacggcgcagagacagaaaagttgcagaagcagctggcatctgagaaggaaatacagatgcagttgcaggaggaaagcgtatgggtgggtagccaactccaagaccttagggagaagtatatggactgcgggggaatgttgattgaaatgcaagaggaggtgaaaacactgcggcagcagcctcctgtgagtactggctcagcaacacactatccatacagtgtacccctggagacactgccagggtttcaggaaacacttgctgaagaactccggacatcactgaggcgtatgatctcagatcccgtgtacttcatggagaggaattatgagatgccgaggggcgatacaagttcccttcgatacgattttaggtactctgaagatcgtgagcaggtgaggggattcgaagcagaggagggcctcatgcttgctgcagatatcatgagaggtgaagactttactccagcagaagagtttgtaccccaggaggagctgggcgctgctaagaaagtgcccgctgaagagggtgtaatggaagaggccgagctggtgagcgaagagaccgagggatgggaggaggtggagttggaattggatgaggcaacccggatgaacgtcgttaccagcgccctggaagcctccggactgggacctagccacttagatatgaactacgtcctgcaacaactcgccaactggcaggatgcccactaccggagacagttgcggtggaaaatgctgcaaaaaggcgaatgcccacatggggctctgccagcggcatcacgaactagctgtaggagctcctgccgctag

SEQ ID NO: 253079 - DNA, 1860 bp, Artificial Sequence
  derived and/or modified sequence
atgagacccaagagactaggacgctgttgcgcaggcagccgcctagggcctggggatccagcggcactgacatgcgcccctagcccttccgctagcccagctcctgagccgagtgcccagcctcaagcccgagggactggccagagagttggttcacgcgcaacctccggatcccaatttctgtcagaggccaggacaggggcacgacccgctagcgaagcgggagctaaagctggggcaaggaggccttccgcctttagcgccatccaaggcgacgtgaggtcaatgcctgataattccgacgccccttggacccgcttcgtgtttcagggcccatttggctcacgcgctaccgggcgtggcacaggaaaggcagcaggcatttggaaaactcccgctgcgtacgtgggtagaaggcccggagtttccgggcctgaaagagccgcattcatcagggaacttgaagaggccttgtgtcctaacctgccacccccagtgaagaaaatcacccaagaggatgtgaaagttatgctatacctcctagaggaacttttgccccctgtatgggaaagcgtgacatacggcatggtgctgcagagagagcgcgacctgaataccgctgctcgaatcggccaatcattagtcaaacaaaactccgtgctgatggaagagaattcgaagctcgaagccctgttagggtccgctaaagaggaaatcttatatctgagacaccaggtgaatttacgggatgagctgctccaactctactccgacagtgatgaagaagatgaagacgaggaggaagaagaagaagagaaggaagccgaagaagagcaagaggaggaggaagcagaggaggatttgcagtgcgctcacccctgcgacgcacccaagcttattagccaagaagctttgctccaccaacaccattgccctcaactggaggcacttcaggagaaacttaggctgttagaggaggagaaccatcagcttcgcgaggaggcatcccagttggacactttagaagacgaggaacaaatgctgatcctggagtgcgtagagcagttctcagaggcctcacagcaaatggctgagctatctgaggttctggttctgagattagaaaattacgagcgccaacagcaggaggtggctaggttgcaagcgcaagtccttaagcttcagcaacgatgcagaatgtatggcgctgagaccgaaaaacttcaaaagcagctcgcctctgagaaggagatacagatgcagcttcaggaagaggagactctgccaggttttcaagagaccctggcagaggagctccgcacctcactccgacgaatgatctccgaccctgtctatttcatggagagaaactacgagatgccaagaggagatacctcgagcttacgctatgattttagatatagcgaagacagagagcaggtccggggattcgaagccgaagagggactgatgctcgctgcagatattatgcgaggtgaggattttactccggctgaggaatttgtaccccaagaagagttaggcgcagccaaaaaagttcctgcggaggagggtgtgatggaggaagccgagctcgtgagtgaggagaccgagggctgggaagaagtcgagctagagctggatgaggctaccagaatgaacgtggtgacatcagcactggaggcgtccgggcttgggccatcccatctggacatgaattacgtactgcagcaacttgcaaactggcaggacgcacattaccgcagacaactgcgttggaagatgttgcagaagggagaatgtccccatggcgcactgcctgctgcaagcagaaccagctgccgttctagctgccgctag

SEQ ID NO: 253080 - DNA, 2016 bp, Artificial Sequence
  derived and/or modified sequence
atgagacccaagagactgggcagatgctgcgccggcagcagactgggccccggcgaccccgccgccctgacctgcgcccccagccccagcgccagccccgcccccgagcccagcgcccagccccaggccagaggcaccggccagagagtgggcagcagagccaccagcggcagccagttcctgagcgaggccagaaccggcgccagacccgccagcgaggccggcgccaaggccggcgccagaagacccagcgccttcagcgccatccagggcgacgtgagaagcatgcccgacaacagcgacgccccctggaccagattcgtgttccagggccccttcggcagcagagccaccggcagaggcaccggcaaggccgccggcatctggaagacccccgccgcctacgtgggcagaagacccggcgtgagcggccccgagagagccgccttcatcagagagctggaggaggccctgtgccccaacctgcccccccccgtgaagaagatcacccaggaggacgtgaaggtgatgctgtacctgctggaggagctgctgccccccgtgtgggagagcgtgacctacggcatggtgctgcagagagagagagacctgaacaccgccgccagaatcggccagagcctggtgaagcagaacagcgtgctgatggaggagaacagcaagctggaggccctgctgggcagcgccaaggaggagatcctgtacctgagacaccaggtgaacctgagagacgagctgctgcagctgtacagcgacagcgacgaggaggacgaggacgaggaggaggaggaggaggagaaggaggccgaggaggagcaggaggaggaggaggccgaggaggacctgcagtgcgcccacccctgcgacgcccccaagctgatcagccaggaggccctgctgcaccagcaccactgcccccagctggaggccctgcaggagaagctgagactgctggaggaggagaaccaccagctgagagaggaggccagccagctggacaccctggaggacgaggagcagatgctgatcctggagtgcgtggagcagttcagcgaggccagccagcagatggccgagctgagcgaggtgctggtgctgagactggagaactacgagagacagcagcaggaggtggccagactgcaggcccaggtgctgaagctgcagcagagatgcagaatgtacggcgccgagaccgagaagctgcagaagcagctggccagcgagaaggagatccagatgcagctgcaggaggagagcgtgtgggtgggcagccagctgcaggacctgagagagaagtacatggactgcggcggcatgctgatcgagatgcaggaggaggtgaagaccctgagacagcagccccccgtgagcaccggcagcgccacccactacccctacagcgtgcccctggagaccctgcccggcttccaggagaccctggccgaggagctgagaaccagcctgagaagaatgatcagcgaccccgtgtacttcatggagagaaactacgagatgcccagaggcgacaccagcagcctgagatacgacttcagatacagcgaggacagagagcaggtgagaggcttcgaggccgaggagggcctgatgctggccgccgacatcatgagaggcgaggacttcacccccgccgaggagttcgtgccccaggaggagctgggcgccgccaagaaggtgcccgccgaggagggcgtgatggaggaggccgagctggtgagcgaggagaccgagggctgggaggaggtggagctggagctggacgaggccaccagaatgaacgtggtgaccagcgccctggaggccagcggcctgggccccagccacctggacatgaactacgtgctgcagcagctggccaactggcaggacgcccactacagaagacagctgagatggaagatgctgcagaagggcgagtgcccccacggcgccctgcccgccgccagcagaaccagctgcagaagcagctgcagatag

SEQ ID NO: 253081 - DNA, 1860 bp, Artificial Sequence
  derived and/or modified sequence
atgagacccaagagactgggcagatgctgcgccggcagcagactgggccccggcgaccccgccgccctgacctgcgcccccagccccagcgccagccccgcccccgagcccagcgcccagccccaggccagaggcaccggccagagagtgggcagcagagccaccagcggcagccagttcctgagcgaggccagaaccggcgccagacccgccagcgaggccggcgccaaggccggcgccagaagacccagcgccttcagcgccatccagggcgacgtgagaagcatgcccgacaacagcgacgccccctggaccagattcgtgttccagggccccttcggcagcagagccaccggcagaggcaccggcaaggccgccggcatctggaagacccccgccgcctacgtgggcagaagacccggcgtgagcggccccgagagagccgccttcatcagagagctggaggaggccctgtgccccaacctgcccccccccgtgaagaagatcacccaggaggacgtgaaggtgatgctgtacctgctggaggagctgctgccccccgtgtgggagagcgtgacctacggcatggtgctgcagagagagagagacctgaacaccgccgccagaatcggccagagcctggtgaagcagaacagcgtgctgatggaggagaacagcaagctggaggccctgctgggcagcgccaaggaggagatcctgtacctgagacaccaggtgaacctgagagacgagctgctgcagctgtacagcgacagcgacgaggaggacgaggacgaggaggaggaggaggaggagaaggaggccgaggaggagcaggaggaggaggaggccgaggaggacctgcagtgcgcccacccctgcgacgcccccaagctgatcagccaggaggccctgctgcaccagcaccactgcccccagctggaggccctgcaggagaagctgagactgctggaggaggagaaccaccagctgagagaggaggccagccagctggacaccctggaggacgaggagcagatgctgatcctggagtgcgtggagcagttcagcgaggccagccagcagatggccgagctgagcgaggtgctggtgctgagactggagaactacgagagacagcagcaggaggtggccagactgcaggcccaggtgctgaagctgcagcagagatgcagaatgtacggcgccgagaccgagaagctgcagaagcagctggccagcgagaaggagatccagatgcagctgcaggaggaggagaccctgcccggcttccaggagaccctggccgaggagctgagaaccagcctgagaagaatgatcagcgaccccgtgtacttcatggagagaaactacgagatgcccagaggcgacaccagcagcctgagatacgacttcagatacagcgaggacagagagcaggtgagaggcttcgaggccgaggagggcctgatgctggccgccgacatcatgagaggcgaggacttcacccccgccgaggagttcgtgccccaggaggagctgggcgccgccaagaaggtgcccgccgaggagggcgtgatggaggaggccgagctggtgagcgaggagaccgagggctgggaggaggtggagctggagctggacgaggccaccagaatgaacgtggtgaccagcgccctggaggccagcggcctgggccccagccacctggacatgaactacgtgctgcagcagctggccaactggcaggacgcccactacagaagacagctgagatggaagatgctgcagaagggcgagtgcccccacggcgccctgcccgccgccagcagaaccagctgcagaagcagctgcagatag

SEQ ID NO: 253082 - protein, 832 aa, Artificial Sequence
  derived and/or modified sequence
MAMRSGRHPSLLLLLVLLLWLLQVSIIDSVQQETDDLTKQTKEKIYQPLRRSKRRWVITTLELEEEDPGPFPKLIGELFNNMSYNMSLMYLISGPGVDEYPEIGLFSLEDHENGRIYVHRPVDREMTPSFTVYFDVVERSTGKIVDTSLIFNIRISDVNDHAPQFPEKEFNITVQENQSAGQPIFQMLAVDLDEENTPNSQVLYFLISQTPLLKESGFRVDRLSGEIRLSGCLDYETAPQFTLLIRARDCGEPSLSSTTTVHVDVQEGNNHRPAFTQENYKVQIPEGRASQGVLRLLVQDRDSPFTSAWRAKFNILHGNEEGHFDISTDPETNEGILNVIKPLDYETRPAQSLIIVVENEERLVFCERGKLQPPRKAAASATVSVQVTDANDPPAFHPQSFIVNKEEGARPGTLLGTFNAMDPDSQIRYELVHDPANWVSVDKNSGVVITVEPIDRESPHVNNSFYVIIIHAVDDGFPPQTATGTLMLFLSDINDNVPTLRPRSRYMEVCESAVHEPLHIEAEDPDLEPFSDPFTFELDNTWGNAEDTWKLGRNWGQSVELLTLRSLPRGNYLVPLFIGDKQGLSQKQTVHVRICPCASGLTCVELADAEVGLHVGALFPVCAAFVALAVALLFLLRCYFVLEPKRHGCSVSNDEGHQTLVMYNAESKGTSAQTWSDVEGQRPALLICTAAAGPTQGVKDLEEVPPSAASQSAQARCALGSWGYGKPFEPRSVKNIHSTPAYPDATMHRQLLAPVEGRMAETLNQKLHVANVLEDDPGYLPHVYSEEGECGGAPSLSSLASLEQELQPDLLDSLGSKATPFEEIYSESGVPS

SEQ ID NO: 253083 - DNA, 2499 bp, Artificial Sequence
  derived and/or modified sequence
atggccatgagaagcggcagacaccccagcctgctgctgctgctggtgctgctgctgtggctgctgcaggtgagcatcatcgacagcgtgcagcaggagaccgacgacctgaccaagcagaccaaggagaagatctaccagcccctgagaagaagcaagagaagatgggtgatcaccaccctggagctggaggaggaggaccccggccccttccccaagctgatcggcgagctgttcaacaacatgagctacaacatgagcctgatgtacctgatcagcggccccggcgtggacgagtaccccgagatcggcctgttcagcctggaggaccacgagaacggcagaatctacgtgcacagacccgtggacagagagatgacccccagcttcaccgtgtacttcgacgtggtggagagaagcaccggcaagatcgtggacaccagcctgatcttcaacatcagaatcagcgacgtgaacgaccacgccccccagttccccgagaaggagttcaacatcaccgtgcaggagaaccagagcgccggccagcccatcttccagatgctggccgtggacctggacgaggagaacacccccaacagccaggtgctgtacttcctgatcagccagacccccctgctgaaggagagcggcttcagagtggacagactgagcggcgagatcagactgagcggctgcctggactacgagaccgccccccagttcaccctgctgatcagagccagagactgcggcgagcccagcctgagcagcaccaccaccgtgcacgtggacgtgcaggagggcaacaaccacagacccgccttcacccaggagaactacaaggtgcagatccccgagggcagagccagccagggcgtgctgagactgctggtgcaggacagagacagccccttcaccagcgcctggagagccaagttcaacatcctgcacggcaacgaggagggccacttcgacatcagcaccgaccccgagaccaacgagggcatcctgaacgtgatcaagcccctggactacgagaccagacccgcccagagcctgatcatcgtggtggagaacgaggagagactggtgttctgcgagagaggcaagctgcagccccccagaaaggccgccgccagcgccaccgtgagcgtgcaggtgaccgacgccaacgacccccccgccttccacccccagagcttcatcgtgaacaaggaggagggcgccagacccggcaccctgctgggcaccttcaacgccatggaccccgacagccagatcagatacgagctggtgcacgaccccgccaactgggtgagcgtggacaagaacagcggcgtggtgatcaccgtggagcccatcgacagagagagcccccacgtgaacaacagcttctacgtgatcatcatccacgccgtggacgacggcttccccccccagaccgccaccggcaccctgatgctgttcctgagcgacatcaacgacaacgtgcccaccctgagacccagaagcagatacatggaggtgtgcgagagcgccgtgcacgagcccctgcacatcgaggccgaggaccccgacctggagcccttcagcgaccccttcaccttcgagctggacaacacctggggcaacgccgaggacacctggaagctgggcagaaactggggccagagcgtggagctgctgaccctgagaagcctgcccagaggcaactacctggtgcccctgttcatcggcgacaagcagggcctgagccagaagcagaccgtgcacgtgagaatctgcccctgcgccagcggcctgacctgcgtggagctggccgacgccgaggtgggcctgcacgtgggcgccctgttccccgtgtgcgccgccttcgtggccctggccgtggccctgctgttcctgctgagatgctacttcgtgctggagcccaagagacacggctgcagcgtgagcaacgacgagggccaccagaccctggtgatgtacaacgccgagagcaagggcaccagcgcccagacctggagcgacgtggagggccagagacccgccctgctgatctgcaccgccgccgccggccccacccagggcgtgaaggacctggaggaggtgccccccagcgccgccagccagagcgcccaggccagatgcgccctgggcagctggggctacggcaagcccttcgagcccagaagcgtgaagaacatccacagcacccccgcctaccccgacgccaccatgcacagacagctgctggcccccgtggagggcagaatggccgagaccctgaaccagaagctgcacgtggccaacgtgctggaggacgaccccggctacctgccccacgtgtacagcgaggagggcgagtgcggcggcgcccccagcctgagcagcctggccagcctggagcaggagctgcagcccgacctgctggacagcctgggcagcaaggccacccccttcgaggagatctacagcgagagcggcgtgcccagctag

SEQ ID NO: 253084 - DNA, 2499 bp, Artificial Sequence
  derived and/or modified sequence
atggcaatgcggtctggacgccaccctagtctgctccttctcctcgtacttctgctgtggctattgcaggtgtctattatagattcagtgcagcaagagactgatgacctgaccaagcagaccaaagagaaaatctaccaaccgctgcgcaggtcaaagcgccgctgggtcattacgaccctagaactggaagaggaggaccccggcccttttcctaagctaattggtgagctgttcaacaacatgtcatacaatatgtccttgatgtatctaatatccggacccggcgtggacgaataccctgagatcggtctgtttagccttgaagatcatgagaacggaaggatttatgtgcacaggcccgtcgatagagaaatgaccccatcttttacagtgtacttcgatgtcgtggaacgatcaacagggaagattgtggacacctcattgatattcaatatccggatttcggatgtgaacgatcacgctccccagttcccagagaaagaattcaatataactgtccaggagaaccagagcgccggacaacccatctttcagatgctggctgtggatctggacgaagagaacaccccgaactctcaagtgctgtactttctgatatcccagacaccactgctgaaggaatccggatttcgcgtggataggctatcaggcgagataaggctcagcggatgtttagactatgagacagccccacaatttaccctgctgatacgcgcccgggattgtggtgagccttcactctctagtacgaccactgtgcacgtcgatgtgcaagaggggaataatcacagacccgcttttacccaagaaaactacaaggttcagattcctgaaggccgggcctcacagggggtactgcgcctgctcgtacaagaccgtgactccccctttacctcagcctggagggctaaatttaatatcctgcatggcaacgaagagggtcatttcgacatttccaccgatcccgagaccaatgaaggtatccttaatgttatcaagcccctggactacgaaactcgccccgctcagagcctcatcattgtggtagagaatgaagaacgcctggttttctgtgaaagaggaaagctgcagcctccaagaaaggcagcagccagcgccactgtcagcgtccaggtgaccgacgctaacgatccacccgcatttcatccccagtcattcatagtgaacaaagaggagggtgccaggcctggaacactgctcggaactttcaacgccatggatccagattcacagatacgatatgagctcgttcacgatcccgccaactgggtgtctgtggataaaaactccggggtggtgattactgtggagcccattgatagggagtcgccccacgtgaacaacagcttttacgtcattattatccacgctgtggatgacggctttcctccccagacagccaccgggaccttgatgctgtttctctcagacataaatgacaatgtgcctaccctgagacctagatcccgatacatggaggtctgtgaatccgctgtgcatgaaccacttcacatcgaagctgaagacccagacctggagccgttttccgacccgttcacattcgaattagacaacacttggggcaacgctgaggacacatggaaactaggccgaaattggggacagagcgttgagctgcttactttgcgatccctgcccagaggtaattaccttgtaccactgttcataggcgataagcaaggtcttagccagaagcagaccgtacatgtaaggatatgcccctgtgcttcaggcctcacttgcgtagagctggctgatgctgaagtcggtcttcatgtgggggccttgttccccgtctgcgcagcatttgtcgccctcgctgtggccctgctttttctgctgcgctgttattttgtcctggagcctaaaaggcatggctgcagtgtgtcaaatgatgaaggccatcagacgttagtgatgtacaacgccgagagcaaaggcacttccgcgcagacctggtccgatgtggaaggtcagagaccagctcttttgatatgtaccgcagctgcaggcccaacgcagggcgtgaaagatctagaggaggttcctccttccgccgcgtctcagtctgcgcaggccaggtgcgcccttggtagctggggctacggcaagccctttgaacctcgtagcgtaaaaaatattcatagtactccggcatacccagacgccactatgcaccgacagcttttggccccggtggaggggagaatggcggagacgctgaatcaaaagttgcacgttgccaacgtgctggaggatgacccaggctatctcccgcacgtctactctgaagagggtgagtgtggaggtgctccatctttgtcatctctggcatcattagaacaggaattacagccggatcttcttgactcactgggatctaaagctactccttttgaggaaatttattcagaaagtggcgttccttcgtag

SEQ ID NO: 253085 - DNA, 2499 bp, Artificial Sequence
  derived and/or modified sequence
atggccatgaggagcggccgccaccccagcctgctgctgctgctggtgctgctgctgtggctgctgcaggtgtccatcattgattctgtgcagcaggagacagatgacctgaccaagcagaccaaggagaagatctaccagcccctgcggcgcagcaagaggcgctgggtgatcaccaccctggagctggaggaggaggaccccggccccttccccaagctgattggagagctgttcaacaacatgagctacaacatgagcctgatgtacctgatcagcggccctggggtggatgagtacccagaaattggcctcttcagcctggaggaccatgaaaatggccgcatctacgtgcacaggcctgtggaccgggagatgacccccagcttcaccgtgtactttgatgtggtggagaggagcacaggcaagatcgtggacaccagcctcatcttcaacatccgcatcagtgatgtgaatgaccacgccccccagtttcctgagaaggagttcaacatcaccgtgcaggagaaccagagcgctggccagcccatcttccagatgctggccgtggacctggatgaggagaacacccccaacagccaggtgctgtacttcctgatcagccagacccccctgctgaaggagagcggcttccgggtggaccggctgagcggggagatccggctgagcggctgcctggactatgaaacagccccccagttcaccctgctgatccgggcccgggactgtggggagcccagcctgagcagcaccaccaccgtgcacgtggatgtgcaggagggcaacaaccacaggcctgccttcacccaggagaactacaaggtgcagatccctgagggccgggccagccagggcgtgctgcggctgctggtgcaggaccgggacagccccttcaccagcgcctggagggccaagttcaacatcctgcatggaaatgaggagggccactttgacatcagcacagatcctgagaccaatgaaggcatcctgaatgtcatcaagcccctggactatgagaccaggcctgcccagagcctcatcatcgtggtggagaatgaggagcggctggtgttctgtgagcggggcaagctgcagccccccaggaaggccgccgccagcgccaccgtgtctgtgcaggtgacagatgccaatgaccccccagccttccacccccagagcttcatcgtgaacaaggaggagggcgcccggcccggcaccctgctgggcaccttcaatgccatggaccctgacagccagatccgctatgagctggtgcatgaccctgccaactgggtgtctgtggacaagaacagcggcgtggtgatcaccgtggagcccatcgaccgggagagcccccacgtgaacaacagcttctacgtgatcatcatccatgctgtggatgatggcttccccccccagacagccaccggcaccctgatgctgttcctgagtgacatcaatgacaacgtgcccaccctgcggcccaggagccgctacatggaggtgtgtgagagcgctgtgcatgagcccctgcacatcgaggctgaagatcctgacctggagcccttcagtgaccccttcacctttgagctggacaacacctggggcaatgctgaggacacctggaagctgggcaggaactggggccagagcgtggagctgctgaccctgcggagcctgccccggggcaactacctggtgcccctcttcatcggggacaagcagggcctgagccagaagcagacagtgcacgtgcgcatctgcccctgtgccagcggcctgacctgtgtggagctggctgatgctgaggtgggcctgcacgtgggcgccctcttccctgtgtgtgccgcctttgtggccctggccgtggccctgctcttcctgctgcgctgctactttgtgctggagcccaagagacatggctgcagcgtgtccaatgatgagggccaccagaccctggtgatgtacaatgctgagagcaagggcaccagcgcccagacctggagcgatgtggagggccagaggcctgccctgctgatctgcacagctgctgctggccccacccagggcgtgaaggacctggaggaggtgcccccatctgctgccagccagagcgcccaggcccgctgtgccctgggctcctggggctacggcaagccctttgagcccaggtctgtgaagaacatccacagcaccccagcctacccagatgccaccatgcaccggcagctgctggcccctgtggagggccgcatggccgagaccctgaaccagaagctgcacgtggccaacgtgctggaggatgatcctggctacctgccccacgtgtacagcgaggagggagaatgtggcggggcccccagcctgagcagcctggccagcctggagcaggagctgcagcctgacctgctggacagcctgggcagcaaggccaccccatttgaggagatctacagcgagagcggcgtgcccagctag

SEQ ID NO: 253086 - DNA, 2499 bp, Artificial Sequence
  derived and/or modified sequence
atggccatgcggagcggccggcaccccagcctgctgctgctgctggtgttgctcctgtggcttctccaagtttccattatagacagtgtgcagcaggaaactgatgatcttaccaaacagacgaaggaaaaaatatatcagcctctcaggcgcagcaaacgacggtgggtgatcactacgctggagctggaagaagaggatcctggaccattccctaagctgattggtgaactcttcaataatatgtcgtacaacatgtcactcatgtacctgatctccggccccggcgtagacgagtacccggagatcggtctgttttccctggaggaccacgaaaacggaagaatctacgtccaccgaccggttgacagggaaatgacccctagcttcacagtttacttcgatgtggtcgagcgatccacaggaaagattgtagatacctctctgatcttcaatatcaggatcagcgacgtgaatgatcacgcccctcagtttcctgagaaagagtttaacattaccgtgcaggagaaccagtctgcaggccagcctattttccagatgctggctgttgacttggatgaggaaaatacccccaactcacaagttctgtattttctgataagtcagacgcctctactcaaggagagcggtttccgggtcgacagactctccggggaaattcggttatcaggatgtctggattacgagacagccccccagttcacacttctcattagagccagagactgcggtgaaccgtctttaagcagtaccacgactgtgcatgtcgacgtgcaagaaggcaacaatcacagacctgcctttacacaggagaattataaggttcagatccctgagggccgggccagccaaggggtgcttagactgctggtacaggacagagatagccccttcaccagcgcatggcgggctaaattcaatattcttcacgggaatgaagaaggtcactttgatatcagcacagacccagagacgaatgagggaattcttaatgtgatcaagcccctagactatgaaaccagacccgcccagagtcttatcattgtcgttgagaacgaggaacggctcgtcttctgcgagagggggaagctgcaaccacctagaaaggccgccgcatccgcaaccgtgtcagtccaagtaactgacgcaaacgacccacccgcattccatccgcagagtttcatcgtgaataaggaggagggagcccgacctggaactctgctgggcacattcaatgcgatggatcccgactctcagatccggtacgagctggtacacgatccagcaaactgggtgtccgtcgacaagaattccggtgtcgttatcactgttgagccgatcgaccgggaatctccacatgttaacaactccttctatgtgatcataatccacgccgttgacgacggtttcccacctcagactgcaaccggtacccttatgctgtttctctctgacataaatgataatgtgcctactttaagacctaggtcaagatacatggaggtgtgcgagagcgctgtgcatgagcccctgcatatcgaggctgaagatcctgatctcgagccattctctgatccatttactttcgagctggataatacatggggaaatgctgaggatacatggaaactgggaaggaactggggtcaatcagttgagctcttgaccctgagatccctgccccgcggtaactatttggtcccacttttcattggggataagcaggggttgagccagaagcagaccgtccacgtgagaatttgcccatgcgcgtccggcctcacttgcgtggagctagccgatgctgaagttggcctgcatgtcggcgccttatttccagtatgcgcagcttttgtggcactggctgtggctctactgttcctcttgaggtgctacttcgtactcgaaccgaaacggcacggctgcagcgtcagcaatgacgaagggcatcagacgctggtgatgtataacgctgaaagcaagggcacaagcgcccagacctggagcgatgtggaaggacagagacccgccttactcatatgcacagccgcagccggccctacacagggtgtgaaagacctcgaagaggttccgccaagcgctgcttcgcaatcagctcaggcacgctgtgcattgggcagttggggatatggcaagcctttcgaaccccgtagcgtgaagaacatacactcaaccccggcctatccagatgccacaatgcatcgccagctcttagctccagtcgagggtcgaatggctgagacgctcaaccagaaactccacgtcgccaacgtcttggaagatgaccccggctacctgccccatgtgtactcagaagagggggagtgcgggggagccccctcactgagttccctcgcctcgcttgagcaggagttgcagccggacctcttggattctcttgggtcgaaggctacgccgttcgaagaaatctatagtgagtctggcgtgccttcctag

SEQ ID NO: 253087 - DNA, 2499 bp, Artificial Sequence
  derived and/or modified sequence
atggcaatgcgttcgggcaggcacccctcccttctcttactcctagtgctgctcttatggctgttacaagtctctatcatcgacagcgtgcagcaggagaccgacgacctgaccaagcagaccaaagagaagatttaccagcctctgcgcagaagtaaaaggcgatgggtcattactacgctggagttagaagaggaagacccaggaccctttcccaagctgattggcgaattgttcaataacatgtcatataatatgagccttatgtacctgatctcagggcctggagtggatgagtaccctgagattggcctgttttccctcgaggatcatgagaatggcaggatctacgtgcacaggccggtcgaccgtgagatgactccaagttttaccgtgtacttcgatgtggtggagagatccacaggcaagatcgtcgatacatctctgatttttaatattagaatctctgacgtgaacgatcacgctccacagtttcctgaaaaagagttcaatatcacagtccaggagaatcaaagcgctgggcagcctatttttcaaatgcttgcagtggatctggacgaagaaaacacacccaattctcaggtcctttactttctgatttcccagacaccgctgctcaaagagagtggttttcgggttgataggctgtctggggagattcggctttcaggctgccttgattatgaaacggcgcctcagttcactctcttgattcgggctcgtgactgtggcgagcccagcctgtcttccactacgaccgtgcacgttgatgtacaggagggcaataaccaccgccctgccttcacccaagaaaactataaggttcagatccctgaagggagagcctctcagggggtgctgcgcctgctggtgcaggaccgagattcaccctttacctctgcatggagagccaaatttaacatcctccacggtaacgaagagggtcactttgacataagcaccgatccagagaccaatgaaggcatcctcaatgttatcaagccgctcgattacgagacccgcccagctcagtcgctgatcatcgtggtagagaatgaggagcggttagtgttctgcgagcggggtaaactgcagcccccacgtaaggctgccgcatcggccaccgttagcgtgcaggtgacagatgccaacgaccctccggcatttcacccacagtcctttattgtaaacaaagaagagggtgcaagacccggaaccctgctcggaacctttaacgccatggaccccgattctcagatccgatacgagcttgtgcatgacccagcgaactgggtatccgtggataagaattccggcgtggtaattaccgtagaacctatcgaccgggaaagcccccacgtgaacaactcattttacgtaatcatcatccatgctgtggacgacggttttccccctcagactgcaacagggaccctgatgctgtttctgtccgatattaatgataatgtgccgacactccggccaagaagtcgttacatggaagtctgtgagtcagccgtgcatgaacccctgcatatcgaggctgaagacccggacctggaacctttcagcgatccattcacctttgaattagataacacctgggggaacgccgaggatacctggaagctgggccgtaactggggtcagagcgtggaactgcttactctcagatccctccctcggggaaactatctggtccctctcttcatcggcgacaaacaaggcctgagccagaagcagacagtgcatgtcaggatatgcccatgtgcgtccggtttgacctgcgtggaattagccgacgccgaagttgggctgcacgtcggagctctgttccccgtgtgcgcagcctttgtggccctcgcggttgctctcctattcctattgaggtgctacttcgtcctggagcccaaacgccatggttgttccgtgtccaatgatgagggacaccagacactggttatgtataacgccgagagtaaagggacatccgcccagacatggtctgacgtggaaggccagcggcctgcactgctaatctgcacagccgcagccggacctacccagggtgtgaaggacctcgaagaggtgccaccttcggctgcctctcagtccgcccaggccagatgcgcgttggggagttggggctacggcaaacccttcgagcccagatctgtcaagaacattcatagtactccggcttaccctgatgcgacgatgcacagacagctcctggcacctgtagaaggccgaatggctgaaaccctcaaccagaaactgcatgttgctaacgtcctggaggatgaccctggttatctcccgcatgtctattccgaggagggtgagtgcggtggagctccttccctctcttcactcgcttccctcgagcaggagctccagcccgatctcctcgattcactcggcagcaaggccacaccatttgaggagatttactctgaatcaggcgtgccctcatag

SEQ ID NO: 253088 - DNA, 3182 bp, Artificial Sequence
  derived and/or modified sequence
agtcttttgtgtacgtgcaggaccatggtggctttagtttctaccccacccttcctaggaactctacttgtggcaaacgtatgttcaagcttacaagtcagcccaccccactctgataaatgcaagaaaagctgaaaagggaggagcaagatgggatgaaagcatctgggccaaagtgacctgaaaacctttagagaagaagctgctggctgagaaggaggtgtgtggctccggtgagaccaccagcttggaggactggtcatcagctgcacgttctgggtctgtcttgggtattcccatatggccatgagatccgggaggcacccctcgctgctgctgcttctagtgctgctgctgtggctgctgcaggtcagtatcattgacagtgttcaacaggaaacagatgatcttactaagcaaacaaaggaaaagatctaccagcctctacggcgatccaagagaagatgggttatcaccaccttggagctggaggaggaagacccgggaccctttcccaaactcattggtgagctgttcaataatatgtcttataacatgtcactaatgtatctaatcagtggacctggtgtggatgaatatccagagattggtttgttttctctagaagatcatgagaacggaaggatatatgttcaccgccctgtcgatcgagaaatgacaccatctttcacggtttattttgatgttgtggagcgctcaacaggaaaaattgtggatacatccttgattttcaacattaggatcagtgatgtgaatgatcatgcaccccagtttccagagaaggaatttaacatcactgtgcaagaaaaccaatctgcagggcaacctatttttcagatgttagcagtcgatttggatgaagaaaacactccaaattctcaagtcctttacttcctcatttctcaaacaccattactgaaagaaagtggtttccgggttgatcgccttagtggagaaatacgactctctggctgcttagattatgagaccgctcctcagtttacactgctaatcagagccagggactgtggagaaccgtcactgtcatccacgaccaccgttcacgtggatgtgcaagaaggcaacaaccacaggcctgcatttacccaggagaactataaggttcagattcctgaaggccgagccagccagggcgtgttgcgtctcctggttcaagatcgagattctccatttacatcagcttggagagcaaaattcaacatattgcatggcaatgaagaggggcattttgacatttcgactgaccctgagaccaacgaagggatattaaatgttatcaagcctttggattatgagactcgcccagcgcaaagcctcatcattgtcgtggagaatgaggagaggctcgtcttctgtgagagaggaaagcttcagccgccaaggaaggcagcagccagcgccactgtgagtgtgcaggtgacagacgccaacgacccaccagcctttcacccccagagcttcattgtcaataaagaggagggcgccaggcctgggaccctgttgggaacttttaatgccatggatccagacagccagataagatatgaactggttcatgacccagcaaattgggtcagcgtcgacaaaaactccggagtggtcatcaccgtggagccaattgaccgagaatcccctcatgtaaataacagtttttatgtaatcatcattcacgctgttgatgatggcttcccaccgcagactgctacagggaccctaatgctcttcctgtctgacatcaatgacaacgtcccgactctccggccacgttcccgctacatggaggtctgtgagtctgctgtgcatgagcccctccacatcgaggcagaggatccggacctggagccgttctctgacccatttacatttgaattggacaatacctggggaaatgcggaggacacatggaagttggggagaaattggggtcaatcagttgaacttttaaccttgagaagcctgccacgtggtaattacttggtgccactcttcattggagacaaacagggactttcccagaagcaaactgtccatgtaaggatctgcccctgtgccagtgggctcacatgtgtggagcttgcagatgcagaagtggggcttcatgtgggggccctgttccctgtctgtgcagcatttgtggctctggcagtggctctgctttttctgttgcgatgctattttgtgcttgaacctaagaggcatggatgctctgtatccaatgatgaaggccaccaaacactggtcatgtataatgcggagagcaaaggcacttcagcccagacatggtcagatgttgaaggccagaggccggctctgctcatctgcacagctgcagcaggacccacgcagggagttaaggatctcgaggaagtgcctccatctgcagcgagtcagtcagcccaagcacgctgtgctctggggagctggggttatggcaagccctttgagccaagaagtgtgaaaaacatacactctactcctgcttacccagatgccacaatgcacagacaactcctggctccggtggaaggaaggatggcagagacattgaatcagaaactccatgttgccaatgtgctggaagatgaccccggctacctacctcacgtctacagcgaggaaggggagtgtggaggggccccatccctcagctctctggccagcttggaacaggagttgcaacctgatttgctggactctttgggttcaaaagcgactccgtttgaggaaatatattcagagtcaggtgttccttcctaaaaaaaaaagtctattttggagaattgaaataattcatggaagggaatcactattcagggatttttcccctttgctcttcttttccctccttaaaagaaaaattaccttctagtcctaggatgaggacacactattagtttgaattaaatgctttgatattctcagatcagccatcttgaaccaaagcaaaaccacaagttacactttcttaaaatttgatttgtcatattttctagagaaacttgaatttaattgtgttattcttagcttccactggcagcctagctttgagggtaaatgaaaatataacccatagattacccagccacttgggaacagcaggtaatactgaagaaaaataaaaatagattttgaaaacgtta

SEQ ID NO: 253089 - protein, 546 aa, Artificial Sequence
  derived and/or modified sequence
MGAYLSQPNTVKCSGDGVGAPRLPLPYGFSAMQGWRVSMEDAHNCIPELDSETAMFSVYDGHGGEEVALYCAKYLPDIIKDQKAYKEGKLQKALEDAFLAIDAKLTTEEVIKELAQIAGRPTEDEDEKEKVADEDDVDNEEAALLHEEATMTIEELLTRYGQNCHKGPPHSKSGGGTGEEPGSQGLNGEAGPEDSTRETPSQENGPTAKAYTGFSSNSERGTEAGQVGEPGIPTGEAGPSCSSASDKLPRVAKSKFFEDSEDESDEAEEEEEDSEECSEEEDGYSSEEAENEEDEDDTEEAEEDDEEEEEEMMVPGMEGKEEPGSDSGTTAVVALIRGKQLIVANAGDSRCVVSEAGKALDMSYDHKPEDEVELARIKNAGGKVTMDGRVNGGLNLSRAIGDHFYKRNKNLPPEEQMISALPDIKVLTLTDDHEFMVIACDGIWNVMSSQEVVDFIQSKISQRDENGELRLLSSIVEELLDQCLAPDTSGDGTGCDNMTCIIICFKPRNTAELQPESGKRKLEEVLSTEGAEENGNSDKKKKAKRD

SEQ ID NO: 253090 - protein, 347 aa, Artificial Sequence
  derived and/or modified sequence
FSLFPAVDNEEAALLHEEATMTIEELLTRYGQNCHKGPPHSKSGASDKLPRVAKSKFFEDSEDESDEAEEEEEDSEECSEEEDGYSSEEAENEEDEDDTEEAEEDDEEEEEEMMVPGMEGKEEPGSDSGTTAVVALIRGKQLIVANAGDSRCVVSEAGKALDMSYDHKPEDEVELARIKNAGGKVTMDGRVNGGLNLSRAIGDHFYKRNKNLPPEEQMISALPDIKVLTLTDDHEFMVIACDGIWNVMSSQEVVDFIQSKISQRDENGELRLLSSIVEELLDQCLAPDTSGDGTGCDNMTCIIICFKPRNTAELQPESGKRKLEEVLSTEGAEENGNSDKKKKAKRD

SEQ ID NO: 253091 - protein, 529 aa, Artificial Sequence
  derived and/or modified sequence
MGAYLSQPNTVKCSGDGVGVSMEDAHNCIPELDSETAMFSVYDGHGGEEVALYCAKYLPDIIKDQKAYKEGKLQKALEDAFLAIDAKLTTEEVIKELAQIAGRPTEDEDEKEKVADEDDVDNEEAALLHEEATMTIEELLTRYGQNCHKGPPHSKSGGGTGEEPGSQGLNGEAGPEDSTRETPSQENGPTAKAYTGFSSNSERGTEAGQVGEPGIPTGEAGPSCSSASDKLPRVAKSKFFEDSEDESDEAEEEEEDSEECSEEEDGYSSEEAENEEDEDDTEEAEEDDEEEEEEMMVPGMEGKEEPGSDSGTTAVVALIRGKQLIVANAGDSRCVVSEAGKALDMSYDHKPEDEVELARIKNAGGKVTMDGRVNGGLNLSRAIGDHFYKRNKNLPPEEQMISALPDIKVLTLTDDHEFMVIACDGIWNVMSSQEVVDFIQSKISQRDENGELRLLSSIVEELLDQCLAPDTSGDGTGCDNMTCIIICFKPRNTAELQPESGKRKLEEVLSTEGAEENGNSDKKKKAKRD

SEQ ID NO: 253092 - DNA, 1641 bp, Artificial Sequence
  derived and/or modified sequence
atgggcgcctacctgagccagcccaacaccgtgaagtgcagcggcgacggcgtgggcgcccccagactgcccctgccctacggcttcagcgccatgcagggctggagagtgagcatggaggacgcccacaactgcatccccgagctggacagcgagaccgccatgttcagcgtgtacgacggccacggcggcgaggaggtggccctgtactgcgccaagtacctgcccgacatcatcaaggaccagaaggcctacaaggagggcaagctgcagaaggccctggaggacgccttcctggccatcgacgccaagctgaccaccgaggaggtgatcaaggagctggcccagatcgccggcagacccaccgaggacgaggacgagaaggagaaggtggccgacgaggacgacgtggacaacgaggaggccgccctgctgcacgaggaggccaccatgaccatcgaggagctgctgaccagatacggccagaactgccacaagggccccccccacagcaagagcggcggcggcaccggcgaggagcccggcagccagggcctgaacggcgaggccggccccgaggacagcaccagagagacccccagccaggagaacggccccaccgccaaggcctacaccggcttcagcagcaacagcgagagaggcaccgaggccggccaggtgggcgagcccggcatccccaccggcgaggccggccccagctgcagcagcgccagcgacaagctgcccagagtggccaagagcaagttcttcgaggacagcgaggacgagagcgacgaggccgaggaggaggaggaggacagcgaggagtgcagcgaggaggaggacggctacagcagcgaggaggccgagaacgaggaggacgaggacgacaccgaggaggccgaggaggacgacgaggaggaggaggaggagatgatggtgcccggcatggagggcaaggaggagcccggcagcgacagcggcaccaccgccgtggtggccctgatcagaggcaagcagctgatcgtggccaacgccggcgacagcagatgcgtggtgagcgaggccggcaaggccctggacatgagctacgaccacaagcccgaggacgaggtggagctggccagaatcaagaacgccggcggcaaggtgaccatggacggcagagtgaacggcggcctgaacctgagcagagccatcggcgaccacttctacaagagaaacaagaacctgccccccgaggagcagatgatcagcgccctgcccgacatcaaggtgctgaccctgaccgacgaccacgagttcatggtgatcgcctgcgacggcatctggaacgtgatgagcagccaggaggtggtggacttcatccagagcaagatcagccagagagacgagaacggcgagctgagactgctgagcagcatcgtggaggagctgctggaccagtgcctggcccccgacaccagcggcgacggcaccggctgcgacaacatgacctgcatcatcatctgcttcaagcccagaaacaccgccgagctgcagcccgagagcggcaagagaaagctggaggaggtgctgagcaccgagggcgccgaggagaacggcaacagcgacaagaagaagaaggccaagagagactag

SEQ ID NO: 253093 - DNA, 1044 bp, Artificial Sequence
  derived and/or modified sequence
ttcagcctgttccccgccgtggacaacgaggaggccgccctgctgcacgaggaggccaccatgaccatcgaggagctgctgaccagatacggccagaactgccacaagggccccccccacagcaagagcggcgccagcgacaagctgcccagagtggccaagagcaagttcttcgaggacagcgaggacgagagcgacgaggccgaggaggaggaggaggacagcgaggagtgcagcgaggaggaggacggctacagcagcgaggaggccgagaacgaggaggacgaggacgacaccgaggaggccgaggaggacgacgaggaggaggaggaggagatgatggtgcccggcatggagggcaaggaggagcccggcagcgacagcggcaccaccgccgtggtggccctgatcagaggcaagcagctgatcgtggccaacgccggcgacagcagatgcgtggtgagcgaggccggcaaggccctggacatgagctacgaccacaagcccgaggacgaggtggagctggccagaatcaagaacgccggcggcaaggtgaccatggacggcagagtgaacggcggcctgaacctgagcagagccatcggcgaccacttctacaagagaaacaagaacctgccccccgaggagcagatgatcagcgccctgcccgacatcaaggtgctgaccctgaccgacgaccacgagttcatggtgatcgcctgcgacggcatctggaacgtgatgagcagccaggaggtggtggacttcatccagagcaagatcagccagagagacgagaacggcgagctgagactgctgagcagcatcgtggaggagctgctggaccagtgcctggcccccgacaccagcggcgacggcaccggctgcgacaacatgacctgcatcatcatctgcttcaagcccagaaacaccgccgagctgcagcccgagagcggcaagagaaagctggaggaggtgctgagcaccgagggcgccgaggagaacggcaacagcgacaagaagaagaaggccaagagagactag

SEQ ID NO: 253094 - DNA, 2311 bp, Artificial Sequence
  derived and/or modified sequence
ggcgagttgctaaggaaatgactgcccgcagcgcctggccccgccgcgcaggccgggcggggtctggagcggcgccgtttccgcttccgctccctcacagctcccgtcccgttaccgcctcctggccggcctcgcgcctttcaccggcaccttgcgtcggtcgcgccgcggggcctgctcctgccgcgcgcacccccggggcttcggctccggcacgggtcgcgcccagctttcctgcacctgaggccgccggccagccgccgccatgggtgcctacctctcccagcccaacacggtgaagtgctccggggacggggtcggcgccccgcgcctgccgctgccctacggcttctccgccatgcaaggctggcgcgtctccatggaggatgctcacaactgtattcctgagctggacagtgagacagccatgttttctgtctacgatggacatggaggggaggaagttgccttgtactgtgccaaatatcttcctgatatcatcaaagatcagaaggcctacaaggaaggcaagctacagaaggctttagaagatgccttcttggctattgacgccaaattgaccactgaagaagtcattaaagagctggcacagattgcagggcgacccactgaggatgaagatgaaaaagaaaaagtagctgatgaagatgatgtggacaatgaggaggctgcactgctgcatgaagaggctaccatgactattgaagagctgctgacacgctacgggcagaactgtcacaagggccctccccacagcaaatctggaggtgggacaggcgaggaaccagggtcccagggcctcaatggggaggcaggacctgaggactcaactagggaaactccttcacaagaaaatggccccacagccaaggcctacacaggcttttcctccaactcggaacgtgggactgaggcaggccaagttggtgagcctggcattcccactggtgaggctgggccttcctgctcttcagcctctgacaagctgcctcgagttgctaagtccaagttctttgaggacagtgaggatgagtcagatgaggcggaggaagaagaggaagacagtgaggaatgcagcgaggaagaggatggctacagcagtgaggaggcagagaatgaggaagatgaggatgacaccgaggaggctgaagaggacgatgaagaagaagaagaagagatgatggtgccagggatggaaggcaaagaggagcctggctctgacagtggtacaacagcggtggtggccctgatacgagggaagcagttgattgtagccaacgcaggagactctcgctgtgtggtatctgaggctggcaaagctttagacatgtcctatgatcacaaaccagaggatgaagtagaactagcacgcatcaagaatgctggtggcaaggtcaccatggatgggcgagtcaacgggggcctcaacctctccagagccattggggaccacttctataagagaaacaagaacctgccacctgaggaacagatgatttcagcccttcctgacatcaaggtgctgactctcactgacgaccatgaattcatggtcattgcctgtgatggcatctggaatgtgatgagcagccaggaagttgtagatttcattcaatcaaagatcagccagcgtgatgaaaatggggagcttcggttattgtcatccattgtggaagagctgctggatcagtgcctggcaccagacacttctggggatggtacagggtgtgacaacatgacctgcatcatcatttgcttcaagccccgaaacacagcagagctccagccagagagtggcaagcgaaaactagaggaggtgctctctactgagggggctgaagaaaatggcaacagcgacaagaagaagaaggccaagcgagactagcagtcatccagacccctgcccacctagactgttttctgagccctccggacctgagactgagttttgtctttttcctttagccttagcagtgggtatgaggtgtgcagggggagctgggtggcttcactccgcccattccaaagagggctctccctccacactgcagccgggagcctctgctgtccttcccagccgcctctgctcctcgggctcatcaccggttctgtgcctgtgctctgttgtgttggagggaaggactggcggttctggtttttactctgtgaactttatttaaggacattcttttttattggcggctccatggccctcggccgcttgcacccgctctctgttgtacactttcaatcaacactttttcagactaaaggccaaaacctaatcgta

SEQ ID NO: 253095 - DNA, 2146 bp, Artificial Sequence
  derived and/or modified sequence
gtcccgttaccgcctcctgctcctgccgcgcgcacccccggggcttcggctccggcacgggtcgcgcccagctttcctgcacctgaggccgccggccagccgccgccatgggtgcctacctctcccagcccaacacggtgaagtgctccggggacggggtcggcgccccgcgcctgccgctgccctacggcttctccgccatgcaaggctggcgcgtctccatggaggatgctcacaactgtattcctgagctggacagtgagacagccatgttttctgtctacgatggacatggaggggaggaagttgccttgtactgtgccaaatatcttcctgatatcatcaaagatcagaaggcctacaaggaaggcaagctacagaaggctttagaagatgccttcttggctattgacgccaaattgaccactgaagaagtcattaaagagctggcacagattgcagggcgacccactgaggatgaagatgaaaaagaaaaagtagctgatgaagatgatgtggacaatgaggaggctgcactgctgcatgaagaggctaccatgactattgaagagctgctgacacgctacgggcagaactgtcacaagggccctccccacagcaaatctggaggtgggacaggcgaggaaccagggtcccagggcctcaatggggaggcaggacctgaggactcaactagggaaactccttcacaagaaaatggccccacagccaaggcctacacaggcttttcctccaactcggaacgtgggactgaggcaggccaagttggtgagcctggcattcccactggtgaggctgggccttcctgctcttcagcctctgacaagctgcctcgagttgctaagtccaagttctttgaggacagtgaggatgagtcagatgaggcggaggaagaagaggaagacagtgaggaatgcagcgaggaagaggatggctacagcagtgaggaggcagagaatgaggaagatgaggatgacaccgaggaggctgaagaggacgatgaagaagaagaagaagagatgatggtgccagggatggaaggcaaagaggagcctggctctgacagtggtacaacagcggtggtggccctgatacgagggaagcagttgattgtagccaacgcaggagactctcgctgtgtggtatctgaggctggcaaagctttagacatgtcctatgatcacaaaccagaggatgaagtagaactagcacgcatcaagaatgctggtggcaaggtcaccatggatgggcgagtcaacgggggcctcaacctctccagagccattggggaccacttctataagagaaacaagaacctgccacctgaggaacagatgatttcagcccttcctgacatcaaggtgctgactctcactgacgaccatgaattcatggtcattgcctgtgatggcatctggaatgtgatgagcagccaggaagttgtagatttcattcaatcaaagatcagccagcgtgatgaaaatggggagcttcggttattgtcatccattgtggaagagctgctggatcagtgcctggcaccagacacttctggggatggtacagggtgtgacaacatgacctgcatcatcatttgcttcaagccccgaaacacagcagagctccagccagagagtggcaagcgaaaactagaggaggtgctctctactgagggggctgaagaaaatggcaacagcgacaagaagaagaaggccaagcgagactagcagtcatccagacccctgcccacctagactgttttctgagccctccggacctgagactgagttttgtctttttcctttagccttagcagtgggtatgaggtgtgcagggggagctgggtggcttcactccgcccattccaaagagggctctccctccacactgcagccgggagcctctgctgtccttcccagccgcctctgctcctcgggctcatcaccggttctgtgcctgtgctctgttgtgttggagggaaggactggcggttctggtttttactctgtgaactttatttaaggacattcttttttattggcggctccatggccctcggccgcttgcacccgctctctgttgtacactttcaatcaacactttttcagactaaaggccaaaacct

SEQ ID NO: 253096 - DNA, 1590 bp, Artificial Sequence
  derived and/or modified sequence
atgggcgcctacctgagccagcccaacaccgtgaagtgcagcggcgacggcgtgggcgtgagcatggaggacgcccacaactgcatccccgagctggacagcgagaccgccatgttcagcgtgtacgacggccacggcggcgaggaggtggccctgtactgcgccaagtacctgcccgacatcatcaaggaccagaaggcctacaaggagggcaagctgcagaaggccctggaggacgccttcctggccatcgacgccaagctgaccaccgaggaggtgatcaaggagctggcccagatcgccggcagacccaccgaggacgaggacgagaaggagaaggtggccgacgaggacgacgtggacaacgaggaggccgccctgctgcacgaggaggccaccatgaccatcgaggagctgctgaccagatacggccagaactgccacaagggccccccccacagcaagagcggcggcggcaccggcgaggagcccggcagccagggcctgaacggcgaggccggccccgaggacagcaccagagagacccccagccaggagaacggccccaccgccaaggcctacaccggcttcagcagcaacagcgagagaggcaccgaggccggccaggtgggcgagcccggcatccccaccggcgaggccggccccagctgcagcagcgccagcgacaagctgcccagagtggccaagagcaagttcttcgaggacagcgaggacgagagcgacgaggccgaggaggaggaggaggacagcgaggagtgcagcgaggaggaggacggctacagcagcgaggaggccgagaacgaggaggacgaggacgacaccgaggaggccgaggaggacgacgaggaggaggaggaggagatgatggtgcccggcatggagggcaaggaggagcccggcagcgacagcggcaccaccgccgtggtggccctgatcagaggcaagcagctgatcgtggccaacgccggcgacagcagatgcgtggtgagcgaggccggcaaggccctggacatgagctacgaccacaagcccgaggacgaggtggagctggccagaatcaagaacgccggcggcaaggtgaccatggacggcagagtgaacggcggcctgaacctgagcagagccatcggcgaccacttctacaagagaaacaagaacctgccccccgaggagcagatgatcagcgccctgcccgacatcaaggtgctgaccctgaccgacgaccacgagttcatggtgatcgcctgcgacggcatctggaacgtgatgagcagccaggaggtggtggacttcatccagagcaagatcagccagagagacgagaacggcgagctgagactgctgagcagcatcgtggaggagctgctggaccagtgcctggcccccgacaccagcggcgacggcaccggctgcgacaacatgacctgcatcatcatctgcttcaagcccagaaacaccgccgagctgcagcccgagagcggcaagagaaagctggaggaggtgctgagcaccgagggcgccgaggagaacggcaacagcgacaagaagaagaaggccaagagagactag

SEQ ID NO: 253097 - DNA, 1641 bp, Artificial Sequence
  derived and/or modified sequence
atgggcgcctatttatcacaacctaatactgtgaagtgtagcggggacggcgttggggcgccccgcctccccctcccctacggatttagcgcaatgcagggctggagagtgagtatggaggatgcacacaactgcatacctgagctggatagtgagaccgctatgttttctgtttacgacgggcatggaggtgaagaagttgctctctattgtgcaaagtacctccccgatattatcaaggaccagaaggcttataaagaaggaaagctgcagaaggcactcgaagatgcattcttggccatcgatgcaaagttgacaacggaggaagttattaaggagctagcacagattgccggccggcccactgaggacgaggatgaaaaagaaaaggtggccgatgaagacgatgtggataatgaagaagccgctctgcttcatgaggaggccacaatgacaatcgaagagctactcaccaggtatggccagaactgtcataagggaccaccgcactccaagtctgggggcgggacaggggaggagcccggctcccagggtctgaatggcgaggcaggtcctgaggatagcaccagggagaccccaagtcaggagaacgggcctacagccaaggcctataccgggttttctagcaattcagaaaggggtactgaggctgggcaagtaggtgaacctggaattcctactggggaggccggtccaagctgctcgtcggcctcagacaaactccccagggtagcaaaatctaaattttttgaggacagcgaggacgagtcagacgaggccgaggaggaggaggaggattccgaggaatgcagcgaggaagaggacggatacagttctgaggaagcagagaatgaggaggatgaagatgacactgaagaggctgaggaagatgacgaagaggaagaggaagaaatgatggtgcccggcatggagggcaaagaggaacccgggagtgattctgggacaaccgctgtggtagccctaattagaggtaagcaactgattgttgccaacgctggcgactccagatgcgtagtctcagaggccgggaaagctttggacatgtcttacgaccataaaccagaggatgaagtcgagctggctcgcatcaaaaacgccggaggcaaggtgaccatggacgggagagtgaacggcggcctcaatctctcccgcgctataggggaccatttttataaacgaaataagaatctgccacccgaggaacagatgatcagcgcacttcctgatataaaagtcttgacgctgactgatgaccatgagttcatggtgatcgcctgcgatgggatttggaacgtcatgagctcacaggaggtcgtggacttcatccaaagtaagatttcccagagggatgaaaatggggaactccgcctgcttagttctattgtcgaagaactgctggaccagtgcttggccccagacacttcaggtgacggaaccgggtgtgacaatatgacgtgcataattatctgtttcaagccgaggaacaccgctgagctgcagccagagagcggcaaacgcaaactggaggaagtgctcagcaccgagggggccgaagaaaacggcaattctgataaaaagaaaaaagcgaagagagactag

SEQ ID NO: 253098 - DNA, 1641 bp, Artificial Sequence
  derived and/or modified sequence
atgggggcttacctatcccagcccaacacagtgaaatgttcaggtgatggcgtgggagcacccaggctacccctgccttacggcttttcggccatgcaaggctggagggtttccatggaggacgctcacaattgtatccccgagctcgacagtgagactgccatgttcagtgtgtatgatggtcatggcggcgaggaggtcgcgctctactgcgctaagtacctgccagatatcattaaagatcaaaaggcctataaggaggggaagctgcagaaagctctcgaggatgcatttttggcaattgacgcaaaacttaccacggaagaagtgatcaaggagctggcacaaatcgctggacggcctacggaggacgaggacgagaaggaaaaggtggccgacgaagacgacgttgacaatgaagaagctgctttattacatgaagaggccactatgaccatcgaagaactcctcactcggtacggccaaaactgccacaagggaccccctcacagcaagagcggcgggggcaccggagaagaacctggatcgcaggggctgaacggcgaagccggccccgaggactcaaccagagagacaccctcgcaggagaacgggccaactgccaaggcgtacacggggttctcaagtaactcagaacggggtacagaggcaggtcaagtgggggaacccggtattcccactggcgaagccgggccatcctgctccagcgcctccgacaaactaccccgggtagcaaagtctaaattctttgaagatagcgaggatgagagcgatgaggcagaggaggaagaagaggatagcgaggaatgttcagaagaagaagatggctacagctcagaggaggccgaaaacgaagaggatgaggatgatacagaagaagcggaagaggatgacgaagaggaggaggaagaaatgatggtccccggtatggagggcaaagaagagcccggctccgactcggggactactgcagtggtagctctcattaggggcaaacagcttattgtggccaatgccggcgattcccgatgtgttgtttctgaggcaggtaaagctcttgatatgagctatgatcacaaaccagaggacgaggttgagttagcacggattaagaatgctggcggcaaagtcaccatggatggcagagtcaatggaggacttaacctgtcaagagctataggggatcacttttataagagaaacaagaatcttcctccggaggaacagatgatttcagcactccctgacattaaggtcttgaccctcaccgacgatcacgagttcatggtaattgcgtgcgacggcatctggaacgtgatgagctctcaggaggtggtcgactttattcaaagtaagataagtcagcgcgacgagaatggagagcttagacttttaagttcaatcgtggaggagctcctggaccagtgcctcgcccccgacacatccggggatggcactggctgtgacaacatgacctgtataatcatctgcttcaaacccaggaacacagctgaactgcagccggagagtggaaaacggaagcttgaagaggtcctgtccacagagggcgcagaggagaatggtaactctgataagaagaagaaggccaaacgtgattag

SEQ ID NO: 253099 - DNA, 1044 bp, Artificial Sequence
  derived and/or modified sequence
ttttcgctcttccctgcagtcgacaacgaggaagccgcccttttgcatgaagaggctaccatgaccatagaggaattactgacaagatacggtcaaaattgccacaaaggcccaccccatagcaagtccggcgcctctgataagctgccgcgcgtcgctaagtctaagttctttgaagactcagaggatgaaagcgacgaggccgaagaggaggaggaggactctgaggaatgctctgaagaggaggacggctatagtagcgaggaggcagaaaatgaggaagatgaggacgacaccgaggaagcagaagaggatgacgaagaggaggaggaggagatgatggtaccaggtatggagggcaaagaggaaccaggatctgattccggaactaccgcagttgtggcccttatcagaggcaaacagctgatagtggcaaacgctggggacagccgttgcgtggttagcgaggctgggaaggctctcgatatgtcgtacgaccacaaacctgaggacgaggtagagcttgcccggattaaaaatgccggcggcaaagtcaccatggacggcagggtgaacggtggcctcaatctcagcagggcaatcggggaccacttctacaaacgcaataaaaatctgccacccgaagaacagatgattagtgccctcccagatatcaaggttctcactcttacggacgatcatgaattcatggtgattgcgtgtgacggcatctggaacgttatgtcttcccaggaagtcgtagacttcatccagagcaaaatctcccagagggatgagaatggcgaacttaggctgctgagtagcatagttgaagagctcctggaccagtgtctggctccggatacctctggggatggaactggttgcgacaatatgacttgcattatcatctgcttcaaacctcggaacaccgccgagcttcagcccgagtcgggaaaaaggaaattagaagaggttctgtccaccgaaggcgccgaggagaacggaaatagtgacaagaaaaaaaaggctaaacgagactag

SEQ ID NO: 253100 - DNA, 1590 bp, Artificial Sequence
  derived and/or modified sequence
atgggcgcctacttgtcccagcctaacactgtgaaatgttctggcgatggcgtgggcgttagcatggaagatgctcacaactgcatccccgagctggactctgagacagcgatgttctccgtgtacgacggccacggtggagaagaagtggcactctactgcgctaaatatctcccagacatcattaaagaccaaaaggcctacaaggagggtaagcttcagaaagctttggaggatgccttccttgcaattgacgccaaactgaccaccgaagaagttatcaaagagcttgcccagatcgcaggtagacctaccgaggacgaggacgagaaggagaaggttgcagacgaggatgatgtcgacaatgaagaggcagccctgctccacgaggaagctacaatgaccatcgaggagttgctgactcggtacggccagaattgccataaagggcctcctcactccaagtcaggggggggaactggcgaagagcctgggagccagggcctgaacggggaggcaggacccgaagactcaacacgtgagaccccatctcaggaaaatggcccaacagcaaaggcatataccggattttccagcaatagcgagcgggggacagaggcgggccaggtgggggaacctgggataccaaccggggaggctggccccagttgctccagcgctagtgacaagctaccccgtgtcgctaaatccaagttctttgaggacagcgaagacgagtcagatgaggccgaggaagaggaagaggactcagaggagtgttctgaggaggaggacgggtactcttcagaagaggcggaaaatgaggaagacgaagacgacaccgaggaagctgaggaggatgacgaagaggaagaagaagagatgatggtacctggcatggagggcaaggaggagccaggatccgacagcggtaccaccgccgtggtggccctcattcgggggaagcagcttattgtagccaacgccggagactctagatgcgtggtgagcgaggcagggaaggcattagatatgtcttatgatcataagcccgaagacgaggtagagctcgccaggataaaaaatgccgggggaaaggttactatggatggcagagtgaacggtggcctaaacctgtcgagggccatcggggaccacttttacaagcgaaataagaatctgccaccggaggagcagatgatcagcgccttgccggacatcaaagtgctgactctgacggatgaccacgaatttatggttattgcttgtgacgggatatggaatgtgatgtcctcacaggaggtggtggactttattcagagcaagatctctcaacgggacgaaaacggcgagcttcgactgctgtccagcatcgtggaggaacttctggaccagtgcctggcacccgatacatctggagacggcaccggatgtgataatatgacttgcatcattatctgcttcaaaccccgcaacaccgcggagttgcagccagaaagtgggaagcgcaaacttgaagaagtgctgtccaccgaaggggccgaggaaaacgggaactctgataagaaaaagaaagctaagcgggattag

SEQ ID NO: 253101 - DNA, 1641 bp, Artificial Sequence
  derived and/or modified sequence
atgggcgcctacctgagccagcccaacacagtgaagtgcagcggagatggagtgggcgccccccggctgcccctgccctacggcttcagcgccatgcagggctggagggtgtccatggaggatgcccacaactgcatccctgagctggacagcgagacagccatgttttctgtgtatgatggccacggcggggaggaggtggccctgtactgtgccaagtacctgcctgacatcatcaaggaccagaaggcctacaaggagggcaagctgcagaaggccctggaggatgccttcctggccattgatgccaagctgaccacagaggaggtgatcaaggagctggcccagattgctggccggcccacagaagatgaagatgagaaggagaaggtggctgatgaagatgatgtggacaatgaggaggccgccctgctgcacgaggaggccaccatgaccatcgaggagctgctgaccaggtatggccagaactgccacaagggccccccccacagcaagagcggcggcggcactggagaggagcccggcagccagggcctgaatggagaggccggccctgaggacagcacccgggagacccccagccaggagaatggccccacagccaaggcctacacaggcttcagcagcaacagcgagcggggcacagaggccggccaggtgggggagcccggcatccccaccggggaggccggccccagctgcagcagcgccagtgacaagctgccccgggtggccaagagcaagttctttgaggacagtgaagatgaaagtgatgaagctgaggaggaggaggaggacagcgaggagtgcagcgaggaggaggatggctacagcagcgaggaggccgagaatgaagaagatgaagatgacacagaggaggccgaggaggatgatgaggaggaggaggaggagatgatggtgcccggcatggagggcaaggaggagcccggcagtgacagcggcaccacagctgtggtggccctgatccggggcaagcagctgattgtggccaatgctggggacagccgctgtgtggtgtctgaggccggcaaggccctggacatgtcctatgaccacaagccagaagatgaggtggagctggcccgcatcaagaatgctgggggcaaggtgaccatggatggccgggtgaatggaggcctgaacctgagccgggccatcggggaccacttctacaagaggaacaagaacctgcccccagaggagcagatgatcagcgccctgcctgacatcaaggtgctgaccctgacagatgaccacgagttcatggtgattgcctgtgatggcatctggaatgtgatgagcagccaggaggtggtggacttcatccagagcaagatcagccagagagatgaaaatggagagctgcggctgctgagcagcatcgtggaggagctgctggaccagtgcctggccccagacaccagcggagatggcaccggctgtgacaacatgacctgcatcatcatctgcttcaagcccaggaacacagctgagctgcagcctgagagcggcaagaggaagctggaggaggtgctgagcacagagggcgcagaagaaaatggaaacagcgacaagaagaagaaggccaagagggactag

SEQ ID NO: 253102 - DNA, 1044 bp, Artificial Sequence
  derived and/or modified sequence
ttcagcctcttccctgctgtggacaatgaggaggccgccctgctgcacgaggaggccaccatgaccatcgaggagctgctgaccaggtatggccagaactgccacaagggccccccccacagcaagagcggggccagtgacaagctgccccgggtggccaagagcaagttctttgaagattctgaagatgaaagtgatgaggccgaggaggaggaggaggacagtgaagaatgttctgaggaggaggatggctacagcagcgaggaggctgaaaatgaggaggatgaagatgacacagaggaggccgaggaggatgatgaggaggaggaggaggagatgatggtgcccggcatggagggcaaggaggagcccggcagtgacagcggcaccacagctgtggtggccctgatccggggcaagcagctgattgtggccaatgctggggacagccgctgtgtggtgtctgaggccggcaaggccctggacatgtcctatgaccacaagccagaagatgaggtggagctggcccgcatcaagaatgccggcggcaaggtgaccatggatggccgggtgaatggaggcctgaacctgagccgggccatcggggaccacttctacaagaggaacaagaacctgcccccagaggagcagatgatcagcgccctgcctgacatcaaggtgctgaccctgacagatgaccacgagttcatggtgattgcctgtgatggcatctggaatgtgatgagcagccaggaggtggtggacttcatccagagcaagatcagccagagagatgaaaatggagagctgcggctgctgagcagcatcgtggaggagctgctggaccagtgcctggccccagacaccagcggagatggcaccggctgtgacaacatgacctgcatcatcatctgcttcaagcccaggaacacagctgagctgcagcctgagagcggcaagaggaagctggaggaggtgctgagcacagaaggagctgaggagaatggaaacagcgacaagaagaagaaggccaagagggactag

SEQ ID NO: 253103 - DNA, 1590 bp, Artificial Sequence
  derived and/or modified sequence
atgggcgcctacctgagccagcccaacacagtgaagtgcagcggagatggagtgggcgtgtccatggaggatgcccacaactgcatccctgagctggacagcgagacagccatgttttctgtgtatgatggccatggaggagaggaggtggccctgtactgtgccaagtacctgcctgacatcatcaaggaccagaaggcctacaaggagggcaagctgcagaaggccctggaggatgccttcctggccattgatgccaagctgaccacagaggaggtgatcaaggagctggcccagattgctggccggcccacagaagatgaagatgagaaggagaaggtggctgatgaagatgatgtggacaatgaggaggccgccctgctgcacgaggaggccaccatgaccatcgaggagctgctgaccaggtatggccagaactgccacaagggccccccccacagcaagagcggcggcggcaccggggaggagcccggcagccagggcctgaatggagaggccggccctgaggacagcacccgggagacccccagccaggagaatggccccacagccaaggcctacacaggcttcagcagcaacagcgagcggggcacagaagctggccaggtgggggagcccggcatccccactggagaggccggccccagctgcagcagcgccagtgacaagctgccccgggtggccaagagcaagttctttgaagattctgaagatgaaagtgatgaggccgaggaggaggaggaggacagtgaagaatgttctgaggaggaggatggctacagcagcgaggaggctgaaaatgaggaggatgaagatgacacagaggaggccgaggaggatgatgaggaggaggaggaggagatgatggtgcccggcatggagggcaaggaggagcccggcagtgacagcggcaccacagctgtggtggccctgatccggggcaagcagctgattgtggccaatgctggggacagccgctgtgtggtgtctgaggccggcaaggccctggacatgtcctatgaccacaagccagaagatgaggtggagctggcccgcatcaagaatgccggcggcaaggtgaccatggatggccgggtgaatggaggcctgaacctgagccgggccatcggggaccacttctacaagaggaacaagaacctgcccccagaggagcagatgatcagcgccctgcctgacatcaaggtgctgaccctgacagatgaccacgagttcatggtgattgcctgtgatggcatctggaatgtgatgagcagccaggaggtggtggacttcatccagagcaagatcagccagagagatgaaaatggagagctgcggctgctgagcagcatcgtggaggagctgctggaccagtgcctggccccagacaccagcggagatggcaccggctgtgacaacatgacctgcatcatcatctgcttcaagcccaggaacacagctgagctgcagcctgagagcggcaagaggaagctggaggaggtgctgagcacagaaggagctgaggagaatggaaacagcgacaagaagaagaaggccaagagggactag

SEQ ID NO: 253104 - DNA, 1641 bp, Artificial Sequence
  derived and/or modified sequence
atgggcgcctacctgagccagcccaacaccgtgaagtgcagcggcgacggcgtcggagcacctcgtctccctctcccgtacgggttctctgctatgcagggctggagggttagcatggaggatgcccacaattgtattccggaactggattccgagaccgccatgttttcagtctacgatggacacggaggagaagaagtggctctttactgcgccaaatacttgcccgatataattaaggaccagaaagcgtacaaagagggaaaactgcagaaagcacttgaggatgcattccttgctatagacgccaagttgaccacagaggaggttatcaaagagctggctcagatcgccggaagacctactgaggacgaagatgagaaagagaaggtcgcggacgaggacgacgtcgacaatgaggaggctgctctgctacatgaggaagcgactatgactatcgaagaactcctaacaagatacggacagaattgccacaagggacctccccactctaagagcggcggggggactggagaagagcccggttcccagggcttgaatggcgaggctggccctgaagactccactcgagagacaccctctcaggagaacgggcccaccgcaaaagcttatacaggcttcagttctaacagcgagcgcggcacagaggcaggacaggtgggagaaccaggaatccctaccggcgaggctgggccatcgtgcagcagcgcgagcgataaactgcctcgtgtcgctaagtccaagttcttcgaagactcagaggacgagagcgacgaggctgaggaggaagaggaggatagcgaggagtgtagcgaggaagaagatggttatagtagcgaggaagcagaaaacgaagaggacgaagatgacactgaggaagcggaggaagatgacgaggaggaggaagaggaaatgatggttccagggatggaaggtaaggaggaacctgggtctgacagcggcaccaccgcagtggtggcactgattcgtggcaagcagctgatagtggccaacgctggggacagtcgctgcgtggtgtctgaggctggaaaggccctggatatgtcttacgaccataagcctgaggatgaggtagagctggccagaatcaaaaacgccggcggcaaagtgaccatggatggcagggtcaatgggggtctcaacttgtcccgcgctattggcgaccacttctataagcgcaataaaaaccttccacccgaggagcagatgattagcgcattgcccgacatcaaagtcctgacgctgaccgatgaccatgagttcatggtgatagcctgcgatggaatttggaatgtgatgagttcccaggaagtggttgatttcatccagagcaaaattagtcaaagagatgaaaatggagaactgagactgctgtcctctattgtggaggaactgctggaccagtgcctcgctccagatacatccggtgacggaacgggatgcgacaacatgacttgtattattatatgtttcaaaccacgcaacacagcagagctccagcctgagtccggcaagcggaagctggaggaggtactgtctactgagggggctgaagagaatggaaactctgacaagaaaaagaaagccaaacgggattag

SEQ ID NO: 253105 - DNA, 1641 bp, Artificial Sequence
  derived and/or modified sequence
atgggcgcctacctgagccagcccaacaccgtgaagtgcagcggcgacggcgtcggcgctccacgactgccactgccgtacgggttctcagccatgcaaggatggagagtgtccatggaggatgcccacaactgtattcctgagctggactccgagacggccatgtttagtgtctacgatggccatggcggcgaagaggtggccctttattgcgccaagtatcttcctgacattatcaaggatcagaaggcatataaagagggtaaacttcagaaggccctggaggacgcttttttggccatcgatgccaagctgacaaccgaagaagtcatcaaggaactggcacaaattgccgggaggcccactgaggacgaggacgaaaaggagaaagtggctgacgaagatgacgtggacaatgaagaggccgcccttctgcatgaggaagcaaccatgacgatcgaagaattgctgaccaggtatggacagaattgccacaaagggccgccccactccaaaagtggcggaggaaccggcgaggagcctggttcccagggactgaatggcgaggccggcccagaggactccaccagggagacaccatctcaggagaatggacccactgcaaaggcgtatacaggtttcagcagcaacagcgagagaggcacagaagccggccaggttggcgaaccaggtatccccactggtgaggcaggaccctcctgctcttcggcctcagataagctacctagagtggccaagtcaaaattcttcgaagattctgaagacgaaagcgacgaggctgaagaggaggaggaggattccgaagagtgcagtgaggaagaagacgggtactccagcgaggaagccgaaaatgaggaggacgaggatgacactgaagaagccgaagaagacgatgaggaagaggaggaggagatgatggtgcctggcatggagggaaaggaggagcctggcagtgactctgggactactgctgtggtcgcgctcatcaggggcaagcagctgatcgtagctaacgcaggagacagtaggtgcgtcgtgtctgaggcaggcaaggccctggacatgtcatacgatcataaaccagaagacgaggtagaactggccagaattaagaatgctggcgggaaggtgacaatggatgggcgagtgaacggcgggcttaacctgtcccgagccataggtgaccacttttataaaaggaataaaaacctcccacctgaggagcagatgatttccgcactcccagatattaaagtgttaacccttactgatgaccatgagttcatggtaatcgcttgtgatggcatttggaatgtgatgtcaagccaggaggttgttgacttcattcaatctaaaatctcccagcgagatgaaaatggggagctcaggcttctgtccagcatcgttgaggagttattggatcaatgtttggcacctgatacttccggggacgggacaggctgtgacaatatgacctgcattatcatatgtttcaagccacgcaacaccgcggagctgcagccagaatcagggaagaggaaattggaggaggtcttatctactgagggggccgaagagaatggcaattcggacaaaaaaaagaaagccaaaagagactag

SEQ ID NO: 253106 - DNA, 1442 bp, Artificial Sequence
  derived and/or modified sequence
tttagcctcttccctgcagtggacaatgaggaggctgcactgctgcatgaagaggctaccatgactattgaagagctgctgacacgctacgggcagaactgtcacaagggccctccccacagcaaatctggagcctctgacaagctgcctcgagttgctaagtccaagttctttgaggacagtgaggatgagtcagatgaggcggaggaagaagaggaagacagtgaggaatgcagcgaggaagaggatggctacagcagtgaggaggcagagaatgaggaagatgaggatgacaccgaggaggctgaagaggacgatgaagaagaagaagaagagatgatggtgccagggatggaaggcaaagaggagcctggctctgacagtggtacaacagcggtggtggccctgatacgagggaagcagttgattgtagccaacgcaggagactctcgctgtgtggtatctgaggctggcaaagctttagacatgtcctatgatcacaaaccagaggatgaagtagaactagcacgcatcaagaatgctggtggcaaggtcaccatggatgggcgagtcaacgggggcctcaacctctccagagccattggggaccacttctataagagaaacaagaacctgccacctgaggaacagatgatttcagcccttcctgacatcaaggtgctgactctcactgacgaccatgaattcatggtcattgcctgtgatggcatctggaatgtgatgagcagccaggaagttgtagatttcattcaatcaaagatcagccagcgtgatgaaaatggggagcttcggttattgtcatccattgtggaagagctgctggatcagtgcctggcaccagacacttctggggatggtacagggtgtgacaacatgacctgcatcatcatttgcttcaagccccgaaacacagcagagctccagccagagagtggcaagcgaaaactagaggaggtgctctctactgagggggctgaagaaaatggcaacagcgacaagaagaagaaggccaagcgagactagcagtcatccagacccctgcccacctagactgttttctgagccctccggacctgagactgagttttgtctttttcctttagccttagcagtgggtatgaggtgtgcagggggagctgggtggcttcactccgcccattccaaagagggctctccctccacactgcagccgggagcctctgctgtccttcccagccgcctctgctcctcgggctcatcaccggttctgtgcctgtgctctgttgtgttggagggaaggactggcggttctggtttttactctgtgaactttatttaaggacattcttttttattggcggctccatggccctcggccgcttgcacccgctctctgttgtacactttcaatcaacactttttcagactaaaggccaaaacct

SEQ ID NO: 253107 - DNA, 1044 bp, Artificial Sequence
  derived and/or modified sequence
ttcagcctgttccccgccgtggacaacgaggaggccgccctgctgcatgaggaggctacaatgaccatagaagaactcctaacacgatacggccagaactgccataaggggccaccacactctaaaagcggggcttccgataagcttcccagggtggccaagagcaaatttttcgaagacagtgaggacgagtccgatgaagccgaagaggaagaggaggattccgaggagtgttctgaggaagaggacgggtacagttcggaagaagcagagaacgaggaggacgaagacgataccgaagaggctgaagaagacgatgaggaagaagaagaggagatgatggtgcctggcatggagggaaaggaggagcccggatccgacagcggcaccacagcagtcgtggctctcattaggggcaagcagctgatcgtggcgaatgcaggagattcgcgctgcgtcgtgagcgaagccggcaaagccttggatatgagctacgatcacaagcccgaggacgaagttgagctcgctcggattaagaacgccggtggtaaggtgaccatggatggcagagtgaatgggggacttaacctttcacgtgccatcggggaccatttttacaagagaaataagaacttaccccctgaggagcagatgattagcgccctcccagacattaaagtgctgacgctcacagacgaccatgaattcatggtcatcgcatgcgacggaatttggaatgttatgagctcccaggaagtggtggattttattcaaagcaagatctcacagcgggatgagaacggcgaactccgcctattgtcctccatcgtggaagagctgctggatcagtgtctggctcccgacaccagcggggacggtacagggtgcgacaatatgacctgtatcatcatttgtttcaagccgagaaataccgccgaactgcaacctgaaagcggcaaacgtaaattggaggaggtgctgtctaccgaaggggccgaggaaaacgggaatagcgacaagaaaaagaaagcaaagagagactag

SEQ ID NO: 253108 - DNA, 1590 bp, Artificial Sequence
  derived and/or modified sequence
atgggcgcctacctgagccagcccaacaccgtgaagtgcagcggcgatggagtcggcgtgtccatggaagacgcccacaattgtattcctgagctggactctgagaccgcaatgttctcagtgtatgacggtcacggtggagaagaggtggctttgtactgcgctaagtacttgcccgatatcatcaaggatcaaaaggcatacaaagaaggtaaacttcagaaagccttggaggacgcgttcctggccatcgacgcaaagttaactaccgaagaggtgattaaggagctcgcacagatcgcaggccggccaactgaggacgaagacgagaaagagaaagttgcggatgaggatgatgtggataatgaggaggccgcactgttgcatgaggaggctacaatgaccatcgaagagctgctcacacgctatggccaaaactgtcataaaggcccccctcactctaaatctggcggtggcacaggagaagagccggggagtcaggggctaaacggggaagccgggccggaggactcaacgcgggaaactccctcccaagagaatggccccactgctaaggcgtatactggctttagctcaaattccgagcgcggcacagaagctggacaagtcggtgagcctgggatacctacaggtgaggcgggcccttcatgcagctcagcctccgacaaactgccccgagtggccaaatcaaaattctttgaggatagcgaggacgagagcgacgaggcagaagaggaagaagaggactctgaggagtgcagcgaggaggaggatggctattcgtctgaggaggccgagaatgaagaggatgaagacgatactgaggaggcggaagaggatgacgaggaggaggaagaggaaatgatggtgccaggcatggagggtaaggaggagcctggctcagatagcggcactacagctgtggtcgcgttgattagggggaaacagctgattgtcgctaacgcaggggattcgaggtgtgttgtgagtgaggcaggaaaagccctagatatgagctacgaccataaaccagaagatgaggtcgaactcgcgaggatcaaaaatgcaggcgggaaagttacaatggacgggcgagtgaatggagggctgaacttgtcccgtgcgatcggagaccatttctacaagaggaataagaacctgcctcccgaagaacaaatgatcagtgccctgcctgatatcaaagtgctgactttaaccgacgaccacgagttcatggtcattgcctgcgatggcatctggaatgtcatgagcagccaggaggtcgtggattttatacagtcaaaaatatcccaacgggacgagaatggagaactgcgtctgttgagcagcatcgttgaagaacttctcgaccaatgtctggccccagacactagtggcgatggaacaggatgcgacaacatgacttgcatcattatttgtttcaaaccacggaacaccgctgaattgcagccggaatcgggaaaaagaaagctggaagaagtgctgtccacggagggtgccgaagaaaatgggaattcagacaaaaaaaagaaggccaagagggattag

SEQ ID NO: 253109 - DNA, 1641 bp, Artificial Sequence
  derived and/or modified sequence
atgggagcctacctatcccagcccaacacagtaaagtgtagtggagacggtgtcggcgcacccagattacctctgccgtatggatttagcgctatgcaaggctggcgcgtcagcatggaggatgctcataattgtatccctgagttagacagcgaaacggccatgtttagtgtttatgacgggcacgggggagaggaggttgcactctactgtgcaaagtatctcccagatatcataaaagatcaaaaagcttacaaggaaggtaagctccagaaagcgctagaggatgccttcctggcaatcgacgctaaactcacaacagaagaggtgatcaaagagctggcacagatcgctggcaggccgacggaggatgaagatgaaaaggagaaggtggctgatgaggacgatgttgataatgaagaggcggcactgctgcatgaggaggcgactatgacaatcgaggagttgctaacccgttacggacagaactgtcataaaggcccacctcatagtaaatctgggggaggtaccggcgaagaacctggcagccagggtctcaatggcgaagcagggccagaggatagcacccgagagacaccgtctcaggagaacggccctactgcaaaagcctacacaggatttagctctaattcggaacgtggcaccgaagcagggcaggtgggggagcctggcatccctactggagaggcgggtccctcatgtagctctgcctctgataaactcccccgagtggccaaatccaagttctttgaagacagtgaggacgaatccgatgaggccgaggaagaggaggaagattcagaagaatgcagcgaagaggaagatggctattcctcggaagaagctgaaaatgaagaggatgaggacgacaccgaagaggcagaggaggacgatgaggaagaggaagaggagatgatggtgcccggtatggaggggaaagaagagccgggttcagattccggaactaccgctgtggtggccctcattcgaggcaagcagctcatcgttgccaacgccggagatagcaggtgcgtcgtctccgaagctgggaaagccctggacatgtcctacgaccacaaaccggaagacgaagtggagttggcccgaataaagaacgctggaggtaaagtgacaatggatgggagggtaaatgggggacttaatcttagccgggctatcggcgaccacttctacaaacgcaacaagaaccttcccccagaagaacagatgatttccgccctacctgacatcaaagtgctgactctaactgatgaccatgagttcatggttattgcttgcgacggtatctggaacgtgatgtcttctcaggaggtggtggattttattcagagcaagattagtcaacgtgacgagaacggagagctcagactactatcaagcattgtggaagaactgctggaccagtgtctggcacctgacacgagtggggacgggactggttgcgacaatatgacatgcattattatctgttttaaacctagaaacaccgcagagctgcagcccgagagcgggaaacgcaagctggaggaagtcctttctacagagggagccgaggaaaacggaaacagcgataaaaaaaaaaaagccaagcgcgattag

SEQ ID NO: 253110 - DNA, 1641 bp, Artificial Sequence
  derived and/or modified sequence
atgggtgcatatctgtcacagccgaatactgtgaagtgctctggggacggcgtgggagcccctcgactgcccttgccctatggcttcagcgcaatgcagggctggcgcgtgtccatggaggacgcccacaattgcataccggaactggattccgaaacagctatgttctcggtgtacgatgggcacgggggagaggaagtggctctttactgtgccaagtacctgccagacataatcaaagaccaaaaagcttataaggagggcaaactgcaaaaagccctggaagatgccttcctggccattgacgctaaattgactaccgaagaagtcatcaaagaattagctcaaattgccggacgtcccaccgaggacgaagatgaaaaggagaaagttgccgacgaggacgacgtcgataatgaagaggccgcactgctgcatgaagaggctaccatgacgatcgaagagctgctgacgaggtatggacagaattgccataagggacctccccattcgaaatctggcggaggcactggggaggagcccggatcacagggcctgaatggtgaggctggaccagaggattcaactagagagacgccaagtcaggagaacggacccactgcaaaggcctacacgggtttttcctctaacagcgaaaggggcacggaggctgggcaggtgggcgaacccggtatccctaccggtgaggctggaccgtcctgctcctctgctagtgataaattgccccgagttgctaagagcaagttttttgaagatagcgaagatgaaagtgacgaagccgaagaggaggaggaagacagtgaagagtgctcagaggaggaagatggctattcttccgaggaggcggaaaacgaagaggacgaagacgacaccgaggaagctgaggaggatgacgaggaggaagaggaagagatgatggtgcctggcatggagggtaaagaagaacccggatcggactcaggcacaacggctgtggtggctctgattaggggcaaacagctcattgtcgcgaatgccggtgactcccgatgtgtggttagcgaggctggcaaagctctcgatatgagctacgaccacaagccagaggatgaagtggaactggccaggattaagaacgcagggggaaaagtgactatggatggacgggttaacggaggtctcaatctgtccagggcgatcggggatcacttctacaaacggaataagaatctgccacctgaggagcagatgattagtgctttacccgacataaaagtccttaccttaaccgacgatcacgaatttatggtgattgcctgtgatggtatttggaatgttatgagcagccaggaggtcgtagacttcatccagagtaagatttcccaaagggatgaaaacggtgaactcaggctgctgagtagtattgtcgaagaacttctcgatcagtgtctggctcccgatactagcggggatggaactggctgcgacaatatgacctgcatcataatctgttttaaaccaaggaacacagccgaacttcaacccgaatccgggaaacggaagctggaggaagtgctgagcaccgagggagccgaagagaacggcaactcagacaagaagaagaaagccaagagggattag

SEQ ID NO: 253111 - DNA, 1044 bp, Artificial Sequence
  derived and/or modified sequence
ttcagtctgttccccgctgtcgataatgaagaggcagcacttctccatgaggaggccactatgaccattgaagagctcctgactagatatggccagaattgccataagggaccaccacattccaagtcaggcgcaagcgataagttaccacgcgtggcaaagtctaagttcttcgaagactccgaggacgagagtgatgaagccgaggaggaggaggaggacagtgaggaatgttctgaggaggaagacggttattcttccgaagaagcagagaacgaagaggacgaggatgacaccgaggaggctgaggaagacgatgaagaagaggaggaggagatgatggtgccgggtatggaaggcaaggaggagccaggcagcgattctgggaccacagccgtagtcgcactcattagaggtaaacagctcattgtggcgaatgccggagattcacggtgcgttgtctcggaggcaggcaaggcactggacatgtcttatgaccacaagcccgaagacgaggtcgagctagcacggatcaagaacgctgggggaaaggtgacaatggacggaagggtgaatggtggcctcaatctgtctcgcgctatcggagaccacttttacaagaggaacaaaaacctgcccccagaggagcagatgatcagcgctcttcctgacatcaaagtccttacccttactgatgatcatgagtttatggtgatagcatgtgacggaatttggaacgtaatgagtagccaggaggttgtggatttcatacagtctaaaattagccaacgcgacgagaacggcgagttaaggctgttgtcatcaatcgtggaagagctgttagatcagtgtctcgcacccgacaccagcggcgacggcacaggctgtgacaacatgacttgcattatcatttgttttaagccaaggaacacagctgaattgcagcccgagtcaggaaagagaaagctggaggaggtgctctccacagagggcgctgaggagaatgggaactcagataagaaaaagaaggcaaagcgggactag

SEQ ID NO: 253112 - DNA, 1590 bp, Artificial Sequence
  derived and/or modified sequence
atgggagcctatcttagtcagcccaacaccgtgaagtgttcaggcgacggagtgggggtgagtatggaggatgcccataactgcatcccggagctggattctgagaccgcaatgttctccgtgtacgacggccatggcggagaggaggtggctctgtactgtgccaagtacttgcctgacattatcaaggatcaaaaagcttacaaagaaggcaagctgcaaaaagccctagaagacgcttttctggccatcgatgccaagcttaccaccgaggaagtaatcaaagagctggctcagatcgctggtcggccaaccgaagacgaggacgaaaaagagaaagttgccgacgaagacgacgttgacaacgaagaagcagctctcctgcatgaagaggcgacaatgacaatcgaagagttgctcactaggtatggacagaattgtcataaagggcctccacattcaaagagcggcggtggcacaggtgaggaaccaggatcacagggtctcaatggagaggccggacctgaggactcaacgcgggaaactccatctcaggaaaacggtccgactgctaaagcatataccggcttctcaagcaattctgaaagaggcacagaagccggacaggttggtgagcctggtatacctaccggcgaagcgggaccctcatgtagctctgcctccgataagcttccacgcgtggcaaagtcaaagtttttcgaggacagcgaggatgaatcagatgaggcggaggaggaagaggaggattcggaggagtgttcagaggaggaggatgggtacagctcggaggaggccgaaaacgaggaggatgaagacgacacagaggaggccgaagaggatgacgaagaagaagaagaggagatgatggtcccagggatggaaggcaaggaagaaccaggcagtgatagtggtacaaccgctgtggtggccctgatccgaggaaagcagctgatcgtggcaaacgcaggagatagcaggtgtgttgtatccgaggccggtaaggctcttgacatgtcttatgatcacaagccggaggacgaggtcgagctggcccgaataaaaaatgcgggtggcaaagtcactatggacgggagggtgaatggcggactaaaccttagccgcgcaatcggtgatcatttctataaaaggaacaagaacttgccccctgaagagcagatgatctcagctttaccagacatcaaagtgctgactctgacagatgaccatgaattcatggtgattgcttgcgacggcatctggaacgtcatgtccagccaggaagtggtcgacttcatccagtcgaagatcagccaacgcgatgagaacggcgaattaaggctactctcctccattgtcgaagaactgttagaccagtgtctggcgcctgatacctcaggggacggcactgggtgtgataacatgacctgcattatcatctgcttcaaacccaggaacaccgcggagctgcagcctgagtctgggaagagaaagctagaagaagttctttccaccgaaggcgctgaggaaaatggcaattccgataagaagaagaaggcaaaacgagactag

SEQ ID NO: 253113 - DNA, 1988 bp, Artificial Sequence
  derived and/or modified sequence
atgggtgcctacctctcccagcccaacacggtgaagtgctccggggacggggtcggcgtctccatggaggatgctcacaactgtattcctgagctggacagtgagacagccatgttttctgtctacgatggacatggaggggaggaagttgccttgtactgtgccaaatatcttcctgatatcatcaaagatcagaaggcctacaaggaaggcaagctacagaaggctttagaagatgccttcttggctattgacgccaaattgaccactgaagaagtcattaaagagctggcacagattgcagggcgacccactgaggatgaagatgaaaaagaaaaagtagctgatgaagatgatgtggacaatgaggaggctgcactgctgcatgaagaggctaccatgactattgaagagctgctgacacgctacgggcagaactgtcacaagggccctccccacagcaaatctggaggtgggacaggcgaggaaccagggtcccagggcctcaatggggaggcaggacctgaggactcaactagggaaactccttcacaagaaaatggccccacagccaaggcctacacaggcttttcctccaactcggaacgtgggactgaggcaggccaagttggtgagcctggcattcccactggtgaggctgggccttcctgctcttcagcctctgacaagctgcctcgagttgctaagtccaagttctttgaggacagtgaggatgagtcagatgaggcggaggaagaagaggaagacagtgaggaatgcagcgaggaagaggatggctacagcagtgaggaggcagagaatgaggaagatgaggatgacaccgaggaggctgaagaggacgatgaagaagaagaagaagagatgatggtgccagggatggaaggcaaagaggagcctggctctgacagtggtacaacagcggtggtggccctgatacgagggaagcagttgattgtagccaacgcaggagactctcgctgtgtggtatctgaggctggcaaagctttagacatgtcctatgatcacaaaccagaggatgaagtagaactagcacgcatcaagaatgctggtggcaaggtcaccatggatgggcgagtcaacgggggcctcaacctctccagagccattggggaccacttctataagagaaacaagaacctgccacctgaggaacagatgatttcagcccttcctgacatcaaggtgctgactctcactgacgaccatgaattcatggtcattgcctgtgatggcatctggaatgtgatgagcagccaggaagttgtagatttcattcaatcaaagatcagccagcgtgatgaaaatggggagcttcggttattgtcatccattgtggaagagctgctggatcagtgcctggcaccagacacttctggggatggtacagggtgtgacaacatgacctgcatcatcatttgcttcaagccccgaaacacagcagagctccagccagagagtggcaagcgaaaactagaggaggtgctctctactgagggggctgaagaaaatggcaacagcgacaagaagaagaaggccaagcgagactagcagtcatccagacccctgcccacctagactgttttctgagccctccggacctgagactgagttttgtctttttcctttagccttagcagtgggtatgaggtgtgcagggggagctgggtggcttcactccgcccattccaaagagggctctccctccacactgcagccgggagcctctgctgtccttcccagccgcctctgctcctcgggctcatcaccggttctgtgcctgtgctctgttgtgttggagggaaggactggcggttctggtttttactctgtgaactttatttaaggacattcttttttattggcggctccatggccctcggccgcttgcacccgctctctgttgtacactttcaatcaacactttttcagactaaaggccaaaacct

SEQ ID NO: 253114 - protein, 1040 aa, Artificial Sequence
  derived and/or modified sequence
MDWLFFRNICLLIILMVVMEVNSEFIVEVKEFDIENGTTKWQTVRRQKREWIKFAAACREGEDNSKRNPIAKIRSDCESNQKITYRISGVGIDRPPYGVFTINPRTGEINITSVVDREITPLFLIYCRALNSRGEDLERPLELRVKVMDINDNAPVFSQSVYTASIEENSDANTLVVKLCATDADEENHLNSKIAYKIVSQEPSGAPMFILNRYTGEVCTMSSFLDREQHSMYNLVVRGSDRDGAADGLSSECDCRIKVLDVNDNFPTLEKTSYSASIEENCLSSELIRLQAIDLDEEGTDNWLAQYLILSGNDGNWFDIQTDPQTNEGILKVVKMLDYEQAPNIQLSIGVKNQADFHYSVASQFQMHPTPVRIQVVDVREGPAFHPSTMAFSVREGIKGSSLLNYVLGTYTAIDLDTGNPATDVRYIIGHDAGSWLKIDSRTGEIQFSREFDKKSKYIINGIYTAEILAIDDGSGKTATGTICIEVPDINDYCPNIFPERRTICIDSPSVLISVNEHSYGSPFTFCVVDEPPGIADMWDVRSTNATSAILTAKQVLSPGFYEIPILVKDSYNRACELAQMVQLYACDCDDNHMCLDSGAAGIYTEDITGDTYGPVTEDQAGVSNVGLGPAGIGMMVLGILLLILAPLLLLLCCCKQRQPEGLGTRFAPVPEGGEGVMQSWRIEGAHPEDRDVSNICAPMTASNTQDRMDSSEIYTNTYAAGGTVEGGVSGVELNTGMGTAVGLMAAGAAGASGAARKRSSTMGTLRDYADADINMAFLDSYFSEKAYAYADEDEGRPANDCLLIYDHEGVGSPVGSIGCCSWIVDDLDESCMETLDPKFRTLAEICLNTEIEPFPSHQACIPISTDLPLLGPNYFVNESSGLTPSEVEFQEEMAASEPVVHGDIIVTETYGNADPCVQPTTIIFDPQLAPNVVVTEAVMAPVYDIQGNICVPAELADYNNVIYAERVLASPGVPDMSNSSTTEGCMGPVMSGNILVGPEIQVMQMMSPDLPIGQTVGSTSPMTSRHRVTRYSNIHYTQQ

SEQ ID NO: 253115 - DNA, 3123 bp, Artificial Sequence
  derived and/or modified sequence
atggattggcttttcttccgtaacatatgcctgcttataatcctgatggttgtgatggaagtgaattccgaattcattgtcgaagtgaaagagttcgatatcgagaacggtaccactaaatggcagactgtgcgtaggcagaagcgggaatggattaaatttgcagcagcatgtcgtgagggcgaggacaactcgaaacggaatcccattgctaaaatccgaagcgactgcgaatccaaccagaaaatcacctatcgcataagcggggtaggcattgaccggccgccttacggggtctttacgatcaacccgcgcacgggtgagatcaacatcaccagtgtggtagatcgcgagatcacccccctttttctcatatactgccgggccctgaactccaggggggaagacctggagagacccctggagttgcgagtcaaggtgatggatattaatgataacgcccctgtgttttcgcagagcgtctacacagcctcgattgaagagaactccgacgcaaataccctggttgtaaaactctgcgctacagatgctgatgaggagaatcaccttaattcaaaaatcgcttacaaaatcgtttcacaggagccttctggcgcccctatgttcatattaaatcggtataccggggaagtttgcactatgtcctcatttctggatcgcgagcaacacagtatgtataacttggtagtacgcggctccgaccgagatggcgctgcggatggcctgtccagcgaatgcgactgccgcattaaggtgctcgacgtcaacgataatttccccacactcgagaaaacatcttactccgcctccatcgaggagaactgcttatcctccgaacttatcagactacaggccatcgatctggacgaagaaggtacagataattggctggcccagtacttgattctcagtggtaacgatggaaattggtttgacattcaaaccgatccacagaccaacgaggggatactaaaggtggtgaaaatgctggactatgagcaggccccaaacattcagctgtccattggcgtgaagaaccaagcagattttcattatagcgtggctagccagttccagatgcacccaacccccgtgaggatccaagtcgtggacgtgagagaagggccagccttccatcctagcaccatggccttctcagtgagagaggggataaaggggtcgagcttattaaactatgtgttgggcacttatacagcaatcgaccttgacaccggtaatccggcaacggacgtgcgatatataatcggccatgacgcaggatcatggctaaaaatcgactcacggaccggagagatccagtttagtcgtgagttcgataaaaaatcaaagtatataatcaatggaatttatactgctgagattctagccatcgacgacggtagcggcaagactgctactggcactatctgtatagaggtccctgacattaatgattactgtccaaacatctttcctgagagaaggacaatctgcattgactccccaagcgtgttgatctctgtcaacgaacacagttacggttcccctttcactttttgtgtagttgatgagccccccggaatagctgacatgtgggacgtccggtctaccaatgcaacttctgctatcctgactgctaagcaggtgctgtccccaggcttctacgagatacctatattggtgaaggatagttacaacagggcgtgtgaactggcccaaatggtacaactgtacgcgtgcgattgtgatgacaaccatatgtgtcttgattcaggcgctgccggcatctataccgaagatatcaccggagatacctacggacccgtgacagaggatcaggccggcgtgtcaaatgtgggcctcggccctgctgggatcggcatgatggttctggggatcttgttgctgatattggctcctctgcttctgctgctttgttgctgtaagcagcgtcagcccgagggactgggaacccgctttgcccctgtgcctgaggggggggagggagtgatgcagagctggaggatcgaaggcgcgcatcctgaagaccgagatgtgtccaacatttgcgcccccatgacagcttctaacacccaggatcggatggattccagcgagatatataccaacacgtacgctgctgggggaactgtggaaggcggcgtaagcggagtcgagctgaacacaggaatgggcacggctgtggggcttatggcagccggggctgcaggagcttctggtgcagcccggaagaggtcgtcaactatgggcaccctcagggattacgcagacgccgatatcaacatggccttcctcgattcctacttttctgaaaaagcatacgcatacgccgatgaagatgagggaaggccggctaacgactgccttttgatctacgatcacgaaggtgtcggttctcccgttggaagcattggttgctgctcctggattgtcgacgatctcgatgagtcctgcatggagactttggatcccaagttcaggacacttgcagaaatctgtctaaataccgagattgagcccttcccttcacaccaggcctgtattcccatttccactgatctgcctctgcttgggccaaactatttcgtcaacgaatcgtccgggctcactccctccgaagtggagttccaggaggaaatggcagcctccgagccagtagtgcacggcgacattattgtcacagaaacctatgggaatgccgatccgtgcgtgcagcccaccacaataattttcgaccctcaactcgcccctaatgttgtcgtaacagaggctgtgatggctcccgtatatgacatccaagggaacatctgtgtccctgctgagcttgccgactacaacaacgttatctacgccgaacgcgtgctagctagcccaggggtgcccgatatgagcaattcatcaaccactgagggctgtatgggcccagtgatgagcgggaatatcttagtaggtccagagattcaggtcatgcaaatgatgagcccggatctgcctatcgggcagaccgtggggtcgacttccccaatgacgagtaggcatagagtcacgaggtacagtaacattcactatacccagcagtag

SEQ ID NO: 253116 - DNA, 3123 bp, Artificial Sequence
  derived and/or modified sequence
atggactggctgttcttcaggaacatctgcctgctgatcatcctgatggtggtgatggaggtgaacagcgagttcatcgtggaggtgaaggagtttgatattgaaaatggcaccaccaagtggcagacagtgcggcggcagaagcgggagtggatcaagtttgctgctgcctgccgggagggggaggacaacagcaagaggaaccccatcgccaagatccgcagtgactgtgagagcaaccagaagatcacctaccgcatcagcggcgtgggcatcgacaggcctccctatggagtcttcaccatcaaccccaggactggagagatcaacatcacctctgtggtggaccgggagatcacccccctcttcctgatctactgccgggccctgaacagcagaggagaggacctggagcggcccctggagctgcgggtgaaggtgatggacatcaatgacaatgcccctgtgttcagccagagcgtgtacacagccagcattgaggagaacagtgatgccaacaccctggtggtgaagctgtgtgccacagatgctgatgaggagaaccacctgaacagcaagatcgcctacaagatcgtgtcccaggagcccagcggggcccccatgttcatcctgaaccgctacacaggagaggtgtgcaccatgagcagcttcctggaccgggagcagcacagcatgtacaacctggtggtgcggggcagtgacagagatggagctgctgatggcctgagcagtgaatgtgactgccgcatcaaggtgctggatgtgaatgacaacttccccaccctggagaagaccagctacagcgccagcattgaggagaactgcctgagcagcgagctgatccggctgcaggccatcgacctggatgaggagggcacagacaactggctggcccagtacctgatcctgtctggaaatgatggcaactggtttgacatccagacagacccccagaccaatgaaggcatcctgaaggtggtgaagatgctggactatgagcaggcccccaacatccagctgagcattggagtgaagaaccaggccgacttccactacagcgtggccagccagttccagatgcaccccacccctgtgcgcatccaggtggtggatgtgcgggagggccctgccttccaccccagcaccatggccttctctgtgcgggagggcatcaagggcagcagcctgctgaactacgtgctgggcacctacacagccatcgacctggacaccggcaacccagccacagatgtgcgctacatcattggacatgatgctggctcctggctgaagattgacagcaggactggagagatccagttcagccgggagtttgacaagaagagcaagtacatcatcaatggcatctacacagctgagatcctggccattgatgatggcagcggcaagacagccaccggcaccatctgcatcgaggtgcctgacatcaatgactactgccccaacatcttccctgagaggaggaccatctgcatcgacagccccagcgtgctgatctctgtgaatgagcacagctatggcagccccttcaccttctgtgtggtggatgagcccccaggcattgctgacatgtgggatgtgcgcagcaccaatgccaccagcgccatcctgacagccaagcaggtgctgagccctggcttctatgagatccccatcctggtgaaggacagctacaacagagcctgtgagctggcccagatggtgcagctgtatgcctgtgactgtgatgacaaccacatgtgcctggacagcggggctgctggcatctacacagaggacatcactggagacacctacggccctgtgacagaggaccaggccggcgtgtccaatgtgggcctgggccctgctggcatcggcatgatggtgctgggcatcctgctgctgatcctggcccccctgctgctgctgctgtgctgctgcaagcagaggcagcctgagggcctgggcaccaggtttgcccctgtgcctgagggcggggagggcgtgatgcagagctggagaattgaaggagcccacccagaagatagagatgtgagcaacatctgtgcccccatgacagccagcaacacccaggacaggatggacagcagcgagatctacaccaacacctacgccgccggcggcaccgtggagggcggcgtgtctggagtggagctgaacacaggcatgggcacagctgtgggcctgatggctgctggagctgctggggccagcggggccgccaggaagaggagcagcaccatgggcaccctgcgggactatgcagatgctgacatcaacatggccttcctggacagctacttcagcgagaaggcctatgcctatgcagatgaagatgagggccggcctgccaatgactgcctgctgatctatgaccacgagggcgtgggcagccctgtgggcagcatcggctgctgctcctggatcgtggatgacctggatgagagctgcatggagaccctggaccccaagttccgcaccctggccgagatctgcctgaacacagaaattgagcccttccccagccaccaggcctgcatccccatcagcacagacctgcccctgctgggccccaactactttgtgaatgaatcttctggcctgacccccagcgaggtggagttccaggaggagatggccgccagcgagcctgtggtgcacggggacatcatcgtgacagagacctatggaaatgctgacccctgtgtgcagcccaccaccatcatctttgacccccagctggcccccaacgtggtggtgacagaggccgtgatggcccctgtgtatgacatccagggcaacatctgtgtgcctgctgagctggccgactacaacaacgtcatctatgcagagcgggtgctggccagccctggggtgcctgacatgagcaacagcagcaccacagagggctgcatgggccctgtgatgagcggcaacatcctggtgggccctgagatccaggtgatgcagatgatgagcccagacctgcccatcggccagacagtgggcagcaccagccccatgaccagccgccaccgggtgacccgctacagcaacatccactacacccagcagtag

SEQ ID NO: 253117 - DNA, 3123 bp, Artificial Sequence
  derived and/or modified sequence
atggactggctgttcttccggaacatctgcctgctgatcatcctgatggtggttatggaggtgaattccgaatttatagtggaggttaaggagttcgatatagagaacgggactactaagtggcagacagtacggcgccagaagagagaatggattaagtttgctgcggcctgtagggaaggagaagacaattctaagcggaatccgatcgcgaagattaggtctgactgtgagtctaatcagaagataacctaccgtatcagcggggtcggcatcgacaggccaccttacggtgtgttcaccattaatccaaggaccggggagatcaatattacatctgtggtcgatagggagattacacctctgttcctcatttactgcagagctttgaactctcgcggtgaggacctggagcgacccctggaactacgcgtaaaggtcatggatattaatgacaatgccccagtgtttagccagtcggtgtacaccgcaagcatcgaggagaattctgacgctaataccctggtcgtcaaactttgcgctaccgatgctgacgaagaaaaccacctaaactccaaaattgcttacaagattgtctctcaagagccaagtggagccccaatgtttatactcaaccgctacacaggcgaagtttgcaccatgagttcatttttggaccgggaacagcacagcatgtataatttagtggtgcgagggtcagatcgcgacggcgctgctgacggacttagctccgagtgcgactgtcgtatcaaggtgctcgatgtgaacgacaattttccaaccctcgagaagacatcgtacagtgcctctatcgaagagaattgcttgagctccgaactgattcgcttgcaggccatcgatttggatgaagagggcacggacaattggctcgcgcagtacctgattctgtcaggaaacgatggtaactggttcgacatccaaacagatcctcagacaaacgaagggatactgaaagttgtcaaaatgctggactacgaacaggcccctaatatacagcttagtattggagtgaaaaaccaggccgactttcactactccgtggcgtcccagttccagatgcatcccactcccgtgaggattcaggtggttgatgtgagggaaggccctgccttccacccatccacaatggcgtttagcgtccgggaggggattaagggttccagcttgctgaactacgtcttaggcacatacaccgcgatcgaccttgatactgggaacccagctaccgatgttagatatataattggccatgacgctggcagctggctcaaaattgactctcgtacgggtgagatacagttctcacgcgagttcgacaagaaatctaaatacatcataaacggaatatataccgcagaaatcttggcgattgatgacgggtccgggaagacggctacagggactatctgcatagaagttcctgacattaacgattattgtcctaacattttccctgagcgccgaaccatatgtattgactctccttccgtgctaatctctgtgaacgagcacagctatggctccccattcaccttttgtgtggtggacgaacctcccggtatagctgacatgtgggatgttcgtagcacaaatgcgacgtccgctatactgaccgcaaagcaagtattgagccccggcttttatgagattcccatcctggtgaaagactcctacaatcgtgcctgcgaactggcacagatggtgcagctgtacgcctgtgactgcgatgataatcacatgtgccttgattccggtgccgcagggatatatacagaggatatcaccggagatacctacggacctgtcaccgaagaccaggccggagtgagcaatgttggtttaggccctgccggaatcggcatgatggtgttggggatcctgttacttatcctcgcccccctactcttgctgctatgttgttgtaagcagagacagcctgagggtctgggcacccgatttgcacctgtcccggagggaggcgagggggtgatgcagtcctggcggatcgaaggcgctcaccctgaagacagggacgtgagcaacatttgcgcgccaatgaccgctagtaacactcaggaccgcatggattcctctgagatctacaccaatacctatgctgctggaggtacggtagagggaggagtcagcggcgtggagctgaacactggtatgggtacagctgttggcctgatggctgccggcgctgccggcgcctccggcgctgcccgtaaacgatccagcacaatgggaacacttcgagactacgctgatgcagacatcaacatggcctttctagattcttatttcagcgagaaggcttatgcctatgcagatgaggacgagggccgccccgctaacgattgtctgcttatctatgatcatgagggcgtgggcagcccagtgggtagcatcggatgttgttcctggatagtcgatgacctagacgaatcttgcatggagaccctggatcccaagttcaggacactcgccgaaatctgcttgaacaccgaaatcgaacccttcccttcacaccaggcctgtattccaatctcaactgatttgccactcctggggccaaactattttgtgaacgagtcaagcggtctaactccatcggaagttgaattccaggaggagatggcagcttctgaacctgttgtacacggggatataatcgtcacagagacctacggaaatgcagacccctgtgtccagccaactactatcattttcgatcctcagctcgcccccaacgtggtcgtgactgaagcagttatggctcccgtttatgatattcagggtaacatctgtgtgccagcagaactggccgactataataacgtgatttacgcagagcgcgtgttggctagtccaggggtgccggatatgagtaattcctccacaacagaaggatgcatgggacctgtcatgtcaggaaatatcctcgtgggcccagagattcaggttatgcagatgatgagtcccgatctgccgatcgggcagactgtcggctccacatcgcctatgacctctaggcatcgcgtcacccgctacagtaatatccattacacacaacagtag

SEQ ID NO: 253118 - DNA, 3123 bp, Artificial Sequence
  derived and/or modified sequence
atggactggctcttttttcggaatatttgtctccttatcatactgatggtggtgatggaagttaattccgagttcattgttgaagtcaaagagtttgatatcgagaacggaaccacaaaatggcagacagtgcggcgacagaaaagggagtggattaaattcgctgccgcttgtcgtgagggggaggacaatagcaagcgtaaccccatcgctaaaatccgcagtgattgcgagagcaaccaaaagatcacatatagaatctctggggtaggaatagacaggccaccctacggcgttttcaccataaatcccaggacgggtgaaatcaacatcactagtgtagtggacagggagattactccgttatttctcatctattgtagagcactcaatagtaggggagaggacttggagaggccactggaactgagggtcaaagtgatggacataaatgataacgcaccagtgtttagtcagtctgtttacactgcaagtatcgaagagaattctgacgccaatactctcgtggtaaagctctgcgcgactgacgccgacgaagagaatcaccttaattcaaagattgcctacaagatagtgtctcaagagccttccggcgctcccatgttcatcctgaatcgctacaccggagaagtctgcactatgagttccttcctcgaccgtgaacagcactctatgtacaatctcgtggtaagaggtagcgatcgcgatggcgcagctgatgggctttcaagcgagtgcgattgtcggatcaaggtgctcgatgtgaacgacaacttcccaaccttagaaaagacctcatactctgcttcaatcgaggaaaattgcctcagttcagagctaatcaggctgcaggctattgacttagacgaagagggcaccgacaattggctggcccagtacttaatcctcagcggaaatgatggaaattggtttgacatccagaccgaccctcagactaacgagggcatacttaaagtggtgaaaatgcttgactatgaacaagctccaaatatccagttgtcaattggggtcaagaaccaggccgactttcattattctgtcgcatcacagtttcagatgcaccctacacccgtacgaatccaagtcgtggacgtgcgcgaagggcctgccttccacccgtccacaatggccttttccgttagggaaggcataaaagggagttctctgctgaattatgttctggggacttataccgcaatagacctggacaccggcaaccccgcaaccgatgtgcggtatatcattggccacgacgcaggtagctggttaaaaatcgactcacggactggggagatccagtttagtcgcgagttcgataaaaaaagtaagtatatcataaacgggatctatacagcagaaatcctggctatcgatgatggatcagggaagacggccacgggaactatttgcatcgaggtcccagacattaacgactattgccccaatatcttcccggagcggaggacgatttgtatcgactccccatcagtgctgattagtgtgaatgagcatagttatggatcaccttttacattctgcgttgttgatgagcctccaggaatcgcggatatgtgggacgtccgttcaaccaacgcaacatcggctatcttgacagcgaagcaggttctttcgcctggattttatgagatccccatccttgtgaaagatagctataacagggcctgcgagttagctcagatggtacagctttacgcatgtgactgcgacgacaaccacatgtgtttggatagcggagccgcaggcatctatacagaggacattacaggcgacacctacggcccagtgacagaagaccaggcaggcgtcagcaatgttggcctggggccagcaggcatcggaatgatggttctgggtatcttactgcttattctggcccctctcctccttcttctctgctgttgcaagcaacgccagcccgaaggacttggcacgcggtttgccccagtccctgagggtggggaaggcgtcatgcagtcttggaggatcgagggagctcatcccgaggaccgggatgtgtcaaatatctgcgcacccatgaccgcctccaacacacaggatagaatggattcttcagagatctacacaaacacctatgctgccggagggactgtggaggggggagtttctggcgttgaactgaatactgggatgggcactgccgttggccttatggccgcaggggcagccggagcatctggcgcagcccgaaagcggtctagcaccatgggcactttgagggactatgccgacgctgacattaacatggcctttctggactcctactttagcgaaaaggcgtacgcttatgcagacgaggacgaagggcgtcccgcaaacgactgtctgttgatttatgatcacgaaggagtcggaagcccagtgggcagtattgggtgttgtagttggatagttgatgacttggatgagagctgcatggagactctcgacccaaagttccggaccctcgccgagatctgtctcaatacggagattgagccattcccctcacaccaggcttgcataccaatatcaaccgacctgccccttttggggcctaattactttgtcaatgagtcaagtggcctgaccccaagtgaggttgaatttcaagaagagatggcagcctccgaacccgtcgttcacggcgacataatcgtgaccgaaacatacggcaatgcagacccttgcgtgcagcccactacaataatcttcgatccgcagctggcccctaatgtggtggtgactgaagcagtcatggcacctgtctacgacatccagggcaacatatgcgtaccagcggaacttgctgactataataatgtgatctacgccgagcgggttctggcttcgccgggtgttcccgatatgagcaactcttctaccaccgaggggtgcatgggccctgtgatgtcaggcaacattctggtcggacctgaaattcaggttatgcagatgatgtcgccagacttacccataggacagactgtggggagcactagtccaatgacctccaggcacagggtgactaggtactccaatattcattacacccagcagtag

SEQ ID NO: 253119 - DNA, 3123 bp, Artificial Sequence
  derived and/or modified sequence
atggactggctgttcttcagaaacatctgcctgctgatcatcctgatggtggtgatggaggtgaacagcgagttcatcgtggaggtgaaggagttcgacatcgagaacggcaccaccaagtggcagaccgtgagaagacagaagagagagtggatcaagttcgccgccgcctgcagagagggcgaggacaacagcaagagaaaccccatcgccaagatcagaagcgactgcgagagcaaccagaagatcacctacagaatcagcggcgtgggcatcgacagacccccctacggcgtgttcaccatcaaccccagaaccggcgagatcaacatcaccagcgtggtggacagagagatcacccccctgttcctgatctactgcagagccctgaacagcagaggcgaggacctggagagacccctggagctgagagtgaaggtgatggacatcaacgacaacgcccccgtgttcagccagagcgtgtacaccgccagcatcgaggagaacagcgacgccaacaccctggtggtgaagctgtgcgccaccgacgccgacgaggagaaccacctgaacagcaagatcgcctacaagatcgtgagccaggagcccagcggcgcccccatgttcatcctgaacagatacaccggcgaggtgtgcaccatgagcagcttcctggacagagagcagcacagcatgtacaacctggtggtgagaggcagcgacagagacggcgccgccgacggcctgagcagcgagtgcgactgcagaatcaaggtgctggacgtgaacgacaacttccccaccctggagaagaccagctacagcgccagcatcgaggagaactgcctgagcagcgagctgatcagactgcaggccatcgacctggacgaggagggcaccgacaactggctggcccagtacctgatcctgagcggcaacgacggcaactggttcgacatccagaccgacccccagaccaacgagggcatcctgaaggtggtgaagatgctggactacgagcaggcccccaacatccagctgagcatcggcgtgaagaaccaggccgacttccactacagcgtggccagccagttccagatgcaccccacccccgtgagaatccaggtggtggacgtgagagagggccccgccttccaccccagcaccatggccttcagcgtgagagagggcatcaagggcagcagcctgctgaactacgtgctgggcacctacaccgccatcgacctggacaccggcaaccccgccaccgacgtgagatacatcatcggccacgacgccggcagctggctgaagatcgacagcagaaccggcgagatccagttcagcagagagttcgacaagaagagcaagtacatcatcaacggcatctacaccgccgagatcctggccatcgacgacggcagcggcaagaccgccaccggcaccatctgcatcgaggtgcccgacatcaacgactactgccccaacatcttccccgagagaagaaccatctgcatcgacagccccagcgtgctgatcagcgtgaacgagcacagctacggcagccccttcaccttctgcgtggtggacgagccccccggcatcgccgacatgtgggacgtgagaagcaccaacgccaccagcgccatcctgaccgccaagcaggtgctgagccccggcttctacgagatccccatcctggtgaaggacagctacaacagagcctgcgagctggcccagatggtgcagctgtacgcctgcgactgcgacgacaaccacatgtgcctggacagcggcgccgccggcatctacaccgaggacatcaccggcgacacctacggccccgtgaccgaggaccaggccggcgtgagcaacgtgggcctgggccccgccggcatcggcatgatggtgctgggcatcctgctgctgatcctggcccccctgctgctgctgctgtgctgctgcaagcagagacagcccgagggcctgggcaccagattcgcccccgtgcccgagggcggcgagggcgtgatgcagagctggagaatcgagggcgcccaccccgaggacagagacgtgagcaacatctgcgcccccatgaccgccagcaacacccaggacagaatggacagcagcgagatctacaccaacacctacgccgccggcggcaccgtggagggcggcgtgagcggcgtggagctgaacaccggcatgggcaccgccgtgggcctgatggccgccggcgccgccggcgccagcggcgccgccagaaagagaagcagcaccatgggcaccctgagagactacgccgacgccgacatcaacatggccttcctggacagctacttcagcgagaaggcctacgcctacgccgacgaggacgagggcagacccgccaacgactgcctgctgatctacgaccacgagggcgtgggcagccccgtgggcagcatcggctgctgcagctggatcgtggacgacctggacgagagctgcatggagaccctggaccccaagttcagaaccctggccgagatctgcctgaacaccgagatcgagcccttccccagccaccaggcctgcatccccatcagcaccgacctgcccctgctgggccccaactacttcgtgaacgagagcagcggcctgacccccagcgaggtggagttccaggaggagatggccgccagcgagcccgtggtgcacggcgacatcatcgtgaccgagacctacggcaacgccgacccctgcgtgcagcccaccaccatcatcttcgacccccagctggcccccaacgtggtggtgaccgaggccgtgatggcccccgtgtacgacatccagggcaacatctgcgtgcccgccgagctggccgactacaacaacgtgatctacgccgagagagtgctggccagccccggcgtgcccgacatgagcaacagcagcaccaccgagggctgcatgggccccgtgatgagcggcaacatcctggtgggccccgagatccaggtgatgcagatgatgagccccgacctgcccatcggccagaccgtgggcagcaccagccccatgaccagcagacacagagtgaccagatacagcaacatccactacacccagcagtag

SEQ ID NO: 253120 - DNA, 3579 bp, Artificial Sequence
  derived and/or modified sequence
caccacagttatcacccatgccctcctaaaagggtgtctcaaagcatatctttctgtagagcagaattcggaactgagaagacgagggctcaaattgaatctcacaggatttgcgtgcaagagaaacccaaaggaatggattggctcttcttcagaaacatttgccttttgatcattctaatggtggtgatggaagtaaacagtgaatttattgttgaggtgaaggaatttgacattgaaaatggcactacaaaatggcaaacagtcagaagacaaaagcgggagtggatcaagtttgccgcagcctgtcgagaaggagaggacaactcgaagaggaaccccattgccaaaattcgatcagactgcgaatcgaaccagaagataacataccggatttctggagtagggattgatcgaccaccatatggggtattcaccattaatcctcgcactggggaaattaacatcacttcagtggtagacagagaaataactccacttttcttgatctattgccgggctctgaattcacggggtgaagatttagaaaggcctcttgagcttagagtcaaagttatggacataaatgataacgctccagtcttttcgcaaagtgtatacacagccagcattgaagaaaatagtgatgccaatacattggtagtaaagttatgtgccacagatgcagatgaagaaaatcatctgaattctaaaattgcctacaagatcgtctctcaggagccatcaggtgcacccatgttcattctgaataggtacactggagaagtctgcaccatgtccagtttcttggacagagagcaacacagtatgtacaacctggttgtgagaggctcagatcgggatggagctgcagatggactgtcttctgagtgtgactgtagaatcaaggttttagacgtcaacgataatttccccaccttagagaaaacttcatactcagccagtattgaagagaattgtttaagttcggaactgatacgattacaagcaattgatcttgatgaagaaggcactgataactggttggctcaatatttaattctctctggaaatgatgggaattggttcgatattcaaacagatccacaaaccaatgaaggcattttgaaagttgtcaagatgctggattatgaacaagcacctaacattcagcttagtatcggagttaaaaaccaagctgattttcactactccgttgcttctcaattccaaatgcacccaacccctgtgagaattcaagttgttgatgtgagagaaggacctgcatttcatccaagtactatggcttttagtgtgcgggaaggaataaaaggaagttccttattgaattatgtgcttggcacatatacagccatagatttggacacaggaaaccctgcaacagatgtcagatatatcatagggcatgatgcaggcagctggttaaaaattgattcaagaactggtgagatacaattttctagagaatttgataagaagtcaaaatatattatcaatgggatatacacagcagagatcctggctatagatgatggctctggaaaaacagctacaggaaccatatgtattgaggttcctgatatcaatgattattgtccaaacatttttcctgaaagaagaaccatctgcattgactctccatcagtccttatctctgttaatgaacattcttatgggtctccgtttactttctgtgttgttgatgagccaccaggaatagctgacatgtgggatgtcagatcaacaaatgctacctcggcaatccttacggctaagcaggttttatctccaggattttatgaaatcccaatcctggtgaaggacagctataacagagcatgtgaattggcacaaatggtgcagttatatgcctgtgattgcgatgacaaccacatgtgcctggactctggtgccgcgggcatctacacagaggacataactggtgacacgtatgggcctgtcactgaagaccaagctggagtttcaaatgttggtcttggaccagcagggattggcatgatggttctgggcatcctgctactgattttggctccactcttgctgctcctgtgttgctgcaaacagagacagccagaaggcctgggaacaagatttgctcctgtgcctgagggcggagaaggagtgatgcagtcttggagaattgaaggggcccatcccgaggacagggatgtgtcaaatatatgtgcacccatgacagcctcaaatacccaggatcggatggattcctctgaaatctacaccaacacctatgcagccgggggcacggtggaaggaggtgtatcgggagtggagctcaacacaggtatggggacagccgttggcctcatggccgcaggggccgcaggagcctcaggggccgcaaggaagaggagctctaccatgggaaccctgcgggactacgctgacgcagacatcaacatggctttcttggacagctacttctcggagaaagcgtatgcttatgcagatgaagatgaaggtcgaccagccaatgactgcttgctcatttatgaccacgagggagtcgggtctcccgtaggctctattggttgttgcagttggattgtggatgacttagatgaaagctgcatggaaactttagatccaaaatttaggactcttgctgagatctgcttaaacacagaaattgaaccatttccttcacaccaggcttgtataccaatcagtactgacctccctttgctcggacctaattactttgttaatgaatcttcaggattgactccctcagaagttgaattccaagaagaaatggcagcatctgaacccgtggtccatggggatattattgtgactgagacttacggtaatgctgatccatgtgtgcaacccactacaattatttttgatcctcagcttgcacccaatgttgtagtaaccgaagcagtaatggcacctgtctatgatattcaagggaatatttgtgtacctgctgagttagcagattacaacaatgtaatctatgctgagagagtactggctagtcctggtgtgcctgacatgagcaatagtagcacgactgagggttgtatgggacctgtgatgagcggcaatattttagtagggccagaaattcaagtgatgcaaatgatgagtccagaccttcccataggccaaaccgttggctccacatcccccatgacatctcgacacagagtaacacgatacagtaacatacattacacccaacagtaagtgctttatggtcagtattctatgtggagaccttgcaccttgtaatcatcaatacatccaccaaaaatatataatgtaccatatatattaatagtcaacaaatactcagatattctaaggtcaatgccattatttgattataccattttgagggtgaatatggctaggcactttagataagcctttttaaaattctttctgattttaaataatgcgtcaaaaaatgtgcagaaaatgtattgcatcccttgatactgtctaacgaatagcacataactcatattgtgaatcctatgggtcttgaggcctgtagaaccaatc

SEQ ID NO: 253121 - protein, 387 aa, Artificial Sequence
  derived and/or modified sequence
MVVERDDGSTLMEIDGDKGKQGGPTYYIDTNALRVPRENMEAISPLKNGMVEDWDSFQAILDHTYKMHVKSEASLHPVLMSEAPWNTRAKREKLTELMFEHYNIPAFFLCKTAVLTAFANGRSTGLILDSGATHTTAIPVHDGYVLQQGIVKSPLAGDFITMQCRELFQEMNIELVPPYMIASKEAVREGSPANWKRKEKLPQVTRSWHNYMCNCVIQDFQASVLQVSDSTYDEQVAAQMPTVHYEFPNGYNCDFGAERLKIPEGLFDPSNVKGLSGNTMLGVSHVVTTSVGMCDIDIRPGLYGSVIVAGGNTLIQSFTDRLNRELSQKTPPSMRLKLIANNTTVERRFSSWIGGSILASLGTFQQMWISKQEYEEGGKQCVERKCP

SEQ ID NO: 253122 - protein, 50 aa, Artificial Sequence
  derived and/or modified sequence
MVVERDDGSTLMEIDGDKGKQGGPTYYIDTNALRVPRENMEAISPLKNGM

SEQ ID NO: 253123 - DNA, 1164 bp, Artificial Sequence
  derived and/or modified sequence
atggtggtggagagagacgacggcagcaccctgatggagatcgacggcgacaagggcaagcagggcggccccacctactacatcgacaccaacgccctgagagtgcccagagagaacatggaggccatcagccccctgaagaacggcatggtggaggactgggacagcttccaggccatcctggaccacacctacaagatgcacgtgaagagcgaggccagcctgcaccccgtgctgatgagcgaggccccctggaacaccagagccaagagagagaagctgaccgagctgatgttcgagcactacaacatccccgccttcttcctgtgcaagaccgccgtgctgaccgccttcgccaacggcagaagcaccggcctgatcctggacagcggcgccacccacaccaccgccatccccgtgcacgacggctacgtgctgcagcagggcatcgtgaagagccccctggccggcgacttcatcaccatgcagtgcagagagctgttccaggagatgaacatcgagctggtgcccccctacatgatcgccagcaaggaggccgtgagagagggcagccccgccaactggaagagaaaggagaagctgccccaggtgaccagaagctggcacaactacatgtgcaactgcgtgatccaggacttccaggccagcgtgctgcaggtgagcgacagcacctacgacgagcaggtggccgcccagatgcccaccgtgcactacgagttccccaacggctacaactgcgacttcggcgccgagagactgaagatccccgagggcctgttcgaccccagcaacgtgaagggcctgagcggcaacaccatgctgggcgtgagccacgtggtgaccaccagcgtgggcatgtgcgacatcgacatcagacccggcctgtacggcagcgtgatcgtggccggcggcaacaccctgatccagagcttcaccgacagactgaacagagagctgagccagaagaccccccccagcatgagactgaagctgatcgccaacaacaccaccgtggagagaagattcagcagctggatcggcggcagcatcctggccagcctgggcaccttccagcagatgtggatcagcaagcaggagtacgaggagggcggcaagcagtgcgtggagagaaagtgcccctag

SEQ ID NO: 253124 - DNA, 153 bp, Artificial Sequence
  derived and/or modified sequence
atggtggtggagagagacgacggcagcaccctgatggagatcgacggcgacaagggcaagcagggcggccccacctactacatcgacaccaacgccctgagagtgcccagagagaacatggaggccatcagccccctgaagaacggcatgtag

SEQ ID NO: 253125 - DNA, 1164 bp, Artificial Sequence
  derived and/or modified sequence
atggtggtggaacgggatgacgggtctaccctaatggagattgatggagataaagggaagcaggggggccccacatactacattgatacgaacgctctccgcgtgccccgcgagaacatggaggcaatctctccactgaaaaacggcatggttgaggactgggactcctttcaagctatcctggaccacacctacaaaatgcacgttaaatctgaagcctccctgcacccggtgctgatgtccgaggccccttggaacacccgcgcaaagcgagagaagctgacagagctgatgtttgagcactataacatccccgctttttttctctgtaagactgccgtgctgacggccttcgcaaatggcaggtcaaccggactgatactggattcgggtgccactcacacaacagcaattcccgtacacgatggatacgtcctgcagcaagggattgtcaagtccccactggccggcgatttcattaccatgcagtgtcgggagttattccaggagatgaacattgagttagtacctccttacatgatcgcatcaaaagaggcagtgagggaaggaagtcccgcaaactggaagcgcaaagagaagctgccccaggtcactcgctcttggcacaattatatgtgcaattgtgtcatccaagattttcaggcttcagtgctccaggttagcgactcaacctatgatgaacaggtggccgcccaaatgcctacagtgcactatgaattcccaaacggctataattgcgatttcggggctgaacggcttaaaatacccgaaggcttattcgatccatccaacgtaaaggggctgtcaggaaacacaatgctaggcgtttcgcacgtggtgaccacctccgtgggcatgtgtgacatcgatatacggccaggcctgtatgggtctgttattgtggccggcggaaataccctgattcagagttttactgatcggttaaatcgggaactctcacagaaaacaccaccaagcatgcgcttgaaactgatagctaacaataccacggtagaaaggaggtttagtagctggatcggcggtagcattttagcttccctgggaacgttccagcagatgtggatcagcaaacaggaatacgaggagggaggcaagcaatgtgtcgagaggaagtgcccttag

SEQ ID NO: 253126 - DNA, 1164 bp, Artificial Sequence
  derived and/or modified sequence
atggttgtagaacgagacgatggttctaccctaatggaaattgacggcgataaaggtaagcagggagggccaacatactacattgacaccaacgcattgagggtccctagagagaacatggaggccattagtccactaaagaacgggatggtagaggactgggatagtttccaggccatcctggaccacacctacaagatgcacgttaaaagtgaagccagcctgcacccagtactgatgtccgaggcaccttggaacacacgggctaaaagagaaaaactgaccgagttgatgttcgaacattacaacattcctgcttttttcttatgtaagacagctgtacttaccgcatttgctaatgggcggagtacagggttgatcctggatagtggggccactcacacaaccgctattcctgtgcacgacggatacgtcttgcagcaggggatagtgaagtctccactggctggtgacttcattactatgcagtgtagggagctctttcaggaaatgaatatagaacttgtgccaccttatatgattgcctccaaggaggcagtgagggaaggcagtcctgcaaactggaagaggaaagagaagcttccccaagtgacgaggagctggcacaactacatgtgtaactgtgtgattcaggattttcaagcctccgttcttcaggtgagcgatagcacgtacgatgagcaggtcgcagcacagatgcccaccgtgcactatgagtttccgaacgggtataactgcgacttcggggccgagcggcttaagattccagagggtttgtttgatcctagcaacgtcaaaggcttatccggtaacaccatgctgggcgtgtcccacgtcgttacgaccagtgtaggcatgtgcgacatcgacatcaggcctgggctatacggatcagtgatagtcgccggcgggaatactttgatccaatcctttactgataggctcaatagggaactctcacaaaagacccctcccagtatgcgcttgaaactgattgcaaataatacaacagtagagagaaggttctcgagctggattggaggctctatcctcgcgtccctggggacattccaacagatgtggatcagcaaacaagaatacgaggagggaggcaaacagtgtgtcgagcgtaagtgcccctag

SEQ ID NO: 253127 - DNA, 153 bp, Artificial Sequence
  derived and/or modified sequence
atggtcgtggaacgcgacgatggaagtaccctgatggaaattgatggcgacaagggaaagcaagggggcccaacatattacattgacactaacgcgctgagggtcccccgcgagaatatggaggccattagcccattgaaaaacgggatgtag

SEQ ID NO: 253128 - DNA, 1164 bp, Artificial Sequence
  derived and/or modified sequence
atggtggtggagagagatgatggcagcaccctgatggagattgatggagacaagggcaagcagggcggccccacctactacatcgacaccaatgccctgcgggtgccccgggagaacatggaggccatcagccccctgaagaatggcatggtggaggactgggacagcttccaggccatcctggaccacacctacaagatgcacgtgaagtctgaggccagcctgcaccctgtgctgatgtctgaggccccctggaacacccgggccaagcgggagaagctgacagagctgatgtttgagcactacaacatcccagccttcttcctgtgcaagacagctgtgctgacagcctttgccaacggccgcagcacaggcctcatcctggacagcggggccacccacaccacagccatccctgtgcatgatggctacgtgctgcagcagggcatcgtgaagagccccctggccggggacttcatcaccatgcagtgccgggagctgttccaggagatgaacatcgagctggtgcccccctacatgattgccagcaaggaggccgtgcgggagggcagccctgccaactggaagaggaaggagaagctgccccaggtgaccaggtcctggcacaactacatgtgcaactgtgtgatccaggacttccaggcctctgtgctgcaggtgtctgacagcacctatgatgagcaggtggccgcccagatgcccaccgtgcactatgagttccccaacggctacaactgtgactttggagctgagcggctgaagatccctgagggcctgtttgaccccagcaatgtgaagggcctgagcggcaacaccatgctgggcgtgagccacgtggtgaccacctctgtgggcatgtgtgacatcgacatccggcccggcctgtatggctctgtgattgtggccggcggcaacaccctcatccagagcttcacagaccggctgaaccgggagctgagccagaagaccccacccagcatgaggctgaagctgattgccaacaacaccaccgtggagcggcgcttcagctcctggattggaggcagcatcctggccagcctgggcaccttccagcagatgtggatcagcaagcaggagtatgaggagggcggcaagcagtgtgtggagaggaaatgtccctag

SEQ ID NO: 253129 - DNA, 153 bp, Artificial Sequence
  derived and/or modified sequence
atggtggtggagagagatgatggcagcaccctgatggagattgatggagacaagggcaagcagggcggccccacctactacatcgacaccaatgccctgcgggtgccccgggagaacatggaggccatcagccccctgaagaatggcatgtag

SEQ ID NO: 253130 - DNA, 1164 bp, Artificial Sequence
  derived and/or modified sequence
atggtggtggagcgggacgacggcagcaccctgatggagatcgacggcgacaaaggcaaacagggtggtcctacttactacattgatacaaacgctcttagggtaccacgtgagaacatggaggcaatttcacccctcaagaacggcatggtggaggactgggattcatttcaagctattctggatcatacatataaaatgcacgtcaaatctgaggcctccctgcaccccgtgctaatgtcagaggctccatggaatacgagagctaaacgtgaaaaacttacagagctcatgttcgaacactacaacattccagctttcttcctctgcaagaccgcggttctcaccgctttcgccaatggtcggtccacaggcttgatactcgactcaggagccacccacaccactgccattcctgtacatgacggatacgtgctccagcaggggattgttaagtctccattggctggggatttcattaccatgcagtgtcgcgagttgtttcaggagatgaacatcgagcttgtgccaccatatatgattgccagtaaggaagcggtgagagagggatccccagccaattggaaaaggaaagaaaaattgccccaggtgacaaggtcgtggcacaactatatgtgcaactgcgtaattcaggacttccaggcctctgtgctccaggtatcagatagcacttatgatgagcaggtcgctgcccagatgccaaccgtgcactatgaattcccaaacggatacaattgcgacttcggagcagagagactaaagattcccgaaggtctgttcgatcccagcaacgtaaaggggttgtctggcaacaccatgctcggagtgtctcacgtcgtgactacaagtgttggtatgtgcgacatagatataagacctggtctttacgggtcagtgattgttgccggaggtaacactttgatccaatcattcactgatcgtctgaatagggaactctcgcagaagactccccctagcatgcggcttaagttgatagctaataacacgacagtggaacggcgtttttcttcttggattggaggaagcattctcgcttccctcggcacattccagcaaatgtggatcagcaagcaggaatacgaagaagggggaaagcagtgtgtggagcggaagtgtccatag

SEQ ID NO: 253131 - DNA, 1164 bp, Artificial Sequence
  derived and/or modified sequence
atggtggtggagcgggacgacggcagcaccctgatggagatcgacggtgacaagggcaaacagggcgggcccacttactacattgatacaaacgcactgcgggtgccacgcgaaaatatggaggccatctcaccactgaagaacggaatggtggaggactgggattctttccaagcgattcttgatcatacctacaagatgcacgttaaatctgaagccagtctccatcctgtccttatgagcgaagcgccgtggaatacccgagcgaagcgggagaagctgaccgagctcatgttcgaacactacaatattcctgccttttttctgtgcaagactgctgttctgaccgccttcgcgaacggccgcagcaccggtctgattttggattctggagcgacacacaccaccgccatccctgtgcatgatggttatgtgctgcagcaagggatcgtgaagagccccttggcaggcgacttcattactatgcaatgccgtgaattgttccaggagatgaacatcgaactcgtccccccgtacatgattgcaagcaaagaagctgtccgtgaaggcagccccgctaactggaaaagaaaagagaagctcccgcaggtgactagatcttggcataactacatgtgcaactgtgttattcaggatttccaggcttcagtcctccaagtgtcagatagcacatacgacgagcaggttgccgcccagatgcccaccgtgcactatgaattcccaaatggttataattgtgattttggagccgaacggctgaagatacctgagggcctgttcgatccctcaaatgtgaaagggctctccggaaacaccatgctcggtgtgtcccacgtagtcacgaccagtgtcgggatgtgcgatatagatatacggccaggcctttacggcagcgtaatagtagctggagggaacaccttaatccagtcatttaccgatcgtctgaatagagagttgagtcaaaaaacccctccctcaatgagattaaaacttatcgcgaacaataccacagtggagcgccggttcagtagctggattgggggcagtatcctagccagcctgggtaccttccagcagatgtggataagcaagcaggagtacgaagagggcggcaagcagtgcgtggagcgcaagtgtccctag

SEQ ID NO: 253132 - DNA, 153 bp, Artificial Sequence
  derived and/or modified sequence
atggtggtggagcgggacgacggcagcaccctgatggagatcgacggggataaaggaaaacagggcggccctacctactacattgatacgaatgcccttcgggtgcctcgagagaatatggaggctatttccccattgaaaaacggtatgtag

SEQ ID NO: 253133 - DNA, 1164 bp, Artificial Sequence
  derived and/or modified sequence
atggtggtagagcgagatgacggcagtaccctgatggagatcgatggcgacaagggcaagcaggggggtcccacttactatattgatacaaatgcattgagagtcccgagagagaacatggaggctataagtcccttgaagaacgggatggtggaagattgggactcattccaggcgatcctcgatcacacttacaagatgcatgtgaagagcgaagcgtctttacatcctgtgctcatgtctgaagccccttggaatactcgggctaagagagagaagttaacagaactgatgtttgagcactataatattcctgccttttttttgtgcaaaacagccgtgctaacagcttttgccaatgggagatccaccggcttgatcctcgattctggagccacacacaccacagcgatccccgtgcacgacggctacgttctgcagcagggaatcgttaagtcccccctggcgggagatttcatcacaatgcaatgtcgggagctgtttcaagagatgaacatcgagttagtgcccccttacatgattgcaagtaaagaggccgtcagagagggcagtccggcaaattggaaacggaaggagaagttgccgcaagtcacccgatcctggcacaactacatgtgcaattgcgtgatccaggacttccaggctagcgtgctccaagtctccgactcgacatatgatgaacaggtcgctgcacaaatgcctactgtccactatgagttcccaaacggatacaactgcgattttggggctgaacggcttaaaattccagaaggcctatttgacccctccaacgtcaagggtctgtcaggcaataccatgctcggcgtttcacacgtggtcacaacctccgtcgggatgtgtgatatcgatattagacccggattgtacggcagcgtcatcgtggctggtggtaacaccctaatacagagcttcaccgaccgactgaacagggagttgtcccagaaaacgccaccatccatgcggttgaagctcattgctaataacaccactgttgaaagacggttttcttcctggatcggtggtagtatcctcgcctcattgggtacctttcagcagatgtggattagtaaacaagaatacgaagaaggcggaaaacaatgtgtcgagagaaagtgcccctag

SEQ ID NO: 253134 - DNA, 1164 bp, Artificial Sequence
  derived and/or modified sequence
atggtggttgaacgggatgatggcagcaccctgatggagatcgatggtgacaaaggtaagcaggggggtcctacctattacatcgacactaatgcattgcgggttcccagggagaacatggaagctattagcccattgaagaatgggatggtcgaagactgggattcgtttcaggctatcctagaccacacctataagatgcacgtcaaatcagaggcatcgctgcatcctgtgttgatgtcagaggcaccctggaatactcgtgcaaaacgcgagaaactgacggagcttatgttcgagcactacaacatccctgccttttttctatgtaagaccgctgtcctgactgctttcgccaatgggaggagcacagggctgattctcgactccggggctactcacacaacggcaatccctgtgcatgatggttatgttttacagcaaggcatcgtcaaatctcccctggccggtgatttcatcactatgcagtgtcgagagctgttccaggagatgaacatcgagctcgttcccccttatatgatcgcgagtaaggaggctgtgcgagaaggatccccagctaactggaagcgaaaagaaaagctccctcaggtgacccgaagttggcacaattatatgtgcaattgcgtcatccaggattttcaggcctcggtgcttcaggttagtgactccacatacgacgagcaggtggccgcacagatgccaaccgtgcactacgagttccccaacggctataattgtgattttggcgctgaacggctgaagatcccggagggcctgttcgacccaagcaacgtgaaggggctcagcggcaacacaatgctcggagtgtcccatgttgttaccacatctgtggggatgtgcgatatcgacatccgccctggcctgtatggctccgtgatcgttgccggaggtaacactcttatacagtctttcactgataggctcaatcgcgagctgagccaaaaaacacctcccagtatgagactaaagttgattgcgaacaacactacggttgaacgacggtttagctcgtggattggaggctccatcctggcctccctgggtaccttccagcagatgtggatttctaagcaggaatacgaggaggggggtaaacaatgcgtagagcgcaagtgcccttag

SEQ ID NO: 253135 - DNA, 153 bp, Artificial Sequence
  derived and/or modified sequence
atggtcgtcgagagggatgacggatctacactgatggagatcgacggggataaaggaaaacaggggggaccaacatattatattgacacgaatgctctgcgggtccctcgtgagaacatggaggctatttccccactgaagaatggtatgtag

SEQ ID NO: 253136 - DNA, 399 bp, Artificial Sequence
  derived and/or modified sequence
atgaccgtgaccggcctgggctggagagacgtgctggaggccatcaaggccaccagacccatcgccaaccccaaccccggcttcagacagcagctggaggagttcggctgggccagcagccagaagctgagaagacagctggaggagagattcggcgagagccccttcagagacgaggaggagctgagagccctgctgcccctgtgcaagagatgcagacagggcagcgccaccagcgccagcagcgccggcccccacagcgccgccagcgagggcaccgtgcagagactggtgcccagaacccccagagaggcccacagacccctgcccctgctggccagagtgaagcagaccttcagctgcctgcccagatgcctgagcagaaagggcggcaagtag

SEQ ID NO: 253137 - DNA, 399 bp, Artificial Sequence
  derived and/or modified sequence
atgaccgtgaccggacttgggtggagggatgtacttgaggccattaaggctacaagacctattgccaatcctaatcccgggttccgacagcagctggaggagttcggttgggcctcttctcaaaaactccgacgtcaactcgaagaacggttcggcgagtctccgttcagggatgaggaggagctgcgcgcattgctgcctttgtgcaagagatgtaggcagggatcagcaacttcggcctcctccgccggaccacacagtgccgccagcgaggggaccgttcaacgtttggtaccacggacgccccgggaagcacatcgacctttaccgctactggcgcgggtgaaacagaccttctcttgtctgccaaggtgcctttcacgcaaagggggaaagtag

SEQ ID NO: 253138 - DNA, 399 bp, Artificial Sequence
  derived and/or modified sequence
atgaccgttaccggactgggatggcgagacgtgctagaggccataaaggcaaccaggcctattgcaaatcccaatcctggcttccgacagcagctggaagaatttgggtgggcctcatcccagaaactcagacgacaactggaggaaaggttcggagaatctccattccgcgacgaagaggagctgagagctctgctgcccctgtgcaagagatgcagacagggctcagctacgtcagcttcctctgctggaccacacagcgccgcgtctgagggcacagtccagagacttgtgcctcgcacacccagagaagcccacagacctctacctcttctcgccagggtaaagcaaactttcagttgtctccctaggtgcttgagcaggaagggcggcaagtag

SEQ ID NO: 253139 - DNA, 399 bp, Artificial Sequence
  derived and/or modified sequence
atgacagtcaccggtctgggatggagggacgtgttagaggcgattaaggcgacccgccctatagcgaaccccaaccctgggtttagacagcagcttgaagagttcggctgggcatcaagtcagaagctgcgacgccaactggaggagcgctttggggagtcacccttccgggatgaagaggaacttcgcgctctgctccccctgtgcaaaaggtgtcgtcagggtagcgctacttcagcttcttcagctggacctcactctgcggccagtgagggaacagttcagagactcgttcctcgcacgcctcgcgaggcccataggcccttgccactgcttgctagagtgaaacaaacgttctcctgtctacccagatgcctgtcccggaaaggcgggaaatag

SEQ ID NO: 253140 - DNA, 399 bp, Artificial Sequence
  derived and/or modified sequence
atgacagtgacaggcctgggctggagagatgtgctggaggccatcaaggccacccggcccatcgccaaccccaaccctggcttccggcagcagctggaggagtttggctgggccagcagccagaagctgcggcggcagctggaggagagatttggagagagccccttcagagatgaggaggagctgcgggccctgctgcccctgtgcaagcgctgccggcagggcagcgccaccagcgccagcagcgctggcccccacagcgctgccagcgagggcaccgtgcagaggctggtgcccaggaccccccgggaggcccaccggcccctgcccctgctggcccgggtgaagcagaccttcagctgcctgccccgctgcctgagcaggaaaggaggcaagtag

SEQ ID NO: 253141 - DNA, 399 bp, Artificial Sequence
  derived and/or modified sequence
atgaccgtgaccggcctgggctggcgggacgtgctggaggccatcaaagcaacaagacctattgccaaccctaatccaggtttccggcagcagcttgaagagtttggctgggcaagttcacagaagttgaggcgacaactcgaggagagatttggcgagtcccccttcagagacgaagaggaattacgggcactattacccttgtgcaagaggtgtaggcaaggttcggccaccagcgcttcttcagcaggtccccattcggccgccagcgaggggacagtgcagcgactcgtgccacgcacccctcgggaggcacacagacccctgcccctgttagctagagtgaagcagacattcagctgtctccctcggtgcctttcacgcaagggaggcaagtag

SEQ ID NO: 253142 - DNA, 399 bp, Artificial Sequence
  derived and/or modified sequence
atgaccgtgaccggcctgggctggcgggacgtgctggaggccatcaaagcaacgcgccctattgcaaaccctaatcctggatttcgacagcaattggaagagttcggttgggcaagcagccagaagttgcggcggcagctcgaagaaagattcggcgaatccccattcagggacgaagaggaattgagagccctcctccccttgtgtaagcggtgcagacagggctcagcgacaagcgcctcttctgccggtccacatagtgcagcttcagagggtaccgtccagaggctggtgccccgcacccctcgggaggcccacaggccgcttcccttactcgcccgggtcaaacagacctttagctgccttccacggtgtttgtccagaaagggagggaagtag

SEQ ID NO: 253143 - DNA, 399 bp, Artificial Sequence
  derived and/or modified sequence
atgaccgtgaccggcctgggctggcgggacgtgctggaggccatcaaggccacacgcccaattgcaaatccaaacccgggatttcggcagcagctggaggagtttggatgggcctcctcacagaagttacggcggcagctggaggaacggttcggtgagtcccccttccgcgacgaggaggagttgagagccctgctgcctctctgtaagcgctgtagacagggaagtgctacatccgccagcagcgcaggtccacattccgcagcaagtgaggggacagttcaaaggctcgtgccgagaactccaagggaggctcatagacccctccccttgctggcccgagtcaaacagaccttttcctgcctgccgcgctgcctgtctcggaaaggcggcaagtag

SEQ ID NO: 253144 - DNA, 399 bp, Artificial Sequence
  derived and/or modified sequence
atgactgtcaccggactgggttggagagatgtccttgaggcgataaaagcgacacgccctattgctaacccaaatccaggattcagacagcagctcgaggagttcggctgggcgagcagccagaagttgcgaaggcaattggaagagcgctttggagagagcccatttagggacgaagaggaacttcgtgcacttctccctctctgcaagcgatgcaggcagggaagcgctacaagcgcttctagtgcaggccctcacagtgcggcaagcgaaggcacagtgcagagactagtgccgaggacccccagagaagctcatcgtccgttaccactcttagccagagtgaaacagactttttcttgtctcccgcgttgcttgagcaggaaggggggtaaatag

SEQ ID NO: 253145 - DNA, 399 bp, Artificial Sequence
  derived and/or modified sequence
atgactgtgactggtttgggctggcgtgatgtccttgaagcaatcaaggccacccgccctattgccaaccctaaccccggtttccgacagcaactggaggaattcggatgggcctcttcccagaagctaaggagacagcttgaggaacgcttcggtgagtccccgtttcgcgacgaggaagaactccgggcactgctgccgctgtgtaagcggtgccgccaggggtccgctacaagcgcctcatccgccggaccacacagtgccgctagcgaaggcacggttcagaggcttgtgccgcgtacccctcgtgaagcacaccgccctctccccctgttggcacgcgtgaagcagaccttcagctgtctgcctaggtgtcttagccgcaaggggggaaagtag

SEQ ID NO: 253146 - DNA, 399 bp, Artificial Sequence
  derived and/or modified sequence
atgactgtgactggcctgggttggcgagacgtcctggaggctatcaaggccacacgtcccatcgctaaccctaatcccggttttagacagcagctggaagaatttggatgggcgagctcccagaagcttagacgccagttggaggaacggttcggagagtccccgttccgcgatgaagaagagttgagagcccttttgcccctatgtaagcgctgcaggcagggctctgctacttcagccagcagcgcaggtccacattccgctgcatccgagggaaccgtccagcggttggtacccaggacccctcgtgaggctcacaggcccctgcccctgctcgcgcgtgtgaagcaaacgttttcatgtctgccccgttgtttgagcaggaaaggtgggaaatag

SEQ ID NO: 253147 - protein, 612 aa, Artificial Sequence
  derived and/or modified sequence
MLEGLGSPASPRAAASASVAGSSGPAACSPPSSSAPRSPESPAPRRGGVRASVPQKLAEMLSSQYGLIVFVAGLLLLLAWAVHAAGVSKSDLLCFLTALMLLQLLWMLWYVGRSSAHRRLFRLKDTHAGAGWLRGSITLFAVITVILGCLKIGYFIGFSECLSATEGVFPVTHSVHTLLQVYFLWGHAKDIIQSFKTLERFGVIHSVFTNLLLWANGVLNESKHQLNEHKERLITLGFGNITTVLDDHTPQCNCTPPTLCTAISHGIYYLYPFNIEYQILASTMLYVLWKNIGRKVDSHQHQKMQFKSDGVMVGAVLGLTVLAATIAVVVVYLIHIGRSKTKSESALIMFYLYAITLLMLMGAAGLAGIRIYRIDEKSLDESKNPARKLDSDLLVGTASGSWLISWGSILAILCAEGHPRYTWYNLPYSILAIVEKYIQNLFIFESIHREPEKLSEDIQTLRVVTVCNGNTMPLASSCPKSGGVARDVAPQGKDMPPAANGNVCMRESHDKEEEKQEESSWGGSPSPVRLPRFLQGNAKRKVLRNIAAFLFLCNISLWIPPAFGCRPEYDNGLEEIVFGFEPWIIVVNLAMPFSIFYRMHAAASLFEVYCKI

SEQ ID NO: 253148 - DNA, 1839 bp, Artificial Sequence
  derived and/or modified sequence
atgctcgaaggtcttggatcgcccgcaagcccaagggccgcagcatcagcaagcgttgctggaagttccggccctgctgcctgctctcctccatcgtccagtgcacccaggagtccagagagtcctgccccaaggcgaggcggagtgcgcgcttcagtgccccaaaagctggcagaaatgttgagcagtcagtatggtctgatcgtctttgtggctggactgttgttactccttgcttgggctgtgcacgcggcaggagtctcgaaatcagatctcttgtgcttcctgaccgcgctgatgctcctgcaactactatggatgctgtggtacgtgggccgatcttccgcccaccggagactatttagattaaaagacactcacgccggagccggatggctgcgtggctccatcacccttttcgctgttattactgtgatactgggctgtcttaagatcggatactttatcggcttctccgagtgcttgtctgccactgagggggtgttccccgttacgcacagcgttcatactttacttcaggtatactttctgtggggccatgccaaagatattattcaaagcttcaaaactctggagcggtttggcgtgatccattcagtcttcaccaacctactgttgtgggctaacggggtacttaatgaatccaaacaccaacttaatgaacataaagagcgcctaatcacattgggattcggcaacatcactaccgttcttgacgatcacaccccccaatgcaactgcacccctcctactctttgtaccgcgatcagtcacggaatttactacctttatccctttaatatcgaatatcagattttggccagcactatgctctatgtgttatggaaaaatatcgggcgtaaagtggactcacatcagcaccaaaagatgcaatttaagagtgacggggtgatggtcggagctgtgctggggctcacggtcctggctgctaccattgcagtagttgtggtctatctgatccatatcggtagatctaagacgaagtctgagtccgctctgattatgttttatctgtacgctattactctgctgatgcttatgggcgctgccggattggcagggataagaatttatcgaattgatgagaagagcttagacgagtctaaaaatcccgctcgtaaactggactctgacctactggtcggaacagcatcaggctcctggttgatcagctgggggtcaatactagccattctttgcgccgagggccacccaaggtacacttggtacaatctcccgtactctattttggctatcgtggagaaatacattcagaatctgttcatctttgagtcaatccacagagagcctgagaaactttccgaagacattcaaactcttcgagtagtcactgtgtgcaatggaaacacaatgcctctcgcttccagttgtcccaagtctggcggagtcgccagagacgtcgcccctcaggggaaagacatgcccccagcggctaacgggaatgtgtgtatgcgtgaaagccacgacaaagaagaggaaaagcaggaagagagcagttggggcggatctccctcacccgtgagactgccccgttttttgcagggaaacgctaagagaaaagtgctgagaaatatcgccgctttcctgtttctttgcaatatatcactctggattcctccggcatttggatgccgaccagaatatgacaacggattggaagagattgtgtttggatttgagccttggattatcgtggtgaacctggccatgccattttccattttctatagaatgcatgccgctgcctctcttttcgaggtgtactgcaagatctag

SEQ ID NO: 253149 - DNA, 1839 bp, Artificial Sequence
  derived and/or modified sequence
atgttggaggggctgggatctcccgcttcaccccgagctgctgcaagcgcgagcgtagctgggagttctggcccagccgcctgttctccaccttcttcaagcgcgcctcgtagccctgagagcccagccccaagacgtggaggggtgagggcctcagttccccaaaagctggcagagatgctttccagtcagtacgggctgattgtctttgtggcaggcctgctgctgctgctcgcgtgggcagtgcatgccgccggggtctctaaatccgacctgctgtgcttcctgaccgcactgatgttgctgcagctgttgtggatgctgtggtacgtagggcgttcgtccgcacatagacgacttttcaggctgaaagacacacacgccggggccggatggttgcgcggctcaattaccttattcgccgtgattactgttattctcggttgtctgaagatcgggtatttcatcggtttcagtgagtgcctgagtgcaaccgaaggagtctttcccgttacacattcagtacacaccctgcttcaggtatattttttgtggggccacgccaaggacataatacaatcatttaagacgctcgagagatttggagttattcattccgtttttacgaacctgctgctgtgggccaacggtgtgctgaatgagtcgaagcatcagcttaatgaacacaaggaacgcctgataactctgggatttggtaatattaccaccgtgcttgatgatcacacaccacagtgtaattgcacacctccaacattatgtacggccattagccatgggatatactacctgtacccgtttaacattgaatatcaaatactcgcttccactatgctgtacgtgctttggaaaaacattggacgtaaggtggacagtcaccaacaccagaagatgcagtttaaaagtgatggagttatggtgggagcggtgcttggattaaccgtgctcgcagcaacgatcgccgttgtggtcgtttatctcattcacattgggcgtagcaagaccaagtctgaatctgcactgatcatgttctacttgtacgctattaccctgttaatgctaatgggcgctgcagggttggctggcattaggatctatcgtatcgacgagaaatccctagacgagtccaagaaccccgctcgaaaactcgattctgatcttctggtcggcacagcatccggctcttggctgatcagctggggtagcatcctggctattctttgtgctgaagggcaccctaggtatacatggtacaatctcccctacagtatattagctatcgtggaaaaatatattcaaaacttattcatatttgagagcatccatcgcgaacccgaaaaattatccgaggatatacagaccttgcgcgtggttacagtctgtaacggcaacaccatgccactcgccagttcttgccccaagagcgggggggttgctcgggacgtagctcctcaagggaaggatatgccaccagcagccaacgggaacgtttgtatgagagagtcccacgacaaggaggaagagaagcaagaagagtcaagttggggaggctctccatcacctgtgcgactaccccgctttcttcaaggtaatgcaaaaagaaaggtgctgagaaacatcgccgccttcctgttcctatgcaacatatccctgtggattcctcccgcgttcgggtgtcgccccgagtatgacaacggcctagaagaaatcgtgttcggtttcgaaccgtggataatagtggtgaatctcgccatgcccttctccatcttctaccgcatgcacgcggctgccagcctattcgaagtgtactgtaagatttag

SEQ ID NO: 253150 - DNA, 1839 bp, Artificial Sequence
  derived and/or modified sequence
atgcttgagggcttgggctccccagctagtccacgtgccgctgcctctgcctctgtagccggctcttccggccccgctgcttgctcaccaccatcttcaagtgcaccacgctccccagaatcgcccgccccaaggcgtggaggagtgcgcgcctctgtgcctcagaaacttgcggaaatgctgtccagccagtatggactcattgttttcgtcgctggactgctccttcttctcgcgtgggcagtgcacgccgccggtgtatctaaatcggatctactgtgctttctgaccgctctgatgttacttcaactgctgtggatgctgtggtatgtcggtaggtcaagtgcacatagaagactgtttcgactgaaagacacccatgcaggcgcaggctggttacgcggctcaattacattgtttgcggtaatcactgtgatcctcggctgcctcaaaattgggtacttcattggattctccgagtgtctgtcagcaacagaaggcgtgtttccggtcactcatagtgttcacacgcttctccaggtgtacttcctttgggggcacgccaaggacatcatccaatcctttaaaacgttagaaaggtttggcgtaattcattctgtatttaccaacctcctcctttgggctaatggagtcttgaatgaaagcaaacatcaacttaatgaacacaaagagagacttatcactctgggatttggaaacatcactacagttcttgatgatcacacaccacaatgtaactgcacaccccccactttgtgtaccgcaataagccacggaatttactatttatacccgtttaacattgagtaccagattctagctagcacaatgttgtatgtgctgtggaaaaacatcggccgcaaagtagactcccaccagcaccagaagatgcaattcaagagtgatggagtgatggtgggtgctgtcctgggccttactgtgctcgctgccaccatcgccgtggtggtcgtgtacctaattcatataggtaggtcaaaaaccaagagtgagtctgctttaattatgttttatttatacgcaataacactactaatgctgatgggagctgccggactagctggtatcaggatatatcgaatcgacgagaagagtctggatgagtcaaaaaatcctgcaagaaaattggacagtgacctgcttgtcggaaccgcttccggctcatggttaatttcatggggatccattctcgccattctctgtgcagagggccaccccaggtatacttggtacaacctaccttattccatccttgctatagttgagaagtacattcagaacctgtttatcttcgaaagtatccatcgcgaacccgaaaagttgagcgaggatatccagaccttacgagtggtgaccgtctgcaatggcaacacaatgccccttgccagctcctgcccaaaaagcggtggagtcgcccgcgatgtggcaccccagggaaaagacatgcccccagccgccaacgggaacgtttgtatgagagagtcccacgacaaggaggaagagaagcaagaagagtcaagttggggaggctctccatcacctgtgcgactaccccgctttcttcaaggtaatgcaaaaagaaaggtgctgagaaacatcgccgccttcctgttcctatgcaacatatccctgtggattcctcccgcgttcgggtgtcgccccgagtatgacaacggcctagaagaaatcgtgttcggtttcgaaccgtggataatagtggtgaatctcgccatgcccttctccatcttctaccgcatgcacgctgctgctagccttttcgaagtgtattgtaagatctag

SEQ ID NO: 253151 - DNA, 1864 bp, Artificial Sequence
  derived and/or modified sequence
cagacttggcgcgggtgtctcgaagatgctcgagggcctggggtcgcccgcctcgccccgggcagctgcaagcgcctcggtcgcagggtcgtcggggccagcggcctgctcgcctccctcgtcctcggccccgaggtccccggaatccccggccccccggcggggcggtgtgcgcgccagcgtcccacagaaactggccgagatgctgagcagccagtatgggctgatcgtgttcgtggcggggctgctgctgctgctggcctgggccgtgcacgccgcgggcgtgagcaagagcgacctgctgtgcttcctgacggcgctcatgctgctgcagctgctgtggatgctgtggtacgtgggccgcagctccgcgcaccgccgcctcttccgcctcaaggacacgcacgcgggtgccggctggctgcgcggtagtatcacattgtttgcagtcattaccgtcatcctgggatgccttaaaattggatacttcattggattttcagaatgtttatcagccactgaaggagttttcccagtcacccattcagtgcatactttgttgcaggtatattttctttgggggcatgcaaaggatattatccagtctttcaaaacactggaaaggtttggagtgatccactcggtgttcaccaacctgcttctgtgggccaatggcgtcctcaatgagtcaaagcaccaactcaatgagcacaaggaacggctcatcactctgggttttgggaacataacaacagttttagatgaccacacaccgcagtgtaactgcacgcccccaactctgtgcactgccatctcccacgggatctactacctctaccccttcaacatagagtatcagatcctggcctccacaatgctctacgtcctgtggaagaacatcgggcgcaaagttgacagccatcagcaccagaagatgcagttcaagtctgatggggtcatggtgggcgcagtcctgggcctgaccgtgctggccgccaccattgctgtggtggtggtatacctgattcatattgggcgctccaagaccaagagcgagtcggcactcatcatgttctacctgtatgccatcaccctgctgatgcttatgggggctgcggggctggctggaatccggatttacaggatagacgagaagtcactggatgagtccaaaaatccggcccgcaaactggactcggacctcttggtgggcactgcctcgggctcctggcttatctcctggggctcaatcttggccatcctctgtgctgagggccacccccgctacacctggtacaacctgccctactccatcctggcgatcgtggagaagtacatccagaacctcttcatctttgaatccattcaccgagagcctgaaaaactctctgaggacatccaaacccttcgggtggtcacagtctgcaatggcaacaccatgccccttgcttcttcctgccccaagagtggaggtgtggccagagatgtggctccccagggcaaggacatgccaccagcagccaatggaaatgtgtgcatgagagaaagccatgacaaggaggaggagaagcaggaggagagcagctggggagggagcccaagcccagtccgccttccccgtttcttacagggcaacgccaagagaaaagtcctgaggaatattgcagccttcttgttcctctgcaatatttcgctttggatacctcccgcctttggctgtcgacctgagtatgacaatggattggaggagattgtctttggctttgaaccctggataattgtggtcaacctggccatgcctttttctattttctatcgaatgcacgcagctgcctccctctttgaggtctattgtaagatatag

SEQ ID NO: 253152 - DNA, 1839 bp, Artificial Sequence
  derived and/or modified sequence
atgctggagggcctgggcagccccgccagccccagagccgccgccagcgccagcgtggccggcagcagcggccccgccgcctgcagcccccccagcagcagcgcccccagaagccccgagagccccgcccccagaagaggcggcgtgagagccagcgtgccccagaagctggccgagatgctgagcagccagtacggcctgatcgtgttcgtggccggcctgctgctgctgctggcctgggccgtgcacgccgccggcgtgagcaagagcgacctgctgtgcttcctgaccgccctgatgctgctgcagctgctgtggatgctgtggtacgtgggcagaagcagcgcccacagaagactgttcagactgaaggacacccacgccggcgccggctggctgagaggcagcatcaccctgttcgccgtgatcaccgtgatcctgggctgcctgaagatcggctacttcatcggcttcagcgagtgcctgagcgccaccgagggcgtgttccccgtgacccacagcgtgcacaccctgctgcaggtgtacttcctgtggggccacgccaaggacatcatccagagcttcaagaccctggagagattcggcgtgatccacagcgtgttcaccaacctgctgctgtgggccaacggcgtgctgaacgagagcaagcaccagctgaacgagcacaaggagagactgatcaccctgggcttcggcaacatcaccaccgtgctggacgaccacaccccccagtgcaactgcaccccccccaccctgtgcaccgccatcagccacggcatctactacctgtaccccttcaacatcgagtaccagatcctggccagcaccatgctgtacgtgctgtggaagaacatcggcagaaaggtggacagccaccagcaccagaagatgcagttcaagagcgacggcgtgatggtgggcgccgtgctgggcctgaccgtgctggccgccaccatcgccgtggtggtggtgtacctgatccacatcggcagaagcaagaccaagagcgagagcgccctgatcatgttctacctgtacgccatcaccctgctgatgctgatgggcgccgccggcctggccggcatcagaatctacagaatcgacgagaagagcctggacgagagcaagaaccccgccagaaagctggacagcgacctgctggtgggcaccgccagcggcagctggctgatcagctggggcagcatcctggccatcctgtgcgccgagggccaccccagatacacctggtacaacctgccctacagcatcctggccatcgtggagaagtacatccagaacctgttcatcttcgagagcatccacagagagcccgagaagctgagcgaggacatccagaccctgagagtggtgaccgtgtgcaacggcaacaccatgcccctggccagcagctgccccaagagcggcggcgtggccagagacgtggccccccagggcaaggacatgccccccgccgccaacggcaacgtgtgcatgagagagagccacgacaaggaggaggagaagcaggaggagagcagctggggcggcagccccagccccgtgagactgcccagattcctgcagggcaacgccaagagaaaggtgctgagaaacatcgccgccttcctgttcctgtgcaacatcagcctgtggatcccccccgccttcggctgcagacccgagtacgacaacggcctggaggagatcgtgttcggcttcgagccctggatcatcgtggtgaacctggccatgcccttcagcatcttctacagaatgcacgccgccgccagcctgttcgaggtgtactgcaagatctag

SEQ ID NO: 253153 - DNA, 1839 bp, Artificial Sequence
  derived and/or modified sequence
atgctggaaggcttgggctcgccagcttctcctcgtgccgcagcgagtgcttctgtggccggttcttccggaccagccgcatgctccccgcccagttcctccgccccaagatccccggagtcacctgccccaaggagaggtggcgtacgagcctccgttccacagaagttggctgaaatgttgtcatctcagtacggcctcatcgttttcgtggcaggcttacttttgctcctggcttgggcagtacacgctgctggagtgagcaagagtgatcttctctgcttcttaacagctctcatgctgctccaactcctctggatgctgtggtatgtgggcagaagctcggcgcacagacggttgtttcggcttaaggacactcatgccggagccgggtggcttcggggatccatcactttgttcgctgtcataaccgtcatccttggctgtctgaaaatcggctatttcatcggattcagtgagtgtctctcggcaacagagggggtcttccctgtgacacattccgtacacacactgctccaggtttactttctgtgggggcacgccaaggatataatccaaagctttaaaactttagaaagattcggagttatccacagtgtgttcactaatctcctattgtgggcgaacggagtgttaaacgaatccaaacaccagcttaacgagcacaaggagaggctgataaccctgggtttcggtaacatcaccactgtgttagacgatcacacgccgcagtgtaattgtactccacctactttgtgcacagccattagccatggcatctactacttgtatcccttcaatattgaataccagatcctcgcttccacaatgttgtacgtcctatggaagaatattggccggaaggttgacagtcaccaacatcagaagatgcagttcaagtccgacggtgtcatggtcggagccgtgctgggactgactgtcctggccgctacaattgccgtggtagttgtctacctcatccacatcgggcggagtaaaactaagagcgagagtgcactgataatgttctacctgtatgccatcactctcctcatgcttatgggagccgccgggctggccggaataagaatctaccgcatcgacgaaaaatccctagatgagagcaagaacccggcccgtaaactcgattctgatctcctggtcggcacagcgtctggcagttggctgatctcatggggctctatccttgcaatcctctgcgcagaaggccacccacgctatacatggtataacctcccttattccatccttgcgattgtcgaaaaatacattcagaacctgttcatttttgagtctattcatcgagaaccagaaaagctttccgaggacatccagacgctgcgcgttgtcaccgtttgtaacggcaatacaatgccgcttgcatcaagttgtccgaagtctggaggagttgcccgtgacgtcgctccacaggggaaagacatgcctcccgccgccaatggaaacgtatgtatgcgtgagtctcacgacaaggaagaagagaaacaggaagaaagctcttggggtggatctccatcacccgtacgtttaccaagatttctacagggaaatgccaagcggaaggtgctacggaacatcgccgctttcctctttctgtgtaacatctctttatggatcccacctgccttcggctgtagacccgagtatgataacggccttgaagaaattgtcttcggcttcgaaccttggataatcgtcgttaacctggctatgccattcagtattttttaccgcatgcacgcagccgcatcgcttttcgaggtgtactgcaagatctag

SEQ ID NO: 253154 - DNA, 1839 bp, Artificial Sequence
  derived and/or modified sequence
atgctggagggcctgggcagccctgccagccccagggctgctgccagcgcctctgtggccggcagcagcggccctgctgcctgcagcccccccagcagcagcgcccccaggagccctgagagccctgcccccaggagaggaggagtgcgggcctctgtgccccagaagctggccgagatgctgagcagccagtatggcctcatcgtgtttgtggccggcctgctgctgctgctggcctgggccgtgcacgccgccggcgtgtccaagagtgacctgctgtgcttcctgacagccctgatgctgctgcagctgctgtggatgctgtggtacgtgggccgcagcagcgcccaccggcggctcttccggctgaaggacacccacgccggggccggctggctgcggggcagcatcaccctgtttgctgtgatcaccgtcatcctgggctgcctgaagattggctacttcatcggcttcagcgagtgcctgagcgccacagaaggagtcttccctgtgacccacagcgtgcacaccctgctgcaggtgtacttcctgtggggccacgccaaggacatcatccagagcttcaagaccctggagagatttggagtcatccacagcgtcttcaccaacctgctgctgtgggccaacggggtgctgaatgaaagcaagcaccagctgaatgagcacaaggagcggctcatcaccctgggcttcggcaacatcaccaccgtgctggatgaccacaccccccagtgcaactgcaccccacccaccctgtgcacagccatcagccacggcatctactacctgtaccccttcaacatcgagtaccagatcctggccagcaccatgctgtatgtgctgtggaagaacatcggcaggaaggtggacagccaccagcaccagaagatgcagttcaagagtgatggagtgatggtgggcgctgtgctgggcctgactgtgctggccgccaccatcgctgtggtggtggtgtacctgatccacatcggccgcagcaagaccaagtctgagagcgccctgatcatgttctacctgtatgccatcaccctgctgatgctgatgggcgccgccggcctggccggcatccgcatctacagaattgatgagaagagcctggatgagagcaagaacccagccaggaagctggacagcgacctgctggtgggcacagccagcggctcctggctgatctcctggggcagcatcctggccatcctgtgtgccgagggccacccccgctacacctggtacaacctgccctacagcatcctggccatcgtggagaagtacatccagaacctcttcatctttgagagcatccaccgggagcctgagaagctgtctgaggacatccagaccctgcgggtggtgacagtgtgcaatggaaacaccatgcccctggccagcagctgccccaagtctggaggagtggccagagatgtggccccccagggcaaggacatgcccccagctgccaatggaaatgtgtgcatgagggagagccatgacaaggaggaggagaagcaggaggagagctcctggggcggcagccccagccctgtgcggctgccccgcttcctgcagggcaatgccaagaggaaggtgctgaggaacattgctgccttcctgttcctgtgcaacatcagcctgtggatccccccagccttcggctgcaggccagaatatgacaatggcctggaggagatcgtgtttggatttgagccctggatcatcgtggtgaacctggccatgcccttcagcatcttctacaggatgcatgctgctgccagcctgtttgaggtgtactgcaagatctag

SEQ ID NO: 253155 - DNA, 1839 bp, Artificial Sequence
  derived and/or modified sequence
atgctggagggcctgggcagccccgccagcccccgggccgccgccagtgcttccgttgctggaagcagcggccctgctgcttgctcgcccccttcctccagcgcgcctagatcacccgagtctcctgcccctcgtcggggtggcgttagagcatccgtcccccagaaactggccgaaatgctcagttctcaatatggcctgattgtcttcgtcgccgggctcttgttactgctggcatgggccgtgcatgcagccggcgtttccaaaagtgacttattatgctttctgaccgccttgatgctcctgcagcttctgtggatgctgtggtacgtcgggaggtccagcgcacaccgccggctttttcggctgaaggacactcatgcaggcgccggatggctgagagggtccattacactgttcgccgtcatcacagtcatcctcggatgcctcaaaatcggttacttcattggttttagcgagtgtctttccgcaacagaaggggtcttcccggtgactcattctgtacatacgttgctgcaggtgtacttcctgtggggccacgctaaggacattatacagtcatttaagactttggagaggttcggcgtgatccactccgtattcacaaacctgctcctttgggccaacggcgtgttgaacgagtccaagcaccagctgaacgagcacaaagagaggctgataaccttagggtttggcaacatcaccaccgttctagacgatcatacccctcagtgtaattgcacccctcctaccttgtgcacagccatttcccatggtatctattacctatatcctttcaatattgaataccagatactggcgtcaaccatgctctatgtactttggaagaacatcggaagaaaagtagactctcatcagcatcagaagatgcagtttaagagtgatggtgtcatggttggcgctgtcttaggcctcacagtcctagctgctaccatcgccgtcgtggtcgtgtaccttatccacattggtcggagtaaaacaaagtcagagagcgctcttatcatgttttacctgtacgcaatcacgctgttgatgttgatgggggcagctggattagccggaatacggatttacaggatagatgaaaagagtctggatgagtctaaaaatccagcccggaagctggacagtgacctcctcgtcggtacggcttctggctcttggctgatttcatggggaagcatccttgcaatcctttgcgcagagggccatcctcgctatacttggtacaatttgccatacagtatcctggccattgtggagaaatatattcagaatctcttcattttcgaatcaattcacagggagcctgaaaagttgagcgaagatatccaaacacttcgagtagtgactgtgtgcaatggcaatacaatgcccctggccagttcttgccctaagtccggcggcgtggcaagggacgtagcgccacaagggaaggatatgccacctgccgccaatgggaacgtctgcatgcgcgagagtcatgataaggaggaagagaagcaagaggagtcgagttggggcggctccccttcacctgtacggctcccaagattccttcaaggcaatgcaaagagaaaggtgcttcgcaatatagccgcttttctgtttctgtgtaacatcagcctgtggattccacctgcctttggctgccgccctgaatacgacaacggtctcgaagagatagtttttggatttgagccttggatcatagtcgtgaaccttgccatgcctttcagcatcttctacaggatgcatgcagccgcttcactgtttgaagtgtattgcaaaatatag

SEQ ID NO: 253156 - RNA, 1839 nt, Artificial Sequence
  derived and/or modified sequence
auguuggaggggcugggaucucccgcuucaccccgagcugcugcaagcgcgagcguagcugggaguucuggcccagccgccuguucuccaccuucuucaagcgcgccucguagcccugagagcccagccccaagacguggaggggugagggccucaguuccccaaaagcuggcagagaugcuuuccagucaguacgggcugauugucuuuguggcaggccugcugcugcugcucgcgugggcagugcaugccgccggggucucuaaauccgaccugcugugcuuccugaccgcacugauguugcugcagcuguuguggaugcugugguacguagggcguucguccgcacauagacgacuuuucaggcugaaagacacacacgccggggccggaugguugcgcggcucaauuaccuuauucgccgugauuacuguuauucucgguugucugaagaucggguauuucaucgguuucagugagugccugagugcaaccgaaggagucuuucccguuacacauucaguacacacccugcuucagguauauuuuuuguggggccacgccaaggacauaauacaaucauuuaagacgcucgagagauuuggaguuauucauuccguuuuuacgaaccugcugcugugggccaacggugugcugaaugagucgaagcaucagcuuaaugaacacaaggaacgccugauaacucugggauuugguaauauuaccaccgugcuugaugaucacacaccacaguguaauugcacaccuccaacauuauguacggccauuagccaugggauauacuaccuguacccguuuaacauugaauaucaaauacucgcuuccacuaugcuguacgugcuuuggaaaaacauuggacguaagguggacagucaccaacaccagaagaugcaguuuaaaagugauggaguuauggugggagcggugcuuggauuaaccgugcucgcagcaacgaucgccguuguggucguuuaucucauucacauugggcguagcaagaccaagucugaaucugcacugaucauguucuacuuguacgcuauuacccuguuaaugcuaaugggcgcugcaggguuggcuggcauuaggaucuaucguaucgacgagaaaucccuagacgaguccaagaaccccgcucgaaaacucgauucugaucuucuggucggcacagcauccggcucuuggcugaucagcugggguagcauccuggcuauucuuugugcugaagggcacccuagguauacaugguacaaucuccccuacaguauauuagcuaucguggaaaaauauauucaaaacuuauucauauuugagagcauccaucgcgaacccgaaaaauuauccgaggauauacagaccuugcgcgugguuacagucuguaacggcaacaccaugccacucgccaguucuugccccaagagcggggggguugcucgggacguagcuccucaagggaaggauaugccaccagcagccaacgggaacguuuguaugagagagucccacgacaaggaggaagagaagcaagaagagucaaguuggggaggcucuccaucaccugugcgacuaccccgcuuucuucaagguaaugcaaaaagaaaggugcugagaaacaucgccgccuuccuguuccuaugcaacauaucccuguggauuccucccgcguucgggugucgccccgaguaugacaacggccuagaagaaaucguguucgguuucgaaccguggauaauaguggugaaucucgccaugcccuucuccaucuucuaccgcaugcacgcggcugccagccuauucgaaguguacuguaagauuuag

SEQ ID NO: 253157 - RNA, 1839 nt, Artificial Sequence
  derived and/or modified sequence
augcuugagggcuugggcuccccagcuaguccacgugccgcugccucugccucuguagccggcucuuccggccccgcugcuugcucaccaccaucuucaagugcaccacgcuccccagaaucgcccgccccaaggcguggaggagugcgcgccucugugccucagaaacuugcggaaaugcuguccagccaguauggacucauuguuuucgucgcuggacugcuccuucuucucgcgugggcagugcacgccgccgguguaucuaaaucggaucuacugugcuuucugaccgcucugauguuacuucaacugcuguggaugcugugguaugucgguaggucaagugcacauagaagacuguuucgacugaaagacacccaugcaggcgcaggcugguuacgcggcucaauuacauuguuugcgguaaucacugugauccucggcugccucaaaauuggguacuucauuggauucuccgagugucugucagcaacagaaggcguguuuccggucacucauaguguucacacgcuucuccagguguacuuccuuugggggcacgccaaggacaucauccaauccuuuaaaacguuagaaagguuuggcguaauucauucuguauuuaccaaccuccuccuuugggcuaauggagucuugaaugaaagcaaacaucaacuuaaugaacacaaagagagacuuaucacucugggauuuggaaacaucacuacaguucuugaugaucacacaccacaauguaacugcacaccccccacuuuguguaccgcaauaagccacggaauuuacuauuuauacccguuuaacauugaguaccagauucuagcuagcacaauguuguaugugcuguggaaaaacaucggccgcaaaguagacucccaccagcaccagaagaugcaauucaagagugauggagugauggugggugcuguccugggccuuacugugcucgcugccaccaucgccgugguggucguguaccuaauucauauagguaggucaaaaaccaagagugagucugcuuuaauuauguuuuauuuauacgcaauaacacuacuaaugcugaugggagcugccggacuagcugguaucaggauauaucgaaucgacgagaagagucuggaugagucaaaaaauccugcaagaaaauuggacagugaccugcuugucggaaccgcuuccggcucaugguuaauuucauggggauccauucucgccauucucugugcagagggccaccccagguauacuugguacaaccuaccuuauuccauccuugcuauaguugagaaguacauucagaaccuguuuaucuucgaaaguauccaucgcgaacccgaaaaguugagcgaggauauccagaccuuacgaguggugaccgucugcaauggcaacacaaugccccuugccagcuccugcccaaaaagcgguggagucgcccgcgauguggcaccccagggaaaagacaugcccccagccgccaacgggaacguuuguaugagagagucccacgacaaggaggaagagaagcaagaagagucaaguuggggaggcucuccaucaccugugcgacuaccccgcuuucuucaagguaaugcaaaaagaaaggugcugagaaacaucgccgccuuccuguuccuaugcaacauaucccuguggauuccucccgcguucgggugucgccccgaguaugacaacggccuagaagaaaucguguucgguuucgaaccguggauaauaguggugaaucucgccaugcccuucuccaucuucuaccgcaugcacgcugcugcuagccuuuucgaaguguauuguaagaucuag

SEQ ID NO: 253158 - protein, 197 aa, Artificial Sequence
  derived and/or modified sequence
MPFLHGFRRIIFEYQPLVDAILGSLGIQDPERQESLDRPSYVASEESRILVLTELLERKAHSPFYQEGVSNALLKMAELGLTRAADVLLRHGANLNFEDPVTYYTALHIAVLRNQPDMVELLVHHGADVNRRDREKLLCSMLWPAATGCRSTILRTFVSYWKEGQTSRPPPKMGTQCSPASSSCLVRPWEGTKRRPR

SEQ ID NO: 253159 - DNA, 594 bp, Artificial Sequence
  derived and/or modified sequence
atgccattcctgcacgggttccggcggataatcttcgagtaccagcctctggtggacgccatcctggggtccttgggaatacaggatcccgaaagacaggagagtctggatcgcccctcttatgtggccagcgaggagtctagaattctcgtcttgacagaactcctcgagcgcaaagctcactctcccttctaccaagagggcgtgtctaatgcgctgctcaagatggctgaactgggcttaactagagccgctgatgttctgctccgacatggtgctaatcttaacttcgaggaccctgtcacctactatacagccttacacatcgctgtactgaggaaccaaccagacatggtagagcttctggtgcatcatggggccgacgtaaatcgcagggatcgcgagaaattgctgtgctccatgctgtggcctgcagcgacgggatgccggagtaccatactccggacattcgtatcctactggaaggagggccagaccagtcggccccccccaaagatggggacacagtgctctcccgcgtctagcagttgtctcgttcggccctgggaaggtactaaacgacggcctagatag

SEQ ID NO: 253160 - DNA, 594 bp, Artificial Sequence
  derived and/or modified sequence
atgcccttcctgcacggcttccgccgcatcatctttgagtaccagcccctggtggatgccatcctgggcagcctgggcatccaggaccctgagcggcaggagagcctggaccggcccagctatgtggccagcgaggagagccgcatcctggtgctgacagagctgctggagaggaaggcccacagccccttctaccaggagggcgtgtccaatgccctgctgaagatggccgagctgggcctgaccagggctgctgatgtgctgctgcggcatggagccaacctgaactttgaggaccctgtgacctactacacagccctgcacatcgctgtgctgaggaaccagcctgacatggtggagctgctggtgcaccacggggctgatgtgaacagaagagaccgggagaagctgctgtgcagcatgctgtggccagctgccaccggctgccgcagcaccatcctgcggacctttgtgtcctactggaaggagggccagaccagccggcccccacccaagatgggcacccagtgcagccctgccagcagcagctgcctggtgcggccctgggagggcaccaagaggcggcccaggtag

SEQ ID NO: 253161 - DNA, 594 bp, Artificial Sequence
  derived and/or modified sequence
atgcccttcctgcacggcttccggcggatcatcttcgagtaccagccactcgtcgatgccatcctggggtccctcggtatccaagaccccgagcgacaagaaagcttggatagaccttcctatgtggcctccgaggaatcgcgcatcctggtcttgaccgaactgttggaacgcaaagcccactccccattttaccaggaaggggtcagtaatgccctcctaaagatggccgagctgggacttaccagggcggccgatgtcttgctgcgccacggcgcgaatctcaatttcgaggacccagtcacttactacacagctctgcatattgccgtactgcgaaaccagccagacatggtggagctcttggtccaccacggtgctgacgttaaccgcagggatagagaaaaactactgtgttctatgctgtggccagctgccacggggtgcagatctacaattttacgcacctttgttagctactggaaagaaggacaaacttctaggccacctccaaagatggggacacaatgctcccctgccagctccagttgcttagttagaccatgggaagggacgaagcgccggccgagatag

SEQ ID NO: 253162 - DNA, 594 bp, Artificial Sequence
  derived and/or modified sequence
atgccatttctgcatggatttcggaggataatttttgaatatcagcctcttgttgacgccatcctgggcagtctcggcatccaggaccctgaaaggcaggaaagtttggaccgtccttcatacgtcgcatcagaggagagccgtatcctggtgctcacagaactcctggagaggaaggcgcattcacccttctatcaggagggggtctccaacgctctgttgaagatggcggaattgggcctcacacgggctgctgatgttctcctgcgacatggcgcaaatctgaatttcgaggacccggtgacctactatacagcactgcacatagcagttctcaggaatcagccagatatggtggagctgttagtccaccatggagccgacgttaatagaagggaccgcgaaaagcttctgtgttcgatgctgtggcctgctgctacggggtgtcgttctaccatccttagaacatttgtgtcctattggaaagagggccagacatcaagaccccctccaaagatgggaacacagtgcagcccagcctcatctagctgcttggtgcggccttgggaaggtactaaacgcaggccaagatag

SEQ ID NO: 253163 - DNA, 594 bp, Artificial Sequence
  derived and/or modified sequence
atgcccttcctgcacggcttcagaagaatcatcttcgagtaccagcccctggtggacgccatcctgggcagcctgggcatccaggaccccgagagacaggagagcctggacagacccagctacgtggccagcgaggagagcagaatcctggtgctgaccgagctgctggagagaaaggcccacagccccttctaccaggagggcgtgagcaacgccctgctgaagatggccgagctgggcctgaccagagccgccgacgtgctgctgagacacggcgccaacctgaacttcgaggaccccgtgacctactacaccgccctgcacatcgccgtgctgagaaaccagcccgacatggtggagctgctggtgcaccacggcgccgacgtgaacagaagagacagagagaagctgctgtgcagcatgctgtggcccgccgccaccggctgcagaagcaccatcctgagaaccttcgtgagctactggaaggagggccagaccagcagacccccccccaagatgggcacccagtgcagccccgccagcagcagctgcctggtgagaccctgggagggcaccaagagaagacccagatag

SEQ ID NO: 253164 - protein, 358 aa, Artificial Sequence
  derived and/or modified sequence
MAEGERQPPPDSSEEAPPATQNFIIPKKEIHTVPDMGKWKRSQAYADYIGFILTLNEGVKGKKLTFEYRVSEMWNEVHEEKEQAAKQSVSCDECIPLPRAGHCAPSEAIEKLVALLNTLDRWIDETPPVDQPSRFGNKAYRTWYAKLDEEAENLVATVVPTHLAAAVPEVAVYLKESVGNSTRIDYGTGHEAAFAAFLCCLCKIGVLRVDDQIAIVFKVFNRYLEVMRKLQKTYRMEPAGSQGVWGLDDFQFLPFIWGSSQLIDHPYLEPRHFVDEKAVNENHKDYMFLECILFITEMKTGPFAEHSNQLWNISAVPSWSKVNQGLIRMYKAECLEKFPVIQHFKFGSLLPIHPVTSG

SEQ ID NO: 253165 - DNA, 1077 bp, Artificial Sequence
  derived and/or modified sequence
atggcagaaggggagcgtcagcctcctcccgatagttctgaggaagcacctcccgctacccaaaatttcatcatccccaagaaggagatccataccgttccagatatgggcaagtggaaacgatcccaagcgtacgcggattatatcgggtttatccttaccttaaacgagggcgtgaagggcaagaagcttacctttgaataccgagtctcagagatgtggaacgaggtgcacgaggagaaggagcaggctgctaagcagagcgtaagctgtgacgaatgcatacccctaccccgcgccggtcattgtgccccgagcgaggccattgaaaaactcgtagcgttgctgaatacgctagacagatggattgacgagacaccacctgtcgatcaaccatcccggttcggcaacaaagcctaccggacgtggtatgccaaattggacgaggaggcggagaatctcgtggcaacggtagtgccaacccatctggccgccgccgtccctgaggtggctgtctaccttaaagagagtgtggggaattccacacgcatagattacgggaccggtcatgaggccgcgttcgctgccttcctctgctgtctatgcaagataggcgtgttgagagttgatgaccagatcgccatcgtgtttaaggtcttcaaccgctatctcgaagtgatgcggaaactacaaaagacatataggatggaacccgctgggtctcagggcgtctggggtcttgacgatttccagttccttcccttcatttggggcagctcacagctcatcgatcatccttacctggaaccaagacactttgtggatgagaaagctgtcaatgagaatcataaagattatatgtttctggaatgtattttattcattaccgaaatgaagactggtccgttcgccgagcactctaatcagctgtggaatatctccgcagtgcctagctggtccaaagtcaatcaggggctcattcgcatgtataaggcggaatgcctcgagaaatttcctgttattcagcattttaagtttggctcattacttcctatacatcctgtaacatctggttag

SEQ ID NO: 253166 - DNA, 1077 bp, Artificial Sequence
  derived and/or modified sequence
atggccgagggggagcggcagcccccaccagacagcagcgaggaggcccccccagccacccagaacttcatcatccccaagaaggagatccacacagtgcctgacatgggcaagtggaagaggagccaggcctatgctgactacatcggcttcatcctgaccctgaatgaaggagtgaagggcaagaagctgacctttgagtacagagtgtctgagatgtggaatgaggtgcatgaggagaaggagcaggccgccaagcagagcgtgtcctgtgatgagtgcatccccctgccccgggccggccactgtgcccccagcgaggccatcgagaagctggtggccctgctgaacaccctggaccgctggattgatgagaccccacctgtggaccagcccagcagatttggaaacaaggcctaccgcacctggtacgccaagctggatgaggaggccgagaacctggtggccaccgtggtgcccacccacctggccgctgctgtgcctgaggtggccgtgtacctgaaggagagcgtgggcaacagcaccagaattgattatggcaccggccacgaggccgcctttgctgccttcctgtgctgcctgtgcaagattggagtgctgcgggtggatgaccagatcgccatcgtgttcaaggtgttcaaccgctacctggaggtgatgaggaagctgcagaagacctacaggatggagcctgctggcagccagggcgtgtggggcctggatgacttccagttcctgcccttcatctggggcagcagccagctgattgaccacccctacctggagcccaggcactttgtggatgagaaggctgtgaatgaaaaccacaaggactacatgttcctggagtgcatcctcttcatcacagagatgaagacaggcccctttgctgagcacagcaaccagctgtggaacatctctgctgtgcccagctggagcaaggtgaaccagggcctcatccgcatgtacaaggcagaatgtctggagaagtttcctgtgatccagcacttcaagtttggcagcctgctgcccatccaccctgtgaccagcggctag

SEQ ID NO: 253167 - DNA, 1077 bp, Artificial Sequence
  derived and/or modified sequence
atggccgagggcgagcggcagcccccccccgacagcagcgaggaggcacccccagcgactcaaaattttatcatcccaaaaaaggagatccataccgtccctgacatgggaaaatggaaacgatctcaggcttacgcagactacatcggcttcatcctgaccctgaatgaaggagtgaaggggaaaaaactgacattcgagtacagagtgtcagagatgtggaacgaagtacatgaagaaaaagagcaggctgccaagcagtcagtgtcatgcgatgaatgtatcccactcccgcgggcggggcattgcgccccatctgaagccatagagaagctggtcgctctcttaaatactctggatagatggatcgacgagaccccccctgtggatcagccatctcgttttggaaataaggcctacaggacctggtatgctaagctggacgaggaagccgaaaacctcgtggccactgtcgttcctacacacttggccgctgccgtgccagaggtggctgtatacctgaaggaaagcgtcgggaattctactcgcatagactacggaaccggacacgaagccgcattcgccgctttcttatgttgcctgtgcaaaataggagtgctaagagtggatgaccagatcgcaattgtgttcaaggtgttcaaccgctatctggaggtgatgcgcaaattacaaaaaacataccggatggaacccgctggaagccagggcgtctggggtctcgatgattttcagttcttgccttttatctggggcagctctcagctcatagaccatccctatttagaaccaagacattttgtcgacgagaaggctgtgaacgagaatcacaaagattacatgttcctggagtgcatcttattcattactgaaatgaaaacaggcccattcgcggaacattctaatcagctctggaacataagcgcggttccctcatggagcaaggttaaccaagggcttatcagaatgtacaaagctgaatgtctggaaaagttcccagtgatccaacacttcaagtttgggtctttgctccctatccaccccgtcacatcaggttag

SEQ ID NO: 253168 - DNA, 1077 bp, Artificial Sequence
  derived and/or modified sequence
atggctgagggggaacgccagcctcctccggactctagtgaggaggccccacccgcaacgcagaacttcatcatacccaagaaggaaattcacactgttcccgacatgggaaagtggaaacgttctcaagcatatgcggactacatcggttttatcttgacacttaacgagggcgtgaaaggcaaaaagctcacttttgagtacagggtgtctgagatgtggaacgaagtccacgaggagaaagaacaggctgcaaaacaatcagtatcctgcgacgagtgtataccactgcctagggccggacactgtgccccatccgaggccatcgaaaagttagtggcattgctgaatacactggaccgatggatcgacgagactccccctgtagatcagccaagccgctttggcaataaggcatatagaacctggtacgctaagttagacgaagaggctgagaatttagtggctacagttgttcctactcatttagctgcggctgtacccgaagtagcggtgtatctaaaagaatctgtagggaatagtacgaggatcgactacggcacaggccacgaggccgctttcgcagccttcttgtgttgtctgtgtaagatcggggtgctgcgtgtggacgaccaaatcgctatcgtgttcaaagtatttaacaggtatcttgaggtgatgcggaagctgcagaaaacctacaggatggaaccagcgggatcccagggcgtgtgggggctcgacgacttccagtttctgcctttcatatgggggtcttctcagctcattgaccacccctatctggaaccccgacacttcgtggatgagaaagcggttaatgagaaccacaaggattacatgttcctcgaatgtatcctttttatcacagagatgaagactggcccattcgctgagcacagtaaccagttgtggaatatttctgcagtcccctcatggtctaaagttaaccagggcctgatccgcatgtacaaggccgagtgtttggagaaattcccggtgattcagcacttcaaattcggttcccttctgcctatacacccagtgacatccggctag

SEQ ID NO: 253169 - DNA, 2824 bp, Artificial Sequence
  derived and/or modified sequence
ccgcactgacatggccgtcgcccggttccgcgcgtccgccgcgcgccggccgttaataggcttgctccctgagcgccccgcaccgacatggcggccgtcttcgctgtggtgactttaactctcggttttcggttatagccggccggcgctcacttgtcttcaggaagctcggagcctttggtggagccggggagaggaagggtgggtgcaagagtgaaaggcgagaggggactgcaagcatccgggtcggctcctggccggagcaagatggctgagggcgagcggcagccgccgccagattcttcagaggaggcccctccagccactcagaacttcatcattccaaaaaaggagatccacacagttccagacatgggcaaatggaagcgttctcaggcatacgctgactacatcggattcatccttaccctcaacgaaggtgtgaaggggaagaagctgaccttcgagtacagagtctccgagatgtggaatgaggttcatgaggaaaaggagcaggctgcaaagcagagtgtgtcctgcgatgaatgcataccattaccccgcgccgggcactgtgcaccttcggaggccattgagaaactagtcgctcttctcaacacgctggacaggtggattgatgagactcctccagtggaccagccctctcggtttgggaataaggcatacaggacctggtatgccaaacttgatgaggaagcagaaaacttggtggccacagtggtccctacccatctggcagctgctgtgcctgaggtggctgtttacctaaaggagtcagtggggaactccacgcgcattgactacggcacagggcatgaggcagccttcgctgctttcctctgctgtctctgcaagattggggtgctccgggtggatgaccaaatagctattgtcttcaaggtgttcaatcggtaccttgaggttatgcggaaactccagaaaacatacaggatggagccagccggcagccagggagtgtggggtctggatgacttccagtttctgcccttcatctggggcagttcgcagctgatagaccacccatacctggagcccagacactttgtggatgagaaggccgtgaatgagaaccacaaggactacatgttcctggagtgtatcctgtttattaccgagatgaagactggcccatttgcagagcactccaaccagctgtggaacatcagcgccgtcccttcctggtccaaagtgaaccagggtctcatccgcatgtataaggccgagtgcctggagaagttccctgtgatccagcacttcaagttcgggagcctgctgcccatccatcctgtcacgtcgggctaggaggggccaagccgaagagccacccaggccacagttcctgtgcctgccttccccaccccagcagtggcccctccccatcccctccctctgttcgtcccgtttgatgagaggctgtttactggggtggggtggcgagatgggcttgagggggctcagagcataaggcttcagggcccaagttgggagaagtgaccaaagtgtagccagttttctgagttcccgtgtgctagactggccagaagagagggtctggggcctggtcactcggccactctctcctgtttctggcctcttctcccttcactcccgtccagtctggttttgagagcaggggctgttctgcagcaccgcagggaagggaggagagatacctgctgcttccattgcttttcccttcctggagtcgatgcctttctaagggttggagctgctccttgcaggggcgggtcagtttcccaggccatgccggggtggccatctatggtagggctggaagctgaggctggccgccagctgtgggctggggtggggtgggtggggtcgggtggtggagaggccttagctgtcctggctggtgcccctcccaggctccttttcaccctgccccctgggcctgaggccccctgtgtccaagcctccccctggctcttcagttctctagcccttggctctgctgggtttcctgactgtagccacatctctcccgctccctaagggtaacctagccaatggaagctgccctttgggtaggtgctgggctcctgggagggcccagatgatggggtgaggcatgtctttccagaactttccctggcagggaggggatggcagaaactcagggaggggcttggggcccattgtatctggagagcctggattcctcttggcagtcttaggcccggccacttctgctacctttgcgctgctgtgagcctcaccctgggcccctgggccctgcttctctgctcccctgggtgatgggtgggcccagaaggtggcagtcccacaccttgtcctcccacctccctgaactgtccattgcttttatagggtgaggtaagagacagcctcccaagcccaggctttggcactcagaatgggcccagtgggggctgggcaggcccattgagggccaccgccgaggtttctcctagggctgttcctgggcctggctcttacaggctcgtcccccaggcctgcccttctccactgccccctcctgtgtctgggtccacacacccttcaggaagggggagcactgagaagcacagcacaggggctcagcctgggatccggtgatggtctgggcagaggctgggtcaggagtcccaaaggtcagtgacagtttctcagaagaggcccagcgtccacctctctcccagggccagacagcccttcctggctcccccatccccctatgggctcccagccccttgcaccctcattgctgttcagattaaagcctctgttttgcacctgt

SEQ ID NO: 253170 - DNA, 1077 bp, Artificial Sequence
  derived and/or modified sequence
atggccgagggcgagagacagcccccccccgacagcagcgaggaggccccccccgccacccagaacttcatcatccccaagaaggagatccacaccgtgcccgacatgggcaagtggaagagaagccaggcctacgccgactacatcggcttcatcctgaccctgaacgagggcgtgaagggcaagaagctgaccttcgagtacagagtgagcgagatgtggaacgaggtgcacgaggagaaggagcaggccgccaagcagagcgtgagctgcgacgagtgcatccccctgcccagagccggccactgcgcccccagcgaggccatcgagaagctggtggccctgctgaacaccctggacagatggatcgacgagaccccccccgtggaccagcccagcagattcggcaacaaggcctacagaacctggtacgccaagctggacgaggaggccgagaacctggtggccaccgtggtgcccacccacctggccgccgccgtgcccgaggtggccgtgtacctgaaggagagcgtgggcaacagcaccagaatcgactacggcaccggccacgaggccgccttcgccgccttcctgtgctgcctgtgcaagatcggcgtgctgagagtggacgaccagatcgccatcgtgttcaaggtgttcaacagatacctggaggtgatgagaaagctgcagaagacctacagaatggagcccgccggcagccagggcgtgtggggcctggacgacttccagttcctgcccttcatctggggcagcagccagctgatcgaccacccctacctggagcccagacacttcgtggacgagaaggccgtgaacgagaaccacaaggactacatgttcctggagtgcatcctgttcatcaccgagatgaagaccggccccttcgccgagcacagcaaccagctgtggaacatcagcgccgtgcccagctggagcaaggtgaaccagggcctgatcagaatgtacaaggccgagtgcctggagaagttccccgtgatccagcacttcaagttcggcagcctgctgcccatccaccccgtgaccagcggctag

SEQ ID NO: 253171 - protein, 281 aa, Artificial Sequence
  derived and/or modified sequence
MAEGERQPPPDSSEEAPPATQNFIIPKKEIHTVPDMGKWKRSQAYADYIGFILTLNEGVKGKKLTFEYRVSEEAENLVATVVPTHLAAAVPEVAVYLKESVGNSTRIDYGTGHEAAFAAFLCCLCKIGVLRVDDQIAIVFKVFNRYLEVMRKLQKTYRMEPAGSQGVWGLDDFQFLPFIWGSSQLIDHPYLEPRHFVDEKAVNENHKDYMFLECILFITEMKTGPFAEHSNQLWNISAVPSWSKVNQGLIRMYKAECLEKFPVIQHFKFGSLLPIHPVTSG

SEQ ID NO: 253172 - DNA, 846 bp, Artificial Sequence
  derived and/or modified sequence
atggccgagggggagcgtcagcccccaccagacagctcggaggaagcgccacctgctactcagaacttcatcatacctaaaaaagagatacacaccgttcctgacatgggcaagtggaagcgttctcaggcgtacgccgattacatcggattcatactgaccttgaatgagggggtgaaggggaaaaaactcacatttgagtatagagtttcggaagaggcggaaaatcttgtggcaacggtcgtccccactcatttggctgccgccgtgcccgaggtggccgtttaccttaaagagtctgtgggaaactccacccgcattgattacggcaccggccacgaggctgcttttgcggctttcctatgttgtctgtgtaagatcggcgtgctgcgagttgatgaccagatcgcaattgtgttcaaggtttttaaccggtacctcgaagtgatgcgcaagttacaaaagacataccgcatggaaccagctggatcgcagggggtgtgggggctggacgatttccagtttcttccttttatttggggctcttctcagctgatagatcacccatacctcgaaccaaggcactttgtcgatgaaaaggctgttaacgaaaaccataaggactatatgttcttggagtgcatcctgtttatcacagagatgaaaacaggtcccttcgccgaacactccaaccagctctggaatattagtgctgtgccttcatggtccaaggtgaaccagggtttgatacgaatgtacaaggcagagtgtctggaaaagttcccagtgatccagcattttaaattcggatccctgcttccgattcaccctgtaacgtccggttag

SEQ ID NO: 253173 - DNA, 846 bp, Artificial Sequence
  derived and/or modified sequence
atggccgagggggagcggcagcccccaccagacagcagcgaggaggcccccccagccacccagaacttcatcatccccaagaaggagatccacacagtgcctgacatgggcaagtggaagaggagccaggcctatgctgactacatcggcttcatcctgaccctgaatgaaggagtgaagggcaagaagctgacctttgagtacagagtgtctgaggaggccgagaacctggtggccaccgtggtgcccacccacctggccgctgctgtgcctgaggtggccgtgtacctgaaggagagcgtgggcaacagcaccagaattgattatggaactggacatgaagctgcctttgctgccttcctgtgctgcctgtgcaagattggagtgctgcgggtggatgaccagatcgccatcgtgttcaaggtgttcaaccgctacctggaggtgatgaggaagctgcagaagacctacaggatggagcccgccggcagccagggcgtgtggggcctggatgacttccagttcctgcccttcatctggggcagcagccagctgattgaccacccctacctggagcccaggcactttgtggatgagaaggctgtgaatgaaaaccacaaggactacatgttcctggagtgcatcctcttcatcacagagatgaagacaggcccctttgctgagcacagcaaccagctgtggaacatctctgctgtgcccagctggagcaaggtgaaccagggcctcatccgcatgtacaaggccgagtgcctggagaagtttcctgtgatccagcacttcaagtttggcagcctgctgcccatccaccctgtgaccagcggctag

SEQ ID NO: 253174 - DNA, 846 bp, Artificial Sequence
  derived and/or modified sequence
atggccgagggcgagcggcagcccccccccgacagcagcgaggaggcccctcccgccacacagaatttcattatccccaagaaggagattcacactgtgcctgacatggggaaatggaagcgctcccaggcctacgccgattacattgggtttatccttaccctcaacgagggcgtgaaagggaagaaactcaccttcgagtatagggtgagtgaagaggcagagaacctggtggcaaccgtcgtccccactcatctggctgccgccgtccctgaggtcgctgtgtacctgaaggagtccgtcgggaattccacacgcatcgactacgggactggacacgaagccgccttcgcagcctttctctgttgcttatgcaaaatcggggtgctgcgcgtcgacgatcagatagctatcgtcttcaaggtcttcaaccgatacctcgaagtcatgcgcaaactgcagaagacatatcggatggagccggcgggcagtcaaggcgtatggggactggacgactttcagttcttaccatttatttggggctcgtcccagttgatagatcacccctacctcgagcctcgtcattttgtagatgagaaggccgtgaatgagaaccacaaggactacatgtttctcgaatgcatccttttcattaccgaaatgaagaccggcccctttgcagaacattcgaatcagctctggaacatctccgccgtcccgagctggtcaaaagtgaatcagggtttaattcggatgtataaggctgaatgccttgagaaattccctgttattcagcactttaagttcggcagtctcctccccattcaccctgtcaccagcggttag

SEQ ID NO: 253175 - DNA, 846 bp, Artificial Sequence
  derived and/or modified sequence
atggctgagggggagagacagcccccaccagactcctcagaagaagcacccccagctacacagaacttcattatacccaagaaggagatccacacagtgccagatatgggcaaatggaagagaagccaagcttacgccgattatatagggtttatcttgactttaaatgaaggtgttaaggggaagaaattaacgtttgaataccgcgtaagcgaggaagccgaaaacctggtggccacagtggtgccaactcatcttgccgctgcggtgcctgaagtcgccgtgtacctaaaagaatctgttggaaattccacaagaatagactacggaactggtcacgaagctgcctttgccgcattcctctgctgcctatgtaagatcggggttcttagggtggatgaccagatcgcaattgtgttcaaggtattcaacaggtacttggaagttatgcgtaagctgcagaaaacttatagaatggaaccagccggttcccagggagtttggggtctggacgatttccagtttctcccctttatttggggctcaagtcagctgatagatcacccgtacctggagcctaggcatttcgttgacgagaaagccgtcaatgaaaaccacaaggactatatgtttttagagtgcattctttttattaccgagatgaagacaggcccatttgctgaacactcaaaccagctgtggaacatcagcgcagtgccatcctggtccaaagtgaaccagggcctgatccgcatgtacaaggcggaatgcctggaaaagttcccagtgatccaacacttcaaatttggctctctccttcctattcacccagttaccagtggctag

SEQ ID NO: 253176 - DNA, 846 bp, Artificial Sequence
  derived and/or modified sequence
atggccgagggcgagagacagcccccccccgacagcagcgaggaggccccccccgccacccagaacttcatcatccccaagaaggagatccacaccgtgcccgacatgggcaagtggaagagaagccaggcctacgccgactacatcggcttcatcctgaccctgaacgagggcgtgaagggcaagaagctgaccttcgagtacagagtgagcgaggaggccgagaacctggtggccaccgtggtgcccacccacctggccgccgccgtgcccgaggtggccgtgtacctgaaggagagcgtgggcaacagcaccagaatcgactacggcaccggccacgaggccgccttcgccgccttcctgtgctgcctgtgcaagatcggcgtgctgagagtggacgaccagatcgccatcgtgttcaaggtgttcaacagatacctggaggtgatgagaaagctgcagaagacctacagaatggagcccgccggcagccagggcgtgtggggcctggacgacttccagttcctgcccttcatctggggcagcagccagctgatcgaccacccctacctggagcccagacacttcgtggacgagaaggccgtgaacgagaaccacaaggactacatgttcctggagtgcatcctgttcatcaccgagatgaagaccggccccttcgccgagcacagcaaccagctgtggaacatcagcgccgtgcccagctggagcaaggtgaaccagggcctgatcagaatgtacaaggccgagtgcctggagaagttccccgtgatccagcacttcaagttcggcagcctgctgcccatccaccccgtgaccagcggctag

SEQ ID NO: 253177 - protein, 1113 aa, Artificial Sequence
  derived and/or modified sequence
MFSQVPRTPASGCYYLNSMTPEGQEMYLRFDQTTRRSPYRMSRILARHQLVTKIQQEIEAKEACDWLRAAGFPQYAQLYEDSQFPINIVAVKNDHDFLEKDLVEPLCRRLNTLNKCASMKLDVNFQRKKGDDSDEEDLCISNKWTFQRTSRRWSRVDDLYTLLPRGDRNGSPGGTGMRNTTSSESVLTDLSEPEVCSIHSESSGGSDSRSQPGQCCTDNPVMLDAPLVSSSLPQPPRDVLNHPFHPKNEKPTRARAKSFLKRMETLRGKGAHGRHKGSGRTGGLVISGPMLQQEPESFKAMQCIQIPNGDLQNSPPPACRKGLPCSGKSSGESSPSEHSSSGVSTPCLKERKCHEANKRGGMYLEDLDVLAGTALPDAGDQSRMHEFHSQENLVVHIPKDHKPGTFPKALSIESLSPTDSSNGVNWRTGSISLGREQVPGAREPRLMASCHRASRVSIYDNVPGSHLYASTGDLLDLEKDDLFPHLDDILQHVNGLQEVVDDWSKDVLPELQTHDTLVGEPGLSTFPSPNQITLDFEGNSVSEGRTTPSDVERDVTSLNESEPPGVRDRRDSGVGASLTRPNRRLRWNSFQLSHQPRPAPASPHISSQTASQLSLLQRFSLLRLTAIMEKHSMSNKHGWTWSVPKFMKRMKVPDYKDKAVFGVPLIVHVQRTGQPLPQSIQQALRYLRSNCLDQVGLFRKSGVKSRIHALRQMNENFPENVNYEDQSAYDVADMVKQFFRDLPEPLFTNKLSETFLHIYQYVSKEQRLQAVQAAILLLADENREVLQTLLCFLNDVVNLVEENQMTPMNLAVCLAPSLFHLNLLKKESSPRVIQKKYATGKPDQKDLNENLAAAQGLAHMIMECDRLFEVPHELVAQSRNSYVEAEIHVPTLEELGTQLEESGATFHTYLNHLIQGLQKEAKEKFKGWVTCSSTDNTDLAFKKVGDGNPLKLWKASVEVEAPPSVVLNRVLRERHLWDEDFVQWKVVETLDRQTEIYQYVLNSMAPHPSRDFVVLRTWKTDLPKGMCTLVSLSVEHEEAQLLGGVRAVVMDSQYLIEPCGSGKSRLTHICRIDLKGHSPEWYSKGFGHLCAAEVARIRNSFQPLIAEGPETKI

SEQ ID NO: 253178 - DNA, 3342 bp, Artificial Sequence
  derived and/or modified sequence
atgttcagccaggtgcccagaacccccgccagcggctgctactacctgaacagcatgacccccgagggccaggagatgtacctgagattcgaccagaccaccagaagaagcccctacagaatgagcagaatcctggccagacaccagctggtgaccaagatccagcaggagatcgaggccaaggaggcctgcgactggctgagagccgccggcttcccccagtacgcccagctgtacgaggacagccagttccccatcaacatcgtggccgtgaagaacgaccacgacttcctggagaaggacctggtggagcccctgtgcagaagactgaacaccctgaacaagtgcgccagcatgaagctggacgtgaacttccagagaaagaagggcgacgacagcgacgaggaggacctgtgcatcagcaacaagtggaccttccagagaaccagcagaagatggagcagagtggacgacctgtacaccctgctgcccagaggcgacagaaacggcagccccggcggcaccggcatgagaaacaccaccagcagcgagagcgtgctgaccgacctgagcgagcccgaggtgtgcagcatccacagcgagagcagcggcggcagcgacagcagaagccagcccggccagtgctgcaccgacaaccccgtgatgctggacgcccccctggtgagcagcagcctgccccagccccccagagacgtgctgaaccaccccttccaccccaagaacgagaagcccaccagagccagagccaagagcttcctgaagagaatggagaccctgagaggcaagggcgcccacggcagacacaagggcagcggcagaaccggcggcctggtgatcagcggccccatgctgcagcaggagcccgagagcttcaaggccatgcagtgcatccagatccccaacggcgacctgcagaacagccccccccccgcctgcagaaagggcctgccctgcagcggcaagagcagcggcgagagcagccccagcgagcacagcagcagcggcgtgagcaccccctgcctgaaggagagaaagtgccacgaggccaacaagagaggcggcatgtacctggaggacctggacgtgctggccggcaccgccctgcccgacgccggcgaccagagcagaatgcacgagttccacagccaggagaacctggtggtgcacatccccaaggaccacaagcccggcaccttccccaaggccctgagcatcgagagcctgagccccaccgacagcagcaacggcgtgaactggagaaccggcagcatcagcctgggcagagagcaggtgcccggcgccagagagcccagactgatggccagctgccacagagccagcagagtgagcatctacgacaacgtgcccggcagccacctgtacgccagcaccggcgacctgctggacctggagaaggacgacctgttcccccacctggacgacatcctgcagcacgtgaacggcctgcaggaggtggtggacgactggagcaaggacgtgctgcccgagctgcagacccacgacaccctggtgggcgagcccggcctgagcaccttccccagccccaaccagatcaccctggacttcgagggcaacagcgtgagcgagggcagaaccacccccagcgacgtggagagagacgtgaccagcctgaacgagagcgagccccccggcgtgagagacagaagagacagcggcgtgggcgccagcctgaccagacccaacagaagactgagatggaacagcttccagctgagccaccagcccagacccgcccccgccagcccccacatcagcagccagaccgccagccagctgagcctgctgcagagattcagcctgctgagactgaccgccatcatggagaagcacagcatgagcaacaagcacggctggacctggagcgtgcccaagttcatgaagagaatgaaggtgcccgactacaaggacaaggccgtgttcggcgtgcccctgatcgtgcacgtgcagagaaccggccagcccctgccccagagcatccagcaggccctgagatacctgagaagcaactgcctggaccaggtgggcctgttcagaaagagcggcgtgaagagcagaatccacgccctgagacagatgaacgagaacttccccgagaacgtgaactacgaggaccagagcgcctacgacgtggccgacatggtgaagcagttcttcagagacctgcccgagcccctgttcaccaacaagctgagcgagaccttcctgcacatctaccagtacgtgagcaaggagcagagactgcaggccgtgcaggccgccatcctgctgctggccgacgagaacagagaggtgctgcagaccctgctgtgcttcctgaacgacgtggtgaacctggtggaggagaaccagatgacccccatgaacctggccgtgtgcctggcccccagcctgttccacctgaacctgctgaagaaggagagcagccccagagtgatccagaagaagtacgccaccggcaagcccgaccagaaggacctgaacgagaacctggccgccgcccagggcctggcccacatgatcatggagtgcgacagactgttcgaggtgccccacgagctggtggcccagagcagaaacagctacgtggaggccgagatccacgtgcccaccctggaggagctgggcacccagctggaggagagcggcgccaccttccacacctacctgaaccacctgatccagggcctgcagaaggaggccaaggagaagttcaagggctgggtgacctgcagcagcaccgacaacaccgacctggccttcaagaaggtgggcgacggcaaccccctgaagctgtggaaggccagcgtggaggtggaggccccccccagcgtggtgctgaacagagtgctgagagagagacacctgtgggacgaggacttcgtgcagtggaaggtggtggagaccctggacagacagaccgagatctaccagtacgtgctgaacagcatggccccccaccccagcagagacttcgtggtgctgagaacctggaagaccgacctgcccaagggcatgtgcaccctggtgagcctgagcgtggagcacgaggaggcccagctgctgggcggcgtgagagccgtggtgatggacagccagtacctgatcgagccctgcggcagcggcaagagcagactgacccacatctgcagaatcgacctgaagggccacagccccgagtggtacagcaagggcttcggccacctgtgcgccgccgaggtggccagaatcagaaacagcttccagcccctgatcgccgagggccccgagaccaagatctag

SEQ ID NO: 253179 - DNA, 3342 bp, Artificial Sequence
  derived and/or modified sequence
atgttcagtcaagtgccacgaactccggcttcgggttgctattacctgaattcaatgacacccgaggggcaggagatgtaccttcgtttcgatcagactactcgccgttctccataccgcatgtcccgtatcctggcccgtcatcagttggtcaccaagatacaacaggaaatcgaggcgaaagaggcctgtgactggttaagggctgctggcttccctcagtatgcacagctctatgaagactcccagttccccataaatatcgttgcagtgaaaaatgatcatgactttttggaaaaggacctggttgagcccttgtgtcggagactcaacactctgaataaatgcgcctccatgaaactagacgtcaactttcagagaaaaaagggcgacgacagcgatgaggaggatctttgcatcagcaacaaatggacctttcagaggaccagtcgaagatggagtcgtgtggacgatctctacacactcctcccgagaggcgatagaaacgggagcccaggtggcacagggatgcgcaacacaacttcttctgagagtgttctgaccgacctcagcgaaccagaagtctgtagtattcactccgagagttctggcgggtcagactctaggtcacagccagggcaatgttgtacagacaacccggtgatgctcgatgcacccctcgttagtagctctttgcctcagccaccgagggatgtgcttaaccacccattccatccgaagaacgagaagcctacaagagcgagagcgaagtcttttttgaaaagaatggaaaccttacgtggcaagggggcacacgggcgtcacaaagggagcggacgcacaggtggcctggtgatcagtgggcccatgctccagcaggagcctgaatcctttaaggccatgcagtgcatccagattcctaatggggacctgcagaactcccctcctcccgcctgccggaagggactgccctgttctggcaagtcttccggtgaatctagtccctctgaacacagttctagtggcgtatccactccatgtctgaaagaaagaaaatgtcacgaagcaaacaaacgcggcggcatgtatctggaagatctggacgtgctcgccggcacagctctgcccgatgcaggggatcagtcccggatgcatgagttccacagccaggaaaacctggtagtacacatcccaaaggatcataagcctgggactttccccaaggcactatccattgaatccctgagccctacagacagctccaacggtgttaattggcggactggcagcatctctctggggagggaacaagttcctggcgcacgggagccgcgcctaatggcatcatgtcaccgagcgtccagggtcagtatctatgacaacgtgcccgggtcccacttgtatgcctcaacgggcgacctcctcgacttagaaaaggatgatctgtttccacatctggacgacatcctgcagcacgtgaacgggttgcaggaggtagtagacgactggtccaaagacgtactaccggagctacagactcacgacacgttggtaggagaacctggattatccacatttccctctccaaatcagatcacgctagatttcgaggggaattccgtttcagagggtaggacaaccccctccgacgtagagcgggacgtaacctccctgaatgagagtgaaccacccggcgtgcgggacagacgggacagcggcgtgggagcctccttaacaagacccaacagacgcctgcgttggaacagcttccagctttctcaccagccaaggccggcacctgcttccccccacatttcttctcagactgctagtcaactgagtctactgcagcggttctccctcctgcgcctgacagccattatggagaaacactcaatgtcaaataagcacggttggacctggagcgttcccaagtttatgaagcggatgaaagtgcccgactataaggataaggcagtgtttggcgttcctctcattgtgcatgtccaaaggaccggccagcccctcccccaatccattcagcaagccttgcggtatttgcgcagcaattgcctggatcaagttgggctcttccggaaatctggcgtgaagtcccgcatccacgcgctccggcagatgaacgaaaattttccagagaacgtcaactatgaggatcagtctgcatatgatgtggctgatatggtcaagcagtttttcagagatctgcccgaacctttgtttaccaataagctgtcagaaaccttcctgcacatttatcaatacgtgtctaaggaacagagactgcaggcagttcaggctgccatacttctcctggctgacgaaaatcgggaagtgctacagacattgctctgctttctgaacgacgttgtcaacctcgtggaggagaatcagatgaccccaatgaatctcgccgtgtgcttggcccctagtcttttccacctgaacctcttgaaaaaggagagtagcccgcgtgtaatccagaaaaagtacgccacgggcaagccagaccaaaaggatctcaacgagaacctggcagctgcacaagggctagcccatatgatcatggagtgcgacagattgttcgaggtgccccatgagcttgtggcgcaatcaagaaacagctacgtagaggccgaaatccatgtcccaaccttggaagagctgggaacccagctggaagaatcaggcgcgacctttcacacataccttaaccatttaattcaaggattgcagaaagaggcgaaggagaagttcaaaggctgggtaacatgttccagtaccgataacaccgatcttgcattcaagaaagtcggtgatgggaaccccctgaaactgtggaaagccagcgtggaggtagaggcacctcctagtgtggtgctcaatcgggtgttaagagaaaggcatttatgggacgaggactttgtccagtggaaagtggtcgagaccctggatcggcagaccgagatctaccaatatgtgctgaacagtatggctccccacccctccagggattttgtggtcctgcgcacttggaagacagacctaccaaaaggtatgtgtaccctggtgtccctttcagttgagcatgaggaagcccaactgctgggtggggtgagagccgtcgtgatggattcacagtatttaattgagccctgtgggtcaggcaagagtcgactgactcacatctgtagaatcgatctgaaaggccattcccctgagtggtacagcaaagggtttgggcacctctgcgccgctgaggtagcccgcattcgcaatagcttccaacccctgattgctgaaggtccagagacaaaaatctag

SEQ ID NO: 253180 - DNA, 3342 bp, Artificial Sequence
  derived and/or modified sequence
atgttcagccaggtgcccaggaccccagccagcggctgctactacctgaacagcatgaccccagagggccaggagatgtacctgcgctttgaccagaccaccaggaggagcccctacaggatgagccgcatcctggcccggcaccagctggtgaccaagatccagcaggagattgaggccaaggaggcctgtgactggctgcgggccgccggcttcccccagtatgcccagctgtatgaggacagccagttccccatcaacatcgtggccgtgaagaatgaccatgacttcctggagaaggacctggtggagcccctgtgccggcggctgaacaccctgaacaagtgtgcctccatgaagctggatgtgaacttccagaggaagaagggagatgacagtgatgaggaggacctgtgcatcagcaacaagtggaccttccagaggaccagccgccgctggagccgggtggatgacctgtacaccctgctgcccaggggggacagaaatggcagccctgggggcaccggcatgaggaacaccaccagcagcgagagcgtgctgacagacctgtctgagcctgaggtgtgcagcatccacagcgagagcagcggcggcagtgacagccgcagccagcccggccagtgctgcacagacaaccctgtgatgctggatgcccccctggtgagcagcagcctgccccagcccccaagagatgtgctgaaccaccccttccaccccaagaatgagaagcccacccgggcccgggccaagagcttcctgaagaggatggagaccctgcggggcaaaggagcccacggccgccacaagggcagcggccgcactggaggcctggtgatcagcggccccatgctgcagcaggagcctgagagcttcaaggccatgcagtgcatccagatccccaacggggacctgcagaacagccccccaccagcctgcaggaagggcctgccctgcagcggcaagagcagcggggagagcagccccagcgagcacagcagcagtggagtgtccaccccctgcctgaaggagaggaagtgccacgaggccaacaagaggggcggcatgtacctggaggacctggatgtgctggccggcacagccctgcctgatgctggggaccagagcaggatgcatgagttccacagccaggagaacctggtggtgcacatccccaaggaccacaagccaggcaccttccccaaggccctgagcattgagagcctgagccccacagacagcagcaatggagtgaactggaggacaggcagcatcagcctgggccgggagcaggtgcctggggcccgggagccccggctgatggccagctgccaccgggccagccgggtgtccatctatgacaacgtgcccggcagccacctgtatgccagcactggagacctgctggacctggagaaggatgacctcttcccccacctggatgacatcctgcagcacgtgaatggcctgcaggaggtggtggatgactggagcaaggatgtgctgcctgagctgcagacccatgacaccctggtgggggagcccggcctgagcaccttccccagccccaaccagatcaccctggactttgagggcaacagcgtgtctgagggccgcaccacccccagtgatgtggagagagatgtgaccagcctgaatgaaagtgagcccccaggagtgcgggacagaagagacagcggcgtgggcgccagcctgacccggcccaacagaaggctgcgctggaacagcttccagctgagccaccagcccaggcctgccccagccagcccccacatcagcagccagacagccagccagctgagcctgctgcagcgcttcagcctgctgcggctgacagccatcatggagaagcacagcatgagcaacaagcacggctggacctggagcgtgcccaagttcatgaagaggatgaaggtgcctgactacaaggacaaggctgtgtttggagtgcccctcatcgtgcacgtgcagaggacaggccagcccctgccccagagcatccagcaggccctgcgctacctgcggagcaactgcctggaccaggtgggcctcttcaggaagtctggagtgaagagccgcatccacgccctgcggcagatgaatgaaaacttcccagaaaatgtgaactatgaggaccagagcgcctatgatgtggccgacatggtgaagcagttcttccgggacctgcctgagcccctcttcaccaacaagctgtctgagaccttcctgcacatctaccagtatgtgtccaaggagcagaggctgcaggccgtgcaggccgccatcctgctgctggctgatgaaaatcgggaggtgctgcagaccctgctgtgcttcctgaatgatgtggtgaacctggtggaggagaaccagatgacccccatgaacctggccgtgtgcctggcccccagcctcttccacctgaacctgctgaagaaggagagcagccccagggtcatccagaagaagtatgccaccgggaagccagaccagaaggacctgaatgaaaacctggccgccgcccagggcctggcccacatgatcatggagtgtgaccggctgtttgaggtgccccatgagctggtggcccagagcagaaattcctatgtggaggccgagatccacgtgcccaccctggaggagctgggcacccagctggaggagagcggggccaccttccacacctacctgaaccacctgatccagggcctgcagaaggaggccaaggagaagttcaagggctgggtgacctgcagcagcacagacaacacagacctggccttcaagaaggtgggagatggcaaccccctgaagctgtggaaggcctctgtggaggtggaggccccacccagcgtggtgctgaacagagtgctgcgggagcggcacctgtgggatgaagattttgtgcagtggaaggtggtggagaccctggaccggcagacagagatctaccagtatgtgctgaacagcatggccccccaccccagccgggactttgtggtgctgcggacctggaagacagacctgcccaagggcatgtgcaccctggtgtccctgtctgtggagcacgaggaggcccagctgctgggcggcgtgcgggctgtggtgatggacagccagtacctgattgagccctgtggcagcggcaagagccggctgacccacatctgcagaattgacctgaagggccacagccctgagtggtacagcaagggcttcggccacctgtgtgccgctgaggtggcccgcatccggaacagcttccagcccctgattgctgagggccctgagaccaagatctag

SEQ ID NO: 253181 - DNA, 3342 bp, Artificial Sequence
  derived and/or modified sequence
atgttcagccaggtgccccggacccccgccagcggctgctactacctcaattctatgacccctgaaggacaggagatgtatttgcggtttgatcagactactcgtagatccccctatcgtatgagtaggattcttgctagacatcaattggtgactaaaatccaacaggagatcgaagctaaggaagcctgtgattggctgagagctgccgggttcccgcaatatgcccagttatacgaggattcgcagttccctattaatatagtggccgtgaaaaacgatcatgatttcctcgagaaggatttggtggagccactgtgcagaagactgaatactttgaacaaatgtgccagtatgaagcttgatgttaacttccagcgcaagaagggagatgattccgacgaggaagacttgtgcatttctaataagtggacctttcagcgcacctcacggcgatggtcccgggttgatgacttatacaccttactacctagaggtgacagaaacgggagtcctggcggcacaggaatgcggaatacaacgtcgtcagagtcagtattaacagacctgtcggaaccagaagtgtgttcaatacactcggagagttctggcggaagcgattcacggagtcagcctggacagtgttgcaccgataatcctgtcatgctagacgcccccctcgttagctccagcttgccccagccccctcgggatgtgctaaatcatccattccatcccaagaacgaaaaaccaacaagagcacgagccaaaagtttcttgaagcgcatggagactctgagagggaagggtgcccatgggcggcacaaaggatcaggcaggactggtggactggtgataagcggccccatgctccagcaggaaccagaatcgtttaaggctatgcagtgtatccaaatccccaacggggatctacagaatagtcccccccccgcttgtcgaaagggcctgccctgctccggaaagagttctggtgagtcttctccctcagagcattccagcagtggcgtgagtaccccttgcctgaaagagcgcaaatgccatgaggcaaacaaacgcgggggcatgtacttggaggacttagacgtactggccggcaccgctctcccagatgcaggggaccagagtcgcatgcacgaattccattctcaagagaacttggtggtgcacatcccaaaagaccacaagcccgggacatttcctaaagctctgtcaattgagtcccttagcccaaccgacagtagtaacggcgtcaattggcgaactgggtctatctccctcggcagagagcaggttccaggcgctcgcgagcctcgtctgatggcctcctgtcaccgagccagcagagtctctatttacgacaatgtgccaggctcgcacctttacgcaagcaccggggacctcctcgacttggaaaaagacgacctgtttccacatctggatgacatactccagcacgtgaacggcttgcaggaggttgtggatgactggagtaaggacgtcctaccagagctccaaactcacgacactctagtgggggagcctggtttgtctactttcccatcccctaaccagataactctggacttcgagggaaatagtgtcagcgaggggagaacaaccccctctgatgtcgagcgggatgtgacgtctctgaacgagtcagagcccccgggcgtgagagatcggagagatagcggagtgggcgcctcactgacccgtcccaatcgcagactgcgatggaattccttccaactgagccatcagccgaggccagcccctgccagtccacacatttcctcccagaccgcctcccaattgagcctgttgcaacgcttttccctgctgagactgaccgctattatggaaaaacactccatgtcaaataaacatggatggacgtggtccgtgccaaaatttatgaaaagaatgaaagtgcccgattacaaggataaagccgttttcggcgttccgctgatcgttcatgtgcaaagaacaggacagccgctgccacagagtattcagcaagccctccgttatttgaggagtaattgccttgaccaggtgggcctctttagaaagagcggagtgaagtctagaattcacgcgttgaggcaaatgaacgagaacttccccgagaacgtaaactacgaggaccagagcgcttatgatgtggcagatatggtgaagcagttcttccgtgatctgccagaaccactctttacaaataaacttagcgaaacctttctgcacatttaccagtacgtgagtaaggagcagagactccaggcagtccaagccgcaattctgttattagccgacgagaacagagaagtcctgcagacactgctgtgttttctgaatgacgtcgtgaacctggtggaggagaaccagatgacaccaatgaacctggcggtctgcctggcgccttccctgtttcacctaaacttgcttaaaaaagaatcaagcccccgggttattcaaaagaagtacgccactggaaagccggaccagaaagacctcaacgagaatttagcagcagcacagggattagcacatatgattatggagtgtgaccgtctgtttgaggttcctcatgaactagtggcacagtcgagaaatagttatgtcgaggccgaaattcacgtcccgactcttgaagaactggggacccagctggaagaatccggtgctacgttccatacttacttgaaccatttaattcagggcttacagaaagaagccaaggagaaattcaaggggtgggtgacgtgttccagcacagacaatactgaccttgcatttaaaaaggtgggggatggaaaccccctaaagttatggaaagccagcgtggaagtggaggctcctccatcagtggtactgaatcgggttctccgcgagagacatctgtgggacgaagactttgtgcaatggaaggtggtggagacacttgatcggcagacagagatttatcagtatgtgctcaacagtatggcccctcacccttcccgtgattttgtggttttgcggacctggaagaccgatctgccaaaggggatgtgtactctcgttagcctgagcgtagagcatgaagaagcccagctgttaggaggggtgagagctgtggtcatggacagccagtacttgattgagccatgcgggtcaggcaaatccaggcttacccatatctgtagaatcgacttaaagggacattctcctgagtggtattccaaagggttcggacacttatgcgccgctgaagttgcccgaatccgcaatagttttcaaccactgatcgccgagggtccagaaactaaaatctag

SEQ ID NO: 253182 - DNA, 3342 bp, Artificial Sequence
  derived and/or modified sequence
atgttttctcaggtgccacggacaccagccagcggatgttattacctgaattctatgactccagaaggacaggaaatgtatctccgttttgaccagacaaccaggaggagcccctaccgcatgtcccgcatcttagctcgccatcagttggtgaccaaaatccagcaggaaattgaagctaaggaggcatgtgactggctccgagccgctggctttccgcagtacgcgcaactgtacgaggatagccagttcccaattaatatagtggcggtcaagaacgatcatgacttcctcgagaaggatctggtggaaccactctgcaggcgactcaacacactcaataagtgcgcgtccatgaagttggatgtgaacttccaacgaaaaaaaggggatgattcagatgaggaagatctatgcatatccaataaatggactttccagagaacctcacgcagatggtcacgtgtggacgacctgtacaccctgctgccacgaggagacagaaacggaagcccgggagggaccgggatgaggaatacaacctcgtccgagtctgtactgacagacttaagtgagcccgaagtatgctccattcattccgagagctctggagggagtgactcacggagccagcccggacagtgttgcaccgacaaccccgtcatgctggacgctccgctcgtgagcagtagcctcccccagcctccgagagacgtgctgaatcatccgtttcaccccaagaatgagaagcctacgcgggcacgagccaagagcttcctcaagcgaatggagacactccgcggaaagggcgctcacggacgacataaaggctcaggacgcacaggcggtttagttatcagcgggcctatgttgcagcaggagccagaaagcttcaaggccatgcaatgcattcagatcccaaacggggatctgcagaactctccccctccggcatgtagaaagggccttccttgttctggaaagtccagcggggaaagttctccaagtgagcacagctcttcaggagtaagcaccccctgcctaaaggagcgcaagtgtcacgaagctaataagcggggaggcatgtacttagaggatctcgatgtcctggccggaaccgctttgcccgacgcaggcgatcagtcccgaatgcacgagttccattcccaagaaaacctggtggtacatattcctaaagatcacaaacccggtaccttccctaaggcactttccatcgagagccttagtccgactgattcctcgaatggggttaattggaggactggtagtatctctcttggcagagagcaggtgccaggggctagagagcctaggctcatggcaagttgtcatagagcttcccgggtgtcgatttatgataatgtgcctgggtctcatttatacgcatctacgggagatcttctcgacctggagaaagacgacctgttcccccacttagacgacatcctgcagcacgtgaacggtctccaggaagtggtagacgactggagcaaagatgtcttgcctgagcttcaaacacatgacaccctggtaggagaaccgggactttctaccttcccttccccaaatcagattactttggactttgagggcaacagcgtgtccgagggcagaaccacgcctagcgacgtggagcgcgacgtcacttccttaaatgaaagcgaacctcctggcgttcgcgataggcgtgatagtggtgtaggggcttccttgacgagacccaacagacgcctccgttggaattcgtttcagctgagtcaccagccgcgacctgccccagcgagtccccacatctcaagtcaaacagcttcccaactgtcgttactgcagagattttcattactccgcctgacagcaatcatggagaagcactcaatgtctaacaaacatggctggacctggtcagttcccaagttcatgaaacgcatgaaggttcctgactataaagataaggcagtgtttggcgtgccactgattgtgcatgtgcagcgtaccggccagccattgccccaatccatccagcaggccctgagatacctgcgcagcaactgcctcgaccaggtcgggctcttccgcaagtcaggggtcaagtcgcgaatccatgcccttagacaaatgaatgagaatttcccggagaacgtgaactacgaagaccaatcagcatacgatgtggcagacatggtgaaacagttcttcagggatctccctgagcctctgttcaccaacaagctcagcgagacatttctgcacatctatcagtacgtttctaaggaacagcgacttcaagcagtgcaggccgcaattctgctgttagccgacgagaaccgcgaagtgctgcagactctgttatgctttctgaatgacgttgttaacctggtggaggagaaccagatgacaccgatgaacttggctgtgtgtctggctcctagtctcttccatttaaacctgcttaaaaaagaatccagccctcgggtaattcaaaaaaagtacgcgacaggtaaacctgatcagaaagacctcaacgagaaccttgctgcagcccaaggcttggcccatatgataatggagtgtgataggctctttgaggtaccgcacgagctcgttgcccagagtcgtaattcctatgtggaggctgagattcatgtgccaaccttagaggaactcggaactcagctagaggagtctggggctacttttcatacctacctgaaccacctcattcagggactgcagaaggaagccaaggagaaattcaagggttgggtcacctgcagctccacagacaacacagacctagcttttaagaaagtaggggatggcaaccctctgaagctctggaaagctagtgtggaagtagaggcccctccttctgtggtcctgaacagagtcctgcgggaacgccacctctgggatgaggatttcgtgcagtggaaggtggtagagacactagataggcagaccgagatttaccagtacgtgctgaatagtatggcccctcatcccagtcgtgacttcgtggtgctccggacgtggaaaaccgacttgccaaagggaatgtgcacgttagtttccttgtctgtcgagcacgaagaagcgcagctccttgggggagtgcgtgccgttgtcatggattcccaataccttatcgagccttgcggcagcggaaaatcacgtcttactcacatttgccgtattgatctcaaaggacatagcccagagtggtattccaaaggctttggtcatctctgcgccgctgaggtggctcgtattcgaaactcctttcagcccctgatagctgagggacccgagacgaagatctag

SEQ ID NO: 253183 - DNA, 5882 bp, Artificial Sequence
  derived and/or modified sequence
aaaaatcgctgggtctgttgagctgtcctgggctgggtgccttgctctttgactgagactggagacagacggcaacagccacaggcagactgaggtggcaataggaaatctgccgagatgttcagtcaggtgcccaggaccccagcctcaggctgctactacctaaattccatgacacctgagggccaggagatgtacttgcgatttgatcagactacaagacgctctccttacaggatgagccggattctagcacgccatcagctagtgactaaaattcaacaagaaattgaggcaaaagaagcatgtgactggctccgtgctgccgggttcccgcaatacgctcagttatatgaggattcacaatttcccatcaacattgtggctgtcaagaatgatcatgattttcttgaaaaggaccttgtagaacctctttgcagacgactaaatacgttgaacaagtgtgcctcaatgaaacttgatgtgaacttccaaaggaaaaagggtgacgactccgatgaggaagatctttgtatcagcaacaaatggactttccaaagaaccagtcgcaggtggtctcgtgtggacgacctctacacgctgctccctcgaggagacagaaatgggtcaccgggaggcacggggatgaggaacacgaccagcagtgagagcgtcctcacagacctgagcgagcctgaggtctgctccattcacagcgaaagcagtggaggcagcgacagtcgcagccagccgggccagtgctgtacagacaacccggtcatgctggatgccccactcgtcagcagcagcctcccacagccccccagagatgtcctcaaccaccccttccaccccaagaatgagaagcccacgagggctagggccaaatcatttttgaaacgcatggaaacactccgagggaagggagcccacgggaggcataaggggtctgggcggacaggtggcctggtgatcagtgggcccatgttgcagcaggagccagagtcctttaaggctatgcagtgcatccaaataccaaatggagatctccagaattcgccgccacctgcctgcagaaaagggctcccatgctctggcaagtcgagtggcgagagcagcccgtcggagcacagcagcagcggggtgagcacgccctgcctgaaggaacgcaagtgccacgaggccaacaagcgcgggggcatgtacttggaggacctagatgtgctggcggggacagcactgccggatgcaggggaccaaagccgtatgcatgaatttcactcccaagagaatttggtggtgcatattcccaaggatcacaaaccaggaacattccccaaggcactttctattgaaagcctctctcccacagatagtagcaatggggttaattggaggaccggtagcatctccctgggcagagagcaggtccctggtgccagggagccccggctcatggcgtcctgccacagagccagccgagtcagtatctatgacaatgtccctggctcccatctgtatgccagcacaggagatcttttggacttggagaaagatgaccttttccctcacttggatgacattctgcagcatgtcaatgggctccaagaggtagtcgatgactggtccaaagatgtcttgcctgaactgcaaactcatgatacattggttggggaacctggcttatccacctttccatctcctaatcagatcaccttagattttgaaggtaactctgtctcagaaggtcggacgacacccagtgatgtggaaagagatgtaacatctcttaatgaatctgagcctcctggggtcagagacaggagggattctggtgtaggggcctctctgaccaggccaaacaggcgactccgatggaacagtttccagctgtcgcaccagccccggccggccccagcatcgccccacatcagcagccagacggccagccagctgagcctgctccagcgcttctcactgctccgcctcacggccatcatggagaagcactccatgtccaacaagcacggctggacatggtcagttccaaagttcatgaagaggatgaaagttcccgactacaaagacaaggctgtctttggcgttcctctcatagtccacgtccaaagaacgggacagcccctgcctcaaagtattcagcaagcactgagatatctacgcagcaactgcctcgatcaggtgggtctttttcgcaaatcaggagtgaagtctcgaatccatgcccttcgccaaatgaatgaaaacttccctgagaacgtcaactatgaagaccagtctgcttatgatgtggcggatatggtgaaacagttcttccgggacctccctgagcctcttttcaccaacaagctcagtgagacctttctccatatctatcagtatgtctccaaagagcagcggctgcaggccgtgcaggctgccatcctgctactggccgatgagaacagggaggtcctgcagacgctcttgtgtttcctgaacgacgtcgtcaacttggtggaagagaatcagatgacgcccatgaacctggcagtgtgtctggccccctccctctttcatcttaatttattgaagaaagaaagctctccacgagtcatacagaagaaatatgccactgggaagccagatcaaaaggacctcaacgagaatctggcagcagctcaggggctagcgcacatgatcatggaatgcgacagactttttgaggttccacacgagttggtggcccagtctcgtaactcgtatgtggaggctgagatccacgtgccaaccctggaagaattggggacacagctggaggagagtggggcaactttccacacttacctgaaccatctcatccagggcctccagaaagaagccaaggagaagttcaaaggatgggtcacgtgctccagcacggacaatacagatcttgctttcaaaaaggtgggcgacgggaacccgctgaagctgtggaaggcttctgtggaggtggaagcacccccctcagtggtcctgaaccgcgtgctgagagagcgccacctgtgggacgaggactttgtgcagtggaaggttgtggaaactctagacaggcaaacagagatctaccagtatgtgctgaacagcatggctccccatccttccagagactttgtggttctcaggacctggaaaactgatttgcccaaaggaatgtgtaccctggtgtccctctccgtggagcatgaggaagcccagctcctgggtggtgtgcgagcagtggtgatggactcgcagtacttgatagaaccgtgtggctctggcaagtcaagactgactcacatctgcaggatagacctgaaaggtcactccccagaatggtacagcaaaggctttggacatctgtgtgcagcagaagttgccaggattagaaactctttccagcccctcattgctgagggcccagaaactaaaatctgagttttgcccagtgtgacatcaaactcagggaagaggaagctaaagtgacgagtgtggcagagagtgtgcatgtgagaaagcgagagaaagaggaactgaaggacgcggttaatgcctaaaaatggaaacgttaagaagttggaatgttggagatgcaagaatttccaagaactttcttagccttcctggagatggctacatccctactaatataattttaaaatgagaactttatatatattacttaaaattaaatggactattccttgtgcattgcctaatttgctatttaaaggcttctaagaagcgtatacctaactgtaaataaatgtatgtatagcatatgtacatatgtgtgtatatctccatctttactgtatatatgtaaaataccaattttatatagaattgtgtgttttgaaaatgacggtgtctgactcagtgagtcccttcctcacacagttctttccaagtggctctgggccccatctctccactgtcctgtaagctgtgcagaacctgctgctaacaccaaggtgtgaacatgccctgatgcctaaccaaagatgagttaaccaaaggaaaataacattaaaggagacttatgtgttaacgctttgtttctgctattcaaaaactgagagtggagatctgggataaagcaaggaaataataattactcctccttaaagcaaatgggggggtgagaagtcattaccaaatttaaagctagatgaggagttgccactgggcccagtaagatggaatttcagtgagatatggaccaccggagtcagcgagagtgactgaaacagaagcgatacctctcgctcccatgcccatcactacagaccccaagtcaagatgaatatcatagcctttacttcttcacagccaaagggagcccctgtgttgtctcaagtttttataaatacatttcataatgttattaaatgtcattctatttgaccagtggcctatttggtcacagttaattggtgttttcttattgcactgaattcaactccagacaccatacaaagggagatgatggccattccgttcaaatcctagatcgttacagcttcagggaattcatattttgttatgtgtaggatactcttaaaatgtaattcattaaacttttacaatctgaaagacagggtttttaactaacatgagaccaaaactatgttctttgattagttttagatagtataatcgggtttattaattcttctgtgtttcttcactagccagtccaagctacctatgcatttgacccaaccttatttattattgtacagatgaagcgaattgactccctttagccaactgctaatggatcgaatgtgctttttattgtaattcaacagctatagagagaaagataacttattgtgtgtttgatttcagggagagagattttctttggtcatccataatagagattgataagatttagcaactggtgttggagaaaaaaagaaaagcaaatgagtgttttcaggtttttttgcattatatgcatttatgtaatgtttctgttatcagcaatgtgcaattattttattgagaggaataaaaaagctttctatgagtttggtatggtgcgaggaaaatcttacagtttgaattatgacctagaaatttttcattcccatatctacctaagaaggaagcagtaaatccataatttaccttttgggcaatgctttgtgagcaaaacaaagtcacttctgccataacatcttgaatttaaccatatatgccagattactttatatgcatcaacaagatcaccagtgaagtttaatctagctaaacactggtcctgctcctgagatgggatcctatgtgtttggaaaacgtgataggcacacgaggatgagtggctttgtatcgcccagagaggtgcttgtccagatttcacatgcacatgaattgcctggggatcttgtgaaactgcagactctgctccaagtaatctgggctgggcctgagattctgcatttctaaggagtctcagggatgcctatgctgctggcctaaaaccacactcagaaacgaggacctagaagatccctaaaacagaataagaacaaatgtgattgtatttctgattctccctctcttcgaattatctgacttttttgtttttgtgcacatagtaatcatatcaccgctgcataacaacacagtgcatctttttaaaacaaggaaaagggaaaaaaaggagaaaaaacgatgcatcaagcttgtttgtcaaataccacagtattttattcattgttatcttgccaatggaaataaagtatgatattgcatttaaatattatatttatacctcatgtatatttttacctcaattgttgatatcaatcatcaattgtaaataaataattgccaaggcaaataaattt

SEQ ID NO: 253184 - DNA, 5784 bp, Artificial Sequence
  derived and/or modified sequence
ctcacagacaacagccaagcacagaggaaatattagctggcagagataacgaagagaaaacactcggtgacagatgcaccatctgtcagtttctgaggagcagttttcaagaaagctgaaaatgaattgaagaagagaggggttttgtttgaaaggtacagcacagcctaaggacaattttaaacaaaaaattgaggcaaaagaagcatgtgactggctccgtgctgccgggttcccgcaatacgctcagttatatgaggattcacaatttcccatcaacattgtggctgtcaagaatgatcatgattttcttgaaaaggaccttgtagaacctctttgcagacgactaaatacgttgaacaagtgtgcctcaatgaaacttgatgtgaacttccaaaggaaaaagggtgacgactccgatgaggaagatctttgtatcagcaacaaatggactttccaaagaaccagtcgcaggtggtctcgtgtggacgacctctacacgctgctccctcgaggagacagaaatgggtcaccgggaggcacggggatgaggaacacgaccagcagtgagagcgtcctcacagacctgagcgagcctgaggtctgctccattcacagcgaaagcagtggaggcagcgacagtcgcagccagccgggccagtgctgtacagacaacccggtcatgctggatgccccactcgtcagcagcagcctcccacagccccccagagatgtcctcaaccaccccttccaccccaagaatgagaagcccacgagggctagggccaaatcatttttgaaacgcatggaaacactccgagggaagggagcccacgggaggcataaggggtctgggcggacaggtggcctggtgatcagtgggcccatgttgcagcaggagccagagtcctttaaggctatgcagtgcatccaaataccaaatggagatctccagaattcgccgccacctgcctgcagaaaagggctcccatgctctggcaagtcgagtggcgagagcagcccgtcggagcacagcagcagcggggtgagcacgccctgcctgaaggaacgcaagtgccacgaggccaacaagcgcgggggcatgtacttggaggacctagatgtgctggcggggacagcactgccggatgcaggggaccaaagccgtatgcatgaatttcactcccaagagaatttggtggtgcatattcccaaggatcacaaaccaggaacattccccaaggcactttctattgaaagcctctctcccacagatagtagcaatggggttaattggaggaccggtagcatctccctgggcagagagcaggtccctggtgccagggagccccggctcatggcgtcctgccacagagccagccgagtcagtatctatgacaatgtccctggctcccatctgtatgccagcacaggagatcttttggacttggagaaagatgaccttttccctcacttggatgacattctgcagcatgtcaatgggctccaagaggtagtcgatgactggtccaaagatgtcttgcctgaactgcaaactcatgatacattggttggggaacctggcttatccacctttccatctcctaatcagatcaccttagattttgaaggtaactctgtctcagaaggtcggacgacacccagtgatgtggaaagagatgtaacatctcttaatgaatctgagcctcctggggtcagagacaggagggattctggtgtaggggcctctctgaccaggccaaacaggcgactccgatggaacagtttccagctgtcgcaccagccccggccggccccagcatcgccccacatcagcagccagacggccagccagctgagcctgctccagcgcttctcactgctccgcctcacggccatcatggagaagcactccatgtccaacaagcacggctggacatggtcagttccaaagttcatgaagaggatgaaagttcccgactacaaagacaaggctgtctttggcgttcctctcatagtccacgtccaaagaacgggacagcccctgcctcaaagtattcagcaagcactgagatatctacgcagcaactgcctcgatcaggtgggtctttttcgcaaatcaggagtgaagtctcgaatccatgcccttcgccaaatgaatgaaaacttccctgagaacgtcaactatgaagaccagtctgcttatgatgtggcggatatggtgaaacagttcttccgggacctccctgagcctcttttcaccaacaagctcagtgagacctttctccatatctatcagtatgtctccaaagagcagcggctgcaggccgtgcaggctgccatcctgctactggccgatgagaacagggaggtcctgcagacgctcttgtgtttcctgaacgacgtcgtcaacttggtggaagagaatcagatgacgcccatgaacctggcagtgtgtctggccccctccctctttcatcttaatttattgaagaaagaaagctctccacgagtcatacagaagaaatatgccactgggaagccagatcaaaaggacctcaacgagaatctggcagcagctcaggggctagcgcacatgatcatggaatgcgacagactttttgaggttccacacgagttggtggcccagtctcgtaactcgtatgtggaggctgagatccacgtgccaaccctggaagaattggggacacagctggaggagagtggggcaactttccacacttacctgaaccatctcatccagggcctccagaaagaagccaaggagaagttcaaaggatgggtcacgtgctccagcacggacaatacagatcttgctttcaaaaaggtgggcgacgggaacccgctgaagctgtggaaggcttctgtggaggtggaagcacccccctcagtggtcctgaaccgcgtgctgagagagcgccacctgtgggacgaggactttgtgcagtggaaggttgtggaaactctagacaggcaaacagagatctaccagtatgtgctgaacagcatggctccccatccttccagagactttgtggttctcaggacctggaaaactgatttgcccaaaggaatgtgtaccctggtgtccctctccgtggagcatgaggaagcccagctcctgggtggtgtgcgagcagtggtgatggactcgcagtacttgatagaaccgtgtggctctggcaagtcaagactgactcacatctgcaggatagacctgaaaggtcactccccagaatggtacagcaaaggctttggacatctgtgtgcagcagaagttgccaggattagaaactctttccagcccctcattgctgagggcccagaaactaaaatctgagttttgcccagtgtgacatcaaactcagggaagaggaagctaaagtgacgagtgtggcagagagtgtgcatgtgagaaagcgagagaaagaggaactgaaggacgcggttaatgcctaaaaatggaaacgttaagaagttggaatgttggagatgcaagaatttccaagaactttcttagccttcctggagatggctacatccctactaatataattttaaaatgagaactttatatatattacttaaaattaaatggactattccttgtgcattgcctaatttgctatttaaaggcttctaagaagcgtatacctaactgtaaataaatgtatgtatagcatatgtacatatgtgtgtatatctccatctttactgtatatatgtaaaataccaattttatatagaattgtgtgttttgaaaatgacggtgtctgactcagtgagtcccttcctcacacagttctttccaagtggctctgggccccatctctccactgtcctgtaagctgtgcagaacctgctgctaacaccaaggtgtgaacatgccctgatgcctaaccaaagatgagttaaccaaaggaaaataacattaaaggagacttatgtgttaacgctttgtttctgctattcaaaaactgagagtggagatctgggataaagcaaggaaataataattactcctccttaaagcaaatgggggggtgagaagtcattaccaaatttaaagctagatgaggagttgccactgggcccagtaagatggaatttcagtgagatatggaccaccggagtcagcgagagtgactgaaacagaagcgatacctctcgctcccatgcccatcactacagaccccaagtcaagatgaatatcatagcctttacttcttcacagccaaagggagcccctgtgttgtctcaagtttttataaatacatttcataatgttattaaatgtcattctatttgaccagtggcctatttggtcacagttaattggtgttttcttattgcactgaattcaactccagacaccatacaaagggagatgatggccattccgttcaaatcctagatcgttacagcttcagggaattcatattttgttatgtgtaggatactcttaaaatgtaattcattaaacttttacaatctgaaagacagggtttttaactaacatgagaccaaaactatgttctttgattagttttagatagtataatcgggtttattaattcttctgtgtttcttcactagccagtccaagctacctatgcatttgacccaaccttatttattattgtacagatgaagcgaattgactccctttagccaactgctaatggatcgaatgtgctttttattgtaattcaacagctatagagagaaagataacttattgtgtgtttgatttcagggagagagattttctttggtcatccataatagagattgataagatttagcaactggtgttggagaaaaaaagaaaagcaaatgagtgttttcaggtttttttgcattatatgcatttatgtaatgtttctgttatcagcaatgtgcaattattttattgagaggaataaaaaagctttctatgagtttggtatggtgcgaggaaaatcttacagtttgaattatgacctagaaatttttcattcccatatctacctaagaaggaagcagtaaatccataatttaccttttgggcaatgctttgtgagcaaaacaaagtcacttctgccataacatcttgaatttaaccatatatgccagattactttatatgcatcaacaagatcaccagtgaagtttaatctagctaaacactggtcctgctcctgagatgggatcctatgtgtttggaaaacgtgataggcacacgaggatgagtggctttgtatcgcccagagaggtgcttgtccagatttcacatgcacatgaattgcctggggatcttgtgaaactgcagactctgctccaagtaatctgggctgggcctgagattctgcatttctaaggagtctcagggatgcctatgctgctggcctaaaaccacactcagaaacgaggacctagaagatccctaaaacagaataagaacaaatgtgattgtatttctgattctccctctcttcgaattatctgacttttttgtttttgtgcacatagtaatcatatcaccgctgcataacaacacagtgcatctttttaaaacaaggaaaagggaaaaaaaggagaaaaaacgatgcatcaagcttgtttgtcaaataccacagtattttattcattgttatcttgccaatggaaataaagtatgatattgcatttaaatattatatttatacctcatgtatatttttacctcaattgttgatatcaatcatcaattgtaaataaataattgccaaggcaaataaattt

SEQ ID NO: 253185 - protein, 1105 aa, Artificial Sequence
  derived and/or modified sequence
MLEPSSVLHANVNQAPLWCLVLRWCRECKDTVCGGKQKSRVNHTFQRREIEAKEACDWLRAAGFPQYAQLYEDSQFPINIVAVKNDHDFLEKDLVEPLCRRLNTLNKCASMKLDVNFQRKKGDDSDEEDLCISNKWTFQRTSRRWSRVDDLYTLLPRGDRNGSPGGTGMRNTTSSESVLTDLSEPEVCSIHSESSGGSDSRSQPGQCCTDNPVMLDAPLVSSSLPQPPRDVLNHPFHPKNEKPTRARAKSFLKRMETLRGKGAHGRHKGSGRTGGLVISGPMLQQEPESFKAMQCIQIPNGDLQNSPPPACRKGLPCSGKSSGESSPSEHSSSGVSTPCLKERKCHEANKRGGMYLEDLDVLAGTALPDAGDQSRMHEFHSQENLVVHIPKDHKPGTFPKALSIESLSPTDSSNGVNWRTGSISLGREQVPGAREPRLMASCHRASRVSIYDNVPGSHLYASTGDLLDLEKDDLFPHLDDILQHVNGLQEVVDDWSKDVLPELQTHDTLVGEPGLSTFPSPNQITLDFEGNSVSEGRTTPSDVERDVTSLNESEPPGVRDRRDSGVGASLTRPNRRLRWNSFQLSHQPRPAPASPHISSQTASQLSLLQRFSLLRLTAIMEKHSMSNKHGWTWSVPKFMKRMKVPDYKDKAVFGVPLIVHVQRTGQPLPQSIQQALRYLRSNCLDQVGLFRKSGVKSRIHALRQMNENFPENVNYEDQSAYDVADMVKQFFRDLPEPLFTNKLSETFLHIYQYVSKEQRLQAVQAAILLLADENREVLQTLLCFLNDVVNLVEENQMTPMNLAVCLAPSLFHLNLLKKESSPRVIQKKYATGKPDQKDLNENLAAAQGLAHMIMECDRLFEVPHELVAQSRNSYVEAEIHVPTLEELGTQLEESGATFHTYLNHLIQGLQKEAKEKFKGWVTCSSTDNTDLAFKKVGDGNPLKLWKASVEVEAPPSVVLNRVLRERHLWDEDFVQWKVVETLDRQTEIYQYVLNSMAPHPSRDFVVLRTWKTDLPKGMCTLVSLSVEHEEAQLLGGVRAVVMDSQYLIEPCGSGKSRLTHICRIDLKGHSPEWYSKGFGHLCAAEVARIRNSFQPLIAEGPETKI

SEQ ID NO: 253186 - protein, 687 aa, Artificial Sequence
  derived and/or modified sequence
MLEPSSVLHANVNQAPLWCLVLRWCRECKDTVCGGKQKSRVNHTFQRREIEAKEACDWLRAAGFPQYAQLYEDSQFPINIVAVKNDHDFLEKDLVEPLCRRLNTLNKCASMKLDVNFQRKKGDDSDEEDLCISNKWTFQRTSRRWSRVDDLYTLLPRGDRNGSPGGTGMRNTTSSESVLTDLSEPEVCSIHSESSGGSDSRSQPGQCCTDNPVMLDAPLVSSSLPQPPRDVLNHPFHPKNEKPTRARAKSFLKRMETLRGKGAHGRHKGSGRTGGLVISGPMLQQEPESFKAMQCIQIPNGDLQNSPPPACRKGLPCSGKSSGESSPSEHSSSGVSTPCLKERKCHEANKRGGMYLEDLDVLAGTALPDAGDQSRMHEFHSQENLVVHIPKDHKPGTFPKALSIESLSPTDSSNGVNWRTGSISLGREQVPGAREPRLMASCHRASRVSIYDNVPGSHLYASTGDLLDLEKDDLFPHLDDILQHVNGLQEVVDDWSKDVLPELQTHDTLVGEPGLSTFPSPNQITLDFEGNSVSEGRTTPSDVERDVTSLNESEPPGVRDRRDSGVGASLTRPNRRLRWNSFQLSHQPRPAPASPHISSQTASQLSLLQRFSLLRLTAIMEKHSMSNKHGWTWSVPKFMKRMKVPDYKDKAVFGVPLIVHVQRTGQPLPQSIQQALRYLRSNCLDQE

SEQ ID NO: 253187 - DNA, 3318 bp, Artificial Sequence
  derived and/or modified sequence
atgctggagcccagcagcgtgctgcacgccaacgtgaaccaggcccccctgtggtgcctggtgctgagatggtgcagagagtgcaaggacaccgtgtgcggcggcaagcagaagagcagagtgaaccacaccttccagagaagagagatcgaggccaaggaggcctgcgactggctgagagccgccggcttcccccagtacgcccagctgtacgaggacagccagttccccatcaacatcgtggccgtgaagaacgaccacgacttcctggagaaggacctggtggagcccctgtgcagaagactgaacaccctgaacaagtgcgccagcatgaagctggacgtgaacttccagagaaagaagggcgacgacagcgacgaggaggacctgtgcatcagcaacaagtggaccttccagagaaccagcagaagatggagcagagtggacgacctgtacaccctgctgcccagaggcgacagaaacggcagccccggcggcaccggcatgagaaacaccaccagcagcgagagcgtgctgaccgacctgagcgagcccgaggtgtgcagcatccacagcgagagcagcggcggcagcgacagcagaagccagcccggccagtgctgcaccgacaaccccgtgatgctggacgcccccctggtgagcagcagcctgccccagccccccagagacgtgctgaaccaccccttccaccccaagaacgagaagcccaccagagccagagccaagagcttcctgaagagaatggagaccctgagaggcaagggcgcccacggcagacacaagggcagcggcagaaccggcggcctggtgatcagcggccccatgctgcagcaggagcccgagagcttcaaggccatgcagtgcatccagatccccaacggcgacctgcagaacagccccccccccgcctgcagaaagggcctgccctgcagcggcaagagcagcggcgagagcagccccagcgagcacagcagcagcggcgtgagcaccccctgcctgaaggagagaaagtgccacgaggccaacaagagaggcggcatgtacctggaggacctggacgtgctggccggcaccgccctgcccgacgccggcgaccagagcagaatgcacgagttccacagccaggagaacctggtggtgcacatccccaaggaccacaagcccggcaccttccccaaggccctgagcatcgagagcctgagccccaccgacagcagcaacggcgtgaactggagaaccggcagcatcagcctgggcagagagcaggtgcccggcgccagagagcccagactgatggccagctgccacagagccagcagagtgagcatctacgacaacgtgcccggcagccacctgtacgccagcaccggcgacctgctggacctggagaaggacgacctgttcccccacctggacgacatcctgcagcacgtgaacggcctgcaggaggtggtggacgactggagcaaggacgtgctgcccgagctgcagacccacgacaccctggtgggcgagcccggcctgagcaccttccccagccccaaccagatcaccctggacttcgagggcaacagcgtgagcgagggcagaaccacccccagcgacgtggagagagacgtgaccagcctgaacgagagcgagccccccggcgtgagagacagaagagacagcggcgtgggcgccagcctgaccagacccaacagaagactgagatggaacagcttccagctgagccaccagcccagacccgcccccgccagcccccacatcagcagccagaccgccagccagctgagcctgctgcagagattcagcctgctgagactgaccgccatcatggagaagcacagcatgagcaacaagcacggctggacctggagcgtgcccaagttcatgaagagaatgaaggtgcccgactacaaggacaaggccgtgttcggcgtgcccctgatcgtgcacgtgcagagaaccggccagcccctgccccagagcatccagcaggccctgagatacctgagaagcaactgcctggaccaggtgggcctgttcagaaagagcggcgtgaagagcagaatccacgccctgagacagatgaacgagaacttccccgagaacgtgaactacgaggaccagagcgcctacgacgtggccgacatggtgaagcagttcttcagagacctgcccgagcccctgttcaccaacaagctgagcgagaccttcctgcacatctaccagtacgtgagcaaggagcagagactgcaggccgtgcaggccgccatcctgctgctggccgacgagaacagagaggtgctgcagaccctgctgtgcttcctgaacgacgtggtgaacctggtggaggagaaccagatgacccccatgaacctggccgtgtgcctggcccccagcctgttccacctgaacctgctgaagaaggagagcagccccagagtgatccagaagaagtacgccaccggcaagcccgaccagaaggacctgaacgagaacctggccgccgcccagggcctggcccacatgatcatggagtgcgacagactgttcgaggtgccccacgagctggtggcccagagcagaaacagctacgtggaggccgagatccacgtgcccaccctggaggagctgggcacccagctggaggagagcggcgccaccttccacacctacctgaaccacctgatccagggcctgcagaaggaggccaaggagaagttcaagggctgggtgacctgcagcagcaccgacaacaccgacctggccttcaagaaggtgggcgacggcaaccccctgaagctgtggaaggccagcgtggaggtggaggccccccccagcgtggtgctgaacagagtgctgagagagagacacctgtgggacgaggacttcgtgcagtggaaggtggtggagaccctggacagacagaccgagatctaccagtacgtgctgaacagcatggccccccaccccagcagagacttcgtggtgctgagaacctggaagaccgacctgcccaagggcatgtgcaccctggtgagcctgagcgtggagcacgaggaggcccagctgctgggcggcgtgagagccgtggtgatggacagccagtacctgatcgagccctgcggcagcggcaagagcagactgacccacatctgcagaatcgacctgaagggccacagccccgagtggtacagcaagggcttcggccacctgtgcgccgccgaggtggccagaatcagaaacagcttccagcccctgatcgccgagggccccgagaccaagatctag

SEQ ID NO: 253188 - DNA, 2988 bp, Artificial Sequence
  derived and/or modified sequence
atgaagctggacgtgaacttccagagaaagaagggcgacgacagcgacgaggaggacctgtgcatcagcaacaagtggaccttccagagaaccagcagaagatggagcagagtggacgacctgtacaccctgctgcccagaggcgacagaaacggcagccccggcggcaccggcatgagaaacaccaccagcagcgagagcgtgctgaccgacctgagcgagcccgaggtgtgcagcatccacagcgagagcagcggcggcagcgacagcagaagccagcccggccagtgctgcaccgacaaccccgtgatgctggacgcccccctggtgagcagcagcctgccccagccccccagagacgtgctgaaccaccccttccaccccaagaacgagaagcccaccagagccagagccaagagcttcctgaagagaatggagaccctgagaggcaagggcgcccacggcagacacaagggcagcggcagaaccggcggcctggtgatcagcggccccatgctgcagcaggagcccgagagcttcaaggccatgcagtgcatccagatccccaacggcgacctgcagaacagccccccccccgcctgcagaaagggcctgccctgcagcggcaagagcagcggcgagagcagccccagcgagcacagcagcagcggcgtgagcaccccctgcctgaaggagagaaagtgccacgaggccaacaagagaggcggcatgtacctggaggacctggacgtgctggccggcaccgccctgcccgacgccggcgaccagagcagaatgcacgagttccacagccaggagaacctggtggtgcacatccccaaggaccacaagcccggcaccttccccaaggccctgagcatcgagagcctgagccccaccgacagcagcaacggcgtgaactggagaaccggcagcatcagcctgggcagagagcaggtgcccggcgccagagagcccagactgatggccagctgccacagagccagcagagtgagcatctacgacaacgtgcccggcagccacctgtacgccagcaccggcgacctgctggacctggagaaggacgacctgttcccccacctggacgacatcctgcagcacgtgaacggcctgcaggaggtggtggacgactggagcaaggacgtgctgcccgagctgcagacccacgacaccctggtgggcgagcccggcctgagcaccttccccagccccaaccagatcaccctggacttcgagggcaacagcgtgagcgagggcagaaccacccccagcgacgtggagagagacgtgaccagcctgaacgagagcgagccccccggcgtgagagacagaagagacagcggcgtgggcgccagcctgaccagacccaacagaagactgagatggaacagcttccagctgagccaccagcccagacccgcccccgccagcccccacatcagcagccagaccgccagccagctgagcctgctgcagagattcagcctgctgagactgaccgccatcatggagaagcacagcatgagcaacaagcacggctggacctggagcgtgcccaagttcatgaagagaatgaaggtgcccgactacaaggacaaggccgtgttcggcgtgcccctgatcgtgcacgtgcagagaaccggccagcccctgccccagagcatccagcaggccctgagatacctgagaagcaactgcctggaccaggtgggcctgttcagaaagagcggcgtgaagagcagaatccacgccctgagacagatgaacgagaacttccccgagaacgtgaactacgaggaccagagcgcctacgacgtggccgacatggtgaagcagttcttcagagacctgcccgagcccctgttcaccaacaagctgagcgagaccttcctgcacatctaccagtacgtgagcaaggagcagagactgcaggccgtgcaggccgccatcctgctgctggccgacgagaacagagaggtgctgcagaccctgctgtgcttcctgaacgacgtggtgaacctggtggaggagaaccagatgacccccatgaacctggccgtgtgcctggcccccagcctgttccacctgaacctgctgaagaaggagagcagccccagagtgatccagaagaagtacgccaccggcaagcccgaccagaaggacctgaacgagaacctggccgccgcccagggcctggcccacatgatcatggagtgcgacagactgttcgaggtgccccacgagctggtggcccagagcagaaacagctacgtggaggccgagatccacgtgcccaccctggaggagctgggcacccagctggaggagagcggcgccaccttccacacctacctgaaccacctgatccagggcctgcagaaggaggccaaggagaagttcaagggctgggtgacctgcagcagcaccgacaacaccgacctggccttcaagaaggtgggcgacggcaaccccctgaagctgtggaaggccagcgtggaggtggaggccccccccagcgtggtgctgaacagagtgctgagagagagacacctgtgggacgaggacttcgtgcagtggaaggtggtggagaccctggacagacagaccgagatctaccagtacgtgctgaacagcatggccccccaccccagcagagacttcgtggtgctgagaacctggaagaccgacctgcccaagggcatgtgcaccctggtgagcctgagcgtggagcacgaggaggcccagctgctgggcggcgtgagagccgtggtgatggacagccagtacctgatcgagccctgcggcagcggcaagagcagactgacccacatctgcagaatcgacctgaagggccacagccccgagtggtacagcaagggcttcggccacctgtgcgccgccgaggtggccagaatcagaaacagcttccagcccctgatcgccgagggccccgagaccaagatctag

SEQ ID NO: 253189 - DNA, 3318 bp, Artificial Sequence
  derived and/or modified sequence
atgcttgaacctagttccgtgttacacgccaatgtcaaccaagcccctctctggtgtctggtgctcaggtggtgccgtgagtgtaaggataccgtgtgcggcgggaagcagaagtctcgggtgaaccacacatttcagcgccgcgagattgaagcaaaagaagcctgcgattggctcagggctgctggttttcctcaatacgctcagctctatgaagacagccagtttcccatcaacatcgtagccgtgaaaaacgatcatgactttctggagaaagacctggtggaaccactgtgtcggcggctaaatactctaaataagtgtgcttccatgaaactggacgttaacttccagcgcaagaagggcgacgattccgacgaagaggatctgtgtatttccaataaatggacattccagcgaacctctagacgctggagccgtgtggacgacttatatactctgctgcctcggggcgatcggaacggaagccccggcggcacagggatgcgcaataccacctctagtgagagcgtgttaacggacttgagcgaaccagaagtctgctcgatccacagcgagagctctggtggaagtgattctcgctcacagcctggtcagtgctgcacagataaccctgtgatgttggatgcacctctggtctccagctcactgccacaacctccaagagacgtgctaaaccacccatttcacccgaagaatgaaaaaccgacacgtgcccgcgctaaaagctttctcaagagaatggaaacactgagagggaaaggtgcccacgggagacataagggaagcggacggacagggggactcgtgatctccggccccatgctgcagcaggagccggaatctttcaaagcaatgcagtgcattcagatccctaacggagaccttcagaattctccgcccccagcctgtcgcaaaggcttaccctgcagcggtaagtctagcggcgaaagttcgccctcagagcatagcagtagtggtgtgtcgacgccctgtctgaaggagcgtaaatgccatgaagccaacaaacgaggtgggatgtacctcgaggacttggacgtgctggctggaaccgccctccctgacgccggagaccagagtcgcatgcatgaatttcacagccaggaaaacctggtggtacacatccccaaggatcacaagcctggcaccttccctaaagccttgtctatcgaaagcctaagcccaaccgattcaagcaatggtgtcaactggcgcaccggctctattagtctgggacgggaacaggtccctggagcacgagagccccggctcatggcgagctgtcaccgggcttctcgagtgagcatttatgacaacgtccccggcagtcacctctacgcctctactggtgaccttctggacctggaaaaggacgacctgttcccacacctggacgatattcttcagcacgtcaacgggctccaggaagtggtggacgattggtccaaggatgtactgcccgaattgcaaacccacgatacactggtcggagagccaggtctgtctacatttccctcacccaatcagataacacttgatttcgagggaaactccgtctctgaagggcgaaccacacccagtgatgtggagcgcgacgtaacttctctgaacgagtcagaacccccgggcgtgcgtgaccggcgggatagcggcgtgggagccagcttaacgagaccaaaccggagactcaggtggaatagctttcagctgtcacaccagcctcgccccgcaccagcttccccccacattagctcccagacggcttctcagctatctctgctgcagcggttttccttgctccgattaaccgcaattatggagaagcactccatgtccaataagcatggttggacctggtcagtcccaaaattcatgaagcgtatgaaggtacccgactataaagacaaagctgtttttggagtcccactgattgtgcacgtccaacgcacaggacaacccctgccgcaaagcatacagcaggccctgagatatctgaggagtaattgtctagaccaggttggactgtttcggaaatctggagtaaagtctaggattcacgctcttcgacaaatgaatgagaactttcccgaaaatgtgaattacgaagatcagtctgcgtacgatgtcgccgacatggttaagcagtttttccgcgacctgccggagcctttgtttaccaataaactgagcgagactttcctacacatataccagtacgtctctaaggagcagcgtctccaggcagtgcaagcagccatactgctactagctgatgagaatagggaggtacttcagacactcctatgctttttaaatgatgtagtcaacctggtggaagagaatcagatgacaccaatgaatctggcggtttgtcttgctcctagcttgtttcacctgaacctgcttaagaaagagagtagtccacgggtgattcagaagaagtacgccaccggcaaacccgaccaaaaagacctgaatgaaaatcttgcagcagcccagggattggcgcatatgatcatggagtgtgacaggttattcgaggtaccccatgaactcgtggcccagagcaggaacagctacgtggaagccgaaatccacgttccaacgctggaggagcttggtacacagctcgaagaaagcggagcgacttttcatacatatttgaatcaccttattcaaggcctgcagaaggaagcgaaagagaagtttaaagggtgggtaacatgttcctcaaccgacaacactgatctagctttcaaaaaagtcggagacggtaaccccctaaaattgtggaaagctagtgtggaagtagaggcgcccccgagcgttgtacttaacagagtgctgcgggagcgtcatctatgggacgaggattttgtgcaatggaaggtcgtggaaactctggatcgacagactgaaatctaccagtacgtgcttaacagcatggccccgcacccaagtagggatttcgtggtgctgagaacctggaaaactgatctcccaaagggaatgtgcaccttggtgtccttgagcgtggagcatgaagaagcccaattattgggtggcgttcgcgctgtcgtgatggactctcagtaccttatcgaaccttgtgggtccggaaagagtcggctcactcacatatgtcgcattgacctgaagggccactctcccgagtggtatagcaagggatttggccatctgtgcgcagccgaagttgctcgtatcagaaactccttccagccgcttatcgctgaaggacccgagactaaaatatag

SEQ ID NO: 253190 - DNA, 2988 bp, Artificial Sequence
  derived and/or modified sequence
atgaaactggacgtaaactttcagagaaaaaagggcgacgactctgacgaagaggatctttgcatctccaacaagtggacgtttcagagaacatcccgcaggtggtcacgtgtggatgatctctatacgctgctgccccgtggcgaccggaacggaagccctggaggcactggtatgcgcaatacaacaagcagcgaatcagtgctgactgacctctcggagcccgaggtctgttccatacacagtgagtcgtccgggggatctgattcaagaagtcagccagggcagtgctgtactgacaatccagtcatgctcgatgcgcctctcgtcagcagttccctaccccagccccccagagacgtgctgaatcacccctttcatcccaaaaacgagaagccgacccgtgcgcgggctaagtcttttctcaaacgtatggagaccctacgcgggaaaggagctcacgggcgacataaagggagcgggcggaccggcgggctggtgatttccggtccgatgcttcagcaggaaccagagagttttaaggctatgcagtgtattcagatccctaacggggacctacagaactcgcccccacccgcatgccgcaaaggactgccttgcagtggcaagagctctggggagagttctcctagtgagcatagttctagcggtgtctccacgccctgtctgaaggagaggaagtgtcatgaggccaacaaaagggggggaatgtatctggaggatctggatgtgcttgctggcactgccctgccagacgccggtgatcaatcccggatgcatgaatttcattcacaggagaatctcgtggtgcatattcccaaggatcacaaacctggcaccttcccaaaggcattgtccatcgaaagcctgtctccaaccgatagctcaaatggcgtgaactggcgtaccggatccatatctctgggaagagagcaggtacctggcgcgcgcgagccccggttgatggcttcatgtcaccgggcttcacgtgtgagtatatatgacaacgtcccaggctctcacctctatgcgtccactggtgatctactcgacctggagaaggatgatttgtttcctcacctggacgacatacttcagcacgtgaacggcctccaggaagtggtcgatgactggtctaaggatgtgcttccagagctgcagacccacgatacactggttggggagccgggcctgtccacatttccatcacctaatcaaataacattagacttcgagggtaacagcgtgtctgagggacggaccaccccttcagatgtcgaaagagacgtgacctcactcaacgaatcagaacctcctggggtgagggatcgccgtgactccggcgtcggcgcctctctgactaggcctaaccggcggcttcggtggaactcctttcagctttctcaccagccccgaccagcacccgcctcgccccacatctcctctcagacagcttctcagctgtcactgctgcaacgctttagtctcctccggctgactgccattatggagaaacatagtatgtcaaataaacacgggtggacctggtcagtacctaagtttatgaaaagaatgaaggttccagattataaggacaaggcggttttcggagtgcccttgatagtgcacgtgcagcgcacaggtcagccattaccacagagcatacagcaggcattgcggtatttgaggtctaactgcttggaccaggtgggccttttccgcaaatctggagtcaaaagcaggatccacgctctaagacagatgaatgagaatttccctgagaacgtgaactatgaagatcagtccgcctatgatgtggcagacatggttaaacagttctttagagacctgcctgagcctcttttcacaaataaactgtctgagaccttcttgcatatctaccagtacgtctcaaaggagcagagactgcaggccgtacaggctgccattctcctgctggctgatgaaaatagggaagtgctgcagaccctgttatgctttctaaacgatgtggtcaatttggtggaggaaaaccagatgacgccgatgaatcttgccgtgtgcctggcaccctctttgtttcacctgaatcttctgaagaaagagtcctctccccgggttatccagaagaagtacgccacaggaaagcccgatcagaaggacctgaatgaaaatctggctgctgctcaagggctcgcccacatgattatggagtgtgaccgcttgttcgaggtacctcatgagctcgtggcacaaagcaggaactcttacgtggaggcagagatacacgtgccaaccctagaagagcttggcactcagctggaggaatcaggcgccacctttcatacatacctcaatcatctgattcaaggcctgcagaaggaggcgaaggagaagttcaaaggctgggttacatgcagctcaaccgacaatactgacctggcatttaagaaggtgggggacggtaaccccctgaaactgtggaaagccagcgttgaggtggaggcccctccgagtgtcgtccttaatagagtcctgagggaacgccatctctgggacgaagacttcgtgcagtggaaggtggtggaaaccttggaccgccagacagaaatctaccagtatgtactgaactccatggccccacatcctagccgggactttgtagtgcttagaacgtggaaaacagaccttccaaaggggatgtgcacacttgtgagccttagcgtcgagcatgaggaagctcaactgttgggtggcgtgcgggccgtggttatggacagccaatacttgatcgaaccatgtggttcaggcaagagtcgtctgacccatatctgtcgcattgaccttaagggacacagcccggagtggtatagtaaaggcttcggacatctgtgcgccgctgaggtggcaagaattcgtaacagttttcaacccctcatcgctgaaggaccagagacaaagatctag

SEQ ID NO: 253191 - DNA, 3318 bp, Artificial Sequence
  derived and/or modified sequence
atgctggagcccagctctgtgctgcacgccaacgtgaaccaggcccccctgtggtgcctggtgctgcgctggtgccgggagtgcaaggacacagtgtgtggcggcaagcagaagagccgggtgaaccacaccttccagaggcgggagattgaggccaaggaggcctgtgactggctgcgggccgccggcttcccccagtatgcccagctgtatgaggacagccagttccccatcaacatcgtggccgtgaagaatgaccatgacttcctggagaaggacctggtggagcccctgtgccggcggctgaacaccctgaacaagtgtgcctccatgaagctggatgtgaacttccagaggaagaagggagatgacagtgatgaggaggacctgtgcatcagcaacaagtggaccttccagaggaccagccgccgctggagccgggtggatgacctgtacaccctgctgcccaggggggacagaaatggcagccctgggggcaccggcatgaggaacaccaccagcagcgagagcgtgctgacagacctgtctgagcctgaggtgtgcagcatccacagcgagagcagcggcggcagtgacagccgcagccagcccggccagtgctgcacagacaaccctgtgatgctggatgcccccctggtgagcagcagcctgccccagcccccaagagatgtgctgaaccaccccttccaccccaagaatgagaagcccacccgggcccgggccaagagcttcctgaagaggatggagaccctgcggggcaaaggagcccacggccgccacaagggcagcggccgcactggaggcctggtgatcagcggccccatgctgcagcaggagcctgagagcttcaaggccatgcagtgcatccagatccccaacggggacctgcagaacagccccccaccagcctgcaggaagggcctgccctgcagcggcaagagcagcggggagagcagccccagcgagcacagcagcagtggagtgtccaccccctgcctgaaggagaggaagtgccacgaggccaacaagaggggcggcatgtacctggaggacctggatgtgctggccggcacagccctgcctgatgctggggaccagagcaggatgcatgagttccacagccaggagaacctggtggtgcacatccccaaggaccacaagccaggcaccttccccaaggccctgagcattgagagcctgagccccacagacagcagcaatggagtgaactggaggacaggcagcatcagcctgggccgggagcaggtgcctggggcccgggagccccggctgatggccagctgccaccgggccagccgggtgtccatctatgacaacgtgcccggcagccacctgtatgccagcactggagacctgctggacctggagaaggatgacctcttcccccacctggatgacatcctgcagcacgtgaatggcctgcaggaggtggtggatgactggagcaaggatgtgctgcctgagctgcagacccatgacaccctggtgggggagcccggcctgagcaccttccccagccccaaccagatcaccctggactttgagggcaacagcgtgtctgagggccgcaccacccccagtgatgtggagagagatgtgaccagcctgaatgaaagtgagcccccaggagtgcgggacagaagagacagcggcgtgggcgccagcctgacccggcccaacagaaggctgcgctggaacagcttccagctgagccaccagcccaggcctgccccagccagcccccacatcagcagccagacagccagccagctgagcctgctgcagcgcttcagcctgctgcggctgacagccatcatggagaagcacagcatgagcaacaagcacggctggacctggagcgtgcccaagttcatgaagaggatgaaggtgcctgactacaaggacaaggctgtgtttggagtgcccctcatcgtgcacgtgcagaggacaggccagcccctgccccagagcatccagcaggccctgcgctacctgcggagcaactgcctggaccaggtgggcctcttcaggaagtctggagtgaagagccgcatccacgccctgcggcagatgaatgaaaacttcccagaaaatgtgaactatgaggaccagagcgcctatgatgtggccgacatggtgaagcagttcttccgggacctgcctgagcccctcttcaccaacaagctgtctgagaccttcctgcacatctaccagtatgtgtccaaggagcagaggctgcaggccgtgcaggccgccatcctgctgctggctgatgaaaatcgggaggtgctgcagaccctgctgtgcttcctgaatgatgtggtgaacctggtggaggagaaccagatgacccccatgaacctggccgtgtgcctggcccccagcctcttccacctgaacctgctgaagaaggagagcagccccagggtcatccagaagaagtatgccaccgggaagccagaccagaaggacctgaatgaaaacctggccgccgcccagggcctggcccacatgatcatggagtgtgaccggctgtttgaggtgccccatgagctggtggcccagagcagaaattcctatgtggaggccgagatccacgtgcccaccctggaggagctgggcacccagctggaggagagcggggccaccttccacacctacctgaaccacctgatccagggcctgcagaaggaggccaaggagaagttcaagggctgggtgacctgcagcagcacagacaacacagacctggccttcaagaaggtgggagatggcaaccccctgaagctgtggaaggcctctgtggaggtggaggccccacccagcgtggtgctgaacagagtgctgcgggagcggcacctgtgggatgaagattttgtgcagtggaaggtggtggagaccctggaccggcagacagagatctaccagtatgtgctgaacagcatggccccccaccccagccgggactttgtggtgctgcggacctggaagacagacctgcccaagggcatgtgcaccctggtgtccctgtctgtggagcacgaggaggcccagctgctgggcggcgtgcgggctgtggtgatggacagccagtacctgattgagccctgtggcagcggcaagagccggctgacccacatctgcagaattgacctgaagggccacagccctgagtggtacagcaagggcttcggccacctgtgtgccgctgaggtggcccgcatccggaacagcttccagcccctgattgctgagggccctgagaccaagatctag

SEQ ID NO: 253192 - DNA, 2988 bp, Artificial Sequence
  derived and/or modified sequence
atgaagctggatgtgaacttccagaggaagaagggagatgacagtgatgaggaggacctgtgcatcagcaacaagtggaccttccagaggaccagccgccgctggagccgggtggatgacctgtacaccctgctgcccaggggggacagaaatggcagccctgggggcaccggcatgaggaacaccaccagcagcgagagcgtgctgacagacctgtctgagcctgaggtgtgcagcatccacagcgagagcagcggcggcagtgacagccgcagccagcccggccagtgctgcacagacaaccctgtgatgctggatgcccccctggtgagcagcagcctgccccagcccccaagagatgtgctgaaccaccccttccaccccaagaatgagaagcccacccgggcccgggccaagagcttcctgaagaggatggagaccctgcggggcaaaggagcccacggccgccacaagggcagcggccgcactggaggcctggtgatcagcggccccatgctgcagcaggagcctgagagcttcaaggccatgcagtgcatccagatccccaacggggacctgcagaacagccccccaccagcctgcaggaagggcctgccctgcagcggcaagagcagcggggagagcagccccagcgagcacagcagcagtggagtgtccaccccctgcctgaaggagaggaagtgccacgaggccaacaagaggggcggcatgtacctggaggacctggatgtgctggccggcacagccctgcctgatgctggggaccagagcaggatgcatgagttccacagccaggagaacctggtggtgcacatccccaaggaccacaagccaggcaccttccccaaggccctgagcattgagagcctgagccccacagacagcagcaatggagtgaactggaggacaggcagcatcagcctgggccgggagcaggtgcctggggcccgggagccccggctgatggccagctgccaccgggccagccgggtgtccatctatgacaacgtgcccggcagccacctgtatgccagcactggagacctgctggacctggagaaggatgacctcttcccccacctggatgacatcctgcagcacgtgaatggcctgcaggaggtggtggatgactggagcaaggatgtgctgcctgagctgcagacccatgacaccctggtgggggagcccggcctgagcaccttccccagccccaaccagatcaccctggactttgagggcaacagcgtgtctgagggccgcaccacccccagtgatgtggagagagatgtgaccagcctgaatgaaagtgagcccccaggagtgcgggacagaagagacagcggcgtgggcgccagcctgacccggcccaacagaaggctgcgctggaacagcttccagctgagccaccagcccaggcctgccccagccagcccccacatcagcagccagacagccagccagctgagcctgctgcagcgcttcagcctgctgcggctgacagccatcatggagaagcacagcatgagcaacaagcacggctggacctggagcgtgcccaagttcatgaagaggatgaaggtgcctgactacaaggacaaggctgtgtttggagtgcccctcatcgtgcacgtgcagaggacaggccagcccctgccccagagcatccagcaggccctgcgctacctgcggagcaactgcctggaccaggtgggcctcttcaggaagtctggagtgaagagccgcatccacgccctgcggcagatgaatgaaaacttcccagaaaatgtgaactatgaggaccagagcgcctatgatgtggccgacatggtgaagcagttcttccgggacctgcctgagcccctcttcaccaacaagctgtctgagaccttcctgcacatctaccagtatgtgtccaaggagcagaggctgcaggccgtgcaggccgccatcctgctgctggctgatgaaaatcgggaggtgctgcagaccctgctgtgcttcctgaatgatgtggtgaacctggtggaggagaaccagatgacccccatgaacctggccgtgtgcctggcccccagcctcttccacctgaacctgctgaagaaggagagcagccccagggtcatccagaagaagtatgccaccgggaagccagaccagaaggacctgaatgaaaacctggccgccgcccagggcctggcccacatgatcatggagtgtgaccggctgtttgaggtgccccatgagctggtggcccagagcagaaattcctatgtggaggccgagatccacgtgcccaccctggaggagctgggcacccagctggaggagagcggggccaccttccacacctacctgaaccacctgatccagggcctgcagaaggaggccaaggagaagttcaagggctgggtgacctgcagcagcacagacaacacagacctggccttcaagaaggtgggagatggcaaccccctgaagctgtggaaggcctctgtggaggtggaggccccacccagcgtggtgctgaacagagtgctgcgggagcggcacctgtgggatgaagattttgtgcagtggaaggtggtggagaccctggaccggcagacagagatctaccagtatgtgctgaacagcatggccccccaccccagccgggactttgtggtgctgcggacctggaagacagacctgcccaagggcatgtgcaccctggtgtccctgtctgtggagcacgaggaggcccagctgctgggcggcgtgcgggctgtggtgatggacagccagtacctgattgagccctgtggcagcggcaagagccggctgacccacatctgcagaattgacctgaagggccacagccctgagtggtacagcaagggcttcggccacctgtgtgccgctgaggtggcccgcatccggaacagcttccagcccctgattgctgagggccctgagaccaagatctag

SEQ ID NO: 253193 - DNA, 3318 bp, Artificial Sequence
  derived and/or modified sequence
atgctggagcccagcagcgtgctgcacgccaacgtgaaccaggcccccttgtggtgtcttgtcttgcgttggtgtcgggagtgcaaggacaccgtctgcggagggaaacaaaaatcgcgggtgaatcacacgtttcagagacgggaaatcgaagcaaaagaagcctgcgactggcttagagccgcggggttcccccagtacgcacaactgtatgaagattcccagttcccaatcaatatcgtggccgtgaaaaacgatcatgactttttggaaaaagacctggttgaacccctttgccggagactgaatactctgaataaatgcgcaagcatgaagctggacgttaactttcagcggaagaaaggagatgattctgacgaagaagacctttgcatcagcaacaaatggactttccagcggacatctagacggtggtcacgagttgatgacctgtacacgctcctgcctcgcggagacaggaacgggtcacccggcgggacaggtatgcggaacaccaccagctccgagagtgtcctcaccgacctgagtgagcccgaggtgtgtagtatccattccgagtcaagtggaggctctgattctaggagccagcccggacagtgctgtacagataatccagttatgcttgacgccccattggtgagttccagcctgccacaaccccctcgcgacgtactcaatcatccttttcaccccaagaacgaaaaaccaactcgagccagggctaaatccttcctgaagagaatggaaaccctgagaggcaaaggcgcacacggcaggcacaaggggtcaggaagaactgggggccttgtgatatctggccctatgctccaacaggagccggaaagctttaaggctatgcagtgtattcagattcctaatggagacctgcaaaatagcccacctccagcctgtcgaaagggacttccttgcagcggcaaatctagcggcgagtcttccccctctgaacactcatcgtccggcgtttcgaccccttgcttaaaggagaggaaatgccatgaggcaaataagaggggaggaatgtacctagaagacctggatgtccttgccggaaccgccctccctgatgccggagaccagtcacggatgcatgagttccattcccaggagaacttggttgtgcatatccctaaagatcataaacctggtacctttccgaaggctctctccattgaatccctctctcctaccgacagctccaacggcgttaattggaggaccgggagcatttccctggggcgggagcaagttccaggtgcccgggagccccgcttaatggcctcttgtcaccgcgcatcgcgagtctcaatctatgataatgtgcctggttcccatttatatgccagcaccggggatctgctggatctggagaaggacgacctatttcctcacctggatgatatcttgcaacacgtgaatggcctgcaggaagtcgtagacgactggagcaaagacgtgctcccagagttgcaaactcacgacactctggtgggggaaccaggactgtctaccttcccaagcccgaatcagatcacattggattttgagggaaattccgtgagcgagggccgcaccaccccaagtgatgttgaacgcgatgtgacaagtctcaacgaatccgagcctccgggcgtccgcgaccggagagacagtggcgtgggtgcctcactgacaaggcccaacaggcgcctcagatggaacagctttcagcttagtcatcaacctagacctgccccggccagtcctcatatcagttcccagacagcatctcaactctccctgttgcagcgttttagcttattgcggctgactgcaataatggaaaaacatagcatgtctaataaacacggatggacatggagtgtcccgaaattcatgaaacgcatgaaagttcctgactacaaggacaaggctgtgttcggtgtaccgctcatcgtacacgtccagcgcactggtcaaccactgccgcagagtattcagcaggctttgagatatctgcgttcaaactgtttggaccaagtgggattattccgaaagtctggcgttaagagccgcatccatgcactgcgccagatgaatgagaacttcccggagaatgtcaactacgaagaccagagcgcatacgacgtcgcggacatggtgaagcagttttttagagaccttcccgaacctctctttacaaacaagctgagcgagacattcctccatatatatcagtacgtgagcaaagagcagcggttacaggccgttcaggccgcaatacttttgctggctgacgagaaccgggaggtcttgcaaaccctcttgtgttttctcaacgatgtggtgaacctggtggaagagaaccagatgacacctatgaacctggctgtgtgcctcgcccctagcctatttcacctgaatctgctcaaaaaagaaagttctccgcgggtgatccagaagaagtatgctacaggaaagccggaccagaaagatcttaacgagaacctggccgcggctcaggggcttgcccatatgatcatggaatgcgacaggctcttcgaagtcccccacgagcttgttgcccagagcaggaattcctacgtggaggccgagatccacgttcctacactggaggaactcgggacacagctggaggagagtggcgcaacatttcacacttatctcaaccatctgatccagggactgcaaaaagaagctaaggaaaaatttaaagggtgggttacttgttccagcacagacaacactgatctcgctttcaagaaggtgggcgacggaaatcctctgaagctttggaaagcttcggtggaggtggaagcaccccccagtgtcgtgctgaatcgagtgctgcgggaacgccacttgtgggatgaagattttgtgcaatggaaggttgtggagaccctagatagacagaccgaaatataccagtatgtgcttaactctatggccccccaccccagtcgagacttcgtcgtcttgaggacatggaagacagacttgcccaagggaatgtgtacccttgtgagtctgtctgtcgaacatgaggaggcccagctgctcggaggagtgagggccgttgtgatggattctcagtacctgatcgagccatgtggatcaggaaagagtcgcttgacacacatctgcaggatcgatttaaaggggcactctccagagtggtactccaaagggttcggccacctatgcgccgctgaagttgcccgcataagaaattccttccaaccactgatcgccgagggccctgagaccaagatttag

SEQ ID NO: 253194 - DNA, 2988 bp, Artificial Sequence
  derived and/or modified sequence
atgaagctggacgtgaacttccagcggaagaagggcgacgacagcgatgaagaggacctctgcatctcaaataaatggacattccagaggacatcccggcgatggtcccgggtcgatgacttatatactctgctcccacgaggcgatagaaacggttctccagggggaaccgggatgaggaacaccaccagcagcgaatccgttcttactgacctttcggaacccgaggtgtgcagcatacattcagaatccagtggcggtagtgactctcggagccagcccggccagtgttgtaccgacaaccctgtcatgctggatgccccacttgtaagctcttcccttccccagcctccaagagacgtgttaaatcaccccttccaccccaagaatgaaaagcccacccgggcaagagcaaaatcgttccttaagcggatggaaacattgcgaggcaaaggggcccacggccgccacaaaggttcagggagaacagggggattggtaatttctggaccgatgctgcagcaggaacccgagtcatttaaagccatgcagtgcattcagatcccgaacggagacctacagaattctccccccccggcctgcagaaagggcctaccttgctctgggaaatcttcgggtgagtcttctcctagtgagcacagctcctccggagtgagtacaccttgcctaaaagaacggaagtgtcatgaagctaataaaaggggcggaatgtatctggaggatctcgacgtgctcgccggcaccgcactcccggacgctggtgatcagtccagaatgcacgaattccactcccaggagaatttagtggtgcacatccccaaagaccacaagcccggcacctttccgaaagcactgtccattgagtcacttagccccaccgattccagcaatggcgtgaactggcgtacaggatcgatatctctgggtagagagcaggtgcctggcgcccgtgaacccagacttatggcctcctgtcatcgggctagcagggtctcaatctacgacaacgttcctgggagtcatctgtacgccagtacaggggacttgctggatctggaaaaagatgatctttttccccacctcgatgatattctgcagcatgtaaacgggcttcaggaagtggtggacgattggtctaaggatgtgctgcccgaactgcagacccatgatactcttgtgggcgaaccaggattgtctacatttcccagccccaaccagataactctggactttgagggaaactctgtctccgaggggcggactacaccaagcgatgttgaaagagatgtgactagtctgaacgaatctgagcctccaggagtaagagatcgaagagattcaggggtgggggccagccttactcggcctaaccggaggttgcggtggaactcttttcaactttcacatcagccaagaccagccccagcatctcctcatatttcatcgcagacggcaagccagctaagcctgctccaaagattctccctgctgaggttgactgccattatggagaagcacagcatgtctaataagcacggatggacgtggtcagtacccaagttcatgaaacgaatgaaggtgccagactacaaggataaggcggtattcggtgtcccactgatcgtgcacgtccagcgaacaggtcagcctctgcctcaatctattcagcaggctctgcgatatctccgatcgaactgcctggatcaagtgggcctattccggaagtccggggtcaaatcccgaattcacgccctccgacagatgaacgaaaatttcccagagaacgtcaactatgaggatcagagtgcttacgacgtcgcagacatggtgaagcagttttttcgagatctgccagagcccctgtttactaataagctatccgagaccttcctgcacatttaccagtacgtttcaaaagaacagcggctgcaggcagtgcaagccgcaatcctcctcctggcagacgaaaatagggaagtgttgcagacattattgtgcttcctgaacgatgtagtgaatctagtggaagagaatcagatgaccccgatgaacctcgcagtgtgcctagccccctcattattccatctgaatcttctaaagaaagaatcatcacctagggttatccagaagaagtacgccaccggaaagcctgaccagaaagaccttaacgaaaacttggccgcagcacagggtctggctcacatgatcatggaatgtgaccgcctctttgaggtaccccacgagttagtagctcagagccgcaactcctacgtcgaagcggaaatccacgtgcctactctggaagaactggggactcaacttgaagaatcaggtgcgacttttcacacttatctgaaccatctcattcagggtctccaaaaggaggcgaaggaaaagtttaaaggctgggtcacatgcagctctaccgacaataccgatcttgcctttaagaaggtcggggatggaaacccactgaaactgtggaaggcttcagtggaagtggaagctcccccctcagtcgtgcttaaccgggtgctgagggagagacacctctgggatgaagacttcgtccagtggaaagtcgtggaaactctggataggcaaacagagatatatcaatacgtgctgaattcaatggcccctcacccaagtcgagactttgttgtgctgcgcacttggaaaacagatttgcctaagggaatgtgtactctggtctccctttccgtcgaacacgaggaagcccagttgcttgggggcgtgagagcggtggtaatggacagtcagtatctgatcgaaccatgtgggagcggtaagtcccgcctcacacatatctgtagaatcgatctcaagggccactcgcccgagtggtattcaaaaggcttcggccatttgtgcgccgcagaggtggctagaatccgcaactcttttcagccgcttatcgcagagggtcctgagactaagatctag

SEQ ID NO: 253195 - DNA, 3318 bp, Artificial Sequence
  derived and/or modified sequence
atgttggagcctagttcggttcttcacgccaatgtcaatcaggcgccactgtggtgccttgtccttcggtggtgccgtgagtgcaaagacactgtgtgcggaggaaaacagaagagccgcgtgaaccacaccttccagcgccgagaaatcgaagccaaggaagcctgcgactggttgcgagcagcaggctttcctcagtatgcccaactctacgaggattcacagttccccatcaatatcgtagccgttaagaacgatcacgacttcttagagaaagacctggtggaaccattatgtagaaggctaaacaccctgaacaaatgtgctagcatgaagctcgatgtgaattttcagcggaagaaaggagacgattcagacgaggaggacttgtgcatttcaaacaaatggacctttcaacggacctcaagacgatggtcccgcgtggatgacctgtatacccttcttccccgaggagacaggaatggcagccctggaggcacagggatgaggaataccacaagctccgaatcagtcctcacggatctgagcgaacctgaggtttgttctatccactcggagagctcaggtggcagcgacagccgcagtcagcctgggcagtgctgcaccgataatccagtaatgttagacgccccacttgtaagtagcagcctgcctcagccccctcgagacgttttgaaccaccctttccaccctaaaaacgagaaacccacgcgcgcacgtgcaaaatcattcctgaagcggatggagacactgagggggaagggtgcccatggacgacataagggcagtgggaggaccggtgggctggttatcagtgggcctatgcttcagcaggagccagaaagcttcaaagccatgcagtgcatccagatccctaacggcgatcttcaaaactcccctccccctgcctgccggaagggccttccatgttctgggaagtcctccggagaatcatcgccgtcagagcattcctcgtccggagtgtcaacaccctgtctcaaagaacgaaaatgtcatgaggctaataagcggggaggcatgtacctagaagatctggatgttctggctgggaccgctctgccggacgccggtgatcagagtcgcatgcatgagttccactcacaggagaatcttgtggttcatataccaaaagaccacaagcccggaacgtttccaaaggccctttctatagagtcattgagcccaacagattcaagcaacggtgttaactggcggacaggctccataagcctcgggagggaacaagtgcctggggctagggagcctagattgatggcttcctgccatcgagcctctagggtgtcaatctatgataacgtgcctggcagtcacctgtacgcttcaacaggcgacctccttgacctggagaaggatgatttattcccacacctggacgacattctgcagcacgtgaacgggctccaggaggtagtggacgactggagcaaagacgtgttaccagaacttcagacgcatgacacccttgtcggcgagcctggtctttcaacgttcccttcccctaatcaaataacgctggactttgaaggtaacagcgtcagcgagggtaggactaccccaagcgacgttgagcgcgatgtcacctctttgaacgagagtgaaccaccgggtgtgcgtgatcgcagagattccggggtgggcgcatcgctgacaaggcccaatcgacgcttaaggtggaacagctttcagctctcccatcagcccagacctgccccagcatcacctcacattagcagccagaccgcctctcagctgtccttgctgcagcgctttagcctcctccggttgacagcaatcatggagaaacattcaatgtcaaacaaacacggctggacttggtctgtccccaaatttatgaagagaatgaaggtgcccgattataaagataaggcagtgttcggtgtgcccttgatcgtgcacgtccagcgcacaggtcagccgttacctcaatcaattcagcaagccctgcggtatctcagatccaattgtctggatcaggtgggattatttcgaaagtcgggagtcaaaagccgaattcacgcactgcgacagatgaatgaaaattttccagaaaatgtgaattatgaggaccaatccgcttacgacgtggctgatatggttaaacagtttttcagagatctgccagaacccctttttaccaataagctgagcgagactttcctgcacatctatcaatacgtcagcaaagaacagcgacttcaagctgtgcaagccgcaatcctcctgttggcagacgagaaccgggaggtgctgcaaaccttactgtgttttttgaatgatgttgttaatctggtcgaggagaatcagatgacacccatgaatcttgctgtgtgcctggcaccatccctattccatctgaatctgctgaagaaggaaagctctccgcgtgtgatacagaaaaaatatgcgacagggaagccggatcagaaggatctaaatgaaaacctcgccgcagcccaaggacttgctcatatgattatggagtgtgaccgcctgttcgaggttccgcacgagctcgtcgctcagagtcgcaattcctatgtggaggctgagatccatgtgcccacccttgaggaactgggaacacaattggaagagtctggggctacctttcatacatacctcaaccatctgattcagggtctccagaaggaagccaaggagaagtttaaggggtgggtgacatgcagctctaccgataacactgacctggcctttaaaaaagttggtgacggtaaccccctgaagttgtggaaggcctctgtagaagtcgaggccccaccatcagtggtgcttaatcgcgtgctcagggaaagacacctgtgggacgaggatttcgtgcaatggaaggtcgtggagactctggaccgtcagacggaaatctaccaatacgtgctgaactctatggcgcctcacccatccagagacttcgtggtccttagaacttggaagaccgacctgcctaagggcatgtgtacgctggtaagtctgtccgtggagcacgaagaggcgcagttgctcgggggagtccgggcagtggttatggacagtcagtaccttatcgagccatgcggcagcggaaagtcgaggctgactcacatttgtcgaatcgacctgaaagggcactccccggagtggtactcgaaagggttcggacacctctgtgcggctgaggtggctagaatacgaaactcattccaacctcttatcgccgagggaccagagaccaaaatatag

SEQ ID NO: 253196 - DNA, 2988 bp, Artificial Sequence
  derived and/or modified sequence
atgaagttggatgtgaacttccaacgtaaaaagggcgatgatagcgatgaagaagatctgtgtatatccaacaagtggactttccagcgaacgagcaggcgctggtcacgtgtggatgacttgtataccctgctgccaaggggggatcggaacggttcacccggtggaacagggatgagaaataccacctcgtccgagagcgttctcacggacctgtcagaaccagaagtgtgttccatccactctgagagctcaggtgggtccgactcaaggagccagcccggacaatgttgcaccgacaatcctgtaatgctggacgccccactggtctcttcctcgttgccccagccacccagagacgtcctcaaccatcctttccaccccaagaatgagaagcccacccgtgcccgagcgaaaagctttctgaagagaatggagaccctgcgaggtaaaggcgctcacggccgacacaagggtagcggtcgcaccgggggacttgttattagtgggcctatgctccagcaggaaccggaaagcttcaaggcgatgcaatgcatacagatcccaaacggggacctccagaactctccaccacccgcttgtcggaaggggctgccgtgtagcggaaaatcttctggagagagttctccaagtgaacattcaagttcgggcgtctcaacaccatgtttaaaggaaaggaaatgccacgaagccaacaagagagggggtatgtacttggaagacctggacgtgctggcaggcacggctctgccagacgcaggcgaccagtcgcgcatgcacgagtttcactcccaggagaacctggtcgtgcacataccaaaagatcataaacccggaaccttcccaaaagctctgagcattgagtcattgtccccaactgattccagtaacggcgttaactggagaacggggagtatctcgcttggcagagagcaagtacccggagcccgagaaccaagactgatggcctcatgccatagggcaagcagagtatcgatttatgacaacgtgcccggaagtcacctctacgcatctactggagatctgctggacctcgagaaagatgacctgttcccccaccttgacgacatcctccagcacgtcaatggactgcaggaggtggtagacgattggagcaaagatgtcctccccgagctgcagacacatgacacattagtgggagaacctggcctctctactttcccaagtccaaatcagatcacgcttgatttcgagggaaatagcgtctcagaagggagaaccaccccttctgatgttgagcgtgacgtcacctcactgaacgagagcgaaccacctggagtgcgggatcggagggatagcggagtgggcgcaagcctgacccgacctaatcggaggctcaggtggaactcattccaacttagccatcagccccgaccagctccagcctctcctcatatctctagccaaaccgcctcacagctctccctactgcagcgattctctctgctcaggttgacggccattatggaaaagcattctatgagcaacaagcacggatggacttggtctgttcccaaatttatgaaacggatgaaggtccctgactacaaggacaaggcggtttttggggttccgcttatcgtccacgtccaaagaacgggacaaccccttcctcagtctattcagcaggcactgaggtacctacgctctaattgtctggaccaggtgggtctcttcaggaagtccggagtcaaaagccgtatccacgctcttaggcagatgaacgagaactttccagaaaatgtgaattatgaggatcagtcagcatacgatgtcgccgacatggtgaaacagtttttcagggacctacctgagccactgtttactaacaaactgagtgaaacattcctccatatttatcagtacgtttcaaaggagcaacggttgcaggctgtgcaggcagccatcctgttactggccgatgagaacagagaagtgctgcagaccctcctgtgctttcttaacgatgtagtaaacctcgtggaggaaaatcaaatgactccaatgaatctcgcagtttgtctggccccatctttgtttcatctgaatctcttaaagaaagagtcttcccctcgggtcatccagaaaaaatacgccactggtaagccagatcagaaggacctcaacgaaaacctagctgctgctcagggcctggcccacatgatcatggagtgtgatagactctttgaagtgccccacgagttggtggcccagtccagaaacagttacgtggaggctgagatacacgtgcctactctagaggagctcggaacacagctggaggaaagtggggcaacctttcacacatatttaaatcacttaatacaaggacttcaaaaagaagccaaagaaaagttcaagggctgggtgacttgcagctctaccgacaataccgatctggcctttaagaaggtgggagacgggaaccccctcaaactctggaaggcttctgttgaggtggaggccccaccttccgtcgtattgaaccgcgtcctgcgcgagagacacctatgggatgaagatttcgtccagtggaaggtcgtggagaccctcgatcgtcagaccgagatctatcagtacgtcctaaattcaatggctcctcatcctagccgagatttcgtagtgctacgaacctggaagaccgatctcccaaagggaatgtgcacactggtgtctctgtctgttgaacacgaggaagcacagctactcggaggggtgagggcagttgtgatggatagtcaatacttgatcgagccttgcggaagcgggaagtcaagattgactcatatctgccgaatagacctgaaggggcattcgccagaatggtattccaagggcttcggccacctctgtgcagccgaggtcgcccgtatcaggaactctttccagccactgatcgctgagggacccgagaccaaaatctag

SEQ ID NO: 253197 - DNA, 5798 bp, Artificial Sequence
  derived and/or modified sequence
cggaaacatgagagaggactatcatctgctccttgctctgaatttctttgaacctccatgctggaaccctcctcagttctccatgcaaacgttaaccaggcccctttgtggtgcttggtgctgcgctggtgcagagaatgcaaagacactgtctgtggtgggaaacagaaaagcagagtgaaccacacattccagcgccgggaaattgaggcaaaagaagcatgtgactggctccgtgctgccgggttcccgcaatacgctcagttatatgaggattcacaatttcccatcaacattgtggctgtcaagaatgatcatgattttcttgaaaaggaccttgtagaacctctttgcagacgactaaatacgttgaacaagtgtgcctcaatgaaacttgatgtgaacttccaaaggaaaaagggtgacgactccgatgaggaagatctttgtatcagcaacaaatggactttccaaagaaccagtcgcaggtggtctcgtgtggacgacctctacacgctgctccctcgaggagacagaaatgggtcaccgggaggcacggggatgaggaacacgaccagcagtgagagcgtcctcacagacctgagcgagcctgaggtctgctccattcacagcgaaagcagtggaggcagcgacagtcgcagccagccgggccagtgctgtacagacaacccggtcatgctggatgccccactcgtcagcagcagcctcccacagccccccagagatgtcctcaaccaccccttccaccccaagaatgagaagcccacgagggctagggccaaatcatttttgaaacgcatggaaacactccgagggaagggagcccacgggaggcataaggggtctgggcggacaggtggcctggtgatcagtgggcccatgttgcagcaggagccagagtcctttaaggctatgcagtgcatccaaataccaaatggagatctccagaattcgccgccacctgcctgcagaaaagggctcccatgctctggcaagtcgagtggcgagagcagcccgtcggagcacagcagcagcggggtgagcacgccctgcctgaaggaacgcaagtgccacgaggccaacaagcgcgggggcatgtacttggaggacctagatgtgctggcggggacagcactgccggatgcaggggaccaaagccgtatgcatgaatttcactcccaagagaatttggtggtgcatattcccaaggatcacaaaccaggaacattccccaaggcactttctattgaaagcctctctcccacagatagtagcaatggggttaattggaggaccggtagcatctccctgggcagagagcaggtccctggtgccagggagccccggctcatggcgtcctgccacagagccagccgagtcagtatctatgacaatgtccctggctcccatctgtatgccagcacaggagatcttttggacttggagaaagatgaccttttccctcacttggatgacattctgcagcatgtcaatgggctccaagaggtagtcgatgactggtccaaagatgtcttgcctgaactgcaaactcatgatacattggttggggaacctggcttatccacctttccatctcctaatcagatcaccttagattttgaaggtaactctgtctcagaaggtcggacgacacccagtgatgtggaaagagatgtaacatctcttaatgaatctgagcctcctggggtcagagacaggagggattctggtgtaggggcctctctgaccaggccaaacaggcgactccgatggaacagtttccagctgtcgcaccagccccggccggccccagcatcgccccacatcagcagccagacggccagccagctgagcctgctccagcgcttctcactgctccgcctcacggccatcatggagaagcactccatgtccaacaagcacggctggacatggtcagttccaaagttcatgaagaggatgaaagttcccgactacaaagacaaggctgtctttggcgttcctctcatagtccacgtccaaagaacgggacagcccctgcctcaaagtattcagcaagcactgagatatctacgcagcaactgcctcgatcaggtgggtctttttcgcaaatcaggagtgaagtctcgaatccatgcccttcgccaaatgaatgaaaacttccctgagaacgtcaactatgaagaccagtctgcttatgatgtggcggatatggtgaaacagttcttccgggacctccctgagcctcttttcaccaacaagctcagtgagacctttctccatatctatcagtatgtctccaaagagcagcggctgcaggccgtgcaggctgccatcctgctactggccgatgagaacagggaggtcctgcagacgctcttgtgtttcctgaacgacgtcgtcaacttggtggaagagaatcagatgacgcccatgaacctggcagtgtgtctggccccctccctctttcatcttaatttattgaagaaagaaagctctccacgagtcatacagaagaaatatgccactgggaagccagatcaaaaggacctcaacgagaatctggcagcagctcaggggctagcgcacatgatcatggaatgcgacagactttttgaggttccacacgagttggtggcccagtctcgtaactcgtatgtggaggctgagatccacgtgccaaccctggaagaattggggacacagctggaggagagtggggcaactttccacacttacctgaaccatctcatccagggcctccagaaagaagccaaggagaagttcaaaggatgggtcacgtgctccagcacggacaatacagatcttgctttcaaaaaggtgggcgacgggaacccgctgaagctgtggaaggcttctgtggaggtggaagcacccccctcagtggtcctgaaccgcgtgctgagagagcgccacctgtgggacgaggactttgtgcagtggaaggttgtggaaactctagacaggcaaacagagatctaccagtatgtgctgaacagcatggctccccatccttccagagactttgtggttctcaggacctggaaaactgatttgcccaaaggaatgtgtaccctggtgtccctctccgtggagcatgaggaagcccagctcctgggtggtgtgcgagcagtggtgatggactcgcagtacttgatagaaccgtgtggctctggcaagtcaagactgactcacatctgcaggatagacctgaaaggtcactccccagaatggtacagcaaaggctttggacatctgtgtgcagcagaagttgccaggattagaaactctttccagcccctcattgctgagggcccagaaactaaaatctgagttttgcccagtgtgacatcaaactcagggaagaggaagctaaagtgacgagtgtggcagagagtgtgcatgtgagaaagcgagagaaagaggaactgaaggacgcggttaatgcctaaaaatggaaacgttaagaagttggaatgttggagatgcaagaatttccaagaactttcttagccttcctggagatggctacatccctactaatataattttaaaatgagaactttatatatattacttaaaattaaatggactattccttgtgcattgcctaatttgctatttaaaggcttctaagaagcgtatacctaactgtaaataaatgtatgtatagcatatgtacatatgtgtgtatatctccatctttactgtatatatgtaaaataccaattttatatagaattgtgtgttttgaaaatgacggtgtctgactcagtgagtcccttcctcacacagttctttccaagtggctctgggccccatctctccactgtcctgtaagctgtgcagaacctgctgctaacaccaaggtgtgaacatgccctgatgcctaaccaaagatgagttaaccaaaggaaaataacattaaaggagacttatgtgttaacgctttgtttctgctattcaaaaactgagagtggagatctgggataaagcaaggaaataataattactcctccttaaagcaaatgggggggtgagaagtcattaccaaatttaaagctagatgaggagttgccactgggcccagtaagatggaatttcagtgagatatggaccaccggagtcagcgagagtgactgaaacagaagcgatacctctcgctcccatgcccatcactacagaccccaagtcaagatgaatatcatagcctttacttcttcacagccaaagggagcccctgtgttgtctcaagtttttataaatacatttcataatgttattaaatgtcattctatttgaccagtggcctatttggtcacagttaattggtgttttcttattgcactgaattcaactccagacaccatacaaagggagatgatggccattccgttcaaatcctagatcgttacagcttcagggaattcatattttgttatgtgtaggatactcttaaaatgtaattcattaaacttttacaatctgaaagacagggtttttaactaacatgagaccaaaactatgttctttgattagttttagatagtataatcgggtttattaattcttctgtgtttcttcactagccagtccaagctacctatgcatttgacccaaccttatttattattgtacagatgaagcgaattgactccctttagccaactgctaatggatcgaatgtgctttttattgtaattcaacagctatagagagaaagataacttattgtgtgtttgatttcagggagagagattttctttggtcatccataatagagattgataagatttagcaactggtgttggagaaaaaaagaaaagcaaatgagtgttttcaggtttttttgcattatatgcatttatgtaatgtttctgttatcagcaatgtgcaattattttattgagaggaataaaaaagctttctatgagtttggtatggtgcgaggaaaatcttacagtttgaattatgacctagaaatttttcattcccatatctacctaagaaggaagcagtaaatccataatttaccttttgggcaatgctttgtgagcaaaacaaagtcacttctgccataacatcttgaatttaaccatatatgccagattactttatatgcatcaacaagatcaccagtgaagtttaatctagctaaacactggtcctgctcctgagatgggatcctatgtgtttggaaaacgtgataggcacacgaggatgagtggctttgtatcgcccagagaggtgcttgtccagatttcacatgcacatgaattgcctggggatcttgtgaaactgcagactctgctccaagtaatctgggctgggcctgagattctgcatttctaaggagtctcagggatgcctatgctgctggcctaaaaccacactcagaaacgaggacctagaagatccctaaaacagaataagaacaaatgtgattgtatttctgattctccctctcttcgaattatctgacttttttgtttttgtgcacatagtaatcatatcaccgctgcataacaacacagtgcatctttttaaaacaaggaaaagggaaaaaaaggagaaaaaacgatgcatcaagcttgtttgtcaaataccacagtattttattcattgttatcttgccaatggaaataaagtatgatattgcatttaaatattatatttatacctcatgtatatttttacctcaattgttgatatcaatcatcaattgtaaataaataattgccaaggcaaataaattt

SEQ ID NO: 253198 - protein, 1220 aa, Artificial Sequence
  derived and/or modified sequence
MAGAGGQHHPPGAAGGAAAGAGAAVTSAAASAGPGEDSSDSEAEQEGPQKLIRKVSTSGQIRTKTSIKEGQLLKQTSSFQRWKKRYFKLRGRTLYYAKDSKSLIFDEVDLSDASVAEASTKNANNSFTIITPFRRLMLCAENRKEMEDWISSLKSVQTREPYEVAQFNVEHFSGMHNWYACSHARPTFCNVCRESLSGVTSHGLSCEVCKFKAHKRCAVRATNNCKWTTLASIGKDIIEDEDGVAMPHQWLEGNLPVSAKCAVCDKTCGSVLRLQDWKCLWCKTMVHTACKDLYHPICPLGQCKVSIIPPIALNSTDSDGFCRATFSFCVSPLLVFVNSKSGDNQGVKFLRRFKQLLNPAQVFDLMNGGPHLGLRLFQKFDNFRILVCGGDGSVGWVLSEIDKLNLNKQCQLGVLPLGTGNDLARVLGWGGSYDDDTQLPQILEKLERASTKMLDRWSIMTYELKLPPKASLLPGPPEASEEFYMTIYEDSVATHLTKILNSDEHAVVISSAKTLCETVKDFVAKVEKTYDKTLENAVVADAVASKCSVLNEKLEQLLQALHTDSQAAPVLPGLSPLIVEEDAVESSSEESLGESKEQLGDDVTKPSSQKAVKPREIMLRANSLKKAVRQVIEEAGKVMDDPTVHPCEPANQSSDYDSTETDESKEEAKDDGAKESITVKTAPRSPDARASYGHSQTDSVPGPAVAASKENLPVLNTRIICPGLRAGLAASIAGSSIINKMLLANIDPFGATPFIDPDLDSVDGYSEKCVMNNYFGIGLDAKISLEFNNKREEHPEKCRSRTKNLMWYGVLGTRELLQRSYKNLEQRVQLECDGQYIPLPSLQGIAVLNIPSYAGGTNFWGGTKEDDIFAAPSFDDKILEVVAIFDSMQMAVSRVIKLQHHRIAQCRTVKITIFGDEGVPVQVDGEAWVQPPGIIKIVHKNRAQMLTRDRAFESTLKSWEDKQKCDSGKPVLRTHLYIHHAIDLATEEVSQMQLCSQAAEELITRICDAATIHCLLEQELAHAVNACSHALNKANPRCPESLTRDTATEIAINVKALYNETESLLVGRVPLQLESPHEERVSNALHSVEVELQKLTEIPWLYYILHPNEDEEPPMDCTKRNNRSTVFRIVPKFKKEKVQKQKTSSQPVQKWGTEEVAAWLDLLNLGEYKDIFIRHDIRGAELLHLERRDLKDLGIPKVGHVKRILQGIKELGRSTPQSEV

SEQ ID NO: 253199 - protein, 1084 aa, Artificial Sequence
  derived and/or modified sequence
MLCAENRKEMEDWISSLKSVQTREPYEVAQFNVEHFSGMHNWYACSHARPTFCNVCRESLSGVTSHGLSCEVCKFKAHKRCAVRATNNCKWTTLASIGKDIIEDEDGVAMPHQWLEGNLPVSAKCAVCDKTCGSVLRLQDWKCLWCKTMVHTACKDLYHPICPLGQCKVSIIPPIALNSTDSDGFCRATFSFCVSPLLVFVNSKSGDNQGVKFLRRFKQLLNPAQVFDLMNGGPHLGLRLFQKFDNFRILVCGGDGSVGWVLSEIDKLNLNKQCQLGVLPLGTGNDLARVLGWGGSYDDDTQLPQILEKLERASTKMLDRWSIMTYELKLPPKASLLPGPPEASEEFYMTIYEDSVATHLTKILNSDEHAVVISSAKTLCETVKDFVAKVEKTYDKTLENAVVADAVASKCSVLNEKLEQLLQALHTDSQAAPVLPGLSPLIVEEDAVESSSEESLGESKEQLGDDVTKPSSQKAVKPREIMLRANSLKKAVRQVIEEAGKVMDDPTVHPCEPANQSSDYDSTETDESKEEAKDDGAKESITVKTAPRSPDARASYGHSQTDSVPGPAVAASKENLPVLNTRIICPGLRAGLAASIAGSSIINKMLLANIDPFGATPFIDPDLDSVDGYSEKCVMNNYFGIGLDAKISLEFNNKREEHPEKCRSRTKNLMWYGVLGTRELLQRSYKNLEQRVQLECDGQYIPLPSLQGIAVLNIPSYAGGTNFWGGTKEDDIFAAPSFDDKILEVVAIFDSMQMAVSRVIKLQHHRIAQCRTVKITIFGDEGVPVQVDGEAWVQPPGIIKIVHKNRAQMLTRDRAFESTLKSWEDKQKCDSGKPVLRTHLYIHHAIDLATEEVSQMQLCSQAAEELITRICDAATIHCLLEQELAHAVNACSHALNKANPRCPESLTRDTATEIAINVKALYNETESLLVGRVPLQLESPHEERVSNALHSVEVELQKLTEIPWLYYILHPNEDEEPPMDCTKRNNRSTVFRIVPKFKKEKVQKQKTSSQPVQKWGTEEVAAWLDLLNLGEYKDIFIRHDIRGAELLHLERRDLKDLGIPKVGHVKRILQGIKELGRSTPQSEV

SEQ ID NO: 253200 - DNA, 3663 bp, Artificial Sequence
  derived and/or modified sequence
atggccggcgccggcggccagcaccacccccccggcgccgccggcggcgccgccgccggcgccggcgccgccgtgaccagcgccgccgccagcgccggccccggcgaggacagcagcgacagcgaggccgagcaggagggcccccagaagctgatcagaaaggtgagcaccagcggccagatcagaaccaagaccagcatcaaggagggccagctgctgaagcagaccagcagcttccagagatggaagaagagatacttcaagctgagaggcagaaccctgtactacgccaaggacagcaagagcctgatcttcgacgaggtggacctgagcgacgccagcgtggccgaggccagcaccaagaacgccaacaacagcttcaccatcatcacccccttcagaagactgatgctgtgcgccgagaacagaaaggagatggaggactggatcagcagcctgaagagcgtgcagaccagagagccctacgaggtggcccagttcaacgtggagcacttcagcggcatgcacaactggtacgcctgcagccacgccagacccaccttctgcaacgtgtgcagagagagcctgagcggcgtgaccagccacggcctgagctgcgaggtgtgcaagttcaaggcccacaagagatgcgccgtgagagccaccaacaactgcaagtggaccaccctggccagcatcggcaaggacatcatcgaggacgaggacggcgtggccatgccccaccagtggctggagggcaacctgcccgtgagcgccaagtgcgccgtgtgcgacaagacctgcggcagcgtgctgagactgcaggactggaagtgcctgtggtgcaagaccatggtgcacaccgcctgcaaggacctgtaccaccccatctgccccctgggccagtgcaaggtgagcatcatcccccccatcgccctgaacagcaccgacagcgacggcttctgcagagccaccttcagcttctgcgtgagccccctgctggtgttcgtgaacagcaagagcggcgacaaccagggcgtgaagttcctgagaagattcaagcagctgctgaaccccgcccaggtgttcgacctgatgaacggcggcccccacctgggcctgagactgttccagaagttcgacaacttcagaatcctggtgtgcggcggcgacggcagcgtgggctgggtgctgagcgagatcgacaagctgaacctgaacaagcagtgccagctgggcgtgctgcccctgggcaccggcaacgacctggccagagtgctgggctggggcggcagctacgacgacgacacccagctgccccagatcctggagaagctggagagagccagcaccaagatgctggacagatggagcatcatgacctacgagctgaagctgccccccaaggccagcctgctgcccggcccccccgaggccagcgaggagttctacatgaccatctacgaggacagcgtggccacccacctgaccaagatcctgaacagcgacgagcacgccgtggtgatcagcagcgccaagaccctgtgcgagaccgtgaaggacttcgtggccaaggtggagaagacctacgacaagaccctggagaacgccgtggtggccgacgccgtggccagcaagtgcagcgtgctgaacgagaagctggagcagctgctgcaggccctgcacaccgacagccaggccgcccccgtgctgcccggcctgagccccctgatcgtggaggaggacgccgtggagagcagcagcgaggagagcctgggcgagagcaaggagcagctgggcgacgacgtgaccaagcccagcagccagaaggccgtgaagcccagagagatcatgctgagagccaacagcctgaagaaggccgtgagacaggtgatcgaggaggccggcaaggtgatggacgaccccaccgtgcacccctgcgagcccgccaaccagagcagcgactacgacagcaccgagaccgacgagagcaaggaggaggccaaggacgacggcgccaaggagagcatcaccgtgaagaccgcccccagaagccccgacgccagagccagctacggccacagccagaccgacagcgtgcccggccccgccgtggccgccagcaaggagaacctgcccgtgctgaacaccagaatcatctgccccggcctgagagccggcctggccgccagcatcgccggcagcagcatcatcaacaagatgctgctggccaacatcgaccccttcggcgccacccccttcatcgaccccgacctggacagcgtggacggctacagcgagaagtgcgtgatgaacaactacttcggcatcggcctggacgccaagatcagcctggagttcaacaacaagagagaggagcaccccgagaagtgcagaagcagaaccaagaacctgatgtggtacggcgtgctgggcaccagagagctgctgcagagaagctacaagaacctggagcagagagtgcagctggagtgcgacggccagtacatccccctgcccagcctgcagggcatcgccgtgctgaacatccccagctacgccggcggcaccaacttctggggcggcaccaaggaggacgacatcttcgccgcccccagcttcgacgacaagatcctggaggtggtggccatcttcgacagcatgcagatggccgtgagcagagtgatcaagctgcagcaccacagaatcgcccagtgcagaaccgtgaagatcaccatcttcggcgacgagggcgtgcccgtgcaggtggacggcgaggcctgggtgcagccccccggcatcatcaagatcgtgcacaagaacagagcccagatgctgaccagagacagagccttcgagagcaccctgaagagctgggaggacaagcagaagtgcgacagcggcaagcccgtgctgagaacccacctgtacatccaccacgccatcgacctggccaccgaggaggtgagccagatgcagctgtgcagccaggccgccgaggagctgatcaccagaatctgcgacgccgccaccatccactgcctgctggagcaggagctggcccacgccgtgaacgcctgcagccacgccctgaacaaggccaaccccagatgccccgagagcctgaccagagacaccgccaccgagatcgccatcaacgtgaaggccctgtacaacgagaccgagagcctgctggtgggcagagtgcccctgcagctggagagcccccacgaggagagagtgagcaacgccctgcacagcgtggaggtggagctgcagaagctgaccgagatcccctggctgtactacatcctgcaccccaacgaggacgaggagccccccatggactgcaccaagagaaacaacagaagcaccgtgttcagaatcgtgcccaagttcaagaaggagaaggtgcagaagcagaagaccagcagccagcccgtgcagaagtggggcaccgaggaggtggccgcctggctggacctgctgaacctgggcgagtacaaggacatcttcatcagacacgacatcagaggcgccgagctgctgcacctggagagaagagacctgaaggacctgggcatccccaaggtgggccacgtgaagagaatcctgcagggcatcaaggagctgggcagaagcaccccccagagcgaggtgtag

SEQ ID NO: 253201 - DNA, 4246 bp, Artificial Sequence
  derived and/or modified sequence
tccccgcaggagtcggagaggatggcaggggccggaggccagcaccaccctccgggcgccgctggaggagcggccgccggagccggcgccgcggtcacctccgccgctgcctcggcggggccgggagaggattcgtctgacagcgaagcggagcaagagggaccccagaaactgatccgcaaagtgtctacctcggggcagatccggaccaagaccagtattaaagagggacagctattgaagcaaaccagttctttccaaaggtggaaaaagcgatacttcaaacttcgaggccgcaccctttactatgcaaaggactcaaagtctctgatatttgatgaagttgacctctcagatgctagtgtagctgaagcaagcacgaaaaatgctaacaacagcttcacgatcatcactccattcagaaggctaatgctgtgtgctgagaacagaaaggagatggaggattggatcagctcactgaagtctgtacagaccagagaaccctacgaggtggcccagtttaatgtggaacatttctcagggatgcacaactggtacgcctgctcccacgcccgacccaccttctgtaacgtgtgcagagagagtctttctggagtcacctcccatggcctgtcctgcgaagtgtgtaaattcaaggctcacaaaagatgtgcagtgagagcaacaaataactgtaaatggactaccctggcctccatcgggaaggacattatagaagatgaagatggcgtcgcgatgcctcaccagtggcttgagggcaacctgcctgtaagtgccaagtgtgctgtctgcgacaaaacatgtggcagtgttctccgtctacaggattggaaatgcctttggtgtaagacaatggtacacactgcctgcaaagatttataccatccaatatgtccacttggtcaatgtaaagtatctatcatacctccaattgcactaaacagcaccgattccgatggtttctgtagagcaacattttcgttctgtgttagtcctctattggtttttgtcaattctaagagtggagataatcagggagtaaagttcctccgtcgctttaaacagttgctaaatccggctcaggtgtttgatttaatgaatggaggtcctcatttaggtttaagattatttcagaagtttgacaatttccggattcttgtttgtggaggcgatggaagtgtaggttgggttttgtcagaaatcgataagctcaacttgaataaacagtgtcagctgggagtgttgcctttgggtacaggaaatgaccttgcccgagttcttggctggggaggttcatatgacgatgacacccaacttcctcagatcctagagaaactggaacgagccagtaccaaaatgttggacaggtggagtataatgacatatgaactcaaattgccaccaaaagcttccctacttccaggacctccagaagcatctgaagaattttatatgacgatttatgaagactcagttgcaacgcatcttacaaaaatcctcaattctgatgaacatgcagtggtcatatcttctgccaagacgctatgtgaaactgtaaaggacttcgttgccaaagtagaaaagacgtatgacaaaaccttggaaaatgccgttgtagctgatgccgtggccagtaaatgttcagtcctaaacgagaagctcgaacaactgctgcaggctttgcacacagattcccaggctgcgcctgttctccctggcctcagccctctcattgtggaagaagatgctgtggaatcgtccagtgaagagtccctgggtgaaagcaaagagcagcttggggatgacgttacaaaaccttcctcccagaaagccgtcaaaccaagggaaatcatgttgcgggcaaatagtttaaagaaagcagtgaggcaagtcattgaggaagccggaaaagttatggatgacccgacagttcacccctgtgaaccagctaatcagtcctctgattatgacagcacagaaacagatgaatctaaggaggaagctaaagatgatggtgccaaagaatcaataactgttaaaactgcacctcggtctccagatgcccgggcaagttatggccattcccaaactgattctgtccctggtccagctgtggcagccagcaaagaaaacctccctgtgctcaataccagaataatctgcccaggtttaagagcaggactggctgcctcaattgctgggagttcgattatcaacaaaatgttactggcaaacattgatccttttggtgccacgccgtttattgacccggatctagattccgtagatggatattcagaaaaatgtgtcatgaacaattactttgggattggattagatgcaaaaatttcattagaatttaataataaaagagaggagcaccctgaaaaatgcaggagccgaactaaaaacttgatgtggtatggagtccttggaacccgggagttattacagagatcgtacaagaatttagaacaaagggttcaacttgagtgtgatgggcagtatattcctcttcccagcttgcaaggcatagccgtgttgaacattcccagctatgctggaggcactaacttttggggtggaactaaagaggatgatatatttgctgcaccatcctttgatgacaagatcctggaagttgtagcaatatttgatagcatgcaaatggcagtttcaagggtcattaaactgcagcatcatcgaatagcccagtgccgtacagtgaaaatcactatatttggtgacgaaggagtcccagtgcaagtggatggtgaagcgtgggttcagcctccagggattatcaaaattgtgcacaaaaacagagcacaaatgctaacaagggacagagcctttgagagcactctgaaatcttgggaagataagcagaagtgtgattctggtaaaccagttctccgaacccatttgtacatccatcacgccattgacttggcaacagaagaggtgtcgcagatgcagctatgctcccaggctgcagaggagctcattactaggatatgtgacgcagccacaattcactgtcttttggagcaagaactggcccatgctgtgaatgcctgctcccatgccctgaataaagccaacccaaggtgcccggagagtcttacaagagacactgccactgaaatagccatcaatgtgaaggcgctgtataatgaaacagaatctttgctagttggcagggttcctttgcagctggaatcgccacatgaagagcgagtatccaatgccttacactctgtggaggtggaattacagaaactgacagagattccttggctttattatatcttacacccaaatgaggatgaggaacctcctatggattgcaccaaaaggaacaacagaagcaccgtatttcgaatagtgccaaagtttaaaaaggaaaaggttcagaagcagaagacaagttcacagcctgttcagaaatggggcacagaggaagttgctgcttggctggatctgctcaatttgggagagtacaaagatatcttcatccgtcatgacatcagaggggctgaacttttgcatctggaaaggcgagatcttaaggatctggggataccgaaagtgggtcatgtgaagcgaattctccagggaattaaagagcttggaaggagcactccacagtcggaggtgtaatcatattggtgctatttcttggaagagaagttattgccacttaatacaaagtccttggaagcaagtggctgttcttgtagttttctgcatagataagtaagcaccactgaagcacctctgtggcttgatattttgctgtgggtgaaattttgatttgaggtattagaaaatatttttgtgccgaacaatacattccacaaagccattttctttttgtgcaaacctgacatgttcaaatatattcacaatggtaataaggtaggaggaatctgagacgattgcattgtctaaacagtggaattgcaaaatgtttactttccatagatctggtctgatggaatgttcctactgtgcaactgcataacaatatgtggttaaaacttcctaggtttcattacgggggggcattggccattttcttaaaatcataggttaggagactaaaatataaattaagttgtgatttgaatgtagattggtatcacctccaactcctagtgcttagtggtcaaatatgttgaaaacctttccaatactatgaatgaatgcaaatcttaatgca

SEQ ID NO: 253202 - DNA, 4296 bp, Artificial Sequence
  derived and/or modified sequence
tccccgcaggagtcggagaggatggcaggggccggaggccagcaccaccctccgggcgccgctggaggagcggccgccggagccggcgccgcggtcacctccgccgctgcctcggcggggccgggagaggattcgtctgacagcgaagcggagcaagagggaccccagaaactgatccgcaaagtgtctacctcggggcagatccggaccaagaccagtattaaagagggacagctattgaagcaaaccagttctttccaaaggtggaaaaagcgatacttcaaacttcgaggccgcaccctttactatgcaaaggactcaaagtctctgatatttgatgaagttgacctctcagatgctagtgtagctgaagcaagcacgaaaaatgctaacaacagcttcacgatcatcactccattcagaaggctaatgctgtgtgctgagaacagaaaggagatggaggattggatcagctcactgaagtctgtacagaccagagaaccctacgaggtggcccagtttaatgtggaacatttctcagggatgcacaactggtacgcctgctcccacgcccgacccaccttctgtaacgtgtgcagagagagtctttctggagtcacctcccatggcctgtcctgcgaagtgtgtaaattcaaggctcacaaaagatgtgcagtgagagcaacaaataactgtaaatggactaccctggcctccatcgggaaggacattatagaagatgaagatggcgtcgcgatgcctcaccagtggcttgagggcaacctgcctgtaagtgccaagtgtgctgtctgcgacaaaacatgtggcagtgttctccgtctacaggattggaaatgcctttggtgtaagacaatggtacacactgcctgcaaagatttataccatccaatatgtccacttggtcaatgtaaagtatctatcatacctccaattgcactaaacagcaccgattccgatggtttctgtagagcaacattttcgttctgtgttagtcctctattggtttttgtcaattctaagagtggagataatcagggagtaaagttcctccgtcgctttaaacagttgctaaatccggctcaggtgtttgatttaatgaatggaggtcctcatttaggtttaagattatttcagaagtttgacaatttccggattcttgtttgtggaggcgatggaagtgtaggttgggttttgtcagaaatcgataagctcaacttgaataaacagtgtcagctgggagtgttgcctttgggtacaggaaatgaccttgcccgagttcttggctggggaggttcatatgacgatgacacccaacttcctcagatcctagagaaactggaacgagccagtaccaaaatgttggacaggtggagtataatgacatatgaactcaaattgccaccaaaagcttccctacttccaggacctccagaagcatctgaagaattttatatgacgatttatgaagactcagttgcaacgcatcttacaaaaatcctcaattctgatgaacatgcagtggtcatatcttctgccaagacgctatgtgaaactgtaaaggacttcgttgccaaagtagaaaagacgtatgacaaaaccttggaaaatgccgttgtagctgatgccgtggccagtaaatgttcagtcctaaacgagaagctcgaacaactgctgcaggctttgcacacagattcccaggctgcgcctgttctccctggcctcagccctctcattgtggaagaagatgctgtggaatcgtccagtgaagagtccctgggtgaaagcaaagagcagcttggggatgacgttacaaaaccttcctcccagaaagccgtcaaaccaagggaaatcatgttgcgggcaaatagtttaaagaaagcagtgaggcaagtcattgaggaagccggaaaagttatggatgacccgacagttcacccctgtgaaccagctaatcagtcctctgattatgacagcacagaaacagatgaatctaaggaggaagctaaagatgatggtgccaaagaatcaataactgttaaaactgcacctcggtctccagatgcccgggcaagttatggccattcccaaactgattctgtccctggtccagctgtggcagccagcaaagaaaacctccctgtgctcaataccagaataatctgcccaggtttaagagcaggactggctgcctcaattgctgggagttcgattatcaacaaaatgttactggcaaacattgatccttttggtgccacgccgtttattgacccggatctagattccgtagatggatattcagaaaaatgtgtcatgaacaattactttgggattggattagatgcaaaaatttcattagaatttaataataaaagagaggagcaccctgaaaaatgcaggagccgaactaaaaacttgatgtggtatggagtccttggaacccgggagttattacagagatcgtacaagaatttagaacaaagggttcaacttgagtgtgatgggcagtatattcctcttcccagcttgcaaggcatagccgtgttgaacattcccagctatgctggaggcactaacttttggggtggaactaaagaggatgatatatttgctgcaccatcctttgatgacaagatcctggaagttgtagcaatatttgatagcatgcaaatggcagtttcaagggtcattaaactgcagcatcatcgaatagcccagtgccgtacagtgaaaatcactatatttggtgacgaaggagtcccagtgcaagtggatggtgaagcgtgggttcagcctccagggattatcaaaattgtgcacaaaaacagagcacaaatgctaacaagggacagagcctttgagagcactctgaaatcttgggaagataagcagaagtgtgattctggtaaaccagttctccgaacccatttgtacatccatcacgccattgacttggcaacagaagaggtgtcgcagatgcagctatgctcccaggctgcagaggagctcattactaggatatgtgacgcagccacaattcactgtcttttggagcaagaactggcccatgctgtgaatgcctgctcccatgccctgaataaagccaacccaaggtgcccggagagtcttacaagagacactgccactgaaatagccatcaatgtgaaggcgctgtataatgaaacagaatctttgctagttggcagggttcctttgcagctggaatcgccacatgaagagcgagtatccaatgccttacactctgtggaggtggaattacagaaactgacagagattccttggctttattatatcttacacccaaatgaggatgaggaacctcctatggattgcaccaaaaggaacaacagaagcaccgtatttcgaatagtgccaaagtttaaaaaggaaaaggttcagaagcagaagacaagttcacagcctgttcagaaatggggcacagaggaagttgctgcttggctggatctgctcaatttgggagagtacaaagatatcttcatccgtcatgacatcagaggggctgaacttttgcatctggaaaggcgagatcttaagaacacagtaggagaaaaaagagacaccaaagaaaatggtaaacatatggatctggggataccgaaagtgggtcatgtgaagcgaattctccagggaattaaagagcttggaaggagcactccacagtcggaggtgtaatcatattggtgctatttcttggaagagaagttattgccacttaatacaaagtccttggaagcaagtggctgttcttgtagttttctgcatagataagtaagcaccactgaagcacctctgtggcttgatattttgctgtgggtgaaattttgatttgaggtattagaaaatatttttgtgccgaacaatacattccacaaagccattttctttttgtgcaaacctgacatgttcaaatatattcacaatggtaataaggtaggaggaatctgagacgattgcattgtctaaacagtggaattgcaaaatgtttactttccatagatctggtctgatggaatgttcctactgtgcaactgcataacaatatgtggttaaaacttcctaggtttcattacgggggggcattggccattttcttaaaatcataggttaggagactaaaatataaattaagttgtgatttgaatgtagattggtatcacctccaactcctagtgcttagtggtcaaatatgttgaaaacctttccaatactatgaatgaatgcaaatcttaatgcacg

SEQ ID NO: 253203 - DNA, 3449 bp, Artificial Sequence
  derived and/or modified sequence
attattagaaatctttagtcatctcattccctgtgagctgaaaggggccttcaagaagagagttctcagagcagactcagctttaggtgctgaaatgaatttctcaagatcatcactccattcagaaggctaatgctgtgtgctgagaacagaaaggagatggaggattggatcagctcactgaagtctgtacagaccagagaaccctacgaggtggcccagtttaatgtggaacatttctcagggatgcacaactggtacgcctgctcccacgcccgacccaccttctgtaacgtgtgcagagagagtctttctggagtcacctcccatggcctgtcctgcgaagtgtgtaaattcaaggctcacaaaagatgtgcagtgagagcaacaaataactgtaaatggactaccctggcctccatcgggaaggacattatagaagatgaagatggcgtcgcgatgcctcaccagtggcttgagggcaacctgcctgtaagtgccaagtgtgctgtctgcgacaaaacatgtggcagtgttctccgtctacaggattggaaatgcctttggtgtaagacaatggtacacactgcctgcaaagatttataccatccaatatgtccacttggtcaatgtaaagtatctatcatacctccaattgcactaaacagcaccgattccgatggtttctgtagagcaacattttcgttctgtgttagtcctctattggtttttgtcaattctaagagtggagataatcagggagtaaagttcctccgtcgctttaaacagttgctaaatccggctcaggtgtttgatttaatgaatggaggtcctcatttaggtttaagattatttcagaagtttgacaatttccggattcttgtttgtggaggcgatggaagtgtaggttgggttttgtcagaaatcgataagctcaacttgaataaacagtgtcagctgggagtgttgcctttgggtacaggaaatgaccttgcccgagttcttggctggggaggttcatatgacgatgacacccaacttcctcagatcctagagaaactggaacgagccagtaccaaaatgttggacaggtggagtataatgacatatgaactcaaattgccaccaaaagcttccctacttccaggacctccagaagcatctgaagaattttatatgacgatttatgaagactcagttgcaacgcatcttacaaaaatcctcaattctgatgaacatgcagtggtcatatcttctgccaagacgctatgtgaaactgtaaaggacttcgttgccaaagtagaaaagacgtatgacaaaaccttggaaaatgccgttgtagctgatgccgtggccagtaaatgttcagtcctaaacgagaagctcgaacaactgctgcaggctttgcacacagattcccaggctgcgcctgttctccctggcctcagccctctcattgtggaagaagatgctgtggaatcgtccagtgaagagtccctgggtgaaagcaaagagcagcttggggatgacgttacaaaaccttcctcccagaaagccgtcaaaccaagggaaatcatgttgcgggcaaatagtttaaagaaagcagtgaggcaagtcattgaggaagccggaaaagttatggatgacccgacagttcacccctgtgaaccagctaatcagtcctctgattatgacagcacagaaacagatgaatctaaggaggaagctaaagatgatggtgccaaagaatcaataactgttaaaactgcacctcggtctccagatgcccgggcaagttatggccattcccaaactgattctgtccctggtccagctgtggcagccagcaaagaaaacctccctgtgctcaataccagaataatctgcccaggtttaagagcaggactggctgcctcaattgctgggagttcgattatcaacaaaatgttactggcaaacattgatccttttggtgccacgccgtttattgacccggatctagattccgtagatggatattcagaaaaatgtgtcatgaacaattactttgggattggattagatgcaaaaatttcattagaatttaataataaaagagaggagcaccctgaaaaatgcaggagccgaactaaaaacttgatgtggtatggagtccttggaacccgggagttattacagagatcgtacaagaatttagaacaaagggttcaacttgagtgtgatgggcagtatattcctcttcccagcttgcaaggcatagccgtgttgaacattcccagctatgctggaggcactaacttttggggtggaactaaagaggatgatatatttgctgcaccatcctttgatgacaagatcctggaagttgtagcaatatttgatagcatgcaaatggcagtttcaagggtcattaaactgcagcatcatcgaatagcccagtgccgtacagtgaaaatcactatatttggtgacgaaggagtcccagtgcaagtggatggtgaagcgtgggttcagcctccagggattatcaaaattgtgcacaaaaacagagcacaaatgctaacaagggacagagcctttgagagcactctgaaatcttgggaagataagcagaagtgtgattctggtaaaccagttctccgaacccatttgtacatccatcacgccattgacttggcaacagaagaggtgtcgcagatgcagctatgctcccaggctgcagaggagctcattactaggatatgtgacgcagccacaattcactgtcttttggagcaagaactggcccatgctgtgaatgcctgctcccatgccctgaataaagccaacccaaggtgcccggagagtcttacaagagacactgccactgaaatagccatcaatgtgaaggcgctgtataatgaaacagaatctttgctagttggcagggttcctttgcagctggaatcgccacatgaagagcgagtatccaatgccttacactctgtggaggtggaattacagaaactgacagagattccttggctttattatatcttacacccaaatgaggatgaggaacctcctatggattgcaccaaaaggaacaacagaagcaccgtatttcgaatagtgccaaagtttaaaaaggaaaaggttcagaagcagaagacaagttcacagcctgttcagaaatggggcacagaggaagttgctgcttggctggatctgctcaatttgggagagtacaaagatatcttcatccgtcatgacatcagaggggctgaacttttgcatctggaaaggcgagatcttaaggatctggggataccgaaagtgggtcatgtgaagcgaattctccagggaattaaagagcttggaaggagcactccacagtcggaggtgtaatcatattggtgctatttcttggaagagaagttattgccacttaatacaaagtccttggaagc

SEQ ID NO: 253204 - DNA, 3663 bp, Artificial Sequence
  derived and/or modified sequence
atggccggcgcagggggacaacaccaccctccaggcgcggccggcggggcagctgcaggggccggggccgcagtgacttccgccgcggcgtctgcagggccaggagaggactcctctgatagcgaagcagaacaggagggcccgcaaaaactgatccgaaaggtcagtacttcaggccaaattaggaccaaaacatctattaaggagggccagttattaaagcagacatcctcttttcagcgctggaaaaaacgttatttcaaacttcgtggaagaacactgtactatgccaaggactctaagagtttgattttcgacgaggttgacctcagcgacgctagtgtcgccgaagctagtacgaagaatgccaacaactccttcactatcataaccccctttcggaggttgatgctatgcgcagagaataggaaagagatggaagattggatatccagcctcaagagtgtacagactcgcgagccgtacgaagtggcacagttcaacgtggagcattttagcggaatgcataactggtacgcttgcagtcatgccagaccaactttttgcaacgtgtgcagggagagcttgtcgggcgtaactagccacgggctgagctgcgaggtgtgcaagtttaaagcccacaaacgctgcgccgtacgggccaccaataattgcaagtggacaacactcgcaagcattgggaaagacatcatcgaagacgaagacggggtagctatgccacatcagtggttagaagggaacctcccagtctccgctaagtgcgcagtctgcgacaagacatgtggcagcgtgctgagacttcaggactggaaatgcctctggtgtaaaaccatggtgcatacggcttgtaaggatctctatcaccccatttgtcctctggggcaatgcaaagtgagcatcataccacccattgccctcaatagtacagattctgacgggttctgccgggctaccttctccttctgcgtctctcccctcctggtttttgtgaattccaaatccggcgacaaccagggcgtaaaattcctcaggcgcttcaaacagctcctcaacccagcccaggtgttcgacctcatgaacggaggcccgcacttagggttgcgcctgttccagaagtttgataatttcagaatattggtctgcggaggcgacggttcagtgggatgggtcttatccgagatagacaagctaaacctcaacaagcagtgtcaattaggggttcttcctctcggaacggggaacgacctagccagggttctcggctggggggggtcctacgacgatgacacgcagttacctcaaattctggagaaacttgaaagagcaagcacgaaaatgttagacaggtggtcgatcatgacttacgagctcaagctcccgccgaaagctagcctgctgccaggtccgcccgaggcttcagaggagttttatatgaccatttatgaggactctgtggccacacatctgactaaaattctgaactctgatgagcacgccgtggtgatcagttccgctaagaccctctgtgagactgttaaagattttgtcgctaaggtcgagaagacttatgacaagacactggagaatgcagttgttgctgatgctgtggcatcaaaatgcagcgtgctgaatgagaaactggaacagttactgcaggccctgcataccgactctcaggcggcgccagtgttgccaggactgtcgcctctcattgtcgaggaagacgccgttgagtcaagctctgaggagtccctaggcgagtccaaggaacagttgggtgacgatgtgacaaagcccagcagccagaaggcggtgaaaccgcgggagatcatgttaagagccaattccttgaagaaagctgtgaggcaggtgatcgaagaagcaggcaaagtgatggacgacccaaccgttcacccatgcgaacccgccaaccaatccagcgactacgactcaactgaaactgacgagtccaaagaagaagccaaagacgatggcgctaaagaatctattaccgtcaagacagcccctaggagtcccgacgcgagagcctcgtacggacactctcagaccgactcagttccagggcctgccgtggccgcctctaaagagaacctgcctgtactcaacactcgtattatctgccccggacttcgagcagggctggcagcgtctatcgccggatcttctataatcaataagatgttactggctaacatcgacccatttggggcaaccccatttatcgaccctgatctcgattctgtggatggctactctgagaaatgcgttatgaataactacttcgggattggactggatgccaaaatttccctcgagttcaacaataagcgtgaagaacatcccgaaaagtgtcgctcccgaaccaaaaatctgatgtggtacggcgtgcttggaacacgggagttgttacaaagaagttacaaaaatctggagcaaagagtgcagcttgagtgcgatggccagtatattcctttacccagtttacaaggcatcgcagtgctgaacatcccatcatatgctggaggcactaatttctggggcgggactaaggaagatgatatctttgctgcgcctagcttcgacgacaagatcctggaagttgtggcgatcttcgatagcatgcagatggctgtgagcagggttatcaagctgcagcatcaccggatcgctcagtgccggacagtgaagatcactattttcggagatgagggggtccctgtgcaagtagacggtgaagcgtgggtccagcccccaggaatcataaagatcgttcataagaatcgtgcccagatgttaactcgtgacagagcatttgaatccacactcaagtcttgggaagataagcaaaagtgcgacagcggcaagcccgtcctcagaactcatctctatatccaccatgccatagatctcgcaaccgaagaggtttcccagatgcagctctgttcccaagctgctgaagagctcatcaccagaatctgtgatgctgccacgatccactgtctcctggagcaggagctggcacacgctgtgaatgcgtgcagtcatgccctcaacaaggctaaccctcgctgtcctgaatccctcacaagggatacagccactgagatagcaatcaatgtgaaggctctgtataacgaaaccgagtccctgcttgtgggcagagtgcccctacagctggaaagcccccacgaggaacgggtgtcgaatgccttgcatagcgtggaagtggagctacagaagcttaccgaaataccctggctgtactatattctccaccccaatgaagatgaggagccacctatggattgtaccaagcgtaacaatcggagcaccgtgttccggatagtgcctaagttcaagaaagaaaaagtgcagaagcagaaaacctcttcacagcccgtgcaaaagtgggggacggaggaggtggccgcctggttggacctgctgaaccttggcgagtacaaggatatcttcatcagacacgatatccggggcgcagaactcctgcacctggagaggagggatttgaaggatcttggcatccccaaggtggggcacgtgaagcggatcctgcaggggattaaggagctcggacggtcaactccccagtcagaagtatag

SEQ ID NO: 253205 - DNA, 3663 bp, Artificial Sequence
  derived and/or modified sequence
atggccggggccggcggccagcaccaccccccaggagctgctgggggcgctgctgctggagctggagctgctgtgaccagcgctgctgccagcgctggccctggagaggacagcagtgacagcgaggccgagcaggagggcccccagaagctgatcaggaaggtgtccaccagcggccagatccgcaccaagaccagcatcaaggagggccagctgctgaagcagaccagcagcttccagcgctggaagaagcgctacttcaagctgcggggccgcaccctgtactatgccaaggacagcaagagcctcatctttgatgaggtggacctgagtgatgcctctgtggccgaggccagcaccaagaatgccaacaacagcttcaccatcatcacccccttccggcggctgatgctgtgtgctgaaaataggaaggagatggaggactggatcagcagcctgaagtctgtgcagacccgggagccctatgaggtggcccagttcaacgtggagcacttcagcggcatgcacaactggtacgcctgcagccacgcccggcccaccttctgcaatgtgtgccgggagagcctgtctggagtgaccagccacggcctgagctgtgaggtgtgcaagttcaaggcccacaagagatgtgctgtgcgggccaccaacaactgcaagtggaccaccctggccagcatcggcaaggacatcattgaagatgaagatggagtggccatgccccaccagtggctggagggcaacctgcctgtgtctgccaagtgtgctgtgtgtgacaagacctgtggctctgtgctgcggctgcaggactggaagtgcctgtggtgcaagaccatggtgcacacagcctgcaaggacctgtaccaccccatctgccccctgggccagtgcaaggtgtccatcatcccccccatcgccctgaacagcacagacagtgatggcttctgccgggccaccttctccttctgtgtgagccccctgctggtgtttgtgaacagcaagagcggggacaaccagggcgtgaagttcctgcggcgcttcaagcagctgctgaacccagcccaggtgtttgacctgatgaatggaggcccccacctgggcctgcggctcttccagaagtttgacaacttccgcatcctggtgtgtggaggagatggctctgtgggctgggtgctgtctgaaattgacaagctgaacctgaacaagcagtgccagctgggcgtgctgcccctgggcactggaaatgacctggcccgggtgctgggctggggcggcagctatgatgatgacacccagctgccccagatcctggagaagctggagcgggccagcaccaagatgctggaccgctggagcatcatgacctatgagctgaagctgccccccaaggccagcctgctgcccggccccccagaggccagcgaggagttctacatgaccatctatgaagattctgtggccacccacctgaccaagatcctgaacagtgatgaacatgctgtggtgatcagcagcgccaagaccctgtgtgagaccgtgaaggactttgtggccaaggtggagaagacctatgacaagaccctggagaatgctgtggtggctgatgctgtggccagcaagtgcagcgtgctgaatgagaagctggagcagctgctgcaggccctgcacacagacagccaggccgcccctgtgctgcccggcctgagccccctcatcgtggaggaggatgctgtggagagcagcagcgaggagagcctgggggagagcaaggagcagctgggagatgatgtgaccaagcccagcagccagaaggctgtgaagccccgggagatcatgctgcgggccaacagcctgaagaaggctgtgcggcaggtgattgaggaggccggcaaggtgatggatgaccccaccgtgcacccctgtgagcccgccaaccagagcagtgactatgacagcacagaaacagatgagagcaaggaggaggccaaggatgatggagccaaggagagcatcaccgtgaagacagcccccaggagcccagatgcccgggccagctatggccacagccagacagattctgtgcccggccctgctgtggccgccagcaaggagaacctgcctgtgctgaacacccgcatcatctgccccggcctgcgggccggcctggccgccagcattgctggcagcagcatcatcaacaagatgctgctggccaacatcgacccctttggagccacccccttcattgatcctgacctggacagcgtggatggctacagcgagaagtgtgtgatgaacaactactttggaattggcctggatgccaagatcagcctggagttcaacaacaagcgggaggagcaccctgagaagtgccgcagcaggaccaagaacctgatgtggtacggcgtgctgggcacccgggagctgctgcagaggagctacaagaacctggagcagagggtgcagctggagtgtgatggccagtacatccccctgcccagcctgcagggcattgctgtgctgaacatccccagctatgctgggggcaccaacttctggggcggcaccaaggaggatgacatctttgctgcccccagctttgatgacaagatcctggaggtggtggccatctttgacagcatgcagatggctgtgtccagggtcatcaagctgcagcaccacagaattgcccagtgcaggacagtgaagatcaccatctttggagatgagggcgtgcctgtgcaggtggatggagaggcctgggtgcagcccccaggcatcatcaagatcgtgcacaagaacagagcccagatgctgacccgggaccgggcctttgagagcaccctgaagtcctgggaggacaagcagaagtgtgacagcggcaagcctgtgctgcggacccacctgtacatccaccacgccatcgacctggccacagaggaggtgtcccagatgcagctgtgcagccaggccgctgaggagctgatcacccgcatctgtgatgctgccaccatccactgcctgctggagcaggagctggcccatgctgtgaatgcctgcagccacgccctgaacaaggccaacccccgctgcccagagagcctgacccgggacacagccacagagatcgccatcaacgtgaaggccctgtacaatgaaacagagagcctgctggtgggccgggtgcccctgcagctggagagcccccatgaggagcgggtgtccaatgccctgcacagcgtggaggtggagctgcagaagctgacagagatcccctggctgtactacatcctgcaccccaatgaagatgaggagccccccatggactgcaccaagaggaacaacagaagcacagtgttcagaattgtgcccaagttcaagaaggagaaggtgcagaagcagaagaccagcagccagcctgtgcagaagtggggcacagaggaggtggccgcctggctggacctgctgaacctgggggagtacaaggacatcttcatcagacatgacatcagaggagctgagctgctgcacctggagcggcgggacctgaaggacctgggcatccccaaggtgggccacgtgaagaggatcctgcagggcatcaaggagctgggccgcagcaccccccagagcgaggtgtag

SEQ ID NO: 253206 - DNA, 3663 bp, Artificial Sequence
  derived and/or modified sequence
atggccggcgccggcggccagcaccacccccccggcgccgccggcggggcagccgctggcgctggggcggctgttacatcagccgccgcctcagcaggacctggtgaggattctagtgacagtgaagccgagcaggaaggccctcagaaactgataaggaaggtgtcgacctcagggcagatccggactaagacgtccatcaaagaaggtcagcttctcaaacagacgagcagcttccagcgttggaagaagcgctacttcaagttgcggggccgtaccctgtactatgccaaggacagcaaatcactcatttttgacgaagtcgatctgtctgatgcctcagtggcggaagctagcactaaaaacgccaataattccttcactatcatcacaccattccgaagactcatgttgtgcgcagaaaatcggaaagaaatggaggactggatttcctctctgaaatcagtgcagacgcgagagccctatgaagtggcccagttcaatgttgagcattttagcggcatgcataactggtacgcctgctcccatgctagacctacattttgcaacgtatgtcgtgaatccctatcaggcgtaacttcacatggcctgagctgtgaggtgtgtaagttcaaggcacacaagcgctgcgccgtgagggcgactaataattgcaagtggacaaccctggcgtcaatagggaaggatattatcgaggatgaagatggtgtcgctatgccacatcagtggctcgaagggaatcttcccgtgtccgcaaagtgtgctgtctgcgataagacgtgtggatcggtgctgaggttacaagactggaagtgcctgtggtgcaaaaccatggtccacacagcctgtaaggacctgtaccatcccatctgtccgctcggtcaatgcaaggtatcaattatccctcctatcgcacttaacagcacggatagtgatggcttctgtcgcgcaaccttcagcttctgcgtgagccctttactggtcttcgtgaactccaaaagcggagataaccaaggggtcaagttcctgcgtcgatttaagcagctgttgaatccagcacaagtgtttgacctcatgaacggaggaccacacctaggcctgaggctgttccaaaagtttgacaatttcaggatcttagtgtgtgggggggacggttctgttggctgggtactgtcagagatcgataagcttaatctgaataagcagtgtcagctcggcgtactgcccctcggtacagggaacgatctcgcccgcgtcctcggctgggggggctcctatgacgatgacacgcagctgccccagatactagaaaagctggaaagggccagcactaagatgctggacaggtggagcataatgacatacgagctcaaacttccacctaaagcctctctgctgccaggacctccagaggcaagcgaggaattctacatgacgatttatgaggattccgtcgcgacccacctcacaaaaattctcaactctgatgagcatgccgtggtgataagctctgctaaaactctctgcgagactgttaaggactttgtggccaaggtggagaagacatacgacaaaactctcgaaaatgctgtggtggctgatgccgttgcaagtaaatgctcggttctgaatgagaagctggagcaacttttgcaagctctccacaccgattctcaggctgctcccgtgctcccagggttgtcaccactcattgtggaggaggatgccgtcgaaagtagttcagaggagagtctaggagaatccaaggagcagttaggggacgatgtgactaaaccgtcgagccagaaggctgtcaaacccagagaaattatgctgagagcaaatagtctgaagaaggccgtcagacaggttattgaggaggcagggaaagtgatggacgatcccaccgtgcatccctgtgagcctgctaatcaaagtagtgattacgacagtacagaaactgatgaatccaaggaggaagccaaggatgatggggcgaaggagtccattactgtgaagactgccccgcgctcccccgatgcccgagcatcttatgggcattctcaaacagacagcgtacctggccctgccgtggccgcgagcaaggagaatctcccagtgttgaacacaagaattatctgtcccggcctacgagccggcctggccgccagcatcgccgggtcgtcaataatcaacaagatgctattagccaacatcgatccatttggtgcaacaccattcatcgatcccgatcttgactctgttgacggatacagtgaaaaatgtgttatgaacaattactttggcatcggactcgatgctaagatcagcctcgaattcaacaacaagagggaagaacaccccgagaagtgccggagtaggaccaagaacctgatgtggtacggcgttctgggaacacgcgagctcctccaaaggtcctataaaaatttggaacagagagtccaactcgaatgcgatggacagtatatacctctgccttcactccaaggtatcgctgtgttgaatattccttcctacgcaggaggtacaaacttctgggggggcactaaggaggatgatattttcgccgcaccgagttttgacgataaaattctcgaggtggtggctatttttgactcaatgcagatggccgtatccagagtgattaagctgcaacatcacaggatcgcgcagtgccgtacggtgaagattacaatctttggtgatgaaggcgtccccgtgcaggttgatggtgaagcttgggtgcagccaccagggatcattaagatcgtacataaaaatcgcgctcagatgctaactcgcgatagagcttttgaaagtaccctgaaaagttgggaggacaagcagaaatgtgactccgggaagccagtcctgcggactcatttatacatacatcatgccattgacctcgcaactgaggaggtcagtcagatgcagttgtgttcacaggcagccgaagaattgatcactcgcatctgtgacgccgcgacaatccactgcctgctcgaacaggaactcgcacacgctgtcaatgcttgtagtcacgcgttgaacaaggccaatccccgttgccctgaatccttgaccagggatacggctacggaaattgccataaatgtgaaagctctttataatgaaacagagtcactcctcgtaggcagggtccctctgcagctggaaagcccccacgaagagcgggtgtctaatgcactgcacagcgtcgaggttgaactccagaagctcacagaaatcccttggctgtactatattcttcatccaaatgaagacgaggaaccccccatggactgtacgaagaggaacaatcgctctacagtctttagaatcgtaccgaaattcaagaaggaaaaagtccagaagcagaagacatcctcgcaaccagtgcagaagtggggaacagaggaggtggcagcctggctggacttactgaacctcggcgagtacaaagatatcttcataagacacgacatccgaggtgcggaacttctccatctggaacggagggatctgaaggatttaggaatcccaaaggtggggcacgtcaagcgaattttacagggaattaaagaactgggcaggagcactccgcaaagtgaagtgtag

SEQ ID NO: 253207 - DNA, 3663 bp, Artificial Sequence
  derived and/or modified sequence
atggctggcgctgggggtcagcatcatcctccgggtgccgctgggggtgcagcagctggtgccggtgccgcagtcacgagcgctgcagcttcagccggtccaggtgaggatagctcagattctgaggcagaacaagaagggccacagaaattgatccgcaaggtgtcaacaagcgggcagattcggacaaaaactagcattaaagaaggtcagctcctcaaacagaccagcagcttccagcggtggaaaaaacggtatttcaaattaaggggtcggactctctactacgccaaagactctaagtcactgatatttgacgaggtggacctgagcgacgcatccgttgctgaggcaagtacaaaaaatgctaacaactcttttaccattatcaccccattcagacggctgatgttgtgtgccgagaaccgcaaagagatggaagactggatctcctctctgaagtccgttcagacgcgcgagccctatgaggtggcgcaatttaatgttgagcacttctccggcatgcacaactggtatgcatgttcacacgcgagacccaccttctgtaatgtctgtcgggagagcctgagcggagtgacgagccatggactgtcttgtgaagtgtgcaaattcaaagcacacaagcgatgcgccgtccgggctacaaataattgcaaatggacgaccctggcatccattggtaaggacatcatagaggacgaggacggcgtggccatgccacatcagtggctcgaggggaacctgccagtgtcggcaaaatgtgctgtctgtgacaagacctgcggatccgtccttagactgcaggattggaagtgcctgtggtgcaagactatggtccatacagcatgtaaggatctctatcatcccatctgccctctggggcagtgcaaagtatctatcataccacccattgccctcaacagtacagactcggatgggttttgccgagcaacattttcattctgcgtgtctcctctgctggtcttcgttaacagcaaatctggtgacaatcagggagttaaatttctccgacggttcaagcagctgctaaatccagcccaggtgttcgatctcatgaacggtggaccacacctcggcctgaggctctttcagaagttcgacaattttcgcatcctcgtgtgcggtggtgacggatcagtgggttgggtgctctccgaaatcgacaaactgaatctgaacaaacagtgtcagctcggggtcctgccactggggacaggcaacgatctggccagggtgttgggatggggcggatcatacgatgacgatacccagttacctcagatccttgagaagctcgagcgtgctagcactaagatgctggataggtggtccatcatgacctacgaactgaagcttcctcctaaggcttctttattgccgggtcccccagaagccagcgaggaattctacatgaccatctacgaagattcagtagccacacacttaactaagatcctcaattctgacgaacatgctgtagtgattagctctgcaaaaaccctctgtgaaactgtaaaggactttgtggccaaagttgagaagacctatgataagactctcgaaaacgccgttgtggcggacgccgtggccagtaaatgtagcgttctgaatgaaaaattggagcagttactccaggccttacacacggattcccaggccgcacccgtgctgcccggactcagtccattaatcgtggaagaggacgccgtggagtccagctccgaagagtctctgggagaatcaaaggagcaactcggggacgatgtcacaaaaccatcgagccaaaaggctgtgaagccacgggagattatgttacgggctaactcgctcaaaaaagctgttagacaggtcatagaggaagctggtaaagtcatggatgacccaacagtccacccttgtgaaccagctaatcaatccagtgattacgattctacagagactgatgagtctaaggaggaggccaaagatgatggagccaaagagtccataacagtcaagaccgcccctagaagccctgacgcgagggcttcatatggccactcgcagacggactcggtaccaggacctgccgtggctgcaagtaaggaaaacctgcccgtgctgaataccagaatcatttgtcctgggctaagggcaggcctcgccgcttcaatagcaggctcttccataatcaacaaaatgctgttggccaatattgacccatttggagctacacctttcattgacccagacctggatagtgtggacggatattccgaaaaatgcgttatgaacaattatttcggaatcggcttggacgctaaaattagccttgaattcaataataagcgggaggagcatcctgagaagtgccgctcacggactaaaaatctgatgtggtatggcgtgttggggaccagagaactcctccagagaagttacaaaaatctggagcagcgggtgcagctggagtgcgatggacagtacatcccactgccttccctgcagggtattgcagtgctgaatatcccctcatatgcgggaggaaccaatttctggggagggactaaggaggatgatatcttcgccgcaccctcatttgacgacaagatcttggaggttgtagccatatttgatagtatgcaaatggcagtatctcgtgtgatcaagttgcagcatcataggatagctcagtgcagaacagtgaaaatcactatctttggcgacgagggcgtgccggttcaggtcgacggcgaagcctgggtccagccccctggcatcattaagattgtgcacaaaaacagggcccaaatgctgacgagggatagggcttttgagtccaccctgaagagctgggaagataagcagaaatgtgactctggaaaaccggtactgcggactcatctctacatacaccacgctatagacctcgccaccgaagaggtgtcccagatgcagttatgttcccaggccgcagaggagctcataacccggatctgtgatgccgcaaccatccattgtctgttggagcaggaactggcacatgcggtgaacgcttgctcacatgccctgaacaaggctaacccgagatgccccgaatcattaacacgcgacacagctactgagattgccatcaatgttaaagcgctgtataatgagaccgagagcttgttggttgggcgagtacctctgcaactcgaatctccccacgaagaacgcgtatctaatgcactccactctgtggaggtggagctccagaagctcacagagattccctggttatactatatcctccatccaaatgaagacgaagaaccgccaatggactgtacgaagcggaataaccgttccacagtgttccgcatcgtccccaaatttaagaaggaaaaggtgcagaaacagaagacatcttctcaacctgtgcagaaatggggtacagaagaagtcgcagcgtggctcgacttactcaaccttggcgagtataaagacatctttatcaggcacgatatcaggggggcagagctattacaccttgaacgcagagatctcaaggatctaggcattccaaaggttggacatgtgaagaggatcctccaagggattaaagaactgggcagatccacaccccaatcggaagtctag

SEQ ID NO: 253208 - DNA, 1134 bp, Artificial Sequence
  derived and/or modified sequence
atgcacgacgaggtggcccagcccctgaacctgagcgccaagcccaagaccagcgacggcaagagccccaccagccccaccagcccccacatgcccgccctgagaatcaacagcggcgccggccccctgaaggccagcgtgcccgccgccctggccagccccagcgccagagtgagcaccatcggctacctgaacgaccacgacgccgtgaccaaggccatccaggaggccagacagatgaaggagcagctgagaagagagcagcaggtgctggacggcaaggtggccgtggtgaacagcctgggcctgaacaactgcagaaccgagaaggagaagaccaccctggagagcctgacccagcagctggccgtgaagcagaacgaggagggcaagttcagccacgccatgatggacttcaacctgagcggcgacagcgacggcagcgccggcgtgagcgagagcagaatctacagagagagcagaggcagaggcagcaacgagccccacatcaagagacccatgaacgccttcatggtgtgggccaaggacgagagaagaaagatcctgcaggccttccccgacatgcacaacagcaacatcagcaagatcctgggcagcagatggaaggccatgaccaacctggagaagcagccctactacgaggagcaggccagactgagcaagcagcacctggagaagtaccccgactacaagtacaagcccagacccaagagaacctgcctggtggacggcaagaagctgagaatcggcgagtacaaggccatcatgagaaacagaagacaggagatgagacagtacttcaacgtgggccagcaggcccagatccccatcgccaccgccggcgtggtgtaccccggcgccatcgccatggccggcatgcccagcccccacctgcccagcgagcacagcagcgtgagcagcagccccgagcccggcatgcccgtgatccagagcacctacggcgtgaagggcgaggagccccacatcaaggaggagatccaggccgaggacatcaacggcgagatctacgacgagtacgacgaggaggaggacgaccccgacgtggactacggcagcgacagcgagaaccacatcgccggccaggccaactag

SEQ ID NO: 253209 - DNA, 1134 bp, Artificial Sequence
  derived and/or modified sequence
atgcatgacgaagtggctcaacctctaaacctttctgccaagccaaagacatctgatggtaagtccccgacatctcccactagcccacatatgccagccctccgtataaacagcggggcgggccccctcaaagcctccgtgccagcagctctggcatccccatcagctcgcgtgagcaccatcggctacctaaacgatcatgacgcggtgaccaaggccattcaggaagctcggcaaatgaaggagcagctcagacgtgagcaacaggtcctggatgggaaggtggcagttgtgaacagcctcggtctcaataattgtaggactgagaaggaaaaaactactcttgagagtcttactcagcagctggcagtgaagcagaatgaagagggaaagttcagccacgctatgatggattttaacctgtccggcgattctgacggaagcgctggtgtgagcgaatccaggatttatcgtgagtccagagggcggggatcaaatgagccacacattaagcgccccatgaacgcctttatggtgtgggcgaaggacgagcgcaggaaaattctccaggctttccctgatatgcacaactccaacatcagcaaaattctaggctcacgatggaaggctatgacaaacctggagaagcaaccttactacgaagagcaggcacgtctcagtaaacaacaccttgagaagtaccccgactacaaatataaacctagacctaaacggacctgtctggtggacggaaagaagcttcgtattggcgagtacaaggccatcatgcgaaaccggaggcaggagatgagacaatatttcaacgtcggccagcaagctcaaattcccattgcaaccgcaggggtcgtgtatcccggcgccatcgcaatggcagggatgcccagccctcacctgccaagcgagcactcctcggtgtcttcctccccagaaccaggaatgccagtcattcagagcacttacggcgtgaaaggcgaagaacctcacatcaaagaggaaatccaggctgaggatatcaatggggagatctacgacgagtatgacgaggaagaggatgaccctgacgtggactacggttctgactccgaaaaccatattgctggacaagccaactag

SEQ ID NO: 253210 - DNA, 1134 bp, Artificial Sequence
  derived and/or modified sequence
atgcatgatgaggtggcccagcccctgaacctgagcgccaagcccaagaccagtgatggcaagagccccaccagccccaccagcccccacatgcctgccctgcgcatcaacagcggggccggccccctgaaggcctctgtgcctgctgccctggccagccccagcgcccgggtgtccaccatcggctacctgaatgaccatgatgctgtgaccaaggccatccaggaggcccggcagatgaaggagcagctgcggcgggagcagcaggtgctggatggcaaggtggccgtggtgaacagcctgggcctgaacaactgcaggacagagaaggagaagaccaccctggagagcctgacccagcagctggccgtgaagcagaatgaggagggcaagttcagccacgccatgatggacttcaacctgagcggggacagtgatggcagcgctggggtgtctgagagccgcatctaccgggagagccggggccggggcagcaatgagccccacatcaagaggcccatgaatgccttcatggtgtgggccaaggatgaaagaaggaagatcctgcaggccttcccagacatgcacaacagcaacatcagcaagatcctgggcagccgctggaaggccatgaccaacctggagaagcagccctactatgaggagcaggcccggctgagcaagcagcacctggagaagtacccagactacaagtacaagccccggcccaagaggacctgcctggtggatggcaagaagctgcgcatcggggagtacaaggccatcatgaggaacagacggcaggagatgaggcagtacttcaacgtgggccagcaggcccagatccccatcgccacagctggggtggtgtacccaggggccatcgccatggccggcatgcccagcccccacctgcccagcgagcacagctctgtgagcagcagccctgagcccggcatgcctgtgatccagagcacctatggagtgaagggggaggagccccacatcaaggaggagatccaggccgaggacatcaacggggagatctatgatgaatatgatgaggaggaggatgatcctgatgtggactatggcagtgacagcgagaaccacatcgccggccaggccaactag

SEQ ID NO: 253211 - DNA, 1134 bp, Artificial Sequence
  derived and/or modified sequence
atgcacgacgaggtggcccagcccctgaacctgagcgccaagcccaagacatctgacggaaagtctcctacctccccaacctccccacacatgcccgcccttagaatcaattccggagcaggaccactcaaggcctctgttccagcggctcttgcatctccatcagctagggtgagcacgatcggatacctgaatgatcacgacgcagtgacgaaagccattcaagaagcccgccagatgaaagagcaattgagacgagaacaacaagtcttggacgggaaggtagccgtagtcaatagtctggggctcaacaactgtagaaccgaaaaagagaaaaccaccttggagagcctgacgcagcagcttgcggtgaagcagaacgaagaggggaagttctcccacgcgatgatggattttaacctcagcggtgacagtgacggatccgcaggggtgagcgagagccggatataccgcgagtccagaggccgcggcagtaacgaaccccatattaaacggcctatgaacgccttcatggtctgggccaaagacgaaaggcgcaaaattctacaggcctttcctgacatgcacaactctaacatctctaaaattcttggctccagatggaaagccatgactaacctggagaagcagccatattacgaagagcaggcaaggctctcaaagcagcacctggagaagtaccccgactacaagtataaaccccggcccaagcgtacatgcttagtagatggaaaaaagctgcggataggcgagtataaggcaatcatgcgtaacagacggcaggaaatgcgacagtactttaacgtaggtcagcaggcgcagattcctattgcaaccgccggtgtagtttatcctggcgccatagccatggcaggcatgccctctccacacctcccgtcagagcacagcagcgtttcaagctctccggaacctggaatgccggtgatccaaagcacgtacggtgtcaagggcgaagagccgcacattaaagaagagatccaagctgaggacataaacggcgaaatctatgatgaatacgacgaggaggaagacgatcctgatgtcgattacggcagcgattctgagaaccatatagcagggcaggctaattag

SEQ ID NO: 253212 - DNA, 1134 bp, Artificial Sequence
  derived and/or modified sequence
atgcatgatgaggtcgcccaaccactcaacttgagcgccaagcctaaaacgagcgatggcaaaagcccaacatctcctacgagccctcacatgccagcactccggataaactccggagctgggccactgaaagctagcgtccccgctgcattggcttctccatccgcgcgagtttcaaccatcggctacctgaatgatcacgacgccgttacaaaagccatccaggaggcacggcagatgaaggagcagctgcggcgagaacagcaggtgctcgatgggaaggtggcggtggtaaatagcctaggacttaataactgccggacagagaaggagaagactactctggagtcactcactcagcagctggccgttaaacagaacgaggagggcaaattcagtcacgccatgatggactttaacctgtccggagactccgatggctcggctggggttagcgagagccggatttacagagagagtagagggagggggtccaacgagccacatattaaacggcctatgaacgcttttatggtttgggctaaggatgagaggagaaagattctgcaagcatttcctgatatgcacaactcgaacataagcaaaatacttggctcccgatggaaggctatgacaaacttagagaaacagccctattatgaagaacaggcccgactgtccaaacagcatctcgagaaatacccggattataagtacaagccacgccctaagaggacctgtctggtggatgggaaaaaacttagaatcggcgagtacaaagccattatgcggaacaggagacaggagatgcggcagtattttaatgtggggcagcaggcgcagattccaattgctactgcaggcgttgtctaccctggcgcaatagccatggccggaatgccaagtcctcacctgccttctgagcattccagcgtatcaagctctccagagcccggaatgcccgtaatccaatctacatacggagtgaagggagaagagccacatatcaaggaagaaatccaggcagaagacattaacggcgagatttatgatgagtacgatgaggaagaggacgatccagatgtcgactacgggtctgacagtgagaaccatattgcaggtcaggctaattag

SEQ ID NO: 253213 - DNA, 1379 bp, Artificial Sequence
  derived and/or modified sequence
aaacagtcagttatagtgggttcaccagactgttggagatttgtgccataggagctgtgcatgcatgatgaagtggcacagccactgaacctatcagctaaacccaagacctctgatggcaaatcacccacatcacccacctctccccatatgccagctctgagaataaacagtggggcaggccccctcaaagcctctgtcccagcagcgttagctagtccttcagccagagttagcacaataggttacttaaatgaccatgatgctgtcaccaaggcaatccaagaagctcggcaaatgaaggagcaactccgacgggaacaacaggtgcttgatgggaaggtggctgttgtgaatagtctgggtctcaataactgccgaacagaaaaggaaaaaacaacactggagagtctgactcagcaactggcagttaaacagaatgaagaaggaaaatttagccatgcaatgatggatttcaatctgagtggagattctgatggaagtgctggagtctcagagtcaagaatttatagggaatcccgagggcgtggtagcaatgaaccccacataaagcgtccaatgaatgccttcatggtgtgggctaaagatgaacggagaaagatccttcaagcctttcctgacatgcacaactccaacatcagcaagatattgggatctcgctggaaagctatgacaaacctagagaaacagccatattatgaggagcaagcccgtctcagcaagcagcacctggagaagtaccctgactataagtacaagcccaggccaaagcgcacctgcctggtggatggcaaaaagctgcgcattggtgaatacaaggcaatcatgcgcaacaggcggcaggaaatgcggcagtacttcaatgttgggcaacaagcacagatccccattgccactgctggtgttgtgtaccctggagccatcgccatggctgggatgccctcccctcacctgccctcggagcactcaagcgtgtctagcagcccagagcctgggatgcctgttatccagagcacttacggtgtgaaaggagaggagccacatatcaaagaagagatacaggccgaggacatcaatggagaaatttatgatgagtacgacgaggaagaggatgatccagatgtagattatgggagtgacagtgaaaaccatattgcaggacaagccaactgataagggtcaaaagattgttgtgaccttaggacttaaagaagccctaactggttcatccttaccagtggccaagcacattaactttctcatacactgactgttactttaactgttagtcttaaatagttgggacatcagctgactaatagacctcagcctcaaaaggcttggaaagaaaaaacaaa

SEQ ID NO: 253214 - protein, 581 aa, Artificial Sequence
  derived and/or modified sequence
MGFNVIRLLSGSAVALVIAPTVLLTMLSSAERGCPKGCRCEGKMVYCESQKLQEIPSSISAGCLGLSLRYNSLQKLKYNQFKGLNQLTWLYLDHNHISNIDENAFNGIRRLKELILSSNRISYFLNNTFRPVTNLRNLDLSYNQLHSLGSEQFRGLRKLLSLHLRSNSLRTIPVRIFQDCRNLELLDLGYNRIRSLARNVFAGMIRLKELHLEHNQFSKLNLALFPRLVSLQNLYLQWNKISVIGQTMSWTWSSLQRLDLSGNEIEAFSGPSVFQCVPNLQRLNLDSNKLTFIGQEILDSWISLNDISLAGNIWECSRNICSLVNWLKSFKGLRENTIICASPKELQGVNVIDAVKNYSICGKSTTERFDLARALPKPTFKPKLPRPKHESKPPLPPTVGATEPGPETDADAEHISFHKIIAGSVALFLSVLVILLVIYVSWKRYPASMKQLQQRSLMRRHRKKKRQSLKQMTPSTQEFYVDYKPTNTETSEMLLNGTGPCTYNKSGSRECEIPLSMNVSTFLAYDQPTISYCGVHHELLSHKSFETNAQEDTMETHLETELDLSTITTAGRISDHKQQLA

SEQ ID NO: 253215 - DNA, 1746 bp, Artificial Sequence
  derived and/or modified sequence
atgggctttaatgtcatccgactcctctcaggttctgccgtagccctggtgattgcccccaccgttctcctcacaatgctctctagcgctgagcgtggctgcccaaaggggtgtaggtgcgagggcaaaatggtgtattgtgaatctcaaaaattgcaggaaatcccaagctccatctccgcggggtgcctcggcctttcacttaggtataactctctccagaaactgaagtacaatcaatttaaggggctcaatcagctgacatggctatatctggaccataaccacatctccaatatcgacgaaaatgcatttaacggtatacgaagactgaaagagctgattctgagttcgaaccggatttcctacttcctgaacaatacattccggcccgtcacaaacctccggaacctcgatcttagctataatcaactgcactcactgggaagcgaacagtttcgaggccttcgcaagctgctgtcgctgcacctgagaagcaatagtttgagaaccatccccgtgcgtatcttccaggactgccggaacttggagctgcttgacttgggatataatagaatcagatccctggcacggaacgtctttgccggtatgatcagactgaaagagctgcaccttgaacacaaccagttttccaagctcaatcttgctctgtttccaagattggtgtcactccagaatctgtacctacaatggaataagattagcgtaatagggcagactatgtcttggacctggagtagcctgcagcgtttggacctttctggaaatgagattgaggccttctctggcccttcagtctttcagtgcgtgcccaacctgcagcggctcaacctcgactctaacaagctaacatttatcgggcaggagatccttgattcctggattagcttgaatgacatctccctggccggaaacatttgggagtgttctagaaatatttgttctctggtaaattggctgaagagctttaaaggcctgcgagagaataccattatatgtgcctcccctaaagagttgcagggtgtgaatgtgatagatgcagttaagaactactccatctgcgggaaatccacaaccgagagattcgatcttgcgagggcactccctaaacccacctttaaacccaagctccctcgacccaaacacgagtcaaaaccccctctgccgcccactgtgggcgccacagaacctggccccgagaccgatgccgacgccgagcacatatcttttcacaaaattattgctggatccgttgccctgttcttgtctgttctggtgatcttgctggtcatatacgtcagctggaagcgctaccccgccagcatgaagcaactgcagcaacgatctttgatgagaagacaccgcaaaaaaaaacggcagtctctcaaacagatgacacccagcacccaagaattctatgttgactacaaacctactaataccgagacatctgagatgctgcttaatggcaccggcccttgcacctacaacaaatccgggtccagggagtgcgaaatacccctgagtatgaacgtgtctactttcctggcctacgaccagccaacgatctcctattgcggggtgcatcacgaattgctcagccataaaagctttgagaccaatgcacaggaagataccatggaaacccacttggagactgaactggatctcagtaccatcactaccgccgggagaatctccgaccacaagcagcagctggcttag

SEQ ID NO: 253216 - DNA, 1746 bp, Artificial Sequence
  derived and/or modified sequence
atggggtttaatgtgatcagactgctttctgggagcgctgtcgcattagttatcgcccccaccgtcttactcactatgttatccagcgctgagcgcgggtgtcccaaaggatgtcggtgcgaggggaagatggtgtactgcgaaagccaaaaactgcaggaaatcccatctagtatttccgcaggctgtctgggcctttcactccgctacaacagtttgcagaaacttaagtacaaccagtttaagggactcaatcagcttacatggttatacctggaccacaaccatatttctaatattgacgagaacgcctttaacgggattcggcggttgaaggagctgattctgagtagtaaccggatctcatacttcttaaataacacatttcggcccgtcacaaatctgcgcaacttagatcttagctataaccagctccacagcttagggtcagagcagtttaggggccttcgaaaactcctgtctctgcatttaaggagtaactcgctcagaacaattccggtgagaattttccaggattgcagaaatctggagctgttagacttaggctataataggattcgctcactggccagaaatgtttttgccggaatgatcaggctgaaggaactgcacctggaacacaaccagttctctaagctaaacctggccctcttcccacgcttggtgtcacttcagaatttatacctacagtggaacaagatttccgtgataggtcagaccatgtcctggacgtggtcttccttgcagagactcgatctcagtggaaacgagattgaggccttcagcgggcccagtgtgttccaatgcgtgcccaatctgcagagactgaacctggacagcaataaactcacattcatcggccaggaaatcttggactcctggatcagtttaaacgacattagtctcgccgggaatatctgggagtgttctcgaaacatctgctcactggtgaattggcttaagtcatttaagggactcagagagaatacaatcatttgcgcatcccccaaggaactccagggagttaatgttatcgatgccgtgaagaattactcaatctgcggcaaaagtaccacggaaagattcgatttggccagggctctgcccaaacccaccttcaaacctaaactgccaagacctaaacatgagagcaagccaccactgcctcctactgtgggtgcgaccgaacccggacccgaaactgacgctgatgctgagcatatcagctttcacaagatcatagctggatccgttgccctttttctgagtgtcctggtgattctgttggtaatctatgtgagctggaagcggtatcccgctagcatgaaacagctgcagcagaggtccctgatgcgaaggcaccgcaagaagaagagacagtccctcaagcagatgacacctagcacgcaggaattttacgtcgattacaagccaactaataccgagacgagcgagatgctgttaaacgggaccggcccctgtacttacaataagagcgggtctagggagtgcgagattcccctttcgatgaacgtgtcaacatttttggcatacgatcagcctaccatctcatattgcggcgttcatcacgaactcctctcgcataagtctttcgaaactaacgcgcaggaagacacgatggagactcacctagaaactgagctggatctaagcacaatcactaccgcgggcagaattagcgaccacaagcaacaactcgcttag

SEQ ID NO: 253217 - DNA, 1746 bp, Artificial Sequence
  derived and/or modified sequence
atgggcttcaacgtcatccggctgctgagcggcagcgctgtggccctggtgattgcccccaccgtgctgctgaccatgctgagcagcgctgagcggggctgccccaagggctgccgctgtgagggcaagatggtgtactgtgagagccagaagctgcaggagatccccagcagcatctctgctggctgcctgggcctgagcctgcgctacaacagcctgcagaagctgaagtacaaccagttcaagggcctgaaccagctgacctggctgtacctggaccacaaccacatcagcaacattgatgaaaatgccttcaacggcatccggcggctgaaggagctgatcctgagcagcaaccgcatctcctacttcctgaacaacaccttccggcctgtgaccaacctgaggaacctggacctgagctacaaccagctgcacagcctgggcagcgagcagttccggggcctgaggaagctgctgagcctgcacctgcggagcaacagcctgcggaccatccctgtgcgcatcttccaggactgcaggaacctggagctgctggacctgggctacaaccgcatccgcagcctggccagaaatgtgtttgctggcatgatccggctgaaggagctgcacctggagcacaaccagttcagcaagctgaacctggccctcttcccccggctggtgtccctgcagaacctgtacctgcagtggaacaagatcagcgtcatcggccagaccatgtcctggacctggagcagcctgcagaggctggacctgtctggaaatgaaattgaggccttcagcggccccagcgtcttccagtgtgtgcccaacctgcagaggctgaacctggacagcaacaagctgaccttcatcggccaggagatcctggacagctggatcagcctgaatgacatcagcctggccggcaacatctgggagtgcagcaggaacatctgcagcctggtgaactggctgaagagcttcaagggcctgcgggagaacaccatcatctgtgccagccccaaggagctgcagggcgtgaatgtgattgatgctgtgaagaactacagcatctgtgggaagagcaccacagaaagatttgacctggcccgggccctgcccaagcccaccttcaagcccaagctgccccggcccaagcatgagagcaagccacccctgccccccaccgtgggcgccacagagcccggccctgagacagatgctgatgctgagcacatctccttccacaagatcatcgccggctctgtggccctcttcctgtctgtgctggtgatcctgctggtgatctacgtgtcctggaagcgctacccagcctccatgaagcagctgcagcagaggagcctgatgagaagacacaggaagaagaagaggcagagcctgaagcagatgacccccagcacccaggagttctacgtggactacaagcccaccaacacagagaccagcgagatgctgctgaatggcaccggcccctgcacctacaacaagagcggcagccgggagtgtgagatccccctgtccatgaatgtgtccaccttcctggcctatgaccagcccaccatctcctactgcggcgtgcaccacgagctgctgagccacaagagctttgagaccaatgcccaggaggacaccatggagacccacctggagacagagctggacctgagcaccatcaccacagctggccgcatcagtgaccacaagcagcagctggcctag

SEQ ID NO: 253218 - DNA, 3192 bp, Artificial Sequence
  derived and/or modified sequence
acataagactgcattcactgaaaccaaagcaacagtccgagcagctttcagaatgacagtctgcagaagtgagctgagcgtgtgcgcggtacggggctctcctgccttctgggctccaacgcagctctgtggctgaactgggtgctcatcacgggaactgctggggtatggaatacagatgtggcagctcaggtagccccaaattgcctggaagaatacatcatgtttttcgataagaagaaattgtaggatccagttttttttttaaccgccccctccccaccccccaaaaaactgtaaagatgcaaaaacgtaatatccatgaagatcctattacctaggaagattttgatgttttgctgcgaatgcggtgttgggatttatttgttcttggagtgttctgcgtggctggcaaagaataatgttccaaaatcggtccatctcccaaggggtccaatttttcttcctgggtgtcagcgagccctgactcactacagtgcagctgacaggggctgtcatgcaactggcccctaagccaaagcaaaagacctaaggacgacctttgaacaatacaaaggatgggtttcaatgtaattaggctactgagcggatcagctgtagcactggttatagcccccactgtcttactgacaatgctttcttctgccgaacgaggatgccctaagggctgtaggtgtgaaggcaaaatggtatattgtgaatctcagaaattacaggagataccctcaagtatatctgctggttgcttaggtttgtcccttcgctataacagccttcaaaaacttaagtataatcaatttaaagggctcaaccagctcacctggctataccttgaccataaccatatcagcaatattgacgaaaatgcttttaatggaatacgcagactcaaagagctgattcttagttccaatagaatctcctattttcttaacaataccttcagacctgtgacaaatttacggaacttggatctgtcctataatcagctgcattctctgggatctgaacagtttcggggcttgcggaagctgctgagtttacatttacggtctaactccctgagaaccatccctgtgcgaatattccaagactgccgcaacctggaacttttggacctgggatataaccggatccgaagtttagccaggaatgtctttgctggcatgatcagactcaaagaacttcacctggagcacaatcaattttccaagctcaacctggccctttttccaaggttggtcagccttcagaacctttacttgcagtggaataaaatcagtgtcataggacagaccatgtcctggacctggagctccttacaaaggcttgatttatcaggcaatgagatcgaagctttcagtggacccagtgttttccagtgtgtcccgaatctgcagcgcctcaacctggattccaacaagctcacatttattggtcaagagattttggattcttggatatccctcaatgacatcagtcttgctgggaatatatgggaatgcagcagaaatatttgctcccttgtaaactggctgaaaagttttaaaggtctaagggagaatacaattatctgtgccagtcccaaagagctgcaaggagtaaatgtgatcgatgcagtgaagaactacagcatctgtggcaaaagtactacagagaggtttgatctggccagggctctcccaaagccgacgtttaagcccaagctccccaggccgaagcatgagagcaaaccccctttgcccccgacggtgggagccacagagcccggcccagagaccgatgctgacgccgagcacatctctttccataaaatcatcgcgggcagcgtggcgcttttcctgtccgtgctcgtcatcctgctggttatctacgtgtcatggaagcggtaccctgcgagcatgaagcagctgcagcagcgctccctcatgcgaaggcacaggaaaaagaaaagacagtccctaaagcaaatgactcccagcacccaggaattttatgtagattataaacccaccaacacggagaccagcgagatgctgctgaatgggacgggaccctgcacctataacaaatcgggctccagggagtgtgagatacctttatcaatgaatgtgtcaacctttctggcatacgaccagcccacaataagttactgtggggtgcatcatgaacttctctcccataagtcctttgaaacgaatgcacaggaagatacgatggaaacacacctagagactgagctggacctgagcacaatcacaacagctggccgaatcagtgaccataaacagcagctagcttaactgagatcattggtagccaggggttgctaccaaactttgtaacctcaaggacaaaatgaggaagatgtgttcattgtggactctaaaaacaaaacaaaacacaaaatcccctgttcaaataaacaaaaaatccaagattgattcatgaaataaagaagacatgaattgttttaagtctacactttgtaattagctaagttgtgcagtattttttgacttaaacagagtatgaccctgaaaaataaaagaatctttttttttcaaaactcatcctacctacctgtaaaaactgtacaaagctaatgtatttttcatattgtaaagtttcaattgtagaaacaactggtatgtacagtaccataatttaattacattttactttaaaaactttacacatttcagtttctaaaattttaaattaacaaaaattatttcttgtgttattcagagttactcagttttgtaaggactgttttgttactgcttttgtgcccagaaaccttgactctaaaattctgtgctgtgcgaaacatgcacgatttttattatgcttactgcgtagaattttatctacttgttccagaaataatacattaaccaaaaaggatttaattgttcagacttgtaagaggttcttcaattacataggcaggtttttcttaaaaatgaaaaaaaaatcaaagatttttttaacagttctcagacttaactgttgccttgaattacagcctagtttctaagcagtgaaatgtaatgataaagagggatattttaacatatttccgaatgaatgactcattatttcattcttttgagtaaccattgttaagggttgggggaaagcatggacaaaacatcactggaaaca

SEQ ID NO: 253219 - DNA, 3530 bp, Artificial Sequence
  derived and/or modified sequence
aacagtccgagcagctttcagaatgacagtctgcagaagtgagctgagcgtgtgcgcggtacggggctctcctgccttctgggctccaacgcagctctgtggctgaactgggtgctcatcacgggaactgctggggtatggaatacagatgtggcagctcaggtagccccaaattgcctggaagaatacatcatgtttttcgataagaagaaattgtaggatccagttttttttttaaccgccccctccccaccccccaaaaaactgtaaagatgcaaaaacgtaatatccatgaagatcctattacctaggaagattttgatgttttgctgcgaatgcggtgttgggatttatttgttcttggagtgttctgcgtggctggcaaagaataatgttccaaaatcggtccatctcccaaggggtccaatttttcttcctgggtgtcagcgagccctgactcactacagtgcagctgacaggggctgtcatgcaactggcccctaagccaaagcaaaagacctaaggacgacctttgaacaatacaaaggatgggtttcaatgtaattaggctactgagcggatcagctgtagcactggttatagcccccactgtcttactgacaatgctttcttctgccgaacgaggatgccctaagggctgtaggtgtgaaggcaaaatggtatattgtgaatctcagaaattacaggagataccctcaagtatatctgctggttgcttaggtttgtcccttcgctataacagccttcaaaaacttaagtataatcaatttaaagggctcaaccagctcacctggctataccttgaccataaccatatcagcaatattgacgaaaatgcttttaatggaatacgcagactcaaagagctgattcttagttccaatagaatctcctattttcttaacaataccttcagacctgtgacaaatttacggaacttggatctgtcctataatcagctgcattctctgggatctgaacagtttcggggcttgcggaagctgctgagtttacatttacggtctaactccctgagaaccatccctgtgcgaatattccaagactgccgcaacctggaacttttggacctgggatataaccggatccgaagtttagccaggaatgtctttgctggcatgatcagactcaaagaacttcacctggagcacaatcaattttccaagctcaacctggccctttttccaaggttggtcagccttcagaacctttacttgcagtggaataaaatcagtgtcataggacagaccatgtcctggacctggagctccttacaaaggcttgatttatcaggcaatgagatcgaagctttcagtggacccagtgttttccagtgtgtcccgaatctgcagcgcctcaacctggattccaacaagctcacatttattggtcaagagattttggattcttggatatccctcaatgacatcagtcttgctgggaatatatgggaatgcagcagaaatatttgctcccttgtaaactggctgaaaagttttaaaggtctaagggagaatacaattatctgtgccagtcccaaagagctgcaaggagtaaatgtgatcgatgcagtgaagaactacagcatctgtggcaaaagtactacagagaggtttgatctggccagggctctcccaaagccgacgtttaagcccaagctccccaggccgaagcatgagagcaaaccccctttgcccccgacggtgggagccacagagcccggcccagagaccgatgctgacgccgagcacatctctttccataaaatcatcgcgggcagcgtggcgcttttcctgtccgtgctcgtcatcctgctggttatctacgtgtcatggaagcggtaccctgcgagcatgaagcagctgcagcagcgctccctcatgcgaaggcacaggaaaaagaaaagacagtccctaaagcaaatgactcccagcacccaggaattttatgtagattataaacccaccaacacggagaccagcgagatgctgctgaatgggacgggaccctgcacctataacaaatcgggctccagggagtgtgagatacctttatcaatgaatgtgtcaacctttctggcatacgaccagcccacaataagttactgtggggtgcatcatgaacttctctcccataagtcctttgaaacgaatgcacaggaagatacgatggaaacacacctagagactgagctggacctgagcacaatcacaacagctggccgaatcagtgaccataaacagcagctagcttaactgagatcattggtagccaggggttgctaccaaactttgtaacctcaaggacaaaacatcactggaaacaaaggctgtaaccacagcaacagactttgtgatacagttaaaaggtgcagctgccagtgacaaataaaaacttttgttacatctcattattttcaggccaaggtgggagtatagtgcataataattgtacagtagcaatttttatcctaattaacccatagcggtttacctaaaagtaaccatcagtcagtgcaaaatgtgcctggttcttaagacaactttttatttagaactgtgagaccggtattttggaaacatttcaaaggaaacatatgaatttgttttgcgttgtgcactacatcatttctctcctgaggaagaattttaaacatgtacagctcattcaatatagatatgagccatggtggagaactttatcactcaagtagacggtaaacatccttaatatgttctaaattgtttatattgctatccataatgggattcacctccaaattatcaaagaaataactcagagtaatttgacaccagcccagatcatatattgattatacaattgtattataaagttcattcaaatcaaattaagaaaacctgagtctttagaagctgaaataatcaacttgtttgtgctgtttgcttgacataggttattgtttgaaaatattgttactttatcaatagtaatcatgcattcttgtgtttttttttaatggaaaactgcaagtttcaattactgttgcactagaagtgctttttatgttgtcattttatattcatgccatcaaaagtagattgacaatacatcaatctaacaggggccaatcaaaacaatgaagaaaagaataactgaaaacaatgtcaaacttttaaatttttatctcttccaaagaagttatatctataaaatctagttttatgcaggtttgtcacagcaaatgtaaaagcggattcaagaagaatgaacttaaaaactgtggagcaaatttttgttgaaaatatataaagtcagaaagaaaaaagatgtaaatgttggaagaagcaaattctattactaattcaaatgaaactaaatgtcaaacacagtacttgtgtcaactatttagcatcccagattttgtaacatattttgcataaattatttgctcttcaaaaatttttgtcattttaaatctaattttaatctttatgttttccattttctaa

SEQ ID NO: 253220 - DNA, 1746 bp, Artificial Sequence
  derived and/or modified sequence
atgggcttcaacgtgatccggctgctgagcggcagcgccgtggccctcgtgatagcccctactgttctactcaccatgctgagcagtgcagagcggggctgccccaaagggtgtcgttgcgagggcaaaatggtgtactgcgaaagtcaaaaattgcaggaaattccttccagtatttctgcaggttgcctgggactgtccctccggtataattccctgcagaagttgaagtacaatcagtttaagggcctgaaccagctgacttggctctacctggatcacaatcacatcagtaacatcgacgagaatgcatttaacggcatccgaaggctgaaggaactaatcctatcctctaatcggattagctacttcctaaataacacgttcagacctgtgactaacttacgcaacttggacttgtcatataaccagcttcacagcttgggctccgagcagtttaggggattgcgaaaactgcttagcctgcacctgcgttccaatagcctgcgcacaattccagtacggatcttccaagactgtaggaacctcgagctgttagatcttggctacaaccgaatcaggtcactggccagaaacgttttcgctgggatgatacggctgaaggagttgcatcttgagcacaaccaatttagcaaactaaacttagcactttttccacgcctggtctcattgcagaacctgtacctccagtggaataaaatcagcgttatcggccagacaatgtcatggacttggtcctccctgcagaggctcgacttaagtggcaacgaaatcgaagcgtttagcgggccgagtgtctttcagtgtgtgcccaaccttcagaggctgaacttagattctaacaagctaacatttattggtcaggaaatcctcgacagctggataagcctgaacgatatcagtcttgccggaaatatctgggaatgttccaggaatatctgctccctagtgaactggctcaagtcatttaaaggactgcgggagaatactataatatgcgcttctccaaaggagctgcagggagtaaacgtgatcgatgcagtcaagaactattccatctgcgggaaatcaaccaccgaacgtttcgacttagccagagccttgcccaaacccactttcaagcctaagctgcctcgtcccaagcacgagagcaagcctcctctgccccccaccgtgggcgccactgagcccggccccgagacagatgcagacgccgagcacatctcctttcacaagatcatcgcggggtccgtggctctgtttttatcggtgttggtgatcctactcgtgatctatgtgtcatggaaaagatatccagccagtatgaaacagcttcagcagcggagcctgatgaggagacatcggaaaaagaagagacagtcactgaaacaaatgacgccatccacccaggagttttatgtggattacaagccaacaaacactgagacctcggagatgcttctgaacggaaccggcccatgcacatacaacaagtccggcagtcgcgaatgcgaaattccactgtcaatgaatgtttcgacgtttctcgcctacgaccagcctactatttcttactgcggtgttcatcatgagctattgtctcataagagtttcgagactaatgcgcaggaagacacgatggagacacatctggagaccgagctggacttgagcacaatcacgaccgcgggcagaataagcgatcacaagcagcagttggcgtag

SEQ ID NO: 253221 - DNA, 1746 bp, Artificial Sequence
  derived and/or modified sequence
atgggcttcaacgtgatccggctgctgagcggcagcgccgtggccctggtaattgccccaactgtgttgttaacgatgctctcttctgcagaaagggggtgcccaaaaggatgtcgctgtgaaggcaagatggtgtattgcgagagccagaagctgcaagagatacccagttccatctcagccggttgcctgggcctaagcctgcggtacaattcattgcaaaagctcaaatacaaccagttcaagggactaaatcagttgacatggctctatctggatcataatcacataagtaacattgatgaaaacgcctttaacggcatccgccgtctcaaagaattgatcctgtcgtccaaccggatctcatatttcttaaacaataccttccggcccgtgacgaacctgagaaatcttgacctttcttacaaccagcttcactcactggggtcagagcagttcaggggccttcgaaagctcctgagtctgcatcttcggagcaattcactccgtaccataccagtgcgcatattccaggattgtaggaatctcgagctgttagacctcggctacaaccggattcgttctctggcccgtaacgtcttcgctggcatgatcagactgaaggaactgcacctggagcacaaccaattcagcaagttaaaccttgcattgtttcctcgcctcgtctcattgcagaacctgtatcttcaatggaacaagatctccgttattggtcagactatgtcctggacatggagcagtctgcagcggctggacctgtcaggcaacgagattgaagccttcagcggacctagcgtgtttcagtgcgtacccaacttacagaggcttaatttggactccaataagctgaccttcataggtcaggagatcctcgactcctggatctccctcaacgacatctccctcgcagggaatatctgggaatgtagccgaaatatctgcagtctcgtcaattggctgaagtctttcaagggactaagggaaaatacaattatctgtgctagtcctaaggaacttcaaggagttaacgttattgatgccgtcaaaaactacagcatctgtgggaagtcaaccaccgagcgtttcgatttagccagggcactgcccaaacctacctttaagcctaaactcccccgaccaaaacacgagtcaaagccacctctccccccaactgttggtgctacagaaccgggccctgaaactgatgctgacgctgagcacatatctttccacaagattatcgcagggtccgtcgccctgtttttatcagtgttggtgattctgttggtcatctatgtctcatggaaacggtatcccgcatcaatgaagcagctgcagcaacggtccttgatgcgcagacacaggaaaaaaaaacgccagtcgctcaagcaaatgacgcccagtacccaggagttctatgtggactacaaaccgactaacaccgaaacttctgaaatgctgcttaacggcaccggcccgtgcacctacaataagagcgggtcacgggagtgcgagattcccctgagtatgaacgtgagcacctttttggcctacgatcagccaactatctcttactgtggagtgcatcacgaactccttagtcataagtcctttgagacgaatgcccaggaggacaccatggaaacccacctggaaacagaacttgacctgagcactatcacgacagcgggacgaatctcagatcacaaacaacagctggcctag

SEQ ID NO: 253222 - DNA, 1746 bp, Artificial Sequence
  derived and/or modified sequence
atgggttttaacgtgataagattactgagcggatccgccgtggcgctcgtcatcgcgccaacagtcttgctaacaatgctcagttcagcggaacgtggctgccccaagggatgtcgatgtgaggggaagatggtgtactgcgaatcacagaagctgcaggaaattcctagtagtatcagcgccggttgtctgggattgtcgcttcgctacaattctctacagaagctgaaatataaccagttcaagggccttaatcagctcacatggctatatttggatcataaccacatctcaaatatcgatgaaaacgctttcaatggaatccgcagacttaaggaactcattctgtcatcaaatcgcatctcctattttctaaacaatacatttaggcccgtcacaaacctgcggaatcttgatctgtcatacaaccagctgcattcccttggctccgaacagttcagggggctgaggaagctcctcagtctacacctgaggtccaatagtctccggaccatcccggtcaggatttttcaggactgccggaatctggagcttcttgacctgggatataaccggataagatctctggctagaaatgtatttgctggcatgataagactaaaggaactacacttggagcacaatcagttcagtaagttgaatctggccttattcccgagactggtgtcccttcaaaacctgtacctacagtggaacaagatctctgtcataggccagaccatgagttggacgtggagctccctccagaggttggatctgtctgggaatgagatcgaagcattctctggtccctctgttttccagtgtgtgccaaatctccaacgcttaaatttggactccaataaactgacattcatcgggcaggagatccttgactcttggatctcattaaacgatataagcctggcaggtaatatctgggagtgctcacgaaacatctgctccctggtcaactggctgaagtctttcaagggcttgcgcgagaatactattatttgcgcatccccaaaagagttgcaaggcgttaacgtaattgacgccgtcaagaactactctatttgcggtaaaagcaccacagagcgcttcgacttagcgagagcattacctaaaccaaccttcaagcccaaactgccacggccaaaacacgagtctaagccaccgttgccccctaccgtgggcgcaaccgaacccggacccgagacggacgccgatgcagaacatatctcctttcacaaaataattgctggttcagttgccctgtttctatctgtgctcgttatactacttgttatttacgtgtcctggaaaagatatccagcatccatgaaacagctacaacagcgctcactgatgagaagacaccgcaagaagaaacgtcagagcctgaaacagatgactccaagtacacaggaattttatgtggattacaaacctactaatacggagacctccgagatgctgctgaacggaacggggccttgcacatataacaagtcaggctccagggagtgtgagatccctctgtctatgaacgtttcgaccttcctggcctacgaccagcccactatcagttattgcggtgtccatcacgagttgctttcacacaaaagcttcgagactaacgcccaggaggataccatggagacgcaccttgagaccgagctcgacctgagtacgatcaccaccgccggacggatttctgaccacaaacagcagttagcatag

SEQ ID NO: 253223 - DNA, 1746 bp, Artificial Sequence
  derived and/or modified sequence
atgggctttaacgtcatccgactcctaagtggcagcgctgtggccctagtgattgctcctactgtattgcttactatgctctcctcagctgagcgcggatgtcctaagggatgtcgatgcgagggcaagatggtatattgtgaaagtcaaaaactgcaggagattccatcaagtatctctgccggatgccttggactgtctttgaggtataactctttgcaaaaattgaagtacaaccagttcaaggggctaaatcagctaacatggctttaccttgatcacaatcatatcagcaatatcgacgagaatgcgtttaatggcattcgtaggctgaaagaactgattctgtcgtccaaccgcatcagttacttcctgaataacacctttcgcccagtgacaaacctgcggaacctggatctcagctacaaccagttgcattcactgggttccgaacaatttcgtggcctaaggaagctgttatccttgcacctgagaagcaacagtctgcgcaccatccccgtaaggatattccaggactgcaggaacttggagctcttagatctcggatataatagaatcaggtccttggcacgcaacgtatttgcaggaatgatccggctgaaagagctgcacctggagcataatcagttctccaaactaaacttagctttgtttcccagacttgtgtcactgcagaacctgtatttgcagtggaataagatctctgttattgggcagaccatgagctggacctggagttcactgcaaagactggatctcagtggcaatgaaatagaagccttctccggcccatccgtgtttcaatgcgtgccaaatttgcaaaggcttaatctggattccaacaaattgaccttcatcggccaagaaatcctggattcctggataagcttgaatgatatcagcctcgcaggtaatatttgggagtgttcccggaacatctgttcactggtaaattggctgaagagtttcaaaggcttgcgggagaatactataatatgtgcctcacccaaggagcttcagggagtgaatgtaattgatgccgtgaagaattactccatctgcggtaaatccactacagagcggtttgatcttgcgagggcccttcctaagccaactttcaagcccaagctccccagacccaagcacgaaagcaaacccccattgccccctaccgtcggagcaacagaacccggacctgaaacagatgctgatgcagaacacatctcatttcataaaatcatagcgggatctgtggcccttttcctttcagtgcttgttatcctcctggttatctatgtttcttggaagagatatccggcttctatgaaacagcttcaacagcgctcactgatgagacggcacagaaaaaaaaagagacaaagccttaaacagatgacaccaagcacccaggaattttacgtggactacaaaccgacaaacactgaaacatcagagatgctccttaatggcactggaccctgcacctacaataaaagcgggtctcgagagtgtgagatcccgttatcgatgaacgtcagcacctttctggcatacgaccaaccgactatctcttattgtggagtgcaccatgaactgctcagtcataagtcctttgaaaccaatgcacaagaggatactatggaaacgcacctggagacagagctcgatctaagcaccatcactactgccggtcggatatctgatcacaaacagcagctagcgtag

SEQ ID NO: 253224 - DNA, 1746 bp, Artificial Sequence
  derived and/or modified sequence
atgggcttcaacgtgatcagactgctgagcggcagcgccgtggccctggtgatcgcccccaccgtgctgctgaccatgctgagcagcgccgagagaggctgccccaagggctgcagatgcgagggcaagatggtgtactgcgagagccagaagctgcaggagatccccagcagcatcagcgccggctgcctgggcctgagcctgagatacaacagcctgcagaagctgaagtacaaccagttcaagggcctgaaccagctgacctggctgtacctggaccacaaccacatcagcaacatcgacgagaacgccttcaacggcatcagaagactgaaggagctgatcctgagcagcaacagaatcagctacttcctgaacaacaccttcagacccgtgaccaacctgagaaacctggacctgagctacaaccagctgcacagcctgggcagcgagcagttcagaggcctgagaaagctgctgagcctgcacctgagaagcaacagcctgagaaccatccccgtgagaatcttccaggactgcagaaacctggagctgctggacctgggctacaacagaatcagaagcctggccagaaacgtgttcgccggcatgatcagactgaaggagctgcacctggagcacaaccagttcagcaagctgaacctggccctgttccccagactggtgagcctgcagaacctgtacctgcagtggaacaagatcagcgtgatcggccagaccatgagctggacctggagcagcctgcagagactggacctgagcggcaacgagatcgaggccttcagcggccccagcgtgttccagtgcgtgcccaacctgcagagactgaacctggacagcaacaagctgaccttcatcggccaggagatcctggacagctggatcagcctgaacgacatcagcctggccggcaacatctgggagtgcagcagaaacatctgcagcctggtgaactggctgaagagcttcaagggcctgagagagaacaccatcatctgcgccagccccaaggagctgcagggcgtgaacgtgatcgacgccgtgaagaactacagcatctgcggcaagagcaccaccgagagattcgacctggccagagccctgcccaagcccaccttcaagcccaagctgcccagacccaagcacgagagcaagccccccctgccccccaccgtgggcgccaccgagcccggccccgagaccgacgccgacgccgagcacatcagcttccacaagatcatcgccggcagcgtggccctgttcctgagcgtgctggtgatcctgctggtgatctacgtgagctggaagagataccccgccagcatgaagcagctgcagcagagaagcctgatgagaagacacagaaagaagaagagacagagcctgaagcagatgacccccagcacccaggagttctacgtggactacaagcccaccaacaccgagaccagcgagatgctgctgaacggcaccggcccctgcacctacaacaagagcggcagcagagagtgcgagatccccctgagcatgaacgtgagcaccttcctggcctacgaccagcccaccatcagctactgcggcgtgcaccacgagctgctgagccacaagagcttcgagaccaacgcccaggaggacaccatggagacccacctggagaccgagctggacctgagcaccatcaccaccgccggcagaatcagcgaccacaagcagcagctggcctag

SEQ ID NO: 253225 - protein, 445 aa, Artificial Sequence [sequence omitted]

SEQ ID NO: 253226 - DNA, 1338 bp, Artificial Sequence
  derived and/or modified sequence
atgagagagatcgtgcacatccaggccggccagtgcggcaaccagatcggcgccaagttctgggaggtgatcagcgacgagcacggcatcgaccccaccggcagctaccacggcgacagcgacctgcagctggagagaatcaacgtgtactacaacgaggccaccggcaacaagtacgtgcccagagccatcctggtggacctggagcccggcaccatggacagcgtgagaagcggccccttcggccagatcttcagacccgacaacttcgtgttcggccagagcggcgccggcaacaactgggccaagggccactacaccgagggcgccgagctggtggacagcgtgctggacgtggtgagaaaggagagcgagagctgcgactgcctgcagggcttccagctgacccacagcctgggcggcggcaccggcagcggcatgggcaccctgctgatcagcaagatcagagaggagtaccccgacagaatcatgaacaccttcagcgtgatgcccagccccaaggtgagcgacaccgtggtggagccctacaacgccaccctgagcgtgcaccagctggtggagaacaccgacgagacctactgcatcgacaacgaggccctgtacgacatctgcttcagaaccctgaagctgaccacccccacctacggcgacctgaaccacctggtgagcgccaccatgagcggcgtgaccacctgcctgagattccccggccagctgaacgccgacctgagaaagctggccgtgaacatggtgcccttccccagactgcacttcttcatgcccggcttcgcccccctgaccagcagaggcagccagcagtacagagccctgaccgtgcccgagctgacccagcagatgttcgacagcaagaacatgatggccgcctgcgaccccagacacggcagatacctgaccgtggccgccatcttcagaggcagaatgagcatgaaggaggtggacgagcagatgctgaacgtgcagaacaagaacagcagctacttcgtggagtggatccccaacaacgtgaagaccgccgtgtgcgacatcccccccagaggcctgaagatgagcgccaccttcatcggcaacagcaccgccatccaggagctgttcaagagaatcagcgagcagttcaccgccatgttcagaagaaaggccttcctgcactggtacaccggcgagggcatggacgagatggagttcaccgaggccgagagcaacatgaacgacctggtgagcgagtaccagcagtaccaggacgccaccgccgacgagcagggcgagttcgaggaggaggagggcgaggacgaggcctag

SEQ ID NO: 253227 - DNA, 1338 bp, Artificial Sequence
  derived and/or modified sequence
atgcgagaaatagttcacatccaggctggccagtgtgggaaccaaattggtgctaaattttgggaagtgatttctgacgagcacggtatcgaccccacagggagctatcacggtgactcggatctgcagctggagcgtattaatgtatactacaacgaagccacaggtaacaaatatgtgcctcgtgctattttggtcgatcttgagccgggcaccatggactccgtccggtcagggccgttcggacaaatattcagacctgacaacttcgttttcggccagagtggggctggcaacaactgggcaaaaggccactacaccgagggagcagaattggtggactcggtgctcgacgtggtgcgtaaggaatccgagagctgtgactgcttacagggttttcaattaacccacagcctggggggaggaacaggttccgggatgggaaccctgctgatctcaaaaatccgggaggaatacccagatcgtataatgaacacctttagtgtgatgccgagtcccaaggtatcagacacagtggttgagccctataacgcaactctcagcgttcaccaattggtggaaaatactgacgagacctattgcatcgataacgaagccctgtatgatatttgcttcagaaccttaaaactgaccacacccacttacggcgacctgaaccacctggtttctgcaactatgagcggggttacaacttgcctccgcttccccggccaactcaacgccgatctgagaaagttggccgtcaacatggtcccattcccacgactgcactttttcatgccaggcttcgcccccctaaccagtagagggagccaacagtacagggcactgacagtacccgagcttacacaacagatgttcgacagcaaaaacatgatggctgcttgcgaccctagacacggacggtacctaaccgtggcagctatttttagagggagaatgagtatgaaagaagttgatgagcagatgcttaacgtccagaataaaaactcatcatatttcgtagagtggattcccaataatgtgaagactgctgtgtgcgatataccccccagaggcctgaagatgtcagcaaccttcatcggcaacagcacggcaatacaggaattatttaagcggatcagcgagcagttcaccgccatgttccgtagaaaggcattcctgcactggtacacaggcgagggtatggacgaaatggagttcaccgaagccgaatcaaacatgaatgaccttgtctccgaataccaacagtaccaggacgctacggcggacgagcagggggagttcgaagaagaggagggtgaggacgaggcttag

SEQ ID NO: 253228 - DNA, 1338 bp, Artificial Sequence
  derived and/or modified sequence
atgagggagatcgtgcacatccaggccggccagtgtggcaaccagatcggggccaagttctgggaggtgatcagtgatgagcacggcatcgaccccaccggcagctaccatggagacagcgacctgcagctggagcgcatcaacgtgtactacaatgaggccactggaaacaagtatgtgccccgggccatcctggtggacctggagcccggcaccatggattctgtgcgcagcggccccttcggccagatcttccggccagacaactttgtgtttggccagagcggggccggcaacaactgggccaagggccactacacagaaggagctgagctggtggacagcgtgctggatgtggtgaggaaggagagcgagagctgtgactgcctgcagggcttccagctgacccacagcctgggcggcggcactggaagtggcatgggcaccctgctgatcagcaagatccgggaggagtacccagaccgcatcatgaacaccttctctgtgatgcccagccccaaggtgtctgacacagtggtggagccctacaatgccaccctgtctgtgcaccagctggtggagaacacagatgagacctactgcatcgacaatgaggccctgtatgacatctgcttccgcaccctgaagctgaccacccccacctacggggacctgaaccacctggtgtctgccaccatgtctggagtgaccacctgcctgcgcttccctggccagctgaatgctgacctgaggaagctggccgtgaacatggtgcccttcccccggctgcacttcttcatgcctggctttgcccccctgaccagccggggcagccagcagtaccgggccctgactgtgcctgagctgacccagcagatgtttgacagcaagaacatgatggccgcctgtgaccccaggcatggccgctacctgactgtggccgccatcttccggggccgcatgtccatgaaggaggtggatgagcagatgctgaatgtgcagaacaagaacagcagctactttgtggagtggatccccaacaacgtgaagacagctgtgtgtgacatccccccccggggcctgaagatgtctgccaccttcatcggcaacagcacagccatccaggagctgttcaagaggatcagcgagcagttcaccgccatgttccggaggaaggccttcctgcactggtacacaggagagggcatggatgagatggagttcacagaagctgagagcaacatgaatgacctggtgtctgagtaccagcagtaccaggatgccacagcagatgagcagggcgagtttgaggaggaggagggggaggatgaggcctag

SEQ ID NO: 253229 - DNA, 1338 bp, Artificial Sequence
  derived and/or modified sequence
atgcgggagatcgtgcacatccaggccggccagtgcggcaaccagatcggagccaaattttgggaggtaattagcgatgagcatggcatcgaccctacaggctcctatcacggcgacagcgatcttcagctggaacgaattaatgtgtattacaacgaggccaccgggaacaagtacgttccacgggcaattctcgtcgatctcgagcctgggactatggattctgtgaggagcggccccttcggacagatcttccgcccagacaattttgtgtttggtcagtccggtgccggcaacaactgggcaaagggtcattataccgagggcgctgagctggttgacagtgtcctggacgtggttagaaaagaaagtgaatcatgtgattgtttacagggattccagctcacgcatagtctagggggggggacaggatcaggaatgggtaccctgctcatctcgaaaatccgcgaagagtatcccgatcgaattatgaacaccttttctgtcatgccttcgcccaaggtaagcgatacagtcgtggagccgtacaatgccactctgagtgtacatcagctcgtagagaacacagacgagacctactgcatagacaacgaggccctctacgatatttgcttcagaaccttgaaactgacgaccccaacgtacggcgatttgaatcacctcgtaagcgccacaatgtcaggcgtgaccacttgcctaagattcccaggccaactgaacgccgacttacggaaattagccgtcaatatggtaccctttcctagactccacttcttcatgcctggttttgcccccctgacctccagaggatcccagcagtatcgcgccttgactgtcccagaattgacccagcagatgtttgactcaaagaatatgatggcagcttgcgatccccgccatggcaggtatttgacagtcgcagccatattcaggggtagaatgtctatgaaagaagtggacgagcaaatgctgaacgtgcaaaacaagaactcttcctattttgtcgagtggatccctaacaacgttaagacggctgtgtgtgacattccgccccgtgggctgaagatgagtgctaccttcatcggcaacagcacggcaatccaagagctgttcaagcggataagtgaacaatttactgctatgttccgacgcaaagcctttcttcattggtatacaggtgagggtatggatgagatggaattcaccgaagctgaatcaaatatgaatgacctcgtgtcagaatatcaacagtaccaggatgccacagcagatgagcaaggagaatttgaagaggaggaaggcgaggatgaggcgtag

SEQ ID NO: 253230 - DNA, 1338 bp, Artificial Sequence
  derived and/or modified sequence
atgcgggagatcgtccatattcaggccggacaatgcggaaaccagattggggctaaattttgggaggtcattagcgacgagcatgggatcgacccaactgggtcataccacggcgattccgatcttcagcttgagagaattaatgtgtactataatgaagcaaccggtaacaagtacgtgccgagagctatcctagtggatttggaacctggcaccatggactctgtgagaagcgggcctttcggacagatcttcaggccagataatttcgtgttcgggcaatccggagccggtaacaattgggcgaagggtcactacaccgagggagcagagctggtcgactcagttctggacgtggtaaggaaagaaagcgaatcctgtgactgtctgcaagggtttcaactgactcacagtctcgggggaggaacggggtctggcatggggacactgctgattagtaaaattcgggaggaataccccgacaggatcatgaacactttttccgtcatgccgtcgccaaaagtctctgacacagttgtcgagccatacaatgcaacgttgagcgtgcaccagttagtggaaaacacagacgagacctattgcatcgataacgaagctctatatgacatttgctttcgcactctgaagctgaccactccaacctatggcgacctgaaccatctggtatccgcaactatgtcgggggtgacaacctgcttgaggttccccggtcagctaaacgcggatttgcgcaagttggccgtgaatatggtgccattcccacggcttcacttctttatgccgggttttgccccactgacaagcagaggcagccagcagtaccgagcattgacggtccccgaacttactcagcagatgtttgactcgaagaatatgatggcagcctgcgatcccagacatggaagatatctgaccgtggctgcaatctttcggggacgtatgagtatgaaggaggtggatgaacagatgttgaatgtccagaataagaattctagctactttgtcgagtggataccgaacaatgttaagaccgcggtgtgcgatatccccccaaggggcctcaaaatgtcggcaacttttatagggaactctaccgctatacaagaactgtttaagcggatttcggaacagttcaccgcgatgtttcgcagaaaggcattccttcattggtacactggcgaggggatggacgagatggagtttactgaagctgaatcaaacatgaatgacctggtaagtgagtaccagcaataccaggatgccaccgccgacgaacaaggagaattcgaggaagaagaaggcgaagatgaggcctag

SEQ ID NO: 253231 - DNA, 1998 bp, Artificial Sequence
  derived and/or modified sequence
ggggggctcgggctgggggcgcggcctgtgccggccgccccaccctccttgcataaaagccggagcccgcggggccggcgctctcagcccgtcggttcccgagcgccttcccggtgaccccgcagtgggtgtgtgaggggaggacggacagacccagacgccgccggaccaggaggacgctgacgaggcaccatgcgtgagatcgtgcacatccaggcgggccagtgcggcaaccagatcggcgccaagttttgggaggtcatcagtgatgagcatgggattgaccccactggcagttaccatggagacagtgatttgcagctggagagaatcaatgtttactacaatgaagccactggtaacaaatatgttcctcgggccatcctcgtggatctggagccaggcacgatggattcggttaggtctggaccattcggccagatcttcagaccagacaatttcgtgtttggccagagtggagccgggaataactgggccaagggccactacacagagggagccgagctggtcgactcggtcctggatgtggtgaggaaggagtcagagagctgtgactgtctccagggcttccagctgacccactctctggggggcggcacggggtccgggatgggcaccctgctcatcagcaagatccgggaagagtacccagaccgcatcatgaacaccttcagcgtcatgccctcacccaaggtgtcagacacggtggtggagccctacaacgccaccctctcggtccaccagctggtggaaaacacagatgaaacctactgcattgacaacgaggccctgtatgacatctgcttccgcaccctgaagctgaccacccccacctacggggacctcaaccacctggtgtcggccaccatgagcggggtcaccacctgcctgcgcttcccgggccagctgaacgcagacctgcgcaagctggcggtgaacatggtgcccttccctcgcctgcacttcttcatgcccggcttcgcgcccctgaccagccggggcagccagcagtaccgggcgctcacggtgcccgagctcacccagcagatgttcgactccaagaacatgatggccgcctgcgacccgcgccacggccgctacctgacggtggctgccatcttccggggccgcatgtccatgaaggaggtggacgagcagatgctcaacgtgcagaacaagaacagcagctacttcgtggagtggatccccaacaacgtgaagacggccgtgtgcgacatcccgccccgcggcctgaagatgtcggccaccttcatcggcaacagcacggccatccaggagctgttcaagcgcatctccgagcagttcacggccatgttccggcgcaaggccttcctgcactggtacacgggcgagggcatggacgagatggagttcaccgaggccgagagcaacatgaacgacctggtgtccgagtaccagcagtaccaggacgccacggccgacgaacaaggggagttcgaggaggaggagggcgaggacgaggcgtagatgcccccgcgagacgggttagggaaagcggaggaggaaagcgagggggtggggggcttcccgggacgataacctggcagtggaaggaaagaagcatggtctactttaggtgtgcgctgggtctctggtgctcttcactgttgcctgtcactttttttttccttttttgtaatattgatgacatcaatgtaacatttgagatatttctgaattactgttgtaatggctaaaatcacataaacgtttgtgtcggaatggtgtcctctctttctcttcctttttctctttattaacgatttaaatgtaactttctgaacacattgcattgaattcttcctttaacaaaaagcaaaggcgtaggtaaaagctcaaatgaatttattctttcggtatggtaaaattgaaccaatcacagttaagatgagagatcaacctgagttttaaaatacctttaataaatattagttg

SEQ ID NO: 253232 - protein, 444 aa, Artificial Sequence
  derived and/or modified sequence
MREIVHIQAGQCGNQIGAKFWEVISDEHGIDPTGTYHGDSDLQLDRISVYYNEATGGKYVPRAILVDLEPGTMDSVRSGPFGQIFRPDNFVFGQSGAGNNWAKGHYTEGAELVDSVLDVVRKEAESCDCLQGFQLTHSLGGGTGSGMGTLLISKIREEYPDRIMNTFSVVPSPKVSDTVVEPYNATLSVHQLVENTDETYCIDNEALYDICFRTLKLTTPTYGDLNHLVSATMSGVTTCLRFPGQLNADLRKLAVNMVPFPRLHFFMPGFAPLTSRGSQQYRALTVPELTQQVFDAKNMMAACDPRHGRYLTVAAVFRGRMSMKEVDEQMLNVQNKNSSYFVEWIPNNVKTAVCDIPPRGLKMAVTFIGNSTAIQELFKRISEQFTAMFRRKAFLHWYTGEGMDEMEFTEAESNMNDLVSEYQQYQDATAEEEEDFGEEAEEEA

SEQ ID NO: 253233 - protein, 426 aa, Artificial Sequence
  derived and/or modified sequence
MFWEVISDEHGIDPTGTYHGDSDLQLDRISVYYNEATGGKYVPRAILVDLEPGTMDSVRSGPFGQIFRPDNFVFGQSGAGNNWAKGHYTEGAELVDSVLDVVRKEAESCDCLQGFQLTHSLGGGTGSGMGTLLISKIREEYPDRIMNTFSVVPSPKVSDTVVEPYNATLSVHQLVENTDETYCIDNEALYDICFRTLKLTTPTYGDLNHLVSATMSGVTTCLRFPGQLNADLRKLAVNMVPFPRLHFFMPGFAPLTSRGSQQYRALTVPELTQQVFDAKNMMAACDPRHGRYLTVAAVFRGRMSMKEVDEQMLNVQNKNSSYFVEWIPNNVKTAVCDIPPRGLKMAVTFIGNSTAIQELFKRISEQFTAMFRRKAFLHWYTGEGMDEMEFTEAESNMNDLVSEYQQYQDATAEEEEDFGEEAEEEA

SEQ ID NO: 253234 - protein, 207 aa, Artificial Sequence
  derived and/or modified sequence
MGTLLISKIREEYPDRIMNTFSVVPSPKVSDTVVEPYNATLSVHQLVENTDETYCIDNEALYDICFRTLKLTTPTYGDLNHLVSATMSGVTTCLRFPGQLNADLRKLAVNMVPFPRLHFFMPGFAPLTSRGSQQYRALTVPELTQQVFDAKNMMAACDPRHGRYLTVAAVFRGRMSMKEVDEQMLNVQNKNSSYFVEWPQQCQDSRL

SEQ ID NO: 253235 - protein, 415 aa, Artificial Sequence
  derived and/or modified sequence
MREIVHIQAGQCGNQIGAKFWEVISDEHGIDPTGTYHGDSDLQLDRISVYYNEATGGKYVPRAILVDLEPGTMDSVRSGPFGQIFRPDNFVFGQSGAGNNCLQGFQLTHSLGGGTGSGMGTLLISKIREEYPDRIMNTFSVVPSPKVSDTVVEPYNATLSVHQLVENTDETYCIDNEALYDICFRTLKLTTPTYGDLNHLVSATMSGVTTCLRFPGQLNADLRKLAVNMVPFPRLHFFMPGFAPLTSRGSQQYRALTVPELTQQVFDAKNMMAACDPRHGRYLTVAAVFRGRMSMKEVDEQMLNVQNKNSSYFVEWIPNNVKTAVCDIPPRGLKMAVTFIGNSTAIQELFKRISEQFTAMFRRKAFLHWYTGEGMDEMEFTEAESNMNDLVSEYQQYQDATAEEEEDFGEEAEEE

SEQ ID NO: 253236 - protein, 435 aa, Artificial Sequence
  derived and/or modified sequence
MREIVHIQAGQCGNQIGAKFWEVISDEHGIDPTGTYHGDSDLQLDRISVYYNEATGGKYVPRAILVDLEPGTMDSVRSGPFGQIFRPDNFVFGQSGAGNNWAKGHYTEGAELVDSVLDVVRKEAESCDCLQGFQLTHSLGGGTGSGMGTLLISKIREEYPDRIMNTFSVVPSPKVSDTVVEPYNATLSVHQLVENTDETYCIDNEALYDICFRTLKLTTPTYGDLNHLVSATMSGVTTCLRFPGQLNADLRKLAVNMVPFPRLHFFMPGFAPLTSRGSQQYRALTVPELTQQVFDAKNMMAACDPRHGRYLTVAAVFRGRMSMKEVDEQMLNVQNKNSSYFVEWIPNNVKTAVCDIPPRGLKMAVTFIGNSTAIQELFKRISEQFTAMFRRKAFLHWYTGEGMDEMEFTEAESNMNDLVSEYQQYQDATAEGGGL

SEQ ID NO: 253237 - protein, 435 aa, Artificial Sequence
  derived and/or modified sequence
MREIVHIQAGQCGNQIGAKFWEVISDEHGIDPTGTYHGDSDLQLDRISVYYNEATGGKYVPRAILVDLEPGTMDSVRSGPFGQIFRPDNFVFGQSGAGNNWAKGHYTEGAELVDSVLDVVRKEAESCDCLQGFQLTHSLGGGTGSGMGTLLISKIREEYPDRIMNTFSVVPSPKVSDTVVEPYNATLSVHQLVENTDETYCIDNEALYDICFRTLKLTTPTYGDLNHLVSATMSGVTTCLRFPGQLNADLRKLAVNMVPFPRLHFFMPGFAPLTSRGSQQYRALTVPELTQQVFDAKNMMAACDPRHGRYLTVAAVFRGRMSMKEVDEQMLNVQNKNSSYFVEWIPNNVKTAVCDIPPRGLKMAVTFIGNSTAIQELFKRISEQFTAMFRRKAFLHWYTGEGMDEMEFTEAESNMNDLVSEYQQYQDATAEEGGV

SEQ ID NO: 253238 - DNA, 1335 bp, Artificial Sequence
  derived and/or modified sequence
atgagagagatcgtgcacatccaggccggccagtgcggcaaccagatcggcgccaagttctgggaggtgatcagcgacgagcacggcatcgaccccaccggcacctaccacggcgacagcgacctgcagctggacagaatcagcgtgtactacaacgaggccaccggcggcaagtacgtgcccagagccatcctggtggacctggagcccggcaccatggacagcgtgagaagcggccccttcggccagatcttcagacccgacaacttcgtgttcggccagagcggcgccggcaacaactgggccaagggccactacaccgagggcgccgagctggtggacagcgtgctggacgtggtgagaaaggaggccgagagctgcgactgcctgcagggcttccagctgacccacagcctgggcggcggcaccggcagcggcatgggcaccctgctgatcagcaagatcagagaggagtaccccgacagaatcatgaacaccttcagcgtggtgcccagccccaaggtgagcgacaccgtggtggagccctacaacgccaccctgagcgtgcaccagctggtggagaacaccgacgagacctactgcatcgacaacgaggccctgtacgacatctgcttcagaaccctgaagctgaccacccccacctacggcgacctgaaccacctggtgagcgccaccatgagcggcgtgaccacctgcctgagattccccggccagctgaacgccgacctgagaaagctggccgtgaacatggtgcccttccccagactgcacttcttcatgcccggcttcgcccccctgaccagcagaggcagccagcagtacagagccctgaccgtgcccgagctgacccagcaggtgttcgacgccaagaacatgatggccgcctgcgaccccagacacggcagatacctgaccgtggccgccgtgttcagaggcagaatgagcatgaaggaggtggacgagcagatgctgaacgtgcagaacaagaacagcagctacttcgtggagtggatccccaacaacgtgaagaccgccgtgtgcgacatcccccccagaggcctgaagatggccgtgaccttcatcggcaacagcaccgccatccaggagctgttcaagagaatcagcgagcagttcaccgccatgttcagaagaaaggccttcctgcactggtacaccggcgagggcatggacgagatggagttcaccgaggccgagagcaacatgaacgacctggtgagcgagtaccagcagtaccaggacgccaccgccgaggaggaggaggacttcggcgaggaggccgaggaggaggcctag

SEQ ID NO: 253239 - DNA, 1281 bp, Artificial Sequence
  derived and/or modified sequence
atgttctgggaggtgatcagcgacgagcacggcatcgaccccaccggcacctaccacggcgacagcgacctgcagctggacagaatcagcgtgtactacaacgaggccaccggcggcaagtacgtgcccagagccatcctggtggacctggagcccggcaccatggacagcgtgagaagcggccccttcggccagatcttcagacccgacaacttcgtgttcggccagagcggcgccggcaacaactgggccaagggccactacaccgagggcgccgagctggtggacagcgtgctggacgtggtgagaaaggaggccgagagctgcgactgcctgcagggcttccagctgacccacagcctgggcggcggcaccggcagcggcatgggcaccctgctgatcagcaagatcagagaggagtaccccgacagaatcatgaacaccttcagcgtggtgcccagccccaaggtgagcgacaccgtggtggagccctacaacgccaccctgagcgtgcaccagctggtggagaacaccgacgagacctactgcatcgacaacgaggccctgtacgacatctgcttcagaaccctgaagctgaccacccccacctacggcgacctgaaccacctggtgagcgccaccatgagcggcgtgaccacctgcctgagattccccggccagctgaacgccgacctgagaaagctggccgtgaacatggtgcccttccccagactgcacttcttcatgcccggcttcgcccccctgaccagcagaggcagccagcagtacagagccctgaccgtgcccgagctgacccagcaggtgttcgacgccaagaacatgatggccgcctgcgaccccagacacggcagatacctgaccgtggccgccgtgttcagaggcagaatgagcatgaaggaggtggacgagcagatgctgaacgtgcagaacaagaacagcagctacttcgtggagtggatccccaacaacgtgaagaccgccgtgtgcgacatcccccccagaggcctgaagatggccgtgaccttcatcggcaacagcaccgccatccaggagctgttcaagagaatcagcgagcagttcaccgccatgttcagaagaaaggccttcctgcactggtacaccggcgagggcatggacgagatggagttcaccgaggccgagagcaacatgaacgacctggtgagcgagtaccagcagtaccaggacgccaccgccgaggaggaggaggacttcggcgaggaggccgaggaggaggcctag

SEQ ID NO: 253240 - DNA, 1248 bp, Artificial Sequence
  derived and/or modified sequence
atgagagagatcgtgcacatccaggccggccagtgcggcaaccagatcggcgccaagttctgggaggtgatcagcgacgagcacggcatcgaccccaccggcacctaccacggcgacagcgacctgcagctggacagaatcagcgtgtactacaacgaggccaccggcggcaagtacgtgcccagagccatcctggtggacctggagcccggcaccatggacagcgtgagaagcggccccttcggccagatcttcagacccgacaacttcgtgttcggccagagcggcgccggcaacaactgcctgcagggcttccagctgacccacagcctgggcggcggcaccggcagcggcatgggcaccctgctgatcagcaagatcagagaggagtaccccgacagaatcatgaacaccttcagcgtggtgcccagccccaaggtgagcgacaccgtggtggagccctacaacgccaccctgagcgtgcaccagctggtggagaacaccgacgagacctactgcatcgacaacgaggccctgtacgacatctgcttcagaaccctgaagctgaccacccccacctacggcgacctgaaccacctggtgagcgccaccatgagcggcgtgaccacctgcctgagattccccggccagctgaacgccgacctgagaaagctggccgtgaacatggtgcccttccccagactgcacttcttcatgcccggcttcgcccccctgaccagcagaggcagccagcagtacagagccctgaccgtgcccgagctgacccagcaggtgttcgacgccaagaacatgatggccgcctgcgaccccagacacggcagatacctgaccgtggccgccgtgttcagaggcagaatgagcatgaaggaggtggacgagcagatgctgaacgtgcagaacaagaacagcagctacttcgtggagtggatccccaacaacgtgaagaccgccgtgtgcgacatcccccccagaggcctgaagatggccgtgaccttcatcggcaacagcaccgccatccaggagctgttcaagagaatcagcgagcagttcaccgccatgttcagaagaaaggccttcctgcactggtacaccggcgagggcatggacgagatggagttcaccgaggccgagagcaacatgaacgacctggtgagcgagtaccagcagtaccaggacgccaccgccgaggaggaggaggacttcggcgaggaggccgaggaggagtag

SEQ ID NO: 253241 - DNA, 1308 bp, Artificial Sequence
  derived and/or modified sequence
atgagagagatcgtgcacatccaggccggccagtgcggcaaccagatcggcgccaagttctgggaggtgatcagcgacgagcacggcatcgaccccaccggcacctaccacggcgacagcgacctgcagctggacagaatcagcgtgtactacaacgaggccaccggcggcaagtacgtgcccagagccatcctggtggacctggagcccggcaccatggacagcgtgagaagcggccccttcggccagatcttcagacccgacaacttcgtgttcggccagagcggcgccggcaacaactgggccaagggccactacaccgagggcgccgagctggtggacagcgtgctggacgtggtgagaaaggaggccgagagctgcgactgcctgcagggcttccagctgacccacagcctgggcggcggcaccggcagcggcatgggcaccctgctgatcagcaagatcagagaggagtaccccgacagaatcatgaacaccttcagcgtggtgcccagccccaaggtgagcgacaccgtggtggagccctacaacgccaccctgagcgtgcaccagctggtggagaacaccgacgagacctactgcatcgacaacgaggccctgtacgacatctgcttcagaaccctgaagctgaccacccccacctacggcgacctgaaccacctggtgagcgccaccatgagcggcgtgaccacctgcctgagattccccggccagctgaacgccgacctgagaaagctggccgtgaacatggtgcccttccccagactgcacttcttcatgcccggcttcgcccccctgaccagcagaggcagccagcagtacagagccctgaccgtgcccgagctgacccagcaggtgttcgacgccaagaacatgatggccgcctgcgaccccagacacggcagatacctgaccgtggccgccgtgttcagaggcagaatgagcatgaaggaggtggacgagcagatgctgaacgtgcagaacaagaacagcagctacttcgtggagtggatccccaacaacgtgaagaccgccgtgtgcgacatcccccccagaggcctgaagatggccgtgaccttcatcggcaacagcaccgccatccaggagctgttcaagagaatcagcgagcagttcaccgccatgttcagaagaaaggccttcctgcactggtacaccggcgagggcatggacgagatggagttcaccgaggccgagagcaacatgaacgacctggtgagcgagtaccagcagtaccaggacgccaccgccgagggcggcggcctgtag

SEQ ID NO: 253242 - DNA, 1308 bp, Artificial Sequence
  derived and/or modified sequence
atgagagagatcgtgcacatccaggccggccagtgcggcaaccagatcggcgccaagttctgggaggtgatcagcgacgagcacggcatcgaccccaccggcacctaccacggcgacagcgacctgcagctggacagaatcagcgtgtactacaacgaggccaccggcggcaagtacgtgcccagagccatcctggtggacctggagcccggcaccatggacagcgtgagaagcggccccttcggccagatcttcagacccgacaacttcgtgttcggccagagcggcgccggcaacaactgggccaagggccactacaccgagggcgccgagctggtggacagcgtgctggacgtggtgagaaaggaggccgagagctgcgactgcctgcagggcttccagctgacccacagcctgggcggcggcaccggcagcggcatgggcaccctgctgatcagcaagatcagagaggagtaccccgacagaatcatgaacaccttcagcgtggtgcccagccccaaggtgagcgacaccgtggtggagccctacaacgccaccctgagcgtgcaccagctggtggagaacaccgacgagacctactgcatcgacaacgaggccctgtacgacatctgcttcagaaccctgaagctgaccacccccacctacggcgacctgaaccacctggtgagcgccaccatgagcggcgtgaccacctgcctgagattccccggccagctgaacgccgacctgagaaagctggccgtgaacatggtgcccttccccagactgcacttcttcatgcccggcttcgcccccctgaccagcagaggcagccagcagtacagagccctgaccgtgcccgagctgacccagcaggtgttcgacgccaagaacatgatggccgcctgcgaccccagacacggcagatacctgaccgtggccgccgtgttcagaggcagaatgagcatgaaggaggtggacgagcagatgctgaacgtgcagaacaagaacagcagctacttcgtggagtggatccccaacaacgtgaagaccgccgtgtgcgacatcccccccagaggcctgaagatggccgtgaccttcatcggcaacagcaccgccatccaggagctgttcaagagaatcagcgagcagttcaccgccatgttcagaagaaaggccttcctgcactggtacaccggcgagggcatggacgagatggagttcaccgaggccgagagcaacatgaacgacctggtgagcgagtaccagcagtaccaggacgccaccgccgaggagggcggcgtgtag

SEQ ID NO: 253243 - DNA, 1335 bp, Artificial Sequence
  derived and/or modified sequence
atgcgcgagatagtgcacatacaggcaggtcagtgcggtaaccagattggcgccaaattttgggaagtgatcagcgatgagcatggaattgatccaaccggcacctaccatggggattcagatctccagcttgaccgcatttccgtgtattacaatgaggccacggggggcaaatacgtgcccagagcaatcttggtggatctggagcctggaaccatggattctgtcagatcggggcccttcggtcagatcttccgccccgacaatttcgttttcgggcagtctggtgctggcaacaactgggcaaagggtcattacacagaaggtgcagagttagtcgattctgtgcttgatgtggtgcgcaaggaagccgaatcctgtgactgtctccaaggcttccagctgacacactcccttggaggaggtacaggatccggaatgggaacactcctgatctccaagattcgggaggaatatcccgatcgaatcatgaacaccttctcagtcgtaccctctcccaaggtttcagacaccgttgttgaaccttataatgctaccctttccgtacatcagctagttgagaacacagacgagacttactgcattgataatgaggccctgtacgacatctgctttcggacccttaagctcacgactccgacctacggagacctgaatcacctggtatcggcaactatgagcggtgtgactacctgccttcgtttccctggccaactgaatgctgacctaagaaaattggcagtgaatatggtcccttttcctcgactgcatttttttatgcccggcttcgctcccctgactagtagaggtagtcagcagtacagggctctgaccgtgcccgaactgacgcaacaggtgtttgacgctaaaaatatgatggctgcatgcgaccctcgccacggacgttaccttactgtagcggctgtcttccgaggccgcatgagtatgaaggaagtggacgagcagatgctgaatgtgcagaataaaaactccagctactttgttgaatggataccaaataacgtgaaaactgccgtatgcgacatccctccgagaggcttgaaaatggctgtgacatttattggaaatagtacagccatacaagaactcttcaaaaggatttccgagcaatttaccgccatgtttaggagaaaggctttcctccattggtatacaggagaaggcatggacgagatggagtttaccgaagctgagtccaatatgaacgatttggtgtcagagtaccagcagtaccaggacgcaacggccgaagaagaggaggatttcggggaagaggcagaggaggaggcatag

SEQ ID NO: 253244 - DNA, 1335 bp, Artificial Sequence
  derived and/or modified sequence
atgagggaaattgtccacatccaggctggccagtgtgggaatcaaatcggcgctaagttctgggaagtcatatccgatgaacatggcatcgaccccactggcacttatcatggagattccgatctgcagctagataggatatctgtgtattataatgaggctaccggtggaaagtacgtgccacgggccatcctcgtagacctggaacctgggactatggattctgtacggagcgggcctttcggtcagatctttcgccccgataacttcgtcttcggacagtctggtgcaggaaacaactgggctaagggtcactacactgagggcgccgaactggtcgactccgttctcgatgtcgtaagaaaggaggccgagagctgtgactgcctgcagggatttcaactcacccactccttagggggcggcactggcagcggtatgggaacgcttttgatctctaaaattagggaagaataccctgaccggatcatgaacactttctcggtagtgccatcaccaaaagttagcgacaccgtggttgagccctacaatgcaactctgtctgtccaccagctcgtggaaaacactgacgagacctactgtatagataatgaggcattgtacgatatatgtttcaggaccttgaagctcaccaccccaacgtacggggaccttaaccatctggtgagtgctaccatgagcggagtcacaacatgtcttcgtttcccggggcaactgaacgctgacctccgaaagcttgccgttaacatggtccccttccctcggctccacttctttatgccgggcttcgcccccctcacatccagggggtcacagcaatatcgcgctctcactgtgcctgagcttactcagcaggttttcgatgccaaaaacatgatggccgcgtgtgatccaagacacgggagatatctgacagtagctgcggtgtttcgtggccgcatgtctatgaaggaggtggatgagcagatgcttaacgtgcaaaacaaaaactcaagttacttcgtcgagtggatacccaataacgtaaagactgctgtgtgcgatatcccaccaagaggcctaaaaatggcggttacatttatcgggaatagcaccgctatccaggaactgttcaagcgaatcagcgagcagttcactgccatgtttcggagaaaggccttcctacattggtacactggcgagggaatggacgaaatggagtttaccgaggctgagagcaatatgaacgatctggtatcagagtatcagcagtatcaggatgcaaccgctgaggaggaggaggactttggtgaagaggcggaagaggaggcttag

SEQ ID NO: 253245 - DNA, 1281 bp, Artificial Sequence
  derived and/or modified sequence
atgttctgggaggtcattagtgatgagcacggaatcgatccgacaggtacataccacggcgacagtgacttgcaactcgaccgcatcagcgtctattataatgaagccaccggtggaaaatacgtgcctcgggcaatcctggtggaccttgagccaggtacgatggactccgttcgctctggcccattcggccagattttcagacccgacaacttcgtgttcggccagtccggggctggcaacaactgggcaaaagggcactacacagagggcgccgaactggtggattccgtattggatgttgtgcgcaaagaggccgaatcatgcgattgtctgcagggcttccagctgacgcactccctaggagggggaactggctcaggcatgggaacattactgatttccaagattagagaggagtaccccgacaggatcatgaacacattttctgtagtccctagcccaaaggtaagtgatacagtagtggagccgtataatgcaaccctgtccgttcaccagctcgtggaaaatacagacgaaacctactgcatagataacgaggcgctgtatgatatttgtttccgcaccttaaagttgacaacccctacctatggggacctcaaccacctggtgtcagccactatgagcggggtcacaacctgtctgaggttccccggccaactgaatgccgacctgcgaaagttggcagtcaatatggttcctttccccaggctccacttcttcatgcccggcttcgcccccttaacatccaggggctcacagcagtaccgagccctgaccgtcccagaactgacccagcaggtgtttgatgccaagaatatgatggccgcctgcgatcccaggcatggacggtacctcaccgtggctgcagtctttcgtggccggatgagcatgaaggaagtcgacgaacagatgcttaacgtgcagaataagaatagttcctactttgtggagtggatccctaacaacgtaaagaccgccgtatgcgacatacctccaagagggctcaagatggccgttacgttcatcggcaactccactgctattcaggaactttttaagcggatttcagaacaattcactgctatgttcaggagaaaggccttcctgcattggtatacgggcgaaggcatggatgaaatggagttcactgaggctgagtctaatatgaatgacctcgttagtgagtatcaacagtatcaggatgcaactgctgaggaagaggaagacttcggtgaagaagccgaggaagaagcatag

SEQ ID NO: 253246 - DNA, 1281 bp, Artificial Sequence
  derived and/or modified sequence
atgttttgggaggtgatttcagacgagcatggtattgatccaactggtacataccacggcgatagtgatttacagctggataggatttcagtgtattataacgaagctaccgggggtaagtatgtacctcgcgccattctagtagacttggagcctgggacaatggattccgtgcgttctggtcccttcggccagatctttaggcccgacaacttcgtcttcggacagtccggtgcaggcaacaactgggcgaagggccactacactgagggagctgaactggtggacagcgtgctggatgtagttcgaaaggaggctgagtcgtgtgattgccttcaggggttccagctcacgcatagcttgggaggaggcacaggttccggtatgggcaccctgctgatctctaaaattagagaagaataccctgatcgtatcatgaacacctttagtgtcgtcccctctccgaaagttagtgatacagtggtggaaccatacaacgccactctcagtgtgcatcagctcgttgaaaacacggatgagacgtattgcattgacaacgaggcactgtacgacatctgcttcagaacactcaaactgaccacgcctacatacggtgatctgaaccacctggtgtctgccactatgagtggcgtgacaacctgcttaagatttcccggtcagcttaacgctgaccttcggaaactggccgtgaatatggttccattcccacgtctccacttttttatgccaggatttgcccccctcacttccaggggttcccagcagtatcgcgcactgaccgtgccagagctcactcagcaggttttcgatgctaaaaacatgatggccgcctgcgacccaaggcacggacgttatctgaccgtggccgccgtttttcgggggaggatgtctatgaaagaagttgacgagcagatgctgaacgttcagaacaaaaattcttcctattttgtagagtggatccctaacaacgtgaagaccgctgtttgtgacattcctcccaggggtctcaaaatggctgttactttcattgggaacagcacggcaatacaggaattattcaaacggatcagtgaacagttcaccgcaatgttcagacgaaaagccttcctccactggtatacaggcgagggaatggatgagatggagtttactgaggccgaatctaacatgaacgaccttgtcagcgaataccaacagtatcaggacgccactgcagaagaggaggaggactttggcgaggaggcggaggaagaagcgtag

SEQ ID NO: 253247 - DNA, 1281 bp, Artificial Sequence
  derived and/or modified sequence
atgttttgggaggtcatctcggacgagcatggaattgatccaaccgggacttaccatggagactctgatctccagttggaccgtatttccgtttattacaacgaagccacaggtggtaagtacgtccctcgggcaatactggtggatttggagcccgggacgatggattcagtgcggagtgggcccttcggacagatcttccggcccgataattttgtgttcggccagagtggcgccggtaacaactgggctaaagggcattacactgagggcgccgaactggtggattctgttctagacgtggtgaggaaagaggctgaatcttgcgactgcttgcagggcttccagttgacacacagcctcggcggtgggactgggagtggaatgggcaccctcttaatctccaagatacgcgaggagtacccagatcgcattatgaatactttctcggtggtgccgagtcccaaggtgagtgataccgtagttgaaccctacaacgccacactgtctgtccaccagttggtcgagaacaccgacgagacctactgtattgacaatgaagccctttatgatatttgttttcggacccttaagctgaccacaccgacttacggagatctcaatcacttagtgtctgccactatgagtggggtgacgacatgcttgagatttcctgggcagcttaacgccgaccttaggaaattggcagtgaatatggtgccctttcctcggctgcatttctttatgcctggcttcgctcctctgaccagcagagggtcacagcagtacagagcgcttaccgtgcccgagctgacacagcaggtgttcgacgcaaaaaacatgatggccgcttgtgatccgaggcacggcagataccttacggtggccgccgtgtttaggggtaggatgtctatgaaggaagtggatgaacagatgttgaacgtgcagaataaaaacagttcgtactttgtcgaatggatcccaaacaatgtgaaaaccgccgtctgcgatatcccacctagagggctgaagatggctgtgacctttatcggaaattctactgccattcaagaactgtttaagcgcattagtgagcagttcacggcaatgtttcgcaggaaggcattcctacattggtatacgggagaaggcatggatgagatggagtttaccgaggccgaaagtaacatgaacgacctggtgagcgagtaccagcagtatcaggatgccacagcagaggaagaggaggacttcggagaagaagctgaagaggaggcctag

SEQ ID NO: 253248 - DNA, 1281 bp, Artificial Sequence
  derived and/or modified sequence
atgttttgggaggtgattagcgacgagcatggcatagacccaaccgggacctatcacggcgattctgatttgcagttagaccgcataagtgtttattataatgaggccactggaggtaaatatgtcccccgcgctatactggtcgatctcgagcctggaaccatggacagcgtcaggtccgggccattcggacaaatctttcggccggataacttcgttttcggtcagagcggggctgggaataactgggctaaggggcactacactgaaggagctgaacttgttgattctgtcctcgatgttgttcgcaaagaggctgaatcctgcgattgcctgcaggggtttcagttgacgcacagcctaggagggggtacgggaagcggaatggggactctcttgattagtaagataagagaggaatatcctgacaggataatgaacaccttttctgtggtgcccagtcccaaggtcagtgatactgttgtggagccctataatgccactttgtccgtccaccagctcgtggaaaatacagatgaaacctactgtatcgacaacgaggcgctatatgacatatgctttcggacactgaagctaacaacccctacgtatggagatttgaatcacctggtgagcgcgacaatgtcaggcgtgactacatgtctcagatttcccgggcagctaaacgctgacctgagaaagctggccgtcaatatggtaccctttcccagactacactttttcatgcccgggtttgcgccattgacgagccgcggcagtcagcagtatcgcgctctgactgttcctgaattaacccagcaggtattcgacgcaaagaacatgatggctgcatgtgaccccagacacgggcggtatctcaccgttgccgcagtgtttaggggccgcatgagtatgaaggaagtggacgagcagatgctgaacgtccaaaacaaaaattccagctacttcgttgagtggatcccaaataacgttaaaaccgccgtatgcgacatcccgccacggggattgaagatggcagtaacatttatcgggaattccactgccatccaggaactcttcaaaagaatttctgaacaattcaccgcgatgttccgacgtaaggcttttttacactggtataccggcgaaggaatggacgagatggagttcacggaggctgagtccaatatgaatgatctggttagcgagtaccaacagtaccaggatgccacggctgaggaggaggaggattttggggaggaggcagaagaggaggcatag

SEQ ID NO: 253249 - DNA, 1335 bp, Artificial Sequence
  derived and/or modified sequence
atgagggaaatcgttcacattcaagctggacagtgcggaaatcaaatcggcgctaaattttgggaggtaattagcgacgagcacggcattgaccccacaggaacctatcatggtgacagcgacctgcaactcgatagaatcagcgtatattataacgaagctacagggggtaaatacgtgccacgagcaatccttgttgacctggagcctggtaccatggacagtgttaggtctgggccattcgggcaaattttccgacccgacaatttcgtgttcggacagagcggcgccggcaacaactgggccaagggtcactatacagaaggggctgaactcgttgacagcgtcttggacgtggtgcgcaaagaggcagaaagttgcgactgtttgcagggcttccaactgacccattcattgggcggaggcacgggatccggaatgggaacgctcttgattagtaaaattcgcgaggagtatcctgatcgcatcatgaatacctttagtgtggtgccgagccccaaggttagcgatactgtggtggaaccctataacgctacactgagcgtccaccaactagtggagaataccgatgagacctattgtatcgataatgaagctctctacgacatctgtttcagaactctgaagctaacaacccctacatatggcgacttaaatcatctcgtgtctgcaaccatgagcggcgtgaccacttgtctacgctttcctggtcagctgaatgccgaccttcgcaaattagccgttaacatggtgccctttccaagattgcattttttcatgccagggttcgcccccctgacttctcgcgggtcccagcaatatcgcgctctgactgtccctgagctaacgcagcaggtcttcgatgctaagaatatgatggccgcctgtgatcctagacacggccggtacctcacagtcgctgcagtcttccggggacggatgagcatgaaagaagttgacgaacagatgctcaacgtacagaacaaaaattcctcctattttgtcgaatggatcccaaacaatgtgaagaccgcagtttgtgacattcccccccgcgggcttaagatggctgtaacctttatcggcaattctaccgcgatccaggagctattcaagcggatctcagaacagtttacggccatgttccgccgcaaagcctttctgcactggtacaccggtgagggcatggatgagatggagttcaccgaggctgagtctaatatgaatgacctggtttcagaataccagcagtatcaggacgccacagctgaggaagaggaagatttcggagaagaagcagaggaagaagcttag

SEQ ID NO: 253250 - DNA, 1281 bp, Artificial Sequence
  derived and/or modified sequence
atgttctgggaggtcatttcagacgaacacggcatagaccccactggaacatatcatggtgattctgaccttcagttagatcggattagcgtttattataacgaggctacagggggaaagtacgttccacgcgctatcttggtggaccttgaacctgggactatggattcggtccggtccgggccctttggacagatttttcgccctgataacttcgttttcggtcagagcggagccggaaataactgggccaaagggcattacactgagggcgctgagttggtcgacagcgttcttgatgtagtcaggaaagaggcagagtcgtgtgactgccttcaagggtttcagctgactcacagcctgggcggcggaacgggctctgggatgggaaccctgctcatctcaaaaattcgcgaggaatacccggaccgcattatgaacactttctccgtagtgccaagtccaaaggtgtccgatactgtggtcgagccttacaatgcgactttgtctgttcaccagctggtggagaatactgatgagacgtactgtatcgataatgaggccctgtacgatatctgctttagaacactgaagctaacaacaccaacatatggtgatctaaatcacttggtgtctgcgactatgtcgggtgtgacaacttgtctgagattcccgggccagctcaatgccgatctccggaaattagctgtaaacatggtgccatttccacgccttcacttcttcatgccgggcttcgcaccgctgacttctagaggaagccaacaataccgagcactgacagtcccagagttgacccaacaggtattcgatgccaagaacatgatggcagcctgcgatcctcggcacggaagatatctaactgtggctgctgtgtttcggggtcggatgtctatgaaagaggtggacgagcaaatgcttaacgttcagaataaaaactcttcttattttgttgaatggatccccaacaatgttaagaccgcagtttgcgacatccctccaaggggactcaagatggcagtaaccttcatcggaaattctacggctattcaggaactctttaagcggatctcagagcagttcacagcgatgtttcgcagaaaggcttttcttcactggtacaccggtgaggggatggacgagatggagttcactgaggccgagagcaatatgaatgacctcgtcagtgaatatcagcagtatcaggatgctacagccgaagaggaggaagacttcggagaagaggcagaagaggaggcctag

SEQ ID NO: 253251 - DNA, 1335 bp, Artificial Sequence
  derived and/or modified sequence
atgcgggagattgttcatatccaagcaggacagtgcggaaaccagattggcgccaagttttgggaagtgatttctgacgagcacggcatcgatcccactggcacgtaccatggcgacagtgatctccagcttgacagaatctcagtgtattataatgaggcaacgggtggaaagtacgtgcctagggccatactcgtcgatctcgaacccggaactatggactcagtacggtcaggaccctttggacagattttccgccctgataactttgtctttggccaaagtggcgcaggaaacaactgggccaagggtcattataccgagggcgccgagctcgtagattccgtccttgacgttgttcgaaaggaggcagaatcctgcgattgtctccaggggtttcagctgacacactccttaggaggaggcactggcagtggcatgggaacacttctcatctctaaaatacgagaagagtaccccgaccggataatgaatactttctccgtagtgccttctcctaaggtctctgatacggtagttgagccctataacgctactctgagcgtccatcaactcgtcgaaaatacggacgagacatattgtatagacaatgaggccttgtacgacatctgcttccgcacattgaagctgacgaccccaacttacggcgaccttaatcacctggttagcgcaacgatgagtggcgttactacctgtctgagattcccgggccagctgaacgcagatctccgcaaactggcagtaaatatggtgccctttccgaggctgcattttttcatgccaggctttgcccccctcacctctcggggatcacagcagtaccgcgccctgacagtgcccgaactgactcaacaggtttttgatgctaagaacatgatggccgcctgtgatccaagacacgggcgatacctcacagtggcggccgtgttccgggggcgcatgagtatgaaggaagtagacgaacagatgctcaacgtgcagaataaaaatagctcatattttgtggaatggatccctaacaacgtcaagaccgcagtttgcgatattccaccaagggggctcaaaatggccgtcaccttcattggcaactccaccgctattcaggagctgttcaaaagaatttccgagcaattcaccgctatgttccgccgcaaggcctttttgcactggtataccggtgagggaatggatgagatggaatttaccgaggctgaatccaacatgaacgacctggttagcgaatatcagcagtaccaggacgccactgcagaggaggaagaggatttcggggaagaggcagaggaggaagcctag

SEQ ID NO: 253252 - DNA, 1335 bp, Artificial Sequence
  derived and/or modified sequence
atgcgcgagatagtgcatatccaggctggacagtgtggtaaccaaatcggggctaaattctgggaggtaataagcgacgagcacggaatcgaccccactgggacatatcacggtgactcggatctccagctcgaccgcattagtgtatattataatgaggccactggtggtaaatatgttcccagagccatcttagtggaccttgagccagggactatggattctgtaagatctggccctttcgggcaaattttccggcctgataactttgtgttcgggcagagcggtgctggtaataactgggcaaagggtcattatactgagggagccgagctggtggatagtgtcctggatgtcgtaagaaaggaggcagaatcgtgcgattgtctacagggcttccagcttactcattccctggggggcggtacagggagcggtatgggcacgcttctcatttccaaaatcagggaagagtatcctgacagaataatgaatacatttagcgtggtcccatcccccaaggtgtccgacacagtggtagagccatataacgccacactgtcggtccatcaactggtggaaaacaccgatgagacctattgcattgataatgaagccctgtatgatatctgcttcaggaccctgaagctgacaactccaacctatggagatctaaatcatctcgtgtccgcaacaatgtctggagtgactacctgtctcaggtttccgggacaactgaatgctgacctcaggaaactggccgtgaatatggtgcccttccctagattacatttcttcatgcccgggttcgctcctctgaccagtcgtggcagtcaacaatacagggctctcacagtccctgaactcacgcagcaggtgtttgacgctaagaacatgatggctgcttgtgaccccaggcacggccggtacctcacagtagctgctgtgtttcggggcagaatgagtatgaaagaagttgacgaacagatgttaaatgtacagaacaagaactcttcttatttcgttgaatggatcccaaataacgttaagaccgcagtttgcgatatccccccccgcggcctaaaaatggcagtcacttttatcggaaactcaaccgccatccaagagctcttcaagaggatttctgagcaattcaccgctatgttcagaaggaaggcatttctccactggtatacaggcgagggaatggacgagatggagtttacagaggctgagtctaatatgaacgatcttgtgtctgagtatcagcaatatcaggatgctaccgccgaagaggaggaggactttggcgaagaggctgaagaagaggcttag

SEQ ID NO: 253253 - DNA, 1335 bp, Artificial Sequence
  derived and/or modified sequence
atgcgggagatcgtgcacattcaggctggacaatgcgggaatcagatcggcgcaaagttctgggaggtgatttcagacgaacatggcatcgatcctacagggacgtatcatggagattccgacctccagctcgatcgcatatcagtgtattacaacgaggctaccgggggaaagtacgttcccagagctatcctggtcgatcttgagcccggcacaatggacagtgtgcggagtggaccttttgggcaaatctttcggcccgacaactttgtcttcggccagtccggagccgggaataactgggccaaggggcactacaccgagggcgctgagctcgttgactctgtccttgatgtggttcgtaaggaagccgagagctgtgattgtctccagggcttccagctaactcacagtctcggcggaggcaccggatctgggatggggacactcctcatttctaagattagggaggaataccccgacagaatcatgaacaccttttctgtagtgcctagcccaaaggtctcggatacagtcgtcgaaccttacaatgccacattgtctgttcaccagcttgttgaaaataccgatgagacatactgcatagataacgaggccctatacgacatttgtttcagaacattgaagttaacaaccccgacgtacggcgacctgaatcacctggttagtgcaacaatgagcggcgtgacaacctgcctgcggttcccaggacagctcaacgcagatctgcgaaaactcgccgtcaacatggtgccttttccgcggctgcactttttcatgcccggcttcgcaccgctgacatcacgcggttcccaacagtatcgcgctctgacagtcccggagctgacacagcaggtgtttgatgctaagaacatgatggccgcctgtgacccccggcacggacggtatctcaccgttgccgctgtgtttcggggcagaatgtcaatgaaggaggtggatgaacagatgctgaatgtccagaacaagaattcttcctacttcgttgaatggatcccaaacaatgtgaaaaccgcagtctgcgatattccgcctagaggtctgaagatggctgtgacattcattggaaacagtactgctattcaggaactgttcaagcgtatctctgaacagttcaccgcgatgttccggcgtaaagccttccttcactggtatacgggagaagggatggatgagatggagtttactgaggccgaatctaatatgaacgacctggtgtctgagtatcagcagtatcaagacgcgaccgccgaggaggaagaggacttcggcgaggaggcggaggaggaagcatag

SEQ ID NO: 253254 - DNA, 1281 bp, Artificial Sequence
  derived and/or modified sequence
atgttctgggaggtcatttctgacgaacatggtattgacccaacgggtacataccacggggattctgacttacagttggataggatttccgtgtactacaatgaggctactggcggaaaatatgttccgagagcaatactggtggacctggaacctggtactatggactcggtacggtctggacctttcggccagatatttcgccctgacaatttcgtcttcggacagagcggcgctggtaacaattgggcgaaggggcattacaccgagggagccgagctcgtggattcagtcctggacgtcgttcggaaggaggctgaatcttgtgattgcctacaagggttccaactaacacactcactgggggggggtacggggtccggtatgggcaccctgctcatcagcaaaataagagaagaatatcctgacagaatcatgaatacgttcagtgtggtcccttctcctaaggtgtccgacacagtggtggagccttacaatgccaccttgtcagtccaccagttagtcgaaaacacggatgagacctactgcatcgataacgaggcgttatacgacatctgctttcgtactctgaagctgaccacacctacttacggtgacctgaatcaccttgtgagtgctacaatgagcggcgttaccacttgcctacgctttccgggccagctaaatgcagacttacgcaagctcgctgtaaacatggtgccatttcctcgactgcacttttttatgcccggcttcgctcctctgacatctaggggctcccagcaatatagagcccttacggttcccgaactgacacagcaggtgttcgatgcaaaaaacatgatggctgcatgtgacccacgccacggaaggtaccttaccgtcgccgccgtgttcaggggccgcatgtccatgaaggaagtggacgagcagatgctcaatgtgcagaataagaatagcagctactttgtggagtggattccaaacaatgttaaaacagcggtgtgtgatatacctcccagaggtttaaagatggctgtcacatttattggcaattcaaccgccatccaggagttatttaagcgtatttccgagcagttcactgcaatgttcaggagaaaagcatttctgcattggtatacgggggaagggatggacgaaatggaatttactgaagctgagagcaacatgaacgatttggttagcgagtatcaacagtaccaagacgctacggccgaagaagaagaggacttcggagaggaagcggaagaggaggcatag

SEQ ID NO: 253255 - DNA, 1281 bp, Artificial Sequence
  derived and/or modified sequence
atgttttgggaggtgatttctgacgagcacggcattgatccgaccggaacctaccatggggactctgacctgcagctcgatcgtatctctgtctactataacgaggcgacaggcgggaaatatgtgccccgagccatcctggtagaccttgagcctggaacaatggactctgtgaggtctggtccattcggtcagatcttccgccctgataactttgtcttcggacagagcggcgctggcaacaattgggcaaagggccactacactgaaggagctgaactcgtggatagcgtattggacgtcgttagaaaggaggccgagtcttgcgactgtcttcaaggcttccagctcacgcattccctgggcggcggcacaggatcaggcatgggcacgctgctgattagcaaaattagagaggagtacccggacagaattatgaatacgttttcagtggtgccctctccgaaggtgagtgatacagttgtggaaccatataacgctaccttaagtgtgcaccagctggttgagaacacggacgagacttattgtatagataatgaagccctctatgatatctgctttcggacactgaaattgaccaccccaacatacggcgaccttaatcatctcgtctctgccacaatgtcaggagtgacgacttgcctgagattccctggccaactgaacgccgacttgcgtaagttggccgtgaacatggtgcccttcccccgcttgcactttttcatgccaggctttgccccacttacctcgcgcggcagccaacagtatcgagcccttacagtgcctgaattgactcaacaggtgtttgacgctaaaaatatgatggccgcctgcgatccccgtcacggacggtacctcaccgtggctgctgtcttccggggtcggatgagcatgaaggaggtggacgagcaaatgctcaacgttcagaacaaaaattcttcatattttgttgagtggattcccaataacgtcaaaactgcagtgtgcgatatcccccctcgtggtctcaaaatggcagtcacattcatcggaaacagtaccgcgatccaggagctgtttaagaggatcagcgagcagttcaccgccatgtttcgaaggaaagcgttcttgcattggtacactggtgagggcatggacgagatggaattcacagaggccgagtccaatatgaacgatctggtgagcgaataccaacagtatcaagatgccaccgcagaagaagaggaagattttggcgaggaggcagaggaggaggcttag

SEQ ID NO: 253256 - DNA, 1281 bp, Artificial Sequence
  derived and/or modified sequence
atgttctgggaagtgatctccgatgagcatgggatagaccccactggcacttaccacggagattctgacctgcagctggatcggatctctgtgtactataatgaggcaacgggaggtaaatacgtcccccgagctattctggtggaccttgaaccaggcaccatggactccgtgagatctggaccctttggccaaatcttccgacccgacaacttcgtcttcggacagagtggggccggcaacaattgggcaaaaggtcattatacagagggggccgaacttgtggattccgtgttggatgtcgtgcgcaaagaagctgagagttgcgactgcttgcaaggcttccagctcacccactcattggggggcggaactggttcagggatgggcacacttctcatatctaagatacgggaggagtaccctgacagaattatgaataccttctccgtagtgccttcgcccaaggtaagcgacacagtggtggaaccatacaatgccaccctcagtgttcaccaacttgtggaaaacacggatgaaacgtactgcattgacaatgaggccttatacgacatctgcttccgcaccctgaagctcacgacgccaacatacggtgacttgaaccatctagtaagtgcaactatgtctggggttacaacctgccttcgcttcccaggccaacttaatgccgacctgcggaaattggccgtcaacatggtccccttccccaggctccacttcttcatgccgggttttgcgccattgacgagccgcggcagtcaacagtacagagccttgacagtgcccgaactcactcaacaggtttttgatgctaagaacatgatggctgcctgtgacccgaggcacggccgctacctcacggttgcagccgtctttagggggcgcatgagcatgaaggaagtggatgagcaaatgctgaatgtgcaaaacaaaaatagctcctatttcgtggaatggatccccaacaacgtcaagaccgctgtatgcgacatcccaccccgtgggctgaaaatggcagtaaccttcatcggcaactctacggccatccaggagctgtttaaacgcatctcagagcagttcacagcgatgttccggcgtaaggcattcttacactggtacacaggagagggcatggatgagatggaattcaccgaggcagagtcaaacatgaacgacctggtctccgagtaccagcagtaccaggacgccacagctgaggaggaggaggatttcggggaggaggcagaagaggaggcctag

SEQ ID NO: 253257 - DNA, 1335 bp, Artificial Sequence
  derived and/or modified sequence
atgagggagatagttcatatccaggcagggcagtgcggaaaccagataggtgcgaagttctgggaagtcataagtgatgaacatgggattgatccaacagggacctatcatggagattctgacctacagctggataggatctctgtatattacaatgaggccacgggaggtaagtacgtccctcgagctatcctcgttgatctggaacctgggacaatggactctgtacggagtggtccctttggccagatatttcggcctgataattttgtgttcggccagtccggggcaggcaacaactgggctaaaggacattacaccgaaggcgccgaactggttgactcggttctcgatgtggtgagaaaagaggccgagagctgcgactgccttcagggctttcagctcacccatagcctgggtggtgggacgggcagcggcatgggcacactgctcatctcaaaaattagagaagagtacccagaccggattatgaataccttctcagtagtgcctagtcctaaggtcagcgataccgttgtcgagccatataatgccactttgagcgtgcatcaactggttgagaacacggacgagacttattgcattgataatgaggcactctacgacatctgcttccgaactctcaaattgaccaccccaacctacggggatctgaatcacctggtaagcgccacaatgtctggagtgaccacatgtctgcgcttccccggacaactgaacgctgaccttagaaagcttgcggtaaatatggtcccatttccaagactccacttttttatgcctgggtttgctcctctgaccagtcgagggtcccagcagtatagggcgctgacagtccctgagctgacccaacaggtattcgacgcaaagaacatgatggcggcctgcgatcccaggcacggccggtacttgactgtggctgccgtgtttagaggtcgcatgtcaatgaaggaggtcgacgagcagatgctaaacgtgcagaacaagaacagcagctactttgttgagtggattcctaataacgtaaagactgcagtgtgtgacatcccacctcgggggcttaagatggctgttactttcattggcaacagcaccgccatccaggaacttttcaagaggatcagtgagcagttcaccgccatgttcaggagaaaagctttcctccattggtatactggcgaggggatggatgagatggagttcactgaagcagagtctaatatgaatgacctagtttctgagtaccagcagtatcaggatgccacagcagaggaggaagaggatttcggggaggaggcagaggaggaggcttag

SEQ ID NO: 253258 - DNA, 1335 bp, Artificial Sequence
  derived and/or modified sequence
atgcgggaaatcgtgcatatccaggctgggcaatgcggaaaccagatcggagcaaaattttgggaggtcatttctgacgagcacggcattgatccgacaggaacctaccatggcgacagcgacctgcagctggacaggatctcagtgtattataacgaagctacggggggaaagtacgtgccccgcgcaatcctggtggatctggagcccgggacgatggacagcgttagatctggcccatttggccaaatttttcgtccggacaacttcgtattcgggcagtccggcgcaggaaataactgggcaaaagggcactacactgagggtgccgagctggtcgactccgtattagacgtcgtgagaaaggaggcagaatcctgcgattgcctgcagggcttccaattgacccattcgctgggcgggggtacaggcagtggaatgggcactctgctgattagcaagattcgcgaagaatatccggatagaatcatgaataccttctctgtggtgccctctcccaaagtctcagataccgtggtggaaccctacaacgcgacgctgagcgtccatcagctcgtagagaataccgatgaaacctactgcattgataacgaggccctatatgacatttgctttcgaaccttgaagctcacaacacccacttatggcgacttgaatcacctggtgagtgccaccatgtcaggcgtaacaacctgcctgagatttcctgggcagctgaatgccgacctgagaaaacttgccgtgaacatggtgccttttcccagactgcacttctttatgccgggcttcgcccctctgacgagcaggggaagccagcagtaccgcgctttaacagtccccgagctgacccaacaagtcttcgacgctaaaaacatgatggccgcctgtgacccaaggcatggaagatatctgacagtggccgctgtgtttcgcgggagaatgagtatgaaggaagtcgacgaacaaatgctgaacgtgcagaacaaaaacagctcttactttgtggagtggattccaaataatgttaaaacagctgtctgtgatattcccccccggggactgaaaatggctgtaacattcattggcaatagtaccgcaatacaggaacttttcaaacgcatttctgagcagtttacagctatgttcaggcgtaaggcgtttctgcattggtatacaggcgagggcatggacgagatggaattcaccgaggcagaatcgaacatgaacgacctagtctccgagtatcagcagtatcaggacgctaccgcagaggaagaggaagattttggggaagaagctgaggaagaagcatag

SEQ ID NO: 253259 - DNA, 1248 bp, Artificial Sequence
  derived and/or modified sequence
atgagagaaatcgtccacatccaggctggacaatgtggcaatcaaattggagcaaaattttgggaggtaatctccgacgaacatggcatcgatcccaccgggacctaccacggcgatagtgacctccagcttgataggatctctgtctactacaacgaagccaccggcggcaaatatgtgccccgcgccatcctcgtggacctcgagcctgggactatggactccgtgcgttcgggccccttcgggcagatctttcgtccagataacttcgtttttgggcaaagcggggccggaaacaattgcctccaggggtttcaattgacccactctctgggcgggggaacagggtcagggatggggaccttgctgatcagtaagatccgcgaggagtatccggaccgtattatgaacaccttttctgtggttcctagcccaaaagtcagcgatacagtcgtggaaccttataacgcgacgctctccgtgcaccagttggtggagaacaccgacgagacttattgtatcgacaatgaggctctttacgacatttgtttccgcactttgaagcttaccactcctacgtatggagatcttaaccacctcgtgtccgccacaatgagcggagtgaccacatgccttagatttcctgggcagttaaatgccgacttgcgaaaactggctgtcaatatggtgcccttcccaaggctgcatttttttatgccagggtttgcacccttgacgagtagggggtctcagcagtaccgtgcattaaccgtgccggaacttacacagcaggttttcgatgcaaagaacatgatggccgcatgcgaccctagacacgggcggtatctgactgtggcggcagtattcaggggaaggatgtccatgaaggaggtagacgagcaaatgctcaatgtgcagaataaaaattccagctactttgtcgagtggattccaaataatgtcaaaacagccgtatgcgacatcccgcctcggggcctgaagatggcggtgaccttcattgggaattccactgctattcaagagcttttcaaacgaattagcgagcaattcaccgctatgttccgtcgtaaggcttttctgcattggtacacaggagaaggaatggatgaaatggagttcacagaggcagaatctaacatgaatgacctggtaagcgagtaccagcagtaccaggacgccacggctgaagaggaggaggatttcggtgaagaagctgaagaggaatag

SEQ ID NO: 253260 - DNA, 1308 bp, Artificial Sequence
  derived and/or modified sequence
atgagggagatcgtgcacatacaggccgggcagtgtggcaaccagatcggagccaagttctgggaggtaatttcggacgagcatggaatagacccaacaggcacgtatcacggcgacagcgacctgcagctcgaccggattagcgtctactacaatgaagccaccggcgggaagtacgtgcctagagcaatcctggtcgatctggagcccgggactatggacagcgtccgttccgggccttttggacagattttccgcccagataattttgtgtttggacagtcaggcgctggcaataactgggcaaaggggcattatactgagggtgccgaactggtggacagcgttctggacgtggttcgcaaggaagcggagagctgtgattgtctgcaaggattccaactgacacacagtctgggcggcggtacaggatcgggtatgggcaccttactgattagcaagattcgggaagagtacccggacagaattatgaacaccttttccgtcgtgcccagccctaaagtgtctgacaccgtggtggaaccctacaatgctacgctgtccgtgcaccagctagttgagaacaccgacgaaacctactgcatagacaatgaagccttatacgacatttgcttcagaactttgaagttaactacccctacttatggcgatctgaatcaccttgtgtccgccaccatgagtggcgtgacaacatgcctgcggtttccaggtcagttgaacgcggatctccgaaaactggctgtgaacatggtcccctttcctcggctgcacttcttcatgcccggatttgcccctctgactagccgtgggtctcaacaatatcgcgccctgactgtccctgaactgactcagcaagtttttgatgccaagaatatgatggccgcttgcgatcctcggcacggccggtatctcacggtcgcagcagtgttcagagggaggatgagcatgaaggaagtcgacgaacagatgctcaatgtgcagaataagaatagttcgtactttgtagagtggattccaaacaatgtcaagactgccgtgtgcgacattccgccaagaggtctcaaaatggcggtgactttcattggaaattcaaccgctattcaggaactatttaaaaggatatctgagcaatttactgccatgtttcgtcgcaaggcctttctccattggtacactggggagggaatggacgagatggagtttaccgaagccgagagcaatatgaatgacctcgtgagtgaatatcaacaatatcaggacgccaccgcagagggcggagggttgtag

SEQ ID NO: 253261 - DNA, 1308 bp, Artificial Sequence
  derived and/or modified sequence
atgcgggagatcgttcatatccaagccgggcagtgcggcaaccaaattggcgctaaattctgggaggtcatttccgacgagcacggcattgaccccacaggcacataccacggggatagcgatctccagctggacagaatatcagtatactataacgaggcaaccgggggcaaatacgtacctcgcgctatactcgtggatctggaacctggaacaatggattccgtgcggagtggtccgttcggtcagatctttcggcccgataattttgtgttcggccagagtggcgcgggcaacaattgggcaaaaggccattacactgagggtgctgaactcgtcgactcggtcttagatgttgtgcgaaaagaagcagagagttgtgattgccttcaaggtttccaactaacccacagcttaggcggaggtaccgggagtggcatggggaccctgctgattagtaaaattagggaggaatacccagatagaatcatgaacacgttcagcgtggtcccatcacccaaagtgagcgatacagtggtggagccttacaacgccaccctgtccgttcatcagctggtcgagaacacagatgaaacttattgtattgataatgaggcactctacgacatttgctttcgcaccctaaagctcacaacccctacctacggtgatcttaatcacctcgtgagtgcaacaatgtcaggcgtaacaacctgccttagattccccggacagttgaacgccgatttgcgcaaattggcggttaacatggtaccctttccccggttgcattttttcatgccgggttttgcacccttgacctctcggggcagccaacagtacagggcactcaccgtgcccgaacttacccagcaggtgtttgacgctaaaaacatgatggccgcttgcgatcccaggcacggtagatacctgactgtcgctgccgtgtttagaggtaggatgtctatgaaagaggtggatgaacagatgctcaacgtgcagaataagaactcatcttattttgtggaatggatacccaataacgtgaaaaccgccgtctgtgatattccgcctcggggactgaagatggcggtcacctttattggcaattctacagcgatccaggaattatttaagcgaatcagcgaacaatttactgctatgttccgccgcaaggctttcctccattggtacaccggagaggggatggacgaaatggaatttacggaggctgagagcaatatgaacgatctggtctctgagtatcagcagtaccaagacgcaacagccgaaggcggaggcctgtag

SEQ ID NO: 253262 - DNA, 1308 bp, Artificial Sequence
  derived and/or modified sequence
atgagggagatcgtgcacatccaggcaggtcagtgcggaaaccagataggagctaagttttgggaggtgatctccgatgagcacgggatagatcccaccggcacttatcacggcgactccgacctgcagctggaccggatttctgtctactacaacgaggcgacaggcgggaagtacgtgccacgcgccatcctggtcgatctcgagcccggcactatggactccgtgaggagcggacctttcggccagatctttcgtccagacaatttcgtgttcgggcagagcggcgcaggaaacaattgggctaagggacactacaccgagggcgcggagctcgtcgactccgttctggatgtggttcgtaaggaggccgagtcctgcgattgcctacaggggttccagctgactcactcgttgggcggcgggacgggttccggaatgggtaccctccttatttccaaaatccgggaggaatacccagatcgcattatgaatacattctccgtggttccatccccaaaagtgtccgacaccgtggtggaaccatacaatgcaacactgtcagtgcatcagcttgtggagaacaccgacgagacatactgtatcgataacgaggctctgtatgatatttgcttccgaacattaaagctgaccacccccacatacggcgatctcaaccatttagtgtccgccacaatgagtggggtgaccacctgcttgcggtttcccggacagcttaacgccgatctcaggaaactcgcagttaacatggtgccatttcctaggttgcatttcttcatgccaggattcgccccgctgacatcgagaggaagtcaacagtatcgtgccctcactgtaccagagctcacacagcaggtgttcgacgctaagaacatgatggctgcatgtgaccctagacatggcagatatttgaccgtggccgcggtgtttagagggcggatgtcaatgaaggaagttgacgaacagatgctgaatgtccagaataaaaactcaagctactttgttgaatggatcccaaacaatgttaagaccgcagtgtgtgatattccacccagaggtttgaagatggcagtgacattcatcgggaacagcactgccatccaggaactcttcaagagaattagtgagcagttcactgctatgtttaggcggaaagcatttctgcactggtacacaggcgagggtatggacgagatggagttcaccgaggcagagagcaatatgaacgatctggtaagcgagtatcaacagtatcaggacgctaccgccgaaggtggcggcctatag

SEQ ID NO: 253263 - DNA, 1248 bp, Artificial Sequence
  derived and/or modified sequence
atgagggaaatcgtgcacattcaagctggccaatgcgggaaccagatcggggctaagttttgggaggttatatctgacgaacatgggattgacccaacaggaacataccatggcgatagtgatcttcagttagacagaatctcagtgtattataacgaggcaaccggcgggaagtacgtgccaagggcgattctggtggacttggagcctggcacaatggatagtgtgcgaagcgggccttttggtcagattttcaggccagataatttcgtgtttggccagtctggtgctgggaataattgcttgcagggcttccagttgactcacagccttgggggcggaactggcagcggtatggggacactgttgattagtaaaattcgggaagaataccctgaccgaattatgaatacctttagtgtggtccccagccccaaggtgtcagatacagttgttgaaccgtataacgctacactgtcagtgcaccagttagtagagaatacagatgaaacttattgcatcgataacgaggctctatatgatatctgttttcgaacgctcaaacttacaacacctacctacggcgacttgaaccatctggtgtccgcaaccatgagcggggtgacgacctgtttgcgcttccccggacaactaaatgctgatctcagaaaactcgcagttaatatggtgcctttcccacggctgcatttcttcatgcccggattcgcacccttgacatcaagaggctcccaacagtatcgggccctaactgttcccgaactgactcagcaggtgttcgacgctaagaacatgatggccgcctgtgatcccagacatggccgctacctgacggtagctgctgtgtttaggggccgcatgagcatgaaagaagtggacgagcagatgcttaacgtgcagaacaaaaattcttcatactttgtcgaatggattccaaacaacgtgaagaccgccgtctgcgatattccccctcgaggtctcaaaatggcagtaactttcattggaaattctacggcgattcaggagttattcaagaggatttctgaacagtttacagcaatgttcagacggaaggccttcctgcattggtataccggagagggcatggatgaaatggagttcactgaagctgaatcaaacatgaacgacctggtgtctgagtaccaacaatatcaggatgccacagctgaggaggaagaagattttggggaagaggccgaggaggaatag

SEQ ID NO: 253264 - DNA, 1248 bp, Artificial Sequence
  derived and/or modified sequence
atgcgcgagatcgtccatatccaggctggacagtgtggcaaccagataggggctaagttctgggaagtcataagcgatgagcacggaatagacccaacaggcacatatcatggagacagcgacctgcagttagatagaatctccgtgtactacaatgaagccactggcggcaagtatgtgccacgcgctatattggtggacctggagcctggaacgatggactccgtgagatctggccccttcggccagatctttcgccctgataacttcgtctttgggcagagtggagcgggaaacaattgcttgcagggctttcaacttacccactccttggggggagggacagggagcggaatgggtaccctcctcatcagtaaaatccgagaggaatatcctgatagaatcatgaacaccttttctgtggtccccagcccgaaggtttctgatactgtagtcgagccctataacgcgactctttccgtacaccagttggtcgagaacacggatgagacttattgtatagataacgaggctctttacgacatctgctttcgcaccctgaaacttacaactcccacctatggagaccttaatcatctggtttctgcgactatgagtggcgtgactacatgcctcaggtttccgggccagctcaatgccgatctgcgaaaactcgccgttaacatggtgcccttccctagactgcatttttttatgccaggctttgcccctctgacaagtcgggggtcccagcaatacagggccctcaccgtaccagagctgacacagcaggtgtttgacgccaagaatatgatggccgcctgcgacccccgacacggcaggtatttgaccgtggccgccgttttccggggaagaatgtcaatgaaagaggtggacgaacagatgctcaacgtgcagaataagaactccagctactttgtggagtggattccaaacaacgtcaaaaccgcggtatgtgatatcccccccaggggcttgaagatggccgtcacatttatcgggaactcaactgcaatccaagagctgttcaagaggatcagtgaacagttcaccgccatgtttagacgaaaagcctttctgcattggtacaccggagagggcatggacgagatggaattcactgaggctgagagtaacatgaacgacctcgtatcagagtaccaacagtaccaggatgccaccgccgaggaagaggaggacttcggcgaagaggccgaggaggaatag

SEQ ID NO: 253265 - DNA, 1248 bp, Artificial Sequence
  derived and/or modified sequence
atgagagaaatcgtccacattcaggcaggccagtgtggcaaccagattggagcaaaattttgggaggttatctccgatgagcatggcattgaccccacaggcacataccacggggatagtgatctgcaactcgaccgtatttctgtgtactataatgaggctactggaggcaaatatgtgccccgggccatactggtcgacctcgaacctgggactatggactcagtaaggtctggaccatttgggcagatcttcagacccgacaattttgtgtttggccagtctggggctgggaataattgcctgcaaggattccagctgacgcactcactgggcggcggaaccggctctggaatgggtaccctgctcatctctaaaatcagggaagaatacccagatagaataatgaacacattctccgtagttccatcacctaaagttagtgatacagtcgttgagccttataacgcaactttgagcgtgcatcagttggtggagaacactgatgagacatattgcattgataacgaagcgttgtatgacatctgcttcaggactctcaagttgacgacccccacctatggcgatctcaaccacctggtttctgctactatgtccggcgtgacgacttgcctccggttcccaggacagttaaatgctgatctacggaagcttgccgttaatatggtgccctttccacggctccattttttcatgccgggatttgccccactgacctccagaggctcccagcagtacagggctttgacagttcctgagctgacacagcaagtttttgatgctaagaacatgatggcagcctgtgatcccagacacggccgatatctgaccgttgccgccgtgttcaggggtcgtatgtcaatgaaggaggtggacgaacagatgctgaatgtacagaacaagaattccagctactttgtcgagtggatcccgaataacgtcaagactgctgtgtgcgacattcctcctagaggcctcaagatggctgttaccttcatcggaaactctaccgcaattcaggaattattcaaaagaatttctgagcagttcactgccatgttccgccggaaggcctttcttcactggtacactggagaagggatggacgaaatggagtttaccgaagccgagtcaaatatgaacgacctagtgtctgagtaccaacagtatcaggacgctaccgcagaggaggaagaggacttcggggaagaggcagaggaggaatag

SEQ ID NO: 253266 - DNA, 1308 bp, Artificial Sequence
  derived and/or modified sequence
atgagggagatcgtccacattcaggctggccaatgcggtaaccaaatcggggccaaattctgggaagtgattagcgatgaacacggcatcgaccccactggcacgtatcacggggacagcgatctgcagctcgaccggatcagcgtttactacaacgaggcgacgggaggaaaatacgtacctagagccatcctcgtagacctggagcctgggactatggactccgtgcgaagtgggccttttgggcagatcttcagaccggacaatttcgtctttgggcagtctggcgctggtaataattgggctaaagggcattacaccgagggagctgaactcgtcgattccgtcctagatgtggtgcgcaaggaggctgaatcttgcgattgtctccaaggctttcaactgactcatagtctagggggcgggacaggctctggaatgggcacattgctgatatctaagattagagaagaataccccgatagaatcatgaacacgttctcagtggtgccgagtccaaaggtgagcgacaccgtggttgaaccttacaatgctaccctcagtgtgcatcagctggtggagaatacagatgagacatattgtattgacaacgaagctttgtacgatatctgtttccggacgctaaaactgaccacacccacatatggtgatctcaatcacttggtttccgctaccatgtctggagtcaccacttgtttgagatttccagggcagcttaacgcagatctgagaaagctagccgttaacatggtgccctttcctcgcctgcacttttttatgccggggttcgccccacttacttcgcgggggtcccagcaatatcgcgctctgaccgtcccagaactcactcagcaggtatttgacgccaaaaatatgatggccgcctgcgatccccggcacggccggtaccttacagtagctgcagtcttccggggccggatgagcatgaaagaggttgatgaacaaatgctgaacgtgcagaacaagaactcatcatatttcgtcgaatggatccccaataacgttaaaaccgccgtctgtgacataccaccccgggggctgaagatggcggtcacctttattggcaattcaaccgctattcaggagttattcaagcggataagcgagcagttcactgccatgttcaggaggaaggccttcctgcattggtacacaggtgagggaatggacgagatggagtttaccgaggcagaaagcaatatgaacgacctggtgagcgagtaccagcagtaccaggacgcaacagctgagggcggcggtctgtag

SEQ ID NO: 253267 - DNA, 1308 bp, Artificial Sequence
  derived and/or modified sequence
atgcgggagatcgtacacatacaggccggacagtgcggaaatcagatcggggcgaaattttgggaggttatctccgacgaacatggcattgatcctactggaacctatcatggagactcagacctgcagttagaccggatctccgtgtattataacgaagcaacaggcggcaagtatgtgcccagggctatcctagtggatctggaacctggcacaatggattcagtgcgatccggacctttcgggcagatcttcagacccgataacttcgtcttcgggcagtccggtgccggaaacaattgggctaaaggccactatacagagggagcggagttggtggattctgtgctggacgtcgttcggaaggaagctgaaagttgtgactgtctgcaaggcttccagttgacacactctctcggaggaggcacaggaagtggcatgggcaccctgctgattagcaagattagggaagagtatcccgatcggataatgaatactttctcagtggtgccttcgcccaaggtttctgatacagtggtggagccgtacaatgctaccctttctgtgcaccagctggtagagaacaccgacgagacatattgtatcgacaacgaagcactgtatgatatttgcttccgtactttgaaacttactacacccacatacggagacctgaaccatttagtgtccgccaccatgtcaggggtcacaacatgtctgcgcttcccagggcagctcaatgccgaccttaggaagctggcggtgaatatggtcccgtttccaagattgcacttctttatgcccggttttgcgccactaacctcacgcggctcccaacaatatagagctctgacggtccctgagctgactcagcaggtgtttgatgctaaaaatatgatggccgcatgcgatccacggcacggtaggtacctcacagtcgccgccgtctttcgaggccggatgagcatgaaggaagtggacgaacaaatgctgaacgtacaaaacaagaacagctcttacttcgtggaatggattccaaacaacgtgaaaactgcagtgtgcgatatcccaccacgcggccttaagatggccgtgacctttattggcaacagtaccgccatccaagagctgtttaagcggatcagtgaacaattcacagctatgtttcgtaggaaggcttttttacactggtacactggagagggaatggacgagatggaatttactgaggccgaatctaacatgaatgatctggtgagtgagtatcaacaataccaggacgccacagctgagggcggcgggctctag

SEQ ID NO: 253268 - DNA, 1308 bp, Artificial Sequence
  derived and/or modified sequence
atgcgggaaattgttcacattcaggccggtcagtgcgggaaccagatcggtgctaaattctgggaagtaataagcgacgagcatgggattgacccgacaggcacgtatcatggtgattcggaccttcagctggatcgaatctcggtatactacaacgaggctacaggtgggaaatacgttccccgggctattctcgtcgatctggagcccggaaccatggactcggttcgcagcgggcctttcggccagattttccgccctgacaattttgtgtttggacagtccggagctggtaataactgggcgaaaggacactacactgagggagcggaactagtagacagcgtactggacgttgttaggaaagaagcagagtcctgcgattgcctgcagggcttccagctgacgcacagcctgggcggcggcaccggttctggaatgggcaccctgctcatcagtaaaatcagagaagagtatccagacagaattatgaatacattctcagtggtcccctctcctaaggtctcagataccgtcgtcgaaccttacaacgccacgctgtcggtgcaccagttggtggagaacacagatgaaacttactgcatcgacaacgaagccctgtacgacatttgttttcgcaccctcaagctgactacaccaacctacggggacttgaaccacctcgtgtcggccacaatgtcgggagtaaccacttgtttgcgatttccagggcagttgaatgcggatctccgaaagcttgccgtgaacatggttccctttccccgcttgcactttttcatgcctgggtttgctcctctcactagtcgagggtcacaacagtaccgcgctctgacagtgcccgagctgacccagcaagtatttgacgcgaagaatatgatggccgcctgtgaccctagacatggacgatacctgactgtggcagccgtgtttcgaggccgtatgtctatgaaagaggtggacgaacaaatgctgaatgtccaaaataagaactccagctactttgttgaatggatcccaaacaacgtgaaaacggccgtgtgcgatatacccccacgcggcttgaagatggcagttactttcattgggaattccactgcaatccaggaactttttaagcgaatttccgagcagttcactgccatgtttcgtcgaaaggccttcttacattggtacacaggagagggcatggacgagatggagtttacagaggctgaatcgaatatgaatgacctagtctccgagtaccagcaataccaggatgcaaccgcggagggtggaggactttag

SEQ ID NO: 253269 - DNA, 1248 bp, Artificial Sequence
  derived and/or modified sequence
atgagagaaatcgttcacatacaggctggacagtgcggaaatcagatcggagccaaattttgggaggtcatttctgacgagcatggtatcgaccctacgggaacgtatcacggggatagtgaccttcagctcgaccgaatatctgtctactacaacgaggctacgggcgggaaatacgtgccaagagccattttagtggacctggaaccaggcaccatggattctgttcggtcagggcccttcggtcagatttttcgcccagataatttcgtctttgggcagagtggtgctggaaataattgcctgcagggatttcagcttacacattcgctggggggcggtaccggcagtggcatgggcacattgctcatctcaaaaatccgcgaagagtaccctgatcgcattatgaatactttctctgtggtcccttccccaaaggtatctgatacagtggtggagccttacaacgccaccctgtctgtgcatcagctggttgagaatactgacgagacatactgtatagacaacgaggcattatacgatatttgctttagaacactgaagctgactacacccacttacggtgacctcaatcatcttgtgtcagccaccatgtcaggcgtgaccacctgcttgcgatttccggggcagctcaacgccgatctgagaaagctcgcagttaacatggtgcctttcccgcggctgcatttttttatgcctgggttcgccccactgactagccggggctcccagcagtaccgcgccctgaccgtgcctgaattaacacagcaggtgtttgatgctaagaatatgatggccgcctgtgatccgcggcacggaagatacttgactgtggccgccgtcttcaggggtcgtatgagtatgaaggaagtagacgaacagatgctgaacgtgcagaataaaaatagtagttacttcgtagaatggatacctaataatgtcaaaacagcagtgtgcgatataccacccaggggcttaaaaatggctgtgacctttatcggcaatagcaccgccatccaagagctcttcaagaggatctcagagcagttcactgccatgttccgcaggaaggccttcctgcactggtacaccggggaaggcatggatgagatggaattcacagaggccgaatctaacatgaatgatttggtttcagaataccagcagtatcaggacgccactgcagaggaagaagaggactttggcgaagaggctgaagaggagtag

SEQ ID NO: 253270 - DNA, 1308 bp, Artificial Sequence
  derived and/or modified sequence
atgagagagattgtccatatacaggctggccaatgcggaaaccagatcggtgccaaattctgggaagtgatttctgacgaacatgggatcgaccccacgggcacttaccatggcgactctgatctgcagctagatcgaatcagcgtgtattataacgaggccaccggcgggaaatacgtcccacgtgccatcctggtggacctggaacccgggaccatggattccgtgcggtctgggccatttgggcagatctttaggcctgataactttgtgtttggacagagcggcgcggggaacaattgggcaaagggccactatacagaaggagctgaactagttgatagcgtactcgacgtcgtgcggaaggaagcagagagctgcgattgcttacaagggtttcagcttactcatagcctgggtggtggtaccgggtcagggatgggcactctgttgattagtaaaattagagaggagtaccccgatcggatcatgaacacttttagtgtggtaccttctcctaaggtctccgataccgtggtcgaaccctacaatgccaccttgtccgtacatcagctggtggaaaacaccgacgagacctattgcatcgacaacgaggcactatatgacatttgtttcagaactcttaagcttaccacacccacctacggagacctgaatcaccttgtctccgcaactatgtctggagtcacgacgtgcttacgcttccctggccaactgaatgctgatctgaggaagttagccgttaacatggtccccttcccgcgcttgcactttttcatgcctggttttgctcctcttacctcccggggtagtcagcagtaccgggctctgaccgtccctgaattaacccagcaggtgtttgatgccaagaatatgatggccgcatgcgatcctaggcatggtcgatatctgacagtggcagccgtgttccgggggaggatgtcaatgaaggaggtggatgagcaaatgctgaatgtccaaaataagaacagctcatatttcgtggagtggattccaaataatgtgaagacggctgtctgcgatatcccgccacgcggcttgaaaatggctgtaacctttatcggcaactcgaccgccatacaggaactctttaaaagaatctcagagcagtttacggcaatgttcaggaggaaagcattcctgcactggtacactggcgagggcatggatgaaatggagtttacagaggcagagtccaacatgaatgacctggtgtcggagtaccaacagtaccaagacgccactgctgaagaaggaggcgtatag

SEQ ID NO: 253271 - DNA, 1248 bp, Artificial Sequence
  derived and/or modified sequence
atgcgtgagatcgtgcatatccaagcagggcaatgcggaaaccagatcggcgctaagttttgggaggtcatcagcgacgagcatggcattgatcctaccggtacctaccatggagatagtgaccttcaactggataggataagtgtgtactacaatgaggctaccggaggcaaatacgtccccagagcgatcctggtggacctcgaaccaggcacaatggattccgttagaagtggtccttttggccagattttcaggccggacaacttcgtcttcggtcaatctggcgctggaaataattgcttgcaggggttccaactgactcattccttgggcggaggcaccggttctggcatggggaccctcctgattagtaagatccgcgaagaatatcctgaccgcattatgaataccttttccgttgtgcctagccctaaagtctctgataccgtcgtggaaccatacaatgccacactgtctgtccaccagctcgtcgagaacacagacgagacctactgtatcgacaatgaggctctctatgatatctgcttcaggaccttgaagctgaccacccccacttatggagacctcaaccatctcgtgagcgcaacaatgtcaggagtgaccacatgtcttcggttcccgggccagctaaatgccgatctcaggaagttggctgtgaacatggtccctttccctagactacacttcttcatgccggggtttgcccctcttaccagcaggggttcccagcaataccgggccctgacagtccctgaactcacgcagcaggtgtttgatgccaagaacatgatggccgcctgtgacccgagacacgggcggtacttgaccgtcgcagccgttttccgaggaaggatgtccatgaaggaagtcgacgaacagatgttgaacgtgcaaaataaaaattcatcctatttcgtggagtggattccaaataatgtgaagaccgcagtgtgcgatatcccgccccggggcctcaagatggcggtcacctttatcggaaatagcaccgccatccaggagctgttcaaacggatttcagagcaattcacagctatgttcaggcgtaaagcctttctccactggtataccggggagggtatggatgagatggagttcacagaagccgagtcgaacatgaacgatctcgtgtctgagtaccaacagtaccaggatgctacagctgaggaagaggaagactttggtgaagaggccgaagaagaatag

SEQ ID NO: 253272 - DNA, 1248 bp, Artificial Sequence
  derived and/or modified sequence
atgcgcgaaatcgtgcatatccaggcaggtcagtgtgggaaccagatcggagcaaaattttgggaagtgattagcgacgagcacggtattgatcctacggggacctatcatggagactccgacctgcaattggaccgaatcagcgtttactacaacgaggccaccgggggtaagtacgttcccagggcaatattagtggacctggagccaggtacaatggactcagtgagatcagggcccttcggacagatctttcgtccggacaactttgtttttggacagagtggagccggcaacaattgtctgcagggctttcagttgactcattcactgggaggggggacggggagcggcatggggacgctgttaatctcaaaaataagggaggagtatcccgacaggataatgaacacattcagcgtggtgccttcaccaaaagtatccgacaccgtggtggaaccatacaatgctaccttgtctgtgcatcaacttgtggaaaatacagatgagacctactgtatcgacaatgaggccctctacgatatctgcttcagaacacttaagctcacaaccccaacatacggagacttaaaccatttggtgagcgccactatgtccggagtcacgacatgcctaaggttccccggtcagcttaatgccgatctgaggaaacttgccgttaacatggtgccatttcctagactccatttttttatgcccggattcgctcccctcacctcaagaggaagccagcagtatcgggcactcacggtgcctgagctcacccagcaggtgttcgacgctaaaaatatgatggctgcctgtgacccgagacatggccgttatctcacggtagcggctgtgtttcggggtagaatgagtatgaaggaagtggacgagcaaatgctgaatgttcaaaataagaattcgtcttattttgtcgaatggattcctaacaacgtgaaaacagccgtctgcgacattcccccccggggcctgaagatggccgtgacttttatcgggaacagtactgctatacaggagttgttcaagaggatcagcgagcagtttaccgccatgttccgccgtaaggcttttcttcactggtatacaggtgaagggatggatgagatggagttcacagaggccgaatccaacatgaatgacctggtgtcagagtatcagcagtatcaggacgctacagctgaggaagaggaggacttcggtgaggaagccgaggaagagtag

SEQ ID NO: 253273 - DNA, 1335 bp, Artificial Sequence
  derived and/or modified sequence
atgagggagatcgtgcacatccaggccggccagtgtggcaaccagatcggggccaagttctgggaggtgatcagtgatgagcacggcatcgaccccaccggcacctaccatggagacagcgacctgcagctggaccgcatctctgtgtactacaatgaggccactggaggcaagtatgtgccccgggccatcctggtggacctggagcccggcaccatggattctgtgcgcagcggccccttcggccagatcttccggccagacaactttgtgtttggccagagcggggccggcaacaactgggccaagggccactacacagaaggagctgagctggtggacagcgtgctggatgtggtgaggaaggaggccgagagctgtgactgcctgcagggcttccagctgacccacagcctgggcggcggcactggaagtggcatgggcaccctgctgatcagcaagatccgggaggagtacccagaccgcatcatgaacaccttctctgtggtgcccagccccaaggtgtctgacacagtggtggagccctacaatgccaccctgtctgtgcaccagctggtggagaacacagatgagacctactgcatcgacaatgaggccctgtatgacatctgcttccgcaccctgaagctgaccacccccacctacggggacctgaaccacctggtgtctgccaccatgtctggagtgaccacctgcctgcgcttccctggccagctgaatgctgacctgaggaagctggccgtgaacatggtgcccttcccccggctgcacttcttcatgcctggctttgcccccctgaccagccggggcagccagcagtaccgggccctgactgtgcctgagctgacccagcaggtgtttgatgccaagaacatgatggccgcctgtgaccccaggcatggccgctacctgactgtggccgctgtgttccggggccgcatgtccatgaaggaggtggatgagcagatgctgaatgtgcagaacaagaacagcagctactttgtggagtggatccccaacaacgtgaagacagctgtgtgtgacatccccccccggggcctgaagatggctgtgaccttcatcggcaacagcacagccatccaggagctgttcaagaggatcagcgagcagttcaccgccatgttccggaggaaggccttcctgcactggtacacaggagagggcatggatgagatggagttcacagaagctgagagcaacatgaatgacctggtgtctgagtaccagcagtaccaggatgccacagctgaggaggaggaggactttggagaggaggccgaggaggaggcctag

SEQ ID NO: 253274 - DNA, 1281 bp, Artificial Sequence
  derived and/or modified sequence
atgttctgggaggtgatcagtgatgagcacggcatcgaccccaccggcacctaccatggagacagcgacctgcagctggaccgcatctctgtgtactacaatgaggccactggaggcaagtatgtgccccgggccatcctggtggacctggagcccggcaccatggattctgtgcgcagcggccccttcggccagatcttccggccagacaactttgtgtttggccagagcggggccggcaacaactgggccaagggccactacacagaaggagctgagctggtggacagcgtgctggatgtggtgaggaaggaggccgagagctgtgactgcctgcagggcttccagctgacccacagcctgggcggcggcactggaagtggcatgggcaccctgctgatcagcaagatccgggaggagtacccagaccgcatcatgaacaccttctctgtggtgcccagccccaaggtgtctgacacagtggtggagccctacaatgccaccctgtctgtgcaccagctggtggagaacacagatgagacctactgcatcgacaatgaggccctgtatgacatctgcttccgcaccctgaagctgaccacccccacctacggggacctgaaccacctggtgtctgccaccatgtctggagtgaccacctgcctgcgcttccctggccagctgaatgctgacctgaggaagctggccgtgaacatggtgcccttcccccggctgcacttcttcatgcctggctttgcccccctgaccagccggggcagccagcagtaccgggccctgactgtgcctgagctgacccagcaggtgtttgatgccaagaacatgatggccgcctgtgaccccaggcatggccgctacctgactgtggccgctgtgttccggggccgcatgtccatgaaggaggtggatgagcagatgctgaatgtgcagaacaagaacagcagctactttgtggagtggatccccaacaacgtgaagacagctgtgtgtgacatccccccccggggcctgaagatggctgtgaccttcatcggcaacagcacagccatccaggagctgttcaagaggatcagcgagcagttcaccgccatgttccggaggaaggccttcctgcactggtacacaggagagggcatggatgagatggagttcacagaagctgagagcaacatgaatgacctggtgtctgagtaccagcagtaccaggatgccacagctgaggaggaggaggactttggagaggaggccgaggaggaggcctag

SEQ ID NO: 253275 - DNA, 1248 bp, Artificial Sequence
  derived and/or modified sequence
atgagggagatcgtgcacatccaggccggccagtgtggcaaccagatcggggccaagttctgggaggtgatcagtgatgagcacggcatcgaccccaccggcacctaccatggagacagcgacctgcagctggaccgcatctctgtgtactacaatgaggccactggaggcaagtatgtgccccgggccatcctggtggacctggagcccggcaccatggattctgtgcgcagcggccccttcggccagatcttccggccagacaactttgtgtttggccagagcggggccggcaacaactgcctgcagggcttccagctgacccacagcctgggcggcggcactggaagtggcatgggcaccctgctgatcagcaagatccgggaggagtacccagaccgcatcatgaacaccttctctgtggtgcccagccccaaggtgtctgacacagtggtggagccctacaatgccaccctgtctgtgcaccagctggtggagaacacagatgagacctactgcatcgacaatgaggccctgtatgacatctgcttccgcaccctgaagctgaccacccccacctacggggacctgaaccacctggtgtctgccaccatgtctggagtgaccacctgcctgcgcttccctggccagctgaatgctgacctgaggaagctggccgtgaacatggtgcccttcccccggctgcacttcttcatgcctggctttgcccccctgaccagccggggcagccagcagtaccgggccctgactgtgcctgagctgacccagcaggtgtttgatgccaagaacatgatggccgcctgtgaccccaggcatggccgctacctgactgtggccgctgtgttccggggccgcatgtccatgaaggaggtggatgagcagatgctgaatgtgcagaacaagaacagcagctactttgtggagtggatccccaacaacgtgaagacagctgtgtgtgacatccccccccggggcctgaagatggctgtgaccttcatcggcaacagcacagccatccaggagctgttcaagaggatcagcgagcagttcaccgccatgttccggaggaaggccttcctgcactggtacacaggagagggcatggatgagatggagttcacagaagctgagagcaacatgaatgacctggtgtctgagtaccagcagtaccaggatgccacagctgaggaggaggaggactttggagaggaggccgaggaggagtag

SEQ ID NO: 253276 - DNA, 1308 bp, Artificial Sequence
  derived and/or modified sequence
atgagggagatcgtgcacatccaggccggccagtgtggcaaccagatcggggccaagttctgggaggtgatcagtgatgagcacggcatcgaccccaccggcacctaccatggagacagcgacctgcagctggaccgcatctctgtgtactacaatgaggccactggaggcaagtatgtgccccgggccatcctggtggacctggagcccggcaccatggattctgtgcgcagcggccccttcggccagatcttccggccagacaactttgtgtttggccagagcggggccggcaacaactgggccaagggccactacacagaaggagctgagctggtggacagcgtgctggatgtggtgaggaaggaggccgagagctgtgactgcctgcagggcttccagctgacccacagcctgggcggcggcactggaagtggcatgggcaccctgctgatcagcaagatccgggaggagtacccagaccgcatcatgaacaccttctctgtggtgcccagccccaaggtgtctgacacagtggtggagccctacaatgccaccctgtctgtgcaccagctggtggagaacacagatgagacctactgcatcgacaatgaggccctgtatgacatctgcttccgcaccctgaagctgaccacccccacctacggggacctgaaccacctggtgtctgccaccatgtctggagtgaccacctgcctgcgcttccctggccagctgaatgctgacctgaggaagctggccgtgaacatggtgcccttcccccggctgcacttcttcatgcctggctttgcccccctgaccagccggggcagccagcagtaccgggccctgactgtgcctgagctgacccagcaggtgtttgatgccaagaacatgatggccgcctgtgaccccaggcatggccgctacctgactgtggccgctgtgttccggggccgcatgtccatgaaggaggtggatgagcagatgctgaatgtgcagaacaagaacagcagctactttgtggagtggatccccaacaacgtgaagacagctgtgtgtgacatccccccccggggcctgaagatggctgtgaccttcatcggcaacagcacagccatccaggagctgttcaagaggatcagcgagcagttcaccgccatgttccggaggaaggccttcctgcactggtacacaggagagggcatggatgagatggagttcacagaagctgagagcaacatgaatgacctggtgtctgagtaccagcagtaccaggatgccacagctgagggcggcggcctgtag

SEQ ID NO: 253277 - DNA, 1308 bp, Artificial Sequence
  derived and/or modified sequence
atgagggagatcgtgcacatccaggccggccagtgtggcaaccagatcggggccaagttctgggaggtgatcagtgatgagcacggcatcgaccccaccggcacctaccatggagacagcgacctgcagctggaccgcatctctgtgtactacaatgaggccactggaggcaagtatgtgccccgggccatcctggtggacctggagcccggcaccatggattctgtgcgcagcggccccttcggccagatcttccggccagacaactttgtgtttggccagagcggggccggcaacaactgggccaagggccactacacagaaggagctgagctggtggacagcgtgctggatgtggtgaggaaggaggccgagagctgtgactgcctgcagggcttccagctgacccacagcctgggcggcggcactggaagtggcatgggcaccctgctgatcagcaagatccgggaggagtacccagaccgcatcatgaacaccttctctgtggtgcccagccccaaggtgtctgacacagtggtggagccctacaatgccaccctgtctgtgcaccagctggtggagaacacagatgagacctactgcatcgacaatgaggccctgtatgacatctgcttccgcaccctgaagctgaccacccccacctacggggacctgaaccacctggtgtctgccaccatgtctggagtgaccacctgcctgcgcttccctggccagctgaatgctgacctgaggaagctggccgtgaacatggtgcccttcccccggctgcacttcttcatgcctggctttgcccccctgaccagccggggcagccagcagtaccgggccctgactgtgcctgagctgacccagcaggtgtttgatgccaagaacatgatggccgcctgtgaccccaggcatggccgctacctgactgtggccgctgtgttccggggccgcatgtccatgaaggaggtggatgagcagatgctgaatgtgcagaacaagaacagcagctactttgtggagtggatccccaacaacgtgaagacagctgtgtgtgacatccccccccggggcctgaagatggctgtgaccttcatcggcaacagcacagccatccaggagctgttcaagaggatcagcgagcagttcaccgccatgttccggaggaaggccttcctgcactggtacacaggagagggcatggatgagatggagttcacagaagctgagagcaacatgaatgacctggtgtctgagtaccagcagtaccaggatgccacagctgaggagggcggcgtgtag

SEQ ID NO: 253278 - DNA, 1335 bp, Artificial Sequence
  derived and/or modified sequence
atgcgggagatcgtgcacatccaggccggccagtgcggcaaccagatcggggcgaagttctgggaggtgatttcggatgaacacggaatcgacccgacgggaacctatcatggggattccgacctgcagctggatcgtatctccgtgtattataacgaagccactggtggaaaatatgtgccaagagccattctggttgaccttgagccagggacgatggatagcgtgcggtcaggaccgtttgggcagatctttcgcccagacaacttcgtttttggccagtcaggggccgggaataattgggccaagggacattataccgagggcgccgagttagtggactccgttctcgacgtggtgcgaaaagaggctgagagctgcgattgcttgcaaggcttccagcttacacattccctggggggtgggactggaagcggaatgggtaccctcttaatctccaagatacgtgaagagtaccccgacagaattatgaatacatttagcgtggtgccttcacccaaagtctcagataccgtcgtcgagccctacaacgcgactctctctgtgcaccaactggtggagaacaccgacgagacctattgtatagacaatgaggcactgtacgatatttgctttcggacactgaaactgactaccccaacttatggcgatctgaatcacctggtctctgccacgatgtcaggtgttactacttgtctaaggttcccaggtcagctgaacgcagatctgcgtaaacttgccgtaaatatggtcccattccctcgcctgcatttctttatgcctggatttgcccctctgacatctcggggcagccagcaataccgagccctcaccgtgcctgagctgacacagcaggtatttgacgctaaaaatatgatggccgcctgtgaccctcggcacggccgttacctcactgtggcagccgttttccgcggccgcatgtccatgaaagaagttgacgagcagatgctaaatgttcagaacaaaaattccagttactttgtggagtggatcccgaataacgtgaagactgccgtgtgcgacattccacctcggggactgaagatggccgtgactttcattgggaatagcactgcaatccaagaactgtttaagcggataagtgagcaattcaccgccatgtttcgtaggaaagctttcctccattggtatacaggggagggcatggatgagatggagttcaccgaggccgaaagtaacatgaatgatctggtgagtgagtaccagcagtaccaggacgcaacagctgaagaagaggaagacttcggagaggaggcagaggaggaagcgtag

SEQ ID NO: 253279 - DNA, 1335 bp, Artificial Sequence
  derived and/or modified sequence
atgcgggagatcgtgcacatccaggccggccagtgcggcaaccagattggtgcaaaattctgggaagtgataagtgacgagcatggcatcgacccaaccggtacttaccatggcgactcagatttgcagttggaccgaatttctgtctattacaacgaagctactggtggtaagtatgttcccagagcaattctggtagacctcgagccaggtactatggacagtgtgcggagcgggcctttcggccagatctttagacctgacaacttcgtgtttgggcagtcgggggcaggcaataactgggcgaaggggcattacactgagggcgctgagctggtggacagcgttcttgacgtggtgagaaaagaggcagaaagttgtgactgtctccaggggtttcaactgacccacagcctgggtggaggcaccggatcaggcatggggaccctgctcatttccaagattagagaagaatatccagaccgcatcatgaacacattttcggtggttcccagcccgaaagtctctgacactgtggtggagccttataatgcaacactgtctgtgcatcagctcgtcgagaatacagacgaaacctattgcatcgataacgaggccctgtatgacatatgctttcgaacccttaaattgaccacacccacatacggggacctgaaccaccttgtctcggctaccatgtcaggagtcacaacctgcttgagatttccagggcagctgaacgcagacttaagaaaattagcggtgaacatggttcccttcccgaggctgcatttctttatgccaggattcgccccgttgacatcaagaggcagtcaacagtacagagctctgacggttcctgagctgactcagcaagtcttcgacgccaaaaacatgatggccgcgtgtgatccgagacatggcaggtacctcacggtggccgcagtgttccgcgggcggatgtcgatgaaagaagtggatgagcaaatgctgaatgtgcaaaataagaattcctcatactttgtcgaatggatccctaacaatgtgaagaccgccgtctgtgatatccctccccgcggacttaaaatggccgtgactttcattggtaactctactgctattcaggagttattcaagcggatttccgaacagttcacagcaatgtttagacgcaaggcattcctacactggtatacaggggaggggatggacgaaatggagttcacagaagctgaatcaaatatgaacgacttagtctccgagtaccagcaataccaagacgcaactgcagaagaggaggaggactttggtgaagaggctgaggaggaagcctag

SEQ ID NO: 253280 - DNA, 1281 bp, Artificial Sequence
  derived and/or modified sequence
atgttctgggaggtgatcagcgacgagcacggcatcgaccccaccggcacctaccatggggattcagatctgcaactggacagaatctctgtttactataatgaggccaccggcggcaagtacgtccccagagccatcttggttgatctggagcctggcacaatggatagcgtccgcagtggcccttttggtcagattttccgaccggacaacttcgtgtttggccagtccggcgccggaaataattgggccaaggggcattacacagagggggctgaactcgtcgactccgtactggacgtcgtgcgcaaggaagccgagtcttgtgactgcctccagggtttccagctaacccattcgctggggggtggtacagggagcggaatgggcactctgctgatttccaagatccgagaggagtaccctgatcgtatcatgaacaccttcagcgtagtgcctagtcccaaagtgagcgacacagtggtggaaccgtataacgccaccctgtcggtccaccaactggtagagaacaccgacgagacttactgcattgataatgaagccttatatgacatttgctttcgaacactgaaactaaccacacctacgtacggcgacctgaaccatttagtgtccgcgaccatgagcggagtgaccacgtgtctgaggttcccagggcagctgaacgcagacctgcgaaagctggcagtcaacatggtgccattcccccggctccatttctttatgccaggctttgctccgctcactagtaggggctcccagcagtatcgagcactgacagtgccagagctgacccaacaggtgtttgatgctaagaatatgatggccgcctgcgacccgagacacggacggtatttaactgtggcggcagtctttcgcgggcggatgtctatgaaggaagtagatgaacaaatgctgaatgttcagaataagaattcctcatatttcgtcgagtggattccaaataacgtaaaaacggccgtgtgtgacatccctccaaggggtctgaaaatggccgtcactttcattgggaattccacagctatccaggaactgttcaaacggatctccgaacagttcaccgctatgtttcgaagaaaggctttcctccactggtacaccggggagggcatggacgaaatggaattcactgaagccgaaagcaacatgaacgacctcgtgagcgagtaccaacagtaccaggatgccactgcagaagaggaggaagatttcggcgaggaagctgaagaagaagcttag

SEQ ID NO: 253281 - DNA, 1281 bp, Artificial Sequence
  derived and/or modified sequence
atgttctgggaggtgatcagcgacgagcacggcatcgaccccaccggaacatatcacggcgattccgacctccagctcgatcgaatcagcgtgtactacaacgaggcaacaggcggcaaatacgtacctagggccatactggtggatctcgaacctggcactatggattccgttagaagcggcccatttggacagatattccggcccgataatttcgtgtttggccagagcggcgcaggaaataactgggccaaagggcactatactgagggtgctgaactcgtggacagcgtgttggatgttgtacggaaggaagcagagtcatgcgactgtctgcaggggtttcagttaacccactcactgggaggcgggaccggtagtgggatggggacattgttgatttcaaagatacgcgaggagtaccccgataggatcatgaacacattctccgtggtcccctcaccaaaggtcagtgataccgtggtcgaaccgtacaacgcaaccctgagcgtgcatcagttggtggagaatactgatgagacatattgtatcgacaatgaggccctctacgatatctgttttcggactttaaagctgacaactcccacatacggcgacttaaatcacttggtaagtgcaacaatgtccggcgtaaccacctgtctgcgcttccctggacagctgaacgctgacctccggaagttagccgtgaatatggtcccctttcctcggttacacttttttatgccagggtttgcccctctgacctctcggggctcccagcaataccgtgctcttacagtcccagaattgacccagcaagtattcgatgcgaaaaatatgatggcagcctgtgacccccggcacgggcggtacttgaccgtggcggcggtctttcgcgggagaatgtccatgaaagaagtggatgagcaaatgctgaacgtgcagaacaagaattcgagctattttgtggagtggatccccaacaacgtcaaaacggctgtgtgcgacatcccaccgcgtggactgaaaatggccgttacattcattggcaattccaccgccatccaggagctgtttaagaggatctctgaacagtttacagcaatgttcaggagaaaagcattcttgcattggtataccggcgaagggatggacgagatggaattcaccgaggccgagtctaacatgaatgacttggtatctgaataccagcaataccaggatgcaaccgccgaagaggaggaggacttcggagaagaagccgaagaagaagcttag

SEQ ID NO: 253282 - DNA, 1281 bp, Artificial Sequence
  derived and/or modified sequence
atgttctgggaggtgatcagcgacgagcacggcatcgaccccaccggaacttaccatggagactcagacctacagttagacaggataagtgtttattataatgaagccacaggaggcaaatatgttccccgcgcaattcttgtggacctggaaccaggcaccatggattccgtgagatctggtccttttgggcagattttcagaccagacaactttgtttttggtcagagcggcgcaggtaacaactgggctaaagggcactacactgaaggcgctgagttggtggactcagttctcgatgtggtgcgcaaagaggcggaatcttgcgactgcctgcagggttttcagctgacgcactccctcggaggggggactggatctgggatgggcactctgctgatcagcaaaataagggaggaatacccggatcgaatcatgaatacattctccgtcgtgcctagtcctaaggtgtctgatacggttgtggagccttacaacgccactctgtcagtgcaccaactggtcgagaatacggatgagacttactgcatcgacaatgaggccttgtatgatatatgtttccggactctgaagcttaccacccctacgtatggtgacttgaaccaccttgtctccgccaccatgtctggcgttacaacatgcctcagattccccggccaattgaatgctgacctgagaaagctcgccgtcaatatggtcccttttccccggctgcacttcttcatgccaggtttcgcgcctctgactagtcgtggctcccagcagtacagggctctaaccgtgcctgagcttacccagcaagtgtttgatgctaagaatatgatggccgcctgtgacccacgccacggaagatatcttactgtggcagccgtctttaggggccgaatgtctatgaaagaagtggacgaacaaatgttgaacgtgcagaataagaattccagctactttgtggagtggattcccaacaacgtcaagacggcagtgtgcgacatccctcccagaggcctgaagatggccgtgacctttatcggaaactctaccgcgatccaggagttattcaagagaatcagcgaacagtttactgctatgttcagacggaaagcttttttgcactggtacacaggggaagggatggacgagatggaattcacagaagctgagagcaacatgaatgacctagtcagcgagtatcagcagtatcaagacgccaccgcggaggaggaggaagactttggggaggaggctgaggaagaagcttag

SEQ ID NO: 253283 - DNA, 1281 bp, Artificial Sequence
  derived and/or modified sequence
atgttctgggaggtgatcagcgacgagcacggcatcgaccccaccggcacatatcatggcgattcggacctccagttggaccgcatttctgtttattataatgaggccacgggagggaagtacgttcctagagctatcttggtggacctcgagcctggaaccatggactctgtgcgctctggcccattcggacagatcttccggccagacaatttcgtttttggccagagtggcgcagggaacaattgggcaaaaggccattataccgaaggagccgagctggtagattccgtcttagacgtcgtgcggaaagaggctgaatcctgcgattgtctccagggatttcagcttactcactccttgggtggtgggactggcagcggcatgggtacactcctcatctctaagatccgcgaagagtatcctgatagaattatgaacacatttagcgtagtcccaagccctaaggtgtcagacactgtggtggagccctataacgctaccttgagcgtacatcagctggtggagaacacggatgaaacgtactgcattgataacgaggcactctacgatatctgcttccgaaccctgaaactcaccacccctacgtatggagacctgaaccatctggttagtgccacgatgtctggcgtgacaacctgtctgagattcccgggccaactcaacgcagacttgaggaagcttgccgtcaatatggtgcctttcccccgattgcacttcttcatgcccggatttgctccccttactagccggggctcccagcagtatcgcgctctgaccgtacctgagctgacgcagcaagtgtttgatgctaagaatatgatggcagcctgcgatccacgacacgggcgatacctgactgtcgctgcggtgtttcgcggtcggatgtccatgaaagaggtcgatgagcaaatgttaaatgtgcagaataagaatagcagctactttgtggagtggattccaaataatgtgaaaacggcagtttgcgacatccctcctcgaggccttaagatggccgtgacttttattggtaactccaccgctatacaggaattgtttaagcgaatatccgaacagtttacggctatgtttcgacgaaaggccttcctccactggtatactggggagggcatggatgagatggaattcactgaggcagagtcaaacatgaacgaccttgtatccgaataccagcaatatcaggatgccaccgcagaggaagaagaagactttggcgaggaggctgaggaggaagcttag

SEQ ID NO: 253284 - DNA, 1335 bp, Artificial Sequence
  derived and/or modified sequence
atgcgggagatcgtgcacatccaggccggccagtgcggcaaccagatcggggcaaaattttgggaagtgatctctgacgaacatggcatcgatccgactggaacctatcatggggatagcgatctgcagctggatagaatcagtgtttattataatgaggccaccggtggcaagtacgtgcctcgagcaatcctcgtggacctggaacctgggactatggactctgtccgcagcgggccctttggccagattttcagacccgataactttgtatttgggcagtcgggggccgggaataattgggcaaagggacattataccgagggcgctgagttggtcgacagcgtgctcgatgtggtcaggaaggaggccgaatcttgcgactgtctacaaggattccagctgacccactcgctcggaggtggaaccgggagtggcatgggcactcttcttatctcgaaaattcgcgaagagtatcccgatcggatcatgaacacttttagcgtggtgccatctccaaaagtcagtgataccgtagtcgaaccatataacgccacactgagcgtgcaccaactggtggagaataccgatgagacatattgcatcgacaatgaggcactgtatgacatatgcttccgtacattgaaattgactacacccacttatggagatctgaaccacctggtatctgctacgatgagtggcgttacgacctgcctgcggttccccggtcagctcaacgctgatttgcggaaactggcggtaaacatggtgccatttccccgactgcactttttcatgcccggattcgccccgttgacctcaaggggctcccagcaatacagagccttaacggttcccgagctgacccagcaagtgttcgatgctaaaaatatgatggcggcctgtgacccacgtcatggacgctatcttacagttgccgctgtgtttcgcggacgcatgtcaatgaaagaggtggatgaacaaatgttgaatgtgcagaacaaaaatagcagctattttgttgagtggataccaaacaatgtgaagaccgcggtgtgcgacatcccacccagaggcctcaagatggccgtgaccttcatcgggaattccaccgccattcaagagcttttcaaaagaatctcagagcaattcacagccatgttccgtcgcaaagcatttctgcactggtacacaggcgagggtatggacgagatggagtttacagaggctgagtctaatatgaacgacctggtcagtgaataccaacagtatcaggacgctaccgccgaagaggaagaagacttcggggaagaagctgaagaagaggcttag

SEQ ID NO: 253285 - DNA, 1281 bp, Artificial Sequence
  derived and/or modified sequence
atgttctgggaggtgatcagcgacgagcacggcatcgaccccaccggcacctatcacggcgatagcgacctgcaacttgatagaatcagtgtgtattacaacgaagccaccggggggaagtatgttcccagagctatcttggtggacctcgagccggggaccatggacagcgtaagatctgggccatttggccagatctttcgccccgacaatttcgtcttcggacaaagtggggcaggtaataattgggccaaaggtcattatactgaaggcgcagagttggtcgacagtgtcctggacgtggtccgaaaagaagccgagtcctgtgactgcctgcaggggtttcagctgactcacagccttggcggagggacgggaagcgggatgggtactctgttaatcagcaaaattcgcgaggagtaccccgatcggataatgaataccttctccgtagtgccttccccaaaagttagcgataccgtggtggagccttacaatgctacattatccgtacatcagctggtggaaaatacagatgagacatattgcattgataatgaggcactctacgacatctgctttcgcacactgaagctcacgactcccacctatggagaccttaaccatctggtttcagctacgatgagcggggtgaccacgtgtctgagatttcccggacagctcaatgccgacctgagaaaactcgcagtgaatatggtgccatttccgcgcctacatttctttatgcctggcttcgcgccgctgacttccaggggcagccagcagtaccgcgccctgacagtgccagaacttacacaacaggtgtttgatgccaagaacatgatggctgcgtgcgatccacgccacggtcgatacctcacagtcgctgctgtttttaggggacgcatgtccatgaaggaggttgacgagcagatgctgaatgtccaaaacaaaaattcctcttactttgttgagtggattcccaataatgttaagacagccgtgtgcgatattccacctcggggcttgaagatggccgttacctttatcggaaatagcacagctattcaggaactctttaagcgaattagtgaacaattcaccgccatgttccggcgcaaggctttcctgcactggtacacgggcgaggggatggatgagatggagttcacggaagctgagtccaatatgaatgatctggtctctgagtaccagcaataccaggatgccaccgccgaagaagaagaagacttcggtgaggaagctgaggaagaggcctag

SEQ ID NO: 253286 - DNA, 1335 bp, Artificial Sequence
  derived and/or modified sequence
atgcgggagatcgtgcacatccaggccggccagtgcggcaaccagattggagccaaattctgggaggtgatttcagatgaacacggcattgatccaacagggacatatcatggggattccgaccttcaactggatcgcatttccgtctattataatgaagctaccggcggcaaatatgttcctagggccatcctggtcgacctggaacctggaaccatggactccgtcagaagcggccccttcggacagattttccggccggataattttgtgtttggccaatcaggcgccggaaataactgggcaaaaggtcattatacagagggggcggaactggtggattcagtcctggacgtggtccgtaaggaagctgaatcctgtgactgtctccaggggtttcaactcacccactcactcggaggtggcacagggtcagggatgggtacacttctgatctctaagatccgtgaagagtaccctgatcgaattatgaataccttttccgttgtcccatcccccaaggtgtccgacacagtcgttgagccatacaatgctaccctgtccgtacatcaactggtggagaataccgatgagacatattgtatcgataatgaagctctctatgatatctgttttcgtacgttgaaacttactaccccgacctacggtgacctgaaccacctagtctcggctacaatgtcaggagttacaacatgtttgaggtttccgggccaactcaacgctgacttgagaaaactcgctgtgaatatggtgccatttcccagactccacttcttcatgcctggattcgcaccattaacttctcgcggatcccaacagtatcgggcactcaccgtgcccgaacttactcagcaggtcttcgatgcgaaaaacatgatggccgcgtgcgatcctaggcatgggcggtatctgactgtggcagctgtcttccgcggccgcatgagcatgaaagaggtggacgagcagatgctaaacgtgcagaacaaaaactcgagctatttcgtggaatggatccctaataacgtgaagaccgcggtgtgtgacattcccccacgaggtctgaagatggccgttacatttatcggtaactctaccgccatccaagagctcttcaagaggatctcggaacagttcaccgcgatgttcaggcgtaaagccttcctgcattggtataccggcgagggcatggacgaaatggagtttaccgaagccgaatcaaacatgaatgaccttgtatctgagtaccagcagtaccaagatgctaccgccgaggaggaagaagattttggggaggaggctgaggaggaagcctag

SEQ ID NO: 253287 - DNA, 1335 bp, Artificial Sequence
  derived and/or modified sequence
atgcgggagatcgtgcacatccaggccggccagtgcggcaaccagattggcgcaaagttctgggaggtgatctcagacgaacacggtatagacccgactgggacttatcacggagatagcgatctgcagctcgatagaattagcgtgtactataacgaggccacgggagggaaatacgtgccccgcgccatcctggttgacttagagcccggcacgatggattctgttcgctcaggaccatttggtcaaatcttcaggcctgacaattttgtgtttggtcagtcaggcgcaggcaacaactgggcgaagggtcactacactgagggtgcagaacttgtggatagcgtcctggatgtcgtgagaaaggaggcagaaagctgtgactgcctgcagggcttccagctgacacacagcttaggcggtgggaccggatccggtatgggcaccctcttaatatctaagattcgcgaggaatatcccgatagaattatgaacacgttcagtgtcgtgccctcacctaaggtttccgatactgtggttgagccttataatgctacgctgagcgtccatcagctagttgaaaacacagatgagacatattgtatcgataacgaggcgctgtacgatatttgtttccgcaccctgaagctcactacccccacatatggagacctgaaccacttggtttcagccactatgagcggtgtgacaacctgcctgcggttccctggacagctgaatgcggacttgcggaagctggcggtcaacatggtgccctttccacggctgcactttttcatgcctgggttcgctcccttaacttcgagagggagccagcagtacagagctctgaccgttcctgaattgacgcaacaggtttttgacgctaagaacatgatggctgcctgcgatccaaggcatggcagatacttaactgtggctgcagtcttccggggtcggatgtctatgaaagaggtggatgaacagatgctgaatgtccagaacaagaatagcagctactttgtggaatggatcccaaataacgtaaaaactgcagtgtgcgacattcctcccaggggactgaagatggcagttacgtttatcgggaatagcacagcgatccaagagctttttaagaggatttcagagcagtttactgcaatgtttcgtaggaaggcctttctgcactggtacacaggcgaaggaatggatgaaatggagttcactgaggctgagagtaacatgaacgatcttgtgagtgagtaccagcagtatcaagatgcaactgccgaggaagaggaggatttcggggaggaggccgaagaggaggcgtag

SEQ ID NO: 253288 - DNA, 1335 bp, Artificial Sequence
  derived and/or modified sequence
atgcgggagatcgtgcacatccaggccggccagtgcggcaaccagatcggcgcgaagttttgggaggtgatctcggacgagcacggaattgaccctacaggaacctaccacggcgactcagatttgcagctcgatcgaatttctgtctactacaacgaagccaccgggggcaagtacgtaccaagggccatacttgtcgacctggagcccggaacgatggatagcgtccgctccggcccatttggacaaatatttcggcctgacaattttgtctttgggcagtctggagcaggcaataactgggctaaaggccattacaccgagggggcagaattggttgatagcgttctggacgtggttcggaaggaagccgagagctgcgactgtctgcagggatttcagctgacccactcattggggggcggcaccggatctggcatgggaacactgttaattagtaagattcgcgaagaataccccgaccggatcatgaataccttttcagtggttccttcccccaaagtgtcggacaccgtcgttgagccttacaacgctacactgtccgtacatcagctcgtggaaaacacagacgaaacttactgtatcgacaatgaggctctctacgatatctgcttcaggacgctgaagcttactacccccacatacggagacttgaatcacctggtcagtgcaacaatgtccggagtcacaacctgcctccggttcccgggccaactgaatgccgatctgcgcaagctggctgtaaatatggtccctttcccacggttgcatttcttcatgcccggcttcgcaccgctaacatctcgggggagccaacaatatcgtgcactcacggtacctgagctgactcagcaggtttttgatgcaaagaatatgatggctgcctgtgacccacgccacgggcgctatctgacagttgcagctgtgtttagaggccgcatgagcatgaaggaggtggacgagcaaatgttaaacgtgcagaacaagaactcatcctactttgttgaatggattccaaacaacgtcaagacagcagtctgcgatatccctccaaggggcctgaagatggccgtcacgttcatagggaatagtaccgctattcaggagttattcaagaggatatccgaacaattcacagctatgtttaggagaaaggcctttctccactggtacactggggaagggatggatgagatggaatttacggaagccgaaagcaatatgaacgacctggtcagcgagtatcagcaataccaggatgccactgctgaggaggaggaagattttggcgaagaggccgaggaggaagcgtag

SEQ ID NO: 253289 - DNA, 1281 bp, Artificial Sequence
  derived and/or modified sequence
atgttctgggaggtgatcagcgacgagcacggcatcgaccccaccgggacctaccatggcgattctgacctgcagctagatcggatctccgtgtactacaacgaagccaccggcggaaaatatgtacccagggccatactggttgatctggagcccgggaccatggacagcgtcaggagcggacctttcggtcagatcttcagaccagacaattttgtttttggtcagagcggggctggcaataattgggctaagggccactatactgagggtgcggagttggtagattctgtgctggatgtggtccgtaaggaggcagagtcctgtgactgccttcaaggatttcagctgactcattcccttgggggggggacaggctccggcatgggcacactgctgatcagcaagatcagagaggaatatccggacaggattatgaataccttttctgtggtcccctcccccaaagtttcagacaccgtcgtggaaccctataatgcgaccttatctgtacaccagctcgtggaaaacactgatgagacatattgtatcgataatgaggccctgtatgacatctgctttcggacactcaaactgaccacccccacatacggggacctgaaccatcttgtgagcgccaccatgtctggcgtcacgacatgccttagattccccggacagctgaacgccgatttacgtaagctcgctgtgaatatggtgccattccctcggttacactttttcatgccaggcttcgcaccactgacctcacgagggtcacagcagtaccgggccttaactgttcccgaacttacacaacaggtattcgatgcgaagaacatgatggcagcctgcgacccacggcacggacgttatttgaccgtggcagctgtctttcggggtcggatgtccatgaaggaggtagatgaacaaatgcttaacgttcagaataagaactcttcctactttgtggagtggattccgaacaacgtgaagactgcagtatgcgacattcctcctcggggtcttaaaatggccgtgacctttataggaaactctaccgccatccaggaactgtttaaaaggatcagtgaacaatttactgcgatgtttagaaggaaggctttcctgcattggtacaccggggagggcatggatgaaatggaattcaccgaggctgaaagcaatatgaatgacctggtgagcgagtaccaacagtatcaggacgccactgctgaggaggaagaggatttcggcgaagaagccgaagaggaagcatag

SEQ ID NO: 253290 - DNA, 1281 bp, Artificial Sequence
  derived and/or modified sequence
atgttctgggaggtgatcagcgacgagcacggcatcgaccccaccggcacttatcatggggactctgatctccagttggacaggattagcgtgtattacaacgaggccaccggcggcaagtacgtgccacgggctatcctcgtcgatctggaacccggaactatggatagcgtccggtcgggacctttcggccagatatttagaccggacaatttcgtgttcgggcagtctggagccggaaacaactgggcaaaaggccattacaccgagggagcagagttggtcgactctgtgttagacgtcgtcagaaaggaggccgagtcttgtgattgtcttcagggtttccagctaactcatagcctcggtggaggcactggtagcggcatgggcaccctgctcatctctaaaattcgtgaagagtatcctgacagaatcatgaataccttttcagttgtgccaagcccaaaggtatctgatactgtggtggaaccttataacgctacactatccgtacatcagctggtggagaacacagatgagacgtattgcatcgataacgaggctctgtacgacatctgtttcaggactctaaaactgactacccccacctacggggacctgaaccacttagtctctgccactatgtccggtgttactacatgtctgcgatttcctgggcagctgaacgctgacctgcgcaagctcgcagtgaacatggtaccatttcctagattgcactttttcatgcccggcttcgcacctctgacctccagaggctcacagcagtaccgtgcactcacggttcccgagctcacccagcaggtgtttgatgctaagaatatgatggcggcgtgtgacccacgacacgggagatatctcaccgtcgccgctgtattccgcgggaggatgtctatgaaagaagtggacgagcagatgctgaatgttcagaataaaaactcctcatacttcgtggagtggatccccaacaatgttaagaccgcagtctgcgacattccaccacgaggcctcaaaatggcagttaccttcataggaaattccaccgcaatccaggagctgttcaaacggatcagcgagcagtttaccgccatgtttcgtaggaaggcattccttcattggtatactggagagggcatggacgagatggagtttaccgaggccgagtccaatatgaacgacctggtctctgagtaccagcagtaccaggacgcaacagccgaggaggaagaagacttcggtgaagaagcagaggaggaggcatag

SEQ ID NO: 253291 - DNA, 1281 bp, Artificial Sequence
  derived and/or modified sequence
atgttctgggaggtgatcagcgacgagcacggcatcgaccccaccggaacctatcatggggactccgatctgcagcttgatagaatttcagtatactataacgaggcgaccgggggcaaatacgtacctcgtgcaattttggtggacttagaaccgggcacaatggactccgtcaggtctggccccttcggccaaattttccgccccgacaactttgtcttcggccagtcaggagccggaaacaactgggctaaaggccactatacagagggggcggaacttgttgactcagtcctcgacgtagtgagaaaagaagccgaatcttgtgattgcctccaaggtttccaactgactcactcactcggcggcggcaccgggtctggaatgggaacgctgctcatttctaaaatccgtgaggagtaccccgaccggattatgaacaccttcagtgtcgtgccgtctcctaaagtgagcgacaccgtggtggagccctataacgcaacgctctccgtgcatcagctggtggagaacactgacgagacctactgcatcgacaacgaggcactctatgatatttgcttccggacgctgaaactgacgacgcctacctacggggacctcaaccacctggtgtccgcaactatgagtggggtgactacttgtctgcggtttccaggtcaacttaacgccgatctgcggaaattggcggtcaacatggtgcccttcccgcggttgcatttttttatgcctggatttgcacctctgacgtcgagagggtctcagcaatacagggcactcacggtcccggagctgacgcaacaggtgtttgatgctaagaatatgatggccgcctgcgacccccggcatggaagatatttgaccgtcgctgcagtattcaggggtagaatgtcaatgaaagaagttgacgagcagatgttgaacgtccaaaataaaaactctagctactttgttgagtggatccctaacaacgtcaagacagccgtgtgtgacattcctccgcgggggcttaagatggccgtcaccttcattggaaattcaaccgcaattcaggagctgtttaagcgcatttcagagcaatttacagcaatgtttagacgaaaagcgttccttcactggtatacaggagagggcatggacgaaatggagtttacagaggctgagtccaacatgaacgatctggtgtccgagtatcagcagtatcaggatgccaccgctgaggaggaggaagacttcggagaagaggcagaggaggaagcatag

SEQ ID NO: 253292 - DNA, 1335 bp, Artificial Sequence
  derived and/or modified sequence
atgcgggagatcgtgcacatccaggccggccagtgcggcaaccagattggggccaagttttgggaggtaatcagcgatgaacatgggattgatccgaccggcacctaccacggtgatagtgacctccaacttgacaggatctcagtttattataatgaggccaccggtggtaagtatgtgccaagagctatcctcgttgacctagagcccggtacaatggactccgtcaggtcagggccttttggtcagatctttagaccagacaacttcgttttcggccagtctggggcaggcaataactgggccaagggccactatactgaaggagccgagttggtggacagtgtgctggacgtcgttcgcaaggaagctgagtcgtgtgactgtcttcaggggttccagctgactcactccctcgggggcggcaccggatcaggcatggggaccctcctcatctcaaagattagggaagaatatcccgaccgaattatgaacacctttagcgtggtgccctcccccaaagttagcgacaccgtggttgagccttacaatgccacactgtctgtgcaccagctcgtggagaacacagatgagacctactgtattgacaatgaagccctctacgatatctgtttcagaacactgaaactgaccacccctacttatggagaccttaaccacctcgtttccgccaccatgtcaggtgttacaacatgtttgaggttcccagggcagctcaacgcggaccttaggaaactggcagttaatatggtgccgtttcccaggctgcactttttcatgcccgggttcgctcccctgaccagtcggggtagccagcaataccgggcattaactgtgcctgaattgacgcagcaagtcttcgacgccaagaatatgatggctgcctgcgatcccaggcacgggcggtaccttacggtggcggccgtatttaggggtagaatgtctatgaaggaagtggacgagcagatgttgaatgtccaaaataaaaacagctcctacttcgtcgaatggattcctaataacgtgaaaactgcagtctgcgacatcccccctaggggcctcaaaatggccgtgacattcatcggtaattctacagcaattcaggaattgtttaaaaggatatctgaacagttcaccgcaatgttccggcggaaagcattcctgcactggtataccggggagggaatggacgagatggagtttacagaggcagagagtaacatgaatgatctggtaagtgaataccagcagtaccaggacgctaccgcagaggaagaagaagactttggcgaagaagcagaagaggaggcctag

SEQ ID NO: 253293 - DNA, 1335 bp, Artificial Sequence
  derived and/or modified sequence
atgcgggagatcgtgcacatccaggccggccagtgcggcaaccagattggagccaagttctgggaagtgatcagcgacgagcacgggatcgaccccacgggcacctatcatggggattcagatctgcagctcgacaggatctccgtttattacaacgaagccacaggaggtaagtatgttccccgagctatacttgtggacctggaacccgggacaatggattccgtccgttcgggtccgttcggccagatctttagaccagacaacttcgtatttggccagtccggcgccggcaataactgggccaaggggcactacacagaaggcgcggaactggtggactcagtgctggatgtggtgcgcaaggaggcggagtcttgcgattgccttcagggcttccaactcacccactctcttggggggggtacaggatcgggaatgggcacactgttgattagtaaaatccgggaagagtacccggaccgaatcatgaacaccttttcagtagttccttccccaaaggtctccgacaccgtggtggaaccctataacgccaccctctctgtgcaccagcttgtcgaaaataccgacgagacctactgtattgacaatgaagctctctacgatatatgcttccgaaccctcaaactcactacccctacctacggtgacttaaatcacctcgtatccgcaaccatgtcgggcgttaccacctgtttacggttcccaggtcagctaaacgctgatttacggaagctggcagtaaatatggtgcctttccccaggttacacttctttatgcccgggttcgcccccctgacatcccgcggatctcaacaatatagggccctgacggtgcctgagctgacccagcaggtcttcgatgcaaaaaatatgatggctgcttgtgatcctaggcacgggcgatatctcacagttgcggctgtatttcgtggacggatgagcatgaaagaagtggacgaacagatgttgaatgtgcagaataaaaacagctcgtactttgttgagtggattcccaataacgttaagacagccgtctgtgatataccaccgcgcggtctaaaaatggccgttacatttatcgggaatagcaccgccatccaggagttgttcaaaagaatatctgagcagtttacagccatgttcagacggaaagcattcttgcattggtacaccggtgagggtatggacgagatggagtttaccgaggctgaatctaatatgaacgacttggtttcagagtaccaacagtatcaggatgcaacagctgaggaagaggaagactttggcgaggaggcggaagaggaagcatag

SEQ ID NO: 253294 - DNA, 1248 bp, Artificial Sequence
  derived and/or modified sequence
atgcgggagatcgtgcacatccaggccggccagtgcggcaaccagattggggccaaattttgggaagtgatttctgacgagcacgggatcgaccctacagggacctaccacggggacagtgacctgcaactggaccgcatctcagtgtattacaatgaagcgactggcgggaaatatgttcctcgagccatactggtggacctggagcccgggaccatggacagtgtccgcagcgggccatttggccagatcttccgccccgacaacttcgtctttggtcagtcaggggccgggaataactgtctgcagggtttccagctgacgcactctctcgggggaggaaccggatcaggcatgggcaccttacttatcagcaagattagggaggaataccccgataggataatgaacactttttctgtcgtccccagccctaaagtctcggacactgtcgtggagccttataacgctacactgtccgtccaccagctggtggagaacaccgacgagacctactgcattgacaacgaagctttgtatgacatatgtttcaggacactgaaactgacaaccccaacgtacggcgatctgaaccatctggtttccgccactatgagcggcgtgactacttgtttgcgtttcccaggtcagcttaacgccgatctgaggaagctggcggttaatatggtgcctttccctcggctgcattttttcatgcctggcttcgccccgctgactagccggggcagccagcagtatcgggccctgacggtacctgaactgacacagcaggtcttcgatgccaagaacatgatggctgcttgcgacccacggcatggaaggtatttgacagtggcggccgtgttcaggggcagaatgagcatgaaggaagtggatgagcagatgcttaacgtgcagaataagaactcctcttatttcgtggaatggatccccaacaatgtcaagacagccgtctgtgatattcccccgagaggcctcaagatggccgtgaccttcattggaaattccactgctatacaggagctgttcaaaagaatcagcgaacagtttactgcaatgttccgcaggaaagcatttttgcactggtacacaggtgaagggatggacgagatggagtttacagaggccgaaagcaacatgaacgacctggtgtcagaatatcaacagtatcaggacgccacggcggaagaagaagaggacttcggggaggaagccgaagaggagtag

SEQ ID NO: 253295 - DNA, 1308 bp, Artificial Sequence
  derived and/or modified sequence
atgcgggagatcgtgcacatccaggccggccagtgcggcaaccagataggagccaagttttgggaggtcatatcagacgaacacggtattgatcctacaggcacctaccacggtgacagcgacctgcaattagaccggatctccgtctattataatgaagccacaggcggcaagtatgtgcctagagccatcttggtggatctggaaccggggaccatggactccgtgaggagtggaccattcggtcaaatctttcgccctgacaacttcgtcttcggtcagtcaggggctgggaacaactgggccaaagggcactatactgaaggcgctgaactagtggacagtgtattggatgtggtgaggaaggaggccgagtcgtgcgattgtttgcagggatttcagctcacacactccctcgggggcggtacaggctcaggaatggggaccctgctcatttcaaaaatccgggaggagtatcccgacagaatcatgaatacttttagcgtcgtcccctctcctaaggtttctgatactgtggtcgagccctataacgccaccctcagcgtacaccaactggtagagaatacagatgaaacctactgtattgacaacgaagccctttacgatatctgtttccgaacactgaagttgactacccccacttacggggaccttaaccacttagtgtctgctacgatgtccggcgtaaccacctgcctaaggtttcccgggcaactgaacgcggacctgagaaaactggcagtgaatatggtcccattccccaggctgcacttcttcatgccgggtttcgctcccttgacatcaagaggcagccagcagtatcgggcactcaccgtgccggaacttacccagcaagttttcgacgcgaaaaatatgatggctgcttgcgatccacggcacggccgctacctgacggtggctgcagtgtttcggggaaggatgagtatgaaagaggtcgatgaacaaatgttgaacgttcagaacaaaaattcgtcttactttgtggaatggattcccaacaatgtcaaaacagcagtgtgcgatatccctcctaggggcctaaagatggcagtgacctttataggaaattccaccgccatacaagaactgttcaagaggatctccgaacaatttacagccatgtttcggcgcaaagccttcctgcactggtatacgggggaggggatggacgaaatggaatttacggaggctgagtcgaatatgaacgatttggtttccgaatatcagcagtaccaagatgcaaccgcagaaggcggagggctgtag

SEQ ID NO: 253296 - DNA, 1308 bp, Artificial Sequence
  derived and/or modified sequence
atgcgggagatcgtgcacatccaggccggccagtgcggcaaccagatcggggcaaagttctgggaggtgatatccgacgagcacggtattgaccccactggaacttatcacggggatagcgatttacaactcgatcgcatcagcgtgtattataatgaggcaaccggcggcaagtatgtcccaagggctatcttagtggacctggagcccggtactatggactcagtgcgctccggaccttttggccagatttttcggccagacaatttcgtttttgggcaaagcggagctggcaacaactgggctaaggggcattataccgaaggtgctgaactcgtagattcagtgcttgacgtggtgaggaaagaggcggaatcttgtgattgtctgcagggtttccagctcactcattccctggggggcggcaccggtagtggcatgggtactttgctgatttctaagatacgagaggagtatcccgaccgaatcatgaacacattttcagttgttccgagtccaaaggttagtgatacagtggtggagccctataacgcaactttgtcagtgcaccagctggttgagaacaccgatgaaacatactgcatcgataatgaagccctttacgatatctgttttcggactttgaagctgaccacgccaacatacggagacctcaaccacttggtaagcgctaccatgagcggagttaccacttgccttcggtttcctgggcagttgaatgcagacttgcgcaagctggctgtgaacatggttcccttcccaaggctgcacttttttatgcccggattcgcaccgctgacctcccgcggttcgcagcaataccgggccctcacagtacctgagctgacacagcaagtcttcgatgcgaagaacatgatggcagcatgtgaccccagacatggccgttatctcaccgtcgctgctgttttcagaggccgaatgtcgatgaaggaggtcgatgagcaaatgctgaatgtgcagaataaaaattcctcctactttgtcgagtggatacctaataatgtcaaaactgcggtgtgcgacatccctccgcggggcctcaaaatggccgtaacgtttatcgggaacagtaccgcgatccaggaactctttaagaggataagcgagcagtttactgcaatgtttcgcaggaaagccttcctacactggtacacgggcgaaggtatggacgagatggaatttactgaggctgaatcgaatatgaacgaccttgtgagtgagtatcagcagtaccaggatgcaacagctgagggcggggggttatag

SEQ ID NO: 253297 - DNA, 1308 bp, Artificial Sequence
  derived and/or modified sequence
atgcgggagatcgtgcacatccaggccggccagtgcggcaaccagattggcgctaaattttgggaggtgatttcagacgagcatgggattgatcccacgggcacataccatggcgactctgacctgcaattggacaggattagcgtttattataacgaggccacaggcggcaagtacgtgccaagggctatccttgtggacctcgagcctggaaccatggacagtgtgaggtcaggacctttcggtcagatcttcaggcccgataatttcgtgttcggacaatctggggccggaaacaactgggccaagggccattatactgagggtgcggagttggtggacagcgttttagatgtggtaaggaaggaggccgagtcctgtgattgtcttcaaggtttccaactcacacacagcctgggcgggggaacaggatcaggcatgggaactttgttgattagtaagatcagagaagagtacccagaccgcattatgaatacatttagcgtggtgccatcccccaaggtgtccgacacagtagtggaaccatataatgccacgctcagcgtgcaccagttggtagagaacaccgacgaaacctactgtatcgacaatgaggccctgtacgatatttgcttcaggactttgaaacttacgacccccacatatggggatttgaatcacctcgtgagtgcgaccatgagtggcgtcactacctgtttgcggttcccggggcagttaaacgctgatcttcgaaagttggctgttaacatggtgcccttcccacgcctgcatttctttatgcccggatttgctcccctgactagtcggggctcccaacagtacagagccttgacggtacccgagttaacacagcaagtcttcgacgccaaaaacatgatggcagcctgcgaccccagacacggacgctaccttacagttgctgcggtgttccgggggaggatgagtatgaaagaggttgacgaacagatgctgaatgtgcaaaacaagaactccagctattttgtcgaatggatcccaaacaatgtcaaaaccgccgtgtgcgacatccctccgcgcggactaaagatggccgttacttttattggaaactcaactgcaatccaagagctgttcaagaggatcagtgagcagttcaccgctatgttcagacggaaagcattcctgcactggtacaccggggaaggtatggacgagatggagttcaccgaggccgagagtaatatgaatgacctcgtaagtgagtaccagcagtaccaggacgcgaccgctgagggcggaggcttgtag

SEQ ID NO: 253298 - DNA, 1248 bp, Artificial Sequence
  derived and/or modified sequence
atgcgggagatcgtgcacatccaggccggccagtgcggcaaccagattggcgctaagttttgggaagttatttcggatgagcatgggatcgatcccacaggcacataccacggggattccgatctacaactggatcgcatttcagtctactataacgaggctaccggaggtaagtacgtgccacgggctatcttggtggacctggagcctggcacgatggatagcgtgcggtccgggccgttcggccaaatctttaggccggataacttcgtattcggacagtcgggcgccggaaacaattgcctgcagggctttcagctcacccattcactaggcggaggcactggatcgggaatgggtactctgttaatttcaaagatccgggaggaataccctgatcgcataatgaatacattctctgtcgtcccctcaccaaaagtgagcgatacagtagtggaaccgtacaatgccacactttccgttcaccagttggtggagaataccgatgagacctactgtattgacaacgaggccctgtatgatatatgtttccgcacactgaaacttactacaccaacctacggagacctgaatcacctggtctctgccacgatgagcggcgtgacaacctgcctgaggttcccgggccaactcaatgccgacctgaggaaactggccgtcaatatggtccccttcccccgcctgcacttcttcatgcctggcttcgcaccccttacgtcaagagggtcccagcagtaccgggcattgacagtgcctgagctgacacagcaggtgttcgatgccaaaaacatgatggcagcctgcgatccccgacacggccgttatctaaccgtcgccgctgtctttcgaggcaggatgagtatgaaggaagttgacgagcagatgctcaacgttcagaacaagaactcatcatacttcgtggagtggatcccgaataatgtcaagactgctgtctgcgatataccacccagaggacttaaaatggctgtgactttcatcggtaatagtacagcaatccaagagctctttaagcggatttctgaacagttcacagcaatgtttcgaaggaaagcttttttgcattggtacaccggagaggggatggacgaaatggagttcactgaagcagagagtaatatgaacgacctggtgtcggaatatcagcagtaccaagacgctaccgcagaagaagaggaagatttcggcgaggaagccgaagaagaatag

SEQ ID NO: 253299 - DNA, 1248 bp, Artificial Sequence
  derived and/or modified sequence
atgcgggagatcgtgcacatccaggccggccagtgcggcaaccagatcggagctaagttttgggaggtgatctctgatgagcacgggatcgaccctactggcacataccatggcgatagcgaccttcagctcgatcgcatttccgtttattataacgaggcaaccggaggcaaatacgtgcctcgcgctattttggttgatcttgaacctggcacgatggattcggtgaggagtgggccttttggacagatctttagacctgacaacttcgtttttggccagtccggtgctggaaacaactgcctgcagggattccagctgactcactctctgggaggtgggaccggctctggtatgggaaccctgctcatatcaaagatccgagaagagtaccccgacaggataatgaacacattctccgtggttcctagccccaaggtcagtgatacagtggtggaaccttacaatgctacgctgagcgttcatcagcttgtggagaacaccgacgagacttactgcattgataatgaggccctgtacgatatttgttttcgcacactcaaactgactactcccacttacggtgatcttaaccacctagtgagcgccaccatgtctggggtgacaacctgcctaagatttccgggccaactgaacgccgatctcaggaaattagctgtgaacatggtgcctttcccccggctgcatttcttcatgcccggttttgcgccccttacaagcagaggtagccagcagtatcgggcactgacggtgccggagctgactcagcaggtgtttgacgccaaaaatatgatggccgcttgcgacccacgacacgggaggtacctcaccgttgctgcggtgttccggggcagaatgagtatgaaagaggtagacgagcagatgttaaatgtacagaacaagaatagttcatatttcgtagagtggatccctaacaacgtaaagaccgccgtttgcgacattcccccgcggggtctgaagatggccgtgactttcatcgggaattcaactgccatccaggagctgtttaaacgtatttctgaacagttcactgctatgttccgtcgcaaggcatttcttcactggtataccggcgagggcatggacgagatggagtttaccgaagcagaatccaacatgaacgatctggtcagtgagtaccagcagtaccaggatgctaccgctgaagaggaagaagactttggagaggaggccgaggaagagtag

SEQ ID NO: 253300 - DNA, 1248 bp, Artificial Sequence
  derived and/or modified sequence
atgcgggagatcgtgcacatccaggccggccagtgcggcaaccagataggcgccaagttttgggaggtcatatcagacgaacatggaatagaccccacaggtacctatcacggcgattctgacttacagctcgaccggattagcgtgtattataacgaagccactggaggcaaatatgtacctagggcaattctggttgatctcgagccagggaccatggattcagtacgcagtgggccttttgggcaaatcttcagaccagataatttcgtattcgggcagtctggggctggcaacaattgcttacaggggttccaattaactcatagcctgggcggcgggaccggttcaggaatgggtactctgcttatctccaagatccgcgaggagtatccagatagaataatgaacacctttagcgtggtgccttcccccaaagtctctgataccgtggtcgagccttataacgctacactatcagtgcaccagctcgtggagaatactgatgagacctactgtatcgataacgaggcgttgtatgacatctgctttcgaacactgaagctgaccacccccacatatggggatcttaatcacctggtgtccgccaccatgtcaggggtgactacgtgtctcagatttccgggccaactgaatgcagacctgagaaaattagccgtgaacatggtcccgtttccaaggctgcactttttcatgccagggttcgcccctctaacatctagaggcagtcagcagtaccgggcattgaccgtacccgagttaacccagcaggtattcgacgccaagaacatgatggccgcttgcgaccctagacacgggaggtacttaaccgttgcagccgtgtttcgcgggaggatgtccatgaaggaagtcgacgaacaaatgttgaacgtgcaaaataaaaacagcagctacttcgtggagtggatccctaataatgtgaagaccgccgtctgcgatatacctcctcggggcctgaagatggcggtgaccttcattgggaactctaccgcaatccaggaactttttaagcggattagcgaacaatttacagccatgtttagacgcaaggcctttctgcactggtataccggcgaagggatggatgagatggagtttacagaggctgagagcaacatgaatgacctggttagcgagtatcagcagtatcaggacgcgaccgccgaggaagaggaagacttcggggaagaagcagaggaggagtag

SEQ ID NO: 253301 - DNA, 1308 bp, Artificial Sequence
  derived and/or modified sequence
atgcgggagatcgtgcacatccaggccggccagtgcggcaaccagattggagcaaaattctgggaggttatatcagatgagcacgggattgaccccaccggcacttatcacggtgattcagacctgcagctagatcgaattagcgtttattacaacgaggctaccggaggaaaatacgtgcctagagcgatccttgtcgacctggaaccaggcaccatggactcagtgcgcagcgggccctttgggcagatttttagacccgataattttgtgttcggtcaatctggagcgggcaacaactgggcgaaagggcattatacagaaggggcggaactggtggattccgtcctggatgtcgtgcggaaggaagcagagtcttgcgattgcctccagggctttcagctcacgcacagtttggggggagggacgggatctggcatgggcacattgttaatatccaagatcagagaggaatatcccgatcggatcatgaacaccttctctgtggtcccttcacccaaggtgtcggatacagtggtcgaaccttacaatgctaccttgagcgtacatcagctggtagaaaatacggatgaaacctactgcatcgataatgaggccctctatgatatttgcttccggaccctgaaactcaccactccaacttatggcgatcttaatcacttggtcagcgcaacgatgtctggggttacaacctgtctccggttcccaggtcagctgaacgccgacttgcgtaaactagcagtaaacatggtgccgtttccacggctgcacttcttcatgccaggctttgctccacttacctcacggggcagccagcagtaccgggccctgaccgtgcctgagttgactcagcaggtattcgatgcgaaaaatatgatggccgcatgcgatccccgccacggtcggtatctgacggttgctgccgtttttaggggaagaatgtctatgaaagaggtagacgagcaaatgttgaatgtccagaataagaactcctcttacttcgtcgaatggatacccaataatgttaagacagctgtatgtgacatcccaccacggggcctaaagatggcggtgacctttattggcaactcaaccgccatccaggagctctttaagcgcatcagcgaacagttcactgccatgttcaggagaaaggcttttcttcactggtacacgggtgaggggatggacgagatggagttcaccgaggcagagtcaaacatgaatgatcttgtgagcgaataccagcaatatcaggacgcaactgccgaggggggtggactttag

SEQ ID NO: 253302 - DNA, 1308 bp, Artificial Sequence
  derived and/or modified sequence
atgcgggagatcgtgcacatccaggccggccagtgcggcaaccagatcggagccaaattttgggaggtcatctctgatgagcacggtattgatcctacagggacctaccatggcgattctgatctgcagctcgataggataagtgtctattataatgaggcaaccggaggcaagtatgtgccaagagcgatcttagtggaccttgaacctgggacaatggatagcgtccgaagcggcccatttgggcaaatctttcgccctgacaatttcgtgtttggtcaaagcggggccgggaacaactgggctaaaggtcactacacagagggggctgagcttgtcgatagtgtgctggacgtcgtccggaaggaagcagagagctgtgactgcctgcagggattccagctcactcacagcctgggagggggcacagggagtgggatgggaaccctgctgatctctaaaatccgagaagagtatcccgatcggattatgaatacgttctctgtggtgccatctccgaaagttagtgatacagtcgtggaaccttataacgctacccttagcgtgcaccagctggttgaaaatacggacgagacatactgcattgataacgaagctctgtacgacatctgtttccggacgctaaagctgacgacccccacttacggagatttgaatcacctggtgtcagccactatgagcggggtgaccacctgtttacggttccctggccaactgaatgctgacctgaggaaactggcggtgaacatggtgccgtttcctaggctgcattttttcatgcccggatttgcccctctcaccagccgcggatcacagcaatatcgcgcccttactgtgccagagctaacccaacaggtcttcgacgcaaagaatatgatggccgcctgtgatccccgtcatggaagataccttaccgtggccgccgtatttcggggcagaatgagcatgaaggaggtcgacgaacaaatgctaaatgtgcagaacaaaaactctagctattttgtggagtggatccccaacaatgtcaaaaccgccgtgtgcgacattccccctagaggactgaaaatggcggtcacttttattggaaattctacagccattcaggaattgtttaaaagaattagcgagcagttcactgcgatgttccggcgcaaggcttttctacattggtacaccggcgaggggatggatgaaatggagttcaccgaagcggaatccaacatgaatgatctcgtgtcggaatatcaacagtatcaggacgccaccgctgaggggggcggcctctag

SEQ ID NO: 253303 - DNA, 1308 bp, Artificial Sequence
  derived and/or modified sequence
atgcgggagatcgtgcacatccaggccggccagtgcggcaaccagatcggggctaagttttgggaggtaattagcgatgagcacgggatcgacccaaccgggacctatcatggtgattctgaccttcagctggaccgcatttccgtctactataacgaggcaacaggaggcaagtacgtgccgcgagccattctggtcgatctcgagccaggcaccatggactcagtgagaagcggaccttttggtcagatcttccggccggacaactttgtctttggacagagtggagcggggaataactgggcaaagggacactatactgagggagcagagttggtggactccgtgctggatgtagtgcggaaagaagctgagtcatgtgactgtcttcagggatttcagctaacacactctctgggggggggtacaggctccggcatggggaccctcttgatctcaaagattcgcgaagaataccccgatcggataatgaacaccttctcggtggtaccctcaccaaaggtatcagatacagtggtagagccttacaacgccacattatccgtacaccaattagtggaaaataccgacgagacctactgtatcgacaacgaagctctgtatgacatctgctttcggacactgaagctgacaacccccacgtatggcgatctgaaccatctcgtttctgctactatgagtggagtgactacatgcctccggtttcctggacaactcaacgctgacttaaggaagctggcagtgaacatggtgccctttcctagactccacttcttcatgccgggctttgcccccctgacaagccgcggatctcagcagtaccgagcacttacggtccccgaattgacccagcaggtgtttgatgccaaaaacatgatggccgcctgcgatcccagacatggtcgatacctgacagtcgcggctgtgtttcgcggacgtatgtccatgaaggaggtagatgagcagatgctgaacgtgcagaacaaaaatagcagctattttgtggaatggattccgaacaatgtaaaaacagccgtctgtgatatcccaccacgggggcttaagatggccgtgactttcatcggcaactcgacagcaattcaggagttgtttaagcgcatttctgagcaatttaccgctatgttcagaagaaaagctttcctccactggtataccggggaaggaatggatgaaatggaatttaccgaggcagagagcaatatgaatgacctcgtgtcagaataccaacagtatcaagatgccacagctgaaggcggaggcctgtag

SEQ ID NO: 253304 - DNA, 1248 bp, Artificial Sequence
  derived and/or modified sequence
atgcgggagatcgtgcacatccaggccggccagtgcggcaaccagatcggagctaagttctgggaggtgatctccgatgagcatggcatagatccaactgggacctaccacggcgactcagatctgcagctcgatcggatcagtgtgtactataatgaggctaccggaggcaagtatgtgccacgcgctatattggtcgacctagagccaggtaccatggacagtgtcagaagtggaccttttggacaaatttttagacccgataacttcgtgttcggccaatccggagcagggaacaattgcctgcagggttttcagctgacccacagcttgggaggcggcaccggatctgggatggggaccttgttgatcagcaaaattagagaggagtatcccgatcggataatgaatactttctccgtggtcccatcccccaaagtttccgacacagtggttgagccatacaacgccaccctcagcgtacatcaactggtcgagaacacagacgagacttattgcattgataacgaggccctgtacgatatttgctttcggacactcaaactaactactcccacctacggagacctaaaccacctggtgagcgcaaccatgagtggagtcaccacctgccttcgcttccccggccagctcaatgctgatttgcgcaagctcgccgtgaatatggtgcccttcccacgcttgcacttttttatgccaggatttgcccccctcactagccgcggctctcagcagtatcgggctctgaccgtgccagaactgacccagcaggtatttgatgctaagaatatgatggctgcatgtgatccacgtcatggcagatacctcaccgtagccgcagtctttcgaggcaggatgtcaatgaaggaggtggacgaacagatgctaaatgtgcagaataaaaactcttcctactttgtggaatggatccccaacaacgtcaaaacagcagtgtgcgacatcccaccaagaggactaaagatggcagtcacttttatcgggaactccactgccattcaggagttgttcaaaaggatatccgaacagttcacggccatgtttcgccggaaagcattcctgcattggtataccggggagggcatggatgagatggagttcaccgaggcagagtccaacatgaacgacctggtgtcggagtatcaacagtatcaggatgctactgcagaggaggaagaagactttggggaggaagccgaggaggaatag

SEQ ID NO: 253305 - DNA, 1308 bp, Artificial Sequence
  derived and/or modified sequence
atgcgggagatcgtgcacatccaggccggccagtgcggcaaccagataggggctaagttctgggaagttatctccgatgagcatggaattgaccccactggaacttaccacggggattctgacctgcagctcgaccggatttcggtgtactataatgaggcaacaggtggtaaatacgtacctagagctatattggtcgaccttgagccggggaccatggatagcgtgaggagtggcccttttgggcaaattttccggcccgataacttcgtgtttggacagtccggagcaggcaacaactgggcaaagggtcattacactgaaggagcagaactggtagacagcgtgctcgacgtggtgcgcaaggaggccgagtcatgcgactgtctccaggggtttcagctgacgcattcgctagggggcgggaccggatccggaatgggtaccctcctgatcagcaagattcgggaagaataccccgaccgtattatgaacacatttagtgtagttccctctccaaaagtgtccgacaccgtggtcgagccttacaacgccactttgtcagtgcaccaactagtagaaaacacagacgaaacttattgcattgacaatgaggccctctatgacatctgctttcggactcttaagttgacaactccaacgtatggagacctgaatcaccttgtctctgctaccatgagcggtgtcacaacgtgcttacggtttcctggtcaattgaatgctgacctgaggaagctagcagtcaacatggtcccctttccccgacttcacttcttcatgccaggattcgcgcccctgacctctcgtggctcccagcagtatcgggccttgacagtgccggagctgacacagcaggtgtttgacgctaaaaacatgatggccgcgtgcgacccacggcatggtagatacctgactgtagccgcggtcttccgcgggcggatgagcatgaaagaagtggacgaacaaatgttgaatgtgcagaataaaaacagcagttattttgtagagtggattcccaacaacgtcaagacagccgtatgtgacattcctccgcgcggtcttaagatggccgttacatttattggcaactccacagccatacaggagctgtttaagcggataagcgagcagttcaccgcaatgttcagaagaaaggcctttctccattggtatacaggggaaggtatggacgagatggagtttaccgaggccgagtctaacatgaacgacctggtctctgaataccagcagtatcaggatgccacagccgaagagggaggggtttag

SEQ ID NO: 253306 - DNA, 1248 bp, Artificial Sequence
  derived and/or modified sequence
atgcgggagatcgtgcacatccaggccggccagtgcggcaaccagatcggcgctaagttctgggaagtgatttccgacgaacacggcatcgaccccacaggtacctatcacggggatagtgatttacagctcgacaggattagcgtgtactacaatgaggctacaggcggaaagtacgtgccacgcgctatcctggttgatctggagccgggcaccatggactctgtgagatcaggaccctttggccagatctttcgtcctgacaattttgtgttcggacaaagtggcgccggaaacaactgcctacagggtttccagctaacacacagcttgggcggcggcactggatccggcatgggcaccctactaatttccaaaatccgggaagagtaccccgaccgcattatgaacactttctccgtggttccttcacccaaagtctcggacacggtagtggagccatataatgccacactgagtgtgcatcagttggtggagaacacggacgagacctattgtatcgacaacgaagcactttacgatatatgtttcaggacgctgaagctcaccacacctacatacggggacctcaatcatttggtgagtgccacaatgtctggggtaactacttgtttgaggttccccgggcagctcaacgcagacctgcgcaaactggctgtgaatatggtgccatttcctcggttacatttttttatgcccggctttgccccactgacaagtcggggttcgcagcagtacagggcattaacagtacccgaattgactcagcaggtctttgatgctaagaacatgatggctgcatgtgaccccagacatggtaggtacttgacggttgcagccgtttttagaggacgcatgagcatgaaagaggttgatgagcagatgctgaatgtacaaaataaaaatagcagctactttgtggagtggatccccaataatgtcaagacagctgtctgcgacatccccccccgtgggctaaagatggccgtcacttttatcggcaactctacggctatacaagagctattcaaaagaatatccgaacagttcaccgccatgttcagacgaaaagccttcctgcattggtacacaggagaggggatggatgagatggagtttacagaagcggaaagcaacatgaacgacctcgtgtccgagtatcagcagtaccaggatgctacagctgaagaggaggaggatttcggcgaagaggccgaggaagagtag

SEQ ID NO: 253307 - DNA, 1248 bp, Artificial Sequence
  derived and/or modified sequence
atgcgggagatcgtgcacatccaggccggccagtgcggcaaccagattggtgctaagttttgggaagtgatcagtgatgaacacggaatcgatcctacaggcacttaccacggtgactctgatcttcaactggacaggattagtgtatactacaatgaagctacgggcgggaagtacgtgccaagggccattctggtagacctggagccgggcaccatggattccgtacgatccggtccattcggacagatctttagacctgataacttcgtgtttggtcaaagcggcgcaggaaacaattgtctgcaggggtttcagctaacacattccttagggggtgggacgggatcaggcatgggaaccctccttatctccaagatccgggaggagtatccagataggatcatgaataccttcagtgtagttccctcccccaaagtaagcgacactgtggtggagccttacaatgccaccctgtcagttcaccaactcgtggaaaacaccgacgagacttattgcattgataacgaagcactttacgatatatgtttcagaacactgaagctgacaacgcctacttatggagacctcaaccatctcgtctcagctaccatgagtggggttacaacctgcctgaggttccccgggcagctgaatgctgacctgcgcaaactagccgttaacatggtgccatttccacgtctgcatttcttcatgcctgggttcgccccactgacctcccgcgggtcacagcaataccgcgctcttaccgtccctgagctcacacagcaggtcttcgacgcgaagaacatgatggctgcctgtgacccgcggcacgggagatacctaacagttgccgccgtgttccgcggacgtatgtctatgaaggaggtcgacgaacagatgcttaatgttcagaataagaattcgagttacttcgtggagtggattcctaataatgtaaagacggcagtgtgtgacatcccgcctagagggcttaaaatggctgtcacgttcatcggaaattccaccgctattcaggagctattcaagcggataagcgagcagtttaccgctatgttccgtaggaaagccttcctgcattggtatacaggcgaagggatggatgagatggagttcaccgaggccgagagtaatatgaatgacttagtgtctgagtaccaacagtaccaggacgccactgccgaagaagaggaagattttggcgaagaggctgaagaggagtag

SEQ ID NO: 253308 - DNA, 1335 bp, Artificial Sequence
  derived and/or modified sequence
atgcgcgaaatagtgcacattcaggccggtcaatgcggcaatcaaattggagctaaattctgggaggtgatttcggacgaacacggcatcgacccaaccggaacctaccacggggacagcgacctccagctcgacaggatatctgtgtattacaacgaggccacagggggaaaatatgttccacgtgctatcctggtggatttagagccagggaccatggattctgtgcgttctgggccttttggtcagatcttccggccagataactttgtctttggccagagtggggctggcaacaattgggccaagggccattataccgagggtgccgagttagtcgatagtgtcttggacgtggtgcggaaggaagccgaaagttgtgactgcttgcagggctttcaactgacccactcactgggcggagggactggcagcggtatgggaaccctcctgatttcaaaaatcagggaggaatacccggatcgcatcatgaacacattcagcgttgtgccctcacctaaagttagcgacactgtggtcgaaccttacaatgctaccctcagcgtgcaccagttggtggagaacacagatgagacctactgcattgataacgaagccctgtacgacatttgttttaggacccttaaactaacaactcccacatacggagatctgaaccacctggtgtcagcaaccatgagcggtgtaactacgtgcctgcggtttccaggtcagctcaatgctgacctgcgcaaactcgctgtgaatatggtcccatttccgcgactccatttcttcatgccagggttcgcccctttgacctctcggggatcccagcagtacagggctctgactgtgcctgagctgacccagcaggttttcgacgctaagaacatgatggccgcttgtgaccccaggcatggacgatatctgacagtcgccgcagtcttcagaggccgtatgagtatgaaagaggtcgatgagcaaatgctgaatgtccagaataagaactccagctacttcgtggaatggatcccgaataatgtgaaaactgctgtgtgcgatattcctccccgagggctgaaaatggccgtcactttcatagggaacagcacggccattcaggagctatttaagcgcatcagtgaacaatttacagccatgtttcggagaaaagcctttctgcattggtacacaggggagggcatggatgaaatggagttcacggaagcagagagcaatatgaacgacctcgtgagtgagtatcaacagtatcaagatgccaccgccgaagaagaggaagacttcggcgaggaagcggaggaggaggcctag

SEQ ID NO: 253309 - DNA, 1335 bp, Artificial Sequence
  derived and/or modified sequence
atgagagaaatcgtgcatatccaggcaggccagtgtggaaatcagatcggagccaagttctgggaggttatcagtgacgaacatggcatcgatccaacaggcacctaccacggagacagcgatcttcagctggaccgcatctcagtttattataatgaggccaccggaggtaagtacgtaccccgtgctatcctggtcgatctggaaccgggaactatggatagtgttcggagcgggccattcggccagatcttcaggcctgacaatttcgtatttggacagagcggggctggaaacaattgggccaagggccactatacagaaggcgcagagttagttgattccgtgctcgacgtggtgcggaaagaggcagagtcatgtgattgcctccaaggattccagctgactcatagccttgggggtggcaccggatccggtatgggcaccctgttgatttccaaaatcagggaggagtacccagacaggatcatgaacaccttttcagttgtgcccagccctaaggtgtcagacactgtagtggaaccttacaatgctaccctttctgtgcaccaactggtggaaaatacagatgagacgtactgtatcgataatgaggccctgtacgacatatgttttagaactttgaaactaacaacacctacgtacggggacctcaatcatctcgttagcgccacgatgagcggggtgacaacctgtctcagattccccggtcagttaaatgccgatctgagaaagctggcggtgaatatggttccattcccccgattgcattttttcatgcctgggtttgctccccttacgtcacgaggctcacagcagtatcgggcactcacggtgccagagttgacccagcaggtatttgacgctaaaaatatgatggcagcttgtgatcctcgccacggtcgatatctgacggttgctgccgtattcaggggtagaatgagcatgaaagaggtggacgaacagatgctgaatgtgcagaacaaaaacagctcctactttgtggaatggatacccaataatgtgaaaacagcagtttgcgatatcccaccccgaggtctgaaaatggcggtcacattcatcggtaattccaccgcgattcaggagctgttcaaacggatctctgaacagttcacagccatgtttaggagaaaagcctttctgcattggtatacaggtgaaggaatggatgaaatggagttcaccgaggcagagtccaacatgaatgacctagtgagtgaatatcaacaatatcaagatgctacagccgaggaagaggaagatttcggcgaagaggctgaggaggaagcttag

SEQ ID NO: 253310 - DNA, 1281 bp, Artificial Sequence
  derived and/or modified sequence
atgttttgggaggtcatctcagacgagcacgggattgatccaacaggaacgtatcacggggattccgatttacagctggatcggatcagtgtttattacaacgaagccaccggaggcaaatacgtgccgcgtgcgatcttagtggatctcgagcctggtacaatggatagtgtgagaagcgggccattcggccagatcttccgacccgataatttcgtgtttggccagtcaggcgcaggcaataactgggccaagggtcactatacagagggcgctgagctggtggactctgtactggacgtagtgcgcaaggaggccgagtcttgtgactgtctccagggcttccagctgacccattccttgggcggagggaccggatcaggaatgggtaccctactgattagcaagattcgggaagagtatcccgacagaattatgaacaccttttcggtcgtgccatctccgaaggtgagcgacactgtcgttgaaccatacaatgccaccctcagcgtgcaccaactggtggaaaatacagacgagacttattgtattgacaacgaggctctatatgatatttgtttccgaacactgaaattgacaactcccacctacggggacttgaaccatctcgtatccgccacaatgtccggagtgactacctgtcttaggtttcccggtcaactgaacgcagacctcagaaagctcgcagtgaacatggtcccctttcccaggcttcactttttcatgccagggttcgctccgttaacgtctagaggaagccagcagtaccgcgctctaacagtgcccgagctgacccagcaagtgttcgatgccaaaaacatgatggctgcgtgcgatccacgacacggcaggtatctgacagtcgcggcagtctttcgcggaagaatgagtatgaaggaggtggatgagcaaatgctgaatgtccagaataaaaattcttcttatttcgtcgaatggatcccaaataacgtgaagacagccgtgtgtgacattccgccaagagggctgaagatggcagttacattcatcggcaattcaacagctatccaagagctctttaagagaatctcagagcaattcacggcaatgttccgcaggaaggcatttcttcactggtatacaggcgagggaatggatgagatggagtttacagaggccgaatccaatatgaatgacctcgtgtctgagtatcaacagtaccaggatgctaccgctgaagaggaggaggactttggggaggaggcagaggaggaggcatag

SEQ ID NO: 253311 - DNA, 1281 bp, Artificial Sequence
  derived and/or modified sequence
atgttctgggaggtgattagcgatgagcatgggatagatcccacaggaacttatcatggagactctgaccttcagctggatcgcatttccgtctactacaacgaagccactggcggaaagtatgtgccacgggcaattctcgtggacctcgagcccggtacaatggactcagtacgcagtggtccatttggacagatattcagacccgataatttcgtgtttggacaatccggggctggtaataactgggcaaaaggacattatactgaaggcgctgaattggtagattcagtactggacgtcgtgcgaaaggaggccgagagctgcgattgcttgcagggctttcaacttacccacagcctggggggtggaaccggttccggaatgggtactcttctgatctcaaagattcgggaggagtatcccgatcgcataatgaacacattctctgttgtgccctcgcccaaggttagcgatacagtggtggaaccctataatgcaacgctctctgtgcaccagcttgtcgagaataccgatgagacatactgcatcgacaatgaagccctgtacgatatatgcttccggactctgaagctcactactcctacttatggcgaccttaaccatctggtgagcgctactatgtccggagtgaccacttgtttgcgatttcctggtcagctgaatgcagaccttcgcaagctcgccgttaatatggtcccattcccacggctccatttctttatgcccggattcgctcccctgacgagccgcggatcccagcagtaccgagctctgacagtgccagagcttacacagcaggtattcgatgcgaagaatatgatggccgcttgtgaccccagacatgggaggtaccttactgtagccgctgtgttcaggggcagaatgtctatgaaggaagtggacgaacagatgctcaatgtacagaataaaaacagcagctacttcgtggagtggattccaaacaacgtcaagaccgccgtgtgcgatataccaccccgtggcctcaaaatggccgtgactttcatagggaactctacagcgattcaagaactgttcaagaggatttcagagcagtttacagctatgttccggagaaaagcttttctgcactggtacacaggcgaaggtatggacgagatggagttcaccgaggccgagtcgaacatgaacgatctcgtctcggaataccagcagtaccaggatgcgacagccgaagaggaagaggacttcggagaggaagccgaggaggaagcttag

SEQ ID NO: 253312 - DNA, 1281 bp, Artificial Sequence
  derived and/or modified sequence
atgttctgggaggtgatttccgacgaacacggtatcgaccccactggaacatatcacggtgatagtgacctgcagctggaccgcatcagcgtgtattataatgaggccacgggagggaaatatgtgccccgagctatccttgtcgatttggaaccgggaacgatggattccgtgaggagtggcccattcgggcaaatttttcggcctgacaattttgttttcggtcagtcaggcgctggtaacaactgggccaagggccattataccgaaggggcagagctggtcgattccgtcctggatgtggtgaggaaggaggcagaaagctgtgattgcttgcaaggcttccagttaacccacagtctcggaggaggaacaggctccgggatgggaacactcctgatctccaagatcagggaggagtatccagatcggatcatgaacacctttagcgtagttccaagtcctaaagtttctgacacagtggtggagccgtacaacgcaaccctatcagtgcatcagctagtggagaatacagacgaaacctattgcatcgacaacgaagccctgtatgacatttgcttccgaaccctgaaactgaccacacctacttacggagatctgaaccacctcgtgagtgccaccatgagtggtgtcaccacctgtttacgtttcccgggtcagctcaacgcagacctaaggaaacttgccgtgaacatggtgccctttccccgactccacttcttcatgcctggatttgcgcctctaacgtcacgcggaagccagcagtaccgcgcacttactgtgcccgaactaactcaacaggtttttgacgcaaagaatatgatggcagcgtgtgatcctcgccatggccgatatctcactgttgctgctgtgtttcggggtcgcatgtcaatgaaagaggtcgatgaacaaatgctcaatgtccagaacaaaaatagttcttatttcgtcgaatggattcctaacaacgtgaagaccgccgtatgtgacatcccaccccgtggactgaagatggcggttaccttcattgggaattccaccgctatccaggagctgtttaagaggatttccgaacagttcaccgccatgtttcgcagaaaggcatttctgcactggtataccggcgaggggatggacgagatggagttcactgaagcagagtctaacatgaacgacctcgtttctgaataccagcaataccaagacgcgaccgctgaagaggaagaagacttcggcgaagaagcagaagaggaagcctag

SEQ ID NO: 253313 - DNA, 1281 bp, Artificial Sequence
  derived and/or modified sequence
atgttctgggaggtgattagcgacgaacacggtatagatcccaccggaacttatcatggcgatagtgacctgcagctagacagaatctcagtttactacaatgaggcaactgggggaaagtacgtcccgagggccattcttgttgatctcgagcctggaacaatggactctgtaagaagtggaccattcggacagatatttcggcctgataatttcgtgttcggccagtcaggggctgggaacaactgggccaaggggcactacaccgaaggcgctgaattggtagatagcgtactggatgttgtgcggaaagaagctgagtcctgcgattgcctgcaggggttccagctgactcattccttaggagggggaacgggttccggtatgggcactttgctgatttctaaaatacgagaggaataccccgaccgaattatgaacacattttctgttgtgccctcccctaaagtgagcgacacggtcgtggagccatacaatgccacgctctccgtgcatcagctggtagagaataccgacgaaacatactgtattgataatgaggcattgtacgatatttgctttagaacactgaaactgaccacacccacatacggtgatctgaaccatctcgtttccgctactatgagcggcgtgactacgtgcctgcgatttcccggacaattgaatgcggatctgaggaagctggcagtgaacatggtgccgtttccaaggctgcactttttcatgcccggatttgcgcctctcacatccagaggatctcagcagtaccgcgctttaacagtgcctgaacttactcagcaggttttcgatgccaagaacatgatggcagcgtgtgatcctagacatggacgatacttgactgtggctgctgtgttcaggggcagaatgagcatgaaggaggttgacgaacagatgctaaacgtgcagaacaaaaacagtagctatttcgtggaatggattccgaataacgttaagacagccgtgtgcgatatccctccgcgtgggttgaaaatggccgtgactttcataggtaactctactgccattcaagagttgttcaagcggatatcagaacagtttacagcaatgtttcggcgaaaggcatttctccactggtatactggagaggggatggacgaaatggagttcactgaggccgaaagcaacatgaatgatcttgttagcgagtaccaacagtaccaggacgccaccgccgaggaagaggaggatttcggtgaggaagcggaggaggaagcctag

SEQ ID NO: 253314 - DNA, 1335 bp, Artificial Sequence
  derived and/or modified sequence
atgcgggagattgtccacatccaggcaggacagtgtgggaatcaaatcggcgcaaaattctgggaagtcatatcagacgagcatggtatagatccgaccgggacctaccatggcgatagcgacctgcagctggacaggataagtgtgtattacaacgaagccacgggtgggaagtatgtgccccgtgcaatcctggtggacctggaaccagggactatggactccgtgaggtcaggccctttcggtcaaattttccggccagataactttgtatttggccagtccggggcagggaacaactgggctaagggacactataccgaaggcgcagagctggtggattccgtcctggatgtagtccgcaaggaagctgaaagttgtgactgtctccagggcttccagctgacacactccctcggaggtggaactggaagcggcatgggtacgctgctcatctcaaaaatccgcgaagagtaccctgatcgaatcatgaacacattttctgtcgtgcccagccctaaagtttcggacacagtcgtcgaaccttacaacgccactctctctgtccaccagttggtggagaacacagacgaaacatattgtatcgataacgaggctctttatgatatatgcttcaggactttgaaactgaccacgcccacatacggcgacctgaatcacttagtttccgccacaatgagcggggtgaccacatgcctgcgattccccggacaactgaacgcagatctccgcaagttggccgtgaatatggtacccttccccagactccactttttcatgcccggatttgcgcctctgacatctcgcggaagccagcagtacagggcattgacagtccccgagctgacacaacaagtgttcgatgctaaaaatatgatggctgcttgcgaccctaggcatggacggtacctgaccgtggccgctgtatttaggggcagaatgagcatgaaagaggttgatgagcagatgctgaacgtgcaaaacaagaactccagctactttgtggagtggattcctaacaacgtgaagactgctgtgtgtgatatcccacccagaggactgaagatggctgtcaccttcattggcaattctaccgctatacaggaactcttcaagagaatttccgagcaattcaccgccatgtttcgcaggaaggcctttctgcactggtacactggagaaggtatggacgagatggagttcactgaagctgagtcaaacatgaatgacctggtgtctgagtaccagcagtaccaagatgcaacagccgaggaagaggaggacttcggggaggaagctgaggaagaagcgtag

SEQ ID NO: 253315 - DNA, 1281 bp, Artificial Sequence
  derived and/or modified sequence
atgttttgggaggtgatctctgacgaacatggcatcgaccctaccggtacctaccacggcgacagtgaccttcagctggatagaattagcgtctactataatgaagctacggggggtaagtatgtccccagggcgatacttgtggacttggaacctgggacaatggactccgtcaggagtggtccctttggtcaaatctttcgcccagacaatttcgtcttcgggcagtctggggctggaaataattgggctaagggacattataccgagggcgctgagctggtggacagcgtcctggatgtggtgcgcaaggaggcagagagctgcgactgcttgcagggcttccagcttacccattcactgggcggtggcactgggtcggggatgggcaccctcttaatttcgaagatccgcgaggagtatcccgaccgtatcatgaacactttttcggtggtacctagtccgaaggtgagcgatacggtggtggaaccttacaatgcaacactgagcgtgcatcagctagtcgagaacacagacgagacttattgtattgacaacgaagctctctacgacatttgctttaggacactgaaactgactaccccaacctacggcgacttgaaccacctggtcagcgccaccatgtcaggggtgactacatgcttgaggtttcctggacagctcaatgcagacctgaggaaactggctgtgaatatggtccccttcccaaggcttcacttcttcatgccaggctttgctccactaaccagcagagggtcccagcagtatagggcgttgacggttcccgagctgacgcaacaagtttttgacgctaagaacatgatggctgcatgcgatccccgacacggaagatacctcaccgtcgccgcagtattcagggggaggatgtcgatgaaggaggtcgacgagcaaatgctgaacgttcaaaacaaaaactcatcctactttgtcgagtggatcccaaacaatgtcaaaacggcagtatgcgatatcccgccaagaggacttaagatggccgttacttttattggaaactcgacagccattcaagagctattcaagcggatctcagagcagttcacggcaatgttccgccgtaaggctttcctgcattggtataccggagaaggcatggacgaaatggagtttactgaggccgagtccaacatgaatgatctggtgtctgaatatcagcaataccaggacgctactgccgaagaggaggaggatttcggcgaggaggccgaagaggaggcctag

SEQ ID NO: 253316 - DNA, 1335 bp, Artificial Sequence
  derived and/or modified sequence
atgagggagatcgtccacattcaggccggacagtgtggcaatcagattggggctaagttctgggaagtgattagcgatgagcacggcatcgatccaacaggcacttatcacggagacagcgacctccagctggataggatttccgtttactacaacgaagcgaccggtggaaagtatgtgcccagggctatcctggttgatctggaacctggcaccatggattcagtacgctctggaccttttggtcagatttttcggccagacaatttcgtattcggccagagcggggctggaaataattgggccaagggccattacacagagggggcagagctcgtcgactctgttttagatgtcgtgcggaaggaggccgaatcatgcgattgtctacaggggttccagctgacacactcacttggcggtggaaccggctctggaatgggaactcttctcattagcaaaatccgggaggagtaccccgatcgaattatgaacacattctccgtcgtgccctcacccaaggtgtctgacactgtagtggaaccgtacaacgctactctgagtgtgcatcagctggttgaaaacactgacgagacttactgcatagataacgaagcgctatacgacatctgcttccggactctgaaactcaccaccccgacctacggtgatctgaatcaccttgtgtccgcaactatgagtggcgtgaccacatgcctcaggtttccagggcagctgaatgccgacctgaggaagctcgccgtgaacatggtaccatttcctagactgcacttctttatgcccggattcgccccactgaccagccgcggatctcaacagtaccgtgccctaacggtgcctgaactgacacagcaggtctttgacgcgaagaacatgatggccgcttgtgatcccagacacgggaggtaccttacggttgctgccgtgtttcggggacggatgtctatgaaagaggtggatgagcagatgttaaatgtacaaaacaagaactcttcatattttgttgagtggataccaaataacgtgaagacggcagtctgcgacatccctcccagaggtcttaaaatggctgtgactttcatcggaaattccacggcaatccaggagctgtttaaaagaatctcagagcagttcactgcaatgtttcgcagaaaggcttttctacattggtatacaggggagggcatggacgaaatggagttcactgaagcagaatccaacatgaatgaccttgtaagcgaataccagcaatatcaggacgcaactgccgaggaggaggaggactttggcgaggaggctgaagaggaggcgtag

SEQ ID NO: 253317 - DNA, 1335 bp, Artificial Sequence
  derived and/or modified sequence
atgagagaaatcgtgcatattcaggcaggccaatgtggtaatcagattggcgcaaaattttgggaagtgatttcagatgaacacggcattgaccctaccggaacttatcacggagactctgacctacaattggaccggatttcagtatactacaatgaggcgaccggcggtaaatatgtgccaagagccatattagtggacttggagcccggtaccatggattctgtgcgaagtgggcctttcggacagatcttcagacctgataactttgtgttcggacaaagcggcgctggcaataactgggctaagggacactatactgagggcgcagaattagtggactcagtgctggacgtagtcaggaaggaggcagagtcttgcgactgcctccagggtttccaactgactcatagcctaggcggaggcacgggatctgggatggggacactactgatctccaaaatcagggaagaatatccggatagaattatgaacacgttttccgttgtgccatcgccaaaggttagtgatacggtggtcgaaccatacaatgctacactgtccgtgcatcaactggtagagaatacggacgagacctattgcatcgataatgaggcgctgtatgacatctgctttcgaacgctcaagttgactaccccaacgtacggcgacctgaaccatctcgtcagcgctacaatgtctggagttacaacctgcctgagattccccggacagttgaatgctgatctgcggaaactggctgttaatatggtccccttcccgaggctgcatttctttatgccaggattcgcgccactgacgtctcggggtagtcagcaatatagagccttaacagtgcctgagctcactcagcaggtgtttgacgcaaaaaacatgatggctgcttgcgatccgaggcacggcagatacctgacggttgccgcagtgtttaggggcaggatgagtatgaaagaggtggacgaacaaatgctaaacgtgcaaaataagaacagttcatattttgtggagtggatccctaacaacgtgaagaccgccgtctgtgatattccacccagggggctgaaaatggcagtgacttttattggaaattccaccgcgatccaggagctgttcaagcgcatatcagaacaatttacggccatgtttcgcagaaaggcctttctccattggtacaccggcgagggaatggacgaaatggagtttactgaggccgagagtaatatgaacgacttagtttcagaataccagcagtatcaggacgctacagccgaggaagaggaggattttggcgaagaagcagaggaggaagcgtag

SEQ ID NO: 253318 - DNA, 1335 bp, Artificial Sequence
  derived and/or modified sequence
atgcgggagatcgttcacatccaagcaggccagtgtgggaaccagatcggcgctaagttctgggaggtaatctcggacgagcacggaattgacccaacgggtacttatcatggggatagcgaccttcaacttgataggattagcgtctattataatgaggctacaggcggaaaatacgtgccaagggcgatcctcgtggatttggaacccggaaccatggactccgttagaagtggcccatttggccaaatctttagacctgacaacttcgtgtttggccagtctggagccggaaataattgggctaaagggcactatactgagggtgccgaattggttgattctgtcctcgacgttgtgaggaaggaagcggaaagctgcgattgcctccagggttttcagttgacacattcattaggagggggaacaggttctggcatgggaacactattaatctcaaaaattagagaagagtacccagacaggataatgaatacgttcagtgtggtgccctcccccaaggtgtccgacaccgtagtcgaaccatacaatgcgacattaagtgtacaccaattggtggagaatacagacgaaacatattgcatcgacaacgaggccctctacgatatctgcttcagaacacttaaactcaccactcctacgtatggagacctgaatcatctggtgtcagccactatgtccggcgtgaccacctgcctgcgattccccggacagcttaatgccgacctgcgaaagttagccgttaatatggtgccattcccgaggctgcactttttcatgccaggtttcgcgccactgacctcccggggaagccagcagtaccgcgcactcactgtccctgagctgacacaacaagtgtttgacgccaaaaatatgatggccgcttgtgatccaagacatgggcgatatctgaccgtggcagctgtgttccggggtcgcatgtcgatgaaggaggttgatgagcaaatgctaaacgttcagaataagaactcatcgtattttgtggaatggatccctaacaatgtgaaaaccgccgtgtgcgacattccgccaaggggtctgaaaatggcagtgacctttatcggcaactccactgcgatacaggagctttttaaacgtatttccgaacagttcacagccatgtttcgcaggaaggccttcctgcattggtacaccggtgagggtatggatgaaatggaattcactgaggctgagagcaacatgaacgacctggtatctgaatatcagcagtaccaggacgccaccgccgaagaggaagaggattttggggaggaggccgaagaggaggcatag

SEQ ID NO: 253319 - DNA, 1281 bp, Artificial Sequence
  derived and/or modified sequence
atgttctgggaagtgatttctgacgagcatggaattgatcccacagggacataccatggagattccgacttacagctggatcggattagtgtctattacaacgaggcaacaggtggaaaatacgtacctcgcgcaatactggttgacctggagcctgggaccatggactcagtccgctctggtcccttcgggcagatttttaggccagataattttgttttcggtcagtccggggctggcaacaattgggccaagggtcactatactgagggggcagaattagtagactctgtgctggatgtggtccgcaaggaagcggagagctgtgactgcctccaaggattccagctgactcattctctgggcggaggcacaggttctgggatggggaccctcctgatctccaagatccgggaggaatacccagatcggatcatgaatacatttagtgtcgtgccctcgccaaaagtcagcgacaccgtggtagagccctacaacgccacgctctccgtccaccaacttgtcgagaatactgatgagacatattgtatcgataatgaggcactgtacgatatttgtttccggaccttgaagctgaccaccccgacatacggcgacctaaatcatctggttagcgcaacaatgagcggagtaacaacttgcctacggttccctggacaattgaacgccgacttaagaaagctcgctgttaacatggtccccttcccacgtcttcacttcttcatgcccggatttgccccacttacgagccgcggtagccagcagtatcgcgcactcacagtcccagaactaacccaacaggtcttcgatgccaagaacatgatggctgcctgcgaccccagacatggcagatacctcacagtggctgccgtgttcaggggtcgaatgtcaatgaaggaggtcgacgagcagatgctgaatgttcaaaataagaatagcagctattttgtcgagtggatccctaacaatgtgaaaacggctgtgtgcgatatcccccctcgcggtctgaagatggccgttacttttattggaaattccacagccatacaggagctgtttaaacgcataagcgaacaattcacagctatgttccggagaaaggccttcttacactggtacaccggggagggaatggacgagatggaattcacagaggctgaaagcaacatgaatgatctagtgtcagagtatcagcaataccaggacgccacagcagaggaagaggaagacttcggcgaggaagccgaggaggaggcatag

SEQ ID NO: 253320 - DNA, 1281 bp, Artificial Sequence
  derived and/or modified sequence
atgttctgggaggtgatctcagatgagcacggcatagaccctactggtacctaccacggtgattccgacctgcaactggacagaatctccgtgtattataacgaagctactgggggaaaatatgtgccccgtgctatcttggtcgacctggagccaggcactatggactcagttcgcagcggtccctttggacagatttttaggcctgacaattttgtgttcgggcaatctggtgcgggaaataattgggccaagggtcactacacagagggtgcagagctggttgacagtgtcttggatgtggttagaaaagaagctgaaagctgcgattgtctacaaggatttcaactgacacactctctggggggaggcaccgggtcaggtatggggacccttctgatatccaagatcagagaagagtaccccgatcgcatcatgaatactttctccgtcgtgccatcaccaaaggtcagtgacacagtggtggagccctacaatgctactctgtcagtacatcaattggtggagaataccgacgagacatactgcatcgacaatgaggcattatatgacatttgctttaggacacttaaactcacaactcctacctatggcgaccttaatcacttggtaagcgctaccatgagtggagttacaacatgcctcaggttcccaggacagctgaacgcagatctaaggaagttggccgtcaacatggtgccatttccaaggctccacttctttatgcctggctttgccccacttacttcacgcggatcacagcagtatagggccctcacagtgcccgagttaactcagcaagtattcgatgctaagaatatgatggccgcttgtgaccctcgacatgggcgatacttgaccgttgccgctgtctttaggggcaggatgtctatgaaagaagtcgacgagcaaatgctaaacgtgcagaacaagaattcctcctatttcgttgagtggatccctaacaacgtgaagacagccgtctgcgatattccgccaagaggactgaagatggccgttaccttcatcggcaattctactgcaatccaggaattgtttaaacggatctccgaacagtttaccgctatgttccgacgcaaggcttttctgcactggtacactggggagggaatggacgaaatggaatttaccgaggcagaaagcaatatgaacgatttggtctccgagtatcagcagtatcaggacgctaccgctgaggaagaggaagacttcggcgaggaggcggaggaagaggcgtag

SEQ ID NO: 253321 - DNA, 1281 bp, Artificial Sequence
  derived and/or modified sequence
atgttttgggaggtcatttccgacgaacacggaattgaccccactgggacatatcacggtgacagtgatttgcaactggaccgaatatcagtttactataacgaagctaccggtggcaagtacgtccctcgtgccattctggttgacttagaacctggaaccatggattctgtcagatccggtccattcggccagatatttcggcctgataactttgtgtttgggcagtcgggcgcaggcaacaattgggcaaaaggacactatacagaaggagccgaactggttgattccgtattggacgtcgtacgcaaagaagctgagtcctgcgattgtctgcaggggtttcagctgactcactctctaggaggagggacaggcagtggtatgggcacactgctgatatcgaaaatccgagaagagtaccctgatcgcattatgaacacattctccgtggtacccagccccaaagtctcggacactgttgtggaaccttacaacgcgacgttgagcgttcaccagcttgttgagaataccgacgagacatactgcattgacaacgaggctctctatgacatctgcttcagaactctgaagttaaccaccccaacctatggggacctaaatcacttggtttccgcaacaatgtctggggtgactacctgcctgaggttccccggacagctgaacgccgatttgagaaagctcgctgtaaacatggtgccgttcccacgccttcactttttcatgcctggcttcgcccctttgacatccagagggtcccagcagtaccgggctctgaccgtccccgagctgacgcagcaggtcttcgacgctaaaaacatgatggccgcatgcgatccacgtcatggcaggtacctgactgtggcagcagtctttcgtggaaggatgtctatgaaagaggtggacgagcagatgctcaatgtccagaacaagaactccagctatttcgttgaatggattcccaacaacgtaaagacagccgtctgcgatatcccaccacgcggtctcaagatggctgtgactttcataggcaatagtaccgctattcaggaactgtttaagaggatatccgagcagtttacagctatgttcagacgaaaagcattcctccattggtacaccggtgaaggcatggacgagatggagtttacagaagctgagtcaaatatgaacgatttagtctcagagtatcagcagtaccaggatgctacggcagaagaagaggaagatttcggtgaagaagctgaagaagaagcatag

SEQ ID NO: 253322 - DNA, 1335 bp, Artificial Sequence
  derived and/or modified sequence
atgagagaaatcgtccacattcaagcaggacagtgtggcaatcaaattggcgctaagttttgggaggtcataagcgatgaacacgggattgaccccactggcacataccatggtgatagtgatctccagcttgatcggattagcgtttactataatgaggctaccggcggaaagtacgttcccagggctatccttgtggacctcgagcctggcaccatggattctgtgcggagtggcccttttggccagatatttagacccgataacttcgtattcggccagagcggggctggtaacaactgggccaagggccattacacggagggtgctgagctcgtggactccgtgttggatgttgtacgcaaagaagcagaaagttgtgactgcctccaaggatttcagctcacacacagcttgggcggaggcacaggctctggcatgggcactctgctgattagtaaaattcgggaagagtaccctgatcggataatgaatactttttccgtagtgcccagccctaaggtgagcgacacagtggtagagccttataatgcaacactttctgtacatcagcttgtggagaacactgacgagacatactgcatagataacgaagctctgtatgatatatgctttcgtaccctcaagctgaccacaccgacgtacggagatctgaaccacctcgtatcagcaaccatgagcggcgtcacaacgtgtctccggtttcctggccagctcaacgccgatcttcggaaactggccgtgaatatggtgcctttccctcgcctacattttttcatgcccggattcgccccactgacctcgaggggtagccagcagtatcgcgctctgactgtaccagaattgacacagcaggttttcgacgctaagaatatgatggcggcatgtgaccctaggcacgggagatacctgactgtggccgcagtttttagagggcgtatgagcatgaaggaagtagacgagcagatgttaaatgtgcagaataagaatagctcctattttgtggagtggattcctaataatgtcaagactgctgtgtgcgatatacccccacgcggattgaagatggcagtgaccttcatcgggaactctacagcaattcaggagctgttcaagagaattagtgagcaatttacggccatgttcaggcggaaagccttcctgcactggtacaccggagagggcatggacgagatggaattcaccgaggcagagtcaaatatgaacgacctcgtgagcgaataccaacaatatcaggacgcaaccgccgaggaggaagaggatttcggagaggaagcggaagaggaggcatag

SEQ ID NO: 253323 - DNA, 1335 bp, Artificial Sequence
  derived and/or modified sequence
atgcgtgagattgtgcacatccaagccggtcagtgtggaaatcagattggtgcgaagttctgggaggtcatctccgacgagcacggcatcgatcctaccgggacatatcacggtgacagcgatctccagttggataggatcagcgtctattataacgaagcgacgggtggaaagtacgtgccgcgtgcaatattggtggatctcgaaccaggcacgatggacagtgtacgtagcggtcccttcggtcagattttcagacctgacaacttcgtgttcggtcagtccggagccggaaataactgggcaaagggccactacacagaaggagccgagctggtagatagcgtcctcgatgttgttcggaaggaagctgagagttgtgattgcctccagggcttccagcttacccattctcttgggggagggaccggctccggtatgggaaccctcctgatttctaagatcagggaggaatatcccgacagaatcatgaacactttttctgtcgttccgtcaccgaaggtgtctgatacggtggtggaaccatacaacgcgacactttccgtccaccagctagtggaaaataccgacgagacctattgtatcgacaatgaggcgttgtacgacatttgcttccggactctaaaactcacgaccccaacatacggggacttgaatcatctggtgagcgcaacaatgtcgggcgtgacgacttgcctgcggttccctggccagctgaacgcggatctaagaaagcttgcagtaaatatggtgccttttccacggcttcatttttttatgccaggattcgctccattgacctccagaggtagtcaacagtaccgggctctgaccgtgccagagcttactcaacaggtttttgatgctaagaatatgatggcggcatgtgacccaaggcatgggaggtacctgactgtggctgccgtctttagaggtagaatgtctatgaaagaggttgacgaacagatgttgaacgtgcagaacaaaaattctagttattttgttgaatggatcccgaacaatgttaagactgccgtctgtgacataccaccacggggacttaaaatggccgtgactttcatcgggaatagtacggccatacaagagcttttcaagcgcatcagcgaacaattcaccgccatgtttcggagaaaggcctttcttcattggtacacaggggagggtatggatgagatggagtttacagaagctgagagcaacatgaatgatctggtttcagagtatcaacagtatcaagacgccaccgccgaagaagaggaggactttggagaggaggccgaagaggaagcttag

SEQ ID NO: 253324 - DNA, 1248 bp, Artificial Sequence
  derived and/or modified sequence
atgagggaaatcgtccatatccaggcaggccagtgcggcaatcagataggcgcaaaattttgggaagttataagtgacgaacacgggatagaccctaccggcacctatcacggcgattcagatttacagctggataggatctccgtctattataacgaagccaccggaggaaaatatgttccaagagccatactggtggatcttgaacccggtacgatggattccgtgcgttcagggccattcgggcagattttcaggccggataacttcgtttttgggcagtccggcgctggaaacaattgcctgcaaggctttcaattgacgcattcgcttggtggaggaaccggcagcggtatgggcacgctgctcatttcaaaaatacgagaagagtaccccgatcggataatgaatacgttctcagtggtgcccagccccaaggtcagcgatactgtggtcgaaccatataacgctactctcagtgtgcatcagctggtggagaacaccgacgagacgtactgtattgataatgaagccctctacgacatatgcttcagaacactcaaactgacaacccctacctatggtgacttgaaccacttggtgtccgccaccatgtccggcgtaactacctgtctgagatttcccggtcaactcaatgccgatctcagaaaactggcagttaacatggtgcctttcccacggctgcatttcttcatgccaggctttgcacctctaacctctcgcggatctcagcagtacagggcactcacagttcccgagctgacccaacaagtgtttgatgcgaaaaacatgatggcagcatgcgatcccagacatggaaggtacctgaccgtggctgctgttttccgcggaaggatgagcatgaaagaggtggatgaacagatgctcaatgtgcaaaacaaaaattctagctattttgtggaatggattccaaataatgttaagacagcggtgtgtgatatacccccacgcggactgaagatggccgtgacgtttatcggaaactcaacagccatacaggagctgttcaaacgcatctcagagcagttcactgccatgtttagacgcaaggcctttttacactggtatactggggaggggatggacgagatggagttcacggaggcagaatccaacatgaatgacctcgtgtccgaatatcagcagtaccaggatgctactgccgaagaggaggaagactttggtgaggaggcagaggaagagtag

SEQ ID NO: 253325 - DNA, 1308 bp, Artificial Sequence
  derived and/or modified sequence
atgcgcgaaattgttcatatccaggccggtcagtgtggtaatcagattggcgctaagttttgggaagtgatatcggatgagcacggcatcgatccaaccggcacctaccacggtgattcagaccttcaattggaccgcattagcgtgtactacaatgaagccacgggtggaaagtatgtccctcgggctattctagttgatctggagcctggcacaatggattccgtcagaagtggcccattcgggcagattttccggcctgacaacttcgtctttggccagtccggtgctgggaataattgggcaaagggtcactacacagagggagccgagttggttgatagcgttctcgacgtagttagaaaggaggcagagagttgtgactgtcttcaggggttccagctgacccacagtctaggtggcggtacgggcagtggcatgggcacgctcttaatctccaagatccgtgaggagtatcccgaccggatcatgaatacgttcagtgtggttcctagccccaaggtcagtgacaccgtagtggaaccttacaatgcaaccctctccgtccaccagctggttgagaataccgatgaaacttactgtatcgacaacgaagcattgtatgatatctgctttagaacactgaaacttacaactccaacctatggggatctcaaccacctcgtctctgcaaccatgtcaggcgtgactacatgccttcggttcccagggcagctgaacgcagatctgcggaagctagccgttaatatggtgcccttccccaggctgcacttctttatgcccggtttcgctccacttacctcacggggttctcagcagtacagggctctgacagttcctgaactcacccagcaagttttcgacgccaagaatatgatggccgcatgcgacccacgccacggccgttacctgaccgtagccgctgtgttccgcggacggatgtctatgaaagaagtcgatgaacagatgctgaatgtgcagaacaagaacagctcatatttcgtcgaatggatcccaaataatgttaaaaccgctgtgtgtgacattccgccacgtggtctgaagatggccgtgacttttatcggcaactccaccgcaatccaagaactcttcaaacgcatcagcgaacagtttacggccatgttccgtagaaaggcctttctgcattggtacacgggcgaagggatggatgaaatggagttcaccgaggccgaatccaatatgaatgacctggtcagtgaataccaacagtatcaggatgctaccgccgagggcggtggcctttag

SEQ ID NO: 253326 - DNA, 1308 bp, Artificial Sequence
  derived and/or modified sequence
atgcgcgaaattgtgcatattcaggcaggccagtgcggaaatcaaatcggagccaagttttgggaggtaattagcgacgagcacgggatcgaccccaccggtacataccatggcgattccgatctgcagctggataggatatcagtatactacaatgaggccactggtggtaagtatgtgccacgagccatccttgtggaccttgagcccggtacgatggactctgtacgctcgggcccattcgggcagatatttcgccctgacaattttgtgtttggacagagtggagccggaaataactgggctaaagggcactatacagaaggcgctgaacttgttgattccgtcctcgatgtagtgcgaaaagaagcagaaagctgtgattgcctgcaggggtttcagctgacacactctttaggtggcggaaccgggagtggaatgggaacattgcttatctccaaaatccgtgaagagtaccccgatagaattatgaacaccttcagcgtcgtgccctcccctaaggtgtccgacactgttgtggaaccctataacgctacgcttagcgtccatcaactcgtggaaaacactgacgaaacgtactgcattgacaatgaagcactgtacgatatctgctttcggactctcaaactgaccactccaacctacggcgatctgaaccacttggtttcagccacaatgtcaggcgtaaccacttgtctaagattcccaggccagcttaacgcggacttgcggaagcttgcggtaaacatggtccctttcccaaggctacacttttttatgcccggattcgcgccactcaccagccggggatcacagcagtaccgtgccctgaccgtgcccgagctaacccagcaggtgtttgacgcaaagaacatgatggctgcttgtgacccaaggcatggtcgctatctcacagtcgccgcagtttttcgcggtcgtatgtctatgaaggaagtggacgagcagatgctcaacgtccagaacaagaacagctcctattttgttgagtggattcctaataacgtgaagacagctgtgtgtgacatacctccaagaggcctgaagatggccgtgacattcattggaaacagcacagcaattcaggagctcttcaagcggatctcagagcagtttacggctatgtttcgtcggaaggccttcctccattggtacacaggggagggcatggatgagatggaattcactgaggcggagtctaatatgaacgacctggtctctgaataccagcagtaccaggatgcaactgcagaagggggtggtctgtag

SEQ ID NO: 253327 - DNA, 1308 bp, Artificial Sequence
  derived and/or modified sequence
atgcgggagattgtgcacattcaggctggccagtgcggcaatcagatcggcgcaaaattttgggaagtgatttctgatgagcacggcattgatcctaccggtacttaccacggtgacagcgatctgcagcttgatcgcatctcggtgtattataacgaggctaccggcggtaagtatgttcccagggcaatcctggtggacctggaacccggaaccatggacagcgtcagatccggtcccttcggtcagatttttagacctgataatttcgtgtttggtcagagcggcgctggaaataactgggccaagggccattatactgaaggagccgagctggtagactcggttctggacgtggtgcgaaaggaagccgaaagctgcgattgtttgcagggttttcagttaactcacagtctaggcggaggcacgggtagtgggatgggaactctcctaatttcaaagataagggaggagtatcccgataggatcatgaatacgtttagcgtggtccccagtcccaaagtgtctgacactgtggtggagccctacaacgcgacactgtctgtgcatcaactggtggagaatactgacgagacatactgtatcgataacgaggccctatacgatatatgtttccgaacactaaaactgactacccccacatacggcgacctcaatcacctggtctcggctaccatgtcaggggtgacgacttgtctgaggtttcctggccagctgaacgctgatctacgcaagttggccgttaacatggttccgttcccacgactgcacttctttatgcccggattcgcccctctgacatctaggggcagtcaacagtatagggccctgacggttccggagcttacacaacaggtgtttgatgccaaaaacatgatggctgcgtgcgaccctaggcacggcaggtacctcactgtagctgctgtcttcagaggacgcatgtccatgaaggaagtcgatgagcagatgctgaacgtacaaaacaagaacagctcctactttgtggaatggatccccaataacgtcaaaaccgccgtgtgtgacattccacctcgaggtctgaaaatggctgtcacgttcattgggaattccaccgccattcaggaactctttaagagaatatccgagcagttcactgccatgttcagaaggaaggctttccttcactggtatacaggagaagggatggacgagatggaattcacagaagcagagagcaacatgaatgatctggtgagtgagtatcaacagtaccaggacgctactgccgagggaggagggctgtag

SEQ ID NO: 253328 - DNA, 1248 bp, Artificial Sequence
  derived and/or modified sequence
atgcgcgagatcgtgcacattcaagccggtcaatgcgggaatcaaatcggtgccaaattctgggaggtgatctctgatgaacatgggattgatccgactggcacttaccatggcgactcagatctgcagctggatcgcatctcagtttactacaatgaagccactggcggaaagtacgtccctcgggctatattagtagacttggaacccggaaccatggacagcgtgcgatctggtccgtttggacaaatcttccggccagacaattttgtctttggtcagtcaggcgctggcaacaactgcctgcagggcttccagcttacccatagcctcggtgggggtactggatcagggatggggaccctcctcatttcaaaaatccgagaagagtatcccgatcgaataatgaacaccttctctgtcgttcccagcccaaaagtatcggatacagtggtagaaccttataacgctacattgagcgtccatcagttggtcgaaaatactgatgagacctattgtattgataacgaggcactctatgatatatgttttagaactcttaaattgacgacaccgacttatggggatctgaatcatctcgtgtcggccaccatgagcggcgtgaccacctgcctgcggtttcccggtcagttgaacgcagacttgcgtaaactggccgtgaatatggtgccatttccgcgtttgcatttcttcatgcctgggttcgctcctcttactagcagggggtcgcagcagtacagggccttgactgtgcctgagctcacacaacaggtgtttgacgctaaaaatatgatggctgcgtgcgatcccaggcacggccgatacctaactgtggcagcagtgttcaggggcaggatgtcaatgaaagaggtcgatgaacaaatgctgaacgtgcagaataagaattcctcatactttgtggaatggatcccgaacaatgtcaagaccgcggtgtgcgatatcccacctcgaggcctcaagatggcggtaactttcataggaaatagtacagccatacaggaactctttaagcgcattagcgaacaatttaccgccatgttccgcaggaaggcgtttctgcattggtacacaggagaggggatggacgaaatggagtttactgaggccgaatctaacatgaacgacctggtgtctgagtaccagcagtaccaggatgctacggcggaggaagaggaggatttcggcgaggaagccgaagaggaatag

SEQ ID NO: 253329 - DNA, 1248 bp, Artificial Sequence
  derived and/or modified sequence
atgagggagattgtgcacatccaggcaggacagtgtggcaatcagatcggagcaaagttctgggaagtgattagcgacgaacacggtatcgatcccacaggcacctaccacggtgactccgacttgcagctcgaccgtattagtgtctactacaatgaagctacaggaggtaaatatgtgccaagagccatactcgtggatctcgagcccggtaccatggactccgtgcgaagcggaccttttggacagatattcaggcccgacaacttcgtgtttggacagagcggagctggaaataattgcctgcaaggctttcaattgacccattcattagggggaggcactggctccggaatgggcacactgctcatcagcaagataagagaggagtatccagataggatcatgaataccttctccgtggttccaagccctaaggttagcgacacagttgtagagccgtacaacgcaactctctccgtgcaccagctggtggagaatacagacgaaacttattgcatcgacaatgaggcactgtatgacatatgcttccgaacattgaagttgacaactccaacttatggcgaccttaaccacctggtgtccgctaccatgagtggcgttacaacatgtctgagatttcccggtcagttaaacgccgatcttcgaaagctcgcagtgaatatggtcccctttccgcgtctgcacttcttcatgccaggcttcgccccactgacaagtcgcggatctcagcagtacagagctctgaccgtcccagagctgacacagcaagtcttcgacgcgaaaaacatgatggcagcctgtgatcctcggcacggacggtacctcactgtggccgctgtgttccgtggaagaatgagcatgaaggaggtggacgagcagatgctgaatgtgcaaaataagaacagtagctatttcgtagaatggattcctaacaatgtgaaaactgcggtgtgtgacatcccacctcgaggtctgaagatggcagtgacgttcatcgggaactctacagctatccaagagttatttaagcggatctctgagcagtttaccgccatgttccgtcggaaggcctttctccactggtacacgggcgaaggaatggatgagatggaatttaccgaagctgaatccaacatgaatgacctggtgtcggaataccagcagtaccaggacgccaccgcagaggaggaggaagattttggcgaggaggccgaggaagagtag

SEQ ID NO: 253330 - DNA, 1248 bp, Artificial Sequence
  derived and/or modified sequence
atgagggagatagttcatattcaggcaggccaatgcgggaaccagattggcgcaaaattttgggaggtgatttccgacgagcacggcattgacccaaccgggacgtaccatggggatagcgaccttcaactggataggattagcgtctattataacgaagcaaccggagggaagtatgtcccacgcgctatcctggttgatctggagcctggtactatggactccgtaaggagcggaccgttcggccagattttcaggccagacaatttcgtgttcggtcaatccggcgctggaaataattgcctccaaggcttccagctgacgcactctctgggtgggggaaccgggagcggcatgggcactctccttatatcaaagataagagaggagtaccccgacaggattatgaacacttttagcgtggtgcctagccccaaggtgtcagacacggtggtagagccatataacgcgaccctcagcgtacaccaactcgtggagaataccgacgaaacatactgtattgacaatgaagcattatatgatatctgctttagaactctgaagctaacaacccccacctatggggatctgaaccatttggtcagtgccacgatgtcaggtgtgaccacatgtctgcgattccccggtcaactcaacgcggaccttaggaagctggcagtgaacatggttccattccccagactccatttcttcatgcccggttttgcgcctttgacatccagagggtcccagcagtatcgcgcattaacagtgcccgagcttactcagcaggtgtttgacgcaaagaacatgatggctgcttgcgacccaagacacggcaggtatctcaccgtggccgcagtgttcagagggcgaatgtcgatgaaggaagtagatgagcagatgctgaatgtgcagaataagaatagctcttactttgtggagtggatcccaaacaacgttaagacagccgtgtgcgacatacctcccagaggtctgaaaatggccgttacctttattggaaactccactgctattcaagagctctttaagcgcatatcagagcagttcaccgcaatgttccgacgtaaagccttcctgcactggtataccggcgaagggatggacgagatggaatttaccgaagccgagtctaatatgaacgatttggtatcagaataccagcagtaccaggatgccactgccgaggaagaagaggatttcggagaagaggctgaggaggagtag

SEQ ID NO: 253331 - DNA, 1308 bp, Artificial Sequence
  derived and/or modified sequence
atgagagagatagtgcacatccaggccggacagtgtggaaaccagattggggctaagttctgggaggttatttcagacgagcacggcattgacccaacagggacatatcacggcgactcagacctccagctagaccgcatcagtgtctactataacgaggccaccggcggtaagtatgtaccccgagctattcttgttgacctagaacctggaacgatggactctgtgcgatctggtccattcggtcagatctttcgccctgataatttcgtgtttggacagagcggcgctgggaacaattgggccaaaggccactacactgagggggctgagctggttgactccgtgttggacgtagtcagaaaagaggctgagagctgcgactgtttgcagggcttccaactgactcacagcctcggaggaggcaccggaagcggaatgggcaccctactcattagtaagatacgagaagagtacccagacaggattatgaacacattcagcgtagtgcctagccctaaggtgtccgacacagtggtggagccatacaacgctaccctgtctgtccatcagcttgttgagaacactgacgaaacatactgtatcgataatgaagccctctatgatatttgcttcaggactttgaagcttactacacccacatacggagacttaaaccatctggtaagcgctactatgtccggagtcactacatgccttcgctttccgggacagttgaacgctgatctgaggaagctggccgtcaatatggtcccctttcccaggcttcatttttttatgcctggctttgcacccttgacatcccggggatcccagcagtaccgagccctgacggtcccggagctgacgcagcaggtgttcgacgccaaaaatatgatggccgcttgtgatcccagacatgggcgttatctgaccgtcgcggcagtgttccgcggtagaatgagcatgaaggaagtagacgagcagatgctgaatgtgcagaacaaaaattctagctatttcgttgaatggatcccaaataacgttaaaaccgccgtgtgcgatattcccccacgcggtctgaagatggcagtgactttcatcggaaactcaacagccatccaagaattattcaaaagaatcagcgagcaatttacggccatgtttcgcaggaaggcctttttgcactggtatacaggagaaggcatggatgagatggaatttacggaggccgaatccaacatgaacgatctggtatccgagtatcagcagtaccaggacgccactgccgagggagggggtctttag

SEQ ID NO: 253332 - DNA, 1308 bp, Artificial Sequence
  derived and/or modified sequence
atgagagaaattgtgcacattcaggctggtcagtgtggcaatcagattggcgctaagttctgggaagtcatcagcgatgaacacggtattgaccctaccggcacttaccacggagacagcgatctgcagttggatcgtatcagcgtgtactacaatgaggccacggggggaaagtatgtccctagggcgattctcgtagacctcgaacctggaacgatggactcggtcagatcaggtccattcggtcagattttcagacccgataatttcgtgtttgggcagtccggagccggaaataactgggctaaaggccactacacagaaggagcagagttagtggactctgttctggacgtggtccgaaaggaagccgagtcctgcgactgtctccaggggttccagctaacccacagcctcggcggtggcacgggcagtggcatgggcacgctgctgatctcgaaaataagagaagagtatcctgatagaattatgaacacatttagcgttgtcccatccccaaaggtctctgatacagtagtggagccgtacaacgcaactctgtctgtgcaccagcttgtagaaaacacagacgaaacgtactgcattgacaatgaggccctttacgacatttgtttcagaaccctcaaactgaccacacctacctacggcgatcttaaccatctggtgtctgctaccatgagcggggttacaacctgcctacgctttccaggacaattgaacgcagacctccgcaagcttgctgtcaacatggtgccctttcccaggctgcatttctttatgcccggatttgccccacttacaagcaggggcagccaacagtatagagccctcacggtgcctgagctcacccagcaggtttttgacgccaaaaacatgatggctgcatgcgatccccgtcatggtcgctatctgactgtagcagccgtgtttaggggaagaatgagcatgaaagaagtggacgagcaaatgctgaatgtgcagaataagaactcatcttatttcgtggaatggatccctaacaatgtcaagactgccgtgtgtgacatacctcccaggggactgaaaatggccgtaacatttattggaaacagtactgcgattcaggagctgtttaagcggattagcgagcagtttactgcgatgttccggagaaaggcctttctgcactggtatacaggtgagggtatggacgagatggaattcacagaagcagaatccaacatgaatgacctggtatcagaataccagcagtatcaggacgcgaccgcagagggaggaggattatag

SEQ ID NO: 253333 - DNA, 1308 bp, Artificial Sequence
  derived and/or modified sequence
atgcgggagatagttcatatccaagccggtcagtgtgggaaccagattggagctaaattttgggaagtgatctctgatgagcatggtattgaccctaccggcacttaccacggtgactccgatctgcagctggaccgcatcagcgtatactacaatgaagcaaccggtggaaagtatgtccctcgggctatactggtggatttggaaccaggcactatggactcagtgcggagcggacctttcggtcagatcttccgcccagataatttcgtgtttgggcagtctggggcagggaataattgggctaaaggacattatacagagggagcagagctagtagacagtgtcctcgacgtggtgcggaaggaggcagagtcttgcgactgcctgcaggggtttcagcttacccattccttggggggaggaacaggcagcggcatgggcacccttctgatcagtaagattagggaagagtatccggaccggatcatgaataccttctctgttgtgccatcccccaaggtctctgataccgttgtcgagccgtataacgcaacgctgtccgtgcatcagctagtggaaaatactgacgagacctattgcatcgacaacgaggccctgtatgacatttgttttcggacactcaagctgaccaccccaacttatggcgacttgaatcatcttgtctccgcaacaatgagcggcgtcaccacctgcttgcggtttcctgggcaactgaatgccgatctcagaaagctggctgtgaatatggttccattccctcggctgcacttttttatgccaggctttgcacctctgacgagtcggggtagtcagcaatacagagcgctgacagtgcccgagttaacccagcaggttttcgacgcaaagaacatgatggctgcctgtgaccctagacacggacgatatctgacagttgccgctgtgtttagagggcgtatgtcaatgaaagaagtggatgaacagatgctgaacgtacagaacaaaaacagcagttatttcgtcgaatggatccccaacaacgtgaagaccgccgtgtgcgatattccaccaagaggcctgaaaatggcagtgacattcattggcaactcgactgctatccaggaattgtttaagcgaatctcagaacagttcaccgctatgtttcggcgaaaggcgttcctgcactggtacaccggggagggcatggacgaaatggaattcacagaggctgagagcaatatgaacgacttagtttccgagtatcagcaataccaagacgctaccgccgaggggggtggcttgtag

SEQ ID NO: 253334 - DNA, 1248 bp, Artificial Sequence
  derived and/or modified sequence
atgcgcgagatcgtacacattcaagcagggcagtgcggcaatcaaatcggcgctaaattttgggaggtgatctccgacgaacacggcattgaccccaccggcacctaccatggcgattccgatttgcagctggaccgcatctcagtctattataacgaggccacgggagggaagtacgtacccagagccatacttgtggacctggagccgggaaccatggactccgtgcgaagcggaccctttgggcagatatttcgccctgataactttgtctttggccagagcggggctggtaacaactgtcttcagggatttcagcttacacattcgctcggaggtggtacaggttctgggatgggcactctcctcataagtaagataagagaggagtacccagaccgcattatgaatacctttagtgtggttccttctcctaaagtgtccgataccgtagtggaaccctacaacgccaccctcagtgtgcaccagctggtggagaatacagacgaaacctattgtatagataatgaagctctgtatgacatctgttttagaaccctgaaactcaccacaccaacatatggcgacctaaatcacctcgtcagtgccactatgtcaggtgtaacgacttgtctacggttccctggacagctgaatgccgatttgagaaaattagcagttaacatggtgccattccccagactgcacttttttatgcctggctttgcgcctctgacgtcaagggggtcccagcagtaccgcgcactaacagttcctgaattgacccaacaggtgtttgacgccaaaaacatgatggcagcttgcgatcctcgacatggacgctacctcacggtcgcagccgtgtttagggggagaatgagtatgaaggaggtggatgagcagatgctgaatgtgcaaaataagaatagctcatattttgttgagtggattcctaacaacgtcaagacagccgtctgtgacattccaccaagaggactcaagatggctgtgactttcatcggtaactcgaccgctatccaggaactgttcaaaagaatcagcgagcagttcacggctatgttcaggcgtaaagcttttcttcactggtacacgggggaggggatggacgagatggaattcactgaggcggaaagtaatatgaatgacctggtgtcagagtatcaacagtatcaggacgcgacagctgaggaagaagaagactttggcgaggaggccgaagaggaatag

SEQ ID NO: 253335 - DNA, 1308 bp, Artificial Sequence
  derived and/or modified sequence
atgcgagagatcgttcacatacaagccggtcagtgcggtaatcagatcggcgcaaagttctgggaggtgattagtgacgaacatggcatcgaccccaccggcacatatcatggggatagtgacctccaattagataggatatctgtgtattataacgaggcgaccggtggaaaatatgtgccacgcgcaattctcgttgatttggaaccaggcacaatggattcggtgcgctccggtcctttcgggcagatattccggcctgacaattttgtgtttggtcagtctggcgctggcaacaactgggcgaaaggtcactatacggaaggcgctgaacttgtagacagtgtgctggacgtggtgcgcaaagaggcagagagctgtgattgtctacaggggttccagttgacacacagccttggcggtgggactggctccggcatgggtactctcctcataagtaagatccgggaagaataccctgatcgaatcatgaatactttcagcgtcgttccaagccccaaggtgtccgatactgtcgtcgaaccttataacgccacactgtccgttcaccagcttgttgaaaatactgatgagacttattgcattgataatgaagccttatacgatatttgcttccgaactttgaagctaacaacgcccacctatggcgacctgaaccacctggtctctgcgaccatgtcaggagtgactacgtgtctgcggtttccaggtcagctgaacgcagacttgcgtaagcttgctgtaaacatggtgccctttccacgattacacttcttcatgcccggatttgcacccctaacaagcagaggtagccaacagtacagagctctcactgtgccagagctgacacagcaagtgttcgatgctaagaacatgatggccgcatgtgatcctcgacacggaagatatcttaccgttgccgctgtctttcgcggaagaatgtccatgaaggaggttgacgagcagatgctgaatgtccagaacaagaactcttcttattttgtggagtggatccccaacaatgtcaaaactgccgtgtgcgatatccctcctaggggcctgaaaatggcagtcacattcattgggaattcaaccgcaattcaggagctattcaaaagaatttcagagcagtttactgccatgtttcgcagaaaggcatttcttcactggtacactggcgagggaatggatgaaatggagttcactgaggctgagtctaacatgaacgatcttgtttctgagtatcagcagtaccaggatgcgaccgctgaggagggtggagtgtag

SEQ ID NO: 253336 - DNA, 1248 bp, Artificial Sequence
  derived and/or modified sequence
atgcgagaaatcgtgcacatccaggcgggacaatgtggtaatcaaattggagcaaagttctgggaggtcatctccgatgagcatggtattgaccccacgggcacttatcacggcgattcagacttgcaactcgataggataagtgtctactataacgaggcaaccggaggcaagtacgtgccgcgtgcaatacttgtggacctggagcctggaacgatggattctgtcaggtccgggccattcggacaaatctttaggcctgacaatttcgtcttcggacagtcaggggctggaaataactgtctccagggtttccagctgactcattcacttggtggtggcacggggagtggcatgggcaccttactgatttccaagatacgagaggaataccctgaccgaattatgaatacattctctgttgtgccgagtcccaaagtgagtgacacggtggtggaaccttacaatgctactctctcagttcaccagctggtagaaaataccgacgagacatactgtatcgacaacgaagccctctatgacatttgcttccgtacgctgaagctgaccacacctacctacggagacctgaaccatctagtctctgccaccatgtctggggtgactacatgcttaaggttcccgggacaattgaacgcggatctgaggaaactggcagttaatatggtgcccttccccaggctgcatttcttcatgccaggatttgctcccctgacttcaagaggctcacaacagtaccgcgctcttacggtcccagagctgacccagcaggtatttgatgccaaaaatatgatggccgcttgtgatccgcgacacggcaggtatctgaccgttgccgctgtctttcgaggccgtatgtccatgaaagaggttgacgagcaaatgttgaacgtccagaacaaaaattctagttactttgtcgaatggatcccgaacaatgttaaaactgccgtctgcgacatccccccacgcggactcaagatggccgtgacattcatcggtaattccactgccatccaggaactgtttaaacgtattagtgaacagttcaccgccatgttcaggcgaaaagccttcttgcactggtatacaggggaaggcatggacgaaatggagtttacggaagctgagtcaaatatgaatgacttggtcagtgagtatcagcagtaccaagacgcaacagctgaggaggaggaggacttcggggaagaggctgaggaagaatag

SEQ ID NO: 253337 - DNA, 1248 bp, Artificial Sequence
  derived and/or modified sequence
atgagggaaatcgtgcatattcaggcaggccagtgcggaaaccagatcggtgcaaagttctgggaggtcatctctgatgagcacggaatcgaccccaccggaacataccacggggactccgatctgcaactagaccgtatcagcgtgtattacaacgaagccaccggaggtaagtatgtgccgagagcaattctcgtggacctggagccaggtactatggattctgtgcgctctggcccttttggtcagatttttcgccctgataacttcgtattcggccaaagtggggctggaaacaattgccttcagggcttccaattgactcattccttaggaggcggaactggtagcggcatgggaaccctattaatttccaaaattagagaggagtacccagataggattatgaacaccttctctgtcgtacctagtcccaaggtttccgacactgtcgtcgaaccatataatgctactttaagcgtgcatcagctcgtggagaataccgatgaaacttattgtattgacaacgaggcgctatacgacatttgttttcgcactctgaagcttacgactcctacatacggtgacctgaaccatctggtcagcgccaccatgtccggagtcactacctgtttacggttccccggacaactgaatgccgacttaaggaaactcgctgttaacatggtgcctttcccgaggctgcactttttcatgcctggattcgcacctctgacaagccgcggttcacaacagtatcgggcactcaccgtccctgaattgacccagcaggtgttcgacgctaaaaacatgatggctgcttgtgatccacgccacggcagatatttgactgtcgcagcagtctttagaggacgcatgtccatgaaagaggtcgacgagcagatgttaaacgttcaaaataagaattcttcatatttcgttgagtggatcccaaacaatgtgaaaaccgccgtatgcgacatccctcccagaggactgaagatggcagtaacgttcattggcaattccacagcgatacaggaactgttcaagaggatttccgagcagttcaccgcaatgtttcgacggaaggcctttctgcactggtacacaggggaaggaatggacgaaatggagtttactgaagctgagtccaacatgaatgacttggtgtcagagtaccaacaatatcaggatgccactgccgaggaggaagaagatttcggagaagaagctgaggaggagtag

SEQ ID NO: 253338 - DNA, 2670 bp, Artificial Sequence
  derived and/or modified sequence
gtacatgaccggcatcgactaatcagggccaggctcgatgaggctttgtctccctaccgcgcgcggggccgattctcccgcctcccagccccggcgcacgcgcgccccgcccagcctgctttccctccgcgccctcccctctcctttctccctctcagaaccttcctgccgtcgcgtttgcacctcgctgctccagcctctggggcgcattccaaccttccagcctgcgacctgcggagaaaaaaaattacttattttcttgccccatacataccttgaggcgagcaaaaaaattaaattttaaccatgagggaaatcgtgcacatccaggctggtcagtgtggcaaccagatcggtgccaagttctgggaggtgatcagtgatgaacatggcatcgaccccaccggcacctaccacggggacagcgacctgcagctggaccgcatctctgtgtactacaatgaagccacaggtggcaaatatgttcctcgtgccatcctggtggatctagaacctgggaccatggactctgttcgctcaggtccttttggccagatctttagaccagacaactttgtatttggtcagtctggggcaggtaacaactgggccaaaggccactacacagagggcgccgagctggttgattctgtcctggatgtggtacggaaggaggcagagagctgtgactgcctgcagggcttccagctgacccactcactgggcgggggcacaggctctggaatgggcactctccttatcagcaagatccgagaagaataccctgatcgcatcatgaataccttcagtgtggtgccttcacccaaagtgtctgacaccgtggtcgagccctacaatgccaccctctccgtccatcagttggtagagaatactgatgagacctattgcattgacaacgaggccctctatgatatctgcttccgcactctgaagctgaccacaccaacctacggggatctgaaccaccttgtctcagccaccatgagtggtgtcaccacctgcctccgtttccctggccagctcaatgctgacctccgcaagttggcagtcaacatggtccccttcccacgtctccatttctttatgcctggctttgcccctctcaccagccgtggaagccagcagtatcgagctctcacagtgccggaactcacccagcaggtcttcgatgccaagaacatgatggctgcctgtgacccccgccacggccgatacctcaccgtggctgctgtcttccgtggtcggatgtccatgaaggaggtcgatgagcagatgcttaacgtgcagaacaagaacagcagctactttgtggaatggatccccaacaatgtcaagacagccgtctgtgacatcccacctcgtggcctcaagatggcagtcaccttcattggcaatagcacagccatccaggagctcttcaagcgcatctcggagcagttcactgccatgttccgccggaaggccttcctccactggtacacaggcgagggcatggacgagatggagttcaccgaggctgagagcaacatgaacgacctcgtctctgagtatcagcagtaccaggatgccaccgcagaagaggaggaggatttcggtgaggaggccgaagaggaggcctaaggcagagcccccatcacctcaggcttctcagttcccttagccgtcttactcaactgcccctttcctctccctcagaatttgtgtttgctgcctctatcttgttttttgttttttcttctggggggggtctagaacagtgcctggcacatagtaggcgctcaataaatacttgtttgttgaatgtctcctctctctttccactctgggaaacctaggtttctgccattctgggtgaccctgtatttctttctggtgcccattccatttgtccagttaatacttcctcttaaaaatctccaagaagctgggtctccagatcccatttagaaccaaccaggtgctgaaaacacatgtagataatggccatcatcctaagcccaaagtagaaaatggtagaaggtagtgggtagaagtcactatataaggaaggggatgggattttccattctaaaagttttggagagggaaatccaggctattaaagtcactaaatttctaagtatgtccatttcccatctcagcttcaagggaggtgtcagcagtattatctccactttcaatctccctccaagctctactctggaggagtctgtcccactctgtcaagtggaatccttccctttccaactctacctccctcactcagctcctttcccctgatcagagaaagggatcaagggggttgggaggggggaaagagaccagccttggtccctaagcctccagaaacgtcttcttaatccccaccttttcttactcccaaaaaagaatgaacacccctgactctggagtggtgtatactgccacatcagtgtttgagtcagtccccagaggagaggggaaccctcctccatcttttttgcaacatctcatttcttccttttgctgttgcttcccccctcacacacttggttttgttctatcctacatttgagatttctattttatgttgaacttgctgctttttttcatattgaaaagatgacatcgccccaagagccaaaaataaatgggaattgaaaaaagctg

SEQ ID NO: 253339 - DNA, 2632 bp, Artificial Sequence
  derived and/or modified sequence
cgcgtgcgccgcagtcacgtggagggcggggggggtggtcgactgcggcggcagctctttcctcagacccccagccttttgtgcgccgcgcggtggggcggtgcccagcttgggggaaggagagcggcgcttatcgaagtgtggtcgacctccatccgcccaccgagcacttgggacccgctgcacatatccagagcagggaaagctgtggctttctcgggggagcgagtgtctaggggaagggtgtggcaggcccacgggatgccatgccctagaacaacggcctgagcgcttgtggaattaaaatgggagatgtggggccgagttctgggaggtgatcagtgatgaacatggcatcgaccccaccggcacctaccacggggacagcgacctgcagctggaccgcatctctgtgtactacaatgaagccacaggtggcaaatatgttcctcgtgccatcctggtggatctagaacctgggaccatggactctgttcgctcaggtccttttggccagatctttagaccagacaactttgtatttggtcagtctggggcaggtaacaactgggccaaaggccactacacagagggcgccgagctggttgattctgtcctggatgtggtacggaaggaggcagagagctgtgactgcctgcagggcttccagctgacccactcactgggcgggggcacaggctctggaatgggcactctccttatcagcaagatccgagaagaataccctgatcgcatcatgaataccttcagtgtggtgccttcacccaaagtgtctgacaccgtggtcgagccctacaatgccaccctctccgtccatcagttggtagagaatactgatgagacctattgcattgacaacgaggccctctatgatatctgcttccgcactctgaagctgaccacaccaacctacggggatctgaaccaccttgtctcagccaccatgagtggtgtcaccacctgcctccgtttccctggccagctcaatgctgacctccgcaagttggcagtcaacatggtccccttcccacgtctccatttctttatgcctggctttgcccctctcaccagccgtggaagccagcagtatcgagctctcacagtgccggaactcacccagcaggtcttcgatgccaagaacatgatggctgcctgtgacccccgccacggccgatacctcaccgtggctgctgtcttccgtggtcggatgtccatgaaggaggtcgatgagcagatgcttaacgtgcagaacaagaacagcagctactttgtggaatggatccccaacaatgtcaagacagccgtctgtgacatcccacctcgtggcctcaagatggcagtcaccttcattggcaatagcacagccatccaggagctcttcaagcgcatctcggagcagttcactgccatgttccgccggaaggccttcctccactggtacacaggcgagggcatggacgagatggagttcaccgaggctgagagcaacatgaacgacctcgtctctgagtatcagcagtaccaggatgccaccgcagaagaggaggaggatttcggtgaggaggccgaagaggaggcctaaggcagagcccccatcacctcaggcttctcagttcccttagccgtcttactcaactgcccctttcctctccctcagaatttgtgtttgctgcctctatcttgttttttgttttttcttctggggggggtctagaacagtgcctggcacatagtaggcgctcaataaatacttgtttgttgaatgtctcctctctctttccactctgggaaacctaggtttctgccattctgggtgaccctgtatttctttctggtgcccattccatttgtccagttaatacttcctcttaaaaatctccaagaagctgggtctccagatcccatttagaaccaaccaggtgctgaaaacacatgtagataatggccatcatcctaagcccaaagtagaaaatggtagaaggtagtgggtagaagtcactatataaggaaggggatgggattttccattctaaaagttttggagagggaaatccaggctattaaagtcactaaatttctaagtatgtccatttcccatctcagcttcaagggaggtgtcagcagtattatctccactttcaatctccctccaagctctactctggaggagtctgtcccactctgtcaagtggaatccttccctttccaactctacctccctcactcagctcctttcccctgatcagagaaagggatcaagggggttgggaggggggaaagagaccagccttggtccctaagcctccagaaacgtcttcttaatccccaccttttcttactcccaaaaaagaatgaacacccctgactctggagtggtgtatactgccacatcagtgtttgagtcagtccccagaggagaggggaaccctcctccatcttttttgcaacatctcatttcttccttttgctgttgcttcccccctcacacacttggttttgttctatcctacatttgagatttctattttatgttgaacttgctgctttttttcatattgaaaagatgacatcgccccaagagccaaaaataaatgggaattgaaaaaagctg

SEQ ID NO: 253340 - DNA, 2671 bp, Artificial Sequence
  derived and/or modified sequence
gtacatgaccggcatcgactaatcagggccaggctcgatgaggctttgtctccctaccgcgcgcggggccgattctcccgcctcccagccccggcgcacgcgcgccccgcccagcctgctttccctccgcgccctcccctctcctttctccctctcagaaccttcctgccgtcgcgtttgcacctcgctgctccagcctctggggcgcattccaaccttccagcctgcgacctgcggagaaaaaaaattacttattttcttgccccatacataccttgaggcgagcaaaaaaattaaattttaaccatgagggaaatcgtgcacatccaggctggtcagtgtggcaaccagatcggtgccaagttctgggaggtgatcagtgatgaacatggcatcgaccccaccggcacctaccacggggacagcgacctgcagctggaccgcatctctgtgtactacaatgaagccacaggtggcaaatatgttcctcgtgccatcctggtggatctagaacctgggaccatggactctgttcgctcaggtccttttggccagatctttagaccagacaactttgtatttggtcagtctggggcaggtaacaactgggccaaaggccactacacagagggcgccgagctggttgattctgtcctggatgtggtacggaaggaggcagagagctgtgactgcctgcagggcttccagctgacccactcactgggcgggggcacaggctctggaatgggcactctccttatcagcaagatccgagaagaataccctgatcgcatcatgaataccttcagtgtggtgccttcacccaaagtgtctgacaccgtggtcgagccctacaatgccaccctctccgtccatcagttggtagagaatactgatgagacctattgcattgacaacgaggccctctatgatatctgcttccgcactctgaagctgaccacaccaacctacggggatctgaaccaccttgtctcagccaccatgagtggtgtcaccacctgcctccgtttccctggccagctcaatgctgacctccgcaagttggcagtcaacatggtccccttcccacgtctccatttctttatgcctggctttgcccctctcaccagccgtggaagccagcagtatcgagctctcacagtgccggaactcacccagcaggtcttcgatgccaagaacatgatggctgcctgtgacccccgccacggccgatacctcaccgtggctgctgtcttccgtggtcggatgtccatgaaggaggtcgatgagcagatgcttaacgtgcagaacaagaacagcagctactttgtggaatggatccccaacaatgtcaagacagccgtctgtgacatcccacctcgtggcctcaagatggcagtcaccttcattggcaatagcacagccatccaggagctcttcaagcgcatctcggagcagttcactgccatgttccgccggaaggccttcctccactggtacacaggcgagggcatggacgagatggagttcaccgaggctgagagcaacatgaacgacctcgtctctgagtatcagcagtaccaggatgccaccgcagaagaggaggaggatttcggtgaggaggccgaagaggaggcctaaggcagagcccccatcacctcaggcttctcagttcccttagccgtcttactcaactgcccctttcctctccctcagaatttgtgtttgctgcctctatcttgttttttgttttttcttctgggggggggtctagaacagtgcctggcacatagtaggcgctcaataaatacttgtttgttgaatgtctcctctctctttccactctgggaaacctaggtttctgccattctgggtgaccctgtatttctttctggtgcccattccatttgtccagttaatacttcctcttaaaaatctccaagaagctgggtctccagatcccatttagaaccaaccaggtgctgaaaacacatgtagataatggccatcatcctaagcccaaagtagaaaatggtagaaggtagtgggtagaagtcactatataaggaaggggatgggattttccattctaaaagttttggagagggaaatccaggctattaaagtcactaaatttctaagtatgtccatttcccatctcagcttcaagggaggtgtcagcagtattatctccactttcaatctccctccaagctctactctggaggagtctgtcccactctgtcaagtggaatccttccctttccaactctacctccctcactcagctcctttcccctgatcagagaaagggatcaagggggttgggaggggggaaagagaccagccttggtccctaagcctccagaaacgtcttcttaatccccaccttttcttactcccaaaaaagaatgaacacccctgactctggagtggtgtatactgccacatcagtgtttgagtcagtccccagaggagaggggaaccctcctccatcttttttgcaacatctcatttcttccttttgctgttgcttcccccctcacacacttggttttgttctatcctacatttgagatttctattttatgttgaacttgctgctttttttcatattgaaaagatgacatcgccccaagagccaaaaataaatgggaattgaaaaaagctg

SEQ ID NO: 253341 - DNA, 2823 bp, Artificial Sequence
  derived and/or modified sequence
ggcgcttatcgaagtgtggtcgacctccatccgcccaccgagcacttgggacccgctgcacatatccagagcagggaaagctgtggctttctcgggggagcgagtgtctaggggaagggtgtggcaggcccacgggatgccatgccctagaacaacggcctgagcgcttgtggaattaaaatgggagatgtggggccgaggtgggcgaattgggatccctccaggtcaggggttcgagaccatcctgggcaacaaagcgagaccctcccccatgccacgtttctacaaaaaataaaagtaaaaaattagctgggcgtggtggcgcgcgtctgtggtcccagctactcgagaggctgagatgggaggatcggttgagcctgggagttccacgctgtagtcatccgtgattgcaccactgcactgcaggctgggcaacaggaagaccctgtcttaaaaattagaagaagctgggcgcggtggctcacccttgtaatcccagcactttgggaggccaagttctgggaggtgatcagtgatgaacatggcatcgaccccaccggcacctaccacggggacagcgacctgcagctggaccgcatctctgtgtactacaatgaagccacaggtggcaaatatgttcctcgtgccatcctggtggatctagaacctgggaccatggactctgttcgctcaggtccttttggccagatctttagaccagacaactttgtatttggtcagtctggggcaggtaacaactgggccaaaggccactacacagagggcgccgagctggttgattctgtcctggatgtggtacggaaggaggcagagagctgtgactgcctgcagggcttccagctgacccactcactgggcgggggcacaggctctggaatgggcactctccttatcagcaagatccgagaagaataccctgatcgcatcatgaataccttcagtgtggtgccttcacccaaagtgtctgacaccgtggtcgagccctacaatgccaccctctccgtccatcagttggtagagaatactgatgagacctattgcattgacaacgaggccctctatgatatctgcttccgcactctgaagctgaccacaccaacctacggggatctgaaccaccttgtctcagccaccatgagtggtgtcaccacctgcctccgtttccctggccagctcaatgctgacctccgcaagttggcagtcaacatggtccccttcccacgtctccatttctttatgcctggctttgcccctctcaccagccgtggaagccagcagtatcgagctctcacagtgccggaactcacccagcaggtcttcgatgccaagaacatgatggctgcctgtgacccccgccacggccgatacctcaccgtggctgctgtcttccgtggtcggatgtccatgaaggaggtcgatgagcagatgcttaacgtgcagaacaagaacagcagctactttgtggaatggatccccaacaatgtcaagacagccgtctgtgacatcccacctcgtggcctcaagatggcagtcaccttcattggcaatagcacagccatccaggagctcttcaagcgcatctcggagcagttcactgccatgttccgccggaaggccttcctccactggtacacaggcgagggcatggacgagatggagttcaccgaggctgagagcaacatgaacgacctcgtctctgagtatcagcagtaccaggatgccaccgcagaagaggaggaggatttcggtgaggaggccgaagaggaggcctaaggcagagcccccatcacctcaggcttctcagttcccttagccgtcttactcaactgcccctttcctctccctcagaatttgtgtttgctgcctctatcttgttttttgttttttcttctggggggggtctagaacagtgcctggcacatagtaggcgctcaataaatacttgtttgttgaatgtctcctctctctttccactctgggaaacctaggtttctgccattctgggtgaccctgtatttctttctggtgcccattccatttgtccagttaatacttcctcttaaaaatctccaagaagctgggtctccagatcccatttagaaccaaccaggtgctgaaaacacatgtagataatggccatcatcctaagcccaaagtagaaaatggtagaaggtagtgggtagaagtcactatataaggaaggggatgggattttccattctaaaagttttggagagggaaatccaggctattaaagtcactaaatttctaagtatgtccatttcccatctcagcttcaagggaggtgtcagcagtattatctccactttcaatctccctccaagctctactctggaggagtctgtcccactctgtcaagtggaatccttccctttccaactctacctccctcactcagctcctttcccctgatcagagaaagggatcaagggggttgggaggggggaaagagaccagccttggtccctaagcctccagaaacgtcttcttaatccccaccttttcttactcccaaaaaagaatgaacacccctgactctggagtggtgtatactgccacatcagtgtttgagtcagtccccagaggagaggggaaccctcctccatcttttttgcaacatctcatttcttccttttgctgttgcttcccccctcacacacttggttttgttctatcctacatttgagatttctattttatgttgaacttgctgctttttttcatattgaaaagatgacatcgccccaagagccaaaaataaatgggaattgaaaaaagctg

SEQ ID NO: 253342 - DNA, 2903 bp, Artificial Sequence
  derived and/or modified sequence
tggggcggtgcccagcttgggggaaggagagcggcgcttatcgaagtgtggtcgacctccatccgcccaccgagcacttgggacccgctgcacatatccagagcagggaaagctgtggctttctcgggggagcgagtgtctaggggaagggtgtggcaggcccacgggatgccatgccctagaacaacggcctgagcgcttgtggaattaaaatgggagatgtggggccgaggtgggcgaattgggatccctccaggtcaggggttcgagaccatcctgggcaacaaagcgagaccctcccccatgccacgtttctacaaaaaataaaagtaaaaaattagctgggcgtggtggcgcgcgtctgtggtcccagctactcgagaggctgagatgggaggatcggttgagcctgggagttccacgctgtagtcatccgtgattgcaccactgcactgcaggctgggcaacaggaagaccctgtcttaaaaattagaagaagctgggcgcggtggctcacccttgtaatcccagcactttgggaggccaaggtgggcggatcacgaggtcaagagatctagaccatcctggccaacatgttctgggaggtgatcagtgatgaacatggcatcgaccccaccggcacctaccacggggacagcgacctgcagctggaccgcatctctgtgtactacaatgaagccacaggtggcaaatatgttcctcgtgccatcctggtggatctagaacctgggaccatggactctgttcgctcaggtccttttggccagatctttagaccagacaactttgtatttggtcagtctggggcaggtaacaactgggccaaaggccactacacagagggcgccgagctggttgattctgtcctggatgtggtacggaaggaggcagagagctgtgactgcctgcagggcttccagctgacccactcactgggcgggggcacaggctctggaatgggcactctccttatcagcaagatccgagaagaataccctgatcgcatcatgaataccttcagtgtggtgccttcacccaaagtgtctgacaccgtggtcgagccctacaatgccaccctctccgtccatcagttggtagagaatactgatgagacctattgcattgacaacgaggccctctatgatatctgcttccgcactctgaagctgaccacaccaacctacggggatctgaaccaccttgtctcagccaccatgagtggtgtcaccacctgcctccgtttccctggccagctcaatgctgacctccgcaagttggcagtcaacatggtccccttcccacgtctccatttctttatgcctggctttgcccctctcaccagccgtggaagccagcagtatcgagctctcacagtgccggaactcacccagcaggtcttcgatgccaagaacatgatggctgcctgtgacccccgccacggccgatacctcaccgtggctgctgtcttccgtggtcggatgtccatgaaggaggtcgatgagcagatgcttaacgtgcagaacaagaacagcagctactttgtggaatggatccccaacaatgtcaagacagccgtctgtgacatcccacctcgtggcctcaagatggcagtcaccttcattggcaatagcacagccatccaggagctcttcaagcgcatctcggagcagttcactgccatgttccgccggaaggccttcctccactggtacacaggcgagggcatggacgagatggagttcaccgaggctgagagcaacatgaacgacctcgtctctgagtatcagcagtaccaggatgccaccgcagaagaggaggaggatttcggtgaggaggccgaagaggaggcctaaggcagagcccccatcacctcaggcttctcagttcccttagccgtcttactcaactgcccctttcctctccctcagaatttgtgtttgctgcctctatcttgttttttgttttttcttctggggggggtctagaacagtgcctggcacatagtaggcgctcaataaatacttgtttgttgaatgtctcctctctctttccactctgggaaacctaggtttctgccattctgggtgaccctgtatttctttctggtgcccattccatttgtccagttaatacttcctcttaaaaatctccaagaagctgggtctccagatcccatttagaaccaaccaggtgctgaaaacacatgtagataatggccatcatcctaagcccaaagtagaaaatggtagaaggtagtgggtagaagtcactatataaggaaggggatgggattttccattctaaaagttttggagagggaaatccaggctattaaagtcactaaatttctaagtatgtccatttcccatctcagcttcaagggaggtgtcagcagtattatctccactttcaatctccctccaagctctactctggaggagtctgtcccactctgtcaagtggaatccttccctttccaactctacctccctcactcagctcctttcccctgatcagagaaagggatcaagggggttgggaggggggaaagagaccagccttggtccctaagcctccagaaacgtcttcttaatccccaccttttcttactcccaaaaaagaatgaacacccctgactctggagtggtgtatactgccacatcagtgtttgagtcagtccccagaggagaggggaaccctcctccatcttttttgcaacatctcatttcttccttttgctgttgcttcccccctcacacacttggttttgttctatcctacatttgagatttctattttatgttgaacttgctgctttttttcatattgaaaagatgacatcgccccaagagccaaaaataaatgggaattgaaaaaagctg

SEQ ID NO: 253343 - DNA, 2824 bp, Artificial Sequence
  derived and/or modified sequence
ggcgcttatcgaagtgtggtcgacctccatccgcccaccgagcacttgggacccgctgcacatatccagagcagggaaagctgtggctttctcgggggagcgagtgtctaggggaagggtgtggcaggcccacgggatgccatgccctagaacaacggcctgagcgcttgtggaattaaaatgggagatgtggggccgaggtgggcgaattgggatccctccaggtcaggggttcgagaccatcctgggcaacaaagcgagaccctcccccatgccacgtttctacaaaaaataaaagtaaaaaattagctgggcgtggtggcgcgcgtctgtggtcccagctactcgagaggctgagatgggaggatcggttgagcctgggagttccacgctgtagtcatccgtgattgcaccactgcactgcaggctgggcaacaggaagaccctgtcttaaaaattagaagaagctgggcgcggtggctcacccttgtaatcccagcactttgggaggccaagttctgggaggtgatcagtgatgaacatggcatcgaccccaccggcacctaccacggggacagcgacctgcagctggaccgcatctctgtgtactacaatgaagccacaggtggcaaatatgttcctcgtgccatcctggtggatctagaacctgggaccatggactctgttcgctcaggtccttttggccagatctttagaccagacaactttgtatttggtcagtctggggcaggtaacaactgggccaaaggccactacacagagggcgccgagctggttgattctgtcctggatgtggtacggaaggaggcagagagctgtgactgcctgcagggcttccagctgacccactcactgggcgggggcacaggctctggaatgggcactctccttatcagcaagatccgagaagaataccctgatcgcatcatgaataccttcagtgtggtgccttcacccaaagtgtctgacaccgtggtcgagccctacaatgccaccctctccgtccatcagttggtagagaatactgatgagacctattgcattgacaacgaggccctctatgatatctgcttccgcactctgaagctgaccacaccaacctacggggatctgaaccaccttgtctcagccaccatgagtggtgtcaccacctgcctccgtttccctggccagctcaatgctgacctccgcaagttggcagtcaacatggtccccttcccacgtctccatttctttatgcctggctttgcccctctcaccagccgtggaagccagcagtatcgagctctcacagtgccggaactcacccagcaggtcttcgatgccaagaacatgatggctgcctgtgacccccgccacggccgatacctcaccgtggctgctgtcttccgtggtcggatgtccatgaaggaggtcgatgagcagatgcttaacgtgcagaacaagaacagcagctactttgtggaatggatccccaacaatgtcaagacagccgtctgtgacatcccacctcgtggcctcaagatggcagtcaccttcattggcaatagcacagccatccaggagctcttcaagcgcatctcggagcagttcactgccatgttccgccggaaggccttcctccactggtacacaggcgagggcatggacgagatggagttcaccgaggctgagagcaacatgaacgacctcgtctctgagtatcagcagtaccaggatgccaccgcagaagaggaggaggatttcggtgaggaggccgaagaggaggcctaaggcagagcccccatcacctcaggcttctcagttcccttagccgtcttactcaactgcccctttcctctccctcagaatttgtgtttgctgcctctatcttgttttttgttttttcttctgggggggggtctagaacagtgcctggcacatagtaggcgctcaataaatacttgtttgttgaatgtctcctctctctttccactctgggaaacctaggtttctgccattctgggtgaccctgtatttctttctggtgcccattccatttgtccagttaatacttcctcttaaaaatctccaagaagctgggtctccagatcccatttagaaccaaccaggtgctgaaaacacatgtagataatggccatcatcctaagcccaaagtagaaaatggtagaaggtagtgggtagaagtcactatataaggaaggggatgggattttccattctaaaagttttggagagggaaatccaggctattaaagtcactaaatttctaagtatgtccatttcccatctcagcttcaagggaggtgtcagcagtattatctccactttcaatctccctccaagctctactctggaggagtctgtcccactctgtcaagtggaatccttccctttccaactctacctccctcactcagctcctttcccctgatcagagaaagggatcaagggggttgggaggggggaaagagaccagccttggtccctaagcctccagaaacgtcttcttaatccccaccttttcttactcccaaaaaagaatgaacacccctgactctggagtggtgtatactgccacatcagtgtttgagtcagtccccagaggagaggggaaccctcctccatcttttttgcaacatctcatttcttccttttgctgttgcttcccccctcacacacttggttttgttctatcctacatttgagatttctattttatgttgaacttgctgctttttttcatattgaaaagatgacatcgccccaagagccaaaaataaatgggaattgaaaaaagctg

SEQ ID NO: 253344 - DNA, 2633 bp, Artificial Sequence
  derived and/or modified sequence
cgcgtgcgccgcagtcacgtggagggcggggggggtggtcgactgcggcggcagctctttcctcagacccccagccttttgtgcgccgcgcggtggggcggtgcccagcttgggggaaggagagcggcgcttatcgaagtgtggtcgacctccatccgcccaccgagcacttgggacccgctgcacatatccagagcagggaaagctgtggctttctcgggggagcgagtgtctaggggaagggtgtggcaggcccacgggatgccatgccctagaacaacggcctgagcgcttgtggaattaaaatgggagatgtggggccgagttctgggaggtgatcagtgatgaacatggcatcgaccccaccggcacctaccacggggacagcgacctgcagctggaccgcatctctgtgtactacaatgaagccacaggtggcaaatatgttcctcgtgccatcctggtggatctagaacctgggaccatggactctgttcgctcaggtccttttggccagatctttagaccagacaactttgtatttggtcagtctggggcaggtaacaactgggccaaaggccactacacagagggcgccgagctggttgattctgtcctggatgtggtacggaaggaggcagagagctgtgactgcctgcagggcttccagctgacccactcactgggcgggggcacaggctctggaatgggcactctccttatcagcaagatccgagaagaataccctgatcgcatcatgaataccttcagtgtggtgccttcacccaaagtgtctgacaccgtggtcgagccctacaatgccaccctctccgtccatcagttggtagagaatactgatgagacctattgcattgacaacgaggccctctatgatatctgcttccgcactctgaagctgaccacaccaacctacggggatctgaaccaccttgtctcagccaccatgagtggtgtcaccacctgcctccgtttccctggccagctcaatgctgacctccgcaagttggcagtcaacatggtccccttcccacgtctccatttctttatgcctggctttgcccctctcaccagccgtggaagccagcagtatcgagctctcacagtgccggaactcacccagcaggtcttcgatgccaagaacatgatggctgcctgtgacccccgccacggccgatacctcaccgtggctgctgtcttccgtggtcggatgtccatgaaggaggtcgatgagcagatgcttaacgtgcagaacaagaacagcagctactttgtggaatggatccccaacaatgtcaagacagccgtctgtgacatcccacctcgtggcctcaagatggcagtcaccttcattggcaatagcacagccatccaggagctcttcaagcgcatctcggagcagttcactgccatgttccgccggaaggccttcctccactggtacacaggcgagggcatggacgagatggagttcaccgaggctgagagcaacatgaacgacctcgtctctgagtatcagcagtaccaggatgccaccgcagaagaggaggaggatttcggtgaggaggccgaagaggaggcctaaggcagagcccccatcacctcaggcttctcagttcccttagccgtcttactcaactgcccctttcctctccctcagaatttgtgtttgctgcctctatcttgttttttgttttttcttctgggggggggtctagaacagtgcctggcacatagtaggcgctcaataaatacttgtttgttgaatgtctcctctctctttccactctgggaaacctaggtttctgccattctgggtgaccctgtatttctttctggtgcccattccatttgtccagttaatacttcctcttaaaaatctccaagaagctgggtctccagatcccatttagaaccaaccaggtgctgaaaacacatgtagataatggccatcatcctaagcccaaagtagaaaatggtagaaggtagtgggtagaagtcactatataaggaaggggatgggattttccattctaaaagttttggagagggaaatccaggctattaaagtcactaaatttctaagtatgtccatttcccatctcagcttcaagggaggtgtcagcagtattatctccactttcaatctccctccaagctctactctggaggagtctgtcccactctgtcaagtggaatccttccctttccaactctacctccctcactcagctcctttcccctgatcagagaaagggatcaagggggttgggaggggggaaagagaccagccttggtccctaagcctccagaaacgtcttcttaatccccaccttttcttactcccaaaaaagaatgaacacccctgactctggagtggtgtatactgccacatcagtgtttgagtcagtccccagaggagaggggaaccctcctccatcttttttgcaacatctcatttcttccttttgctgttgcttcccccctcacacacttggttttgttctatcctacatttgagatttctattttatgttgaacttgctgctttttttcatattgaaaagatgacatcgccccaagagccaaaaataaatgggaattgaaaaaagctg

SEQ ID NO: 253345 - DNA, 2904 bp, Artificial Sequence
  derived and/or modified sequence
tggggcggtgcccagcttgggggaaggagagcggcgcttatcgaagtgtggtcgacctccatccgcccaccgagcacttgggacccgctgcacatatccagagcagggaaagctgtggctttctcgggggagcgagtgtctaggggaagggtgtggcaggcccacgggatgccatgccctagaacaacggcctgagcgcttgtggaattaaaatgggagatgtggggccgaggtgggcgaattgggatccctccaggtcaggggttcgagaccatcctgggcaacaaagcgagaccctcccccatgccacgtttctacaaaaaataaaagtaaaaaattagctgggcgtggtggcgcgcgtctgtggtcccagctactcgagaggctgagatgggaggatcggttgagcctgggagttccacgctgtagtcatccgtgattgcaccactgcactgcaggctgggcaacaggaagaccctgtcttaaaaattagaagaagctgggcgcggtggctcacccttgtaatcccagcactttgggaggccaaggtgggcggatcacgaggtcaagagatctagaccatcctggccaacatgttctgggaggtgatcagtgatgaacatggcatcgaccccaccggcacctaccacggggacagcgacctgcagctggaccgcatctctgtgtactacaatgaagccacaggtggcaaatatgttcctcgtgccatcctggtggatctagaacctgggaccatggactctgttcgctcaggtccttttggccagatctttagaccagacaactttgtatttggtcagtctggggcaggtaacaactgggccaaaggccactacacagagggcgccgagctggttgattctgtcctggatgtggtacggaaggaggcagagagctgtgactgcctgcagggcttccagctgacccactcactgggcgggggcacaggctctggaatgggcactctccttatcagcaagatccgagaagaataccctgatcgcatcatgaataccttcagtgtggtgccttcacccaaagtgtctgacaccgtggtcgagccctacaatgccaccctctccgtccatcagttggtagagaatactgatgagacctattgcattgacaacgaggccctctatgatatctgcttccgcactctgaagctgaccacaccaacctacggggatctgaaccaccttgtctcagccaccatgagtggtgtcaccacctgcctccgtttccctggccagctcaatgctgacctccgcaagttggcagtcaacatggtccccttcccacgtctccatttctttatgcctggctttgcccctctcaccagccgtggaagccagcagtatcgagctctcacagtgccggaactcacccagcaggtcttcgatgccaagaacatgatggctgcctgtgacccccgccacggccgatacctcaccgtggctgctgtcttccgtggtcggatgtccatgaaggaggtcgatgagcagatgcttaacgtgcagaacaagaacagcagctactttgtggaatggatccccaacaatgtcaagacagccgtctgtgacatcccacctcgtggcctcaagatggcagtcaccttcattggcaatagcacagccatccaggagctcttcaagcgcatctcggagcagttcactgccatgttccgccggaaggccttcctccactggtacacaggcgagggcatggacgagatggagttcaccgaggctgagagcaacatgaacgacctcgtctctgagtatcagcagtaccaggatgccaccgcagaagaggaggaggatttcggtgaggaggccgaagaggaggcctaaggcagagcccccatcacctcaggcttctcagttcccttagccgtcttactcaactgcccctttcctctccctcagaatttgtgtttgctgcctctatcttgttttttgttttttcttctgggggggggtctagaacagtgcctggcacatagtaggcgctcaataaatacttgtttgttgaatgtctcctctctctttccactctgggaaacctaggtttctgccattctgggtgaccctgtatttctttctggtgcccattccatttgtccagttaatacttcctcttaaaaatctccaagaagctgggtctccagatcccatttagaaccaaccaggtgctgaaaacacatgtagataatggccatcatcctaagcccaaagtagaaaatggtagaaggtagtgggtagaagtcactatataaggaaggggatgggattttccattctaaaagttttggagagggaaatccaggctattaaagtcactaaatttctaagtatgtccatttcccatctcagcttcaagggaggtgtcagcagtattatctccactttcaatctccctccaagctctactctggaggagtctgtcccactctgtcaagtggaatccttccctttccaactctacctccctcactcagctcctttcccctgatcagagaaagggatcaagggggttgggaggggggaaagagaccagccttggtccctaagcctccagaaacgtcttcttaatccccaccttttcttactcccaaaaaagaatgaacacccctgactctggagtggtgtatactgccacatcagtgtttgagtcagtccccagaggagaggggaaccctcctccatcttttttgcaacatctcatttcttccttttgctgttgcttcccccctcacacacttggttttgttctatcctacatttgagatttctattttatgttgaacttgctgctttttttcatattgaaaagatgacatcgccccaagagccaaaaataaatgggaattgaaaaaagctg

SEQ ID NO: 253346 - DNA, 2903 bp, Artificial Sequence
  derived and/or modified sequence
tggggcggtgcccagcttgggggaaggagagcggcgcttatcgaagtgtggtcgacctccatccgcccaccgagcacttgggacccgctgcacatatccagagcagggaaagctgtggctttctcgggggagcgagtgtctaggggaagggtgtggcaggcccacgggatgccatgccctagaacaacggcctgagcgcttgtggaattaaaatgggagatgtggggccgaggtgggcgaattgggatccctccaggtcaggggttcgagaccatcctgggcaacaaagcgagaccctcccccatgccacgtttctacaaaaaataaaagtaaaaaattagctgggcgtggtggcgcgcgtctgtggtcccagctactcgagaggctgagatgggaggatcggttgagcctgggagttccacgctgtagtcatccgtgattgcaccactgcactgcaggctgggcaacaggaagaccctgtcttaaaaattagaagaagctgggcgcggtggctcacccttgtaatcccagcactttgggaggccaaggtgggcggatcacgaggtcaagagatctagaccatcctggccaacatgttctgggaggtgatcagtgatgaacatggcatcgaccccaccggcacctaccacggggacagcgacctgcagctggaccgcatctctgtgtactacaatgaagccacaggtggcaaatatgttcctcgtgccatcctggtggatctagaacctgggaccatggactctgttcgctcaggtccttttggccagatctttagaccagacaactttgtatttggtcagtctggggcaggtaacaactgggccaaaggccactacacagagggcgccgagctggttgattctgtcctggatgtggtacggaaggaggcagagagctgtgactgcctgcagggcttccagctgacccactcactgggcgggggcacaggctctggaatgggcactctccttatcagcaagatccgagaagaataccctgatcgcatcatgaataccttcagtgtggtgccttcacccaaagtgtctgacaccgtggtcgagccctacaatgccaccctctccgtccatcagttggtagagaatactgatgagacctattgcattgacaacgaggccctctatgatatctgcttccgcactctgaagctgaccacaccaacctacggggatctgaaccaccttgtctcagccaccatgagtggtgtcaccacctgcctccgtttccctggccagctcaatgctgacctccgcaagttggcagtcaacatggtccccttcccacgtctccatttctttatgcctggctttgcccctctcaccagccgtggaagccagcagtatcgagctctcacagtgccggaactcacccagcaggtcttcgatgccaagaacatgatggctgcctgtgacccccgccacggccgatacctcaccgtggctgctgtcttccgtggtcggatgtccatgaaggaggtcgatgagcagatgcttaacgtgcagaacaagaacagcagctactttgtggaatggatccccaacaatgtcaagacagccgtctgtgacatcccacctcgtggcctcaagatggcagtcaccttcattggcaatagcacagccatccaggagctcttcaagcgcatctcggagcagttcactgccatgttccgccggaaggccttcctccactggtacacaggcgagggcatggacgagatggagttcaccgaggctgagagcaacatgaacgacctcgtctctgagtatcagcagtaccaggatgccaccgcagaagaggaggaggatttcggtgaggaggccgaagaggaggcctaaggcagagcccccatcacctcaggcttctcagttcccttagccgtcttactcaactgcccctttcctctccctcagaatttgtgtttgctgcctctatcttgttttttgttttttcttctggggggggtctagaacagtgcctggcacatagtaggcgctcaataaatacttgtttgttgaatgtctcctctctctttccactctgggaaacctaggtttctgccattctgggtgaccctgtatttctttctggtgcccattccatttgtccagttaatacttcctcttaaaaatctccaagaagctgggtctccagatcccatttagaaccaaccaggtgctgaaaacacatgtagataatggccatcatcctaagcccaaagtagaaaatggtagaaggtagtgggtagaagtcactatataaggaaggggatgggattttccattctaaaagttttggagagggaaatccaggctattaaagtcactaaatttctaagtatgtccatttcccatctcagcttcaagggaggtgtcagcagtattatctccactttcaatctccctccaagctctactctggaggagtctgtcccactctgtcaagtggaatccttccctttccaactctacctccctcactcagctcctttcccctgatcagagaaagggatcaagggggttgggaggggggaaagagaccagccttggtccctaagcctccagaaacgtcttcttaatccccaccttttcttactcccaaaaaagaatgaacacccctgactctggaatggtgtatactgccacatcagtgtttgagtcagtccccagaggagaggggaaccctcctccatcttttttgcaacatctcatttcttccttttgctgttgcttcccccctcacacacttggttttgttctatcctacatttgagatttctattttgtgttgaacttgctgctttttttcatattgaaaagatgacatcgccccaagagccaaaaataaatgggaattgaaaaaagctg

SEQ ID NO: 253347 - DNA, 2670 bp, Artificial Sequence
  derived and/or modified sequence
gtacatgaccggcatcgactaatcagggccaggctcgatgaggctttgtctccctaccgcgcgcggggccgattctcccgcctcccagccccggcgcacgcgcgccccgcccagcctgctttccctccgcgccctcccctctcctttctccctctcagaaccttcctgccgtcgcgtttgcacctcgctgctccagcctctggggcgcattccaaccttccagcctgcgacctgcggagaaaaaaaattacttattttcttgccccatacataccttgaggcgagcaaaaaaattaaattttaaccatgagggaaatcgtgcacatccaggctggtcagtgtggcaaccagatcggtgccaagttctgggaggtgatcagtgatgaacatggcatcgaccccaccggcacctaccacggggacagcgacctgcagctggaccgcatctctgtgtactacaatgaagccacaggtggcaaatatgttcctcgtgccatcctggtggatctagaacctgggaccatggactctgttcgctcaggtccttttggccagatctttagaccagacaactttgtatttggtcagtctggggcaggtaacaactgggccaaaggccactacacagagggcgccgagctggttgattctgtcctggatgtggtacggaaggaggcagagagctgtgactgcctgcagggcttccagctgacccactcactgggcgggggcacaggctctggaatgggcactctccttatcagcaagatccgagaagaataccctgatcgcatcatgaataccttcagtgtggtgccttcacccaaagtgtctgacaccgtggtcgagccctacaatgccaccctctccgtccatcagttggtagagaatactgatgagacctattgcattgacaacgaggccctctatgatatctgcttccgcactctgaagctgaccacaccaacctacggggatctgaaccaccttgtctcagccaccatgagtggtgtcaccacctgcctccgtttccctggccagctcaatgctgacctccgcaagttggcagtcaacatggtccccttcccacgtctccatttctttatgcctggctttgcccctctcaccagccgtggaagccagcagtatcgagctctcacagtgccggaactcacccagcaggtcttcgatgccaagaacatgatggctgcctgtgacccccgccacggccgatacctcaccgtggctgctgtcttccgtggtcggatgtccatgaaggaggtcgatgagcagatgcttaacgtgcagaacaagaacagcagctactttgtggaatggatccccaacaatgtcaagacagccgtctgtgacatcccacctcgtggcctcaagatggcagtcaccttcattggcaatagcacagccatccaggagctcttcaagcgcatctcggagcagttcactgccatgttccgccggaaggccttcctccactggtacacaggcgagggcatggacgagatggagttcaccgaggctgagagcaacatgaacgacctcgtctctgagtatcagcagtaccaggatgccaccgcagaagaggaggaggatttcggtgaggaggccgaagaggaggcctaaggcagagcccccatcacctcaggcttctcagttcccttagccgtcttactcaactgcccctttcctctccctcagaatttgtgtttgctgcctctatcttgttttttgttttttcttctggggggggtctagaacagtgcctggcacatagtaggcgctcaataaatacttgtttgttgaatgtctcctctctctttccactctgggaaacctaggtttctgccattctgggtgaccctgtatttctttctggtgcccattccatttgtccagttaatacttcctcttaaaaatctccaagaagctgggtctccagatcccatttagaaccaaccaggtgctgaaaacacatgtagataatggccatcatcctaagcccaaagtagaaaatggtagaaggtagtgggtagaagtcactatataaggaaggggatgggattttccattctaaaagttttggagagggaaatccaggctattaaagtcactaaatttctaagtatgtccatttcccatctcagcttcaagggaggtgtcagcagtattatctccactttcaatctccctccaagctctactctggaggagtctgtcccactctgtcaagtggaatccttccctttccaactctacctccctcactcagctcctttcccctgatcagagaaagggatcaagggggttgggaggggggaaagagaccagccttggtccctaagcctccagaaacgtcttcttaatccccaccttttcttactcccaaaaaagaatgaacacccctgactctggaatggtgtatactgccacatcagtgtttgagtcagtccccagaggagaggggaaccctcctccatcttttttgcaacatctcatttcttccttttgctgttgcttcccccctcacacacttggttttgttctatcctacatttgagatttctattttgtgttgaacttgctgctttttttcatattgaaaagatgacatcgccccaagagccaaaaataaatgggaattgaaaaaagctg

SEQ ID NO: 253348 - DNA, 2632 bp, Artificial Sequence
  derived and/or modified sequence
cgcgtgcgccgcagtcacgtggagggcggggggggtggtcgactgcggcggcagctctttcctcagacccccagccttttgtgcgccgcgcggtggggcggtgcccagcttgggggaaggagagcggcgcttatcgaagtgtggtcgacctccatccgcccaccgagcacttgggacccgctgcacatatccagagcagggaaagctgtggctttctcgggggagcgagtgtctaggggaagggtgtggcaggcccacgggatgccatgccctagaacaacggcctgagcgcttgtggaattaaaatgggagatgtggggccgagttctgggaggtgatcagtgatgaacatggcatcgaccccaccggcacctaccacggggacagcgacctgcagctggaccgcatctctgtgtactacaatgaagccacaggtggcaaatatgttcctcgtgccatcctggtggatctagaacctgggaccatggactctgttcgctcaggtccttttggccagatctttagaccagacaactttgtatttggtcagtctggggcaggtaacaactgggccaaaggccactacacagagggcgccgagctggttgattctgtcctggatgtggtacggaaggaggcagagagctgtgactgcctgcagggcttccagctgacccactcactgggcgggggcacaggctctggaatgggcactctccttatcagcaagatccgagaagaataccctgatcgcatcatgaataccttcagtgtggtgccttcacccaaagtgtctgacaccgtggtcgagccctacaatgccaccctctccgtccatcagttggtagagaatactgatgagacctattgcattgacaacgaggccctctatgatatctgcttccgcactctgaagctgaccacaccaacctacggggatctgaaccaccttgtctcagccaccatgagtggtgtcaccacctgcctccgtttccctggccagctcaatgctgacctccgcaagttggcagtcaacatggtccccttcccacgtctccatttctttatgcctggctttgcccctctcaccagccgtggaagccagcagtatcgagctctcacagtgccggaactcacccagcaggtcttcgatgccaagaacatgatggctgcctgtgacccccgccacggccgatacctcaccgtggctgctgtcttccgtggtcggatgtccatgaaggaggtcgatgagcagatgcttaacgtgcagaacaagaacagcagctactttgtggaatggatccccaacaatgtcaagacagccgtctgtgacatcccacctcgtggcctcaagatggcagtcaccttcattggcaatagcacagccatccaggagctcttcaagcgcatctcggagcagttcactgccatgttccgccggaaggccttcctccactggtacacaggcgagggcatggacgagatggagttcaccgaggctgagagcaacatgaacgacctcgtctctgagtatcagcagtaccaggatgccaccgcagaagaggaggaggatttcggtgaggaggccgaagaggaggcctaaggcagagcccccatcacctcaggcttctcagttcccttagccgtcttactcaactgcccctttcctctccctcagaatttgtgtttgctgcctctatcttgttttttgttttttcttctggggggggtctagaacagtgcctggcacatagtaggcgctcaataaatacttgtttgttgaatgtctcctctctctttccactctgggaaacctaggtttctgccattctgggtgaccctgtatttctttctggtgcccattccatttgtccagttaatacttcctcttaaaaatctccaagaagctgggtctccagatcccatttagaaccaaccaggtgctgaaaacacatgtagataatggccatcatcctaagcccaaagtagaaaatggtagaaggtagtgggtagaagtcactatataaggaaggggatgggattttccattctaaaagttttggagagggaaatccaggctattaaagtcactaaatttctaagtatgtccatttcccatctcagcttcaagggaggtgtcagcagtattatctccactttcaatctccctccaagctctactctggaggagtctgtcccactctgtcaagtggaatccttccctttccaactctacctccctcactcagctcctttcccctgatcagagaaagggatcaagggggttgggaggggggaaagagaccagccttggtccctaagcctccagaaacgtcttcttaatccccaccttttcttactcccaaaaaagaatgaacacccctgactctggaatggtgtatactgccacatcagtgtttgagtcagtccccagaggagaggggaaccctcctccatcttttttgcaacatctcatttcttccttttgctgttgcttcccccctcacacacttggttttgttctatcctacatttgagatttctattttgtgttgaacttgctgctttttttcatattgaaaagatgacatcgccccaagagccaaaaataaatgggaattgaaaaaagctg

SEQ ID NO: 253349 - DNA, 2823 bp, Artificial Sequence
  derived and/or modified sequence
ggcgcttatcgaagtgtggtcgacctccatccgcccaccgagcacttgggacccgctgcacatatccagagcagggaaagctgtggctttctcgggggagcgagtgtctaggggaagggtgtggcaggcccacgggatgccatgccctagaacaacggcctgagcgcttgtggaattaaaatgggagatgtggggccgaggtgggcgaattgggatccctccaggtcaggggttcgagaccatcctgggcaacaaagcgagaccctcccccatgccacgtttctacaaaaaataaaagtaaaaaattagctgggcgtggtggcgcgcgtctgtggtcccagctactcgagaggctgagatgggaggatcggttgagcctgggagttccacgctgtagtcatccgtgattgcaccactgcactgcaggctgggcaacaggaagaccctgtcttaaaaattagaagaagctgggcgcggtggctcacccttgtaatcccagcactttgggaggccaagttctgggaggtgatcagtgatgaacatggcatcgaccccaccggcacctaccacggggacagcgacctgcagctggaccgcatctctgtgtactacaatgaagccacaggtggcaaatatgttcctcgtgccatcctggtggatctagaacctgggaccatggactctgttcgctcaggtccttttggccagatctttagaccagacaactttgtatttggtcagtctggggcaggtaacaactgggccaaaggccactacacagagggcgccgagctggttgattctgtcctggatgtggtacggaaggaggcagagagctgtgactgcctgcagggcttccagctgacccactcactgggcgggggcacaggctctggaatgggcactctccttatcagcaagatccgagaagaataccctgatcgcatcatgaataccttcagtgtggtgccttcacccaaagtgtctgacaccgtggtcgagccctacaatgccaccctctccgtccatcagttggtagagaatactgatgagacctattgcattgacaacgaggccctctatgatatctgcttccgcactctgaagctgaccacaccaacctacggggatctgaaccaccttgtctcagccaccatgagtggtgtcaccacctgcctccgtttccctggccagctcaatgctgacctccgcaagttggcagtcaacatggtccccttcccacgtctccatttctttatgcctggctttgcccctctcaccagccgtggaagccagcagtatcgagctctcacagtgccggaactcacccagcaggtcttcgatgccaagaacatgatggctgcctgtgacccccgccacggccgatacctcaccgtggctgctgtcttccgtggtcggatgtccatgaaggaggtcgatgagcagatgcttaacgtgcagaacaagaacagcagctactttgtggaatggatccccaacaatgtcaagacagccgtctgtgacatcccacctcgtggcctcaagatggcagtcaccttcattggcaatagcacagccatccaggagctcttcaagcgcatctcggagcagttcactgccatgttccgccggaaggccttcctccactggtacacaggcgagggcatggacgagatggagttcaccgaggctgagagcaacatgaacgacctcgtctctgagtatcagcagtaccaggatgccaccgcagaagaggaggaggatttcggtgaggaggccgaagaggaggcctaaggcagagcccccatcacctcaggcttctcagttcccttagccgtcttactcaactgcccctttcctctccctcagaatttgtgtttgctgcctctatcttgttttttgttttttcttctggggggggtctagaacagtgcctggcacatagtaggcgctcaataaatacttgtttgttgaatgtctcctctctctttccactctgggaaacctaggtttctgccattctgggtgaccctgtatttctttctggtgcccattccatttgtccagttaatacttcctcttaaaaatctccaagaagctgggtctccagatcccatttagaaccaaccaggtgctgaaaacacatgtagataatggccatcatcctaagcccaaagtagaaaatggtagaaggtagtgggtagaagtcactatataaggaaggggatgggattttccattctaaaagttttggagagggaaatccaggctattaaagtcactaaatttctaagtatgtccatttcccatctcagcttcaagggaggtgtcagcagtattatctccactttcaatctccctccaagctctactctggaggagtctgtcccactctgtcaagtggaatccttccctttccaactctacctccctcactcagctcctttcccctgatcagagaaagggatcaagggggttgggaggggggaaagagaccagccttggtccctaagcctccagaaacgtcttcttaatccccaccttttcttactcccaaaaaagaatgaacacccctgactctggaatggtgtatactgccacatcagtgtttgagtcagtccccagaggagaggggaaccctcctccatcttttttgcaacatctcatttcttccttttgctgttgcttcccccctcacacacttggttttgttctatcctacatttgagatttctattttgtgttgaacttgctgctttttttcatattgaaaagatgacatcgccccaagagccaaaaataaatgggaattgaaaaaagctg

SEQ ID NO: 253350 - DNA, 1395 bp, Artificial Sequence
  derived and/or modified sequence
agaaccttcctgccgtcgcgtttgcacctcgctgctccagcctctggggcgcattccaaccttccagcctgcgacctgcggagaaaaaaaattacttattttcttgccccatacataccttgaggcgagcaaaaaaattaaattttaaccatgagggaaatcgtgcacatccaggctggtcagtgtggcaaccagatcggtgccaagttctgggaggtgatcagtgatgaacatggcatcgaccccaccggcacctaccacggggacagcgacctgcagctggaccgcatctctgtgtactacaatgaagccacaggtggcaaatatgttcctcgtgccatcctggtggatctagaacctgggaccatggactctgttcgctcaggtccttttggccagatctttagaccagacaactttgtatttggtcagtctggggcaggtaacaactgcctgcagggcttccagctgacccactcactgggcgggggcacaggctctggaatgggcactctccttatcagcaagatccgagaagaataccctgatcgcatcatgaataccttcagtgtggtgccttcacccaaagtgtctgacaccgtggtcgagccctacaatgccaccctctccgtccatcagttggtagagaatactgatgagacctattgcattgacaacgaggccctctatgatatctgcttccgcactctgaagctgaccacaccaacctacggggatctgaaccaccttgtctcagccaccatgagtggtgtcaccacctgcctccgtttccctggccagctcaatgctgacctccgcaagttggcagtcaacatggtccccttcccacgtctccatttctttatgcctggctttgcccctctcaccagccgtggaagccagcagtatcgagctctcacagtgccggaactcacccagcaggtcttcgatgccaagaacatgatggctgcctgtgacccccgccacggccgatacctcaccgtggctgctgtcttccgtggtcggatgtccatgaaggaggtcgatgagcagatgcttaacgtgcagaacaagaacagcagctactttgtggaatggatccccaacaatgtcaagacagccgtctgtgacatcccacctcgtggcctcaagatggcagtcaccttcattggcaatagcacagccatccaggagctcttcaagcgcatctcggagcagttcactgccatgttccgccggaaggccttcctccactggtacacaggcgagggcatggacgagatggagttcaccgaggctgagagcaacatgaacgacctcgtctctgagtatcagcagtaccaggatgccaccgcagaagaggaggaggatttcggtgaggaggccgaagaggag

SEQ ID NO: 253351 - DNA, 1455 bp, Artificial Sequence
  derived and/or modified sequence
agaaccttcctgccgtcgcgtttgcacctcgctgctccagcctctggggcgcattccaaccttccagcctgcgacctgcggagaaaaaaaattacttattttcttgccccatacataccttgaggcgagcaaaaaaattaaattttaaccatgagggaaatcgtgcacatccaggctggtcagtgtggcaaccagatcggtgccaagttctgggaggtgatcagtgatgaacatggcatcgaccccaccggcacctaccacggggacagcgacctgcagctggaccgcatctctgtgtactacaatgaagccacaggtggcaaatatgttcctcgtgccatcctggtggatctagaacctgggaccatggactctgttcgctcaggtccttttggccagatctttagaccagacaactttgtatttggtcagtctggggcaggtaacaactgggccaaaggccactacacagagggcgccgagctggttgattctgtcctggatgtggtacggaaggaggcagagagctgtgactgcctgcagggcttccagctgacccactcactgggcgggggcacaggctctggaatgggcactctccttatcagcaagatccgagaagaataccctgatcgcatcatgaataccttcagtgtggtgccttcacccaaagtgtctgacaccgtggtcgagccctacaatgccaccctctccgtccatcagttggtagagaatactgatgagacctattgcattgacaacgaggccctctatgatatctgcttccgcactctgaagctgaccacaccaacctacggggatctgaaccaccttgtctcagccaccatgagtggtgtcaccacctgcctccgtttccctggccagctcaatgctgacctccgcaagttggcagtcaacatggtccccttcccacgtctccatttctttatgcctggctttgcccctctcaccagccgtggaagccagcagtatcgagctctcacagtgccggaactcacccagcaggtcttcgatgccaagaacatgatggctgcctgtgacccccgccacggccgatacctcaccgtggctgctgtcttccgtggtcggatgtccatgaaggaggtcgatgagcagatgcttaacgtgcagaacaagaacagcagctactttgtggaatggatccccaacaatgtcaagacagccgtctgtgacatcccacctcgtggcctcaagatggcagtcaccttcattggcaatagcacagccatccaggagctcttcaagcgcatctcggagcagttcactgccatgttccgccggaaggccttcctccactggtacacaggcgagggcatggacgagatggagttcaccgaggctgagagcaacatgaacgacctcgtctctgagtatcagcagtaccaggatgccaccgcagaaggggggggtcta

SEQ ID NO: 253352 - DNA, 1458 bp, Artificial Sequence
  derived and/or modified sequence
agaaccttcctgccgtcgcgtttgcacctcgctgctccagcctctggggcgcattccaaccttccagcctgcgacctgcggagaaaaaaaattacttattttcttgccccatacataccttgaggcgagcaaaaaaattaaattttaaccatgagggaaatcgtgcacatccaggctggtcagtgtggcaaccagatcggtgccaagttctgggaggtgatcagtgatgaacatggcatcgaccccaccggcacctaccacggggacagcgacctgcagctggaccgcatctctgtgtactacaatgaagccacaggtggcaaatatgttcctcgtgccatcctggtggatctagaacctgggaccatggactctgttcgctcaggtccttttggccagatctttagaccagacaactttgtatttggtcagtctggggcaggtaacaactgggccaaaggccactacacagagggcgccgagctggttgattctgtcctggatgtggtacggaaggaggcagagagctgtgactgcctgcagggcttccagctgacccactcactgggcgggggcacaggctctggaatgggcactctccttatcagcaagatccgagaagaataccctgatcgcatcatgaataccttcagtgtggtgccttcacccaaagtgtctgacaccgtggtcgagccctacaatgccaccctctccgtccatcagttggtagagaatactgatgagacctattgcattgacaacgaggccctctatgatatctgcttccgcactctgaagctgaccacaccaacctacggggatctgaaccaccttgtctcagccaccatgagtggtgtcaccacctgcctccgtttccctggccagctcaatgctgacctccgcaagttggcagtcaacatggtccccttcccacgtctccatttctttatgcctggctttgcccctctcaccagccgtggaagccagcagtatcgagctctcacagtgccggaactcacccagcaggtcttcgatgccaagaacatgatggctgcctgtgacccccgccacggccgatacctcaccgtggctgctgtcttccgtggtcggatgtccatgaaggaggtcgatgagcagatgcttaacgtgcagaacaagaacagcagctactttgtggaatggatccccaacaatgtcaagacagccgtctgtgacatcccacctcgtggcctcaagatggcagtcaccttcattggcaatagcacagccatccaggagctcttcaagcgcatctcggagcagttcactgccatgttccgccggaaggccttcctccactggtacacaggcgagggcatggacgagatggagttcaccgaggctgagagcaacatgaacgacctcgtctctgagtatcagcagtaccaggatgccaccgcagaagaggggggggtctag

SEQ ID NO: 253353 - protein, 1023 aa, Artificial Sequence
  derived and/or modified sequence
MCARMAGRTTAAPRGPYGPWLCLLVALALDVVRVDCGQAPLDPVYLPAALELLDAPEHFRVQQVGHYPPANSSLSSRSETFLLLQPWPRAQPLLRASYPPFATQQVVPPRVTEPHQRPVPWDVRAVSVEAAVTPAEPYARVLFHLKGQDWPPGSGSLPCARLHATHPAGTAHQACRFQPSLGACVVELELPSHWFSQASTTRAELAYTLEPAAEGPGGCGSGEENDPGEQALPVGGVELRPADPPQYQEVPLDEAVTLRVPDMPVRPGQLFSATLLLRHNFTASLLTLRIKVKKGLHVTAARPAQPTLWTAKLDRFKGSRHHTTLITCHRAGLTEPDSSPLELSEFLWVDFVVENSTGGGVAVTRPVTWQLEYPGQAPEAEKDKMVWEILVSERDIRALIPLAKAEELVNTAPLTGVPQHVPVRLVTVDGGGALVEVTEHVGCESANTQVLQVSEACDAVFVAGKESRGARGVRVDFWWRRLRASLRLTVWAPLLPLRIELTDTTLEQVRGWRVPGPAEGPAEPAAEASDEAERRARGCHLQYQRAGVRFLAPFAAHPLDGGRRLTHLLGPDWLLDVSHLVAPHARVLDSRVASLEGGRVVVGREPGVTSIEVRSPLSDSILGEQALAVTDDKVSVLELRVQPVMGISLTLSRGTAHPGEVTATCWAQSALPAPKQEVALSLWLSFSDHTVAPAELYDRRDLGLSVSAEEPGAILPAEEQGAQLGVVVSGAGAEGLPLHVALHPPEPCRRGRHRVPLASGTAWLGLPPASTPAPALPSSPAWSPPATEATMGGKRQVAGSVGGNTGVRGKFERAEEEARKEETEAREEEEEEEEEMVPAPQHVTELELGMYALLGVFCVAIFIFLVNGVVFVLRYQRKEPPDSATDPTSPQPHNWVWLGTDQEELSRQLDRQSPGPPKGEGSCPCESGGGGEAPTLAPGPPGGTTSSSSTLARKEAGGRRKRVEFVTFAPAPPAQSPEEPVGAPAVQSILVAGEEDIRWVCEDMGLKDPEELRNYMERIRGSS

SEQ ID NO: 253354 - DNA, 3072 bp, Artificial Sequence
  derived and/or modified sequence
atgtgcgccagaatggccggcagaaccaccgccgcccccagaggcccctacggcccctggctgtgcctgctggtggccctggccctggacgtggtgagagtggactgcggccaggcccccctggaccccgtgtacctgcccgccgccctggagctgctggacgcccccgagcacttcagagtgcagcaggtgggccactacccccccgccaacagcagcctgagcagcagaagcgagaccttcctgctgctgcagccctggcccagagcccagcccctgctgagagccagctacccccccttcgccacccagcaggtggtgccccccagagtgaccgagccccaccagagacccgtgccctgggacgtgagagccgtgagcgtggaggccgccgtgacccccgccgagccctacgccagagtgctgttccacctgaagggccaggactggccccccggcagcggcagcctgccctgcgccagactgcacgccacccaccccgccggcaccgcccaccaggcctgcagattccagcccagcctgggcgcctgcgtggtggagctggagctgcccagccactggttcagccaggccagcaccaccagagccgagctggcctacaccctggagcccgccgccgagggccccggcggctgcggcagcggcgaggagaacgaccccggcgagcaggccctgcccgtgggcggcgtggagctgagacccgccgaccccccccagtaccaggaggtgcccctggacgaggccgtgaccctgagagtgcccgacatgcccgtgagacccggccagctgttcagcgccaccctgctgctgagacacaacttcaccgccagcctgctgaccctgagaatcaaggtgaagaagggcctgcacgtgaccgccgccagacccgcccagcccaccctgtggaccgccaagctggacagattcaagggcagcagacaccacaccaccctgatcacctgccacagagccggcctgaccgagcccgacagcagccccctggagctgagcgagttcctgtgggtggacttcgtggtggagaacagcaccggcggcggcgtggccgtgaccagacccgtgacctggcagctggagtaccccggccaggcccccgaggccgagaaggacaagatggtgtgggagatcctggtgagcgagagagacatcagagccctgatccccctggccaaggccgaggagctggtgaacaccgcccccctgaccggcgtgccccagcacgtgcccgtgagactggtgaccgtggacggcggcggcgccctggtggaggtgaccgagcacgtgggctgcgagagcgccaacacccaggtgctgcaggtgagcgaggcctgcgacgccgtgttcgtggccggcaaggagagcagaggcgccagaggcgtgagagtggacttctggtggagaagactgagagccagcctgagactgaccgtgtgggcccccctgctgcccctgagaatcgagctgaccgacaccaccctggagcaggtgagaggctggagagtgcccggccccgccgagggccccgccgagcccgccgccgaggccagcgacgaggccgagagaagagccagaggctgccacctgcagtaccagagagccggcgtgagattcctggcccccttcgccgcccaccccctggacggcggcagaagactgacccacctgctgggccccgactggctgctggacgtgagccacctggtggccccccacgccagagtgctggacagcagagtggccagcctggagggcggcagagtggtggtgggcagagagcccggcgtgaccagcatcgaggtgagaagccccctgagcgacagcatcctgggcgagcaggccctggccgtgaccgacgacaaggtgagcgtgctggagctgagagtgcagcccgtgatgggcatcagcctgaccctgagcagaggcaccgcccaccccggcgaggtgaccgccacctgctgggcccagagcgccctgcccgcccccaagcaggaggtggccctgagcctgtggctgagcttcagcgaccacaccgtggcccccgccgagctgtacgacagaagagacctgggcctgagcgtgagcgccgaggagcccggcgccatcctgcccgccgaggagcagggcgcccagctgggcgtggtggtgagcggcgccggcgccgagggcctgcccctgcacgtggccctgcacccccccgagccctgcagaagaggcagacacagagtgcccctggccagcggcaccgcctggctgggcctgccccccgccagcacccccgcccccgccctgcccagcagccccgcctggagcccccccgccaccgaggccaccatgggcggcaagagacaggtggccggcagcgtgggcggcaacaccggcgtgagaggcaagttcgagagagccgaggaggaggccagaaaggaggagaccgaggccagagaggaggaggaggaggaggaggaggagatggtgcccgccccccagcacgtgaccgagctggagctgggcatgtacgccctgctgggcgtgttctgcgtggccatcttcatcttcctggtgaacggcgtggtgttcgtgctgagataccagagaaaggagccccccgacagcgccaccgaccccaccagcccccagccccacaactgggtgtggctgggcaccgaccaggaggagctgagcagacagctggacagacagagccccggcccccccaagggcgagggcagctgcccctgcgagagcggcggcggcggcgaggcccccaccctggcccccggcccccccggcggcaccaccagcagcagcagcaccctggccagaaaggaggccggcggcagaagaaagagagtggagttcgtgaccttcgcccccgccccccccgcccagagccccgaggagcccgtgggcgcccccgccgtgcagagcatcctggtggccggcgaggaggacatcagatgggtgtgcgaggacatgggcctgaaggaccccgaggagctgagaaactacatggagagaatcagaggcagcagctag

SEQ ID NO: 253355 - DNA, 3072 bp, Artificial Sequence
  derived and/or modified sequence
atgtgcgccaggatggccggtagaacaaccgccgcaccacgggggccctacgggccatggctgtgtctgctggttgccctggccctggacgtggtgcgtgtggactgcggccaggctccgctggaccctgtctacctgcctgccgcgcttgagcttttggatgcgccggagcactttcgtgtgcaacaggtgggacattatcctcctgctaactccagtctgagcagcaggtctgagacatttcttctgctgcaaccctggcccagggcccagcccttgctacgggcgagctacccaccattcgctactcagcaggtggtgcccccccgcgtgactgagccacatcaaaggcccgtgccatgggacgtgcgagctgtgtctgtcgaagcggcagtaaccccggccgagccttacgctagggtgctctttcatttgaagggacaggattggccccccggttcagggagccttccttgcgctcggttacatgcaacacaccctgccggaacagcacatcaggcatgtcgctttcagccatccctaggcgcctgcgttgtggagctggaactccccagccactggttctctcaagcctccacaactagggcagagctcgcttacactctcgaaccggctgccgaaggccctggcggttgcggatcaggtgaggaaaacgaccccggtgagcaagctttgcccgtcgggggcgtcgaactgcgtccagccgacccaccccagtatcaggaagtgccattggacgaggctgtcactttacgggtgcctgatatgcctgtgcgccctggccagttattctccgccacattgctcttacgtcataacttcacagctagtctcctgacattgaggatcaaagtaaagaaaggtctgcatgtcacagcggctagaccggctcaaccaaccttgtggaccgctaaactggatagatttaaggggtccagacaccataccacactgattacgtgccaccgcgccggcctgaccgagccggatagttctccactggagctgagtgaattcctgtgggtggatttcgttgtcgagaactctactggcggtggggtcgctgtaacgcgcccggtgacctggcaattagaataccccggtcaggctccagaggctgaaaaggacaagatggtctgggaaatccttgtctccgagcgtgacatcagggcactcattcccttagctaaggccgaggaactcgtaaacacagcgcccctcacaggggtccctcagcacgtacctgtgcgccttgttaccgtcgatggaggcggagctctcgtggaagtcactgagcatgtggggtgtgaaagcgcgaacacccaagttctccaggtatccgaagcctgtgatgcagtgtttgtcgccggaaaagagtctagaggcgcccgaggcgttagggtggacttctggtggcgtaggctccgtgcttccttgcgccttacagtgtgggcaccactgcttccgctacgcattgagctaacagacaccacactggaacaggtgcgcgggtggagagtgcctggcccggccgaggggccggcagaacccgccgccgaggcgtccgatgaggccgaacgccgagccaggggatgtcacctgcaatatcagagagcgggcgtgagattccttgctccatttgctgcccatcctctggacggaggtaggcgtttgacccatctccttgggccagactggctgctggacgtctcccacctggttgcaccacatgcgcgggttctcgacagccgcgtcgcgtctttagagggcggccgtgtcgtggttggtcgtgagccaggcgttacctctattgaagtgagatcccccctgagtgactccatcctcggcgagcaggccttggctgtgactgacgataaggtgagcgttttggagcttagggtccaacccgtcatgggcatctcattgactttgagcagaggcacagcccaccccggcgaagtgaccgcaacatgctgggctcagagcgccttgccagccccgaagcaagaggtagcgctgagtctgtggctcagtttctccgatcacaccgtggcgccagccgaattgtacgatagacgggatttgggactcagcgtctccgcagaggaacccggggcaatcctgcccgcggaagaacagggtgcccaactgggcgtggtggtatccggggccggtgcggaaggtcttcctctccacgtcgcgttgcaccctcctgagccctgtcggcgaggccgtcatcgggtccccttggcatccggtacggcctggctgggtcttccacctgcttctacgccggctccagcactgccctcgagccccgcttggagcccacccgcgaccgaggcaacaatgggcggcaagagacaggtcgccggaagtgttggcggaaatactggcgtgcgcggtaagtttgaacgcgctgaggaagaggcccgtaaagaggagacagaggcccgagaagaagaagaagaggaggaagaggagatggttcccgcaccacagcatgtcactgagctagaactgggaatgtatgcattgttgggggtcttttgtgtggccattttcattttcctggtgaacggtgttgtgtttgtcttaagataccaaaggaaggagccacctgacagcgcgacggatccaacgtctccacaaccacataactgggtatggctgggcaccgatcaggaggagctgtcaagacagcttgatcgtcagtcccccggcccaccaaaaggtgaagggagctgcccttgcgaaagtggggggggaggggaggcaccgactctcgcccccggaccacccggcggaactacctcatcatcctctaccctggctcggaaagaggcaggagggcgcaggaagcgcgtcgagtttgttacttttgctcctgctccccccgcccagagccctgaggaaccagttggagctcccgcagtgcagtccattttagtcgccggagaggaggacatcagatgggtttgtgaagatatggggctgaaggatcctgaggagttgcgtaattatatggaaaggatccgggggtctagctag

SEQ ID NO: 253356 - DNA, 3072 bp, Artificial Sequence
  derived and/or modified sequence
atgtgtgccaggatggccggccgcaccacagctgccccccggggcccctacggcccctggctgtgcctgctggtggccctggccctggatgtggtgcgggtggactgtggccaggcccccctggaccctgtgtacctgcctgctgccctggagctgctggatgcccctgagcacttccgggtgcagcaggtgggccactaccccccagccaacagcagcctgagcagccgctctgagaccttcctgctgctgcagccctggccccgggcccagcccctgctgcgggccagctaccccccatttgccacccagcaggtggtgcccccccgggtgacagagccccaccagaggcctgtgccctgggatgtgcgggctgtgtctgtggaggccgctgtgaccccagctgagccctatgcccgggtgctcttccacctgaagggccaggactggcccccaggcagcggcagcctgccctgtgcccggctgcacgccacccaccctgctggaacagcccaccaggcctgccgcttccagcccagcctgggcgcctgtgtggtggagctggagctgcccagccactggttcagccaggccagcaccaccagggctgagctggcctacaccctggagcctgctgctgagggccctgggggctgcggcagcggggaggagaatgaccctggagagcaggccctgcctgtgggcggcgtggagctgcggcctgctgaccccccccagtaccaggaggtgcccctggatgaagctgtgaccctgcgggtgcctgacatgcctgtgcggcccggccagctgttcagcgccaccctgctgctgcggcacaacttcaccgccagcctgctgaccctgcgcatcaaggtgaagaagggcctgcacgtgacagctgcccggcctgcccagcccaccctgtggacagccaagctggaccgcttcaagggcagccgccaccacaccaccctcatcacctgccacagagctggcctgacagagccagacagcagccccctggagctgtctgagttcctgtgggtggactttgtggtggagaacagcactggaggcggcgtggccgtgaccaggcctgtgacctggcagctggagtacccaggccaggcccctgaggccgagaaggacaagatggtgtgggagatcctggtgtctgagcgggacatccgggccctgatccccctggccaaggccgaggagctggtgaacacagcccccctgactggagtgccccagcacgtgcctgtgcggctggtgacagtggatggcggcggggccctggtggaggtgacagagcacgtgggctgtgagagcgccaacacccaggtgctgcaggtgtctgaggcctgtgatgctgtgtttgtggccggcaaggagagcagaggagcccggggcgtgcgggtggacttctggtggaggcggctgcgggccagcctgcggctgactgtgtgggcccccctgctgcccctgagaattgagctgacagacaccaccctggagcaggtgcggggctggagggtgcccggccctgctgagggccctgctgagcctgctgctgaggccagtgatgaggccgagcggcgggcccggggctgccacctgcagtaccagagagctggggtgcgcttcctggccccctttgctgcccaccccctggatggcggccgccgcctgacccacctgctgggccctgactggctgctggatgtgagccacctggtggccccccacgcccgggtgctggacagccgggtggccagcctggagggcggccgggtggtggtgggccgggagcccggggtgaccagcattgaggtgcgcagccccctgagtgacagcatcctgggggagcaggccctggccgtgacagatgacaaggtgtctgtgctggagctgcgggtgcagcctgtgatgggcatcagcctgaccctgagccggggcacagcccaccctggagaggtgacagccacctgctgggcccagagcgccctgcctgcccccaagcaggaggtggccctgagcctgtggctgtccttcagtgaccacacagtggccccagctgagctgtatgacagaagagacctgggcctgtctgtgtctgctgaggagcccggggccatcctgcctgctgaggagcagggcgcccagctgggcgtggtggtgtctggagctggagctgagggcctgcccctgcacgtggccctgcaccccccagagccctgcagaagaggccgccaccgggtgcccctggccagcggcacagcctggctgggcctgcccccagccagcaccccagccccagccctgcccagcagccctgcctggagccccccagccacagaggccaccatgggcggcaagaggcaggtggccggctctgtgggcggcaacacaggagtgcggggcaagtttgagcgggcagaggaggaggccaggaaggaggagacagaggcccgggaggaggaggaggaggaggaggaggagatggtgcctgccccccagcacgtgacagagctggagctgggcatgtatgccctgctgggcgtcttctgtgtggccatcttcatcttcctggtgaatggagtggtgtttgtgctgcgctaccagaggaaggagcccccagattctgccacagaccccaccagcccccagccccacaactgggtgtggctgggcacagaccaggaggagctgagccggcagctggaccggcagagccctggcccccccaagggggagggcagctgcccctgtgagagcggcggcggcggggaggcccccaccctggcccctggccccccaggcggcaccaccagcagcagcagcaccctggccaggaaggaggccggcggccgcaggaagagggtggagtttgtgacctttgccccagcccccccagcccagagccctgaggagcctgtgggcgccccagctgtgcagagcatcctggtggccggggaggaggacatccgctgggtgtgtgaggacatgggcctgaaggaccctgaggagctgaggaactacatggagcgcatccggggcagcagctag

SEQ ID NO: 253357 - DNA, 3072 bp, Artificial Sequence
  derived and/or modified sequence
atgtgcgcccggatggccggccggaccaccgccgccccccggggcccttacggaccttggttatgtctcttagtggcccttgctctggatgtcgtcagagtcgattgtggtcaagctccactggatcctgtgtatttgccagcggctttggagctactggacgcaccggagcattttcgtgttcagcaagttggacattatccgcctgctaactcatcattatcaagccgatccgagaccttcttattactgcagccttggccaagagcacagccactgctgcgggctagctatccccctttcgctacccaacaggttgtcccccccagagttactgagccacaccagcgacctgtgccatgggatgtgcgagctgtgagtgtcgaagccgccgtgacacccgctgaaccctatgcaagagtcttgtttcacctgaagggacaggactggccacccggctcagggtcactcccttgtgccaggctgcatgccacgcaccctgctggcaccgcccaccaggcttgtaggtttcaaccctcgctaggcgcctgtgtggtggaactcgagctccccagccattggttctcgcaggcatccaccaccagggccgagctcgcttataccctggaacccgctgcagagggccccggcggctgtggttccggagaagagaatgacccgggggagcaggcccttcccgtgggtggggtcgaactcagaccggcagatcctcctcaataccaagaggttccccttgacgaggcagtgaccttgagagtacccgatatgcctgtaaggccgggccagctgttttccgcgaccctcctgctccgccataattttaccgcatctctgctcaccttgcggattaaggtaaaaaaagggctacatgttacagcagcaaggccagcccagccaaccctgtggaccgcaaaactggacagatttaagggaagtcggcatcacaccaccttgattacctgtcacagagctggtctgactgaaccggactcatcaccccttgagctgtctgagtttttgtgggtagatttcgttgttgaaaactccacgggtggcggcgtcgcagtgacgcgccccgtcacgtggcagctcgagtatccaggtcaggcgcccgaagccgaaaaagacaaaatggtgtgggagattctggtgagtgagcgtgacatccgagctttgataccattggcgaaggcggaagagcttgtgaataccgccccactaactggcgtcccccagcatgtgccagtgcgactggtcacagtggatggcggtggcgccctggtcgaagttaccgaacatgtgggatgtgagagcgctaacacgcaggtactccaagtgagcgaggcctgcgacgctgtgttcgtggcgggaaaggaatctagaggagcccgcggcgtgagggtagacttctggtggcgccgcctgagagcaagcttaagactgacagtttgggcccccctgcttcctttgcgaattgagctgacagatacgacccttgagcaagtgagaggatggcgcgtgcctggtcctgctgaggggcctgcggaacccgccgctgaggcctctgatgaagccgagagacgggcgagaggctgccaccttcagtaccagcgggcaggtgtcagatttctggcgccattcgctgcccatcccctggacggcggtcgccggctaacccacctgctgggccccgactggctgctcgacgtgtctcatttggtggccccacatgctcgcgtcctggattccagagtggcgagccttgaggggggcagggtggttgtgggcagagagcccggtgtcacatccattgaagtacgctcacctctgagtgattccatcctgggagagcaggctctggccgttacagatgataaagtatctgtcctggagctacgggtgcagcccgtgatggggatctctcttaccttgagtaggggcacagcacacccaggcgaggtcactgcaacctgctgggcccagtcagcgctgcccgccccgaagcaggaagtggccctttcgttgtggttatcattttctgaccataccgtggcacctgctgaactgtacgaccgcagggacctgggtctcagcgtttcggccgaagagcccggagctatcctgcccgcagaggagcaaggtgcccagctcggcgtggtggtgtcaggagccggggccgaaggtctcccactccatgtggcccttcaccctcctgaaccctgccggagaggaaggcaccgagtacctctggcctccggcaccgcttggctagggctcccccccgcctcaacacctgcaccggctttaccgtcctcgcccgcgtggtcacctcctgcaaccgaggctaccatgggcgggaagagacaggttgctgggagcgtaggaggtaacacaggagtcaggggaaaatttgaaagagcggaggaagaggcacggaaggaagaaacagaagctcgtgaagaggaggaggaggaggaggaggaaatggtgcccgccccacagcacgtgaccgaactggaactaggtatgtacgcactgctcggagtattctgtgtcgcaattttcatatttctggtgaatggcgttgtttttgttcttaggtatcaaaggaaggagcctcctgacagcgctaccgatcctacgagcccccagccccacaattgggtttggctggggactgatcaggaagaactttcccgtcagttagatcgacagagccctggtccccccaagggggagggatcttgcccatgcgagtccggaggggggggcgaagccccgacacttgcgccaggcccacccggcggcacgacttctagcagttctactcttgctcgcaaggaagctggcgggcggcgcaaaagagttgagttcgtgactttcgcgccagcaccacccgctcagtcccccgaagagcctgtaggggcccccgccgtgcaatcaatcttggtcgctggggaagaggatatccgctgggtgtgcgaagatatgggtctgaaagaccctgaggaactccggaactatatggaaagaatcaggggctcatcctag

SEQ ID NO: 253358 - DNA, 3072 bp, Artificial Sequence
  derived and/or modified sequence
atgtgcgcacgaatggcagggagaactactgcagctccgagaggcccatatggaccctggctgtgtctactggtagccctggccttggatgttgtgagggtagactgcggacaggccccattagatccagtgtacctacccgctgcactggaactgctggacgcccctgagcattttagagtgcaacaggttggccactaccccccagctaattcttccctgtcaagcagatctgaaaccttccttttgctgcagccttggccaagagcccagcccttgctgagggcatcttatccaccttttgcaacgcaacaggtggtcccaccccgtgttacagagccccaccagagacccgttccatgggacgtccgggctgtttccgtagaagccgctgtcactcctgccgaaccttacgccagggtgctcttccatttgaagggccaggattggccacctggttctgggagccttccctgtgctcgactccacgccacacatccggctggcacagcacatcaggcatgccggttccagccatctctcggcgcatgtgtggtagaactggaacttcccagccactggttctcccaggcttccacgactcgggcagagctggcctatacgctggaacctgccgcagaaggaccaggaggatgtggttcaggagaagaaaatgatcccggtgaacaggcattgccggtgggaggtgtggaactgcggcctgccgacccccctcagtaccaagaggtgccactggacgaggcagtgaccttgagagtgccagatatgcccgtccggccaggccagctgttcagcgctacactgctcttaaggcacaactttaccgcctctttgctgactctgcgcatcaaggttaaaaagggtctccatgtgacagctgcgagaccagcacagccaacgctatggacggcgaaactcgacagattcaaagggtcacggcaccacacaacactgattacatgccaccgcgcaggtctaacagaacctgatagcagccccctggagctgtcagaattcctttgggtcgactttgtcgtcgagaactcaacgggaggaggcgtggctgtgactaggcctgtcacttggcagctggagtacccagggcaggcaccagaggctgagaaagataagatggtatgggagatcctcgtgtccgaaagagacatcagagctctgatcccactagcaaaagctgaagagctggtgaacaccgccccactgacgggcgtacctcagcatgtgccagtccggttagtgactgttgatggtgggggtgctttggtcgaggtcacggagcacgttggttgtgagtctgccaacacccaggtactgcaagtgtctgaggcctgtgacgccgtgttcgtcgcaggaaaggagagccgcggagcaagaggagtgagggtcgatttctggtggcgccgactgcgcgctagcctcagactcactgtctgggccccattactgcctctgcgtattgagctgacagacacaactctggagcaggtcagagggtggcgggttcccggacccgctgaaggtcccgcagagcctgccgcagaagctagtgatgaggcagagcggcgtgcccgtggctgccacctgcagtaccaacgggctggtgttcgcttcttggccccttttgctgcacatccgttggatgggggacgacgtctgacccatctgctgggcccagattggttgctggacgtctcacacctggtcgcaccccacgctagagtactggactccagagtggcctctctggaagggggtcgtgtggttgtggggagagagccgggtgtcacttccatagaagtgcgctctcctctgtccgatagcatcttaggagagcaggccctggccgtcaccgatgacaaggtaagcgttttagagttgagagtacagccagttatgggtatctccctgaccctgtctcgaggtacagcccaccccggagaggtgacagctacatgctgggcccaatccgccttaccagcacctaagcaagaggtagccctttcactgtggctgtcattcagtgaccatacagtggctccagccgagctctacgaccggagagatttgggcctgagcgttagcgccgaggagcccggagctattctccccgctgaagagcagggcgcacagttgggggtcgtggtcagtggggctggagcagaaggccttccgctccatgtcgccctgcaccccccagagccctgccgaaggggcaggcacagagtgccgctcgccagcggaaccgcctggctggggctccctcccgcttctacgcccgcacccgctctgccttcatcacccgcttggagccctccggcaacagaggccaccatgggaggaaagaggcaagtggcgggtagcgtgggtgggaacaccggagtcagaggtaagttcgagcgagcagaagaggaggctcgcaaggaagagacggaggctagagaggaggaagaagaggaggaagaggaaatggtaccggctcctcagcacgtgactgaattagaactcggtatgtacgcattgctgggagttttctgcgtcgctatcttcatcttcctcgtgaacggagtggtcttcgtgctccgatatcagcgcaaagaacccccagacagtgccaccgatccaacctccccacagccacacaattgggtatggttagggaccgatcaggaggaactatctagacagctcgacagacagagtcccggacctcccaagggagaaggctcctgtccttgtgaaagtggagggggaggtgaggcccctacgctggccccagggcctcccggtgggacaacttcttctagttcgacactagctaggaaagaggcaggcggacgtcgcaagcgcgttgaatttgtaacatttgccccagcacctcccgctcagagtccagaagaaccagttggagctcccgctgttcagagtatcctggtggcgggagaggaggatatccgttgggtgtgcgaggacatgggtctgaaagatcctgaagaactgcgcaattacatggagaggatccggggtagctcttag

SEQ ID NO: 253359 - DNA, 3346 bp, Artificial Sequence
  derived and/or modified sequence
tgtctgggaattgcagccgcggggcgggcggcggcggcggcggcggcggccgggacccagcgggccaggtggggacggcgcggagcgggtgcgggagatgccgtgcgggactggggccacctgagccgcccgcctcgtccccgccttctgtgggaaggatgtgcgcgcggatggccggtcgcacaacagcggcccctcgggggccctacggcccctggctctgcctcctggtggccctcgccctggacgtcgtgagagtggactgtggccaggctcccctggaccctgtctacctgccggcagccctggagctcctagacgcccctgaacacttccgtgtgcagcaggtgggccactacccacctgccaactcctctctgagctcccgatctgagacctttctgctcctacagccctggcccagggcccagccacttctccgggcctcctacccaccttttgccactcagcaggtggtcccccctcgagtcactgagccccaccaacggccagtcccatgggacgtgcgggccgtttcagtggaagcggctgtgactccagcagagccctacgcccgggttctcttccacctcaaagggcaggattggccaccagggtctggcagcctgccctgtgcccggctccatgccacacaccctgccggcactgctcaccaagcctgccgcttccagccatccctgggcgcctgcgtggtggagctggagcttccctcgcactggttctcacaggcctccaccacacgggccgagctggcctacacgcttgagcctgcagctgagggccctgggggctgtggctccggcgaggagaacgaccctggggagcaggccctcccagtggggggtgtggagctgcgcccagcagaccccccgcagtaccaggaggtacctctggacgaggctgtgactctgcgggtgcctgacatgccagtgcggcccggccagctctttagtgctaccctcctgcttcggcacaacttcacagccagcctcctgaccctgcggatcaaggtgaagaaggggctgcatgtgacagccgcccgcccagcccagcccacactctggactgccaagctggaccgcttcaagggctccaggcaccacaccaccctcatcacctgccaccgtgctgggctcacagagccagattccagtccccttgaactgtctgagttcctatgggtggactttgtggtggagaatagcactggtgggggcgtagcggtcactcgccccgtcacgtggcagctggagtacccaggccaggcccctgaagcagagaaggacaaaatggtgtgggaaatcctggtgtctgagcgggacatcagagcccttatcccactggccaaggctgaggagctggtgaatacagcaccactgactggagtgccccagcatgtccccgtgcgccttgtcactgtggacggcgggggggccttggtggaggtgacagagcatgtcggctgcgagtctgccaacacacaggtcctgcaggtgtctgaggcctgtgatgccgtgttcgtggctggcaaggagagccggggcgcccggggggtgcgagtggacttctggtggcgccggctccgcgcctcgctgcggctgaccgtgtgggcccccctgctaccgctgcgtatcgagctcaccgacaccaccctcgagcaggtccgcggctggagggtacctggccctgctgaagggcctgcggaacccgctgcagaggcgtcggatgaggccgagcggcgcgcccgtggctgccacctgcagtaccagcgggccggtgtgcgcttcctcgcccccttcgcggcccacccgctggacggcggccgccgcctcacgcacctgcttggccccgactggctgctagacgtgtcccacctcgtggcgccacacgcccgcgtgctggactcgcgtgtagcctctctggagggtggccgtgtcgtggtgggccgggagcccggtgtcacctccattgaggtgcgttccccactgtctgactccatcctgggggagcaggcgctggctgtgacggacgacaaggtctcagtgctggagctgagggtgcagccagtgatgggcatctcgctgaccttgagccggggcactgcccaccccggggaggtcacagctacgtgctgggcacagtcagcccttcccgccccaaagcaggaggtggccctctccctatggctgtccttctctgatcacactgtggccccagctgagctctacgaccgccgtgacctgggactgtccgtctcagccgaggagcctggtgccatcctgccagctgaggagcagggtgcccagctcggggtggtggtgagtggggcaggcgccgaggggctgccgctgcatgtggctctgcacccgcccgagccctgccgccggggccgccaccgtgtgcctctggcctctggcaccgcctggctggggctgccccctgcctccactccagcccctgctctcccatccagccctgcttggagcccaccagccacagaagccaccatgggtggtaaacggcaggtggcaggcagtgtcgggggcaacacaggtgtgaggggcaagtttgagcgggcagaggaggaggccaggaaggaggagaccgaagccagggaggaggaggaggaagaggaggaggagatggtccctgcccctcagcatgtcactgagctagagctgggcatgtacgccctgctgggagtcttctgcgtggccatcttcatcttcttggtcaatggtgtggtcttcgtcctgcgctatcagcgcaaagaacctcccgacagtgccactgaccccacctccccccagccccacaactgggtctggctgggcactgaccaggaggaactgagccgccagctggaccggcagtcccctggcccgcccaagggggaggggagctgcccctgtgagagtgggggaggaggggaggcccctaccctggcccctggccctcctgggggcaccaccagctcctcaagcaccctggcccgaaaggaggctggggggcggcggaagcgagtagagtttgtgacatttgcgccagcccctccagcccagtcacctgaggagcctgtaggggcccctgctgtgcagtccatccttgtggcaggcgaggaggacatccgctgggtgtgtgaggacatggggctgaaggaccctgaggagcttcgcaactacatggagaggatccggggcagctcctgaccctccacagccacctggtcagccaccagctggggcaacgagggtggaggtcccactgagcctctcgcctgcccccgccactcgtctggtgcttgttgatccaagtcccctgcctg

SEQ ID NO: 253360 - DNA, 540 bp, Artificial Sequence
  derived and/or modified sequence
atgggctcatggcattgggaatggtacggagctcctaccagtactttgagcctgggctgcttactcttgcctggtgagaaatggaccttcctcattctgccttcccattacgggaccactacccatgcacactctctgcaggggtgcgtggaaaggcagtggcaggattcaaaacaattggctataagtccgggccccacattactgaggagcgagtacgtcggtagcctcagtccagtctgttcctcgctgacccaggttcaccgcgtcccatggggccaacatagagcgtgtccagtcatgctgcttgtttttactaaatggctgcaaagatacctgcactttgaaaagcccgcagagccagcctctgtggggcaagatccagacttcttcggaaaatctgaaggtgagcgggcaacctgcctgctgagcaggtcttgcctgtatctcgcatctgtatgcaatctgcgggagaacgatagctgcatgggtaggagcggggggacaggaaagtcagatctccccggaagctgccgttag

SEQ ID NO: 253361 - protein, 818 aa, Artificial Sequence
  derived and/or modified sequence
MESLSPGGPPGHPYQGEASTCWQLTVRVLEARNLRWADLLSEADPYVILQLSTAPGMKFKTKTLTDTSHPVWNEAFRFLIQSQVKNVLELSIYDEDSVTEDDICFKVLYDISEVLPGKLLRKTFSQSPQGEEELDVEFLMEETSDRPENLITNKVIVARELSCLDVHLDSTGSTAVVADQDKLELELVLKGSYEDTQTSFLGTASAFRFHYMAALETELSGRLRSSRSNGWNGDNSAGYLTVPLRPLTIGKEVTMDVPAPNAPGVRLQLKAEGCPEELAVHLGFNLCAEEQAFLSRRKQVVAKALKQALQLDRDLQEDEVPVVGIMATGGGARAMTSLYGHLLALQKLGLLDCVTYFSGISGSTWTMAHLYGDPEWSQRDLEGPIRYAREHLAKSKLEVFSPERLASYRRELELRAEQGHPTTFVDLWALVLESMLHGQVMDQKLSGQRAALERGQNPLPLYLSLNVKENNLETLDFKEWVEFSPYEVGFLKYGAFVPPELFGSEFFMGRLMRRIPEPRICFLEAIWSNIFSLNLLDAWYDLTSSGESWKQHIKDKTRSLEKEPLTTSGTSSRLEASWLQPGTALAQAFKGFLTGRPLHQRSPNFLQGLQLHQDYCSHKDFSTWADYQLDSMPSQLTPKEPRLCLVDAAYFINTSSPSMFRPGRRLDLILSFDYSLSAPFEALQQTELYCRARGLPFPRVEPSPQDQHQPRECHLFSDPACPEAPILLHFPLVNASFKDHSAPGVQRSPAELQGGQVDLTGATCPYTLSNMTYKEEDFERLLRLSDYNVQTSQGAILQALRTALKHRTLEARPPRAQT

SEQ ID NO: 253362 - DNA, 2457 bp, Artificial Sequence
  derived and/or modified sequence
atggagagtttgagtccaggaggccctccaggacacccataccaaggggaagcctcgacatgctggcagctgacggttcgcgtactggaagctcgcaacctgcgttgggcagacctgctgagtgaggccgatccgtacgtgatccttcagctgagcaccgcacccggcatgaagtttaaaactaaaacgctgacggacacttcacatccagtctggaatgaagccttccgctttctgatacagagccaagttaagaacgtgctggagctgagtatttacgatgaagacagcgtgaccgaagacgatatctgtttcaaagtcctatacgacatatccgaagtgctgcctgggaagctacttcgtaagaccttctcacagagtccacagggagaagaagaactggatgtggaattcctcatggaggagacaagcgacaggccagagaaccttattaccaataaggtgatagtggcccgcgaactctcatgtctggatgttcatcttgactccaccgggtcaaccgccgttgtggctgatcaggacaaactagagctcgaactggtgctgaaaggatcttacgaggatacccaaacatcatttctcgggactgccagtgctttcagatttcattacatggcagcccttgaaacggaactgtccggacgccttcggtcatcaaggtctaatggctggaatggcgataattccgccggctatcttacggtacctttaagaccgttaacaatcggtaaggaggtcacaatggacgtaccagctccgaatgcccccggggttcggctgcagctcaaagccgagggatgccccgaggagctagccgttcacctgggcttcaatttgtgcgccgaggagcaggcctttctgagtcgtcggaagcaagttgtggctaaggcgttgaaacaggctttacaacttgatagggatctgcaagaggatgaggtgccagtggtcggtatcatggctacaggtgggggcgctcgtgcaatgacctcgctatatggtcatctgctggctcttcaaaaactgggcctcctggactgcgttacttattttagcgggatctctggaagtacctggacaatggctcacctctacggtgaccctgagtggtcacagagggacttagaaggacccattcgatatgctagagaacaccttgcaaaaagcaaactggaagtgttttcacctgaacgactggcttcctatagaagagaactagagttacgggcagagcaggggcacccgactacgtttgtggacctgtgggccttagtactggagtcaatgcttcacgggcaggtgatggatcagaaactatcagggcagcgtgctgcgctggagcgcggtcagaatcctctgcccctttacctgagcttgaacgtgaaggagaacaacttagagaccctagattttaaagagtgggtggaattctctccatacgaagtgggattcctgaagtatggggcgtttgtgcccccagagttgttcgggtctgagtttttcatgggcagattgatgaggcgtatccctgagccgaggatctgctttcttgaggccatctggagtaatatctttagcctcaacctgctggatgcttggtacgacttgaccagctcaggtgagagctggaaacagcatatcaaagataagacaaggtctttggagaaggagcctttaaccacaagcggaaccagctctagactcgaagcgtcttggctgcaaccaggcaccgccctcgcacaggctttcaagggctttctcaccggaagaccactgcaccagagatctccaaactttttgcaagggctgcagctacaccaggactattgctcccacaaggatttctcgacctgggcagattaccagctggattcaatgccgtcccagcttacccctaaggagcctagattgtgtttggtggatgccgcatactttatcaatacctcctcaccatccatgtttcgccccggaaggcgcctggaccttatcctcagtttcgattactccttgtccgcacccttcgaagcgctgcagcagaccgaactttactgcagggcccggggactgcctttccctagggtggagcctagccctcaggatcagcaccagcctagagagtgtcatcttttcagtgatcctgcatgcccggaagcacctatcctgcttcattttccccttgtcaacgcttctttcaaggaccactcagcaccgggggtccagcgttcgccggcagagttgcagggagggcaggtggacttaaccggcgccacctgcccatacacgttaagtaatatgacttacaaagaagaagactttgagcgcttgctcaggttatcagattacaacgtgcagactagccagggcgcgatcctccaagcactgcgaaccgctctaaagcatagaactctggaggcccggcctcctcgagcacagacatag

SEQ ID NO: 253363 - DNA, 2457 bp, Artificial Sequence
  derived and/or modified sequence
atggagagcctgagccctgggggccccccaggccacccctaccagggcgaggccagcacctgctggcagctgactgtgcgggtgctggaggccaggaacctgcgctgggccgacctgctgtctgaggccgacccctacgtgatcctgcagctgagcacagcccctggcatgaagttcaagaccaagaccctgacagacaccagccaccctgtgtggaatgaggccttccgcttcctgatccagagccaggtgaagaatgtgctggagctgagcatctatgatgaagattctgtgacagaagatgacatctgcttcaaggtgctgtatgacatcagcgaggtgctgcccgggaagctgctgaggaagaccttcagccagagcccccagggcgaggaggagctggatgtggagttcctgatggaggagaccagtgacaggcctgagaacctgatcaccaacaaggtgattgtggcccgggagctgagctgcctggatgtgcacctggacagcacaggcagcacagctgtggtggccgaccaggacaagctggagctggagctggtgctgaagggcagctatgaggacacccagaccagcttcctgggcacagccagcgccttccgcttccactacatggccgccctggagacagagctgagcggccgcctgcggagcagccgcagcaatggctggaatggagacaacagcgctggctacctgactgtgcccctgcggcccctgaccatcggcaaggaggtgaccatggatgtgcctgccccaaatgcccctggggtgcggctgcagctgaaggccgagggctgcccagaggagctggccgtgcacctgggcttcaacctgtgtgccgaggagcaggccttcctgagcaggaggaagcaggtggtggccaaggccctgaagcaggccctgcagctggaccgggacctgcaggaggatgaggtgcctgtggtgggcatcatggccaccggcggcggggcccgggccatgaccagcctgtatggccacctgctggccctgcagaagctgggcctgctggactgtgtgacctacttcagcggcatcagcggcagcacctggaccatggcccacctgtatggagaccctgagtggagccagagggacctggagggccccatccgctatgcccgggagcacctggccaagagcaagctggaggtgttcagccctgagcggctggccagctacagaagagagctggagctgcgggcagagcagggccaccccaccacctttgtggacctgtgggccctggtgctggagagcatgctgcacggccaggtgatggaccagaagctgagcggccagagagctgccctggagcggggccagaaccccctgcccctgtacctgagcctgaatgtgaaggagaacaacctggagaccctggacttcaaggagtgggtggagttcagcccctatgaggtgggcttcctgaagtatggagcctttgtgcccccagagctgtttggcagcgagttcttcatgggccgcctgatgaggcgcatccctgagccccgcatctgcttcctggaggccatctggagcaacatcttcagcctgaacctgctggatgcctggtatgacctgaccagcagtggagagagctggaagcagcacatcaaggacaagaccaggagcctggagaaggagcccctgaccaccagcggcaccagcagccggctggaggcctcctggctgcagcctggaacagccctggcccaggccttcaagggcttcctgaccggccggcccctgcaccagaggagccccaacttcctgcagggcctgcagctgcaccaggactactgcagccacaaggacttcagcacctgggccgactaccagctggacagcatgcccagccagctgacccccaaggagccccggctgtgcctggtggatgctgcctacttcatcaacaccagcagccccagcatgttccggcccggccggcggctggacctgatcctgagctttgactacagcctgagcgccccctttgaggccctgcagcagacagagctgtactgccgggcccggggcctgcccttcccccgggtggagcccagcccccaggaccagcaccagccccgggagtgccacctgttcagtgaccctgcctgcccagaggcccccatcctgctgcacttccccctggtgaatgccagcttcaaggaccacagcgcccctggggtgcagaggagccctgctgagctgcagggcggccaggtggacctgaccggggccacctgcccctacaccctgagcaacatgacctacaaggaggaggactttgagcggctgctgcggctgagtgactacaacgtgcagaccagccagggcgccatcctgcaggccctgaggacagccctgaagcacaggaccctggaggcccggcccccccgggcccagacctag

SEQ ID NO: 253364 - DNA, 2457 bp, Artificial Sequence
  derived and/or modified sequence
atggagagcctgagccccggcggcccccccggccacccctaccagggcgaggccagcacttgctggcagttaacggtccgggtgctggaagctcgcaatctgcgatgggcagacctgctttcggaggccgatccgtacgtcatccttcagttgtccaccgcgcccggaatgaagttcaaaactaaaacactgactgatacatcccatccagtgtggaacgaagctttccgcttccttatccaaagtcaagtgaaaaacgtgttggagctcagtatctatgacgaggacagcgtcacagaggacgacatttgcttcaaggtcctgtatgacatctctgaggtgctgcctggaaagctcctgcggaagacctttagtcagagtccccaaggcgaggaagaactggacgttgagttccttatggaagagaccagcgaccgaccggaaaacctgataaccaataaagtgatcgtcgccagagagctctcttgcctcgatgtccatctggattccactggtagcacggccgtggtggctgatcaggacaaactggagttagaactggtgctcaagggtagctatgaggacacccagactagtttcctgggcactgcctctgccttccgtttccactacatggctgctctggagacggagctttcagggaggttgcgtagctctcgcagcaacggatggaacggcgacaatagcgccgggtaccttactgtccctttacgcccactgacaatcggaaaagaggtaactatggatgtgcctgcaccgaatgcacccggggtgcgcttacagctgaaggctgaggggtgcccagaggaattggcggtccatctggggttcaatctctgcgctgaggaacaagcattcttaagtcgtcggaaacaggtggtggccaaggccctgaagcaggcactgcaactcgaccgcgatctccaggaggatgaagtgccagtcgtgggtattatggccaccggcggcggcgcccgggccatgacctctctttatggccatttgctggctttgcagaaattggggctcttggactgtgtcacttattttagtgggattagtgggagcacctggaccatggcccatttgtacggggatcccgaatggtcccagagagacctggagggccctatcagatacgcccgtgagcacctcgcaaagtctaaactcgaggtcttctctcccgaaagactagccagctaccggcgagaactggaactgagagctgagcagggacatccaacaacatttgtggatctgtgggctcttgttttagagtctatgctgcatggccaggtgatggaccaaaagctgtctggccagcgagctgctcttgagagaggccagaatccgctaccattatatctgtccctgaacgttaaggaaaacaatctcgaaacccttgatttcaaagagtgggttgagttctccccctatgaggttggatttcttaagtacggggctttcgtacctccagaactcttcggctccgagtttttcatggggaggcttatgcggcgcatccccgaacctagaatctgcttcctggaagctatctggagcaacattttctccctgaacctcctggacgcatggtatgatctgacctccagcggtgaatcttggaaacagcatataaaggacaaaacccggagcctcgaaaaagagcctctgacaacttctggaacttcttcaaggctcgaggcctcctggctgcaaccaggcacagccttggcacaggcctttaagggctttctaacgggccgccccctccaccaacgtagccccaactttttgcaaggtctgcagcttcaccaggattactgctcccacaaagacttctcaacctgggctgactatcagctggattccatgccatctcaattgacccctaaggagccccgcctatgtctggtggatgctgcatatttcatcaacacatccagcccgtcaatgtttcgccctggtcgccggctagacctgattctgtccttcgactactctctttcagctccttttgaagcactgcagcaaaccgaactgtattgtagagcacgcggccttccattccccagagttgagccttctccacaagaccagcatcaacctcgcgagtgccacctcttctctgaccccgcttgccctgaggccccaatcctgctgcactttccactggttaacgcatctttcaaggaccatagcgctccaggtgtgcagcgtagccccgctgagttacagggcggccaggtcgacctgaccggcgctacctgcccttataccttatctaatatgacatacaaggaagaagattttgaacgtctattgaggctctcagattacaacgtccaaacgtcccagggtgccatcctgcaggcattgcgaaccgctctcaaacaccgcacattggaggcacggcctccccgtgcacagacttag

SEQ ID NO: 253365 - DNA, 3584 bp, Artificial Sequence
  derived and/or modified sequence
gctggtcctatcccactgggaccgtcgctgccactcagccagagagccagcatcttggcaagggctgggcctggagtgaagctggaagggctagcatggagagcctgtcacctgggggaccacctggccacccttaccagggggaggcctctacctgctggcagctcacagtgagggtcctggaggcgcggaacctgcgctgggctgacctgttgagtgaggccgacccttacgtgatcctacagctgtcgaccgcacctggaatgaagtttaagaccaagacgctcaccgacaccagtcatcctgtgtggaatgaggccttccgtttccttatccaaagtcaggtcaagaatgttctggagcttagcatctatgatgaggactcagtcacggaggatgacatctgcttcaaggttctctatgacatctcagaagtcctccctggcaagctgctccggaaaaccttctcccagagtccccagggagaggaggagctggatgtggagttcctgatggaagaaacgtcagatcgcccagaaaacctcatcaccaacaaagtcattgtggcccgagagctgtcatgcctggatgtgcatctggacagcacagggagcaccgctgtggttgcagatcaggacaagctggagctggagctggtgctgaaggggtcctatgaggacacacagacatccttcctgggcacagcctctgccttccgcttccactacatggcagccctagagacagagctgagcgggcgcctgaggagctccagaagcaatggctggaatggggacaactcagctgggtacctcactgtgcccctgaggcccttgaccattgggaaggaggtgactatggatgttcctgctccaaatgccccaggagtgaggctgcagctcaaggcagagggctgccctgaggagctggccgtgcacctgggcttcaatctctgtgcagaggagcaggccttcctgagcaggaggaagcaggtggtggccaaggccctgaagcaggccctgcagctggacagagacctgcaggaggatgaggtacccgttgtgggcatcatggccacaggaggaggtgcccgggccatgacctcactctacggccacctattggccttgcagaagctgggcctcctagactgtgtgacctacttcagtggcatctctggctctacgtggacaatggcccacctgtacggggaccctgagtggtcgcagagggacctggagggacctatcagatacgcccgggagcacctggccaagagcaagctggaggtcttttccccagagcgcctggcgagctaccgccgggagctggagctgcgggctgagcagggccaccccacgacctttgtggacctgtgggcgctagtgctggagtccatgctgcacggccaggtgatggatcagaagctgtcaggacagagagccgccctggaacggggtcagaaccctctgcccctctacttgagcctcaatgtcaaagagaacaatctggagacactggacttcaaggagtgggttgagttctccccctatgaggtcggtttcctgaagtacggggccttcgtccctcctgagctcttcggctccgagttcttcatgggacggctgatgaggaggatcccggagccccggatctgctttctggaagccatctggagcaacattttctccctgaacctgctggatgcctggtatgacctcaccagttctggggagtcctggaaacagcacatcaaggacaagaccaggagcttagagaaggagcccctgaccacctcggggacctcctcgcggctggaggcctcgtggctgcagccaggcacggcgctggcccaggcatttaaaggcttcctgacaggcaggcccctccaccagcgcagccccaacttcctccagggcctccagctgcaccaggactactgtagccacaaagacttctccacctgggcagactaccagcttgactccatgcccagccagctgacccccaaggagccccggctctgcctggtggacgccgcctacttcatcaacaccagctctccctccatgttccggccaggccgcaggctggacctcatcctctccttcgactactccctatctgcgcccttcgaggcactgcagcagacggagctgtactgccgggcccgggggctgcccttcccccgggtggaacccagccctcaggaccagcaccagccaagggaatgccacctcttctcagaccccgcctgccccgaggccccgatcctgctgcacttcccgctggtcaatgcctccttcaaggaccactcagcccccggtgtccagcgcagccccgcagagctccagggtggccaagtggatctcaccggggccacctgcccctacaccctgtccaacatgacctacaaggaggaagacttcgagcgcctgctgcggctcagtgactacaacgtgcagaccagccagggtgccatcctgcaggccctgaggaccgcgctgaagcaccggactctagaggcgaggcctccaagggcacagacctgaggttgctcagaggctgcaggaccctccagggcctgcgggcataacctgatctgtagctgggctcagccacaggccttcctggttggagttctgggctctcccaggcctgggtggcctctgtagctggtctcactgcccagagggaactgcacacacagacttctctcttacgttcatggctggcttgagatgagttgaaaataacttcgccaggccagtgtgtagaacagctggtccaaccagacagactttcacaccacaattacttccatgcctgagcaggatagatttgaagtgcaagccggaggcagcagatcaggagtagggacaggaaggacaggggatgcctgacctgacaggtggcttcaggcctcgggaatcacaagacatcctgaacacattgcctcctcatcttcttcctgctcctccacctcctcctctccttgtccttctcctctttgtcctcctgctttccgtatccaagtcttgtacttgtttaaatttattcctaaatattttattctttttgataagtggagttactttcttaatttcatttagattattcattgctattttatagaaatacaatggatttttaaatgttgatcttgtattccgcaatcttgctgaagttgtttaccggctctaatacttttgcggatttcttagaattttctgtagacagatcatgccatctccaaatagagatggttttacttcttcctgtctgatctgaatgccttttatttatttttcccaattgccctgagcagtacaatgatgaacacacgtttcaagagcagacatcttgtcttgttcctgactctgacaagaaagcataagtctctcaccatttagtgtgattttagctgtgggtttttcttggacatccttatcaggttgagaaagttctcttttatttctagtttattgagtgttttatgatgaaacggtgttaggttttgtcaagtgatttttctgtgtctatgggcatgatcatgtggttttgtcgtgtattttattaatgta

SEQ ID NO: 253366 - DNA, 2457 bp, Artificial Sequence
  derived and/or modified sequence
atggaatccttgagtcccggtggacccccaggtcatccttatcagggagaagcatccacttgttggcagttgaccgtccgagtgctagaagccagaaacctgcgttgggcagatctgttgtctgaggccgacccgtatgtgatactccagctgagcaccgcacccggaatgaagttcaagactaagacattgacagatacatcgcaccccgtgtggaacgaggcctttcggtttcttattcagagccaggttaagaacgtgttagaactctcaatctatgacgaggactctgtgacagaagatgacatttgttttaaagtgctgtatgacatctcagaggtgctgccaggaaagttactgagaaaaactttcagccaaagcccacaaggggaagaggaactggacgtggagtttctaatggaagagacttccgatcgtccagagaatctgattactaataaggtgatagttgcacgggagctgtcctgtctggacgtgcacctcgactcaacaggatctacggctgtggtggctgatcaggataagctggagctggagctggtgcttaagggctcatatgaagatacacaaacctcattccttggaacagctagcgcctttcgatttcattacatggctgcacttgagacagagctgagcggccgattgcggtctagcaggagcaatggatggaatggggacaattctgctggctacctcactgttcccctacggcctctgacaattggcaaggaggtgacaatggacgtccccgctcccaacgctccaggggtgagattgcagcttaaggccgagggttgtcccgaggagctggccgtccacctaggcttcaatctctgcgccgaggagcaggcatttctttccaggagaaagcaggttgttgcaaaggcactgaaacaggctcttcagctggaccgagacctccaggaggacgaagtcccagtagtgggcataatggccacagggggaggggcacgggctatgacttctctctacggccatctcctggctcttcagaaactgggcttactggactgcgtgacctatttctctgggatctccggtagtacttggacgatggcccatctttacggcgacccagagtggtcccagcgggatttagaggggccaattcgctacgcccgagaacaccttgctaaatccaaactggaagtgttttcgcctgaacggctcgcaagctataggcgggagctggaactacgcgctgagcagggtcacccaaccaccttcgtggacctgtgggccctcgtgctggaatctatgctccatggacaagtcatggaccagaaactgtctggacagcgcgcagccctcgaacggggtcagaatcccctgcccctgtacctgtcactgaatgtgaaggaaaataacttagagacactcgattttaaagagtgggtggagtttagcccttatgaagttgggttcctgaaatacggcgcttttgtgccgcctgagttattcggttccgaattctttatgggaagactaatgcgacggatccccgagcctagaatatgcttcctggaggctatttggagcaacattttctcactgaacctcttagatgcctggtacgatttgacctcctctggcgaaagctggaaacagcacatcaaagacaagacgcgaagcctggagaaggagccccttacaacttcggggacgtctagcaggttggaggcctcctggttacagcccggtacagccttagcacaggccttcaaaggctttctgacaggaaggcctcttcatcagaggtctcctaatttcctgcagggacttcagcttcatcaagattattgttctcacaaggatttttctacctgggctgattatcaactagactcgatgccgagccagctgacaccaaaggagcccaggctgtgtcttgtggacgctgcttattttatcaatacttcctccccatccatgttcagacccggtaggaggctggacctgatattgtcattcgactactcattatctgctccattcgaagccctgcagcagactgaactgtattgccgggctagagggctgccctttcccagagtagagcccagtccccaggaccaacatcagcctcgtgaatgccatctctttagtgaccccgcttgtccagaggcacctattctcctgcatttccctttggtcaatgctagcttcaaggaccatagcgcccctggcgtgcaacggtcccccgcagagctgcagggcggacaggtggacttgaccggcgcaacttgcccttataccttaagcaacatgacgtataaagaggaagatttcgagagattgctgaggttgagcgactacaacgttcagacttctcagggcgcaattctccaggcattacgcaccgctctgaagcaccgcacgttagaggccaggcctccccgagctcagacctag

SEQ ID NO: 253367 - DNA, 2457 bp, Artificial Sequence
  derived and/or modified sequence
atggagagcctgagccccggcggcccccccggccacccctaccagggcgaggccagcacctgctggcagctgaccgtgagagtgctggaggccagaaacctgagatgggccgacctgctgagcgaggccgacccctacgtgatcctgcagctgagcaccgcccccggcatgaagttcaagaccaagaccctgaccgacaccagccaccccgtgtggaacgaggccttcagattcctgatccagagccaggtgaagaacgtgctggagctgagcatctacgacgaggacagcgtgaccgaggacgacatctgcttcaaggtgctgtacgacatcagcgaggtgctgcccggcaagctgctgagaaagaccttcagccagagcccccagggcgaggaggagctggacgtggagttcctgatggaggagaccagcgacagacccgagaacctgatcaccaacaaggtgatcgtggccagagagctgagctgcctggacgtgcacctggacagcaccggcagcaccgccgtggtggccgaccaggacaagctggagctggagctggtgctgaagggcagctacgaggacacccagaccagcttcctgggcaccgccagcgccttcagattccactacatggccgccctggagaccgagctgagcggcagactgagaagcagcagaagcaacggctggaacggcgacaacagcgccggctacctgaccgtgcccctgagacccctgaccatcggcaaggaggtgaccatggacgtgcccgcccccaacgcccccggcgtgagactgcagctgaaggccgagggctgccccgaggagctggccgtgcacctgggcttcaacctgtgcgccgaggagcaggccttcctgagcagaagaaagcaggtggtggccaaggccctgaagcaggccctgcagctggacagagacctgcaggaggacgaggtgcccgtggtgggcatcatggccaccggcggcggcgccagagccatgaccagcctgtacggccacctgctggccctgcagaagctgggcctgctggactgcgtgacctacttcagcggcatcagcggcagcacctggaccatggcccacctgtacggcgaccccgagtggagccagagagacctggagggccccatcagatacgccagagagcacctggccaagagcaagctggaggtgttcagccccgagagactggccagctacagaagagagctggagctgagagccgagcagggccaccccaccaccttcgtggacctgtgggccctggtgctggagagcatgctgcacggccaggtgatggaccagaagctgagcggccagagagccgccctggagagaggccagaaccccctgcccctgtacctgagcctgaacgtgaaggagaacaacctggagaccctggacttcaaggagtgggtggagttcagcccctacgaggtgggcttcctgaagtacggcgccttcgtgccccccgagctgttcggcagcgagttcttcatgggcagactgatgagaagaatccccgagcccagaatctgcttcctggaggccatctggagcaacatcttcagcctgaacctgctggacgcctggtacgacctgaccagcagcggcgagagctggaagcagcacatcaaggacaagaccagaagcctggagaaggagcccctgaccaccagcggcaccagcagcagactggaggccagctggctgcagcccggcaccgccctggcccaggccttcaagggcttcctgaccggcagacccctgcaccagagaagccccaacttcctgcagggcctgcagctgcaccaggactactgcagccacaaggacttcagcacctgggccgactaccagctggacagcatgcccagccagctgacccccaaggagcccagactgtgcctggtggacgccgcctacttcatcaacaccagcagccccagcatgttcagacccggcagaagactggacctgatcctgagcttcgactacagcctgagcgcccccttcgaggccctgcagcagaccgagctgtactgcagagccagaggcctgcccttccccagagtggagcccagcccccaggaccagcaccagcccagagagtgccacctgttcagcgaccccgcctgccccgaggcccccatcctgctgcacttccccctggtgaacgccagcttcaaggaccacagcgcccccggcgtgcagagaagccccgccgagctgcagggcggccaggtggacctgaccggcgccacctgcccctacaccctgagcaacatgacctacaaggaggaggacttcgagagactgctgagactgagcgactacaacgtgcagaccagccagggcgccatcctgcaggccctgagaaccgccctgaagcacagaaccctggaggccagaccccccagagcccagacctag

SEQ ID NO: 253368 - protein, 171 aa, Artificial Sequence
  derived and/or modified sequence
MTMTTMPESLNSPVSGKAVFMEFGPPNQQMSPSPMSHGHYSMHCLHSAGHSQPDGAYSSASSFSRPLGYPYVNSVSSHASSPYISSVQSYPGSASLAQSRLEDPGADSEKSTVVEGGEVRFNGKGKKIRKPRTIYSSLQLQALNRRFQQTQYLALPERAELAASLGLTQTQ

SEQ ID NO: 253369 - protein, 255 aa, Artificial Sequence
  derived and/or modified sequence
MTMTTMPESLNSPVSGKAVFMEFGPPNQQMSPSPMSHGHYSMHCLHSAGHSQPDGAYSSASSFSRPLGYPYVNSVSSHASSPYISSVQSYPGSASLAQSRLEDPGADSEKSTVVEGGEVRFNGKGKKIRKPRTIYSSLQLQALNRRFQQTQYLALPERAELAASLGLTQTQVKIWFQNKRSKFKKLMKQGGAALEGSALANGRALSAGSPPVPPGWNPNSSSGKGSGGNAGSYIPSYTSWYPSAHQEAMQQPQLM

SEQ ID NO: 253370 - protein, 187 aa, Artificial Sequence
  derived and/or modified sequence
MTMTTMPESLNSPVSGKAVFMEFGPPNQQMSPSPMSHGHYSMHCLHSAGHSQPDGAYSSASSFSRPLGYPYVNSVSSHASSPYISSVQSYPGSASLAQSRLEDPGADSEKSTVVEGGEVRFNGKGKKIRKPRTIYSSLQLQALNRRFQQTQYLALPERAELAASLGLTQTQVKIWFQNKRSKFKKLM

SEQ ID NO: 253371 - DNA, 516 bp, Artificial Sequence
  derived and/or modified sequence
atgactatgacaacaatgcctgagtccctgaacagccctgtgtctggaaaagcggtctttatggagttcggcccccctaatcagcagatgagtccttctccgatgtctcacggccattactccatgcactgccttcatagtgccggccattcccaaccggatggcgcctattcatctgcttcttctttcagtaggccactgggttacccctatgtgaattctgtctccagtcatgccagctccccatatatatcaagcgtgcagagctatcctggatctgctagccttgcccagtcacgactcgaggaccccggagcagactctgaaaaatctaccgtcgtggaagggggcgaagtaagatttaatggcaaaggcaagaagattcgaaaacctcgcaccatttactcgtcactgcagcttcaggccctcaacagaagattccagcagacccaatatcttgctctccctgagcgggccgaacttgctgcctccttgggccttacccagacccagtag

SEQ ID NO: 253372 - DNA, 768 bp, Artificial Sequence
  derived and/or modified sequence
atgactatgaccactatgccagagtcattgaactcacctgtgtcagggaaggccgtttttatggaattcggtccacccaaccagcagatgagcccgagcccgatgtcccacggacattactccatgcactgtctgcattctgccggccattcacaacctgacggggcctactctagtgcatcatcattctcgagacccctcggatatccatacgtgaacagcgtcagtagtcacgcttcttctccctacattagttcagtgcaatcctatcccggtagtgcttccctggcacagagcagacttgaagaccccggcgctgattcggagaagagtacagtggtggagggaggagaagtgcgattcaacgggaagggaaagaaaatccgcaaaccgaggactatctatagctccctgcagctgcaggctctgaataggagatttcagcagacccagtatctggctcttcctgagcgcgccgagttggctgcctctcttgggctgacccagacccaggttaaaatctggttccagaacaagaggagcaaatttaaaaagctcatgaagcaaggaggcgccgccctcgaggggagtgctctcgccaacggcagagctctgagtgccggatcccccccggtgcccccaggctggaatcccaattcttcgtctggaaaaggatccgggggcaacgcagggagctatatccccagttatacctcgtggtatcccagcgcccaccaggaggctatgcagcagccccaattgatgtag

SEQ ID NO: 253373 - DNA, 564 bp, Artificial Sequence
  derived and/or modified sequence
atgacaatgaccacaatgccggaaagcctgaactctcctgtgtctggaaaggcagtctttatggagtttgggcctcctaaccagcagatgtctccatcgccaatgtcgcatggccactactcaatgcactgcctgcactccgccggacatagccaacctgacggtgcctattcctctgcaagctcttttagcaggccattgggctacccatacgtcaactccgttagcagtcacgcatctagtccgtacatctccagcgtgcagagttatcctgggtccgcaagtcttgcccagagtagattggaggatcctggggccgactctgagaaatctacagttgtggaaggtggagaggtgcgatttaacggaaaagggaagaaaattaggaagccacgtacaatttactccagcctccagctgcaggctttaaacaggcggttccagcagacgcaatatctggctctccctgaacgcgccgaattggctgcaagccttgggctgacccaaacccaggtaaaaatttggttccaaaacaagcgctccaagttcaagaaactcatgtag

SEQ ID NO: 253374 - DNA, 516 bp, Artificial Sequence
  derived and/or modified sequence
atgaccatgaccaccatgcctgagagcctgaacagccctgtgtctgggaaggctgtgttcatggagtttggaccacccaaccagcagatgagccccagccccatgagccacggccactacagcatgcactgcctgcacagcgctggccacagccagccagatggagcctacagcagcgccagcagcttcagccggcccctgggctacccctacgtgaacagcgtgagcagccacgccagcagcccctacatcagctctgtgcagagctacccaggcagcgccagcctggcccagagccggctggaggaccccggggctgacagcgagaagagcacagtggtggagggcggggaggtgcgcttcaacgggaagggcaagaagatcaggaagcccaggaccatctacagcagcctgcagctgcaggccctgaacagacgcttccagcagacccagtacctggccctgcctgagagagctgagctggccgccagcctgggcctgacccagacccagtag

SEQ ID NO: 253375 - DNA, 768 bp, Artificial Sequence
  derived and/or modified sequence
atgaccatgaccaccatgcctgagagcctgaacagccctgtgtctgggaaggctgtgttcatggagtttggaccacccaaccagcagatgagccccagccccatgagccacggccactacagcatgcactgcctgcacagcgctggccacagccagccagatggagcctacagcagcgccagcagcttcagccggcccctgggctacccctacgtgaacagcgtgagcagccacgccagcagcccctacatcagctctgtgcagagctacccaggcagcgccagcctggcccagagccggctggaggaccccggggctgacagcgagaagagcacagtggtggagggcggggaggtgcgcttcaacgggaagggcaagaagatcaggaagcccaggaccatctacagcagcctgcagctgcaggccctgaacagacgcttccagcagacccagtacctggccctgcctgagagagctgagctggccgccagcctgggcctgacccagacccaggtgaagatctggttccagaacaagaggagcaagttcaagaagctgatgaagcagggcggggccgccctggagggcagcgccctggccaacggccgggccctgtctgctggcagcccccctgtgcccccaggctggaaccccaacagcagcagcggcaagggcagcggcggcaatgccggcagctacatccccagctacacctcctggtaccccagcgcccaccaggaggccatgcagcagccccagctgatgtag

SEQ ID NO: 253376 - DNA, 564 bp, Artificial Sequence
  derived and/or modified sequence
atgaccatgaccaccatgcctgagagcctgaacagccctgtgtctgggaaggctgtgttcatggagtttggaccacccaaccagcagatgagccccagccccatgagccacggccactacagcatgcactgcctgcacagcgctggccacagccagccagatggagcctacagcagcgccagcagcttcagccggcccctgggctacccctacgtgaacagcgtgagcagccacgccagcagcccctacatcagctctgtgcagagctacccaggcagcgccagcctggcccagagccggctggaggaccccggggctgacagcgagaagagcacagtggtggagggcggggaggtgcgcttcaacgggaagggcaagaagatcaggaagcccaggaccatctacagcagcctgcagctgcaggccctgaacagacgcttccagcagacccagtacctggccctgcctgagagagctgagctggccgccagcctgggcctgacccagacccaggtgaagatctggttccagaacaagaggagcaagttcaagaagctgatgtag

SEQ ID NO: 253377 - DNA, 516 bp, Artificial Sequence
  derived and/or modified sequence
atgaccatgaccaccatgcccgagagcctgaacagccccgtgagcgggaaggccgtttttatggagtttggcccccccaaccagcagatgagtccttctcccatgtcccacggacattactcaatgcattgcctccactcggctggccactctcaacctgatggggcatatagctccgcctcttccttctcacgtcccctcggatatccctatgtcaattcagtgagcagtcacgcaagtagcccttacataagcagcgtgcaaagctatccagggagcgcaagcctggctcaatccagactggaggaccccggggctgatagtgagaaaagtactgtggtggagggaggggaggtgcgttttaatggaaaaggaaagaaaatccgtaagccccgcacgatctacagttcgttgcagcttcaggctcttaaccgcagattccaacagacccagtacctcgccttaccagagcgggccgaattggcggcatccctagggctgacacagacccaatag

SEQ ID NO: 253378 - DNA, 768 bp, Artificial Sequence
  derived and/or modified sequence
atgaccatgaccaccatgcccgagagcctgaacagccccgtgagcggaaaggctgtgttcatggaatttggcccaccaaaccagcagatgagtcccagcccgatgtcccacggccactactccatgcattgcctgcactcagctggacattcccagccggatggtgcctacagctctgcgtcatcgttctcccgtcccttgggctacccgtatgtcaactctgtctcatctcacgcttcatccccgtacatttcttcagtacagagctatccggggagcgccagcctcgcacagtccaggttggaggatcctggggcagacagtgaaaaatcaactgttgtggaaggcggggaagtgcgattcaatggcaaggggaagaagatacggaagcctaggacaatttactctagtctgcagttacaggcgctgaacaggagatttcagcagacccaatatctggcccttccagagcgtgcagagcttgccgcaagtctgggtttgactcagacacaggtcaagatctggtttcaaaacaaacgcagtaagttcaaaaaattgatgaagcagggaggggcggccctcgaagggtcagccctggctaatgggagggcactttctgctgggagtccccctgttccgccagggtggaaccccaattcctcatccggcaaaggctccggcgggaacgcgggatcctatattccaagctatacatcgtggtatccctccgctcatcaagaggccatgcagcagcctcagttgatgtag

SEQ ID NO: 253379 - DNA, 564 bp, Artificial Sequence
  derived and/or modified sequence
atgaccatgaccaccatgcccgagagcctgaacagccccgtgagcggtaaggccgtcttcatggaatttgggccacccaaccagcagatgtccccctcacctatgagtcatggtcactatagtatgcactgcctgcattctgccggacactctcagccggacggagcttacagcagcgcaagcagttttagtcgacctctaggttacccctatgtgaattcagtgtcctcccatgccagctccccttatatttcttccgtgcagagttaccccggctccgcaagtctcgcccagtcacggcttgaagaccccggagccgattccgagaaatccacagtcgtcgaagggggagaggtgcggttcaatggcaagggcaaaaagatcaggaagccgcgaaccatatattcctctcttcaactccaggccctgaaccgacggtttcagcagacacagtaccttgccctacctgaacgggccgagctggccgcctctctgggtctgacacagactcaggtcaagatctggtttcaaaacaagaggagcaagttcaagaagctgatgtag

SEQ ID NO: 253380 - DNA, 516 bp, Artificial Sequence
  derived and/or modified sequence
atgacaatgaccaccatgcccgaaagccttaacagtcctgtttccggcaaggcagtgtttatggagtttggccctccaaatcagcaaatgagcccatcgcccatgtctcatggacactattcgatgcactgcctgcacagtgctggacacagccaaccggatggggcatattcatcagctagttccttcagtcggccactgggctacccttacgtgaactccgtaagctctcacgcaagctctccctacatctctagcgtgcagtcatatccagggagcgcctcattggcacaatctcgcttggaagatcctggggctgatagcgagaagagtaccgttgtagaaggaggggaggtgcgatttaacggcaaaggcaaaaaaattcgcaaacctcgcacgatttacagtagtctccaactgcaggctctgaatcgccgttttcaacagacccagtatctggccttgccagaacgagcagaacttgctgcctctctgggtctgacacagacacagtag

SEQ ID NO: 253381 - DNA, 768 bp, Artificial Sequence
  derived and/or modified sequence
atgacaatgaccacgatgcccgaaagtctaaatagccccgtgtctggcaaagccgtatttatggagttcggacctcctaaccagcaaatgtctccttccccaatgagccatgggcactacagtatgcactgtttgcactcagccggtcactcccagccagatggcgcatactcgagcgctagcagcttttctcgacccttgggatacccatatgtcaactccgtgtccagtcatgccagctcaccatacatttcctcagtgcagagttacccagggtctgcaagcctggcccaaagtagactcgaggacccgggagccgactcggagaagtcaacagttgtcgagggtggggaggttaggttcaatggcaagggcaagaagatccggaagcccaggacgatttactcttcactgcagctgcaggccttgaataggcgctttcagcagacacagtacctagcgctgcccgagcgggctgaactggctgcctcactgggcctgacccagacacaggtcaagatttggtttcagaacaagagaagtaagttcaagaagctgatgaaacagggcggagcagcgttggagggaagcgcactcgctaatggccgtgccctgtcagccggaagtcctcccgtgcccccaggctggaacccaaattcatccagtgggaaaggaagtgggggaaacgccggatcatatatcccatcatatacaagctggtacccaagcgcgcaccaggaggcaatgcagcagccccagcttatgtag

SEQ ID NO: 253382 - DNA, 564 bp, Artificial Sequence
  derived and/or modified sequence
atgaccatgacgaccatgcctgagtcactgaacagtcctgtgtctggcaaggcagtgttcatggagttcgggccaccgaaccagcagatgtccccctcccctatgtcacacgggcattattctatgcattgcctgcattccgctggccattcccaacctgatggagcgtattcaagcgcatccagtttttcccgccctttgggatatccttacgtgaacagtgtttcgagtcatgcgagctctccctatatttcttcagttcagtcatacccagggagcgcctctctcgcccagagccggctcgaggatcccggagctgattctgagaagtctactgttgtcgagggaggggaggtgcgctttaacgggaagggtaagaagattcggaagccaagaacgatatacagctcacttcagcttcaagcattgaatcgaaggttccagcagacccagtaccttgcactgccagaacgggctgagctcgccgcaagcctgggcctcacccaaacgcaggttaagatttggttccagaataagcgctcaaaatttaaaaaactaatgtag

SEQ ID NO: 253383 - DNA, 516 bp, Artificial Sequence
  derived and/or modified sequence
atgaccatgaccaccatgcccgagagcctgaacagccccgtgagcggcaaggccgtgttcatggagttcggcccccccaaccagcagatgagccccagccccatgagccacggccactacagcatgcactgcctgcacagcgccggccacagccagcccgacggcgcctacagcagcgccagcagcttcagcagacccctgggctacccctacgtgaacagcgtgagcagccacgccagcagcccctacatcagcagcgtgcagagctaccccggcagcgccagcctggcccagagcagactggaggaccccggcgccgacagcgagaagagcaccgtggtggagggcggcgaggtgagattcaacggcaagggcaagaagatcagaaagcccagaaccatctacagcagcctgcagctgcaggccctgaacagaagattccagcagacccagtacctggccctgcccgagagagccgagctggccgccagcctgggcctgacccagacccagtag

SEQ ID NO: 253384 - DNA, 768 bp, Artificial Sequence
  derived and/or modified sequence
atgaccatgaccaccatgcccgagagcctgaacagccccgtgagcggcaaggccgtgttcatggagttcggcccccccaaccagcagatgagccccagccccatgagccacggccactacagcatgcactgcctgcacagcgccggccacagccagcccgacggcgcctacagcagcgccagcagcttcagcagacccctgggctacccctacgtgaacagcgtgagcagccacgccagcagcccctacatcagcagcgtgcagagctaccccggcagcgccagcctggcccagagcagactggaggaccccggcgccgacagcgagaagagcaccgtggtggagggcggcgaggtgagattcaacggcaagggcaagaagatcagaaagcccagaaccatctacagcagcctgcagctgcaggccctgaacagaagattccagcagacccagtacctggccctgcccgagagagccgagctggccgccagcctgggcctgacccagacccaggtgaagatctggttccagaacaagagaagcaagttcaagaagctgatgaagcagggcggcgccgccctggagggcagcgccctggccaacggcagagccctgagcgccggcagcccccccgtgccccccggctggaaccccaacagcagcagcggcaagggcagcggcggcaacgccggcagctacatccccagctacaccagctggtaccccagcgcccaccaggaggccatgcagcagccccagctgatgtag

SEQ ID NO: 253385 - DNA, 564 bp, Artificial Sequence
  derived and/or modified sequence
atgaccatgaccaccatgcccgagagcctgaacagccccgtgagcggcaaggccgtgttcatggagttcggcccccccaaccagcagatgagccccagccccatgagccacggccactacagcatgcactgcctgcacagcgccggccacagccagcccgacggcgcctacagcagcgccagcagcttcagcagacccctgggctacccctacgtgaacagcgtgagcagccacgccagcagcccctacatcagcagcgtgcagagctaccccggcagcgccagcctggcccagagcagactggaggaccccggcgccgacagcgagaagagcaccgtggtggagggcggcgaggtgagattcaacggcaagggcaagaagatcagaaagcccagaaccatctacagcagcctgcagctgcaggccctgaacagaagattccagcagacccagtacctggccctgcccgagagagccgagctggccgccagcctgggcctgacccagacccaggtgaagatctggttccagaacaagagaagcaagttcaagaagctgatgtag

SEQ ID NO: 253386 - DNA, 1022 bp, Artificial Sequence
  derived and/or modified sequence
gggaggagaagcgcgggttcctggctctccacgcgcactgctttaatcagacccgtgcagcctcgagctggagtggccagctgggcctggagcaatgcgagcgggccccagggagcgacagcggcgttggcgcagcggccgaaggagccccggccgggaagtgtggatgcgtcttacccgaggccgggccgcctcgcccgctctagtccagcggagcccgagcgcctcggaccaatccccagtgattatgcaagacagcggaccaatcagctccgccagctcatgaatatttatgaccttcgctgagtcaaagctttgaaccgagtttggggagctcagcagcatcatgcttagacttttcaaagagacaaactccattttcttatgaatggaaagtgaaaacccctgttccgcttaaattgggttccttcctgtcctgagaaacatagagacccccaaaagggaagcagaggagagaaagtcccacacccagaccccgcgagaagagatgaccatgaccaccatgccagaaagtctcaacagccccgtgtcgggcaaggcggtgtttatggagtttgggccgcccaaccagcaaatgtctccttctcccatgtcccacgggcactactccatgcactgtttacactcggcgggccattcgcagcccgacggcgcctacagctcagcctcgtccttctcccgaccgctgggctacccctacgtcaactcggtcagcagccacgcatccagcccctacatcagttcggtgcagtcctacccgggcagcgccagcctcgcccagagccgcctggaggacccaggggcggactcggagaagagcacggtggtggaaggcggtgaagtgcgcttcaatggcaagggaaaaaagatccgtaaacccaggacgatttattccagtttgcagttgcaggctttgaaccggaggttccagcaaactcagtacctagctctgccggagagggcggagctcgcggcctctttgggactcacacagactcagg

SEQ ID NO: 253387 - DNA, 2640 bp, Artificial Sequence
  derived and/or modified sequence
gggaggccgatgagccgcgggccgcaggggccccggcgcagacgccgcagcccattgtgcttcctgcccggcgcgctctgttgcagaggagccccggccgggaagtgtggatgcgtcttacccgaggccgggccgcctcgcccgctctagtccagcggagcccgagcgcctcggaccaatccccagtgattatgcaagacagcggaccaatcagctccgccagctcatgaatatttatgaccttcgctgagtcaaagctttgaaccgagtttggggagctcagcagcatcatgcttagacttttcaaagagacaaactccattttcttatgaatggaaagtgaaaacccctgttccgcttaaattgggttccttcctgtcctgagaaacatagagacccccaaaagggaagcagaggagagaaagtcccacacccagaccccgcgagaagagatgaccatgaccaccatgccagaaagtctcaacagccccgtgtcgggcaaggcggtgtttatggagtttgggccgcccaaccagcaaatgtctccttctcccatgtcccacgggcactactccatgcactgtttacactcggcgggccattcgcagcccgacggcgcctacagctcagcctcgtccttctcccgaccgctgggctacccctacgtcaactcggtcagcagccacgcatccagcccctacatcagttcggtgcagtcctacccgggcagcgccagcctcgcccagagccgcctggaggacccaggggcggactcggagaagagcacggtggtggaaggcggtgaagtgcgcttcaatggcaagggaaaaaagatccgtaaacccaggacgatttattccagtttgcagttgcaggctttgaaccggaggttccagcaaactcagtacctagctctgccggagagggcggagctcgcggcctctttgggactcacacagactcaggtcaagatctggttccaaaacaagcgatccaagttcaagaagctgatgaagcagggtggggcggctctggagggtagtgcgttggccaacggtcgggccctgtctgctggctccccacccgtgccgcccggctggaaccctaactcttcatccgggaagggctcaggaggaaacgcgggctcctatatccccagctacacatcgtggtacccttcagcgcaccaagaagctatgcagcaaccccaacttatgtgaggttgcccgcccgtctccttcttgtctccccggcccaggtccctcccgcctccaggtccatccatcccgtccggaaaagaaggacccagagggaagaaggaacagtggaggcgggacgccctccatctcctcggagccccgcgaggtccggcccagcaacttcccggcatccgcgctctagcctgaaccctggcctgggccgagcagtggcagcagagagtggcctcggagggaagccactgccacctgagacagcccaagcagcaagataaacccgctccacccgacccgccgaccttcagctttgtgggactatcaggaaaaaacaaaacaaaaacaaaatgtagaaaaagcaaaagctcttttctgtcctgtcagtctcctgtctccttttgctctgtctgtgcgctggtaaagtccaggtcctcatccgtccgctgtcctcattctgcggcctcagcaaaaagccacaaggtctgagcggcccgggtcctgccgggctgaccatctccggatcctgggacactctgcctgaccatctgtgtagctggtgtgggaatctgggggcattggagggagggggttttatttattgagaaatggacttcgcctgaggctgtttgccaattcagggttctgctgggcgcaaggaacgcactgttcaaacgcactgtttactttaagcgcacggggagaaacgaataaggaggacgtggtgatttttaatttatacagtaacttttgtacttctctggtatggagagtttggagccgaatgatttgcattttttacatgtccgacattatttaataaataatttttaaaagaaaagaacgataaatgaagccaacatgattttctcatttcgggaggaactctgttgcttcgcctggacaagaaggaaaatgctgatttcctccttgggtagaaagagggagcgagggcaaatggggagtagagagaaaacaggcgagaacaagcactctaattccagtgggctttaaaataagacaaaatcagctttacaacaatccctagaggctcgaccacagaataatgccagtcaccaccctgaacgcacaatctccagtgcaggatctaatgactgtacatattattgttattattattattgttattattgttgttctgtaaacatgttgcacaagcttagcctttttgcgttctgttgtgtgtggctgtaaaaccccatgctttgtgaaatgagaatcttgacatttttcttgtgaaatttggaaaatgtgatcaattgaaatcaactgtgttttgtgttctctatgtcaaagtttagttttatattgagaatgttaacttattgctttgtatcttgggaaaaaaactttgtaaataagttataaagtttctttgagacagtaaaattatgatttcttgaaagaa

SEQ ID NO: 253388 - DNA, 762 bp, Artificial Sequence
  derived and/or modified sequence
agcgcgggttcctggctctccacgcgcactgctttaatcagacccgtgcagcctcgagctggagtggccagctgggcctggagcaatgcgagcgggccccagggagcgacagcggcgttggcgcagcggccgaaaacatagagacccccaaaagggaagcagaggagagaaagtcccacacccagaccccgcgagaagagatgaccatgaccaccatgccagaaagtctcaacagccccgtgtcgggcaaggcggtgtttatggagtttgggccgcccaaccagcaaatgtctccttctcccatgtcccacgggcactactccatgcactgtttacactcggcgggccattcgcagcccgacggcgcctacagctcagcctcgtccttctcccgaccgctgggctacccctacgtcaactcggtcagcagccacgcatccagcccctacatcagttcggtgcagtcctacccgggcagcgccagcctcgcccagagccgcctggaggacccaggggcggactcggagaagagcacggtggtggaaggcggtgaagtgcgcttcaatggcaagggaaaaaagatccgtaaacccaggacgatttattccagtttgcagttgcaggctttgaaccggaggttccagcaaactcagtacctagctctgccggagagggcggagctcgcggcctctttgggactcacacagactcaggtcaagatctggttccaaaacaagcgatccaagttcaagaagctgatga

SEQ ID NO: 253389 - protein, 487 aa, Artificial Sequence
  derived and/or modified sequence
MAWQVSLLELEDWLQCPICLEVFKEPLMLQCGHSYCKGCLVSLSCHLDAELRCPVCRQAVDGSSSLPNVSLARVIEALRLPGDPEPKVCVHHRNPLSLFCEKDQELICGLCGLLGSHQHHPVTPVSTVYSRMKEELAALISELKQEQKKVDELIAKLVNNRTRIVNESDVFSWVIRREFQELHHLVDEEKARCLEGIGGHTRGLVASLDMQLEQAQGTRERLAQAECVLEQFGNEDHHKFIRKFHSMASRAEMPQARPLEGAFSPISFKPGLHQADIKLTVWKRLFRKVLPAPEPLKLDPATAHPLLELSKGNTVVQCGLLAQRRASQPERFDYSTCVLASRGFSCGRHYWEVVVGSKSDWRLGVIKGTASRKGKLNRSPEHGVWLIGLKEGRVYEAFACPRVPLPVAGHPHRIGLYLHYEQGELTFFDADRPDDLRPLYTFQADFQGKLYPILDTCWHERGSNSLPMVLPPPSGPGPLSPEQPTKL

SEQ ID NO: 253390 - DNA, 1464 bp, Artificial Sequence
  derived and/or modified sequence
atggcctggcaggtgagcctgctggagctggaggactggctgcagtgccccatctgcctggaggtgttcaaggagcccctgatgctgcagtgcggccacagctactgcaagggctgcctggtgagcctgagctgccacctggacgccgagctgagatgccccgtgtgcagacaggccgtggacggcagcagcagcctgcccaacgtgagcctggccagagtgatcgaggccctgagactgcccggcgaccccgagcccaaggtgtgcgtgcaccacagaaaccccctgagcctgttctgcgagaaggaccaggagctgatctgcggcctgtgcggcctgctgggcagccaccagcaccaccccgtgacccccgtgagcaccgtgtacagcagaatgaaggaggagctggccgccctgatcagcgagctgaagcaggagcagaagaaggtggacgagctgatcgccaagctggtgaacaacagaaccagaatcgtgaacgagagcgacgtgttcagctgggtgatcagaagagagttccaggagctgcaccacctggtggacgaggagaaggccagatgcctggagggcatcggcggccacaccagaggcctggtggccagcctggacatgcagctggagcaggcccagggcaccagagagagactggcccaggccgagtgcgtgctggagcagttcggcaacgaggaccaccacaagttcatcagaaagttccacagcatggccagcagagccgagatgccccaggccagacccctggagggcgccttcagccccatcagcttcaagcccggcctgcaccaggccgacatcaagctgaccgtgtggaagagactgttcagaaaggtgctgcccgcccccgagcccctgaagctggaccccgccaccgcccaccccctgctggagctgagcaagggcaacaccgtggtgcagtgcggcctgctggcccagagaagagccagccagcccgagagattcgactacagcacctgcgtgctggccagcagaggcttcagctgcggcagacactactgggaggtggtggtgggcagcaagagcgactggagactgggcgtgatcaagggcaccgccagcagaaagggcaagctgaacagaagccccgagcacggcgtgtggctgatcggcctgaaggagggcagagtgtacgaggccttcgcctgccccagagtgcccctgcccgtggccggccacccccacagaatcggcctgtacctgcactacgagcagggcgagctgaccttcttcgacgccgacagacccgacgacctgagacccctgtacaccttccaggccgacttccagggcaagctgtaccccatcctggacacctgctggcacgagagaggcagcaacagcctgcccatggtgctgcccccccccagcggccccggccccctgagccccgagcagcccaccaagctgtag

SEQ ID NO: 253391 - DNA, 1464 bp, Artificial Sequence
  derived and/or modified sequence
atggcctggcaagtgagcctcctggaactcgaggattggctgcagtgtccaatctgcctggaggtcttcaaggagccacttatgttacaatgcggtcactcatattgtaagggatgtttggtgtcactctcatgccatttagacgccgagctgaggtgtcctgtctgccgccaagctgtcgacggttcttcttctttacctaacgttagcctcgctagagtcatcgaggctctgaggctgcctggcgacccagagcccaaggtctgtgtgcatcacagaaatccgcttagtctattttgcgaaaaggatcaagaactcatctgcggactatgtgggctcttgggtagccatcagcaccatcctgttaccccagtgagcaccgtgtatagtaggatgaaagaagaactcgccgcacttatatcggagctgaagcaggagcagaaaaaggtcgatgagctcatcgctaagcttgttaataatagaactcgcatcgtaaatgagagtgatgtgttctcctgggttatcaggagggagtttcaagaactgcaccacctggtggatgaggagaaggcccgatgcctcgaggggataggcgggcacacacgtgggttggtggccagtctggacatgcaattagaacaggctcagggtacaagagagagactggcccaggcagagtgcgtgcttgaacagtttggtaatgaggatcaccacaagttcatccgaaaattccatagtatggcctcccgggcagaaatgccccaggcgcggccccttgaaggggccttttctcctatctccttcaagccaggtctccaccaggccgacattaagcttaccgtgtggaaaaggctcttcagaaaagtgctgcccgcaccagaacctctgaaactcgacccagcaaccgcgcaccccctactggagctgtctaaaggaaatactgttgtgcagtgtgggttattggcccagcggcgcgcatcccaacccgagagattcgattacagcacatgcgtactggcctcaaggggattcagttgcggacggcactactgggaagttgtagtggggagcaagagtgactggcggttgggcgtgatcaagggcaccgcaagccggaaggggaaattgaaccgctcaccagagcacggagtgtggctgataggattgaaggaaggacgggtgtatgaagctttcgcttgtccacgtgtccccttaccagttgctggtcatcctcataggatcggtctctatctccattacgagcagggcgagctgacattcttcgatgctgacaggccagatgacctaagacctctttacacatttcaagccgactttcagggaaaactgtatccaatcttagacacttgctggcatgagcgtgggtctaacagtctacccatggttctgcctccccccagtgggcccgggcccctttcccctgagcagcccacgaaactgtag

SEQ ID NO: 253392 - DNA, 1464 bp, Artificial Sequence
  derived and/or modified sequence
atggcatggcaagtgtctctgcttgagctggaggactggctgcagtgtcctatttgcttagaggttttcaaagagccactcatgctccaatgtggtcattcctactgtaaggggtgcctagtgagtctgagctgtcacctggacgctgagctgcgttgtcccgtctgtcgacaggcagtggatggctccagctcactccctaatgtgtccctcgccagggttatcgaagcactccgtcttcctggggaccctgaacccaaggtgtgtgtccaccatcggaatccactgagcttgttctgcgagaaggaccaagaactaatatgcggactatgcggcttgctgggcagtcaccagcaccaccccgtcacccctgttagcactgtttattcaaggatgaaagaggagctcgccgccctgattagcgagttaaagcaagagcagaagaaagtggatgagttgattgcaaagctggttaataacaggacacgaatagtgaacgaaagcgatgtgttttcatgggtaattagacgggaattccaagagctccaccacctggtggacgaagagaaggcaaggtgtttggaggggatcggcggacataccaggggtttggtggcctccttggacatgcagctggaacaggcacaaggaacacgcgaaaggttggcacaggctgaatgtgtactggagcagtttggaaatgaagatcatcacaagtttattaggaaattccactctatggctagccgcgccgagatgccacaggctcggcccctcgagggcgcgttttcccccatcagtttcaagccgggtttgcaccaggctgacatcaagctcactgtgtggaaacgcctgttccgcaaagtgcttccagctcccgaacctttgaaactagaccccgccaccgctcaccccctgcttgagctgtctaaaggcaacactgtcgtgcagtgcgggttgctggcacagagaagagcctcacagccggaaaggttcgactactctacttgcgtgttggcatctcggggtttttcttgtggaaggcattattgggaggtggtagtaggaagcaaaagcgactggcgactcggcgtaataaaggggacagcctctagaaagggcaaactcaacagatcacccgagcacggcgtgtggttaattggactgaaagaaggccgcgtctatgaagcatttgcctgcccaagggtgcctctgcccgtggcgggccacccacacagaataggcttgtaccttcactatgagcaaggcgagctgacctttttcgatgctgataggccagacgacctgcgtcccctgtacaccttccaggctgacttccagggaaaactctatccgatcctggacacatgttggcacgaacgcggcagcaatagcctgcctatggtgttgccacccccaagcggaccagggcctttgtcgccggaacaacccactaagttgtag

SEQ ID NO: 253393 - DNA, 1464 bp, Artificial Sequence
  derived and/or modified sequence
atggcctggcaggtgtccctgctggagctggaggactggctgcagtgccccatctgcctggaggtgttcaaggagcccctgatgctgcagtgtggccacagctactgcaagggctgcctggtgtccctgagctgccacctggatgctgagctgcgctgccctgtgtgccggcaggccgtggatggcagcagcagcctgcccaacgtgtccctggcccgggtgattgaggccctgcggctgcccggggaccctgagcccaaggtgtgtgtgcaccacaggaaccccctgagcctcttctgtgagaaggaccaggagctgatctgtggcctgtgtggcctgctgggcagccaccagcaccaccctgtgacccctgtgtccacagtgtacagcaggatgaaggaggagctggccgccctgatcagcgagctgaagcaggagcagaagaaggtggatgagctgattgccaagctggtgaacaacagaacccgcatcgtgaatgaaagtgatgtgttctcctgggtgatccggcgggagttccaggagctgcaccacctggtggatgaggagaaggcccgctgcctggagggcattggaggccacacccggggcctggtggccagcctggacatgcagctggagcaggcccagggcacccgggagcggctggcccaggccgagtgtgtgctggagcagtttggaaatgaagaccaccacaagttcatcaggaagttccacagcatggccagcagagctgagatgccccaggcccggcccctggagggcgccttcagccccatctccttcaagccaggcctgcaccaggccgacatcaagctgactgtgtggaagaggctcttcaggaaggtgctgcctgcccctgagcccctgaagctggaccctgccacagcccaccccctgctggagctgagcaaaggaaacacagtggtgcagtgtggcctgctggcccagaggcgggccagccagcctgagagatttgactacagcacctgtgtgctggccagccggggcttcagctgtggccgccactactgggaggtggtggtgggcagcaagagtgactggaggctgggcgtcatcaagggcacagccagcaggaagggcaagctgaacagaagccctgagcacggcgtgtggctgattggcctgaaggagggccgggtgtatgaggcctttgcctgcccccgggtgcccctgcctgtggccggccacccccaccgcatcggcctgtacctgcactatgagcagggcgagctgaccttctttgatgctgacagaccagatgacctgcggcccctgtacaccttccaggccgacttccagggcaagctgtaccccatcctggacacctgctggcatgagcggggcagcaacagcctgcccatggtgctgcccccacccagcggccctggccccctgagccctgagcagcccaccaagctgtag

SEQ ID NO: 253394 - DNA, 1464 bp, Artificial Sequence
  derived and/or modified sequence
atggcctggcaggtgagcctgctggagctggaggactggctgcagtgtccaatttgcttagaagttttcaaagaacctctgatgcttcaatgcggccattcatactgcaagggctgcctcgtttctctgagttgtcacctcgatgcagagctccgctgtcctgtgtgtcgccaggccgtggacgggtctagctcactcccaaatgtttcattggctagagtgatcgaagccttgcgactcccaggagaccccgagccgaaggtttgtgtccaccaccggaacccactgtctctgttctgcgaaaaggaccaggaactgatttgcggactttgtggattactcgggagccatcagcaccatcccgtgaccccggtgtcaactgtgtattcgcgtatgaaggaggagcttgccgcgctcatctctgagctaaagcaggagcagaagaaagtcgacgagctgattgcgaagctggtgaataacaggacccgaattgtcaacgagagcgatgtattctcttgggtgatacgacgggaattccaggagttgcaccatctcgtggatgaggagaaagcccggtgcttggaggggattggaggacacactcgtgggctggtggcaagcttggacatgcagctcgaacaggcgcagggaactcgcgagcgtctggcgcaggcggagtgcgtgctggaacagttcggcaacgaggaccaccacaagttcatcagaaagtttcatagcatggcctcccgcgcagagatgccgcaggccaggcctctcgaaggcgccttttcgcctatcagttttaagcccgggctgcatcaggcagacatcaaactcactgtttggaagaggctgttccggaaggtccttccagctcctgagccattaaaacttgacccagccaccgctcaccccctcttggaactgagcaagggaaacaccgttgtgcagtgcggtctcctggcccagagacgggccagccagcctgaaaggtttgattatagcacttgcgtcttagcctctcgcggcttctcttgtggccggcattattgggaagtagttgtggggtcaaaatctgattggaggctcggcgtaattaagggtactgcatccagaaaagggaagcttaaccggtctcccgagcacggcgtgtggctcatcggcctcaaggaaggcagagtctacgaggcatttgcctgtccacgcgttcctctccccgtggcaggccatccacatcgaatcggactctacttacactatgaacagggtgagcttactttcttcgacgccgatagaccagacgacctccgcccattatacacctttcaagcagacttccaggggaagttgtatcctatactcgacacatgttggcatgagagaggaagtaactcattgcctatggtcctcccacccccatccggtcccggacctttgtccccagagcagcctacgaagctgtag

SEQ ID NO: 253395 - DNA, 1464 bp, Artificial Sequence
  derived and/or modified sequence
atggcctggcaggtgagcctgctggagctggaggactggctgcagtgccctatctgcctggaggtcttcaaggagcccctgatgcttcagtgtggccattcttattgcaagggttgtctggttagcctttcttgtcacctggacgcagagctgcgctgccctgtctgtcggcaagctgtggacggatcgagcagtctgcccaatgtctcactggctcgggtgattgaagctctgcggcttcccggggatcctgagcctaaagtctgtgtccaccaccgcaacccactctctctgttctgtgagaaagatcaggagctgatttgcggactttgtggactattggggagccaccagcaccaccctgtgaccccggtctccaccgtctactcccggatgaaagaggaactcgccgctcttatctctgaacttaaacaagagcagaagaaagtcgacgaactgattgcaaaactcgtgaataaccgcactcgcatcgtgaacgagtctgacgtcttctcttgggtcatccgccgcgaatttcaggagctccaccatttggtcgacgaagagaaggcccggtgcttggaaggtattgggggccatacaaggggacttgtagccagcctagacatgcagctggagcaagcacaggggactcgtgagaggttggctcaggccgagtgtgttctggagcagttcggaaatgaggaccatcacaaattcataagaaagtttcacagcatggcctctcgggcagagatgccgcaggcccgcccattggaaggcgcatttagcccaatatcatttaagcccggcttgcatcaagcggacattaagctgacagtgtggaagagattattccgcaaggtccttccagcacctgagcctctcaagctggatccagcaaccgcgcaccctctactggagctgtccaagggaaataccgtggtccagtgtgggctcttagctcagaggcgcgcatcccagcccgagagattcgattatagcacttgtgtcttggcatcccgcggctttagctgtgggcggcactactgggaggtagttgtgggcagcaaatctgactggaggctgggcgtgattaaaggcactgcctcccggaaagggaagttgaacagaagtcccgaacacggggtctggctgattgggctgaaggaaggacgcgtttacgaggcatttgcttgccctcgggttcccctaccagtcgccgggcatccacatagaattggattatacctgcattacgagcagggagagttaacatttttcgacgccgatcggccggacgacctgcgccctctttacactttccaagccgacttccagggtaaactctatcctatcctggacacttgttggcatgagagaggtagtaatagccttcccatggtcctcccacccccaagtggccccggccccctgtcgccagaacagccgaccaaactttag

SEQ ID NO: 253396 - DNA, 1464 bp, Artificial Sequence
  derived and/or modified sequence
atggcatggcaagtatctctcctggagttggaggactggctgcaatgccctatttgcctcgaagtctttaaagagcccctgatgctgcaatgtggccacagctactgcaagggttgtctagtgtcgctgagttgccacttggacgccgagctacggtgcccagtctgtaggcaggcggtggacggatcatcatctctgccaaacgtgtcactggctagggttatcgaagcgctacgactcccaggggatcctgaacctaaggtatgcgttcatcatcgaaatccccttagcctgttctgtgagaaggatcaggaactgatttgcggcctgtgcgggctgctggggtcccatcagcatcacccagtgacacctgtaagtaccgtttattctagaatgaaggaggaactggcggcactcatcagtgagttaaagcaggaacaaaagaaggtggatgaattgatcgcgaagctggttaacaatcggaccagaatagtcaatgaatccgatgtgttcagctgggtgatccggagagaatttcaggaactgcatcatctggtcgatgaggagaaagctaggtgcctggagggtattggcggtcacacacggggactcgtggccagtctggacatgcagctggaacaggcccaaggtacccgggaacgcctcgcccaagccgagtgcgtattggagcagtttggcaatgaggaccatcacaagttcatcagaaagttccactctatggcctcccgggcagagatgccccaggcgagacctctggagggagcattttctccaattagcttcaagcccggtctgcaccaagccgacattaaactgacagtgtggaaacggctttttagaaaggtactaccggctcccgaaccactgaaactcgacccagctaccgcccaccctctcctcgagctctccaagggtaacacagtggttcagtgcggacttttggcacagcggagggcctcccaacctgaacgctttgattacagcacctgtgtgttggcttcaaggggctttagctgcgggcgacattactgggaagtggtggttggaagtaaaagcgattggcgactgggtgtgattaaaggtaccgctagtcgtaagggaaaactaaaccgctctcctgagcacggtgtctggttgatcggtctgaaagaaggcagagtgtatgaagcctttgcttgtcctagagtccccctaccagtcgctggtcaccctcatcgaatcggattatatctacactacgagcaaggagaactgacctttttcgatgctgacaggccggacgatttaaggcctctttatacctttcaagcggatttccagggtaaactctacccaattttggatacttgttggcacgaacgaggatctaactccctacccatggtgctaccgcctccgtcggggcctggaccattatcaccagagcagccgactaaactgtag

SEQ ID NO: 253397 - DNA, 1464 bp, Artificial Sequence
  derived and/or modified sequence
atggcatggcaggtgagcctgctcgagctggaagattggcttcagtgtcccatatgtctcgaggtgttcaaagagcctctgatgttgcagtgtggccatagctattgcaagggctgtcttgtgtctctcagctgccacctcgacgccgagctgagatgtccagtgtgtaggcaggccgtggacggtagtagctccctgccaaacgtttcccttgcccgtgtcatagaagccctacgcctacccggagacccggagcctaaggtgtgcgtccaccacagaaacccgctgtccttattttgtgagaaggaccaggaactaatctgcggactttgtggcttgctcggttcacaccagcaccaccctgtgacccctgtaagcacagtttactccaggatgaaggaggaattggccgcactcattagcgagctgaaacaggagcaaaagaaggtggacgagctcatcgcgaaactggtgaacaacaggacacgcattgttaatgagtccgatgttttttcctgggtcatccgtagggaatttcaggagctgcatcacttggtggatgaagaaaaggcacgctgcctcgaaggtatcggcggacacacccgtggtctggttgcttcgctcgatatgcagctagagcaggcacaaggcacgcgagagcgtctggcgcaggctgaatgcgttctggagcaattcggaaatgaggatcaccacaagttcatccgaaaatttcactcaatggccagccgtgccgagatgccccaggctcgacccctggaaggcgcattctcacccatttcatttaagccgggtcttcatcaagccgatatcaaactgactgtgtggaagaggctgttcagaaaggtgttgcccgctcccgagcctctcaagttggaccctgccacggcgcatcccctgctcgaattatccaaagggaacacggtggtgcagtgtggcctactcgcacagaggcgcgcttcccaacccgaacgctttgattatagcacttgtgtactggcctccagagggttttcttgcggccgacactattgggaagtcgtcgttggttcaaaatccgactggcgcctcggagtgattaaggggaccgctagccggaagggcaagctgaatcgtagtcccgagcacggcgtgtggctcattgggctgaaggaagggagggtgtatgaagcatttgcttgccccagagtccccctcccggtggcgggacaccctcataggataggtctctatctccattacgagcagggtgaattgaccttctttgacgccgatcggcctgacgatctgagacctttgtacacattccaagctgacttccagggaaaactctacccaatcctagacacatgttggcacgaacgcggtagcaacagtctccccatggtgcttcccccaccatccggaccaggaccgcttagcccagaacagccgacaaagctgtag

SEQ ID NO: 253398 - DNA, 2047 bp, Artificial Sequence
  derived and/or modified sequence
agagcatgatggggcacgcgcggtagcgcgaggcggggcatgtaaccatagcgtgcgggtcatgatgaggcacggacgtggggggttaggtggggcacgtaattggagctcgcggggcaggatggggcatctaactggagcgacagagagcacgatggggcacttacaggggccggaggctggcccgggcagtgagtgtggatggcttggcaggtgagcctgctggagctggaggactggcttcagtgtcccatctgcctggaggtcttcaaggagcccctgatgctgcagtgtggccactcttactgcaagggctgcctggtttccctgtcctgccacctggatgccgagctgcgctgccccgtgtgccggcaggcggtggacggcagcagctccctgcccaacgtctccctggccagggtgatcgaagccctgaggctccctggggacccggagcccaaggtctgcgtgcaccaccggaacccgctcagccttttctgcgagaaggaccaggagctcatctgtggcctctgcggtctgctgggctcccaccaacaccacccggtcacgcccgtctccaccgtctacagccgcatgaaggaggagctcgcagccctcatctctgagctgaagcaggagcagaaaaaggtggatgagctcatcgccaaactggtgaacaaccggacccgaatcgtcaatgagtcggatgtcttcagctgggtgatccgccgcgagttccaggagctgcaccacctggtggatgaggagaaggcccgctgcctggaggggatagggggtcacacccgtggcctggtggcctccctggacatgcagctggagcaggcccagggaacccgggagcggctggcccaagccgagtgtgtgctggaacagttcggcaatgaggaccaccacaagttcatccggaagttccactccatggcctccagagcagagatgccgcaggcccggcccttagaaggcgcattcagccccatctccttcaagccaggcctccaccaggctgacatcaagctgaccgtgtggaaaaggctcttccggaaagttttgccagccccggagcctctcaagttggaccctgccactgcccacccactcctggagctctccaagggcaacacggtggtgcagtgcgggcttctggcccagcggcgagccagccagcctgagcgcttcgactacagcacctgcgtcctggccagccgcggcttctcctgcggccgccactactgggaggtggtggtgggcagcaagagcgactggcgcctgggggtcatcaagggcacagccagccgtaagggcaagctgaacaggtcccccgagcacggcgtgtggctgatcggcctgaaggagggccgggtgtacgaagcctttgcctgcccccgggtacccctgcccgtggccggccacccccaccgcatcgggctctacctgcactatgagcagggcgaactcaccttcttcgatgccgaccgccccgatgacctgcggccgctctacaccttccaggccgacttccagggcaagctctaccccatcctggacacctgctggcacgagaggggcagcaactcgctgcccatggtgctgcccccgcccagcgggcctggccccctcagccccgagcagcccaccaagctgtagggccgcccggagtcctgccggcccacaggcccatcccggcggggcaccggggactcgcgggcttctgctgggtcccgcctgaggtgatatcgtcactgtttaggaaggtcttcaggcctgtgtgtccctggaacatgtaatgatagggaacaggaccccagtccctttcccctcagccaagggtgtatttgtaaacttcggcccccaggccttggcagccagggacacactgaaatccccatggttcctgccacttgctaaccatgctatctgcgcagacgcttccgagggcagaaatagtcccatgtataccttttccatattactgtgaactttcaactactatcaaggataataaatttgacattatttctttctcttt

SEQ ID NO: 253399 - DNA, 1599 bp, Artificial Sequence
  derived and/or modified sequence
tttcccacttctgactctgtgcctgctgttccctgctgggaagaaggaaagccagtgatgctggcttgaggctgtagtgggaggcccagcggattgtgagaagccagcccgggcagtgagtgtggatggcttggcaggtgagcctgctggagctggaggactggcttcagtgtcccatctgcctggaggtcttcaaggagcccctgatgctgcagtgtggccactcttactgcaagggctgcctggtttccctgtcctgccacctggatgccgagctgcgctgccccgtgtgccggcaggcggtggacggcagcagctccctgcccaacgtctccctggccagggtgatcgaagccctgaggctccctggggacccggagcccaaggtctgcgtgcaccaccggaacccgctcagccttttctgcgagaaggaccaggagctcatctgtggcctctgcggtctgctgggctcccaccaacaccacccggtcacgcccgtctccaccgtctacagccgcatgaaggaggagctcgcagccctcatctctgagctgaagcaggagcagaaaaaggtggatgagctcatcgccaaactggtgaacaaccggacccgaatcgtcaatgagtcggatgtcttcagctgggtgatccgccgcgagttccaggagctgcaccacctggtggatgaggagaaggcccgctgcctggaggggatagggggtcacacccgtggcctggtggcctccctggacatgcagctggagcaggcccagggaacccgggagcggctggcccaagccgagtgtgtgctggaacagttcggcaatgaggaccaccacaagttcatccggaagttccactccatggcctccagagcagagatgccgcaggcccggcccttagaaggcgcattcagccccatctccttcaagccaggcctccaccaggctgacatcaagctgaccgtgtggaaaaggctcttccggaaagttttgccagccccggagcctctcaagttggaccctgccactgcccacccactcctggagctctccaagggcaacacggtggtgcagtgcgggcttctggcccagcggcgagccagccagcctgagcgcttcgactacagcacctgcgtcctggccagccgcggcttctcctgcggccgccactactgggaggtggtggtgggcagcaagagcgactggcgcctgggggtcatcaagggcacagccagccgtaagggcaagctgaacaggtcccccgagcacggcgtgtggctgatcggcctgaaggagggccgggtgtacgaagcctttgcctgcccccgggtacccctgcccgtggccggccacccccaccgcatcgggctctacctgcactatgagcagggcgaactcaccttcttcgatgccgaccgccccgatgacctgcggccgctctacaccttccaggccgacttccagggcaagctctaccccatcctggacacctgctggcacgagaggggcagcaactcgctgcccatggtgctgcccccgcccagcgggcctggccccctcagccccgagcagcccaccaagctgtagggccgcccgg

SEQ ID NO: 253400 - protein, 263 aa, Artificial Sequence
  derived and/or modified sequence
MLSSKGLTVVDVYQGWCGPCKPVVSLFQKMRIEVGLDLLHFALAEADRLDVLEKYRGKCEPTFLFYAIKDEALSDEDECVSHGKNNGEDEDMVSSERTCTLAIIKPDAVAHGKTDEIIMKIQEAGFEILTNEERTMTEAEVRLFYQHKAGEEAFEKLVHHMCSGPSHLLILTRTEGFEDVVTTWRTVMGPRDPNVARREQPESLRAQYGTEMPFNAVHGSRDREDADRELALLFPSLKFSDKDTEAPQGESSTQPRLKITDLD

SEQ ID NO: 253401 - DNA, 792 bp, Artificial Sequence
  derived and/or modified sequence
atgttgtcctccaagggacttaccgtagtagacgtctaccagggatggtgcggcccatgtaaacctgtcgtttccctttttcagaagatgcgaattgaagttggcctcgacttattgcacttcgccttggcagaggctgatcggctggatgtcctggagaagtaccgggggaaatgcgagcctacatttctgttttatgcgatcaaggatgaagcgcttagcgatgaggatgagtgcgtcagccatggtaagaataatggcgaggacgaggacatggtcagtagtgaaagaacatgcacactggcaattataaaaccagacgctgtcgcccatgggaagactgatgagattatcatgaagatccaggaggctggcttcgagatactgaccaacgaagagcgaaccatgaccgaagctgaagtccgcctgttttatcagcataaggccggggaggaagcttttgaaaaactcgttcaccacatgtgctccgggcccagccacctattgattctgacaaggaccgagggctttgaggatgttgtcacgacttggcgaactgtgatgggccctcgggacccgaacgtagcccgacgcgaacagcctgaatccctccgggcacagtatggaactgagatgccattcaacgctgtacacggatctcgagatagagaggatgcagaccgggaactcgccttactgttcccctctctgaaattttccgataaagataccgaggcaccacaaggcgaatcgtcgactcagcctaggctcaagattaccgacttagattag

SEQ ID NO: 253402 - DNA, 792 bp, Artificial Sequence
  derived and/or modified sequence
atgctctcctctaaaggcctcaccgtcgttgatgtctaccaaggatggtgtgggccttgtaagccagtggtgagtttatttcaaaagatgagaattgaggtgggtttggatcttttgcatttcgcactggccgaggctgatagactggatgtcctcgagaaatatcggggaaagtgtgaacccactttccttttctatgccattaaggacgaggccctgagtgatgaagatgaatgcgtctctcacggcaagaataacggggaggatgaagatatggtgagcagtgagaggacatgcacgctggcaattattaaacctgatgcggttgcacacggaaaaactgacgagattatcatgaaaattcaggaagccgggttcgaaatattaactaacgaggaaagaacgatgacagaggcagaggtgcgcctcttttaccagcacaaagctggggaggaggccttcgagaagttagtgcaccacatgtgctccggaccatcccatcttctgattttgacccggacggagggattcgaagatgtggtaactacctggcgtaccgtgatgggtccaagagatcctaacgtagccagacgggagcagccagagtctttgcgcgcccagtatggcactgaaatgcccttcaatgctgtgcacggctcacgagatcgagaggatgctgaccgcgagttagctctgttgttccctagtctgaaattttcagataaggacacagaagcaccacaaggcgagagttctactcagccaagactcaaaatcacggatctggattag

SEQ ID NO: 253403 - DNA, 792 bp, Artificial Sequence
  derived and/or modified sequence
atgctcagctctaagggattaacagtggtggatgtctatcagggatggtgtggcccgtgcaaaccggtcgtgtcactctttcaaaaaatgcgaatcgaggtgggcctggacctactccacttcgctctagcagaggcagacagactcgacgtgctcgagaaatacagaggaaagtgcgaacccacattcctgttttacgccatcaaagacgaagcgctcagtgacgaagatgaatgcgtctcccacggaaagaataatggcgaggacgaggacatggtgtcttccgagagaacatgtacacttgccattattaagccagatgctgtcgcacacgggaagacagatgaaatcattatgaagattcaggaggccgggtttgaaattctgaccaacgaagagaggactatgacagaagccgaggtgaggcttttctaccagcacaaggccggtgaagaagctttcgagaaactcgtccaccatatgtgctccggcccaagccatctgctgatattaacgcggacggagggcttcgaggacgtggtgaccacctggaggaccgtgatggggcctagggaccccaacgttgcacgaagagaacagcccgagtctctgcgggcccaatacggcaccgagatgcccttcaatgccgtccacggaagtcgggacagagaggacgccgacagagaactagcactcctgtttccctcacttaaatttagtgacaaagacacagaggcgcctcagggcgaatctagcacacaaccccggctgaagatcaccgacctggactag

SEQ ID NO: 253404 - DNA, 792 bp, Artificial Sequence
  derived and/or modified sequence
atgctgagcagcaagggcctgactgtggtggatgtgtaccagggctggtgtggcccctgcaagcctgtggtgtccctcttccagaagatgagaattgaggtgggcctggacctgctgcactttgccctggccgaggccgaccggctggatgtgctggagaagtaccggggcaaatgtgagcccaccttcctgttctacgccatcaaggatgaggccctgagtgatgaagatgaatgtgtgagccacggcaagaacaacggggaggatgaggacatggtgtcctctgagaggacctgcaccctggccatcatcaagccagatgctgtggcccacggcaagacagatgagatcatcatgaagatccaggaggccggctttgagatcctgaccaatgaggagaggaccatgacagaagctgaggtgcggctcttctaccagcacaaggccggggaggaggcctttgagaagctggtgcaccacatgtgcagcggccccagccacctgctgatcctgaccaggacagagggctttgaagatgtggtgaccacctggaggacagtgatgggcccccgggaccccaacgtggcccggcgggagcagcctgagagcctgcgggcccagtatggaacagagatgcccttcaatgctgtgcacggcagccgggaccgggaggatgctgaccgggagctggccctgctcttccccagcctgaagttcagtgacaaggacacagaggccccccagggcgagagcagcacccagccccggctgaagatcacagacctggactag

SEQ ID NO: 253405 - DNA, 2133 bp, Artificial Sequence
  derived and/or modified sequence
ggctttcctggcaggcctggcgggggggccaggttgccatgacgaccgcggctaggtcgcggcagactcgagccatgggcagcaggaagaaggaaattgccctgcaggctggaatgcagcggcatgatctcatctcagtgcaacctccacctctcacgttcaagcagttctcatgtctcagcctcccgagtagctggtaaaacaggtcaacatcagcacccaagagctttgggaggaaatgctcagttccaaaggactaactgttgttgatgtctatcaaggctggtgtggcccctgcaaacctgtggtgagcctcttccagaagatgaggatcgaggtcggcctggaccttctgcactttgcattagcagaggcagatcgtcttgatgtcctcgaaaagtacagagggaagtgcgagccaacctttctgttttatgcaattaaagatgaggctctttctgatgaagatgaatgtgtttcccatggaaagaataatggtgaagatgaggacatggtttcatcagagaggacctgtaccttggccatcattaaaccagatgcagtggcccatggaaagactgatgagattatcatgaagattcaggaagctgggtttgaaattctaacaaatgaagagagaaccatgacagaggcagaagtgcgacttttctaccaacacaaagctggagaggaggcatttgagaagctggtacatcacatgtgcagtggaccaagccacctcctgatcctcaccaggactgagggcttcgaggacgtggtcactacctggcgaaccgtcatgggcccccgtgaccccaatgtggccaggagggagcagccagaaagtctccgagctcagtacggcacagaaatgcccttcaatgccgtccatggaagccgggacagagaagatgctgacagagaactggcattgctcttccccagtttgaaattttcagacaaagatacagaagcccctcagggtgagtccagtacacagccaaggttgaagatcactgacctagactaaaatgagaggattcagaagtctgaccttagaacatgagagagtggaaaacctcaggatgtttcagccaaacaagaagagaagaaaatattgttgaaattaacaatgatcagggaaaatatcatctattaagaacagggaaccacattttagctgtagattaggaatggtaatttttatctggtgttttagtttccaaaacatttacatattgatctactcctcgccctagaccaaacctaattccattcttactgatatgcacaatcactctctgtcctcattgtcacctctagcccctaaattcctccctttctcagtctacctactctttgtgactccctcatatcttttccccctggcatggatgtcctgctcagacactccacttagaagacagtttccctttttcactgtcctcccaccattcattactcctcctccagataccaactgctgatgttgctctagaaaaaccaccaaacatgactgttctttccgtgtaagctatcccacctcagcggcaccctcactgctggtgaccagccttgtaaccccctggagatgcccatgttccttatggtagctacctcttacttcaaattcttctgcctccctcatgctcgcagccactctgtgcccacctcatcttcgtagggaccttgattttggggacacacattgcaacttcccacttctgacgaaaggtctccatgcttttgctgttttctttactcttgtcaaggttgggtacttcaagctcaaagcctatctaccttgatccaaaaactacctttccataatgttctcacatctttactctgtcctacctctcattttcaatcctgtttaaaagacgtttaagtgtccaaactttaacctcttgaagctagtcctctccccactttccatctttaaatgggcatatatacaataaaggctctgtccatctccatctcttatatataacaatactgtgacttaaaaaccaactcagtattggaaattttctaaagttctgtcctagagttctttcctgacctctagctccatacttctgattgcctaataaatatgacatggatgttcagtggaacttcccatct

SEQ ID NO: 253406 - DNA, 792 bp, Artificial Sequence
  derived and/or modified sequence
atgctgagcagcaagggcctgaccgtggtggacgtgtaccagggctggtgcggaccctgtaagcccgtagtgtctttgttccaaaagatgcgaatagaggtgggactggatttgctgcactttgctttggccgaggcggatcggttggacgtattggagaaatacaggggcaagtgtgaaccaaccttcctgttttacgcaatcaaagatgaagccctgtccgatgaagatgaatgcgtgtcacatggaaagaacaatggcgaagacgaagatatggtctcctctgagcggacttgtaccttagcaatcattaaaccggatgcggtagcacacgggaaaactgacgagattatcatgaagattcaggaagctggctttgagatcctgactaacgaggaacggacgatgaccgaagccgaggttcgtctgttttatcagcacaaagcaggcgaagaggcgttcgagaagttggttcatcacatgtgctctgggccctcacacctacttatcctgacacgtacggaaggctttgaggacgtggtgactacctggaggacggtaatgggtccccgcgacccaaacgtggctaggagagagcaacctgaaagccttagagcgcagtacgggaccgaaatgccttttaatgccgttcatggatcaagagaccgggaggacgccgaccgggaacttgctctgctgtttcctagtctgaagtttagtgacaaagataccgaggcaccccagggggaatcttcgactcagccacgcttaaagattaccgacctggattag

SEQ ID NO: 253407 - DNA, 792 bp, Artificial Sequence
  derived and/or modified sequence
atgctgagcagcaagggcctgaccgtggtggacgtgtaccagggctggtgtggtccttgtaaaccggtggtgtcactgtttcagaagatgcggattgaggtggggctggacttattgcactttgccttggctgaggctgatcgactcgacgtcctggaaaagtatcgcggcaagtgtgagcccaccttccttttttacgcaattaaggatgaagcactcagtgacgaggatgaatgtgtgtctcatggcaagaacaacggagaggatgaggacatggtctcttcagagcgtacttgcactctagctattatcaaacccgacgccgtggcacacggcaagacagacgagatcattatgaagatccaggaggctggttttgagatcctgaccaacgaggagagaaccatgacagaagccgaagtccgactgttctatcagcataaagccggcgaggaagcttttgaaaagctggtgcaccacatgtgttccggccccagtcatctgcttatattaactcggaccgaggggttcgaggacgtggtaacaacctggagaacagttatgggtcctagagaccctaacgtggcccgacgagagcagccagagtctttaagagcccaatacgggaccgagatgccgtttaacgcggtgcacgggtcgcgagatcgcgaagatgctgaccgggagctcgcgctactatttccgagtctgaaattctccgacaaagatactgaggcaccccagggcgaatcatctactcaaccaagactgaaaatcaccgatctggactag

SEQ ID NO: 253408 - DNA, 792 bp, Artificial Sequence
  derived and/or modified sequence
atgctgagcagcaagggcctgaccgtggtggacgtgtaccagggctggtgcggcccatgtaagcccgtcgtttcattatttcagaagatgcgcatcgaagttggactagatcttctacatttcgccctggccgaggccgatagattggatgtccttgagaaataccggggtaaatgcgagccgacgttcttgttctacgcgatcaaggacgaagctctgtcagacgaagacgaatgcgtatcccacggcaagaacaacggtgaggatgaagacatggtctcaagcgaacgcacatgtactttggccattatcaaacccgacgcagtggctcatggtaagaccgatgagatcattatgaagatccaggaggccggttttgagattctgaccaacgaggaacggaccatgacggaggctgaagtgcggcttttctaccagcacaaagcaggtgaagaagcttttgagaaactggtacatcatatgtgttcaggcccaagccatctgctgatccttactcgcaccgaaggatttgaggacgtcgtgactacttggcggacagtgatgggccctagagacccaaacgtggccagaagggagcaacctgagtcacttcgggcacagtatggcacggagatgccctttaacgcagtgcacggatctcgtgatagagaggatgccgacagagaactggctttgctcttcccgagcctgaagttctccgacaaggataccgaggcacctcagggcgagagctctacacagcccagactgaaaatcaccgatctggattag

SEQ ID NO: 253409 - DNA, 792 bp, Artificial Sequence
  derived and/or modified sequence
atgctgagctcaaagggtttgacagtagtggacgtatatcaaggctggtgcggtccttgtaaacctgtagtctcacttttccagaagatgcgcatcgaagtgggcctggatctgctgcatttcgccctggcagaggccgatcgcctggacgtgctcgagaagtatcggggtaaatgtgaaccaacgttcctattttatgccattaaggatgaggcgctgagcgacgaggatgaatgcgtctcacacgggaagaacaacggtgaggacgaagatatggtcagctctgaacgcacttgtaccctggcaatcattaaacctgacgctgtggcccatggcaaaactgacgagattataatgaagatacaggaggcgggattcgaaatactgactaacgaagaaagaactatgacagaagcagaagtgaggctcttctatcagcataaagccggtgaggaggctttcgagaagcttgttcaccacatgtgttccggcccatcccacttgctgattctgaccaggaccgagggatttgaagacgtagtgacgacttggcgcaccgtaatgggcccacgcgatccaaacgtggccagacgagaacagcctgaaagtctccgcgctcagtatggcaccgaaatgccattcaatgccgtgcacggatcccgcgacagagaggacgccgaccgggaattggcgctgctattcccgtctctcaagtttagcgataaagatactgaggcccctcaaggagagtcctcgactcagccacgattgaaaattactgacctcgattag

SEQ ID NO: 253410 - DNA, 792 bp, Artificial Sequence
  derived and/or modified sequence
atgctgagctctaaaggcctgaccgtggtggacgtataccaaggctggtgcggtccttgtaagcccgtggtttccctttttcagaaaatgagaattgaagtgggtttagatctgctgcatttcgcacttgcagaggcagatcggctggatgtgctcgaaaagtatagaggtaaatgtgagccaaccttcttgttctacgctatcaaagacgaggcactgtctgacgaagatgagtgcgtctcgcacgggaagaacaatggcgaggatgaggatatggtcagttccgagcggacctgtaccctggcaatcattaagccagatgctgttgcccatgggaaaacagatgaaataatcatgaaaatccaggaggctggatttgagattctgacaaacgaggaaagaacaatgaccgaagccgaggtgcgtcttttctaccaacacaaggccggtgaagaagcctttgagaagcttgttcaccacatgtgtagcggaccatcgcaccttcttattctcacccgcaccgaagggttcgaggatgtcgtgaccacgtggcggacggtgatgggcccaagagatccaaacgtcgctcgaagggagcaacctgagtctctccgggctcagtatgggacagaaatgccttttaatgccgtgcacggttctagagatcgtgaggacgccgatagggaactcgccttgctatttccttcgctcaagtttagcgacaaggacaccgaagcccctcaaggcgagagtagcacacaaccacgactgaaaattaccgatttggattag

SEQ ID NO: 253411 - DNA, 792 bp, Artificial Sequence
  derived and/or modified sequence
atgttatcctctaagggtctcacagtcgtggatgtgtaccaagggtggtgcggcccatgcaaaccagtcgtatctttgtttcaaaaaatgcgaatcgaagtgggtctggacttattacactttgctttggccgaggctgaccggttggacgtgttggagaagtatagagggaagtgtgagccgaccttcttgttttacgccattaaggatgaggccctgtcagacgaggacgagtgcgtgtcccacggcaagaataacggagaggacgaggacatggtgagcagtgagaggacatgtactcttgcaataatcaagcccgacgctgtcgcccacggaaaaacggacgaaattatcatgaaaatacaggaagccggattcgagattttgactaatgaggagcggactatgacagaggcagaggtgcgacttttttatcagcataaagccggtgaggaagccttcgaaaagttggtgcatcacatgtgctctggtccttcgcaccttttgatcctaacgagaactgaggggttcgaggatgtggtcaccacctggcgcacagtgatgggccctcgagatcctaatgtcgcaagacgcgagcagccagagagcctgcgtgctcagtatggcaccgaaatgccttttaatgcagtacatgggtcgagagatagggaagacgccgacagagagctggcattactctttccctcgctgaagttcagcgacaaggataccgaggcccctcagggagagagttctacacagccgagactgaaaattaccgacctcgactag

SEQ ID NO: 253412 - DNA, 1930 bp, Artificial Sequence
  derived and/or modified sequence
aggtcaacatcagcacccaagagctttgggaggaaatgctcagttccaaaggactaactgttgttgatgtctatcaaggctggtgtggcccctgcaaacctgtggtgagcctcttccagaagatgaggatcgaggtcggcctggaccttctgcactttgcattagcagaggcagatcgtcttgatgtcctcgaaaagtacagagggaagtgcgagccaacctttctgttttatgcaattaaagatgaggctctttctgatgaagatgaatgtgtttcccatggaaagaataatggtgaagatgaggacatggtttcatcagagaggacctgtaccttggccatcattaaaccagatgcagtggcccatggaaagactgatgagattatcatgaagattcaggaagctgggtttgaaattctaacaaatgaagagagaaccatgacagaggcagaagtgcgacttttctaccaacacaaagctggagaggaggcatttgagaagctggtacatcacatgtgcagtggaccaagccacctcctgatcctcaccaggactgagggcttcgaggacgtggtcactacctggcgaaccgtcatgggcccccgtgaccccaatgtggccaggagggagcagccagaaagtctccgagctcagtacggcacagaaatgcccttcaatgccgtccatggaagccgggacagagaagatgctgacagagaactggcattgctcttccccagtttgaaattttcagacaaagatacagaagcccctcagggtgagtccagtacacagccaaggttgaagatcactgacctagactaaaatgagaggattcagaagtctgaccttagaacatgagagagtggaaaacctcaggatgtttcagccaaacaagaagagaagaaaatattgttgaaattaacaatgatcagggaaaatatcatctattaagaacagggaaccacattttagctgtagattaggaatggtaatttttatctggtgttttagtttccaaaacatttacatattgatctactcctcgccctagaccaaacctaattccattcttactgatatgcacaatcactctctgtcctcattgtcacctctagcccctaaattcctccctttctcagtctacctactctttgtgactccctcatatcttttccccctggcatggatgtcctgctcagacactccacttagaagacagtttccctttttcactgtcctcccaccattcattactcctcctccagataccaactgctgatgttgctctagaaaaaccaccaaacatgactgttctttccgtgtaagctatcccacctcagcggcaccctcactgctggtgaccagccttgtaaccccctggagatgcccatgttccttatggtagctacctcttacttcaaattcttctgcctccctcatgctcgcagccactctgtgcccacctcatcttcgtagggaccttgattttggggacacacattgcaacttcccacttctgacgaaaggtctccatgcttttgctgttttctttactcttgtcaaggttgggtacttcaagctcaaagcctatctaccttgatccaaaaactacctttccataatgttctcacatctttactctgtcctacctctcattttcaatcctgtttaaaagacgtttaagtgtccaaactttaacctcttgaagctagtcctctccccactttccatctttaaatgggcatatatacaataaaggctctgtccatctccatctcttatatataacaatactgtgacttaaaaaccaactcagtattggaaattttctaaagttctgtcctagagttctttcctgacctctagctccatacttctgattgcctaataaatatgacatggatgttcagtggaacttcccatct

SEQ ID NO: 253413 - DNA, 792 bp, Artificial Sequence
  derived and/or modified sequence
atgctgagcagcaagggcctgaccgtggtggacgtgtaccagggctggtgcggcccctgcaagcccgtggtgagcctgttccagaagatgagaatcgaggtgggcctggacctgctgcacttcgccctggccgaggccgacagactggacgtgctggagaagtacagaggcaagtgcgagcccaccttcctgttctacgccatcaaggacgaggccctgagcgacgaggacgagtgcgtgagccacggcaagaacaacggcgaggacgaggacatggtgagcagcgagagaacctgcaccctggccatcatcaagcccgacgccgtggcccacggcaagaccgacgagatcatcatgaagatccaggaggccggcttcgagatcctgaccaacgaggagagaaccatgaccgaggccgaggtgagactgttctaccagcacaaggccggcgaggaggccttcgagaagctggtgcaccacatgtgcagcggccccagccacctgctgatcctgaccagaaccgagggcttcgaggacgtggtgaccacctggagaaccgtgatgggccccagagaccccaacgtggccagaagagagcagcccgagagcctgagagcccagtacggcaccgagatgcccttcaacgccgtgcacggcagcagagacagagaggacgccgacagagagctggccctgctgttccccagcctgaagttcagcgacaaggacaccgaggccccccagggcgagagcagcacccagcccagactgaagatcaccgacctggactag

SEQ ID NO: 253414 - protein, 300 aa, Artificial Sequence
  derived and/or modified sequence
MNIILEILLLLITIIYSYLESLVKFFIPQRRKSVAGEIVLITGAGHGIGRQTTYEFAKRQSILVLWDINKRGVEETAAECRKLGVTAHAYVVDCSNREEIYRSLNQVKKEVGDVTIVVNNAGTVYPADLLSTKDEEITKTFEVNILGHFWITKALLPSMMERNHGHIVTVASVCGHEGIPYLIPYCSSKFAAVGFHRGLTSELQALGKTGIKTSCLCPVFVNTGFTKNPSTRLWPVLETDEVVRSLIDGILTNKKMIFVPSYINIFLRLQKFLPERASAILNRMQNIQFEAVVGHKIKMK

SEQ ID NO: 253415 - DNA, 903 bp, Artificial Sequence
  derived and/or modified sequence
atgaacatcattttggaaattcttctcctgttaatcactataatctacagttatctggaatccttggttaaattcttcatacctcagcgaagaaaatctgtcgcaggggagatcgtgctgataaccggggcaggccacggtattggccgtcaaaccacatatgagtttgccaagcgacagagtattcttgttctctgggacatcaataaacggggtgtggaagagactgccgctgagtgcaggaagctgggagttaccgctcatgcttatgtggttgactgcagtaatcgcgaagagatataccgcagtctcaaccaagtgaagaaggaggtgggcgacgttaccattgtggtcaacaacgccggaacagtgtaccctgcagaccttctgtctacaaaggacgaggaaatcacaaaaacatttgaagtgaacatactggggcacttctggattactaaggcactgctgccaagcatgatggagaggaatcatggccacattgttaccgtcgcaagcgtatgtggccacgaaggcattccttacctaataccttattgctcctccaaatttgccgcagtgggattccatcgtggcctcacttccgaactgcaggctctgggcaagaccggcatcaaaacatcctgcctgtgtcctgtgttcgtgaacactggctttaccaaaaatccctcaacacggctgtggcccgtactggagacggatgaagtggttcggtcactcattgacggaatactcacgaacaagaaaatgatctttgttccttcctacatcaacatttttttgagactccagaagtttctgccagagcgagccagcgccatcttaaatcgcatgcagaatatccagttcgaggcggtcgtgggacacaagattaagatgaagtag

SEQ ID NO: 253416 - DNA, 2397 bp, Artificial Sequence
  derived and/or modified sequence
agacagtacctcctccctaggactacacaaggactgaaccagaaggaagaggacagagcaaagccatgaacatcatcctagaaatccttctgcttctgatcaccatcatctactcctacttggagtcgttggtgaagtttttcattcctcagaggagaaaatctgtggctggggagattgttctcattactggagctgggcatggaataggcaggcagactacttatgaatttgcaaaacgacagagcatattggttctgtgggatattaataagcgcggtgtggaggaaactgcagctgagtgccgaaaactaggcgtcactgcgcatgcgtatgtggtagactgcagcaacagagaagagatctatcgctctctaaatcaggtgaagaaagaagtgggtgatgtaacaatcgtggtgaataatgctgggacagtatatccagccgatcttctcagcaccaaggatgaagagattaccaagacatttgaggtcaacatcctaggacatttttggatcacaaaagcacttcttccatcgatgatggagagaaatcatggccacatcgtcacagtggcttcagtgtgcggccacgaagggattccttacctcatcccatattgttccagcaaatttgccgctgttggctttcacagaggtctgacatcagaacttcaggccttgggaaaaactggtatcaaaacctcatgtctctgcccagtttttgtgaatactgggttcaccaaaaatccaagcacaagattatggcctgtattggagacagatgaagtcgtaagaagtctgatagatggaatacttaccaataagaaaatgatttttgttccatcgtatatcaatatctttctgagactacagaagtttcttcctgaacgcgcctcagcgattttaaatcgtatgcagaatattcaatttgaagcagtggttggccacaaaatcaaaatgaaatgaataaataagctccagccagagatgtatgcatgataatgatatgaatagtttcgaatcaatgctgcaaagctttatttcacattttttcagtcctgataatattaaaaacattggtttggcactagcagcagtcaaacgaacaagattaattacctgtcttcctgtttctcaagaatatttacgtagtttttcataggtctgtttttcctttcatgcctcttaaaaacttctgtgcttacataaacatacttaaaaggttttctttaagatattttatttttccatttaaaggtggacaaaagctacctccctaaaagtaaatacaaagagaacttatttacacagggaaggtttaagactgttcaagtagcattccaatctgtagccatgccacagaatatcaacaagaacacagaatgagtgcacagctaagagatcaagtttcagcaggcagctttatctcaacctggacatattttaagattcagcatttgaaagatttccctagcctcttcctttttcattagcccaaaacggtgcaactctattctggactttattacttgattctgtcttctgtataactctgaagtccaccaaaagtggaccctctatatttcctccctttttatagtcttataagatacattatgaaaggtgaccgactctattttaaatctcagaattttaagttctagccccatgataacctttttctttgtaatttatgctttcatatatccttggtcccagagatgtttagacaattttaggctcaaaaattaaagctaacacaggaaaaggaactgtactggctattacataagaaacaatggacccaagagaagaaaaggaagaaagaaaggttttttggtttttgttttgttttgttttgttttttgtttttttgagatggagtctcactctttcgcccaggctggagtgcagtggtatgatctcagctcactgcaagctccacctcccgggttcacgccattctcctgcctcagcctcctgagtagctgggactacaggcgcccgccaccacacccggctaattttttgtattttttgtagagacggggtttcaccatgttagccaagatggtctcgatctcctgacctcgtgatccacctgcctcggcctcccaaagtgctgggattacgggtgtgagccaccgtgcccagcctttttttttttaatagaaaaaataatccgactcccactacatcaagactaatcttgttttgtgtgtttttcacatgtattatagaatgcttttgcatggactatcctcttgtttttattaaaaacaaatgatttttttaaaagtcacaaaaacaattcactaaaaataaatatgtcattgtgctttaaaaaaataacctcttgtagttataaaataaaacgtttgacttctaaactctg

SEQ ID NO: 253417 - DNA, 903 bp, Artificial Sequence
  derived and/or modified sequence
atgaacatcatcctggagatcctgctgctgctgatcaccatcatctacagctacctggagagcctggtgaagttcttcatcccccagaggaggaagtctgtggccggggagatcgtgctgatcaccggggccggccacggcatcggccggcagaccacctatgaatttgccaagaggcagagcatcctggtgctgtgggacatcaacaagaggggcgtggaggagacagctgctgaatgtaggaagctgggcgtgacagcccacgcctacgtggtggactgcagcaaccgggaggagatctaccgcagcctgaaccaggtgaagaaggaggtgggagatgtgaccatcgtggtgaacaatgccggcaccgtgtacccagctgacctgctgagcaccaaggatgaggagatcaccaagacctttgaggtgaacatcctgggccacttctggatcaccaaggccctgctgcccagcatgatggagaggaaccacggccacatcgtgacagtggcctctgtgtgtggccacgagggcatcccctacctgatcccctactgcagcagcaagtttgctgctgtgggcttccaccggggcctgaccagcgagctgcaggccctgggcaagacaggcatcaagaccagctgcctgtgccctgtgtttgtgaacacaggcttcaccaagaaccccagcacccggctgtggcctgtgctggagacagatgaggtggtgcgcagcctgattgatggcatcctgaccaacaagaagatgatctttgtgcccagctacatcaacatcttcctgcggctgcagaagttcctgcctgagcgggccagcgccatcctgaacaggatgcagaacatccagtttgaagctgtggtgggccacaagatcaagatgaagtag

SEQ ID NO: 253418 - DNA, 903 bp, Artificial Sequence
  derived and/or modified sequence
atgaacatcatcctggagatcctgctgctgctgatcaccatcatctactcataccttgagagtttggtgaaatttttcatcccgcagagacgtaagagtgttgccggagaaatagtgctcattactggagcgggtcacggcatcgggaggcagaccacctatgaatttgcaaaaagacaatctatcctagtgctttgggatatcaataagaggggggtggaagagaccgcagccgaatgcaggaaactgggggtgacagcccatgcatatgttgttgactgctcaaacagggaggagatttaccgcagcctgaaccaggtgaaaaaagaggtgggggatgtaacgatcgtggttaataacgccggtacagtgtacccggccgacttgctgtccaccaaggatgaggagattaccaagacgtttgaagtcaatatcttgggtcatttttggatcacaaaggccctgttgccatcaatgatggaaaggaaccacggccacattgtaaccgttgctagcgtgtgcggtcacgaagggatcccttatctgattccttattgttctagtaaatttgccgctgtcgggtttcaccgaggcctcacttcagagctgcaggcacttggcaaaaccggcataaagacttcttgtctctgcccagtattcgtcaatacagggttcaccaaaaacccttcgacgcggttgtggcctgtcctggagaccgatgaggttgtgagatctctcatcgacgggattctgaccaacaaaaagatgatatttgtaccttcttatattaacatattcctgcgcctacaaaagttcttgccagagagagccagcgcaattctgaacaggatgcagaatattcaattcgaggctgttgtgggccacaagataaagatgaagtag

SEQ ID NO: 253419 - DNA, 903 bp, Artificial Sequence
  derived and/or modified sequence
atgaacattatcctagagatcttactgctgctgatcaccatcatctactcctatctagagagcttggtgaagttctttatcccgcagcggagaaaatctgtggctggcgaaatcgtcctcatcaccggggcaggccatggcattggtcgccagaccacatatgagtttgcaaaaaggcagagcatcctcgtgctgtgggatattaacaagaggggggtagaggagacggccgcagaatgcaggaaactcggagtgactgcccacgcctatgtggttgattgctctaacagggaggaaatatatcggtcgcttaatcaggtaaaaaaagaggtgggggatgttacaatagtggtaaacaatgctggcacagtgtatcctgcggaccttctgtcaactaaagatgaggaaataacaaagacctttgaggtgaacattctgggacatttctggataaccaaagctttgctcccatctatgatggagaggaaccacggacacatcgtgacagttgcttctgtgtgcggacacgagggaattccttacctgatcccgtattgctcatccaagttcgctgctgtggggtttcacaggggcctgacctccgaactacaagcactgggaaagacaggcataaagaccagctgcctctgtccagtattcgtgaacacggggtttacaaagaatcccagcaccagattgtggccagtgctggagaccgacgaagtggtgcggtccctgatagatggaatcttgactaataaaaagatgatcttcgttccatcttatatcaacattttcctgagactacaaaagtttctgccagaaagggccagtgcgattttgaaccggatgcagaacattcagtttgaggctgtggtggggcataagattaagatgaagtag

SEQ ID NO: 253420 - DNA, 903 bp, Artificial Sequence
  derived and/or modified sequence
atgaacatcatcctggagatcctgctgctgctgatcaccatcatctacagctacctggagagcctggtgaagttcttcatcccccagagaagaaagagcgtggccggcgagatcgtgctgatcaccggcgccggccacggcatcggcagacagaccacctacgagttcgccaagagacagagcatcctggtgctgtgggacatcaacaagagaggcgtggaggagaccgccgccgagtgcagaaagctgggcgtgaccgcccacgcctacgtggtggactgcagcaacagagaggagatctacagaagcctgaaccaggtgaagaaggaggtgggcgacgtgaccatcgtggtgaacaacgccggcaccgtgtaccccgccgacctgctgagcaccaaggacgaggagatcaccaagaccttcgaggtgaacatcctgggccacttctggatcaccaaggccctgctgcccagcatgatggagagaaaccacggccacatcgtgaccgtggccagcgtgtgcggccacgagggcatcccctacctgatcccctactgcagcagcaagttcgccgccgtgggcttccacagaggcctgaccagcgagctgcaggccctgggcaagaccggcatcaagaccagctgcctgtgccccgtgttcgtgaacaccggcttcaccaagaaccccagcaccagactgtggcccgtgctggagaccgacgaggtggtgagaagcctgatcgacggcatcctgaccaacaagaagatgatcttcgtgcccagctacatcaacatcttcctgagactgcagaagttcctgcccgagagagccagcgccatcctgaacagaatgcagaacatccagttcgaggccgtggtgggccacaagatcaagatgaagtag

SEQ ID NO: 253421 - protein, 392 aa, Artificial Sequence
  derived and/or modified sequence
MADISLDELIRKRGAAAKGRLNARPGVGGVRSRVGIQQGLLSQSTRTATFQQRFDARQKIGLSDARLKLGVKDAREKLLQKDARFRIKGKVQDAREMLNSRKQQTTVPQKPRQVADAREKISLKRSSPAAFINPPIGTVTPALKLTKTIQNLYDLDEDDDGIASVPTKQMKFAASGGFLHHMAGLSSSKLSMSKALPLTKVVQNDAYTAPALPSSIRTKALTNMSRTLVNKEEPPKELPAAEPVLSPLEGTKMTVNNLHPRVTEEDIVELFCVCGALKRARLVHPGVAEVVFVKKDDAITAYKKYNNRCLDGQPMKCNLHMNGNVITSDQPILLRLSDSPSMKKESELPRRVNSASSSNPPAEVDPDTILKALFKSSGASVTTQPTEFKIKL

SEQ ID NO: 253422 - protein, 229 aa, Artificial Sequence [sequence omitted]

SEQ ID NO: 253423 - DNA, 1179 bp, Artificial Sequence
  derived and/or modified sequence
atggcagacatcagcctggacgaattgatcaggaagaggggggccgcagcaaagggacgccttaatgctaggccaggagtgggcggggttagaagtcgcgtgggcatccagcaggggctgttaagccagtctacgcgtactgctaccttccagcagcgctttgacgctcgacagaaaatcggcctaagtgatgctcggctgaagcttggggttaaggatgcgcgcgaaaaacttttacagaaggacgcacgatttcgaattaaagggaaagtgcaagatgctcgggagatgctaaattctagaaagcaacagactacagtgcctcagaagccacgtcaggtcgccgacgcccgggagaagatttccctgaaacgttcttctcctgcagcgtttataaacccgcccatcggaaccgtcactcccgccctgaagctcaccaaaacaatccagaacctgtacgacctagatgaggacgacgacggaatcgcctctgtgcctaccaaacagatgaaattcgccgccagcggggggtttctccaccacatggcaggattgagcagttccaagctgtctatgtcaaaagccctaccattaaccaaggtggttcagaatgatgcctacactgccccggccctaccaagcagcatcagaacaaaggcgctcaccaatatgagccgtaccctcgtgaacaaagaggagccccccaaggaattgccggccgcagaaccagttctctcgcctctggagggtaccaagatgacggtgaacaatttacaccctcgcgtaaccgaagaggatatcgtagagcttttctgcgtgtgcggagcactaaaacgcgcccgcctggtccaccccggcgtggcggaagtggtgttcgttaagaaagacgatgccatcacagcttacaagaaatacaacaacagatgccttgatggtcagccaatgaagtgtaatttacatatgaacgggaacgtgatcacgagcgatcagccgatactgctgcggctgtcggacagtcctagtatgaaaaaagagagtgaactacctcgtagggttaactcagcgtcctcctccaacccacccgcagaggtcgaccctgatactatcctgaaggccctgtttaaaagctccggagccagcgtgaccacacagcctacagaatttaaaattaaattatag

SEQ ID NO: 253424 - DNA, 690 bp, Artificial Sequence
  derived and/or modified sequence
atggctgacatctctctcgatgagttgatcaggaagcgaggcgccgccgccaagggtagactcaacgcaagaccgggggttggaggggtccgcagcagggttggcatccagcaggggttgctgagccagagtacacgaacagctaccttccaacagcgatttgacgctcggcagaagatcggcctgtctgacgcccggctcaaattaggggtgaaagatgcgagagagaaactgctgcagaaggacgcccgctttagaataaaagggaaggttcaggacgcacgggagatgcttaattcccggaagcagcaaaccacagttcctcaaaaaccaaggcaggttgccgacgctagagagaaaatctccttgaagcggtcttctcctgctgcattcatcaacccaccgatcggcacagtgacaccagctctgaagctcacgaaaacaatccagaacctgtatgatctggatgaagatgacgacggaatcgcctcagtccccactaagcagatgaagtttgcggcctctgggggattcctgcatcacatggcgggtctgtcatcgtcaaagttatctatgtccaaagcattgcctctgacgaaggtagtgcagaatgatgcttacacagcccctgcactcccctcaagtatcaggacaaaagccctgcccgtactgacttccccaggcacttag

SEQ ID NO: 253425 - DNA, 1179 bp, Artificial Sequence
  derived and/or modified sequence
atggctgacatcagcctggatgagctgatcaggaagagaggagctgctgccaagggccgcctgaatgcccggcctggggtgggcggcgtgcgcagccgggtgggcatccagcagggcctgctgagccagagcaccaggacagccaccttccagcagagatttgatgcccggcagaagattggcctgagtgatgcccggctgaagctgggcgtgaaggatgcccgggagaagctgctgcagaaggatgcccgcttccgcatcaagggcaaggtgcaggatgcccgggagatgctgaacagcaggaagcagcagaccaccgtgccccagaagccccggcaggtggctgatgcccgggagaagatcagcctgaagaggagcagccctgctgccttcatcaacccccccatcggcaccgtgaccccagccctgaagctgaccaagaccatccagaacctgtatgacctggatgaagatgatgatggcatcgcctctgtgcccaccaagcagatgaagtttgctgccagcggcggcttcctgcaccacatggccggcctgagcagcagcaagctgtccatgagcaaggccctgcccctgaccaaggtggtgcagaatgatgcctacacagccccagccctgcccagcagcatccgcaccaaggccctgaccaacatgagcaggaccctggtgaacaaggaggagccccccaaggagctgcctgctgctgagcctgtgctgagccccctggagggcaccaagatgacagtgaacaacctgcacccccgggtgacagaagaagatattgtggagctgttctgtgtgtgtggggccctgaagagggcccggctggtgcaccctggggtggccgaggtggtgtttgtgaagaaggatgatgccatcacagcctacaagaagtacaacaaccgctgcctggatggccagcccatgaagtgcaacctgcacatgaatggaaatgtcatcaccagtgaccagcccatcctgctgcggctgagtgacagccccagcatgaagaaggagagcgagctgccccggcgggtgaacagcgccagcagcagcaaccccccagctgaggtggaccctgacaccatcctgaaggccctcttcaagagcagcggggcctctgtgaccacccagcccacagagttcaagatcaagctgtag

SEQ ID NO: 253426 - DNA, 690 bp, Artificial Sequence
  derived and/or modified sequence
atggctgacatcagcctggatgagctgatcaggaagagaggagctgctgccaagggccgcctgaatgcccggcctggggtgggcggcgtgcgcagccgggtgggcatccagcagggcctgctgagccagagcaccaggacagccaccttccagcagagatttgatgcccggcagaagattggcctgagtgatgcccggctgaagctgggcgtgaaggatgcccgggagaagctgctgcagaaggatgcccgcttccgcatcaagggcaaggtgcaggatgcccgggagatgctgaacagcaggaagcagcagaccaccgtgccccagaagccccggcaggtggctgatgcccgggagaagatcagcctgaagaggagcagccctgctgccttcatcaacccccccatcggcaccgtgaccccagccctgaagctgaccaagaccatccagaacctgtatgacctggatgaagatgatgatggcatcgcctctgtgcccaccaagcagatgaagtttgctgccagcggcggcttcctgcaccacatggccggcctgagcagcagcaagctgtccatgagcaaggccctgcccctgaccaaggtggtgcagaatgatgcctacacagccccagccctgcccagcagcatccgcaccaaggccctgcctgtgctgaccagccctggcacctag

SEQ ID NO: 253427 - DNA, 1179 bp, Artificial Sequence
  derived and/or modified sequence
atggccgacatcagcctggacgagctgatccggaagcggggcgccgccgccaaagggcgcctgaacgcccggcctggagtgggcggagtgaggagccgggtcgggatccagcagggactcctgtcgcaaagcacccgtacagcaacttttcagcagcgattcgatgcacggcaaaagattggactgtcagatgccagactcaaacttggcgtgaaggacgccagggagaaattattacagaaagacgcccgatttaggataaaaggtaaggtgcaggatgcccgcgagatgctgaactctcgtaaacagcaaaccaccgttccgcagaaacctaggcaggtcgccgacgcaagagagaagatatctctgaagaggtccagcccagctgctttcattaaccctcctatcgggacagtgactccagccctcaagctgaccaagaccatccagaacctgtatgatctcgacgaagatgatgatggtattgctagcgtgccaactaaacagatgaagttcgccgctagcggtgggttcctgcatcatatggccggtctgtcctccagtaaactgtctatgtccaaggcgctcccgctaacgaaggtggtacaaaacgacgcctataccgcacctgccctgcccagttccatccgcaccaaggctcttaccaatatgagtaggactctggtgaataaggaggagccccccaaagagctccccgctgctgagcccgtactctccccgctcgaaggaacaaagatgaccgtcaataatctgcaccctagagtgactgaagaggatattgtcgaacttttttgcgtatgcggggccctcaaaagggcgcggctcgtccacccaggtgtcgccgaggttgtgtttgtgaaaaaagacgatgccattacggcatacaagaagtacaacaataggtgcctggatggacagcccatgaagtgcaatctgcacatgaatggcaatgttattactagcgatcagcctatcctactacgcttatctgacagcccatcaatgaaaaaagagagtgagctgccccggcgtgtgaacagcgccagcagctccaaccctcctgctgaggtggaccccgacacaatcctcaaggcactgtttaagagttctggggcttcagtgactacccagccgaccgaattcaaaataaagttgtag

SEQ ID NO: 253428 - DNA, 690 bp, Artificial Sequence
  derived and/or modified sequence
atggccgacatcagcctggacgagctgatccggaagcggggcgccgcggcgaaaggccgacttaacgcccgcccaggtgtcgggggggttcgctcccgcgtggggatccaacaaggcctgctttcacaaagcacgagaacagccacgttccagcagcgctttgacgcaagacagaagatcggcttgtctgacgctagacttaaactcggggtcaaagacgcaagagagaagctgcttcaaaaagatgcccgatttcgcattaaaggcaaggtacaggatgctcgggaaatgctgaacagccggaagcaacaaacaaccgtgccccagaagcccagacaggtcgctgacgcccgcgagaaaatcagtctaaaaaggtcatcccctgcggcctttattaatccgcccatcggaaccgttacacccgctctgaagctgaccaagacgattcagaacctgtacgaccttgatgaggatgacgacggaatcgcgtccgtgcccaccaaacagatgaaattcgcagcctcaggcggatttcttcatcacatggcaggtctgagttcttccaaactgtccatgagcaaggccctgcccttaacaaaagtagtccagaatgacgcatataccgccccagccctgccctctagcatcagaacaaaagcccttcctgttctgacctcaccaggcacctag

SEQ ID NO: 253429 - DNA, 3323 bp, Artificial Sequence
  derived and/or modified sequence
ttcgtcgctccctagcggccgaaggggcgggctcgcggggtctcgactgctttcggcttgctcggcggagcaagatggcggacatctccctggacgaactcatcaggaagcgcggggcggcggcgaaaggacggcttaatgccagaccgggagttggaggtgtccgatctcgagttgggatccagcaaggccttctcagccagtcaacacgcacagccaccttccagcagagatttgatgcccggcagaagattggcctctcagatgcccggctcaaactgggagtcaaggatgcccgggagaagcttttgcagaaagatgcccgatttcgaatcaaagggaaagtgcaggatgccagagagatgttgaactctcgcaagcagcagaccacggtgccccagaagccccgccaggttgctgatgcccgggagaagatcagcttgaagaggagttcccctgctgccttcataaacccacccattgggacagtgacccctgctctgaagctcaccaaaaccatccagaatttatatgacctggatgaagatgatgatggtatagcttccgttcctactaaacagatgaagtttgcagcctcaggcggctttctccaccacatggctgggctaagcagttccaagctttccatgtccaaggccctccctctcaccaaagtggttcagaatgatgcatacacagctcctgctctcccttcctctattcgaacaaaagccttgaccaacatgtcccggacactggtgaacaaggaagaaccccccaaagagctgccagctgctgagcctgttctcagcccattggaaggcaccaagatgactgtgaataatctgcaccctcgagtcactgaggaggacattgttgagcttttctgtgtgtgtggggccctcaagcgagctcgactggtccatcctggggtagcggaggtggtgtttgtgaaaaaggacgatgccatcaccgcatataagaagtacaacaaccggtgtctggacgggcagccgatgaagtgcaaccttcacatgaatgggaatgttatcacctcagaccagcccatcctgctgcggctgagtgacagcccatcaatgaaaaaggagagcgagctgcctcgcagggtgaactctgcctcctcctccaacccccctgccgaagtggaccctgacaccatcctgaaggcactcttcaagtcctcaggggcctctgtgaccacgcagcccacagaattcaaaatcaagctttgagcaggggagtgaggcagccagaagtgggggcagaggagggtggctctgtttccccaaggcaaagcttatgaccaatgggccatcggactggagacccctgattgtgggaagggttgccagggataaagagcttcctcactggatgggacccgcctttctgtgttgtgttctgccctgtgctcttctctctacgttaacgtttcctgtagtatgtttcttcatctcatcgccaaggtaggcttgtgtttttcagtgtgtgcctccccgagcctcagccccaagctgatttcttatctggaaatggtacactgaattctctgggtggctttcttgtggccccatgggatgcagcgtgggggctgtctgaaggaccctgctttttccaggggccgaggggctgcctttcctttgtgtgtattaagcttttcaaacaatggaggggatggagagccctggtgtcctgacgggagccaggtcggcctgagagctgtgccgctcctctgtcttgtcagtggaggtgcctgggtggggagcaggtctcaggcctcttgtcctctccccagtggctccaggcctcactagtggcaagggcaggatgaggctgcaccgctgggaagagtctatctaagctcttggcttggagtcccgtgtcgtctccacccagaggaagttctccagagttcacctttcccttttccttgagttgtgctgaatgccccaccccagctctctttcccttctgggtgtctttgctgggagggggctgtgttgtgagccctcccggttctcacctcgcctggcacttaaccacaccctggttttgtgtagccgccagctctcttctggttgggcctttgaaaggctcagcctcccattgtgcagtgcttgggtttggagcttatttgaatggaagaggtcagtttgttcctggctctccatttctggcctcagttgtctacaggacagtggtcagggatgcctggaggcatatatccagctgccaccaaggggcactgtttgttcccacttatgtgagtgaccccatccatccatgaccagaggattattttcctgccttggcagaggaggaggagtcaagggagcagggcagctctaccaggcaaggtgtttccccagcataggcgcagacagttgggacgaaacttcagagcccaggcagtccctgaatgaccaggccagtgttgtcactgagtggtcccctgctggttgggagtgaagagaatccaggctggcagagctggagccagttggggagcacggttctgggagctctgcaaaatcagtagcaagtgctggaaaaggcacatgccgaagatactcaagagctcccaagatttgcttgaggctagcccagtgaaaaaaaccagagactcatgtttccaggggtcagtctgtcaggcaggaaggacccaggatttgaacccagcttcagtgtgcaggctctgaggctgcccaggacgggaaagtccaaggaaggggcctggtggtgctccacttgcagttctttaaagaatgctgctttttattctcctaaccctttcaagtgggtgcagacttctcgttagcagctggaagacattcctcccacacttttcccttcctggcccaagagagcatccagaaggcagtaggacctggtttttcaggtactgggagccgggggctcactgcttgcactgtgcttagggtagggatggtaaatatcctccctgcatggctttatcctccctctcatcccaaagcaggtatcttctggttgtcacagagtttcattgagtccagctgcagccacgtggccatctggagctggtgctataggtgaccatctggtacattgaggggacctgtttgcctcctccactctataagcagtcatcttgggagaccgggaggagaaggtggtgggctagtcctgtgtcctcctccacttcccatgcctctatgttacccatctgtgtctcctgtgcagaaggagaggaaggggcattaagagatgaagggtgattatgtattacttatccatttctgaataaacatttgttattccta

SEQ ID NO: 253430 - DNA, 2006 bp, Artificial Sequence
  derived and/or modified sequence
gaaggggcgggctcgcggggtctcgactgctttcggcttgctcggcggagcaagatggcggacatctccctggacgaactcatcaggaagcgcggggcggcggcgaaaggacggcttaatgccagaccgggagttggaggtgtccgatctcgagttgggatccagcaaggccttctcagccagtcaacacgcacagccaccttccagcagagatttgatgcccggcagaagattggcctctcagatgcccggctcaaactgggagtcaaggatgcccgggagaagcttttgcagaaagatgcccgatttcgaatcaaagggaaagtgcaggatgccagagagatgttgaactctcgcaagcagcagaccacggtgccccagaagccccgccaggttgctgatgcccgggagaagatcagcttgaagaggagttcccctgctgccttcataaacccacccattgggacagtgacccctgctctgaagctcaccaaaaccatccagaatttatatgacctggatgaagatgatgatggtatagcttccgttcctactaaacagatgaagtttgcagcctcaggcggctttctccaccacatggctgggctaagcagttccaagctttccatgtccaaggccctccctctcaccaaagtggttcagaatgatgcatacacagctcctgctctcccttcctctattcgaacaaaagccctcccggttctcacctcgcctggcacttaaccacaccctggttttgtgtagccgccagctctcttctggttgggcctttgaaaggctcagcctcccattgtgcagtgcttgggtttggagcttatttgaatggaagaggtcagtttgttcctggctctccatttctggcctcagttgtctacaggacagtggtcagggatgcctggaggcatatatccagctgccaccaaggggcactgtttgttcccacttatgtgagtgaccccatccatccatgaccagaggattattttcctgccttggcagaggaggaggagtcaagggagcagggcagctctaccaggcaaggtgtttccccagcataggcgcagacagttgggacgaaacttcagagcccaggcagtccctgaatgaccaggccagtgttgtcactgagtggtcccctgctggttgggagtgaagagaatccaggctggcagagctggagccagttggggagcacggttctgggagctctgcaaaatcagtagcaagtgctggaaaaggcacatgccgaagatactcaagagctcccaagatttgcttgaggctagcccagtgaaaaaaaccagagactcatgtttccaggggtcagtctgtcaggcaggaaggacccaggatttgaacccagcttcagtgtgcaggctctgaggctgcccaggacgggaaagtccaaggaaggggcctggtggtgctccacttgcagttctttaaagaatgctgctttttattctcctaaccctttcaagtgggtgcagacttctcgttagcagctggaagacattcctcccacacttttcccttcctggcccaagagagcatccagaaggcagtaggacctggtttttcaggtactgggagccgggggctcactgcttgcactgtgcttagggtagggatggtaaatatcctccctgcatggctttatcctccctctcatcccaaagcaggtatcttctggttgtcacagagtttcattgagtccagctgcagccacgtggccatctggagctggtgctataggtgaccatctggtacattgaggggacctgtttgcctcctccactctataagcagtcatcttgggagaccgggaggagaaggtggtgggctagtcctgtgtcctcctccacttcccatgcctctatgttacccatctgtgtctcctgtgcagaaggagaggaaggggcattaagagatgaagggtgattatgtattacttatccatttctgaataaacatttgttattcct

SEQ ID NO: 253431 - DNA, 1340 bp, Artificial Sequence
  derived and/or modified sequence
gtctcgactgctttcggcttgctcggcggagcaagatggcggacatctccctggacgaactcatcaggaagcgcggggcggcggcgaaaggacggcttaatgccagaccgggagttggaggtgtccgatctcgagttgggatccagcaaggccttctcagccagtcaacacgcacagccaccttccagcagagatttgatgcccggcagaagattggcctctcagatgcccggctcaaactgggagtcaaggatgcccgggagaagcttttgcagaaagatgcccgatttcgaatcaaagggaaagtgcaggatgccagagagatgttgaactctcgcaagcagcagaccacggtgccccagaagccccgccaggttgctgatgcccgggagaagatcagcttgaagaggagttcccctgctgccttcataaacccacccattgggacagtgacccctgctctgaagctcaccaaaaccatccaggttccaagctttccatgtccaaggccctccctctcaccaaagtggttcagaatgatgcatacacagctcctgctctcccttcctctattcgaacaaaagccttgaccaacatgtcccggacactggtgaacaaggaagaaccccccaaagagctgccagctgctgagcctgttctcagcccattggaaggcaccaagatgactgtgaataatctgcaccctcgagtcactgaggaggacattgttgagcttttctgtgtgtgtggggccctcaagcgagctcgactggtccatcctggggtagcggaggtggtgtttgtgaaaaaggacgatgccatcaccgcatataagaagtacaacaaccggtgtctggacggcggctgagtgacagcccatcaatgaaaaaggagagcgagctgcctcgcagggtgaactctgcctcctcctccaacccccctgccgaagtggaccctgacaccatcctgaaggcactcttcaagtcctcaggggcctctgtgaccacgcagcccacagaattcaaaatcaagctttgagcaggggagtgaggcagccagaagtgggggcagaggagggtggctctgtttccccaaggcaaagcttatgaccaatgggccatcggactggagacccctgattgtgggaagggttgccagggataaagagcttcctcactggatgggacccgcctttctgtgttgtgttctgccctgtgctcttctctctacgttaacgtttcctgtagtatgtttcttcatctcatcgccaaggtaggcttgtgtttttcagtgtgtgcctccccgagcctcagccccaagctgatttcttatctggaaat

SEQ ID NO: 253432 - DNA, 1179 bp, Artificial Sequence
  derived and/or modified sequence
atggctgacatcagcctggacgagctcatcagaaaacgcggagctgctgctaaaggcagacttaacgcgaggccaggagtaggcggagtcaggagccgtgtgggcatccagcaagggctgcttagccaatccactcgcacggccacctttcagcaaagatttgatgcgaggcagaagattggactctctgacgcacgcttgaagctcggagttaaggatgcccgagaaaagctgctgcaaaaggacgcccgttttagaataaaaggcaaggtacaggacgctagggagatgctcaacagtaggaaacagcagacgaccgtgccacagaaaccacgccaggtcgctgacgctagagaaaaaatcagcctgaaaaggtctagcccagctgctttcatcaatccacctattggcactgtgactcccgcactgaagctcaccaagacaattcagaatctctatgatctcgacgaggatgatgacggaatcgctagtgttccaacaaagcaaatgaaatttgccgcatccggaggatttcttcaccacatggccggactgagttcttcaaaactgtcaatgtccaaagcacttccactgacaaaggtggttcagaacgatgcatatacagccccagcattgccgtcctccattcgcactaaggcgctaacaaatatgagccgtaccctggtgaacaaagaagaaccccctaaagagctgccggctgccgagcccgtgctgagcccactggagggcacaaaaatgaccgttaataatctacaccccagagtgacggaggaggacatcgtagagctattctgcgtgtgcggggctctgaaacgggcaagactggttcaccccggtgtggctgaggtagtctttgtgaagaaggatgacgctataacagcttacaaaaaatacaacaaccgatgtttggatggtcagcctatgaagtgcaacttgcacatgaacggaaacgtgattacctcggatcagccaatcttgctgcgattaagcgattctccatccatgaagaaggaaagcgagctcccaagacgggttaactctgcatccagcagtaaccctccagcggaggtcgatcctgataccattctcaaagctctcttcaagtcgtccggggcatctgtaactacacaaccaacagaatttaagattaaactgtag

SEQ ID NO: 253433 - DNA, 690 bp, Artificial Sequence
  derived and/or modified sequence
atggctgacatctctctcgacgaacttattaggaagcgcggagctgccgcaaaaggacgacttaatgcaagacctggggtgggcggagtgagaagcagggtcgggatccagcagggacttctgagtcagagcactcggacagcgactttccagcagcgctttgacgctcgccagaaaatcggcctgtcagatgctcgacttaaattaggcgtgaaggatgctcgagaaaaactgctgcagaaagatgcacgatttagaattaagggcaaggtccaggatgccagagagatgttaaattctaggaagcagcagactacagtcccacagaagcctcggcaggtcgcagatgccagggaaaaaatatccttgaagagatcaagccccgctgcattcataaaccccccaatcggaacagtgacaccagcccttaagttaactaagacgatccagaacctttacgatctggatgaagatgatgatgggatagctagcgtgcccacaaagcagatgaagttcgctgcctccggaggatttctccatcatatggctgggctgtcgagcagcaagttatcaatgagcaaggccttgcctcttacaaaggtagtccaaaatgacgcttacacagcccctgcactgcccagctcaattaggacaaaagccctgcccgtgcttacttcacccggtacttag

SEQ ID NO: 253434 - DNA, 1179 bp, Artificial Sequence
  derived and/or modified sequence
atggccgacatcagcctggacgagctgatcagaaagagaggcgccgccgccaagggcagactgaacgccagacccggcgtgggcggcgtgagaagcagagtgggcatccagcagggcctgctgagccagagcaccagaaccgccaccttccagcagagattcgacgccagacagaagatcggcctgagcgacgccagactgaagctgggcgtgaaggacgccagagagaagctgctgcagaaggacgccagattcagaatcaagggcaaggtgcaggacgccagagagatgctgaacagcagaaagcagcagaccaccgtgccccagaagcccagacaggtggccgacgccagagagaagatcagcctgaagagaagcagccccgccgccttcatcaacccccccatcggcaccgtgacccccgccctgaagctgaccaagaccatccagaacctgtacgacctggacgaggacgacgacggcatcgccagcgtgcccaccaagcagatgaagttcgccgccagcggcggcttcctgcaccacatggccggcctgagcagcagcaagctgagcatgagcaaggccctgcccctgaccaaggtggtgcagaacgacgcctacaccgcccccgccctgcccagcagcatcagaaccaaggccctgaccaacatgagcagaaccctggtgaacaaggaggagccccccaaggagctgcccgccgccgagcccgtgctgagccccctggagggcaccaagatgaccgtgaacaacctgcaccccagagtgaccgaggaggacatcgtggagctgttctgcgtgtgcggcgccctgaagagagccagactggtgcaccccggcgtggccgaggtggtgttcgtgaagaaggacgacgccatcaccgcctacaagaagtacaacaacagatgcctggacggccagcccatgaagtgcaacctgcacatgaacggcaacgtgatcaccagcgaccagcccatcctgctgagactgagcgacagccccagcatgaagaaggagagcgagctgcccagaagagtgaacagcgccagcagcagcaacccccccgccgaggtggaccccgacaccatcctgaaggccctgttcaagagcagcggcgccagcgtgaccacccagcccaccgagttcaagatcaagctgtag

SEQ ID NO: 253435 - DNA, 690 bp, Artificial Sequence
  derived and/or modified sequence
atggccgacatcagcctggacgagctgatcagaaagagaggcgccgccgccaagggcagactgaacgccagacccggcgtgggcggcgtgagaagcagagtgggcatccagcagggcctgctgagccagagcaccagaaccgccaccttccagcagagattcgacgccagacagaagatcggcctgagcgacgccagactgaagctgggcgtgaaggacgccagagagaagctgctgcagaaggacgccagattcagaatcaagggcaaggtgcaggacgccagagagatgctgaacagcagaaagcagcagaccaccgtgccccagaagcccagacaggtggccgacgccagagagaagatcagcctgaagagaagcagccccgccgccttcatcaacccccccatcggcaccgtgacccccgccctgaagctgaccaagaccatccagaacctgtacgacctggacgaggacgacgacggcatcgccagcgtgcccaccaagcagatgaagttcgccgccagcggcggcttcctgcaccacatggccggcctgagcagcagcaagctgagcatgagcaaggccctgcccctgaccaaggtggtgcagaacgacgcctacaccgcccccgccctgcccagcagcatcagaaccaaggccctgcccgtgctgaccagccccggcacctag

SEQ ID NO: 253436 - protein, 397 aa, Artificial Sequence
  derived and/or modified sequence
MLLETGLERDRARPGAAAVCTLGGTREIPLCAGCDQHILDRFILKALDRHWHSKCLKCSDCHTPLAERCFSRGESVYCKDDFFKRFGTKCAACQLGIPPTQVVRRAQDFVYHLHCFACVVCKRQLATGDEFYLMEDSRLVCKADYETAKQREAEATAKRPRTTITAKQLETLKSAYNTSPKPARHVREQLSSETGLDMRVVQVWFQNRRAKEKRLKKDAGRQRWGQYFRNMKRSRGGSKSDKDSVQEGQDSDAEVSFPDEPSLAEMGPANGLYGSLGEPTQALGRPSGALGNFSLEHGGLAGPEQYRELRPGSPYGVPPSPAAPQSLPGPQPLLSSLVYPDTSLGLVPSGAPGGPPPMRVLAGNGPSSDLSTGSSGGYPDFPASPASWLDEVDHAQF

SEQ ID NO: 253437 - DNA, 1194 bp, Artificial Sequence
  derived and/or modified sequence
atgctcctcgagacaggcctggaacgcgatcgggcccggccgggcgcagccgccgtgtgtaccctaggcggcactcgggagattccgctgtgcgccggatgcgatcaacatatactcgaccgcttcatactgaaggccctcgatcgccattggcacagcaagtgtctaaagtgttcggattgccacacccccctagctgaaagatgcttttctcggggcgaaagcgtgtactgtaaggacgatttcttcaagcggtttggcacaaaatgcgccgcatgccaattaggaatcccccctacacaagtagtgcgcagggctcaggatttcgtgtaccatctgcactgcttcgcctgtgtagtgtgcaaaaggcaactcgccaccggcgatgaattctaccttatggaggattctaggcttgtgtgtaaggccgactatgagaccgctaagcaaagagaagccgaggctacagcaaagcgtcctcgcactacgattaccgccaagcaacttgagaccctgaagagtgcctataacacctccccaaaacctgcacggcatgtgcgagaacagctgtcatctgagactggactagacatgcgtgtcgtgcaagtgtggttccagaatcggcgggcaaaagaaaagcgcttaaagaaggatgctggaaggcagcggtgggggcaatacttcagaaatatgaaaagatctagaggaggttctaagtccgataaagacagcgttcaggaggggcaggattcagatgcggaggtaagcttccccgatgagcctagcttggctgaaatggggcctgccaatggactgtacggttccttgggggaaccaacccaggcactggggaggccctctggagccctaggcaacttttctctcgagcatggggggctcgcaggaccggagcaataccgcgagctacggcctggaagtccttacggagtgcccccatctccagcagcccctcaatccctgcctggaccacagcccctgttgtcatccttggtttatccagacacgtctctcggattggtccctagtggggcccctggcggtccaccgcccatgagagttctggccgggaatgggccctcttctgacctctccaccgggagttcaggtgggtatccagacttccccgcttcgcccgcctcttggctggatgaggtggatcacgcacagttttag

SEQ ID NO: 253438 - DNA, 1194 bp, Artificial Sequence
  derived and/or modified sequence
atgctgctggagaccggcctggagcgggaccgggcccggcctggagctgctgctgtgtgcaccctgggcggcacccgggagatccccctgtgtgccggctgtgaccagcacatcctggaccgcttcatcctgaaggccctggacagacactggcacagcaagtgcctgaagtgcagcgactgccacacccccctggccgagcgctgcttcagcagaggagagagcgtgtactgcaaggatgacttcttcaagcgcttcggcaccaagtgtgccgcctgccagctgggcatcccccccacccaggtggtgcggcgggcccaggactttgtgtaccacctgcactgctttgcctgtgtggtgtgcaagaggcagctggccactggagatgagttctacctgatggaggacagccggctggtgtgcaaggctgactatgaaacagccaagcagcgggaggccgaggccacagccaagaggcccaggaccaccatcacagccaagcagctggagaccctgaagagcgcctacaacaccagccccaagccagcccggcacgtgcgggagcagctgagcagcgagaccggcctggacatgagggtggtgcaggtgtggttccagaacagaagagccaaggagaagaggctgaagaaggatgctggccggcagcgctggggccagtacttcaggaacatgaagaggagccggggcggcagcaagagtgacaaggacagcgtgcaggagggccaggacagtgatgctgaggtgtccttcccagatgagcccagcctggccgagatgggccctgccaacggcctgtatggcagcctgggggagcccacccaggccctgggccggcccagcggggccctgggcaacttcagcctggagcacggcggcctggccggccctgagcagtaccgggagctgcggcccggcagcccctatggagtgccccccagccctgctgccccccagagcctgcccggcccccagcccctgctgagcagcctggtgtacccagacaccagcctgggcctggtgcccagcggggcccctgggggccccccacccatgagggtgctggccggaaatggccccagcagtgacctgagcacaggcagcagcggcggctacccagacttccctgccagccctgcctcctggctggatgaggtggaccacgcccagttctag

SEQ ID NO: 253439 - DNA, 2337 bp, Artificial Sequence
  derived and/or modified sequence
gccccgcacgacgcggcgggacttgggagccccgaaccctccaggggacgctgacctaggaggagcgcgtctcgcgccactcggcctggtggccgcgatgctgctggaaacggggctcgagcgcgaccgagcgaggcccggggccgccgccgtctgcaccttgggcgggactcgggagatcccgctgtgcgctggctgtgaccagcacatcctggaccgcttcatcctcaaggctctggaccgccactggcacagcaagtgtctcaagtgcagcgactgccacacgccactggccgagcgctgcttcagccgaggggagagcgtttactgcaaggacgactttttcaagcgcttcgggaccaagtgcgccgcgtgccagctgggcatcccgcccacgcaggtggtgcgccgcgcccaggacttcgtgtaccacctgcactgctttgcctgcgtcgtgtgcaagcggcagctggccacgggcgacgagttctacctcatggaggacagccggctcgtgtgcaaggcggactacgaaaccgccaagcagcgagaggccgaggccacggccaagcggccgcgcacgaccatcaccgccaagcagctggagacgctgaagagcgcttacaacacctcgcccaagccggcgcgccacgtgcgcgagcagctctcgtccgagacgggcctggacatgcgcgtggtgcaggtttggttccagaaccgccgggccaaggagaagaggctgaagaaggacgccggccggcagcgctgggggcagtatttccgcaacatgaagcgctcccgcggcggctccaagtcggacaaggacagcgttcaggaggggcaggacagcgacgctgaggtctccttccccgatgagccttccttggcggaaatgggcccggccaatggcctctacgggagcttgggggaacccacccaggccttgggccggccctcgggagccctgggcaacttctccctggagcatggaggcctggcaggcccagagcagtaccgagagctgcgtcccggcagcccctacggtgtccccccatcccccgccgccccgcagagcctccctggcccccagcccctcctctccagcctggtgtacccagacaccagcttgggccttgtgccctcgggagcccccggcgggcccccacccatgagggtgctggcagggaacggacccagttctgacctatccacggggagcagcgggggttaccccgacttccctgccagccccgcctcctggctggatgaggtagaccacgctcagttctgacccaggcccggctccaccctgcacctcacacgagggagctgcccctgggtgggcggctcggggctgctggggtttccgaggaagtggggccagggcgtcaagggagggctggtgccttcggagcctcccactgccgaccgcacagctccctctctgggggctgagggacccacctggcccctcctctgacacagggctggcccgccaggtggcctcccagcaagccagccttttttgtaagcaaatttctcccctttattgaccaattaactgagcacttgctgctatttctagacatgaaatgtcaccttgctgaggcccagcccagcccagcatagcccgagggctggaaaaacgctttcatctctaaaactgagaaatcatcataattgtgctttcacttcccaggctccatgtgtcttggagccgtcaccccgaggctccctctttaggtcggagattggccttgcctgtcgaggcaagaggctgcagaggcggggacacacctgtgtcctccgggagaggccccctcctctccccagaccacagggggcctctctgcctccagccccaccttccccgggagaagctttccccaatccccaggtctctagatcattctgttctcgagtatcctgtggaggaggcaaaaatgcctggcgccccttctctccaagctcaattctctaagcccctcagggtctcctcctcaccccaccccaggcccttggtgtccaggctgcacccacagatgtctgttgccaaacagcctgccctccctgccggagccggctctgccagccccagattgggaagtctccccgctggagaagggtggggctcctctgagcctgccctgcctcctccatcagatcctttgggaagaagtttctgggagatgcccgcagctgtgcgtgccccagacacaaaggctggcctgtgtgtaagtcaaagtcactcccgcaaacctgaatctcgagctacctattggttctgtgaatgttctgtgtcttttatttattctcgggtgatcagctctttccaag

SEQ ID NO: 253440 - DNA, 1194 bp, Artificial Sequence
  derived and/or modified sequence
atgctgctggagaccggcctggagcgggaccgggcccggcccggcgcagctgctgtctgcactcttggaggcactagagagatacctctgtgtgccgggtgtgatcagcacattttagatcggttcattttgaaagccctggatcggcattggcactccaagtgtttgaagtgcagtgactgccatacaccccttgcagagaggtgtttctcccggggggaaagtgtctactgtaaggacgattttttcaaacgtttcggaactaagtgtgcagcatgccagctggggattccgcctacccaagtggtaaggagagcccaggactttgtgtatcacctccactgtttcgcatgtgtggtatgcaagcgtcaactggccaccggagatgagttctacctcatggaggatagcaggctagtttgcaaggctgattacgagacagcaaaacagcgggaggccgaagccacagctaagagacccagaaccaccattacggcgaaacaacttgagacattgaagtctgcctataacaccagccctaagccagcaaggcacgtcagagaacagctgtcaagtgaaacaggtttagacatgagagttgtacaagtgtggttccagaaccgacgggctaaggagaaaagattgaaaaaggacgccggccggcagcgatggggacaatacttccgaaacatgaaacggtccagaggaggaagtaaatcagataaggacagtgtgcaagaaggtcaagatagcgatgccgaggtgagcttccctgatgagccctctctggcagaaatggggcctgcgaacgggttatacggctccctaggggaaccaacgcaagcactgggcaggccatcaggcgccctgggaaacttctccctcgaacacggtggcttggccggtcctgaacagtacagggagctccgtcccggctccccctacggagtgccacccagtcccgccgccccacagagcctgcccgggccacaaccgcttctgtcctctctcgtctacccagatacaagcctcggtttggttccatccggtgccccaggaggtcccccccccatgagagtcctggctggcaatggtccttcctctgacctgagtaccgggagctctgggggctacccagactttcccgcatcaccagcctcttggttggacgaggtggatcatgcccagttctag

SEQ ID NO: 253441 - DNA, 1194 bp, Artificial Sequence
  derived and/or modified sequence
atgttactggaaacagggttagaacgcgacagagcccgacctggcgctgcggctgtctgcaccctgggaggaacaagggaaatccccctgtgcgctggatgcgaccaacacatattagaccgttttattcttaaagcgctcgatagacattggcacagtaaatgccttaagtgcagcgactgccataccccgctggcagagcggtgtttcagtagaggtgaatcagtgtattgtaaagatgatttcttcaaacgattcggtaccaaatgtgccgcttgccagctgggcattccacctacgcaggtcgttagacgcgcacaggattttgtttatcacctccattgttttgcatgtgtggtgtgtaagcgccagctggctacaggtgatgagttttatctcatggaggactcccgtctggtctgcaaagctgattacgagaccgccaaacagcgagaagccgaagcaaccgccaagcggccacgaacaacaatcaccgcgaagcagctggaaactttaaaaagcgcgtataacaccagtcccaagcccgcaagacatgtgcgagagcaattaagcagcgaaactggcctcgatatgagggtagtacaagtgtggttccagaacagaagagccaaagagaaacggcttaagaaggatgccggacgccagaggtggggccaatacttccggaatatgaaacggagccgcggaggcagcaagtctgacaaggactcagtccaagaggggcaggacagtgacgcagaggtcagcttcccagatgagccaagtctggctgaaatgggtcccgctaatggcctgtatggcagtctcggcgagccgacacaggctctgggtaggccatccggcgctctgggaaactttagtcttgaacatggcggactagccggacctgagcaatacagggagctcaggcctggctccccatacggtgtgccaccctctccagccgcaccacaaagcctcccgggacctcagccactgctgagttcactagtgtatccagatacctcactgggcttagtaccttctggcgcacctggtggaccacctcctatgcgtgtcttagctggcaacggtccttcctccgatctgtctaccggctcctccgggggataccctgatttccccgctagtccagcgtcttggcttgacgaagtcgaccatgcccaattctag

SEQ ID NO: 253442 - DNA, 1194 bp, Artificial Sequence
  derived and/or modified sequence
atgctgctggagaccggcctggagagagacagagccagacccggcgccgccgccgtgtgcaccctgggcggcaccagagagatccccctgtgcgccggctgcgaccagcacatcctggacagattcatcctgaaggccctggacagacactggcacagcaagtgcctgaagtgcagcgactgccacacccccctggccgagagatgcttcagcagaggcgagagcgtgtactgcaaggacgacttcttcaagagattcggcaccaagtgcgccgcctgccagctgggcatcccccccacccaggtggtgagaagagcccaggacttcgtgtaccacctgcactgcttcgcctgcgtggtgtgcaagagacagctggccaccggcgacgagttctacctgatggaggacagcagactggtgtgcaaggccgactacgagaccgccaagcagagagaggccgaggccaccgccaagagacccagaaccaccatcaccgccaagcagctggagaccctgaagagcgcctacaacaccagccccaagcccgccagacacgtgagagagcagctgagcagcgagaccggcctggacatgagagtggtgcaggtgtggttccagaacagaagagccaaggagaagagactgaagaaggacgccggcagacagagatggggccagtacttcagaaacatgaagagaagcagaggcggcagcaagagcgacaaggacagcgtgcaggagggccaggacagcgacgccgaggtgagcttccccgacgagcccagcctggccgagatgggccccgccaacggcctgtacggcagcctgggcgagcccacccaggccctgggcagacccagcggcgccctgggcaacttcagcctggagcacggcggcctggccggccccgagcagtacagagagctgagacccggcagcccctacggcgtgccccccagccccgccgccccccagagcctgcccggcccccagcccctgctgagcagcctggtgtaccccgacaccagcctgggcctggtgcccagcggcgcccccggcggccccccccccatgagagtgctggccggcaacggccccagcagcgacctgagcaccggcagcagcggcggctaccccgacttccccgccagccccgccagctggctggacgaggtggaccacgcccagttctag

SEQ ID NO: 253443 - protein, 2839 aa, Artificial Sequence
  derived and/or modified sequence
MPITQDNAVLHLPLLYQWLQNSLQEGGDGPEQRLCQAAIQKLQEYIQLNFAVDESTVPPDHSPPEMEICTVYLTKELGDTETVGLSFGNIPVFGDYGEKRRGGKKRKTHQGPVLDVGCIWVTELRKNSPAGKSGKVRLRDEILSLNGQLMVGVDVSGASYLAEQCWNGGFIYLIMLRRFKHKAHSTYNGNSSNSSEPGETPTLELGDRTAKKGKRTRKFGVISRPPANKAPEESKGSAGCEVSSDPSTELENGPDPELGNGHVFQLENGPDSLKEVAGPHLERSEVDRGTEHRIPKTDAPLTTSNDKRRFSKGGKTDFQSSDCLAREEVGRIWKMELLKESDGLGIQVSGGRGSKRSPHAIVVTQVKEGGAAHRDGRLSLGDELLVINGHLLVGLSHEEAVAILRSATGMVQLVVASKENSAEDLLRLTSKSLPDLTSSVEDVSSWTDNEDQEADGEEDEGTSSSVQRAMPGTDEPQDVCGAEESKGNLESPKQGSNKIKLKSRLSGGVHRLESVEEYNELMVRNGDPRIRMLEVSRDGRKHSLPQLLDSSSASQEYHIVKKSTRSLSTTQVESPWRLIRPSVISIIGLYKEKGKGLGFSIAGGRDCIRGQMGIFVKTIFPNGSAAEDGRLKEGDEILDVNGIPIKGLTFQEAIHTFKQIRSGLFVLTVRTKLVSPSLTPCSTPTHMSRSASPNFNTSGGASAGGSDEGSSSSLGRKTPGPKDRIVMEVTLNKEPRVGLGIGACCLALENSPPGIYIHSLAPGSVAKMESNLSRGDQILEVNSVNVRHAALSKVHAILSKCPPGPVRLVIGRHPNPKVSEQEMDEVIARSTYQESKEANSSPGLGTPLKSPSLAKKDSLISESELSQYFAHDVPGPLSDFMVAGSEDEDHPGSGCSTSEEGSLPPSTSTHKEPGKPRANSLVTLGSHRASGLFHKQVTVARQASLPGSPQALRNPLLRQRKVGCYDANDASDEEEFDREGDCISLPGALPGPIRPLSEDDPRRVSISSSKGMDVHNQEERPRKTLVSKAISAPLLGSSVDLEESIPEGMVDAASYAANLTDSAEAPKGSPGSWWKKELSGSSSAPKLEYTVRTDTQSPTNTGSPSSPQQKSEGLGSRHRPVARVSPHCKRSEAEAKPSGSQTVNLTGRANDPCDLDSRVQATSVKVTVAGFQPGGAVEKESLGKLTTGDACVSTSCELASALSHLDASHLTENLPKAASELGQQPMTELDSSSDLISSPGKKGAAHPDPSKTSVDTGQVSRPENPSQPASPRVTKCKARSPVRLPHEGSPSPGEKAAAPPDYSKTRSASETSTPHNTRRVAALRGAGPGAEGMTPAGAVLPGDPLTSQEQRQGAPGNHSKALEMTGIHAPESSQEPSLLEGADSVSSRAPQASLSMLPSTDNTKEACGHVSGHCCPGGSRESPVTDIDSFIKELDASAARSPSSQTGDSGSQEGSAQGHPPAGAGGGSSCRAEPVPGGQTSSPRRAWAAGAPAYPQWASQPSVLDSINPDKHFTVNKNFLSNYSRNFSSFHEDSTSLSGLGDSTEPSLSSMYGDAEDSSSDPESLTEAPRASARDGWSPPRSRVSLHKEDPSESEEEQIEICSTRGCPNPPSSPAHLPTQAAICPASAKVLSLKYSTPRESVASPREKAACLPGSYTSGPDSSQPSSLLEMSSQEHETHADISTSQNHRPSCAEETTEVTSASSAMENSPLSKVARHFHSPPIILSSPNMVNGLEHDLLDDETLNQYETSINAAASLSSFSVDVPKNGESVLENLHISESQDLDDLLQKPKMIARRPIMAWFKEINKHNQGTHLRSKTEKEQPLMPARSPDSKIQMVSSSQKKGVTVPHSPPQPKTNLENKDLSKKSPAEMLLTNGQKAKCGPKLKRLSLKGKAKVNSEAPAANAVKAGGTDHRKPLISPQTSHKTLSKAVSQRLHVADHEDPDRNTTAAPRSPQCVLESKPPLATSGPLKPSVSDTSIRTFVSPLTSPKPVPEQGMWSRFHMAVLSEPDRGCPTTPKSPKCRAEGRAPRADSGPVSPAASRNGMSVAGNRQSEPRLASHVAADTAQPRPTGEKGGNIMASDRLERTNQLKIVEISAEAVSETVCGNKPAESDRRGGCLAQGNCQEKSEIRLYRQVAESSTSHPSSLPSHASQAEQEMSRSFSMAKLASSSSSLQTAIRKAEYSQGKSSLMSDSRGVPRNSIPGGPSGEDHLYFTPRPATRTYSMPAQFSSHFGREGHPPHSLGRSRDSQVPVTSSVVPEAKASRGGLPSLANGQGIYSVKPLLDTSRNLPATDEGDIISVQETSCLVTDKIKVTRRHYCYEQNWPHESTSFFSVKQRIKSFENLANADRPVAKSGASPFLSVSSKPPIGRRSSGSIVSGSLGHPGDAAARLLRRSLSSCSENQSEAGTLLPQMAKSPSIMTLTISRQNPPETSSKGSDSELKKSLGPLGIPTPTMTLASPVKRNKSSVRHTQPSPVSRSKLQELRALSMPDLDKLCSEDYSAGPSAVLFKTELEITPRRSPGPPAGGVSCPEKGGNRACPGGSGPKTSAAETPSSASDTGEAAQDLPFRRSWSVNLDQLLVSAGDQQRLQSVLSSVGSKSTILTLIQEAKAQSENEEDVCFIVLNRKEGSGLGFSVAGGTDVEPKSITVHRVFSQGAASQEGTMNRGDFLLSVNGASLAGLAHGNVLKVLHQAQLHKDALVVIKKGMDQPRPSARQEPPTANGKGLLSRKTIPLEPGIGRSVAVHDALCVEVLKTSAGLGLSLDGGKSSVTGDGPLVIKRVYKGGAAEQAGIIEAGDEILAINGKPLVGLMHFDAWNIMKSVPEGPVQLLIRKHRNSS

SEQ ID NO: 253444 - protein, 2640 aa, Artificial Sequence
  derived and/or modified sequence
MPITQDNAVLHLPLLYQWLQNSLQEGGDGPEQRLCQAAIQKLQEYIQLNFAVDESTVPPDHSPPEMEICTVYLTKELGDTETVGLSFGNIPVFGDYGEKRRGGKKRKTHQGPVLDVGCIWVTELRKNSPAGKSGKVRLRDEILSLNGQLMVGVDVSGASYLAEQCWNGGFIYLIMLRRFKHKAHSTYNGNSSNSSEPGETPTLELGDRTAKKGKRTRKFGVISRPPANKAPEESKGSAGCEVSSDPSTELENGPDPELGNGHVFQLENGPDSLKEVAGPHLERSEVDRGTEHRIPKTDAPLTTSNDKRRFSKGGKTDFQSSDCLAREEVGRIWKMELLKESDGLGIQVSGGRGSKRSPHAIVVTQVKEGGAAHREYHIVKKSTRSLSTTQVESPWRLIRPSVISIIGLYKEKGKGLGFSIAGGRDCIRGQMGIFVKTIFPNGSAAEDGRLKEGDEILDVNGIPIKGLTFQEAIHTFKQIRSGLFVLTVRTKLVSPSLTPCSTPTHMSRSASPNFNTSGGASAGGSDEGSSSSLGRKTPGPKDRIVMEVTLNKEPRVGLGIGACCLALENSPPGIYIHSLAPGSVAKMESNLSRGDQILEVNSVNVRHAALSKVHAILSKCPVSEQEMDEVIARSTYQESKEANSSPGLGTPLKSPSLAKKDSLISESELSQYFAHDVPGPLSDFMVAGSEDEDHPGSGCSTSEEGSLPPSTSKEPGKPRANSLVTLGSHRASGLFHKQVTVARQASLPGSPQALRNPLLRQRKVGCYDANDASDEEEFDREGDCISLPGALPGPIRPLSEDDPRRVSISSSKGMDVHNQEERPRKTLVSKAISAPLLGSSVDLEESIPEGMVDAASYAANLTDSAEAPKGSPGSWWKKELSGSSSAPKLEYTVRTDTQSPTNTGSPSSPQQKSEGLGSRHRPVARVSPHCKRSEAEAKPSGSQTVNLTGRANDPCDLDSRVQATSVKVTVAGFQPGGAVEKLCQESLGKLTTGDACVSTSCELASALSHLDASHLTENLPKAASELGQQPMTASDLISSPGKKGAAHPDPSKTSVDTGQVSRPENPSQPASPRVTKCKARSPVRLPHEGSPSPGEKAAAPPDYSKTRSASETSTPHNTRRVAALRGAGPGAEGMTPAGAVLPGDPLTSQEQRQGAPGNHSKALEMTGIHAPESSQEPSLLEGADSVSSRAPQASLSMLPSTDNTKEACGHVSGHCCPGGSRESPVTDIDSFIKELDASAARSPSSQTGDSGSQEGSAQGHPPAGAGGGSSCRAEPVPGGQTSSPRRAWAAGAPAYPQWASQPSVLDSINPDKHFTVNKNFLSNYSRNFSSFHEDSTSLSGLGDSTEPSLSSMYGDAEDSSSDPESLTEAPRASARDGWSPPRSRVSLHKEDPSESEEEQIEICSTRGCPNPPSSPAHLPTQAAICPASAKVLSLKYSTPRESVASPREKAACLPGSYTSGPDSSQPSSLLEMSSQEHETHADISTSQNHRPSCAEETTEVTSASSAMENSPLSKVARHFHSPPIILSSPNMVNGLEHDLLDDETLNQYETSINAAASLSSFSVDVPKNGESVLENLHISESQDLDDLLQKPKMIARRPIMAWFKEINKHNQGTHLRSKTEKEQPLMPARSPDSKIQMVSSSQKKGVTVPHSPPQPKTNLENKDLSKKSPAEMLLTNGQKAKCGPKLKRLSLKGKAKVNSEAPAANAVKAGGTDHRKPLISPQTSHKTLSKAVSQRLHVADHEDPDRNTTAAPRSPQCVLESKPPLATSGPLKPSVSDTSIRTFVSPLTSPKPVPEQGMWSRFHMAVLSEPDRGCPTTPKSPKCRAEGRAPRADSGPVSPAASRNGMSVAGNRQSEPRLASHVAADTAQPRPTGEKGGNIMASDRLERTNQLKIVEISAEAVSETVCGNKPAESDRRGGCLAQGNCQEKSEIRLYRQVAESSTSHPSSLPSHASQAEQEMSRSFSMAKLASSSSSLQTAIRKAEYSQGKSSLMSDSRGVPRNSIPGGPSGEDHLYFTPRPATRTYSMPAQFSSHFGREGHPPHSLGRSRDSQVPVTSSVVPEAKASRGGLPSLANGQGIYSVKPLLDTSRNLPATDEGDIISVQETSCLVTDKIKVTRRHYCYEQNWPHESTSFFSVKQRIKSFENLANADRPVAKSGASPFLSVSSKPPIGRRSSGSIVSGSLGHPGDAAARLLRRSLSSCSENQSEAGTLLPQMAKSPSIMTLTISRQNPPETSSKGSDSELKKSLGPLGIPTPTMTLASPVKRNKSSVRHTQPSPVSRSKLQELRALSMPDLDKLCSEDYSAGPSAVLFKTELEITPRRSPGPPAGGVSCPEKGGNRACPGGSGPKTSAAETPSSASDTGEAAQDLPFRRSWSVNLDQLLVSAGDQQRLQSVLSSVGSKSTILTLIQEAKAQSENEEDVCFIVLNRKEGSGLGFSVAGGTDVEPKSITVHRVFSQGAASQEGTMNRGDFLLSVNGASLAGLAHGNVLKVLHQAQLHKDALVVIKKGMDQPRPSARQEPPTANGKGLLSRKTIPLEPGIGRSVAVHDALCVEVLKTSAGLGLSLDGGKSSVTGDGPLVIKRVYKGGAAEQAGIIEAGDEILAINGKPLVGLMHFDAWNIMKSVPEGPVQLLIRKHRNSS

SEQ ID NO: 253445 - DNA, 8520 bp, Artificial Sequence
  derived and/or modified sequence
atgcctatcactcaggacaacgcagtactacacctacctctgttatatcagtggctgcaaaactctctgcaggaagggggggatggccctgaacaaagactgtgccaagccgctattcagaagctccaggaatacattcaactcaactttgccgtcgatgaatcaacagtgcccccagatcacagtcctccagaaatggagatttgtaccgtgtatttgactaaggagctgggggacaccgaaacagtcggtctctcatttggcaacatccccgtgttcggggattatggcgaaaaacggcggggtggaaaaaagagaaaaacccaccaggggcccgtcctcgacgttgggtgcatctgggtcacagaactcagaaagaattcaccagccggtaaaagcggcaaagtgaggctgagagatgagatcctcagcctgaacggtcagctcatggttggggtggatgtgagtggggcatcctaccttgcagaacagtgttggaatggagggtttatttatttgattatgctacgacggttcaagcataaagcccacagcacttataacggtaattctagtaactcctcagaacctggagaaacgcccacactggagttaggagacagaaccgcaaaaaagggcaagaggacacggaagttcggcgtaatcagtagacctccagccaacaaggcccccgaggagagtaaaggaagcgcagggtgtgaggtgagtagcgaccccagcactgagcttgaaaacggacctgatccagagctgggcaatgggcacgtttttcagctcgagaatggacccgatagcttgaaggaggtcgcagggccacacctggagcggagtgaggtcgatcggggcacagagcatagaattccaaaaaccgacgcccctctaaccaccagcaacgacaaaaggcgcttctcaaaaggtgggaagacagattttcagtctagcgattgtctcgctagagaagaggtcggacgaatctggaagatggaactcctcaaagagagtgacgggttaggtattcaggtgagcggaggacggggctccaagaggtctccacatgccatcgtcgtcactcaagtaaaggaaggaggcgccgctcatagggacgggaggctgtccctcggcgacgagttgctcgtcattaacggtcatttgctcgtgggactgagccacgaggaggccgttgcaatactcaggagcgcaaccggaatggttcagctggtagtggcatcgaaagagaattcagccgaagacctgctgaggctgacctctaagtctctgccagaccttacttccagcgtggaagatgtatcctcctggactgataatgaggaccaggaggcagacggcgaggaggacgaagggacaagctcctctgttcagcgtgctatgcctggtactgacgaaccccaagatgtgtgcggggccgaggagagcaaaggtaacctggaaagccccaaacagggaagcaacaaaataaaactgaagtcccgcctgtccgggggcgtgcaccggctggagtcagtggaagagtataacgaacttatggtacgcaacggagatcctagaatccgcatgctggaagttagccgagatggtagaaaacacagtttgcctcagctgcttgactcctcaagtgcctcccaggagtaccacattgtgaagaaatcaaccagatcgttgtccaccacccaggtggagagcccatggcgactgattcggccctccgtgatttcaatcattgggctatataaagaaaaggggaagggtctgggcttctcaattgccgggggtcgggattgcatcagaggacagatgggcatatttgtcaaaaccatcttccccaatggatctgccgccgaagatggaagacttaaagagggcgatgaaatcctagacgtgaatggcattcccataaaggggctgactttccaagaagctatacacacgtttaaacaaattagaagtggcttgttcgtgctgaccgtccggacaaaacttgtctccccaagcctcaccccgtgttctacccccactcacatgagtagaagtgcaagccccaacttcaacaccagcggaggcgccagtgccggtggaagtgatgagggttcttctagctcattgggtaggaaaactcccggccccaaggatagaatcgttatggaagtgaccctgaacaaggagccgcgagtcgggctgggaattggcgcctgctgtctggcgctggagaacagccctcctggcatttacatccactccctggcccccgggtcagtggccaagatggaatccaacctgtcccggggagatcagatcctggaagttaacagtgtcaacgtaaggcatgccgcactatctaaggtccatgcaatcctgtcgaagtgtccacctggcccggtgcgattggtgattggtcgccaccccaaccccaaagtgagtgagcaagagatggacgaggtgatcgctcgcagtacgtaccaagaatcaaaggaggcaaactcttcccctgggttgggaactccccttaagtcgccaagcttggcgaagaaggactccttaatttccgaaagcgagctttcccagtactttgcacatgacgtgcccggccccctgagcgatttcatggtggccggatccgaggatgaagatcacccagggtctggctgtagcacctccgaggaggggtctctgccgccttccaccagtactcacaaggaacctggcaaaccccgggccaatagtttggttacactgggctcccatcgggcctccggattatttcacaagcaggttacagtggctcgtcaagcaagtctgcctggatctccgcaggccctgagaaatcccctccttcgccagcggaaagtgggttgttacgatgccaatgatgcttccgacgaagaggaatttgatagggagggggattgtattagcctcccgggggcccttccaggccccatcaggcctctatcagaggatgatcctaggcgagtgtctataagctcctcaaagggaatggacgtgcacaatcaagaagagcgccccaggaagaccttggtgagcaaagccatttctgctcctcttctgggcagttctgtggacctcgaggaatccattccagagggcatggttgatgccgcatcttatgctgccaaccttacagactcagccgaagctcccaaaggaagtccaggaagttggtggaagaaagagctgtctggttcctctagcgccccaaagttagagtacactgtgcggacggacacgcagtcccccactaatactggctccccaagttcaccacagcagaagtcagagggactaggatctcggcaccggcctgtggcgcgagtgagtccacattgcaagcgtagcgaagctgaagccaagcccagtgggtcccaaaccgtgaacctcaccggcagagcaaacgacccctgcgacctggactcaagagtgcaggccacctctgtgaaagtgactgtagcaggttttcaacccggcggtgctgtggagaaggaatcattaggcaagcttactaccggtgacgcttgcgtgtccacgagttgcgaattggcgtccgccctgagtcacctcgacgcctctcaccttaccgaaaatctgccaaaggccgcctcagagctggggcagcagcctatgaccgaactggattcttccagcgatctgatctctagtccaggcaagaaaggtgcagcacatcccgaccctagcaaaacctcagtggataccggccaggtgtccaggcctgaaaacccttcccaacctgcgtctccgcgcgtgacgaagtgcaaggcgagatcaccagtacgtttgcctcatgagggatcacccagtcccggcgagaaagctgcagctcctcctgattattccaaaacacgctctgcctctgaaacttctacaccccataatacccgccgggttgccgccctgcgcggagcgggtccaggggctgagggcatgactcctgctggtgctgttctcccaggcgaccctttaacatctcaggagcagcggcagggggcccctggaaatcactccaaggccctggagatgacaggaatacacgctcctgagtcatcacaggaaccctccctgttagaaggtgctgacagcgttagctcccgggccccccaggcctctctttccatgttacccagcacagataatacaaaggaggcttgcggccatgtgtctggccactgttgtcccggcggcagccgggaatcccctgtgacagatatcgattccttcattaaggaactggacgcatccgccgctaggtccccttcctcccagactggcgatagtggtagccaggagggatccgcccagggtcatccgcctgcaggcgcagggggcgggtcgagctgtcgtgccgagccggtacctggcggccagacaagttcccccagacgggcttgggccgcaggagctcccgcttatcctcaatgggccagccaaccatccgttctggattctattaatcccgacaaacatttcaccgtaaacaagaacttcctctccaactacagtagaaacttctcctcgttccatgaagactccacctcactgtctggcctcggggatagtactgagcccagtctgagctctatgtatggagacgcggaggactcaagctcagaccctgaatccttaactgaggctcctcgggcatccgcccgcgacggctggtcgcctccgaggtctcgcgtgagccttcacaaagaagacccctcagaaagcgaggaggagcagatagaaatttgctctactcgggggtgcccaaatcccccctcctcacccgcacatctgcccacgcaggccgcaatctgtcccgctagtgcaaaggtgttgagtcttaagtattcgacgcctcgcgagagcgtcgccagtccacgtgagaaggcagcatgtcttccaggctcctacacttcaggcccggacagctcacagccttcctcactcctcgagatgtccagtcaagagcacgagacacacgccgatatatccacttcccaaaatcaccgtccctcgtgcgcagaagagaccactgaagtgacctccgcttcgagtgccatggagaactcccccctgtctaaggtggcccggcacttccacagccctcccatcatactgtcatcccctaacatggtcaacggcttggagcatgatcttctggatgacgaaacacttaaccagtatgaaacttcaattaacgcagctgctagtctttcttcatttagcgtggatgtgcctaaaaacggcgagtcggtcctagaaaatctccatattagtgagtcgcaggacctggacgatcttcttcaaaaacccaagatgatcgcgcgaaggccaatcatggcctggttcaaggaaattaacaagcataaccaaggcacccatctccgatccaaaactgagaaagaacagcctctcatgcctgcccggtcgcctgactccaagatacaaatggtgtcatcatctcagaagaaaggagtgactgttccccattctcctccacagcccaagacaaatttagaaaacaaggacctctcaaaaaagtcccccgccgaaatgctgttaactaacggccagaaggcaaaatgcggccctaagctgaagagactgtcactgaagggaaaggctaaagtgaactcggaggcccctgctgctaatgcagtgaaggctggaggaaccgaccataggaaacccttgatttccccccaaactagccacaaaacactgtctaaagccgtatcccagagacttcatgtggcagatcatgaggacccagaccgaaacacgaccgccgcgccaagatcccctcagtgcgtcctggaatccaaacctcccctagcaacaagtggaccacttaaacccagcgtcagcgacacatcaatccggaccttcgtctcccctttgactagccccaagccagtgcctgagcaaggcatgtggtccagatttcacatggcagttctgagcgagcctgacagaggctgtcctactaccccgaagtcacctaaatgccgggccgaaggcagagccccgcgagcggactctggcccagtgtcacccgctgcctcccgcaacggcatgtctgtcgctggcaatcgccagtccgagccccgtctcgctagtcacgtcgcagcggacactgctcagcctaggcccactggtgagaaaggaggtaacatcatggcttctgaccgcctggaaagaaccaaccagctaaagatagtggagatatccgccgaagccgtcagcgaaactgtttgtggaaacaagcccgctgagtcagataggcgcggtggctgtttggcacagggaaactgtcaggagaagtcagaaatccgcctgtatagacaagtggcggagagctccacaagccaccctagctccctcccatctcatgcctcccaagctgagcaggagatgagtcgatcattttccatggctaagctcgcctcgtccagctctagtctgcagaccgccatacgcaaggcagaatactcccagggcaagtcatccctgatgtccgattctcgaggtgtgcctaggaactcaattccaggtggaccaagcggagaggaccatttgtattttacacccaggcctgccacgcgcacttacagcatgccagcccaattttcaagccatttcggccgagagggtcacccaccacatagcctgggccggtcaagagattctcaggttccagtgacttccagtgtagtcccagaagctaaagcttcccggggaggccttccttcccttgcaaatgggcaaggcatttactcagtcaagcccctcctggatacctctcgaaacctgcccgccacagacgagggcgatattatatccgttcaggaaacaagctgtctggtgacggacaaaattaaagtaactcggaggcactactgctacgaacagaactggccgcatgagtctactagttttttttcagtgaaacagaggatcaagtcatttgagaatcttgctaacgcagaccggcccgtagccaagagtggtgcctccccgtttctgtctgtcagttcgaagcctccgataggacgccgtagcagcggatccattgtctctggcagtctggggcatccaggtgatgccgctgcccgactgcttcgaagatcgctgtcctcgtgttctgaaaatcaaagcgaagccggaacactcttgccacagatggcaaaatcaccctccattatgacgctaaccatttctcggcagaatccacccgaaacatcctccaaaggctccgatagtgaattgaaaaagagcctgggtccactcggcattcctacacccaccatgactctggcctcccctgtaaagaggaataaatctagcgtgaggcatactcagccatcaccagtcagccggagtaaactgcaagaactgagggctctctctatgccagatctcgataaattatgcagcgaggattacagcgctggtcccagcgctgtgttatttaaaactgagctggaaatcacaccccgacgcagtcctggacctcctgcaggcggggtgtcctgtcccgagaagggggggaaccgtgcttgccctggaggttccgggcctaaaacctccgctgcagagaccccctcgagcgcgtccgacactggagaggcagcccaggacctcccattcagaaggagctggagcgtgaatctggaccagctcctagtctccgcaggcgaccagcagcgactgcaatcggtgttaagcagcgtgggatctaaatctactattctcaccctaattcaggaagccaaagcccagtctgaaaatgaggaggacgtctgtttcatcgttctgaataggaaggagggctcaggtctaggattttcggtggctggaggaaccgacgtagaacccaagtctattacagtccatagggttttcagtcagggagctgcctctcaggaggggaccatgaatcgtggtgactttttattgtcggttaacggcgcctccttggcaggcctggcccacggaaacgtgctgaaggtgctacatcaggcacaattgcacaaggacgccctggttgtcatcaaaaaaggtatggaccagcctcgccctagcgcacgtcaagagccccccacagcgaatggtaaaggcctgctgagtcggaaaaccattccgctagaaccagggatcggtcggagtgttgcagtgcacgacgcgctgtgcgtcgaagttctcaagacgagcgctggccttgggctctctttggatggcggtaagtcatcagtgaccggtgatgggcctctcgtcataaaaagggtttataaaggtggcgccgctgagcaggccggtattattgaagcaggcgatgagattttggctatcaacggaaagccactcgtggggttaatgcattttgatgcatggaacatcatgaaaagtgtaccagagggacctgtccagctgttgattcgcaaacatcgtaactctagctag

SEQ ID NO: 253446 - DNA, 7923 bp, Artificial Sequence
  derived and/or modified sequence
atgccgatcactcaagacaacgcagtgttgcacctgccactcctgtaccagtggttacagaacagcctgcaggagggtggcgacggtcctgaacaaagactttgccaagctgctattcaaaaacttcaggaatatattcaactcaattttgctgtcgacgaatctacagtgccccctgaccactctccgcccgagatggaaatttgcactgtttacctgacaaaggagttaggcgacaccgagacagtaggcttgtcatttgggaacataccagtgttcggagattatggtgagaaaaggcgcggcggcaagaaacggaagactcaccagggtcctgtcttagacgtcgggtgcatctgggtgactgagctacgtaagaacagccccgccgggaagtctggaaaggtccgcctcagagatgagattctgagtctcaacgggcagcttatggtgggggttgacgtgtcaggcgcctcttacctggccgagcaatgctggaatggaggttttatctatctgataatgctccggcgcttcaaacataaggctcattctacttataatggtaattcatccaattcgtctgagccaggtgaaacgcctacccttgaattgggagaccgaaccgccaaaaaagggaaacgcactcgcaaattcggtgtaatttcacggccacccgccaacaaggccccggaagaatctaagggttccgcggggtgtgaagtgtcatccgacccatctactgagctggagaatggccccgaccccgaactgggtaacggacacgtgtttcagttagaaaacgggccagactctcttaaggaggtggcaggcccacatctggagagaagtgaagtggacaggggcacggagcatagaattccgaagactgatgcaccattaacaacctccaacgataaaaggcgctttagtaaaggcggcaaaactgactttcagagctcggattgtctagctagagaagaagtgggaaggatttggaagatggaattgctgaaagagagcgatggactgggcatccaggtatctggaggtcgtgggagtaagcggagtccacacgcaattgtggtcacacaggtgaaagaaggcggggccgcacaccgtgagtaccatatagtgaaaaagagcacccgctccctgtccacaactcaagtggaatctccatggcgcctcatccgaccatctgttatctctataattggtctgtacaaggagaaggggaaaggactcggcttctccattgccgggggcagggattgtattcggggccaaatgggcatcttcgtaaaaacaatcttcccaaatgggagcgcagccgaggatggccgcctgaaggaaggcgacgagatccttgacgtcaatggtatcccaatcaaaggtttgactttccaggaagcaattcatacatttaaacagatccgatccggacttttcgttctcacagtcaggactaaactcgtgagcccgtctctgactccgtgctcgacacccacccacatgagtcggtctgcatcccccaattttaacacctctggcggcgctagcgcaggggggtcagacgagggctcatcctcctccctgggcaggaagactccagggcccaaagacaggatagtgatggaagtaacccttaacaaagaacctagagtggggctggggatcggcgcctgttgccttgccctagagaattcgcctcccgggatctatatccacagcctagcaccaggctcagtggccaagatggagtctaacctttcgagaggtgatcagattctggaggtgaactccgtgaatgttagacacgccgcactgtcaaaggtacacgcaattttgtcgaaatgtcccgttagtgaacaggagatggacgaggtgattgcgcggtcaacatatcaagagtcaaaggaggcgaactcctcacctgggttgggcacgcctctgaagagtccgtccctggccaagaaggattctctcatcagcgaatcagaattgtcacagtactttgctcacgacgttcccggccccttatccgacttcatggtcgccggctctgaggatgaagatcacccaggctccgggtgcagtacctcagaggagggcagcctgcccccttccacatccaaggagccgggcaagcctcgggccaacagtttagtcactctgggctctcatcgcgcttccggtttattccacaagcaagtgacagtagctaggcaggccagcctgccaggaagtccgcaagcattgcggaatcctctcttgcgtcaacggaaagtagggtgctatgatgcaaatgacgcaagcgatgaggaggaattcgaccgcgaaggagattgcatctctctgcccggtgcattacctggacccattcggccgctatctgaagatgatccgcgaagagtatcaatcagcagttcaaaagggatggacgttcacaatcaggaagaaagaccacggaagactctggtgagtaaggcgatctctgcgcccctgcttggatcaagcgtggatcttgaagagtcaatccctgaagggatggtcgacgccgcttcctacgccgcaaatctcacagactctgctgaagcccctaaagggagtcctggaagttggtggaagaaggagctttcagggagtagctctgccccgaaactagagtacaccgtgaggacggatacacagagccccaccaatacaggaagtcccagttcccctcaacagaaaagtgaaggacttgggtcaagacacagacccgtggcaagagtgtcaccgcactgcaagcggtccgaggcagaggcaaaaccctccgggagccagaccgtcaaccttaccggacgggccaatgatccttgcgacttggattctcgggtgcaggccacctctgttaaggtcaccgtggccgggtttcaacccggaggcgccgttgagaaactatgccaagagagtctgggcaagctcaccactggagatgcgtgtgtcagcacatcttgtgaactcgccagtgccctttctcacctcgacgcgtcccatttaaccgagaatttgccaaaggctgcaagcgagctgggccagcaacccatgaccgctagtgatttgatatcctccccaggcaaaaagggcgccgcccaccccgacccctccaaaacttcagtggacacaggtcaagtgtcacgccctgagaaccctagccaaccagcgtctcctcgtgtcactaaatgtaaagcccgctcaccagttcggctgccccatgagggatcccccagtcccggggagaaggctgcggctccgcctgattattcgaagacgcgctcggcctccgaaactagcacacctcacaatacaagacgggtcgccgcactcaggggagcaggacccggggccgaggggatgacgcctgcaggagcagtgctgcctggtgatcctctgacctcacaggaacagcgccagggcgctccgggaaaccactccaaggccctcgaaatgaccgggatccatgcccccgaaagcagccaggaaccgagcctgttagaaggggccgattccgtgtcctcccgggccccccaggcctcactgagtatgctgccctcgaccgataacactaaagaggcctgcggtcatgtatcaggacattgctgccctggagggagccgggaaagccccgtcacagacattgacagtttcattaaggagctggatgcctccgccgcccgcagcccctcttcgcagaccggggattccggatcacaagagggttctgctcaaggccacccccccgcaggagccggtggaggtagctcatgccgggcagaacccgttccagggggacagacaagttcaccacgccgtgcttgggccgcaggcgcgccagcttatcctcagtgggcgagccagcctagcgttctggacagtatcaatcccgacaagcacttcacagttaacaagaactttttgtctaactacagtcggaacttcagctcttttcacgaggattctaccagtctgtcgggtctgggtgatagcactgagccatcactgagttccatgtatggtgatgccgaagactccagttctgatcccgagagtcttactgaagctcccagggccagcgctcgggatgggtggtcccccccaagatcacgcgttagcctgcacaaggaggaccccagcgagagcgaggaagagcaaatcgagatctgctctacacggggatgtccgaaccctcctagctcccccgcccacttgcctactcaggctgccatttgccctgcctccgcaaaggtgctgtctctgaagtattctacgcccagggagtctgtcgctagtcctcgcgaaaaagctgcctgcctgccggggtcctacacgagcggtcccgattcctctcagccatcctccttgctagagatgtccagccaggaacatgaaacccacgccgacatcagtacaagccagaaccaccgccccagctgcgcagaggagaccacggaggtgacgagcgcatctagcgctatggagaacagtccactctcgaaagttgctagacatttccattccccacctatcatactgagcagccccaacatggtgaatggattggaacatgacctgttagacgatgaaacccttaaccagtacgagacaagcattaacgcagcggcttcacttagctctttctccgtagacgtccctaaaaacggcgaatccgtgctggagaatcttcacatttctgagtcacaggatttggacgacttgcttcagaagcctaaaatgatcgccaggaggcctattatggcctggtttaaggagattaataagcacaatcagggaacccacttaagaagtaagaccgaaaaggaacagccacttatgccagctagatcacctgactccaaaattcaaatggttagtagtagccagaaaaagggagtgaccgtcccccattcaccccctcaacctaagacaaatctggagaacaaagacctaagcaagaaatcccccgctgagatgctccttacaaatggacagaaagctaagtgtgggcctaagctgaagcgattgtcactgaaagggaaagccaaggttaattccgaggcacccgccgcaaatgccgtcaaagccggcggtacagatcatcgcaaacccttgatcagccctcagacaagccataagacactgtcaaaagcggttagtcagagactgcatgtagcggaccacgaggatcctgatcggaatactacagccgccccgagaagtccgcagtgtgtgctcgagtcaaaacccccgctggctaccagcggacccctcaaacctagcgtctcggacacaagcattagaacttttgtgtccccactgacatctcccaagcccgtcccagagcagggaatgtggtcccgattccatatggcagtccttagcgagcccgaccggggctgcccaacgaccccaaaatctcctaagtgcagggccgaggggagagcaccacgagccgatagcggtcccgtgtctcccgctgccagccgcaatggaatgagcgtagcaggcaacagacagagcgagccccgcctagccagtcacgttgctgctgataccgcccagcctaggccaacaggcgaaaagggtggaaacattatggcgtccgataggctggagagaacaaaccaattaaaaatcgtggagatatcagccgaagccgtgagcgaaaccgtgtgcggaaataaacctgctgagtctgatcgcagaggcggatgtctggcacaggggaactgccaagagaagtccgaaatccgtctctacagacaagtggcagagtcgagcactagtcacccaagctccctgccctcgcatgcctctcaggctgaacaagagatgtctaggtctttttctatggctaagctcgcctcttcttcaagctccctgcagactgccatcagaaaggcggaatattcgcagggcaagtcgtcactaatgtcagattcaagaggtgtgccaagaaacagtatcccgggtggacctagtggcgaagatcacctttacttcaccccacgacccgccacccgcacctattcgatgccagcccagttttccagccattttggtagggagggacacccaccacacagtctcggcaggagcagggacagtcaggttccagtgacgtcctctgtggtgcccgaggccaaagcgtcccgaggcggcttacccagcctcgcaaacggccaaggcatatactccgtgaagccactgctggatacctctagaaatctccctgctaccgatgagggtgatattattagcgtgcaagagaccagttgtctcgtcacagataagataaaggtgaccaggcgtcattactgctatgagcagaattggccccatgaaagcacgtccttcttctctgtaaaacagagaatcaagtccttcgagaatttagccaatgccgatagacccgtcgcaaagtctggtgcctcgccattcctctcagtgtcttccaaacccccaattgggaggcgcagctcaggttccatcgtgtcgggctccttgggccacccgggagacgccgcggcacggctcctacgaagaagtctctcatcctgctcagaaaaccagtcggaggcaggcacgctgctgccacaaatggcaaagtccccatcaataatgacactgaccattagtcggcaaaatccccctgagaccagctctaaaggatctgactcagagctgaagaagtccctgggaccactgggtatcccaacccccacaatgaccctagcttcccccgtgaagcggaataaatcgtccgtgcgccacacacagccttcacccgtgtccaggagcaaactgcaggaactgcgagccctgtccatgcctgaccttgacaagctatgttctgaagactactccgccgggccgagcgccgtgctgtttaaaaccgagctcgaaattacgccccggcgaagcccgggtcctcccgctggtggcgtttcatgtcccgaaaaggggggtaatagggcctgccccgggggctccggcccaaagacaagcgccgcggagacccccagttccgcctcagacacaggcgaggccgcacaagatctgccctttagacgcagttggtctgtgaacctggatcagctgctcgtgagcgcaggtgaccagcaaagactgcaatcagtactctcttcggtaggatccaaaagtacaatcttgaccttgatccaggaggctaaagcccagagcgagaacgaggaagatgtctgcttcatcgttctcaacagaaaggagggctccggcctgggtttttcagtagctggaggcacagacgtggagccaaagtcaattaccgtgcatcgggtttttagccagggcgctgcaagtcaggaggggactatgaataggggggatttcctgctgtccgttaatggggcctccttagctgggttagcacacggaaatgtgcttaaagttctacatcaggctcaattgcacaaagacgctctggtagttattaagaagggaatggaccagccacggccatccgcccgtcaggaaccgcctacggctaatgggaaaggactcctgtcccgaaagactattcccttggagccaggcataggaagatcagtcgctgtgcacgatgccctgtgcgttgaggtactaaagacatctgccggccttggcttgagtctggatggcggcaagagttcagtcaccggggatgggcccctggtgatcaaaagagtctataaaggcggcgctgctgaacaagccggaataatagaagctggcgacgagatcctggctatcaacggtaagccccttgtgggcctcatgcacttcgacgcttggaatatcatgaagagcgtacccgaaggaccagtccagcttttgatacgaaaacaccggaattcctcgtag

SEQ ID NO: 253447 - DNA, 8520 bp, Artificial Sequence
  derived and/or modified sequence
atgccaatcactcaggacaatgcagtgctgcatctgccgctgctttatcagtggctgcaaaatagcctgcaagagggaggtgacggcccagagcaaagattgtgccaggcagccattcagaagctccaggagtatatccaacttaatttcgccgtagacgaatccacagtgcctcctgatcactctccacctgagatggagatctgtactgtatatctgactaaggagcttggcgatacagagacagtgggtctgtctttcggaaatatccccgttttcggagattacggagagaaacgaagaggcgggaagaagaggaagactcatcagggaccagtgcttgacgtgggatgcatctgggtgacagaacttagaaagaactccccagccggtaagagcggaaaagtgaggttgcgcgacgaaattctgtcccttaatggccagctgatggtaggagtggacgtgagtggagcttcctatctcgccgaacaatgctggaatggtgggttcatatatttgattatgctgcggagattcaagcacaaagcccattcgacatataacggaaactcttccaactccagcgagccaggggagactcctacattagaactgggcgacagaactgcgaaaaaaggcaaaaggacacgaaaatttggcgttatcagtcgaccacctgcaaataaagcgcccgaagagtccaagggatccgccgggtgcgaagtgagtagcgaccccagcaccgagctggagaatggcccagatccagagctgggaaatggccacgttttccagttagagaatggaccagattccctgaaagaagtcgccggaccacatctagagaggtccgaggtggatcgaggtaccgagcatcgtattcccaagacagatgcccctctcaccacctccaatgataagaggcggttctcgaagggaggaaaaacagacttccagagtagcgactgcttggctagagaggaggtcggaagaatatggaaaatggagctcctgaaggaatcagacggactgggaatccaagtatctggtggaagggggagcaaaaggtctccgcatgcaatcgtcgtgactcaggtgaaagagggtggagccgctcaccgagacggaaggctgagcctgggtgatgaactcctggtgatcaacggacacctgctggttggactgtcccatgaggaggcagtagcgatccttcggtccgccaccggtatggtgcaactggtagttgcctctaaggagaacagcgccgaggatctcctgagactgaccagcaagtcgcttcccgacctgacatcatcagtggaggacgtgagctcttggaccgacaacgaggatcaggaggcagatggagaggaagatgaagggacctcctcaagtgtgcagcgagcgatgccaggtacagacgaacctcaggacgtctgtggggccgaagagtcaaaaggcaacttggaatctccaaaacagggtagtaataagataaagctcaagtctcggctgtcggggggagtgcataggctcgaaagtgttgaggaatacaacgagcttatggttaggaacggagatcctagaatccgcatgctggaggtctccagagacgggcgtaagcatagccttccccagttgttagacagtagcagcgcgtcccaggaatatcatattgtaaagaagagtacaaggagtttgagcaccacgcaggtggagtctccatggagactgatccgacctagtgtcattagtattattgggttgtacaaggagaaggggaagggcttgggattttctattgccggggggagagattgcatccgcggacagatgggaatttttgtgaagacaattttcccaaatggatccgccgccgaggatggacggctgaaggaaggtgacgagatcttggatgtcaatggcattcctataaaaggtctgacttttcaggaagcaatccacacattcaagcaaattcggtccggattgttcgtcttgactgttagaacaaaactggtttccccaagcctcacgccttgctcgacaccgacacacatgagcagatccgctagcccgaactttaatacatccggtggcgctagcgctggcggttctgacgaaggatcaagtagctccctaggacgcaaaactcccggccccaaagataggattgttatggaggtcacccttaacaaagaacctcgcgtaggtctggggatcggagcatgttgtctggcactggaaaatagtcctccgggcatctacatacatagtcttgcaccaggctctgtcgctaagatggaaagcaatctgtcccgcggcgaccagattctcgaggtcaactcagtaaacgtgagacatgctgccctctccaaagtacacgccatccttagtaagtgccctccgggcccagtgcgactggtaatcgggagacatcctaacccaaaggtttctgagcaggagatggatgaagtgatcgcgagatcaacataccaggaatccaaagaggctaactcctcccccgggttgggaacaccccttaagtcgccttctttagctaaaaaagattccctgattagtgaaagcgagcttagtcagtactttgcgcatgacgtacccgggcccctgagtgactttatggtggctgggtccgaggacgaggaccaccccggcagcggctgttccaccagcgaggaagggtcactgcctcccagtacatccacccacaaagagccggggaaaccacgggccaacagcttggtcactctcggctctcaccgggcctctggcctctttcacaaacaggtcactgtcgcccggcaggcctctctccccggctctccgcaggcgctcaggaaccctcttcttcgtcaaaggaaggtgggctgttacgatgccaacgacgcctcagatgaagaagagttcgaccgcgagggtgattgcatttcactccccggggcacttccggggcctataagaccactgtcggaagacgaccccaggagggtatcgataagctcatcaaaggggatggatgtgcataatcaagaggagaggccccggaagactctggtgagcaaggcgatctccgcccccttactggggtcctccgtcgacctggaggaaagtattccagaaggtatggtagacgcggcctcttacgccgctaacctgacagatagcgccgaggcacctaagggatctcccggcagctggtggaaaaaagagctgagcggatcaagctctgcgcctaaactggagtataccgttcgaacggatacacaaagtcctacaaatacaggctcccccagttcacctcaacagaaatctgaaggcctgggaagtaggcatcgaccagttgctcgagtgtctccccattgtaagcgatccgaggctgaggccaaacccagcggctctcagaccgtaaaccttaccggcagagctaacgacccgtgcgacctcgactcccgggtgcaggcaacatccgtaaaagttactgtggcgggtttccaaccggggggagctgtggaaaaggaatccctgggcaaactgacaacgggggacgcttgcgtgagcacaagctgcgagctggcgtctgcgctgtctcatttggatgcttcccatttgactgagaacctccccaaggctgcctcagagttgggccagcagccaatgacagaacttgattccagttctgacctgatcagctcccccggaaaaaagggtgcagctcaccccgaccctagcaaaacgtcggtagatacagggcaggtctctagaccagagaacccatctcagccagcttcacctagggtcaccaaatgcaaggcccgatcccccgtacgcctccctcatgaggggtctccttctccgggtgagaaggccgcagcccccccagattattcaaagacaaggagcgcaagtgaaacaagtacgccacacaacacacgccgagtggcagcactgcgaggcgccggtcctggggcagagggaatgactccggctggcgcagtactgcccggcgaccccttaacttcccaagagcagcgccaaggggctcctggaaatcactcgaaagcactcgagatgacgggcatccacgcgcccgagtcttctcaggaacctagcctgttagagggcgccgattcagttagcagtagagccccgcaggcatccctgtccatgttacccagcacggataacaccaaagaggcttgcgggcacgtgtctggacattgttgcccaggaggtagccgcgaatcccctgtgacagacattgacagctttattaaggagcttgacgcatccgccgccaggtctccatcaagtcagacaggggactccggctcgcaagagggttctgcacaagggcatccccctgcgggcgccggcggggggagttcctgcagggctgaacctgtgccaggtggacagacctcatccccccgtcgtgcttgggccgccggcgccccagcatatccgcagtgggcctcccagccttcggtgttggatagtatcaaccccgacaagcactttacagtgaataagaattttctgagcaattatagtcgaaattttagcagtttccatgaggactcgacttctctgagtggtcttggagattcaaccgagccctcactctcctccatgtacggggacgctgaagactcttcctcggaccctgagagcttgacggaagcgccccgcgcgagtgcccgggacgggtggagccctccaagaagtcgagtcagtttgcacaaagaagaccccagcgagtcagaggaagagcagatagaaatctgctcaacccgtggctgccctaacccgccctcttctcctgcccacctgcccacgcaagctgccatctgtcctgcttctgccaaggtcttgtcactgaaatattcaacaccacgagagagtgtggctagccccagagagaaggcggcttgcctgcccggtagctacacaagcggccctgattcatctcagccaagctcgctgttggagatgtcttcacaggaacacgaaacccacgctgatatctctacatcacagaatcaccgcccatcctgcgccgaggagactaccgaggtgaccagcgcgagctctgccatggagaacagtccactgagtaaggtggctcgccacttccactccccgccaattatcttaagctcccccaatatggtcaacggactggaacacgatcttctcgatgacgagaccctgaaccagtacgagacgagcatcaatgcagccgcctccctttcaagcttctccgtggacgtccccaagaatggcgagagcgtgctggagaacctgcatatcagcgaatcccaagatttagacgacctgctgcaaaagcctaagatgatagcccgtcgtcctattatggcctggttcaaggaaattaataaacacaaccaggggacacatctccgttccaagactgaaaaggaacagcctctgatgcctgcccgcagcccggactctaaaatccaaatggtttcaagcagtcagaaaaagggagtcaccgttcctcatagcccaccacagcccaagaccaatctcgaaaacaaagacctgagtaagaaatcccctgccgagatgctgttgacaaacggacagaaggcgaagtgcggacctaaactgaaaaggctgagcttaaaaggaaaggctaaggttaacagcgaagcacctgctgcaaatgccgttaaagcggggggtactgaccatagaaagccattgatttcccctcagacttctcataagacactgagtaaggctgtctcgcagcggctgcacgtcgcagatcacgaagacccagataggaacacaactgccgccccaagatcccctcagtgtgtgctcgagtccaagccccctctcgcaaccagcggcccactcaagcctagcgtctccgacacctccattcgcaccttcgtctcccccttgacatccccaaaaccagtccccgagcaaggcatgtggtcacgtttccatatggccgtactgtcagagccagatcggggatgtccgactaccccgaagtcccctaagtgtagagccgaggggcgggctccgcgggccgattcgggccccgtctcacctgctgcctcacgaaatggcatgagtgttgcgggtaatcgccagtccgagcccagactcgcttcccatgtagccgctgatactgcccagcctcggcccacaggcgagaaggggggcaacattatggccagcgacagactggaacgtacgaaccaactgaaaatcgtggagatatccgccgaggctgtgagtgagaccgtgtgtggaaacaagcctgccgagtcggaccgcagaggcgggtgtcttgcccagggcaattgtcaggagaaaagcgaaattagactctatcgccaggtggcggagagcagtacatctcacccgtcctctctgcccagccatgcgtcccaggctgaacaggagatgtccaggtccttcagcatggcaaaactcgcctcatcctcaagttcactacagactgctatccggaaggccgaatatagccagggtaagagctcgctgatgtcagatagtaggggtgtgccaaggaatagtatccccgggggaccctccggagaggaccacctctactttacaccaagaccagccacccgcacttactctatgccggcacagtttagttcgcactttggacgggaaggacatcctcctcatagtctgggacgatctagagactctcaagtcccagtcacaagtagcgttgtcccagaagcaaaggcctcgagagggggcttgccaagccttgccaacggccaaggcatctattctgttaagccgctgctggatacatcacgcaatttgcccgctactgacgaaggggatatcatttccgtgcaagaaacatcctgcctggttaccgacaagatcaaggtgacccgacggcactattgttatgagcaaaattggccccacgagtctacaagctttttctctgtaaagcagcggataaaatccttcgagaacctcgccaatgcggatagacccgttgcaaagtcaggagccagcccctttctttccgttagcagcaagccacccattgggaggagaagcagcggctctatcgtctccggctcactgggccaccccggtgacgctgctgcccgcctgctacgacggtctctgtcttcttgctccgagaatcagtctgaagctggcacgctactccctcagatggccaagtccccatcgatcatgacgctgacaatcagccgtcaaaacccccctgaaacatcatctaagggctctgactccgagctgaagaaaagcctcggaccattgggaatccccacccccactatgacactcgccagcccagtaaaaaggaacaagtctagcgtacgacacactcagcctagtccagtgtctcgcagcaaattgcaggaacttcgtgctctaagcatgccagacctggacaagctttgttctgaagactacagtgccggcccatctgccgtgttgtttaaaaccgagcttgagatcacgccacggcgaagccctgggccgcccgctgggggagtctcatgccctgaaaagggagggaaccgcgcctgcccaggtgggagtggccctaagacttcagctgccgaaacaccttcatctgcgtcagatacaggcgaagccgcgcaggatcttccatttcgaagaagttggagtgtgaacttggatcagctgctggtatctgcaggcgaccagcaaaggctgcagagcgtactcagcagcgtcgggtctaagtccaccatcctcacgctcattcaggaagccaaggcacaatctgagaatgaggaggacgtatgttttatcgtgctcaaccggaaggaaggatcaggactgggattcagcgtggcgggtggtaccgacgtggagccgaaatccattaccgttcacagggtgttttcccagggggccgcctctcaagagggaaccatgaaccggggagacttcctgctttccgtgaatggagccagcctggctggtctggcccacggtaacgtgctcaaggttctacatcaggctcagctccacaaagacgcccttgtcgttattaagaaaggcatggatcagcccagaccgagtgcccgccaagaaccgcctactgctaacggcaaaggcctactgagtagaaagaccatacctttggagcccggaatcggcaggtccgtcgccgtacacgatgccctatgcgtcgaggtactgaaaacatcggccggtctcggcctttccctggacggggggaagagcagtgtgaccggcgacggtcctctggtcattaagagagtatacaagggcggggccgccgagcaggccggtatcatagaagcgggagacgagatcctcgcaatcaacggaaaacccctcgttggtctgatgcactttgacgcctggaatattatgaagtcagtgccagaaggtccagtgcagctattaattagaaagcaccggaattcgagctag

SEQ ID NO: 253448 - DNA, 8520 bp, Artificial Sequence
  derived and/or modified sequence
atgcccatcacccaggacaatgctgtgctgcacctgcccctgctgtaccagtggctgcagaacagcctgcaggagggcggagatggccctgagcagaggctgtgccaggccgccatccagaagctgcaggagtacatccagctgaactttgctgtggatgagagcacagtgcccccagaccacagccccccagagatggagatctgcaccgtgtacctgaccaaggagctgggggacacagagaccgtgggcctgagctttggaaacatccctgtgtttggagactatggagagaagaggcggggcggcaagaagaggaagacccaccagggccctgtgctggatgtgggctgcatctgggtgacagagctgaggaagaacagccctgctgggaagagcggcaaggtgcggctgagagatgagatcctgagcctgaatggccagctgatggtgggcgtggatgtgtctggggccagctacctggccgagcagtgctggaatggaggcttcatctacctgatcatgctgcggcgcttcaagcacaaggcccacagcacctacaacggcaacagcagcaacagcagcgagcctggagagacccccaccctggagctgggggacagaacagccaagaagggcaagaggaccaggaagtttggagtcatcagccggcccccagccaacaaggcccctgaggagagcaaaggatctgctggctgtgaggtgtccagtgaccccagcacagagctggagaatggaccagaccctgagctgggcaatggccacgtgttccagctggagaatggaccagacagcctgaaggaggtggccggcccccacctggagaggtctgaggtggaccggggcacagagcaccgcatccccaagacagatgcccccctgaccaccagcaatgacaagaggcgcttcagcaagggcggcaagacagacttccagagcagtgactgcctggcccgggaggaggtgggccgcatctggaagatggagctgctgaaggagagtgatggcctgggcatccaggtgtctgggggccggggcagcaagaggagcccccacgccatcgtggtgacccaggtgaaggagggcggggccgcccacagagatggccgcctgagcctgggagatgagctgctggtgatcaatggccacctgctggtgggcctgagccatgaggaggccgtggccatcctgcggagcgccaccggcatggtgcagctggtggtggccagcaaagaaaattctgctgaggacctgctgcggctgaccagcaagagcctgcctgacctgaccagctctgtggaggatgtgtcctcctggacagacaatgaagaccaggaggctgatggagaggaggatgagggcaccagcagctctgtgcagagggccatgcctggaacagatgagccccaggatgtgtgtggggctgaggagagcaagggcaacctggagagccccaagcagggcagcaacaagatcaagctgaagagccggctgagcggcggcgtgcaccggctggagagcgtggaggagtacaatgagctgatggtgagaaatggagacccccgcatccgcatgctggaggtgtccagagatggcaggaagcacagcctgccccagctgctggacagcagcagcgccagccaggagtaccacatcgtgaagaagagcaccaggagcctgagcaccacccaggtggagagcccctggaggctcatccggcccagcgtcatcagcatcatcggcctgtacaaggagaagggcaagggcctgggcttcagcattgctgggggccgggactgcatccggggccagatgggcatctttgtgaagaccatcttccccaacggcagcgctgctgaagatggccgcctgaaggagggagatgagatcctggatgtgaatggcatccccatcaagggcctgaccttccaggaggccatccacaccttcaagcagatccgcagcggcctgtttgtgctgactgtgaggaccaagctggtgagccccagcctgaccccctgcagcacccccacccacatgagccgcagcgccagccccaacttcaacaccagcggcggggccagcgctgggggcagtgatgagggcagcagcagcagcctgggcaggaagaccccaggccccaaggacagaattgtgatggaggtgaccctgaacaaggagccccgggtgggcctgggcattggagcctgctgcctggccctggagaacagccccccaggcatctacatccacagcctggcccctggctctgtggccaagatggagagcaacctgagcagaggagaccagatcctggaggtgaacagcgtgaatgtgagacatgctgccctgagcaaggtgcacgccatcctgagcaagtgccccccaggccctgtgcggctggtgattggccgccaccccaaccccaaggtgtctgagcaggagatggatgaggtgattgcccggagcacctaccaggagagcaaggaggccaacagcagccctggcctgggcacccccctgaagagccccagcctggccaagaaggacagcctcatcagcgagagcgagctgagccagtactttgcccatgatgtgcccggccccctgagtgacttcatggtggccggctctgaagatgaggaccaccctggcagcggctgcagcaccagcgaggagggcagcctgccccccagcaccagcacccacaaggagcccgggaagccccgggccaacagcctggtgaccctgggcagccaccgggccagcggcctcttccacaagcaggtgacagtggcccggcaggccagcctgcccggcagcccccaggccctgaggaaccccctgctgcggcagaggaaggtgggctgctatgatgccaatgatgccagtgatgaggaggagtttgaccgggagggggactgcatcagcctgcccggggccctgcccggccccatccggcccctgtctgaagatgacccccggcgggtgtccatcagcagcagcaagggcatggatgtgcacaaccaggaggagcggcccaggaagaccctggtgtccaaggccatcagcgcccccctgctgggcagctctgtggacctggaggagagcatccctgagggcatggtggatgctgccagctatgctgccaacctgacagacagcgctgaggcccccaagggcagccctggctcctggtggaagaaggagctgagcggcagcagcagcgcccccaagctggagtacacagtgaggacagacacccagagccccaccaacacaggcagccccagcagcccccagcagaagtctgagggcctgggcagccgccacaggcctgtggcccgggtgagcccccactgcaagaggtctgaggccgaggccaagcccagcggcagccagacagtgaacctgaccggccgggccaatgacccctgtgacctggacagccgggtgcaggccacctctgtgaaggtgacagtggccggcttccagcctggaggagctgtggagaaggagagcctgggcaagctgaccactggagatgcctgtgtgtccaccagctgtgagctggccagcgccctgagccacctggatgccagccacctgacagagaacctgcccaaggccgccagcgagctgggccagcagcccatgacagagctggacagcagcagtgacctgatcagcagccctgggaagaagggggccgcccacccagaccccagcaagacctctgtggacaccggccaggtgtccaggcctgagaaccccagccagcctgccagcccccgggtgaccaagtgcaaggcccggagccctgtgcggctgccccatgagggcagccccagccctggagagaaggctgctgcccccccagactacagcaagaccaggtctgccagcgagaccagcaccccccacaacacccggcgggtggccgccctgcggggggccggccctggagctgagggcatgaccccagctggagctgtgctgcccggggaccccctgaccagccaggagcagaggcagggcgcccctggcaaccacagcaaggccctggagatgacaggcatccacgcccctgagagcagccaggagcccagcctgctggagggcgctgacagcgtgagcagccgggccccccaggccagcctgtccatgctgcccagcacagacaacaccaaggaggcctgtggccacgtgtctggccactgctgccctgggggcagccgggagagccctgtgacagacatcgacagcttcatcaaggagctggatgccagcgctgcccggagccccagcagccagacaggagacagcggcagccaggagggcagcgcccagggccaccccccagctggggccggcggcggcagcagctgcagagctgagcctgtgcctgggggccagaccagcagcccccggcgggcctgggccgccggggccccagcctacccccagtgggccagccagcccagcgtgctggacagcatcaacccagacaagcacttcaccgtgaacaagaacttcctgagcaactacagcaggaacttcagcagcttccacgaggacagcaccagcctgagcggcctgggggacagcacagagcccagcctgagctccatgtatggagatgctgaggacagcagcagtgaccctgagagcctgacagaggccccccgggccagcgccagagatggctggagccccccaagaagccgggtgtccctgcacaaggaggaccccagcgagagcgaggaggagcagatcgagatctgcagcacccggggctgccccaacccccccagcagccctgcccacctgcccacccaggccgccatctgcccagccagcgccaaggtgctgagcctgaagtacagcaccccccgggagagcgtggccagcccccgggagaaggccgcctgcctgcccggcagctacaccagcggccctgacagcagccagcccagcagcctgctggagatgagcagccaggagcacgagacccacgccgacatcagcaccagccagaaccaccggcccagctgtgccgaggagaccacagaggtgaccagcgccagcagcgccatggagaacagccccctgagcaaggtggcccggcacttccacagcccccccatcatcctgagcagccccaacatggtgaatggcctggagcatgacctgctggatgatgagaccctgaaccagtatgagaccagcatcaatgctgctgccagcctgagcagcttctctgtggatgtgcccaagaatggagagagcgtgctggagaacctgcacatcagcgagagccaggacctggatgacctgctgcagaagcccaagatgattgcccggcggcccatcatggcctggttcaaggagatcaacaagcacaaccagggcacccacctgcggagcaagacagagaaggagcagcccctgatgcctgcccggagcccagacagcaagatccagatggtgagcagcagccagaagaagggcgtgacagtgccccacagccccccccagcccaagaccaacctggagaacaaggacctgagcaagaagagccctgctgagatgctgctgaccaacggccagaaggccaagtgtggccccaagctgaagaggctgagcctgaagggcaaggccaaggtgaacagcgaggccccagctgccaatgctgtgaaggccggcggcacagaccacaggaagcccctcatcagcccccagaccagccacaagaccctgagcaaggctgtgtcccagaggctgcacgtggccgaccatgaagatcctgacaggaacaccacagctgcccccaggagcccccagtgtgtgctggagagcaagccacccctggccaccagcggccccctgaagcccagcgtgtctgacaccagcatccgcacctttgtgagccccctgaccagccccaagcctgtgcctgagcagggcatgtggagccgcttccacatggctgtgctgtctgagccagaccggggctgccccaccacccccaagagccccaagtgcagagctgagggccgggcccccagggctgacagcggccctgtgtccccagctgccagcagaaatggcatgtctgtggccggcaaccggcagagcgagccccggctggccagccacgtggccgctgacacagcccagccccggcccactggagagaagggcggcaacatcatggccagtgaccggctggagaggaccaaccagctgaagatcgtggagatctctgctgaggccgtgtctgaaacagtgtgtggcaacaagccagctgagagtgaccggcggggcggctgcctggcccagggcaactgccaggagaagtctgagatccggctgtaccggcaggtggccgagagcagcaccagccaccccagcagcctgcccagccacgccagccaggccgagcaggagatgagccgctccttctccatggccaagctggccagcagcagcagcagcctgcagacagccatcaggaaggccgagtacagccagggcaagagcagcctgatgtctgacagccggggcgtgcccagaaattccatccctgggggccccagcggggaggaccacctgtacttcacccccaggcctgccaccaggacctacagcatgcctgcccagttcagcagccacttcggccgggagggccaccccccccacagcctgggccgcagccgggacagccaggtgcctgtgaccagctctgtggtgcctgaggccaaggccagccggggcggcctgcccagcctggccaacggccagggcatctacagcgtgaagcccctgctggacaccagcaggaacctgcctgccacagatgaaggagacatcatctctgtgcaggagaccagctgcctggtgacagacaagatcaaggtgacccggcggcactactgctatgagcagaactggccccatgagagcaccagcttcttctctgtgaagcagaggatcaagagctttgagaacctggccaatgctgacaggcctgtggccaagagcggggccagccccttcctgtctgtgagcagcaagccacccatcggcagaagaagcagcggcagcatcgtgtctggcagcctgggccaccctggagatgctgctgcccggctgctgcggcgcagcctgagcagctgcagcgagaaccagagcgaggccggcaccctgctgccccagatggccaagagccccagcatcatgaccctgaccatcagccggcagaaccccccagagaccagcagcaagggcagtgacagcgagctgaagaagagcctgggccccctgggcatccccacccccaccatgaccctggccagccctgtgaagaggaacaagagctctgtgcgccacacccagcccagccctgtgagccgcagcaagctgcaggagctgcgggccctgtccatgccagacctggacaagctgtgcagcgaggactacagcgctggccccagcgctgtgctcttcaagacagagctggagatcaccccaagaagaagccctggccccccagctgggggcgtgtcctgcccagagaagggcggcaacagagcctgccctgggggcagcggccccaagaccagcgctgctgagacccccagcagcgccagtgacaccggggaggccgcccaggacctgcccttccgccgctcctggagcgtgaacctggaccagctgctggtgtctgctggggaccagcagaggctgcagagcgtgctgagctctgtgggcagcaagagcaccatcctgaccctcatccaggaggccaaggcccagagtgaaaatgaggaggatgtgtgcttcatcgtgctgaacaggaaggagggcagcggcctgggcttctctgtggccggcggcacagatgtggagcccaagagcatcaccgtgcacagggtcttcagccagggcgccgccagccaggagggcaccatgaacagaggagacttcctgctgtctgtgaatggagccagcctggccggcctggcccacggcaatgtgctgaaggtgctgcaccaggcccagctgcacaaggatgccctggtggtgatcaagaagggcatggaccagccccggcccagcgcccggcaggagcccccaacagccaacgggaagggcctgctgagcaggaagaccatccccctggagcccggcatcggccgctctgtggccgtgcatgatgccctgtgtgtggaggtgctgaagaccagcgctggcctgggcctgagcctggatggcggcaagagctctgtgactggagatggccccctggtgatcaagagggtgtacaagggcggcgctgctgagcaggccggcatcatcgaggccggagatgagatcctggccatcaacgggaagcccctggtgggcctgatgcactttgatgcctggaacatcatgaagtctgtgcctgagggccctgtgcagctgctgatcaggaagcacaggaacagcagctag

SEQ ID NO: 253449 - DNA, 7923 bp, Artificial Sequence
  derived and/or modified sequence
atgcccatcacccaggacaatgctgtgctgcacctgcccctgctgtaccagtggctgcagaacagcctgcaggagggcggagatggccctgagcagaggctgtgccaggccgccatccagaagctgcaggagtacatccagctgaactttgctgtggatgagagcacagtgcccccagaccacagccccccagagatggagatctgcaccgtgtacctgaccaaggagctgggggacacagagaccgtgggcctgagctttggaaacatccctgtgtttggagactatggagagaagaggcggggcggcaagaagaggaagacccaccagggccctgtgctggatgtgggctgcatctgggtgacagagctgaggaagaacagccctgctgggaagagcggcaaggtgcggctgagagatgagatcctgagcctgaatggccagctgatggtgggcgtggatgtgtctggggccagctacctggccgagcagtgctggaatggaggcttcatctacctgatcatgctgcggcgcttcaagcacaaggcccacagcacctacaacggcaacagcagcaacagcagcgagcctggagagacccccaccctggagctgggggacagaacagccaagaagggcaagaggaccaggaagtttggagtcatcagccggcccccagccaacaaggcccctgaggagagcaaaggatctgctggctgtgaggtgtccagtgaccccagcacagagctggagaatggaccagaccctgagctgggcaatggccacgtgttccagctggagaatggaccagacagcctgaaggaggtggccggcccccacctggagaggtctgaggtggaccggggcacagagcaccgcatccccaagacagatgcccccctgaccaccagcaatgacaagaggcgcttcagcaagggcggcaagacagacttccagagcagtgactgcctggcccgggaggaggtgggccgcatctggaagatggagctgctgaaggagagtgatggcctgggcatccaggtgtctgggggccggggcagcaagaggagcccccacgccatcgtggtgacccaggtgaaggagggcggggccgcccaccgggagtaccacatcgtgaagaagagcaccaggagcctgagcaccacccaggtggagagcccctggaggctcatccggcccagcgtcatcagcatcatcggcctgtacaaggagaagggcaagggcctgggcttcagcattgctgggggccgggactgcatccggggccagatgggcatctttgtgaagaccatcttccccaatggatctgctgctgaagatggccgcctgaaggagggagatgagatcctggatgtgaatggcatccccatcaagggcctgaccttccaggaggccatccacaccttcaagcagatccgcagcggcctgtttgtgctgactgtgaggaccaagctggtgagccccagcctgaccccctgcagcacccccacccacatgagccgcagcgccagccccaacttcaacaccagcggcggggccagcgctgggggcagtgatgagggcagcagcagcagcctgggcaggaagaccccaggccccaaggaccgcatcgtgatggaggtgaccctgaacaaggagccccgggtgggcctgggcatcggggcctgctgcctggccctggagaacagccccccaggcatctacatccacagcctggcccctggctctgtggccaagatggagagcaacctgagcagaggagaccagatcctggaggtgaacagcgtgaatgtgagacatgctgccctgagcaaggtgcacgccatcctgagcaaatgtcctgtgtctgagcaggagatggatgaggtgattgcccggagcacctaccaggagagcaaggaggccaacagcagccctggcctgggcacccccctgaagagccccagcctggccaagaaggacagcctcatcagcgagagcgagctgagccagtactttgcccatgatgtgcccggccccctgagtgacttcatggtggccggctctgaagatgaggaccaccctggcagcggctgcagcaccagcgaggagggcagcctgccccccagcaccagcaaggagcccgggaagccccgggccaacagcctggtgaccctgggcagccaccgggccagcggcctcttccacaagcaggtgacagtggcccggcaggccagcctgcccggcagcccccaggccctgaggaaccccctgctgcggcagaggaaggtgggctgctatgatgccaatgatgccagtgatgaggaggagtttgaccgggagggggactgcatcagcctgcccggggccctgcccggccccatccggcccctgtctgaagatgacccccggcgggtgtccatcagcagcagcaagggcatggatgtgcacaaccaggaggagcggcccaggaagaccctggtgtccaaggccatcagcgcccccctgctgggcagctctgtggacctggaggagagcatccctgagggcatggtggatgctgccagctatgctgccaacctgacagacagcgctgaggcccccaagggcagccctggctcctggtggaagaaggagctgagcggcagcagcagcgcccccaagctggagtacacagtgaggacagacacccagagccccaccaacacaggcagccccagcagcccccagcagaagtctgagggcctgggcagccgccacaggcctgtggcccgggtgagcccccactgcaagaggtctgaggccgaggccaagcccagcggcagccagacagtgaacctgaccggccgggccaatgacccctgtgacctggacagccgggtgcaggccacctctgtgaaggtgacagtggccggcttccagcctggaggagctgtggagaagctgtgccaggagagcctgggcaagctgaccactggagatgcctgtgtgtccaccagctgtgagctggccagcgccctgagccacctggatgccagccacctgacagagaacctgcccaaggccgccagcgagctgggccagcagcccatgacagccagtgacctgatcagcagccctgggaagaagggagctgcccacccagaccccagcaagacctctgtggacaccggccaggtgtccaggcctgagaaccccagccagcctgccagcccccgggtgaccaagtgcaaggcccggagccctgtgcggctgccccatgagggcagccccagccctggagagaaggccgccgcccccccagactacagcaagaccaggtctgccagcgagaccagcaccccccacaacaccaggagagtggccgccctgcggggagctggccctggagctgagggcatgaccccagctggagctgtgctgcccggggaccccctgaccagccaggagcagaggcagggcgcccctggcaaccacagcaaggccctggagatgacaggcatccacgcccctgagagcagccaggagcccagcctgctggagggcgctgacagcgtgagcagccgggccccccaggccagcctgtccatgctgcccagcacagacaacaccaaggaggcctgtggccacgtgtctggccactgctgccctgggggcagccgggagagccctgtgacagacatcgacagcttcatcaaggagctggatgccagcgctgcccggagccccagcagccagacaggagacagcggcagccaggagggcagcgcccagggccaccccccagctggagctgggggcggcagcagctgcagagctgagcctgtgcctgggggccagaccagcagcccccggcgggcctgggccgccggggccccagcctacccccagtgggccagccagcccagcgtgctggacagcatcaacccagacaagcacttcaccgtgaacaagaacttcctgagcaactacagcaggaacttcagcagcttccacgaggacagcaccagcctgagcggcctgggggacagcacagagcccagcctgagctccatgtatggagatgctgaggacagcagcagtgaccctgagagcctgacagaggccccccgggccagcgccagagatggctggagcccccccaggagccgggtgtccctgcacaaggaggaccccagcgagagcgaggaggagcagatcgagatctgcagcacccggggctgccccaacccccccagcagccctgcccacctgcccacccaggccgccatctgcccagccagcgccaaggtgctgagcctgaagtacagcaccccccgggagagcgtggccagcccccgggagaaggccgcctgcctgcccggcagctacaccagcggccctgacagcagccagcccagcagcctgctggagatgagcagccaggagcacgagacccatgctgacatcagcaccagccagaaccaccggcccagctgtgccgaggagaccacagaggtgaccagcgccagcagcgccatggagaacagccccctgagcaaggtggcccggcacttccacagcccccccatcatcctgagcagccccaacatggtgaatggcctggagcatgacctgctggatgatgagaccctgaaccagtatgagaccagcatcaatgctgctgccagcctgagcagcttctctgtggatgtgcccaagaatggagagagcgtgctggagaacctgcacatcagcgagagccaggacctggatgacctgctgcagaagcccaagatgattgcccggcggcccatcatggcctggttcaaggagatcaacaagcacaaccagggcacccacctgcggagcaagacagagaaggagcagcccctgatgcctgcccggagcccagacagcaagatccagatggtgagcagcagccagaagaagggcgtgacagtgccccacagccccccccagcccaagaccaacctggagaacaaggacctgagcaagaagagccctgctgagatgctgctgaccaacggccagaaggccaagtgtggccccaagctgaagaggctgagcctgaagggcaaggccaaggtgaacagcgaggccccagctgccaatgctgtgaaggccggcggcacagaccacaggaagcccctcatcagcccccagaccagccacaagaccctgagcaaggctgtgtcccagaggctgcacgtggccgaccacgaggaccctgacaggaacaccacagctgcccccaggagcccccagtgtgtgctggagagcaagccacccctggccaccagcggccccctgaagcccagcgtgtctgacaccagcatccgcacctttgtgagccccctgaccagccccaagcctgtgcctgagcagggcatgtggagccgcttccacatggctgtgctgtctgagccagaccggggctgccccaccacccccaagagccccaagtgcagagctgagggccgggcccccagggctgacagcggccctgtgtccccagctgccagcagaaatggcatgtctgtggccggcaaccggcagagcgagccccggctggccagccacgtggccgctgacacagcccagccccggcccaccggggagaagggcggcaacatcatggccagtgaccggctggagaggaccaaccagctgaagatcgtggagatctctgctgaggccgtgtctgagaccgtgtgtggcaacaagccagctgagagtgacagaagaggaggctgcctggcccagggcaactgccaggagaagtctgagatccggctgtaccggcaggtggccgagagcagcaccagccaccccagcagcctgcccagccacgccagccaggccgagcaggagatgagccgctccttctccatggccaagctggccagcagcagcagcagcctgcagacagccatcaggaaggccgagtacagccagggcaagagcagcctgatgtctgacagcagaggagtgcccaggaacagcatccctgggggccccagcggggaggaccacctgtacttcacccccaggcctgccaccaggacctacagcatgcctgcccagttcagcagccacttcggccgggagggccaccccccccacagcctgggccgcagccgggacagccaggtgcctgtgaccagctctgtggtgcctgaggccaaggccagcagaggaggcctgcccagcctggccaacggccagggcatctacagcgtgaagcccctgctggacaccagcaggaacctgcctgccacagatgaaggagacatcatctctgtgcaggagaccagctgcctggtgacagacaagatcaaggtgaccaggaggcactactgctatgagcagaactggccccatgagagcaccagcttcttctctgtgaagcagaggatcaagagctttgagaacctggccaatgctgacaggcctgtggccaagagcggggccagccccttcctgtctgtgagcagcaagccacccatcggccgccgcagcagcggcagcatcgtgtctggcagcctgggccaccctggagatgctgctgcccggctgctgcggcgcagcctgagcagctgcagcgagaaccagagcgaggccggcaccctgctgccccagatggccaagagccccagcatcatgaccctgaccatcagccggcagaaccccccagagaccagcagcaaaggaagtgacagcgagctgaagaagagcctgggccccctgggcatccccacccccaccatgaccctggccagccctgtgaagaggaacaagagctctgtgcgccacacccagcccagccctgtgagccgcagcaagctgcaggagctgcgggccctgtccatgccagacctggacaagctgtgcagcgaggactacagcgctggccccagcgctgtgctcttcaagacagagctggagatcaccccccggcgcagccctggccccccagctggaggagtgtcctgcccagagaagggcggcaacagagcctgccctgggggcagcggccccaagaccagcgctgctgagacccccagcagcgccagtgacacaggagaggccgcccaggacctgcccttcagaagatcctggagcgtgaacctggaccagctgctggtgtctgctggggaccagcagaggctgcagagcgtgctgagctctgtgggcagcaagagcaccatcctgaccctcatccaggaggccaaggcccagagtgaaaatgaagaagatgtgtgcttcatcgtgctgaacaggaaggagggcagcggcctgggcttctctgtggccggcggcacagatgtggagcccaagagcatcaccgtgcacagggtcttcagccagggcgccgccagccaggagggcaccatgaacagaggagacttcctgctgtctgtgaatggagccagcctggccggcctggcccatggaaatgtgctgaaggtgctgcaccaggcccagctgcacaaggatgccctggtggtgatcaagaagggcatggaccagccccggcccagcgcccggcaggagcccccaacagccaacgggaagggcctgctgagcaggaagaccatccccctggagcccggcatcggccgctctgtggccgtgcatgatgccctgtgtgtggaggtgctgaagaccagcgctggcctgggcctgagcctggatggcggcaagagctctgtgactggagatggccccctggtgatcaagagggtgtacaagggcggcgctgctgagcaggccggcatcattgaagctggagatgagatcctggccatcaatggcaagcccctggtgggcctgatgcactttgatgcctggaacatcatgaagtctgtgcctgagggccctgtgcagctgctgatcaggaagcacaggaacagcagctag

SEQ ID NO: 253450 - DNA, 8520 bp, Artificial Sequence
  derived and/or modified sequence
atgcccatcacccaggacaacgccgtgctgcacctgcccctgctgtaccagtggctccagaactctcttcaggaggggggggacggtcctgagcagcgcctgtgccaggctgctatccaaaagctccaggagtacatccagctgaacttcgccgtggacgagagcacggttcctccggaccattcccctccagagatggagatatgcacagtctacttgacaaaagagttgggtgatacagagaccgtgggcctgagcttcgggaacattccggttttcggagactacggcgagaaaaggcgtgggggcaaaaaaagaaagactcaccagggtcccgtactggacgtggggtgcatctgggtcacggagctcagaaagaatagtccagctgggaaatcaggaaaggttaggctaagagacgagattctgtctctgaatgggcagctgatggtcggggttgacgtgtctggggccagttatctggccgagcagtgctggaacggtggatttatttaccttatcatgcttaggaggttcaaacacaaagctcactccacttacaatggcaattcttcaaactcatcggagcctggcgaaacccccacattggaactaggtgatagaacggctaaaaagggcaaaaggactcgaaagttcggggttatctccagaccgccagccaataaggccccagaggagtctaagggttccgctggatgcgaggtaagctccgatccgagcacagaactggagaacggaccagaccccgagctgggtaatggccatgtcttccagcttgagaacggccctgatagcctgaaggaagtcgctggcccacatctggaacgcagtgaagtggatcgcggcactgagcacagaatccccaaaactgacgccccgcttacaaccagcaatgacaaacgtcgtttttctaaggggggcaagacggactttcagagctcggattgcctggcccgcgaagaggtgggacgaatctggaaaatggagctgttaaaggagtcggatggactcgggattcaggttagcgggggtaggggttctaaacgttccccccatgccattgtggtgactcaggttaaagaggggggggccgcacaccgcgacggccgactgagtctaggcgacgagctcctggtgatcaacggtcaccttttagttggcttatctcatgaagaggcagtggcgatattgaggtccgccaccggcatggtccaactcgtcgtggccagtaaggagaatagtgctgaagaccttctgcgtttgacttctaaaagtctgccggacctcacaagttcagtggaggatgtgtctagctggacagataacgaggatcaggaagccgatggggaggaagatgaaggaacatccagttccgtccaaagagccatgccaggtaccgacgaaccccaggatgtgtgtggcgccgaggagagcaagggcaatttggagtctccaaagcagggaagtaacaaaatcaagctcaagtcccgcctttccggcggcgtccacagactggagagcgtggaggagtacaatgaactaatggtgaggaatggcgaccctaggatccgcatgttggaagtgagtcgcgacggcaggaaacattccttaccgcagctgttggactcatctagtgcaagtcaggagtatcacatcgtgaagaaatcaacccgcagcctgtctacaacccaggtggaatccccctggcggttaattcgcccatccgtcatctccattataggattatacaaggagaaaggtaaaggactcgggttttctatcgcaggaggcagagattgtatccgaggtcagatgggtatttttgtgaaaacaattttcccgaacggatctgctgccgaagatggtcgccttaaggaaggcgatgagatcttggatgtgaatggcatccctattaaggggctcacctttcaggaagctatccatactttcaaacagattagatccggactttttgtcctcacagtaagaacaaaactcgtatctccatctctaaccccttgtagcactccaactcatatgagcagatctgcctcccctaatttcaatacgagcgggggggcatccgctggggggagtgacgaaggatcctccagctccttaggcaggaagacaccaggacctaaggataggattgtgatggaggtgacattgaataaggaacccagggtggggctgggcataggcgcctgttgtctcgctctcgaaaactccccccccggaatttatatccacagccttgctcctggcagtgtggccaagatggaatctaacctctcccgcggcgaccagatcctggaggtaaattccgttaacgttagacatgccgcactgagtaaggtgcacgccatcctttccaagtgccctcccggacctgtgcggctggtgatcggccgccaccccaatcctaaagtatccgagcaggagatggacgaagtgatcgcacggtcaacttaccaggagagtaaggaggcaaactcgagcccaggtctcgggacgccccttaagtctccctcacttgccaaaaaggattccttgatatccgaaagcgaattatcacaatattttgcgcatgacgtcccgggccccttgagcgattttatggtggctggatcagaggatgaggatcaccccgggtccggatgtagcaccagcgaagagggcagcttgcctccatctacctctacccataaggagccaggcaaacccagggcgaattccctggttactctgggtagccatagggcatcagggctctttcataaacaggtcacagtggctcggcaggcgtctcttccagggtccccccaagctctaagaaaccccctgctgagacaaaggaaggtgggctgctatgatgccaatgacgcctcagatgaagaagaattcgacagagagggagattgtatttccctgccgggcgctcttcccggacccatccgtccgcttagcgaggacgaccctagacgcgtcagcatctcttcatctaagggaatggatgtgcacaatcaagaggagagacccaggaaaactttagtgtctaaggccatcagcgcaccccttctcggctccagcgtagacctagaggaaagtatacccgagggaatggttgacgcggccagctacgctgctaatttgaccgacagtgcagaagctcctaagggctcccccggatcatggtggaagaaggaactcagcggcagttcttcggcccctaaactcgaatacacagtcaggactgacactcagagcccaacgaatacaggctctccatcttccccacaacagaagtccgagggcttgggttcaagacaccgccctgttgctcgggttagcccccactgcaaacggagtgaggctgaggctaaaccctccgggtcccagaccgtgaatctaaccggtagagccaatgacccatgtgatctggactccagggtacaagctacatccgtcaaggtgaccgtggccggttttcagcctggcggcgctgtggaaaaagaatccctcggcaagcttacgactggcgatgcgtgtgtgtccacgagttgcgaactggccagcgccttgtctcacctagatgcttcacatcttactgaaaacctccctaaggctgccagtgaactgggtcagcaacccatgaccgaactcgactctagtagcgaccttattagtagccctggcaagaagggggcagcccaccctgatccctcaaaaacctccgtggataccggccaggtcagccgacctgagaacccaagtcagccagctagcccacgcgtgacaaagtgcaaggctcggtctcctgtgaggttgcctcatgagggctcaccctccccaggcgaaaaagccgctgcaccacctgattactccaagaccagatcggcatccgagacatctaccccacataatactcgacgggtggccgcactccgtggagctgggcccggcgccgaggggatgacaccagctggcgccgttttgcctggcgacccattaacctcccaggagcaacgccaaggggctccagggaaccattcgaaggcccttgaaatgacgggtattcacgctcctgagagctcacaagagccttctttactcgagggggcagatagcgtgagttcacgggctccacaggcttcccttagcatgcttccttctacagacaacacaaaagaagcatgtggacacgtcagtgggcactgctgtcccggaggttctcgtgagagtcctgtgaccgacatcgactccttcataaaggagcttgacgccagtgcagctaggagcccctcttctcagaccggagatagtggctctcaagaggggtcggctcagggacaccctcccgccggggcaggaggcggttcctcctgtcgcgctgagccagtgcctgggggccagacgagcagtccacgcagggcctgggcagcaggcgctcctgcctacccccagtgggcttcccagccttccgtgttggattcaatcaatcccgataaacatttcacagtcaacaaaaacttcctctctaactacagcagaaacttttcttccttccacgaagattccacttctctgtccgggttgggagattctacagaaccctccctcagtagcatgtatggcgatgctgaagatagctcctccgatcccgaatctctgacagaagcaccccgggcctccgcccgagacggatggagccctcccaggtctagggtatccctgcacaaagaggacccttcagagagtgaggaagagcaaatagagatttgtagcacacgaggctgtcccaatcctccatccagcccggctcatttgcctactcaggccgctatttgtcccgctagcgccaaggtgctgtctcttaaatatagcactccccgggagtccgtggctagcccaagggagaaagcagcctgcttgcccgggtcttacacaagcggacctgacagtagtcagccatccagccttcttgaaatgagctcccaggagcacgagacccatgccgatatctctacttctcagaaccacaggccaagctgcgcggaggagaccactgaggtaacctccgcaagctcagctatggagaattcacctctttctaaagtggccaggcactttcattctccccctatcattctctcatccccgaacatggtcaatggcctagagcatgatctgcttgacgacgagaccctgaatcagtacgagacctccataaacgccgcggcttccctctcttccttctcagtggatgtgcccaaaaatggggagagcgtcctggagaatctgcatattagtgaatctcaggatttggatgaccttttgcagaagcctaagatgattgctaggagaccaattatggcctggtttaaagaaattaataaacataatcaaggaactcacctgcggtctaagactgagaaggaacagcccctgatgcccgcccggtcccctgactccaaaatccaaatggtcagcagttcacagaaaaaaggggtgaccgtgccgcactcccccccgcagcccaaaaccaacctggaaaacaaggacttgtccaagaagtctccagcggagatgctccttacaaatggtcagaaagcaaaatgcggtcccaaactcaagcgactctccctgaaaggaaaggccaaagtgaacagtgaggcacctgctgccaatgctgtcaaggcaggcggaaccgaccatcggaagcccctcattagcccgcagaccagtcacaagactcttagtaaagccgtatcccagagattgcatgtcgccgatcatgaagatcctgacaggaataccactgccgcccctagatcaccacagtgcgtccttgagagcaaaccgccactggccacaagcggtccactgaagccctctgtgtccgacactagcatccgcacttttgtgagtccgcttacttcaccgaagcctgttcctgaacaaggcatgtggtcacgttttcacatggccgtgctgtcagagccggaccgcgggtgtcccacaacacctaaatcaccgaagtgtagagccgagggacgggccccccgggctgatagcggcccagtcagccccgcagcttcaaggaatggtatgagcgtggccggcaaccgccagagtgagcctcggctggccagtcatgtcgccgcagatacagcgcaacctaggccgacaggggagaagggcggcaatatcatggcaagcgatcgacttgaaagaaccaatcagttgaaaattgtcgaaatttccgccgaagctgtcagtgagaccgtgtgcggtaacaaaccagctgagtcagacagacgtggcgggtgcctggcccagggcaattgtcaagaaaagagcgagatccggctatatagacaggtcgcagagtcaagcacctctcatccttctagtctccccagccacgcgagtcaggccgaacaggagatgtctagatctttctctatggcaaagctcgcatctagcagttccagcctacagacagcaatacgcaaagcagaatactcccagggcaaatcaagcctgatgtccgattcccgcggcgtccctcggaattcaataccaggcggaccttcaggcgaagatcacctatacttcacccctagaccagcgacaaggacctattcaatgcccgcgcaattttcatctcacttcggccgcgaggggcatcctccccattctctggggcgctcccgggatagccaggtgcccgtcacctcaagtgtggtgcctgaggccaaggcatcccgcgggggcctgccaagcctggcgaacggacagggcatctactctgtcaaaccactactggacacatcccggaaccttccagcaactgacgaaggggatatcatatccgtgcaagagacctcatgccttgtgacagataagattaaagttacacgaagacactactgctatgaacaaaactggcctcatgagtcgaccagcttcttcagtgtaaaacagcgaattaagtccttcgaaaacctggcgaatgccgatagaccggtggccaagtcaggcgcctcgcccttcctgagcgtgagtagcaaaccccctattggaagacgctcatcaggctccatcgtaagcggcagcctcggacaccccggcgatgcagcggctcgcctgctacgtcggagtctgagctcgtgtagtgagaaccaatccgaggccggcacccttttgccacagatggccaagtctccaagtataatgaccctgacaatatcccgtcagaatccgcccgagacgagttccaagggatccgattctgaactgaaaaagtctctgggacctttgggaattcctacccccacaatgaccctggcctcgccagtgaagcgaaataagtccagcgttaggcatactcagccgtctcccgtctctcgatctaagctgcaggagctgcgcgccctgtcaatgcccgacctggataaactgtgctctgaagattacagtgccggtccctccgctgttctcttcaagaccgaactggaaattaccccgcggcgcagccccggacctccggcaggcggggtctcctgccccgagaaggggggaaacagagcctgtcccggtggctccgggcccaagacatctgccgccgagacaccctcgagcgcgtcggacaccggtgaagcagctcaggacctgccttttcgtagaagctggtccgtgaacctcgatcagctgctcgtgtctgcaggagaccaacagcggctgcaaagcgtgctctcatctgttgggtccaagtctaccattctgaccttgatacaggaagccaaggcccagtccgagaacgaggaagatgtgtgctttatcgtgcttaataggaaggaaggcagtgggctgggcttctcagtagccgggggaactgacgtcgagccaaagtccattactgtgcaccgggtgttttcacaaggggctgcatcgcaggagggcacgatgaacagaggggatttcctgctgtctgttaacggagctagtctcgcaggcctggcacacggtaatgtcctgaaggtgcttcaccaagcacaacttcataaggacgctctggtcgtgattaaaaaggggatggatcagcctaggccgagtgccagacaggagccacccacagccaacggcaagggcctgttatcaaggaaaaccatcccactggaacctggaattggaagaagtgttgctgtgcacgatgcactctgtgttgaggtgctcaagacttccgctggtctcggattgtctctggatgggggcaaatctagtgttacaggagatggccctctggtcattaagagggtgtacaaggggggagccgccgagcaggctgggataattgaggctggcgatgagattctggccataaatggtaagcctctggtgggactcatgcacttcgatgcctggaatatcatgaagagcgtgccagagggccccgtgcagctgcttatccgcaagcacagaaattcaagttag

SEQ ID NO: 253451 - DNA, 7923 bp, Artificial Sequence
  derived and/or modified sequence
atgcccatcacccaggacaacgccgtgctgcacctgcccctgctgtatcaatggctgcagaactctctccaggaaggtggggatggccccgagcagagactgtgccaagcagctattcagaaactgcaggagtacatccagcttaattttgctgtcgacgagtctaccgtaccccccgaccatagccctccggagatggaaatatgtaccgtgtaccttacgaaggagcttggcgataccgagacagtgggcttgagtttcgggaatatccctgttttcggagattacggcgaaaaacgacggggcggaaagaagaggaaaacccatcaagggcctgtcttggacgtgggttgtatttgggtaaccgaactgagaaaaaacagccctgccgggaagtccggcaaggttcggctgagggacgaaattttgtccttgaacgggcaactcatggtcggggtggacgttagcggtgcctcatatctggccgagcagtgctggaacggaggtttcatctacttgataatgctgcgaaggtttaagcacaaggctcattcgacgtataacgggaacagctccaattcctccgaacccggagagacccctacccttgaactgggggacagaacggccaaaaaaggcaagagaactcggaaattcggcgtcatatctcggccccccgcaaacaaggcgcccgaggaatcaaaaggatcagcagggtgcgaagtcagctccgaccccagcacagaactggaaaacggtcccgacccagaattgggcaacggccatgtcttccagctggagaatgggcccgattcccttaaagaagtagccgggcctcacctcgaaagatcagaagttgacagaggaactgagcatcgcatcccaaaaaccgacgccccacttacaacaagcaacgacaagcgccggttcagcaagggcggtaaaaccgactttcagagctctgactgtttggcccgggaagaggtgggccggatctggaagatggagttgctgaaagagagcgacgggctgggcattcaggttagcggcggcagaggcagcaagaggtctcctcatgccattgtagtgacgcaagtgaaggaaggaggcgccgcccatagggagtatcatatagtgaaaaaatcaacccgctcgctgtctaccactcaggttgaaagcccttggaggctaatccgccccagcgtaatatctatcattggactttataaggagaaagggaagggattagggtttagcatagctggtggaagggattgcatccggggtcagatgggcatttttgtaaagaccatatttcccaatggtagcgcagccgaagatggaaggcttaaagaaggcgacgagatcctggacgtaaatggcataccaattaagggacttacattccaggaagcgatccacacatttaagcagatcagatccggtctgttcgtccttaccgtccgcacaaagctggtgagcccctcactgacaccatgctcaacaccgacccatatgtctcgctcagcaagtcctaactttaataccagtgggggagcctccgccgggggaagtgatgaaggctcatcctcaagcctagggcgaaaaacgcctgggcccaaggatagaattgtcatggaggtgacattaaataaggagcccagggtgggcctgggaattggcgcgtgctgcctggctctcgagaactcaccacctggcatatatattcattcacttgcacctggttcggtggctaagatggagagcaacctgagcaggggggaccagatcctggaggtgaatagcgttaacgtccggcacgccgctctctccaaagttcatgctatactcagtaaatgccccgtgtccgagcaggagatggatgaggtgatagctaggagcacttaccaggaaagcaaagaagctaatagcagtcccggcctgggaacgcccctgaagagcccaagcctggcgaagaaggacagcttaatctcagaaagcgagctgagccagtatttcgcacacgatgtgcccggccctcttagcgatttcatggtcgccggaagtgaagatgaggatcatcctggctcgggatgttcaacttctgaagagggctcattaccaccaagcacaagtaaggaaccgggcaaacctagagccaacagtcttgtgacactcggatcacaccgggctagcggcctgttccataagcaggtgacagtcgcgcgccaggcctccttgccagggtcgcctcaagcacttaggaacccactcctgaggcagcgcaaggtcggctgctatgatgccaatgatgcctccgatgaggaggagttcgatcgggaaggcgactgtatttcactccccggcgccctgccgggccctattcgcccgctgtccgaggatgatcccaggcgggtgtccatctccagctctaagggcatggatgtccacaaccaggaggagagaccgcggaaaacacttgtgtctaaggccatctccgccccgctgctggggagtagcgtggatcttgaggaaagcatcccggaaggcatggtcgacgcagcgtcctatgctgccaacctgacagacagtgctgaagcacccaaaggctcgccaggatcgtggtggaaaaaagaactgtctggctcctccagtgcgccgaaattggagtacaccgttcggaccgatactcagagcccaaccaataccgggtcgcccagctccccacagcagaaatccgagggactggggtctaggcatagacctgttgcgcgggtgagcccccactgtaagcggtctgaggccgaagccaaaccatccggttcccagacggtgaatctgaccgggagagctaacgatccttgcgatctggattcaagggtgcaagccacctccgtcaaagtgactgtcgcagggtttcagcctgggggtgcagtggaaaagctctgccaagaaagcctcggaaagctcactacaggagacgcctgcgtgtctactagctgcgaactggcaagtgccctctcccaccttgatgcctcacacctaaccgagaacttgccaaaggcagcttccgagcttgggcagcagcccatgactgcatcggacctcatttcctctcccggtaagaagggcgccgcacacccagatccctccaagacctcagttgatacggggcaggtgtctcgcccagaaaatccttcccaacctgcatctcctcgcgtgaccaagtgtaaggccagatctcccgtcagactacctcacgaggggtccccctctccaggcgaaaaggccgcagctccacccgattacagcaagacacggtctgcctctgagacgtccacccctcataacactagacgggttgccgcgctgaggggcgctggcccaggtgcggaggggatgacacccgccggggcagtactacccggcgaccctctcacctcccaagagcagcggcaaggcgcccccggaaatcacagcaaggcactcgagatgacaggaattcatgcccctgagtcatctcaagagccctccctactggagggggccgatagcgttagttctcgggccccccaggctagtcttagcatgttaccaagcacagataatacaaaggaggcatgcggacatgtgagcgggcactgctgcccaggcggttcaagagagtccccagtgactgatattgactccttcattaaagaattggacgctagtgctgctagaagcccgtcttctcagacaggtgactctggtagccaggagggctctgcacaggggcaccctcccgccggtgccggcgggggatccagttgtcgggctgagccagtacccggaggacagaccagctcccctagacgtgcctgggctgccggagcccccgcctacccccagtgggcaagccagccttccgtcctcgactcgatcaaccctgacaaacacttcaccgtcaacaagaacttcctgtcaaattactcaagaaacttcagcagctttcacgaggattcaacctccctctcaggcctgggcgattccacagaaccctctctgagcagtatgtacggagatgccgaagatagctcttccgaccccgaaagcttaacagaagcacctcgtgcttctgcacgcgatggctggtctcctccgcgctcccgggtgagcctgcacaaagaggacccaagcgagtcagaagaagaacaaatcgaaatttgcagtacacgggggtgtccaaatcctcccagctccccagcacatctgcccacgcaggcagcgatttgtcccgccagcgccaaagtgctgtccctgaagtacagcacccctcgcgagtccgtggcaagcccacgagaaaaggctgcgtgtctccctgggtcgtacacctcaggccctgattcttcccagcctagcagcctcttggagatgtcatcccaggagcacgagactcatgccgatatctcaacttctcagaaccaccgcccttcctgtgccgaagaaactacagaggttaccagtgcaagctcggcaatggaaaattcaccgctctcaaaggtggctcgccacttccactctccacccatcatcttatccagccccaatatggtaaacggcctcgaacacgacctccttgacgatgaaactctcaatcaatatgagacaagtattaacgccgcggcctcgctctcctccttttccgtcgacgtacctaaaaatggagagtcagtgctagaaaatttgcacatttcagagtctcaggaccttgatgatttgctgcagaagcccaagatgatcgcaaggcgacccatcatggcctggttcaaggaaattaacaagcataatcagggcactcaccttaggagcaagaccgagaaggagcagccactgatgcccgctcgctccccagatagcaagatacagatggtatcctcgtctcagaagaaaggggtcactgtcccgcactcccccccacagccgaagacgaacctggaaaataaggatctgtcaaaaaagtcacccgccgaaatgctcctgactaacggacagaaagcgaagtgcggcccaaaattgaagagactgtctctgaaaggcaaagcaaaagtgaactccgaggctcccgccgccaacgcggttaaggctggcggtacggaccacagaaagccgctcatctcaccccagacaagccacaaaacactatccaaggccgtgagtcagaggctgcatgtggcagaccacgaagacccagataggaacaccacggctgcaccgagatccccacagtgtgtgcttgagtccaagcctcccctggccactagtgggcctctgaaaccgtccgtgagtgatacttccatcaggactttcgtatcccctctgactagtccaaagccagtgccagaacagggaatgtggtccaggtttcacatggccgtgctgtcagaacctgaccggggttgccctactacacccaagtcaccgaaatgccgggcggaaggaagagcccctagagctgactctgggccagtgagtcccgctgccagccgtaatggtatgtccgttgcagggaaccgccagtcggaacctcggctcgcgtcccatgttgcggccgacacggcgcagccccggcctacaggggagaagggtggcaacataatggcttccgaccgcctggagcggacaaaccagctaaagatagtagagatctctgcggaagccgtgagtgagacagtgtgtggaaacaagcccgcagaaagcgataggaggggtggatgtctagcgcagggcaactgccaggagaaaagtgagattaggctgtaccggcaggtggcagagagttctactagtcacccctccagcctgcccagtcatgcctcgcaggcagagcaggaaatgagccgcagcttttccatggcgaaactggcaagctcaagctcctcattacagactgccattaggaaagccgagtatagtcaaggcaagagctccctgatgtctgacagcagaggagtgcctcgcaactcaattccgggcgggcctagcggggaggatcacctctattttactcctagaccggccacacgtacttatagcatgccagcacaattctcatctcatttcggcagggaaggccatcccccacactccctgggccgcagcagggattcccaggtgccggttacctcttccgtcgtccctgaggccaaagcaagtcggggcgggcttccttccctggcgaacggccaaggcatctattctgtaaaacccctgttggataccagccgaaacctgccggcgacagacgaaggcgatatcatctccgtgcaagaaacaagctgcctcgtgacagataagattaaagtcacgcgacgccattattgctacgagcagaactggccacacgaatcaacctcttttttctctgttaagcaaaggattaaatcctttgagaatcttgccaacgccgacagacctgtcgccaagagtggcgctagcccctttctgtccgtgtcctcaaagcctcctatcggtaggcggtcaagcggatcgattgtgagtggatcactaggccaccccggggacgcagccgctagacttttacggaggtcgctaagctcttgctccgaaaaccagtccgaagcagggactctgctacctcagatggcaaaatcaccgtcaatcatgaccctaacaatctctagacaaaacccaccagagacgtcttccaagggatctgacagcgagttgaaaaagtccctgggacctctgggcatcccaacccccacaatgacccttgcctctccagtgaaaagaaataagtcgagtgtgcgccatacccagcctagccccgtgtctcgatcaaaactgcaagaactgcgtgcactttctatgccggacctggacaagttgtgctccgaagactattccgccgggcctagcgccgtattgttcaagaccgaattggagatcacaccaagacgttctcctggcccccctgctggcggggtcagctgtcccgaaaaaggggggaacagagcctgccccgggggttctgggccgaagacaagcgccgctgaaacaccctcctcggctagcgacaccggcgaagccgctcaagatcttccttttagacggagctggagcgtgaatctggaccagttgttggttagtgccggtgaccagcagcgcctccagtcagtgctttcgagtgtgggctccaaaagcaccatcttgacccttattcaggaagccaaggcccaatccgagaacgaggaggacgtgtgcttcatcgtgttgaaccgcaaagaaggatccggactggggtttagcgtggcgggaggaactgacgtcgagcccaaatctattaccgtccacagggtctttagccaaggcgcagcatcccaggaggggacgatgaacagaggcgattttctcctctcagtgaacggagcatcactagccggactggcccacggcaacgtactgaaagtgctgcaccaggcacaactgcataaagatgcactcgtggtcataaagaagggcatggaccaaccccggccatctgcccgccaagagccgcccactgctaatggaaaaggactgctgtctagaaaaactattcctctcgaacctgggatcggccgctcggttgcggtccacgatgccctgtgcgtagaggtactgaagacaagcgctggattgggtctctcattggacggaggcaagtcctccgtcaccggcgacggccctctcgtgatcaagcgcgtgtataaaggaggagcagctgaacaggccggtatcattgaggcgggtgacgaaatcctcgccatcaacggcaaaccgctcgtggggctgatgcactttgacgcgtggaacattatgaaaagcgtaccagagggccccgtgcagcttctgattcggaaacataggaattccagctag

SEQ ID NO: 253452 - DNA, 8520 bp, Artificial Sequence
  derived and/or modified sequence
atgcccatcacccaggacaacgccgtgctgcacctgcccctgctgtaccaatggctgcagaattccctgcaagaggggggtgatggtcccgaacagagactttgtcaggctgcgatccagaaacttcaggaatacatccagctgaactttgctgtggatgagtcgaccgtgcctccggatcactcacctcctgagatggaaatatgtactgtctacctgaccaaggagttgggcgacactgagaccgttggactaagcttcggcaacatcccagtttttggcgactatggggaaaagcggagaggcgggaaaaagcgcaagactcatcagggccctgttctggatgtcggttgcatctgggtcacggagctgagaaaaaactcccccgcgggaaagtcgggcaaggtaaggttaagggacgagatcctgtcgctgaacgggcagctcatggtaggagtggatgtctcaggagctagttatctggccgaacagtgttggaacggaggcttcatctatttgattatgctgcgtagattcaagcacaaagctcattccacatacaatggaaactcctctaactcatcagagcccggagaaacccccactttagagctgggtgatagaacagctaaaaaggggaaaaggacccgtaagtttggtgtgataagccgtcccccagccaataaagccccggaggagagcaaaggatctgcgggctgtgaagtgagcagcgacccaagcacagagctagagaacggacctgacccggaactgggtaatggccatgtcttccagttagaaaacggccccgactcattgaaggaagtcgctggacctcatctcgaaaggtctgaagtcgatcggggcactgagcaccgaatcccgaagaccgacgcccccctaaccacaagcaatgacaagcgccgtttctccaagggaggcaagaccgactttcaaagctctgactgtcttgccagggaggaagttggccgtatttggaagatggagctgctgaaagagtccgatggcctgggaatacaagtttcaggcggccgcggctctaaaagatcaccgcatgctattgttgtcacccaggtgaaggagggtggggcagcccaccgtgatggacgtttgagcctgggcgacgagctgcttgtgattaacggccacctcctcgttggcctctcacacgaagaggcagttgcaattctgcgctccgcaacgggcatggtgcaactggtcgtcgcctctaaagaaaactctgctgaggacctgctcagactcacttctaagagcttacccgatctgacctcttcagtggaggatgtctccagctggaccgataacgaggaccaggaagcagacggggaagaggacgagggaacttcatcttctgtgcagcgggctatgccaggtacggacgaaccccaggatgtttgcggtgctgaggagagcaaagggaatctcgaaagtccgaaacaggggtccaacaagatcaagctgaaatccagactttccggtggagtccaccggctggagagcgttgaggaatataatgagctgatggtacgcaacggggatccgcggatccgtatgttagaggtttcgcgcgacggtcggaagcattccctccctcaactgctcgattcctcctcagcgagccaggagtatcacatagtgaagaaatccacacgttctttaagcacaacccaggtcgaatcgccttggcggctgattaggccgtctgtaattagtatcattgggttatataaggaaaagggcaagggcttgggttttagcattgccggggggcgcgattgcatccggggacagatggggatctttgttaagacgatcttcccaaacgggtcagctgctgaagacggtaggctgaaagaaggagacgagattctggatgttaacgggatccccatcaagggcctgaccttccaggaagcaatacacaccttcaaacagattaggtcagggctgttcgtcctcactgtccggactaaacttgtcagtcccagcctgactccttgtagcacgcctacccacatgagcagaagtgcctctccaaatttcaacactagcggaggggcctctgctggcggatctgacgaagggagctcgtccagcctgggccgcaaaacccccggcccaaaggatcgaatcgtcatggaggtgacccttaataaagagccccgagtggggcttggcatcggcgcttgttgcttggccctggaaaactccccgcctggtatttatatccattccctggcgccaggatctgtagccaaaatggagagcaacctctctcgcggggaccagattctggaagtgaactctgtgaacgtgaggcacgcagccctatctaaagtacatgcaattctctccaagtgtcccccgggtcctgtccggctggttatcggtcgacatccaaatcctaaagtgtcggagcaggagatggacgaggtgattgcacggtccacttatcaggagtctaaggaggccaacagcagccctgggctcggtacccccctgaaatccccctcactcgctaagaaggacagccttatcagcgagtctgagttgtcccagtatttcgcccatgacgtgcctgggccgctttccgattttatggtggccgggtcagaagatgaagatcatcccggctctgggtgttcaacatctgaagaaggatctcttccgccctcgacatcaacccataaggaacccggaaaaccccgtgccaattccctagttacgctggggtctcatcgggctagcggactgttccataagcaggtcactgtggctcggcaagccagtctgccagggtcccctcaggccctgcgtaatcccctcttgcgacagaggaaggtagggtgctacgatgctaatgacgcatcagacgaggaggagtttgatcgggagggtgattgtatctctctgccaggggccctgccaggcccaattcgtcccctgagtgaagacgatcccagaagggtcagcatcagtagctctaaggggatggatgtgcacaaccaggaagaacgcccacggaagaccctcgtttccaaagcaatcagcgcgcccctactgggatcatccgtagacctcgaggaatctatccctgaaggcatggtcgatgcggcatcatatgccgctaacctgaccgatagtgccgaggctcctaagggatctccaggaagctggtggaagaaggagctgagcggtagcagctcagccccaaagttggaatatactgtaagaaccgacacccaaagtccgacaaatactggcagcccctcatctccacagcaaaagagcgaaggacttggttcccgtcacagaccggtagcccgagtcagcccccactgtaaacggagtgaggcggaggcgaagccctccggttctcagacagtaaacttgaccggtcgcgcgaacgatccatgtgacttagatagtagggtacaagccacatctgtcaaagtgaccgtcgcggggttccagcccggcggagctgttgagaaagaatctctagggaaactgacaaccggggacgcttgcgtgagcacaagttgtgagctcgcttccgcactctctcacctcgacgcctcacacctgaccgagaatttacctaaagccgcctctgaacttggccagcagccgatgactgagctggatagcagctctgatctgatatcttcacctggcaagaaaggagcagcgcatcccgacccaagcaagacgtcagtcgatactggccaggtaagcaggcccgaaaacccgtcccaacccgcttcaccgagagttactaagtgcaaggcacggagccctgtgcgcctcccacatgaaggttctccatcccccggagagaaagctgctgccccaccagactattctaaaacacgaagcgcttcagaaacttctaccccacataacactagacgtgtcgctgccctcaggggcgccggtccaggcgccgaagggatgactccagctggagctgtactgccgggtgacccactgacgagtcaagagcaacgccagggtgcgcccgggaatcacagcaaagcgctggaaatgaccggtatccatgctcccgaatccagtcaggagccttcgttactggagggcgctgacagtgtgagctcccgagctccgcaagcctcactgtcgatgctgccttccacagataacacaaaggaggcctgcgggcatgtgtcaggccactgttgcccgggaggctcccgagagagcccggtgacagatatcgactctttcatcaaggaactggacgcctctgccgcccgctctccatcgtcccaaacgggggactcaggttcccaggagggctctgctcagggacatcctcccgccggagcaggcggaggaagctcctgccgggccgaaccagtacccggaggacaaacatctagcccgcgacgggcatgggctgctggcgcccccgcttatcctcagtgggcatcgcagcctagtgtcctagattccatcaatccggataagcattttacagtgaacaagaatttcctttccaactactcccgtaacttcagctcatttcacgaggactctacgtccctgagcggtttaggcgactctacagagccctccctgtccagtatgtacggtgatgccgaggattcatcaagcgaccccgagagcctgaccgaggcacctcgcgcctctgctcgtgatggctggagcccgccccgctccagggtatccctgcataaggaggacccctcggagagtgaggaggaacagatcgagatttgctccacccggggctgtccaaatccccctagtagtcctgctcaccttcccacacaggctgccatctgtccggccagtgcaaaagttttatctcttaaatattcgactcctcgtgagtccgtggcctcacctagggaaaaagcagcctgtcttccgggctcctatacttccggcccggacagttcccagccctcatccctgctcgagatgtcttcccaggaacacgaaacacacgctgacatcagcactagtcaaaaccatcggcctagctgtgcagaagaaactacagaggtgacctctgcctctagcgccatggagaatagccctcttagtaaagtcgcccggcattttcacagcccacccattattttgtcatctcccaacatggtgaatggccttgaacatgatctgctggacgatgagacgctgaaccagtacgaaacaagtatcaatgcagctgcaagcctatcctctttttccgttgacgtcccaaaaaacggagagtcagtgcttgaaaatttgcatatttcagagtcacaagacctggacgaccttttgcagaaacctaaaatgattgcgaggaggccgataatggcctggttcaaggagattaacaagcataaccagggcactcacctcagatcaaaaacggaaaaggaacagccactgatgccggcccggagtccagactcaaaaattcagatggtgtccagcagccagaagaaaggagttaccgtcccccactcccccccccagcctaagaccaacctcgaaaacaaagatctgagcaaaaaatccccggccgaaatgctgctgactaatgggcagaaagctaagtgcgggccgaagctgaagaggctgtcactgaagggtaaagccaaggtgaattctgaggctcccgcagccaatgccgtcaaggcagggggaacagatcatcggaaacctctgatctccccccagacaagccataaaaccctgagcaaggccgtgagccagcggctgcatgtagcggatcacgaagaccctgatcgaaacacaactgcagcacctaggtccccccagtgtgtgttagaaagtaaacctcccttggccacttccggccctttgaaaccatccgtgtccgacacctcaattagaacttttgtctccccactgacctccccaaaacctgtccccgaacagggaatgtggtccaggtttcacatggcagtgctgagtgagcctgataggggctgcccgaccacccccaagtcacctaagtgtagagcggagggcagagccccccgtgcagatagcggacccgtgtccccagctgcatctcggaatgggatgtcggtcgcaggtaatagacaatcagaaccccgtttggctagccatgtggcagctgacacagctcagccaagaccaaccggcgagaaaggcggaaatattatggcatcagatagattggagcggaccaaccagcttaagatcgtggaaattagcgcggaagctgtttctgagacggtctgtgggaacaaaccagccgagtccgaccggcgcggcgggtgtctggcccagggaaactgtcaggaaaagtcagaaattaggttgtaccgacaggttgccgagtcgagtacaagtcacccctcatccctgccctcacatgcctcacaggcagagcaagaaatgtcgagatccttttccatggcaaagcttgctagctcatcctcatccctccagacggctatcagaaaggcagagtatagtcagggtaaatcctcactcatgtccgatagcagaggtgttccaagaaacagtatccctgggggccccagtggggaggatcacctgtattttacgccccgacctgcaacacggacctattccatgcccgcacagttttcgagccacttcgggagggagggacatccaccgcattctcttggcagatcccgggactcccaagtgcccgtgacctcgtctgtcgtgcctgaggctaaagccagtagaggcggcttaccctctctggcgaatgggcagggcatttactctgtgaagcctctactggacacctcccgcaacctgcccgccacagatgagggtgacataatatccgtccaagagacctcatgtcttgttaccgataagatcaaggtcacgagacgccattattgctatgaacagaactggccacacgaaagcacgtcttttttctccgtgaagcaaaggattaaatctttcgagaatctggcaaatgcagacagacccgtggccaaatccggagcctcaccattcctctccgtgtctagcaagcctcccattgggcgcaggagctccggaagcattgtgagtgggtcgctgggccatccaggagacgcggcagcacggctgctgcgccgatcgcttagctcctgttccgagaatcagtcggaggcgggcacactgctgccgcagatggcgaaatccccatccataatgacccttaccatttctcggcaaaacccacccgagacctcctcgaaaggatcagattccgaattaaaaaagagccttggcccgctcggtatccctacccctaccatgacccttgcaagccccgtgaagaggaacaaatcctcagtgcgccacacacagccatcaccagtgtcccggtctaagctgcaggagctgagggcactttcgatgcctgacctggacaagctctgcagcgaagattactccgctggcccaagtgctgtcttgtttaagaccgagttggagattacccccaggcgttcacctggcccgcccgcagggggggtgagctgtcccgagaaaggagggaatcgcgcgtgtcctgggggtagcggtcccaaaacgagcgctgctgagaccccctcttcagcctcggacaccggagaggcagcacaggacctgccgtttaggcgcagctggagtgttaatctagaccagctactcgtatcagcaggggaccagcagagactgcagagcgttctcagcagcgtgggaagtaagtctaccattctcacgctgattcaggaagcaaaagcacagtctgaaaatgaagaggatgtctgcttcattgtgttgaatcgcaaggagggaagcgggttggggttcagcgtggctggagggacggacgttgagcccaaatctattacagttcaccgagtgtttagccagggagccgcctctcaggaaggcacaatgaaccgtggcgatttcctactgtctgtcaatggcgcctctctcgcaggcctcgctcacggcaatgtactcaaggtgctccatcaggcacagctccacaaggacgctctagtggtgatcaaaaaagggatggatcaaccccggccctccgccagacaagaaccccccacggctaatgggaagggactcctgagtaggaaaactatcccattggagcctggcattggcagatcagtggcagttcacgatgcgctgtgtgttgaagtgctcaagacgtccgcagggctgggcctctccctggatggtgggaaatcatctgttacgggcgatggtcccctcgtgattaagagagtgtataagggaggggctgccgaacaggccgggattatcgaggccggcgacgaaattcttgcaatcaatggcaagccactagttggactcatgcattttgacgcttggaacatcatgaaatccgtgcccgaagggccagtacagttactcatcagaaaacatcgaaattcatcctag

SEQ ID NO: 253453 - DNA, 11641 bp, Artificial Sequence
  derived and/or modified sequence
gctggagggatcctccattcctgtgtcatttgcatgggtcctgctgtgaaatgaacctggcagggacttgttagacacttccttccttccctcattgagcactccagtgccattgttccacagttgttctaattgggtcctagcttcctcctgccaaggcaaacagcatagtctcgagtaggtgtccctaggctcatctgccagcctgaacatgaacacaggcaaagctgatgatggccagggaccccaggggacgtggggccctgtggggtctggcccccaggagcaagacctctgatgatgctggtgtctgggagtgagcaccatgcccatcacccaggacaatgccgtgctgcacctgcccctcctctaccagtggctgcagaacagcctgcaggaaggtggggatgggccggagcagcggctctgccaggcggccatccagaagctgcaggagtacatccagctgaactttgctgtggatgagagtacggtcccacctgatcacagcccccccgaaatggagatctgtactgtgtacctcaccaaggagctgggggacacagagactgtgggcctgagttttgggaacatccctgttttcggggactatggtgaaaagcgcagggggggcaagaagaggaaaacccaccagggtcctgtgctggatgtgggctgcatctgggtgacagagctgaggaagaacagcccagcagggaagagtgggaaggtccgactgcgggatgagatcctctcactgaatgggcagctgatggttggagttgatgtcagtggggccagttacctggctgagcagtgctggaatggcggctttatctacctgatcatgctgcgtcgctttaagcacaaagcccactccacttataatggcaacagtagcaacagctctgaaccaggagaaacacctaccttggagctgggtgaccgaactgcgaaaaaggggaaacgaaccagaaagtttggggtcatctccaggcctcctgccaacaaggcccctgaagaatccaagggcagcgctggctgtgaggtgtccagtgaccccagcactgagctggagaacggccctgaccctgaacttggaaacggccatgtctttcagctagaaaatggcccagattctctcaaggaggtggctggaccccatctagagaggtcagaagtggacagagggacagagcatagaattccaaagacagatgctcctctgaccacaagcaatgacaaacgccgcttctcaaaaggtgggaagacggacttccaatcgagtgactgcctggcacgggaggaagttggccgaatatggaagatggagctgctcaaagaatcggatgggctgggaattcaggttagtggaggccgaggatcaaagcgctcacctcacgctatcgttgtcactcaagtgaaggaaggaggtgccgctcacagggatggcaggctgtccttaggagatgagctgctggtaatcaatggtcatttactggtcgggctctcccacgaggaagcagtggccattcttcgctccgccacgggaatggtgcagcttgtggtggccagcaaggaaaactccgcagaggacctcctcaggttaacatctaagagcttgccagatctgaccagctcggtagaagatgtgtcctcctggactgataacgaagaccaggaggcagacggggaagaggacgaaggaaccagctcttctgtccagagagcaatgcctgggacagatgaaccccaagatgtgtgcggtgctgaggaatccaaggggaacttggaaagtcccaaacagggcagcaataaaatcaagctcaagagtcgcctttcagggggtgtacaccgccttgagtcagttgaagaatataacgagctgatggtgcggaatggggacccccggatccggatgttggaggtctcccgagatggccggaaacactccctcccgcagctgctggactcttccagtgcctcacaggaataccacattgtgaagaagtctacccgctccttaagcacgactcaggtggaatctccttggaggctcattcggccatccgtcatctcgatcattgggttgtacaaagaaaaaggcaagggccttggctttagtattgctggaggtcgagactgcattcgtggacagatggggatttttgtcaagaccatcttcccaaatggatcagctgcagaggacggaagacttaaagaaggggatgaaatcctagatgtaaatggaataccaataaagggcttgacatttcaagaagccattcatacctttaagcaaatccggagtggattatttgttttaacggtacgcacaaagttggtgagccccagcctcacaccctgctcgacacccacacacatgagcagatccgcctccccgaacttcaataccagtgggggagcctcagcgggaggttccgatgaaggcagttcttcatccctgggtcggaagacccctgggcccaaggacaggatcgtcatggaagtaacactcaacaaagagccaagagttggattaggcattggtgcctgctgcttggctctggaaaacagtcctcctggcatctacattcacagccttgctccaggatcagtggccaagatggagagcaacctgagccgcggggatcaaatcctggaagtgaactccgtcaacgtccgccatgctgctttaagcaaagtccacgccatcttgagtaaatgccctccaggacccgttcgccttgtcatcggccggcaccctaatccaaaggtttccgagcaggaaatggatgaagtcatagcacgcagcacttatcaggagagcaaagaggccaattcctctcctggcttaggtacccccttgaagagtccctctcttgcaaaaaaggactcccttatttctgaatctgaactctcccagtactttgcccacgatgtccctggccccttgtcagacttcatggtggccggttctgaggacgaggatcacccgggaagtggctgcagcacgtcggaggagggcagcctgcctcccagcacctccactcacaaggagcctggaaaacccagagccaacagcctcgtgactcttgggagccatcgggcttctgggctcttccacaagcaggtgacagttgccagacaagccagtctccccggaagcccacaggccctccgaaaccctctcctccgccagaggaaggtaggctgctacgatgccaacgatgccagtgatgaggaagagtttgacagagaaggggactgcatttcactcccaggggccctcccgggtcccatcaggcctctgtcagaggatgacccgaggcgtgtctcaatttcctcttccaagggcatggacgtccacaaccaagaggaacgaccccggaaaacactggtgagcaaggccatctcggcacctcttcttggtagctcagtggacttagaggagagtatcccagagggcatggtggatgctgcgtcctatgcagccaacctcacggactctgcagaggcccccaaggggagccctggaagctggtggaagaaggaactgtcaggatcaagtagcgcacccaaattggaatacacagtccgtacagacacccagagtccgacgaacactgggagccccagttccccccagcagaaaagtgaaggcctgggctccaggcacagaccagtggccagggtaagcccccactgcaagagatccgaggctgaggccaagcccagtggctcacagacagtgaacctgactggcagagccaatgatccatgcgatctggactcgagagtccaggccacttctgtcaaagtgactgtcgctggctttcagccaggtggagctgtggagaaggaatctctgggaaagctgaccactggagatgcttgtgtctctaccagctgtgaactagccagtgctctgtcccatctggatgccagccacctcacagagaacctgcccaaagctgcatcagagctggggcaacaacccatgactgaactggacagctcctcagacctcatctcttccccagggaagaagggggccgctcatcctgaccccagcaagacctctgtagacacagggcaagtcagtcggccagagaatcccagccagcctgcatcgcccagggtcaccaagtgcaaggccaggtctccagtcaggctcccccatgagggcagcccctccccgggggagaaagcagcggctccccctgactacagcaagactcgatcagcatcggaaaccagcacaccccacaataccaggagggtggctgccctcaggggagcgggacctggagcagagggaatgacaccagctggtgctgtcctgccaggagaccccctcacatcccaggagcagagacagggagctccaggtaaccacagtaaggctctggaaatgacaggaatccatgcacctgaaagctcccaggagccttccctgctggagggagcagattctgtgtcctcaagggcaccgcaggccagcctctccatgctgccatccactgacaacaccaaagaagcatgtggccatgtctcggggcactgctgcccaggggggagtagagagagccctgtgacggacattgacagcttcatcaaggagctggatgcttctgcagcaaggtctccgtcttcccagacgggggacagtggctctcaggagggcagtgctcagggccacccaccagccggggctggaggtgggagctcctgccgtgccgaaccagtcccggggggccagacctcctccccgaggagggcctgggctgctggtgcccccgcctacccacaatgggcctcccagccttcggttttagattcaattaatcccgacaaacattttactgtgaacaaaaactttctgagcaactactctagaaattttagcagttttcatgaagacagcacctccctatcaggcctgggtgacagcacggagccgtctctgtcatccatgtatggcgatgctgaggattcttcttctgaccctgagtcactcactgaagccccacgagcttctgccagggacggctggtcccctcctcgttcccgtgtgtctttgcacaaggaagatccttcggagtcagaagaggaacagattgagatttgttccacacgtggctgccccaatccaccctcgagtcctgctcatcttcccacccaggctgccatctgtcctgcctcagccaaagttctgtcattaaaatacagcactccgagagagtcggtggccagtccccgtgagaaggccgcctgcttgccaggctcatacacttcaggcccagactcttcccagccatcatcactcttggagatgagctctcaggagcatgaaactcatgcggacataagcacttcacagaaccacaggccctcgtgtgcagaagaaaccacagaagtcaccagcgctagctcagccatggaaaacagtccgctgtctaaagtagccaggcattttcacagtccgcccatcattctcagctcccccaacatggtaaatggcttggaacatgacctgctagatgacgaaaccctgaatcaatacgaaacaagcattaatgcagctgccagtctgtcctccttcagtgtggatgtccctaagaatggagaatctgttttggaaaacctccacatctctgaaagtcaagacctggatgacttgctacagaaaccaaaaatgatcgctaggaggcccatcatggcctggtttaaagaaataaataaacataaccaaggcacacatttgaggagcaaaaccgagaaggaacaacctctaatgcctgccagaagtcccgactccaagattcagatggtgagttcaagccaaaaaaagggcgttactgtgcctcatagccctcctcagccgaaaacaaacctggaaaataaggacctgtctaagaagagtccggcagaaatgcttctgactaatggtcagaaggcaaagtgtggtccgaagctgaagaggctcagcctcaagggcaaggccaaagtcaactctgaggcccctgctgcgaatgctgtgaaggctggggggacggaccacaggaaacccttgatctcaccccagacctcccacaaaacactttctaaggcagtgtcacagcggctccatgtagccgaccacgaggaccctgacagaaacaccacagctgcccccaggtccccccagtgtgtgctggaaagcaagccacctcttgccacctctgggccactgaaaccctcagtgtctgacacgagcatcaggacatttgtctcgcccctgacctctcccaagcctgttcctgagcaaggcatgtggagcaggttccacatggctgtcctctctgaacccgacagaggttgcccaaccacccctaaatctcctaagtgtagagcagagggcagggcgccccgtgctgactccgggccggtgagtccggcagcgtctaggaacggcatgtccgtggcagggaacagacagagtgagccgcgcctggccagccatgtggcagcagacacagcccaacccaggccgactggcgaaaaaggaggcaacataatggccagcgatcgcctcgaaagaacaaaccagctgaaaatcgtggagatttctgctgaagcagtgtcagagactgtatgtggtaacaagccagctgaaagcgacagacggggagggtgcttggcccagggcaactgtcaggagaagagtgaaatcaggctctatcgccaggtcgcagaatcatccacaagtcatccatcctcactcccatctcatgcctcccaggcagagcaggaaatgtcacgatcattcagcatggcaaaactggcgtcctcctcctcctcccttcaaacagccattagaaaggcagaatactcccagggaaaatcaagcctgatgtcagactcccgaggggtgcccagaaacagcattccagggggcccctcgggggaggaccatctctacttcaccccaaggccagcgaccaggacctactccatgccagcccagttctcaagccattttggacgggagggtcaccccccacacagcctgggtcgctctcgggacagccaggtccctgtgacaagcagtgttgtccccgaggcaaaggcatccagaggtggtcttcccagcctggctaatggacagggcatatatagtgtaaagccgctgctggacacatcgaggaatcttccagccacagatgaaggggatatcatttcagtccaggagacgagctgcctagtcacagacaaaatcaaagtcaccagacgacactactgctatgagcagaactggccccatgaatctacctcatttttctctgtgaagcagcggatcaagtcttttgagaacctggccaatgctgaccggcctgtagccaagtccggggcttccccatttttgtcggtgagctccaagcctcccattgggaggcggtcttccggcagcattgtttccgggagcctgggccacccaggtgacgcagcagcaaggttgttgagacgcagcttgagttcctgcagcgaaaaccaaagcgaagccggcaccctcctgccccagatggccaagtctccctcaatcatgacactgaccatctctcggcagaacccaccagagaccagtagcaagggctctgattcggaactaaagaaatcacttggtcctttgggaattcccaccccaacgatgaccctggcttctcctgttaagaggaacaagtcctcggtacgccacacgcagccctcgcccgtgtcccgctccaagctccaggagctgagagccttgagcatgcctgaccttgacaagctctgcagcgaggattactcagcagggccgagcgccgtgctcttcaaaactgagctggagatcacccccaggaggtcacctggccctcctgctggaggcgtttcgtgtcccgagaagggcgggaacagggcctgtccaggaggaagtggccctaaaaccagtgctgctgagacacccagttcagccagtgatacgggtgaagctgcccaggatctgccttttagaagaagctggtcagttaatttggatcaacttctagtctcagcgggggaccagcaaagattacagtctgttttatcgtcagtgggatcgaaatctaccatcctaactctcattcaggaagcgaaagcacaatcagagaatgaagaagatgtttgcttcatagtcttgaatagaaaagaaggctcaggtctgggattcagtgtggcaggagggacagatgtggagccaaaatcaatcacggtccacagggtgttttctcagggggcggcttctcaggaagggactatgaaccgaggggatttccttctgtcagtcaacggcgcctcactggctggcttagcccacgggaatgtcctgaaggttctgcaccaggcacagctgcacaaagatgccctcgtggtcatcaagaaagggatggatcagcccaggccctctgcccggcaggagcctcccacagccaatgggaagggtttgctgtccagaaagaccatccccctggagcctggcattgggagaagtgtggctgtacacgatgctctgtgtgttgaagtgctgaagacctcggctgggctgggactgagtctggatgggggaaaatcatcggtgacgggagatgggcccttggtcattaaaagagtgtacaaaggtggtgcggctgaacaagctggaataatagaagctggagatgaaattcttgctattaatgggaaacctctggttgggctcatgcactttgatgcctggaatattatgaagtctgtcccagaaggacctgtgcagttattaattagaaagcataggaattcttcatgaattttaacaagaatcattttctcagttctcttctttctttagcaaatcagagtgacttctttaaaccacaggttgttgaaatggccaacactggtacagacacggactataaaaatctccaagcttgtgcttacacatgaagcctgacttaactgtatgtgcaacagcaatgaaattaactccagaagccttccacctgcgtcacccaggccgggagggttccttcgttccagtgcctgtcccctacctttatgttatgtttactgatggggatacaagatgtgacacacccttctttatttgaaacaaacaaacatttagctagacctttgcttccttcttgccagctctcccaacatacccaatcctggtgatcagggaactaaaagtctgagggggacacaaatgtcacacctaagaggacaatcaatcattttgtatgattttgtaagtaaatgacagaatgcttttaggcacattcaatggaaggaggagatgtaggtctgtatatgttaccctgaaaagagaataagacttacttaaaaaaatgaattatgacctgttaggctgagctcaggaattgtccaaaaaggaaaaagcaaaataattaattgagagtattttttagtgagtgtaatgtataatgtacgtatgcaaagttcaactcaataggttattgatcaccatgaagtattgatcattttctatctcaaaagtgtaagccataaggctgttttacagaatagcacttctgataagctgtattaaatagccatgagcttcactgcttagagggagcagaaaggtcaacatctaaaagcaccttacaactagtttttgaacctgtcttgataagtgcttgaattcaagactggtcagtccaagagcagacaaaaatatcacaagtcagtcagtcactgggtttccatttctgaattttatgcactccaaccatgaatttaaactaaatttttagaaatcaagtatctttctaagtgtccttggatttatagacaatgtatgtacaatccaaatagaggagcttaatggaatccttttaggagactggttggtttttttccctctttcccaacatgtttaagaaatgtaacattctaagtattggatctcttttcttgacctagtataatgacaactgcagtgacttaagtttttgctgttttcgttttcccgctttgcaatttcctccttttgccaaaaatgttttcctacagaagactgtcgtgactcacgctacttgggaaactcactctggccactcctcctctggtggcatgagctgcttcccagtagctattccgattggatattccgttcgtcgtcacatagctggcttttctctcctcatgatgtaccttattttcttaggtaaataattccaaactctcatcgggtcataaagaggaggagaaacagggtgagtcaaggtaaaggagcagaaatgtagttacaagccaggtcgtcttcagtggcacaaaccaacccgttgagccctgacaacatgagtggagagtgcatttgccatacctgtgtgcatgacactaagattttatgttggagatacttctttaaataacctacagcttgggtctatggctgtgacccccagattcatggaggggctttagccatcagctttgtacatcatcatttttctgaatgaccaatcccactaaacatctttgaagtcggcctagagaggtccttcagatgagagagaaatagctggcttgtctgagtccagatttctcatcaactggcaatacaaaggaaaatatggtacaggagttagttagaaaggtcttattgattttacttctacttttcactacagttacaggtagaatactgtaggaagtcagtgcaaggtgcatgcttgattgatagatattgattgattgtttttcagtctctggggtcagttttgtggtttctgctttcttgcctaaatcaaagactatttcaagtcaacaacactgaaaactgcttttcgcctccactcttacagctgtgcctaataataattaattaataaacgcacagccctatgtgaacagacaggaatttcttgtgcaatgtggagcaaatggaatggtctccttccgcaagtctttttaatcctcatatctggagtacaagggtagacctctggcttaccacatacactatgctaaagtcatcagccactgctactacatcttgccagaaggtttccctcgccaacaaacagttgaaatttaagggaagaagcaaaagctaaactgtctttgaccctaagatagatagaaagctatttatttgtcttcagtgttcaaggcatgactagtatttctaattagcctaataaattcccacactttctgaagtgaacactaatggtattgtcctactaaaactgtcattgtttctttttttttaactggtcagtcattcacaataagctatgagggtaaataaatatgtgttataacaagtaaaccgtagttgcaagaatataccatgaagattaaagtaggctgggtttcatttccatcttcccacacatctcattgaatttgatggttgacttaattggcaccataactttgtatgatattatacattaacctttatttatgtaaagtaaaatgccttatatattaaagagtaagtgcaataatatgaaatagcctgtacattttaaaaatgttgtcaccaagttatataaatccacatctctgtaaacaaccttttttaagtaattttaaaaaaaataaacactctgcttactacttg

SEQ ID NO: 253454 - DNA, 11107 bp, Artificial Sequence
  derived and/or modified sequence
gcgggagcctcggccaagccgcgagcaggtgtgaatgagcccagggaaggacacacggccactgctggagggatcctccattcctgtgtcatttgcatgggtcctgctgtgaaatgaacctggcagggacttgttagacacttccttccttccctcattgagcactccagtgccattgttccacagttgttctaattgggtcctagcttcctcctgccaaggcaaacagcatagtctcgagtaggtgtccctaggctcatctgccagcctgaacatgaacacaggcaaagctgatgatggccagggaccccaggggacgtggggccctgtggggtctggcccccaggagcaagacctctgatgatgctggtgtctgggagtgagcaccatgcccatcacccaggacaatgccgtgctgcacctgcccctcctctaccagtggctgcagaacagcctgcaggaaggtggggatgggccggagcagcggctctgccaggcggccatccagaagctgcaggagtacatccagctgaactttgctgtggatgagagtacggtcccacctgatcacagcccccccgaaatggagatctgtactgtgtacctcaccaaggagctgggggacacagagactgtgggcctgagttttgggaacatccctgttttcggggactatggtgaaaagcgcagggggggcaagaagaggaaaacccaccagggtcctgtgctggatgtgggctgcatctgggtgacagagctgaggaagaacagcccagcagggaagagtgggaaggtccgactgcgggatgagatcctctcactgaatgggcagctgatggttggagttgatgtcagtggggccagttacctggctgagcagtgctggaatggcggctttatctacctgatcatgctgcgtcgctttaagcacaaagcccactccacttataatggcaacagtagcaacagctctgaaccaggagaaacacctaccttggagctgggtgaccgaactgcgaaaaaggggaaacgaaccagaaagtttggggtcatctccaggcctcctgccaacaaggcccctgaagaatccaagggcagcgctggctgtgaggtgtccagtgaccccagcactgagctggagaacggccctgaccctgaacttggaaacggccatgtctttcagctagaaaatggcccagattctctcaaggaggtggctggaccccatctagagaggtcagaagtggacagagggacagagcatagaattccaaagacagatgctcctctgaccacaagcaatgacaaacgccgcttctcaaaaggtgggaagacggacttccaatcgagtgactgcctggcacgggaggaagttggccgaatatggaagatggagctgctcaaagaatcggatgggctgggaattcaggttagtggaggccgaggatcaaagcgctcacctcacgctatcgttgtcactcaagtgaaggaaggaggtgccgctcacagggaataccacattgtgaagaagtctacccgctccttaagcacgactcaggtggaatctccttggaggctcattcggccatccgtcatctcgatcattgggttgtacaaagaaaaaggcaagggccttggctttagtattgctggaggtcgagactgcattcgtggacagatggggatttttgtcaagaccatcttcccaaatggatcagctgcagaggacggaagacttaaagaaggggatgaaatcctagatgtaaatggaataccaataaagggcttgacatttcaagaagccattcatacctttaagcaaatccggagtggattatttgttttaacggtacgcacaaagttggtgagccccagcctcacaccctgctcgacacccacacacatgagcagatccgcctccccgaacttcaataccagtgggggagcctcagcgggaggttccgatgaaggcagttcttcatccctgggtcggaagacccctgggcccaaggacaggatcgtcatggaagtaacactcaacaaagagccaagagttggattaggcattggtgcctgctgcttggctctggaaaacagtcctcctggcatctacattcacagccttgctccaggatcagtggccaagatggagagcaacctgagccgcggggatcaaatcctggaagtgaactccgtcaacgtccgccatgctgctttaagcaaagtccacgccatcttgagtaaatgccctgtttccgagcaggaaatggatgaagtcatagcacgcagcacttatcaggagagcaaagaggccaattcctctcctggcttaggtacccccttgaagagtccctctcttgcaaaaaaggactcccttatttctgaatctgaactctcccagtactttgcccacgatgtccctggccccttgtcagacttcatggtggccggttctgaggacgaggatcacccgggaagtggctgcagcacgtcggaggagggcagcctgcctcccagcacctccaaggagcctggaaaacccagagccaacagcctcgtgactcttgggagccatcgggcttctgggctcttccacaagcaggtgacagttgccagacaagccagtctccccggaagcccacaggccctccgaaaccctctcctccgccagaggaaggtaggctgctacgatgccaacgatgccagtgatgaggaagagtttgacagagaaggggactgcatttcactcccaggggccctcccgggtcccatcaggcctctgtcagaggatgacccgaggcgtgtctcaatttcctcttccaagggcatggacgtccacaaccaagaggaacgaccccggaaaacactggtgagcaaggccatctcggcacctcttcttggtagctcagtggacttagaggagagtatcccagagggcatggtggatgctgcgtcctatgcagccaacctcacggactctgcagaggcccccaaggggagccctggaagctggtggaagaaggaactgtcaggatcaagtagcgcacccaaattggaatacacagtccgtacagacacccagagtccgacgaacactgggagccccagttccccccagcagaaaagtgaaggcctgggctccaggcacagaccagtggccagggtaagcccccactgcaagagatccgaggctgaggccaagcccagtggctcacagacagtgaacctgactggcagagccaatgatccatgcgatctggactcgagagtccaggccacttctgtcaaagtgactgtcgctggctttcagccaggtggagctgtggagaagttgtgccaggaatctctgggaaagctgaccactggagatgcttgtgtctctaccagctgtgaactagccagtgctctgtcccatctggatgccagccacctcacagagaacctgcccaaagctgcatcagagctggggcaacaacccatgactgcctcagacctcatctcttccccagggaagaagggggccgctcatcctgaccccagcaagacctctgtagacacagggcaagtcagtcggccagagaatcccagccagcctgcatcgcccagggtcaccaagtgcaaggccaggtctccagtcaggctcccccatgagggcagcccctccccgggggagaaagcagcggctccccctgactacagcaagactcgatcagcatcggaaaccagcacaccccacaataccaggagggtggctgccctcaggggagcgggacctggagcagagggaatgacaccagctggtgctgtcctgccaggagaccccctcacatcccaggagcagagacagggagctccaggtaaccacagtaaggctctggaaatgacaggaatccatgcacctgaaagctcccaggagccttccctgctggagggagcagattctgtgtcctcaagggcaccgcaggccagcctctccatgctgccatccactgacaacaccaaagaagcatgtggccatgtctcggggcactgctgcccaggggggagtagagagagccctgtgacggacattgacagcttcatcaaggagctggatgcttctgcagcaaggtctccgtcttcccagacgggggacagtggctctcaggagggcagtgctcagggccacccaccagccggggctggaggtgggagctcctgccgtgccgaaccagtcccggggggccagacctcctccccgaggagggcctgggctgctggtgcccccgcctacccacaatgggcctcccagccttcggttttagattcaattaatcccgacaaacattttactgtgaacaaaaactttctgagcaactactctagaaattttagcagttttcatgaagacagcacctccctatcaggcctgggtgacagcacggagccgtctctgtcatccatgtatggcgatgctgaggattcttcttctgaccctgagtcactcactgaagccccacgagcttctgccagggacggctggtcccctcctcgttcccgtgtgtctttgcacaaggaagatccttcggagtcagaagaggaacagattgagatttgttccacacgtggctgccccaatccaccctcgagtcctgctcatcttcccacccaggctgccatctgtcctgcctcagccaaagttctgtcattaaaatacagcactccgagagagtcggtggccagtccccgtgagaaggccgcctgcttgccaggctcatacacttcaggcccagactcttcccagccatcatcactcttggagatgagctctcaggagcatgaaactcatgcggacataagcacttcacagaaccacaggccctcgtgtgcagaagaaaccacagaagtcaccagcgctagctcagccatggaaaacagtccgctgtctaaagtagccaggcattttcacagtccgcccatcattctcagctcccccaacatggtaaatggcttggaacatgacctgctagatgacgaaaccctgaatcaatacgaaacaagcattaatgcagctgccagtctgtcctccttcagtgtggatgtccctaagaatggagaatctgttttggaaaacctccacatctctgaaagtcaagacctggatgacttgctacagaaaccaaaaatgatcgctaggaggcccatcatggcctggtttaaagaaataaataaacataaccaaggcacacatttgaggagcaaaaccgagaaggaacaacctctaatgcctgccagaagtcccgactccaagattcagatggtgagttcaagccaaaaaaagggcgttactgtgcctcatagccctcctcagccgaaaacaaacctggaaaataaggacctgtctaagaagagtccggcagaaatgcttctgactaatggtcagaaggcaaagtgtggtccgaagctgaagaggctcagcctcaagggcaaggccaaagtcaactctgaggcccctgctgcgaatgctgtgaaggctggggggacggaccacaggaaacccttgatctcaccccagacctcccacaaaacactttctaaggcagtgtcacagcggctccatgtagccgaccacgaggaccctgacagaaacaccacagctgcccccaggtccccccagtgtgtgctggaaagcaagccacctcttgccacctctgggccactgaaaccctcagtgtctgacacgagcatcaggacatttgtctcgcccctgacctctcccaagcctgttcctgagcaaggcatgtggagcaggttccacatggctgtcctctctgaacccgacagaggttgcccaaccacccctaaatctcctaagtgtagagcagagggcagggcgccccgtgctgactccgggccggtgagtccggcagcgtctaggaacggcatgtccgtggcagggaacagacagagtgagccgcgcctggccagccatgtggcagcagacacagcccaacccaggccgactggcgaaaaaggaggcaacataatggccagcgatcgcctcgaaagaacaaaccagctgaaaatcgtggagatttctgctgaagcagtgtcagagactgtatgtggtaacaagccagctgaaagcgacagacggggagggtgcttggcccagggcaactgtcaggagaagagtgaaatcaggctctatcgccaggtcgcagaatcatccacaagtcatccatcctcactcccatctcatgcctcccaggcagagcaggaaatgtcacgatcattcagcatggcaaaactggcgtcctcctcctcctcccttcaaacagccattagaaaggcagaatactcccagggaaaatcaagcctgatgtcagactcccgaggggtgcccagaaacagcattccagggggcccctcgggggaggaccatctctacttcaccccaaggccagcgaccaggacctactccatgccagcccagttctcaagccattttggacgggagggtcaccccccacacagcctgggtcgctctcgggacagccaggtccctgtgacaagcagtgttgtccccgaggcaaaggcatccagaggtggtcttcccagcctggctaatggacagggcatatatagtgtaaagccgctgctggacacatcgaggaatcttccagccacagatgaaggggatatcatttcagtccaggagacgagctgcctagtcacagacaaaatcaaagtcaccagacgacactactgctatgagcagaactggccccatgaatctacctcatttttctctgtgaagcagcggatcaagtcttttgagaacctggccaatgctgaccggcctgtagccaagtccggggcttccccatttttgtcggtgagctccaagcctcccattgggaggcggtcttccggcagcattgtttccgggagcctgggccacccaggtgacgcagcagcaaggttgttgagacgcagcttgagttcctgcagcgaaaaccaaagcgaagccggcaccctcctgccccagatggccaagtctccctcaatcatgacactgaccatctctcggcagaacccaccagagaccagtagcaagggctctgattcggaactaaagaaatcacttggtcctttgggaattcccaccccaacgatgaccctggcttctcctgttaagaggaacaagtcctcggtacgccacacgcagccctcgcccgtgtcccgctccaagctccaggagctgagagccttgagcatgcctgaccttgacaagctctgcagcgaggattactcagcagggccgagcgccgtgctcttcaaaactgagctggagatcacccccaggaggtcacctggccctcctgctggaggcgtttcgtgtcccgagaagggcgggaacagggcctgtccaggaggaagtggccctaaaaccagtgctgctgagacacccagttcagccagtgatacgggtgaagctgcccaggatctgccttttagaagaagctggtcagttaatttggatcaacttctagtctcagcgggggaccagcaaagattacagtctgttttatcgtcagtgggatcgaaatctaccatcctaactctcattcaggaagcgaaagcacaatcagagaatgaagaagatgtttgcttcatagtcttgaatagaaaagaaggctcaggtctgggattcagtgtggcaggagggacagatgtggagccaaaatcaatcacggtccacagggtgttttctcagggggcggcttctcaggaagggactatgaaccgaggggatttccttctgtcagtcaacggcgcctcactggctggcttagcccacgggaatgtcctgaaggttctgcaccaggcacagctgcacaaagatgccctcgtggtcatcaagaaagggatggatcagcccaggccctctgcccggcaggagcctcccacagccaatgggaagggtttgctgtccagaaagaccatccccctggagcctggcattgggagaagtgtggctgtacacgatgctctgtgtgttgaagtgctgaagacctcggctgggctgggactgagtctggatgggggaaaatcatcggtgacgggagatgggcccttggtcattaaaagagtgtacaaaggtggtgcggctgaacaagctggaataatagaagctggagatgaaattcttgctattaatgggaaacctctggttgggctcatgcactttgatgcctggaatattatgaagtctgtcccagaaggacctgtgcagttattaattagaaagcataggaattcttcatgaattttaacaagaatcattttctcagttctcttctttctttagcaaatcagagtgacttctttaaaccacaggttgttgaaatggccaacactggtacagacacggactataaaaatctccaagcttgtgcttacacatgaagcctgacttaactgtatgtgcaacagcaatgaaattaactccagaagccttccacctgcgtcacccaggccgggagggttccttcgttccagtgcctgtcccctacctttatgttatgtttactgatggggatacaagatgtgacacacccttctttatttgaaacaaacaaacatttagctagacctttgcttccttcttgccagctctcccaacatacccaatcctggtgatcagggaactaaaagtctgagggggacacaaatgtcacacctaagaggacaatcaatcattttgtatgattttgtaagtaaatgacagaatgcttttaggcacattcaatggaaggaggagatgtaggtctgtatatgttaccctgaaaagagaataagacttacttaaaaaaatgaattatgacctgttaggctgagctcaggaattgtccaaaaaggaaaaagcaaaataattaattgagagtattttttagtgagtgtaatgtataatgtacgtatgcaaagttcaactcaataggttattgatcaccatgaagtattgatcattttctatctcaaaagtgtaagccataaggctgttttacagaatagcacttctgataagctgtattaaatagccatgagcttcactgcttagagggagcagaaaggtcaacatctaaaagcaccttacaactagtttttgaacctgtcttgataagtgcttgaattcaagactggtcagtccaagagcagacaaaaatatcacaagtcagtcagtcactgggtttccatttctgaattttatgcactccaaccatgaatttaaactaaatttttagaaatcaagtatctttctaagtgtccttggatttatagacaatgtatgtacaatccaaatagaggagcttaatggaatccttttaggagactggttggtttttttccctctttcccaacatgtttaagaaatgtaacattctaagtattggatctcttttcttgacctagtataatgacaactgcagtgacttaagtttttgctgttttcgttttcccgctttgcaatttcctccttttgccaaaaatgttttcctacagaagactgtcgtgactcacgctacttgggaaactcactctggccactcctcctctggtggcatgagctgcttcccagtagctattccgattggatattccgttcgtcgtcacatagctggcttttctctcctcatgatgtaccttattttcttaggtaaataattccaaactctcatcgggtcataaagaggaggagaaacagggtgagtcaaggtaaaggagcagaaatgtagttacaagccaggtcgtcttcagtggcacaaaccaacccgttgagccctgacaacatgagtggagagtgcatttgccatacctgtgtgcatgacactaagattttatgttggagatacttctttaaataacctacagcttgggtctatggctgtgacccccagattcatggaggggctttagccatcagctttgtacatcatcatttttctgaatgaccaatcccactaaacatctttgaagtcggcctagagaggtccttcagatgagagagaaatagctggcttgtctgagtccagatttctcatcaactggcaatacaaaggaaaatatggtacaggagttagttagaaaggtcttattgattttacttctacttttcactacagttacaggtagaatactgtaggaagtcagtgcaaggtgcatgcttgattgatagatattgattgattgtttttcagtctctggggtcagttttgtggtttctgctttcttgcctaaatcaaagactatttcaagtcaacaacactgaaaactgcttttcgcctccactcttacagctgtgcctaataataattaattaataaacgcacagccctatgtgaacagacaggaatttcttgtgcaatgtggagcaaatggaatggtctccttccgcaagtctttttaatcctcatatctggagtacaagggtagacctctggcttaccacatacactatgctaaagtcatcagccactgctactacatcttgccagaaggtttccctcgccaacaaacagttgaaatttaagggaagaagcaaaagctaaactgtctttgaccctaagatagatagaaagctatttatttgtcttcagtgttcaaggcatgactagtatttctaattagcctaataaattcccacactttctgaagtgaacactaatggtattgtcctactaaaactgtcattgtttctttttttttaactggtcagtcattcacaataagctatgagggtaaataaatatgtgttataacaagtaaaccgtagttgcaagaatataccatgaagattaaagtaggctgggtttcatttccatcttcccacacatctcattgaatttgatggttgacttaattggcaccataactttgtatgatattatacattaacctttatttatgtaaagtaaaatgccttatatattaaagagtaagtgcaataatatgaaatagcctgtacattttaaaaatgttgtcaccaagttatataaatccacatctctgtaaacaaccttttttaagtaattttaaaaaaaataaacactctgcttactacttg

SEQ ID NO: 253455 - DNA, 11704 bp, Artificial Sequence
  derived and/or modified sequence
gcgggagcctcggccaagccgcgagcaggtgtgaatgagcccagggaaggacacacggccactgctggagggatcctccattcctgtgtcatttgcatgggtcctgctgtgaaatgaacctggcagggacttgttagacacttccttccttccctcattgagcactccagtgccattgttccacagttgttctaattgggtcctagcttcctcctgccaaggcaaacagcatagtctcgagtaggtgtccctaggctcatctgccagcctgaacatgaacacaggcaaagctgatgatggccagggaccccaggggacgtggggccctgtggggtctggcccccaggagcaagacctctgatgatgctggtgtctgggagtgagcaccatgcccatcacccaggacaatgccgtgctgcacctgcccctcctctaccagtggctgcagaacagcctgcaggaaggtggggatgggccggagcagcggctctgccaggcggccatccagaagctgcaggagtacatccagctgaactttgctgtggatgagagtacggtcccacctgatcacagcccccccgaaatggagatctgtactgtgtacctcaccaaggagctgggggacacagagactgtgggcctgagttttgggaacatccctgttttcggggactatggtgaaaagcgcagggggggcaagaagaggaaaacccaccagggtcctgtgctggatgtgggctgcatctgggtgacagagctgaggaagaacagcccagcagggaagagtgggaaggtccgactgcgggatgagatcctctcactgaatgggcagctgatggttggagttgatgtcagtggggccagttacctggctgagcagtgctggaatggcggctttatctacctgatcatgctgcgtcgctttaagcacaaagcccactccacttataatggcaacagtagcaacagctctgaaccaggagaaacacctaccttggagctgggtgaccgaactgcgaaaaaggggaaacgaaccagaaagtttggggtcatctccaggcctcctgccaacaaggcccctgaagaatccaagggcagcgctggctgtgaggtgtccagtgaccccagcactgagctggagaacggccctgaccctgaacttggaaacggccatgtctttcagctagaaaatggcccagattctctcaaggaggtggctggaccccatctagagaggtcagaagtggacagagggacagagcatagaattccaaagacagatgctcctctgaccacaagcaatgacaaacgccgcttctcaaaaggtgggaagacggacttccaatcgagtgactgcctggcacgggaggaagttggccgaatatggaagatggagctgctcaaagaatcggatgggctgggaattcaggttagtggaggccgaggatcaaagcgctcacctcacgctatcgttgtcactcaagtgaaggaaggaggtgccgctcacagggatggcaggctgtccttaggagatgagctgctggtaatcaatggtcatttactggtcgggctctcccacgaggaagcagtggccattcttcgctccgccacgggaatggtgcagcttgtggtggccagcaaggaaaactccgcagaggacctcctcaggttaacatctaagagcttgccagatctgaccagctcggtagaagatgtgtcctcctggactgataacgaagaccaggaggcagacggggaagaggacgaaggaaccagctcttctgtccagagagcaatgcctgggacagatgaaccccaagatgtgtgcggtgctgaggaatccaaggggaacttggaaagtcccaaacagggcagcaataaaatcaagctcaagagtcgcctttcagggggtgtacaccgccttgagtcagttgaagaatataacgagctgatggtgcggaatggggacccccggatccggatgttggaggtctcccgagatggccggaaacactccctcccgcagctgctggactcttccagtgcctcacaggaataccacattgtgaagaagtctacccgctccttaagcacgactcaggtggaatctccttggaggctcattcggccatccgtcatctcgatcattgggttgtacaaagaaaaaggcaagggccttggctttagtattgctggaggtcgagactgcattcgtggacagatggggatttttgtcaagaccatcttcccaaatggatcagctgcagaggacggaagacttaaagaaggggatgaaatcctagatgtaaatggaataccaataaagggcttgacatttcaagaagccattcatacctttaagcaaatccggagtggattatttgttttaacggtacgcacaaagttggtgagccccagcctcacaccctgctcgacacccacacacatgagcagatccgcctccccgaacttcaataccagtgggggagcctcagcgggaggttccgatgaaggcagttcttcatccctgggtcggaagacccctgggcccaaggacaggatcgtcatggaagtaacactcaacaaagagccaagagttggattaggcattggtgcctgctgcttggctctggaaaacagtcctcctggcatctacattcacagccttgctccaggatcagtggccaagatggagagcaacctgagccgcggggatcaaatcctggaagtgaactccgtcaacgtccgccatgctgctttaagcaaagtccacgccatcttgagtaaatgccctccaggacccgttcgccttgtcatcggccggcaccctaatccaaaggtttccgagcaggaaatggatgaagtcatagcacgcagcacttatcaggagagcaaagaggccaattcctctcctggcttaggtacccccttgaagagtccctctcttgcaaaaaaggactcccttatttctgaatctgaactctcccagtactttgcccacgatgtccctggccccttgtcagacttcatggtggccggttctgaggacgaggatcacccgggaagtggctgcagcacgtcggaggagggcagcctgcctcccagcacctccactcacaaggagcctggaaaacccagagccaacagcctcgtgactcttgggagccatcgggcttctgggctcttccacaagcaggtgacagttgccagacaagccagtctccccggaagcccacaggccctccgaaaccctctcctccgccagaggaaggtaggctgctacgatgccaacgatgccagtgatgaggaagagtttgacagagaaggggactgcatttcactcccaggggccctcccgggtcccatcaggcctctgtcagaggatgacccgaggcgtgtctcaatttcctcttccaagggcatggacgtccacaaccaagaggaacgaccccggaaaacactggtgagcaaggccatctcggcacctcttcttggtagctcagtggacttagaggagagtatcccagagggcatggtggatgctgcgtcctatgcagccaacctcacggactctgcagaggcccccaaggggagccctggaagctggtggaagaaggaactgtcaggatcaagtagcgcacccaaattggaatacacagtccgtacagacacccagagtccgacgaacactgggagccccagttccccccagcagaaaagtgaaggcctgggctccaggcacagaccagtggccagggtaagcccccactgcaagagatccgaggctgaggccaagcccagtggctcacagacagtgaacctgactggcagagccaatgatccatgcgatctggactcgagagtccaggccacttctgtcaaagtgactgtcgctggctttcagccaggtggagctgtggagaaggaatctctgggaaagctgaccactggagatgcttgtgtctctaccagctgtgaactagccagtgctctgtcccatctggatgccagccacctcacagagaacctgcccaaagctgcatcagagctggggcaacaacccatgactgaactggacagctcctcagacctcatctcttccccagggaagaagggggccgctcatcctgaccccagcaagacctctgtagacacagggcaagtcagtcggccagagaatcccagccagcctgcatcgcccagggtcaccaagtgcaaggccaggtctccagtcaggctcccccatgagggcagcccctccccgggggagaaagcagcggctccccctgactacagcaagactcgatcagcatcggaaaccagcacaccccacaataccaggagggtggctgccctcaggggagcgggacctggagcagagggaatgacaccagctggtgctgtcctgccaggagaccccctcacatcccaggagcagagacagggagctccaggtaaccacagtaaggctctggaaatgacaggaatccatgcacctgaaagctcccaggagccttccctgctggagggagcagattctgtgtcctcaagggcaccgcaggccagcctctccatgctgccatccactgacaacaccaaagaagcatgtggccatgtctcggggcactgctgcccaggggggagtagagagagccctgtgacggacattgacagcttcatcaaggagctggatgcttctgcagcaaggtctccgtcttcccagacgggggacagtggctctcaggagggcagtgctcagggccacccaccagccggggctggaggtgggagctcctgccgtgccgaaccagtcccggggggccagacctcctccccgaggagggcctgggctgctggtgcccccgcctacccacaatgggcctcccagccttcggttttagattcaattaatcccgacaaacattttactgtgaacaaaaactttctgagcaactactctagaaattttagcagttttcatgaagacagcacctccctatcaggcctgggtgacagcacggagccgtctctgtcatccatgtatggcgatgctgaggattcttcttctgaccctgagtcactcactgaagccccacgagcttctgccagggacggctggtcccctcctcgttcccgtgtgtctttgcacaaggaagatccttcggagtcagaagaggaacagattgagatttgttccacacgtggctgccccaatccaccctcgagtcctgctcatcttcccacccaggctgccatctgtcctgcctcagccaaagttctgtcattaaaatacagcactccgagagagtcggtggccagtccccgtgagaaggccgcctgcttgccaggctcatacacttcaggcccagactcttcccagccatcatcactcttggagatgagctctcaggagcatgaaactcatgcggacataagcacttcacagaaccacaggccctcgtgtgcagaagaaaccacagaagtcaccagcgctagctcagccatggaaaacagtccgctgtctaaagtagccaggcattttcacagtccgcccatcattctcagctcccccaacatggtaaatggcttggaacatgacctgctagatgacgaaaccctgaatcaatacgaaacaagcattaatgcagctgccagtctgtcctccttcagtgtggatgtccctaagaatggagaatctgttttggaaaacctccacatctctgaaagtcaagacctggatgacttgctacagaaaccaaaaatgatcgctaggaggcccatcatggcctggtttaaagaaataaataaacataaccaaggcacacatttgaggagcaaaaccgagaaggaacaacctctaatgcctgccagaagtcccgactccaagattcagatggtgagttcaagccaaaaaaagggcgttactgtgcctcatagccctcctcagccgaaaacaaacctggaaaataaggacctgtctaagaagagtccggcagaaatgcttctgactaatggtcagaaggcaaagtgtggtccgaagctgaagaggctcagcctcaagggcaaggccaaagtcaactctgaggcccctgctgcgaatgctgtgaaggctggggggacggaccacaggaaacccttgatctcaccccagacctcccacaaaacactttctaaggcagtgtcacagcggctccatgtagccgaccacgaggaccctgacagaaacaccacagctgcccccaggtccccccagtgtgtgctggaaagcaagccacctcttgccacctctgggccactgaaaccctcagtgtctgacacgagcatcaggacatttgtctcgcccctgacctctcccaagcctgttcctgagcaaggcatgtggagcaggttccacatggctgtcctctctgaacccgacagaggttgcccaaccacccctaaatctcctaagtgtagagcagagggcagggcgccccgtgctgactccgggccggtgagtccggcagcgtctaggaacggcatgtccgtggcagggaacagacagagtgagccgcgcctggccagccatgtggcagcagacacagcccaacccaggccgactggcgaaaaaggaggcaacataatggccagcgatcgcctcgaaagaacaaaccagctgaaaatcgtggagatttctgctgaagcagtgtcagagactgtatgtggtaacaagccagctgaaagcgacagacggggagggtgcttggcccagggcaactgtcaggagaagagtgaaatcaggctctatcgccaggtcgcagaatcatccacaagtcatccatcctcactcccatctcatgcctcccaggcagagcaggaaatgtcacgatcattcagcatggcaaaactggcgtcctcctcctcctcccttcaaacagccattagaaaggcagaatactcccagggaaaatcaagcctgatgtcagactcccgaggggtgcccagaaacagcattccagggggcccctcgggggaggaccatctctacttcaccccaaggccagcgaccaggacctactccatgccagcccagttctcaagccattttggacgggagggtcaccccccacacagcctgggtcgctctcgggacagccaggtccctgtgacaagcagtgttgtccccgaggcaaaggcatccagaggtggtcttcccagcctggctaatggacagggcatatatagtgtaaagccgctgctggacacatcgaggaatcttccagccacagatgaaggggatatcatttcagtccaggagacgagctgcctagtcacagacaaaatcaaagtcaccagacgacactactgctatgagcagaactggccccatgaatctacctcatttttctctgtgaagcagcggatcaagtcttttgagaacctggccaatgctgaccggcctgtagccaagtccggggcttccccatttttgtcggtgagctccaagcctcccattgggaggcggtcttccggcagcattgtttccgggagcctgggccacccaggtgacgcagcagcaaggttgttgagacgcagcttgagttcctgcagcgaaaaccaaagcgaagccggcaccctcctgccccagatggccaagtctccctcaatcatgacactgaccatctctcggcagaacccaccagagaccagtagcaagggctctgattcggaactaaagaaatcacttggtcctttgggaattcccaccccaacgatgaccctggcttctcctgttaagaggaacaagtcctcggtacgccacacgcagccctcgcccgtgtcccgctccaagctccaggagctgagagccttgagcatgcctgaccttgacaagctctgcagcgaggattactcagcagggccgagcgccgtgctcttcaaaactgagctggagatcacccccaggaggtcacctggccctcctgctggaggcgtttcgtgtcccgagaagggcgggaacagggcctgtccaggaggaagtggccctaaaaccagtgctgctgagacacccagttcagccagtgatacgggtgaagctgcccaggatctgccttttagaagaagctggtcagttaatttggatcaacttctagtctcagcgggggaccagcaaagattacagtctgttttatcgtcagtgggatcgaaatctaccatcctaactctcattcaggaagcgaaagcacaatcagagaatgaagaagatgtttgcttcatagtcttgaatagaaaagaaggctcaggtctgggattcagtgtggcaggagggacagatgtggagccaaaatcaatcacggtccacagggtgttttctcagggggcggcttctcaggaagggactatgaaccgaggggatttccttctgtcagtcaacggcgcctcactggctggcttagcccacgggaatgtcctgaaggttctgcaccaggcacagctgcacaaagatgccctcgtggtcatcaagaaagggatggatcagcccaggccctctgcccggcaggagcctcccacagccaatgggaagggtttgctgtccagaaagaccatccccctggagcctggcattgggagaagtgtggctgtacacgatgctctgtgtgttgaagtgctgaagacctcggctgggctgggactgagtctggatgggggaaaatcatcggtgacgggagatgggcccttggtcattaaaagagtgtacaaaggtggtgcggctgaacaagctggaataatagaagctggagatgaaattcttgctattaatgggaaacctctggttgggctcatgcactttgatgcctggaatattatgaagtctgtcccagaaggacctgtgcagttattaattagaaagcataggaattcttcatgaattttaacaagaatcattttctcagttctcttctttctttagcaaatcagagtgacttctttaaaccacaggttgttgaaatggccaacactggtacagacacggactataaaaatctccaagcttgtgcttacacatgaagcctgacttaactgtatgtgcaacagcaatgaaattaactccagaagccttccacctgcgtcacccaggccgggagggttccttcgttccagtgcctgtcccctacctttatgttatgtttactgatggggatacaagatgtgacacacccttctttatttgaaacaaacaaacatttagctagacctttgcttccttcttgccagctctcccaacatacccaatcctggtgatcagggaactaaaagtctgagggggacacaaatgtcacacctaagaggacaatcaatcattttgtatgattttgtaagtaaatgacagaatgcttttaggcacattcaatggaaggaggagatgtaggtctgtatatgttaccctgaaaagagaataagacttacttaaaaaaatgaattatgacctgttaggctgagctcaggaattgtccaaaaaggaaaaagcaaaataattaattgagagtattttttagtgagtgtaatgtataatgtacgtatgcaaagttcaactcaataggttattgatcaccatgaagtattgatcattttctatctcaaaagtgtaagccataaggctgttttacagaatagcacttctgataagctgtattaaatagccatgagcttcactgcttagagggagcagaaaggtcaacatctaaaagcaccttacaactagtttttgaacctgtcttgataagtgcttgaattcaagactggtcagtccaagagcagacaaaaatatcacaagtcagtcagtcactgggtttccatttctgaattttatgcactccaaccatgaatttaaactaaatttttagaaatcaagtatctttctaagtgtccttggatttatagacaatgtatgtacaatccaaatagaggagcttaatggaatccttttaggagactggttggtttttttccctctttcccaacatgtttaagaaatgtaacattctaagtattggatctcttttcttgacctagtataatgacaactgcagtgacttaagtttttgctgttttcgttttcccgctttgcaatttcctccttttgccaaaaatgttttcctacagaagactgtcgtgactcacgctacttgggaaactcactctggccactcctcctctggtggcatgagctgcttcccagtagctattccgattggatattccgttcgtcgtcacatagctggcttttctctcctcatgatgtaccttattttcttaggtaaataattccaaactctcatcgggtcataaagaggaggagaaacagggtgagtcaaggtaaaggagcagaaatgtagttacaagccaggtcgtcttcagtggcacaaaccaacccgttgagccctgacaacatgagtggagagtgcatttgccatacctgtgtgcatgacactaagattttatgttggagatacttctttaaataacctacagcttgggtctatggctgtgacccccagattcatggaggggctttagccatcagctttgtacatcatcatttttctgaatgaccaatcccactaaacatctttgaagtcggcctagagaggtccttcagatgagagagaaatagctggcttgtctgagtccagatttctcatcaactggcaatacaaaggaaaatatggtacaggagttagttagaaaggtcttattgattttacttctacttttcactacagttacaggtagaatactgtaggaagtcagtgcaaggtgcatgcttgattgatagatattgattgattgtttttcagtctctggggtcagttttgtggtttctgctttcttgcctaaatcaaagactatttcaagtcaacaacactgaaaactgcttttcgcctccactcttacagctgtgcctaataataattaattaataaacgcacagccctatgtgaacagacaggaatttcttgtgcaatgtggagcaaatggaatggtctccttccgcaagtctttttaatcctcatatctggagtacaagggtagacctctggcttaccacatacactatgctaaagtcatcagccactgctactacatcttgccagaaggtttccctcgccaacaaacagttgaaatttaagggaagaagcaaaagctaaactgtctttgaccctaagatagatagaaagctatttatttgtcttcagtgttcaaggcatgactagtatttctaattagcctaataaattcccacactttctgaagtgaacactaatggtattgtcctactaaaactgtcattgtttctttttttttaactggtcagtcattcacaataagctatgagggtaaataaatatgtgttataacaagtaaaccgtagttgcaagaatataccatgaagattaaagtaggctgggtttcatttccatcttcccacacatctcattgaatttgatggttgacttaattggcaccataactttgtatgatattatacattaacctttatttatgtaaagtaaaatgccttatatattaaagagtaagtgcaataatatgaaatagcctgtacattttaaaaatgttgtcaccaagttatataaatccacatctctgtaaacaaccttttttaagtaattttaaaaaaaataaacactctgcttactacttg

SEQ ID NO: 253456 - DNA, 8520 bp, Artificial Sequence
  derived and/or modified sequence
atgcctattacacaggacaatgctgttctgcaccttccacttctgtaccagtggctgcaaaatagcctgcaggaggggggagacggcccagagcagagactgtgtcaggcggctatccagaaactgcaggagtatatccagttaaatttcgccgttgacgagagcacagtgcctccagaccacagcccccctgagatggagatttgtaccgtctatctgacaaaggaacttggagatacggagaccgtggggctgtctttcgggaatatccccgtcttcggggattacggagaaaaaaggagagggggaaaaaagaggaaaacgcaccagggaccagtgctggacgtcggctgcatttgggtcacggagctgaggaagaattctccggctggtaagtcagggaaggttcgtctgagggacgaaatcctgtctttgaacggccaactgatggtgggggtggacgtgagtggggcaagttatctcgccgagcagtgctggaacggtggttttatttatcttataatgctgaggcggttcaagcacaaggcccacagtacttacaatggcaacagctccaacagctccgaacctggcgagactcctacactggagttaggagatagaactgctaagaagggtaaaagaacgaggaagtttggggtcatcagccgccctccagcaaacaaagcgccagaggagtccaagggcagcgctgggtgtgaggtgagctctgacccgtcaacggaactcgaaaatgggccagacccagagctgggtaatgggcacgtatttcagttggaaaacggaccagactcccttaaagaggttgccggtcctcatctggaaagatcggaggtggatcggggaactgaacaccggatccccaagaccgacgcaccactaactacttccaacgacaagcggaggtttagtaaaggcggaaaaaccgactttcagtccagtgattgtctggccagagaggaagtcggaaggatctggaagatggaactattgaaggaaagcgatgggttgggtatccaagtgagtggaggtaggggttcgaaaaggtctccacacgcaatcgttgtcacgcaggtgaaagaagggggtgccgctcatagagatggacgtctgtcactgggtgacgaactattagtcattaatggccatctgttagtaggactttctcacgaagaagccgtcgctattctgagaagtgcaactggcatggtccagctcgtcgtcgcatccaaagagaacagtgctgaagatctcttacgacttacctccaaatcactacccgacctcaccagtagcgttgaagacgtaagctcctggacggacaatgaggatcaggaggcggatggagaggaggatgagggtacctcctccagtgtgcagcgggcaatgcccggaacggatgaaccccaggatgtgtgcggcgcagaggagtccaagggaaacctggaaagccccaagcagggatcgaacaagataaaacttaaatcacgtctcagcggaggcgtccatagacttgagtctgtcgaagagtacaacgaactgatggtcaggaatggcgaccctcgaattcgtatgttagaagtatctagggatgggagaaaacattccctgccccagttgctggactctagctcagccagccaggagtaccacattgtcaagaaatctactaggtcgctatccaccacacaagttgaatctccatggcggcttatcagaccctcggtgattagcatcattggactctacaaagagaaaggaaaaggactgggattttctatcgctgggggaagagactgtatccgaggtcagatggggattttcgtgaaaaccatcttcccgaacgggagtgcagcagaggacggcagactaaaagagggcgacgagatactggatgtgaatgggataccaatcaaggggctgacgttccaggaagcaatccacaccttcaagcaaattcggtctggcttattcgttttgacagtgaggacaaaactagtgagcccctcccttacaccatgctcgacccccactcatatgtccaggagcgcctcacccaattttaacacaagcggtggggctagcgcgggagggagcgacgaagggtcgagtagctcactcggcagaaaaacacctggacctaaggataggatcgtcatggaggtgacgctgaacaaggagccacgcgtcggacttggaatcggggcttgctgccttgcactggaaaactcacccccagggatctacatacattccctcgcaccaggatccgttgcaaagatggagagcaacctgtctcgaggtgaccaaatcctagaggtgaactccgtgaacgtgcgccacgctgccctctctaaagtgcacgccattctgagtaagtgtccgccaggaccagtcaggctggttattgggaggcacccaaaccccaaggtctccgaacaggaaatggatgaagtaatcgctcgatcaacttaccaagagtcaaaggaagccaacagcagcccagggttaggcacccctctgaagagcccaagcctcgcgaaaaaggatagcctgatcagtgagtcggaactgtcacagtactttgctcacgatgttccaggaccactttccgattttatggtcgccggttccgaagacgaagatcaccccggaagcggatgtagtacaagtgaggaagggtcgctccctccctcgacctctactcacaaagagccagggaaacctcgcgctaactcgctggttactttggggtcccacagagcctcgggcctcttccacaagcaggtcactgtagctcggcaggctagcttacccggttcacctcaagccctcagaaatccattgctgaggcagcggaaggtgggctgctacgatgccaatgatgcatccgacgaagaagaatttgatagagagggagattgcatcagcctgcccggagccttgcctggtcctatcaggcccctgagcgaagatgaccctcgacgagtgtctatctccagttctaagggaatggacgtccacaaccaagaggagaggccacgcaagaccctggtgagcaaagcgataagtgccccactcctcggctcctctgttgatctggaagagtctatacccgaaggcatggttgacgccgcaagttacgctgcaaacctgaccgacagtgctgaagctccaaagggtagtcctgggtcatggtggaagaaagagctcagcgggtcgtccagcgcaccaaagctggagtataccgtaaggaccgacacacagagccctaccaacaccggctcaccctcatccccacagcagaaaagcgagggactgggatcccggcatcgtccggtcgctcgggtgagtcctcactgcaaacggtccgaagcggaggctaagccatctggaagtcagaccgtaaacctcactggcagggctaatgatccctgtgacttagattccagagtgcaggccacttccgttaaagtgacagtggccggatttcagcccggaggggctgtggagaaagaatctctgggcaaattaactaccggggacgcctgcgtgagcaccagttgtgaactggcttcagccctttcacacctagatgcctcacatctgacggaaaatcttcctaaagctgccagcgaactcggccagcaacctatgactgaactcgacagctctagtgatcttatcagctctccgggtaaaaagggggctgcccatccggatcctagcaagaccagcgtcgacacaggccaagtatcgcgtccggagaatccatcccaaccggcatcgcccagagtcacgaagtgcaaggcaaggagtcccgtaaggctaccccacgagggtagcccgagcccgggagaaaaggccgctgcccctccagattacagtaaaacaaggtctgcttcagagacaagcacacctcacaacacaaggcgcgttgcggctcttagaggtgcagggccaggcgctgaagggatgacccccgcaggcgctgtccttcccggtgatcccctgacaagtcaggagcagcgccagggagcccctggcaaccacagtaaagcgctcgaaatgacaggaatccacgcacccgagagctcgcaggagccaagcctcctggagggcgctgactctgtgtcatccagagcccctcaagctagtttgagcatgctgcctagcactgacaacaccaaagaagcttgtggtcatgtctctggtcactgctgtcctggtggctcaagggaaagccctgttactgatattgactcctttattaaagagttggacgcttcagctgcccgatctccgtccagccagaccggagactccggttcacaggaaggctccgctcaaggacacccacctgctggggctggaggcggatcgtcatgtagggccgagccagtcccagggggacagacgtcaagccccaggagggcgtgggccgcaggcgctcccgcttatcctcagtgggcctctcagccatccgtgctggacagtataaatcctgataagcattttacagtcaataagaatttcctcagcaattactcgagaaactttagcagtttccatgaggatagcacatctctctccgggttgggggactccacagagccttctctttcaagcatgtatggagacgcagaagatagctcatctgatcctgagtccctcacagaggcgccaagagcatcagccagagacggctggtctcctcccagaagccgcgtgtcgttacataaggaggatccatcagaaagtgaggaagagcagattgagatttgttccacccggggatgccccaatcctccaagctctccagcgcacctgccaacccaagccgctatctgtcccgcaagcgcaaaagtgctctcactgaaatactccactcctagagagagcgtagcctcgccccgagagaaggcagcatgtcttcccggtagttacaccagcggacctgattccagccagccttcatccctcctagagatgagctctcaggagcatgaaacacatgccgatatatctacatcccagaatcatcgtccctcatgcgccgaggaaaccacggaggtgacctccgccagcagcgcaatggagaattctccactctcaaaggtggctcgtcacttccactcacccccaatcatccttagtagtcctaacatggtaaatgggctggaacatgatcttcttgatgatgagacccttaaccagtacgagacatccattaacgctgcagcctctctgtcttctttctccgtggacgtgccaaagaacggcgaatcagttttagaaaatctgcacatttcagagtcccaagacctggatgatcttcttcagaaaccaaagatgatagcccgtagaccaattatggcctggtttaaagaaatcaacaaacacaaccagggcacacatctgcgttcaaaaactgaaaaggagcagccccttatgccggctcgcagccctgacagtaagatacaaatggtttcatctagccagaagaagggcgtgacggtgccacattcccctcctcaacctaaaacaaaccttgaaaataaggatctgagcaagaagtcaccggctgagatgctcctaaccaatggacagaaagccaagtgtggccctaagttgaagcgcctgagcctcaagggaaaagcaaaggtgaacagcgaggcccctgcggctaacgcagtgaaagcaggcggaactgatcacaggaaaccacttattagcccacagacgagtcataaaacactcagtaaagctgtaagtcagaggttgcacgtggcagatcacgaagatcctgacaggaatactaccgcggctccccgatccccacagtgcgttctggagtccaagccacctctcgctacatccggacccctcaaacctagcgtgagtgatacctccatccgcacctttgtgagccccttaacaagcccaaagcccgtccctgagcaggggatgtggtccagattccatatggctgtgctgagcgaacctgatcgaggatgtcctacaacaccaaagagcccaaagtgtcgagctgagggcagggctcccagagccgattcaggtcctgtgtctcctgcagcttctcgcaatggcatgagtgttgccggtaaccgccaaagcgagccacgtctggcgagtcacgtagctgcagataccgctcagcccagacccacgggagagaagggagggaacattatggcatcggacagactcgagcggactaaccagctgaagatagtggagatcagtgcagaggccgtcagcgagactgtgtgcgggaacaaacccgcagagagcgaccgtcggggaggctgtctagcgcagggcaactgtcaagagaagtccgaaattaggctgtatagacaggtcgcggaatcttccactagtcacccttccagtctgccctctcacgccagtcaagccgagcaagagatgtctcggtctttttcgatggccaagctggcatcctcaagttctagcttacagaccgctatccggaaagccgaatactctcaggggaagtcttccctcatgtcagacagccggggtgtccctcggaatagcatcccgggaggaccaagtggagaagaccacttgtacttcactccacggcctgctacccgcacatatagtatgcctgctcagttctcttctcactttggacgagagggtcatccgcctcactctctcggcaggtcccgggatagtcaggtgccagttacttcaagtgtcgtgcctgaggcaaaggcatctcgtggagggcttcctagcttagccaacggacaaggcatttatagcgtgaaacctttgctcgatactagcaggaacctaccagcaaccgatgaaggtgacatcatttcagtacaggagaccagctgccttgtgaccgataaaattaaggtgacaaggaggcattattgctacgaacagaactggcctcacgagtctacaagctttttttccgtgaagcaacgcatcaagtctttcgaaaatttagccaatgccgaccggcctgtggccaaatctggagctagtccttttttatctgtgagcagcaaacctcctatcggccgtaggtcaagtggcagcatcgtttctggaagtttaggacatcccggagatgctgcagctaggctgctccgcaggtccctgtccagttgttcagaaaaccaaagcgaggcagggacgttgttgcctcagatggccaagagcccctccattatgaccctgactatcagccggcaaaatcctccagagacgtcttctaaaggttccgactcagagttgaaaaaaagcctgggtcctctaggcatccctacaccaaccatgactctagcctcacccgtgaaaagaaataagtcctctgtgcgacacacacagcctagcccagtgtctcgctcgaaactacaggaactgagagcgctcagtatgccagatctagacaagctctgtagcgaggattacagcgccggaccaagcgccgtgttatttaagacggagctcgaaatcacacctcgtcgcagtccaggtccacctgcgggaggtgtatcttgccctgaaaaggggggaaaccgggcttgtcccggtggttctgggccaaagacctctgcagccgagaccccttcatcagcgtctgatactggagaagcagcccaggacctgccctttcgcagaagctggtcggtgaacctcgaccagctgctcgtgagcgcgggagaccaacaaagattgcagagcgtgctgtcttcagtggggtccaagtcaactatactgacccttatccaggaagccaaagcccagtcagaaaatgaggaggacgtgtgctttattgtgttaaaccggaaagaggggtcaggcctgggcttttctgttgctggcggaacggatgtcgaacccaagagtattaccgtccaccgcgtgttttcccagggtgccgcaagtcaggaaggaacaatgaacagaggcgacttcttactctcagtgaatggggcttcgttggccggactggcccatggtaatgtactgaaggttcttcaccaagcacagctgcacaaggacgccctggtggtcatcaagaagggaatggatcagcctcgcccatctgctcggcaagaacctccaacagcaaacgggaagggactgctcagtagaaaaactattccccttgagccgggaatcgggaggtccgtggcagttcacgacgcgctctgtgtcgaggtgttgaaaacgtcggccggtctcggcctcagcctcgacggcggaaaatcttcggttacaggagatggccctcttgtgattaagagggtctacaagggtggggcagctgaacaggccggtattatcgaggctggggacgagattctggccatcaacggaaagcccctggttggtctgatgcactttgatgcgtggaacatcatgaagtccgtgccagagggaccagttcagttgcttatccgaaaacatcgcaacagcagctac

SEQ ID NO: 253457 - DNA, 7922 bp, Artificial Sequence
  derived and/or modified sequence
atgcctattacacaggataatgcggtgctgcacttgcctctgctataccagtggctccagaattctctgcaggaaggaggggacggacccgagcagaggctgtgtcaggccgcaatacagaagctgcaggaatacatccagctgaacttcgcagtggacgagagtaccgttccacctgatcattctccacccgaaatggaaatttgtaccgtgtatctgacaaaggagctgggagacaccgaaacagtgggcttgagttttggaaacattccagtgtttggggattacggagagaaaagacggggaggcaagaagagaaagacccatcagggcccagtgcttgatgtgggatgtatctgggtgaccgaattacggaagaactcccctgccggtaagagcgggaaagtgcgactgagagatgagattctttccctgaacgggcagttgatggtaggagtggatgtatctggcgcttcttacctggccgaacagtgttggaatgggggatttatttacttgatcatgctcagaaggttcaaacataaggctcactccacatacaacggaaatagttctaactcaagcgagcccggtgagacaccgactctcgaactgggcgatcggactgctaaaaaaggtaaacggactaggaagtttggggtgatttctcgcccacctgctaataaagcgccagaagagtcgaagggctccgcaggatgtgaagtgagttccgatccttccaccgaactggagaacggcccagacccggaattaggcaatggccatgtcttccagctggagaacggcccagattcccttaaggaggtcgctggaccccacctggagcgttccgaggtggaccggggtacagagcatcggattccgaaaactgacgctcctctcacaacatcaaatgacaagagaagattttccaaaggtggcaaaaccgactttcagagctctgattgtcttgcacgggaggaagtgggcaggatctggaaaatggaactattaaaagaatccgatgggcttggtattcaggtttctggcggacgcggttcgaagcgatcaccgcatgccatagtagtaacgcaggttaaggagggtggagccgctcatagggagtatcacattgtgaagaagagcacaaggtctctctctaccactcaagtggagtccccgtggcgtttgatacgcccatcggtgatcagcattattgggctctataaggagaagggtaagggcctgggttttagcatagctggcggaagggattgcattagagggcagatggggatttttgtgaagaccatcttcccaaatggctctgcagccgaagacggaagattgaaagagggtgatgagatcttggatgtcaatggcattcctatcaaagggttaacttttcaagaagcgatccacacattcaagcagataaggtcaggcctatttgttctaacagtccgaacaaaacttgtaagcccaagcctcactccttgttcaacacctactcatatgagtagatctgcatctcccaattttaatacctccgggggagccagcgctggtggttcggatgagggctccagcagctcccttggacggaaaacaccaggacccaaggaccggatcgtcatggaggtgacactgaataaggagcccagggtagggctggggataggggcatgctgtttggctctcgaaaattcccccccagggatctatattcacagcctagcacctggatccgttgccaagatggagtccaatctgtctaggggagaccaaatactggaagtcaatagcgttaacgtacgccacgccgctctctcaaaggttcatgcaatcctgtcaaaatgtccagtctctgagcaggagatggatgaagtcattgcgcgatcaacgtatcaggagtccaaggaggcaaacagcagccctgggctgggcacacccctcaagtcacccagtctggccaaaaaagatagtctgatctctgaatcagagctcagccaatatttcgctcatgatgtgcccggaccattgagcgactttatggtggcaggatctgaggacgaagaccaccccggatctggctgtagtactagcgaagagggcagtctccctccgtccacctctaaagagcccggaaaacctagggctaacagtttagtaacactgggctcgcaccgcgcatccggattgtttcataagcaggtaacggtggccagacaggccagccttccaggctccccccaggctctgaggaatcctcttctcagacagagaaaagtgggctgttacgatgcaaatgacgctagcgatgaggaggagttcgatcgtgagggggactgcatcagtctgcccggagctctgccaggcccaatcagaccactgtctgaagatgacccccgacgggtcagcatttcaagcagcaagggaatggatgtccataatcaggaggaacgccctcgaaaaaccctggtcagcaaagccatctccgcacctctcctaggcagcagcgtggatctggaggaatcaattcccgaaggcatggtggacgccgctagttatgcagcaaacctgaccgatagcgccgaagcgcctaagggctctcccggaagctggtggaagaaagaactaagtggatcctcctcagcgcctaaacttgagtataccgtgcgtaccgatacacagtctccaacgaatactgggtcgccctcctctccccagcagaaatccgagggccttggctcaagacaccgccctgttgctagggtatctccccactgcaagaggagcgaggcggaagctaagcctagcgggtcacaaacagtcaatttgacaggacgagcgaacgatccatgtgacctcgatagccgcgtgcaagcaacttccgtcaaggttactgtcgccggttttcaacccggtggcgcagtcgagaagctctgtcaggagtcacttggaaaacttaccacaggagacgcctgcgtctctactagctgtgagttggcctccgccctgtctcacttggatgctagtcacctgactgagaaccttcctaaagcagctagcgaattagggcagcaacccatgaccgctagtgaccttataagctctcccggaaagaaaggcgctgctcacccagaccctagtaaaacctccgttgacactggacaggtgtcccggcctgagaatcccagccagccggcatcgccaagagtcaccaagtgtaaggcaaggtctccggtgcggctgcctcacgagggtagtccctcacccggtgaaaaggcagcagcccctcccgactactctaagacacggagtgcgtccgagacctcaacccctcacaatacaagaagggtcgctgcgcttagaggagcaggccctggcgctgaaggcatgacacctgccggagccgtcttacctggcgatcctctgacctcacaagagcaaagacagggtgctcctggaaaccattctaaagccctggaaatgacaggcattcacgctcctgaatcttcacaggaaccatcgctccttgagggggctgactcggtctccagccgcgctccacaggctagcctgtcaatgctccccagcactgataacacaaaagaggcttgcggccacgtgagcggccattgttgccccggtggctctcgggagtccccagtgacagatattgactcattcatcaaggaattggacgcttctgctgccagatcaccatccagccaaacgggagattctggaagtcaggaaggctccgctcagggtcacccacctgcgggtgccggtggcggttctagctgcagagccgaacccgtccctggaggccagacatcgtccccacgtcgggcttgggctgccggagcgccagcctatccgcagtgggcctcacagccttccgtgctggactctatcaatccggataagcatttcactgttaataagaatttcttatccaactacagccgcaacttctcgagttttcatgaagactccacttccctgagcggactgggagacagtaccgagccaagcttgtcttccatgtacggcgatgctgaagactctagctctgaccccgaatccctcacagaggcacccagagcaagcgccagagacggctggagccctcccaggtcacgggtgagtttgcataaggaggacccgagcgaatctgaggaggagcagattgagatctgttcgacgcggggttgtcctaacccaccatcttcccccgctcacttgcctacccaagccgctatctgtcctgccagcgctaaggttcttagccttaaatattccactcctcgcgaatcagtcgcttcaccgagggaaaaggccgcatgtctgcccggttcttacacctccggtccggattcaagccagccttcttccctgcttgagatgagtagtcaagaacacgagactcatgccgacatcagtactagccagaaccataggccctcttgtgctgaggaaactacagaagtgactagtgccagttctgccatggaaaacagccctctcagcaaggtcgcccgtcactttcactccccgccaattatcttgagttctccaaacatggtcaacggactggagcacgatctgcttgatgacgagacattaaatcagtatgaaaccagcatcaatgccgctgcctctctctcctcgttctccgtcgacgtccccaaaaacggagagtccgtcctagagaatttgcacatatcagagtctcaggacctggacgatctgctgcagaaacctaagatgatcgcccgacgccctattatggcatggtttaaggaaataaacaaacacaaccaagggacccacctgaggtcgaaaaccgaaaaggagcagcctctgatgcccgcaagatctccagattcaaaaatccaaatggtcagttcctcccaaaaaaaaggagtaaccgtccctcattctccgcctcagcccaaaacgaatctggaaaataaggacttgagcaaaaaatctcctgccgaaatgctgcttacaaacgggcaaaaagcaaagtgcggccctaaattgaaacgcttgagcctgaaaggaaaggccaaagttaatagtgaagcacccgctgccaatgccgtgaaggcaggtgggaccgaccatcgtaagccgctgataagcccccagacgtcgcacaagacacttagcaaggcagtatcacaacgactacatgtcgccgaccatgaggaccccgataggaatacgacagccgctcctcgtagcccacagtgtgtgctggaatctaagcctcccctagccacttccgggccactcaaaccaagtgtttcagatacaagtataagaacattcgtttcacccttgacatcaccaaagcccgtgcccgagcagggaatgtggtccaggttccatatggccgtactgagcgaacccgaccgcggatgcccaaccactcctaagagcccgaaatgtcgtgcagaaggaagagccccaagggccgactcaggtccagtctcacctgctgcctccagaaacggcatgagcgtagctggcaaccgccaatctgagcccagactggcctcgcacgtggctgctgatactgcccagccacggcctactggggagaaaggaggtaatattatggcctccgaccgtctggagagaaccaatcagctcaaaattgtcgagatttcggcggaggcggtcagcgaaaccgtttgcgggaacaaaccggcagagagcgataggaggggcggatgtctggctcagggcaactgccaggagaagagcgaaattcgcctctacagacaggtggctgagtcttccacgtctcatccaagctccttacccagccatgcgtcgcaggccgaacaggagatgtcccggagtttttctatggctaagctggctagctcttcctctagtcttcaaaccgctattagaaaagccgagtattcacagggcaaatcaagtctgatgtcagattcacgaggcgttcctaggaacagcataccgggaggcccatcaggggaagaccacctctactttaccccgcgtcccgcaactcgtacctatagcatgccagcgcagttctcgtcccatttcggacgcgagggacacccccctcacagcctcggccgtagcagggactcacaggtgcctgtcaccagcagtgtcgtgccagaggcaaaggcctccaggggtgggctacccagtctggctaatgggcagggaatttactccgtgaagccactgctggatacctctcgaaatctgcctgccaccgatgaaggggacattataagcgtgcaggaaaccagctgtttggtgaccgacaagattaaggtgacgcgccgtcactactgctacgaacaaaactggccacatgagtcaacctccttcttttctgtgaaacaaaggatcaagtctttcgaaaatctggccaacgccgaccgaccagtggccaaaagcggcgcttcccctttcctatcagtaagctccaagcccccaatcggaagacgaagcagtggctccatcgtcagcggctccctgggccatcccggagacgctgcagcgcgactgctgaggaggtctctgtcctcctgctcggagaaccagtctgaagcaggtaccctgttgcctcagatggccaagtccccatccatcatgacgctgaccatttctaggcagaacccacctgaaacttccagcaagggaagtgattccgagttgaagaaaagcctcggccctctcggaatcccaactccaaccatgacccttgcctctcccgtaaagcggaacaaatccagtgttcgccatacccaaccatcccccgtcagccggtccaagctgcaggaattaagggcactctccatgcctgaccttgacaagttgtgctctgaggactatagtgcagggccatcggccgtgttgttcaagactgagcttgagatcaccccaaggcggagcccaggtcctcctgctgggggagtgtcttgtcctgagaaggggggtaatcgcgcttgtcccggtggctcaggcccaaagactagcgccgcagagactccgtcgagcgcttcagatacaggggaagccgctcaagatctgccctttcgtcggtcctggtctgtgaacctggatcagctgcttgtgtctgccggagaccagcagcgccttcagagtgtgctaagcagcgtggggtctaaatccactattctgaccctcattcaagaggctaaagcccagtcagaaaatgaagaagatgtgtgcttcatcgttcttaacagaaaagaagggagcgggctcggattcagcgtcgccggtggcaccgacgtagagcccaagtctatcaccgttcaccgcgtgttttctcaaggcgctgcctcacaggaaggcaccatgaacagaggtgactttctattatccgtcaatggtgcttccctcgctggactggctcacgggaatgtgctgaaggtcctgcaccaggcacagctgcataaagatgctctggtcgttatcaaaaaaggcatggaccagcctcgcccttctgccagacaggagcccccaaccgctaatgggaaaggcctgctttctaggaagacgatcccactcgagccaggcataggtcgcagcgtggccgtccacgatgccctgtgtgtcgaagtactgaaaacctcagcaggtctgggactctccctggacggcggaaaatccagtgttactggggatggtccgctggttataaagcgcgtgtataaaggaggcgcagccgaacaggccggtataatagaggccggtgatgagattcttgctattaacggaaagccactcgtagggcttatgcactttgatgcctggaacataatgaagtccgtccccgagggaccagtacagctgctgatccgcaaacataggaattctagtta

SEQ ID NO: 253458 - DNA, 8519 bp, Artificial Sequence
  derived and/or modified sequence
atgcccattacgcaagataatgcggtactgcatcttccacttctctatcagtggctgcagaactctttacaagagggcggagatgggcctgagcaaaggctttgccaggccgctattcagaaactgcaggagtacatccagctgaactttgcagtggatgaatcaacagtgccgcctgatcattctccaccagaaatggagatttgtacagtgtacctgaccaaagagctgggggacaccgagacagttgggctgagttttggcaatatacctgtgtttggtgattacggcgagaaacggagagggggaaaaaagaggaagacccatcaggggccagtgctcgacgtgggatgtatctgggtcactgagttgcggaagaattctcccgctgggaaaagtggaaaggttcgcctgagagacgagattctgtccctgaatggtcagctcatggtgggagtcgacgtctccggcgcttcctacttggctgagcaatgctggaacggcggttttatttaccttattatgctccgcaggttcaagcataaagcccatagtacctacaatggcaactcatccaactccagtgagcccggagagactccaacgctcgagctcggtgaccgcaccgctaaaaaaggcaagaggactcgcaaattcggagtgatctctagaccacccgctaacaaagccccagaggaatccaaaggaagcgctgggtgcgaggttagttccgacccttccaccgagctagagaacggcccagacccagagctgggtaatggccatgtgttccagttggagaacggccctgacagtctgaaagaggtcgccggaccacacctggagcggtccgaagtggaccgcggtacggagcaccgcatccctaaaaccgatgccccacttacgacttctaacgacaagagaaggttcagcaaggggggaaaaacagacttccagtcgagtgattgtctggctcgggaagaggtgggcagaatttggaagatggagctgcttaaggaatctgatggtctgggcatccaggtatctggaggtaggggttctaagcggagcccgcacgcaatcgttgtcacccaggttaaggaaggaggagctgctcatcgggatggccgactgagcttgggcgatgagctgttagtgataaatgggcacctattagtggggctgtctcacgaggaggctgtggcaatactgagatcagccacaggtatggtccagcttgtggtcgcatctaaagaaaattccgctgaggatttgttacgactcacgagcaagtccctcccagatctgacctcatcagtcgaagacgtcagcagctggactgataacgaagatcaggaagccgacggtgaggaagacgagggcacatcctcttctgtccagcgagccatgcccggtacagatgaaccccaggatgtttgtggggcagaggaaagcaagggaaatctcgaatctcccaagcagggatcaaacaagatcaagctgaagagccggctgtctggcggagtgcaccggctagaatcagtggaggaatacaacgagctgatggtgagaaacggagaccccaggattagaatgctggaggtcagtcgtgacggacgcaagcacagcctcccacaactgctggatagctcttctgcctctcaagaataccacatcgtgaagaagagcactcgttcactgtctaccacgcaggtggagagcccttggcgactgattcggccatcagtaatcagcatcattggtctgtacaaggaaaaggggaaggggcttggctttagcatcgcgggaggcagggactgcatcagaggccaaatgggaatattcgtgaaaactatctttcccaacggctccgccgctgaagacggccgtttaaaagaaggtgacgagatactcgacgtgaatggcatccccattaagggactcacctttcaagaagcgatccacaccttcaagcagatccggagcggcttatttgtgctgaccgtgcgaacaaagctggtgagcccttcattgacgccatgttcaacccccacacacatgtctcgctcagcttccccgaactttaacacttcaggcggtgcgtcggccggagggagcgatgaaggcagtagttcaagccttggacggaaaactccgggtcccaaggataggattgtgatggaggtcacactgaacaaggagccccgtgtcgggctaggtattggcgcttgttgcctcgcgctcgagaatagtcccccagggatttatattcacagtcttgcacccggttctgtggctaaaatggagagcaatctgtcccgtggggaccagatcctggaggttaattctgtgaatgttaggcatgccgctctgagcaaggtgcacgccatcctgtcaaaatgtccgccaggtcccgtgcgcctggtgataggccgtcacccaaaccccaaggtctccgagcaggaaatggacgaagtcatcgcaaggagcacctatcaggagtccaaggaggcaaactcttcacccggtctggggacccccctcaagtccccttctctggctaagaaggatagcctgatctccgaaagtgaattgtctcagtattttgcacacgatgtccctggccctctgagtgatttcatggtcgccggttccgaggatgaagaccaccccggaagcgggtgctccacatctgaagagggcagcttacccccatcgacaagcacacacaaagagcccggtaaacctcgcgctaactccctcgtgaccctcggcagccaccgagcatccggtctctttcataagcaggtcacagtggccagacaggccagcctgccgggatctccgcaagccctgcggaacccactgcttagacagcgcaaggtgggttgctatgatgccaacgacgcttccgatgaagaagaattcgatcgtgagggcgactgtatcagtctccctggggctctgcccggacccatcaggcctctttcagaggatgacccgaggagagtgagcatctccagcagtaaaggaatggatgtgcacaaccaagaggaacgtcccagaaagacgttggtttccaaagccatttccgcaccactgctcggcagtagtgtcgatctggaggagtctatcccagaaggcatggtggacgccgctagctacgctgcaaatttaaccgattctgctgaagcacctaagggaagcccgggttcttggtggaagaaagagctgtctggttccagttccgcacccaaattagagtatacggtgaggacagacacacagtctccaacaaatactggctcaccttctagtccccagcagaaaagcgaggggctggggtctcgccatcggccagtagctcgtgtgtctcctcattgcaaacggtccgaggccgaggccaagcccagcgggagtcagacagtgaacctgactgggagagctaatgacccttgcgatttggatagtcgggttcaagcaacatcagttaaagttacagtggccggtttccagccaggcggtgcggtagaaaaagagagccttgggaaactcacgacaggggatgcttgtgtgtccacttcttgcgagttggcctcagctctgagtcacctggacgcctctcatctaaccgaaaatctgcctaaggctgcatccgagctcggtcagcagcccatgacggagcttgattccagcagcgaccttatctcctctcccggtaagaagggcgctgcccaccctgacccttctaaaacctccgtggatactgggcaggtgtcccggccagagaatccctcccagcccgcatctccacgagtgactaagtgcaaagcgcgttcgccagtccggctgcctcacgagggaagtccctccccaggtgagaaggctgcagcccctcctgattattccaaaacgaggtctgcatctgagactagcactccgcacaacaccagaagagtggcagctttaagaggagctggcccaggggctgaaggcatgaccccagctggcgcagtgcttccaggggatccccttacgtcacaggaacagcgacaaggtgcccctggtaatcactccaaggcacttgagatgaccggaattcatgccccagagagttcacaagagccgtctctcttggaaggtgcagactccgtctcatcgagagctcctcaagcctccttgagtatgctgcccagcactgataatacaaaagaggcctgtggtcatgtctcgggacactgctgccccggaggatcacgcgaatctcccgtcaccgacattgacagtttcatcaaagaattggacgcctccgcagccaggtctcccagctctcagaccggagactcaggaagtcaggagggaagcgcccaggggcacccaccggcaggcgctgggggaggaagcagctgcagagccgagcccgtccccggagggcagacaagctctcctaggcgcgcttgggccgcaggcgctcctgcttatccccagtgggcctctcagccatctgtgctggacagcattaacccagataaacactttaccgtgaataaaaatttcctttcgaattacagccgcaactttagcagttttcatgaggattctacaagtctgtcaggcctcggagactctactgagcccagcctctctagcatgtatggtgacgctgaagactcttcttcggacccagaaagtcttaccgaggcaccgagggcttcagcgagagatgggtggagccctccgcgtagtagggtttctttgcacaaggaagatcctagtgagtcagaagaagagcagattgagatctgctcaactagaggttgtccgaaccccccaagctcccccgcacatttaccaacgcaagccgcaatttgtcctgcttctgcaaaggttcttagtcttaagtatagcacgcctagggagtccgtggcaagtccccgtgagaaagccgcatgtctccctggtagctacacttctggccctgattcaagtcagcctagcagcctgctagaaatgtcatcccaggaacacgagacacacgctgacatttccacttctcaaaaccaccgcccatcatgcgctgaggagacgaccgaggtcacaagtgcctcatctgcaatggagaattcacctctaagcaaagtggctcgtcacttccactctcctcccattattttatcaagccccaacatggtcaatggcctcgaacacgatctgctggatgatgaaaccctgaatcagtacgaaacgtcgataaatgctgccgctagcctaagtagcttcagcgtagatgttcccaagaatggcgagtctgtcctcgagaacctgcacataagtgaatcacaggatcttgatgatctgctacaaaaacctaagatgatcgcgagaagacctatcatggcctggttcaaagagattaataaacacaatcaaggcacccacttacgtagcaagacggagaaggagcaacctttaatgcctgcacgctcgcccgactcaaagattcaaatggtcagttcctcccagaaaaagggagtcaccgttccccattctccgcctcagccaaagacaaacctcgagaataaagacctgtctaagaagagccccgcagagatgctcctcaccaacgggcagaaagccaagtgcggccctaagctcaagaggctaagtctcaagggcaaggcgaaagtcaactcagaggcaccagcggctaatgctgtgaaagctggtggaacagatcacagaaagccgctgatcagcccacagacgagccataaaaccctgtccaaggcagtgagtcaacgcctgcatgttgccgatcacgaggatcctgataggaataccacagcggcacccaggtcccctcaatgcgttttggaatccaaacctcccctcgccaccagtggtccccttaaaccaagcgtgagcgacacctccatacggaccttcgtcagtccgctcacttcccccaagcctgtcccggagcagggtatgtggtctaggtttcatatggccgtactgtccgagcccgaccgaggatgtccaactactccaaagtctccgaaatgtcgcgctgaaggacgcgcacctagagccgacagcggacctgtaagcccggcagcatcacgtaacggaatgtccgtcgccggaaaccgtcaatctgaacccagactcgcgtcacatgtggctgcagacactgctcagcctcgtcccaccggagagaaggggggaaatataatggccagcgacaggctggagaggaccaaccagctaaaaattgtggagatctccgctgaagcagtctcagagacggtgtgtgggaataaaccagcagaatccgatcggcgaggcggttgcctagcacagggcaattgccaggaaaagagcgaaattcgattgtataggcaggtggctgaaagctccacctcacatccatcaagcctgccaagccacgcttctcaagcagagcaggagatgagccggtccttcagcatggctaagctggcatccagctcaagctcgttacagacagccattcggaaagcggagtacagccaggggaagtctagcctcatgtccgatagcaggggagtgcctcgtaactccatcccaggcggtccgtccggagaagaccacctgtacttcactcctaggccagcaacaagaacgtattcgatgcctgctcagtttagcagccacttcggcagagaaggccaccctccacacagtctggggcgaagtcgggacagccaggtgcccgtcacaagctccgtggtacccgaggcgaaagcatctcggggaggcctgccctcacttgcaaatggtcaggggatctactcagtcaagccactactggacacgtccagaaacctccccgcaaccgacgaaggagacataatttccgtgcaggaaacaagctgcctggttaccgataagatcaaagtgacgcgtagacactattgctacgagcaaaactggccgcatgaaagcaccagtttctttagcgtcaaacagcgaatcaaatcatttgaaaacttagctaacgccgacagaccagtcgcaaagagcggcgctagcccttttctttccgtgtcatctaagccaccaatcgggagaagaagttcaggatctatagtgtccggctctcttggccatcccggtgatgccgctgccaggctgctgcgcagaagtctttcttcttgcagcgaaaatcaaagcgaggcgggaactctgcttccccagatggctaaatccccctctatcatgacgctgactatctcccgccaaaaccctcctgaaacatcaagtaaaggatccgactcggagcttaaaaaatcgctcgggccactgggcattcccacacccaccatgaccctggccagtcctgtcaagagaaacaagagcagtgtgcggcatacacagccctcccccgtaagtcgctccaaactccaggagctccgcgcactgtctatgccagatctggacaagctgtgttccgaggattattccgcaggcccttctgctgtcttgtttaaaacagaattggagatcactccaagaagatctccaggccctccggcagggggtgtctcatgtccagaaaaaggagggaaccgtgcttgtcccggaggatctggcccaaagacatctgctgcagagactccctcctccgcttctgatacgggggaggccgctcaagatctgccattcagacggagctggtcggtgaatctggaccagctcctggtaagtgcaggggaccaacagagactccaatccgtgctatcgtctgttggaagcaaaagtacaatcctcacccttatacaggaagctaaagcccaatctgaaaatgaggaggatgtgtgctttatagtgctcaaccggaaagagggtagtggcctgggcttctctgtggccggtggcaccgatgtggagcccaagtcgatcaccgtccatcgagtgttttcacaaggagcagctagtcaggagggaaccatgaacagaggcgattttctgctttcagtaaatggggcttccctggctggactggcgcatggcaacgtcctaaaggtactgcaccaggcacagcttcacaaagatgcattggtggtgatcaagaaggggatggatcagccaaggcccagcgctagacaggagccacctacggctaatggaaaaggcctactctccagaaagacaattcctctcgagcctggcatcggacgcagcgttgccgtccacgatgccctctgcgttgaagtcttgaaaacctcggccggactgggcctgtctttggatggcggaaaatcctccgtcacaggggacggcccacttgtcattaagagagtttacaaggggggtgctgctgagcaggcagggatcatcgaggccggagacgagatcctcgcaataaatggcaaaccactcgttggactgatgcactttgacgcgtggaacatcatgaaaagcgtgccagagggtccagttcagttgctcattcgtaaacatcggaatagttctta

SEQ ID NO: 253459 - DNA, 8520 bp, Artificial Sequence
  derived and/or modified sequence
atgcccatcacccaggacaacgccgtgctgcacctgcccctgctgtaccagtggctgcagaacagcctgcaggagggcggcgacggccccgagcagagactgtgccaggccgccatccagaagctgcaggagtacatccagctgaacttcgccgtggacgagagcaccgtgccccccgaccacagcccccccgagatggagatctgcaccgtgtacctgaccaaggagctgggcgacaccgagaccgtgggcctgagcttcggcaacatccccgtgttcggcgactacggcgagaagagaagaggcggcaagaagagaaagacccaccagggccccgtgctggacgtgggctgcatctgggtgaccgagctgagaaagaacagccccgccggcaagagcggcaaggtgagactgagagacgagatcctgagcctgaacggccagctgatggtgggcgtggacgtgagcggcgccagctacctggccgagcagtgctggaacggcggcttcatctacctgatcatgctgagaagattcaagcacaaggcccacagcacctacaacggcaacagcagcaacagcagcgagcccggcgagacccccaccctggagctgggcgacagaaccgccaagaagggcaagagaaccagaaagttcggcgtgatcagcagaccccccgccaacaaggcccccgaggagagcaagggcagcgccggctgcgaggtgagcagcgaccccagcaccgagctggagaacggccccgaccccgagctgggcaacggccacgtgttccagctggagaacggccccgacagcctgaaggaggtggccggcccccacctggagagaagcgaggtggacagaggcaccgagcacagaatccccaagaccgacgcccccctgaccaccagcaacgacaagagaagattcagcaagggcggcaagaccgacttccagagcagcgactgcctggccagagaggaggtgggcagaatctggaagatggagctgctgaaggagagcgacggcctgggcatccaggtgagcggcggcagaggcagcaagagaagcccccacgccatcgtggtgacccaggtgaaggagggcggcgccgcccacagagacggcagactgagcctgggcgacgagctgctggtgatcaacggccacctgctggtgggcctgagccacgaggaggccgtggccatcctgagaagcgccaccggcatggtgcagctggtggtggccagcaaggagaacagcgccgaggacctgctgagactgaccagcaagagcctgcccgacctgaccagcagcgtggaggacgtgagcagctggaccgacaacgaggaccaggaggccgacggcgaggaggacgagggcaccagcagcagcgtgcagagagccatgcccggcaccgacgagccccaggacgtgtgcggcgccgaggagagcaagggcaacctggagagccccaagcagggcagcaacaagatcaagctgaagagcagactgagcggcggcgtgcacagactggagagcgtggaggagtacaacgagctgatggtgagaaacggcgaccccagaatcagaatgctggaggtgagcagagacggcagaaagcacagcctgccccagctgctggacagcagcagcgccagccaggagtaccacatcgtgaagaagagcaccagaagcctgagcaccacccaggtggagagcccctggagactgatcagacccagcgtgatcagcatcatcggcctgtacaaggagaagggcaagggcctgggcttcagcatcgccggcggcagagactgcatcagaggccagatgggcatcttcgtgaagaccatcttccccaacggcagcgccgccgaggacggcagactgaaggagggcgacgagatcctggacgtgaacggcatccccatcaagggcctgaccttccaggaggccatccacaccttcaagcagatcagaagcggcctgttcgtgctgaccgtgagaaccaagctggtgagccccagcctgaccccctgcagcacccccacccacatgagcagaagcgccagccccaacttcaacaccagcggcggcgccagcgccggcggcagcgacgagggcagcagcagcagcctgggcagaaagacccccggccccaaggacagaatcgtgatggaggtgaccctgaacaaggagcccagagtgggcctgggcatcggcgcctgctgcctggccctggagaacagcccccccggcatctacatccacagcctggcccccggcagcgtggccaagatggagagcaacctgagcagaggcgaccagatcctggaggtgaacagcgtgaacgtgagacacgccgccctgagcaaggtgcacgccatcctgagcaagtgcccccccggccccgtgagactggtgatcggcagacaccccaaccccaaggtgagcgagcaggagatggacgaggtgatcgccagaagcacctaccaggagagcaaggaggccaacagcagccccggcctgggcacccccctgaagagccccagcctggccaagaaggacagcctgatcagcgagagcgagctgagccagtacttcgcccacgacgtgcccggccccctgagcgacttcatggtggccggcagcgaggacgaggaccaccccggcagcggctgcagcaccagcgaggagggcagcctgccccccagcaccagcacccacaaggagcccggcaagcccagagccaacagcctggtgaccctgggcagccacagagccagcggcctgttccacaagcaggtgaccgtggccagacaggccagcctgcccggcagcccccaggccctgagaaaccccctgctgagacagagaaaggtgggctgctacgacgccaacgacgccagcgacgaggaggagttcgacagagagggcgactgcatcagcctgcccggcgccctgcccggccccatcagacccctgagcgaggacgaccccagaagagtgagcatcagcagcagcaagggcatggacgtgcacaaccaggaggagagacccagaaagaccctggtgagcaaggccatcagcgcccccctgctgggcagcagcgtggacctggaggagagcatccccgagggcatggtggacgccgccagctacgccgccaacctgaccgacagcgccgaggcccccaagggcagccccggcagctggtggaagaaggagctgagcggcagcagcagcgcccccaagctggagtacaccgtgagaaccgacacccagagccccaccaacaccggcagccccagcagcccccagcagaagagcgagggcctgggcagcagacacagacccgtggccagagtgagcccccactgcaagagaagcgaggccgaggccaagcccagcggcagccagaccgtgaacctgaccggcagagccaacgacccctgcgacctggacagcagagtgcaggccaccagcgtgaaggtgaccgtggccggcttccagcccggcggcgccgtggagaaggagagcctgggcaagctgaccaccggcgacgcctgcgtgagcaccagctgcgagctggccagcgccctgagccacctggacgccagccacctgaccgagaacctgcccaaggccgccagcgagctgggccagcagcccatgaccgagctggacagcagcagcgacctgatcagcagccccggcaagaagggcgccgcccaccccgaccccagcaagaccagcgtggacaccggccaggtgagcagacccgagaaccccagccagcccgccagccccagagtgaccaagtgcaaggccagaagccccgtgagactgccccacgagggcagccccagccccggcgagaaggccgccgccccccccgactacagcaagaccagaagcgccagcgagaccagcaccccccacaacaccagaagagtggccgccctgagaggcgccggccccggcgccgagggcatgacccccgccggcgccgtgctgcccggcgaccccctgaccagccaggagcagagacagggcgcccccggcaaccacagcaaggccctggagatgaccggcatccacgcccccgagagcagccaggagcccagcctgctggagggcgccgacagcgtgagcagcagagccccccaggccagcctgagcatgctgcccagcaccgacaacaccaaggaggcctgcggccacgtgagcggccactgctgccccggcggcagcagagagagccccgtgaccgacatcgacagcttcatcaaggagctggacgccagcgccgccagaagccccagcagccagaccggcgacagcggcagccaggagggcagcgcccagggccacccccccgccggcgccggcggcggcagcagctgcagagccgagcccgtgcccggcggccagaccagcagccccagaagagcctgggccgccggcgcccccgcctacccccagtgggccagccagcccagcgtgctggacagcatcaaccccgacaagcacttcaccgtgaacaagaacttcctgagcaactacagcagaaacttcagcagcttccacgaggacagcaccagcctgagcggcctgggcgacagcaccgagcccagcctgagcagcatgtacggcgacgccgaggacagcagcagcgaccccgagagcctgaccgaggcccccagagccagcgccagagacggctggagcccccccagaagcagagtgagcctgcacaaggaggaccccagcgagagcgaggaggagcagatcgagatctgcagcaccagaggctgccccaacccccccagcagccccgcccacctgcccacccaggccgccatctgccccgccagcgccaaggtgctgagcctgaagtacagcacccccagagagagcgtggccagccccagagagaaggccgcctgcctgcccggcagctacaccagcggccccgacagcagccagcccagcagcctgctggagatgagcagccaggagcacgagacccacgccgacatcagcaccagccagaaccacagacccagctgcgccgaggagaccaccgaggtgaccagcgccagcagcgccatggagaacagccccctgagcaaggtggccagacacttccacagcccccccatcatcctgagcagccccaacatggtgaacggcctggagcacgacctgctggacgacgagaccctgaaccagtacgagaccagcatcaacgccgccgccagcctgagcagcttcagcgtggacgtgcccaagaacggcgagagcgtgctggagaacctgcacatcagcgagagccaggacctggacgacctgctgcagaagcccaagatgatcgccagaagacccatcatggcctggttcaaggagatcaacaagcacaaccagggcacccacctgagaagcaagaccgagaaggagcagcccctgatgcccgccagaagccccgacagcaagatccagatggtgagcagcagccagaagaagggcgtgaccgtgccccacagccccccccagcccaagaccaacctggagaacaaggacctgagcaagaagagccccgccgagatgctgctgaccaacggccagaaggccaagtgcggccccaagctgaagagactgagcctgaagggcaaggccaaggtgaacagcgaggcccccgccgccaacgccgtgaaggccggcggcaccgaccacagaaagcccctgatcagcccccagaccagccacaagaccctgagcaaggccgtgagccagagactgcacgtggccgaccacgaggaccccgacagaaacaccaccgccgcccccagaagcccccagtgcgtgctggagagcaagccccccctggccaccagcggccccctgaagcccagcgtgagcgacaccagcatcagaaccttcgtgagccccctgaccagccccaagcccgtgcccgagcagggcatgtggagcagattccacatggccgtgctgagcgagcccgacagaggctgccccaccacccccaagagccccaagtgcagagccgagggcagagcccccagagccgacagcggccccgtgagccccgccgccagcagaaacggcatgagcgtggccggcaacagacagagcgagcccagactggccagccacgtggccgccgacaccgcccagcccagacccaccggcgagaagggcggcaacatcatggccagcgacagactggagagaaccaaccagctgaagatcgtggagatcagcgccgaggccgtgagcgagaccgtgtgcggcaacaagcccgccgagagcgacagaagaggcggctgcctggcccagggcaactgccaggagaagagcgagatcagactgtacagacaggtggccgagagcagcaccagccaccccagcagcctgcccagccacgccagccaggccgagcaggagatgagcagaagcttcagcatggccaagctggccagcagcagcagcagcctgcagaccgccatcagaaaggccgagtacagccagggcaagagcagcctgatgagcgacagcagaggcgtgcccagaaacagcatccccggcggccccagcggcgaggaccacctgtacttcacccccagacccgccaccagaacctacagcatgcccgcccagttcagcagccacttcggcagagagggccaccccccccacagcctgggcagaagcagagacagccaggtgcccgtgaccagcagcgtggtgcccgaggccaaggccagcagaggcggcctgcccagcctggccaacggccagggcatctacagcgtgaagcccctgctggacaccagcagaaacctgcccgccaccgacgagggcgacatcatcagcgtgcaggagaccagctgcctggtgaccgacaagatcaaggtgaccagaagacactactgctacgagcagaactggccccacgagagcaccagcttcttcagcgtgaagcagagaatcaagagcttcgagaacctggccaacgccgacagacccgtggccaagagcggcgccagccccttcctgagcgtgagcagcaagccccccatcggcagaagaagcagcggcagcatcgtgagcggcagcctgggccaccccggcgacgccgccgccagactgctgagaagaagcctgagcagctgcagcgagaaccagagcgaggccggcaccctgctgccccagatggccaagagccccagcatcatgaccctgaccatcagcagacagaacccccccgagaccagcagcaagggcagcgacagcgagctgaagaagagcctgggccccctgggcatccccacccccaccatgaccctggccagccccgtgaagagaaacaagagcagcgtgagacacacccagcccagccccgtgagcagaagcaagctgcaggagctgagagccctgagcatgcccgacctggacaagctgtgcagcgaggactacagcgccggccccagcgccgtgctgttcaagaccgagctggagatcacccccagaagaagccccggcccccccgccggcggcgtgagctgccccgagaagggcggcaacagagcctgccccggcggcagcggccccaagaccagcgccgccgagacccccagcagcgccagcgacaccggcgaggccgcccaggacctgcccttcagaagaagctggagcgtgaacctggaccagctgctggtgagcgccggcgaccagcagagactgcagagcgtgctgagcagcgtgggcagcaagagcaccatcctgaccctgatccaggaggccaaggcccagagcgagaacgaggaggacgtgtgcttcatcgtgctgaacagaaaggagggcagcggcctgggcttcagcgtggccggcggcaccgacgtggagcccaagagcatcaccgtgcacagagtgttcagccagggcgccgccagccaggagggcaccatgaacagaggcgacttcctgctgagcgtgaacggcgccagcctggccggcctggcccacggcaacgtgctgaaggtgctgcaccaggcccagctgcacaaggacgccctggtggtgatcaagaagggcatggaccagcccagacccagcgccagacaggagccccccaccgccaacggcaagggcctgctgagcagaaagaccatccccctggagcccggcatcggcagaagcgtggccgtgcacgacgccctgtgcgtggaggtgctgaagaccagcgccggcctgggcctgagcctggacggcggcaagagcagcgtgaccggcgacggccccctggtgatcaagagagtgtacaagggcggcgccgccgagcaggccggcatcatcgaggccggcgacgagatcctggccatcaacggcaagcccctggtgggcctgatgcacttcgacgcctggaacatcatgaagagcgtgcccgagggccccgtgcagctgctgatcagaaagcacagaaacagcagctag

SEQ ID NO: 253460 - DNA, 7923 bp, Artificial Sequence
  derived and/or modified sequence
atgcccatcacccaggacaacgccgtgctgcacctgcccctgctgtaccagtggctgcagaacagcctgcaggagggcggcgacggccccgagcagagactgtgccaggccgccatccagaagctgcaggagtacatccagctgaacttcgccgtggacgagagcaccgtgccccccgaccacagcccccccgagatggagatctgcaccgtgtacctgaccaaggagctgggcgacaccgagaccgtgggcctgagcttcggcaacatccccgtgttcggcgactacggcgagaagagaagaggcggcaagaagagaaagacccaccagggccccgtgctggacgtgggctgcatctgggtgaccgagctgagaaagaacagccccgccggcaagagcggcaaggtgagactgagagacgagatcctgagcctgaacggccagctgatggtgggcgtggacgtgagcggcgccagctacctggccgagcagtgctggaacggcggcttcatctacctgatcatgctgagaagattcaagcacaaggcccacagcacctacaacggcaacagcagcaacagcagcgagcccggcgagacccccaccctggagctgggcgacagaaccgccaagaagggcaagagaaccagaaagttcggcgtgatcagcagaccccccgccaacaaggcccccgaggagagcaagggcagcgccggctgcgaggtgagcagcgaccccagcaccgagctggagaacggccccgaccccgagctgggcaacggccacgtgttccagctggagaacggccccgacagcctgaaggaggtggccggcccccacctggagagaagcgaggtggacagaggcaccgagcacagaatccccaagaccgacgcccccctgaccaccagcaacgacaagagaagattcagcaagggcggcaagaccgacttccagagcagcgactgcctggccagagaggaggtgggcagaatctggaagatggagctgctgaaggagagcgacggcctgggcatccaggtgagcggcggcagaggcagcaagagaagcccccacgccatcgtggtgacccaggtgaaggagggcggcgccgcccacagagagtaccacatcgtgaagaagagcaccagaagcctgagcaccacccaggtggagagcccctggagactgatcagacccagcgtgatcagcatcatcggcctgtacaaggagaagggcaagggcctgggcttcagcatcgccggcggcagagactgcatcagaggccagatgggcatcttcgtgaagaccatcttccccaacggcagcgccgccgaggacggcagactgaaggagggcgacgagatcctggacgtgaacggcatccccatcaagggcctgaccttccaggaggccatccacaccttcaagcagatcagaagcggcctgttcgtgctgaccgtgagaaccaagctggtgagccccagcctgaccccctgcagcacccccacccacatgagcagaagcgccagccccaacttcaacaccagcggcggcgccagcgccggcggcagcgacgagggcagcagcagcagcctgggcagaaagacccccggccccaaggacagaatcgtgatggaggtgaccctgaacaaggagcccagagtgggcctgggcatcggcgcctgctgcctggccctggagaacagcccccccggcatctacatccacagcctggcccccggcagcgtggccaagatggagagcaacctgagcagaggcgaccagatcctggaggtgaacagcgtgaacgtgagacacgccgccctgagcaaggtgcacgccatcctgagcaagtgccccgtgagcgagcaggagatggacgaggtgatcgccagaagcacctaccaggagagcaaggaggccaacagcagccccggcctgggcacccccctgaagagccccagcctggccaagaaggacagcctgatcagcgagagcgagctgagccagtacttcgcccacgacgtgcccggccccctgagcgacttcatggtggccggcagcgaggacgaggaccaccccggcagcggctgcagcaccagcgaggagggcagcctgccccccagcaccagcaaggagcccggcaagcccagagccaacagcctggtgaccctgggcagccacagagccagcggcctgttccacaagcaggtgaccgtggccagacaggccagcctgcccggcagcccccaggccctgagaaaccccctgctgagacagagaaaggtgggctgctacgacgccaacgacgccagcgacgaggaggagttcgacagagagggcgactgcatcagcctgcccggcgccctgcccggccccatcagacccctgagcgaggacgaccccagaagagtgagcatcagcagcagcaagggcatggacgtgcacaaccaggaggagagacccagaaagaccctggtgagcaaggccatcagcgcccccctgctgggcagcagcgtggacctggaggagagcatccccgagggcatggtggacgccgccagctacgccgccaacctgaccgacagcgccgaggcccccaagggcagccccggcagctggtggaagaaggagctgagcggcagcagcagcgcccccaagctggagtacaccgtgagaaccgacacccagagccccaccaacaccggcagccccagcagcccccagcagaagagcgagggcctgggcagcagacacagacccgtggccagagtgagcccccactgcaagagaagcgaggccgaggccaagcccagcggcagccagaccgtgaacctgaccggcagagccaacgacccctgcgacctggacagcagagtgcaggccaccagcgtgaaggtgaccgtggccggcttccagcccggcggcgccgtggagaagctgtgccaggagagcctgggcaagctgaccaccggcgacgcctgcgtgagcaccagctgcgagctggccagcgccctgagccacctggacgccagccacctgaccgagaacctgcccaaggccgccagcgagctgggccagcagcccatgaccgccagcgacctgatcagcagccccggcaagaagggcgccgcccaccccgaccccagcaagaccagcgtggacaccggccaggtgagcagacccgagaaccccagccagcccgccagccccagagtgaccaagtgcaaggccagaagccccgtgagactgccccacgagggcagccccagccccggcgagaaggccgccgccccccccgactacagcaagaccagaagcgccagcgagaccagcaccccccacaacaccagaagagtggccgccctgagaggcgccggccccggcgccgagggcatgacccccgccggcgccgtgctgcccggcgaccccctgaccagccaggagcagagacagggcgcccccggcaaccacagcaaggccctggagatgaccggcatccacgcccccgagagcagccaggagcccagcctgctggagggcgccgacagcgtgagcagcagagccccccaggccagcctgagcatgctgcccagcaccgacaacaccaaggaggcctgcggccacgtgagcggccactgctgccccggcggcagcagagagagccccgtgaccgacatcgacagcttcatcaaggagctggacgccagcgccgccagaagccccagcagccagaccggcgacagcggcagccaggagggcagcgcccagggccacccccccgccggcgccggcggcggcagcagctgcagagccgagcccgtgcccggcggccagaccagcagccccagaagagcctgggccgccggcgcccccgcctacccccagtgggccagccagcccagcgtgctggacagcatcaaccccgacaagcacttcaccgtgaacaagaacttcctgagcaactacagcagaaacttcagcagcttccacgaggacagcaccagcctgagcggcctgggcgacagcaccgagcccagcctgagcagcatgtacggcgacgccgaggacagcagcagcgaccccgagagcctgaccgaggcccccagagccagcgccagagacggctggagcccccccagaagcagagtgagcctgcacaaggaggaccccagcgagagcgaggaggagcagatcgagatctgcagcaccagaggctgccccaacccccccagcagccccgcccacctgcccacccaggccgccatctgccccgccagcgccaaggtgctgagcctgaagtacagcacccccagagagagcgtggccagccccagagagaaggccgcctgcctgcccggcagctacaccagcggccccgacagcagccagcccagcagcctgctggagatgagcagccaggagcacgagacccacgccgacatcagcaccagccagaaccacagacccagctgcgccgaggagaccaccgaggtgaccagcgccagcagcgccatggagaacagccccctgagcaaggtggccagacacttccacagcccccccatcatcctgagcagccccaacatggtgaacggcctggagcacgacctgctggacgacgagaccctgaaccagtacgagaccagcatcaacgccgccgccagcctgagcagcttcagcgtggacgtgcccaagaacggcgagagcgtgctggagaacctgcacatcagcgagagccaggacctggacgacctgctgcagaagcccaagatgatcgccagaagacccatcatggcctggttcaaggagatcaacaagcacaaccagggcacccacctgagaagcaagaccgagaaggagcagcccctgatgcccgccagaagccccgacagcaagatccagatggtgagcagcagccagaagaagggcgtgaccgtgccccacagccccccccagcccaagaccaacctggagaacaaggacctgagcaagaagagccccgccgagatgctgctgaccaacggccagaaggccaagtgcggccccaagctgaagagactgagcctgaagggcaaggccaaggtgaacagcgaggcccccgccgccaacgccgtgaaggccggcggcaccgaccacagaaagcccctgatcagcccccagaccagccacaagaccctgagcaaggccgtgagccagagactgcacgtggccgaccacgaggaccccgacagaaacaccaccgccgcccccagaagcccccagtgcgtgctggagagcaagccccccctggccaccagcggccccctgaagcccagcgtgagcgacaccagcatcagaaccttcgtgagccccctgaccagccccaagcccgtgcccgagcagggcatgtggagcagattccacatggccgtgctgagcgagcccgacagaggctgccccaccacccccaagagccccaagtgcagagccgagggcagagcccccagagccgacagcggccccgtgagccccgccgccagcagaaacggcatgagcgtggccggcaacagacagagcgagcccagactggccagccacgtggccgccgacaccgcccagcccagacccaccggcgagaagggcggcaacatcatggccagcgacagactggagagaaccaaccagctgaagatcgtggagatcagcgccgaggccgtgagcgagaccgtgtgcggcaacaagcccgccgagagcgacagaagaggcggctgcctggcccagggcaactgccaggagaagagcgagatcagactgtacagacaggtggccgagagcagcaccagccaccccagcagcctgcccagccacgccagccaggccgagcaggagatgagcagaagcttcagcatggccaagctggccagcagcagcagcagcctgcagaccgccatcagaaaggccgagtacagccagggcaagagcagcctgatgagcgacagcagaggcgtgcccagaaacagcatccccggcggccccagcggcgaggaccacctgtacttcacccccagacccgccaccagaacctacagcatgcccgcccagttcagcagccacttcggcagagagggccaccccccccacagcctgggcagaagcagagacagccaggtgcccgtgaccagcagcgtggtgcccgaggccaaggccagcagaggcggcctgcccagcctggccaacggccagggcatctacagcgtgaagcccctgctggacaccagcagaaacctgcccgccaccgacgagggcgacatcatcagcgtgcaggagaccagctgcctggtgaccgacaagatcaaggtgaccagaagacactactgctacgagcagaactggccccacgagagcaccagcttcttcagcgtgaagcagagaatcaagagcttcgagaacctggccaacgccgacagacccgtggccaagagcggcgccagccccttcctgagcgtgagcagcaagccccccatcggcagaagaagcagcggcagcatcgtgagcggcagcctgggccaccccggcgacgccgccgccagactgctgagaagaagcctgagcagctgcagcgagaaccagagcgaggccggcaccctgctgccccagatggccaagagccccagcatcatgaccctgaccatcagcagacagaacccccccgagaccagcagcaagggcagcgacagcgagctgaagaagagcctgggccccctgggcatccccacccccaccatgaccctggccagccccgtgaagagaaacaagagcagcgtgagacacacccagcccagccccgtgagcagaagcaagctgcaggagctgagagccctgagcatgcccgacctggacaagctgtgcagcgaggactacagcgccggccccagcgccgtgctgttcaagaccgagctggagatcacccccagaagaagccccggcccccccgccggcggcgtgagctgccccgagaagggcggcaacagagcctgccccggcggcagcggccccaagaccagcgccgccgagacccccagcagcgccagcgacaccggcgaggccgcccaggacctgcccttcagaagaagctggagcgtgaacctggaccagctgctggtgagcgccggcgaccagcagagactgcagagcgtgctgagcagcgtgggcagcaagagcaccatcctgaccctgatccaggaggccaaggcccagagcgagaacgaggaggacgtgtgcttcatcgtgctgaacagaaaggagggcagcggcctgggcttcagcgtggccggcggcaccgacgtggagcccaagagcatcaccgtgcacagagtgttcagccagggcgccgccagccaggagggcaccatgaacagaggcgacttcctgctgagcgtgaacggcgccagcctggccggcctggcccacggcaacgtgctgaaggtgctgcaccaggcccagctgcacaaggacgccctggtggtgatcaagaagggcatggaccagcccagacccagcgccagacaggagccccccaccgccaacggcaagggcctgctgagcagaaagaccatccccctggagcccggcatcggcagaagcgtggccgtgcacgacgccctgtgcgtggaggtgctgaagaccagcgccggcctgggcctgagcctggacggcggcaagagcagcgtgaccggcgacggccccctggtgatcaagagagtgtacaagggcggcgccgccgagcaggccggcatcatcgaggccggcgacgagatcctggccatcaacggcaagcccctggtgggcctgatgcacttcgacgcctggaacatcatgaagagcgtgcccgagggccccgtgcagctgctgatcagaaagcacagaaacagcagctag

SEQ ID NO: 253461 - protein, 392 aa, Artificial Sequence
  derived and/or modified sequence
MDARWWAVVVLAAFPSLGAGGETPEAPPESWTQLWFFRFVVNAAGYASFMVPGYLLVQYFRRKNYLETGRGLCFPLVKACVFGNEPKASDEVPLAPRTEAAETTPMWQALKLLFCATGLQVSYLTWGVLQERVMTRSYGATATSPGERFTDSQFLVLMNRVLALIVAGLSCVLCKQPRHGAPMYRYSFASLSNVLSSWCQYEALKFVSFPTQVLAKASKVIPVMLMGKLVSRRSYEHWEYLTATLISIGVSMFLLSSGPEPRSSPATTLSGLFTVGSLLEQGALLEGTRFMGRHSEFAAHALLLSICSACGQLFIFYTIGQFGAAVFTIIMTLRQAFAILLSCLLYGHTVTVVGGLGVAVVFAALLLRVYARGRLKQRGKKAVPVESPVQKV

SEQ ID NO: 253462 - protein, 432 aa, Artificial Sequence
  derived and/or modified sequence
MDARWWAVVVLAAFPSLGAGGETPEAPPESWTQLWFFRFVVNAAGYASFMVPGYLLVQYFRRKNYLETGRGLCFPLVKACVFGNEPKASDEVPLAPRTEAAETTPMWQALKLLFCATGLQVSYLTWGVLQERVMTRSYGATATSPGERFTDSQFLVLMNRVLALIVAGLSCVLCKQPRHGAPMYRYSFASLSNVLSSWCQYEALKFVSFPTQVLAKASKVIPVMLMGKLVSRRSYEHWEYLTATLISIGVSMFLLSSGPEPRSSPATTLSGLILLAGYIAFDSFTSNWQDALFAYKMSSVQMMFGVNFFSCLFTVGSLLEQGALLEGTRFMGRHSEFAAHALLLSICSACGQLFIFYTIGQFGAAVFTIIMTLRQAFAILLSCLLYGHTVTVVGGLGVAVVFAALLLRVYARGRLKQRGKKAVPVESPVQKV

SEQ ID NO: 253463 - DNA, 1179 bp, Artificial Sequence
  derived and/or modified sequence
atggatgccagatggtgggccgtggtggtgttggcggcattcccctcacttggcgcaggaggcgaaactccggaggctcctcctgaatcctggactcaactgtggttctttagattcgtcgtaaatgccgcaggatacgcatcgtttatggtgccgggttacctgttagtccagtattttaggcgtaagaactacctggaaactggacgcggcttgtgttttccattagtcaaggcctgcgtgttcggcaacgagcctaaggcctctgacgaggtgccattggcaccaaggacggaggctgccgagacaactcccatgtggcaagccctcaagctcctcttttgtgccaccgggttacaagtctcatatcttacctggggggtcctgcaggagagggtgatgaccaggtcatatggtgccaccgctacatctccaggcgagagatttacggactctcagtttctggtgctgatgaacagagtgctggccctgattgtcgccggattgtcatgtgtgctgtgtaaacagcctagacacggtgctcctatgtaccggtatagtttcgcatcactttccaatgtgttgagtagctggtgtcaatatgaggcccttaaattcgtgtctttccctacacaagtcttagcgaaagcttccaaagtaattcctgtgatgcttatgggaaaactagtgtccaggcgctcctacgagcactgggagtatctgacagccactctgatctcaatcggtgtgtctatgttcctgttatcgagtggtcccgagccccggtccagcccggccactaccctatccggactgttcactgtggggtcgttgctagaacagggggctctgctagaaggaacacgcttcatggggagacactctgagtttgcagcacatgctttattgttatctatttgttcggcatgcgggcaactgttcattttctataccataggacagtttggcgcggccgttttcactataatcatgacattgagacaagccttcgcgattctgttgagttgtctgttatatggacacacagtgacggtggtggggggcctgggagtcgccgttgtgtttgccgcactcctacttagagtgtatgccagaggacgactcaaacagaggggaaagaaggcggtgccggtcgagtctccagtgcaaaaggtgtag

SEQ ID NO: 253464 - DNA, 1299 bp, Artificial Sequence
  derived and/or modified sequence
atggacgcccgatggtgggccgtggttgtcctggccgccttcccaagcttgggtgccggcggggagacccctgaggcaccaccggagtcatggacacagttatggttctttcgtttcgtggtgaatgcagccggatatgcttctttcatggtgcccggttacctgctggtgcagtactttaggaggaagaattacctcgagactggacgggggctgtgctttcccttggtcaaggcctgtgtctttggcaacgagcctaaggcctccgacgaagtacccctagctcctcggaccgaggccgctgaaactacaccaatgtggcaggcactgaagttgctcttctgtgcaaccgggcttcaggtgagttacctgacttggggggttttgcaagaaagggtcatgacccgtagctacggtgctacagcaacttcaccaggcgagcgatttacggatagtcagttcctggtgctgatgaacagagtactagcattgatagttgccggcctgtcctgcgtgttgtgcaagcagcctagacacggcgcccctatgtataggtactcattcgcctccctgtctaacgtcctgtcttcttggtgccagtatgaagcattaaaatttgttagttttcccacacaggtgttagctaaggcttctaaggtgattcccgtgatgttaatgggtaaactggtgtcaaggcggtcgtacgaacactgggaatacctaaccgctaccttgatctcaattggggtgtccatgttcctcctttctagcggcccagagcctagatcgtctcccgctactaccttgtcaggcctgatcttgttggccgggtacattgcctttgacagcttcacatccaactggcaagatgccttgttcgcgtacaagatgagctcggtgcagatgatgttcggcgtgaactttttttcatgcctcttcaccgttgggtctctccttgaacaaggcgccctgctcgaaggcaccaggttcatggggaggcatagcgagtttgctgctcatgcactacttttgagcatatgtagtgcttgcggccagttgttcatcttttataccattggccagtttggagccgctgtctttactattattatgactctcaggcaagccttcgctattctgctcagctgcctcctctacggacacactgttacggtggtgggcggtctgggggtggcggtggtgtttgcagcactcctattgcgggtgtacgccagaggcaggttaaaacagagagggaagaaggctgtgccagtagagtctccagtccagaaggtgtag

SEQ ID NO: 253465 - DNA, 1179 bp, Artificial Sequence
  derived and/or modified sequence
atggatgcccgctggtgggccgtggtggtgctggccgccttccccagcctgggcgccggcggggagaccccagaggcccctcctgagagctggacccagctgtggttcttccgctttgtggtgaatgctgctggctacgccagcttcatggtgcccggctacctgctggtgcagtacttccggaggaagaactacctggagaccggccggggcctgtgcttccccctggtgaaggcctgtgtgtttggaaatgagcccaaggccagtgatgaggtgcccctggcccccaggacagaggccgctgagaccacccccatgtggcaggccctgaagctgctcttctgtgccaccggcctgcaggtgtcctacctgacctggggcgtgctgcaggagcgggtgatgaccaggagctatggagccacagccaccagccctggagagcgcttcacagacagccagttcctggtgctgatgaacagagtgctggccctgattgtggccggcctgagctgtgtgctgtgcaagcagcccaggcatggagcccccatgtaccgctacagctttgccagcctgagcaatgtgctgagctcctggtgccagtatgaggccctgaagtttgtgtccttccccacccaggtgctggccaaggccagcaaggtgattcctgtgatgctgatgggcaagctggtgagccgccgctcctatgagcactgggagtacctgacagccaccctcatcagcattggagtgtccatgttcctgctgagcagcggccctgagcccaggagcagccctgccaccaccctgagcggcctcttcaccgtgggcagcctgctggagcagggcgccctgctggagggcacccgcttcatgggccgccacagcgagtttgctgcccacgccctgctgctgagcatctgcagcgcctgtggccagctgttcatcttctacaccatcggccagtttggagctgctgtgttcaccatcatcatgaccctgcggcaggcctttgccatcctgctgagctgcctgctgtatggccacacagtgacagtggtgggcggcctgggcgtggccgtggtgtttgctgccctgctgctgcgggtgtatgcccggggccgcctgaagcagaggggcaagaaggctgtgcctgtggagagccctgtgcagaaggtgtag

SEQ ID NO: 253466 - DNA, 1299 bp, Artificial Sequence
  derived and/or modified sequence
atggatgcccgctggtgggccgtggtggtgctggccgccttccccagcctgggcgccggcggggagaccccagaggcccctcctgagagctggacccagctgtggttcttccgctttgtggtgaatgctgctggctacgccagcttcatggtgcccggctacctgctggtgcagtacttccggaggaagaactacctggagaccggccggggcctgtgcttccccctggtgaaggcctgtgtgtttggaaatgagcccaaggccagtgatgaggtgcccctggcccccaggacagaggccgctgagaccacccccatgtggcaggccctgaagctgctcttctgtgccaccggcctgcaggtgtcctacctgacctggggcgtgctgcaggagcgggtgatgaccaggagctatggagccacagccaccagccctggagagcgcttcacagacagccagttcctggtgctgatgaacagagtgctggccctgattgtggccggcctgagctgtgtgctgtgcaagcagcccaggcatggagcccccatgtaccgctacagctttgccagcctgagcaatgtgctgagctcctggtgccagtatgaggccctgaagtttgtgtccttccccacccaggtgctggccaaggccagcaaggtgattcctgtgatgctgatgggcaagctggtgagccgccgctcctatgagcactgggagtacctgacagccaccctcatcagcattggagtgtccatgttcctgctgagcagcggccctgagcccaggagcagccctgccaccaccctgagcggcctcatcctgctggccggctacatcgcctttgacagcttcaccagcaactggcaggatgccctgtttgcctacaagatgagctctgtgcagatgatgtttggagtgaacttcttcagctgcctcttcaccgtgggcagcctgctggagcagggcgccctgctggagggcacccgcttcatgggccgccacagcgagtttgctgcccacgccctgctgctgagcatctgcagcgcctgtggccagctgttcatcttctacaccatcggccagtttggagctgctgtgttcaccatcatcatgaccctgcggcaggcctttgccatcctgctgagctgcctgctgtatggccacacagtgacagtggtgggcggcctgggcgtggccgtggtgtttgctgccctgctgctgcgggtgtatgcccggggccgcctgaagcagaggggcaagaaggctgtgcctgtggagagccctgtgcagaaggtgtag

SEQ ID NO: 253467 - DNA, 1179 bp, Artificial Sequence
  derived and/or modified sequence
atggacgcccggtggtgggccgtggtggtgctggccgccttcccctctctgggagcgggaggcgagaccccagaggcaccacccgagtcctggacacagttatggttcttcaggtttgttgtgaacgctgccggctatgcctcatttatggtgccaggctaccttctcgtacagtacttcaggagaaagaactacttagagaccgggcggggcctgtgctttccactggtcaaggcatgtgtgttcggaaatgagcccaaggcgtctgacgaggttccgctcgctccacggacagaggcagcagagaccacgccgatgtggcaggcgctcaaactgttgttctgcgcaaccggcctgcaggtgagctatcttacgtggggcgtccttcaggaacgtgtgatgaccagaagctacggtgctaccgcaacctctccgggcgagcggttcacagacagccagttccttgtgctgatgaaccgggtcctagccctgatcgtggcaggcttgagttgtgtgctttgcaagcagcccagacatggggctccaatgtaccgatacagcttcgcatccctgagtaatgtcctgtcttcgtggtgccagtacgaagccctcaagttcgttagttttcctacgcaggtgctggcgaaagcgtccaaggtcattcctgtcatgctgatggggaagttagtctcacggaggagctacgagcattgggaatacctcaccgctacccttatctccataggggtatctatgtttttgttgagctccgggcctgagccccggagctcacccgccaccacacttagtggcctgtttacagttggttcactcctcgagcagggcgctcttcttgagggcactaggttcatggggcggcactcagagttcgctgcccacgcacttctgctctctatttgttctgcctgcggccaactattcatcttctatactattggccaatttggagctgccgtatttaccatcatcatgaccctccgccaggccttcgcaatcctcctgtcatgtcttctatatggtcataccgtgaccgtcgtgggcgggttgggcgtcgcggtagtgttcgctgctttgctgctgcgggtgtacgctcgggggaggttaaagcagcggggcaagaaagcagttccagtagagtccccagtgcaaaaagtgtag

SEQ ID NO: 253468 - DNA, 1299 bp, Artificial Sequence
  derived and/or modified sequence
atggacgcccggtggtgggccgtggtggtgctggccgccttcccctccttaggagctggcggcgagacccctgaggcaccaccggagtcttggacccagctgtggttcttccgctttgtggtcaatgcggccggctatgcaagctttatggtgcccggatacctactggtccaatattttcggcgcaagaattacctcgagacagggagggggctatgcttcccactggtgaaggcctgtgtattcggtaacgaaccgaaggcatcggatgaggtaccccttgcaccgagaacagaggccgctgaaacgacaccaatgtggcaggccttaaagctcctgttttgcgcgacaggcctgcaggtcagttacctgacctggggagtgctgcaagaacgggtgatgacccggagctacggcgccacagctacaagccctggtgagcgatttactgactctcagttcttggtcttgatgaaccgagttttggcccttatcgtcgctggactttcctgcgttttgtgcaagcagccccgtcatggggcacccatgtaccgctacagcttcgcatctttgagtaatgtgctatcatcctggtgccagtacgaggcactcaaatttgtaagtttcccgacccaggtgctggccaaggcgtcaaaggtcattccggtaatgctgatgggtaagcttgtgagcagacgatcctatgagcactgggagtatctgacagccacactcatttccataggagtgtccatgtttctgctgagcagcggccctgagcccagaagctcacctgccacaacattgagcggactaattctcctggctggttacatcgccttcgacagctttacctccaattggcaggacgcactgttcgcgtacaagatgtcctctgtccagatgatgtttggcgtgaatttcttttcgtgcttgttcaccgtggggtcgctcctagagcaaggcgcactactcgagggcactcgtttcatgggccggcatagcgagttcgcagctcacgcgctcctgctaagcatatgttccgcgtgtggacaattatttatcttttatactattggacagtttggcgcggctgtattcacgataatcatgaccctgcgccaggcctttgccatactcttatcttgtctgctttatggacatacagttacagtcgtgggtggcttgggcgtggcagttgtgtttgcggccttgctgctacgagtgtacgccagaggccggctgaaacagaggggcaaaaaggctgtgcctgtggagtctccagtccagaaggtgtag

SEQ ID NO: 253469 - DNA, 81 bp, Artificial Sequence
  derived and/or modified sequence
acagcactcttgtggggactgaagaaaaaaggcaagcagcagaagaacaccagctatgctactaacgatttgataatctag

SEQ ID NO: 253470 - DNA, 1179 bp, Artificial Sequence
  derived and/or modified sequence
atggatgccaggtggtgggccgtagtggtcttggccgcattccccagtttaggcgcagggggagagacacccgaggctccaccagaatcttggactcagctctggttttttcgctttgtagtgaacgccgctggctacgcctcattcatggtcccaggctatctgctggtgcaatactttcgccgaaagaactacctggaaactggcagagggctctgctttcccctggtgaaggcgtgtgttttcggcaacgagccaaaggcttccgatgaagttcctctggcgccacggaccgaggcagccgaaaccacacccatgtggcaggctcttaaacttttgttctgcgccactggcttgcaagtgtcatatctgacctggggcgtcctgcaggagcgggtcatgacaaggagctatggagccaccgccacttctccaggggagaggttcacggactcccaattcctggtgctcatgaatagggtgctcgcgcttatcgttgccggactctcctgcgttttatgcaagcagccacggcatggcgcaccaatgtatagatactccttcgcatcactctcaaatgttctgtcatcttggtgccagtacgaggccctcaagtttgtgtccttcccaactcaggttcttgcgaaggcgtccaaggtaattccagtgatgctcatgggcaagctggtgagcagaagaagctacgagcattgggagtatctgactgccaccctgatctccatcggggtgtccatgttcctgctttcctctggccctgaaccacggtcaagtcctgccacaacgctctccggcctattcacagtcggcagcctactggaacagggagcgctgctcgaagggaccaggtttatggggcgacacagcgaattcgcggctcacgcgctgctgctatctatctgctcagcctgcggacagctgttcatcttttatacgatcgggcagtttggagccgctgtcttcaccattataatgactctgagacaggcgttcgccattctcttgagctgtctcctgtatggccacaccgtgactgttgtcggaggtcttggcgtcgccgtggtcttcgctgccctgctcctccgggtctacgcacgtggcaggcttaaacagagaggtaagaaggctgtacctgttgagtctcctgttcagaaggtgtag

SEQ ID NO: 253471 - DNA, 1299 bp, Artificial Sequence
  derived and/or modified sequence
atggacgctcggtggtgggctgtggttgtactggccgcttttccctcactgggggcaggcggagagacccccgaagcaccgcctgagagttggacacagctttggttcttccgttttgtggtaaacgccgctggctatgcctccttcatggtccccggatacctgctcgtccagtatttccgcagaaaaaattacctggaaacagggagggggctgtgcttccctctggtgaaggcctgtgtgtttgggaacgagcccaaggctagcgacgaggtaccacttgccccacggacggaagcagccgagacgactcctatgtggcaagctcttaaactgttgttttgtgcaacaggccttcaggtcagctacctcacttggggagtgctgcaagagagggtgatgacacggtcttacggtgcgacagccacgagcccaggcgaaaggtttaccgactcacagttcttggtgctgatgaaccgcgtgctggccctgattgtagcaggcctcagctgcgtgctgtgcaaacagcctcgtcatggggctcccatgtaccgatatagttttgccagtctaagtaacgttttgagcagctggtgtcagtatgaggccctgaaattcgtaagcttccccacccaggttctggctaaggccagtaaagtaattccagtgatgctcatgggcaaacttgtatcaaggaggagctatgagcactgggaatatctcaccgccaccctcattagtattggagtctcaatgttcctgctctcatccggacccgaaccacgcagttcaccagctaccaccctctctggcctcattctactggcaggatatattgcctttgacagtttcacaagtaattggcaggacgcgttgtttgcttataagatgtcaagcgttcagatgatgttcggtgtaaacttctttagttgcctgtttactgttggctccctgctggaacagggggcattactcgaagggacccggttcatggggaggcactcagagttcgctgcccacgcgctgttattgtcaatttgttccgcctgcggccagttgttcattttctatacaattggacagtttggggcagcagtgtttaccatcataatgacactccgtcaagcttttgcaatcctcctttcttgtctgctatatggtcatactgtcacagtggtgggagggcttggggtggcagtggtgtttgccgctctgctgctgcgcgtctatgccagagggagattaaagcaaagaggcaaaaaagctgtaccagttgaatctcctgttcagaaagtgtag

SEQ ID NO: 253472 - DNA, 1315 bp, Artificial Sequence
  derived and/or modified sequence
aggcgggaagagcgcggcacttccgctggccgctggctcgctggccgctcctggaggcggcggcgggagcgcagggggcgcgcggcccggggactcgcattccccggttccccctccaccccacgcggcctggaccatggacgccagatggtgggcagtggtggtgctggctgcgttcccctccctaggggcaggtggggagactcccgaagcccctccggagtcatggacccagctatggttcttccgatttgtggtgaatgctgctggctatgccagctttatggtacctggctacctcctggtgcagtacttcaggcggaagaactacctggagaccggtaggggcctctgctttcccctggtgaaagcttgtgtgtttggcaatgagcccaaggcctctgatgaggttcccctggcgccccgaacagaggcggcagagaccaccccgatgtggcaggccctgaagctgctcttctgtgccacagggctccaggtgtcttatctgacttggggtgtgctgcaggaaagagtgatgacccgcagctatggggccacagccacatcaccgggtgagcgctttacggactcgcagttcctggtgctaatgaaccgagtgctggcactgattgtggctggcctctcctgtgttctctgcaagcagccccggcatggggcacccatgtaccggtactcctttgccagcctgtccaatgtgcttagcagctggtgccaatacgaagctcttaagttcgtcagcttccccacccaggtgctggccaaggcctctaaggtgatccctgtcatgctgatgggaaagcttgtgtctcggcgcagctacgaacactgggagtacctgacagccaccctcatctccattggggtcagcatgtttctgctatccagcggaccagagccccgcagctccccagccaccacactctcaggcctcttcacagtgggctcactgctagaacagggggccctactggagggaacccgcttcatggggcgacacagtgagtttgctgcccatgccctgctactctccatctgctccgcatgtggccagctcttcatcttttacaccattgggcagtttggggctgccgtcttcaccatcatcatgaccctccgccaggcctttgccatccttctttcctgccttctctatggccacactgtcactgtggtgggagggctgggggtggctgtggtctttgctgccctcctgctcagagtctacgcgcggggccgtctaaagcaacggggaaagaaggctgtgcctgttgagtctcctgtgcagaaggtttga

SEQ ID NO: 253473 - DNA, 2043 bp, Artificial Sequence
  derived and/or modified sequence
ggggagggaggcgggaagagcgcggcacttccgctggccgctggctcgctggccgctcctggaggcggcggcgggagcgcagggggcgcgcggcccggggactcgcattccccggttccccctccaccccacgcggcctggaccatggacgccagatggtgggcagtggtggtgctggctgcgttcccctccctaggggcaggtggggagactcccgaagcccctccggagtcatggacccagctatggttcttccgatttgtggtgaatgctgctggctatgccagctttatggtacctggctacctcctggtgcagtacttcaggcggaagaactacctggagaccggtaggggcctctgctttcccctggtgaaagcttgtgtgtttggcaatgagcccaaggcctctgatgaggttcccctggcgccccgaacagaggcggcagagaccaccccgatgtggcaggccctgaagctgctcttctgtgccacagggctccaggtgtcttatctgacttggggtgtgctgcaggaaagagtgatgacccgcagctatggggccacagccacatcaccgggtgagcgctttacggactcgcagttcctggtgctaatgaaccgagtgctggcactgattgtggctggcctctcctgtgttctctgcaagcagccccggcatggggcacccatgtaccggtactcctttgccagcctgtccaatgtgcttagcagctggtgccaatacgaagctcttaagttcgtcagcttccccacccaggtgctggccaaggcctctaaggtgatccctgtcatgctgatgggaaagcttgtgtctcggcgcagctacgaacactgggagtacctgacagccaccctcatctccattggggtcagcatgtttctgctatccagcggaccagagccccgcagctccccagccaccacactctcaggcctcatcttactggcaggttatattgcttttgacagcttcacctcaaactggcaggatgccctgtttgcctataagatgtcatcggtgcagatgatgtttggggtcaatttcttctcctgcctcttcacagtgggctcactgctagaacagggggccctactggagggaacccgcttcatggggcgacacagtgagtttgctgcccatgccctgctactctccatctgctccgcatgtggccagctcttcatcttttacaccattgggcagtttggggctgccgtcttcaccatcatcatgaccctccgccaggcctttgccatccttctttcctgccttctctatggccacactgtcactgtggtgggagggctgggggtggctgtggtctttgctgccctcctgctcagagtctacgcgcggggccgtctaaagcaacggggaaagaaggctgtgcctgttgagtctcctgtgcagaaggtttgagggtggaaagggcctgaggggtgaagtgaaataggaccctcccaccatccccttctgctgtaacctctgagggagctggctgaaagggcaaaatgcaggtgttttctcagtatcacagaccagctctgcagcaggggattggggagcccaggaggcagccttcccttttgccttaagtcacccatcttccagtaagcagtttattctgagccccgggggtagacagtcctcagtgaggggttttggggagtttggggtcaagagagcataggtaggttccagttactcttcccacaagttcccttaagtcttgccctagctgtgctctgccaccttccagactcactcccctctgcaaatacctgcatttcttaccctggtgagaaaagcacaagcggtgtaggctccaatgctgctttcccaggagggtgaagatggtgctgtgctgaggaaaggggatgcagagccctgcccagcaccaccacctcctatgctcctggatccctaggctctgttccatgagcctgttgcaggttttggtactttagaaatgtaactttttgctcttataattttattttattaaattaaattactgca

SEQ ID NO: 253474 - DNA, 1179 bp, Artificial Sequence
  derived and/or modified sequence
atggacgccagatggtgggccgtggtggtgctggccgccttccccagcctgggcgccggcggcgagacccccgaggccccccccgagagctggacccagctgtggttcttcagattcgtggtgaacgccgccggctacgccagcttcatggtgcccggctacctgctggtgcagtacttcagaagaaagaactacctggagaccggcagaggcctgtgcttccccctggtgaaggcctgcgtgttcggcaacgagcccaaggccagcgacgaggtgcccctggcccccagaaccgaggccgccgagaccacccccatgtggcaggccctgaagctgctgttctgcgccaccggcctgcaggtgagctacctgacctggggcgtgctgcaggagagagtgatgaccagaagctacggcgccaccgccaccagccccggcgagagattcaccgacagccagttcctggtgctgatgaacagagtgctggccctgatcgtggccggcctgagctgcgtgctgtgcaagcagcccagacacggcgcccccatgtacagatacagcttcgccagcctgagcaacgtgctgagcagctggtgccagtacgaggccctgaagttcgtgagcttccccacccaggtgctggccaaggccagcaaggtgatccccgtgatgctgatgggcaagctggtgagcagaagaagctacgagcactgggagtacctgaccgccaccctgatcagcatcggcgtgagcatgttcctgctgagcagcggccccgagcccagaagcagccccgccaccaccctgagcggcctgttcaccgtgggcagcctgctggagcagggcgccctgctggagggcaccagattcatgggcagacacagcgagttcgccgcccacgccctgctgctgagcatctgcagcgcctgcggccagctgttcatcttctacaccatcggccagttcggcgccgccgtgttcaccatcatcatgaccctgagacaggccttcgccatcctgctgagctgcctgctgtacggccacaccgtgaccgtggtgggcggcctgggcgtggccgtggtgttcgccgccctgctgctgagagtgtacgccagaggcagactgaagcagagaggcaagaaggccgtgcccgtggagagccccgtgcagaaggtgtag

SEQ ID NO: 253475 - DNA, 1299 bp, Artificial Sequence
  derived and/or modified sequence
atggacgccagatggtgggccgtggtggtgctggccgccttccccagcctgggcgccggcggcgagacccccgaggccccccccgagagctggacccagctgtggttcttcagattcgtggtgaacgccgccggctacgccagcttcatggtgcccggctacctgctggtgcagtacttcagaagaaagaactacctggagaccggcagaggcctgtgcttccccctggtgaaggcctgcgtgttcggcaacgagcccaaggccagcgacgaggtgcccctggcccccagaaccgaggccgccgagaccacccccatgtggcaggccctgaagctgctgttctgcgccaccggcctgcaggtgagctacctgacctggggcgtgctgcaggagagagtgatgaccagaagctacggcgccaccgccaccagccccggcgagagattcaccgacagccagttcctggtgctgatgaacagagtgctggccctgatcgtggccggcctgagctgcgtgctgtgcaagcagcccagacacggcgcccccatgtacagatacagcttcgccagcctgagcaacgtgctgagcagctggtgccagtacgaggccctgaagttcgtgagcttccccacccaggtgctggccaaggccagcaaggtgatccccgtgatgctgatgggcaagctggtgagcagaagaagctacgagcactgggagtacctgaccgccaccctgatcagcatcggcgtgagcatgttcctgctgagcagcggccccgagcccagaagcagccccgccaccaccctgagcggcctgatcctgctggccggctacatcgccttcgacagcttcaccagcaactggcaggacgccctgttcgcctacaagatgagcagcgtgcagatgatgttcggcgtgaacttcttcagctgcctgttcaccgtgggcagcctgctggagcagggcgccctgctggagggcaccagattcatgggcagacacagcgagttcgccgcccacgccctgctgctgagcatctgcagcgcctgcggccagctgttcatcttctacaccatcggccagttcggcgccgccgtgttcaccatcatcatgaccctgagacaggccttcgccatcctgctgagctgcctgctgtacggccacaccgtgaccgtggtgggcggcctgggcgtggccgtggtgttcgccgccctgctgctgagagtgtacgccagaggcagactgaagcagagaggcaagaaggccgtgcccgtggagagccccgtgcagaaggtgtag

SEQ ID NO: 253476 - protein, 1043 aa, Artificial Sequence
  derived and/or modified sequence
MRRFKRKHLTAIDCQHLARSHLAVTQPFGQRWTNRDPNHGLYPKPRTKRGSRGQGSQRCIPEFFLAGKQPCTNDMAKSNSVGQDSCQDSEGDMIFPAESSCALPQEGSAGPGSPGSAPPSRKRSWSSEEESNQATGTSRWDGVSKKAPRHHLSVPCTRPREARQEAEDSTSRLSAESGETDQDAGDVGPDPIPDSYYGLLGTLPCQEALSHICSLPSEVLRHVFAFLPVEDLYWNLSLVCHLWREIISDPLFIPWKKLYHRYLMNEEQAVSKVDGILSNCGIEKESDLCVLNLIRYTATTKCSPSVDPERVLWSLRDHPLLPEAEACVRQHLPDLYAAAGGVNIWALVAAVVLLSSSVNDIQRLLFCLRRPSSTVTMPDVTETLYCIAVLLYAMREKGINISNRIHYNIFYCLYLQENSCTQATKVKEEPSVWPGKKTIQLTHEQQLILNHKMEPLQVVKIMAFAGTGKTSTLVKYAEKWSQSRFLYVTFNKSIAKQAERVFPSNVICKTFHSMAYGHIGRKYQSKKKLNLFKLTPFMVNSVLAEGKGGFIRAKLVCKTLENFFASADEELTIDHVPIWCKNSQGQRVMVEQSEKLNGVLEASRLWDNMRKLGECTEEAHQMTHDGYLKLWQLSKPSLASFDAIFVDEAQDCTPAIMNIVLSQPCGKIFVGDPHQQIYTFRGAVNALFTVPHTHVFYLTQSFRFGVEIAYVGATILDVCKRVRKKTLVGGNHQSGIRGDAKGQVALLSRTNANVFDEAVRVTEGEFPSRIHLIGGIKSFGLDRIIDIWILLQPEEERRKQNLVIKDKFIRRWVHKEGFSGFKRYVTAAEDKELEAKIAVVEKYNIRIPELVQRIEKCHIEDLDFAEYILGTVHKAKGLEFDTVHVLDDFVKVPCARHNLPQLPHFRVESFSEDEWNLLYVAVTRAKKRLIMTKSLENILTLAGEYFLQAELTSNVLKTGVVRCCVGQCNNAIPVDTVLTMKKLPITYSNRKENKGGYLCHSCAEQRIGPLAFLTASPEQVRAMERTVENIVLPRHEALLFLVF

SEQ ID NO: 253477 - DNA, 3560 bp, Artificial Sequence
  derived and/or modified sequence
ctcgggctccaggtcccggccagaggaggagctcgctgccgggggacgctgggctgagcggccggcggcgcgggcccggcggcggcggcagcggggtccgggtccggagcgccacatgagacggtttaagcggaagcatcttactgccattgactgccagcatttggctcggagtcacttggctgtgacccagcccttcggtcaaagatggacaaacagagatccgaaccatggtctctatcctaaaccgagaacaaaaagagggagtaggggtcagggaagtcaaagatgcatccctgagttcttcctagcaggcaagcagccgtgcaccaatgacatggccaaaagcaattctgttggccaggacagctgtcaggactctgagggtgacatgatctttcctgcagagagcagctgtgcactgcctcaggaaggcagtgcagggccgggctcaccagggtctgccccgccctccaggaagcggtcttggtcctctgaggaagagagtaaccaggctaccgggaccagccggtgggatggagtttctaagaaagctccacggcaccatttgtctgtgccatgcacaaggcctagggaggccaggcaagaagcagaggacagtacgtctcggctctctgcggagtctggtgaaaccgaccaagatgctggggacgtgggtcctgatcccattcctgactcatactatgggcttcttgggaccttgccctgccaggaagcactgagccacatttgcagcctgcctagtgaggtcctgaggcacgtgtttgccttcctcccggtggaagacctctattggaacctgagcttggtgtgccacttgtggagggagatcatcagtgacccgctgttcattccttggaagaagctgtaccatcgatacctgatgaatgaagagcaagctgtcagcaaagtggacggcatcctgtctaactgtggcatagaaaaggagtcagacctgtgtgtgctgaacctcatacgatacacagccaccactaagtgctctccgagtgtggatcccgagagggtgctgtggagtctgagggaccaccccctcctccccgaggctgaggcgtgtgtgcggcaacacctccccgacctctacgctgctgccgggggtgtcaacatctgggccctggtggcggctgtggtgctcctctccagcagtgtgaatgacatccagcgactgctcttctgcctccggagacccagctccacggtgaccatgccagatgtcaccgagaccctgtactgcatagccgtgcttctctacgccatgagggagaaggggattaacatcagcaataggattcactacaacattttctattgcctatatcttcaggagaattcctgcactcaggccacaaaagttaaagaggagccatctgtctggccaggcaagaaaaccatccaacttacacatgaacaacagctgattctgaatcacaagatggaacctctccaggtggtgaaaattatggcctttgccggcactgggaagacctcaacgctggtcaagtatgcagagaagtggtctcagagcaggtttctgtatgtgacattcaacaagagcatcgcaaagcaggccgaacgcgtcttccccagcaacgtcatctgcaaaaccttccactccatggcctacgggcacatagggcggaagtaccagtcaaagaagaagttgaatctcttcaagttaacacccttcatggtcaactccgtccttgctgaagggaagggtggattcataagagccaagcttgtgtgtaagactctagaaaacttctttgcctcggctgacgaagagctgaccattgatcacgtgcctatttggtgtaagaacagccaaggacagagagtcatggttgagcagagtgaaaaactgaatggtgtccttgaagcgagccgcctctgggataacatgcggaagctgggggagtgcacagaagaggcgcaccagatgactcatgacggctacttgaaactctggcagctgagcaagccttcgctggcctcttttgacgccatctttgtggatgaggcccaggactgcacaccagctatcatgaacatagttctgtctcagccatgtgggaaaatctttgtaggggacccgcaccagcagatctataccttccggggtgcggtcaacgccctgttcacagtgccccacacccacgtcttctatctcacgcagagttttcggtttggtgtggaaatagcttatgtgggagctactatcttggatgtttgcaagagagtcaggaaaaagactttggttggaggaaaccatcagagtggcattagaggtgacgcaaaggggcaagtggccttgttgtcccggaccaacgccaacgtgtttgatgaggccgtacgggtgacggaaggggaattcccttcaaggatacatttgattggggggattaaatcatttggattggacagaatcattgatatttggatccttcttcagccagaggaagaacggaggaaacaaaacctcgtcattaaagacaaatttatcagaagatgggtgcacaaagaaggctttagtggcttcaagaggtatgtgaccgctgccgaggacaaggagcttgaagccaagatcgcagttgttgaaaagtataacatcaggattccagagctggtgcaaaggatagaaaaatgccatatagaagatttggactttgcagagtacattctgggcactgtgcacaaagccaaaggcctggagtttgacactgtgcatgttttggatgattttgtgaaagtgccttgtgcccggcataacctgccccagcttccgcacttcagagttgagtcattttctgaggatgaatggaatttactgtatgttgcagtaactcgagccaagaagcgtctcatcatgaccaaatcattggaaaacattttgactttggctggggagtacttcttgcaagcagagctgacaagcaacgtcttaaaaacaggcgtggtgcgctgctgcgtgggacagtgcaacaatgccatccctgttgacaccgtccttaccatgaagaagctgcccatcacctatagcaacaggaaggaaaacaaggggggctacctctgccactcctgtgcggagcagcgcatcgggcccctggcgttcctgacagcctccccggagcaggtgcgcgccatggagcgcactgtggagaacatcgtactgccccggcatgaggccctgctcttcctcgtcttctgaggacaaggcgcacgttctccgcagtgcagagcagcttgccgaggaccccgcgtgaagaaagccagcgaggggggcttctgctccctgagactctgggttcacccacagcactttctgaggaagaggacaccagcccaagctggacctgccatttctccactccctacagacagccagtctccacttgcctcccctctggatgtatctggtcagggaagtgggggatgttcttttgataaaaaaaaaaaaaaaaatttatgtatttaaacttttattacaagatttcaattaaacaggcaccatagcactggca

SEQ ID NO: 253478 - DNA, 3658 bp, Artificial Sequence
  derived and/or modified sequence
acagccccggcctgccccgcgtgggagaagccgcggttccgggcacggggcggtttttcctcagggacggagcggtccgggatgagcacggaggggcctggggatccgagagcgctggcgtccgccgtcctggagctgcagcggcccgtacgtgattcgggactgaacactgagacggtttaagcggaagcatcttactgccattgactgccagcatttggctcggagtcacttggctgtgacccagcccttcggtcaaagatggacaaacagagatccgaaccatggtctctatcctaaaccgagaacaaaaagagggagtaggggtcagggaagtcaaagatgcatccctgagttcttcctagcaggcaagcagccgtgcaccaatgacatggccaaaagcaattctgttggccaggacagctgtcaggactctgagggtgacatgatctttcctgcagagagcagctgtgcactgcctcaggaaggcagtgcagggccgggctcaccagggtctgccccgccctccaggaagcggtcttggtcctctgaggaagagagtaaccaggctaccgggaccagccggtgggatggagtttctaagaaagctccacggcaccatttgtctgtgccatgcacaaggcctagggaggccaggcaagaagcagaggacagtacgtctcggctctctgcggagtctggtgaaaccgaccaagatgctggggacgtgggtcctgatcccattcctgactcatactatgggcttcttgggaccttgccctgccaggaagcactgagccacatttgcagcctgcctagtgaggtcctgaggcacgtgtttgccttcctcccggtggaagacctctattggaacctgagcttggtgtgccacttgtggagggagatcatcagtgacccgctgttcattccttggaagaagctgtaccatcgatacctgatgaatgaagagcaagctgtcagcaaagtggacggcatcctgtctaactgtggcatagaaaaggagtcagacctgtgtgtgctgaacctcatacgatacacagccaccactaagtgctctccgagtgtggatcccgagagggtgctgtggagtctgagggaccaccccctcctccccgaggctgaggcgtgtgtgcggcaacacctccccgacctctacgctgctgccgggggtgtcaacatctgggccctggtggcggctgtggtgctcctctccagcagtgtgaatgacatccagcgactgctcttctgcctccggagacccagctccacggtgaccatgccagatgtcaccgagaccctgtactgcatagccgtgcttctctacgccatgagggagaaggggattaacatcagcaataggattcactacaacattttctattgcctatatcttcaggagaattcctgcactcaggccacaaaagttaaagaggagccatctgtctggccaggcaagaaaaccatccaacttacacatgaacaacagctgattctgaatcacaagatggaacctctccaggtggtgaaaattatggcctttgccggcactgggaagacctcaacgctggtcaagtatgcagagaagtggtctcagagcaggtttctgtatgtgacattcaacaagagcatcgcaaagcaggccgaacgcgtcttccccagcaacgtcatctgcaaaaccttccactccatggcctacgggcacatagggcggaagtaccagtcaaagaagaagttgaatctcttcaagttaacacccttcatggtcaactccgtccttgctgaagggaagggtggattcataagagccaagcttgtgtgtaagactctagaaaacttctttgcctcggctgacgaagagctgaccattgatcacgtgcctatttggtgtaagaacagccaaggacagagagtcatggttgagcagagtgaaaaactgaatggtgtccttgaagcgagccgcctctgggataacatgcggaagctgggggagtgcacagaagaggcgcaccagatgactcatgacggctacttgaaactctggcagctgagcaagccttcgctggcctcttttgacgccatctttgtggatgaggcccaggactgcacaccagctatcatgaacatagttctgtctcagccatgtgggaaaatctttgtaggggacccgcaccagcagatctataccttccggggtgcggtcaacgccctgttcacagtgccccacacccacgtcttctatctcacgcagagttttcggtttggtgtggaaatagcttatgtgggagctactatcttggatgtttgcaagagagtcaggaaaaagactttggttggaggaaaccatcagagtggcattagaggtgacgcaaaggggcaagtggccttgttgtcccggaccaacgccaacgtgtttgatgaggccgtacgggtgacggaaggggaattcccttcaaggatacatttgattggggggattaaatcatttggattggacagaatcattgatatttggatccttcttcagccagaggaagaacggaggaaacaaaacctcgtcattaaagacaaatttatcagaagatgggtgcacaaagaaggctttagtggcttcaagaggtatgtgaccgctgccgaggacaaggagcttgaagccaagatcgcagttgttgaaaagtataacatcaggattccagagctggtgcaaaggatagaaaaatgccatatagaagatttggactttgcagagatggagtctcaccatgttggccaggctggtctcgaactcccaacctcagagtacattctgggcactgtgcacaaagccaaaggcctggagtttgacactgtgcatgttttggatgattttgtgaaagtgccttgtgcccggcataacctgccccagcttccgcacttcagagttgagtcattttctgaggatgaatggaatttactgtatgttgcagtaactcgagccaagaagcgtctcatcatgaccaaatcattggaaaacattttgactttggctggggagtacttcttgcaagcagagctgacaagcaacgtcttaaaaacaggcgtggtgcgctgctgcgtgggacagtgcaacaatgccatccctgttgacaccgtccttaccatgaagaagctgcccatcacctatagcaacaggaaggaaaacaaggggggctacctctgccactcctgtgcggagcagcgcatcgggcccctggcgttcctgacagcctccccggagcaggtgcgcgccatggagcgcactgtggagaacatcgtactgccccggcatgaggccctgctcttcctcgtcttctgaggacaaggcgcacgttctccgcagtgcagagcagcttgccgaggaccccgcgtgaagaaagccagcgaggggggcttctgctccctgagactctgggttcacccacagcactttctgaggaagaggacaccagcccaagctggacctgccatttctccactccctacagacagccagtctccacttgcctcccctctggatgtatctggtcagggaagtgggggatgttcttttgataaaaaaaaaaaaaaaaatttatgtatttaaacttttattacaagatttcaattaaacaggcaccatagc

SEQ ID NO: 253479 - DNA, 2119 bp, Artificial Sequence
  derived and/or modified sequence
ctcgggctccaggtcccggccagaggaggagctcgctgccgggggacgctgggctgagcggccggcggcgcgggcccggcggcggcggcagcggggtccgggtccggagcgccacatgagacggtttaagcggaagcatcttactgccattgactgccagcatttggctcggagtcacttggctgtgacccagcccttcggtcaaagatggacaaacagagatccgaaccatggtctctatcctaaaccgagaacaaaaagagggagtaggggtcagggaagtcaaagatgcatccctgagttcttcctagcaggcaagcagccgtgcaccaatgacatggccaaaagcaattctgttggccaggacagctgtcaggactctgagggtgacatgatctttcctgcagagagcagctgtgcactgcctcaggaaggcagtgcagggccgggctcaccagggtctgccccgccctccaggaagcggtcttggtcctctgaggaagagagtaaccaggctaccgggaccagccggtgggatggagtttctaagaaagctccacggcaccatttgtctgtgccatgcacaaggcctagggaggccaggcaagaagcagaggacagtacgtctcggctctctgcggagtctggtgaaaccgaccaagatgctggggacgtgggtcctgatcccattcctgactcatactatgggcttcttgggaccttgccctgccaggaagcactgagccacatttgcagcctgcctagtgaggtcctgaggcacgtgtttgccttcctcccggtggaagacctctattggaacctgagcttggtgtgccacttgtggagggagatcatcagtgacccgctgttcattccttggaagaagctgtaccatcgatacctgatgaatgaagagcaagctgtcagcaaagtggacggcatcctgtctaactgtggcatagaaaaggagtcagacctgtgtgtgctgaacctcatacgatacacagccaccactaagtgctctccgagtgtggatcccgagagggtgctgtggagtctgagggaccaccccctcctccccgaggctgaggcgtgtgtgcggcaacacctccccgacctctacgctgctgccgggggtgtcaacatctgggccctggtggcggctgtggtgctcctctccagcagtgtgaatgacatccagcgactgctcttctgcctccggagacccagctccacggtgaccatgccagatgtcaccgagaccctgtactgcatagccgtgcttctctacgccatgagggagaaggggattaacatcagcaataggattcactacaacattttctattgcctatatcttcaggagaattcctgcactcaggccacaaaagttaaagaggagccatctgtctggccaggcaagaaaaccatccaacttacacatgaacaacagctgattctgaatcacaagatggaacctctccaggtggtgaaaattatggcctttgccggcactgggaagacctcaacgctggtcaagtatgcagagaagtggtctcagagcaggtttctgtatgtgacattcaacaagagcatcgcaaagcaggccgaacgcgtcttccccagcaacgtcatctgcaaaaccttccactccatggcctacgggcacatagggcggaagtaccagtcaaagaagaagttgaatctcttcaagttaacacccttcatggtcaactccgtccttgctgaagggaagggtggattcataagagccaagcttgtgtgtaagactctagaaaacttctttgcctcggctgacgaagagctgaccattgatcacgtgcctatttggtgtaagaacagccaaggacagagagtcatggttgagcagagtgaaaaactgaatggtgtccttgaagcgagccgcctctgggataacatgcggaagctgggggagtgcacagaagaggcgcaccagatgactcatgacggctacttgaaactctggcagctgagcaagccttcgctggcctcttttgacgccatctttgtggatgaggcccaggcaggtgcgcgccatggagcgcactgtggagaacatcgtactgccccggcatga

SEQ ID NO: 253480 - DNA, 3132 bp, Artificial Sequence
  derived and/or modified sequence
atgcggaggttcaaaagaaaacatttaactgcaattgactgtcagcatctggcccgcagtcaccttgcagttacccagcccttcggtcagcgctggaccaatcgcgacccgaatcacggattgtatcccaaaccccgaaccaagcgcgggagtaggggccagggctcacagagatgcattcccgagttcttccttgcggggaagcagccttgcacgaacgatatggcaaaatccaatagtgtgggacaggacagctgccaagactccgaaggggatatgatctttcccgccgagtctagctgtgctctcccccaggaagggagcgcgggtccaggaagtccaggatccgcgccccctagcagaaaacggtcatggtcttccgaggaagaaagcaatcaggccacagggacgagcaggtgggacggtgtgtctaagaaggctcctagacatcacttgagcgttccatgcactcgtcctagagaagccagacaggaggctgaggactcgacttctcggctatcggctgagtctggagagaccgaccaggacgcaggcgatgtcggccctgatccgattcctgacagctattatggactcctcggaacattgccgtgtcaggaagccctaagtcacatctgttctctgccgtccgaggttctgcgtcacgtgttcgccttcctgcccgtcgaggacctctactggaatcttagtctggtgtgccatttgtggcgggagatcattagtgatcctctgttcatcccatggaagaagctgtatcacagatatctcatgaacgaggagcaggccgtcagcaaggtggacggaatactaagcaactgtggcattgaaaaggaatctgatctctgcgtgttaaatctgataagatacacggctaccacaaagtgctcgcccagcgtggacccagagcgagtactttggagcctgcgtgatcacccattattgccagaggctgaggcttgtgtgagacagcacctcccggatctatacgcggccgcaggaggtgttaatatctgggcccttgtcgccgccgtcgtgcttctttcctcgtcagtgaatgatatacagaggctcctgttctgcttgcggcgcccaagctcaactgtgaccatgcctgatgttacagagactctgtattgtattgctgtgctgctgtacgccatgagagaaaagggtataaatatcagcaaccgcatccattacaacattttttattgcctttatctccaggaaaattcttgcacccaggcaaccaaagttaaagaggagcctagtgtttggcctggtaagaagaccatccagttgacacatgagcaacagctgatcttaaatcataaaatggagcctctgcaggtggtgaagatcatggcgttcgcgggcactggtaaaacttccactttggtgaaatacgctgaaaagtggtcccaatcaaggttcctgtacgtgacattcaataaaagcatagccaaacaggctgagcgcgttttcccatcaaatgtgatttgtaaaacgtttcattccatggcctacggccatatcggtagaaagtaccagtctaagaagaagcttaacctgtttaagctgacccccttcatggtcaacagtgttctcgctgaaggtaagggggggttcatccgcgctaagctggtctgcaaaacgttagaaaactttttcgcgtctgctgatgaggagcttacaatcgatcatgtgcccatctggtgtaagaactctcaggggcagagagtcatggtggagcaatctgaaaaactgaacggcgtattggaggcatcacgtctttgggacaacatgcggaagctcggagaatgtacagaggaggcccaccagatgacgcatgatggctatttaaagctttggcagcttagcaagccttccttagcgtccttcgacgccatcttcgtagacgaggctcaggactgcacccccgcgatcatgaacattgttctatcacagccttgcggaaagatcttcgttggtgatccccaccagcagatctataccttccgtggagcagtcaatgctctttttacagtccctcacacccacgtcttctacctgacccagtccttcagatttggggtcgaaatcgcatacgtgggtgcaacaattttagatgtgtgtaaacgcgtgcgtaaaaagaccctggtgggtggaaaccatcagagcggtattcgcggagatgcgaaaggccaggtggcgctgctgagccggactaacgctaacgtttttgacgaggcagtgcgggtcactgaaggagagttcccatcgaggatccacctgatcgggggcatcaagtcattcggtctggacaggataattgatatctggattttgttgcagccggaggaggaacggaggaaacagaacctcgtgatcaaggataaattcatcagaagatgggttcacaaagagggcttctcgggctttaaacgctacgtgacagcagctgaagacaaagagttggaagcaaagatagcggttgtggaaaagtataacatccgcattccagagctggtccaaagaatagagaagtgccacattgaagatctagatttcgccgagtatattctcggtaccgtgcacaaggcaaagggcctagagtttgatacagtgcatgtcctggatgatttcgtcaaagtgccctgcgctagacataatctcccacagctgccccacttccgggtagaatctttttccgaggacgagtggaatctcctctacgtcgccgtcacaagggcaaaaaagcgactcatcatgacaaagtcgctagaaaatatcttgacgctagcgggagaatactttctgcaggctgagctcacatccaacgtgctgaagaccggggtggtgagatgctgcgttggacagtgcaataacgcgattccagtagacaccgttctgactatgaaaaagctgccaatcacctacagcaatcgcaaggagaataaagggggttacctttgccatagctgtgccgaacagcgcatcggacctctcgcctttctgaccgcttcaccagaacaggtgcgcgccatggaacgcaccgtcgaaaacatcgtgctgccgagacacgaagccctgcttttcctggtcttctag

SEQ ID NO: 253481 - DNA, 3132 bp, Artificial Sequence
  derived and/or modified sequence
atgaggcgcttcaagaggaagcacctgacagccatcgactgccagcacctggcccggagccacctggccgtgacccagcccttcggccagcgctggaccaacagagaccccaaccacggcctgtaccccaagcccaggaccaagaggggcagccggggccagggcagccagcgctgcatccctgagttcttcctggccggcaagcagccctgcaccaatgacatggccaagagcaacagcgtgggccaggacagctgccaggacagcgagggggacatgatcttccctgctgagagcagctgtgccctgccccaggagggcagcgctggccctggcagccctggcagcgccccacccagcaggaagaggtcctggagcagcgaggaggagagcaaccaggccaccggcaccagccgctgggatggagtgtccaagaaggcccccaggcaccacctgtctgtgccctgcacccggccccgggaggcccggcaggaggccgaggacagcaccagccggctgtctgctgagagcggggagacagaccaggatgctggagatgtgggccctgaccccatcccagacagctactacggcctgctgggcaccctgccctgccaggaggccctgagccacatctgcagcctgcccagcgaggtgctgcggcacgtgtttgccttcctgcctgtggaggacctgtactggaacctgagcctggtgtgccacctgtggagggagatcatcagtgaccccctcttcatcccctggaagaagctgtaccaccgctacctgatgaatgaggagcaggccgtgtccaaggtggatggcatcctgagcaactgtggcatcgagaaggagagtgacctgtgtgtgctgaacctgatccgctacacagccaccaccaagtgcagccccagcgtggaccctgagcgggtgctgtggagcctgcgggaccaccccctgctgcctgaggccgaggcctgtgtgcggcagcacctgcctgacctgtatgctgctgctggaggagtgaacatctgggccctggtggccgctgtggtgctgctgagcagctctgtgaatgacatccagaggctgctcttctgcctgcggcggcccagcagcacagtgaccatgccagatgtgacagagaccctgtactgcatcgctgtgctgctgtatgccatgagggagaagggcatcaacatcagcaaccgcatccactacaacatcttctactgcctgtacctgcaggagaacagctgcacccaggccaccaaggtgaaggaggagcccagcgtgtggccaggcaagaagaccatccagctgacccatgagcagcagctgatcctgaaccacaagatggagcccctgcaggtggtgaagatcatggcctttgctggcaccgggaagaccagcaccctggtgaagtatgcagagaagtggagccagagccgcttcctgtatgtgaccttcaacaagagcatcgccaagcaggccgagagggtcttccccagcaatgtcatctgcaagaccttccacagcatggcctacggccacatcggcaggaagtaccagagcaagaagaagctgaacctcttcaagctgacccccttcatggtgaacagcgtgctggccgagggcaaaggaggcttcatccgggccaagctggtgtgcaagaccctggagaacttctttgccagcgcagatgaggagctgaccatcgaccacgtgcccatctggtgcaagaacagccagggccagagggtgatggtggagcagagcgagaagctgaatggagtgctggaggccagccggctgtgggacaacatgaggaagctgggggagtgcacagaggaggcccaccagatgacccatgatggctacctgaagctgtggcagctgagcaagcccagcctggccagctttgatgccatctttgtggatgaggcccaggactgcaccccagccatcatgaacatcgtgctgagccagccctgtgggaagatctttgtgggggacccccaccagcagatctacaccttcagaggagctgtgaatgccctcttcaccgtgccccacacccacgtgttctacctgacccagagcttccgcttcggcgtggagatcgcctacgtgggcgccaccatcctggatgtgtgcaagagggtgaggaagaagaccctggtgggcggcaaccaccagagcggcatcagaggagatgccaagggccaggtggccctgctgagcaggaccaatgccaacgtgtttgatgaggccgtgcgggtgacagaaggagagttccccagccgcatccacctgattggaggcatcaagagctttggcctggaccgcatcatcgacatctggatcctgctgcagcctgaggaggagaggaggaagcagaacctggtgatcaaggacaagttcatccgccgctgggtgcacaaggagggcttcagcggcttcaagcgctacgtgacagctgctgaggacaaggagctggaggccaagattgctgtggtggagaagtacaacatccgcatccctgagctggtgcagagaattgagaagtgccacatcgaggacctggactttgctgagtacatcctgggcaccgtgcacaaggccaagggcctggagtttgacacagtgcacgtgctggatgactttgtgaaggtgccctgtgcccggcacaacctgccccagctgccccacttccgggtggagagcttctctgaagatgagtggaacctgctgtatgtggccgtgacccgggccaagaagaggctcatcatgaccaagagcctggagaacatcctgaccctggccggggagtacttcctgcaggccgagctgaccagcaatgtgctgaagacaggagtggtgcgctgctgcgtgggccagtgcaacaatgccatccctgtggacacagtgctgaccatgaagaagctgcccatcacctacagcaacaggaaggagaacaagggcggctacctgtgccacagctgtgccgagcagagaattggccccctggccttcctgacagccagccctgagcaggtgcgggccatggagaggacagtggagaacatcgtgctgcccaggcatgaggccctgctcttcctggtgttctag

SEQ ID NO: 253482 - DNA, 3132 bp, Artificial Sequence
  derived and/or modified sequence
atgcggcggttcaagcggaagcacctgaccgccatcgactgccagcacctagccaggagccacctagctgtcactcaaccttttggacagagatggacgaatagggatcccaaccacggactctaccccaaacctaggaccaaaaggggctctaggggccagggctcccagcgttgtattccagagtttttcctggccggcaagcagccgtgtacgaatgacatggccaagagtaattcagtcgggcaggattcctgtcaagactccgaaggagacatgatctttcctgctgaatcctcctgtgcgcttcctcaggagggctcagctggaccggggtcccctggatccgcgcccccaagccgaaagaggtcctggagtagcgaggaggagtctaatcaggctaccggaactagtaggtgggatggagtgtccaaaaaggccccacggcaccacctgtccgtaccatgtactagacccagagaggcacggcaggaagccgaagattcaacctctagactctcagctgaaagcggtgaaaccgatcaagacgccggggacgtgggcccggacccgatacctgattcctactacgggcttctcggtacccttccctgccaagaggccttatcccacatctgtagccttccatcagaggtgctcagacacgtgtttgcgtttctgcccgtggaagacttgtattggaatctgagcctcgtctgccatctctggcgggagattattagtgaccccctgtttattccttggaagaagctgtaccaccgctacctgatgaacgaagaacaagcagtcagcaaagtggacggcatcctgagcaattgcggcattgagaaagagtccgacctgtgcgtgttgaatctcattagatacaccgcgaccacaaagtgcagtccgtccgtggatccggaaagagtgctctggtccctgcgggaccatcctcttctcccagaagccgaggcctgtgtgaggcagcatctgccggacctctatgccgcagccgggggcgtcaatatttgggcactagtggccgctgtggtccttctcagttcaagcgtaaacgatattcagcgccttttgttctgcctgagacgcccttcatccaccgttaccatgccagacgttaccgagaccctgtattgtatcgccgtgcttctctacgctatgcgggaaaagggaattaatatcagcaacaggatccattacaatattttctactgcctttatctgcaggagaatagctgcacgcaagcgactaaggttaaagaagagccctctgtatggcccggaaagaaaacgatccagctaacgcacgaacaacaactcatattgaaccacaagatggaacctctccaggtagtcaagataatggcctttgccggaacagggaagacatctacactggtgaagtacgccgaaaaatggtcgcaatcccgatttctctacgtcacctttaacaagtcaattgccaaacaggccgagagagtatttccttcaaacgtgatctgtaagacttttcattcaatggcctacggccacattgggcggaagtaccagagcaagaaaaagttaaacctgttcaagctgaccccattcatggtgaacagtgttctggctgaaggcaaaggaggattcataagggctaaactggtctgtaagacgcttgagaacttctttgcctcagcagatgaagaactgacaatagatcacgtaccgatctggtgcaaaaactcacaggggcagagggtgatggtagaacagtcagaaaagctgaatggcgttctggaggctagccggctctgggacaatatgcggaagctgggagagtgtacagaagaagcgcaccagatgacgcatgacgggtacctcaaactttggcagctttccaagcctagtctcgcctctttcgacgcaattttcgtcgacgaggcacaggactgtacaccagctataatgaatattgttctcagccagccctgtggcaagatctttgtgggagacccacaccagcagatatataccttccggggcgcggtgaacgccctattcaccgttccacacactcacgtgttctacctgacccaatcattcaggtttggggttgagatagcatatgtgggagctaccatcctggatgtctgtaagcgcgtgagaaagaagaccctcgtggggggaaaccaccagagcggcattcggggagatgccaaagggcaggtcgcactgttaagccgcacgaacgccaacgtgttcgatgaagctgttcgcgtcacggaaggcgagttcccttctagaatacacttgataggaggcatcaaatcattcggcctggatcgaatcattgatatctggattctgttgcagccagaagaggaaaggagaaaacagaatctcgtgatcaaggataaattcatcagaaggtgggtccataaggaaggcttctccggattcaagcgttacgtgaccgctgccgaagataaagaactcgaagccaagatagcagtagtggaaaagtataatatccggatcccggagcttgtccagagaatagagaaatgccacattgaggaccttgattttgcagagtacatccttggcacagtgcacaaggcgaagggacttgaattcgatacggtgcatgtgctggacgattttgtgaaggtgccttgcgcaaggcacaacttgccccagttgccacactttcgcgtggaatcgttctccgaagatgaatggaacctgctatacgtggccgtcacacgcgccaagaagaggctcattatgacgaagtcattagagaacattctgacgctggcgggagaatacttcttgcaagcggagctcacatccaatgtcttgaagacaggggtcgtccgttgctgcgtgggccaatgtaacaacgcaatccctgtggatactgtgctaacaatgaagaaacttcctattacgtactccaacaggaaggagaacaagggcggctatctatgccacagttgtgccgagcagagaatcggccccctggcctttttgactgcttctccagaacaggtgcgggcaatggaacgcactgtggaaaatattgttttgcctaggcacgaggctctgctgttcctcgtattttag

SEQ ID NO: 253483 - DNA, 3132 bp, Artificial Sequence
  derived and/or modified sequence
atgaggagatttaaaaggaagcacctgaccgctatcgactgtcagcatttagcgagaagtcaccttgcggtgacccagccattcggtcaaagatggacaaatcgcgaccccaaccacggcctctatccgaaaccaaggacaaagcggggttcccgcggtcagggttctcaaaggtgtatccccgaattctttcttgccggaaaacagccctgcaccaacgatatggccaagagcaacagtgtcggccaggactcctgccaagactccgaaggggacatgatatttcctgccgagagtagctgcgccctgccccaggagggaagcgcaggtccaggctccccagggtcagcacccccatcccggaagagatcatggtcatccgaggaagagagcaatcaggctactggcacaagcaggtgggatggggtaagtaagaaagctcccaggcaccatctttccgtaccctgcactaggcctagagaagcgaggcaggaagccgaggacagcacatctaggttgtccgctgaatcgggagagaccgaccaggacgccggtgacgtcgggcctgacccaattccagactcttactatggattactcggcaccttgccttgtcaggaggcactgtctcatatttgttcgctgccttccgaagttctgaggcatgtgtttgcttttctgcccgtggaagacctctattggaacctcagcttggtgtgtcacctttggagagaaataatatccgaccccctatttatcccgtggaaaaaactgtatcaccgctatctaatgaatgaggagcaggctgtctctaaggtggatggcattttgtccaactgcggtatcgagaaggaatcagatctgtgtgtcctaaatctgatccgctatactgctaccaccaagtgttcaccaagtgtggaccctgaaagagtgctgtggtcgctccgagaccatcccctgctacctgaggctgaagcctgcgtcagacaacacctccccgatctgtacgcagctgcgggaggtgtcaatatatgggctctggtggccgctgtggtgctactgtcttcctctgtgaacgacatccagcggctgctgttctgtctacgccgtccttcatcaactgttacgatgccagacgttaccgaaaccctgtactgtattgcggttctgctgtacgctatgcgagagaagggcattaatatcagcaaccggattcattacaatatcttttactgcctttacctgcaagagaacagctgtacgcaagctacaaaagtcaaagaggagcctagcgtgtggccgggtaagaagactatccagcttacgcatgaacagcaactgatcctgaatcataagatggaacccttacaggttgttaaaatcatggccttcgcaggaaccgggaagacgagcacgctggtcaaatatgctgaaaaatggagtcaatcccgctttctctatgtgactttcaacaagtccatagcaaaacaagccgaacgggttttcccaagtaacgtcatttgtaagaccttccactccatggcttatggccatataggacggaagtaccagtcaaagaaaaagcttaatctctttaaactaaccccatttatggtaaacagcgttctggctgagggcaagggaggatttattagggctaaacttgtctgcaagacgctcgagaatttcttcgcttcagcagacgaagaactcactatcgaccatgtcccgatctggtgtaagaattcccaggggcagcgggtgatggttgaacagtccgagaagctcaacggcgttcttgaggcctcaagattatgggataatatgcgtaagctcggcgaatgcaccgaagaggctcaccaaatgacccacgatggatatctgaagctctggcaactgagcaagccctcgctagcatcattcgatgcaatcttcgtcgatgaggcacaggactgcacaccagccatcatgaatattgtgttatcccagccttgcggaaagattttcgtgggggacccgcaccaacagatttacacctttaggggagcagtcaatgccctcttcactgtcccccacacccacgtgttctacctcacccagtccttccgttttggagttgaaattgcttatgttggagcaacaattctggatgtctgtaagagggtgcggaagaagacgctggtgggaggcaaccaccaatctggcattcgtggcgatgccaaggggcaagttgccttgctgagccggactaacgcaaatgtatttgacgaggctgtacgcgtgacagagggcgagttcccaagtcgtatccaccttatcgggggtattaagtcgtttgggctggaccgaattattgacatttggattctgctccagcccgaggaagaacgcagaaagcagaacctcgttatcaaggataaatttatcaggcgttgggtccataaggagggtttctctggattcaagcgctatgttaccgccgctgaggacaaagaattagaagccaaaatcgctgtggtggaaaagtataatattcgcatacccgaactcgtccagcgaattgaaaaatgtcatattgaggacctggattttgccgagtatatactgggaactgtgcataaagccaaggggctggaatttgacaccgttcacgtattggatgacttcgtgaaggtgccctgcgcaagacataatttgccgcagctgcctcacttccgggtggagtctttttccgaggatgaatggaatctgctgtatgtcgccgtcacaagggcaaaaaagcggctaatcatgaccaagtcactggagaacatcttgaccttggccggagagtattttctccaggccgaattaacttccaatgtgctgaaaaccggggtcgtccgatgctgtgtgggacaatgcaacaatgcaatacccgtagacaccgtactcacgatgaaaaagctccccatcacctactccaacaggaaggagaataaaggtgggtacctgtgtcattcttgtgctgaacagagaataggtcccttggctttcctgacagctagccccgaacaggtccgggcaatggagcggactgtggaaaatattgttttgcccagacacgaagcgctcctctttcttgtgttctag

SEQ ID NO: 253484 - DNA, 3132 bp, Artificial Sequence
  derived and/or modified sequence
atgagaagattcaagagaaagcacctgaccgccatcgactgccagcacctggccagaagccacctggccgtgacccagcccttcggccagagatggaccaacagagaccccaaccacggcctgtaccccaagcccagaaccaagagaggcagcagaggccagggcagccagagatgcatccccgagttcttcctggccggcaagcagccctgcaccaacgacatggccaagagcaacagcgtgggccaggacagctgccaggacagcgagggcgacatgatcttccccgccgagagcagctgcgccctgccccaggagggcagcgccggccccggcagccccggcagcgccccccccagcagaaagagaagctggagcagcgaggaggagagcaaccaggccaccggcaccagcagatgggacggcgtgagcaagaaggcccccagacaccacctgagcgtgccctgcaccagacccagagaggccagacaggaggccgaggacagcaccagcagactgagcgccgagagcggcgagaccgaccaggacgccggcgacgtgggccccgaccccatccccgacagctactacggcctgctgggcaccctgccctgccaggaggccctgagccacatctgcagcctgcccagcgaggtgctgagacacgtgttcgccttcctgcccgtggaggacctgtactggaacctgagcctggtgtgccacctgtggagagagatcatcagcgaccccctgttcatcccctggaagaagctgtaccacagatacctgatgaacgaggagcaggccgtgagcaaggtggacggcatcctgagcaactgcggcatcgagaaggagagcgacctgtgcgtgctgaacctgatcagatacaccgccaccaccaagtgcagccccagcgtggaccccgagagagtgctgtggagcctgagagaccaccccctgctgcccgaggccgaggcctgcgtgagacagcacctgcccgacctgtacgccgccgccggcggcgtgaacatctgggccctggtggccgccgtggtgctgctgagcagcagcgtgaacgacatccagagactgctgttctgcctgagaagacccagcagcaccgtgaccatgcccgacgtgaccgagaccctgtactgcatcgccgtgctgctgtacgccatgagagagaagggcatcaacatcagcaacagaatccactacaacatcttctactgcctgtacctgcaggagaacagctgcacccaggccaccaaggtgaaggaggagcccagcgtgtggcccggcaagaagaccatccagctgacccacgagcagcagctgatcctgaaccacaagatggagcccctgcaggtggtgaagatcatggccttcgccggcaccggcaagaccagcaccctggtgaagtacgccgagaagtggagccagagcagattcctgtacgtgaccttcaacaagagcatcgccaagcaggccgagagagtgttccccagcaacgtgatctgcaagaccttccacagcatggcctacggccacatcggcagaaagtaccagagcaagaagaagctgaacctgttcaagctgacccccttcatggtgaacagcgtgctggccgagggcaagggcggcttcatcagagccaagctggtgtgcaagaccctggagaacttcttcgccagcgccgacgaggagctgaccatcgaccacgtgcccatctggtgcaagaacagccagggccagagagtgatggtggagcagagcgagaagctgaacggcgtgctggaggccagcagactgtgggacaacatgagaaagctgggcgagtgcaccgaggaggcccaccagatgacccacgacggctacctgaagctgtggcagctgagcaagcccagcctggccagcttcgacgccatcttcgtggacgaggcccaggactgcacccccgccatcatgaacatcgtgctgagccagccctgcggcaagatcttcgtgggcgacccccaccagcagatctacaccttcagaggcgccgtgaacgccctgttcaccgtgccccacacccacgtgttctacctgacccagagcttcagattcggcgtggagatcgcctacgtgggcgccaccatcctggacgtgtgcaagagagtgagaaagaagaccctggtgggcggcaaccaccagagcggcatcagaggcgacgccaagggccaggtggccctgctgagcagaaccaacgccaacgtgttcgacgaggccgtgagagtgaccgagggcgagttccccagcagaatccacctgatcggcggcatcaagagcttcggcctggacagaatcatcgacatctggatcctgctgcagcccgaggaggagagaagaaagcagaacctggtgatcaaggacaagttcatcagaagatgggtgcacaaggagggcttcagcggcttcaagagatacgtgaccgccgccgaggacaaggagctggaggccaagatcgccgtggtggagaagtacaacatcagaatccccgagctggtgcagagaatcgagaagtgccacatcgaggacctggacttcgccgagtacatcctgggcaccgtgcacaaggccaagggcctggagttcgacaccgtgcacgtgctggacgacttcgtgaaggtgccctgcgccagacacaacctgccccagctgccccacttcagagtggagagcttcagcgaggacgagtggaacctgctgtacgtggccgtgaccagagccaagaagagactgatcatgaccaagagcctggagaacatcctgaccctggccggcgagtacttcctgcaggccgagctgaccagcaacgtgctgaagaccggcgtggtgagatgctgcgtgggccagtgcaacaacgccatccccgtggacaccgtgctgaccatgaagaagctgcccatcacctacagcaacagaaaggagaacaagggcggctacctgtgccacagctgcgccgagcagagaatcggccccctggccttcctgaccgccagccccgagcaggtgagagccatggagagaaccgtggagaacatcgtgctgcccagacacgaggccctgctgttcctggtgttctag

SEQ ID NO: 253485 - protein, 365 aa, Artificial Sequence
  derived and/or modified sequence
MELDFGHFDERDKTSRNMRGSRMNGLPSPTHSAHCSFYRTRTLQALSNEKKAKKVRFYRNGDRYFKGIVYAVSSDRFRSFDALLADLTRSLSDNINLPQGVRYIYTIDGSRKIGSMDELEEGESYVCSSDNFFKKVEYTKNVNPNWSVNVKTSANMKAPQSLASSNSAQARENKDFVRPKLVTIIRSGVKPRKAVRVLLNKKTAHSFEQVLTDITEAIKLETGVVKKLYTLDGKQVTCLHDFFGDDDVFIACGPEKFRYAQDDFSLDENECRVMKGNPSATAGPKASPTPQKTSAKSPGPMRRSKSPADSGNDQDANGTSSSQLSTPKSKQSPISTPTSPGSLRKHKDLYLPLSLDDSDSLGDSM

SEQ ID NO: 253486 - DNA, 1098 bp, Artificial Sequence
  derived and/or modified sequence
atggaattagactttggacactttgacgagcgcgataagactagcaggaatatgcgggggtccaggatgaatggcctgccaagtcctacccactcagcccactgttccttctatagaaccaggacccttcaggctctgtcaaacgagaaaaaggccaaaaaggtgagattttatagaaacggcgatcgctatttcaaggggatcgtctacgcggtaagttccgataggttccggagctttgatgcactgctcgctgacctcacgcggtctctgtcagataatattaatttgccccagggagtgagatatatctacacaattgatggaagccgtaaaattggtagcatggatgagctggaagagggcgagagctacgtgtgttcttcggataacttcttcaagaaagtggaatacaccaaaaacgtgaaccccaactggtctgtcaacgtgaaaacttccgccaacatgaaagccccacagtctcttgcatctagtaacagcgcccaggccagagagaacaaagattttgtgcggcccaaactcgtgaccataatcagaagcggagttaagccaaggaaggccgtccgcgtattgctgaacaagaagactgcacattcgtttgaacaggtgctcacggatattaccgaagctattaagctcgagaccggcgtggtgaaaaagctctatactctcgatggcaagcaggtcacatgtctgcatgacttttttggcgacgatgatgtattcatagcttgcggaccggagaagtttcgctacgcacaggacgatttttctctggacgaaaacgagtgtagagtaatgaaaggcaatccgagcgccactgcgggacccaaagcctcaccaactccccagaaaacgagtgctaaatcgcccggcccgatgcgccggtccaagtccccggcagatagcggtaatgaccaggacgcaaacggaaccagctcctcacagctgtctaccccgaaatctaagcagagcccaatcagcacccctacctcaccaggcagccttcgcaagcataaagatctctacctcccgctgtcccttgacgatagcgacagcctcggggattctatgtag

SEQ ID NO: 253487 - DNA, 1098 bp, Artificial Sequence
  derived and/or modified sequence
atggaattggatttcggccacttcgatgagagagataagactagtaggaatatgcgtggatctaggatgaatggtctcccctcccccacgcactccgcacactgttccttctacagaacgcgcacgttacaggccctgtcgaatgaaaagaaagctaagaaagtgcgattctataggaatggcgatagatattttaagggcatcgtgtatgctgtctcgagtgatcgatttcgctccttcgatgcgttactggccgatctaacacggtctttaagtgacaatatcaacctgcctcagggcgtccgatacatctacacaattgatggtagtcgaaaaatagggtcaatggacgagcttgaagaaggcgaatcctatgtgtgctctagcgacaattttttcaaaaaggtcgaatatacaaaaaatgtcaaccccaattggtctgtgaacgtgaagacgtcggctaatatgaaggccccgcagtctctggccagcagcaactctgctcaagcaagggaaaataaagacttcgtacgaccaaagcttgtgacgattattagaagcggcgtgaagccgagaaaagctgtgagagtgctcctgaataagaagacagcacactccttcgaacaagtcttaaccgacatcacggaagctattaaactggagaccggtgtggtgaagaaactgtatactctggacggcaaacaggtgacttgtttgcatgacttttttggagacgatgacgtgtttatcgcctgcgggccagagaagtttcgctacgcacaggatgatttttcactggacgaaaacgagtgtcgagttatgaaagggaatccatctgctacagcgggcccaaaagcatccccaaccccacagaaaactagcgccaagtcgcctggcccgatgcgcagatctaaaagccccgccgactctgggaatgaccaggacgccaatggcaccagcagttcccagctatctaccccaaagtcaaaacagtcccccatcagcacccccactagcccaggttccctgcgcaagcacaaagacctttatttaccactgagcctcgatgatagcgactcgttaggggacagcatgtag

SEQ ID NO: 253488 - DNA, 1098 bp, Artificial Sequence
  derived and/or modified sequence
atggagctggactttggccactttgatgagcgggacaagaccagcaggaacatgaggggcagcaggatgaatggcctgcccagccccacccacagcgcccactgcagcttctaccgcaccaggaccctgcaggccctgagcaatgagaagaaggccaagaaggtgcgcttctacagaaatggagaccgctacttcaagggcatcgtgtatgctgtgtccagtgaccgcttccgcagctttgatgccctgctggccgacctgaccaggagcctgagtgacaacatcaacctgccccagggcgtgcgctacatctacaccattgatggcagcaggaagattggctccatggatgagctggaggagggggagagctatgtgtgcagcagtgacaacttcttcaagaaggtggagtacaccaagaatgtgaaccccaactggagcgtgaatgtgaagaccagcgccaacatgaaggccccccagagcctggccagcagcaacagcgcccaggcccgggagaacaaggactttgtgcggcccaagctggtgaccatcatccgctctggagtgaagcccaggaaggctgtgcgggtgctgctgaacaagaagacagcccacagctttgagcaggtgctgacagacatcacagaggccatcaagctggagaccggggtggtgaagaagctgtacaccctggatggcaagcaggtgacctgcctgcatgacttctttggagatgatgatgtgttcatcgcctgtggccctgagaagttccgctatgcccaggatgacttcagcctggatgaaaatgaatgtcgggtgatgaagggcaaccccagcgccacagctggccccaaggccagccccaccccccagaagaccagcgccaagagccctggccccatgaggaggagcaagagccctgctgacagcggaaatgaccaggatgccaacggcaccagcagcagccagctgagcacccccaagagcaagcagagccccatcagcacccccaccagccctggcagcctgaggaagcacaaggacctgtacctgcccctgagcctggatgacagcgacagcctgggggacagcatgtag

SEQ ID NO: 253489 - DNA, 1098 bp, Artificial Sequence
  derived and/or modified sequence
atggagctggacttcggccacttcgacgagcgggacaagaccagccggaacatgcgtggatctagaatgaatgggctgcccagcccaactcatagcgcccactgtagcttctaccgcacccggaccctccaggcgttgagcaacgaaaaaaaagccaagaaagtgcggttctaccgcaacggcgaccggtatttcaagggtattgtctatgcggtgtcctccgacagattcagatcatttgatgcgttgctcgctgatttgactcgttcactcagcgacaacattaatttgccacagggcgtgcgttatatatacaccatcgatgggagccggaagataggctccatggatgaactggaggaaggggagagctatgtctgctcttcagataacttctttaagaaagtcgaatacaccaaaaacgtgaaccctaactggagcgtgaacgtgaaaacgagtgcaaatatgaaggccccacagagcttagcatcttccaactctgcgcaggcacgtgagaataaggactttgtcagacctaaactcgtcacaatcatccggtccggcgttaagccgcggaaggctgtgagagtactgttgaataaaaaaactgctcattcctttgaacaggtactgacagacatcaccgaggctattaaactcgagacaggagtcgtgaaaaagctttacacccttgatggcaaacaagtaacatgcctgcatgacttctttggggatgatgacgtcttcattgcctgcgggccagaaaaatttcggtatgctcaggacgacttcagcctggacgagaatgaatgcagagtcatgaagggcaatccttcagccaccgccggccccaaagcttccccaacaccacaaaagacatcagccaagtctcccggccctatgcgtcgctcgaagagtcccgcagactctgggaatgaccaggatgccaatggtaccagctcatcccagctgagtacacctaaaagtaagcaatcccccatttcaacccccacatcccctggctcgctccgcaaacataaggacctctacctccctctgtcccttgacgactccgacagcctgggtgactcgatgtag

SEQ ID NO: 253490 - DNA, 1098 bp, Artificial Sequence
  derived and/or modified sequence
atggagctggacttcggccacttcgacgagcgggacaagaccagccggaatatgagaggcagtcgcatgaatgggctaccctcgcccacccattccgcccactgtagtttctaccggacacgaacccttcaggccctgagcaatgagaagaaggccaagaaagtacgattctatcggaacggtgatcgatacttcaaaggtattgtctacgccgtgtcttcagaccggttccgaagttttgacgccctgctcgccgacttaaccaggagtcttagtgataatatcaatctgccccaaggtgtcagatacatttataccatagacgggtcccgcaaaataggcagtatggacgaactagaagaaggggagtcctacgtttgtagctctgacaactttttcaaaaaagtcgaatataccaagaatgtgaaccccaattggagcgtcaacgtgaaaacgagcgcaaatatgaaggctccccaaagtctggcttcttccaactccgcacaggcgcgggagaacaaggatttcgtgaggcctaagctggtgacgattatcagatccggggtgaagcctagaaaagccgtccgcgtgttgctgaacaagaagacagcccacagcttcgagcaggtcttgaccgacatcaccgaagcaatcaaattagaaactggcgtagtaaagaaattgtacaccctcgatggaaaacaggttacatgcctgcacgatttttttggcgatgacgatgtgtttatagcctgtggccccgaaaaatttcgctatgcccaagacgatttcagtcttgacgagaacgagtgtcgtgttatgaagggcaatccctcggccactgcagggccgaaagcatcccccactccacagaaaacgtcagcaaaatcaccagggccgatgcggagatcaaagagtcctgctgattccggtaacgaccaggacgccaatggtaccagcagcagccagctatccacccccaaaagcaaacagagccccataagcacaccaacctctccagggagtcttcgtaagcacaaggatctctatcttcccctttctctggatgattcagattctcttggcgattctatgtag

SEQ ID NO: 253491 - DNA, 1098 bp, Artificial Sequence
  derived and/or modified sequence
atggaacttgactttgggcactttgatgagcgggacaaaacgagcaggaatatgcggggaagcaggatgaatgggttgccctctcctacccatagtgcgcactgttcgttctatcgtaccagaaccctccaagcactcagtaacgagaaaaaagccaagaaggttagattttatcgaaacggtgatcgctatttcaaggggatagtatacgcagtatcatctgatagatttaggtcattcgatgcactcctggcagacctgaccagatcactgtccgataatatcaatttaccacagggagtccgctatatatacaccattgatggcagtagaaaaatcggatctatggatgaacttgaggagggggaatcttacgtgtgttcctcggataacttttttaaaaaagttgagtatacgaagaatgtcaatccaaactggagcgtaaatgtcaagacgtccgcaaacatgaaggcgccacaatctctcgcaagttctaattctgcgcaggctcgcgaaaataaggatttcgtgcgacccaagcttgtgactattatcagatctggagtgaagcctagaaaagctgttcgggtgctgctgaacaagaagacggcgcactccttcgagcaggtgctgaccgacataaccgaggcaattaagctcgagacgggggtcgttaaaaaactatatacgcttgacggcaaacaggtcacctgtcttcatgacttcttcggagacgacgatgtgtttattgcttgcggccctgagaagtttcggtatgcgcaggatgacttctcactggatgagaatgagtgtcgagtgatgaagggtaatccttctgctaccgccggtcctaaggcctcgcccacaccccaaaaaacatcggccaaaagccctggtccaatgaggaggagcaagtcccctgcggacagtgggaacgatcaggacgcgaatggcacttccagcagtcagctgagcacacctaaaagcaaacagtcccccatctccacccccacatcccccggttctctgcgcaaacataaggacttatacctgcctctctctctggatgattcagactctttgggcgatagcatgtag

SEQ ID NO: 253492 - DNA, 1098 bp, Artificial Sequence
  derived and/or modified sequence
atggagttggactttggccactttgacgagcgagataaaacgagtcgaaatatgaggggctctcgaatgaacggcttaccctccccaactcacagtgctcactgctctttctatagaaccaggaccctgcaggctttgagcaacgaaaagaaagcaaagaaggttcgtttctaccgcaacggcgaccgctattttaaggggatcgtgtatgcagtctctagcgatagattccgctctttcgacgctctgttagctgatctgactcgcagtcttagtgacaatattaacctgccccagggtgtgcgctacatctatacaattgatggcagccggaagatcggttcaatggacgagttagaagaaggggaatcctatgtctgttcctctgacaatttttttaaaaaagtggagtacaccaagaatgtgaacccaaactggtctgtgaacgtgaaaacgtcggccaatatgaaagcccctcagtctcttgccagctctaatagtgcccaggccagggaaaataaggactttgttcggcctaagctggtgaccatcatccggtctggcgtgaagcctcggaaggcagtccgtgtcctcctcaataagaaaacggcacatagtttcgagcaggtgctcactgatatcacagaagccatcaaacttgaaaccggcgtagtcaagaagctgtataccctagacgggaagcaagtgacctgcctacacgactttttcggagatgatgacgtcttcatcgcctgtggaccggagaagtttcggtatgctcaggatgatttctccctcgacgagaatgagtgtagagtgatgaagggaaacccgtcagccacggctggtcctaaggcgagtccgaccccacagaaaactagcgccaagagccccggtccaatgagacgcagcaaaagccctgcagactcaggcaatgaccaggacgctaatggcacttcatcgagtcaacttagcacacccaagagcaagcagtcaccgataagtaccccgaccagccctggctcactgcgcaaacacaaagacctgtatctaccccttagcctggatgattccgactcattgggggactccatgtag

SEQ ID NO: 253493 - DNA, 1098 bp, Artificial Sequence
  derived and/or modified sequence
atggagctggacttcggccacttcgacgagagagacaagaccagcagaaacatgagaggcagcagaatgaacggcctgcccagccccacccacagcgcccactgcagcttctacagaaccagaaccctgcaggccctgagcaacgagaagaaggccaagaaggtgagattctacagaaacggcgacagatacttcaagggcatcgtgtacgccgtgagcagcgacagattcagaagcttcgacgccctgctggccgacctgaccagaagcctgagcgacaacatcaacctgccccagggcgtgagatacatctacaccatcgacggcagcagaaagatcggcagcatggacgagctggaggagggcgagagctacgtgtgcagcagcgacaacttcttcaagaaggtggagtacaccaagaacgtgaaccccaactggagcgtgaacgtgaagaccagcgccaacatgaaggccccccagagcctggccagcagcaacagcgcccaggccagagagaacaaggacttcgtgagacccaagctggtgaccatcatcagaagcggcgtgaagcccagaaaggccgtgagagtgctgctgaacaagaagaccgcccacagcttcgagcaggtgctgaccgacatcaccgaggccatcaagctggagaccggcgtggtgaagaagctgtacaccctggacggcaagcaggtgacctgcctgcacgacttcttcggcgacgacgacgtgttcatcgcctgcggccccgagaagttcagatacgcccaggacgacttcagcctggacgagaacgagtgcagagtgatgaagggcaaccccagcgccaccgccggccccaaggccagccccaccccccagaagaccagcgccaagagccccggccccatgagaagaagcaagagccccgccgacagcggcaacgaccaggacgccaacggcaccagcagcagccagctgagcacccccaagagcaagcagagccccatcagcacccccaccagccccggcagcctgagaaagcacaaggacctgtacctgcccctgagcctggacgacagcgacagcctgggcgacagcatgtag

SEQ ID NO: 253494 - DNA, 2981 bp, Artificial Sequence
  derived and/or modified sequence
gagattggttttctttctctcagcatctccacccaaccagcagaaaaccgcttctacctgggattttcctttggaaaagtctctgaggttccaccaaaatatggaacttgattttggacactttgacgaaagagataagacatccaggaacatgcgaggctcccggatgaatgggttgcctagccccactcacagcgcccactgtagcttctaccgaaccagaaccttgcaggcactgagtaatgagaagaaagccaagaaggtacgtttctaccgcaatggggaccgctacttcaaggggattgtgtacgctgtgtcctctgaccgttttcgcagctttgacgccttgctggctgacctgacgcgatctctgtctgacaacatcaacctgcctcagggagtgcgttacatttacaccattgatggatccaggaagatcggaagcatggatgaactggaggaaggggaaagctatgtctgttcctcagacaacttctttaaaaaggtggagtacaccaagaatgtcaatcccaactggtctgtcaacgtaaaaacatctgccaatatgaaagccccccagtccttggctagcagcaacagtgcacaggccagggagaacaaggactttgtgcgccccaagctggttaccatcatccgcagtggggtgaagcctcggaaggctgtgcgtgtgcttctgaacaagaagacagcccactcttttgagcaagtcctcactgatatcacagaagccatcaaactggagaccggggttgtcaaaaaactctacactctggatggaaaacaggtaacttgtctccatgatttctttggtgatgatgatgtgtttattgcctgtggtcctgaaaaatttcgctatgctcaggatgatttttctctggatgaaaatgaatgccgagtcatgaagggaaacccatcagccacagctggcccaaaggcatccccaacacctcagaagacttcagccaagagccctggtcctatgcgccgaagcaagtctccagctgactcaggtaacgaccaagacgcaaacggaacctccagcagccagctctctacccccaagtctaagcagtctcccatctctacgcccaccagtcctggcagcctccggaagcacaaggacctgtacctgcctctgtccttggatgactcggactcgcttggtgattccatgtaaaggaggggagagtgctcagagtccagagtacaaatccaagcctatcattgtagtagggtacttctgctcaagtgtccaacagggctattggtgctttcaagtttttattttgttgttgttgttattttgaaaaacacattgtaatatgttgggtttattttcctgtgatttctcctctgggccactgatccacagttaccaattatgagagatagattgataaccatcctttggggcagcattccagggatgcaaaatgtgctagtccatgacctttcaatggaaagcttaggtgcctgcgttatatttgccctgtctaattttgcccatacagtcttccttctgtagagggctgtttacatatacagcacttaaaatgtttgtgtgggaaaaaaaaaactcattggcagatccaagaatgacaaacacaagtgccccttttctctggatctcaagaatggtggaggaccctggaaggacagcaaggcagctccccagcctcactcttcactcctgattgaggcccgggtttgttgtccagcaccaattctggctgtcaatggggagaaataaaccaacaacttataattgtgacaccagatgcttaggatcctggtgctgggttagctaagagaatagacagaattggaaaatactgcagacatttccgaagagtttataaagcacagtgaattcctggtcaatctctccactgaggcaatttggaatcaataagcaattgataatagtttggagtaagggacttcatatacctgattcctctagaaggctgtctaacataccacatgattacatgaactgtatggtatccatctatctctgttctattgaatgccttgttaacagccaacactgaaaacactgtgagaatttgttttcaggtctgacacctttcagtctctttttatagcaagaaatcaatatcctttttataaaaattcatgtctgtatttcaggagcaaactcttcaggctccttttttataaactggtgatttttcttttgtctaaaaaacacatgaagaaaatttaccaaaaaaaaaaaaaaaagcagaagaataatgtagtttagaaattatgctgtcactgccaaacagtaacctccaggagaaaacaagatgaatagcagaggccaattcaatagaatcagttttttgatagctttttaacagttatgcttgcattaataatttcaatgtggaccagacattctaattatattttaaatgaaatgttacagcatattttaagcaactctttttatctataatcctaatatttcatactgaagacacagaaatctttcacttgtctttaacattagaaaggatttctctttactaaggactgatcatttgaaatagttttcagtcttttgagatacaggtttataacactgcttttttttttctgtaatcatagcccataatggcaaagacaactaaatttaagtgaaggtcatgcatgccaattctgtgtttgcttttagcagatatgaagatttccttatttctttgtaattgtgcagatattttgaaaggcacagcattcgaagccaagctgctgtttggctactgaatggcttgcagttgttcctccactctaaatggaatgagcttgctgtgtgtgtgtgtggtggtggtgggagggggtggtgcatgtgtgtgtgtgtgtgtgcatctgcagctgcttcaaaattaggaaatactacaggacacccctgtaatggattggtggcaactgggtggcactgctgatgtgca

SEQ ID NO: 253495 - DNA, 9069 bp, Artificial Sequence
  derived and/or modified sequence
tttctttctctcagcatctccacccaaccagcagaaaaccggtctctgaggttccaccaaaatatggaacttgattttggacactttgacgaaagagataagacatccaggaacatgcgaggctcccggatgaatgggttgcctagccccactcacagcgcccactgtagcttctaccgaaccagaaccttgcaggcactgagtaatgagaagaaagccaagaaggtacgtttctaccgcaatggggaccgctacttcaaggggattgtgtacgctgtgtcctctgaccgttttcgcagctttgacgccttgctggctgacctgacgcgatctctgtctgacaacatcaacctgcctcagggagtgcgttacatttacaccattgatggatccaggaagatcggaagcatggatgaactggaggaaggggaaagctatgtctgttcctcagacaacttctttaaaaaggtggagtacaccaagaatgtcaatcccaactggtctgtcaacgtaaaaacatctgccaatatgaaagccccccagtccttggctagcagcaacagtgcacaggccagggagaacaaggactttgtgcgccccaagctggttaccatcatccgcagtggggtgaagcctcggaaggctgtgcgtgtgcttctgaacaagaagacagcccactcttttgagcaagtcctcactgatatcacagaagccatcaaactggagaccggggttgtcaaaaaactctacactctggatggaaaacaggtaacttgtctccatgatttctttggtgatgatgatgtgtttattgcctgtggtcctgaaaaatttcgctatgctcaggatgatttttctctggatgaaaatgaatgccgagtcatgaagggaaacccatcagccacagctggcccaaaggcatccccaacacctcagaagacttcagccaagagccctggtcctatgcgccgaagcaagtctccagctgactcaggtaacgaccaagacgcaaacggaacctccagcagccagctctctacccccaagtctaagcagtctcccatctctacgcccaccagtcctggcagcctccggaagcacaaggacctgtacctgcctctgtccttggatgactcggactcgcttggtgattccatgtaaaggaggggagagtgctcagagtccagagtacaaatccaagcctatcattgtagtagggtacttctgctcaagtgtccaacagggctattggtgctttcaagtttttattttgttgttgttgttattttgaaaaacacattgtaatatgttgggtttattttcctgtgatttctcctctgggccactgatccacagttaccaattatgagagatagattgataaccatcctttggggcagcattccagggatgcaaaatgtgctagtccatgacctttcaatggaaagcttaggtgcctgcgttatatttgccctgtctaattttgcccatacagtcttccttctgtagagggctgtttacatatacagcacttaaaatgtttgtgtgggaaaaaaaaaactcattggcagatccaagaatgacaaacacaagtgccccttttctctggatctcaagaatggtggaggaccctggaaggacagcaaggcagctccccagcctcactcttcactcctgattgaggcccgggtttgttgtccagcaccaattctggctgtcaatggggagaaataaaccaacaacttataattgtgacaccagatgcttaggatcctggtgctgggttagctaagagaatagacagaattggaaaatactgcagacatttccgaagagtttataaagcacagtgaattcctggtcaatctctccactgaggcaatttggaatcaataagcaattgataatagtttggagtaagggacttcatatacctgattcctctagaaggctgtctaacataccacatgattacatgaactgtatggtatccatctatctctgttctattgaatgccttgttaacagccaacactgaaaacactgtgagaatttgttttcaggtctgacacctttcagtctctttttatagcaagaaatcaatatcctttttataaaaattcatgtctgtatttcaggagcaaactcttcaggctccttttttataaactggtgatttttcttttgtctaaaaaacacatgaagaaaatttaccaaaaaaaaaaaaaaaagcagaagaataatgtagtttagaaattatgctgtcactgccaaacagtaacctccaggagaaaacaagatgaatagcagaggccaattcaatagaatcagttttttgatagctttttaacagttatgcttgcattaataatttcaatgtggaccagacattctaattatattttaaatgaaatgttacagcatattttaagcaactctttttatctataatcctaatatttcatactgaagacacagaaatctttcacttgtctttaacattagaaaggatttctctttactaaggactgatcatttgaaatagttttcagtcttttgagatacaggtttataacactgcttttttttttctgtaatcatagcccataatggcaaagacaactaaatttaagtgaaggtcatgcatgccaattctgtgtttgcttttagcagatatgaagatttccttatttctttgtaattgtgcagatattttgaaaggcacagcattcgaagccaagctgctgtttggctactgaatggcttgcagttgttcctccactctaaatggaatgagcttgctgtgtgtgtgtgtggtggtggtgggagggggtggtgcatgtgtgtgtgtgtgtgtgcatctgcagctgcttcaaaattaggaaatactacaggacacccctgtaatggattggtggcaactgggtggcactgctgatgtgcactgtgtaggggggaacccagtggtggtggggtagctcagatgcccctagacaagcttcagatgtctgtagctaccagaaacattttcggttcaggaaaagtgagatgatggtagtactggtttctggtgaaattgaagaaccccaaatgatgaggatctctttttgccccctctcctttttttgtagacccattcaaaaccattaataagcccattttactaagcccctatttctttctagaagctcagggttttcttagtgcctcccagaacattttgtagttaattgggaaaaagtgatacttggattagggggtgtgggcataaagaatggtgggaggcctgattttaaacttcaggccagaacccccaatgactccacccatagtctcactttaggtctcatttagtccatcacctttattttaagttgaggaagtggaggctggtaaagagcaggaccagaggaagaatccagatttccttatgcttgggcctcacactagctctctgagtatttccttgattgcggtatatgtactactagaaaataccaaatggatatattttctttaggataacctttgaaccaacaatcttcaataacaatagtacatcttccatcttacttttaatcgagtataaggaaatgtttctttatggccattttggagggagcaggggatgaggcttggcatagtccaaaatttaagtctccaataattaattgcattttaaattggcccactttcaaggcaattttttttgtgtgtctgtaactgagctcctccacccctgtcattcacttccaattttacccaatccaattttagcactcaagttccattgtgttaatttctgcacggtcaacaaacatcaagtcagcaagcatttgccaccactccctatacttctccctccttcttacacacacacacacacacacacacacaatccatctcttgcttgttcctacctcctgatttttcttccctacagaaatagaaatagggacaaagaaggggaaaatgtatatattggggctgggctgaacaactaacttcataagtagtattaactaggggtaaattgagagaaaagctccttttctcttcactgttttggaaaggatagccattagcatgactgctttgtgtccttatggactttagtattagcctagattgaattatagcgttttctagctggaaggaaccttaagatcacatcatctactcctctactccaaatttctcattcttcaggccaggaaaccgagacacagaggtaaagtaatttccccaaggtcacacagctggctggggcaggattgggtttacaacccacatctcctggctcttattccagggccttttcccactaagtagtattgccttccattaggctcctgagagttatttctcagggtcatgttgcatcttggagccacatgctgctgccctgatctcagtgggaaatccacccagcaacctaatacagccccttttccctgcattcacctggttcccatccacatgggttgcagatgtccttgaagagagtgaggcattgagggccaataggagcaatggggtccctggccttgtccatctgattcaggagatcactgctccatcgtgaggagccctctgaatagccccccactgaatgcttgccttgcccaaatggaatggaggaagattgattttctccatcagttcaccttgtgtcatctcataatggttggtctttccaggctgagggaaatgtttcttgtttccagagtagaaaaagaaagagtggaacaatagctttgttcatcctaactttctgagatggcttttcaacattttaaaaaaactagtgtggctaccattcactggcaatgatttcttttagaatatgggagtaagatgagctagagaaaataacctggtctcactgtggttgccctcatccacaatgtccccaaagccatcctgctctgatgaggacaatttccaggtataagcaaggggctttgtgacaaaaatgtaccctggctgatgttaaacattggctcctgtgtttgcaccaaaatagcaagctgtgtgctctatacactcttcccatcgtcttgtgtacactgctcctgtggccttccacagcagaaaccagggcaaaagggtccaaacacatggttttccttgctgcaaggctcttcctgggaactaagggggtatttattagttcagttctaagagacctccttctgggcttaccccactcctcaggtacttctctctccttcctccttctcctccacagtcacaagtaaccaaggaacctgaaagtggatgtgtagctatttgaagaaggcaaggaaccctgagattcttctttgaatcctctagtccaagtcttagaccagtgattggtgcttaccttgaacaaaattttgtctgtgttcctaatcccttcaatactctgggtacaatgctcccaatcaccctgcacatttgattctaaatggcttttattttttaaaaatccatatccctaggacaagagaacaggatgcctatatccccaaaatgagctccaggacactgatgggaatgatcccaaagatcaccccacctcagaaacgtctgtgccaagagacttccccagatagaaacactgggacagtggtttgaacgacttcttttatggttgtccagtttgctatggaaataaaaggcattgattttttaaaaagatgattggaacctgtctttggccacatagggccacttggatccatttccaggccttactcatatattgccttcactgaagggctttggctttaagtcccagactggtctcccaagtgaaccataagtgttttggagctcatctggggtgaggcatgagaatgttgccccatctatcccttcaggaaaaggtgccttccctccctttctcctaaagcctggtccccagaaattgtttttgtctccaaaagtctagtatggtctttatacacccagactcttagtgttgcgtcctgccttgtttccttgttaaggatctatgcagacctcccgctttggcttagctagcgtgacattggctatcatttgacaagactaacttttttttttttttttttttgactgagtctccctctgtcacctaggctggagtgcagtggcacaatcttggctcgctgcaaccttcacccttcacctcccaggtcgaagcgattctcctgcctcagtctcccgagtagctgggattacaggcgtgcgccaccaaatctggctatttttttattattattatttttagtagagatggggtttcaccatgttggccagactggtcttgaactcttggcctcaaattatctgcccacctcggcctcccaaagtgctgggattacaggcatgagccaccatgcccagctgacaagactaattttttatcccttggtttattggcttcaacatcttctggaatcagaggtgattttttcttaccttggatgcctgagactaggggagtatagaattccaattggtaattaaggcatctttctgctcctgatcagaagggcaggttagttgggagaggtcagatggcacaacagaagtcaccttgtaagtaaggcaaagacttgaaggcattagcgtttctcattactaggtcaataacctgagggaatcaatggctttttgccgctctacctcttgtgtatctctttgacttttctttctctgtctagtttcctctgttctcagtttatattctatgttatcagtctctctttccacagtacaaacatccatcctttctcctgtgcaattctgtctctccctcttattatctttatttgtactttttccttcctccctgtctaggcattgggcatgtgcctcttcttagcctgtgattttgccttgggactgatgataaattatttccagattcaatcagccctggtcctaccccagtccaatcagaagtatgttggtgggaatcaacctgatcctggccctttcttcttctccattttcattcgtaatccccctcagcagatctttacaagcagtttccttatagctcatgtatctttaggtctttgccttccaagcactgtacagaatactttgtggttcctttttagtctgacattttgtggagcagtgaagcgtgctcagagacataatcagctgaagagaaaaaatccacccatggatttatatcagctaaatactaataattgattttgtttgatgtgcccataatttttaaagctgcaatataatataatgagggaccacaggtaatttctcctgtcatttgttttggctggatgggggtgggggagtaattgcttaaagttttaccattacacattaaactctctataataatcttgtttggggcttgctaactgttgagctgttttaactaaactggtaggcaatcggagttgatttaaatgaaaagataatttaacaaatctatactataaaaagagacatttgcttaattgacatgtattttttccttctgagtcacctaaacatttactcttgacaccaactgttcatgatactgaatagacagtccatataagagaaattagtggacctaaagaagccagattgtaggtgttaatttattaaacagagtgcaaagcccttggaaatgtcactgcttggcaataccatatggaatgccaaaatttacaatgacttttctttataagttatccaaaagggatttgaacaagtaagaggttatgccaaaatgtctccaatgtatggtcctgtaatatattgcagcttgaagccaatgatcccttatgacttgtatacaactaatgcatgttttattgaattttgcatttcccacgtgtggtaagttctttaaaatgtttttgatcacctttttgtgccattaaacttgtacagaaaatgtttttatggccattttcaaagggagaaagtttaaaatggaaacagcccaccctttctgccctatagctgtagttagaattgagtacctgtagcaaaacagctgtaattggtggttgtagtgttagaggtgttagcttgctagtgactagctttggagagtaaatgcatggtattgtacatcacatttcttaactcgttttaacctctgaaaagaatatattcttctttgtagtccttcttcccacccccttgccctctccctctccctgctcccagttgtcttacagttgtaaatatctgatttgaggcccaataactcttgccaagtaaagtcagcaaacaacaaacaaaccaaaatgtggggaaaaggcatttctcaaccatctctcagcagttattgatcatttcttaaggaacagcattgtgatcaaagactcaactttacgtaaaaatcagtggtaaattggggttgtatttggccatttgattacatttcaggattgaatagttttcagaatcacatgtaatccaaagacagtaggtagtgatgtcccttatccctgcagctgttttaagatagagacctcagaagactctgcttgaccgatgaccaataattatttgaaaaaaaaagaaaaaatgagagaaataaaacagatatttaagaactttagccacctatttagaatagttatagccagaaaaaaaaacaagggcatgagttcaaatgcattactatcagtgtcctaggcaatacctaacctactctgaaattgtgattcaaaagcagtatttcaagaggcattctccttttttggtttgctgaccccacttggactggtaggtttggtgaggcccccataaaccagctggagcagacccttttcatctcctgtgcctgtaacacccctcttcccccaccccctccgcaattcaatgagggctttcttgggtcagaggacttcaaggttgtctagagaagtttgccatgtgtgtaaggtgctgtgaactgtgagtgctgaagattcgcagcattcaataccaggcagccaaagagctgctcttgcaattattttggctctcaagctctgttcttcatcgcattctcatttctgtgtacatttgcaagatgtgtgtaatgtcattttccaaaaataaaatttgatttcaata

SEQ ID NO: 253496 - protein, 113 aa, Artificial Sequence
  derived and/or modified sequence
MELDFGHFDERDKTSRNMRGSRMNGLPSPTHSAHCSFYRTRTLQALSNEKKAKKVRFYRNGDRYFKGIVYAVSSDRFRSFDALLADLTRSLSDNINLPQGVRYIYTIDGSRKI

SEQ ID NO: 253497 - DNA, 1083 bp, Artificial Sequence
  derived and/or modified sequence
atggagctcgatttcgggcatttcgatgagcgcgataaaactagcagaaacatgcgggggagccgcatgaatggattaccttcacccacccacagcgctcactgttcgttctatcggacacgcaccctgcaggcccttagtaatgagaagaaggcgaagaaagttaggttttatcgcaatggtgatcggtatttcaagggcatcgtgtacgctgtcagcagtgatagattcagatctttcgacgcattgttagctgacttaacccgctcactatcggacaatattaatctgcctcagggggtaaggtatatttacacgatagatggatcccgcaaaattggaagcatggatgagctggaagagggcgagagttacgtctgttcctcagacaacttttttaaaaaggtcgagtacactaagaacgtaaatccgaactggtctgttaatgtaaagacgtcagctaacatgaaagcccctcagagcctggccagttctaactctgcccaggcccgcgagaataaagatttcgtgagacctaaactagttacgatcatccgctctggtgtcaaaccaagaaaggcagtgagggtactcctgaacaaaaagacagcacactctttcgagcaggtgctaacggacattactgaagccatcaaattggaaaccggggtagtgaaaaagctctataccctggacgggaagcaagtcacttgtctgcatgatttttttggggacgatgacgtctttattgcttgtggtcctgagaagttcaggtacgctcaggacgacttttctctggatgaaaatgagtgcagggtcatgaagggcaatccatctgctacagcaggccccaaggcttctccaaccccgcagaagacctctgccaagagccctggtccaatgagacgctcaaagagccctgccgactcagccaatggcaccagctcctctcagttgtctacacccaagtctaagcaatcccccatatccaccccaacatcgcccgggtcactcagaaaacataaggacctgtatctccccttgtcgctggatgatagtgatagcttgggcgattctatgtag

SEQ ID NO: 253498 - DNA, 1083 bp, Artificial Sequence
  derived and/or modified sequence
atggaactcgatttcggccacttcgacgaaagggacaagacctccagaaatatgagaggaagtaggatgaatggactcccatcccccacgcactcagcccactgtagtttctaccggactcgcaccctgcaagctctgtctaacgaaaaaaaggctaagaaggtccggttttaccgcaacggggatcgctattttaagggaatcgtctatgccgtgtcgagcgaccgctttcgcagctttgacgctcttttggcggatttgacacgatcactctctgataatattaatctgccacagggcgtccgttacatatacaccattgatggctctcgtaagatcggatctatggatgaactggaggagggtgagtcgtacgtgtgctctagcgataactttttcaagaaagttgagtacaccaaaaatgtcaaccccaattggtccgttaacgtcaaaacctcggccaacatgaaggcgcctcagagcctggcttccagtaacagtgcccaggcaagagagaacaaagacttcgtgagaccaaagttggtaactatcatacggtcaggcgtaaagcctaggaaagcggtgagagtcctgctcaacaaaaagactgcacatagctttgagcaggtgttaactgatattaccgaggcaatcaagttggaaacgggcgtggtgaagaaactttatacactggatggcaagcaggtgacatgcctacacgacttcttcggcgatgacgatgtctttatcgcttgtggtccagagaagtttaggtatgcacaggatgattttagcctggatgagaatgagtgtagagtgatgaaggggaatccatctgcaactgcaggtccaaaagcatcccctacgccccaaaaaactagtgccaaatctcccggacccatgcgcaggtccaagagccctgcagacagcgcgaatggtacttcctccagtcagctgtcaacccctaaatccaagcagtctcctatttccaccccaaccagcccaggttctctgcgcaagcacaaagacttatacctgcctctgagcctggatgattccgactcactgggtgattccatgtag

SEQ ID NO: 253499 - DNA, 1083 bp, Artificial Sequence
  derived and/or modified sequence
atggagctggactttggccactttgatgagcgggacaagaccagcaggaacatgaggggcagcaggatgaatggcctgcccagccccacccacagcgcccactgcagcttctaccgcaccaggaccctgcaggccctgagcaatgagaagaaggccaagaaggtgcgcttctacagaaatggagaccgctacttcaagggcatcgtgtatgctgtgtccagtgaccgcttccgcagctttgatgccctgctggccgacctgaccaggagcctgagtgacaacatcaacctgccccagggcgtgcgctacatctacaccattgatggcagcaggaagattggctccatggatgagctggaggagggggagagctatgtgtgcagcagtgacaacttcttcaagaaggtggagtacaccaagaatgtgaaccccaactggagcgtgaatgtgaagaccagcgccaacatgaaggccccccagagcctggccagcagcaacagcgcccaggcccgggagaacaaggactttgtgcggcccaagctggtgaccatcatccgctctggagtgaagcccaggaaggctgtgcgggtgctgctgaacaagaagacagcccacagctttgagcaggtgctgacagacatcacagaggccatcaagctggagaccggggtggtgaagaagctgtacaccctggatggcaagcaggtgacctgcctgcatgacttctttggagatgatgatgtgttcatcgcctgtggccctgagaagttccgctatgcccaggatgacttcagcctggatgaaaatgaatgtcgggtgatgaagggcaaccccagcgccacagctggccccaaggccagccccaccccccagaagaccagcgccaagagccctggccccatgaggaggagcaagagccctgctgacagcgccaacggcaccagcagcagccagctgagcacccccaagagcaagcagagccccatcagcacccccaccagccctggcagcctgaggaagcacaaggacctgtacctgcccctgagcctggatgacagcgacagcctgggggacagcatgtag

SEQ ID NO: 253500 - DNA, 1083 bp, Artificial Sequence
  derived and/or modified sequence
atggagctggacttcggccacttcgacgagcgggacaagaccagcagaaatatgcggggcagccgtatgaacggtctgccctctcccactcacagcgcacactgctcgttctacagaactcggacactgcaggcattgtctaatgaaaagaaagcaaagaaagtgcggttttaccggaacggagacagatacttcaagggcatagtgtatgccgtctctagtgaccgcttcagatccttcgatgccctgctagctgatctcacccgttcactctccgataatattaatttgccccagggtgtgagatatatttataccatagatgggtcgcgaaagatcggctcaatggatgagctggaggaaggagagtcctacgtgtgtagctccgataactttttcaaaaaagtggagtacaccaaaaatgtcaatccaaactggtctgtcaacgtgaagaccagcgccaatatgaaagcaccacagagcctggcctctagtaactccgcgcaggccagagaaaacaaagatttcgtgcgcccgaaattggtgaccattattaggagcggcgtgaaaccaaggaaagccgttcgggtgctgctcaacaagaaaaccgctcattcctttgagcaagtactgactgatattactgaggcaatcaaactggaaaccggcgtggtgaagaagctatacaccctggacggaaaacaggtcacatgtcttcacgacttcttcggggatgacgatgtgtttatcgcgtgtggccctgagaaatttcgctatgcccaagacgatttcagccttgatgaaaacgagtgtcgagtaatgaaaggaaacccaagcgccaccgccggccctaaagcatcccccaccccccagaagacttccgccaaatctcccggaccgatgcggaggagcaaaagtcccgccgactcagccaatggaacgagctccagccaattgtctacacccaaatccaagcaatcgcccatcagtacccctaccagtcccggatcactgaggaagcacaaggacctgtacttgcctctgtccctggacgacagcgattccctgggcgattctatgtag

SEQ ID NO: 253501 - DNA, 1083 bp, Artificial Sequence
  derived and/or modified sequence
atggagctggacttcggccacttcgacgagcgggacaagaccagccgtaacatgcgcgggagtagaatgaatgggcttcctagtcctactcatagcgcccactgttcattctatagaactagaacccttcaggcactgagtaacgaaaagaaggctaaaaaagtgagattctacaggaatggagatcgttactttaaaggaatcgtgtacgctgtatcaagtgaccggtttaggtcctttgacgcgctgctggcagacctgacaaggagcctttcagacaacatcaatctccctcagggagtgaggtacatctacaccatcgacggctcaaggaagattggatccatggacgaactggaggagggcgaatcttacgtctgcagctccgacaacttcttcaaaaaagttgaatatacaaaaaacgtcaaccccaattggtctgtaaacgtcaagacttcagccaacatgaaagccccgcaaagcttagcctcatcgaactccgctcaagccagggagaacaaagatttcgtgcggccaaagctcgttacgatcatccgttccggtgtcaagccccggaaagcagtccgggtccttctcaataaaaaaactgcccattctttcgaacaggtgctaactgatataacggaagctatcaaacttgagacgggcgtcgtgaagaagctgtacaccttagacgggaagcaggttacttgcctacacgacttctttggagatgatgatgtattcatcgcctgcggtcctgaaaagttccggtacgcccaagacgactttagtttagatgaaaacgagtgccgagtcatgaagggtaacccttccgctacagccgggccgaaggctagtccaaccccccaaaagacctcagcaaagtccccgggtccaatgagaaggagtaaatctccagccgacagcgcgaatgggacttcttcatcacaactcagcacccccaagtcaaaacaaagtcccatttcgacacctacctccccgggatccctccggaaacacaaagatttgtaccttcccttgagtcttgacgatagtgactccctcggggattctatgtag

SEQ ID NO: 253502 - DNA, 1083 bp, Artificial Sequence
  derived and/or modified sequence
atggagttggactttggacattttgacgaacgagataaaacgagtagaaatatgagagggtctcgaatgaatggcttgccttctccgacccactccgcacactgttctttctaccgtacaagaaccctccaggcgctgagtaatgaaaagaaagctaagaaggtgaggttctacagaaacggcgaccgttacttcaaaggtatcgtttatgccgtgtcatccgatcgctttcggtccttcgatgcactgctggccgatttgacccgatcactatctgataatattaaccttcctcaaggcgtgagatatatctatactatcgacggctcaaggaagatcggctccatggatgaactggaggaaggggagagttacgtctgctcaagtgacaacttctttaagaaagtggagtataccaagaacgtgaaccctaattggagcgtgaatgtgaagacttccgccaatatgaaggcaccccaatcgcttgcctcatctaattccgctcaagcacgtgaaaacaaagacttcgtccggcctaaactggtaacaatcattcggtctggcgtgaaaccgcgtaaggctgtaagagtactattgaacaagaagacagcacattcctttgagcaggtgcttaccgatatcacggaggccataaaactggagaccggtgtcgtgaaaaaactttacacgctggatgggaagcaggtgacttgcttacacgactttttcggggacgacgatgtatttatagcctgcgggccagagaagtttaggtacgcgcaagacgatttctctctggatgaaaatgaatgccgggtgatgaaaggaaatccctccgccacagccggaccaaaagcatctcccacgccccagaagacatcagccaaatctcctggcccaatgaggcgctctaagagtccggcagacagcgctaatggcacttcaagttcacagctgtctacgcccaaaagcaaacagtctccaatcagcacccctacttcccctggctctctgcggaagcataaggacctttatctccctctctccctcgatgactccgatagccttggcgacagcatgtag

SEQ ID NO: 253503 - DNA, 1083 bp, Artificial Sequence
  derived and/or modified sequence
atggaactggatttcgggcactttgatgaacgggacaagacctcccggaatatgcgcggttctcgcatgaatgggcttccttcccctactcactctgcccactgtagcttctatcggacacggactctccaggcccttagcaacgagaagaaagccaaaaaagtcagattctaccgaaacggagataggtatttcaaaggcatcgtgtacgctgtgtctagtgaccgcttcaggtctttcgatgccttattggctgaccttactagatcactctccgacaatataaatctcccgcaaggggtgcgctatatttacacgatagacgggtcccgcaaaatcgggagtatggatgaactggaggaaggagaatcctacgtatgctcatcggataattttttcaagaaagtcgagtatactaaaaacgttaatccgaactggagtgtaaatgtgaaaacttctgccaacatgaaggccccacaatccttggcgtccagcaactctgcgcaggctcgcgaaaacaaagacttcgtcaggcccaagttggtgaccatcatcagaagcggcgtgaaaccacggaaagctgtgcgcgttctgctcaacaaaaaaacagcccattcctttgagcaggtgctaaccgatataactgaagccatcaaactggagacaggggtggttaaaaagctgtatactctcgatggcaagcaggtcacatgcctgcatgacttcttcggcgacgatgacgtgttcattgcttgtggccctgaaaaattccggtatgcccaggatgattttagcttggatgaaaatgaatgcagagtgatgaaaggcaacccttccgccacggccggacccaaagcttccccgacaccgcagaagaccagcgctaaatcgcctggaccgatgcggaggtccaagagtcccgctgactctgcgaatggtaccagctcctcacaactgtccactccaaaatcaaagcagagtcccatttctacaccaacttctccaggttcactacgtaagcacaaagacctttacctccctctttcccttgatgattcagactcactgggcgattccatgtag

SEQ ID NO: 253504 - DNA, 1083 bp, Artificial Sequence
  derived and/or modified sequence
atggagctggacttcggccacttcgacgagagagacaagaccagcagaaacatgagaggcagcagaatgaacggcctgcccagccccacccacagcgcccactgcagcttctacagaaccagaaccctgcaggccctgagcaacgagaagaaggccaagaaggtgagattctacagaaacggcgacagatacttcaagggcatcgtgtacgccgtgagcagcgacagattcagaagcttcgacgccctgctggccgacctgaccagaagcctgagcgacaacatcaacctgccccagggcgtgagatacatctacaccatcgacggcagcagaaagatcggcagcatggacgagctggaggagggcgagagctacgtgtgcagcagcgacaacttcttcaagaaggtggagtacaccaagaacgtgaaccccaactggagcgtgaacgtgaagaccagcgccaacatgaaggccccccagagcctggccagcagcaacagcgcccaggccagagagaacaaggacttcgtgagacccaagctggtgaccatcatcagaagcggcgtgaagcccagaaaggccgtgagagtgctgctgaacaagaagaccgcccacagcttcgagcaggtgctgaccgacatcaccgaggccatcaagctggagaccggcgtggtgaagaagctgtacaccctggacggcaagcaggtgacctgcctgcacgacttcttcggcgacgacgacgtgttcatcgcctgcggccccgagaagttcagatacgcccaggacgacttcagcctggacgagaacgagtgcagagtgatgaagggcaaccccagcgccaccgccggccccaaggccagccccaccccccagaagaccagcgccaagagccccggccccatgagaagaagcaagagccccgccgacagcgccaacggcaccagcagcagccagctgagcacccccaagagcaagcagagccccatcagcacccccaccagccccggcagcctgagaaagcacaaggacctgtacctgcccctgagcctggacgacagcgacagcctgggcgacagcatgtag

SEQ ID NO: 253505 - protein, 328 aa, Artificial Sequence
  derived and/or modified sequence
MDAVLLEHFPGGLDAFPSSYFDEDDFFTDQSSRDPLEDGDELLADEQAEVEFLSHQLHEYCYRDGACLLLQPAPPAAPLALAPPSSGGLGEPDDGGGGGYCCETGAPPGGFPYSPGSPPSCLAYPCAGAAVLSPGARLRGLSGAAAAAARRRRRVRSEAELQQLRQAANVRERRRMQSINDAFEGLRSHIPTLPYEKRLSKVDTLRLAIGYINFLSELVQADLPLRGGGAGGCGGPGGGGRLGGDSPGSQAQKVIICHRGTRSPSPSDPDYGLPPLAGHSLSWTDEKQLKEQNIIRTAKVWTPEDPRKLNSKSSFNNIENEPPFEFVS

SEQ ID NO: 253506 - DNA, 1339 bp, Artificial Sequence
  derived and/or modified sequence
atggacgcggtgttgctggagcacttccccgggggcctagacgcctttccttcttcgtacttcgacgaggacgacttcttcaccgaccagtcttcacgggaccccctggaggacggcgatgagctgctggcggacgagcaggccgaggtggagttccttagccaccagctccacgagtactgctaccgcgacggggcgtgcctgctgctgcagcccgcgcccccggccgccccgctagcgctcgccccgccgtcctcggggggcctcggtgagccagacgacggcggcggcggcggctactgctgcgagacgggggcgcccccaggcggcttcccctactcgcccggctcgccgccctcgtgcctggcctacccgtgcgccggggcggcagtactgtctcccggggcgcggctgcgcggcctgagcggagcggcggctgcggcggcgcggcgccggcggcgggtgcgctccgaggcggagctgcagcagctgcggcaggcggccaacgtgcgcgagcggcggcgcatgcagtccatcaacgacgccttcgaggggctgcgctcgcacatccccacgctgccctacgagaagcgcctctccaaggtggacacgctgcgcctggccatcggctacatcaacttcctcagcgagctcgtgcaggccgacctgcccttgcgcggcggtggcgcgggcggctgcggggggccgggcggcggcgggcgcctgggcggggacagcccgggcagccaggcccagaaggtcatcatctgccatcggggcacccggtccccctcccccagcgaccctgattatggcctccctcccctagcaggacactctctctcatggactgatgaaaaacaactcaaggaacaaaatattatccgaacagccaaagtctggaccccagaggaccccagaaaactcaacagcaaatcttccttcaacaacatagaaaacgaaccaccatttgagtttgtgtcctgagaagtcccagactcggctgaagatctgattatgtctctgtgcatattgtacatgtaaatatctataatgtaaatgtaatttaagaatcaaatttttcgaatggcaatcaactgtttattatttatctatttattatcctgttgagttgatgaaatagatgatttctttttaaatatataatttatataacttatcctgattttctgaaaatatgcaatagcctatgattttcctgaactctgtgttgttgggagaactctggccagaaaacgtcctgcttatttattgccagatatggtttatttctaagcgttgtcaataaatgctatttacaccttttcctgaaaaaaaa

SEQ ID NO: 253507 - DNA, 987 bp, Artificial Sequence
  derived and/or modified sequence
atggacgccgtgctgctggagcatttcccaggcggacttgatgcttttccatcatcatacttcgatgaggatgacttctttactgaccaaagctctagggatccactggaagatggtgatgaactcttagcagacgagcaggcagaggtcgaattccttagtcatcagctccatgagtactgctatcgggatggcgcctgcctgctgctccagccagcgcccccagctgcccctctggcgcttgccccaccctcttccgggggcttaggtgagcctgatgacgggggaggaggaggatactgttgcgaaactggagcccctcctggcgggttcccctactcccctggctctcccccttcatgcctcgcatacccttgtgccggggccgcagtgctgtcccctggggcccggctcagaggcctgtctggggcagctgccgcggccgcacgtaggcgtcgacgggtgcggagcgaagcagagcttcagcagctgaggcaggcagccaacgtccgcgagcgcaggagaatgcagtccatcaatgatgccttcgaggggttaagatcacatattcccaccctgccgtacgagaaacgcctgagcaaggtggatacacttagacttgcgattgggtacatcaatttcctgtctgagctggttcaggcagacctgcctcttaggggtggtggtgctggaggatgcggcggtcctgggggcggcggcaggctcgggggcgattctcctggttcccaggcacagaaggtgattatctgtcatcgcgggactaggtctccctcacccagtgatcctgattatggcctgccacccttggccggccacagtctctcgtggaccgacgagaagcagctcaaggaacagaatataatacggacagccaaggtgtggacgcctgaggaccccaggaagctcaacagcaagagcagcttcaacaacattgagaacgagcccccatttgagttcgtgtcatag

SEQ ID NO: 253508 - DNA, 987 bp, Artificial Sequence
  derived and/or modified sequence
atggatgctgtgctgctggagcacttccctgggggcctggatgccttccccagcagctactttgatgaagatgacttcttcacagaccagagcagccgggaccccctggaggatggagatgagctgctggctgatgagcaggccgaggtggagttcctgagccaccagctgcacgagtactgctacagagatggagcctgcctgctgctgcagcctgcccccccagctgcccccctggccctggccccacccagcagcggcggcctgggggagccagatgatggcggcggcggcggctactgctgtgagaccggggcccctcctgggggcttcccctacagccctggcagcccccccagctgcctggcctacccctgtgccggggctgctgtgctgagccctggggcccggctgcggggcctgagcggggctgctgctgctgctgccaggagaagaagaagagtgcgctctgaggccgagctgcagcagctgcggcaggccgccaacgtgcgggagaggaggaggatgcagagcatcaatgatgcctttgagggcctgcggagccacatccccaccctgccctatgagaagaggctgagcaaggtggacaccctgcggctggccatcggctacatcaacttcctgtctgagctggtgcaggccgacctgcccctgcggggcggcggggccggcggctgcggcggccctgggggcggcggccgcctgggcggggacagccctggcagccaggcccagaaggtgatcatctgccaccggggcaccaggagccccagccccagcgaccctgactatggcctgccccccctggccggccacagcctgtcctggacagatgagaagcagctgaaggagcagaacatcatcagaacagccaaggtgtggaccccagaggaccccaggaagctgaacagcaagagcagcttcaacaacattgaaaatgagcccccatttgaatttgtgtcctag

SEQ ID NO: 253509 - DNA, 987 bp, Artificial Sequence
  derived and/or modified sequence
atggacgccgtgctgctggagcacttccccggcggcctggacgcctttccatcaagctattttgatgaggacgatttcttcaccgatcagtcaagtcgagaccccttggaggacggggatgagctcttggctgatgagcaagccgaagtggaattcctgtctcaccaactccatgagtattgttaccgagacggcgcctgtctgctcttacagccagctccgccagccgcccccctcgcccttgcaccaccatccagcggggggctgggagaacccgatgacggaggcggaggggggtactgctgcgagacaggggctccccccggtggtttcccttactctcctggcagccctcctagctgcctcgcgtatccatgtgctggagctgccgttctatctcccggcgctaggctgcgagggttgtccggcgccgccgcagccgctgcacggaggaggcgacgcgtcagatcagaggccgagctacaacaactcaggcaggcagcaaatgttcgtgagcgcagacgtatgcaatcaattaatgatgcgttcgagggtctccgcagccatattcctacactgccctacgagaagaggttatccaaggttgatacactcaggctcgctataggatatattaattttttatcagagctcgtgcaggctgaccttccactccgtggcggcggagcgggcggctgtggcggacccggaggtggaggcaggctcggtggtgattctccggggtcccaggctcagaaggttattatctgccaccgcggaactcgaagccctagcccctccgatcccgactacggcttgcccccattagccgggcatagccttagttggaccgacgagaaacagctcaaagaacaaaatataatacgcaccgcaaaggtgtggacacctgaggaccctagaaaactgaacagcaaatcgtcctttaataatatcgaaaacgagcccccatttgagttcgtgagctag

SEQ ID NO: 253510 - DNA, 1537 bp, Artificial Sequence
  derived and/or modified sequence
cagccctccccagcgcagcgcgagcgcgggccagagcgcagcggccgcgggcactccagggaggcccgggggcgggcagcccggcggccgcctagctgcccccagccagggccccgggagggaggggctcggacgggccttagaaactcaccaagaactaacacgcgcagcccggcagtcccgctgcccactgcggcggcgagcatggacgcggtgttgctggagcacttccccgggggcctagacgcctttccttcttcgtacttcgacgaggacgacttcttcaccgaccagtcttcacgggaccccctggaggacggcgatgagctgctggcggacgagcaggccgaggtggagttccttagccaccagctccacgagtactgctaccgcgacggggcgtgcctgctgctgcagcccgcgcccccggccgccccgctagcgctcgccccgccgtcctcggggggcctcggtgagccagacgacggcggcggcggcggctactgctgcgagacgggggcgcccccaggcggcttcccctactcgcccggctcgccgccctcgtgcctggcctacccgtgcgccggggcggcagtactgtctcccggggcgcggctgcgcggcctgagcggagcggcggctgcggcggcgcggcgccggcggcgggtgcgctccgaggcggagctgcagcagctgcggcaggcggccaacgtgcgcgagcggcggcgcatgcagtccatcaacgacgccttcgaggggctgcgctcgcacatccccacgctgccctacgagaagcgcctctccaaggtggacacgctgcgcctggccatcggctacatcaacttcctcagcgagctcgtgcaggccgacctgcccttgcgcggcggtggcgcgggcggctgcggggggccgggcggcggcgggcgcctgggcggggacagcccgggcagccaggcccagaaggtcatcatctgccatcggggcacccggtccccctcccccagcgaccctgattatggcctccctcccctagcaggacactctctctcatggactgatgaaaaacaactcaaggaacaaaatattatccgaacagccaaagtctggaccccagaggaccccagaaaactcaacagcaaatcttccttcaacaacatagaaaacgaaccaccatttgagtttgtgtcctgagaagtcccagactcggctgaagatctgattatgtctctgtgcatattgtacatgtaaatatctataatgtaaatgtaatttaagaatcaaatttttcgaatggcaatcaactgtttattatttatctatttattatcctgttgagttgatgaaatagatgatttctttttaaatatataatttatataacttatcctgattttctgaaaatatgcaatagcctatgattttcctgaactctgtgttgttgggagaactctggccagaaaacgtcctgcttatttattgccagatatggtttatttctaagcgttgtcaataaatgctatttacaccttttcctgaa

SEQ ID NO: 253511 - DNA, 987 bp, Artificial Sequence
  derived and/or modified sequence
atggatgctgttcttttggagcactttccaggtggcttagatgcattcccctcgtcctattttgatgaggacgacttcttcaccgaccaatcttctcgggatccactggaggacggggacgaactgctcgcagatgaacaggccgaagtcgagtttttgtctcaccagcttcatgaatattgctatcgcgatggtgcttgcctgctgctgcagccagccccacccgcagcccctctggccttggcacctccaagctctggcggactcggagagcccgacgacggaggcggaggaggctactgctgcgaaaccggcgcaccacccggaggttttccatactcaccaggatctcctcctagctgcctggcttacccttgcgccggtgctgctgttttaagcccaggcgctcgcctgagaggactttccggcgctgccgctgccgcagcacggagaagacggagagtcagaagcgaggcagagctccagcagctgaggcaggcggcaaacgtccgggaaagacggaggatgcagagcatcaatgatgcttttgaggggttgcggtcccacattccaactctcccgtacgaaaaacgcctgagtaaggtcgacactctccgtctggccattgggtatatcaactttctgagtgagttggttcaggcagacctgcccctcagaggtggcggtgcaggcggttgtggaggaccaggcggagggggaagattgggtggcgacagtcccggttcacaggcccagaaggtgatcatctgtcaccggggaacgcgctctccatccccaagcgaccccgattacggcctaccccctctggcagggcactccctgagctggaccgatgaaaagcaactcaaagaacagaatatcatacgcactgccaaggtgtggacaccagaggatccacggaagctgaatagcaagtcttcttttaacaatatcgagaatgaacctccatttgagttcgtttcctag

SEQ ID NO: 253512 - DNA, 987 bp, Artificial Sequence
  derived and/or modified sequence
atggacgccgtgctgctggagcacttccccggcggcctggacgccttccccagcagctacttcgacgaggacgacttcttcaccgaccagagcagcagagaccccctggaggacggcgacgagctgctggccgacgagcaggccgaggtggagttcctgagccaccagctgcacgagtactgctacagagacggcgcctgcctgctgctgcagcccgccccccccgccgcccccctggccctggccccccccagcagcggcggcctgggcgagcccgacgacggcggcggcggcggctactgctgcgagaccggcgccccccccggcggcttcccctacagccccggcagcccccccagctgcctggcctacccctgcgccggcgccgccgtgctgagccccggcgccagactgagaggcctgagcggcgccgccgccgccgccgccagaagaagaagaagagtgagaagcgaggccgagctgcagcagctgagacaggccgccaacgtgagagagagaagaagaatgcagagcatcaacgacgccttcgagggcctgagaagccacatccccaccctgccctacgagaagagactgagcaaggtggacaccctgagactggccatcggctacatcaacttcctgagcgagctggtgcaggccgacctgcccctgagaggcggcggcgccggcggctgcggcggccccggcggcggcggcagactgggcggcgacagccccggcagccaggcccagaaggtgatcatctgccacagaggcaccagaagccccagccccagcgaccccgactacggcctgccccccctggccggccacagcctgagctggaccgacgagaagcagctgaaggagcagaacatcatcagaaccgccaaggtgtggacccccgaggaccccagaaagctgaacagcaagagcagcttcaacaacatcgagaacgagccccccttcgagttcgtgagctag

SEQ ID NO: 253513 - protein, 238 aa, Artificial Sequence
  derived and/or modified sequence
MSSGYSSLEEDAEDFFFTARTSFFRRAPQGKPRSGQQDVEKEKETHSYLSKEEIKEKVHKYNLAVTDKLKMTLNSNGIYTGFIKVQMELCKPPQTSPNSGKLSPSSNGCMNTLHISSTNTVGEVIEALLKKFLVTESPAKFALYKRCHREDQVYACKLSDREHPLYLRLVAGPRTDTLSFVLREHEIGEWEAFSLPELQNFLRILDKEEDEQLQNLKRRYTAYRQKLEEALREVWKPD

SEQ ID NO: 253514 - DNA, 717 bp, Artificial Sequence
  derived and/or modified sequence
atgtcatccggttattcctcactcgaggaggatgccgaggacttcttcttcaccgctagaaccagtttctttcgccgcgcgccccagggaaaacctaggagtggtcaacaggatgtcgagaaggagaaagagacgcatagttatctgtctaaagaagaaatcaaagagaaagtccacaaatacaacttggcagtgacagataagctgaagatgaccctgaattcaaatgggatctataccgggtttattaaagtgcagatggagctgtgtaaaccaccccagacttctcccaattcaggcaaactgtctccgtcctccaacgggtgcatgaacacgctccacattagcagcactaacactgtgggcgaggtgatcgaggccctcctgaaaaaattcctagtgaccgagtcacctgctaaatttgctctgtacaagcgctgtcatcgtgaagaccaagtttacgcctgcaaactatcagaccgtgaacatcctttatacttgcgcctggttgctggccctcggactgatacactcagttttgtactgcgtgaacacgagattggtgagtgggaagctttttctctgcctgagctgcagaactttctacgtatcctggacaaggaggaagatgagcagcttcagaacctcaaaagaagatatacggcatacagacagaagctcgaggaggcactgagagaagtgtggaagccagactag

SEQ ID NO: 253515 - DNA, 717 bp, Artificial Sequence
  derived and/or modified sequence
atgagtagtggctatagctcgctagaggaagacgccgaggactttttctttaccgccaggacctcatttttccgtagggctcctcagggtaaacctaggtccggacagcaggatgtcgagaaagagaaggagacccattcctatctgtctaaggaggaaataaaggagaaagttcacaaatacaacctggccgttaccgataaactcaagatgactttgaacagcaacggcatttacaccggattcattaaagtgcagatggagctgtgcaaacccccacagacttcccccaatagcgggaagctctctccctccagtaacggttgcatgaacacgcttcatatcagctccaccaacacagttggggaagttatcgaggctcttctcaaaaaatttttagtgactgaaagccctgcaaaattcgcgctctacaaaaggtgccatagggaggaccaggtttacgcctgtaagctcagtgatcgcgagcaccccctctacctgcgactcgtcgcgggccccagaaccgatactcttagctttgtcttgagagagcacgaaataggagagtgggaggctttcagcctccctgaactgcagaactttttacggatactcgataaggaggaggacgagcagctgcagaatcttaagcggaggtacactgcctatagacagaaactggaagaagcccttcgtgaagtctggaaaccggattag

SEQ ID NO: 253516 - DNA, 717 bp, Artificial Sequence
  derived and/or modified sequence
atgagcagcggctacagcagcctggaggaggatgctgaggacttcttcttcaccgcccggaccagcttcttcagaagagccccccagggcaagcccaggagcggccagcaggatgtggagaaggagaaggagacccacagctacctgagcaaggaggagatcaaggagaaggtgcacaagtacaacctggccgtgacagacaagctgaagatgaccctgaacagcaatggcatctacacaggcttcatcaaggtgcagatggagctgtgcaagccaccccagaccagccccaacagcggcaagctgagccccagcagcaatggctgcatgaacaccctgcacatcagcagcaccaacacagtgggggaggtgattgaggccctgctgaagaagttcctggtgacagagagccctgccaagtttgccctgtacaagcgctgccaccgggaggaccaggtgtatgcctgcaagctgagtgaccgggagcaccccctgtacctgcggctggtggccggccccaggacagacaccctgagctttgtgctgcgggagcatgaaattggagagtgggaggccttcagcctgcctgagctgcagaacttcctgcgcatcctggacaaggaggaggatgagcagctgcagaacctgaagaggcgctacacagcctaccggcagaagctggaggaggccctgcgggaggtgtggaagccagactag

SEQ ID NO: 253517 - DNA, 717 bp, Artificial Sequence
  derived and/or modified sequence
atgagcagcggctacagcagcctggaggaggacgccgaggacttcttctttaccgcccggactagcttctttcggcgtgcgccgcagggcaaacctagaagcggacagcaggatgttgaaaaggagaaggaaacacacagctatctgtctaaagaagaaatcaaggagaaagtccacaaatacaatctggcagtcacggataagctaaaaatgacccttaactccaatggtatctatacgggcttcattaaggtgcagatggagttatgcaaaccgcctcagacctccccaaattcagggaaactttccccctctagcaatgggtgcatgaacaccctgcacatctctagtacgaacacagtgggggaagtgattgaggcgctgctaaagaagtttttggtgactgaatccccggccaaattcgccctatacaagagatgtcaccgggaggatcaagtgtatgcctgcaaactgagtgatcgcgagcatcctctgtatctccgactcgttgcaggacctaggactgacactttatccttcgtgctccgagagcatgagatcggggaatgggaagccttctcccttccggagctccagaattttctgaggatcctagataaagaagaggacgaacaactgcagaacctgaagcgaagatacacagcctatcggcagaagttagaagaggctttacgggaggtatggaaaccagattag

SEQ ID NO: 253518 - DNA, 717 bp, Artificial Sequence
  derived and/or modified sequence
atgagcagcggctacagcagcctggaggaggacgccgaggacttcttttttacggcccggacttccttttttaggagagcgccccagggcaaacctcggtcgggacagcaggacgtagaaaaggaaaaggagacgcactcttatttgtctaaagaagaaatcaaagagaaagtacacaagtacaatctggccgttactgataaactaaagatgaccttgaactccaacggcatctatacagggttcattaaagtacagatggagctctgtaaaccaccacaaacctcacccaatagtggcaagttatcacccagctctaacggttgcatgaacaccttgcacatatcctccactaataccgtaggtgaggtgattgaagccctactgaagaaattcctggtaaccgaatctcctgccaaatttgctctctacaaacggtgccatagggaagatcaagtgtacgcctgcaaactgtctgacagagagcaccccctgtacttaaggctcgtggcaggaccgagaaccgacaccctttcttttgttctgcgcgagcacgagatcggcgagtgggaggcctttagcttgccagagctgcagaattttctgcggatcttggataaggaggaagacgagcagctacagaacctcaaaagacgttatacggcctacagacagaaactggaggaggcacttagagaggtgtggaagcctgattag

SEQ ID NO: 253519 - DNA, 717 bp, Artificial Sequence
  derived and/or modified sequence
atgtcctccgggtattcttctcttgaggaagacgccgaagattttttcttcaccgctagaacctcattctttcgcagagcaccacagggaaaacccagatcgggacaacaagatgttgagaaggagaaggaaacacatagctatctgagcaaagaggagattaaggaaaaggttcacaaatataatctagccgttactgataagctgaagatgacactcaactcgaatggcatttacaccgggtttatcaaggtgcaaatggaactatgtaagccccctcaaacttccccaaattctggcaagttgtccccttcctctaacggatgtatgaatacactgcatatcagctctactaacacggtcggggaagttatcgaggccctgctgaaaaaattccttgtaaccgaatcccctgcaaagttcgccctctacaaacggtgccaccgtgaggatcaggtgtacgcctgtaaactctcagacagggaacatcccctgtatctgcgtttagtggccggaccaaggacagataccttgtcgttcgtgttgagagaacacgagatcggagagtgggaagcctttagcttaccagagctgcaaaactttttgcgtatcctggacaaggaggaagatgagcagctgcaaaacttgaagagacgatacacagcctacaggcagaagctcgaggaggccctgcgcgaggtgtggaagccagattag

SEQ ID NO: 253520 - DNA, 717 bp, Artificial Sequence
  derived and/or modified sequence
atgagcagcgggtattcgtccctcgaagaggatgctgaggacttctttttcactgcacgcacctcttttttccggagagccccacagggtaagccacggtccggccagcaggatgtcgagaaggaaaaagaaacccatagttacttgtcgaaggaggagattaaggagaaagtacacaagtacaatctcgcggttacggataagctgaaaatgactctcaattctaatggtatctacacaggctttattaaggtccaaatggaactgtgtaagccccctcagaccagtccaaattccgggaagctcagtccctcatctaacggatgcatgaacacattacatatttccagcactaatactgtgggagaagtgatagaagccctgcttaaaaagttcttggttacagaatcccctgcaaagtttgcactgtataaacgctgccacagggaagaccaggtgtacgcctgcaagctgtccgacagggagcatccgttgtacctgaggctcgtggccggacctaggaccgataccctttccttcgtcctgcgggagcacgagattggcgagtgggaagcttttagcctccccgagctgcagaattttctgagaattttagataaggaggaagacgagcagctgcagaacctcaagcgtcggtatacagcctacagacagaagcttgaggaagcgctccgggaggtttggaagccggattag

SEQ ID NO: 253521 - DNA, 1030 bp, Artificial Sequence
  derived and/or modified sequence
gctgcataaggactgcccggggctgcgcgacgggaccggcagcatgagcagcggctacagcagcctggaggaggacgccgaggacttcttcttcaccgccaggacctccttcttcaggagagcgccccagggcaagccccgctccggccaacaagatgttgagaaagagaaggaaacccacagttacctcagcaaagaggagatcaaagagaaagttcataaatacaacttagcagtcacagacaagttgaagatgaccttgaattcaaatgggatttacactggcttcattaaagtacagatggaactctgcaaacctccacagacttctccaaattctggaaaactctctcccagtagcaatggctgtatgaatacacttcatatcagcagcacaaacactgtcggggaagtgatcgaggccctgctcaaaaagtttctcgtgactgagagccctgccaagtttgcactttataagcgttgtcacagggaagaccaagtctacgcctgcaagctctcagaccgggaacatccactctacctgcgtttggtagcagggcccagaacagacacacttagttttgttcttcgtgaacatgaaattggagagtgggaagccttcagccttccagaactacagaatttcttgcgcatcttggacaaggaagaagatgaacagctgcagaacctgaagaggcgctacacagcctacaggcagaagctggaagaagccctccgtgaggtgtggaagcctgattaaagcggggctccctgcccgtgaggcccggtgcaggaccgatgtacaaaacagcagcaagtgcctctcttctcagagggctgctgtcttgccccactatgctagggtcttcgcctttctatctgtagattttgttccccaaacctggtcacacagcatcctgcaccttagcgtcccatgtaagggactctgcaagcttgttgttcagcaccgcagtgttacctcttggcaagctgtgaacctgtcgcctcatcaggagcattcgagggtgct

SEQ ID NO: 253522 - DNA, 965 bp, Artificial Sequence
  derived and/or modified sequence
gctgcataaggactgcccggggctgcgcgccgggaacctcgcggggctggcgggcgccgcacccccctcccgagtagctaggactacaggatgttgagaaagagaaggaaacccacagttacctcagcaaagaggagatcaaagagaaagttcataaatacaacttagcagtcacagacaagttgaagatgaccttgaattcaaatgggatttacactggcttcattaaagtacagatggaactctgcaaacctccacagacttctccaaattctggaaaactctctcccagtagcaatggctgtatgaatacacttcatatcagcagcacaaacactgtcggggaagtgatcgaggccctgctcaaaaagtttctcgtgactgagagccctgccaagtttgcactttataagcgttgtcacagggaagaccaagtctacgcctgcaagctctcagaccgggaacatccactctacctgcgtttggtagcagggcccagaacagacacacttagttttgttcttcgtgaacatgaaattggagagtgggaagccttcagccttccagaactacagaatttcttgcgcatcttggacaaggaagaagatgaacagctgcagaacctgaagaggcgctacacagcctacaggcagaagctggaagaagccctccgtgaggtgtggaagcctgattaaagcggggctccctgcccgtgaggcccggtgcaggaccgatgtacaaaacagcagcaagtgcctctcttctcagagggctgctgtcttgccccactatgctagggtcttcgcctttctatctgtagattttgttccccaaacctggtcacacagcatcctgcaccttagcgtcccatgtaagggactctgcaagcttgttgttcagcaccgcagtgttacctcttggcaagctgtgaacctgtcgcctcatcaggagcattcgagggtgct

SEQ ID NO: 253523 - DNA, 3492 bp, Artificial Sequence
  derived and/or modified sequence
gctgcataaggactgcccggggctgcgcgccgggaacctcgcggggctggcgggcgccgcaccccctccctggccgcctgcgccccggggaggccgcccgcgcgcgacgggaccggcagcatgagcagcggctacagcagcctggaggaggacgccgaggacttcttcttcaccgccaggacctccttcttcaggagagcgccccagggcaagccccgctccggccaacaagatgttgagaaagagaaggaaacccacagttacctcagcaaagaggagatcaaagagaaagttcataaatacaacttagcagtcacagacaagttgaagatgaccttgaattcaaatgggatttacactggcttcattaaagtacagatggaactctgcaaacctccacagacttctccaaattctggaaaactctctcccagtagcaatggctgtatgaatacacttcatatcagcagcacaaacactgtcggggaagtgatcgaggccctgctcaaaaagtttctcgtgactgagagccctgccaagtttgcactttataagcgttgtcacagggaagaccaagtctacgcctgcaagctctcagaccgggaacatccactctacctgcgtttggtagcagggcccagaacagacacacttagttttgttcttcgtgaacatgaaattggagagtgggaagccttcagccttccagaactacagaatttcttgcgcatcttggacaaggaagaagatgaacagctgcagaacctgaagaggcgctacacagcctacaggcagaagctggaagaagccctccgtgaggtgtggaagcctgattaaagcggggctccctgcccgtgaggcccggtgcaggaccgatgtacaaaacagcagcaagtgcctctcttctcagagggctgctgtcttgccccactatgctagggtcttcgcctttctatctgtagattttgttccccaaacctggtcacacagcatcctgcaccttagcgtcccatgtaagggactctgcaagcttgttgttcagcaccgcagtgttacctcttggcaagctgtgaacctgtcgcctcatcaggagcattcgagggtgcttggaagcatgaactctgggggtgtttttttttttggttattttaattatgtgatgatgctgttaagcttacagatatgcagttgattttttaaaaagcttaactaggaatctttctgaatacttgtcctattttgaaactacctgtctggttttttgtttggttttgttttctttttttaatgtcagaggaatctatccatgtgaatcgaaaggcacaggaatctaggaactctgaggaatttattgtgaaggattttgttagggggttgacagagaaagcaaagtgtaagtttggaagaaggcatgtgcggtggtggcgagtgctgcgggctatggaaggtgacttggcttttcagttaggggtagtggagaaaggggtagttgcttgtaaacgagttaaaagcattcagtgtggaggtgttaaacccattttaggatcgcttggtttcctggtgggtagaatatgggaacagagccagaggcaggagctaaaccaaaaggagggacccatgaactctgcagctgaccaatcagagaatcaggcaggtgtagcctactgacctgggcagaggtgggcctcacgcagctggatccgaccctttaattctgcccttttggagtggaaggtctgattggtgtagctgctctgcataggcaggacagtgacagttcactaactcttgttaagttacatagtgtatagctttccccccacaggtggttttcaaagttgagacggaatttgggtaggggcagctgtttttcccttgattgttagctaggatatttgtcaagtaaactttggtgacaatcactctcttcccttttattcctcctttccttttcctttcttcccttttttctttccttccctgctgtctcccaccctaccttgttcttttcctccctccctccctccctccctccctccctccctccttccctccctctctctccctctccctttcttttctacattgaaatctgttcttacataatagagaacagggctattgaataaagacccaatcctaccagatctttagttctaaagggcaacttgactgtgagtaggagggcccccaagaaagggaggaaagtccacacccagctaaccacacaacagggcttcattatggaaatattttaacaaaagtacatgttattaccaaccaaagagatgcatgtgcaatagaagccttccttaaaaacaggctaaataacctcattttatgcagcagtttaatctgagaacagagggaaaggtgtgcagtggttccagaggggccttatattctatttttagtctagatattttttgtttataaattcccaaggaattgttaacactttggtgacacctaatggattctttttgaaattccaaggtgcttcagttctttgcccaagtgaactgtgccttttattgcatttctgttcgtctcttggtggctcttctgactttttggagaatacccatcttgttggaggcagacttaagttgttatgctgtgccacacaatttactgagacaatcatatcttcctaagcatttaaggaaagttgaaaaaaatagaattagctataaaatatgtatggcacatcttgtttaattttgcatgtaacttctcttttgtacattgatgaggttttagtgacattgtcatccaacactttacctttattgttcagggaatgccttcgtgattttttgtactggttttattattcagactatggcctggatttgagtatattgttattaccacctggttttttaattattcatcccagtaaacttatattttgtgaagcatttgtttctcagattaagacactgttagaacctaaagtagtagctgatgggtatctgtgaattttttttttttttttttttttacttgaagtagattgtctgaataggcatcctcatctatatttacccaaaacctcgcttactgtcatgtgcactacaaattgcaatttggaaacctactgtattgaaattctgtcagtttatggttcttgaagactgatgtcctttcccaaacactggttactgcagcagcatttttaatgtgtaagtgaagaaaaaaggccactaaggccaaagattttttaagaatcattgtacaaatcattatgttaaactatctaagctttgctgtaatactgttttctcttcaatatgtgatggtacaggaaggatgttaaatgaaggggtggtattgcaggagagcattttaaatggcagaagtaaaaagttataatatttataattttgatgggtttaagtttatttttgtagggaagatttttctcccctaaaatagtttctagaatggcaaaattgtttccattattaaaaattgaagttattagtt

SEQ ID NO: 253524 - DNA, 717 bp, Artificial Sequence
  derived and/or modified sequence
atgagcagcggctacagcagcctggaggaggacgccgaggacttcttcttcaccgccagaaccagcttcttcagaagagccccccagggcaagcccagaagcggccagcaggacgtggagaaggagaaggagacccacagctacctgagcaaggaggagatcaaggagaaggtgcacaagtacaacctggccgtgaccgacaagctgaagatgaccctgaacagcaacggcatctacaccggcttcatcaaggtgcagatggagctgtgcaagcccccccagaccagccccaacagcggcaagctgagccccagcagcaacggctgcatgaacaccctgcacatcagcagcaccaacaccgtgggcgaggtgatcgaggccctgctgaagaagttcctggtgaccgagagccccgccaagttcgccctgtacaagagatgccacagagaggaccaggtgtacgcctgcaagctgagcgacagagagcaccccctgtacctgagactggtggccggccccagaaccgacaccctgagcttcgtgctgagagagcacgagatcggcgagtgggaggccttcagcctgcccgagctgcagaacttcctgagaatcctggacaaggaggaggacgagcagctgcagaacctgaagagaagatacaccgcctacagacagaagctggaggaggccctgagagaggtgtggaagcccgactag

SEQ ID NO: 253525 - protein, 692 aa, Artificial Sequence
  derived and/or modified sequence
MEKYERIRVVGRGAFGIVHLCLRKADQKLVIIKQIPVEQMTKEERQAAQNECQVLKLLNHPNVIEYYENFLEDKALMIAMEYAPGGTLAEFIQKRCNSLLEEETILHFFVQILLALHHVHTHLILHRDLKTQNILLDKHRMVVKIGDFGISKILSSKSKAYTVVGTPCYISPELCEGKPYNQKSDIWALGCVLYELASLKRAFEAANLPALVLKIMSGTFAPISDRYSPELRQLVLSLLSLEPAQRPPLSHIMAQPLCIRALLNLHTDVGSVRMRRAEKSVAPSNTGSRTTSVRCRGIPRGPVRPAIPPPLSSVYAWGGGLGTPLRLPMLNTEVVQVAAGRTQKAGVTRSGRLILWEAPPLGAGGGSLLPGAVEQPQPQFISRFLEGQSGVTIKHVACGDFFTACLTDRGIIMTFGSGSNGCLGHGSLTDISQPTIVEALLGYEMVQVACGASHVLALSTERELFAWGRGDSGRLGLGTRESHSCPQQVPMPPGQEAQRVVCGIDSSMILTVPGQALACGSNRFNKLGLDHLSLGEEPVPHQQVEEALSFTLLGSAPLDQEPLLSIDLGTAHSAAVTASGDCYTFGSNQHGQLGTNTRRGSRAPCKVQGLEGIKMAMVACGDAFTVAIGAESEVYSWGKGARGRLGRRDEDAGLPRPVQLDETHPYTVTSVSCCHGNTLLAVRSVTDEPVPP

SEQ ID NO: 253526 - DNA, 2079 bp, Artificial Sequence
  derived and/or modified sequence
atggaaaaatatgaacgcattagggtggttggcagaggagcctttgggattgttcatctgtgtttgcggaaggcagatcagaaacttgtgataatcaaacagattcccgtggagcagatgacgaaggaagagcgccaggctgcccaaaatgaatgccaggtgctaaagctacttaaccatcccaatgtcatagaatattatgagaatttccttgaagataaggctctgatgattgcaatggagtacgccccaggggggaccttagctgagtttattcagaaacgatgcaattcactactggaagaagaaactatccttcattttttcgtgcagattttgctagcccttcaccacgtgcacacgcatctgattctccaccgagacctgaaaacacagaatatcttactagacaagcaccgtatggtcgtcaaaattggtgattttggcatctctaaaatcctgtctagtaaatctaaggcgtatacagtggtgggaacaccatgctacatcagtcctgagctttgcgagggaaagccctacaaccagaaatctgatatttgggcgctcggctgcgtactgtacgaattggctagcttaaaaagagcattcgaagccgcaaatctgcccgcattggtgttaaaaataatgagcggcaccttcgcccctatcagcgatcggtactccccagaactgaggcagttggtgctgtctctgttgtcactcgagccagctcagcgtccacctctgtcacatatcatggctcagcccctctgcatacgggccctactaaacctacatacggatgtgggaagcgtgagaatgaggagggccgagaagagcgtggccccctccaacactggcagtcgaactacatctgttcgatgcagggggatacccaggggacccgtcagacccgctatccctcctccccttagttctgtctacgcctggggcggtggcctgggcacaccattgcgactgccaatgctgaataccgaggttgtgcaggttgccgccggtcgcacgcaaaaagccggggttaccaggagtggacgccttattctgtgggaggccccaccgctgggagccgggggcggaagtctgttgccgggggcagtggagcaaccccaaccccagttcatctccagatttcttgaaggccagtcgggcgtcacgattaaacatgtcgcatgtggcgattttttcactgcgtgtctgaccgatagaggcatcatcatgacgtttggttctggctcgaatggttgtctagggcacggcagtctgactgacataagccaacccaccatcgttgaggcactgctgggatacgagatggtccaggtggcgtgtggcgcttcacacgtgctggccttgtctaccgaacgcgaactctttgcttggggaaggggtgatagtggtcggctgggcctcggcaccagagagtctcatagctgtccacaacaggtgcctatgccccccgggcaggaagcccaacgggtggtttgtgggatagattcttctatgatcctcacggttcccgggcaggctctcgcatgtggaagtaacagatttaacaagttgggactcgaccacctgagtctgggggaggagcctgtgcctcatcagcaggtggaggaggccctgagcttcacgttgttagggagcgcgccacttgatcaggaaccccttctgtcaattgatctgggtactgcacactcggcagctgttacagcttccggagactgctacacctttggaagcaaccaacacggtcagctgggcacaaatactcgaagaggcagcagggcgccctgtaaggtgcagggactggaaggcatcaagatggcaatggtagcctgcggcgacgcgtttacagttgcgataggagctgagtcggaagtgtacagctggggaaagggcgccaggggtcgtctgggcaggagagacgaagatgctggtctgcccaggcctgtgcagctggatgagacccacccctatacagtgacatcagtgtcctgttgtcacggcaacaccctgcttgccgtccggtcagtcaccgatgagcctgtacccccttag

SEQ ID NO: 253527 - DNA, 2079 bp, Artificial Sequence
  derived and/or modified sequence
atggagaagtatgaaagaatccgggtggtgggccgcggggcctttggaattgtgcacctgtgcctgaggaaggctgaccagaagctggtgatcatcaagcagatccctgtggagcagatgaccaaggaggagcggcaggccgcccagaatgaatgccaggtgctgaagctgctgaaccaccccaacgtcatcgagtactatgagaacttcctggaggacaaggccctgatgattgccatggagtatgcccctgggggcaccctggccgagttcatccagaagcgctgcaacagcctgctggaggaggagaccatcctgcacttctttgtgcagatcctgctggccctgcaccacgtgcacacccacctgatcctgcaccgggacctgaagacccagaacatcctgctggacaagcacaggatggtggtgaagattggagactttggcatcagcaagatcctgagcagcaagagcaaggcctacacagtggtgggcaccccctgctacatcagccctgagctgtgtgagggcaagccctacaaccagaagagtgacatctgggccctgggctgtgtgctgtatgagctggccagcctgaagagggcctttgaagctgccaacctgcctgccctggtgctgaagatcatgagcggcacctttgcccccatcagtgaccgctacagccctgagctgcggcagctggtgctgagcctgctgagcctggagcccgcccagaggcctcccctgagccacatcatggcccagcccctgtgcatccgggccctgctgaacctgcacacagatgtgggctctgtgaggatgagaagagctgagaagtctgtggcccccagcaacacaggcagcaggaccacctctgtgcgctgccggggcatcccccggggccctgtgcggcctgccatccccccacccctgagctctgtgtatgcctggggcggcggcctgggcacccccctgcggctgcccatgctgaacacagaggtggtgcaggtggccgccggccgcacccagaaggccggcgtgaccaggagcggccgcctcatcctgtgggaggccccacccctgggcgccggcggcggcagcctgctgcccggggctgtggagcagccccagccccagttcatcagccgcttcctggagggccagagcggcgtgaccatcaagcacgtggcctgtggggacttcttcaccgcctgcctgacagaccggggcatcatcatgacctttggaagtggcagcaatggctgcctgggccacggcagcctgacagacatcagccagcccaccatcgtggaggccctgctgggctatgagatggtgcaggtggcctgtggggccagccacgtgctggccctgagcacagagcgggagctgtttgcctggggccgcggggacagcggccgcctgggcctgggcacccgggagagccacagctgcccccagcaggtgcccatgcctcctggccaggaggcccagagggtggtgtgtggcatcgacagctccatgatcctgactgtgcccggccaggccctggcctgtggcagcaaccgcttcaacaagctgggcctggaccacctgagcctgggggaggagcctgtgccccaccagcaggtggaggaggccctgtccttcaccctgctgggcagcgcccccctggaccaggagcccctgctgagcattgacctgggcacagcccacagcgctgctgtgacagccagcggggactgctacaccttcggcagcaaccagcacggccagctgggcaccaacacccggcggggcagccgggccccctgcaaggtgcagggcctggagggcatcaagatggccatggtggcctgtggagatgccttcaccgtggccatcggggctgagagcgaggtgtacagctggggcaaaggagcccggggccgcctgggcagaagagatgaagatgctggcctgcccaggcctgtgcagctggatgagacccacccctacacagtgacctctgtgtcctgctgccacggcaacaccctgctggccgtgcgctctgtgacagatgagcctgtgcccccatag

SEQ ID NO: 253528 - DNA, 2079 bp, Artificial Sequence
  derived and/or modified sequence
atggagaagtacgagcggatccgggtggtgggccggggcgccttcggtatagtgcatctgtgcctgcgcaaggctgaccagaagctcgttattatcaaacagatccccgtggaacaaatgaccaaagaggaacgtcaggcagcacagaatgagtgccaggttctgaagttacttaaccacccgaatgtaattgaatactacgaaaacttcttggaggacaaggcccttatgattgccatggaatacgcgcctggagggacgcttgcggagtttattcagaaaagatgtaacagcctgctcgaagaagagacaatcctccacttttttgttcagatcctgctggcgctgcaccacgtccatactcacctgattctccatagagatttgaagacccagaatatcctcctcgataagcacaggatggttgtgaaaattggagatttcggcatcagtaaaatactgagtagcaagagcaaggcttacaccgtggtgggaacaccgtgctatatttcacctgagctgtgtgagggaaaaccgtataaccagaagtccgatatttgggccctggggtgtgtgctgtatgaactggccagcttgaagagggctttcgaagccgcaaatctgccagcgcttgtgctcaagatcatgtccggaactttcgccccgatttctgaccgctattcccccgaactgcgccagctagtactcagtttactgtcacttgaaccagcacaaagacctcctctgtcccacataatggcccagccgctctgcattcgcgcattgctgaatttgcatacagatgtgggttctgtgaggatgaggagagcagaaaagtcagtggcaccgtccaacactggcagccgcacaacgtcagttaggtgccgagggatccccagaggtcccgtcagaccggctattcctcctccactgtcttcagtttatgcttggggcggcggccttggaacacccctacggttgccaatgctcaacacagaagtcgtccaggtcgccgccggccgtacacagaaagcgggcgttactcgctcaggaaggctcatcctgtgggaggcacctcccctgggggcgggcgggggaagcctcctgcctggagccgttgagcagccacagccacaatttattagtaggttcctcgaagggcaatccggtgtgaccatcaagcatgttgcatgtggggacttttttactgcttgcctcacagataggggcatcatcatgaccttcggctccggttccaatggttgcctcggacatggctccttgaccgacatctctcagcccaccattgtggaggcattgcttggatatgaaatggtgcaggtagcatgcggggcgagccatgtccttgcactgtcaaccgaacgtgaacttttcgcgtggggccgcggcgattcaggtcgtttgggccttggcactagagaaagccattcctgtccacagcaggttccgatgccccctggccaggaagctcagcgcgtcgtatgtggcatcgattcgtcgatgattctcaccgtacctgggcaggctctggcatgtgggtctaacagattcaacaagctggggctggaccatctaagtcttggcgaggagcccgtgccacaccagcaggtggaagaggccctgtcctttaccctccttggctccgctcccctggaccaggagcccttgctgtctatcgatctaggtacagcccactctgcagctgtgaccgcatctggtgattgctacacgttcggtagtaaccagcacggccaactgggcacaaacacccggcgaggctcaagagccccatgcaaagtccagggactcgaaggcattaaaatggccatggtggcttgtggtgatgcttttaccgttgcgattggagctgagtcagaagtctattcttggggcaagggcgctcgaggtcgtttaggtcgcagagacgaggacgccggattaccccgtccagtgcagctggatgaaactcacccgtatactgtaacatccgttagttgctgccacgggaacaccctgctggcagtccggagcgtgaccgatgagcccgttcctccctag

SEQ ID NO: 253529 - DNA, 2858 bp, Artificial Sequence
  derived and/or modified sequence
atggagaagtacgagcggatccgagtggtggggagaggtgccttcgggattgtgcacctgtgcctgcgaaaggctgaccagaagctggtgatcatcaagcagattccagtggaacagatgaccaaggaagagcggcaggcagcccagaatgagtgccaggtcctcaagctgctcaaccaccccaatgtcattgagtactacgagaacttcctggaagacaaagcccttatgatcgccatggaatatgcaccaggcggcactctggctgagttcatccaaaagcgctgtaattccctgctggaggaggagaccatcctgcacttcttcgtgcagatcctgcttgcactgcatcatgtgcacacccacctcatcctgcaccgagacctcaagacccagaacatcctgcttgacaaacaccgcatggtcgtcaagatcggtgatttcggcatctccaagatccttagcagcaagagcaaggcctacacggtggtgggtaccccatgctatatctcccctgagctgtgtgagggcaagccctacaaccagaagagtgacatctgggccctgggctgtgtcctctacgagctggccagcctcaagagggctttcgaggctgcgaacttgccagcactggtgctgaagatcatgagtggcacctttgcacctatctctgaccggtacagccctgagcttcgccagctggtcctgagtctactcagcctggagcctgcccagcggccaccactcagccacatcatggcacagcccctctgcatccgtgccctcctcaacctccacaccgacgtgggcagtgtccgcatgcggagggcagagaagtccgtggcccccagcaacacagggagcaggaccaccagtgtccgctgcagaggtatcccccggggacctgtgaggccagccatcccaccaccactgtcgtcagtgtatgcctggggtggtgggctgggcacccccctgcggctgccaatgctcaacacagaggtggtccaggtggcagctgggcgcacgcagaaagccggcgtcacgcgctctgggcgtctcatcctgtgggaggccccacccctaggtgcaggcggaggcagtctccttcctggggcagtggagcagccacagccccagttcatctcgcgtttcctggagggccagtcgggtgtgaccatcaagcacgtggcctgtggggacttcttcactgcctgcctgactgacagaggcatcatcatgacattcggcagcggcagcaatgggtgcctaggccatggcagcctcactgacatcagccagcccaccattgtggaggctttgctgggctatgaaatggtgcaggtggcctgtggggcctctcacgtgctggccctgtccactgagcgagaactatttgcctggggccgtggagacagcggcagactggggctaggcaccagggagtcccacagctgcccccagcaggtgcccatgcccccaggacaggaagctcagcgagttgtatgtggtatcgattcctccatgatcctcactgtgcctggccaagccctagcctgtgggagcaacaggttcaacaagctgggcctggaccacctctccctgggggaggagcctgtcccccaccagcaagtggaggaggccctgagcttcacactactaggctctgcacccctggaccaggagcctctgctgagtatagacctgggcactgctcactcagctgctgtgactgcctcgggtgattgctacacttttggcagcaatcagcacggacagttgggcaccaatactcgccgaggcagtcgggcaccctgtaaggtccaaggccttgagggcatcaagatggcaatggtagcctgtggggatgccttcactgtagctattggggcagagagcgaagtgtactcttggggcaaaggggcgcgaggtcgattgggaaggagggatgaggatgccggactccctcggccagtgcagttggatgagacacacccttacacggtgacttccgtgtcctgttgccatggaaacaccctcctggctgttcgatcggtcacagatgagccggtccccccctgaggcacccggattcacctctggaccaccctgatattgcttctcctctgaatgctctgaaaagtgcaggtgcccaaggcatgacttgcagctgtctcctggattgtgtcatcatggggtatcagggctggcaaaacccctgctctgcttttggccttggatatggaaacctcaaccactttgttctcctaccacctctttgcccttcctaccccttcctcccttcagtcagtgtccccagggtccagcctggctagagttagaaggcagacctagcctttggaagcagggtggcctccagagccttgccataaaaaggctgaaggcagccgggcgcagtggctcacgcctgtaatcccagcactttgggaggctgaggcgggcggatcacgaggtcaggagatcgagaccatcctggctaacgtggtgaaaccccatctctactaaaaatacaaaaaaattagctgggcgtggtggcacgcgcctgtagtcccagctgctcaggaggctgaggcaggagaatggcgtaaacccctccagcctgggcgacagaaccagactccgtctcaaaaaaaaaaaaaaaacaaaaaaggctgaaggcagctgtagctccacacagaccctaccctttcccctagcccagttagaaaataagtctgggccggcggcggtggctcacacctgcataggcagtgctttggccaggaggatcccttgatcccttgtggccaggagttgggagaccagcctggggaccatagcgagaccgctgtctccaccaa

SEQ ID NO: 253530 - DNA, 2079 bp, Artificial Sequence
  derived and/or modified sequence
atggagaagtacgagcgtatcagagtggtggggcgtggggctttcggcattgtacacctctgcttgaggaaggcagatcagaagttggtgattataaagcaaattccagtggaacagatgaccaaggaggaaagacaggcggctcagaacgagtgccaggtgctgaaactcttgaatcatcctaacgtaatcgagtattacgaaaattttttagaagataaagccctcatgatcgcgatggagtacgccccaggcggtactctggccgagttcatacagaaaaggtgtaacagtttacttgaggaggaaaccatccttcatttttttgtgcagatccttctagctctccatcacgtccatacacacttgatcttgcatagagatctgaaaactcagaacatccttctcgacaaacatcgaatggtggtgaagattggggattttgggattagtaagatactgagctctaaatcgaaggcctacacggtggtggggacgccatgctacatttcgccagagttgtgcgaagggaaaccatataatcagaagtctgacatctgggctctgggttgcgttctttatgaacttgctagtctaaagagagccttcgaagccgctaacctcccggcattagtactcaaaattatgagtggcacgttcgccccaatttcagatcggtattcacctgaactgcggcagctcgtgctctccctgctttctctagagccggcacagaggcctcctttgtctcatataatggcacagccgctgtgcatccgagccttgttgaacctgcatactgatgtgggttccgtgcggatgcgcagggcagaaaaatccgtagccccttctaacacaggtagccgtaccaccagcgtacggtgccgtgggatcccacggggacccgtgaggccggcaattcctcctccactctcaagcgtttacgcttggggcggaggcctgggcacaccgctccgactcccaatgttgaacaccgaagtagtgcaagtggctgccggacgcacccaaaaggccggagtaacaagatcaggacgtctgatactctgggaggcacccccactgggcgcaggtggcggttccctgttgcccggtgctgttgagcagccacagccacagtttatttccaggttcctggagggacagtcaggcgtcactatcaaacacgtcgcctgtggtgatttttttacagcatgcctaacagaccgcggaatcataatgactttcggcagcggcagcaatgggtgcctgggccacggttctctgactgatatctcacagcccacaattgtcgaggctctgttagggtatgagatggttcaggtcgcttgtggcgcaagtcacgtgctggccctttccaccgagcgcgagctatttgcctggggaagaggtgactcagggagacttggcttaggcacaagggagtcccattcttgtccgcagcaggtgcccatgcccccagggcaggaagcacagcgggttgtgtgcggaattgacagcagtatgattttaacagtgcctggccaggccctggcatgtggcagtaaccgcttcaataaattgggcctggaccacctgagcctcggcgaggagcccgtgcctcaccagcaagttgaagaagctctgtccttcaccttactcggtagcgcacctctggatcaggaacccctcttgagtatcgatcttgggactgcccactcagccgcagttacggcttctggggactgttatacttttggctctaatcaacatggccagctaggcacgaacaccagaagagggtccagggctccatgcaaggttcagggtctcgaaggaattaagatggctatggtggcttgcggggatgctttcacagtagctatcggtgctgaaagcgaggtctactcctggggtaaaggagccaggggacgtttgggtaggcgtgacgaagacgcaggtcttccccgaccagtgcagctggatgaaactcacccttacactgtcaccagcgtctcctgctgtcatggcaacaccctcctggctgttaggtcagtcacagacgagcccgtcccaccttag

SEQ ID NO: 253531 - DNA, 2079 bp, Artificial Sequence
  derived and/or modified sequence
atggagaagtacgagagaatcagagtggtgggcagaggcgccttcggcatcgtgcacctgtgcctgagaaaggccgaccagaagctggtgatcatcaagcagatccccgtggagcagatgaccaaggaggagagacaggccgcccagaacgagtgccaggtgctgaagctgctgaaccaccccaacgtgatcgagtactacgagaacttcctggaggacaaggccctgatgatcgccatggagtacgcccccggcggcaccctggccgagttcatccagaagagatgcaacagcctgctggaggaggagaccatcctgcacttcttcgtgcagatcctgctggccctgcaccacgtgcacacccacctgatcctgcacagagacctgaagacccagaacatcctgctggacaagcacagaatggtggtgaagatcggcgacttcggcatcagcaagatcctgagcagcaagagcaaggcctacaccgtggtgggcaccccctgctacatcagccccgagctgtgcgagggcaagccctacaaccagaagagcgacatctgggccctgggctgcgtgctgtacgagctggccagcctgaagagagccttcgaggccgccaacctgcccgccctggtgctgaagatcatgagcggcaccttcgcccccatcagcgacagatacagccccgagctgagacagctggtgctgagcctgctgagcctggagcccgcccagagaccccccctgagccacatcatggcccagcccctgtgcatcagagccctgctgaacctgcacaccgacgtgggcagcgtgagaatgagaagagccgagaagagcgtggcccccagcaacaccggcagcagaaccaccagcgtgagatgcagaggcatccccagaggccccgtgagacccgccatccccccccccctgagcagcgtgtacgcctggggcggcggcctgggcacccccctgagactgcccatgctgaacaccgaggtggtgcaggtggccgccggcagaacccagaaggccggcgtgaccagaagcggcagactgatcctgtgggaggccccccccctgggcgccggcggcggcagcctgctgcccggcgccgtggagcagccccagccccagttcatcagcagattcctggagggccagagcggcgtgaccatcaagcacgtggcctgcggcgacttcttcaccgcctgcctgaccgacagaggcatcatcatgaccttcggcagcggcagcaacggctgcctgggccacggcagcctgaccgacatcagccagcccaccatcgtggaggccctgctgggctacgagatggtgcaggtggcctgcggcgccagccacgtgctggccctgagcaccgagagagagctgttcgcctggggcagaggcgacagcggcagactgggcctgggcaccagagagagccacagctgcccccagcaggtgcccatgccccccggccaggaggcccagagagtggtgtgcggcatcgacagcagcatgatcctgaccgtgcccggccaggccctggcctgcggcagcaacagattcaacaagctgggcctggaccacctgagcctgggcgaggagcccgtgccccaccagcaggtggaggaggccctgagcttcaccctgctgggcagcgcccccctggaccaggagcccctgctgagcatcgacctgggcaccgcccacagcgccgccgtgaccgccagcggcgactgctacaccttcggcagcaaccagcacggccagctgggcaccaacaccagaagaggcagcagagccccctgcaaggtgcagggcctggagggcatcaagatggccatggtggcctgcggcgacgccttcaccgtggccatcggcgccgagagcgaggtgtacagctggggcaagggcgccagaggcagactgggcagaagagacgaggacgccggcctgcccagacccgtgcagctggacgagacccacccctacaccgtgaccagcgtgagctgctgccacggcaacaccctgctggccgtgagaagcgtgaccgacgagcccgtgcccccctag

SEQ ID NO: 253532 - protein, 184 aa, Artificial Sequence
  derived and/or modified sequence
MKALGAVLLALLLCGRPGRGQTQQEEEEEDEDHGPDDYDEEDEDEVEEEETNRLPGGRSRVLLRCYTCKSLPRDERCNLTQNCSHGQTCTTLIAHGNTESGLLTTHSTWCTDSCQPITKTVEGTQVTMTCCQSSLCNVPPWQSSRVQDPTGKGAGGPRGSSETVGAALLLNLLAGLGAMGARRP

SEQ ID NO: 253533 - DNA, 555 bp, Artificial Sequence
  derived and/or modified sequence
atgaaggcgctgggggccgtgctcttggctctcctgctttgtggcagacctggcaggggtcaaactcagcaagaggaggaggaggaggacgaagatcacgggcccgatgattatgacgaggaggatgaggacgaggtggaagaggaggagactaacagattgccgggcggacgcagcagggtgctcctgcgctgctacacatgtaagagcttgccacgagacgagaggtgtaacctgactcagaactgctctcatggccaaacatgcaccacattgatcgcacatgggaacactgagtcgggactccttacaacacacagtacatggtgcactgatagctgtcagcccattaccaagacggtcgagggaacacaggttaccatgacatgctgtcagagcagcctttgtaacgtccccccttggcagtccagtcgggtccaagaccctacagggaagggcgccggcgggcctcggggctcgtcagagaccgtgggggctgcattgcttctgaatctcctggctggcttgggtgcaatgggggctagacgcccttag

SEQ ID NO: 253534 - DNA, 2281 bp, Artificial Sequence
  derived and/or modified sequence
ccttcatcccacttaccgcagctccagagccctgcgggaggactcagagtcagggacacagcagcgtccggcgagatgaaggcgctcggggctgtcctgcttgccctcttgctgtgcgggcggccagggagagggcagacacagcaggaggaagaggaagaggacgaggaccacgggccagatgactacgacgaggaagatgaggatgaggtggaagaggaggagaccaacaggctccctggtggcaggagcagagtgctgctgcggtgctacacctgcaagtccctgcccagggacgagcgctgcaacctgacgcagaactgctcacatggccagacctgcacaaccctcattgcccacgggaacaccgagtcaggcctcctgaccacccactccacgtggtgcacagacagctgccagcccatcaccaagacggtggaggggacccaggtgaccatgacctgctgccagtccagcctgtgcaatgtcccaccctggcaaagctcccgagtccaggacccaacaggcaagggggcaggcggcccccggggcagctccgaaactgtgggcgcagccctcctgctcaacctccttgccggccttggagcaatgggggccaggagaccctgacccacggcccctccccacccccacccggctcacccccggccctgccagcactctgtctggtaccttcccctcctgcccctgcaccagctttggagaatggatttggagtgtcttgggcgatccagccagcgcaggccccccggcccggttgcttcctcagttcccggctgtgtccttggtgtcctttctccaccacctgtgagcagcaagactgccgcacgtgggcgctgggtccagacctcggctgccacgccccaggacctgcagccctcatgggggctggggatccccatcagcacagccaggcagagatgatacccaccacacacctgggggcccccacacccagtcctcacccttaacttctgccatgggaattcctccatctgcagcggtcacacgggcccaccctgcccttccccaggtcggcctctccgctgtctggagggaaggggatttggagggaggctgtcgtcgcccccaggaaagacgggcctgggggaggcgggacagtgggagaggcgcgctgaggatgagagggcacagggaggtgggttggggtgaggccacatgcggaggggcggggcgggggggggctggggggacaggcaccaagtatgaagaggatggggccagcggggcctgtctggctctggcgtgagcaccgctatgggagaccctggcttggaaagtgaacttgcagccttggatggggaagggccagatgctgggtgggtgcctgtcaccttgaggtgaccatctagggcagtacctgctgggcttaggacagcgcctgaggctgggaatacctgtctctgctctagcagaggctaaagcaggctagagcagtggaggggtggagttgatgaaaggagaggagtagatgagatggaatttttccagcctcatcctggcctgccctctagactccagtccccaagccctcagcctagtgggtgtcatggatggatctgggggtgtcagacaggctaccctgtgccagggagggggcagaatgggcctgcagcttcctgcagaggaagcaggactgggtagcagagccgggaaggtgggtggcccattacaggggggtccccagggtgtcctctggcagggctgtgactgctgcaagctctgccttcaccagtagctggtgccaggacagagctctgggacagcaggcagaggccgagcctgggccacagctcagccactgacttgggtatcagtttccccttctgagaagtacagagtgagacttaaagaacccctagatccccaccagttcaacactccattaactgggaagcccagagtcctgtccggcctgccaagttcatcctggtggacagcgggaggcctccgctaactgttctcttcttttccttattaataaaacacacaatgcctagctggggggtcggaaggcaaatgccctagatggtggggtcacgtctttctccttctccttcctccttctgctggctgaagtgatgactggagctcagcaaccactttgcaccatgaggcagcactgagcacggtagggcagcctggtgagaggggcctagctcgctgccgacagaagtcactgcctacctcagggtccccttacctgggtgggaaataaatttctgctgtgttgaagcta

SEQ ID NO: 253535 - DNA, 555 bp, Artificial Sequence
  derived and/or modified sequence
atgaaggccctgggcgctgtgctgctggccctgctgctgtgtggccggcccggccggggccagacccagcaggaggaggaggaggaggatgaagatcatggcccagatgattatgatgaagaagatgaagatgaggtggaggaggaggagaccaaccggctgcccggcggccgcagccgggtgctgctgcgctgctacacctgcaagagcctgcccagagatgagcgctgcaacctgacccagaactgcagccacggccagacctgcaccaccctgattgcccacggcaacacagagagcggcctgctgaccacccacagcacctggtgcacagacagctgccagcccatcaccaagacagtggagggcacccaggtgaccatgacctgctgccagagcagcctgtgcaatgtgcccccctggcagagcagccgggtgcaggaccccaccgggaagggggccggcggcccccggggcagcagcgagaccgtgggcgccgccctgctgctgaacctgctggccggcctgggcgccatgggcgcccggcggccctag

SEQ ID NO: 253536 - DNA, 555 bp, Artificial Sequence
  derived and/or modified sequence
atgaaggccctgggcgccgtgctgctggccctgctgctgtgcggcagaccgggcagagggcagacccagcaggaggaggaggaagaagacgaagatcacggtcccgatgactacgatgaagaagacgaagacgaagtagaagaagaggagaccaatcgactgcccggcggaagatccagagtccttttacgatgttacacttgcaagtcacttccccgtgacgagcgctgtaatctcactcagaactgttcccatggacagacgtgcaccactctgattgcccatgggaataccgagtcaggcctgctgacaacacactccacctggtgcactgactcttgtcaacctatcacgaaaacagtggagggaactcaggtgactatgacatgttgccaatcgagcctctgtaacgtgccgccatggcaatcctctcgcgtccaggatccgaccgggaagggcgccggcggcccccgggggtcctccgagaccgtgggcgcggcgctgctgctcaatctcctggctgggttgggcgcaatgggcgccagacgcccatag

SEQ ID NO: 253537 - DNA, 555 bp, Artificial Sequence
  derived and/or modified sequence
atgaaggccctgggcgctgtcctgctcgcccttctgctctgcggcaggccgggaagggggcagacgcagcaggaggaggaagaggaagacgaggaccacggccctgacgattacgacgaggaagatgaggacgaagtcgaggaggaggagactaaccgattacccggagggagatcaagagttctcttacgatgctatacttgtaaaagtctaccccgtgacgaaagatgcaacctcacgcaaaactgcagtcacggtcaaacatgcaccacactgatcgcccacggtaacacagagtctggtctgctcacaacacattcaacctggtgcacagactcttgtcagcccatcacaaagactgtagaaggcacccaggtcactatgacgtgctgtcagagtagcctttgtaacgtccctccatggcagtcaagcagagtgcaagatccaacagggaaaggcgctggcggacctcgaggatctagtgagaccgttggcgctgcactgctcctgaacctgttggcagggctcggcgcaatgggggctaggcggccttag

SEQ ID NO: 253538 - DNA, 555 bp, Artificial Sequence
  derived and/or modified sequence
atgaaggccctgggcgccgtgctgctggccctgctgctgtgcggcagacccggcagaggccagacccagcaggaggaggaggaggaggacgaggaccacggccccgacgactacgacgaggaggacgaggacgaggtggaggaggaggagaccaacagactgcccggcggcagaagcagagtgctgctgagatgctacacctgcaagagcctgcccagagacgagagatgcaacctgacccagaactgcagccacggccagacctgcaccaccctgatcgcccacggcaacaccgagagcggcctgctgaccacccacagcacctggtgcaccgacagctgccagcccatcaccaagaccgtggagggcacccaggtgaccatgacctgctgccagagcagcctgtgcaacgtgcccccctggcagagcagcagagtgcaggaccccaccggcaagggcgccggcggccccagaggcagcagcgagaccgtgggcgccgccctgctgctgaacctgctggccggcctgggcgccatgggcgccagaagaccctag

SEQ ID NO: 253539 - protein, 311 aa, Artificial Sequence
  derived and/or modified sequence
MGLTLLLLLLLGLEGQGIVGSLPEVLQAPVGSSILVQCHYRLQDVKAQKVWCRFLPEGCQPLVSSAVDRRAPAGRRTFLTDLGGGLLQVEMVTLQEEDAGEYGCMVDGARGPQILHRVSLNILPPEEEEETHKIGSLAENAFSDPAGSANPLEPSQDEKSIPLIWGAVLLVGLLVAAVVLFAVMAKRKQGNRLGVCGRFLSSRVSGMNPSSVVHHVSDSGPAAELPLDVPHIRLDSPPSFDNTTYTSLPLDSPSGKPSLPAPSSLPPLPPKVLVCSKPVTYATVIFPGGNKGGGTSCGPAQNPPNNQTPSS

SEQ ID NO: 253540 - DNA, 936 bp, Artificial Sequence
  derived and/or modified sequence
atgggcctgaccctgctgctgctgctgctgctgggcctggagggccagggcatcgtgggcagcctgcccgaggtgctgcaggcccccgtgggcagcagcatcctggtgcagtgccactacagactgcaggacgtgaaggcccagaaggtgtggtgcagattcctgcccgagggctgccagcccctggtgagcagcgccgtggacagaagagcccccgccggcagaagaaccttcctgaccgacctgggcggcggcctgctgcaggtggagatggtgaccctgcaggaggaggacgccggcgagtacggctgcatggtggacggcgccagaggcccccagatcctgcacagagtgagcctgaacatcctgccccccgaggaggaggaggagacccacaagatcggcagcctggccgagaacgccttcagcgaccccgccggcagcgccaaccccctggagcccagccaggacgagaagagcatccccctgatctggggcgccgtgctgctggtgggcctgctggtggccgccgtggtgctgttcgccgtgatggccaagagaaagcagggcaacagactgggcgtgtgcggcagattcctgagcagcagagtgagcggcatgaaccccagcagcgtggtgcaccacgtgagcgacagcggccccgccgccgagctgcccctggacgtgccccacatcagactggacagcccccccagcttcgacaacaccacctacaccagcctgcccctggacagccccagcggcaagcccagcctgcccgcccccagcagcctgccccccctgccccccaaggtgctggtgtgcagcaagcccgtgacctacgccaccgtgatcttccccggcggcaacaagggcggcggcaccagctgcggccccgcccagaacccccccaacaaccagacccccagcagctag

SEQ ID NO: 253541 - DNA, 936 bp, Artificial Sequence
  derived and/or modified sequence
atgggtctgacattactgcttctgctgctcctcgggcttgaaggtcagggcatagtgggctcactgcctgaggtgttacaggcaccagtcgggagctcaatcctggtccagtgccactaccgcttgcaggatgtcaaagctcagaaggtgtggtgccgattcttgcctgaaggctgccaacccttggtgtccagcgccgtagacagacgcgcaccggcaggccggaggacatttctcactgatctcggcggtggcctcctgcaagttgagatggtaacactacaagaggaggatgctggtgagtatggttgcatggtcgacggagctaggggccctcaaatcttacaccgcgtgagcctgaacattcttcctccagaggaggaagaggaaacgcataagattgggtccttggccgaaaacgccttctccgaccctgccggctccgccaatcccctcgagccttcacaagacgagaagagtatcccactgatttggggcgcggtgctgctggtcggccttctggtcgcagccgtggttctttttgccgttatggccaagaggaagcagggtaacaggttgggggtgtgcggcaggttcctgtcaagcagggtgtccgggatgaacccgtcttctgtcgtgcaccatgtgtcagacagtggtccagctgctgaactgcccttagatgtgccccacatccgacttgacagcccgccttctttcgacaacaccacatatactagcctgcctcttgacagtccctcgggaaaaccatcgttgcctgcaccatcctccctgccccccctgccacccaaggttctcgtgtgtagtaagcctgtgacgtacgcaactgtgatctttcccggcggcaacaagggagggggaaccagctgcggcccagctcagaatcccccaaataaccagaccccctcctcctag

SEQ ID NO: 253542 - DNA, 936 bp, Artificial Sequence
  derived and/or modified sequence
atgggcctgaccctgctgctgctgctgctgctgggcctggagggccagggcatcgtgggcagcctgcctgaggtgctgcaggcccctgtgggcagcagcatcctggtgcagtgccactaccgcctgcaggatgtgaaggcccagaaggtgtggtgccgcttcctgcctgagggctgccagcccctggtgtcctctgctgtggacagaagagccccagctggaagaaggaccttcctgacagacctgggcggcggcctgctgcaggtggagatggtgaccctgcaggaggaggatgctggggagtatggctgcatggtggatggagcccggggcccccagatcctgcaccgggtgtccctgaacatcctgcccccagaggaggaggaggagacccacaagattggcagcctggctgaaaatgccttcagtgaccctgctggcagcgccaaccccctggagcccagccaggatgagaagagcatccccctcatctggggcgctgtgctgctggtgggcctgctggtggccgctgtggtgctgtttgctgtgatggccaagaggaagcagggcaaccggctgggcgtgtgtggccgcttcctgagcagccgggtgtctggcatgaaccccagctctgtggtgcaccacgtgtctgattctggccctgctgctgagctgcccctggatgtgccccacatccggctggacagccccccatcctttgacaacaccacctacaccagcctgcccctggacagccccagcggcaagcccagcctgcctgcccccagcagcctgccccccctgccccccaaggtgctggtgtgcagcaagcctgtgacctacgccaccgtcatcttccctgggggcaacaagggcggcggcaccagctgtggccctgcccagaacccccccaacaaccagacccccagcagctag

SEQ ID NO: 253543 - DNA, 936 bp, Artificial Sequence
  derived and/or modified sequence
atgggcctgaccctgctgctgctgctgctgctgggcctggagggccagggcatcgttggctccctgccagaagtgcttcaggccccagtgggatcctcaatccttgtacaatgccattacaggttgcaggacgtgaaggcccaaaaagtgtggtgccgctttctgcccgagggttgtcagccgttagtgagttctgcggtggatcggcgggcccccgcgggacggcggacgtttctgacagatttgggaggcggcttgctgcaagttgagatggtgaccctgcaggaagaggacgcaggagaatacggatgcatggtcgacggcgccagaggccctcaaatcctgcatcgggttagccttaacatcttgccccccgaggaggaggaggaaacccataagatcggatcactcgccgagaatgcgttcagcgaccccgctggtagcgctaacccactggagcccagtcaggatgaaaagtctattcccttaatctggggtgccgttttactggtggggctgttggtggctgccgtggtgctgttcgccgtgatggccaagaggaagcaaggcaataggcttggagtatgtggaaggttcctctcatcccgtgtttctggaatgaacccaagctcagtcgtgcaccacgtgagcgatagcggaccagccgctgaattgccacttgacgtccctcatatcaggctggattccccaccttcattcgacaacacaacttatacttccctgccacttgattcaccttccgggaaaccttctctgccagcaccctcctctctcccccctttgcctcctaaagtgctggtgtgcagtaaacccgtgacatacgccactgtgatctttccaggagggaacaaaggcggcggaaccagttgtgggccagcccagaacccaccaaataaccagaccccttcatcttag

SEQ ID NO: 253544 - DNA, 936 bp, Artificial Sequence
  derived and/or modified sequence
atgggtttgaccctcttactactcctgttactcggactcgagggccagggcatagtcgggagtctgcccgaggtcctgcaggctcccgttggctcatctatcctcgtgcagtgccactatcgactgcaagacgttaaggcccagaaggtgtggtgccgctttcttccagaaggctgccagccacttgtctcaagcgccgtcgatagacgggcaccagcaggcaggcgcacatttctgacagatctcgggggaggtcttctgcaggtggagatggtcaccctccaggaagaagacgcaggagagtatggatgtatggtagacggcgcacggggacctcagattctacaccgcgtgtctctgaatattctccctccagaggaggaagaagaaacacataagattggaagcctggctgagaacgccttcagcgacccggctggatccgcaaatcccttggagccttcacaggatgagaaatcgatacccctgatttggggcgctgtgctcctagtcggtttgctagtggcagcggtggtgttgtttgctgtcatggctaaacgaaaacaggggaacagactgggcgtctgcggcaggttcctgagtagccgggttagtggcatgaacccaagtagtgtggttcatcacgtctctgactctggtcctgctgcagaactgcccctagacgtgccccacattagactggattctcccccttctttcgataatacgacctacacctcactacctctggattccccttccggcaagccatcactgccagcgccttcctctctcccacctctccctcctaaagtgctagtgtgtagcaagcccgtaacatacgccacagtgatattccctggaggaaacaagggcggtggcactagttgcgggccagcccagaatccccctaacaatcagacaccttcaagctag

SEQ ID NO: 253545 - DNA, 1287 bp, Artificial Sequence
  derived and/or modified sequence
ctgcccagccatgggcctcaccctgctcttgctgctgctcctgggactagaaggtcagggcatagttggcagcctccctgaggtgctgcaggcacccgtgggaagctccattctggtgcagtgccactacaggctccaggatgtcaaagctcagaaggtgtggtgccggttcttgccggaggggtgccagcccctggtgtcctcagctgtggatcgcagagctccagcgggcaggcgtacgtttctcacagacctgggtgggggcctgctgcaggtggaaatggttaccctgcaggaagaggatgctggcgagtatggctgcatggtggatggggccagggggccccagattttgcacagagtctctctgaacatactgcccccagaggaagaagaagagacccataagattggcagtctggctgagaacgcattctcagaccctgcaggcagtgccaaccctttggaacccagccaggatgagaagagcatccccttgatctggggtgctgtgctcctggtaggtctgctggtggcagcggtggtgctgtttgctgtgatggccaagaggaaacaagggaacaggcttggtgtctgtggccgattcctgagcagcagagtttcaggcatgaatccctcctcagtggtccaccacgtcagtgactctggaccggctgctgaattgcctttggatgtaccacacattaggcttgactcaccaccttcatttgacaataccacctacaccagcctacctcttgattccccatcaggaaaaccttcactcccagctccatcctcattgccccctctacctcctaaggtcctggtctgctccaagcctgtgacatatgccacagtaatcttcccgggagggaacaagggtggagggacctcgtgtgggccagcccagaatccacctaacaatcagactccatccagctaagctgctcatcacactttaaactcatgaggaccatccctaggggttctgtgcatccatccagccagctcatgccctaggatccttaggatatctgagcaaccagggactttaagatctaatccaatgtcctaactttactagggaaagtgacgctcagacatgactgagatgtcttggggaagacctccctgcacccaactcccccactggttcttctaccattacacactgggctaaataaaccctaataatgatgtgcaaactcttaatggctgaatgggaaaggaaactgcccaagtttgactaattgcttggcctgtgaatggaaaagactctggtct

SEQ ID NO: 253546 - DNA, 927 bp, Artificial Sequence
  derived and/or modified sequence
cagtgcccaggcaagcccaggagttgacatttctctgcccagccatgggcctcaccctgctcttgctgctgctcctgggactagaaggtcagggcatagttggcagcctccctgaggtgctgcaggcacccgtgggaagctccattctggtgcagtgccactacaggctccaggatgtcaaagctcagaaggtgtggtgccggttcttgccggaggggtgccagcccctggtgtcctcagctgtggatcgcagagctccagcgggcaggcgtacgtttctcacagacctgggtgggggcctgctgcaggtggaaatggttaccctgcaggaagaggatgctggcgagtatggctgcatggtggatggggccagggggccccagattttgcacagagtctctctgaacatactgcccccagaggaagaagaagagacccataagattggcagtctggctgagaacgcattctcagaccctgcaggcagtgccaaccctttggaacccagccaggatgagaagagcatccccttgatctggggtgctgtgctcctggtaggtctgctggtggcagcggtggtgctgtttgctgtgatggccaagaggaaacaagaatccctcctcagtggtccaccacgtcagtgactctggaccggctgctgaattgcctttggatgtaccacacattaggcttgactcaccaccttcatttgacaataccacctacaccagcctacctcttgattccccatcaggaaaaccttcactcccagctccatcctcattgccccctctacctcctaaggtcctggtctgctccaagcctgtgacatatgccacagtaatcttcccgggagggaacaagggtggagggacctcgtgtgggccagcccagaatccacctaacaatcagactccatccagctaa

SEQ ID NO: 253547 - protein, 341 aa, Artificial Sequence
  derived and/or modified sequence
MGVATTLQPPTTSKTLQKQHLEAVGAYQYVLTFLFMGPFFSLLVFVLLFTSLWPFSVFYLVWLYVDWDTPNQGGRRSEWIRNRAIWRQLRDYYPVKLVKTAELPPDRNYVLGAHPHGIMCTGFLCNFSTESNGFSQLFPGLRPWLAVLAGLFYLPVYRDYIMSFGLCPVSRQSLDFILSQPQLGQAVVIMVGGAHEALYSVPGEHCLTLQKRKGFVRLALRHGASLVPVYSFGENDIFRLKAFATGSWQHWCQLTFKKLMGFSPCIFWGRGLFSATSWGLLPFAVPITTVVGRPIPVPQRLHPTEEEVNHYHALYMTALEQLFEEHKESCGVPASTCLTFI

SEQ ID NO: 253548 - DNA, 2132 bp, Artificial Sequence
  derived and/or modified sequence
cactcacacacctacggacacacgctactctgggaggtgatttgcgacttagccaggcccccaaagctgggctcctgtagggagaaagtctgcccaggtccacatccaagccttcatcgtttgtcctccgggttctgggatcctgctggaagaggggagcttctgcaatgggagttgccacaaccctgcagcccccaaccacttccaaaaccttgcagaagcagcatctagaagcagtgggcgcctaccaatatgtgctcactttcctcttcatgggccctttcttctcccttcttgtctttgtcctcctcttcacgtcactctggcccttctctgttttttacttggtgtggctctatgtggactgggacacacccaaccaaggtggaaggcgttcggagtggataaggaaccgggcaatttggagacaactaagggattattatcctgtcaagctggtgaaaacagcagagctgcccccggatcggaactacgtgctgggcgcccaccctcatgggatcatgtgtacaggcttcctctgtaatttctccaccgagagcaatggcttctcccagctcttcccggggctccggccctggttagccgtgctggctggcctcttctacctcccggtctatcgcgactacatcatgtcctttggactctgtccggtgagccgccagagcctggacttcatcctgtcccagccccagctcgggcaggccgtggtcatcatggtggggggtgcgcacgaggccctgtattcagtccccggggagcactgccttacgctccagaagcgcaaaggcttcgtgcgcctggcgctgaggcacggggcgtccctggtgcccgtgtactcctttggggagaatgacatctttagacttaaggcttttgccacaggctcctggcagcattggtgccagctcaccttcaagaagctcatgggcttctctccttgcatcttctggggtcgcggtctcttctcagccacctcctggggcctgctgccctttgctgtgcccatcaccactgtggtgggccgccccatccccgtcccccagcgcctccaccccaccgaggaggaagtcaatcactatcacgccctctacatgacggccctggagcagctcttcgaggagcacaaggaaagctgtggggtccccgcttccacctgcctcaccttcatctaggcctggccgcggcctttcgctgagcccctgagcccaaggcactgagacctccacccactgtggactccatgcctccaataaaaggtagttctgggcccagcgcagtgcctcatgcctgtaatcccagcactttgggaggccaaggtgggaggatcgtttgagcccaggagttgaagaccagcctgggcaacacagtgagacttcatttctacaaaaattaaaaaataatgttgttaattagccgggcatggtggcatgtgcctgtaatcccagctatttgggaggctgaggcaggagacttgcttaaacccaggaggcggaggttgcagtgagctgagatcacaccacagtactccagcctgggcaacacagcgagactcaatctcaaaaaaaaaaaaaaaaaaaaaaaaaagactgttaaagctgtagtaggctgggcgtggtggctcatgcccataatcccaacactttgggaagccgaggcaggtggatcaactgaggtcaggagttcaagaccagcctggccaaaatggcaaaaccccctctctactaaaactacaaaaattagccgggcatggtggctcatgcctataatcccagctactccggaggctgaggcaggagaatcgcttgaacccaggaggcagaggttgcagtgagccgagatcacaccactgcactccagtctgggcaacagagcgagattccatctcaaaaaaaaaaaaatgttgttaaagctataatcgttctggaagtgaacatggccaggcatgacctgcccccatcctgatgtgctacaaagctgctgccttagattgggtatcaggaccctgaactgtcctcccagtgagagttcagtctgtggcatgaccttggacaagcctcttccttttgcctgtttacttctttgtctgtaaataaaggcatctgcttagcaaa

SEQ ID NO: 253549 - DNA, 1026 bp, Artificial Sequence
  derived and/or modified sequence
atgggcgtggcaactaccttgcaacctcccacgacctctaagaccttgcaaaagcaacacctagaggctgtgggagcttaccagtacgttttaaccttcctgtttatgggaccttttttctctttgctcgtttttgtgctgctgttcacaagcctctggcctttcagcgtgttttacctcgtgtggttatatgtggattgggatacccctaatcaaggtggccgccgcagcgagtggattaggaatcgcgccatctggagacagctccgcgactattaccccgtgaagctcgtgaaaaccgcggagctccctccggatagaaactatgtcctgggtgcacacccccatggtatcatgtgcactgggttcctctgtaactttagcaccgagagtaacggtttctcccagctcttccccggcctgcgaccctggctggccgtcttggccggattattctatcttccggtgtaccgcgattacattatgagctttggactgtgtccggtgtccaggcagtctttggactttatcctcagccagccacagttgggacaagcggtggtcattatggtaggcggcgctcacgaggccctgtattctgtgccaggagaacactgtctaaccctacagaagcgcaaggggtttgtccggcttgctctgcgccacggtgcatccctggttccagtttattcctttggtgagaatgatatcttcaggctaaaggcgtttgccactggctcctggcaacactggtgtcagctgacatttaagaaattgatgggcttcagcccctgcatattttggggacggggtctgtttagtgcaacctcctggggactgctgcctttcgctgtacccatcaccaccgttgtggggcggcccatccccgttccacagcggttgcaccctactgaagaagaggtcaatcattatcatgccctatatatgactgctctggaacagctgtttgaagaacacaaggaaagttgtggcgtaccagcttctacatgtcttacctttatctag

SEQ ID NO: 253550 - DNA, 1026 bp, Artificial Sequence
  derived and/or modified sequence
atgggcgtggccaccaccctgcagccccccaccaccagcaagaccctgcagaagcagcacctggaggccgtgggcgcctaccagtatgtgctgaccttcctgttcatgggccccttcttcagcctgctggtgtttgtgctgctcttcaccagcctgtggcccttcagcgtcttctacctggtgtggctgtatgtggactgggacacccccaaccagggcggcagaagaagtgagtggatccggaacagagccatctggaggcagctgcgggactactaccctgtgaagctggtgaagacagctgagctgcccccagacagaaattatgtgctgggcgcccacccccacggcatcatgtgcaccggcttcctgtgcaacttcagcacagagagcaatggcttcagccagctgtttcctggcctgcggccctggctggccgtgctggccggcctcttctacctgcctgtgtacagagactacatcatgagctttggcctgtgccctgtgtcccggcagagcctggacttcatcctgagccagccccagctgggccaggccgtggtgatcatggtgggcggggcccacgaggccctgtacagcgtgcctggagagcactgcctgaccctgcagaagaggaaaggatttgtgcggctggccctgcggcacggggccagcctggtgcctgtgtacagctttggagaaaatgacatcttccggctgaaggcctttgccaccggctcctggcagcactggtgccagctgaccttcaagaagctgatgggcttcagcccctgcatcttctggggccggggcctcttcagcgccacctcctggggcctgctgccctttgctgtgcccatcaccaccgtggtgggccggcccatccctgtgccccagaggctgcaccccacagaggaggaggtgaaccactaccacgccctgtacatgacagccctggagcagctgtttgaggagcacaaggagagctgtggggtgcctgccagcacctgcctgaccttcatctag

SEQ ID NO: 253551 - DNA, 1026 bp, Artificial Sequence
  derived and/or modified sequence
atgggcgtggccaccaccctgcagccccccaccaccagcaagaccctccaaaagcaacatctggaagctgtgggtgcataccagtacgttctgacatttctctttatgggacccttctttagtctgctcgtctttgtcctgctgttcactagcctgtggcccttcagcgtgttctatcttgtctggctctatgtcgactgggacacccccaatcaagggggacgtaggagcgaatggattaggaacagggccatatggaggcagttgcgcgactactatccagtgaagctggtgaaaacggcggaacttcctccggaccggaactacgtactcggcgcccatccacacgggataatgtgtactgggtttctctgtaatttcagtaccgagagcaacggtttctcccagctattccctgggcttagaccttggctggccgtgctcgccggtctgttttatctgcctgtgtatagggattatataatgtcttttgggctgtgtcccgtctccagacagtccctcgactttatcctctctcagccacagctggggcaggctgtcgttattatggtgggcggagctcacgaggcactatactcggtgccaggtgagcactgcctgaccctgcagaagcggaagggattcgttaggctcgctttgcgccatggggccagcctcgttcctgtgtatagctttggggagaacgacatattccgtttaaaagcatttgccacgggcagctggcaacattggtgtcagctgactttcaagaagctgatggggttttcaccgtgtatattttggggcagagggctcttctcagccacatcttggggcctgctcccgtttgcggtgccaatcacaactgtggttggccggcctatccctgtaccccagagactgcatcctacagaagaggaagtaaaccattaccacgctctgtacatgaccgccctggagcagctattcgaggagcacaaggagtcatgcggtgtccctgccagcacctgtctcaccttcatttag

SEQ ID NO: 253552 - DNA, 1026 bp, Artificial Sequence
  derived and/or modified sequence
atgggggtagcgaccaccctccagccacctaccacctccaaaactttgcagaagcagcacctggaagccgtgggagcttatcagtatgtgctcacgttcctgttcatggggccatttttctccctgctcgtgtttgttctccttttcacaagtttgtggcccttttctgtcttttatcttgtatggctctacgttgattgggatacacctaatcaggggggtcggcgtagtgaatggattcgaaatcgagcaatctggcgtcagttacgagactattaccctgtgaagcttgtgaaaacagccgaactgccaccagatagaaactacgtgctgggagcgcacccccacgggattatgtgtaccgggttcttgtgtaacttttccacagagtccaatggattttcacagttatttccaggcctccgaccttggcttgctgtgctggccggattgttctatctgcctgtatacagggattacatcatgtctttcggactctgccccgtgagccggcagtcactggacttcatcctcagccagcctcagctggggcaggccgttgtgataatggttggaggagcgcatgaagccctgtactccgtcccaggagaacattgtctcacgctgcagaagagaaaaggattcgtgcggctggcactccggcatggagccagtctggtccccgtctactccttcggtgaaaacgatatcttcagactaaaagcgttcgcgactggttcatggcagcattggtgtcaacttacctttaagaagctcatggggttcagcccttgcatattttggggacgcggactgttctccgctacctcttggggattgctgccctttgctgtgcccattactactgtggtgggcaggcctatccctgtgccccagagactacatcccacagaggaggaggtcaaccactaccacgccctctatatgaccgccttagagcagctctttgaggagcataaggagtcttgcggagttccagccagtacttgtctgacattcatctag

SEQ ID NO: 253553 - DNA, 1026 bp, Artificial Sequence
  derived and/or modified sequence
atgggcgtggccaccaccctgcagccccccaccaccagcaagaccctgcagaagcagcacctggaggccgtgggcgcctaccagtacgtgctgaccttcctgttcatgggccccttcttcagcctgctggtgttcgtgctgctgttcaccagcctgtggcccttcagcgtgttctacctggtgtggctgtacgtggactgggacacccccaaccagggcggcagaagaagcgagtggatcagaaacagagccatctggagacagctgagagactactaccccgtgaagctggtgaagaccgccgagctgccccccgacagaaactacgtgctgggcgcccacccccacggcatcatgtgcaccggcttcctgtgcaacttcagcaccgagagcaacggcttcagccagctgttccccggcctgagaccctggctggccgtgctggccggcctgttctacctgcccgtgtacagagactacatcatgagcttcggcctgtgccccgtgagcagacagagcctggacttcatcctgagccagccccagctgggccaggccgtggtgatcatggtgggcggcgcccacgaggccctgtacagcgtgcccggcgagcactgcctgaccctgcagaagagaaagggcttcgtgagactggccctgagacacggcgccagcctggtgcccgtgtacagcttcggcgagaacgacatcttcagactgaaggccttcgccaccggcagctggcagcactggtgccagctgaccttcaagaagctgatgggcttcagcccctgcatcttctggggcagaggcctgttcagcgccaccagctggggcctgctgcccttcgccgtgcccatcaccaccgtggtgggcagacccatccccgtgccccagagactgcaccccaccgaggaggaggtgaaccactaccacgccctgtacatgaccgccctggagcagctgttcgaggagcacaaggagagctgcggcgtgcccgccagcacctgcctgaccttcatctag

SEQ ID NO: 253554 - DNA, 648 bp, Artificial Sequence
  derived and/or modified sequence
atgtatcaagtaatccagggaatcattagcccagtaaatgatacgtatggtaaaaaggatctggctgcatcccaccatcgggtggcaatggcccggctcgccttgcagaccagcgattggatcagggttgacccatgggagtcagagcaggcacagtggatggagaccgtgaaggtgttgcgacaccatcatagcaagctgctaagaagtccaccccaaatggagggcccagaccatggcaaagccctattctcaacgcctgccgcagtgcccgagttaaaactgctctgtggcgcggatgtgttgaaaacatttcagacacccaatctgtggaaggacgcacatattcaagagatcgtggagaaatttggcttggtgtgcgtcgggcgggtgggacatgaccccaagggatatattgccgagagtcctatcctgaggatgcaccagcataacatccacctcgcaaaggaaccggtgcagaacgagatcagtgccacatatatccggagggccctcgggcagggccaaagcgtgaagtacctgattcctgacgccgtgattacatatataaaagatcacggactgtacaccaagggcagcacttggaaaggaaaaagcactcagtctaccgaaggtaaaacctcgtag

SEQ ID NO: 253555 - DNA, 648 bp, Artificial Sequence
  derived and/or modified sequence
atgtaccaggttatccaagggattatctccccagtgaatgatacttacggcaagaaggatctggccgcatcccaccatcgagttgccatggcaagactggctcttcagaccagcgactggatccgggtggatccatgggaaagcgagcaggcccagtggatggaaacggtaaaggtgttaagacaccatcactcaaaacttcttaggagtccaccacagatggagggcccagaccatgggaaggccctgttcagtacacccgccgctgtgcccgaattaaaactgctttgcggagcggatgtcctcaagacttttcagaccccgaatctgtggaaagacgcacatatacaagagatcgtcgagaaattcggactggtgtgtgtagggcgtgttggtcatgaccctaaggggtacattgctgaatcacctattcttaggatgcaccagcataacattcacctcgctaaagaacctgtccagaacgaaatctccgcaacctacatccggagagcactaggtcaggggcaatccgtgaaatatttgatccctgacgctgtcattacctacatcaaggaccacggactgtacaccaagggcagtacatggaaagggaaaagcacgcaatccacagaaggtaagacctcctag

SEQ ID NO: 253556 - DNA, 648 bp, Artificial Sequence
  derived and/or modified sequence
atgtaccaggtgatccagggcatcatcagccctgtgaatgacacctacggcaagaaggacctggccgccagccaccaccgggtggccatggcccggctggccctgcagaccagtgactggatccgggtggacccctgggagagcgagcaggcccagtggatggagaccgtgaaggtgctgcggcaccaccacagcaagctgctgcggagccccccccagatggagggccctgaccacggcaaggccctcttcagcaccccagctgctgtgcctgagctgaagctgctgtgtggggctgatgtgctgaagaccttccagacccccaacctgtggaaggatgcccacatccaggagatcgtggagaagtttggcctggtgtgtgtgggccgggtgggccatgaccccaagggctacatcgccgagagccccatcctgaggatgcaccagcacaacatccacctggccaaggagcctgtgcagaatgagatcagcgccacctacatcagaagagccctgggccagggccagagcgtgaagtacctgatcccagatgctgtgatcacctacatcaaggaccacggcctgtacaccaagggcagcacctggaagggcaagagcacccagagcacagagggcaagaccagctag

SEQ ID NO: 253557 - DNA, 648 bp, Artificial Sequence
  derived and/or modified sequence
atgtaccaggtgatccagggcatcatcagccccgtgaacgacacctatggaaaaaaggacttagccgcatcgcatcaccgtgtggccatggctagacttgccctccaaactagcgattggatcagagtcgacccctgggagtccgagcaagcacagtggatggaaacagttaaagtgctgcgacaccatcattccaagctcttaagatcccccccccagatggaaggccccgaccacgggaaagctctgttttccacgccagccgctgtgcctgagctcaaactcctatgtggggccgatgtccttaagaccttccagacacccaacctctggaaagacgcgcatatccaggagatcgtggaaaaatttggactggtgtgtgtggggcgcgtggggcacgatcccaaagggtatattgcggaaagtcctatcctgaggatgcaccagcacaacattcacttagcaaaggagcccgtgcaaaatgagatcagcgcaacgtacatcaggcgcgctctcggtcaggggcagtcagtcaagtatctcatccctgatgccgtgataacgtatatcaaagaccacggactctacaccaaaggttcaacctggaaaggcaagagcacgcagagtacagaaggcaagacctcctag

SEQ ID NO: 253558 - DNA, 648 bp, Artificial Sequence
  derived and/or modified sequence
atgtaccaggtgatccagggcatcatcagccccgtgaacgacacctacgggaaaaaagaccttgctgccagccatcaccgtgtggcaatggcacgcttggcccttcagacgagcgattggatccgagtcgatccatgggaaagtgaacaggctcaatggatggagacagtgaaggtcttgaggcaccatcactccaagctgctgaggtctcctccacagatggagggccccgaccacggcaaggccctattctctacacctgcagctgtgcctgaacttaaactcctctgtggtgcagacgtcctaaagacattccagacgccaaatctgtggaaggatgctcacattcaagaaattgtggagaagttcggtcttgtgtgcgtaggccgtgttggccacgatcctaagggttacatagctgaatctcccatcctccgcatgcaccaacacaacatacatctggcgaaggaaccagtgcaaaatgagatatccgccacttacatcaggagggctctgggccaggggcagtccgtgaagtacctgatcccagacgccgtgatcacctacattaaagaccacgggctatatacgaaaggcagcacctggaagggcaagagtacacagagtactgaaggaaaaacctcttag

SEQ ID NO: 253559 - DNA, 2449 bp, Artificial Sequence
  derived and/or modified sequence
agggcccgccccagcgaaggggcggggcgcagatctgtttccctcagactccatctgcccggggccgctaagggagcgcaaggtcaagttcgccttggccccgcctccagctcaggtactaggggatctagacctgaggctgcccgggccggaggcagccttgagtcccgagaccaaacgtcgtttccctctcggacctcgggcgccgggccgcgcgctgaccgacagcccctgctaggcccagcaggtcccctagtcccccgcagtcccccgagactcgccgagcgccgttgctgagccctgcaaatagcagctacctgcttcagcctagatcctgccatgaagcggactgctgctccctggctcccactctgatctgcttttcactcttgccttgtctcccaattaataagcagggtggccactgcaacaggtgtggatgtgcctgacaagatgaagagccgaatacctgtggtgctcctggcctgtggctcctttaaccccatcaccaacatgcacctgcgcatgtttgaggtggccagagatcacctacaccaaacaggaatgtaccaggtcatccagggtatcatctctcctgtcaacgacacctatgggaagaaagacctcgcagcttctcatcaccgagtggccatggcccggctggccctgcagacatccgactggatccgggtggacccttgggagagtgagcaggcacagtggatggagacagtgaaggtgctgagataaagaaactgaggctcagagaggctacgttaatcacggtcacacacaaataggacgtggagctcccatctgtggagctctgaagccatgcttatggccatcttcaaaacagggatctgcaggctgggaacatgatgtggctggctttacacctcccacagttgccctccaatctttcctgaagaccagtgggactgctgaggacaccaagaacatgcccccagggtcaatccacaggcccaaggtaccactcaggcaggcagcaagaagcagttaatggtcatgccccatagaggcgcagtggaagtccctggcaaatgcatgttgtattggaagtaattatttccacaacaaagttcagagatccagctaatattcaaagtagggtcaacctgaactaggaccttcaaggcatcatcacagcaaactgctcagatctccaccccagatggaaggcccagaccatggcaaggcactcttctcgacccctgcagctgtgcctgagctgaagcttctctgtggggcagacgtcttgaagaccttccagacccccaacctctggaaggatgcgcacatccaggaaatagtggagaagtttggcttggtgtgcgtgggccgagtaggtcacgacccaaaaggttacatcgcagaatctcccatcctacggatgcaccagcacaacattcacctggccaaggagcctgtgcagaatgagatcagtgccacatacatcaggcgagccttgggccaagggcagagcgtaaagtacctgattcccgatgctgtcatcacgtacatcaaggaccatggcctctacaccaagggcagtacctggaaaggcaaaagcacccagagcactgagggcaagacaagctagggaggggggactcagcacccacacctcctccaacaagctcctgctggggagagggctgttaaggtttctgttttactttggtttttgcttctccatttttcatttgctttatttctacagtgattctacttctgaggagtcttctgtcccaggaagagataccttctttacaggagaggaaaggtctaaatcacaaggatagacatttatcaaagaagttaaaatggtgtggcaggtcattaggattaggcagaatctctcagagctgctggacaaggaggtctacttattttgtgtggatggtaattatggcatgcacgctgaatgcagttctgagcatggcagcggcccctgagggtcagatcagaattgcccacaatgtgttttttaactaggaccaggtgcagcatgctagtcttgattggaaagatttgacaggatgctaattactgaacagtgggttttgtcaacgccctggtttcagaatatgaactgaggagtcaaacagttggaaacagcacattgctgatttacactggatcttgccttagaaaccattgtctgcctgcctaaccagcttttcataaaatttaaacaaaactctttctacgtagtgatcctcaagcaatatttttgatacagcaagtgtcaaacttgctatagcataaaagccggggctcctgatttccaggtttctaaaaaggaactgaggtaaaacagatgcctgaccgttttaaaggatcttttttaatgttttatgactgcctgtctgtttgaatactggcaaagggataaataataaattgacatcaaaaagtactaatg

SEQ ID NO: 253560 - DNA, 648 bp, Artificial Sequence
  derived and/or modified sequence
atgtatcaggtaatccagggcattattagccccgttaacgacacctatggaaaaaaggatttagccgcatctcaccatcgcgtagctatggctcggttagccttgcagacatccgattggatccgggtggatccatgggagtcagaacaggctcagtggatggaaaccgtaaaggtgctgagacatcatcactctaaactgcttcgcagtccaccccagatggagggaccagaccatggcaaagctctgtttagtactcccgcagccgtcccggaactgaaattgctctgcggggcagacgtactgaaaacctttcagactccaaatctctggaaggatgcacacatccaggagatagtggagaagtttggcctggtgtgtgtgggtagagtgggacacgaccctaagggatacatcgctgagtctcctattctgaggatgcaccaacataatatccacttggccaaagagccagtgcagaatgaaatctctgcaacatatattaggcgggctttgggacagggccagtccgtgaagtacctcatccctgatgcagttatcacttatataaaagatcatggcctatacacaaaaggctcaacatggaaggggaaatcaacacaaagtacagaaggcaaaacatcttag

SEQ ID NO: 253561 - DNA, 648 bp, Artificial Sequence
  derived and/or modified sequence
atgtaccaagttattcagggcatcatcagcccagtaaacgatacatacgggaagaaggacctggccgctagtcaccatcgggtggccatggcgaggttagccttgcagacctctgattggataagggtcgacccatgggagtctgaacaggcacagtggatggaaacagtgaaagtgctgagacatcaccattcgaagcttcttcgatctccccctcagatggaaggacccgaccatggcaaagcgctcttctctacacctgcagctgtgcccgaactcaagctcctgtgtggcgctgatgtgctgaaaacctttcagaccccgaacctctggaaggacgctcacatacaggagatagtcgagaagttcgggctcgtgtgcgtgggcagggtgggacacgatcccaagggctacatagctgagtcccccattcttagaatgcaccagcacaacattcatctggctaaggagcctgttcaaaacgagatttcagctacatacattcggcgtgccttagggcagggacagagcgtaaaatacttgatccctgacgcggttattacatacattaaagatcacggactgtataccaaggggtctacttggaagggcaagtctacgcagtccaccgaggggaaaactagctag

SEQ ID NO: 253562 - DNA, 648 bp, Artificial Sequence
  derived and/or modified sequence
atgtaccaggtgatccagggcatcatcagccccgtgaacgacacctacggcaagaaggacctggccgccagccaccacagagtggccatggccagactggccctgcagaccagcgactggatcagagtggacccctgggagagcgagcaggcccagtggatggagaccgtgaaggtgctgagacaccaccacagcaagctgctgagaagccccccccagatggagggccccgaccacggcaaggccctgttcagcacccccgccgccgtgcccgagctgaagctgctgtgcggcgccgacgtgctgaagaccttccagacccccaacctgtggaaggacgcccacatccaggagatcgtggagaagttcggcctggtgtgcgtgggcagagtgggccacgaccccaagggctacatcgccgagagccccatcctgagaatgcaccagcacaacatccacctggccaaggagcccgtgcagaacgagatcagcgccacctacatcagaagagccctgggccagggccagagcgtgaagtacctgatccccgacgccgtgatcacctacatcaaggaccacggcctgtacaccaagggcagcacctggaagggcaagagcacccagagcaccgagggcaagaccagctag

SEQ ID NO: 253563 - protein, 343 aa, Artificial Sequence
  derived and/or modified sequence
MAGLNCGVSIALLGVLLLGAARLPRGAEAFEIALPRESNITVLIKLGTPTLLAKPCYIVISKRHITMLSIKSGERIVFTFSCQSPENHFVIEIQKNIDCMSGPCPFGEVQLQPSTSLLPTLNRTFIWDVKAHKSIGLELQFSIPRLRQIGPGESCPDGVTHSISGRIDATVVRIGTFCSNGTVSRIKMQEGVKMALHLPWFHPRNVSGFSIANRSSIKRLCIIESVFEGEGSATLMSANYPEGFPEDELMTWQFVVPAHLRASVSFLNFNLSNCERKEERVEYYIPGSTTNPEVFKLEDKQPGNMAGNFNLSLQGCDQDAQSPGILRLQFQVLVQHPQNESSE

SEQ ID NO: 253564 - DNA, 1032 bp, Artificial Sequence
  derived and/or modified sequence
atggctggtctcaattgcggagtctcgatcgccttgctaggcgtgctcctcttaggcgctgcaagactgccacggggggctgaggccttcgagattgccctcccccgcgaaagcaacataacagtgctgattaagctgggaactcccacactgctagctaagccgtgttacatcgtgatatccaaacgtcacattaccatgctgagtatcaagagcggtgagcgaattgttttcactttctcttgccagagtcccgagaaccacttcgtaattgagatccagaagaatattgactgcatgagcggcccttgcccattcggtgaagtacagcttcagccaagcacttcattgctccccactcttaaccgtacttttatctgggacgtaaaagctcacaagtctatcgggctggagttacagttttcaattcctcggttacgacagatcggtccaggcgagtcctgcccagacggcgttactcattcaatcagcggtcgtatcgacgctacagtggtaagaatcggcactttctgttccaatggaactgtgagcaggatcaagatgcaggaaggtgtgaagatggccctgcacctgccttggtttcacccccgtaacgttagcggcttctccattgcaaaccggagttccattaagaggctgtgcatcattgagtctgtctttgaaggggaggggagtgccaccctgatgtccgccaattaccctgaggggttcccagaggacgaactgatgacctggcagttcgtggtgcccgcccacttgcgcgcctcagtgagttttctgaacttcaatttgagtaactgcgaacggaaggaggaaagagtcgagtactatatccctggctccacaaccaatccggaggtattcaagctagaggataagcagcccggtaacatggccggaaatttcaatctctccctccaaggttgcgatcaagacgcccagagccccgggatcctccgcctacagttccaggtactggtccagcatccccaaaacgaaagctcggagtag

SEQ ID NO: 253565 - DNA, 1032 bp, Artificial Sequence
  derived and/or modified sequence
atggccggcctgaactgtggggtgtccatcgccctgctgggcgtgctgctgctgggcgccgcccggctgcccagaggagctgaggcctttgagatcgccctgccccgggagagcaacatcaccgtgctgatcaagctgggcacccccaccctgctggccaagccctgctacatcgtcatcagcaagaggcacatcaccatgctgagcatcaagagcggggagcgcatcgtgttcaccttcagctgccagagccctgagaaccactttgtgattgagatccagaagaacatcgactgcatgagcggcccctgcccctttggagaggtgcagctgcagcccagcaccagcctgctgcccaccctgaacagaaccttcatctgggatgtgaaggcccacaagagcatcggcctggagctgcagttcagcatcccccggctgcggcagatcggccctggagagagctgcccagatggagtgacccacagcatcagcggcagaattgatgccaccgtggtgcgcatcggcaccttctgcagcaatggcaccgtgagccgcatcaagatgcaggagggcgtgaagatggccctgcacctgccctggttccaccccagaaatgtgtctggcttcagcatcgccaacagaagcagcatcaagaggctgtgcatcattgaatctgtgtttgaaggagagggcagcgccaccctgatgtctgccaactacccagagggcttcccagaagatgagctgatgacctggcagtttgtggtgcctgcccacctgcgggcctctgtgtccttcctgaacttcaacctgagcaactgtgagaggaaggaggagcgggtggagtactacatccctggcagcaccaccaaccctgaggtgttcaagctggaggacaagcagcccggcaacatggccggcaacttcaacctgagcctgcagggctgtgaccaggatgcccagagccctggcatcctgcggctgcagttccaggtgctggtgcagcacccccagaatgaaagcagcgagtag

SEQ ID NO: 253566 - DNA, 1032 bp, Artificial Sequence
  derived and/or modified sequence
atggccggcctgaactgcggcgtgagcatcgccctgctgggcgtgctcctgctcggcgctgccaggttgccgaggggagccgaggctttcgagatagccctccctcgagaatcgaacattaccgtgcttataaagcttgggaccccaaccctactggctaagccttgctacatcgtgattagcaaacggcacataaccatgctatccatcaaaagcggcgagcggatcgtgtttacatttagttgccaatcccccgaaaatcactttgttatagagatccaaaaaaacatagattgtatgtcaggcccatgcccctttggggaagtccaactacaaccctctacctctctgctgcccaccctgaatcgaacattcatttgggatgtcaaggctcacaaatctattgggctcgagttacagtttagtataccacgtttgcgtcagatcgggcctggagaaagttgccccgacggggtaacccactccatcagcggccggatcgacgccacggtggtgaggattggcacattctgtagcaatgggaccgtctccaggataaagatgcaagaaggcgtgaaaatggcactgcaccttccttggttccatcctcgcaacgtgtccggctttagtatagcaaaccggtcaagcatcaagcgattgtgcataattgagagtgttttcgagggggaagggtcagctaccctcatgagtgccaactaccctgagggcttccctgaggacgagcttatgacctggcaatttgtggttcccgcgcatctgagagccagcgtatctttcctgaacttcaacttgagcaattgtgagcgaaaggaggagcgcgtggagtactacataccgggatctactacaaatcccgaggtgtttaagctagaagataaacaaccgggaaatatggctggtaacttcaacctatccttgcagggttgcgatcaggatgcacagtcacctggtatcttgaggctgcaatttcaggtcctggtccagcacccgcagaacgagagcagcgagtag

SEQ ID NO: 253567 - DNA, 1032 bp, Artificial Sequence
  derived and/or modified sequence
atggctgggctgaattgcggcgtcagtatagctctcctcggtgtgctcctgctcggtgccgctaggctgcctcggggagccgaagccttcgaaatcgctctccctcgtgaatcgaacattactgtgctaattaagctgggcactcctacgctattagctaaaccttgctacatcgtgatatccaagcgacatataacaatgctgtcaatcaagagtggagagcggatcgtgttcaccttcagctgccagtctcccgagaaccactttgttattgagattcaaaaaaacattgattgtatgtccgggccttgtccatttggggaggtgcagttgcagccaagcacaagtctgttgccaacccttaatcgtacatttatttgggacgtcaaggctcacaagtctattggacttgagctccagttcagcatccctcgactgaggcagataggcccaggtgagtcttgccccgacggcgttacccactccatttcaggtcggatagacgccaccgtggtgcggataggcacattttgttccaatggcactgtgtcgcggatcaagatgcaagaaggagtcaagatggctctgcatttgccatggtttcacccacgtaacgttagtggcttcagtatcgcgaacagatcttctattaagagactgtgtatcattgagtccgtgttcgaaggagaaggctcagcaaccctgatgagcgccaattatccagaaggatttccagaagacgagctgatgacctggcagttcgttgtgccagcacacctcagagcatccgtgtcattcctgaactttaatctaagcaactgcgaaagaaaggaagagagggttgaatactacatccctggtagtaccacaaatcccgaggtgttcaagctggaggataagcagcctggtaatatggccggaaatttcaatctgagcttacagggatgcgaccaggacgcccaatcccctggtatactccggctgcaatttcaagtgcttgtgcagcacccccaaaatgaaagtagcgagtag

SEQ ID NO: 253568 - DNA, 1416 bp, Artificial Sequence
  derived and/or modified sequence
gggcggggctcgggccggtccgcccgcgcgcaggtgagtgagccagggcggagcgcagctgcgccgggcttgggcgcctggggccgccgctccccaccgtcgttttccccaccgaggccgaggcgtcccggagtcatggccggcctgaactgcggggtctctatcgcactgctaggggttctgctgctgggtgcggcgcgcctgccgcgcggggcagaagcttttgagattgctctgccacgagaaagcaacattacagttctcataaagctggggaccccgactctgctggcaaaaccctgttacatcgtcatttctaaaagacatataaccatgttgtccatcaagtctggagaaagaatagtctttacctttagctgccagagtcctgagaatcactttgtcatagagatccagaaaaatattgactgtatgtcaggcccatgtccttttggggaggttcagcttcagccctcgacatcgttgttgcctaccctcaacagaactttcatctgggatgtcaaagctcataagagcatcggtttagagctgcagttttccatccctcgcctgaggcagatcggtccgggtgagagctgcccagacggagtcactcactccatcagcggccgaatcgatgccaccgtggtcaggatcggaaccttctgcagcaatggcactgtgtcccggatcaagatgcaagaaggagtgaaaatggccttacacctcccatggttccaccccagaaatgtctccggcttcagcattgcaaaccgctcatctataaaacgtctgtgcatcatcgagtctgtgtttgagggtgaaggctcagcaaccctgatgtctgccaactacccagaaggcttccctgaggatgagctcatgacgtggcagtttgtcgttcctgcacacctgcgggccagcgtctccttcctcaacttcaacctctccaactgtgagaggaaggaggagcgggttgaatactacatcccgggctccaccaccaaccccgaggtgttcaagctggaggacaagcagcctgggaacatggcggggaacttcaacctctctctgcaaggctgtgaccaagatgcccaaagtccagggatcctccggctgcagttccaagttttggtccaacatccacaaaatgaaagcagtgagtgagccccactttcctttttcttcctcctccagcaccttcgttgtttcctgggtagtctgcctgggtgaggctcccttcctgtttctcatctgtggcttctgaaacacttagactctggacccagcaagagtttcaggaagtgggttgctaggcagttagacaggcttgttggtgaacacccggtatgtagttccatttcagcacaataaaaagaaatcttgcattcaagatgctaaattgtttttaacgaa

SEQ ID NO: 253569 - DNA, 1032 bp, Artificial Sequence
  derived and/or modified sequence
atggccggcctgaactgcggcgtgagcatcgccctgctgggcgtgctgctgctgggcgccgccagactgcccagaggcgccgaggccttcgagatcgccctgcccagagagagcaacatcaccgtgctgatcaagctgggcacccccaccctgctggccaagccctgctacatcgtgatcagcaagagacacatcaccatgctgagcatcaagagcggcgagagaatcgtgttcaccttcagctgccagagccccgagaaccacttcgtgatcgagatccagaagaacatcgactgcatgagcggcccctgccccttcggcgaggtgcagctgcagcccagcaccagcctgctgcccaccctgaacagaaccttcatctgggacgtgaaggcccacaagagcatcggcctggagctgcagttcagcatccccagactgagacagatcggccccggcgagagctgccccgacggcgtgacccacagcatcagcggcagaatcgacgccaccgtggtgagaatcggcaccttctgcagcaacggcaccgtgagcagaatcaagatgcaggagggcgtgaagatggccctgcacctgccctggttccaccccagaaacgtgagcggcttcagcatcgccaacagaagcagcatcaagagactgtgcatcatcgagagcgtgttcgagggcgagggcagcgccaccctgatgagcgccaactaccccgagggcttccccgaggacgagctgatgacctggcagttcgtggtgcccgcccacctgagagccagcgtgagcttcctgaacttcaacctgagcaactgcgagagaaaggaggagagagtggagtactacatccccggcagcaccaccaaccccgaggtgttcaagctggaggacaagcagcccggcaacatggccggcaacttcaacctgagcctgcagggctgcgaccaggacgcccagagccccggcatcctgagactgcagttccaggtgctggtgcagcacccccagaacgagagcagcgagtag

SEQ ID NO: 253570 - protein, 1631 aa, Artificial Sequence
  derived and/or modified sequence
MERRAAGPGWAAYERLTAEEMDEQRRQNVAYQYLCRLEEAKRWMEACLKEELPSPVELEESLRNGVLLAKLGHCFAPSVVPLKKIYDVEQLRYQATGLHFRHTDNINFWLSAIAHIGLPSTFFPETTDIYDKKNMPRVVYCIHALSLFLFRLGLAPQIHDLYGKVKFTAEELSNMASELAKYGLQLPAFSKIGGILANELSVDEAAVHAAVLAINEAVERGVVEDTLAALQNPSALLENLREPLAAVYQEMLAQAKMEKAANARNHDDRESQDIYDHYLTQAEIQGNINHVNVHGALEVVDDALERQSPEALLKALQDPALALRGVRRDFADWYLEQLNSDREQKAQELGLVELLEKEEVQAGVAAANTKGDQEQAMLHAVQRINKAIRRRVAADTVKELMCPEAQLPPVYPVASSMYQLELAVLQQQQGELGQEELFVAVEMLSAVVLINRALEARDASGFWSSLVNPATGLAEVEGENAQRYFDALLKLRQERGMGEDFLSWNDLQATVSQVNAQTQEETDRVLAVSLINEALDKGSPEKTLSALLLPAAGLDDVSLPVAPRYHLLLVAAKRQKAQVTGDPGAVLWLEEIRQGVVRANQDTNTAQRMALGVAAINQAIKEGKAAQTERVLRNPAVALRGVVPDCANGYQRALESAMAKKQRPADTAFWVQHDMKDGTAYYFHLQTFQGIWEQPPGCPLNTSHLTREEIQSAVTKVTAAYDRQQLWKANVGFVIQLQARLRGFLVRQKFAEHSHFLRTWLPAVIKIQAHWRGYRQRKIYLEWLQYFKANLDAIIKIQAWARMWAARRQYLRRLHYFQKNVNSIVKIQAFFRARKAQDDYRILVHAPHPPLSVVRRFAHLLNQSQQDFLAEAELLKLQEEVVRKIRSNQQLEQDLNIMDIKIGLLVKNRITLQEVVSHCKKLTKRNKEQLSDMMVLDKQKGLKSLSKEKRQKLEAYQHLFYLLQTQPIYLAKLIFQMPQNKTTKFMEAVIFSLYNYASSRREAYLLLQLFKTALQEEIKSKVEQPQDVVTGNPTVVRLVVRFYRNGRGQSALQEILGKVIQDVLEDKVLSVHTDPVHLYKNWINQTEAQTGQRSHLPYDVTPEQALSHPEVQRRLDIALRNLLAMTDKFLLAITSSVDQIPYGMRYVAKVLKATLAEKFPDATDSEVYKVVGNLLYYRFLNPAVVAPDAFDIVAMAAGGALAAPQRHALGAVAQLLQHAAAGKAFSGQSQHLRVLNDYLEETHLKFRKFIHRACQVPEPEERFAVDEYSDMVAVAKPMVYITVGELVNTHRLLLEHQDCIAPDHQDPLHELLEDLGELPTIPDLIGESIAADGHTDLSKLEVSLTLTNKFEGLEADADDSNTRSLLLSTKQLLADIIQFHPGDTLKEILSLSASREQEAAHKQLMSRRQACTAQTPEPLRRHRSLTAHSLLPLAEKQRRVLRNLRRLEALGLVSARNGYQGLVDELAKDIRNQHRHRHRRKAELVKLQATLQGLSTKTTFYEEQGDYYSQYIRACLDHLAPDSKSSGKGKKQPSLHYTAAQLLEKGVLVEIEDLPASHFRNVIFDITPGDEAGKFEVNAKFLGVDMERFQLHYQDLLQLQYEGVAVMKLFNKAKVNVNLLIFLLNKKFLRK

SEQ ID NO: 253571 - DNA, 4896 bp, Artificial Sequence
  derived and/or modified sequence
atggagagaagagccgccggccccggctgggccgcctacgagagactgaccgccgaggagatggacgagcagagaagacagaacgtggcctaccagtacctgtgcagactggaggaggccaagagatggatggaggcctgcctgaaggaggagctgcccagccccgtggagctggaggagagcctgagaaacggcgtgctgctggccaagctgggccactgcttcgcccccagcgtggtgcccctgaagaagatctacgacgtggagcagctgagataccaggccaccggcctgcacttcagacacaccgacaacatcaacttctggctgagcgccatcgcccacatcggcctgcccagcaccttcttccccgagaccaccgacatctacgacaagaagaacatgcccagagtggtgtactgcatccacgccctgagcctgttcctgttcagactgggcctggccccccagatccacgacctgtacggcaaggtgaagttcaccgccgaggagctgagcaacatggccagcgagctggccaagtacggcctgcagctgcccgccttcagcaagatcggcggcatcctggccaacgagctgagcgtggacgaggccgccgtgcacgccgccgtgctggccatcaacgaggccgtggagagaggcgtggtggaggacaccctggccgccctgcagaaccccagcgccctgctggagaacctgagagagcccctggccgccgtgtaccaggagatgctggcccaggccaagatggagaaggccgccaacgccagaaaccacgacgacagagagagccaggacatctacgaccactacctgacccaggccgagatccagggcaacatcaaccacgtgaacgtgcacggcgccctggaggtggtggacgacgccctggagagacagagccccgaggccctgctgaaggccctgcaggaccccgccctggccctgagaggcgtgagaagagacttcgccgactggtacctggagcagctgaacagcgacagagagcagaaggcccaggagctgggcctggtggagctgctggagaaggaggaggtgcaggccggcgtggccgccgccaacaccaagggcgaccaggagcaggccatgctgcacgccgtgcagagaatcaacaaggccatcagaagaagagtggccgccgacaccgtgaaggagctgatgtgccccgaggcccagctgccccccgtgtaccccgtggccagcagcatgtaccagctggagctggccgtgctgcagcagcagcagggcgagctgggccaggaggagctgttcgtggccgtggagatgctgagcgccgtggtgctgatcaacagagccctggaggccagagacgccagcggcttctggagcagcctggtgaaccccgccaccggcctggccgaggtggagggcgagaacgcccagagatacttcgacgccctgctgaagctgagacaggagagaggcatgggcgaggacttcctgagctggaacgacctgcaggccaccgtgagccaggtgaacgcccagacccaggaggagaccgacagagtgctggccgtgagcctgatcaacgaggccctggacaagggcagccccgagaagaccctgagcgccctgctgctgcccgccgccggcctggacgacgtgagcctgcccgtggcccccagataccacctgctgctggtggccgccaagagacagaaggcccaggtgaccggcgaccccggcgccgtgctgtggctggaggagatcagacagggcgtggtgagagccaaccaggacaccaacaccgcccagagaatggccctgggcgtggccgccatcaaccaggccatcaaggagggcaaggccgcccagaccgagagagtgctgagaaaccccgccgtggccctgagaggcgtggtgcccgactgcgccaacggctaccagagagccctggagagcgccatggccaagaagcagagacccgccgacaccgccttctgggtgcagcacgacatgaaggacggcaccgcctactacttccacctgcagaccttccagggcatctgggagcagccccccggctgccccctgaacaccagccacctgaccagagaggagatccagagcgccgtgaccaaggtgaccgccgcctacgacagacagcagctgtggaaggccaacgtgggcttcgtgatccagctgcaggccagactgagaggcttcctggtgagacagaagttcgccgagcacagccacttcctgagaacctggctgcccgccgtgatcaagatccaggcccactggagaggctacagacagagaaagatctacctggagtggctgcagtacttcaaggccaacctggacgccatcatcaagatccaggcctgggccagaatgtgggccgccagaagacagtacctgagaagactgcactacttccagaagaacgtgaacagcatcgtgaagatccaggccttcttcagagccagaaaggcccaggacgactacagaatcctggtgcacgccccccacccccccctgagcgtggtgagaagattcgcccacctgctgaaccagagccagcaggacttcctggccgaggccgagctgctgaagctgcaggaggaggtggtgagaaagatcagaagcaaccagcagctggagcaggacctgaacatcatggacatcaagatcggcctgctggtgaagaacagaatcaccctgcaggaggtggtgagccactgcaagaagctgaccaagagaaacaaggagcagctgagcgacatgatggtgctggacaagcagaagggcctgaagagcctgagcaaggagaagagacagaagctggaggcctaccagcacctgttctacctgctgcagacccagcccatctacctggccaagctgatcttccagatgccccagaacaagaccaccaagttcatggaggccgtgatcttcagcctgtacaactacgccagcagcagaagagaggcctacctgctgctgcagctgttcaagaccgccctgcaggaggagatcaagagcaaggtggagcagccccaggacgtggtgaccggcaaccccaccgtggtgagactggtggtgagattctacagaaacggcagaggccagagcgccctgcaggagatcctgggcaaggtgatccaggacgtgctggaggacaaggtgctgagcgtgcacaccgaccccgtgcacctgtacaagaactggatcaaccagaccgaggcccagaccggccagagaagccacctgccctacgacgtgacccccgagcaggccctgagccaccccgaggtgcagagaagactggacatcgccctgagaaacctgctggccatgaccgacaagttcctgctggccatcaccagcagcgtggaccagatcccctacggcatgagatacgtggccaaggtgctgaaggccaccctggccgagaagttccccgacgccaccgacagcgaggtgtacaaggtggtgggcaacctgctgtactacagattcctgaaccccgccgtggtggcccccgacgccttcgacatcgtggccatggccgccggcggcgccctggccgccccccagagacacgccctgggcgccgtggcccagctgctgcagcacgccgccgccggcaaggccttcagcggccagagccagcacctgagagtgctgaacgactacctggaggagacccacctgaagttcagaaagttcatccacagagcctgccaggtgcccgagcccgaggagagattcgccgtggacgagtacagcgacatggtggccgtggccaagcccatggtgtacatcaccgtgggcgagctggtgaacacccacagactgctgctggagcaccaggactgcatcgcccccgaccaccaggaccccctgcacgagctgctggaggacctgggcgagctgcccaccatccccgacctgatcggcgagagcatcgccgccgacggccacaccgacctgagcaagctggaggtgagcctgaccctgaccaacaagttcgagggcctggaggccgacgccgacgacagcaacaccagaagcctgctgctgagcaccaagcagctgctggccgacatcatccagttccaccccggcgacaccctgaaggagatcctgagcctgagcgccagcagagagcaggaggccgcccacaagcagctgatgagcagaagacaggcctgcaccgcccagacccccgagcccctgagaagacacagaagcctgaccgcccacagcctgctgcccctggccgagaagcagagaagagtgctgagaaacctgagaagactggaggccctgggcctggtgagcgccagaaacggctaccagggcctggtggacgagctggccaaggacatcagaaaccagcacagacacagacacagaagaaaggccgagctggtgaagctgcaggccaccctgcagggcctgagcaccaagaccaccttctacgaggagcagggcgactactacagccagtacatcagagcctgcctggaccacctggcccccgacagcaagagcagcggcaagggcaagaagcagcccagcctgcactacaccgccgcccagctgctggagaagggcgtgctggtggagatcgaggacctgcccgccagccacttcagaaacgtgatcttcgacatcacccccggcgacgaggccggcaagttcgaggtgaacgccaagttcctgggcgtggacatggagagattccagctgcactaccaggacctgctgcagctgcagtacgagggcgtggccgtgatgaagctgttcaacaaggccaaggtgaacgtgaacctgctgatcttcctgctgaacaagaagttcctgagaaagtag

SEQ ID NO: 253572 - DNA, 4896 bp, Artificial Sequence
  derived and/or modified sequence
atggagcggcgagctgctggccctgggtgggctgcctacgaaagactgacagctgaggagatggacgagcagagacgccaaaacgtggcctaccagtacttgtgccgcctagaagaagcgaagagatggatggaggcgtgcctcaaagaggagttgccgagtcccgtggaactggaagaaagtcttagaaacggtgttttactggcgaaactcggccattgcttcgcgccatccgtcgtgcccctgaaaaagatctatgatgtggagcagctaagatatcaggccaccggcctccatttccggcacacagacaacattaacttttggttaagcgccattgcacacataggtttaccttctaccttcttccccgaaaccacagacatttatgacaagaagaatatgcctagggtcgtgtattgtatacacgcactttctctctttctattcaggcttgggctcgcccctcaaatacatgatctttacggcaaagttaagtttaccgctgaggagctgagtaacatggcatctgagctagcaaaatacgggctacagttgccagctttcagcaagataggcgggatattggccaatgagctgtccgtggacgaggcggcggtccacgctgccgtgctggcgattaacgaagccgtggaacggggagtcgtggaagataccttggctgcccttcagaacccaagcgcattgttagaaaacctgagagaacctctggctgctgtgtatcaggagatgctggcacaggccaaaatggaaaaggctgcgaatgcgcgaaaccatgatgatcgggagtcccaagatatttatgaccactatctcacccaggcagagattcaaggcaatattaatcatgtgaacgtccacggtgctctcgaggtggtagatgacgctctggagagacagagccccgaggctcttctcaaggctctccaggaccccgcattggccctgcggggagtgcggagggatttcgccgattggtacctcgaacaacttaactctgaccgcgaacaaaaagcgcaggagttgggcctggtcgagctgctggagaaagaagaggtccaggctggcgtcgccgccgccaacactaaaggagatcaggagcaagcaatgctgcatgctgtccaacggattaataaggcaataagacgtcgcgtggccgcggacactgtgaaggagctgatgtgccccgaggcccagcttcctcctgtctacccggtggcctcatccatgtatcagcttgagttagccgtcttgcaacagcagcagggagagctcggccaggaggagctatttgtggctgtcgagatgctgtcggccgtggttctgattaaccgcgcgctcgaggcacgggacgcaagcgggttctggagcagcctggtgaaccccgccacaggccttgcggaagttgaaggtgaaaacgcccagcggtacttcgacgcactcctgaaactaagacaggagcggggcatgggtgaggactttctgtcatggaacgacctgcaggctaccgtttcccaggtcaacgcacagacccaggaagaaaccgatcgcgtgttagctgtgtccctgattaatgaggctctagacaagggatctcccgagaagacgctgagtgctctgctcttgcccgccgccggtctggacgatgtctctttgccagttgcccctagatatcaccttctgctcgtggcagccaaacggcaaaaagcacaggttactggcgacccgggtgccgtcttgtggttggaggagataaggcagggggtggtccgcgctaatcaagacaccaacaccgcccaaagaatggcccttggcgtagccgcgattaatcaggcaatcaaagagggaaaggccgctcagactgaacgggtgcttcgcaatccagccgtggcactgagaggtgtggtccccgactgtgccaacggctaccagcgcgctttagagagcgcgatggctaagaagcagcggcctgcggataccgcattctgggtgcagcacgatatgaaagatggcacagcttactacttccatctccagacattccaggggatctgggagcagccccccgggtgtcctctgaacacctcccacctcaccagggaggagattcaaagtgccgttacaaaggtcacagccgcctatgacagacaacagctttggaaggctaatgtagggttcgtcatccagctccaggctcggcttcgcgggttcctggtacgccagaaattcgccgaacattctcactttctccgcacttggctccccgccgtaatcaagattcaagcccactggcgcggctaccgccagcgaaagatatatctggaatggctgcagtattttaaagcgaacctggacgccataatcaagatccaggcctgggcaagaatgtgggctgctaggcggcagtatctgagaaggctccactacttccagaaaaacgttaatagcatcgtcaagattcaggcattctttagagctagaaaagctcaggacgactatcgcatacttgtgcatgcacctcatccccccctcagtgtggttagaaggtttgcccacctgctcaaccagagccaacaggatttcctggcagaagctgaattattgaaactgcaagaggaggtggtgcgcaaaataaggtcgaaccagcagctggagcaagatttgaatatcatggacattaagatcggactcctggtgaagaataggatcacactgcaagaggtggtgtcccactgtaagaaacttactaaacggaacaaggaacaactcagcgatatgatggtgctggacaaacagaagggcttgaaaagtctcagcaaggagaaacggcagaaactggaggcatatcagcacctgttctatctgcttcagacccagcccatctatttggcaaagctgatctttcaaatgccccagaacaaaacaacaaagtttatggaggccgtcatcttttcactgtataactacgcctcgagtcgacgggaagcttacctgttactccagctgtttaagacggcgttacaggaggagatcaaaagtaaagtggagcagccgcaggacgtcgtgacaggcaaccccaccgtggtgaggttagttgtcaggttttatagaaatgggcgggggcagtcagcgctccaggaaatccttgggaaggtgattcaggatgttctcgaagataaggtccttagcgtgcacactgatccggtacacctctataagaattggattaaccagacggaggcgcaaaccggacaacgatcacatctcccatatgacgtgacgcccgagcaggcactatctcatcccgaggtccagagacgactggacatcgctctgaggaacctcctcgcaatgacagacaagttcttgttggccataaccagttctgtggatcaaattccatatggtatgaggtacgtggcaaaagtactaaaggcgacccttgccgagaagtttcctgacgcaaccgattccgaagtttacaaggtcgtgggaaatctgttgtactaccgatttctgaatccggcggtggtggcgcctgatgccttcgacatagttgccatggcagcgggcggcgccctggccgccccccagcgccatgcacttggagctgtggcccagcttctacagcatgctgctgccggcaaggctttctccggacagtctcaacaccttcgggttttgaatgactatctggaagaaacacatcttaaatttagaaagttcattcatagggcatgccaggtcccagaacccgaggagcgatttgcagttgacgagtactcagacatggtcgcagtggcaaagccaatggtgtacatcaccgtgggcgagttggtcaacacacaccgtctgctgttggagcaccaggactgcatcgctccggaccaccaagatcccctgcacgaacttctggaggatctcggggagctgccaacaattcctgacctgataggggaatcgatcgcggcagatggccatacagacctctcaaagttggaagtctccttgacattgaccaataaatttgagggactcgaagcagatgctgacgattctaacacacggagcctgctcttgtccacgaagcaactgctagctgatattattcaattccatcctggtgataccctgaaagagatcctgtccctgagcgcatcccgcgaacaggaggccgcccacaaacagttaatgagtaggcggcaggcttgtactgcccagaccccagaaccgctgaggcgccaccggtccctgacagcccacagcctgctcccccttgccgagaagcaaaggagagtcctcaggaacctccggagactagaagccttaggcttggtctcggcacgcaacggctaccaagggctcgttgatgaactagcaaaggatattcggaaccagcatagacacaggcaccgaagaaaagctgaattggttaagctgcaggccacgctgcagggcctctccaccaagacaacattctacgaggagcagggcgattactattctcagtacatccgcgcatgcctggatcacctcgccccagattctaagagttctggcaagggtaaaaagcagcctagtcttcactacacagctgcccagctgctggaaaaaggtgtactggttgaaatcgaggatctgccagctagccactttcggaacgttatatttgacatcacccccggtgacgaagccggcaagttcgaggtcaacgccaaatttctgggagttgacatggagagatttcagctgcactaccaggacctcctccagctccagtatgagggagtggctgtaatgaaactgtttaataaggcaaaggttaacgtgaatctgctgattttcctcctgaataagaagttccttcgaaagtag

SEQ ID NO: 253573 - DNA, 5988 bp, Artificial Sequence
  derived and/or modified sequence
gaaggaggaacatggagaggagagcagcgggcccaggctgggcagcctatgaacgcctcacagctgaggagatggatgagcagaggcggcagaatgttgcctatcagtacctgtgccggctggaggaggccaagcgctggatggaggcctgcctgaaggaggagcttccttccccggtggagctggaggagagccttcggaatggagtgctgctggccaagctaggccactgttttgcaccctccgtggttcccttgaagaagatctacgatgtggagcagctgcggtaccaggcaactggcttacatttccgtcacacagacaacatcaacttttggctatctgcaatagcccacatcggtctgccttcgaccttcttcccagagaccacggacatctatgacaaaaagaacatgccccgggtagtctactgcatccatgctctcagtctcttcctcttccggctgggattggcccctcagatacatgatctatacgggaaagtgaaattcacagctgaggaactcagcaacatggcgtccgaactggccaaatatggcctccagctgcctgccttcagcaagatcgggggcatcttggccaatgagctctcggtggatgaggctgcagtccatgcagctgttcttgccatcaatgaagcagtggagcgaggggtggtggaggacaccctggctgccttgcagaatcccagtgctcttctggagaatctccgagagcctctggcagccgtctaccaagagatgctggcccaggccaagatggagaaggcagccaatgccaggaaccatgatgacagagaaagccaggacatctatgaccactacctaactcaggctgaaatccagggcaatatcaaccatgtcaacgtccatggggctctagaagttgttgatgatgccctggaaagacagagccctgaagccttgctcaaggcccttcaagaccctgccctggccctgcgaggggtgaggagagactttgctgactggtacctggagcagctgaactcagacagagagcagaaggcacaggagctgggcctggtggagcttctggaaaaggaggaagtccaggctggtgtggctgcagccaacacaaagggtgatcaggaacaagccatgctccacgctgtgcagcggatcaacaaagccatccggaggagagtggcggctgacactgtgaaggagctgatgtgccctgaggcccagctgcctccagtgtaccctgttgcatcgtctatgtaccagctggagctggcagtgctccagcagcagcagggggagcttggccaggaggagctcttcgtggctgtggagatgctctcagctgtggtcctgattaaccgggccctggaggcccgggatgccagtggcttctggagcagcctggtgaaccctgccacaggcctggctgaggtggaaggagaaaatgcccagcgttacttcgatgccctgctgaaattgcgacaggagcgtgggatgggtgaggacttcctgagctggaatgacctgcaggccaccgtgagccaggtcaatgcacagacccaggaagagactgaccgggtccttgcagtcagcctcatcaatgaggctctggacaaaggcagccctgagaagactctgtctgccctactgcttcctgcagctggcctagatgatgtcagcctccctgtcgcccctcggtaccatctcctccttgtggcagccaaaaggcagaaggcccaggtgacaggggatcctggagctgtgctgtggcttgaggagatccgccagggagtggtcagagccaaccaggacactaatacagctcagagaatggctcttggtgtggctgccatcaatcaagccatcaaggagggcaaggcagcccagactgagcgggtgttgaggaaccccgcagtggcccttcgaggggtagttcccgactgtgccaacggctaccagcgagccctggaaagtgccatggcaaagaaacagcgtccagcagacacagctttctgggttcaacatgacatgaaggatggcactgcctactacttccatctgcagaccttccaggggatctgggagcaacctcctggctgccccctcaacacctctcacctgacccgggaggagatccagtcagctgtcaccaaggtcactgctgcctatgaccgccaacagctctggaaagccaacgtcggctttgttatccagctccaggcccgcctccgtggcttcctagttcggcagaagtttgctgagcattcccactttctgaggacctggctcccagcagtcatcaagatccaggctcattggcggggttataggcagcggaagatttacctggagtggttgcagtattttaaagcaaacctggatgccataatcaagatccaggcctgggcccggatgtgggcagctcggaggcaatacctgaggcgtctgcactacttccagaagaatgttaactccattgtgaagatccaggcatttttccgagccaggaaagcccaagatgactacaggatattagtgcatgcaccccaccctcctctcagtgtggtacgcagatttgcccatctcttgaatcaaagccagcaagacttcttggctgaggcagagctgctgaagctccaggaagaggtagttaggaagatccgatccaatcagcagctggagcaggacctcaacatcatggacatcaagattggcctgctggtgaagaaccggatcactctgcaggaagtggtctcccactgcaagaagctgaccaagaggaataaggaacagctgtcagatatgatggttctggacaagcagaagggtttaaagtcgctgagcaaagagaaacggcagaaactagaagcataccaacacctcttctacctgctccagactcagcccatctacctggccaagctgatctttcagatgccacagaacaaaaccaccaagttcatggaggcagtgattttcagcctgtacaactatgcctccagccgccgagaggcctatctcctgctccagctgttcaagacagcactccaggaggaaatcaagtcaaaggtggagcagccccaggacgtggtgacaggcaacccaacagtggtgaggctggtggtgagattctaccgtaatgggcggggacagagtgccctgcaggagattctgggcaaggttatccaggatgtgctagaagacaaagtgctcagcgtccacacagaccctgtccacctctataagaactggatcaaccagactgaggcccagacagggcagcgcagccatctcccatatgatgtcaccccggagcaggccttgagccaccccgaggtccagagacgactggacatcgccctacgcaacctcctcgccatgactgataagttccttttagccatcacctcatctgtggaccaaattccgtatgggatgcgatatgtggccaaagtcctgaaggcaactctggcagagaaattccctgacgccacagacagcgaggtctataaggtggtcgggaacctcctgtactaccgcttcctgaacccagctgtggtggctcctgacgccttcgacattgtggccatggcagctggtggagccctggctgccccccagcgccatgccctgggggctgtggctcagctcctacagcacgctgcggctggcaaggccttctctgggcagagccagcacctacgggtcctgaatgactatctggaggaaacacacctcaagttcaggaagttcatccatagagcctgccaggtgccagagccagaggagcgttttgcagtggacgagtactcagacatggtggctgtggccaaacccatggtgtacatcaccgtgggggagctggtcaacacgcacaggctgttgctggagcaccaggactgcattgcccctgatcaccaagaccccctgcatgagctcctggaggatcttggggagctgcccaccatccctgaccttattggtgagagcatcgctgcagatgggcacacggacctgagcaagctagaagtgtccctgacgctgaccaacaagtttgaaggactagaggcagatgctgatgactccaacacccgtagcctgcttctgagcaccaagcagctgttggccgatatcatacagttccatcctggggacaccctcaaggagatcctgtccctctcggcttccagagagcaagaagcagcccacaagcagctgatgagccgacgccaggcctgtacagcccagacaccggagccactgcgacgacaccgctcactgacagctcactccctcctgccactggcagagaagcagcggcgcgtcctgcggaacctacgccgacttgaagccctggggttggtcagcgccagaaatggctaccaggggctagtggacgagctggccaaggacatccgcaaccagcacagacacaggcacaggcggaaggcagagctggtgaagctgcaggccacattacagggcctgagcactaagaccaccttctatgaggagcagggtgactactacagccagtacatccgggcctgcctggaccacctggcccccgactccaagagttctgggaaggggaagaagcagccttctcttcattacactgctgctcagctcctggaaaagggtgtcttggtggaaattgaagatcttcccgcctctcacttcagaaacgtcatctttgacatcacgccgggagatgaggcaggaaagtttgaagtaaatgccaagttcctgggtgtggacatggagcgatttcagcttcactatcaggatctcctgcagctccagtatgagggtgtggctgtcatgaaactcttcaacaaggccaaagtcaatgtcaaccttctcatcttcctcctcaacaagaagtttttgcggaagtgacagaggcaaagggtgctacccaagcccctcttacctctctggatgctttctttaacactaactcaccactgtgcttccctgcagacacctagagctcaggactgggcaaggcccagggattctcaccccttccccagctgggaggagcttgcctgcctggccacagacagtgtatcttctaattggctaaagtgggccttgcccagagtccagctgtgtggcttttatcatgcatgacaaacccctggctttcctgccagatggtaggacatggaccttgacctgggaaagccattactcttgtgtctgctactgccctcccacagtcaccccaatattacaagcactgccccagcggcttgatttcccctctgccttccttctctctgcactcccacaaagccagggccaggctccccatccctacctcccactgcatcagcagtgggtgttcctgcccttcctgagtctaggcagctctgctgctgtgatctgcacaccctccaacctgggcagggactggggggatgcagtgtgtgttagtgcccatgtggcattgtggcactgttgccccccatggcggcatgggcaagatgaccttccattagcttcaagtcttgttctcttgtctgtggtctgtttaatatgtgggtcactagggtatttattctttctcccatccttacactctggatcattgtgcagacttaatcagggttttaacgctttcatttttttttttttttttttttttttgagctcaaagagagttctcattttccctattcaaactaatacccatgccgtgttttttaccttggatttaaagtcaccttaggttggggcaacagattctcactcatgtttaagatcttgttatttcagcttcataagatcaaagaggagtctttcccttttctcttttaccctcaggattctcatcccttacagctgactcttccaggcaatttccatagatctgcagtcctgcctctgccacagtctctctgttgtccccacatctacccaacttcctgtactgttgcccttctgatgttaataaaagcagctgttactccca

SEQ ID NO: 253574 - DNA, 4896 bp, Artificial Sequence
  derived and/or modified sequence
atggagaggagagctgctggccctggctgggccgcctatgagcggctgacagctgaggagatggatgagcagaggcggcagaatgtggcctaccagtacctgtgccgcctggaggaggccaagcgctggatggaggcctgcctgaaggaggagctgcccagccctgtggagctggaggagagcctgagaaatggagtgctgctggccaagctgggccactgctttgcccccagcgtggtgcccctgaagaagatctatgatgtggagcagctgcgctaccaggccaccggcctgcacttccgccacacagacaacatcaacttctggctgagcgccatcgcccacatcggcctgcccagcaccttcttccctgagaccacagacatctatgacaagaagaacatgccccgggtggtgtactgcatccacgccctgagcctcttcctgttccggctgggcctggccccccagatccatgacctgtatggcaaggtgaagttcaccgctgaggagctgagcaacatggccagcgagctggccaagtatggcctgcagctgcctgccttcagcaagattggaggcatcctggccaatgagctgtctgtggatgaagctgctgtgcatgctgctgtgctggccatcaatgaagctgtggagcggggcgtggtggaggacaccctggccgccctgcagaaccccagcgccctgctggagaacctgcgggagcccctggccgctgtgtaccaggagatgctggcccaggccaagatggagaaggccgccaatgccaggaaccatgatgaccgggagagccaggacatctatgaccactacctgacccaggccgagatccagggcaacatcaaccacgtgaatgtgcacggggccctggaggtggtggatgatgccctggagcggcagagccctgaggccctgctgaaggccctgcaggaccctgccctggccctgcggggcgtgagaagagactttgctgactggtacctggagcagctgaacagcgaccgggagcagaaggcccaggagctgggcctggtggagctgctggagaaggaggaggtgcaggccggcgtggccgccgccaacaccaagggggaccaggagcaggccatgctgcatgctgtgcagaggatcaacaaggccatcagaagaagagtggccgctgacacagtgaaggagctgatgtgcccagaggcccagctgccccctgtgtaccctgtggccagctccatgtaccagctggagctggccgtgctgcagcagcagcagggcgagctgggccaggaggagctgtttgtggccgtggagatgctgtctgctgtggtgctgatcaacagagccctggaggccagagatgccagcggcttctggagcagcctggtgaacccagccaccggcctggccgaggtggagggagaaaatgcccagcgctactttgatgccctgctgaagctgcggcaggagcggggcatgggagaggacttcctgtcctggaatgacctgcaggccaccgtgtcccaggtgaatgcccagacccaggaggagacagacagagtgctggccgtgtccctcatcaatgaggccctggacaagggcagccctgagaagaccctgagcgccctgctgctgcctgctgctggcctggatgatgtgtccctgcctgtggccccccgctaccacctgctgctggtggccgccaagaggcagaaggcccaggtgactggagaccctggagctgtgctgtggctggaggagatccggcagggcgtggtgcgggccaaccaggacaccaacacagcccagaggatggccctgggcgtggccgccatcaaccaggccatcaaggagggcaaggccgcccagacagagcgggtgctgagaaatcctgctgtggccctgcggggcgtggtgcctgactgtgccaacggctaccagagggccctggagagcgccatggccaagaagcagaggcctgctgacacagccttctgggtgcagcacgacatgaaggatggaacagcctactacttccacctgcagaccttccagggcatctgggagcagcccccaggctgccccctgaacaccagccacctgacccgggaggagatccagagcgctgtgaccaaggtgacagctgcctatgaccggcagcagctgtggaaggccaacgtgggctttgtgatccagctgcaggcccggctgcggggcttcctggtgcggcagaagtttgctgagcacagccacttcctgcggacctggctgcctgctgtgatcaagatccaggcccactggaggggctaccggcagaggaagatctacctggagtggctgcagtacttcaaggccaacctggatgccatcatcaagatccaggcctgggccaggatgtgggccgcccggcggcagtacctgcggcggctgcactacttccagaagaatgtgaacagcatcgtgaagatccaggccttcttccgggccaggaaggcccaggatgactaccgcatcctggtgcacgccccccacccccccctgtctgtggtgagaagatttgcccacctgctgaaccagagccagcaggacttcctggccgaggccgagctgctgaagctgcaggaggaggtggtgaggaagatccgcagcaaccagcagctggagcaggacctgaacatcatggacatcaagattggcctgctggtgaagaaccgcatcaccctgcaggaggtggtgagccactgcaagaagctgaccaagaggaacaaggagcagctgagtgacatgatggtgctggacaagcagaagggcctgaagagcctgagcaaggagaagaggcagaagctggaggcctaccagcacctgttctacctgctgcagacccagcccatctacctggccaagctgatcttccagatgccccagaacaagaccaccaagttcatggaggccgtcatcttcagcctgtacaactatgccagcagccggcgggaggcctacctgctgctgcagctgttcaagacagccctgcaggaggagatcaagagcaaggtggagcagccccaggatgtggtgacaggcaaccccaccgtggtgcggctggtggtgcgcttctacagaaatggccggggccagagcgccctgcaggagatcctgggcaaggtgatccaggatgtgctggaggacaaggtgctgtctgtgcacacagatcctgtgcacctgtacaagaactggatcaaccagacagaggcccagacaggccagaggagccacctgccctatgatgtgaccccagagcaggccctgagccaccctgaggtgcagaggcggctggacatcgccctgaggaacctgctggccatgacagacaagttcctgctggccatcaccagctctgtggaccagatcccctacggcatgagatatgtggccaaggtgctgaaggccaccctggccgagaagttcccagatgccacagattctgaggtgtacaaggtggtgggcaacctgctgtactaccgcttcctgaacccagctgtggtggccccagatgcctttgacatcgtggccatggctgctggaggagccctggccgccccccagagacatgccctgggcgctgtggcccagctgctgcagcacgccgctgctgggaaggccttcagcggccagagccagcacctgcgggtgctgaatgactacctggaggagacccacctgaagttcaggaagttcatccaccgggcctgccaggtgcctgagcctgaggagagatttgctgtggatgagtacagcgacatggtggccgtggccaagcccatggtgtacatcaccgtgggggagctggtgaacacccaccggctgctgctggagcaccaggactgcatcgccccagaccaccaggaccccctgcacgagctgctggaggacctgggggagctgcccaccatcccagacctgattggagagagcattgctgctgatggccacacagacctgagcaagctggaggtgtccctgaccctgaccaacaagtttgagggcctggaggctgatgctgatgacagcaacaccaggagcctgctgctgagcaccaagcagctgctggccgacatcatccagttccaccctggggacaccctgaaggagatcctgagcctgagcgccagccgggagcaggaggccgcccacaagcagctgatgagccggcggcaggcctgcacagcccagaccccagagcccctgcggcggcacaggagcctgacagcccacagcctgctgcccctggccgagaagcagaggagagtgctgaggaacctgcggcggctggaggccctgggcctggtgtctgccagaaatggctaccagggcctggtggatgagctggccaaggacatccggaaccagcaccgccaccgccacaggaggaaggccgagctggtgaagctgcaggccaccctgcagggcctgagcaccaagaccaccttctatgaggagcagggcgactactacagccagtacatccgggcctgcctggaccacctggccccagacagcaagagcagcggcaagggcaagaagcagcccagcctgcactacacagctgcccagctgctggagaagggcgtgctggtggagattgaggacctgcctgccagccacttcagaaatgtcatctttgacatcaccccaggagatgaggccggcaagtttgaggtgaatgccaagttcctgggcgtggacatggagcgcttccagctgcactaccaggacctgctgcagctgcagtatgaaggagtggccgtgatgaagctgttcaacaaggccaaggtgaatgtgaacctgctgatcttcctgctgaacaagaagttcctgaggaagtag

SEQ ID NO: 253575 - DNA, 4896 bp, Artificial Sequence
  derived and/or modified sequence
atggagcggcgggccgccggccccggctgggccgcctacgagcggctgaccgctgaggaaatggatgagcagagaagacagaacgtggcatatcagtacctctgcaggttagaagaagccaagcggtggatggaggcttgtctgaaagaagagctgccctcaccagtggagttggaagagtccctgcgaaacggggtgcttctcgccaagctggggcactgctttgctccgtctgtcgtccccctgaaaaaaatttacgacgttgagcagttacggtatcaggctactggactccattttagacacaccgataacatcaatttttggcttagtgccatcgcgcatatcggtctaccatccaccttcttcccagaaacaactgatatctacgacaaaaagaacatgccccgggtcgtgtattgcatacatgcccttagcctgtttctcttccgtttgggcctggccccccaaatccacgacctgtacggcaaggttaaatttacagcagaggagctttccaacatggcttctgagctagcgaaatacggcttgcagctgccggccttcagtaagattggaggaatcctggctaatgaattgtctgtggacgaggccgcggtacatgctgcagtcctggctatcaacgaagccgtcgaaaggggcgtggtggaagatacactggcagctcttcagaaccctagcgctcttcttgagaacctgcgagagccactggccgctgtctaccaagaaatgttggcacaggccaaaatggagaaagccgccaatgcgcgcaatcatgatgatcgggaatcacaggatatttacgaccactatctgactcaggctgagatacagggcaatattaatcacgtgaacgttcatggagctctcgaggttgtagacgacgctttagagcgccagtctcccgaggccctcctgaaagcactccaagaccctgccctggccttgcgaggagtacgcagagactttgctgattggtacctggaacagctgaatagcgaccgcgaacagaaagcccaagaactcgggctggtggagctgttggagaaagaagaagttcaggccggagtggcagccgcaaacacaaagggagaccaggagcaggcaatgctgcacgccgtccagcggattaataaggctattcggcggagggttgcggccgacactgtcaaggaattgatgtgtcccgaagctcagttgccacctgtctatccagtggctagctcaatgtatcaactggaactggccgtgctgcaacagcagcaaggcgaattgggccaagaggagctttttgttgcggtcgagatgctgagtgcagtggttttgatcaatcgggcgttagaggctagagatgcgtcaggtttttggagctctctggttaatcccgcaaccggtctggctgaggtggagggcgaaaatgcccaaaggtacttcgacgcccttctcaagttgcggcaagaaagagggatgggcgaggacttccttagctggaatgacctgcaggctaccgtatcccaggtaaacgcccagacccaggaagaaactgacagagtcctggctgtgtcactcattaacgaggcattggataaaggctcacctgaaaagacattgtccgctctcctgttgcctgcagccgggctcgatgacgtgtccctccccgtcgcaccgcgttatcatctgttattggttgctgccaaaaggcaaaaggctcaggtgactggtgacccaggggcagtcctgtggctcgaagaaattaggcagggcgtagtcagagccaatcaggataccaacacggcccaacgcatggctctcggcgtagcggcaatcaaccaggccattaaggaaggaaaggccgcacaaacagaacgcgtgcttaggaacccggccgttgctctccggggagttgttcctgactgcgctaacgggtaccaacgagcgctggaatctgccatggccaaaaagcagagaccagccgacaccgcattctgggttcaacatgatatgaaggatgggaccgcctattatttccatttacagacattccagggcatctgggaacagcctccggggtgccccttgaatacaagtcacctgactagagaggaaatacagagtgcagtgacaaaggtgacagctgcctacgaccggcaacaactgtggaaggccaacgtaggatttgtgatccagttgcaagcacgactccgggggtttctggttagacagaaattcgccgagcattctcacttcttgcgcacatggctgcctgccgtaatcaagatccaggcccactggcgtgggtatagacaacgtaagatctatcttgagtggctccaatatttcaaagccaacctcgacgcgataatcaagattcaggcatgggcccgtatgtgggcagcccgtcgacagtaccttcggagactgcattacttccaaaagaacgtgaactctatcgtaaagatccaggccttttttagagctagaaaggcacaggatgactaccggattttagtccacgcccctcatcccccgctcagcgtggtgagacgattcgcccacctactgaaccagagtcagcaagattttttagctgaggccgagttgctgaaacttcaggaagaagtggtccgcaagataagatcaaaccagcagcttgaacaggatctcaacattatggatattaagataggtttactggttaagaatcgcattacattacaggaagtggtttcccattgcaaaaaactgactaagagaaataaggagcaactttctgatatgatggtattagataagcagaaaggccttaagagcctcagtaaggaaaagagacagaaattggaagcatatcagcatctgttttacctgctgcagacacagccaatttatctggccaaactgatctttcaaatgcctcaaaataagactacaaagttcatggaggctgttattttttctctgtacaactacgctagcagcaggcgcgaagcatatctgctcttgcaactctttaagactgccctacaggaagagattaaaagtaaagtagaacaaccgcaagacgtagtcactggaaaccctaccgtagtacgcctcgtagtcaggttctaccgcaatggcagaggccagtcagccctgcaggaaatcttgggaaaggtgattcaggatgtgctggaagataaagtgctgagtgtgcatacagaccccgttcacctttataaaaattggatcaatcaaacagaggctcagaccggtcagcgttctcatttaccttatgatgtaactccagagcaggctctgagccacccggaggtccagagaaggttggacattgcactgcgcaacctgcttgcaatgaccgataaatttctgctggcaatcaccagctctgtggaccaaatcccttacgggatgcgttacgtcgccaaggtgttgaaggcaactcttgccgaaaagttccccgacgcaactgattctgaagtttacaaggtggttggcaacttactgtactatcggttcctcaatcccgccgtcgtggcccccgacgcctttgacatcgtggcaatggccgcagggggggcattagccgcaccccaacgccacgctttgggcgccgtcgcgcagctgcttcaacacgcagccgccggcaaagctttcagcgggcagagccagcatctgcgcgtcttaaatgattatctagaagagactcacttgaaattccgtaaattcattcaccgcgcgtgtcaagtcccggagcccgaagaacgttttgccgttgatgaatattcagatatggtggccgtcgccaaaccaatggtgtatattactgtgggggaactcgttaacacgcacagactactgctcgagcaccaagactgcatagcccctgaccatcaggaccctctgcatgagttgctggaggacctgggggagcttccaactattccagacctcataggcgagagcatcgcagctgacggacacacagatctaagtaagctggaagtgtccctgactctgactaataaatttgaaggattggaagcagatgcagacgatagcaacacgagatctctgctcctttccaccaagcagcttctcgctgatattattcagttccatcctggtgatacactaaaagaaatactctcgttatctgccagccgcgagcaggaggccgcccacaagcaactgatgtcaagaagacaggcctgtaccgcacagaccccagagccactgagacgccatcgttcattaacggcacactctttgctccccctggccgaaaaacagcgacgagtgttgcgcaacctcaggcggttggaggccctgggtttggtttctgcaaggaatggctatcagggactagttgatgaactcgctaaggacattaggaaccagcaccgacaccggcacaggaggaaagctgaattggttaaactccaagcaaccctgcagggtttgtccaccaagacgaccttttatgaggagcagggagactactatagccagtatatcagagcttgtctcgaccatctagccccagatagcaaaagtagcggaaaaggcaagaaacagccttccctccactacactgctgctcaactgctggaaaaaggcgtgctcgtagaaattgaggaccttcctgcgtctcactttaggaatgtgatcttcgacataactcctggcgatgaggccggaaaattcgaggtcaatgctaagtttctgggagttgatatggagagattccagctgcattatcaggacctgctgcaactgcagtacgaaggcgtggcagtgatgaagctgttcaataaggccaaagttaacgttaatctcctgatttttttgctcaacaaaaaattcctgagaaagtag

SEQ ID NO: 253576 - DNA, 4896 bp, Artificial Sequence
  derived and/or modified sequence
atggagaggcgcgctgccggacccggatgggccgcttacgaaaggctgactgcagaggaaatggatgagcaaaggagacagaatgtggcatatcagtatttgtgtaggctagaggaggccaaaagatggatggaggcttgtctcaaggaagagcttccttccccagtagagttggaggagagcctgagaaacggggtgttactagccaaattggggcactgttttgctcctagtgtcgttcctcttaaaaagatctacgacgtggagcagctgagataccaggccaccggcctgcattttaggcatactgacaatataaacttttggttatcagcaatcgcacacatcggtctcccttctacattcttccccgagacaaccgatatctacgataagaagaatatgccccgagtcgtctattgcatccacgcgctgtcactcttcctattcaggttgggactcgccccacagattcacgacctgtacggcaaagtaaagttcactgccgaagagctgtcaaacatggccagtgagctcgccaaatatggtcttcagttaccagcatttagtaaaattgggggaatcctggcgaatgagctgtccgtagacgaagcggctgtgcatgccgctgtactagcaatcaatgaagccgtggaacgaggcgtcgttgaggatacactcgctgcactccagaatccttccgcattgctggaaaacttgagggagccacttgcagccgtgtatcaagagatgctggcccaagcaaaaatggaaaaggccgcaaatgcacggaaccacgacgaccgggagtcccaggacatctacgatcattacctgacgcaagcagagatccagggcaatattaatcacgtgaacgtgcacggtgcgctcgaggtggttgacgatgccctggaacgccaatcccccgaggcgctgctcaaagctctgcaggatcctgctcttgcactacgcggagtgaggagggactttgctgactggtatttagaacagcttaattccgacagggagcagaaagctcaggagcttggattggtggagctcttggagaaagaggaggtccaggcaggcgtcgccgctgccaacacaaaaggcgaccaagagcaggccatgcttcacgcagtgcaacggattaataaagcgatccgacgcagggtcgccgctgacacagtaaaagaactgatgtgccctgaggcacagctcccacctgtttacccagtggcctcctcaatgtatcagctcgagcttgccgtgctgcaacaacagcaaggggagctgggtcaagaggagctatttgtggcggtggagatgttgtcagcggtggtgctgattaaccgggctctcgaggctcgtgacgcctctggattttggtcctcccttgttaatcctgctaccggcctggccgaggtggaaggagagaacgcgcagagatactttgacgcattgctgaagctcagacaggaacgaggcatgggggaggacttccttagctggaacgacctccaggccacagtgtcccaggttaatgcccagacacaggaagagacagaccgagtgctggcagtgtccttaataaacgaggctcttgacaagggttcacccgagaagacattgtctgctttgctcctgcccgcagccggacttgacgacgtgtcgctgccagtggcaccgcgataccacctgctcctggtggctgcaaaacgacaaaaggcacaggtgactggtgatcctggagcagttctctggctggaagaaattaggcagggggtggtaagggccaatcaggacaccaacacggctcagcgcatggcacttggagttgcagccataaaccaggctatcaaggaaggaaaagccgctcagactgaaagggtgctgcgcaatcccgcagtggctctgcggggtgttgttcctgattgtgccaatggctatcagcgggctctggaatctgcgatggcgaaaaagcaacggccagccgataccgctttctgggtccagcacgatatgaaggatggtaccgcatattacttccatctccagactttccagggcatctgggaacagccacccggttgccccctgaacacaagtcatctcaccagggaggaaatacagtctgccgtgacaaaagtgaccgctgcatacgacaggcaacagctgtggaaggccaatgttggctttgtgatccagctgcaggctcggttgcgtgggtttttagtgcgacagaaattcgccgaacattctcactttctgaggacatggctgcccgctgtaattaagatacaggcacactggcgtggttataggcagagaaagatttacctagagtggctccagtattttaaggcgaacttagatgcgattattaagatccaggcatgggccagaatgtgggccgctcgcaggcagtatctgcggcgactgcactatttccaaaaaaatgtgaattctatagtcaagatccaagcttttttccgggctagaaaagcacaagatgattataggattctggtgcacgcaccccacccaccactttccgtggtcagaagatttgctcacctgcttaaccagtctcagcaggactttctggccgaagcagagctgcttaaactccaggaggaggttgttagaaagatacggagcaatcaacaattagagcaggatcttaacatcatggacattaagatcgggctgcttgttaaaaatcgcatcaccctccaggaagtagtgtcacattgcaaaaagctgaccaagcggaacaaagagcagttgtccgacatgatggtgttggataagcagaaggggctcaagagcttgagcaaggagaagagacagaagctggaagcttaccaacatcttttctacctccttcaaacacagcctatctatctggctaagctgatttttcagatgcctcagaataagaccactaaattcatggaggccgtgatcttttccttgtataattatgccagctctagacgagaagcgtacctgctcctccaactgtttaagacagccctgcaggaagagattaagtccaaagtcgaacagcctcaggatgtggtgactgggaatccgaccgtggttaggctggttgttcgcttttaccgcaacggcaggggtcagagcgcactgcaggagattctggggaaggttattcaggatgtactcgaggacaaggtgttatccgtgcatacagaccctgtgcatttgtataaaaattggatcaatcaaactgaggcccagaccgggcagaggtcccatcttccttacgacgttactcccgaacaggctttaagtcatccagaggttcagcgtagacttgacatagcactgcggaatctgctggccatgacagacaagtttctcctggccatcacatcaagcgtggaccagatcccttacggaatgagatatgtggccaaggtgttgaaggcaacgctggctgagaagtttcccgacgctactgactcggaggtttacaaggtagtgggcaatctgctgtattacagatttcttaatccagccgttgttgctcccgatgcgttcgatatagttgctatggcggctggtggtgccttagccgctcctcagcgacacgcccttggggctgtagcccagctgctgcagcatgccgcagccggaaaagcatttagtggccaaagtcagcatttgcgggtgctcaacgactatctcgaagagactcacctaaagttccggaagttcatacaccgcgcttgccaagttcctgagcctgaggaaagatttgctgtggatgaatattctgatatggtagccgttgctaagcctatggtgtacatcacggtgggagaactggtgaatactcaccgattattactggagcatcaggactgtatcgcaccagaccatcaagaccccctgcacgagctgctagaagacctaggggagctgccaacaatcccggacttgattggcgaaagtattgctgccgacggacatacagatttaagtaagttggaggtttcactgacgctgacaaataaattcgaggggctggaagcagatgcggatgatagtaacacaagatccctcctgctttcaaccaaacagctgctcgccgatattatccagttccaccccggagatactctcaaggaaattctgtctctctccgcttcccgcgagcaggaggcagcacataagcagctgatgtcaaggcgacaggcttgcaccgcccagacaccagaaccacttagacggcaccggagcctcacagctcattcactcctgcccctggccgaaaagcaacgcagggttcttcgtaatctaagaagactggaggctctgggactcgttagcgcacggaacggctatcaaggattggtggatgagctggctaaggatatcagaaaccagcaccgccacaggcaccgtcggaaggctgagctagtgaagctccaggctacactgcagggactgagcacaaaaaccaccttctatgaagaacagggggactactactctcagtatatccgggcatgcttggaccatctggcaccagactccaagagctcaggcaaaggcaaaaaacagccctccctgcattacaccgccgcacagctgctcgagaagggggtgcttgtggagattgaggacctgcccgcttctcacttcagaaacgtgatcttcgatataacccctggagacgaggcaggcaagtttgaggtgaatgccaagttcctgggcgtcgacatggagagatttcagctacactaccaggacttacttcagctacagtatgaaggcgttgcggtgatgaaactgtttaacaaggcgaaagtaaatgttaacctgctgatttttcttctgaataagaaatttctgcgcaagtag

SEQ ID NO: 253577 - protein, 347 aa, Artificial Sequence
  derived and/or modified sequence
MGARGAPSRRRQAGRRLRYLPTGSFPFLLLLLLLCIQLGGGQKKKENLLAEKVEQLMEWSSRRSIFRMNGDKFRKFIKAPPRNYSMIVMFTALQPQRQCSVCRQANEEYQILANSWRYSSAFCNKLFFSMVDYDEGTDVFQQLNMNSAPTFMHFPPKGRPKRADTFDLQRIGFAAEQLAKWIADRTDVHIRVFRPPNYSGTIALALLVSLVGGLLYLRRNNLEFIYNKTGWAMVSLCIVFAMTSGQMWNHIRGPPYAHKNPHNGQVSYIHGSSQAQFVAESHIILVLNAAITMGMVLLNEAATSKGDVGKRRIICLVGLGLVVFFFSFLLSIFRSKYHGYPYSFLIK

SEQ ID NO: 253578 - DNA, 1044 bp, Artificial Sequence
  derived and/or modified sequence
atgggcgccagaggcgcccccagcagaagaagacaggccggcagaagactgagatacctgcccaccggcagcttccccttcctgctgctgctgctgctgctgtgcatccagctgggcggcggccagaagaagaaggagaacctgctggccgagaaggtggagcagctgatggagtggagcagcagaagaagcatcttcagaatgaacggcgacaagttcagaaagttcatcaaggccccccccagaaactacagcatgatcgtgatgttcaccgccctgcagccccagagacagtgcagcgtgtgcagacaggccaacgaggagtaccagatcctggccaacagctggagatacagcagcgccttctgcaacaagctgttcttcagcatggtggactacgacgagggcaccgacgtgttccagcagctgaacatgaacagcgcccccaccttcatgcacttcccccccaagggcagacccaagagagccgacaccttcgacctgcagagaatcggcttcgccgccgagcagctggccaagtggatcgccgacagaaccgacgtgcacatcagagtgttcagaccccccaactacagcggcaccatcgccctggccctgctggtgagcctggtgggcggcctgctgtacctgagaagaaacaacctggagttcatctacaacaagaccggctgggccatggtgagcctgtgcatcgtgttcgccatgaccagcggccagatgtggaaccacatcagaggccccccctacgcccacaagaacccccacaacggccaggtgagctacatccacggcagcagccaggcccagttcgtggccgagagccacatcatcctggtgctgaacgccgccatcaccatgggcatggtgctgctgaacgaggccgccaccagcaagggcgacgtgggcaagagaagaatcatctgcctggtgggcctgggcctggtggtgttcttcttcagcttcctgctgagcatcttcagaagcaagtaccacggctacccctacagcttcctgatcaagtag

SEQ ID NO: 253579 - DNA, 1044 bp, Artificial Sequence
  derived and/or modified sequence
atgggcgcaaggggcgcaccttcgcggagacggcaagctggccggagactaagatacctgcctactggttctttcccatttctcctcctgcttttgctcctctgcatccaactgggtggtggacaaaagaaaaaggaaaatctgctggccgagaaggtcgagcaactgatggagtggtcttcgaggaggagtattttcaggatgaacggcgataaatttagaaagtttataaaagctcccccgcgcaactactcgatgatcgttatgttcaccgcactacagccccagagacagtgcagtgtctgcaggcaggccaacgaggaataccaaatcttggccaattcatggcgttatagcagtgctttctgcaacaagctcttttttagcatggtggactacgacgaaggcacggacgtgttccagcaactgaacatgaacagcgctccaactttcatgcacttccctccaaagggacgccccaagcgcgcagatacctttgatttgcagagaatcggctttgctgccgagcagcttgcaaaatggatcgctgatagaacagacgtgcatatcagagttttcaggccgcctaactacagcggtacaattgcactggccttactggttagtttggtgggagggctcctgtatctgcggaggaataatctggaattcatatataataagacgggttgggccatggtgtcgctgtgcattgtgttcgcgatgacatcagggcagatgtggaatcacattagaggtcctccctacgcccataaaaatccacataacggccaggtctcctatatacacggatccagtcaggcccaattcgtagccgaaagccatattattcttgtgctgaatgctgcaatcacaatgggtatggtcttgctcaacgaggccgctactagcaagggggacgtaggaaagcgccgaatcatctgcctcgtggggctaggactcgtggtcttcttctttagcttcctgctttctatatttaggagtaaataccatggatatccatactcatttctgataaaatag

SEQ ID NO: 253580 - DNA, 1044 bp, Artificial Sequence
  derived and/or modified sequence
atgggcgcccggggggcccccagcagaagacggcaggccggccgccgcctgcgctacctgcccaccggcagcttccccttcctgctgctgctgctgctgctgtgcatccagctgggcggcggccagaagaagaaggagaacctgctggccgagaaggtggagcagctgatggagtggagcagccgccgcagcatcttcaggatgaatggagacaagttcaggaagttcatcaaggccccacccaggaactacagcatgattgtgatgttcaccgccctgcagccccagaggcagtgcagcgtgtgccggcaggccaatgaggagtaccagatcctggccaacagctggagatacagcagcgccttctgcaacaagctgttcttctccatggtggactatgatgagggcacagatgtgttccagcagctgaacatgaacagcgcccccaccttcatgcacttcccccccaagggccggcccaagagagctgacacctttgacctgcagagaattggatttgctgctgagcagctggccaagtggattgctgacagaacagatgtgcacatccgggtcttccggccccccaactacagcggcaccatcgccctggccctgctggtgtccctggtgggcggcctgctgtacctgcggaggaacaacctggagttcatctacaacaagacaggctgggccatggtgtccctgtgcatcgtgtttgccatgaccagcggccagatgtggaaccacatccggggccccccctatgcccacaagaacccccacaacggccaggtgtcctacatccacggcagcagccaggcccagtttgtggccgagagccacatcatcctggtgctgaatgctgccatcaccatgggcatggtgctgctgaatgaagctgccaccagcaaaggagatgtgggcaagaggcgcatcatctgcctggtgggcctgggcctggtggtgttcttcttctccttcctgctgagcatcttccgcagcaagtaccacggctacccctacagcttcctgatcaagtag

SEQ ID NO: 253581 - DNA, 1044 bp, Artificial Sequence
  derived and/or modified sequence
atgggcgcccggggcgcccccagccggcggcggcaggccggccggagactccggtatctccccacggggagtttcccattcttactgttactcctgctgttgtgcattcaattgggaggtggccagaaaaagaaggagaacctgctggcagaaaaagttgagcagctcatggagtggtcaagccgtcgatcaatcttccgcatgaatggcgacaagttcaggaagttcatcaaggcgcctcctcgcaattatagcatgatagtgatgtttaccgcactccaacctcagaggcaatgtagtgtgtgccgccaagcaaacgaagagtaccagattctggcgaactcctggcgttatagcagcgcattctgcaacaaattgttctttagcatggtggattacgatgaaggaactgatgtattccaacagctcaacatgaacagcgccccaacctttatgcatttcccgccgaaagggcgccctaaacgggcagatacttttgatctacagagaattggattcgccgccgagcagctcgccaagtggatagccgaccgcaccgatgtgcatatcagagtctttaggcccccaaattattccggaacaattgccctggcactgctggtgtctctggtgggcggactgttgtacctgaggaggaacaacctggagtttatctataacaaaaccggctgggctatggtttctctgtgtatcgtgttcgcaatgacctctgggcagatgtggaaccacattagaggtccgccatacgcccacaagaacccacacaacggccaggtatcctatatccacgggtctagccaggcccagttcgtagcagagagccatatcatcttggtcctgaacgcagcaatcacaatgggcatggtgcttcttaacgaagccgctacttccaaaggtgacgtgggaaaaaggcggatcatatgtctagtggggcttggcctcgtcgtcttcttctttagcttcctgctgagtatcttccgctccaagtaccacgggtacccctactcatttctgatcaagtag

SEQ ID NO: 253582 - DNA, 1044 bp, Artificial Sequence
  derived and/or modified sequence
atgggcgcacgtggcgctccctctagaagaaggcaggccggtcgccgactcagatacctgcccacaggttcattcccattcctgctgctgttgcttttattgtgcatccaactgggcggaggtcagaagaagaaagagaatttgctggccgaaaaggtagagcagctgatggaatggtcttcgcgtaggtccatctttagaatgaatggagacaaattccgcaaatttatcaaggctccccctcggaattactctatgatcgtcatgttcacggccttacagccacagaggcaatgttccgtgtgccgtcaagcaaacgaggaataccagatcttagccaactcctggcgatatagctctgcattctgtaacaaactgtttttttccatggttgattacgatgaaggcaccgacgtatttcagcaacttaatatgaattctgccccaacatttatgcatttcccacctaagggaaggccaaaaagggctgacacctttgaccttcagcggattggattcgccgcagagcagctagctaagtggattgccgacagaactgacgttcatatccgggtgttccgaccgcctaactatagtgggaccatagccctagccctcctcgtgagtcttgtgggcggtctgctgtaccttcggagaaacaatctcgagtttatctataacaaaaccggatgggctatggtgagtctctgcatagtttttgctatgacctcaggacagatgtggaatcacattcggggtccaccttacgcccacaagaatcctcataacgggcaagttagctacattcatgggagctcacaagcccagtttgtcgcagagtcccacataatactggtcctgaatgccgcaattactatgggcatggttttgctgaacgaggcggcaactagtaagggagacgtcggcaagaggaggattatatgtcttgtgggtttgggcctggtggtcttttttttcagtttcttattaagcatcttccgctccaaatatcatggctatccctacagttttctcattaaatag

SEQ ID NO: 253583 - DNA, 3683 bp, Artificial Sequence
  derived and/or modified sequence
gcctttccaggtcttctcccggtgaaccggatgctctgtcagtctcctcctctgcgtcctcggccgcggcccgggtccctcgcaaagccgctgccatcccggagggcccagccagcgggctcccggaggctggccgggcaggcgtggtgcgcggtaggagctgggcgcgcacggctaccgcgcgtggaggagacactgccctgccgcgatgggggcccggggcgctccttcacgccgtaggcaagcggggcggcggctgcggtacctgcccaccgggagctttcccttccttctcctgctgctgctgctctgcatccagctcgggggaggacagaagaaaaaggagaatcttttagctgaaaaagtagagcagctgatggaatggagttccagacgctcaatcttccgaatgaatggtgataaattccgaaaatttataaaggcaccacctcgaaactattccatgattgttatgttcactgctcttcagcctcagcggcagtgttctgtgtgcaggcaagctaatgaagaatatcaaatactggcgaactcctggcgctattcatctgctttttgtaacaagctcttcttcagtatggtggactatgatgaggggacagacgtttttcagcagctcaacatgaactctgctcctacattcatgcattttcctccaaaaggcagacctaagagagctgatacttttgacctccaaagaattggatttgcagctgagcaactagcaaagtggattgctgacagaacggatgttcatattcgggttttcagaccacccaactactctggtaccattgctttggccctgttagtgtcgcttgttggaggtttgctttatttgagaaggaacaacttggagttcatctataacaagactggttgggccatggtgtctctgtgtatagtctttgctatgacttctggccagatgtggaaccatatccgtggacctccatatgctcataagaacccacacaatggacaagtgagctacattcatgggagcagccaggctcagtttgtggcagaatcacacattattctggtactgaatgccgctatcaccatggggatggttcttctaaatgaagcagcaacttcgaaaggcgatgttggaaaaagacggataatttgcctagtgggattgggcctggtggtcttcttcttcagttttctactttcaatatttcgttccaagtaccacggctatccttatagctttttaattaaatgaagccaagtgggatttgcataaagtgaatgtttaccatgaagataaactgttcctgactttatactattttgaattcattcatttcattgtgatcagctagcttattcttgtgtactttttttaaactgtgggttttcctagtaaatttaatttacagaaatcaatggtagcatttagtaatctacaaaggaaatatcaaagtgtttttcaagcctgttatattcagtgtgtgccacaggattgaaataaatgacaatgtaattatgaattcatgttttagagctgtttactcattagtaaaggaccgcaatgttagtaaagaaaacctatgaaatgtatgttaaagattcttagtattgtacagggataaagcaaatgcatgaaaatatgtcatgtactgaaaattaaacttacttcagtttcagttataaaggacgtgcactgttacgaatagtgttttgttattaattataactagataaaggtatataggacagggaactggatgaatggtacctacaatttggatgcctaaccaaggactagagctccttcttgagatctaaatctaaagtaaatgtgcattaaagcagtgtgcttcaaaggcatcagacgatgaaagcaacataccacaactaggagttatttctcaaacttaaatgtcctctgggaatccagacttaaaaataagagcaaacttaacacactatccattttcgagcaaacctaacccactatatccattttgctcatgtgttttatgcaaccagctttccatcaaatcctcaatctttgaatccaggtaaaaggttaattatcctaggattagtgaatgattcaatgaagctttcttgaaaacaaacataggagtgtaatgtactattatgtttgtatcctgttttagtttataaagcactttcacatacattatggtatttcttcctcacaataaccttgtaaattagtcaggaaatgtaaattttatctgactcatagaactaatggaagctgaaagccaaaaataaagtttataaccaggccttcaaactctcaaacatggatttttatattctgtggagttatccaaattaattagggtttaggaaagcagttcttcttgagtcagttcaataagtgtttgctttttgtttttaaggtttgttatctaattttcattaagatttgagtaacagaccatggagaattgttttcattgggagttccagctatatagcctcaaacaagaaacgggtgtacaaccattgagtttacttacttaaatctgtgaatttcaatgaagaatgggaatataaaggcctactggggcatgtttatcaagttatatcccagggcaatgtgtatgctagcaggatgaatgctatcttttcaaaacataatattcagtgaaaattacgtaataattgtaagtttataatcatactcccaaatctgttactaaaaataacataaattctcctagttcatgtacttagatgaataaatttagttttggaatgacgtttatggaaaagcaatagatgaacttaatcatttgatcactgcctatcactaggcagaacttgacctgtaattcttaatccattgtagattttttacattttactcaaaacttcatacatagagactctcaggtcaaattttacaagtattaaacatttgttaattataatcacttttgtttgtatccttaaatctcagaattatcttgcagttaatatgcagctgattaaatgatattacaaattatctctaatctcactgtaaatcttttaatcatatcaaagtcaggtcatcctcagacactataactaagatagataaggagtactttactataccatattagtaaaggttttctagctcttattttctaatttcctctgagcatttaaaattacatccagtgataaaaacaatatttttttttcagaatttcatgctttaaaaagctgtggcttctctatagacaactgttacattagggaagtgattctagagcaaaatatactgcctcaacataagtcgttactgactggaaaatgctataggcagaattgcaaagagtggctcaaacatatagtttgcttgcagaatgtaacgtgcaaaatcacatacatgcgatgtatttacctttgctagacaatgagaattgaataattgatttgtacctggtatgttatatcctccagtgtcactttttaaccagattcactgtgcgttccaaactgtcataaaaattgattatatgtttaacaattgtttttctactacagtggagagaaaaatcccaattataaaattccacctaaaggagtttcattttgtaataacatctgattaataacttgttgcattttgcttaacatactgttcctggcattagatattcacatgagtaagcccagtagca

SEQ ID NO: 253584 - protein, 336 aa, Artificial Sequence
  derived and/or modified sequence
MESVLSKYEDQITIFTDYLEEYPDTDELVWILGKQHLLKTEKSKLLSDISARLWFTYRRKFSPIGGTGPSSDAGWGCMLRCGQMMLAQALICRHLGRDWSWEKQKEQPKEYQRILQCFLDRKDCCYSIHQMAQMGVGEGKSIGEWFGPNTVAQVLKKLALFDEWNSLAVYVSMDNTVVIEDIKKMCRVLPLSADTAGDRPPDSLTASNQSDELIFLDPHTTQTFVDTEENGTVNDQTFHCLQSPQRMNILNLDPSVALGFFCKEEKDFDNWCSLVQKEILKENLRMFELVQKHPSHWPPFVPPAKPEVTTTGAEFIDSTEQLEEFDLEEDFEILSV

SEQ ID NO: 253585 - protein, 259 aa, Artificial Sequence
  derived and/or modified sequence
MLRCGQMMLAQALICRHLGRDWSWEKQKEQPKEYQRILQCFLDRKDCCYSIHQMAQMGVGEGKSIGEWFGPNTVAQVLKKLALFDEWNSLAVYVSMDNTVVIEDIKKMCRVLPLSADTAGDRPPDSLTASNQSDELIFLDPHTTQTFVDTEENGTVNDQTFHCLQSPQRMNILNLDPSVALGFFCKEEKDFDNWCSLVQKEILKENLRMFELVQKHPSHWPPFVPPAKPEVTTTGAEFIDSTEQLEEFDLEEDFEILSV

SEQ ID NO: 253586 - DNA, 1011 bp, Artificial Sequence
  derived and/or modified sequence
atggagagcgtgctgagcaagtacgaggaccagatcaccatcttcaccgactacctggaggagtaccccgacaccgacgagctggtgtggatcctgggcaagcagcacctgctgaagaccgagaagagcaagctgctgagcgacatcagcgccagactgtggttcacctacagaagaaagttcagccccatcggcggcaccggccccagcagcgacgccggctggggctgcatgctgagatgcggccagatgatgctggcccaggccctgatctgcagacacctgggcagagactggagctgggagaagcagaaggagcagcccaaggagtaccagagaatcctgcagtgcttcctggacagaaaggactgctgctacagcatccaccagatggcccagatgggcgtgggcgagggcaagagcatcggcgagtggttcggccccaacaccgtggcccaggtgctgaagaagctggccctgttcgacgagtggaacagcctggccgtgtacgtgagcatggacaacaccgtggtgatcgaggacatcaagaagatgtgcagagtgctgcccctgagcgccgacaccgccggcgacagaccccccgacagcctgaccgccagcaaccagagcgacgagctgatcttcctggacccccacaccacccagaccttcgtggacaccgaggagaacggcaccgtgaacgaccagaccttccactgcctgcagagcccccagagaatgaacatcctgaacctggaccccagcgtggccctgggcttcttctgcaaggaggagaaggacttcgacaactggtgcagcctggtgcagaaggagatcctgaaggagaacctgagaatgttcgagctggtgcagaagcaccccagccactggccccccttcgtgccccccgccaagcccgaggtgaccaccaccggcgccgagttcatcgacagcaccgagcagctggaggagttcgacctggaggaggacttcgagatcctgagcgtgtag

SEQ ID NO: 253587 - DNA, 2129 bp, Artificial Sequence
  derived and/or modified sequence
ggagttgcagtttgagagcagttccgggcagggaggcgcctttgctgccctcacagacttggcccctagcagtgcagaactacaagtcccagggatcctagcgaccgtccgtccgtagtcaagttgccggtggaattggcccaggatgacagctggagaatggagtcagttttatccaagtatgaagatcagattactattttcactgactacctagaagaatatccagatacagatgagctggtatggatcttagggaagcagcatctccttaaaacagaaaaatctaagctgttgtctgatataagtgctcgtctatggtttacatacagaaggaaattttcaccaattggtggaacgggcccttcatcagatgctggttggggatgtatgctacgctgtggacagatgatgctggctcaagcccttatctgtagacacttgggaagggactggagctgggagaaacaaaaagaacaacccaaagaataccaacgcatcctacagtgcttcttagatagaaaagattgttgctactctatccatcaaatggcacaaatgggtgtaggagaagggaaatcaattggagaatggtttggaccaaatacagttgcacaggtgttaaaaaaacttgctttatttgacgaatggaattccttggctgtttatgtttcaatggataacacagtggtcattgaagatatcaaaaaaatgtgccgtgtccttcccttgagtgctgacacagctggtgacaggcctcccgattctttaactgcttcaaaccagagtgacgagctcatcttcttggaccctcatacaacccagacctttgttgacactgaagagaatggaacggttaatgaccagactttccattgcctgcagtccccacagcgaatgaacatcctaaacctggatccttcagttgcattgggatttttctgcaaagaagaaaaagactttgataactggtgtagccttgttcagaaggaaattctaaaggagaatttaaggatgtttgaattagttcagaaacatccatcacactggcctccctttgtacctccagccaagccagaagtgacaaccactggggcagaattcattgactctactgagcaactggaggagtttgatctggaggaagattttgagattctgagtgtgtagaatcctgggaactcaacttgaaggtctgtcttccatctggcaccataaaaacatgaacttattgcataaaacttttctagtcagcaagtgcctgatatgccaatagcatacaaactcaatagcaatcatgactgagccaatcactgtttctcagaaaaacaaaacaaaacaaaacaaatgacagtaacccttccccggaaagaaatagaacaatcatggagcctaggagcagagagatgaggaggagttcattgcttcccagcttgtgttatatggctacagcaagtcttcagctgctgcaatgaggaaatgggcatctggaagacaaacagcaactctcagcttgcttcaagaaccagcagataagagatggttaagctgttcttcaccctttcagatgtgacctcttttggactaagcagcaatctgttctcttgctcaaataataaagtgactgaatcagggaggaaaaggttcttgttaaattatttgattgtgtagttgaagtaattataatttatatcaaaacgtttgtcaaagaaacgatgtcaaatatacacttcttgatctcccttctgtttgcggggatcttactatttgatgggtcactgtccccattcttactgatacttttgtcagatatcaccctgtccttaaatcatgatcacttaaatcaggggtcagcaaactttttctgtaaagggccagacgggaaatattttgggctttgcaggccatgcggcctctgtcacatctactcaactctgctgttgacatgcaaaagcagcaatagacaatatgcgtgtaaatgagtgtggctgtaatccaagaaaactttatttacaaaagcaggtggagggctgggtttggcctgcaggctgtagcttgccaatcagtgacttaaattgttgatttttgtttgataaattaaaaataaattgtgtttgaagtatacccta

SEQ ID NO: 253588 - DNA, 1011 bp, Artificial Sequence
  derived and/or modified sequence
atggaaagcgtcctgtctaagtatgaagaccagatcacgattttcactgactacttagaggaataccctgatacggatgagctcgtttggatccttggcaaacaacacctgctgaagaccgagaagagcaagctcctcagtgatatttctgctagactgtggtttacgtacaggaggaagttctcccccattggtgggacaggaccgagttccgatgccgggtggggctgcatgttacgatgcgggcagatgatgttggcccaggccctgatttgcagacatcttgggagagattggagttgggagaagcagaaggaacagcctaaggaataccagcggatccttcaatgctttttggatagaaaggactgctgctactccattcatcaaatggcgcagatgggtgttggagagggcaagtcaatcggtgagtggtttggacctaacaccgtggcccaagtcttgaagaaattggccttgttcgacgagtggaacagcttagccgtgtacgtgtccatggacaatacggtcgtaatcgaagatataaaaaaaatgtgtagagttttgcccctgtcagctgatacagccggagataggccacctgattccctaaccgcatctaaccaaagcgatgaattgatcttcctagacccccacaccacacagactttcgtggacacagaggagaatggaaccgtgaacgatcagacattccactgcctccagtcgccacagcgaatgaatatactcaacctggatccatcagtggccctgggcttcttttgcaaagaagaaaaagactttgataattggtgctctttggttcagaaggagattttaaaagaaaacttgcggatgtttgaactggtgcaaaagcacccctcccactggcctccttttgtgccacctgccaaacctgaagtaaccacaacaggcgctgagtttattgattccactgagcagctggaggaattcgacttggaggaggatttcgaaatcctgtccgtttag

SEQ ID NO: 253589 - DNA, 1011 bp, Artificial Sequence
  derived and/or modified sequence
atggagagcgtgctgagcaaatatgaggaccagatcaccatcttcacagactacctggaggagtacccagacacagatgagctggtgtggatcctgggcaagcagcacctgctgaagacagagaagagcaagctgctgagtgacatcagcgcccggctgtggttcacctacagaaggaagttcagccccatcggcggcaccggccccagcagtgatgctggctggggctgcatgctgcgctgtggccagatgatgctggcccaggccctgatctgccgccacctgggccgggactggagctgggagaagcagaaggagcagcccaaggagtaccagaggatcctgcagtgcttcctggacaggaaggactgctgctacagcatccaccagatggcccagatgggcgtgggggagggcaagagcatcggggagtggtttggccccaacacagtggcccaggtgctgaagaagctggccctgtttgatgagtggaacagcctggccgtgtatgtgtccatggacaacacagtggtgattgaggacatcaagaagatgtgccgggtgctgcccctgtctgctgacacagctggggaccggcccccagacagcctgacagccagcaaccagagtgatgagctgatcttcctggacccccacaccacccagacctttgtggacacagaagaaaatggcaccgtgaatgaccagaccttccactgcctgcagagcccccagaggatgaacatcctgaacctggaccccagcgtggccctgggcttcttctgcaaggaggagaaggactttgacaactggtgcagcctggtgcagaaggagatcctgaaggagaacctgaggatgtttgagctggtgcagaagcaccccagccactggcccccatttgtgcccccagccaagccagaggtgaccaccactggagctgagttcatcgacagcacagagcagctggaggagtttgacctggaggaggactttgagatcctgtctgtgtag

SEQ ID NO: 253590 - DNA, 1011 bp, Artificial Sequence
  derived and/or modified sequence
atggagagcgtgctgagcaagtacgaggaccagatcaccatcttcactgattacctcgaggagtatcccgatacagacgagctcgtgtggatcctaggtaaacagcacttgctgaagacagaaaaatctaagctgctgagtgatatctccgccagactctggtttacataccgtcggaagttctcccccattggggggactggtccttcctccgatgcagggtggggctgtatgcttcggtgcggtcagatgatgctagcacaggctctcatctgccgacacctggggagagattggtcctgggagaaacagaaagaacagccaaaggagtatcagcgaattttgcagtgtttcttggatagaaaggactgctgttacagtattcaccaaatggcccagatgggggtcggggaaggtaagtcaattggagaatggttcgggcctaatacagtggcccaggtgctgaaaaaattggctctctttgatgaatggaatagtctggctgtctacgtttcaatggacaacacagtcgtgattgaagacatcaaaaaaatgtgcagggttcttcctttatctgctgataccgctggggatcgtcctccagactcccttaccgccagcaatcagtcagacgagctgatcttcctcgacccacacacaacacagacatttgtcgatacagaggagaacggtactgtcaatgaccagaccttccattgtttacagtcgccacagcggatgaatatcttaaacttagatccctcggtagcattaggctttttctgtaaggaagagaaagacttcgataactggtgctccctcgtgcagaaggagatcctgaaagaaaatctgcggatgtttgagctagttcagaagcatccaagccactggccccccttcgtcccacccgccaagccggaagttactaccacaggcgctgagttcattgactccactgagcagctcgaagaatttgatctcgaagaggattttgagatcctgtcagtctag

SEQ ID NO: 253591 - DNA, 1011 bp, Artificial Sequence
  derived and/or modified sequence
atggagtccgtcctttccaaatatgaggaccagattacaattttcacagactatcttgaggaatatccagacacagatgagctggtctggatccttgggaagcagcaccttctgaagactgagaaaagtaagctcttgtcagacatatctgcgagactgtggttcacttaccggaggaaattctctcccatagggggtacggggccttctagcgatgccggatggggctgtatgcttcggtgcggtcagatgatgctggcacaggctctgatctgccgccatctcggacgagattggagttgggagaaacagaaagaacaaccaaaggaatatcagcggattctgcaatgctttcttgatcggaaggactgctgttattcgattcaccagatggctcagatgggcgtaggcgaagggaagtctataggtgaatggtttggaccaaatacggtggctcaggtcctgaaaaagttggccttgttcgacgaatggaattcgctcgctgtctatgtgagcatggacaataccgtcgtgatcgaggatattaagaaaatgtgtcgagtcctgcccctttccgctgataccgccggagaccgacctcccgatagcctgacggctagcaatcaatcagacgaattaatttttcttgaccctcacaccactcagacctttgtcgacacggaggaaaacgggactgtgaacgatcagacatttcactgtctccagtctccacaacgcatgaacatcctgaacctcgacccaagcgtggcactcgggtttttttgcaaggaggaaaaggattttgataattggtgttccttagtgcagaaggaaatccttaaggaaaaccttcgcatgtttgagctcgtgcagaagcatcccagtcattggcctccttttgtccctcctgcaaagcccgaggtcaccactaccggcgcagagtttatcgatagcacggaacaacttgaagagtttgacctagaagaagacttcgaaatcttgtccgtttag

SEQ ID NO: 253592 - DNA, 1653 bp, Artificial Sequence
  derived and/or modified sequence
aagttgccggtggaattggcccaggatgacagctggagaatggagtcagttttatccaagtatgaagatcagattactattttcactgactacctagaagaatatccagatacagatgagctggtatggatcttagggaagcagcatctccttaaaacagattgggaaagaaagaccttttaacctgaaactgctaacagcccagcacccagataaagccagagcttggaaagaggcagctctgagatttgtgtctttctgaggagacatcctcttcagaggccctcacttagcgtggaggaaggaacaggaagaggctgatgaaaaggcaggagaggaagttaggcattgtggagctcctcctgagcctggcttcattattttgattggagaattctgaacagtggaaagcctggagctagcaattaggagaccttttgtattcagactcttctaactcagaaaaatctaagctgttgtctgatataagtgctcgtctatggtttacatacagaaggaaattttcaccaattggtggaacgggcccttcatcagatgctggttggggatgtatgctacgctgtggacagatgatgctggctcaagcccttatctgtagacacttgggaagggactggagctgggagaaacaaaaagaacaacccaaagaataccaacgcatcctacagtgcttcttagatagaaaagattgttgctactctatccatcaaatggcacaaatgggtgtaggagaagggaaatcaattggagaatggtttggaccaaatacagttgcacaggtgttaaaaaaacttgctttatttgacgaatggaattccttggctgtttatgtttcaatggataacacagtggtcattgaagatatcaaaaaaatgtgccgtgtccttcccttgagtgctgacacagctggtgacaggcctcccgattctttaactgcttcaaaccagagtgacgagctcatcttcttggaccctcatacaacccagacctttgttgacactgaagagaatggaacggttaatgaccagactttccattgcctgcagtccccacagcgaatgaacatcctaaacctggatccttcagttgcattgggatttttctgcaaagaagaaaaagactttgataactggtgtagccttgttcagaaggaaattctaaaggagaatttaaggatgtttgaattagttcagaaacatccatcacactggcctccctttgtacctccagccaagccagaagtgacaaccactggggcagaattcattgactctactgagcaactggaggagtttgatctggaggaagattttgagattctgagtgtgtagaatcctgggaactcaacttgaaggtctgtcttccatctggcaccataaaaacatgaacttattgcataaaacttttctagtcagcaagtgcctgatatgccaatagcatacaaactcaatagcaatcatgactgagccaatcactgtttctcagaaaaacaaaacaaaacaaaacaaatgacagtaacccttccccggaaagaaatagaacaatcatggagcctaggagcagagagatgaggaggagttcattgcttcccagcttgtgttatatggctacagcaagtcttcagctgctgca

SEQ ID NO: 253593 - protein, 230 aa, Artificial Sequence
  derived and/or modified sequence
MGRPLLLPLLPLLLPPAFLQPSGSTGSGPSYLYGVTQPKHLSASMGGSVEIPFSFYYPWELATAPDVRISWRRGHFHRQSFYSTRPPSIHKDYVNRLFLNWTEGQKSGFLRISNLQKQDQSVYFCRVELDTRSSGRQQWQSIEGTKLSITQGQQRTKATTPAREPFQNTEEPYENIRNEGQNTDPKLNPKDDGIVYASLALSSSTSPRAPPSHRPLKSPQNETLYSVLKA

SEQ ID NO: 253594 - protein, 163 aa, Artificial Sequence
  derived and/or modified sequence
MGRPLLLPLLPLLLPPAFLQPSGSTGSGPSYLYGVTQPKHLSASMGGSVEIPFSFYYPWELATAPDVRISWRRGHFHRQSFYSTRPPSIHKDYVNRLFLNWTEGQKSGFLRISNLQKQDQSVYFCRVELDTRSSGRQQWQSIEGTKLSITQGQQRTKATTPAR

SEQ ID NO: 253595 - DNA, 693 bp, Artificial Sequence
  derived and/or modified sequence
atgggccgcccgctgctcctccctcttttgcctctgttattacccccagcgtttctgcagccctccggcagtaccggtagcggaccctcctacctatatggcgtgactcagcccaagcatttgagcgccagtatgggcgggtccgttgaaatccccttctcattttattacccatgggagcttgccacggctcctgatgtgagaatcagctggagaagaggtcattttcatagacagtctttttatagcaccagaccacctagcatccataaggactatgttaacagattgttcctaaactggacagaggggcagaagtctggcttcctgcggatcagtaatcttcaaaagcaggaccagtctgtgtacttctgtcgcgtggagcttgacactcggtctagcggacggcaacagtggcagtccatcgaagggaccaaattgtctataacccaggggcagcagaggaccaaagcgactactcctgccagggaaccatttcagaataccgaagagccatacgagaacattagaaacgaaggccagaataccgaccctaagcttaatcccaaggatgatggcatcgtgtacgctagtctcgctctgtcctcaagcaccagtccacgcgcacctcctagccatcgccctctcaaatctcctcagaatgagacgctgtattccgtgctgaaagcctag

SEQ ID NO: 253596 - DNA, 492 bp, Artificial Sequence
  derived and/or modified sequence
atgggaaggcctctgttgcttcccctgctgcctctcttgctgcctcccgcttttctacagccgtctggcagcacaggatctggcccctcctatctctacggggttacccagccgaagcatttgagcgcctccatgggtggctcagtagagattcctttctcattttattatccatgggaacttgctactgctcctgacgtgcggatctcttggagaagaggccatttccacaggcaaagcttctatagcactcggccccctagtattcataaagattatgtcaatagactatttcttaactggaccgaggggcaaaagtctgggttcctccgcatttctaatctccaaaaacaggaccagtccgtctacttttgtcgtgtggagcttgacacaaggtcaagcggacggcaacagtggcaatcgattgaggggactaaactctcaatcacccaagggcagcagcgtaccaaggcaaccacccccgcccgatag

SEQ ID NO: 253597 - DNA, 693 bp, Artificial Sequence
  derived and/or modified sequence
atgggccggcccctgctgctgcccctgctgcccctgctgctgcccccagccttcctgcagcccagcggcagcactggaagtggccccagctacctgtatggagtgacccagcccaagcacctgagcgcctccatgggcggctctgtggagatccccttctccttctactacccctgggagctggccacagccccagatgtgcgcatctcctggaggcggggccacttccaccggcagagcttctacagcacccggccccccagcatccacaaggactatgtgaacagactcttcctgaactggacagagggccagaagagcggcttcctgcgcatcagcaacctgcagaagcaggaccagagcgtgtacttctgccgggtggagctggacaccaggagcagcggccggcagcagtggcagagcattgagggcaccaagctgagcatcacccagggccagcagaggaccaaggccaccaccccagcccgggagcccttccagaacacagaggagccctatgagaacatcagaaatgaaggccagaacacagaccccaagctgaaccccaaggatgatggcatcgtgtatgccagcctggccctgagcagcagcaccagcccccgggccccacccagccaccggcccctgaagagcccccagaatgagaccctgtacagcgtgctgaaggcctag

SEQ ID NO: 253598 - DNA, 492 bp, Artificial Sequence
  derived and/or modified sequence
atgggccggcccctgctgctgcccctgctgcccctgctgctgcccccagccttcctgcagcccagcggcagcactggaagtggccccagctacctgtatggagtgacccagcccaagcacctgagcgcctccatgggcggctctgtggagatccccttctccttctactacccctgggagctggccacagccccagatgtgcgcatctcctggaggcggggccacttccaccggcagagcttctacagcacccggccccccagcatccacaaggactatgtgaacagactcttcctgaactggacagagggccagaagagcggcttcctgcgcatcagcaacctgcagaagcaggaccagagcgtgtacttctgccgggtggagctggacaccaggagcagcggccggcagcagtggcagagcattgagggcaccaagctgagcatcacccagggccagcagaggaccaaggccaccaccccagccaggtag

SEQ ID NO: 253599 - DNA, 693 bp, Artificial Sequence
  derived and/or modified sequence
atgggccggcccctgctgctgcccctgctgcccctgctgctgccccccgcctttctccagccatcgggctccactggctctggcccaagctatttatacggcgttacacaaccaaaacacttgtctgccagcatgggtgggtctgtcgaaatacccttttccttttattacccttgggaacttgcgacagcccccgacgtgcgaattagctggcgacggggtcactttcatcggcagagtttctacagcacacgcccaccaagcatccataaggattacgttaaccgcctgtttcttaattggaccgagggtcaaaagtctggtttcctacgcatctcaaacctccaaaagcaggatcaatccgtatacttctgccgcgtcgagctcgacacgagatcctcagggcgacagcagtggcagagcattgaagggaccaaactgtcgattacccagggacagcagagaacaaaggctacaacccctgcacgggagcctttccagaatactgaagaaccatatgagaatatccgaaacgaggggcagaacactgaccccaaactcaaccctaaagatgacggaatcgtatatgcctctctggctttgtccagtagcacctcccccagagcacctccgtcccatagacccctgaagagtcctcaaaatgagacactgtactccgtcttgaaggcctag

SEQ ID NO: 253600 - DNA, 492 bp, Artificial Sequence
  derived and/or modified sequence
atgggccggcccctgctgctgcccctgctgcccctgctgctgccccccgcctttctgcaaccatcaggatccacggggagcggcccgtcttatctctatggcgtgactcagcccaagcatcttagcgctagcatgggagggtctgtggagattccattctccttctattatccatgggagcttgccacagctcccgacgtacgtatttcatggcgaagggggcattttcacaggcagtctttctatagtacacgacccccctctattcataaggattacgttaaccggttgtttctcaactggactgaagggcagaagtcagggttcttacgaatcagcaatctccagaagcaagatcagagcgtttacttttgtagagtggagctggatacacggtccagcgggcgccagcaatggcagagcatcgagggaacaaagttatccattactcaggggcaacagcggaccaaggcaactacgccagccaggtag

SEQ ID NO: 253601 - DNA, 1011 bp, Artificial Sequence
  derived and/or modified sequence
acagccctcttcggagcctgagcccggctctcctcactcacctcaacccccaggcggcccctccacagggcccctctcctgcctggacggctctgctggtctccccgtcccctggagaagaacaaggccatgggtcggcccctgctgctgcccctactgcccttgctgctgccgccagcatttctgcagcctagtggctccacaggatctggtccaagctacctttatggggtcactcaaccaaaacacctctcagcctccatgggtggctctgtggaaatccccttctccttctattacccctgggagttagccacagctcccgacgtgagaatatcctggagacggggccacttccacaggcagtccttctacagcacaaggccgccttccattcacaaggattatgtgaaccggctctttctgaactggacagagggtcagaagagcggcttcctcaggatctccaacctgcagaagcaggaccagtctgtgtatttctgccgagttgagctggacacacggagctcagggaggcagcagtggcagtccatcgaggggaccaaactctccatcacccagggtcagcagcggactaaagccacaaccccagccagggaacccttccaaaacacagaggagccatatgagaatatcaggaatgaaggacaaaatacagatcccaagctaaatcccaaggatgacggcatcgtctatgcttcccttgccctctccagctccacctcacccagagcacctcccagccaccgtcccctcaagagcccccagaacgagaccctgtactctgtcttaaaggcctaaccaatggacagccctctcaagactgaatggtgaggccaggtacagtggcgcacacctgtaatcccagctactctgaagcctgaggcagaatcaagtgagcccaggagttcagggccagctttgataatggagcgagatgccatctctagttaaaaatatatattaacaataaagtaacaaatttaaaaa

SEQ ID NO: 253602 - DNA, 653 bp, Artificial Sequence
  derived and/or modified sequence
gctgggtccctgaatcaccgactggaggagagttacctacaagagccttcatccaggagcatccacactgcaatgatataggaatgaggcggcccctccacagggcccctctcctgcctggacggctctgctggtctccccgtcccctggagaagaacaaggccatgggtcggcccctgctgctgcccctactgcccttgctgctgccgccagcatttctgcagcctagtggctccacaggatctggtccaagctacctttatggggtcactcaaccaaaacacctctcagcctccatgggtggctctgtggaaatccccttctccttctattacccctgggagttagccacagctcccgacgtgagaatatcctggagacggggccacttccacaggcagtccttctacagcacaaggccgccttccattcacaaggattatgtgaaccggctctttctgaactggacagagggtcagaagagcggcttcctcaggatctccaacctgcagaagcaggaccagtctgtgtatttctgccgagttgagctggacacacggagctcagggaggcagcagtggcagtccatcgaggggaccaaactctccatcacccagggtcagcagcggactaaagccacaaccccagccagg

SEQ ID NO: 253603 - DNA, 693 bp, Artificial Sequence
  derived and/or modified sequence
atggggcgacctctattgttgcccttattgcctctcctgttgccaccagcgttcctgcagccatccggctctactggctctggtccctcctacctttatggtgttactcagccaaagcacctctctgcctccatggggggatctgtggaaatccccttttccttctactatccctgggagttagctaccgcgcctgatgtgaggatatcctggaggcggggtcactttcacaggcagagtttctattccacaaggccgccatctatccacaaagactacgttaatcgattatttcttaactggacggaggggcagaagtcaggattccttcggatttctaacctccagaaacaagatcagtctgtgtatttctgtagggttgaactggatacgcgcagttccggcaggcagcagtggcagtctattgaaggaaccaaactgtctattacccagggacaacaaaggaccaaggcaaccacccctgcccgagaaccgtttcaaaatacagaggagccttatgagaatattcgcaatgagggtcaaaataccgatcctaagcttaaccctaaagacgatggtatcgtgtacgcctcgctcgcgctgtcttcaagcactagtccaagggcaccacctagccacagacctctgaagtccccccaaaatgagacactatacagcgtactgaaggcatag

SEQ ID NO: 253604 - DNA, 492 bp, Artificial Sequence
  derived and/or modified sequence
atgggtcgcccactgttgcttccattgttacccctgctgctgccacctgcgttcttacagccgtctggaagcaccggatcgggaccttcatacctgtatggcgttacccagccaaaacatcttagtgcgagcatgggcggaagcgtggaaatccccttctcattctactacccctgggaactggccaccgccccagacgtgcgcatctcttggcgacggggtcactttcaccggcagtctttttattctacccgcccaccgagtatccacaaggactacgttaaccgcctttttctgaattggacagagggccagaagagcggctttttacgtatcagcaacttacagaagcaggaccaatctgtttacttttgcagagtcgaactggatacccgttccagcggcagacagcaatggcaaagcattgagggcactaagctgtccatcactcaagggcagcagaggaccaaggccaccaccccagctagatag

SEQ ID NO: 253605 - DNA, 693 bp, Artificial Sequence
  derived and/or modified sequence
atgggcagacccctgctgctgcccctgctgcccctgctgctgccccccgccttcctgcagcccagcggcagcaccggcagcggccccagctacctgtacggcgtgacccagcccaagcacctgagcgccagcatgggcggcagcgtggagatccccttcagcttctactacccctgggagctggccaccgcccccgacgtgagaatcagctggagaagaggccacttccacagacagagcttctacagcaccagaccccccagcatccacaaggactacgtgaacagactgttcctgaactggaccgagggccagaagagcggcttcctgagaatcagcaacctgcagaagcaggaccagagcgtgtacttctgcagagtggagctggacaccagaagcagcggcagacagcagtggcagagcatcgagggcaccaagctgagcatcacccagggccagcagagaaccaaggccaccacccccgccagagagcccttccagaacaccgaggagccctacgagaacatcagaaacgagggccagaacaccgaccccaagctgaaccccaaggacgacggcatcgtgtacgccagcctggccctgagcagcagcaccagccccagagccccccccagccacagacccctgaagagcccccagaacgagaccctgtacagcgtgctgaaggcctag

SEQ ID NO: 253606 - DNA, 492 bp, Artificial Sequence
  derived and/or modified sequence
atgggcagacccctgctgctgcccctgctgcccctgctgctgccccccgccttcctgcagcccagcggcagcaccggcagcggccccagctacctgtacggcgtgacccagcccaagcacctgagcgccagcatgggcggcagcgtggagatccccttcagcttctactacccctgggagctggccaccgcccccgacgtgagaatcagctggagaagaggccacttccacagacagagcttctacagcaccagaccccccagcatccacaaggactacgtgaacagactgttcctgaactggaccgagggccagaagagcggcttcctgagaatcagcaacctgcagaagcaggaccagagcgtgtacttctgcagagtggagctggacaccagaagcagcggcagacagcagtggcagagcatcgagggcaccaagctgagcatcacccagggccagcagagaaccaaggccaccacccccgccagatag

SEQ ID NO: 253607 - protein, 175 aa, Artificial Sequence
  derived and/or modified sequence
MGRPLLLPLLPLLLPPAFLQPSGSTGSGPSYLYGVTQPKHLSASMGGSVEIPFSFYYPWELATAPDVRISWRRGHFHRQSFYSTRPPSIHKDYVNRLFLNWTEGQKSGFLRISNLQKQDQSVYFCRVELDTRSSGRQQWQSIEGTKLSITQGNPSKTQRSHMRISGMKDKIQIPS

SEQ ID NO: 253608 - DNA, 528 bp, Artificial Sequence
  derived and/or modified sequence
atgggcagacctttgcttctgcccctgctgcctcttctgcttccgcctgcctttctgcaacccagtgggagcacgggcagcgggccaagttacctgtacggggtgacccaacccaaacacctctctgcgtcaatggggggatcggtggaaattccattctctttctactacccttgggagctggccaccgcaccagacgttcgcatttcttggagacgaggccactttcacagacagtctttctatagcactcgccccccatcaatccacaaagactatgttaatcggctcttcctcaattggacggaaggtcagaaatccggcttcttaaggatttccaatctgcagaagcaggatcaaagcgtctacttttgccgcgttgagctcgatacccgctcaagcggcaggcaacagtggcagtcaattgagggcaccaaactgtctataacgcagggcaacccctcgaaaactcagaggtcacatatgcggatatctggcatgaaggataagatccaaatcccaagctag

SEQ ID NO: 253609 - DNA, 528 bp, Artificial Sequence
  derived and/or modified sequence
atgggccggcccctgctgctgcccctgctgcccctgctgctgcccccagccttcctgcagcccagcggcagcactggaagtggccccagctacctgtatggagtgacccagcccaagcacctgagcgcctccatgggcggctctgtggagatccccttctccttctactacccctgggagctggccacagccccagatgtgcgcatctcctggaggcggggccacttccaccggcagagcttctacagcacccggccccccagcatccacaaggactatgtgaacagactcttcctgaactggacagagggccagaagagcggcttcctgcgcatcagcaacctgcagaagcaggaccagagcgtgtacttctgccgggtggagctggacaccaggagcagcggccggcagcagtggcagagcattgagggcaccaagctgagcatcacccagggcaaccccagcaagacccagaggagccacatgaggatcagcggcatgaaggacaagatccagatccccagctag

SEQ ID NO: 253610 - DNA, 528 bp, Artificial Sequence
  derived and/or modified sequence
atgggccggcccctgctgctgcccctgctgcccctgctgctgccccccgcctttctgcagccgagcgggagcaccgggtccggcccgtcatacctttacggtgtgacccagcccaaacacctgtcagcttccatggggggcagtgtggaaattccttttagcttctattacccctgggaactggccaccgctcccgatgtgcggatctcctggagacggggccatttccacagacagagcttctactctactagacctcccagtatccataaggattatgtaaaccgcttgttcctgaattggaccgaggggcagaaaagtggatttctgcgaatctctaatctgcaaaagcaggatcaatctgtatatttctgcagggtcgagctcgacacccgctcttccggtaggcagcaatggcagagcattgaaggaactaaactctctatcacccaggggaatccatcaaaaacccagcggtcacacatgcggatttcagggatgaaggataagatccagataccatcttag

SEQ ID NO: 253611 - DNA, 909 bp, Artificial Sequence
  derived and/or modified sequence
acagccctcttcggagcctgagcccggctctcctcactcacctcaacccccaggcggcccctccacagggcccctctcctgcctggacggctctgctggtctccccgtcccctggagaagaacaaggccatgggtcggcccctgctgctgcccctactgcccttgctgctgccgccagcatttctgcagcctagtggctccacaggatctggtccaagctacctttatggggtcactcaaccaaaacacctctcagcctccatgggtggctctgtggaaatccccttctccttctattacccctgggagttagccacagctcccgacgtgagaatatcctggagacggggccacttccacaggcagtccttctacagcacaaggccgccttccattcacaaggattatgtgaaccggctctttctgaactggacagagggtcagaagagcggcttcctcaggatctccaacctgcagaagcaggaccagtctgtgtatttctgccgagttgagctggacacacggagctcagggaggcagcagtggcagtccatcgaggggaccaaactctccatcacccaggggaacccttccaaaacacagaggagccatatgagaatatcaggaatgaaggacaaaatacagatcccaagctaaatcccaaggatgacggcatcgtctatgcttcccttgccctctccagctccacctcacccagagcacctcccagccaccgtcccctcaagagcccccagaacgagaccctgtactctgtcttaaaggcctaaccaatggacagccctctcaagactgaatggtgaggccaggtacagtggcgcacacctgtaatcccagctactctgaagcctgaggcagaatcaagtgagcccaggagttcagggccagctt

SEQ ID NO: 253612 - DNA, 528 bp, Artificial Sequence
  derived and/or modified sequence
atgggcaggccattgcttcttcccttgttgccactcctcctccctcccgctttcctgcagcccagtggcagcaccgggtctggcccttcctacctgtatggtgtcacccaacctaaacacctgagcgctagcatgggaggatcagtggaaattccttttagcttttactacccgtgggagctcgctacagccccagacgtgagaatatcatggcgacggggacactttcataggcagtctttctactcaaccaggcctccttctatccacaaagactacgtgaatcgtctgttcctgaattggactgaagggcagaagtccggattcctgaggatcagcaacttgcagaaacaggaccaatcggtgtacttttgcagagtggagctggacacaaggtcatcaggtcggcagcagtggcaaagtattgagggcactaaactgtcaataacccagggaaacccctcaaaaactcagcggtcccacatgcgcatttcgggaatgaaagacaagatccagattcccagttag

SEQ ID NO: 253613 - DNA, 528 bp, Artificial Sequence
  derived and/or modified sequence
atgggcagacccctgctgctgcccctgctgcccctgctgctgccccccgccttcctgcagcccagcggcagcaccggcagcggccccagctacctgtacggcgtgacccagcccaagcacctgagcgccagcatgggcggcagcgtggagatccccttcagcttctactacccctgggagctggccaccgcccccgacgtgagaatcagctggagaagaggccacttccacagacagagcttctacagcaccagaccccccagcatccacaaggactacgtgaacagactgttcctgaactggaccgagggccagaagagcggcttcctgagaatcagcaacctgcagaagcaggaccagagcgtgtacttctgcagagtggagctggacaccagaagcagcggcagacagcagtggcagagcatcgagggcaccaagctgagcatcacccagggcaaccccagcaagacccagagaagccacatgagaatcagcggcatgaaggacaagatccagatccccagctag

SEQ ID NO: 253614 - protein, 422 aa, Artificial Sequence
  derived and/or modified sequence
TGSCCVDQLACCCGSAGCSLCCDCCPRIRQSLSTRFMYALYFILVVVLCCIMMSTTVAHKMKEHIPFFEDMCKGIKAGDTCEKLVGYSAVYRVCFGMACFFFIFCLLTLKINNSKSCRAHIHNGFWFFKLLLLGAMCSGAFFIPDQDTFLNAWRYVGAVGGFLFIGIQLLLLVEFAHKWNKNWTAGTASNKLWYASLALVTLIMYSIATGGLVLMAVFYTQKDSCMENKILLGVNGGLCLLISLVAISPWVQNRQPHSGLLQSGVISCYVTYLTFSALSSKPAEVVLDEHGKNVTICVPDFGQDLYRDENLVTILGTSLLIGCILYSCLTSTTRSSSDALQGRYAAPELEIARCCFCFSPGGEDTEEQQPGKEGPRVIYDEKKGTVYIYSYFHFVFFLASLYVMMTVTNWFNHVRSAFHLLP

SEQ ID NO: 253615 - protein, 423 aa, Artificial Sequence
  derived and/or modified sequence
MSAQCCAGQLACCCGSAGCSLCCDCCPRIRQSLSTRFMYALYFILVVVLCCIMMSTTVAHKMKEHIPFFEDMCKGIKAGDTCEKLVGYSAVYRVCFGMACFFFIFCLLTLKINNSKSCRAHIHNGFWFFKLLLLGAMCSGAFFIPDQDTFLNAWRYVGAVGGFLFIGIQLLLLVEFAHKWNKNWTAGTASNKLWYASLALVTLIMYSIATGGLVLMAVFYTQKDSCMENKILLGVNGGLCLLISLVAISPWVQNRQPHSGLLQSGVISCYVTYLTFSALSSKPAEVVLDEHGKNVTICVPDFGQDLYRDENLVTILGTSLLIGCILYSCLTSTTRSSSDALQGRYAAPELEIARCCFCFSPGGEDTEEQQPGKEGPRVIYDEKKGTVYIYSYFHFVFFLASLYVMMTVTNWFNHVRSAFHLLP

SEQ ID NO: 253616 - DNA, 1269 bp, Artificial Sequence
  derived and/or modified sequence
accggcagctgctgcgtggaccagctggcctgctgctgcggcagcgccggctgcagcctgtgctgcgactgctgccccagaatcagacagagcctgagcaccagattcatgtacgccctgtacttcatcctggtggtggtgctgtgctgcatcatgatgagcaccaccgtggcccacaagatgaaggagcacatccccttcttcgaggacatgtgcaagggcatcaaggccggcgacacctgcgagaagctggtgggctacagcgccgtgtacagagtgtgcttcggcatggcctgcttcttcttcatcttctgcctgctgaccctgaagatcaacaacagcaagagctgcagagcccacatccacaacggcttctggttcttcaagctgctgctgctgggcgccatgtgcagcggcgccttcttcatccccgaccaggacaccttcctgaacgcctggagatacgtgggcgccgtgggcggcttcctgttcatcggcatccagctgctgctgctggtggagttcgcccacaagtggaacaagaactggaccgccggcaccgccagcaacaagctgtggtacgccagcctggccctggtgaccctgatcatgtacagcatcgccaccggcggcctggtgctgatggccgtgttctacacccagaaggacagctgcatggagaacaagatcctgctgggcgtgaacggcggcctgtgcctgctgatcagcctggtggccatcagcccctgggtgcagaacagacagccccacagcggcctgctgcagagcggcgtgatcagctgctacgtgacctacctgaccttcagcgccctgagcagcaagcccgccgaggtggtgctggacgagcacggcaagaacgtgaccatctgcgtgcccgacttcggccaggacctgtacagagacgagaacctggtgaccatcctgggcaccagcctgctgatcggctgcatcctgtacagctgcctgaccagcaccaccagaagcagcagcgacgccctgcagggcagatacgccgcccccgagctggagatcgccagatgctgcttctgcttcagccccggcggcgaggacaccgaggagcagcagcccggcaaggagggccccagagtgatctacgacgagaagaagggcaccgtgtacatctacagctacttccacttcgtgttcttcctggccagcctgtacgtgatgatgaccgtgaccaactggttcaaccacgtgagaagcgccttccacctgctgccctag

SEQ ID NO: 253617 - DNA, 1272 bp, Artificial Sequence
  derived and/or modified sequence
atgagcgcccagtgctgcgccggccagctggcctgctgctgcggcagcgccggctgcagcctgtgctgcgactgctgccccagaatcagacagagcctgagcaccagattcatgtacgccctgtacttcatcctggtggtggtgctgtgctgcatcatgatgagcaccaccgtggcccacaagatgaaggagcacatccccttcttcgaggacatgtgcaagggcatcaaggccggcgacacctgcgagaagctggtgggctacagcgccgtgtacagagtgtgcttcggcatggcctgcttcttcttcatcttctgcctgctgaccctgaagatcaacaacagcaagagctgcagagcccacatccacaacggcttctggttcttcaagctgctgctgctgggcgccatgtgcagcggcgccttcttcatccccgaccaggacaccttcctgaacgcctggagatacgtgggcgccgtgggcggcttcctgttcatcggcatccagctgctgctgctggtggagttcgcccacaagtggaacaagaactggaccgccggcaccgccagcaacaagctgtggtacgccagcctggccctggtgaccctgatcatgtacagcatcgccaccggcggcctggtgctgatggccgtgttctacacccagaaggacagctgcatggagaacaagatcctgctgggcgtgaacggcggcctgtgcctgctgatcagcctggtggccatcagcccctgggtgcagaacagacagccccacagcggcctgctgcagagcggcgtgatcagctgctacgtgacctacctgaccttcagcgccctgagcagcaagcccgccgaggtggtgctggacgagcacggcaagaacgtgaccatctgcgtgcccgacttcggccaggacctgtacagagacgagaacctggtgaccatcctgggcaccagcctgctgatcggctgcatcctgtacagctgcctgaccagcaccaccagaagcagcagcgacgccctgcagggcagatacgccgcccccgagctggagatcgccagatgctgcttctgcttcagccccggcggcgaggacaccgaggagcagcagcccggcaaggagggccccagagtgatctacgacgagaagaagggcaccgtgtacatctacagctacttccacttcgtgttcttcctggccagcctgtacgtgatgatgaccgtgaccaactggttcaaccacgtgagaagcgccttccacctgctgccctag

SEQ ID NO: 253618 - DNA, 1269 bp, Artificial Sequence
  derived and/or modified sequence
accggatcgtgctgcgtagaccagctggcctgctgctgtggaagcgccggctgctccctctgttgcgactgttgcccacgtatccgccaatccctgtccaccaggttcatgtatgctctgtatttcatactggtggtcgttctgtgttgtatcatgatgagcacaacagtcgctcacaaaatgaaggagcacattccattttttgaggacatgtgcaaagggatcaaggctggggacacatgcgagaaacttgtcggatactctgccgtgtaccgcgtgtgtttcggaatggcttgcttctttttcatcttttgcctgctgacgctgaagataaacaactccaagtcctgccgggcccatatccataatggattctggtttttcaagctgctgctgcttggcgcgatgtgtagcggagctttctttattccagatcaagatactttcctgaatgcctggcgctatgtgggggctgttggagggttcctcttcatcggcatccagttgctgctgctcgttgagtttgcccacaaatggaataagaattggaccgcgggcacagctagtaataaactgtggtacgcgtcacttgcccttgtgactctcatcatgtatagcatcgccacagggggtctggtgctgatggctgtcttttatacccaaaaggacagttgcatggagaataagatcctgttaggtgttaatggaggactgtgcctgctgatctccctggttgcgatttctccatgggttcaaaacagacaaccgcattccggactgctgcaatccggggtgatttcctgctacgtgacctacctcacattctccgctttaagtagcaaacctgcggaagtggtgctagatgagcacggaaagaatgtgactatctgcgtgcctgacttcggacaagatctttaccgggacgagaacctggtgacgatcctgggaacctccctactgattggatgtatcctgtatagctgtctgacatcaacgactcggagcagctccgatgcactgcagggaagatacgcagcccccgaactggaaattgcacgatgttgcttttgctttagcccaggtggagaggacacggaagagcagcagcctggcaaggaggggcccagggttatctatgacgagaagaaggggacagtatatatttatagctactttcacttcgtcttttttctggcgtccctgtacgtgatgatgacggtcactaactggttcaaccacgtccggagtgctttccacctgcttccttag

SEQ ID NO: 253619 - DNA, 1272 bp, Artificial Sequence
  derived and/or modified sequence
atgagcgcccagtgttgtgccggccaactggcctgctgctgcgggagtgccgggtgctccctgtgttgcgactgctgtccgcggatccgccagtcgttatcaaccaggttcatgtacgctctgtacttcattctggtggttgtgctatgctgtataatgatgtcaacaacagtggcccacaagatgaaagaacacatcccattcttcgaagacatgtgcaagggcatcaaggctggagatacttgcgagaaacttgtcggctactcggccgtctatcgagtatgttttggaatggcttgtttcttcttcatcttttgccttctaaccctgaaaatcaacaattcaaagagctgccgtgcccacatacacaatggtttttggttctttaaactgcttttgctgggtgcgatgtgtagcggtgccttcttcatcccagaccaggacacttttctgaacgcgtggcgatatgtcggggccgttggcggatttttgttcattgggatccagttgcttctattggtggaatttgcgcacaagtggaataagaactggactgcaggcacagcatctaataaattgtggtacgcttctctagcccttgtgacactgatcatgtattccattgccaccggcgggctcgtgctaatggctgtgttttatacccagaaggacagctgtatggagaacaagatcctgcttggcgtcaacggcggcctgtgcttgctgatctctctggttgcgatctccccctgggtccagaatcggcagccccatagtgggctacttcagtcaggggtgattagctgctatgttacctacctcactttctctgctctgtcctccaaacccgctgaagtggtgcttgacgaacacggcaagaacgtgacaatatgtgtccctgattttggacaagacctataccgggacgagaacctggtcaccattctggggaccagcctgctgattggatgtatcctgtacagttgtctgacttcgaccaccagatctagctccgatgcacttcaggggcgttatgctgcacctgagctggaaattgcacgctgctgcttctgttttagccctggcggcgaagatacagaagaacaacagcctgggaaggaaggaccacgtgtgatttacgacgaaaagaaaggtacagtctacatttatagctactttcatttcgtgtttttcctggccagtctgtacgtgatgatgactgtgacaaattggtttaatcacgtgcgatctgccttccatcttttgccatag

SEQ ID NO: 253620 - DNA, 1269 bp, Artificial Sequence
  derived and/or modified sequence
actggcagctgctgcgtggaccagctggcctgctgctgcggcagcgctggctgcagcctgtgctgtgactgctgcccccgcatccggcagagcctgagcacccgcttcatgtatgccctgtacttcatcctggtggtggtgctgtgctgcatcatgatgagcaccaccgtggcccacaagatgaaggagcacatccccttctttgaggacatgtgcaagggcatcaaggccggggacacctgtgagaagctggtgggctacagcgctgtgtacagagtgtgcttcggcatggcctgcttcttcttcatcttctgcctgctgaccctgaagatcaacaacagcaagagctgccgggcccacatccacaacggcttctggttcttcaagctgctgctgctgggcgccatgtgcagcggggccttcttcatcccagaccaggacaccttcctgaatgcctggaggtatgtgggcgctgtgggcggcttcctgttcatcggcatccagctgctgctgctggtggagtttgcccacaagtggaacaagaactggacagctggaacagccagcaacaagctgtggtacgccagcctggccctggtgaccctcatcatgtacagcatcgccactggaggcctggtgctgatggctgtgttctacacccagaaggacagctgcatggagaacaagatcctgctgggcgtgaatggaggcctgtgcctgctgatcagcctggtggccatcagcccctgggtgcagaaccggcagccccacagcggcctgctgcagagcggggtcatcagctgctacgtgacctacctgaccttcagcgccctgagcagcaagccagctgaggtggtgctggatgagcacggcaagaatgtgaccatctgtgtgcctgactttggccaggacctgtacagagatgagaacctggtgaccatcctgggcaccagcctgctgattggctgcatcctgtacagctgcctgaccagcaccaccaggagcagcagtgatgccctgcagggccgctatgctgcccctgagctggagatcgcccgctgctgcttctgcttcagccctggaggagaggacacagaggagcagcagcccgggaaggagggccccagggtcatctatgatgagaagaagggcaccgtgtacatctacagctacttccactttgtgttcttcctggccagcctgtatgtgatgatgacagtgaccaactggttcaaccacgtgcgcagcgccttccacctgctgccctag

SEQ ID NO: 253621 - DNA, 1272 bp, Artificial Sequence
  derived and/or modified sequence
atgtctgcccagtgctgtgccggccagctggcctgctgctgcggcagcgctggctgcagcctgtgctgtgactgctgcccccgcatccggcagagcctgagcacccgcttcatgtatgccctgtacttcatcctggtggtggtgctgtgctgcatcatgatgagcaccaccgtggcccacaagatgaaggagcacatccccttctttgaggacatgtgcaagggcatcaaggccggggacacctgtgagaagctggtgggctacagcgctgtgtacagagtgtgcttcggcatggcctgcttcttcttcatcttctgcctgctgaccctgaagatcaacaacagcaagagctgccgggcccacatccacaacggcttctggttcttcaagctgctgctgctgggcgccatgtgcagcggggccttcttcatcccagaccaggacaccttcctgaatgcctggaggtatgtgggcgctgtgggcggcttcctgttcatcggcatccagctgctgctgctggtggagtttgcccacaagtggaacaagaactggacagctggaacagccagcaacaagctgtggtacgccagcctggccctggtgaccctcatcatgtacagcatcgccaccggcggcctggtgctgatggctgtgttctacacccagaaggacagctgcatggagaacaagatcctgctgggcgtgaatggaggcctgtgcctgctgatcagcctggtggccatcagcccctgggtgcagaaccggcagccccacagcggcctgctgcagagcggggtcatcagctgctacgtgacctacctgaccttcagcgccctgagcagcaagccagctgaggtggtgctggatgaacatggcaagaatgtgaccatctgtgtgcctgactttggccaggacctgtacagagatgagaacctggtgaccatcctgggcaccagcctgctgattggctgcatcctgtacagctgcctgaccagcaccaccaggagcagcagtgatgccctgcagggccgctatgctgcccctgagctggagatcgcccgctgctgcttctgcttcagccctggaggagaggacacagaggagcagcagcccgggaaggagggccccagggtcatctatgatgagaagaagggcaccgtgtacatctacagctacttccactttgtgttcttcctggccagcctgtatgtgatgatgacagtgaccaactggttcaaccacgtgcgcagcgccttccacctgctgccctag

SEQ ID NO: 253622 - DNA, 1269 bp, Artificial Sequence
  derived and/or modified sequence
accggcagctgctgcgtggaccagctggcctgctgctgcggcagcgctgggtgcagcctctgttgtgactgctgccctagaatccgccagtccctgtccacccggtttatgtacgctctctactttatccttgtagtggtactctgctgcataatgatgagcacaaccgtggctcataagatgaaggagcacattccgttctttgaagatatgtgcaagggaattaaggcaggcgacacttgcgagaagctggtaggatatagcgccgtgtatcgcgtttgcttcgggatggcctgcttcttcttcatcttttgtctgctcaccctcaagattaataacagcaaaagctgccgcgcgcatatacacaacgggttctggttctttaagctgctgctgctcggtgcaatgtgttcaggagcctttttcatcccagatcaggacacattcctcaacgcttggaggtatgttggcgctgtgggggggttcctctttatcggtatccagctgctgttactcgttgaattcgcccacaaatggaacaaaaattggactgcggggaccgcttctaataagctgtggtatgccagtctggcccttgttactttgatcatgtatagcatcgcgaccggcgggctggtactcatggcagtgttttatacccaaaaagatagctgcatggaaaacaagattctcctaggagtcaacggaggactttgtctgctgatctccttggttgccatatccccttgggtgcagaacagacagccgcattccggcctgcttcagagtggcgtgatttcctgttacgtcacataccttactttctcggccttaagttccaagcccgccgaggtcgtgctggatgagcatggcaaaaacgtcaccatctgcgtccccgatttcggccaggacctgtacagagatgagaatctggtgactatccttggaacatcactgctcattggttgtattctttattcctgcctcacgagcacaacaagaagcagctcagacgcactccaaggtaggtacgcagctccagaacttgagatcgcccggtgctgcttctgcttctctcctggcggggaggatacagaggagcagcagcctggcaaggaggggccgcgcgtgatctacgacgaaaaaaaggggacagtgtacatttattcatatttccatttcgtgttctttctggctagcctgtacgtcatgatgacggtcacaaattggttcaatcacgtccggtctgcatttcacctacttccgtag

SEQ ID NO: 253623 - DNA, 1272 bp, Artificial Sequence
  derived and/or modified sequence
atgagcgcccagtgctgcgccggccagctggcctgctgctgcggctctgcagggtgctcgctgtgttgtgattgttgccctagaatccggcagagcttgagcacacggttcatgtacgccttgtactttattttagtagtggtgctatgctgtatcatgatgtccacaactgtggctcataagatgaaggagcacatccctttttttgaggatatgtgcaagggtatcaaggcaggcgacacatgtgaaaagctggttggttactccgctgtttacagagtgtgctttggcatggcatgttttttcttcatcttctgtctcctcacactgaaaattaacaactcaaagtcttgtcgggcacacattcataacgggttctggttctttaagcttctgctgcttggggccatgtgcagtggggccttctttatccccgaccaggatacttttcttaatgcctggaggtacgtgggagctgtagggggttttttgtttattggaatccaactgctgctactggttgaatttgctcacaagtggaataagaactggaccgccggcaccgccagtaacaagctgtggtatgcttctctggctctcgtgacactcatcatgtattctatagccaccggaggcttagtactcatggccgttttctacacgcaaaaggatagttgtatggaaaataagattctcctcggtgttaacggcggcctatgtttgctgatctctctcgttgccatttccccatgggtgcagaatagacagccacactcaggtctgctgcagagcggtgtgatctcttgttacgtgacatacctgacattctcagctctgtcttctaaacctgccgaggtggttctcgacgagcatggcaaaaacgtaaccatttgcgtaccagattttggccaggacctttatcgggatgagaacctggtaactatcttgggcactagtcttctaatcggctgcatcctgtactcgtgtctcacatccactacacgcagctccagcgatgcactccaaggccgctatgcagcaccagagcttgagatcgctcgatgctgcttttgtttttcgcccgggggggaagataccgaggaacaacagccaggcaaggagggacccagagtcatttacgacgaaaagaaaggaactgtatatatttattcttacttccacttcgtattcttcctcgcttctctctatgtcatgatgacagtgactaactggtttaaccatgtaagaagcgcattccacctgttgccctag

SEQ ID NO: 253624 - DNA, 1269 bp, Artificial Sequence
  derived and/or modified sequence
accggcagctgttgcgtggatcaactggcctgttgctgtggctccgctggatgtagtctgtgttgtgattgttgtcctagaattaggcaatccctaagtacaagatttatgtatgccctgtacttcatcttggtggtggtgctgtgctgtattatgatgagcacaacagtcgctcacaaaatgaaagagcatatcccattctttgaggatatgtgtaaagggataaaggccggagacacctgtgagaaactggtcggatattcagccgtctatagagtctgctttggaatggcctgctttttctttatcttctgcttgctgaccctgaagatcaacaatagcaagtcatgccgggctcacatacataatggtttttggtttttcaagttgttgctcttgggagctatgtgttcaggagccttctttatccccgatcaggatactttcctgaacgcttggcggtacgtgggcgctgtaggaggcttcctgtttattgggatccagctactactgctggtggagttcgcccacaagtggaacaagaactggaccgcagggacagccagcaacaaactgtggtatgcctctttggccttggtgacactgatcatgtattcaattgccaccggaggtctcgtgttgatggcagtgttctatacccaaaaagactcttgtatggagaacaaaatacttctgggcgtcaacgggggtctgtgtctcttaatctctctggttgctataagcccttgggtccaaaacagacagcctcatagtggactcctgcaaagcggtgtcataagctgttatgtcacctacctgactttttccgccctgagctcgaagcccgctgaagttgtactcgacgagcatggcaaaaatgtcacgatttgcgtccccgacttcggccaagacctctatcgcgatgagaatctagtgaccattctcggtacctctctcttaataggatgtattttatacagttgtctcacatccacgaccagatccagtagtgatgcacttcaggggcgatacgctgcccctgagctggagattgcccgatgctgcttttgtttttcccccggaggggaggatacggaggaacagcagccaggcaaagaaggcccacgcgtcatttacgatgagaagaagggcaccgtgtacatctactcctattttcatttcgtatttttcctcgcctccctgtatgtgatgatgaccgtgaccaattggttcaatcacgtcaggtcagcatttcatttgctgccctag

SEQ ID NO: 253625 - DNA, 1272 bp, Artificial Sequence
  derived and/or modified sequence
atgtcagcccagtgttgtgcagggcaactggcatgttgctgtgggtctgcaggctgttcactctgttgtgactgctgtcccaggatccggcaatctctgtctacccggttcatgtatgcgctgtatttcattttggtggtcgtgctatgctgcataatgatgtcgacaacagtggcccataagatgaaggaacatattcccttttttgaggatatgtgcaaagggattaaggcgggagatacatgcgagaaactggtggggtatagtgccgtataccgcgtgtgctttggcatggcatgcttcttcttcatcttctgcctgctcacgctcaaaatcaataatagtaaaagctgtcgagctcacattcataatggattctggtttttcaagctgctgctgctcggtgcgatgtgttccggggcattttttattcccgatcaagacacttttttgaacgcgtggcgttatgtgggggcagtaggcggatttcttttcataggcatacagctgctccttctagtcgagtttgcgcacaaatggaataagaattggaccgccggaaccgcttccaacaagctctggtacgccagcctggctcttgttacactgataatgtacagtattgccacaggaggcctggtgctgatggcagtgttttatacccaaaaagactcttgcatggagaacaagatcctgttgggtgttaatggtgggttatgcctgctaatctctctggtggcaatctcaccatgggtccagaatcggcagccccatagcggcctgcttcagtcgggggtcattagttgctacgtaacctatctgaccttcagcgcgctgagctctaaacctgctgaggtagtgcttgacgagcacggcaaaaacgttaccatatgcgtccccgacttcggccaggacctgtatcgtgacgagaatctggtaacaatcctaggcactagcctgttaatcggctgtatcctgtactcctgtctgacctccacaacacggagttcatctgacgctctccaggggaggtacgcagcccctgagctcgaaattgccaggtgttgtttttgtttttcccctggcggtgaagacacagaagaacagcagccgggaaaggagggcccacgcgtgatctatgatgagaagaaagggaccgtgtatatctatagttatttccattttgtgttttttttggcatctctatatgtcatgatgacagtaaccaactggtttaaccacgttaggagtgccttccacctgctcccttag

SEQ ID NO: 253626 - DNA, 1774 bp, Artificial Sequence
  derived and/or modified sequence
acaggttcttgctgtgttgaccagctggcctgctgctgtgggtctgcaggctgctctctctgctgtgattgctgccccaggattcggcagtccctcagcacccgcttcatgtacgccctctacttcattctggtcgtcgtcctctgctgcatcatgatgtcaacaaccgtggctcacaagatgaaagagcacattcctttttttgaagatatgtgtaaaggcattaaagctggtgacacctgtgagaagctggtgggatattctgccgtgtatagagtctgttttggaatggcttgtttcttctttatcttctgtctactgaccttgaaaatcaacaacagcaaaagttgtagagctcatattcacaatggcttttggttctttaaacttctgctgttgggggccatgtgctcaggagctttcttcattccagatcaggacacctttctgaacgcctggcgctatgtgggagccgtcggaggcttcctcttcattggcatccagctcctcctgctcgtggagtttgcacataagtggaacaagaactggacagcaggcacagccagtaacaagctgtggtacgcctccctggccctggtgacgctcatcatgtattccattgccactggaggcttggttttgatggcagtgttttatacacagaaagacagctgcatggaaaacaaaattctgctgggagtaaatggaggcctgtgcctgcttatatcattggtagccatctcaccctgggtccaaaatcgacagccacactcggggctcttacaatcaggggtcataagctgctatgtcacctacctcaccttctcagctctgtccagcaaacctgcagaagtagttctagatgaacatgggaaaaatgttacaatctgtgtgcctgactttggtcaagacctgtacagagatgaaaacttggtgactatactggggaccagcctcttaatcggatgtatcttgtattcatgtttgacatcaacaacaagatcgagttctgacgctctgcaggggcgatacgcagctcctgaattggagatagctcgctgttgtttttgcttcagtcctggtggagaggacactgaagagcagcagccggggaaggagggaccacgggtcatttatgacgagaagaaaggcaccgtctacatctactcctacttccacttcgtgttcttcctagcttccctgtatgtgatgatgaccgtcaccaactggttcaaccatgtaagaagtgcctttcacctcctgccatgattctgaggcctccccagccatgtggaactctgagaaacctgaacggactccatttggctccttcatttgcaagacatcaagggctccttacccacccccttcctcaaggaattaacttgtgcaagctgactcccagcacatcaaagaatgcaattaactgataacatgctgtggcaagctatgtccgcagttcccaggaatttgtccagttgatattaccctaagcccctgtgtttttgtctggttgatagcacccaaagcccagcgtctatcaccttgtgatggatttaaagcccctgcacctggaactgtttgctttcctgtaaccatttgtctttttaacttcttttgcctgttttacttctgtaagactgctacagctaggctccccctcccctctctaaaccaaagtataaaacaaaatctagccccttcttcagggccgagagaattttgagcactagccgtctctcggtcgctggctaataaaggactcctcaattcg

SEQ ID NO: 253627 - DNA, 1928 bp, Artificial Sequence
  derived and/or modified sequence
acccaggcctcggcgcctaggcgcttcgccgaggctgatcttcgttcaagtgtgagctgcggctgagcccagcgctcgaggcgcgaggcagccaggagggcccgtgcggcgcggggagccagcgagcgcgccttcggcattggccgccgcgatgtcagctcagtgctgtgcgggccagctggcctgctgctgtgggtctgcaggctgctctctctgctgtgattgctgccccaggattcggcagtccctcagcacccgcttcatgtacgccctctacttcattctggtcgtcgtcctctgctgcatcatgatgtcaacaaccgtggctcacaagatgaaagagcacattcctttttttgaagatatgtgtaaaggcattaaagctggtgacacctgtgagaagctggtgggatattctgccgtgtatagagtctgttttggaatggcttgtttcttctttatcttctgtctactgaccttgaaaatcaacaacagcaaaagttgtagagctcatattcacaatggcttttggttctttaaacttctgctgttgggggccatgtgctcaggagctttcttcattccagatcaggacacctttctgaacgcctggcgctatgtgggagccgtcggaggcttcctcttcattggcatccagctcctcctgctcgtggagtttgcacataagtggaacaagaactggacagcaggcacagccagtaacaagctgtggtacgcctccctggccctggtgacgctcatcatgtattccattgccactggaggcttggttttgatggcagtgttttatacacagaaagacagctgcatggaaaacaaaattctgctgggagtaaatggaggcctgtgcctgcttatatcattggtagccatctcaccctgggtccaaaatcgacagccacactcggggctcttacaatcaggggtcataagctgctatgtcacctacctcaccttctcagctctgtccagcaaacctgcagaagtagttctagatgaacatgggaaaaatgttacaatctgtgtgcctgactttggtcaagacctgtacagagatgaaaacttggtgactatactggggaccagcctcttaatcggatgtatcttgtattcatgtttgacatcaacaacaagatcgagttctgacgctctgcaggggcgatacgcagctcctgaattggagatagctcgctgttgtttttgcttcagtcctggtggagaggacactgaagagcagcagccggggaaggagggaccacgggtcatttatgacgagaagaaaggcaccgtctacatctactcctacttccacttcgtgttcttcctagcttccctgtatgtgatgatgaccgtcaccaactggttcaaccatgtaagaagtgcctttcacctcctgccatgattctgaggcctccccagccatgtggaactctgagaaacctgaacggactccatttggctccttcatttgcaagacatcaagggctccttacccacccccttcctcaaggaattaacttgtgcaagctgactcccagcacatcaaagaatgcaattaactgataacatgctgtggcaagctatgtccgcagttcccaggaatttgtccagttgatattaccctaagcccctgtgtttttgtctggttgatagcacccaaagcccagcgtctatcaccttgtgatggatttaaagcccctgcacctggaactgtttgctttcctgtaaccatttgtctttttaacttcttttgcctgttttacttctgtaagactgctacagctaggctccccctcccctctctaaaccaaagtataaaacaaaatctagccccttcttcagggccgagagaattttgagcactagccgtctctcggtcgctggctaataaaggactcctcaattcg

SEQ ID NO: 253628 - protein, 292 aa, Artificial Sequence
  derived and/or modified sequence
MPRSFLVKTHSSHRVPNYRRLETQREINGACSACGGLVVPLLPRDKEAPSVPGDLPQPWDRSSAVACISLPLLPRIEEALGASGLDALEVSEVDPRASRAAIVPLKDSLNHLNLPPLLVLPTRWSPTLGPDRHGAPEKLLGAERMPRAPGGFECFHCHKPYHTLAGLARHRQLHCHLQVGRVFTCKYCDKEYTSLGALKMHIRTHTLPCTCKICGKAFSRPWLLQGHVRTHTGEKPYACSHCSRAFADRSNLRAHLQTHSDAKKYRCRRCTKTFSRMSLLARHEESGCCPGP

SEQ ID NO: 253629 - DNA, 1676 bp, Artificial Sequence
  derived and/or modified sequence
cgcactccagccacagggtccccaactaccggcggctggagacgcagagagaaatcaatggtgcctgctctgcctgtggggggctggtggtgcccctcctcccccgagacaaggaggccccttctgtgcccggtgaccttccccagccctgggaccgctcctcggccgtcgcctgcatctccctgcccctcctgccacggatcgaggaagctctgggggcctctgggctggacgccttggaagtcagcgaggtcgaccctcgggccagccgggccgccattgtacccctcaaagacagcctgaaccacctcaacctgcccccactgctggtgctgcccacacggtggtccccgaccttgggcccagaccggcacggggctccggaaaaactgcttggggctgagcggatgccccgagccccgggcggctttgagtgcttccactgccacaaaccctaccacacgctggccgggctggccaggcaccggcagctgcactgccacctgcaggtggggcgtgtcttcacctgcaagtactgcgacaaggagtacaccagcctgggtgccctcaagatgcacatccgcactcacacgctgccctgcacctgcaagatctgtggcaaggccttctccaggccctggttactgcagggccatgtccgcacccacacaggggagaagccctatgcctgctcgcactgcagcagggcctttgccgaccgctccaaccttcgggcccatctgcaaacgcactcagacgccaagaagtaccggtgccggcgctgcaccaagaccttctcccgcatgtccctcctggcgcggcatgaggagtctggctgctgcccgggcccctgagaggcacgtggtcggcgcaggtaggagggatggtcctcaccgggagagctggcgtccctcctgcccccagaggagccaggagtctgggagggcggggccgggcctcacacttggtgcgtcctccacatctgcgtccaatcagaaccaaagaagtccagcggggggccactgggccggaggacactcccccaggcatcccaccgcgcggagcccactcagaggagactcctctcccggggaaggctttcatcagaacaagagccatggttccatttcgacacggccaggtctccggggctacccttccaagagtcagagcctcggggaggtggccgccagcatgggccggcactgccgccggatggctggcaaggctgcctagttcccttgcagcagaaatgaacagttctgacttatagtgagcacggccctgtggcccttcctcagtaggcacaactacctctcagccagcccccgccagcctttggtttggggtctgggacgagctgccccatgtcacacgtctatgtgcatgtgcacacacactcaaacatgtacacacacgtgccctccccacctcactagactctccgggagatggggcaggactgggagagcccacgattggtgatttgggtgtgttgggatgaggcggagtgcctgtgggatttgtcccggtcagagcctcagggggctggggtctcagggcactcagcttcccaggcaataacagccgtggggtaataaatggtctctgcacacctgcaaaaaaaaaaaaaaaaaaaaaaaaaaaaaaaaaaaaaaaaaaaaaaaaaaaaaaaa

SEQ ID NO: 253630 - DNA, 879 bp, Artificial Sequence
  derived and/or modified sequence
atgcccagaagcttcctggtgaagacccacagcagccacagagtgcccaactacagaagactggagacccagagagagatcaacggcgcctgcagcgcctgcggcggcctggtggtgcccctgctgcccagagacaaggaggcccccagcgtgcccggcgacctgccccagccctgggacagaagcagcgccgtggcctgcatcagcctgcccctgctgcccagaatcgaggaggccctgggcgccagcggcctggacgccctggaggtgagcgaggtggaccccagagccagcagagccgccatcgtgcccctgaaggacagcctgaaccacctgaacctgccccccctgctggtgctgcccaccagatggagccccaccctgggccccgacagacacggcgcccccgagaagctgctgggcgccgagagaatgcccagagcccccggcggcttcgagtgcttccactgccacaagccctaccacaccctggccggcctggccagacacagacagctgcactgccacctgcaggtgggcagagtgttcacctgcaagtactgcgacaaggagtacaccagcctgggcgccctgaagatgcacatcagaacccacaccctgccctgcacctgcaagatctgcggcaaggccttcagcagaccctggctgctgcagggccacgtgagaacccacaccggcgagaagccctacgcctgcagccactgcagcagagccttcgccgacagaagcaacctgagagcccacctgcagacccacagcgacgccaagaagtacagatgcagaagatgcaccaagaccttcagcagaatgagcctgctggccagacacgaggagagcggctgctgccccggcccctag

SEQ ID NO: 253631 - DNA, 879 bp, Artificial Sequence
  derived and/or modified sequence
atgcctcgaagcttcctggtaaagactcactcctcgcaccgggtaccgaactacaggcgtctcgaaacccagcgtgagatcaacggagcttgcagtgcctgtgggggattggtcgtccctcttttaccgcgcgacaaagaggccccgagtgtacctggcgacctgccccagccttgggatcggagcagtgcagtggcatgcatcagtttgcctctgctccccagaattgaagaggctttgggggcgagcggactagatgcactggaggtctccgaagtagaccctagagcctcccgggcggccatcgtcccccttaaggactccctcaaccatctcaacttaccacctctactggtcctgccaacacgctggtcccctaccctggggcctgatcgtcacggcgcccccgaaaaactgctgggtgcagagagaatgccccgagctcctggcggatttgagtgcttccattgccacaagccttatcataccttggctggtttagcacgtcaccggcaactccactgccatctccaggtgggacgggtgtttacatgcaagtactgcgacaaagagtatacctcactaggggccctgaagatgcatatccggacccacactcttccatgcacctgcaagatatgcgggaaagctttctctagaccttggttgctgcaggggcatgttcggacccatacgggagaaaagccatacgcatgctctcactgttccagagcctttgcggacaggagcaatctccgagctcatttgcaaacacacagcgacgccaagaagtaccgctgcagacgatgcaccaagactttcagtcggatgtccctcttagctagacacgaggagtctggatgttgccccgggccttag

SEQ ID NO: 253632 - DNA, 879 bp, Artificial Sequence
  derived and/or modified sequence
atgcccaggagcttcctggtgaagacccacagcagccaccgggtgcccaactacagaaggctggagacccagcgggagatcaacggggcctgcagcgcctgtggcggcctggtggtgcccctgctgccccgggacaaggaggcccccagcgtgcctggggacctgccccagccctgggacaggagcagcgctgtggcctgcatcagcctgcccctgctgccccgcatcgaggaggccctgggcgccagcggcctggatgccctggaggtgtctgaggtggacccccgggccagccgggccgccatcgtgcccctgaaggacagcctgaaccacctgaacctgccccccctgctggtgctgcccacccgctggagccccaccctgggccctgacagacatggagcccctgagaagctgctgggcgctgagaggatgccccgggcccctgggggctttgagtgcttccactgccacaagccctaccacaccctggccggcctggcccggcaccggcagctgcactgccacctgcaggtgggccgggtcttcacctgcaagtactgtgacaaggagtacaccagcctgggcgccctgaagatgcacatccgcacccacaccctgccctgcacctgcaagatctgtgggaaggccttcagccggccctggctgctgcagggccacgtgaggacccacactggagagaagccctatgcctgcagccactgcagccgggcctttgctgacaggagcaacctgcgggcccacctgcagacccacagtgatgccaagaagtaccgctgccgccgctgcaccaagaccttcagcaggatgagcctgctggcccggcatgaggagagcggctgctgccccggcccctag

SEQ ID NO: 253633 - DNA, 879 bp, Artificial Sequence
  derived and/or modified sequence
atgccccggagcttcctggtgaagacccacagcagccaccgggtgcccaattaccggagactggagacccagcgggagataaatggagcatgctcagcatgtggtggattagtggtcccgctgcttccgcgagataaagaggccccctccgtacccggtgatcttcctcagccctgggaccgctcctctgccgttgcctgtatcagccttccgctgctgcccaggatcgaagaggccctgggggcttctggactggacgctctggaggtttcagaagttgacccacgggccagccgagcggcaatagtcccgttgaaggacagcctgaaccacctgaatctgcctcccctgctagtacttccaacccggtggagccccactcttggcccagatagacacggagctccagagaaactcctcggagccgagagaatgccaagggcccctggcggtttcgagtgttttcactgccacaagccttaccacactctcgctgggctggcacgacatagacaattacactgtcacttacaggtgggtcgagtgtttacttgtaaatattgcgataaggaatacacatcactcggcgccttaaagatgcacatacgcacccacactctcccatgcacgtgtaaaatttgtggaaaagcatttagccgcccatggttgctgcagggccacgttaggacacataccggtgaaaaaccgtatgcttgcagccactgcagccgggcttttgccgatcgttcgaacttacgagcccatttacaaacccactccgatgccaagaaatatcggtgtcgtaggtgcactaaaacctttagtcggatgtcactgcttgcccggcatgaagaatccggatgctgcccgggcccctag

SEQ ID NO: 253634 - DNA, 879 bp, Artificial Sequence
  derived and/or modified sequence
atgcccagatcctttctagtgaagacccattcctctcatagagttcccaactatagacgactagaaactcaaagagaaataaatggagcttgtagcgcttgcggtgggctggttgtgcccctattaccccgtgacaaagaggcccctagtgtcccgggtgatctccctcagccatgggatcggtcctcagccgtcgcctgcatttctctgcctctattaccacggatcgaagaggctttgggggcaagcggactagatgctctggaagtctctgaggtggaccctagagcctcgcgagcggcaatagtccctctgaaggattctctaaaccatttgaatttgccaccactccttgtgctgcctacccggtggtcccccactttagggccagacagacacggagccccagagaagcttctgggggctgagagaatgccacgggcacccggagggttcgaatgcttccactgtcacaagccctaccacactcttgctgggctcgcacggcacagacagctacactgccatctgcaggtgggcagagttttcacctgcaaatattgtgacaaggagtataccagcctaggcgctctcaaaatgcatataaggacccacaccctaccgtgtacatgcaaaatctgtggaaaggcattttccagaccatggctattgcagggtcacgtgagaactcacacaggcgagaagccctacgcctgcagccattgctctcgcgcatttgcagaccgatcgaaccttagggcacacttgcagacacactccgatgccaagaaataccggtgccggagatgtacaaaaactttctccagaatgagcctcctggcaaggcatgaagaatcgggctgctgtccaggaccctag

SEQ ID NO: 253635 - DNA, 1713 bp, Artificial Sequence
  derived and/or modified sequence
cagcagtccggacccaggcgcgcccctcccgccccagcccaccccggcctgccgcccgggaggggaacatgccgcgctccttcctggtgaaaacgcactccagccacagggtccccaactaccggcggctggagacgcagagagaaatcaatggtgcctgctctgcctgtggggggctggtggtgcccctcctcccccgagacaaggaggccccttctgtgcccggtgaccttccccagccctgggaccgctcctcggccgtcgcctgcatctccctgcccctcctgccacggatcgaggaagctctgggggcctctgggctggacgccttggaagtcagcgaggtcgaccctcgggccagccgggccgccattgtacccctcaaagacagcctgaaccacctcaacctgcccccactgctggtgctgcccacacggtggtccccgaccttgggcccagaccggcacggggctccggaaaaactgcttggggctgagcggatgccccgagccccgggcggctttgagtgcttccactgccacaaaccctaccacacgctggccgggctggccaggcaccggcagctgcactgccacctgcaggtggggcgtgtcttcacctgcaagtactgcgacaaggagtacaccagcctgggtgccctcaagatgcacatccgcactcacacgctgccctgcacctgcaagatctgtggcaaggccttctccaggccctggttactgcagggccatgtccgcacccacacaggggagaagccctatgcctgctcgcactgcagcagggcctttgccgaccgctccaaccttcgggcccatctgcaaacgcactcagacgccaagaagtaccggtgccggcgctgcaccaagaccttctcccgcatgtccctcctggcgcggcatgaggagtctggctgctgcccgggcccctgagaggcacgtggtcggcgcaggtaggagggatggtcctcaccgggagagctggcgtccctcctgcccccagaggagccaggagtctgggagggcggggcctggcctcacacttggtgcgtcctccacatctgcgtccaatcagaaccaaagaagtccagcgggggccactgggccggaggacactcccccaggcatcccaccgcgcggagcccactcagaggagactcctctcccggggaaggctttcatcagaacaagagccatggttccatttcgacacggccaggtctccggggctacccttccaagagtcagagcctcggggaggtggccgccagcatgggccggcactgccgccggatggctggcaaggctgcctagttccattgcagcagaaatgaacagttctgacttatagtgagcaccgccctgtggcccttcctcagtaggcacaactacctctcagccagcccccgccagcctttggtttggggtctgggacgagctgccccatgtcacacgtctatgtgcatgtgcacacacactcaaacatgtacacacacgtgccctccccacctcactagactctccgggagatggggcaggactgggagagcccacgattggtgatttgggtgtgttgggatgaggcggagtgcctgtgggatttgtcccggtcagagcctcagggggctggggtctcagggcactcagcttcccaggcaataacagccgtggggtaataaatggtctctgcacacctgca

SEQ ID NO: 253636 - protein, 2155 aa, Artificial Sequence
  derived and/or modified sequence
MELQRTSSISGPLSPAYTGQVPYNYNQLEGRFKQLQDEREAVQKKTFTKWVNSHLARVSCRITDLYTDLRDGRMLIKLLEVLSGERLPKPTKGRMRIHCLENVDKALQFLKEQRVHLENMGSHDIVDGNHRLTLGLIWTIILRFQIQDISVETEDNKEKKSAKDALLLWCQMKTAGYPNVNIHNFTTSWRDGMAFNALIHKHRPDLIDFDKLKKSNAHYNLQNAFNLAEQHLGLTKLLDPEDISVDHPDEKSIITYVVTYYHYFSKMKALAVEGKRIGKVLDNAIETEKMIEKYESLASDLLEWIEQTIIILNNRKFANSLVGVQQQLQAFNTYRTVEKPPKFTEKGNLEVLLFTIQSKMRANNQKVYMPREGKLISDINKAWERLEKAEHERELALRNELIRQEKLEQLARRFDRKAAMRETWLSENQRLVSQDNFGFDLPAVEAATKKHEAIETDIAAYEERVQAVVAVARELEAENYHDIKRITARKDNVIRLWEYLLELLRARRQRLEMNLGLQKIFQEMLYIMDWMDEMKVLVLSQDYGKHLLGVEDLLQKHTLVEADIGIQAERVRGVNASAQKFATDGEGYKPCDPQVIRDRVAHMEFCYQELCQLAAERRARLEESRRLWKFFWEMAEEEGWIREKEKILSSDDYGKDLTSVMRLLSKHRAFEDEMSGRSGHFEQAIKEGEDMIAEEHFGSEKIRERIIYIREQWANLEQLSAIRKKRLEEASLLHQFQADADDIDAWMLDILKIVSSSDVGHDEYSTQSLVKKHKDVAEEIANYRPTLDTLHEQASALPQEHAESPDVRGRLSGIEERYKEVAELTRLRKQALQDTLALYKMFSEADACELWIDEKEQWLNNMQIPEKLEDLEVIQHRFESLEPEMNNQASRVAVVNQIARQLMHSGHPSEKEIKAQQDKLNTRWSQFRELVDRKKDALLSALSIQNYHLECNETKSWIREKTKVIESTQDLGNDLAGVMALQRKLTGMERDLVAIEAKLSDLQKEAEKLESEHPDQAQAILSRLAEISDVWEEMKTTLKNREASLGEASKLQQFLRDLDDFQSWLSRTQTAIASEDMPNTLTEAEKLLTQHENIKNEIDNYEEDYQKMRDMGEMVTQGQTDAQYMFLRQRLQALDTGWNELHKMWENRQNLLSQSHAYQQFLRDTKQAEAFLNNQEYVLAHTEMPTTLEGAEAAIKKQEDFMTTMDANEEKINAVVETGRRLVSDGNINSDRIQEKVDSIDDRHRKNRETASELLMRLKDNRDLQKFLQDCQELSLWINEKMLTAQDMSYDEARNLHSKWLKHQAFMAELASNKEWLDKIEKEGMQLISEKPETEAVVKEKLTGLHKMWEVLESTTQTKAQRLFDANKAELFTQSCADLDKWLHGLESQIQSDDYGKDLTSVNILLKKQQMLENQMEVRKKEIEELQSQAQALSQEGKSTDEVDSKRLTVQTKFMELLEPLNERKHNLLASKEIHQFNRDVEDEILWVGERMPLATSTDHGHNLQTVQLLIKKNQTLQKEIQGHQPRIDDIFERSQNIVTDSSSLSAEAIRQRLADLKQLWGLLIEETEKRHRRLEEAHRAQQYYFDAAEAEAWMSEQELYMMSEEKAKDEQSAVSMLKKHQILEQAVEDYAETVHQLSKTSRALVADSHPESERISMRQSKVDKLYAGLKDLAEERRGKLDERHRLFQLNREVDDLEQWIAEREVVAGSHELGQDYEHVTMLQERFREFARDTGNIGQERVDTVNHLADELINSGHSDAATIAEWKDGLNEAWADLLELIDTRTQILAASYELHKFYHDAKEIFGRIQDKHKKLPEELGRDQNTVETLQRMHTTFEHDIQALGTQVRQLQEDAARLQAAYAGDKADDIQKRENEVLEAWKSLLDACESRRVRLVDTGDKFRFFSMVRDLMLWMEDVIRQIEAQEKPRDVSSVELLMNNHQGIKAEIDARNDSFTTCIELGKSLLARKHYASEEIKEKLLQLTEKRKEMIDKWEDRWEWLRLILEVHQFSRDASVAEAWLLGQEPYLSSREIGQSVDEVEKLIKRHEAFEKSAATWDERFSALERLTTLELLEVRRQQEEEERKRRPPSPEPSTKVSEEAESQQQWDTSKGEQVSQNGLPAEQGSPRVSYRSQTYQNYKNFNSRRTASDQPWSGL

SEQ ID NO: 253637 - DNA, 6468 bp, Artificial Sequence
  derived and/or modified sequence
atggagctgcagagaaccagcagcatcagcggccccctgagccccgcctacaccggccaggtgccctacaactacaaccagctggagggcagattcaagcagctgcaggacgagagagaggccgtgcagaagaagaccttcaccaagtgggtgaacagccacctggccagagtgagctgcagaatcaccgacctgtacaccgacctgagagacggcagaatgctgatcaagctgctggaggtgctgagcggcgagagactgcccaagcccaccaagggcagaatgagaatccactgcctggagaacgtggacaaggccctgcagttcctgaaggagcagagagtgcacctggagaacatgggcagccacgacatcgtggacggcaaccacagactgaccctgggcctgatctggaccatcatcctgagattccagatccaggacatcagcgtggagaccgaggacaacaaggagaagaagagcgccaaggacgccctgctgctgtggtgccagatgaagaccgccggctaccccaacgtgaacatccacaacttcaccaccagctggagagacggcatggccttcaacgccctgatccacaagcacagacccgacctgatcgacttcgacaagctgaagaagagcaacgcccactacaacctgcagaacgccttcaacctggccgagcagcacctgggcctgaccaagctgctggaccccgaggacatcagcgtggaccaccccgacgagaagagcatcatcacctacgtggtgacctactaccactacttcagcaagatgaaggccctggccgtggagggcaagagaatcggcaaggtgctggacaacgccatcgagaccgagaagatgatcgagaagtacgagagcctggccagcgacctgctggagtggatcgagcagaccatcatcatcctgaacaacagaaagttcgccaacagcctggtgggcgtgcagcagcagctgcaggccttcaacacctacagaaccgtggagaagccccccaagttcaccgagaagggcaacctggaggtgctgctgttcaccatccagagcaagatgagagccaacaaccagaaggtgtacatgcccagagagggcaagctgatcagcgacatcaacaaggcctgggagagactggagaaggccgagcacgagagagagctggccctgagaaacgagctgatcagacaggagaagctggagcagctggccagaagattcgacagaaaggccgccatgagagagacctggctgagcgagaaccagagactggtgagccaggacaacttcggcttcgacctgcccgccgtggaggccgccaccaagaagcacgaggccatcgagaccgacatcgccgcctacgaggagagagtgcaggccgtggtggccgtggccagagagctggaggccgagaactaccacgacatcaagagaatcaccgccagaaaggacaacgtgatcagactgtgggagtacctgctggagctgctgagagccagaagacagagactggagatgaacctgggcctgcagaagatcttccaggagatgctgtacatcatggactggatggacgagatgaaggtgctggtgctgagccaggactacggcaagcacctgctgggcgtggaggacctgctgcagaagcacaccctggtggaggccgacatcggcatccaggccgagagagtgagaggcgtgaacgccagcgcccagaagttcgccaccgacggcgagggctacaagccctgcgacccccaggtgatcagagacagagtggcccacatggagttctgctaccaggagctgtgccagctggccgccgagagaagagccagactggaggagagcagaagactgtggaagttcttctgggagatggccgaggaggagggctggatcagagagaaggagaagatcctgagcagcgacgactacggcaaggacctgaccagcgtgatgagactgctgagcaagcacagagccttcgaggacgagatgagcggcagaagcggccacttcgagcaggccatcaaggagggcgaggacatgatcgccgaggagcacttcggcagcgagaagatcagagagagaatcatctacatcagagagcagtgggccaacctggagcagctgagcgccatcagaaagaagagactggaggaggccagcctgctgcaccagttccaggccgacgccgacgacatcgacgcctggatgctggacatcctgaagatcgtgagcagcagcgacgtgggccacgacgagtacagcacccagagcctggtgaagaagcacaaggacgtggccgaggagatcgccaactacagacccaccctggacaccctgcacgagcaggccagcgccctgccccaggagcacgccgagagccccgacgtgagaggcagactgagcggcatcgaggagagatacaaggaggtggccgagctgaccagactgagaaagcaggccctgcaggacaccctggccctgtacaagatgttcagcgaggccgacgcctgcgagctgtggatcgacgagaaggagcagtggctgaacaacatgcagatccccgagaagctggaggacctggaggtgatccagcacagattcgagagcctggagcccgagatgaacaaccaggccagcagagtggccgtggtgaaccagatcgccagacagctgatgcacagcggccaccccagcgagaaggagatcaaggcccagcaggacaagctgaacaccagatggagccagttcagagagctggtggacagaaagaaggacgccctgctgagcgccctgagcatccagaactaccacctggagtgcaacgagaccaagagctggatcagagagaagaccaaggtgatcgagagcacccaggacctgggcaacgacctggccggcgtgatggccctgcagagaaagctgaccggcatggagagagacctggtggccatcgaggccaagctgagcgacctgcagaaggaggccgagaagctggagagcgagcaccccgaccaggcccaggccatcctgagcagactggccgagatcagcgacgtgtgggaggagatgaagaccaccctgaagaacagagaggccagcctgggcgaggccagcaagctgcagcagttcctgagagacctggacgacttccagagctggctgagcagaacccagaccgccatcgccagcgaggacatgcccaacaccctgaccgaggccgagaagctgctgacccagcacgagaacatcaagaacgagatcgacaactacgaggaggactaccagaagatgagagacatgggcgagatggtgacccagggccagaccgacgcccagtacatgttcctgagacagagactgcaggccctggacaccggctggaacgagctgcacaagatgtgggagaacagacagaacctgctgagccagagccacgcctaccagcagttcctgagagacaccaagcaggccgaggccttcctgaacaaccaggagtacgtgctggcccacaccgagatgcccaccaccctggagggcgccgaggccgccatcaagaagcaggaggacttcatgaccaccatggacgccaacgaggagaagatcaacgccgtggtggagaccggcagaagactggtgagcgacggcaacatcaacagcgacagaatccaggagaaggtggacagcatcgacgacagacacagaaagaacagagagaccgccagcgagctgctgatgagactgaaggacaacagagacctgcagaagttcctgcaggactgccaggagctgagcctgtggatcaacgagaagatgctgaccgcccaggacatgagctacgacgaggccagaaacctgcacagcaagtggctgaagcaccaggccttcatggccgagctggccagcaacaaggagtggctggacaagatcgagaaggagggcatgcagctgatcagcgagaagcccgagaccgaggccgtggtgaaggagaagctgaccggcctgcacaagatgtgggaggtgctggagagcaccacccagaccaaggcccagagactgttcgacgccaacaaggccgagctgttcacccagagctgcgccgacctggacaagtggctgcacggcctggagagccagatccagagcgacgactacggcaaggacctgaccagcgtgaacatcctgctgaagaagcagcagatgctggagaaccagatggaggtgagaaagaaggagatcgaggagctgcagagccaggcccaggccctgagccaggagggcaagagcaccgacgaggtggacagcaagagactgaccgtgcagaccaagttcatggagctgctggagcccctgaacgagagaaagcacaacctgctggccagcaaggagatccaccagttcaacagagacgtggaggacgagatcctgtgggtgggcgagagaatgcccctggccaccagcaccgaccacggccacaacctgcagaccgtgcagctgctgatcaagaagaaccagaccctgcagaaggagatccagggccaccagcccagaatcgacgacatcttcgagagaagccagaacatcgtgaccgacagcagcagcctgagcgccgaggccatcagacagagactggccgacctgaagcagctgtggggcctgctgatcgaggagaccgagaagagacacagaagactggaggaggcccacagagcccagcagtactacttcgacgccgccgaggccgaggcctggatgagcgagcaggagctgtacatgatgagcgaggagaaggccaaggacgagcagagcgccgtgagcatgctgaagaagcaccagatcctggagcaggccgtggaggactacgccgagaccgtgcaccagctgagcaagaccagcagagccctggtggccgacagccaccccgagagcgagagaatcagcatgagacagagcaaggtggacaagctgtacgccggcctgaaggacctggccgaggagagaagaggcaagctggacgagagacacagactgttccagctgaacagagaggtggacgacctggagcagtggatcgccgagagagaggtggtggccggcagccacgagctgggccaggactacgagcacgtgaccatgctgcaggagagattcagagagttcgccagagacaccggcaacatcggccaggagagagtggacaccgtgaaccacctggccgacgagctgatcaacagcggccacagcgacgccgccaccatcgccgagtggaaggacggcctgaacgaggcctgggccgacctgctggagctgatcgacaccagaacccagatcctggccgccagctacgagctgcacaagttctaccacgacgccaaggagatcttcggcagaatccaggacaagcacaagaagctgcccgaggagctgggcagagaccagaacaccgtggagaccctgcagagaatgcacaccaccttcgagcacgacatccaggccctgggcacccaggtgagacagctgcaggaggacgccgccagactgcaggccgcctacgccggcgacaaggccgacgacatccagaagagagagaacgaggtgctggaggcctggaagagcctgctggacgcctgcgagagcagaagagtgagactggtggacaccggcgacaagttcagattcttcagcatggtgagagacctgatgctgtggatggaggacgtgatcagacagatcgaggcccaggagaagcccagagacgtgagcagcgtggagctgctgatgaacaaccaccagggcatcaaggccgagatcgacgccagaaacgacagcttcaccacctgcatcgagctgggcaagagcctgctggccagaaagcactacgccagcgaggagatcaaggagaagctgctgcagctgaccgagaagagaaaggagatgatcgacaagtgggaggacagatgggagtggctgagactgatcctggaggtgcaccagttcagcagagacgccagcgtggccgaggcctggctgctgggccaggagccctacctgagcagcagagagatcggccagagcgtggacgaggtggagaagctgatcaagagacacgaggccttcgagaagagcgccgccacctgggacgagagattcagcgccctggagagactgaccaccctggagctgctggaggtgagaagacagcaggaggaggaggagagaaagagaagaccccccagccccgagcccagcaccaaggtgagcgaggaggccgagagccagcagcagtgggacaccagcaagggcgagcaggtgagccagaacggcctgcccgccgagcagggcagccccagagtgagctacagaagccagacctaccagaactacaagaacttcaacagcagaagaaccgccagcgaccagccctggagcggcctgtag

SEQ ID NO: 253638 - DNA, 6468 bp, Artificial Sequence
  derived and/or modified sequence
atggaactgcaacgcacatcctctatttccgggcccttatcccccgcttataccggccaagtaccatataactataatcagctggaaggaagattcaagcagctgcaggacgaacgtgaggcagtgcaaaaaaaaacatttacaaagtgggtcaatagccatttagcgcgcgtatcttgtcgcattaccgatttatatacagatcttagggacggccgtatgctaattaagctgctggaagtgctgagtggcgagcgcctgccaaagcccacaaaaggccgaatgcgcatccactgtctcgagaatgtggataaagcactacagtttttgaaagaacaacgcgtgcatttggaaaatatgggttctcacgacatagtcgatggcaatcataggttgaccctggggctgatttggacaattatcctgagattccagatacaggacatctccgtggagacagaagataacaaagagaagaagagtgcgaaggacgcactgttgttatggtgtcagatgaaaactgccggctaccccaacgtgaacatccacaattttactactagctggagagatgggatggcgttcaacgccctgattcacaaacaccggccagacctgatcgactttgacaagctgaagaagagcaacgcccattataacttgcagaacgcatttaatctggctgaacagcatctgggacttactaaactcctcgaccccgaggatatttcggtggatcatcctgacgagaagtccattatcacgtacgtggtcacctactatcactatttttcaaaaatgaaggcccttgctgtggaggggaagcggattggcaaagtactcgataacgccatcgaaaccgaaaaaatgatcgagaagtacgagtcgctggcttctgacctgcttgagtggatagaacaaactatcattatattgaacaaccgcaagttcgccaacagccttgttggggttcaacagcagctgcaagctttcaatacctacagaactgtggaaaagcctcccaagttcaccgagaaaggaaatctcgaagtgctgctgttcactatccaaagcaaaatgagggcgaataaccagaaggtctacatgccccgagaaggcaaactgatctctgatataaacaaggcgtgggaacggctggagaaagcagagcacgagcgggagcttgccttgagaaacgagctgatacgccaagaaaaactggaacagcttgcccgccgctttgaccggaaagctgccatgcgtgagacttggctgtcagaaaatcagagacttgtgtcgcaagataacttcgggtttgacctgccagctgtcgaagccgcgaccaaaaagcacgaggctatcgaaacagatattgccgcctatgaggagcgggtacaggcagtggttgccgtggcacgtgaattggaggctgaaaactaccacgatattaagcggattactgcacgcaaagacaacgttatccgtctttgggaatatttgcttgagttacttcgtgctagacgccaaaggctggagatgaatcttggcctgcaaaagatcttccaggagatgctctacattatggattggatggacgaaatgaaggtgctggtcctcagtcaggattacggcaaacacctgctgggggtagaggacctgctgcagaaacatacgctggtagaagccgacatcggaattcaggctgaaagggttaggggcgtcaacgccagcgcacagaagtttgccaccgatggagagggctacaaaccttgcgaccctcaggtgattagggaccgcgtggcacacatggagttctgttatcaggagctctgccagttggctgcggaacgccgagctcgcttagaagaaagtagacggctgtggaaattcttctgggaaatggctgaggaggaaggctggattcgggagaaggagaagattctctcctctgacgattacggtaaagaccttacttcagtgatgagacttttaagcaaacatcgtgcattcgaggacgaaatgagtggaagatccggacatttcgaacaggccatcaaggagggggaagatatgatcgccgaagaacatttcgggagcgaaaagataagagaaagaataatctacatacgcgagcagtgggccaatctggagcaactgagtgctatccgtaagaagcgtctggaggaagccagtctgctacaccagtttcaggcagacgccgacgacattgacgcgtggatgctggacatactgaagattgtgtcgtcctcagatgtgggccacgacgaatactctacacaaagtctggtgaaaaaacacaaagacgtggcggaggaaattgctaattaccggccaaccctggatactctgcatgaacaggcttcagccctgcctcaggagcatgctgagtccccagatgtgcgtggtcggttgtctggcatagaggagcgttataaggaggtggcagagttgacccgcctgcggaagcaggcccttcaggacactctcgcactatataaaatgttctctgaagccgatgcctgcgagctatggatcgatgagaaagaacaatggctgaacaacatgcaaattcccgaaaagttggaggatctagaggtcattcaacaccgcttcgaaagtttggaacccgagatgaataaccaggcgtccagagtggcagttgtgaatcaaatcgctcgccagctgatgcactccggacaccccagcgagaaggagattaaggcccagcaggataagcttaacacgcgatggtcacagttccgcgaactcgttgataggaaaaaggatgccttattatcagccttatcaattcaaaactatcatcttgagtgcaacgagacgaaaagttggatccgcgagaagacaaaggtcattgagtccactcaagatttgggcaacgatctggccggtgtgatggctctccagcgcaaactgactggaatggaacgggatcttgttgccatcgaagccaaactgtcagacctgcaaaaggaggctgaaaagctcgagagcgagcacccagatcaggctcaggccattttgagccgattggccgagataagcgatgtgtgggaagaaatgaaaaccactctgaaaaatagagaagccagcttaggcgaggcctccaagctgcagcagttcctgcgggatttggacgatttccaaagttggctgtcccgcacgcaaaccgcaattgcttcggaggatatgccaaacacccttacagaagctgaaaaacttctgacgcagcatgagaacatcaagaacgagattgacaattacgaggaggattatcagaaaatgagagacatgggcgaaatggtgacacagggccaaaccgatgctcagtacatgtttttgcggcaacggctacaggccttggatactggttggaatgagcttcacaaaatgtgggaaaatagacagaacctcctgtctcagagccacgcctaccagcagttcctgcgcgacaccaaacaagctgaggccttcctgaataaccaagagtatgtgcttgcgcacactgaaatgccaacaacattagaaggagccgaggctgctatcaagaagcaggaagacttcatgaccactatggatgcaaatgaagagaagattaatgccgtggtagaaactggaagacgcctcgtgtccgacgggaatataaatagtgaccgaattcaggaaaaagtcgacagtatcgatgataggcaccgaaaaaaccgtgaaaccgcatctgagctgctgatgaggctgaaggacaaccgcgacctgcaaaaatttctccaggactgccaggaactgagcctctggattaatgagaagatgctgaccgcccaggacatgtcatatgatgaagcccgtaacctccactcaaagtggctcaagcatcaggccttcatggctgagctcgcaagcaacaaagagtggctagacaagatcgaaaaggagggaatgcagctgatctctgaaaaacctgagaccgaggccgtagtgaaggagaagcttactggcctacacaaaatgtgggaggtgctcgagtccactacccaaaccaaggctcagaggctcttcgatgccaacaaggctgagctattcactcagagctgcgccgacttggataaatggctacacgggctcgagtcccagatccagagcgatgactacggtaaggatctgaccagcgtcaacatcttactcaagaaacaacagatgctggagaatcagatggaggttaggaagaaagaaatcgaagagctgcagtcccaagcacaggcactgtcccaagaagggaaaagtactgatgaagtggactccaaaagattgaccgtgcagacgaaatttatggaactccttgagccacttaacgaacggaagcataatttgttagcctcaaaggaaatccaccagttcaatagagatgtggaagatgaaatcctgtgggtgggcgagagaatgcccctggccacttccaccgaccacggccataatctgcagacagtgcaactcctcattaaaaaaaatcaaacactgcaaaaagaaatccaagggcatcagccgcggatcgatgatatttttgagcgatcccagaacatcgtgactgacagttctagcctgtctgctgaggccatccgacagaggctggccgatttgaagcaactctggggattactcatcgaggaaaccgagaaacggcatagaagactcgaagaggctcatagggcacagcagtactacttcgacgccgctgaggctgaggcctggatgagcgaacaggaactgtacatgatgtccgaggaaaaggccaaggatgagcagtcagctgtctctatgctgaaaaaacaccagatcctcgaacaggccgtggaagactacgcggagaccgtgcaccaactgtcaaagacgtctagagcattggtcgccgactcacaccccgagagtgaaagaatcagcatgcggcagtccaaagttgacaagctctatgctggactgaaagacttggccgaggagaggaggggcaaattagatgaaagacaccggctgtttcagttgaatcgggaggttgatgatttggagcagtggattgccgaaagggaggtggttgctggatctcatgaactcgggcaggactatgaacacgtcacaatgctgcaggaaaggtttagggaattcgcaagggataccggtaacattggccaggaacgtgtggacactgttaatcatttggccgatgaacttatcaatagcgggcacagcgacgcagccaccatcgccgaatggaaggatggcctgaacgaagcctgggctgacctgctggaacttatcgatactcgtacccaaattctggcggcatcttacgaactccataagttctatcacgacgctaaggagatttttgggagaatccaggataagcataaaaagctccctgaagaacttggccgcgaccaaaataccgttgaaacgttgcagagaatgcataccactttcgaacatgatatacaggcccttggaacacaggtacggcagctccaggaagacgccgctcggttgcaggccgcctatgccggcgataaagccgatgacattcagaaaagggagaacgaagttctagaagcttggaaaagtctcttagatgcctgtgaatctagaagagtgcggcttgttgatactggggacaagtttcgcttcttctccatggtgcgggatctcatgctctggatggaagatgtcatcagacagatcgaggctcaggagaagccgcgggacgtgagctctgttgagctcctgatgaataatcaccagggaatcaaggcagagatcgacgccaggaatgattcattcacaacctgtattgaattaggcaagagccttttggccaggaaacattatgcttccgaggagatcaaggagaaactactccagctgacggagaaacgaaaggaaatgatcgacaaatgggaggataggtgggagtggctgcgactgattttagaggtccaccaattcagcagagacgcaagcgtggcagaggcatggttgctgggccaggagccctacctttccagcagggaaataggccaatcggtggacgaagtagagaagttgatcaagcgacatgaagcttttgagaaaagcgcagctacttgggacgagcgcttctcagcccttgagaggttaaccaccctggagctgctggaggtcaggaggcagcaggaggaagaggaaaggaaaaggcgacctccatcgcctgaacctagcaccaaggtgagcgaagaagcagagtcacagcagcagtgggacacttccaaaggggaacaagtctcccaaaacgggctccctgccgagcagggttcaccccgggtctcgtatcgctcccagacataccagaactacaaaaacttcaactcacggcgcactgcatccgaccaaccctggagcggcctttag

SEQ ID NO: 253639 - DNA, 6468 bp, Artificial Sequence
  derived and/or modified sequence
atggagctgcagaggaccagcagcatcagcggccccctgagccctgcctacacaggccaggtgccctacaactacaaccagctggagggccgcttcaagcagctgcaggatgagcgggaggccgtgcagaagaagaccttcaccaagtgggtgaacagccacctggcccgggtgtcctgccgcatcacagacctgtacacagacctgagagatggccgcatgctgatcaagctgctggaggtgctgtctggagagcggctgcccaagcccaccaagggccgcatgaggatccactgcctggagaatgtggacaaggccctgcagttcctgaaggagcagagggtgcacctggagaacatgggcagccatgacatcgtggatggcaaccaccggctgaccctgggcctcatctggaccatcatcctgcgcttccagatccaggacatctctgtggagacagaggacaacaaggagaagaagagcgccaaggatgccctgctgctgtggtgccagatgaagacagctggctacccaaatgtgaacatccacaacttcaccacctcctggagagatggcatggccttcaatgccctgatccacaagcacaggccagacctgattgactttgacaagctgaagaagagcaatgcccactacaacctgcagaatgccttcaacctggccgagcagcacctgggcctgaccaagctgctggaccctgaggacatctctgtggaccacccagatgagaagagcatcatcacctacgtggtgacctactaccactacttcagcaagatgaaggccctggccgtggagggcaagagaattggcaaggtgctggacaatgccattgaaacagagaagatgattgagaagtatgagagcctggccagtgacctgctggagtggattgagcagaccatcatcatcctgaacaacaggaagtttgccaacagcctggtgggcgtgcagcagcagctgcaggccttcaacacctacagaacagtggagaagccacccaagttcacagagaagggcaacctggaggtgctgctcttcaccatccagagcaagatgagggccaacaaccagaaggtgtacatgccccgggagggcaagctgatcagtgacatcaacaaggcctgggagcggctggagaaggccgagcacgagcgggagctggccctgagaaatgaactcatccggcaggagaagctggagcagctggccaggagatttgacaggaaggccgccatgagggagacctggctgtctgagaaccagaggctggtgtcccaggacaactttggatttgacctgcctgctgtggaggccgccaccaagaagcatgaggccatcgagacagacattgctgcctatgaggagcgggtgcaggccgtggtggccgtggcccgggagctggaggccgagaactaccatgacatcaagaggatcacagccaggaaggacaacgtcatccggctgtgggagtacctgctggagctgctgcgggcccggcggcagaggctggagatgaacctgggcctgcagaagatcttccaggagatgctgtacatcatggactggatggatgagatgaaggtgctggtgctgagccaggactatggcaagcacctgctgggcgtggaggacctgctgcagaagcacaccctggtggaggccgacatcggcatccaggccgagcgggtgcggggcgtgaatgccagcgcccagaagtttgccacagatggagagggctacaagccctgtgacccccaggtgatccgggacagagtggcccacatggagttctgctaccaggagctgtgccagctggccgctgagcggcgggcccggctggaggagagccggcggctgtggaagttcttctgggagatggccgaggaggagggctggatccgggagaaggagaagatcctgagcagtgatgattatggcaaggacctgacctctgtgatgaggctgctgagcaagcaccgggcctttgaagatgagatgagcggccgcagcggccactttgagcaggccatcaaggagggggaggacatgattgctgaggagcactttggaagtgagaagatccgggagcgcatcatctacatccgggagcagtgggccaacctggagcagctgagcgccatcaggaagaagaggctggaggaggccagcctgctgcaccagttccaggctgatgctgatgacattgatgcctggatgctggacatcctgaagatcgtgagcagcagtgatgtgggccatgatgagtacagcacccagagcctggtgaagaagcacaaggatgtggccgaggagatcgccaactaccggcccaccctggacaccctgcacgagcaggccagcgccctgccccaggagcacgccgagagcccagatgtgcggggccgcctgagcggcatcgaggagcgctacaaggaggtggccgagctgacccggctgaggaagcaggccctgcaggacaccctggccctgtacaagatgttttctgaggctgatgcctgtgagctgtggattgatgagaaggagcagtggctgaacaacatgcagatccctgagaagctggaggacctggaggtgatccagcacagatttgagagcctggagcctgagatgaacaaccaggccagccgggtggccgtggtgaaccagatcgcccggcagctgatgcacagcggccaccccagcgagaaggagatcaaggcccagcaggacaagctgaacacccgctggagccagttccgggagctggtggacaggaagaaggatgccctgctgagcgccctgagcatccagaactaccacctggagtgcaatgagaccaagtcctggatccgggagaagaccaaggtgattgagagcacccaggacctgggcaatgacctggccggcgtgatggccctgcagaggaagctgaccggcatggagcgggacctggtggccatcgaggccaagctgagtgacctgcagaaggaggccgagaagctggagagcgagcacccagaccaggcccaggccatcctgagccggctggccgagatcagtgatgtgtgggaggagatgaagaccaccctgaagaaccgggaggccagcctgggggaggccagcaagctgcagcagttcctgcgggacctggatgacttccagagctggctgagcaggacccagacagccatcgccagcgaggacatgcccaacaccctgacagaggccgagaagctgctgacccagcacgagaacatcaagaatgaaattgacaactatgaggaggactaccagaagatgagggacatgggagagatggtgacccagggccagacagatgcccagtacatgttcctgcggcagaggctgcaggccctggacaccggctggaatgagctgcacaagatgtgggagaaccggcagaacctgctgagccagagccacgcctaccagcagttcctgcgggacaccaagcaggccgaggccttcctgaacaaccaggagtatgtgctggcccacacagagatgcccaccaccctggagggcgctgaggccgccatcaagaagcaggaggacttcatgaccaccatggatgccaatgaggagaagatcaatgctgtggtggagaccggccggcggctggtgtctgatggcaacatcaacagcgaccgcatccaggagaaggtggacagcattgatgacagacacaggaagaaccgggagacagccagcgagctgctgatgaggctgaaggacaacagagacctgcagaagttcctgcaggactgccaggagctgagcctgtggatcaatgagaagatgctgacagcccaggacatgtcctatgatgaggccaggaacctgcacagcaagtggctgaagcaccaggccttcatggccgagctggccagcaacaaggagtggctggacaagattgagaaggagggcatgcagctgatcagcgagaagccagagacagaggccgtggtgaaggagaagctgaccggcctgcacaagatgtgggaggtgctggagagcaccacccagaccaaggcccagaggctgtttgatgccaacaaggccgagctgttcacccagagctgtgccgacctggacaagtggctgcacggcctggagagccagatccagagtgatgattatggcaaggacctgacctctgtgaacatcctgctgaagaagcagcagatgctggagaaccagatggaggtgaggaagaaggagattgaggagctgcagagccaggcccaggccctgagccaggagggcaagagcacagatgaggtggacagcaagaggctgactgtgcagaccaagttcatggagctgctggagcccctgaatgaaaggaagcacaacctgctggccagcaaggagatccaccagttcaacagagatgtggaggatgagatcctgtgggtgggggagaggatgcccctggccaccagcacagaccacggccacaacctgcagacagtgcagctgctgatcaagaagaaccagaccctgcagaaggagatccagggccaccagcccagaattgatgacatctttgagaggagccagaacatcgtgacagacagcagcagcctgtctgctgaggccatccggcagaggctggccgacctgaagcagctgtggggcctgctgattgaggagacagagaagaggcaccggcggctggaggaggcccaccgggcccagcagtactactttgatgctgctgaggccgaggcctggatgtctgagcaggagctgtacatgatgtctgaggagaaggccaaggatgagcagagcgctgtgtccatgctgaagaagcaccagatcctggagcaggccgtggaggactatgcagagaccgtgcaccagctgagcaagaccagccgggccctggtggccgacagccaccctgagagcgagcgcatctccatgaggcagagcaaggtggacaagctgtatgccggcctgaaggacctggccgaggagcggcggggcaagctggatgagcggcacaggctcttccagctgaaccgggaggtggatgacctggagcagtggattgctgagcgggaggtggtggccggcagccatgagctgggccaggactatgaacatgtgaccatgctgcaggagcgcttccgggagtttgcccgggacaccggcaacatcggccaggagcgggtggacacagtgaaccacctggctgatgagctgatcaacagcggccacagtgatgctgccaccatcgccgagtggaaggatggcctgaatgaggcctgggccgacctgctggagctgattgacaccaggacccagatcctggccgccagctatgagctgcacaagttctaccatgatgccaaggagatcttcggccgcatccaggacaagcacaagaagctgcctgaggagctgggccgggaccagaacacagtggagaccctgcagaggatgcacaccacctttgaacatgacatccaggccctgggcacccaggtgcggcagctgcaggaggatgctgcccggctgcaggccgcctatgctggggacaaggcagatgacatccagaagagagaaaatgaggtgctggaggcctggaagagcctgctggatgcctgtgagagccggcgggtgcggctggtggacacaggagacaagttccgcttcttctccatggtgcgggacctgatgctgtggatggaggatgtgatccggcagatcgaggcccaggagaagcccagagatgtgtcctctgtggagctgctgatgaacaaccaccagggcatcaaggccgagattgatgccagaaatgacagcttcaccacctgcatcgagctgggcaagagcctgctggccaggaagcactacgccagcgaggagatcaaggagaagctgctgcagctgacagagaagaggaaggagatgattgacaagtgggaggaccgctgggagtggctgcggctcatcctggaggtgcaccagttcagcagagatgcctctgtggccgaggcctggctgctgggccaggagccctacctgagcagccgggagatcggccagagcgtggatgaggtggagaagctgatcaagagacatgaggcctttgagaagtctgctgccacctgggatgagcgcttcagcgccctggagcggctgaccaccctggagctgctggaggtgcggcggcagcaggaggaggaggagaggaagagaagaccacccagccctgagcccagcaccaaggtgtctgaggaggccgagagccagcagcagtgggacaccagcaagggggagcaggtgtcccagaatggcctgcctgctgagcagggcagcccccgggtgtcctaccgcagccagacctaccagaactacaagaacttcaacagcagaagaacagccagtgaccagccctggagcggcctgtag

SEQ ID NO: 253640 - DNA, 6468 bp, Artificial Sequence
  derived and/or modified sequence
atggagctgcagcggaccagcagcatcagcggccccctgagccccgcctatactggccaggtgccttataattataaccagctggagggtcggttcaaacagctgcaggacgaacgcgaggccgtccaaaaaaaaacttttacaaagtgggtgaactcacatttggcccgtgtctcttgccgcatcaccgacctgtacaccgacctacgcgatgggaggatgcttattaagcttctggaagtgctaagcggtgaaaggctgcccaagccaacaaaaggccgcatgaggattcactgtctcgagaatgtggacaaggcccttcagttcctcaaagagcagagggtgcacctcgagaacatgggttcccacgacattgtggacggcaaccaccgtctcaccttggggctcatctggactattatcctgagatttcagatacaggatatatctgtggaaactgaggacaacaaggaaaaaaagagcgccaaggatgctcttcttctatggtgtcagatgaagacagcaggttaccccaatgtgaacatccataatttcaccacgagctggcgcgatggaatggcgtttaacgccctgattcataagcaccgccctgaccttatcgactttgacaagctaaagaagtcgaatgcacattataacttacaaaatgccttcaatttagccgagcagcacttaggactgacgaagctgctggaccccgaagacatctcagtagaccacccagacgaaaagagtatcatcacgtatgtagtaacgtactaccattatttcagcaagatgaaagcactggctgttgaggggaagcgcatcggcaaggtactggacaacgctattgagaccgagaagatgatcgagaaatatgagtcccttgctagcgatcttctcgaatggatagaacagactattatcattctgaataaccggaagttcgctaacagtctggtcggggtccagcagcagctgcaagcttttaatacataccgcacagtggagaaacccccaaagtttaccgagaaaggaaacctggaagtacttctcttcacgattcagtcaaagatgagggctaataaccagaaggtctatatgcctagagagggcaaacttattagcgatatcaacaaagcctgggagcggttggagaaggcggagcacgagcgagaattagccttgaggaacgaactcattcggcaggagaaactggagcagctggcacgacggttcgacagaaaagctgctatgagagagacctggctgtcagaaaaccaacgcctagtgtcccaggataacttcggatttgacctcccagcggtggaggctgcaaccaagaagcacgaggcaattgagacagacattgccgcatacgaggagcgcgtccaggctgtcgtggcggtagcccgggagctggaggcagagaattaccacgatattaagcgcataaccgctcggaaggacaatgtgattcgtctgtgggagtacttgctggaactgctgagagctaggaggcagcgcctggagatgaacttagggttgcagaagatctttcaagagatgctctatattatggactggatggacgagatgaaagtacttgtcctgtctcaggactacggtaagcatcttttaggcgttgaagatctgctgcaaaagcatactttagtagaggccgacatagggatacaggcagagagggtgcggggcgttaatgcatcagcacaaaagttcgcaacggacggggaaggttataagccctgtgaccctcaggtgatccgcgaccgagtcgcgcatatggagttctgctaccaagaactctgtcagctggccgccgagaggcgcgctcgtttagaggagagtcgtaggctctggaagttcttttgggaaatggctgaagaagagggctggattcgggagaaagaaaaaatcctgtcgtcagacgactatggcaaggatctgactagtgtgatgcggctcctgtcaaaacatagagctttcgaggacgagatgtctggaagatccgggcactttgagcaagctatcaaagagggcgaagatatgatcgcagaggagcactttggctccgaaaaaatccgtgagagaattatctacattcgcgaacagtgggcaaacctggaacagctgtcagcaatacgcaagaagcgactggaagaggcaagtctcctgcatcagttccaggccgacgccgacgacatcgatgcctggatgttggatatcttgaagatagtgagctcatccgatgtaggacacgatgaatacagtacccagagtctggtgaagaagcacaaagatgtggctgaggagattgcaaattatcgtcctacactggatactctgcatgaacaggcaagcgctctgcctcaggaacacgccgaatcacctgacgtaagaggccgcttgtctgggattgaagagaggtataaggaagttgcagagcttacacggctacgtaagcaggctctccaagatactctcgccctctataaaatgttctctgaggctgacgcgtgcgagctgtggattgatgaaaaggaacagtggctgaacaatatgcagattcctgaaaagctcgaagacttggaggtaattcagcacaggttcgaaagcctggagcccgagatgaacaaccaggcatctagagtcgctgtggtcaaccagattgcccgtcagctcatgcattctggacatccgagtgaaaaggaaattaaagcacagcaggataaattgaacacaaggtggagtcagttccgggaactggtggaccggaagaaggacgctctactgtccgccctgagcattcaaaactatcaccttgaatgcaatgagactaaatcgtggatacgagaaaagaccaaagtgatcgagagcactcaagacctggggaacgacctggcaggggttatggccctgcagcgcaaactgacaggcatggagcgagacctggtggccatagaagctaagctgagtgatctgcagaaagaagcagagaagctcgaatcagagcatcctgaccaggcccaggccatcttgtccaggctggctgaaatctccgatgtgtgggaggagatgaagacaactctcaagaatcgcgaggcttccctgggcgaagctagcaagttacaacagtttctgagggacttagacgattttcagtcatggctcagtcggacccagactgcaatcgctagcgaggacatgcctaatacactcaccgaagccgaaaagttgcttacacagcatgaaaatatcaagaacgagatcgataattacgaagaggactaccagaaaatgagggatatgggcgagatggtcactcaaggtcagactgacgcccagtacatgttcttgagacagcggctccaggcattagacacagggtggaacgaactgcataaaatgtgggagaatcgccaaaacctgctctcccagtcccacgcataccagcaattcttacgggacacgaagcaggcggaggcgtttctcaacaaccaggagtatgtgcttgcgcacaccgaaatgcctacaaccctcgagggcgctgaagctgcaataaagaagcaggaggacttcatgaccactatggatgccaatgaagaaaaaattaacgcagttgttgaaactggcaggcgcttggtcagtgacggtaatatcaatagcgacaggattcaggaaaaggtggactctatcgatgacagacataggaagaaccgtgagactgcaagtgagttactcatgcgtctgaaggataaccgcgaccttcagaaattcctgcaggactgccaggagctctccctttggattaacgagaagatgttgacagcccaagatatgtcatacgacgaagctcgcaacctccacagtaaatggcttaaacatcaagccttcatggctgagcttgcttcaaacaaggagtggctagacaaaattgagaaggaaggtatgcagctgatcagcgaaaagcccgaaactgaagctgtggtgaaggagaaactcacgggtctccacaagatgtgggaagtgctggaatccaccacccagactaaagctcaaaggttatttgacgcaaacaaagcagaactatttacacaatcatgtgctgatttggataaatggctccatggcctcgagtcacaaattcagtctgatgactatggtaaagatcttaccagtgtgaatatcctcttgaaaaaacagcagatgctagagaatcaaatggaggtccgaaagaaggaaatcgaggaactccagagtcaggctcaagcgttatctcaggaaggaaaaagcacagatgaagttgattcgaaacggctgaccgtgcagaccaaattcatggagctcctcgaaccgctcaacgagagaaagcacaatttactggccagtaaggaaatccatcagtttaaccgggacgtggaggatgagattctttgggtgggcgagcggatgcccctggctacgtctaccgatcatggtcataatttacagacagtacaactgctcatcaaaaaaaatcaaacactgcagaaagaaatccaagggcaccaaccgagaatcgatgacatcttcgaaagaagccaaaacatcgttaccgactccagttccctttctgctgaggctattcgccagcgacttgccgatctgaagcagctatggggacttctgatagaggagactgagaaaaggcataggcgcctggaagaagcacatagggcccagcagtattactttgacgctgccgaggcagaggcctggatgtcagaacaggaactgtacatgatgagcgaagaaaaggcaaaagacgaacagtctgcagtgtctatgctgaaaaaacatcagatactggaacaggccgtcgaagattatgccgagacagttcatcagttatctaaaactagcagggctctggttgctgactcgcatcccgagtcggagcgcatttccatgcgtcagtccaaagtggacaagctttatgccggcctcaaggatctggcagaggagcgtcgtggcaaactggacgagaggcatcgcctgttccagctgaacagagaggtggacgacttggagcagtggatcgccgagcgggaggtggttgctggtagtcacgagcttggccaggactacgaacatgtcactatgctacaagagcgcttcagggagtttgccagggataccggaaacattggccaagagcgcgtcgataccgtgaatcatctagcagatgagcttatcaattctggccacagcgatgccgccacaatcgcggagtggaaagacgggttaaacgaggcctgggcagatctgctcgagcttatcgatactcggacgcagatattggcagcaagttatgaacttcacaagttttaccacgatgccaaagaaatttttgggcgcatccaggacaaacataagaaactgcccgaagagctcgggcgcgatcaaaatactgtggagactctacaaagaatgcatactaccttcgagcacgatatccaggccctggggactcaggtgcggcaacttcaggaggatgcggcccgactacaggctgcgtatgcaggtgataaggccgatgacatacagaagagggaaaacgaggtcctagaggcctggaaatctttgctcgacgcatgtgagagtagacgcgtgcgccttgtggacaccggagataaattccggttctttagcatggtgcgcgacctaatgctgtggatggaggacgtgatacgacagatcgaggcccaagaaaagcctcgagacgtgtcttctgtagagttgctgatgaacaaccaccagggtataaaagcggaaattgacgcccgcaacgacagctttaccacctgtatcgagttaggcaagtccctgctcgctcgaaaacactacgcctcggaggaaattaaagagaagcttctgcagctcacggagaaacgaaaagaaatgattgacaagtgggaggatcgctgggagtggttgaggcttattttggaagtgcatcaattcagtcgcgacgcatctgtcgccgaagcttggttgttaggccaagagccctatctgtcatccagagagattggacaatctgtcgacgaagtggagaagctcattaagaggcacgaagccttcgagaaatctgccgcaacctgggatgagcggttctccgcgttggagcgccttaccactctggagttgcttgaagtgcggcgacaacaagaagaagaggagagaaagcgacggcctcccagtcccgaacctagcactaaagtcagcgaggaagccgaaagccagcagcagtgggataccagcaagggcgaacaggtgagccagaacggcctgcctgccgaacagggcagtccaagagtctcctataggtcccagacgtaccagaactataaaaatttcaacagccgtcgcactgcgtcagaccagccctggtctggcctctag

SEQ ID NO: 253641 - DNA, 6467 bp, Artificial Sequence
  derived and/or modified sequence
atggaactgcagcggactagctcaatctccggtcccctttctccagcctacacagggcaagtcccttataattacaatcagcttgaaggacgctttaaacaactccaggacgagagggaggccgtgcagaagaaaacttttaccaaatgggtgaacagccacctcgctcgggtttcctgccggattacagacctttacacggatctgcgagacggtaggatgctcataaaactgcttgaggtcctgtccggggaacggctgcccaagcctaccaagggccgtatgagaatccactgcttagaaaacgtggataaggcattgcagtttctgaaagagcaacgggtgcacttggagaatatgggatcacacgacattgtcgatggtaaccaccggcttaccctcggcctcatctggactatcatcctgaggtttcagatccaggatatcagtgtcgagacagaggataacaaggagaaaaagtcggccaaagatgccttgctcctgtggtgtcagatgaagacagctggctacccaaacgtgaacattcacaatttcactacaagctggcgtgacggcatggcattcaacgctctgattcacaagcatcgacctgacctgatagattttgataagctaaagaagtcaaatgcccattacaacctgcagaatgcatttaaccttgcagagcagcacctgggattgacaaagcttctggaccccgaggatattagtgtggaccaccccgacgagaagtctatcatcacttacgtggttacctattaccattattttagtaagatgaaagccctggctgtggaaggcaaacggattgggaaagtgctggacaacgctatcgaaacggaaaagatgatcgaaaagtatgaaagtctggcatccgatttactcgagtggattgagcagaccatcattatcctgaacaacaggaagtttgccaacagcttggtgggagtgcaacagcagctgcaggccttcaacacctaccggactgtcgaaaagcctcctaaattcactgagaaaggcaacctggaggtgctgctgttcacaatacaaagtaaaatgagggccaacaaccaaaaggtctatatgccaagggaggggaagcttatcagtgatatcaataaagcctgggagcggctggagaaagctgaacatgaacgcgaactcgcactgaggaacgagctgatccgacaggagaagttggaacaacttgcacggaggttcgaccgcaaggccgctatgagagaaacctggttatccgagaaccagcggctggttagccaggacaactttggtttcgatctgccagcggtggaagcagcaacgaagaagcatgaggcgatcgaaaccgatattgccgcttacgaggaacgtgtccaggccgtagtagcagtcgccagggaactggaagccgagaattatcatgacatcaagcgcattaccgccagaaaagacaacgtaatccgtctctgggagtacctgcttgaactgctcagagccaggaggcaaaggctggagatgaatttgggcttgcagaagatatttcaggagatgctgtacatcatggactggatggacgagatgaaagtgctagtgctgtctcaagactacggaaagcacctgctgggtgtggaagatctattgcagaaacacaccctcgtcgaagccgacatcggcattcaggccgagcgggtgcggggagtaaacgcatcagcacagaaatttgccaccgacggggagggctataagccatgcgatccgcaggtgatcagggacagggtggctcacatggagttttgctaccaggagctgtgccagctcgcggcagaacgacgagcccgtctcgaagagagcagacggctctggaaattcttctgggaaatggcggaagaagaaggatggattcgggagaaagaaaagatactgtcatccgatgattacgggaaagatttgacctctgtgatgcgccttttgagcaaacacagggctttcgaagatgagatgagcggaagatcggggcactttgagcaggccatcaaagagggcgaagacatgatcgcagaggaacacttcgggtcagagaagataagagagcgcattatctacatacgggagcagtgggccaacctggaacagttgtccgcaattcgaaagaaacgattagaggaggctagcctgctgcaccagttccaggcggatgctgatgatatcgatgcatggatgctggatattctcaagattgtctccagcagtgacgtgggccacgatgagtattccacacagtccctggtgaagaagcacaaggacgttgcagaagagatagctaattaccgtcctaccctggatacactgcatgagcaagcctccgccttgccccaggagcacgccgagagccctgatgtgcgcggaagactcagcgggattgaggagcggtacaaagaggtggcggagctcaccaggctgagaaaacaggcgcttcaggatacacttgccctctataagatgttttcggaggccgacgcctgcgagctttggatcgatgaaaaggagcagtggctaaataacatgcaaatcccggaaaaactagaggacctcgaagtgatccagcatagatttgagagtctggaacctgaaatgaacaaccaggcaagtcgtgtggctgttgtgaaccagatcgcaaggcaattgatgcacagtggacaccctagcgaaaaggaaatcaaggcacagcaagacaagctgaatacccgctggagtcagtttagagagctggtagaccgcaagaaagatgctttgctgtctgctctgtccattcaaaattatcacctggaatgtaatgaaacgaagtcttggatcagagagaagaccaaagtcattgagtctacccaggatctcggaaatgatcttgccggagtcatggccttgcagcggaagctcactggcatggagcgggatctggtggccatcgaagccaagttgagcgacctccagaaagaagctgaaaaacttgagagtgagcatcctgaccaggctcaggccatcttatctaggctggccgaaatctctgatgtttgggaagagatgaaaactactctgaagaatcgagaggcctccttaggcgaagcctccaagctgcaacagtttctgcgggacctagatgacttccaaagttggctgagtcgaacacagactgcgatagcatccgaagatatgcccaacacacttactgaggctgaaaagttgctaactcagcatgaaaacattaagaacgagatagacaactacgaagaagactatcagaaaatgcgggatatgggagagatggtcacccaggggcagacagatgcccaatatatgtttctgcgtcaaagactgcaggcattagacaccggttggaacgagctgcataaaatgtgggagaatcggcagaacttactgtcccagtcccatgcgtaccagcagttcctccgggacactaaacaggcagaggcttttttgaataaccaggaatacgtcttggctcataccgagatgccgacaacactggaaggagctgaggctgcgatcaagaagcaggaggactttatgacaacaatggacgctaacgaagagaaaattaacgccgtggtggaaacgggaagaaggctggtctcagatgggaacattaattctgatagaattcaagaaaaggtggactccattgatgaccgtcaccgcaaaaacagagagacagccagcgagctgctcatgcgcctcaaggataacagagacctgcagaaattccttcaggattgccaggaactctcgttatggattaacgaaaaaatgctcacagcacaggatatgagctatgacgaggccagaaatctgcattcaaaatggctcaaacatcaggcttttatggcagagctggcatcaaataaagaatggttagacaaaattgaaaaggagggaatgcagctgatctccgaaaagccagagactgaagctgtcgtgaaggagaagttgacaggactccacaagatgtgggaggtgttggagagcactacccagactaaggctcagagacttttcgacgcaaacaaagcagaactgtttacgcagagctgcgctgatcttgacaaatggttgcacggattggaatcccagatacagtcggatgactatggtaaggatctaacatcagttaacatccttctgaaaaaacagcagatgctggagaaccaaatggaagtcaggaagaaggagattgaggaacttcagtcacaggcgcaagcgctgtcccaggaaggaaagtccacagacgaagtggactctaaaaggctgaccgtacagactaaattcatggagctgctggaacctttgaacgagcggaagcacaacctcctcgcaagcaaagaaatccaccagttcaaccgggatgtagaagacgagatcttgtgggttggggagagaatgcccctggctaccagtacagaccacggccataacttgcaaaccgtgcaactgttgatcaaaaaaaatcagacccttcagaaagagatccagggccaccagccaagaatcgacgacatctttgaaaggtcacagaacattgttactgactctagttcgctgtctgcagaagctatccggcagagactggcagatctgaagcagctctggggactgttgatcgaagaaacggagaagcggcacaggcggctagaggaggcccaccgcgcacagcagtattacttcgacgctgcagaggccgaggcctggatgagcgagcaagaactgtatatgatgtcagaggaaaaggccaaagacgagcagtcggccgtgtctatgctaaagaagcaccagatactggagcaggccgtggaggactatgctgagaccgtgcaccagttgtccaagacctcacgagccctggtggctgactcccatccagagtctgagcgtatctcaatgaggcagtctaaagtcgacaagctctacgcgggtctgaaggatctggctgaggagcgccgtgggaaactcgatgagcggcataggttattccagctgaatcgggaagtggacgatctcgaacaatggatcgcggaaagggaggtagtggctggctctcacgagctcggacaggactatgagcatgtgacaatgctccaagagcgttttcgggaattcgcccgagacactggaaatataggtcaagaacgagttgacacagtaaaccatctggcagacgagctaattaactctggtcatagtgacgccgctacaatcgcagagtggaaagacggccttaacgaggcatgggctgatttactcgagctaattgatacacgcacgcagattctggcggcatcatacgagttgcacaagttctaccacgacgcaaaggagatcttcggccgaatacaagacaagcataaaaagctgcccgaagagttgggacgcgaccaaaataccgtcgagactctgcagagaatgcatacaaccttcgaacacgatatccaggccctgggaacacaggtccgtcagctgcaggaggatgccgctcgcctgcaagcggcttacgctggagacaaggccgacgacatccagaagagagagaatgaggttctggaggcatggaaatcccttctggatgcttgcgagtccagacgtgtaagactcgttgacaccggagacaaattccgttttttttccatggttcgcgatctgatgttgtggatggaggacgtgattcggcaaatagaggcccaggaaaaaccccgtgatgtcagcagcgttgagttgctgatgaacaaccaccagggcatcaaggccgagatcgatgcacgaaacgatagctttactacctgtatcgaacttggcaagtcgcttttagcccgaaagcactacgcctcagaggaaattaaggaaaaactgctccagcttaccgagaaaaggaaggagatgatagataagtgggaagacaggtgggagtggctgagactgatcctcgaggtccaccagtttagtcgcgacgcttctgttgctgaggcttggcttctagggcaggagccttatctctcttcgagggagatcggccaatctgtcgacgaggtggagaaacttatcaagcggcatgaggccttcgaaaaaagcgccgctacttgggacgagagattttctgctctggagagattaacaacactcgaattactagaagttaggcgccagcaagaggaagaagagcgaaaaagaaggccgccatctcccgaaccgtccactaaagtctctgaagaggcggagtctcagcaacagtgggacacttccaaaggggaacaggtgagtcaaaacggactgccagccgaacaggggagtcctcgcgtgtcctaccgcagtcagacataccaaaactacaagaactttaattcccggagaacagcttccgatcagccgtggagtgggcttta

SEQ ID NO: 253642 - DNA, 9075 bp, Artificial Sequence
  derived and/or modified sequence
ggtgtgcgcgctgcgcccgcgagctcccgggctcggcaaccgtggcatgcttaggattggccatatttaaaagttctgaagtagaacctgcgcctcctctctgcttctccctcctcctcagtaatttatttcgagcttccaggcaagggccacggaagaagggaaagcaagaaattagatgcctgtgtggtaactcctcgcggagctaaggtggactctcttgcagccaacttcccatcagatcaccctgctggacttgcagaccggaatggggctcgcctaaggagccgagcgctgcggaggctgctgcgtgttggatgggagtgggagggggctggagcgagatttccagggcgcagtcctccggggcgttacgccgggcataatggaattgcagaggacgtctagtatctccgggccgctgtcgccggcgtacacggggcaggtgccttacaactacaaccagctggaaggcagattcaagcagctgcaagatgagcgtgaagccgtgcagaagaagaccttcaccaagtgggtcaattcccaccttgcccgtgtgtcctgccggatcacagacctgtacactgaccttcgagatggacggatgctcatcaagctgctggaggtcctctctggagagaggctgcctaaacccaccaagggacgaatgcgcatccactgcttagagaatgtggacaaggcccttcagttcctgaaggagcagagagtccatcttgagaacatggggtcccatgacatcgtggatggaaaccaccggctgacccttggcctcatctggaccatcatcctgcgcttccagatccaggatatcagtgtggaaactgaagacaacaaagagaagaaatctgccaaggatgcattgctgttgtggtgccagatgaagacagctgggtaccccaatgtcaacattcacaatttcaccactagctggagggacggcatggccttcaatgcactgatacacaaacaccggcctgacctgatagattttgacaaactaaagaaatctaacgcacactacaacctgcagaatgcatttaatctggcagaacagcacctcggcctcactaaactgttggaccccgaagacatcagcgtggaccatcctgatgagaagtccataatcacttatgtggtgacttattaccactacttctctaagatgaaggccttagctgttgaaggaaaacgaattggaaaggtgcttgacaatgctattgaaacagaaaaaatgattgaaaagtatgaatcacttgcctctgaccttctggaatggattgaacaaaccatcatcattctgaacaatcgcaaatttgccaattcactggtcggggttcaacagcagcttcaggcattcaacacttaccgcactgtggagaaaccacccaaatttactgagaaggggaacttggaagtgctgctcttcaccattcagagcaagatgagggccaacaaccagaaggtctacatgccccgggaggggaagctcatctctgacatcaacaaggcctgggaaagactggaaaaagcggaacacgaaagagaactggctttgcggaatgagctcataagacaggagaaactggaacagctcgcccgcagatttgatcgcaaggcagctatgagggagacttggctgagcgaaaaccagcgtctggtgtctcaggacaactttgggtttgaccttcctgcagttgaggccgccacaaaaaagcacgaggccattgagacagacattgccgcatacgaggagcgtgtgcaggctgtggtagccgtggccagggagctcgaggccgagaattaccacgacatcaagcgcatcacagcgaggaaggacaatgtcatccggctctgggaatacctactggaactgctcagggcccggagacagcggctcgagatgaacctggggctgcagaagatattccaggaaatgctctacattatggactggatggatgaaatgaaggtgctagtattgtctcaagactatggcaaacacttacttggtgtggaagacctgttacagaagcacaccctggttgaagcagacattggcatccaggcagagcgggtgagaggtgtcaatgcctccgcccagaagttcgcaacagacggggaaggttacaagccctgtgacccccaggtgatccgagaccgcgtggcccacatggagttctgttatcaagagctttgccagctggcggctgagcgcagggcccgtctggaagagtcccgccgcctctggaagttcttctgggagatggcagaagaggaaggctggatacgggagaaggagaagatcctgtcctcggacgattacgggaaagacctgaccagcgtcatgcgcctgctcagcaagcaccgggcgttcgaggacgagatgagcggccgcagtggccactttgagcaggccatcaaggaaggcgaagacatgatcgcggaggagcacttcgggtcggagaagatccgtgagaggatcatttacatccgggagcagtgggccaacctagagcagctctcggccattcggaagaagcgcctggaggaggcctccctgctgcaccagttccaggcagatgctgatgacattgatgcctggatgctggacatcctcaagattgtctccagcagcgacgtgggccacgatgagtattccacacagtctctggtcaagaaacacaaggacgtggcggaagagatcgccaattacaggcccacccttgacacgctgcacgaacaagccagcgccctcccccaggagcatgccgagtctccagacgtgaggggcaggctgtcgggcatcgaggagcggtataaggaggtggcagagctgacgcggctgcggaagcaggcactccaggacactctggccctgtacaagatgttcagcgaggctgatgcctgtgagctctggatcgacgagaaggagcagtggctcaacaacatgcagatcccagagaagctggaggatctggaggtcatccagcacagatttgagagcctagaaccagaaatgaacaaccaggcttcccgggttgcagtggtgaaccagattgcacgccagctgatgcacagcggccacccaagtgagaaggaaatcaaagcccagcaggacaaactcaacacaaggtggagccagttcagagaactggttgacaggaagaaggatgccctcctgtctgccctgagcatccagaactaccacctcgagtgcaatgaaaccaaatcctggattcgggaaaagaccaaggtcatcgagtccacccaggacctgggcaatgacctggctggcgtcatggccctgcagcgcaagctgaccggcatggagcgggacttggtggccattgaggcaaagctgagtgacctgcagaaggaggcggagaagctggagtccgagcaccccgaccaggcccaggccatcctgtctcggctggccgagatcagcgacgtgtgggaggagatgaagaccaccctgaaaaaccgagaggcctccctgggagaggccagcaagctgcagcagttcctacgggacttggacgacttccagtcctggctctctaggacccagacagcgatcgcctcggaggacatgccaaacaccctgaccgaggctgagaagctgctcacgcagcacgagaacatcaagaacgagatcgacaactacgaggaggactaccagaagatgagggacatgggcgagatggtcacccaggggcagaccgatgcccagtacatgtttctgcggcagcggctgcaggccctggacactggatggaacgagctccacaagatgtgggagaacagacaaaatctcctatcccagtcacatgcctaccagcagttcctcagagacacgaagcaagccgaagcctttcttaacaaccaggagtatgttctggctcacactgaaatgcctaccaccttggaaggagctgaagcagcaattaaaaagcaagaggacttcatgaccaccatggacgccaatgaggagaagatcaatgctgtggtggagactggccggaggctggtgagcgatgggaacatcaactcagatcgcatccaggagaaggtggactctattgatgacagacataggaagaatcgtgagacagccagtgaacttttgatgaggttgaaggacaacagggatctacagaaattcctgcaagattgtcaagagctgtctctctggatcaatgagaagatgctcacagcccaggacatgtcttacgatgaagccagaaatctgcacagtaaatggttgaagcatcaagcatttatggcagaacttgcatccaacaaagaatggcttgacaaaatcgagaaggaaggaatgcagctcatttcagaaaagcctgagacggaagctgtggtgaaggagaaactcactggtttacataaaatgtgggaagtccttgaatccactacccagacaaaggcccagcggctctttgatgcaaacaaggccgaacttttcacccagagctgtgcagatctagacaaatggctgcacggcctggagagtcagattcagtctgatgactatggcaaagacctgaccagtgtcaatatcctgctgaaaaagcaacagatgctggagaatcagatggaagtgcggaagaaggagatcgaagagctccaaagccaagcccaggccctgagtcaggaagggaagagcaccgacgaggtagacagcaagcgcctcaccgtgcagaccaagttcatggagttgctggagcccttgaacgagaggaagcataacctgctggcctccaaagagatccatcagttcaacagggatgtggaggacgagatcttgtgggttggagagaggatgcctttggcaacttccacggatcatggccacaacctccagactgtgcagctgttaataaagaaaaatcagaccctccagaaagaaatccaggggcaccagcctcgcattgacgacatctttgagaggagccaaaacatcgtcactgacagcagcagcctcagcgctgaggccatcagacagaggcttgccgacctgaagcagctgtggggtctcctcattgaggagacagagaaacgccacaggcggctggaggaggcgcacagggcccagcagtactactttgacgctgctgaggccgaagcctggatgagcgagcaggagctgtacatgatgtcagaggagaaggccaaggatgagcagagtgctgtctccatgttgaagaagcaccagatcttagaacaagctgtggaggactatgcagagaccgtgcatcagctctccaagaccagccgggccctggtggccgacagccatcctgaaagtgagcgcattagcatgcggcagtccaaagtggataaactgtacgctggtctgaaagaccttgctgaagagagaagaggcaagctggatgagagacacaggttattccagctcaaccgggaggtggacgacctggagcagtggatcgctgagagggaggtggtcgcagggtcccatgaactgggacaggactatgagcatgtcacgatgttacaagaacgattccgggagtttgcccgagacaccgggaacattgggcaggagcgcgtggacacggtcaatcacctggcagatgagctcatcaactctggacattcagatgccgccaccatcgctgaatggaaggatggcctcaatgaagcctgggccgacctcctggagctcattgacacaagaacacagattcttgccgcttcctatgaactgcacaagttttaccacgatgccaaggagatctttgggcgtatacaggacaaacacaagaaactccctgaggagcttgggagagatcagaacacagtggagaccttacagagaatgcacactacatttgagcatgacatccaggctctgggcacacaggtgaggcagctgcaggaggatgcagcccgcctccaggcggcctatgcgggtgacaaggccgacgatatccagaagcgcgagaacgaggtcctggaagcctggaagtccctcctggacgcctgtgagagccgcagggtgcggctggtggacacaggggacaagttccgcttcttcagcatggtgcgcgacctcatgctctggatggaggatgtcatccggcagatcgaggcccaggagaagccaagggatgtatcatctgttgaactcttaatgaataatcatcaaggcatcaaagctgaaattgatgcacgtaatgacagtttcacaacctgcattgaacttgggaaatccctgttggcgagaaaacactatgcatctgaggagatcaaggaaaaattactgcagttgacggaaaagaggaaagaaatgatcgacaagtgggaagaccgatgggaatggttaagactgattctggaggtccatcagttctcaagagacgccagtgtggccgaggcctggctgcttggacaggagccgtacctatccagccgagagataggccagagcgtggacgaggtggagaagctcatcaagcgccacgaggcatttgaaaagtctgcagcaacctgggatgagaggttctctgccctggaaaggctgactacattggagttactggaagtgcgcagacagcaagaggaagaggagaggaagaggcggccgccttctcccgagccgagcacgaaggtttcagaggaagccgagtcccagcagcagtgggatacttcaaaaggagaacaagtttcccaaaacggtttgccagctgaacagggatctccacgggttagttaccgctctcaaacctaccaaaactacaaaaactttaatagcagacggacagccagtgaccagccatggtctggactgtgaagttcactaccatttgtcaagaatcaccctttccaaatcctctgggttttgactttttggcttccacttcacccaaaatgttaaaatttttacttaattcatagccttccttggtttcatatttgtttgcatttaattcatgtttgagtctcttaactgatggatgcccacttgccttaaagcagcatacttattttttgtttatttattgtgagctttttactttattaagattttacagcgaaacccttacatgagtaattgaaatgaaattaaatgagattacagcataatgaagaagaaaactagaatctaacaggtatgacacattcagttattctaacagggcacagtactgtgctatatgtagccgcctttacagatgttattaacctatagtagtttactattaactaggaagactggtgtatgaggagggagacattctgtaataagattaaaacctaaagtcagctgtgtaacattccatgaaagatgcattcatttattgaagatgacaaaaaagggagtcagatatattctggaagctattttaattttaggcacacaatctcatacattttgagacccttgggtcatttattactttttacaaactagttcctctctttttttctgccaagtcctgaattgaaaactgtaggcttccttgcacagatgttgcagccagcctcaggagtaaagtgcccgctgactgctgccgccacctctgtctcgctccctgtcagtgctgctggcacgtgggacgcggcaggtgacagccgttctcagcatgttttagaagcttgcctcacagacttccatgcctctccattcagccgatgacttcagggtgtcaaactgttttaatttttcaaacaaatggaacagaagccattgtggttcatcctgattacttgaacgttgcacttggtggaccgtgcctgggagcgctcgcatgccccctggcttcagaagtcatgtcagtgtctctgtagacaaactccactgtacatcttggattaatcttctgattcattgttcattttctcaagactttttgtggaattctctgataaaggaagcttttaggatggtatctatcaggccaccagcaggaattgaaaatgttttcacaaaaatccttttccttagaaataaaagctggtgacagagatggtttccttgtaccgataaaaacaaaaccaaatccatattatacatcaaaaccttgtgagacattcacttgctcttttgccatatttagatgtgtcagtggaatcagaaacctgttttgatatgtgttctctatgagttaagtctgatttgtctttttatttcatgatgcatgtcttttttttcttttgtcaggataacgtcatatagcatcttgtttgtttttccttatctctatgtacatatctatctacttctgactgtagatgggtatatagatagatgccaagcttcttatgttctgggggtagtatgcatcattattgggtctctgccttaaaacacatcaaaattcattttagacaaaaaaacttctgctttgtctttggtcattagggagctctaatgtgtgtttgtggctccaagttacattttgtgtttcattgatctatatgtatatatgtgatgttttcatatatatatgtgtgtgtgtttaaattttgtatcatcaggactgacacccaatttgacactttttgtatctagaagaccctccaaaaaaggaaccacataagcacacaagaaaagagtgctatgatgttcttagcatttgctatcatgcctatttttatctagatttttaaatgtagcttgtcataacaaaattttaattacaattggcttgtatgagaagaaaaagtatttttattgttttgagtgatgacgcagagactcagtgaacttgaaaatagcattgcttcgtgcactttgaataccaatcaggtgttttctgtgctactagttgtcacgttgcattcatgttcacctcctgatttaagtatctcgggtgtgcccagccactaaagcactctggactaatcgctaaagagaagcaacgtggggggtggggttgcgagggatgtgttcacatgtacccatcatttgatcatagcactgtgattgcttttgatgtgtgtctctagtggtgtgctgtctgttggcatgcttaaagcacatgtccattaaaattcattttgttcctttta

SEQ ID NO: 253643 - protein, 403 aa, Artificial Sequence
  derived and/or modified sequence
MEEERGSALAAESALEKNVAELTVMDVYDIASLVGHEFERVIDQHGCEAIARLMPKVVRVLEILEVLVSRHHVAPELDELRLELDRLRLERMDRIEKERKHQKELELVEDVWRGEAQDLLSQIAQLQEENKQLMTNLSHKDVNFSEEEFQKHEGMSERERQVMKKLKEVVDKQRDEIRAKDRELGLKNEDVEALQQQQTRLMKINHDLRHRVTVVEAQGKALIEQKVELEADLQTKEQEMGSLRAELGKLRERLQGEHSQNGEEEPETEPVGEESISDAEKVAMDLKDPNRPRFTLQELRDVLHERNELKSKVFLLQEELAYYKSEEMEEENRIPQPPPIAHPRTSPQPESGIKRLFSFFSRDKKRLANTQRNVHIQESFGQWANTHRDDGYTEQGQEALQHL

SEQ ID NO: 253644 - DNA, 1212 bp, Artificial Sequence
  derived and/or modified sequence
atggaggaagagcgtggcagcgccctggcagcagagtctgcccttgagaaaaatgtagctgagctcactgtgatggatgtctacgacatagctagtctcgtgggccatgaattcgagcgtgtgattgatcaacacggttgcgaggccatagcaagacttatgccgaaagtcgtgagagtcctggaaattctggaggtcctggtcagcaggcatcacgtggcgccggaactggacgagctgagactggagttggatagactccgcctggagagaatggatcgcatcgagaaggagcgaaaacaccagaaggagctggaacttgtggaggacgtctggagaggtgaagcccaggatttgctcagtcagattgcccaactacaggaagaaaacaaacagttgatgactaaccttagccacaaagatgtgaatttttccgaggaggaatttcagaaacatgagggtatgtctgaacgggaacgacaggtcatgaaaaagctcaaggaggtggttgataagcaacgggatgaaatccgcgcaaaagaccgggaattaggcttgaaaaacgaggacgtcgaggccctgcagcagcagcaaactcggctgatgaagattaaccatgatctccgccacagggtaacagttgtggaggcacagggcaaagcactcattgagcagaaggttgagttagaggcagacttgcagactaaggagcaagaaatgggatctctccgagcggaactaggcaagctcagagaacggctacaaggcgagcatagccagaatggagaagaggaacctgaaacggaacctgtgggggaagagagtatctcggatgccgagaaggttgccatggatctgaaggaccccaatcgtcctagattcacgcttcaggaattgcgtgacgtcttgcacgaacggaacgaactgaaatcaaaggtcttcttattacaggaagagctggcttattataaatctgaggaaatggaagaggaaaacaggattccccagcccccccctattgcacatccgcgcacttctccccagcctgagtccggcatcaaaagactgttctccttcttttctcgggataaaaagcggctggctaacacacagcggaatgttcatatccaagagtcattcggccagtgggccaatacgcaccgcgacgacggctacacggagcaagggcaggaggccttgcagcacttgtag

SEQ ID NO: 253645 - DNA, 1212 bp, Artificial Sequence
  derived and/or modified sequence
atggaggaggagcggggcagcgccctggccgctgagagcgccctggagaagaatgtggccgagctgactgtgatggatgtgtatgacatcgccagcctggtgggccacgagtttgagagggtcatcgaccagcacggctgtgaggccatcgcccggctgatgcccaaggtggtgcgggtgctggagatcctggaggtgctggtgagccgccaccacgtggcccctgagctggatgagctgcggctggagctggaccggctgcggctggagaggatggacagaattgagaaggagaggaagcaccagaaggagctggagctggtggaggatgtgtggagaggagaggcccaggacctgctgagccagatcgcccagctgcaggaggagaacaagcagctgatgaccaacctgagccacaaggatgtgaacttcagcgaggaggagttccagaagcatgagggcatgtctgagcgggagcggcaggtgatgaagaagctgaaggaggtggtggacaagcagagagatgagatccgggccaaggaccgggagctgggcctgaagaatgaagatgtggaggccctgcagcagcagcagacccggctgatgaagatcaaccacgacctgcggcaccgggtgacagtggtggaggcccagggcaaggccctgattgagcagaaggtggagctggaggccgacctgcagaccaaggagcaggagatgggcagcctgcgggcagagctgggcaagctgcgggagcggctgcagggcgagcacagccagaatggagaggaggagcctgagacagagcctgtgggggaggagagcatcagtgatgctgagaaggtggccatggacctgaaggaccccaaccggccccgcttcaccctgcaggagctgagagatgtgctgcacgagagaaatgagctgaagagcaaggtgttcctgctgcaggaggagctggcctactacaagtctgaggagatggaggaggagaaccgcatcccccagcccccacccatcgcccaccccaggaccagcccccagcctgagagcggcatcaagaggctcttctccttcttcagccgggacaagaagaggctggccaacacccagagaaatgtgcacatccaggagagctttggccagtgggccaacacccacagagatgatggctacacagagcagggccaggaggccctgcagcacctgtag

SEQ ID NO: 253646 - DNA, 1212 bp, Artificial Sequence
  derived and/or modified sequence
atggaggaggagcggggcagcgccctggccgccgagagcgccctggagaagaatgtggccgagctgacagtaatggatgtatacgacatcgcgagcttggtgggacacgagtttgaaagagtgattgaccagcacggctgcgaggcgatagctcggctgatgcccaaggtggtgcgcgttctggagattctcgaggtcctggtgagccgccaccacgtggccccagaactggatgaactccggttggaattggatcgccttaggcttgagcgtatggatagaatcgagaaagaaaggaaacatcagaaggagcttgagctggtggaggatgtgtggcggggtgaggcacaggatctgctcagtcaaatcgcccagctccaggaggagaacaaacagttaatgaccaatctgagtcacaaagacgtaaacttctcggaagaggagttccagaagcacgagggaatgagtgagagggaaaggcaggttatgaaaaagctaaaggaggttgtcgataaacagagggatgaaatccgcgctaaggaccgcgagctgggtctgaaaaacgaagacgtggaagccctgcagcagcaacaaacgcgcctgatgaaaatcaaccacgatcttcgccatagagtgaccgttgtagaggcccagggcaaggcgctgatcgagcagaaggtcgagttggaagcagatcttcagaccaaagagcaggaaatgggttctctgcgtgcagagctcggcaagctgcgcgaacgactccagggcgaacactcccagaacggtgaggaggagcctgaaacagagcctgtgggggaagagagcattagcgacgccgagaaagtggcaatggaccttaaggatccgaatcggcccaggtttactcttcaggagctcagggatgtgcttcacgagcgcaacgagctgaagagcaaggttttcctgctacaggaggagcttgcatactataaaagcgaggaaatggaagaggaaaatagaatcccgcagccgccgccgatagcccatccaaggaccagcccacagcctgaatctggtattaagaggctattctcgtttttttcaagggataaaaagagactggccaatacccagcgtaatgtgcacatccaggaaagctttggccagtgggcaaacacacatagggatgatggatataccgaacagggccaggaggcactgcaacacctttag

SEQ ID NO: 253647 - DNA, 1212 bp, Artificial Sequence
  derived and/or modified sequence
atggaagaggagaggggaagcgccctcgccgctgaaagcgccctggagaaaaacgtggccgagttgaccgtaatggacgtctacgacatagcttctctcgtggggcacgagttcgagagggtgatcgaccagcatgggtgtgaggccattgctaggctgatgcccaaagtggtcagggtgcttgaaattctggaagtgcttgtcagtcgacatcacgtagcaccagagctagacgagttaaggctggaacttgatcggctgaggttggagcgcatggatcggatagaaaaagaacgcaagcatcagaaggagctggagctcgtcgaagacgtgtggcggggagaggcacaagacctgctgagccagatcgcacagctccaggaagagaacaagcagctcatgaccaacttgagtcacaaagatgtgaatttctccgaagaagagttccagaaacatgaagggatgagtgaaagggagcgacaagtaatgaaaaaactaaaagaggtagtcgacaagcaaagggacgaaatcagggctaaggacagggagttgggcctcaaaaacgaggacgtggaggcattgcaacagcaacagacacggctgatgaagattaatcatgatctgaggcaccgtgtgacggtagtggaggctcaggggaaagcactgatcgagcaaaaggtggaactggaggctgacctccagactaaagaacaggagatgggcagccttcgcgctgagctgggcaagttgcgggaacgcctccagggtgaacattcacagaatggtgaggaagaacctgagactgagccggtaggggaagagtccatttctgatgccgagaaagtggccatggatttgaaagaccctaaccgaccaaggttcacgctgcaggagctgcgggatgtgctccacgagaggaacgagctgaagagtaaggtgtttctgctgcaggaagagctcgcctactacaagtcagaagagatggaagaggagaatcgcatcccacagcctcctccaatagctcacccaagaactagcccccaaccagagtcaggtataaagagactgttcagcttcttttcccgggataaaaagagactagccaacacccagcggaatgtacatattcaggagtccttcggacagtgggcaaatacacaccgagacgatggctataccgaacagggacaggaggctctacagcatctatag

SEQ ID NO: 253648 - DNA, 2608 bp, Artificial Sequence
  derived and/or modified sequence
ctcgggagcagctccgggccgagccgggcgcccagaccccgggcccgcacaccccgcgccgccgcccgtgcccgcgcccgcgcccgccgcccgctgcccgctgcgccctcgccccagcgcccgctgagcgcgcccgcccgcggcccaggctgggcccggccggcccggccctcgacagcggcaagtttgggagttgcacgagtttgcggggcgggggacaggccaggagggtggccatggaggaggagcgggggtcggcgctggcggccgagtcggcgctggagaagaacgtggccgagctgaccgtcatggacgtgtacgacatcgcgtcgcttgtgggccacgagttcgagcgggtcattgaccagcacggctgcgaggccatcgcgcgcctcatgcccaaggtcgtgcgcgtcctggagatcctggaggtgctggtcagccgccaccacgtcgcgcccgagctggacgagctgcgcctggagctggaccgcctgcgcctggagaggatggaccgcatcgagaaggagcgcaagcaccagaaggagctggagctggtggaggatgtgtggcgaggggaggcgcaggacctcctctcccagatcgcccagctgcaggaggagaacaagcagctcatgaccaacctctcccacaaggatgtcaatttctcagaggaggagttccagaagcatgaaggcatgtcagagcgggagcgacaggtgatgaagaagctgaaggaggtggtggacaaacaacgcgacgagatccgcgccaaggacagggagctgggcctgaaaaatgaggacgttgaggctttacagcagcagcagacacggctgatgaagatcaaccatgaccttcggcaccgggtcacggtggtggaggcccaggggaaagccctgatcgaacagaaggtggagctggaggcagacctgcagaccaaggagcaggagatgggcagcctgcgagcagagctggggaagttgcgagagaggctgcagggggagcacagccagaatggggaggaggagcctgagacggagccggtgggagaggagagcatctccgacgcagagaaggtggccatggatctcaaggaccccaaccgcccccggttcaccctgcaggagctgcgggacgtgctgcacgagaggaacgagctcaagtccaaggtgttcttgctgcaggaggagctggcttactataagagtgaagaaatggaagaggaaaaccgaataccccaacccccacccatcgcccacccgaggacgtccccccagccggagtcgggcatcaagcgactgtttagcttcttctcccgagataagaagcgcctggccaacacacagagaaacgtgcacatccaggagtcctttggacagtgggcaaacacccaccgcgatgacggttacacagagcaaggacaggaagccctgcagcatctgtgaccttggcccatctccaccctccaacctggactgcccgccaccagcgcctgcaaccgaactgcagcccaggggtcattgctgcctcaagcctctcggtgcagatgcaccctgaaaactgacccctcaaacagactgtctgatttgaggatggacattgaaaaactgacgccaaactctaaagaaatgtttatttatacccagggctatcactgtttctaatagatgactctgatcccgtaggatatatatttaataatcccacaaacggaggccagacttctgcgttaacttcagtaacacaagcttctttaagccaaatacatcacttgccactatcattgctgtttgacttgctttgtataaaatgctatgtgtagaggttttattatcacaggtgacatagttcagcaggaggcatggaagggctagatcttcattagttacattcatgaaattgtgatggtaacgtattatacagaatgtatccatcaggcagacaaggggtctgaagtcacaggctcagtagcccaactcagacacaaagccacagacaatatggatgatggtcctcttacccagaaactggagacaactttgcaggcaccctggctgcgttcctgataatgcctagagcatgtagcaatgttcaaggcaggtgccttggaatctgctgtgagttatgcagtactaaccaaacaaagttgctaaggatgagatgttgcaacatttcttgtgtgcacttttttttcctgacatctttttttccttttaggattcattaagtcatatacttagtcccctgcaaagaagaagacagatgtcccagagcagactgaaagcggggcgtgggatcctaggcaatgcaggagggcaggtgggggagctgtagcagaacaagggtgctaggtgggaagctggcttggggaccacacgtctggctgactcacagggctatagcagcagacagagagccagatgctctactgcaactggtgagttggaggcttgcccacataacactgtctttctctccacccgccaagcatccagggcacagggctggttgctcacagattgagcgaggtagcacctcctaccagcactcaagtttatcagggccgcgttctaaacattctactgaagtttgctaagaaaccatt

SEQ ID NO: 253649 - DNA, 1212 bp, Artificial Sequence
  derived and/or modified sequence
atggaggaggagagaggcagcgccctggccgccgagagcgccctggagaagaacgtggccgagctgaccgtgatggacgtgtacgacatcgccagcctggtgggccacgagttcgagagagtgatcgaccagcacggctgcgaggccatcgccagactgatgcccaaggtggtgagagtgctggagatcctggaggtgctggtgagcagacaccacgtggcccccgagctggacgagctgagactggagctggacagactgagactggagagaatggacagaatcgagaaggagagaaagcaccagaaggagctggagctggtggaggacgtgtggagaggcgaggcccaggacctgctgagccagatcgcccagctgcaggaggagaacaagcagctgatgaccaacctgagccacaaggacgtgaacttcagcgaggaggagttccagaagcacgagggcatgagcgagagagagagacaggtgatgaagaagctgaaggaggtggtggacaagcagagagacgagatcagagccaaggacagagagctgggcctgaagaacgaggacgtggaggccctgcagcagcagcagaccagactgatgaagatcaaccacgacctgagacacagagtgaccgtggtggaggcccagggcaaggccctgatcgagcagaaggtggagctggaggccgacctgcagaccaaggagcaggagatgggcagcctgagagccgagctgggcaagctgagagagagactgcagggcgagcacagccagaacggcgaggaggagcccgagaccgagcccgtgggcgaggagagcatcagcgacgccgagaaggtggccatggacctgaaggaccccaacagacccagattcaccctgcaggagctgagagacgtgctgcacgagagaaacgagctgaagagcaaggtgttcctgctgcaggaggagctggcctactacaagagcgaggagatggaggaggagaacagaatcccccagcccccccccatcgcccaccccagaaccagcccccagcccgagagcggcatcaagagactgttcagcttcttcagcagagacaagaagagactggccaacacccagagaaacgtgcacatccaggagagcttcggccagtgggccaacacccacagagacgacggctacaccgagcagggccaggaggccctgcagcacctgtag

SEQ ID NO: 253650 - DNA, 432 bp, Artificial Sequence
  derived and/or modified sequence
atggccaccgctaccgagcagtgggtattggttgaaatggtgcaggcgctgtacgaggcacccgcctaccatctcattctggaagggatcctaattctgtggattatccgactcctattctcaaaaacctataagctacaggaaaggagcgatctgacggtgaaggagaaggaggaactaatcgaggagtggcagcccgaaccccttgtccccccggtgcctaaggaccatcccgcactaaactacaacatagtctctggccccccctctcacaagactgtcgtcaacggcaaagaatgcattaattttgcctccttcaacttcctgggactgctcgacaacccccgagtgaaggctgcagcccttgcttcgctgaagaagtatggggttggaacatgcgggccgcgcggtttttatggaaccttcgaatag

SEQ ID NO: 253651 - DNA, 432 bp, Artificial Sequence
  derived and/or modified sequence
atggccacagccacagagcagtgggtgctggtggagatggtgcaggccctgtatgaggccccagcctaccacctgatcctggagggcatcctgatcctgtggatcatccggctgctcttcagcaagacctacaagctgcaggagaggagtgacctgactgtgaaggagaaggaggagctgattgaggagtggcagcctgagcccctggtgccccctgtgcccaaggaccacccagccctgaactacaacatcgtgtctggcccccccagccacaagacagtggtgaatggcaaggagtgcatcaactttgccagcttcaacttcctgggcctgctggacaacccccgggtgaaggccgccgccctggccagcctgaagaagtatggagtgggcacctgtggcccccggggcttctacggcacctttgaatag

SEQ ID NO: 253652 - DNA, 432 bp, Artificial Sequence
  derived and/or modified sequence
atggccaccgccaccgagcagtgggtgctggtggagatggtgcaggcgctgtatgaggcaccggcctaccatcttatcttagaagggattctgatcctctggattatccggctgctcttcagtaaaacgtacaagctgcaagaacgatcagaccttactgtcaaggagaaagaggaacttatagaggagtggcagccagagcctttagtccctccagtccctaaggaccaccccgcacttaattataatatcgtgagtggccctccatcccataaaaccgtagtcaatggaaaggagtgcatcaatttcgcctcattcaacttcctgggattgctggataatcctcgggtcaaagcagccgctctggcgagtttgaaaaaatacggagtggggacatgcggacctcggggcttttacggaacctttgagtag

SEQ ID NO: 253653 - DNA, 432 bp, Artificial Sequence
  derived and/or modified sequence
atggctacagctaccgaacaatgggtcctagttgagatggtgcaggcgctgtacgaagctcccgcttatcaccttatcctcgaaggcatcctgatcctctggattattcgacttcttttcagtaaaacttataaattacaggagcgctcagacctgaccgtcaaggagaaggaggagctcatcgaggagtggcagcctgagcccttggtgccacccgtgccaaaggaccacccagcactgaattataacatcgtcagtgggcctccatcacacaagacagttgtgaatggcaaagagtgcatcaatttcgcgagcttcaattttctaggtcttctggataacccacgggtgaaagccgctgctcttgcaagcctcaagaagtacggtgttggtacgtgcggccctagaggattctatggcacctttgaatag

SEQ ID NO: 253654 - DNA, 946 bp, Artificial Sequence
  derived and/or modified sequence
gaagcggctaactatggcgaccgccacggagcagtgggttctggtggagatggtacaggcgctttacgaggctcctgcttaccatcttattttggaagggattctgatcctctggataatcagacttcttttctctaagacttacaaattacaagaacgatctgatcttacagtcaaggaaaaagaagaactgattgaagagtggcaaccagaacctcttgttcctcctgtcccaaaagaccatcctgctctcaactacaacatcgtttcaggccctccaagccacaaaactgtggtgaatggaaaagaatgtataaacttcgcctcatttaattttcttggattgttggataaccctagggttaaggcagcagctttagcatctctaaagaagtatggcgtggggacttgtggacccagaggattttatggcacatttgaatgaagatgaaggatcattgatttccttgtgtatggataatccgggaacaggccaactaaatatttgatgaatgtatgatttcaaatacagtgaattccctgggagtcatcaaagaagaccggcattttatggttgtttttattaagtgtatattctttgctcctgaaaatgttattaaataattgtttaggccgggcatggtggctcatgcctgtaatcccagcactttcaaaggctgaggcaggcagatcacctgaggtcaggagttcaaaaccagcctggccaacatgctgaaacctcgtctctactaaaaatacaaaaattagctgggcgtggtggtggatacctgtaatcccagctacgtgggaggctgaggtgggagaattgcttcaacctgggaggcagaggttgcagtgagccgagatcatgccactgcactccagcctgggcaacagagcaagactgtctcaaaaataaataaataaataaaattgtttaaatgaa

SEQ ID NO: 253655 - DNA, 432 bp, Artificial Sequence
  derived and/or modified sequence
atggccaccgccaccgagcagtgggtgctggtggagatggtgcaggccctgtacgaggcccccgcctaccacctgatcctggagggcatcctgatcctgtggatcatcagactgctgttcagcaagacctacaagctgcaggagagaagcgacctgaccgtgaaggagaaggaggagctgatcgaggagtggcagcccgagcccctggtgccccccgtgcccaaggaccaccccgccctgaactacaacatcgtgagcggcccccccagccacaagaccgtggtgaacggcaaggagtgcatcaacttcgccagcttcaacttcctgggcctgctggacaaccccagagtgaaggccgccgccctggccagcctgaagaagtacggcgtgggcacctgcggccccagaggcttctacggcaccttcgagtag

SEQ ID NO: 253656 - protein, 380 aa, Artificial Sequence
  derived and/or modified sequence
MDAATLTYDTLRFAEFEDFPETSEPVWILGRKYSIFTEKDEILSDVASRLWFTYRKNFPAIGGTGPTSDTGWGCMLRCGQMIFAQALVCRHLGRDWRWTQRKRQPDSYFSVLNAFIDRKDSYYSIHQIAQMGVGEGKSIGQWYGPNTVAQVLKKLAVFDTWSSLAVHIAMDNTVVMEEIRRLCRTSVPCAGATAFPADSDRHCNGFPAGAEVTNRPSPWRPLVLLIPLRLGLTDINEAYVETLKHCFMMPQSLGVIGGKPNSAHYFIGYVGEELIYLDPHTTQPAVEPTDGCFIPDESFHCQHPPCRMSIAELDPSIAVGFFCKTEDDFNDWCQQVKKLSLLGGALPMFELVELQPSHLACPDVLNLSLGESCQVQILLM

SEQ ID NO: 253657 - DNA, 1143 bp, Artificial Sequence
  derived and/or modified sequence
atggacgccgccaccctgacctacgacaccctgagattcgccgagttcgaggacttccccgagaccagcgagcccgtgtggatcctgggcagaaagtacagcatcttcaccgagaaggacgagatcctgagcgacgtggccagcagactgtggttcacctacagaaagaacttccccgccatcggcggcaccggccccaccagcgacaccggctggggctgcatgctgagatgcggccagatgatcttcgcccaggccctggtgtgcagacacctgggcagagactggagatggacccagagaaagagacagcccgacagctacttcagcgtgctgaacgccttcatcgacagaaaggacagctactacagcatccaccagatcgcccagatgggcgtgggcgagggcaagagcatcggccagtggtacggccccaacaccgtggcccaggtgctgaagaagctggccgtgttcgacacctggagcagcctggccgtgcacatcgccatggacaacaccgtggtgatggaggagatcagaagactgtgcagaaccagcgtgccctgcgccggcgccaccgccttccccgccgacagcgacagacactgcaacggcttccccgccggcgccgaggtgaccaacagacccagcccctggagacccctggtgctgctgatccccctgagactgggcctgaccgacatcaacgaggcctacgtggagaccctgaagcactgcttcatgatgccccagagcctgggcgtgatcggcggcaagcccaacagcgcccactacttcatcggctacgtgggcgaggagctgatctacctggacccccacaccacccagcccgccgtggagcccaccgacggctgcttcatccccgacgagagcttccactgccagcaccccccctgcagaatgagcatcgccgagctggaccccagcatcgccgtgggcttcttctgcaagaccgaggacgacttcaacgactggtgccagcaggtgaagaagctgagcctgctgggcggcgccctgcccatgttcgagctggtggagctgcagcccagccacctggcctgccccgacgtgctgaacctgagcctgggcgagagctgccaggtgcagatcctgctgatgtag

SEQ ID NO: 253658 - DNA, 1143 bp, Artificial Sequence
  derived and/or modified sequence
atggacgccgctactctcacgtacgacactctgaggttcgctgagttcgaggacttcccagaaacctctgaacctgtttggattttgggcaggaagtactctatcttcactgaaaaggacgagatcctctccgatgtggccagtaggttatggtttacttaccgcaagaattttccagccatcggcggcaccgggcccacatcagacacaggatggggctgtatgctgcggtgcggccagatgatttttgcacaggccctggtctgcaggcatcttggaagggattggaggtggactcaaaggaagaggcagccagactcttatttttcagttttgaacgctttcattgatagaaaagacagctactattcaatccatcagatcgcacagatgggagtgggagagggcaagtccatcggccaatggtacggcccaaataccgttgcccaggtcctcaaaaagctggctgtttttgacacctggtcaagtctcgctgtgcatatcgccatggacaacaccgtagttatggaagagatcagaaggctgtgccggacgtctgtaccttgcgcaggagctaccgccttcccagccgatagtgatcggcactgcaacggattccctgcgggagcagaggtgactaataggccctctccatggagacctctggtgcttctgattcctctgcgactcggtctaactgatattaacgaagcatacgtggagaccctaaagcactgcttcatgatgccgcaatcactcggtgttatcggggggaagccaaactcggcccattatttcatcgggtatgtcggggaagagctgatctaccttgatcctcatacaacacagcctgcagtcgagcccactgacgggtgtttcatccctgacgagtcttttcactgtcagcacccaccctgcaggatgtcaattgcagagctggatccatccattgccgtaggctttttttgtaaaacggaggacgactttaacgattggtgtcagcaagttaagaaactttccctcctgggtggcgctctacccatgtttgagctggtcgaattgcagccctctcacttagcttgtcccgacgtgcttaatctctctctcggggagagctgccaggtgcagatcctgttaatgtag

SEQ ID NO: 253659 - DNA, 1143 bp, Artificial Sequence
  derived and/or modified sequence
atggatgctgccaccctgacctatgacaccctgcgctttgctgagtttgaggacttccctgagaccagcgagcctgtgtggatcctgggcaggaagtacagcatcttcacagagaaggatgagatcctgagtgatgtggccagccggctgtggttcacctacaggaagaacttccctgccatcggcggcaccggccccaccagtgacaccggctggggctgcatgctgcgctgtggccagatgatctttgcccaggccctggtgtgccgccacctgggccgggactggcgctggacccagaggaagaggcagcctgacagctacttctctgtgctgaatgccttcatcgacaggaaggacagctactacagcatccaccagatcgcccagatgggcgtgggggagggcaagagcatcggccagtggtacggccccaacacagtggcccaggtgctgaagaagctggccgtgtttgacacctggagcagcctggccgtgcacatcgccatggacaacacagtggtgatggaggagatccggcggctgtgcaggacctctgtgccctgtgccggggccacagccttccctgctgacagcgacagacactgcaatggcttccctgctggagctgaggtgaccaaccggcccagcccctggaggcccctggtgctgctgatccccctgcggctgggcctgacagacatcaatgaggcctacgtggagaccctgaagcactgcttcatgatgccccagagcctgggcgtcatcggcggcaagcccaacagcgcccactacttcatcggctacgtgggggaggagctgatctacctggacccccacaccacccagcctgctgtggagcccacagatggctgcttcatcccagatgagagcttccactgccagcaccccccctgcaggatgagcattgctgagctggaccccagcattgctgtgggcttcttctgcaagacagaagatgacttcaatgactggtgccagcaggtgaagaagctgagcctgctgggcggggccctgcccatgtttgagctggtggagctgcagcccagccacctggcctgcccagatgtgctgaacctgagcctgggggagagctgccaggtgcagatcctgctgatgtag

SEQ ID NO: 253660 - DNA, 1143 bp, Artificial Sequence
  derived and/or modified sequence
atggacgccgccaccctgacctacgacaccctgcggttcgccgagtttgaggatttccctgagactagtgaacctgtgtggatcttgggcaggaagtactccattttcacagagaaggatgagatcctgagtgacgttgcatcccgcctgtggttcacgtaccgcaagaacttccccgccataggcggcacaggaccaacttccgacaccggttggggatgcatgctgcgatgcggccaaatgattttcgctcaggccctcgtttgtcggcatcttgggcgagactggcggtggactcagagaaagaggcagcctgactcatatttctcggtcctgaacgcgtttatcgacagaaaggatagctattactctatccaccagattgcccagatgggcgtgggggaaggtaagagcatcggccagtggtatggcccaaatacagtcgctcaagttctgaaaaagctggccgtgttcgacacatggagctcgttagccgttcatatagctatggacaacacagtggtgatggaagagattaggagactgtgtcggacatctgtgccctgtgctggcgccactgcattccccgctgactcggataggcactgtaacggattccccgccggcgcagaggttaccaaccggcctagtccatggagacccctggtgcttctaattcccctaaggcttggactgaccgacatcaacgaagcatatgtcgagacactgaagcactgtttcatgatgccacaatccctaggggttataggcgggaagcctaatagtgcgcactatttcattggctacgtgggcgaagagctaatctaccttgatccccatacgacccaaccggcggttgaacccaccgatggctgttttatcccagacgagagcttccactgccaacaccccccttgtagaatgagcattgcggaattagaccccagcatcgccgtcggatttttttgtaaaacagaggatgactttaatgattggtgccagcaagtgaagaagctgtcattattaggcggcgcacttcccatgttcgagctggtggaactgcagcccagtcatctggcttgcccggatgtgctgaacctgtctctgggcgagtcttgccaggtgcagatcctgttaatgtag

SEQ ID NO: 253661 - DNA, 3294 bp, Artificial Sequence
  derived and/or modified sequence
ctcgccagccgcgggttcgggcgtcttcggaccagcggggcgccgcaggcccctcgcagcgtccgtcggcaggcgggcagacgggcgggggagtcgccccggcggggcaagtccgtaccgcgacatgggcgcgccgagcacgtccgtaccgcaagatggctgctcggacggggacagagctcgcctctgccgcctcgacaactgctcctgggtcctctaagaggaggaagcgccacccatggcacacagtgtcccgtcggacagcagaaccagccgtcgtcccacgacacgaccccatgccgcccgcagggcgccccggggctcgcgtcggcccggccgtacgccaaaatggcggctcccgcgtatttccgctcgcgcgccgtatcgtcttcgccgcctgcgccggcacacctattggcccccgcggcgtcccgtcgccgcgtcgcgttgctggcccgtcggagcgacgccgctcgggtcagtcggcggccggactgggaagatggacgcagctactctgacctacgacactctccggtttgctgagtttgaagattttcctgagacctcagagcccgtttggatactgggtagaaaatacagcattttcacagaaaaggacgagatcttgtctgatgtggcatctagactttggtttacatacaggaaaaactttccagccattggggggacaggccccacctcggacacaggctggggctgcatgctgcggtgtggacagatgatctttgcccaagccctggtgtgccggcacctaggccgagattggaggtggacacaaaggaagaggcagccagacagctacttcagcgtcctcaacgcattcatcgacaggaaggacagttactactccattcaccagatagcgcaaatgggagttggcgaaggcaagtccataggccagtggtacgggcccaacactgtcgcccaggtcctgaagaagcttgctgtcttcgatacgtggagctccttggcggtccacattgcaatggacaacactgttgtgatggaggaaatcagaaggttgtgcaggaccagcgttccctgtgcaggcgccactgcgtttcctgcagattccgaccggcactgcaacggattccctgccggagctgaggtcaccaacaggccgtcgccatggagacccctggtacttctcattcccctgcgcctggggctcacggacatcaacgaggcctacgtggagacgctgaagcactgcttcatgatgccccagtccctgggcgtcatcggagggaagcccaacagcgcccactacttcatcggctacgttggtgaggagctcatctacctggacccccacaccacgcagccagccgtggagcccactgatggctgcttcatcccggacgagagcttccactgccagcacccgccgtgccgcatgagcatcgcggagcttgacccgtccatcgctgtggggtttttctgtaagactgaagatgacttcaatgattggtgccagcaagtcaaaaagctgtctctgcttggaggtgccctgcccatgtttgagctggtggagctgcagccttcacatctggcctgccccgacgtcctgaacctgtccctaggtgagagctgccaagtccagattcttctgatgtagagcgactggaaagattcttcgactcagaagatgaagactttgaaatcctgtccctttgaaaatcctggggtcgggggtggcacctgtgagagcctggggctcctggtgccgctgcgtttcatccatcccgcccgctcgcctgccgagggctgcgccccgtgctgcctccccccagagggccacccgctgtgctcgtggactgaggctgcgctgcccgggaggccttactgcttggtgtcagactgcccagctcagagtgcccgtcagggcctgtgcatccgcacgcggagccgtctgttaggagcttccagagtgttctctcgacactgccagccccgtgttagcacctgggcctcagtcccacttgctcccaggcgccggttctgtggttggtttggaattaaagtcctgtttgaagttgtcagacacagacatgaatttctgggcgctccctgagtcagagtctcagaagacctgtgcaggctggcgtgagaggagcggcagccacactgcggccccacgcccaaggactgggctgctctcgaggggggcgcgcccaccgctgtgtcctctctgcccagcctggcttaccaagggctacctcagtgggagatgaggttggaggaacgaaggcgaggttcctccttgctttggggagaaaagtattcaggaagtgggtgtgtgggaaacctgaagatggcgtgcacaggacacagcgtgggcggcctgggcagaagggcggctggctgtcctggagctgctgctggagcctgccctcagagtgtccctttccagtgctgtggcattctgtggcagcttccccaggtgtggtgacggggggggggcggggcctccacctgtgacagccaggcttgagggtggacggcgtgcctctcccaggagccttccccatgtccttgccttgctgagaattgccctcccatgccgctgaggtgttaggtggtttagggccaaaaggggaaaaccacttgagtcttgtggtgtgtggtgggcagacaccacagggtggcatcacctggtggcatttccagaacctcagccccgattccagcacccaccaccgcctgaccctgtgtaacctgctgtcccgggtcccagagtgcactctgccccgctgctctgctgcctgtcctgggaaagtatctttgccccactaggaaatgtaaacaggagggcttggggagcgtgggcacttttctcatgagcagctactgcggcgttggcaggactcgctgctgctgctgctgcttgtgtaggtcggggagccagagatccccgaggacgcgcgccggacagtcggcactgaccggcccacctggtagcagaggacacccccagccccccaagcattgaagacatagtgtatttcctcgtatcctttctcccttgggtgtagttggggtggggaagcagggaaggctggtgcgatctccattccttgggctccacgtccgagttcatggtgcgccgctgtgctgggagctgcagtggtaatgtgtgggacaccttgaccaaaggggagctttgtctcgtgtgttttgaaaaaggcttaatgaagagaatgttgttcattcttagtagtatagtttgcaattcttaatggcaaataataagtttcagtagaaaac

SEQ ID NO: 253662 - DNA, 553 bp, Artificial Sequence
  derived and/or modified sequence
agtcggcggccggactgggaagatggacgcagtaaccagtagattctccaagctgcttttccgtgacgagaaagagaaacagtgaatttgtatcatcgggtcttagtttcttggggtcctaagagagagagaaagagaaggactactctgacctacgacactctccggtttgctgagtttgaagattttcctgagacctcagagcccgtttggatactgggtagaaaatacagcattttcacagaaaaggacgagatcttgtctgatgtggcatctagactttggtttacatacaggaaaaactttccagccattggggggacaggccccacctcggacacaggctggggctgcatgctgcggtgtggacagatgatctttgcccaagccctggtgtgccggcacctaggccgagattggaggtggacacaaaggaagaggcagccagacagctacttcagcgtcctcaacgcattcatcgacaggaaggacagttactactccattcaccagatagcgcaaatgggagttggcgaaggcaagtccataggcc

SEQ ID NO: 253663 - DNA, 1143 bp, Artificial Sequence
  derived and/or modified sequence
atggacgccgcaactttgacttatgataccttaaggttcgcagaattcgaggactttccagagacaagcgaacctgtgtggattctcggacgtaaatattcaatatttacggaaaaagacgagatcttgagtgatgtggcatctaggttatggtttacctacagaaaaaattttcccgctatcgggggaacaggccctactagcgacacaggttgggggtgcatgcttagatgcggacagatgatctttgctcaggctttggtttgcagacatcttggcagggattggcgttggacccagaggaagcgacagccggacagttatttttccgtccttaacgcctttatagataggaaggactcatactatagcatacatcagattgcccagatgggggtgggcgagggcaaaagtatcggccaatggtatggtccgaacactgtcgcccaggtgctaaagaagctcgcggtatttgacacctggtcatctttagctgtccacattgcaatggataatacagtagtgatggaggagatccgacgattgtgcaggacctccgttccatgcgcgggtgccacagcctttcccgctgacagcgaccggcattgcaatgggtttcccgcaggggctgaggtgacaaatcgaccctccccatggagacccctcgtgctgctgattccactgagacttgggcttactgatataaatgaggcgtatgtggagacattgaaacactgcttcatgatgccccagtctctgggtgtcatcggaggaaagccaaatagcgcccattattttattggatacgtcggggaagagctgatttacttggaccctcacacgactcagccggctgtcgaacccactgacggctgcttcatccccgacgagtcattccactgtcagcaccccccttgccgcatgtcgatagcagaattagatccttcaattgcggtgggctttttctgtaaaaccgaagacgattttaacgactggtgtcaacaggttaaaaagctgagtttattagggggagcactccccatgttcgagctggtggaacttcagccctcccacctggcctgccctgatgtactgaacctcagtctgggcgaatcttgccaggtccagatcttgttaatgtag

SEQ ID NO: 253664 - DNA, 524 bp, Artificial Sequence
  derived and/or modified sequence
gggccatctggccatgagcacttctctctctgtctgccacgacaggggggacaggccccacctcggacacaggctggggctgcatgctgcggtgtggacagatgatctttgcccaagccctggtgtgccggcacctaggccgagattggaggtggacacaaaggaagaggcagccagacagctacttcagcgtcctcaacgcattcatcgacaggaaggacagttactactccattcaccagatagcgcaaatgggagttggcgaaggcaagtccataggccagtggtacgggcccaacactgtcgcccaggtcctgaagaagcttgctgtcttcgatacgtggagctccttggcggtccacattgcaatggacaacactgttgtgatggaggaaatcagaaggttgtgcaggaccagcgttccctgtgcaggcgccactgcgtttcctgcagattccgaccggcactgcaacggattccctgccggagctgaggtcaccaacaggccgtcgccatggagaccc

SEQ ID NO: 253665 - DNA, 623 bp, Artificial Sequence
  derived and/or modified sequence
ggagttgccgggggtcggtctttccgcaggagctactctgacctacgacactctccggtttgctgagtttgaagattttcctgagacctcagagcccgtttggatactgggtagaaaatacagcattttcacagaaaaggacgagatcttgtctgatgtggcatctagactttggtttacatacaggaaaaactttccagccattggaggttgtcgggacatttcactctccagtaaatgtggcccttggcgttactgagtcctaagaggggggacaggccccacctcggacacaggctggggctgcatgctgcggtgtggacagatgatctttgcccaagccctggtgtgccggcacctaggccgagattggaggtggacacaaaggaagaggcagccagacagctacttcagcgtcctcaacgcattcatcgacaggaaggacagttactactccattcaccagatagcgcaaatgggagttggcgaaggcaagtccataggccagtggtacgggcccaacactgtcgcccaggtcctgaagaagcttgctgtcttcgatacgtggagctccttggcggtccacattgcaatggacaacactgttgtgatggaggaaatca

SEQ ID NO: 253666 - protein, 376 aa, Artificial Sequence
  derived and/or modified sequence
MPFGIRMLLRAHKPGSSRRSEMTTSLDTVETFGTTSYYDDVGLLCEKADTRALMAQFVPPLYSLVFTVGLLGNVVVVMILIKYRRLRIMTNIYLLNLAISDLLFLVTLPFWIHYVRGHNWVFGHGMCKLLSGFYHTGLYSEIFFIILLTIDRYLAIVHAVFALRARTVTFGVITSIVTWGLAVLAALPEFIFYETEELFEETLCSALYPEDTVYSWRHFHTLRMTIFCLVLPLLVMAICYTGIIKTLLRCPSKKKYKAIRLIFVIMAVFFIFWTPYNVAILLSSYQSILFGNDCERSKHLDLVMLVTEVIAYSHCCMNPVIYAFVGERFRKYLRHFFHRHLLMHLGRYIPFLPSEKLERTSSVSPSTAEPELSIVF

SEQ ID NO: 253667 - DNA, 66 bp, Artificial Sequence
  derived and/or modified sequence
atgaccacaagcttggatacagtggaaacgttcggcactacaagctactacgacgacgtcggctag

SEQ ID NO: 253668 - DNA, 1131 bp, Artificial Sequence
  derived and/or modified sequence
atgccgtttgggatcaggatgttgttgcgggcccataaacccggatcctcccgacgaagtgagatgactacatctctggacaccgtcgaaaccttcggcactaccagctactacgacgacgtcggcctgctgtgcgaaaaggctgacacacgagccctgatggcccagttcgtacccccactgtatagcctcgtatttacagtagggctcctggggaacgtggttgtggtgatgattctcattaaatatcgacgcctgcgaattatgaccaacatttacctgcttaacctcgcgatctctgaccttctctttttggtgacactgccattttggattcattacgtgagaggacataactgggtattcgggcacggcatgtgcaagctcctgagtggattttatcacactggcttgtactcagagatattttttataatcctcttgactattgaccgctacctggctattgtccacgccgtatttgccctgcgggctcgcaccgtcaccttcggagtaatcacctccattgttacctggggcttggcagttctggctgctttgccagaatttatcttttacgaaacagaggagctgtttgaagaaacactgtgctcggccttgtatccggaagacacagtgtactcctggcgtcacttccataccctcaggatgactatcttctgtctagtcctccctttgctggtgatggcaatttgctacacagggattattaaaacgctcctcaggtgtccttccaaaaagaagtacaaggcaatcagactgatctttgtgataatggccgtgttttttatcttctggactccatataacgttgctatcctgctctcatcctaccagagtatcctctttggcaatgattgcgaaaggtccaagcatctggacttggttatgcttgtgacagaggtgattgcctactctcactgttgcatgaatccagtgatctatgccttcgtgggtgagagattcagaaaatacctcaggcatttctttcaccggcacctgttaatgcatctgggtcggtacatccccttcctgccgagtgagaaacttgagaggacgtcgtctgtgtctccaagcactgctgagccagaactgtctatcgtgttctag

SEQ ID NO: 253669 - DNA, 66 bp, Artificial Sequence
  derived and/or modified sequence
atgaccaccagcctggacacagtggagaccttcggcaccaccagctactatgatgatgtgggctag

SEQ ID NO: 253670 - DNA, 1131 bp, Artificial Sequence
  derived and/or modified sequence
atgcccttcggcatccgcatgctgctgcgggcccacaagccaggcagcagccgccgctctgagatgaccaccagcctggacacagtggagaccttcggcaccaccagctactatgatgatgtgggcctgctgtgtgagaaggctgacacccgggccctgatggcccagtttgtgccccccctgtacagcctggtgttcaccgtgggcctgctgggcaatgtggtggtggtgatgatcctgatcaagtaccgccgcctgcgcatcatgaccaacatctacctgctgaacctggccatcagtgacctgctcttcctggtgaccctgcccttctggatccactacgtgcggggccacaactgggtgtttggccacggcatgtgcaagctgctgagcggcttctaccacacaggcctgtacagcgagatcttcttcatcatcctgctgaccatcgaccgctacctggccatcgtgcatgctgtgtttgccctgcgggccaggacagtgaccttcggggtcatcaccagcatcgtgacctggggcctggccgtgctggccgccctgcctgagttcatcttctatgaaacagaggagctgtttgaggagaccctgtgcagcgccctgtacccagaggacacagtgtacagctggaggcacttccacaccctgaggatgaccatcttctgcctggtgctgcccctgctggtgatggccatctgctacacaggcatcatcaagaccctgctgcgctgccccagcaagaagaagtacaaggccatccgcctcatctttgtgatcatggctgtgttcttcatcttctggaccccctacaacgtggccatcctgctgagcagctaccagagcatcctgtttggaaatgactgtgagaggagcaagcacctggacctggtgatgctggtgacagaggtgattgcctacagccactgctgcatgaaccctgtgatctatgcctttgtgggggagcgcttcaggaagtacctgcggcacttcttccaccgccacctgctgatgcacctgggccgctacatccccttcctgcccagcgagaagctggagaggaccagctctgtgagccccagcacagctgagcctgagctgagcatcgtgttctag

SEQ ID NO: 253671 - DNA, 66 bp, Artificial Sequence
  derived and/or modified sequence
atgaccaccagcctggacaccgtggagaccttcggcaccaccagctactatgacgacgttggatag

SEQ ID NO: 253672 - DNA, 1131 bp, Artificial Sequence
  derived and/or modified sequence
atgcccttcggcatccggatgctgctgcgggcccacaagcccggcagtagccgcaggtccgagatgactacaagtctggataccgtcgagacgtttgggacaacctcctactacgacgatgtaggtctgctgtgtgagaaggctgatacccgggccctaatggctcagtttgtgccacccttgtatagcttagtgtttacagtgggtctcttgggcaacgtggtggtggtaatgattctgattaagtaccggagacttcgcattatgaccaatatttacctgctcaatctggccattagtgacctccttttcctggttacgctgcccttctggatccattatgtgaggggccacaactgggtttttggacacggcatgtgcaagctgttgtctgggttttaccataccgggctctatagtgagatttttttcattattctcctgaccattgaccggtatctggcaattgtacatgcggtattcgccttgcgtgctagaacggttacttttggagtaatcacctccattgtgacatggggattggctgttctggctgcacttccggaattcatcttttatgagactgaagaactcttcgaggagactctgtgcagcgcgctgtaccctgaagatacagtctatagttggcggcacttccataccctgcggatgaccatattttgtctcgtgcttcctctattggtgatggccatttgttacactggcatcatcaaaactctactccgttgtccatccaagaaaaagtataaggcaatccggctgattttcgttattatggcggtgttctttatcttttggacaccatataatgttgctatactgctgtcatcctaccaatctatactgttcggcaacgactgcgagaggagtaaacacctggacttagtgatgttagttaccgaagtgatcgcttattctcattgttgtatgaaccctgtgatctacgcttttgtcggagaaagattccgcaagtatctccggcatttttttcacaggcacctgcttatgcacctgggccggtacattccatttttgccaagtgagaagctggagaggacttcttctgtgtcaccttcaactgccgaaccagagttgtccattgtgttttag

SEQ ID NO: 253673 - DNA, 66 bp, Artificial Sequence
  derived and/or modified sequence
atgacaacatccctggacaccgtcgagaccttcgggaccacaagctattacgacgatgtcggatag

SEQ ID NO: 253674 - DNA, 1131 bp, Artificial Sequence
  derived and/or modified sequence
atgcccttcggaatcagaatgctgctcagggctcataagcctggctccagtagacgcagcgagatgactacatctttagacacagttgagacgttcggcaccacctcctactacgacgacgtcgggctgctctgtgaaaaggcagacacccgagctctgatggcccaattcgtaccacccctgtattccctggtgttcaccgtgggcctcctaggcaacgtggtggtcgttatgatacttattaagtatcggcgtttgcgtattatgaccaatatttaccttctgaaccttgccatttctgacctgctctttttggtgactttacccttctggattcattacgtgcgcggacacaattgggtctttggccacggcatgtgcaaattgctctcaggtttctaccataccggtctctacagtgagattttcttcattattttactgactattgacagatatctggcaatagtgcacgcggtttttgcgctgagagcccgtaccgtgacttttggggtcatcacatcaatcgtcacatggggtctggctgtcttagcagccctacctgaattcatcttctacgaaacagaggaattattcgaggagacgctgtgtagcgctctctacccagaagatactgtgtatagctggcgacacttccacacactgaggatgactattttctgcctggtcctcccactgctcgtcatggctatttgttacactggcatcatcaaaaccctgctcagatgcccttctaaaaaaaaatataaagctatccgactgatattcgtgattatggccgtgttcttcatcttctggaccccttacaatgtcgcaatacttctctccagttaccagtctatcctgttcgggaacgattgcgaacgctccaaacacctcgacctggtgatgctggtcactgaagtgatcgcctattcacattgctgcatgaaccctgtgatttacgcgtttgtgggggagagatttcgcaagtatttgaggcatttctttcatagacacctgctgatgcatttgggcagatatatcccctttctcccatctgaaaaactcgagaggacttcgagcgtcagcccttcaacggctgagcccgagctctctatcgtcttctag

SEQ ID NO: 253675 - DNA, 400 bp, Artificial Sequence
  derived and/or modified sequence
accactggtcttcttgtgcttatccgggcaagaacttatcgaaatacaatagaagtttttacttagaagagattttcagctgctgtggattggattatgccatttggaataagaatgctgttaagagcacacaagccaggttcctcaaggagaagtgaaatgacaacctcactagatacagttgagacctttggtaccacatcctactatgatgacgtgggcctgctctgtgaaaaagctgataccagagcactgatggcccagtttgtgcccccgctgtactccctggtgttcactgtgggcctcttgggcaatgtggtggtggtgatgatcctcataaaatacaggaggctccgaattatgaccaacatctacctgctcaacctggccatttcggacc

SEQ ID NO: 253676 - DNA, 1786 bp, Artificial Sequence
  derived and/or modified sequence
ctgatggtatctctgtttcaggagtggtgacgcctaagctatcactggacatatcaaggacttcactaaattagcaggtaccactggtcttcttgtgcttatccgggcaagaacttatcgaaatacaatagaagtttttacttagaagagattttcagctgctgtggattggattatgccatttggaataagaatgctgttaagagcacacaagccaggttcctcaaggagaagtgaaatgacaacctcactagatacagttgagacctttggtaccacatcctactatgatgacgtgggcctgctctgtgaaaaagctgataccagagcactgatggcccagtttgtgcccccgctgtactccctggtgttcactgtgggcctcttgggcaatgtggtggtggtgatgatcctcataaaatacaggaggctccgaattatgaccaacatctacctgctcaacctggccatttcggacctgctcttcctcgtcacccttccattctggatccactatgtcagggggcataactgggtttttggccatggcatgtgtaagctcctctcagggttttatcacacaggcttgtacagcgagatctttttcataatcctgctgacaatcgacaggtacctggccattgtccatgctgtgtttgcccttcgagcccggactgtcacttttggtgtcatcaccagcatcgtcacctggggcctggcagtgctagcagctcttcctgaatttatcttctatgagactgaagagttgtttgaagagactctttgcagtgctctttacccagaggatacagtatatagctggaggcatttccacactctgagaatgaccatcttctgtctcgttctccctctgctcgttatggccatctgctacacaggaatcatcaaaacgctgctgaggtgccccagtaaaaaaaagtacaaggccatccggctcatttttgtcatcatggcggtgtttttcattttctggacaccctacaatgtggctatccttctctcttcctatcaatccatcttatttggaaatgactgtgagcggagcaagcatctggacctggtcatgctggtgacagaggtgatcgcctactcccactgctgcatgaacccggtgatctacgcctttgttggagagaggttccggaagtacctgcgccacttcttccacaggcacttgctcatgcacctgggcagatacatcccattccttcctagtgagaagctggaaagaaccagctctgtctctccatccacagcagagccggaactctctattgtgttttaggtcagatgcagaaaattgcctaaagaggaaggaccaaggagatgaagcaaacacattaagccttccacactcacctctaaaacagtccttcaaacttccagtgcaacactgaagctcttgaagacactgaaatatacacacagcagtagcagtagatgcatgtaccctaaggtcattaccacaggccaggggctgggcagcgtactcatcatcaaccctaaaaagcagagctttgcttctctctctaaaatgagttacctacattttaatgcacctgaatgttagatagttactatatgccgctacaaaaaggtaaaactttttatattttatacattaacttcagccagctattgatataaataaaacattttcacacaatacaataagttaactattttattttctaatgtgcctagttctttccctgcttaatgaaaagcttgttttttcagtgtgaataaataatcgtaagcaaca

SEQ ID NO: 253677 - DNA, 66 bp, Artificial Sequence
  derived and/or modified sequence
atgaccaccagcctggacaccgtggagaccttcggcaccaccagctactacgacgacgtgggctag

SEQ ID NO: 253678 - DNA, 1131 bp, Artificial Sequence
  derived and/or modified sequence
atgcccttcggcatcagaatgctgctgagagcccacaagcccggcagcagcagaagaagcgagatgaccaccagcctggacaccgtggagaccttcggcaccaccagctactacgacgacgtgggcctgctgtgcgagaaggccgacaccagagccctgatggcccagttcgtgccccccctgtacagcctggtgttcaccgtgggcctgctgggcaacgtggtggtggtgatgatcctgatcaagtacagaagactgagaatcatgaccaacatctacctgctgaacctggccatcagcgacctgctgttcctggtgaccctgcccttctggatccactacgtgagaggccacaactgggtgttcggccacggcatgtgcaagctgctgagcggcttctaccacaccggcctgtacagcgagatcttcttcatcatcctgctgaccatcgacagatacctggccatcgtgcacgccgtgttcgccctgagagccagaaccgtgaccttcggcgtgatcaccagcatcgtgacctggggcctggccgtgctggccgccctgcccgagttcatcttctacgagaccgaggagctgttcgaggagaccctgtgcagcgccctgtaccccgaggacaccgtgtacagctggagacacttccacaccctgagaatgaccatcttctgcctggtgctgcccctgctggtgatggccatctgctacaccggcatcatcaagaccctgctgagatgccccagcaagaagaagtacaaggccatcagactgatcttcgtgatcatggccgtgttcttcatcttctggaccccctacaacgtggccatcctgctgagcagctaccagagcatcctgttcggcaacgactgcgagagaagcaagcacctggacctggtgatgctggtgaccgaggtgatcgcctacagccactgctgcatgaaccccgtgatctacgccttcgtgggcgagagattcagaaagtacctgagacacttcttccacagacacctgctgatgcacctgggcagatacatccccttcctgcccagcgagaagctggagagaaccagcagcgtgagccccagcaccgccgagcccgagctgagcatcgtgttctag

SEQ ID NO: 253679 - DNA, 342 bp, Artificial Sequence
  derived and/or modified sequence
atggcttctagtcgcaggggtttgctgctcctgttgcttctgaccgctcatttgggaccttcagaagcccagcactggagccatggctggtacccgggcggcaaaagggcattgagcagcgcccaagacccccagaacgccttacgtccccccgccgggagtccagtgcaaacagcacatggcctgccctctgacgccctggcccctcttgatgatagcatgccctgggaagggaggaccactgcacagtggtcattgcaccgcaaaaggcacctggccaggaccttgcttacagccgccagggagccacgacctgctccgcccagcagcaacaaagtctag

SEQ ID NO: 253680 - DNA, 342 bp, Artificial Sequence
  derived and/or modified sequence
atggccagttctaggcggggtttgctcctacttttgctactgaccgcacacctaggcccctccgaagctcagcattggagtcatggctggtatcccggtggcaaaagggccctgtcctccgcccaggaccctcaaaatgcactgaggccacccgccgggtcccccgtgcagaccgcccacggactgcctagtgatgcactggccccactggatgattctatgccttgggagggacggacaaccgcccagtggagcttgcaccgtaaacgtcatcttgcaagaactttgctgaccgctgccagagagcctcgccctgcccccccctccagcaataaagtttag

SEQ ID NO: 253681 - DNA, 404 bp, Artificial Sequence
  derived and/or modified sequence
ctgcagctgcctgaaggagccatctcatccacagctcttccttgagcagccatggccagctccaggcgaggcctcctgctcctgctgctgctgactgcccaccttggaccctcagaggctcagcactggtcccatggctggtaccctggaggaaagcgagccctcagctcagcccaggatccccagaatgcccttaggcccccagcaggcagcccagtccagactgcccatggcctcccaagtgatgccctggctcccctggacgacagcatgccctgggagggcaggaccacggcccagtggtcccttcacaggaagcgacacctggcacggacactgctgaccgcagcccgagagccccgccccgccccgccatcctccaataaagtgtgaggttctccgaa

SEQ ID NO: 253682 - DNA, 342 bp, Artificial Sequence
  derived and/or modified sequence
atggccagcagcagaagaggcctgctgctgctgctgctgctgacagcccacctgggccccagcgaggcccagcactggagccacggctggtacccaggcggcaagagggccctgagcagcgcccaggacccccagaatgccctgcggcccccagctggcagccctgtgcagacagcccacggcctgcccagtgatgccctggcccccctggatgacagcatgccctgggagggccgcaccacagcccagtggagcctgcacaggaagaggcacctggcccggaccctgctgacagctgcccgggagcccaggcctgccccacccagcagcaacaaggtgtag

SEQ ID NO: 253683 - DNA, 342 bp, Artificial Sequence
  derived and/or modified sequence
atggccagcagccggcggggcctgctgctgctgctgctgctgaccgctcacctaggcccaagcgaagctcagcactggagccatggatggtatcctggaggtaaacgcgccctgagctctgcccaggatccccagaatgcccttagacccccggctggctcacccgtgcagactgctcatgggctgcccagtgacgccttagcccctctagatgactccatgccatgggaggggagaaccacagctcaatggtctctgcataggaaacgccacttggccaggacgctactcactgcagcacgcgagcctcgccccgctcctccctccagtaacaaggtttag

SEQ ID NO: 253684 - DNA, 342 bp, Artificial Sequence
  derived and/or modified sequence
atggccagcagccggcggggcctgctgctgctgctgctgctgaccgcacatctggggccctcagaggctcaacattggtctcacggatggtatcctggcggaaaacgcgcactttcctcggcacaagaccctcaaaatgcgctccgcccacccgcgggatctccggtccagactgctcatggcttgcctagcgatgccttggctccattggacgattcaatgccctgggaaggacggacaacagctcaatggagtcttcataggaaaagacacctcgctagaactctactgaccgctgctcgggagccaaggcctgcccctcccagctcaaacaaggtgtag

SEQ ID NO: 253685 - DNA, 342 bp, Artificial Sequence
  derived and/or modified sequence
atggcaagtagccggagggggcttttgttgttactgctgctgacagctcacctggggcctagtgaagcacagcattggagtcacggatggtatcctggcggtaagcgtgcactgagtagcgcccaggacccccagaacgcgcttaggccgccagcaggttctccagttcagactgcccacggacttccctccgatgctctcgctccccttgacgactctatgccatgggagggccgtactactgcacaatggtccctgcacaggaaacggcacttagccaggactttgcttaccgccgcaagggagcctcgcccagcccctccctccagtaacaaagtgtag

SEQ ID NO: 253686 - DNA, 342 bp, Artificial Sequence
  derived and/or modified sequence
atggccagctcgaggcggggacttctcctcctgctattactgacagcccatctgggtccatcggaagcacagcactggtcccatggctggtatcccggagggaagagggcgctttccagcgctcaggaccctcaaaacgcgctgcggccacccgcaggaagtccagtgcaaactgcccatggcctcccatcagatgccctggctccgctggatgatagtatgccctgggaaggccgaaccactgcccaatggtctttacaccgcaagaggcacctggccaggaccctgctgaccgcagcgcgagaaccacgtccagcacctccatcaagcaacaaggtgtag

SEQ ID NO: 253687 - DNA, 342 bp, Artificial Sequence
  derived and/or modified sequence
atggccagcagcagaagaggcctgctgctgctgctgctgctgaccgcccacctgggccccagcgaggcccagcactggagccacggctggtaccccggcggcaagagagccctgagcagcgcccaggacccccagaacgccctgagaccccccgccggcagccccgtgcagaccgcccacggcctgcccagcgacgccctggcccccctggacgacagcatgccctgggagggcagaaccaccgcccagtggagcctgcacagaaagagacacctggccagaaccctgctgaccgccgccagagagcccagacccgccccccccagcagcaacaaggtgtag

SEQ ID NO: 253688 - protein, 112 aa, Artificial Sequence
  derived and/or modified sequence
MASSRRGLLLLLLLTAHLGPSEAQHWSHGWYPGGKRALSSAQDPQNALRPPGSPVQTAHGLPSDALAPLDDSMPWEGRTTAQWSLHRKRHLARTLLTAAREPRPAPPSSNKV

SEQ ID NO: 253689 - DNA, 339 bp, Artificial Sequence
  derived and/or modified sequence
atggcaagcagccgtagagggttactcctgctcttgcttctcaccgcccaccttgggcctagcgaggcacagcactggagccatgggtggtacccgggcggcaagagggccctctcctcagcccaggatccacaaaatgcactaagaccccctggctcccctgttcagactgctcatggcttgccctctgatgcattggccccgctggacgattctatgccttgggagggtagaactactgcgcagtggagcctccatcgcaaacggcacctggccaggacactactcacggctgcccgggagccgaggcctgcgccgccatcctctaacaaagtttag

SEQ ID NO: 253690 - DNA, 339 bp, Artificial Sequence
  derived and/or modified sequence
atggccagtagtagacgaggactgctgctgctgcttttgctgactgcacatctcgggccttccgaggcgcagcactggtcacatggctggtatcctggcggcaagagagctctatcttcagcccaggacccacaaaacgctttaagacctcctgggtccccggttcagacagcacacggcctgccttccgatgccctcgcacccctcgacgatagcatgccttgggagggaaggactaccgcacagtggagcctgcaccgaaagcgacatctggcccgcacacttcttacagctgcccgtgagccgcgcccagccccaccttcgagtaataaggtttag

SEQ ID NO: 253691 - DNA, 399 bp, Artificial Sequence
  derived and/or modified sequence
ctgcagctgcctgaaggagccatctcatccacagctcttccttgagcagccatggccagctccaggcgaggcctcctgctcctgctgctgctgactgcccaccttggaccctcagaggctcagcactggtcccatggctggtaccctggaggaaagcgagccctcagctcagcccaggatccccagaatgcccttaggcccccaggcagcccagtccagactgcccatggcctcccaagtgatgccctggctcccctggacgacagcatgccctgggagggcaggaccacggcccagtggtcccttcacaggaagcgacacctggcacggacactgctgaccgcagcccgagagccccgccccgccccgccatcctccaataaagtgtgaggttctccg

SEQ ID NO: 253692 - DNA, 353 bp, Artificial Sequence
  derived and/or modified sequence
gccatggccagctccaggcgaggcctcctgctcctgctgctgctgactgcccaccttggaccctcagaggctcagcactggtcccatggctggtaccctggaggaaagcgagccctcagctcagcccaggatccccagaatgcccttaggcccccaggcagcccagtccagactgcccatggcctcccaagtgatgccctggctcccctggacgacagcatgccctgggagggcaggaccacggcccagtggtcccttcacaggaagcgacacctggcacggacactgctgaccgcagcccgagagccccgccccgccccgccatcctccaataaagtgtgaggttctccgaa

SEQ ID NO: 253693 - DNA, 339 bp, Artificial Sequence
  derived and/or modified sequence
atggccagcagcagaagaggcctgctgctgctgctgctgctgacagcccacctgggccccagcgaggcccagcactggagccacggctggtacccaggcggcaagagggccctgagcagcgcccaggacccccagaatgccctgcggcccccaggcagccctgtgcagacagcccacggcctgcccagtgatgccctggcccccctggatgacagcatgccctgggagggccgcaccacagcccagtggagcctgcacaggaagaggcacctggcccggaccctgctgacagctgcccgggagcccaggcctgccccacccagcagcaacaaggtgtag

SEQ ID NO: 253694 - DNA, 339 bp, Artificial Sequence
  derived and/or modified sequence
atggccagcagccggcggggcctgctgctgctgctgctgctgaccgcacatctgggccccagtgaagcccaacactggtctcacgggtggtaccccggagggaaacgcgctttgtcctccgctcaggacccacagaatgctctcagacctcctggtagtccggtccaaaccgctcacggtctcccgagcgatgccctcgcaccgctggatgacagtatgccctgggaggggcggaccaccgcacagtggtccctgcaccggaaaagacatctggcccggactctgctgactgctgcccgagagccaaggcccgcccctccatcttctaataaagtgtag

SEQ ID NO: 253695 - DNA, 339 bp, Artificial Sequence
  derived and/or modified sequence
atggccagcagccggcggggcctgctgctgctgctgctgctgaccgcacacctcggtccatctgaggcacagcattggagtcatggctggtatcccggtggcaaacgggcattatctagcgcacaagatccacaaaatgcactacgccctccggggtctccggtgcaaaccgcacacggcctgccgtcagacgcgctggccccgctggacgattccatgccatgggagggtagaaccaccgctcaatggagtctgcatagaaagcgccatttagcgaggactcttctgactgcagcccgcgagccgcggccagcgccaccttcctccaataaagtgtag

SEQ ID NO: 253696 - DNA, 339 bp, Artificial Sequence
  derived and/or modified sequence
atggccagttccaggcgcggtcttctgctactccttctcctgacagcccatctcggcccatcagaagcccagcactggagccacgggtggtaccccggaggaaaaagggccttgagctcagctcaggaccctcagaacgccctgcgcccaccaggcagcccagtgcagacggctcatggtctcccctccgacgccttagcccctctggacgattccatgccgtgggagggcagaactaccgcccagtggtcacttcatcgtaaaagacatctcgccaggaccctcctaaccgccgcacgcgaacccagacctgcccctcccagctcgaataaagtctag

SEQ ID NO: 253697 - DNA, 339 bp, Artificial Sequence
  derived and/or modified sequence
atggccagcagcagacgtggcttgctgctactgctgctgttgactgctcatctggggccatctgaggcacagcattggtctcatgggtggtaccctggcggtaaaagagcactgtccagcgctcaagatccccagaacgccctccgcccaccagggtcacctgttcagaccgcgcacggccttccttcagatgctttagcaccattggatgactcaatgccctgggaaggcagaacaactgctcaatggagccttcataggaaacgccatctggcaagaacgcttctaacagccgcacgcgagcctaggccagctcccccatcttcaaataaagtgtag

SEQ ID NO: 253698 - DNA, 339 bp, Artificial Sequence
  derived and/or modified sequence
atggccagcagcagaagaggcctgctgctgctgctgctgctgaccgcccacctgggccccagcgaggcccagcactggagccacggctggtaccccggcggcaagagagccctgagcagcgcccaggacccccagaacgccctgagaccccccggcagccccgtgcagaccgcccacggcctgcccagcgacgccctggcccccctggacgacagcatgccctgggagggcagaaccaccgcccagtggagcctgcacagaaagagacacctggccagaaccctgctgaccgccgccagagagcccagacccgccccccccagcagcaacaaggtgtag

SEQ ID NO: 253699 - protein, 482 aa, Artificial Sequence
  derived and/or modified sequence
MAEVSIDQSKLPGVKEVCRDFAVLEDHTLAHSLQEQEIEHHLASNVQRNRLVQHDLQVAKQLQEEDLKAQAQLQKRYKDLEQQDCEIAQEIQEKLAIEAERRRIQEKKDEDIARLLQEKELQEEKKRKKHFPEFPATRAYADSYYYEDGDQPGSRRARELGSGFSRPCRLQRDGKTVKHKKEKPEHPLENLEEPEQHCSSKRSLSSSSSGKGRDNPHINNEQHERKRSTQERPRRPLLPTISGEVFLSTECDDWETKINHQTRNWEKQSRHQDRLSPKSSQKAGLHCKEVVYGRDHGQGEHRKRRHRPRTPPFSESEEQLHLHDAGMKPRVMKEAVSTPSRMAHRDQEWYDAEIARKLQEEELLATQVDMRAAQVAQDEEIARLLMAEEKKAYKKAKEREKSSLDKRKQDPEWKPKTAKAANSKSKESDEPHHSKNERPARPPPPIMTDGEDADYTHFTNQQSSTRHFSKSESSHKGFHYKH

SEQ ID NO: 253700 - DNA, 1449 bp, Artificial Sequence
  derived and/or modified sequence
atggcagaggtcagcattgatcagtcaaaacttccaggggttaaagaagtctgtcgggactttgctgtcctggaagaccacactttggctcattccctgcaggaacaggagatcgagcatcacttggctagcaacgtgcaacggaaccgcctggtccaacacgatcttcaggtggccaaacagctgcaggaagaagatctgaaggcccaggcacagctgcagaaacgctacaaggacctggaacaacaagactgtgaaatcgcgcaagagatacaagagaagctggcgattgaagccgaacggaggaggatccaggagaagaaggatgaagatattgccaggctactgcaggagaaggagcttcaggaagaaaagaagcggaaaaagcacttcccagagttccctgccaccagggcgtatgctgattcttattattacgaggatggtgaccagcccggatcacgcagagcgcgagagcttggttcaggcttcagtcgcccgtgtcggttacagagggatggcaaaaccgtgaaacacaagaaggagaagcctgagcacccgctggaaaatttggaggagccagagcagcactgcagcagtaaaaggagtcttagtagctcttcctctggcaaagggcgcgacaatccacatatcaacaacgaacaacacgagagaaaacggtcgacacaagagagacctaggcgacctctgctgccgaccatcagcggcgaggtgttcctgagtacggaatgcgatgattgggagacaaagatcaaccaccagacccggaactgggaaaaacaatccagacaccaagacagactctctccaaaaagcagtcaaaaggctggactgcactgcaaagaagtggtgtacgggcgggatcatggccagggtgagcaccgaaagagacgccatcgccctcgaacccctccattctccgaatcagaggaacagcttcacttacacgacgcaggtatgaaaccccgggttatgaaggaggctgtgtccactccaagtcgcatggcccaccgggatcaagagtggtacgatgcagagatcgcacgaaaactgcaggaagaagaacttctggcaactcaagtcgacatgcgagctgcacaggtggcccaggacgaggaaatcgctagacttttgatggccgaagagaagaaggcgtataagaaggccaaggaaagggaaaaatcatccttggataaacggaagcaggaccctgagtggaaaccaaaaacagctaaagctgccaactcaaagagtaaggaatcagatgaaccacatcactccaaaaatgaaagacccgcacggccacctccaccaatcatgactgatggagaggacgcggattatactcatttcactaatcagcaatcttccacaagacatttctccaagtccgagagctcgcataagggcttccactataagcattag

SEQ ID NO: 253701 - DNA, 1449 bp, Artificial Sequence
  derived and/or modified sequence
atggccgaggtgtccattgaccagagcaagctgcccggggtgaaggaggtgtgccgggactttgctgtgctggaggaccacaccctggcccacagcctgcaggagcaggagattgagcaccacctggccagcaatgtgcagaggaaccggctggtgcagcacgacctgcaggtggccaagcagctgcaggaggaggacctgaaggcccaggcccagctgcagaagcgctacaaggacctggagcagcaggactgtgaaattgcccaggagatccaggagaagctggccattgaagctgagcggcggcgcatccaggagaagaaggatgaggacatcgcccggctgctgcaggagaaggagctgcaggaggagaagaagaggaagaagcacttccctgagttccctgccacccgggcctatgctgacagctactactatgaagatggagaccagcccggcagcagaagagcccgggagctgggcagcggcttcagccggccctgccgcctgcagagagatggcaagacagtgaagcacaagaaggagaagccagagcaccccctggagaacctggaggagcctgagcagcactgcagcagcaagaggagcctgagcagcagcagcagcggcaagggccgggacaacccccacatcaacaatgagcagcacgagaggaagaggagcacccaggagcggccccggcggcccctgctgcccaccatcagcggggaggtgttcctgagcacagaatgtgatgactgggagaccaagatcaaccaccagaccaggaactgggagaagcagagccgccaccaggaccggctgagccccaagagcagccagaaggccggcctgcactgcaaggaggtggtgtatggccgggaccacggccagggcgagcacaggaagaggaggcaccggcccaggaccccacccttcagcgagagcgaggagcagctgcacctgcatgatgctggcatgaagccccgggtgatgaaggaggccgtgtccacccccagcaggatggcccaccgggaccaggagtggtatgatgctgagatcgccaggaagctgcaggaggaggagctgctggccacccaggtggacatgagagctgcccaggtggcccaggatgaggagatcgcccggctgctgatggccgaggagaagaaggcctacaagaaggccaaggagcgggagaagagcagcctggacaagaggaagcaggaccctgagtggaagcccaagacagccaaggccgccaacagcaagagcaaggagagtgatgagccccaccacagcaagaatgaaagacctgcccggcccccaccacccatcatgacagatggagaagatgctgactacacccacttcaccaaccagcagagcagcaccaggcacttcagcaagtctgagagcagccacaagggcttccactacaagcactag

SEQ ID NO: 253702 - DNA, 1449 bp, Artificial Sequence
  derived and/or modified sequence
atggccgaggtgagcatcgaccagagcaagctgcccggcgtgaaggaggtctgcagagacttcgcggtccttgaagatcacaccctcgctcattccctgcaagaacaagagattgaacatcacttagcttccaacgttcagcgcaaccggctggtccagcacgatctccaggtggccaagcagctgcaggaggaggatctgaaggcacaggcccagctgcagaaacgctataaagacctggagcagcaggactgtgagatcgcccaggagattcaggagaaacttgccattgaggccgagaggcgccgaatccaggaaaaaaaggacgaggatatcgcaagactgctgcaagaaaaagagctccaggaggaaaagaagcggaagaagcatttcccagaattccccgccactcgcgcgtatgcggattcttactattacgaggacggggaccagccaggaagtcgcagagccagggagctgggatcggggttcagcagaccctgtagactgcagcgggacggtaaaaccgtgaaacacaaaaaggagaagcccgaacacccattggaaaatcttgaagaacccgaacagcattgctcttcaaagcgaagtctctcgtcttcaagttctggaaagggccgagacaatccgcatattaacaacgaacagcacgagcggaaacggagcacccaggaacgtcccaggcgcccgcttctccctacaatatccggcgaggtgtttctttcgacagaatgtgatgactgggaaaccaaaatcaaccaccagacccgaaactgggagaaacaatccagacatcaggataggctgtcaccgaagagctctcagaaggcgggccttcactgcaaggaagtggtctatggtagagaccacggacagggcgagcaccgcaaacgcagacacaggccgagaacgcctccattctccgagtcagaagagcagttgcacctgcatgacgcagggatgaaaccacgggtcatgaaggaagctgtttccacaccctcaagaatggctcacagagaccaggagtggtacgacgcagaaattgcaaggaaattacaggaagaggaactgctagccacgcaggtcgatatgcgcgctgcgcaggtcgcgcaggacgaagaaattgctaggctgcttatggctgaagaaaaaaaggcctacaagaaggctaaggagcgagaaaagagttccctcgacaaacggaagcaagatccggagtggaaaccaaaaacggcgaaggctgctaattctaaaagtaaagagtccgatgagccccaccattcaaaaaatgaacgcccagcccgtccccctcctcctattatgacagacggagaggatgcagactacacgcactttaccaatcagcagagctcgactaggcacttcagtaaatccgaatcatcacacaaagggtttcattacaagcattag

SEQ ID NO: 253703 - DNA, 1449 bp, Artificial Sequence
  derived and/or modified sequence
atggccgaagtctcaattgaccagagtaagctccctggtgtcaaagaggtgtgccgggacttcgctgtgttggaggaccatactctggctcactcattgcaggagcaggagattgaacaccatctggcaagcaacgtgcagcggaaccgcctagtgcaacatgatttgcaggtcgccaagcagctccaggaggaggacctgaaagctcaggcccaacttcagaagaggtacaaggacctggaacagcaggactgcgagatcgcacaagagattcaggagaagctcgccattgaagcagagagacgtcggatccaggagaaaaaagatgaagacattgcacggctgctgcaggagaaagagctacaagaggagaaaaaacgcaagaaacactttccagagttccccgcaaccagggcctacgccgattcatactactacgaggacggagaccaaccgggaagccggcgagccagggagttaggcagtggtttctctaggccttgcaggttacagagggatggcaagaccgtgaagcacaagaaggaaaaacctgagcacccactggaaaatctggaagaacctgaacagcactgcagctctaaaaggtccctctctagtagttcttcggggaaagggagagacaatccgcacatcaacaacgagcagcatgagaggaagaggtccacacaggaacgtccccgacgcccactgttgccaaccatttctggtgaagtgtttcttagcaccgagtgtgacgactgggagaccaagattaaccaccagacacgcaactgggaaaaacaaagtcgacaccaggacaggctgtcccccaaatcctcccagaaagccggactgcattgtaaagaggtggtttatggaagagatcatggccagggtgagcaccgcaagcgaaggcacaggcccagaacccctccattctccgagagcgaagagcaattacacttgcatgatgccggaatgaagccccgtgtgatgaaggaagcagtgagtactccttctaggatggctcatcgggaccaggagtggtatgacgccgaaatcgcgcgtaagttacaggaggaggaactccttgcgacccaggtcgatatgagagctgcccaggtggcacaggacgaagaaatagcaagactcctgatggctgaggagaaaaaggcttacaagaaggccaaggaacgggagaagtcgagcttggataagagaaaacaagatcctgagtggaagccaaagactgccaaggcggcaaattccaagagtaaggaaagtgacgagccgcatcacagtaagaacgaacgcccagcgaggccaccccctcctataatgactgacggagaggacgcggattatacgcattttactaaccagcaatctagcaccagacacttcagcaagagtgagagctctcacaagggctttcattacaagcattag

SEQ ID NO: 253704 - DNA, 2454 bp, Artificial Sequence
  derived and/or modified sequence
ggaaagactatgttttaggtgacccgtgtggcctttttgttgaggcctttaggatacaaggcccccacctaaagacgcgaccctcccgtaggaggggggcagggcccgggggcgggagcacagcggggccccagcctcaggcggcgcgtcactgagcacaaaggagacaacagcgaggcggcagcgggcgctgatcttcgctcgccagccactcgcaattgcggttacagacctgcagctccccctcccccagccggcccgcccgcctttctgtctcctctctccctccgtactggacggccccggtccatttccgggctccggatatttggtatcgattggggccggggacgcggagcaggtggccgcggcggggcagctgggccgccagcttggtgcctcggggaccgtctcccgctgctttggtcaccagcccctgcccgcccgacccgctccgttctccggcctgcgagccctgccggccggactttgcgccgcgtccggcgctgctgctgcgctcggggccccgctcggcgccggcggtgaccgggaagcccgcgttaaaggggcaaccgggaccctggcccggtatggctgaagtcagcatcgaccagtccaagctgcctggagtcaaggaagtatgccgagattttgctgtcctggaggaccacaccctggctcacagcctgcaggaacaagagattgagcatcatttggcatcgaacgttcagcggaaccgtttggtccagcatgatctccaggtggctaagcagctccaagaggaagatctgaaagcgcaggcccagctccagaagcgctacaaagaccttgaacaacaagactgtgaaattgctcaggaaattcaggagaagctggctattgaggcagagagacgacgcattcaggagaagaaggatgaggacatagctcgccttttgcaagaaaaggagttacaggaagagaaaaagagaaagaaacactttccagagttccctgcaacccgtgcttatgcagatagttactattatgaagatggagaccaaccagggtcaaggagggccagggaattgggttctggattctcaagaccttgtagactccaaagagatggaaagactgtgaagcacaagaaagagaaaccagaacatccactggagaacttggaagagccagaacaacattgttcatcgaagagatccctgtcatcctctagctcgggcaaagggagggacaatccccatattaacaatgagcagcatgaaaggaaacggtccactcaggagaggcctcggagacctctgcttcccacgatcagtggtgaagtgtttctgagcactgaatgtgatgactgggagactaagattaaccatcagactcgaaattgggaaaaacagtctcgacaccaagatcgactttcacccaagtcctcacaaaaagcagggcttcactgcaaggaagttgtatatgggagggaccatgggcaaggtgagcacagaaaaaggagacacaggcccaggactcctccattctcagagagtgaggagcagctccacctccatgacgcaggaatgaagccaagagtgatgaaagaagctgtatctactccatcacgaatggcccacagggatcaggaatggtatgatgctgaaattgccagaaaactgcaagaagaagaacttttggctacccaggtggacatgagagccgctcaagtagctcaagatgaagaaatcgctcgacttctaatggctgaagaaaagaaagcttacaaaaaagccaaggagcgggagaaatcatctttggacaaaagaaagcaagaccccgagtggaagccaaaaacagctaaagcagcaaattccaagtcaaaagagagtgatgaacctcaccattctaagaatgaaaggccagcacggccaccaccacctatcatgacagatggtgaagatgcggattacactcattttacaaaccagcagagttccacacggcatttctcaaaatcagagtcctctcataaaggttttcattacaaacattaaaaacctaggaatctgccttgaaaatggactcactatagcaaatattactgggtgatacagaatgaattctacacttactttttttctcctgtgtttgcattcctgggatttatcctcaagtgcatttctgaccataagtaattttaattcatttcaaatgttttggttattcatgatcacttgggcagtataagaaaatgtagcttctgaatattggccacctctatgctgcatatacttcttgggatatagtatctaagacctttgtaaactgccattttgttaggtatggagtttggtatctagggagtaggccttatttagcaattcaaattttatggagatgaatgatcaaagtgaaacaatgtttggatgcaacgcagaataaaagaatataagaaatagctttttgttg

SEQ ID NO: 253705 - DNA, 1449 bp, Artificial Sequence
  derived and/or modified sequence
atggccgaggtgagcatcgaccagagcaagctgcccggcgtgaaggaggtgtgcagagacttcgccgtgctggaggaccacaccctggcccacagcctgcaggagcaggagatcgagcaccacctggccagcaacgtgcagagaaacagactggtgcagcacgacctgcaggtggccaagcagctgcaggaggaggacctgaaggcccaggcccagctgcagaagagatacaaggacctggagcagcaggactgcgagatcgcccaggagatccaggagaagctggccatcgaggccgagagaagaagaatccaggagaagaaggacgaggacatcgccagactgctgcaggagaaggagctgcaggaggagaagaagagaaagaagcacttccccgagttccccgccaccagagcctacgccgacagctactactacgaggacggcgaccagcccggcagcagaagagccagagagctgggcagcggcttcagcagaccctgcagactgcagagagacggcaagaccgtgaagcacaagaaggagaagcccgagcaccccctggagaacctggaggagcccgagcagcactgcagcagcaagagaagcctgagcagcagcagcagcggcaagggcagagacaacccccacatcaacaacgagcagcacgagagaaagagaagcacccaggagagacccagaagacccctgctgcccaccatcagcggcgaggtgttcctgagcaccgagtgcgacgactgggagaccaagatcaaccaccagaccagaaactgggagaagcagagcagacaccaggacagactgagccccaagagcagccagaaggccggcctgcactgcaaggaggtggtgtacggcagagaccacggccagggcgagcacagaaagagaagacacagacccagaaccccccccttcagcgagagcgaggagcagctgcacctgcacgacgccggcatgaagcccagagtgatgaaggaggccgtgagcacccccagcagaatggcccacagagaccaggagtggtacgacgccgagatcgccagaaagctgcaggaggaggagctgctggccacccaggtggacatgagagccgcccaggtggcccaggacgaggagatcgccagactgctgatggccgaggagaagaaggcctacaagaaggccaaggagagagagaagagcagcctggacaagagaaagcaggaccccgagtggaagcccaagaccgccaaggccgccaacagcaagagcaaggagagcgacgagccccaccacagcaagaacgagagacccgccagaccccccccccccatcatgaccgacggcgaggacgccgactacacccacttcaccaaccagcagagcagcaccagacacttcagcaagagcgagagcagccacaagggcttccactacaagcactag

SEQ ID NO: 253706 - protein, 123 aa, Artificial Sequence
  derived and/or modified sequence
MAALGTVLFTGVRRLHCSVAAWAGGQWRLQQGLAANPSGYGPLTELPDWSYADGRPAPPMKGQLRRKAERETFARRVVLLSQEMDAGLQAWQLRQQKLQEEQRKQENALKPKGASLKSPLPSQ

SEQ ID NO: 253707 - DNA, 372 bp, Artificial Sequence
  derived and/or modified sequence
atggcagcattggggaccgtgttattcactggagtgagaaggctacattgttctgtggccgcctgggccgggggccagtggaggctgcaacagggcttagctgccaatccatcaggatacgggccgctaactgaactgcctgattggtcctacgcggatggtagaccagcaccccccatgaaggggcagctccggaggaaagccgagcgggaaacattcgcacgcagggtggtgttgctaagtcaggagatggatgctggcctgcaggcatggcagctccgtcaacaaaagcttcaggaggagcaaaggaaacaggaaaacgctctgaagccaaaaggcgccagtcttaagtccccattgccttcacagtag

SEQ ID NO: 253708 - DNA, 372 bp, Artificial Sequence
  derived and/or modified sequence
atggccgccctgggcaccgtgctcttcaccggggtgcggcggctgcactgcagcgtggccgcctgggccggcggccagtggaggctgcagcagggcctggccgccaaccccagcggctacggccccctgacagagctgcctgactggagctatgcagatggccggcctgccccacccatgaagggccagctgcggaggaaggccgagcgggagacctttgccaggagagtggtgctgctgagccaggagatggatgctggcctgcaggcctggcagctgcggcagcagaagctgcaggaggagcagaggaagcaggagaatgccctgaagcccaagggggccagcctgaagagccccctgcccagccagtag

SEQ ID NO: 253709 - DNA, 1118 bp, Artificial Sequence
  derived and/or modified sequence
ttccggctaccccggctactcctgctcagcatggctgctttagggactgttctcttcacaggtgtccggaggctgcactgcagcgtagccgcttgggcgggcggccagtggcgactacagcagggactggctgccaacccctccggctacgggccccttaccgagctcccagactggtcatatgcggatggccgccctgctcccccaatgaaaggccagcttcgaagaaaagctgaaagggagacgtttgcaagacgagttgtactgctgtcacaggaaatggacgctggattacaagcatggcagctcaggcagcagaagttgcaggaagaacaaaggaagcaggaaaatgctcttaaacccaaaggggcttcactgaagagcccacttccaagtcaataaaaagcaactcctgcctcccttcctcaccctgtctctggatttcttttctatcacctagatgcttcatccagccagaagatagccttcacgttccccatctgtcttcagagaaaaagagctgggacaccaagaacaagctgttagatcactgcctgggaggcttggcttagtactctcatctctggttccattccagttcagctaagtcttgctttaaaatttttacctcctagctgggtgcggtggctcacgcctgtaatcccagcactttgggaggctgaggcgggcagatcacaagatcaggagttcgagaccagcctggccaacccagcctggtcaacatggtgaaaccctgtccctactaaagatacaaacaattagccgggcgtggtggggtgcgcttgtaatcccagctactcaggaggctgaggcaggagaatcgcttaaactcgggaggtagaggttgcagtgagccaaggtcacaccattgcactccaacctgggcgacagggcgagactccgtctcaaaaaaaaaaaaaaatttacctcctttgcaggccataggactagcccaactatgagaaatagctgttctgtgaacgtgaaaaggggacagcagttttcccagttttggccaggcagtcaagcctttaacagctcatgcacagtttaggccatgtacagctggcatctaataaatgttttcatgaaaaaga

SEQ ID NO: 253710 - DNA, 586 bp, Artificial Sequence
  derived and/or modified sequence
gctcagcatggctgctttagggactgttctcttcagtgagtgggtatagatagggaccgtggactcgggggccctttggggacgggcacaggacccctgatccggctgcgcggcctctcccccaactctgctctgttctcccagcaggtgtccggaggctgcactgcagcgtagccgcttgggcgggcggccagtggcgactacagcagggactggctgccaacccctccggctacgggccccttaccgagctcccagactggtcatatgcgggggtatgatcctgcttaattggataattggtgactgaggaagatggtgaagattttttctacttgttatttactatggccgccctgctcccccaatgaaaggccagcttcgaagaaaagctgaaagggagacgtttgcaagacgagttgtactgctgtcacaggaaatggacgctggattacaagcatggcagctcaggcagcagaagttgcaggaagaacaaaggaagcaggaaaatgctcttaaacccaaaggggcttcactgaagagcccacttccaagtcaataaaaagcaactcctgcctcccttcct

SEQ ID NO: 253711 - DNA, 895 bp, Artificial Sequence
  derived and/or modified sequence
cggctactcctgctcagcatggctgctttagggactgttctcttcagtgagtgggtatagatagggaccgtggactcgggggccctttggggacgggcacaggacccctgatccggctgcgcggcctctcccccaactctgctctgttctcccagcaggtgtccggaggctgcactgcagcgtagccgcttgggcgggcggccagtggcgactacagcagggactggctgccaacccctccggctacgggccccttaccgagctcccagactggtcatatgcggatggccgccctgctcccccaatgaaaggccagcttcgaagaaaagctgaaagggagacgtttgcaagacgagttgtactgctgtcacaggaaatggacgctggattacaagcatggcagctcaggcagcagaagttgcaggaagaacaaaggaagcaggaaaatgctcttaaacccaaaggggcttcactgaagagcccacttccaagtcaataaaaagcaactcctgcctcccttcctcaccctgtctctggatttcttttctatcacctagatgcttcatccagccagaagatagccttcacgttccccatctgtcttcagagaaaaagagctgggacaccaagaacaagctgttagatcactgcctgggaggcttggcttagtactctcatctctggttccattccagttcagctaagtcttgctttaaaatttttacctcctagctgggtgcggtggctcacgcctgtaatcccagcactttgggaggctgaggcgggcagatcacaagatcaggagttcgagaccagcctggccaacccagcctggtcaacatggtgaaaccctgtccctactaaagatacaaacaattagccgggcgtggtgggg

SEQ ID NO: 253712 - DNA, 398 bp, Artificial Sequence
  derived and/or modified sequence
tttagggactgttctcttcagtgagtggcaggtgtccggaggctgcactgcagcgtagccgcttgggcgggcggccagtggcgactacagcagggactggctgccaacccctccggctacgggccccttaccgagctcccagactggtcatatgcggatggccgccctgctcccccaatgaaaggccagcttcgaagaaaagctgaaagggagacgtttgcaagacgagttgtactgctgtcacaggaaatggacgctggattacaagcatggcagctcaggcagcagaagttgcaggaagaacaaaggaagcaggaaaatgctcttaaacccaaaggggcttcactgaagagcccacttccaagtcaataaaaagcaactcctgcctcccttcctca

SEQ ID NO: 253713 - DNA, 372 bp, Artificial Sequence
  derived and/or modified sequence
atggccgccctgggcaccgtgctgttcaccggcgtgcggcggctgcactgctccgtggcagcttgggcaggcgggcaatggaggttgcagcagggtctggccgctaacccgtccggctacggaccactgacagaattacctgattggagttacgccgatggtaggcctgctccaccaatgaagggacagctgcggcgcaaggccgagcgcgaaacttttgccagacgagtcgttctcctatcacaggagatggatgctggcctgcaagcatggcagctaagacagcagaagctccaggaagagcagcgtaaacaggagaacgctctgaaaccaaagggcgccagcctcaagtcaccactgccttctcaatag

SEQ ID NO: 253714 - DNA, 372 bp, Artificial Sequence
  derived and/or modified sequence
atggccgcacttgggacagtgctgttcacgggcgtgaggaggctgcattgttccgtcgccgcttgggctgggggtcagtggaggctacagcaagggttggcagccaatcctagcggttatggtccgctaacggagttgcctgattggagctacgccgatggccgaccagcacctccaatgaaaggccagcttaggcggaaagcagaaagggaaacctttgcaaggagggtggtgctcctttcacaggagatggatgcaggtcttcaggcctggcagttgcgccagcagaagttacaggaggagcagcgcaaacaggagaatgcccttaagccgaagggagcaagtctgaaaagccctttgccatcccagtag

SEQ ID NO: 253715 - DNA, 372 bp, Artificial Sequence
  derived and/or modified sequence
atggccgccctgggcaccgtgctgttcaccggcgtgagaagactgcactgcagcgtggccgcctgggccggcggccagtggagactgcagcagggcctggccgccaaccccagcggctacggccccctgaccgagctgcccgactggagctacgccgacggcagacccgccccccccatgaagggccagctgagaagaaaggccgagagagagaccttcgccagaagagtggtgctgctgagccaggagatggacgccggcctgcaggcctggcagctgagacagcagaagctgcaggaggagcagagaaagcaggagaacgccctgaagcccaagggcgccagcctgaagagccccctgcccagccagtag

SEQ ID NO: 253716 - protein, 170 aa, Artificial Sequence
  derived and/or modified sequence
MKTMATRKRCKLSRTGPEFENVIKRLLCARTFHTRIGGDLTHGIINRGRRANAEQMGLQGSAQHFNIFPLDLWTQGKKTEVQKREGTDSIPAAGRSGTANQPSIAPHRCLFSRGITALDGLKRGRGCNGAAHLVRGDAWKTKLGEPWVSIALALAGPGAILILELSWFLG

SEQ ID NO: 253717 - protein, 78 aa, Artificial Sequence
  derived and/or modified sequence
MKTMATRKRCKLSRTGPEFENVIKRLLCARTFHTRIGGDLTHGIINRGRRANAEQMGLQGSAQHFNIFPLDLWTQGKK

SEQ ID NO: 253718 - DNA, 1859 bp, Artificial Sequence
  derived and/or modified sequence
ccactcttgctgtgcaaactcaatttcctgtatcctactctacgtattttcgaagcagtcatcgccatatggtatactctctctagattattttcttgggcatttgcctattgtcaccttttcttctcactagcatgtggctccatgagggcaaatacttaatctgttatgttcactggggcatctccagaacttgcctgaaacccagtaggtgttcaataagttctggagggatgaatgaatgactcctctcactgtaaggaagtttgggatatgtagtctatctgggcacatttctatctgttctctttgcaggggagaaagggatgaggatgttggataagcagctcagcatgttccccaacatgtaagggaatcaggtcgagttctacactctccttcttggtacacatcctcagaatgcaggaagtgcctgtgcttgctgtgagtctttgtggacagaggcaggatcatgctggctagaatctagtggacaagggcagcacattccccctgttcccaggtgggtccagagatgtcgcctgggagccagggcctggagttctgttactgtggctgagcttgcacccaagctacaagatgacatcctactcttccctcacctttctacaagtagaggagtctcttctcatggccaccattgtcccaggatgtgaggtctggaacagctgcagccattttgccaccatgggaaacctgggacatctgaactgactccatgaagcctgaagagaaagctaataagaaggcagagagaagaggaagagtcttggtctttggaaatatcttttggagctgctggatcaagtatcacttgaagtattattgaatttattccccgaaggagagcggctaagagtattgcccagccacaggctctcaaccaccaacccgagcctcagattctcctcacacagccacagctgtaccacatggcccacgtgaaatctgaatccacatgaaaacaatggcaacaagaaaaaggtgtaaactttccagaacaggcccagaatttgaaaatgtgataaagaggttattgtgcgcccgaacttttcacacaagaattggaggagatttaacacatggaataataaacagaggaaggcgggctaatgcagagcagatgggcctgcagggcagtgctcagcatttcaacatctttcccctggacctttggacccaaggtaagaaaactgaagttcagaaaagggaggggactgactcaatcccagctgctggcagatctgggactgcaaaccagccttccattgctccacacaggtgtctcttctcacgtggaatcacagcattggatggactgaaaagaggaagaggctgcaatggagcagcacacctggtgcgtggggatgcctggaaaacaaaattaggagagccctgggtcagcattgctctggcactggctgggccgggggccatcctgattctagaattatcttggttcctgggatagaaatgtccccagagtggagaagttcagttcaatccaacatccttatattgcaatgaggataaagaccacagaccctatggcctgtatgacccagctgcccatttctaggaacccattcctacagaaatgacaacatgcgtgtgcaaacagcaacaatgacaaacataccctgggatgctttccctctgtggtttgttatagtaagatagcggctacagcttatatatcatcaacagaggactggctaaatgatggcacttcattctgcagaatctttttttgtagtcaaaaagaacaagttagatctatatgtgtgaacatggaaaggtgtacatgacttaagtagaaaaattaagttgcagaacga

SEQ ID NO: 253719 - DNA, 1216 bp, Artificial Sequence
  derived and/or modified sequence
ccactcttgctgtgcaaactcaatttcctgtatcctactctacgtattttcgaagcagtcatcgccatatggtatactctctctagattattttcttgggcatttgcctattgtcaccttttcttctcactagcatgtggctccatgagggcaaatacttaatctgttatgttcactggggcatctccagaacttgcctgaaacccagtaggtgttcaataagttctggagggatgaatgaatgactcctctcactgtaaggaagtttgggatatgtagtctatctgggcacatttctatctgttctctttgcaggggagaaagggatgaggatgttggataagcagctcagcatgttccccaacatgtaagggaatcaggtcgagttctacactctccttcttggtacacatcctcagaatgcaggaagtgcctgtgcttgctgtgagtctttgtggacagaggcaggatcatgctggctagaatctagtggacaagggcagcacattccccctgttcccaggtgggtccagagatgtcgcctgggagccagggcctggagttctgttactgtggctgagcttgcacccaagctacaagatgacatcctactcttccctcacctttctacaagtagaggagtctcttctcatggccaccattgtcccaggatgtgaggtctggaacagctgcagccattttgccaccatgggaaacctgggacatctgaactgactccatgaagcctgaagagaaagctaataagaaggcagagagaagaggaagagtcttggtctttggaaatatcttttggagctgctggatcaagtatcacttgaagtattattgaatttattccccgaaggagagcggctaagagtattgcccagccacaggctctcaaccaccaacccgagcctcagattctcctcacacagccacagctgtaccacatggcccacgtgaaatctgaatccacatgaaaacaatggcaacaagaaaaaggtgtaaactttccagaacaggcccagaatttgaaaatgtgataaagaggttattgtgcgcccgaacttttcacacaagaattggaggagatttaacacatggaataataaacagaggaaggcgggctaatgcagagcagatgggcctgcagggcagtgctcagcatttcaacatctttcccctggacctttggacccaaggaaaaaaatga

SEQ ID NO: 253720 - DNA, 513 bp, Artificial Sequence
  derived and/or modified sequence
atgaagaccatggccaccagaaagagatgcaagctgagcagaaccggccccgagttcgagaacgtgatcaagagactgctgtgcgccagaaccttccacaccagaatcggcggcgacctgacccacggcatcatcaacagaggcagaagagccaacgccgagcagatgggcctgcagggcagcgcccagcacttcaacatcttccccctggacctgtggacccagggcaagaagaccgaggtgcagaagagagagggcaccgacagcatccccgccgccggcagaagcggcaccgccaaccagcccagcatcgccccccacagatgcctgttcagcagaggcatcaccgccctggacggcctgaagagaggcagaggctgcaacggcgccgcccacctggtgagaggcgacgcctggaagaccaagctgggcgagccctgggtgagcatcgccctggccctggccggccccggcgccatcctgatcctggagctgagctggttcctgggctag

SEQ ID NO: 253721 - DNA, 237 bp, Artificial Sequence
  derived and/or modified sequence
atgaagaccatggccaccagaaagagatgcaagctgagcagaaccggccccgagttcgagaacgtgatcaagagactgctgtgcgccagaaccttccacaccagaatcggcggcgacctgacccacggcatcatcaacagaggcagaagagccaacgccgagcagatgggcctgcagggcagcgcccagcacttcaacatcttccccctggacctgtggacccagggcaagaagtag

SEQ ID NO: 253722 - DNA, 513 bp, Artificial Sequence
  derived and/or modified sequence
atgaaaaccatggcaacaagaaagcgatgcaagctgtctcggaccggtccagaatttgaaaacgtgattaaaaggctgttgtgcgctcggacatttcacaccaggatcggcggtgatctgacacatggcatcattaacagggggcgccgagctaacgccgagcagatgggtctgcagggatctgcccagcattttaacatctttcctctcgatctttggacacaggggaagaagacggaggtccaaaagagagagggtacagactctataccggccgctggtcgctccggaacagctaaccagccttccattgcgcctcataggtgcttgttcagcaggggtatcacagcgctggacgggcttaagaggggaaggggatgcaatggagcagcacatctagttcggggtgacgcttggaagactaaacttggagaaccctgggtgtcaatagcgctcgccttggcgggccccggagcgatcctgattctggagctctcctggttcctcggttag

SEQ ID NO: 253723 - DNA, 237 bp, Artificial Sequence
  derived and/or modified sequence
atgaaaacgatggcaacccggaaacgatgcaagctgagcaggaccggaccagagtttgaaaatgtcatcaagaggctgctgtgtgcaaggacattccacactcggataggaggggacctgacgcacggaataatcaatcgaggcaggcgagccaatgctgagcaaatgggactccaggggtctgcccaacacttcaacatcttccccctggacctctggacccaggggaagaagtag

SEQ ID NO: 253724 - DNA, 513 bp, Artificial Sequence
  derived and/or modified sequence
atgaagaccatggccaccaggaagcgctgcaagctgagcaggactggacctgagtttgaaaatgtcatcaagaggctgctgtgtgcccggaccttccacacccgcatcggcggggacctgacccacggcatcatcaacagaggaagaagagccaatgctgagcagatgggcctgcagggcagcgcccagcacttcaacatcttccccctggacctgtggacccagggcaagaagacagaggtgcagaagcgggagggcacagacagcatcccagctgctggccgcagcggcacagccaaccagcccagcatcgccccccaccgctgcctcttcagccggggcatcacagccctggatggcctgaagaggggccggggctgcaatggagctgcccacctggtgagaggagatgcctggaagaccaagctgggggagccctgggtgtccatcgccctggccctggccggccctggggccatcctgatcctggagctgtcctggttcctgggctag

SEQ ID NO: 253725 - DNA, 237 bp, Artificial Sequence
  derived and/or modified sequence
atgaagaccatggccaccaggaagcgctgcaagctgagcaggactggacctgagtttgaaaatgtcatcaagaggctgctgtgtgcccggaccttccacacccgcatcggcggggacctgacccacggcatcatcaacagaggaagaagagccaatgctgagcagatgggcctgcagggcagcgcccagcacttcaacatcttccccctggacctgtggacccagggcaagaagtag

SEQ ID NO: 253726 - DNA, 513 bp, Artificial Sequence
  derived and/or modified sequence
atgaagaccatggccacccggaagcggtgcaagctgagccggaccgggcctgagtttgagaacgttattaagcgccttctctgcgccaggacctttcacacacgaatcggaggcgacttgacacatggtatcataaaccgcggaaggcgggcaaacgcagagcaaatgggcctccaggggagtgcacagcactttaatatattcccccttgacctctggacgcagggcaagaagaccgaagtgcagaaacgcgaaggaacagatagcataccggccgccggtaggagtggcaccgccaatcagccatctatcgcccctcacaggtgtttattctcacgaggcattacagccctggacgggctgaagaggggacgaggctgtaacggggccgcgcacctcgttcgcggggacgcctggaaaacaaaactcggagaaccttgggtgagcattgcgctcgcactggccggccctggagctatcctgatccttgaattaagttggtttctcggttag

SEQ ID NO: 253727 - DNA, 237 bp, Artificial Sequence
  derived and/or modified sequence
atgaagaccatggccacccggaagcggtgcaagctgagccggaccggaccggagtttgagaatgtgattaagaggttattgtgtgctcggaccttccacactcgaataggaggggatcttacacatggcatcattaaccggggcagacgggctaacgcagagcagatgggcctgcagggcagtgcccaacattttaacatttttcctttggacctttggacccagggtaagaagtag

SEQ ID NO: 253728 - DNA, 513 bp, Artificial Sequence
  derived and/or modified sequence
atgaagacaatggctacccgcaagagatgcaaactgtccaggaccggcccagagtttgagaatgtgatcaagaggctcctatgcgcgagaaccttccatacgaggatcgggggtgatttgactcatggtattataaaccgcggtcgcagagcaaatgccgagcaaatgggactccagggttcagcgcagcattttaatatatttccgctggacctctggacacaggggaagaaaactgaagttcagaagagggaggggaccgattccattccggctgccggtagatcagggaccgccaatcagccttcaattgctcctcaccgctgtttgttctcgcggggtatcaccgcccttgatggcctgaagcggggacggggttgcaatggtgccgcacacttagtacgaggagacgcctggaagactaaattaggtgaaccatgggtctctattgcacttgcactggccggaccaggcgctattctgatattggagctgagctggtttcttgggtag

SEQ ID NO: 253729 - DNA, 237 bp, Artificial Sequence
  derived and/or modified sequence
atgaaaactatggctaccagaaaacggtgcaagctgtctcgcacggggcctgagttcgaaaacgtgattaagcggctcctctgtgcaaggacctttcatacacggatagggggtgacctgacccatggaatcatcaataggggcaggagggctaacgctgagcagatgggactgcagggatctgcccaacatttcaacatttttccattagatctatggacccaggggaagaagtag

SEQ ID NO: 253730 - protein, 119 aa, Artificial Sequence
  derived and/or modified sequence
MKTMATRKRCKLSRTGPEFENVIKRLLCARTFHTRIGGDLTHGIINRGRRANAEQMGLQGSAQHFNIFPLDLWTQGDCMLVSLAKNKVNVFGAIINMAASVSGVIGGLKFSRTYYVKGI

SEQ ID NO: 253731 - DNA, 1364 bp, Artificial Sequence
  derived and/or modified sequence
actgtggctgagcttgcacccaagctacaagatgacatcctactcttccctcacctttctacaagtagaggagtctcttctcatggccaccattgtcccagattatctctccatacctcgtggctggagctgagaatgggggatgaatggcatagccaactcaagactgtcttttctactgtcttcagtgtctctttcagtgatatgaagttaaaaccaggatgtgaggtctggaacagctgcagccattttgccaccatgggaaacctgggacatctgaactgactccatgaagcctgaagagaaagctaataagaaggcagagagaagaggaagagtcttggtctttggaaatatcttttggagctgctggatcaagtatcacttgaagtattattgaatttattccccgaaggagagcggctaagagtattgcccagccacaggctctcaaccaccaacccgagcctcagattctcctcacacagccacagctgtaccacatggcccacgtgaaatctgaatccacatgaaaacaatggcaacaagaaaaaggtgtaaactttccagaacaggcccagaatttgaaaatgtgataaagaggttattgtgcgcccgaacttttcacacaagaattggaggagatttaacacatggaataataaacagaggaaggcgggctaatgcagagcagatgggcctgcagggcagtgctcagcatttcaacatctttcccctggacctttggacccaaggtgattgcatgctggtgtctttagctaaaaataaagttaatgtctttggggcaatcataaatatggctgcttcagtttctggggtgattggtggtctaaagttttcaagaacctactatgtgaaaggcatttgacattcactaatttaatcccaactactactccattttgaaggaaaaaaatgaaggctctgaaagtgtaaatcgcttactgaagggcacacggccaggatgacagcggagccaggatcaccccaggtctgtctcattgcatatgtcatggctctgcaaactggggcaataggtgagcagggagaagagtcatggccaaataaaattgagacataccgatacacacacacacacacacacacacacacacacatttacacggtaacagccttattaaggtacaactaatgtacaataaggtgtacatatttaaaggatactatttgataagttttgacatatgtctgtacctgggaaaccatcactacaatcatgatggtgagcatatctaatactctcaaaagtttcctcttgccttttgtaattccattctgccatcccacctgtccctcccactcctgatcccaggcaaccactg

SEQ ID NO: 253732 - DNA, 1528 bp, Artificial Sequence
  derived and/or modified sequence
ctgatcattgagagagtgacacctggtcttaggcttagaagaggagtagaagagagccagtgaagtcagggaaggcttccaaggcaaaaggaccagcaaaagggcagcacattccccctgttcccaggtgggtccagagatgtcgcctgggagccagggcctggagttctgttactgtggctgagcttgcacccaagctacaagatgacatcctactcttccctcacctttctacaagtagaggagtctcttctcatggccaccattgtcccaggatgtgaggtctggaacagctgcagccattttgccaccatgggaaacctgggacatctgaactgactccatgaagcctgaagagaaagctaataagaaggcagagagaagaggaagagtcttggtctttggaaatatcttttggagctgctggatcaagtatcacttgaagtattattgaatttattccccgaaggagagcggctaagagtattgcccagccacaggctctcaaccaccaacccgagcctcagattctcctcacacagccacagctgtaccacatggcccacgtggtatggtgctaattcctctgacatctaattttcactttttggcaatatttggtctcatcaagctttacacataaatattttcagcaaagtgctccaaatgcctttttcagaaatctgaatccacatgaaaacaatggcaacaagaaaaaggtgtaaactttccagaacaggcccagaatttgaaaatgtgataaagaggttattgtgcgcccgaacttttcacacaagaattggaggagatttaacacatggaataataaacagaggaaggcgggctaatgcagagcagatgggcctgcagggcagtgctcagcatttcaacatctttcccctggacctttggacccaaggtgattgcatgctggtgtctttagctaaaaataaagttaatgtctttggggcaatcataaatatggctgcttcagtttctggggtgattggtggtctaaagttttcaagaacctactatgtgaaaggcatttgacattcactaatttaatcccaactactactccattttgaaggaaaaaaatgaaggctctgaaagtgtaaatcgcttactgaagggcacacggccaggatgacagcggagccaggatcaccccaggtctgtctcattgcatatgtcatggctctgcaaactggggcaataggtgagcagggagaagagtcatggccaaataaaattgagacataccgatacacacacacacacacacacacacacacacacatttacacggtaacagccttattaaggtacaactaatgtacaataaggtgtacatatttaaaggatactatttgataagttttgacatatgtctgtacctgggaaaccatcactacaatcatgatggtgagcatatctaatactctcaaaagtttcctcttgccttttgtaattccattctgccatcccacctgtccctcccactcctgatcccaggcaaccactg

SEQ ID NO: 253733 - DNA, 1678 bp, Artificial Sequence
  derived and/or modified sequence
acatcctcagaatgcaggaagtgcctgtgcttgctgtgagtctttgtggacagaggcaggatcatgctggctagaatctagtggacaagggcagcacattccccctgttcccaggtgggtccagagatgtcgcctgggagccagggcctggagttctgttactgtggctgagcttgcacccaagctacaagatgacatcctactcttccctcacctttctacaagtagaggagtctcttctcatggccaccattgtcccaggatgtgaggtctggaacagctgcagccattttgccaccatgggaaacctgggacatctgaactgactccatgaagcctgaagagaaagctaataagaaggcagagagaagaggaagagtcttggtctttggaaatatcttttggagctgctggatcaagtatcacttgaagtattattgaatttattccccgaaggagagcggctaagagtattgcccagccacaggctctcaaccaccaacccgagcctcagattctcctcacacagccacagctgtaccacatggcccacgtgaaatctgaatccacatgaaaacaatggcaacaagaaaaaggtgtaaactttccagaacaggcccagaatttgaaaatgtgataaagaggttattgtgcgcccgaacttttcacacaagaattggaggagatttaacacatggaataataaacagaggaaggcgggctaatgcagagcagatgggcctgcagggcagtgctcagcatttcaacatctttcccctggacctttggacccaaggtgattgcatgctggtgtctttagctaaaaataaagttaatgtctttggggcaatcataaatatggctgcttcagtttctggggtgattggtggtctaaagttttcaagaacctactatgtgaaaggcatttgacattcactaatttaatcccaactactactccattttgaaggaaaaaaatgaaggctctgaaagtgtaaatcgcttactgaagggcacacggccaggatgacagcggagccaggatcaccccaggtctgtctcattgcatatgtcatggctctgcaaactggggcaataggtgagcagggagaagagtcatggccaaataaaattgagacataccgatacacacacacacacacacacacacacacacacatttacacggtaacagccttattaaggtacaactaatgtacaataaggtgtacatatttaaaggatactatttgataagttttgacatatgtctgtacctgggaaaccatcactacaatcatgatggtgagcatatctaatactctcaaaagtttcctcttgccttttgtaattccattctgccatcccacctgtccctcccactcctgatcccaggcaaccactgatctgctttctgtcactatagattagttacattttctagaattttatataaatgaaataatacaatatgtactatttttctgtgtttctttcactcagcaaaattattttgagattcattcatgttattgcttgtttattcctttatattgttgagtagttattccattgtatgaatatgccacaatttgtttatctgttcatctacatatggacatctatagatgtttgcacttttgggctattaaaaatcaagttgatgtgaatgtttgta

SEQ ID NO: 253734 - DNA, 360 bp, Artificial Sequence
  derived and/or modified sequence
atgaagaccatggccaccagaaagagatgcaagctgagcagaaccggccccgagttcgagaacgtgatcaagagactgctgtgcgccagaaccttccacaccagaatcggcggcgacctgacccacggcatcatcaacagaggcagaagagccaacgccgagcagatgggcctgcagggcagcgcccagcacttcaacatcttccccctggacctgtggacccagggcgactgcatgctggtgagcctggccaagaacaaggtgaacgtgttcggcgccatcatcaacatggccgccagcgtgagcggcgtgatcggcggcctgaagttcagcagaacctactacgtgaagggcatctag

SEQ ID NO: 253735 - DNA, 360 bp, Artificial Sequence
  derived and/or modified sequence
atgaagacaatggcaactcggaagaggtgcaaactgagcagaactgggcccgaattcgagaacgtcattaaaaggcttctgtgcgcccggacgttccataccagaatcgggggtgacttaacacacggcataatcaaccgaggtcgccgcgcgaatgccgaacagatggggttgcagggcagcgcacagcatttcaacatcttcccactcgacctctggacacagggggactgcatgctagtcagcctggcaaagaataaggtcaacgtgtttggagctatcatcaatatggctgccagcgtgagcggcgtgataggtggactgaagttttcaaggacatactatgtgaaaggcatttag

SEQ ID NO: 253736 - DNA, 360 bp, Artificial Sequence
  derived and/or modified sequence
atgaagacaatggccacacggaaacggtgtaaactgagtaggacaggccctgagttcgagaacgtaattaaacggctgctgtgtgccaggacattccacaccagaatcggcggtgacttgacacacgggatcatcaatcgcgggaggcgagccaatgcagaacagatggggttgcagggctctgctcagcacttcaatatcttccctttagacttgtggacacaaggcgattgtatgctcgtctcgctcgcgaaaaataaagtgaacgtgtttggagccattatcaatatggccgcgagcgtgagtggggtgatcggggggctcaaattcagccggacctattatgtaaaagggatatag

SEQ ID NO: 253737 - DNA, 360 bp, Artificial Sequence
  derived and/or modified sequence
atgaaaacgatggctaccaggaaaaggtgtaaattgagtagaactggccccgagtttgagaatgtgatcaagaggttactgtgcgccaggacctttcatactcggattgggggcgacctgacacacggaatcatcaaccggggcagacgcgcaaatgcagagcagatgggccttcagggaagcgcacaacactttaatattttccccctggacctgtggacacagggcgattgcatgctcgtgagcctggctaagaacaaggtcaacgtgttcggggccataatcaatatggctgccagtgtctccggcgtcatcggcgggctgaagttctcacgaacatattatgtgaagggaatctag

SEQ ID NO: 253738 - DNA, 360 bp, Artificial Sequence
  derived and/or modified sequence
atgaagaccatggccaccaggaagcgctgcaagctgagcaggactggacctgagtttgaaaatgtcatcaagaggctgctgtgtgcccggaccttccacacccgcatcggcggggacctgacccacggcatcatcaacagaggaagaagagccaatgctgagcagatgggcctgcagggcagcgcccagcacttcaacatcttccccctggacctgtggacccagggcgactgcatgctggtgtccctggccaagaacaaggtgaatgtgtttggagccatcatcaacatggccgcctctgtgtctggagtgattggaggcctgaagttcagcaggacctactacgtgaagggcatctag

SEQ ID NO: 253739 - DNA, 360 bp, Artificial Sequence
  derived and/or modified sequence
atgaagaccatggccacccggaagcggtgcaagctgagccggaccggtccagaattcgaaaacgtgatcaagcggttgctctgtgctaggaccttccacacaaggatcggcggggacctgacgcatgggataataaatcggggcaggcgcgctaatgccgagcagatgggccttcagggctctgcccagcacttcaacatttttcccctagacctgtggacccagggtgattgcatgctggtgagcctggcaaaaaacaaggtcaatgtattcggggcaataatcaatatggctgcatcagtgagcggggtgattggcgggctcaagttctcacgaacttactacgtgaaggggatctag

SEQ ID NO: 253740 - DNA, 360 bp, Artificial Sequence
  derived and/or modified sequence
atgaagaccatggccacccggaagcggtgcaagctgagccggaccgggccggagttcgagaacgtgattaagagactgctgtgtgctagaacattccatactcgaatcggcggtgacctgacacacggaatcattaatagggggaggagggccaacgccgaacagatgggactgcaggggagtgcccagcatttcaatatcttcccactggatctgtggacccaaggagactgcatgctggtttcattggccaagaacaaggtgaacgtgttcggtgctatcattaacatggccgcatccgtaagtggcgtaattggaggtcttaaattttcaagaacgtactacgttaaaggaatttag

SEQ ID NO: 253741 - DNA, 360 bp, Artificial Sequence
  derived and/or modified sequence
atgaagaccatggccacccggaagcggtgcaagctgagccggaccggccctgagttcgagaacgttatcaagaggctactctgcgcaaggaccttccacacacgcatcgggggggaccttactcatgggattattaatcgcggtagacgggcaaacgcggaacagatggggctccaaggcagcgcacagcacttcaacattttcccactggacctatggacccagggtgattgtatgctggtcagtctcgcaaagaataaggtgaatgtgtttggtgctatcatcaacatggctgccagcgtgtccggcgtaatcggcggccttaagtttagtagaacttattacgtcaaggggatttag

SEQ ID NO: 253742 - DNA, 360 bp, Artificial Sequence
  derived and/or modified sequence
atgaagacaatggcaacgaggaagcgatgtaaactcagccgcactggccctgagttcgagaatgtgataaagcggctgttatgtgcccgtacctttcatactagaattggaggggaccttacacatggcatcattaacagaggccgaagggcaaatgcggaacaaatgggcttacagggatctgcccaacattttaatatattccctttggatctttggacacagggggattgtatgctggtgtccctggccaaaaacaaggttaacgtgttcggcgcaattattaacatggccgcatccgtttcaggagtgatcggcggacttaagttcagtcggacctactatgtgaaagggatctag

SEQ ID NO: 253743 - DNA, 360 bp, Artificial Sequence
  derived and/or modified sequence
atgaaaaccatggctactaggaaaaggtgtaagctctcccgcaccggacctgagttcgagaatgtcatcaagaggctactgtgcgccagaacgtttcatactagaattgggggagatcttacccacggcattatcaaccggggtcgaagggccaatgcagagcagatgggacttcagggcagcgcccaacactttaacatattccccttagatctgtggacacaaggtgactgcatgctggtgtccttggcaaagaacaaggtgaatgtcttcggagcaattattaacatggctgctagcgtgagcggcgtcattgggggactgaagttttctaggacctattacgtcaaaggcatttag

SEQ ID NO: 253744 - DNA, 360 bp, Artificial Sequence
  derived and/or modified sequence
atgaagacgatggccacccgaaaacggtgcaaactgagccgaactggcccagaatttgaaaacgtgatcaaaaggctgttgtgtgcgagaacattccatacacgaattggcggtgacctcactcatgggattatcaatcgaggcagaagagcaaacgcggaacagatgggcttacaggggagcgcacagcactttaatatcttccctctggatctgtggacacagggagattgcatgctagtcagcctcgccaaaaataaagtcaacgtctttggtgcaatcataaatatggccgctagtgttagtggagttattgggggactcaaattcagtcgaacatactacgttaaaggaatatag

SEQ ID NO: 253745 - protein, 118 aa, Artificial Sequence
  derived and/or modified sequence
MSCQQSQQQCQPPPKCTPKCPPKCPTPKCPPKCPPKCPPVSSCCSVSSGGCCGSSSGGSCGSSSGGCCSSGGGGCCLSHHRRRRSHCHRPQSSGCCSQPSGGSSCCGGGSGQHSGGCC

SEQ ID NO: 253746 - protein, 1066 aa, Artificial Sequence
  derived and/or modified sequence
MHSMISSVDVKSEVPVGLEPISPLDLRTDLRMMMPVVDPVVREKQLQQELLLIQQQQQIQKQLLIAEFQKQHENLTRQHQAQLQEHIKELLAIKQQQELLEKEQKLEQQRQEQEVERHRREQQLPPLRGKDRGRERAVASTEVKQKLQEFLLSKSATKDTPTNGKNHSVSRHPKLWYTAAHHTSLDQSSPPLSGTSPSYKYTLPGAQDAKDDFPLRKTASEPNLKVRSRLKQKVAERRSSPLLRRKDGNVVTSFKKRMFEVTESSVSSSSPGSGPSSPNNGPTGSVTENETSVLPPTPHAEQMVSQQRILIHEDSMNLLSLYTSPSLPNITLGLPAVPSQLNASNSLKEKQKCETQTLRQGVPLPGQYGGSIPASSSHPHVTLEGKPPNSSHQALLQHLLLKEQMRQQKLLVAGGVPLHPQSPLATKERISPGIRGTHKLPRHRPLNRTQSAPLPQSTLAQLVIQQQHQQFLEKQKQYQQQIHMNKLLSKSIEQLKQPGSHLEEAEEELQGDQAMQEDRAPSSGNSTRSDSSACVDDTLGQVGAVKVKEEPVDSDEDAQIQEMESGEQAAFMQQPFLEPTHTRALSVRQAPLAAVGMDGLEKHRLVSRTHSSPAASVLPHPAMDRPLQPGSATGIAYDPLMLKHQCVCGNSTTHPEHAGRIQSIWSRLQETGLLNKCERIQGRKASLEEIQLVHSEHHSLLYGTNPLDGQKLDPRILLGDDSQKFFSSLPCGGLGVDSDTIWNELHSSGAARMAVGCVIELASKVASGELKNGFAVVRPPGHHAEESTAMGFCFFNSVAITAKYLRDQLNISKILIVDLDVHHGNGTQQAFYADPSILYISLHRYDEGNFFPGSGAPNEVGTGLGEGYNINIAWTGGLDPPMGDVEYLEAFRTIVKPVAKEFDPDMVLVSAGFDALEGHTPPLGGYKVTAKCFGHLTKQLMTLADGRVVLALEGGHDLTAICDASEACVNALLGNELEPLAEDILHQSPNMNAVISLQKIIEIQSKYWKSVRMVAVPRGCALAGAQLQEETETVSALASLTVDVEQPFAQEDSRTAGEPMEEEPAL

SEQ ID NO: 253747 - DNA, 3201 bp, Artificial Sequence
  derived and/or modified sequence
atgcacagtatgatcagttcagtggatgtaaagagcgaggtgcctgtgggtctggagcctattagccccctcgacctgcgcactgatctgcggatgatgatgcccgttgtggatcctgtagtgagagagaagcagctgcagcaagagctgctgctcattcagcaacagcaacaaatccaaaaacagctcctgatcgcagagttccagaagcagcacgagaacctgactcggcagcaccaagctcagctgcaggaacatataaaggagctcttggcaatcaaacaacagcaggagctgctggaaaaggaacagaagctggaacagcaacgacaagagcaagaagttgagcggcatagaagagagcagcaattgccacctcttaggggcaaggatcgcggaagggagagggcagtcgctagcaccgaggttaagcagaaacttcaggaatttctgctgagtaaaagtgctacaaaggatactcccaccaatggcaaaaaccacagcgtgtcgcggcaccccaaactgtggtataccgctgcccatcataccagcctcgaccagagctctccccccctgagtggtacaagcccatcatacaagtacaccctgccaggagcacaggacgccaaggacgattttccgctgcggaagaccgcctcagaacctaatctgaaagtgcggtcccgactcaaacaaaaggtcgcagaacgccggtctagcccccttctgaggcgcaaggacggtaatgtagttaccagcttcaagaagcgaatgttcgaggtgacagagtcctcagtctctagttcgtctcccggctccggaccatcaagtccaaacaatgggcccactggttccgtgacggagaatgagaccagcgtcctgcctccaactccccatgccgagcagatggtatcccagcaacgcatcctcattcatgaggattcaatgaatctgctgtctctctataccagcccatctctgcctaacatcactttgggacttcctgccgttccatcccaactgaacgcttctaattccctgaaagagaagcaaaagtgcgaaacccagactctgcgacagggcgtccctctccccggtcagtacggcgggtcaatccctgccagctcctcgcatccccatgtcacccttgagggtaagcccccgaattcttcccaccaagcgctcctgcagcatcttctcttgaaggaacagatgaggcagcaaaagctgctggtggctggcggggttcctctccaccctcagtcacccctagctacgaaagagcggatttctcctggcataaggggaacacacaagcttccccgccacagaccccttaatcgtacacaatcggcccctcttccccagagcactctggcgcagctcgttattcagcaacaacaccagcagttcctggagaaacaaaagcagtatcagcagcagatccacatgaacaagctgttgtctaaatccatagaacaattgaagcagcccggatcacatctggaggaggccgaggaagagcttcagggggaccaggccatgcaggaggacagagcacctagcagtggaaactccacacgcagtgatagcagtgcctgcgtggatgatactttgggccaggtcggagcagtgaaggttaaggaggagcccgtggattcggacgaggatgctcaaatccaagaaatggagtccggggagcaggccgcttttatgcaacaacctttccttgagcccacccacacccgcgctcttagtgtgcggcaggcccccttggccgctgtgggcatggacggcctggagaaacatcgcctcgtatcccgaacccacagtagtcctgcagcttctgtgttacctcacccggctatggataggccactgcagcccgggagcgcaacagggattgcgtacgatcctctcatgctcaagcaccaatgcgtgtgcggaaactctacaacccaccccgagcacgccggccggatacagagcatctggagccgattgcaagagactgggctgttgaacaagtgcgaaaggatacaaggcaggaaagccagtttggaggagatccagctggttcattcagagcaccatagcctcctctacggtaccaacccactggacgggcagaagctggaccctcggattctgctgggcgacgattctcagaagttctttagttctctgccatgtggcggccttggagtcgattccgacacaatctggaacgagctgcacagttccggggccgccaggatggctgtgggctgtgtcatcgaacttgcaagcaaagtcgcctcaggagaactcaaaaatggcttcgctgtggtgcggccaccgggccatcatgccgaagagtcaacggctatgggattttgtttcttcaactccgtggccatcactgcaaagtatctccgcgaccagctgaacattagcaagatactcatcgtcgacctggacgtgcaccacggcaacgggacacagcaagcgttctacgctgatcccagtattctgtacatctcactgcataggtatgacgaggggaatttctttcctggctcaggtgctccaaacgaggtgggcactggccttggcgagggttacaatatcaacatagcatggacggggggtctggacccccctatgggagatgtggaatacctggaggcgttccgcacaatagtcaaacccgtggccaaagaattcgacccggacatggttctggtttccgctggatttgatgcactcgagggacatacgcctcctttgggcggttacaaagtgacagccaaatgcttcggacacctgactaagcagctcatgacattagccgacggcagggtcgtgttggccttggaaggagggcatgacctgactgcaatttgtgatgcatccgaggcttgcgtgaacgcgttattgggaaatgaacttgagcccctcgcggaggatattctgcaccagtctcctaatatgaatgccgtgatctctctacagaagataattgagatccagagtaagtactggaaatcagtaaggatggttgccgtccctcggggctgtgcactggcgggtgctcagctgcaggaagagacagagaccgtgtcagcactcgcttccctaacggtggacgtcgagcagcccttcgcacaggaggattcccgtacagccggggagcccatggaagaggagccagccctgtag

SEQ ID NO: 253748 - DNA, 3201 bp, Artificial Sequence
  derived and/or modified sequence
atgcacagcatgatcagctctgtggatgtgaagtctgaggtgcctgtgggcctggagcccatcagccccctggacctgaggacagacctgaggatgatgatgcctgtggtggaccctgtggtgcgggagaagcagctgcagcaggagctgctgctgatccagcagcagcagcagatccagaagcagctgctgattgctgagttccagaagcagcacgagaacctgacccggcagcaccaggcccagctgcaggagcacatcaaggagctgctggccatcaagcagcagcaggagctgctggagaaggagcagaagctggagcagcagaggcaggagcaggaggtggagcggcacagaagagagcagcagctgccccccctgcggggcaaggaccggggccgggagagagctgtggccagcacagaggtgaagcagaagctgcaggagttcctgctgagcaagagcgccaccaaggacacccccaccaacgggaagaaccacagcgtgagccgccaccccaagctgtggtacacagctgcccaccacaccagcctggaccagagcagcccccccctgagcggcaccagccccagctacaagtacaccctgcccggggcccaggatgccaaggatgacttccccctgaggaagacagccagcgagcccaacctgaaggtgcgcagccggctgaagcagaaggtggccgagaggaggagcagccccctgctgcggaggaaggatggaaatgtggtgaccagcttcaagaagaggatgtttgaggtgacagagagctctgtgagcagcagcagccctggcagcggccccagcagccccaacaacggccccactggatctgtgacagaaaatgagacctctgtgctgccccccacccctcatgctgagcagatggtgtcccagcagaggatcctgattcatgaagattccatgaacctgctgagcctgtacaccagccccagcctgcccaacatcaccctgggcctgcctgctgtgcccagccagctgaatgccagcaacagcctgaaggagaagcagaagtgtgagacccagaccctgcggcagggcgtgcccctgcccggccagtatggaggcagcatcccagccagcagcagccacccccacgtgaccctggagggcaagccacccaacagcagccaccaggccctgctgcagcacctgctgctgaaggagcagatgaggcagcagaagctgctggtggccggcggcgtgcccctgcacccccagagccccctggccaccaaggagcgcatcagccctggcatccggggcacccacaagctgcccaggcaccggcccctgaacagaacccagagcgcccccctgccccagagcaccctggcccagctggtgatccagcagcagcaccagcagttcctggagaagcagaagcagtaccagcagcagatccacatgaacaagctgctgagcaagagcattgagcagctgaagcagcccggcagccacctggaggaggccgaggaggagctgcagggcgaccaggccatgcaggaggaccgggcccccagcagcggcaacagcaccaggagtgacagcagcgcctgtgtggatgacaccctgggccaggtgggcgctgtgaaggtgaaggaggagcctgtggacagtgatgaagatgcccagatccaggagatggagagcggggagcaggccgccttcatgcagcagcccttcctggagcccacccacacccgggccctgtctgtgcggcaggcccccctggccgctgtgggcatggatggcctggagaagcaccggctggtgtccaggacccacagcagccctgctgcctctgtgctgccccacccagccatggaccggcccctgcagcccggcagcgccactggaattgcctatgaccccctgatgctgaagcaccagtgtgtgtgtggcaacagcaccacccaccctgagcacgccggccgcatccagagcatctggagccggctgcaggagaccggcctgctgaacaagtgtgagcgcatccagggcaggaaggccagcctggaggagatccagctggtgcacagcgagcaccacagcctgctgtatggcaccaaccccctggatggccagaagctggacccccgcatcctgctgggagatgacagccagaagttcttcagcagcctgccctgtggcggcctgggcgtggacagcgacaccatctggaatgagctgcacagcagcggggccgccaggatggctgtgggctgtgtgattgagctggccagcaaggtggccagcggggagctgaagaatggatttgctgtggtgcggcccccaggccaccacgccgaggagagcacagccatgggcttctgcttcttcaacagcgtggccatcacagccaagtacctgcgggaccagctgaacatcagcaagatcctgattgtggacctggatgtgcaccacggcaatggcacccagcaggccttctatgctgaccccagcatcctgtacatcagcctgcacagatatgatgagggcaacttcttccctggcagcggggccccaaatgaggtgggcaccggcctgggggagggctacaacatcaacatcgcctggacaggaggcctggacccccccatgggagatgtggagtacctggaggccttccgcaccatcgtgaagcctgtggccaaggagtttgatcctgacatggtgctggtgtctgctggctttgatgccctggagggccacaccccacccctgggcggctacaaggtgacagccaagtgcttcggccacctgaccaagcagctgatgaccctggctgatggccgggtggtgctggccctggagggcggccatgacctgacagccatctgtgatgccagcgaggcctgtgtgaatgccctgctgggcaatgagctggagcccctggccgaggacatcctgcaccagagccccaacatgaatgctgtgatcagcctgcagaagatcatcgagatccagagcaagtactggaagtctgtgaggatggtggccgtgccccggggctgtgccctggccggggcccagctgcaggaggagacagaaacagtgtctgccctggccagcctgactgtggatgtggagcagccctttgcccaggaggacagcaggacagctggggagcccatggaggaggagcccgccctgtag

SEQ ID NO: 253749 - DNA, 3201 bp, Artificial Sequence
  derived and/or modified sequence
atgcacagcatgatcagcagcgtggacgtgaagagcgaggtgcccgtgggcttggagccaatttctccacttgatctgcggacggatctaagaatgatgatgcctgtcgtggacccagtcgtgcgcgaaaaacagctacagcaggaactgctcctgattcagcagcagcaacagatccagaagcagcttttaatcgcagagtttcagaaacagcatgagaatctgaccagacagcatcaggcacagctccaggagcacattaaagagctcctcgcaataaagcagcagcaggaattgttggaaaaggagcagaaactggaacagcaaagacaggagcaggaggttgagcgtcatcggcgcgaacagcagcttcctccattgagggggaaggaccgcgggagagagcgagctgtggcttccactgaggttaagcagaaactccaggagttcttattgagtaagtccgctacaaaagacacgcctaccaacggaaagaatcactccgtgtctcgccaccccaaactctggtacacagccgcccatcatacttccttggaccaatcttcacctcctctgtcaggtacctctccttcctacaagtacaccctgcccggcgcacaagatgctaaggacgattttccgttgcgcaagactgccagcgaacccaacctgaaggtccggtctcgactaaaacagaaagtagcagaacggcgctcctccccactgctacgtcgaaaggatggcaatgtggtaaccagttttaaaaaacgcatgtttgaagtgaccgagagcagtgtttcctctagttcccccgggtctggcccttcctccccaaataacggccccaccgggtccgtgactgaaaacgagacatctgtattacctcccacaccccacgcagagcaaatggtgtcccagcagcgaatcctcattcatgaagacagtatgaatctgctgagtctttatacaagtccatctctccccaacattactctcggccttcccgctgttccttctcagctcaatgcgtctaatagtctgaaggaaaagcagaagtgcgaaacccagacgctcagacagggtgtacctcttccgggtcaatatggaggcagtattcccgctagttctagtcacccgcacgttacacttgagggtaaaccacccaactcaagtcaccaagctctgcttcagcatcttctgctaaaagaacagatgcgtcagcagaaactgcttgtcgcgggcggagtacctttacacccccagtcacccctcgcgaccaaggagaggattagtcccggtatcaggggaacacataagctcccaaggcacagaccgttaaatcgtacccagagcgcgcctcttccacagagcacactggcccagctcgtcatccaacagcagcaccagcagtttctggaaaaacagaaacagtaccagcagcagatccacatgaacaaactgctctctaaaagtattgaacaattgaagcaacctggtagccacctcgaagaggcagaggaggaacttcagggagaccaagccatgcaggaggatagagccccttcctctggaaactcgaccaggagtgattcctccgcctgcgtcgacgataccctcggacaggtgggagccgtgaaggtgaaagaagagccagtggatagcgatgaagatgcccagatacaggagatggaatccggggaacaggctgcttttatgcagcagcccttcctggagccaactcacacgagggctctgtctgtcaggcaggcacctctggccgctgtgggtatggatgggctggaaaagcacagactggtctcccggacacactcctccccagctgccagcgtcctgccccatcccgctatggacagacccctgcaacccggatccgctactgggatagcttatgatcctctgatgctcaagcatcagtgcgtgtgcggcaacagcacaacccatcctgaacacgctggacgcatccaatccatctggtcccgcctacaggaaaccggattgctgaataaatgcgagcgaatccaaggtagaaaggccagcctagaagaaattcagctggttcacagcgaacaccatagcctcctgtacgggacaaacccccttgatgggcagaaactggatcctagaatactgctgggggacgattcccagaagttcttcagttctctgccttgcggggggttgggggttgactctgatacaatttggaacgagctacattcatccggggcagcccgaatggctgtcgggtgtgttatagagctcgccagtaaggttgcctctggggagcttaaaaacggttttgccgttgtgcgcccccctgggcatcacgcagaagagtcaacagccatggggttctgcttttttaactctgtggccatcactgccaaatatctgcgcgatcagctcaatatttctaagatccttattgtggatctcgacgtgcatcacggcaatggcacgcagcaggcgttttatgccgaccccagcattctgtacattagtctacacaggtacgacgagggaaacttcttccccggatctggggcgccaaacgaggtcgggacggggcttggggagggttataacataaacattgcatggacaggaggacttgatccacctatgggggacgtggaatacctggaagctttccggaccattgtgaaaccagtggctaaggagttcgacccagacatggtattggtcagcgcgggctttgatgccctggagggccatacgcctccattgggtggttataaagtcacagccaaatgcttcgggcacctcactaagcagctgatgacattggctgatggccgcgtggtcctggccctggaagggggacacgacttgacagccatttgcgatgctagcgaagcatgtgtgaacgctctgctgggcaatgaactcgagccactggccgaagatatactgcatcagtccccaaatatgaatgccgttattagcttacagaaaattattgaaattcagtccaagtattggaaatccgtacgcatggtggccgttcccagaggatgtgcgcttgccggagcgcagctccaggaagagacagaaaccgtctctgccctggccagtctgacggtcgatgttgagcagcctttcgcacaagaggattccaggactgctggcgagccaatggaagaagaacccgcattatag

SEQ ID NO: 253750 - DNA, 3201 bp, Artificial Sequence
  derived and/or modified sequence
atgcattctatgatatcaagcgtcgatgtgaagagcgaggttccagttggactagagccaattagccccttggacctccgaaccgatctgaggatgatgatgcctgtagtggatcccgttgtgcgcgagaaacagctccaacaggagctcctgcttattcaacagcagcagcagattcagaagcagctgctcatcgctgagttccagaagcagcacgaaaacttgaccagacagcaccaggcgcaacttcaggagcatatcaaggagctcttggcaattaaacagcagcaggagctgctggagaaggagcagaaacttgaacagcaacgtcaggagcaggaggtggaacgccaccggcgagaacagcaactccctcccctgaggggaaaagatcggggacgggaaagagctgtggcttccaccgaggttaagcaaaagcttcaggaatttctgctcagcaaatctgcgacaaaggatacacctacgaacggtaaaaatcatagtgtgtctcgccacccaaagctgtggtacacagcggctcatcacacaagtctggatcagtccagtccccctctaagcgggactagtcctagctataagtatacgctcccgggtgcccaggacgctaaggacgacttccctctgcgaaaaaccgcttccgagcctaatctcaaggtgagaagccgactgaagcagaaggtggccgaacggagatcttcacccctgctgaggcgcaaagatggcaatgtagtgacgagctttaaaaaacggatgtttgaagtgactgagtccagtgtgtcctcatcgagtccaggctcaggacctagttcccccaacaacgggcctaccggatccgtgacagagaacgaaactagtgtgctgccacctacacctcacgcagaacagatggtgtctcagcagaggattctgatacacgaggactcaatgaatttgctgtcgctctatacttcaccgagcctgccaaatatcacactggggctgcccgcagtcccgtcccagttgaatgctagcaacagtctaaaagaaaagcagaaatgcgaaactcagactctgcgccagggagtgcctctgcccggtcaatatggaggatctatcccggcttcgagtagtcacccacatgtgacccttgagggtaagcctccaaattctagtcaccaggcccttttgcaacatttgttgttaaaggaacagatgcggcaacagaagctgctcgtggccggaggggtgccactccatcctcagtccccactcgctaccaaggagcggatttcccccggaattcgcggaacacacaaactgccccgacatcggccactgaatcgcacccagtccgctccgctacctcagagtaccttggcccagctcgtgattcagcagcagcaccagcagttcctggagaaacaaaaacaataccaacagcagatccatatgaacaaactgttgtctaagagcattgaacaattgaaacaacccggttcgcatcttgaggaggctgaagaggaactgcaaggtgatcaggctatgcaggaagatcgcgcaccttcaagcggcaactccacacgatcggattcctccgcttgcgtggacgataccttaggccaagtgggggctgtcaaggtgaaagaggagcccgtggactctgatgaggatgcacaaatccaggagatggaaagtggtgagcaggccgcattcatgcagcagcccttcctagagcctacacatactagagccctgagcgtccgccaagccccactggctgctgtcggcatggacgggctggagaagcataggctcgtgtctaggacacattctagtccagccgcttctgtacttccccacccagccatggatagacctctgcagcccggaagcgcgaccggaatcgcgtacgatccactgatgcttaaacaccaatgcgtgtgtggcaacagtaccacgcatccagagcacgctggcagaatacaaagtatctggtctcgcctccaggagactggtctcctgaacaaatgcgaaaggatacaagggagaaaggccagcctggaggaaatccagttggtccactccgaacaccacagtctgctttacggaacaaatccgctggacggacagaagctggacccaaggattctgctgggagatgactcccagaaattctttagctcgctaccctgtgggggactgggggtcgatagtgacacaatctggaatgagctgcatagttctggggctgcgagaatggccgtaggatgcgtcattgaactggccagcaaggtggccagcggcgagctgaagaatggcttcgccgttgtgcgccctccaggccaccacgcagaagagtcaacagcaatgggattctgtttcttcaacagtgtagctattactgcaaagtacctccgcgaccagctgaacatttccaagatcctgatcgtggatcttgacgtacaccacggaaatggaactcagcaagccttttacgctgatccttccattctgtatatcagcttacaccggtacgatgaagggaatttcttccccggatccggagcacctaacgaagttggtactgggctaggggaggggtacaatatcaatatcgcctggacgggcggactcgacccacccatgggtgatgttgaatacctcgaagcctttcggaccattgttaagcctgtagcaaaagagttcgaccccgatatggtcttggtgtctgccggattcgacgccctcgagggacacacgcctccactggggggatacaaggtgaccgctaagtgttttggacacctcaccaaacaacttatgaccctggctgatggaagagttgttctggccctggaaggcggtcatgatctcacggccatctgtgatgcctccgaggcatgtgtgaatgccctcttaggaaacgagctcgaaccactggccgaagatatccttcatcaaagcccaaacatgaatgcagtgatcagtctccaaaagattattgaaatacagagtaagtattggaaatctgtaaggatggtggccgtgccaaggggttgcgccctggccggtgcccaactacaagaagagaccgaaaccgtgagtgcattagctagcttgaccgtcgacgtggagcagccatttgcacaagaagactcaagaaccgcaggtgagcccatggaggaggagccagccctctag

SEQ ID NO: 253751 - DNA, 3201 bp, Artificial Sequence
  derived and/or modified sequence
atgcacagcatgatcagcagcgtggacgtgaagagcgaggtgcccgtgggcctggagcccatcagccccctggacctgagaaccgacctgagaatgatgatgcccgtggtggaccccgtggtgagagagaagcagctgcagcaggagctgctgctgatccagcagcagcagcagatccagaagcagctgctgatcgccgagttccagaagcagcacgagaacctgaccagacagcaccaggcccagctgcaggagcacatcaaggagctgctggccatcaagcagcagcaggagctgctggagaaggagcagaagctggagcagcagagacaggagcaggaggtggagagacacagaagagagcagcagctgccccccctgagaggcaaggacagaggcagagagagagccgtggccagcaccgaggtgaagcagaagctgcaggagttcctgctgagcaagagcgccaccaaggacacccccaccaacggcaagaaccacagcgtgagcagacaccccaagctgtggtacaccgccgcccaccacaccagcctggaccagagcagcccccccctgagcggcaccagccccagctacaagtacaccctgcccggcgcccaggacgccaaggacgacttccccctgagaaagaccgccagcgagcccaacctgaaggtgagaagcagactgaagcagaaggtggccgagagaagaagcagccccctgctgagaagaaaggacggcaacgtggtgaccagcttcaagaagagaatgttcgaggtgaccgagagcagcgtgagcagcagcagccccggcagcggccccagcagccccaacaacggccccaccggcagcgtgaccgagaacgagaccagcgtgctgccccccaccccccacgccgagcagatggtgagccagcagagaatcctgatccacgaggacagcatgaacctgctgagcctgtacaccagccccagcctgcccaacatcaccctgggcctgcccgccgtgcccagccagctgaacgccagcaacagcctgaaggagaagcagaagtgcgagacccagaccctgagacagggcgtgcccctgcccggccagtacggcggcagcatccccgccagcagcagccacccccacgtgaccctggagggcaagccccccaacagcagccaccaggccctgctgcagcacctgctgctgaaggagcagatgagacagcagaagctgctggtggccggcggcgtgcccctgcacccccagagccccctggccaccaaggagagaatcagccccggcatcagaggcacccacaagctgcccagacacagacccctgaacagaacccagagcgcccccctgccccagagcaccctggcccagctggtgatccagcagcagcaccagcagttcctggagaagcagaagcagtaccagcagcagatccacatgaacaagctgctgagcaagagcatcgagcagctgaagcagcccggcagccacctggaggaggccgaggaggagctgcagggcgaccaggccatgcaggaggacagagcccccagcagcggcaacagcaccagaagcgacagcagcgcctgcgtggacgacaccctgggccaggtgggcgccgtgaaggtgaaggaggagcccgtggacagcgacgaggacgcccagatccaggagatggagagcggcgagcaggccgccttcatgcagcagcccttcctggagcccacccacaccagagccctgagcgtgagacaggcccccctggccgccgtgggcatggacggcctggagaagcacagactggtgagcagaacccacagcagccccgccgccagcgtgctgccccaccccgccatggacagacccctgcagcccggcagcgccaccggcatcgcctacgaccccctgatgctgaagcaccagtgcgtgtgcggcaacagcaccacccaccccgagcacgccggcagaatccagagcatctggagcagactgcaggagaccggcctgctgaacaagtgcgagagaatccagggcagaaaggccagcctggaggagatccagctggtgcacagcgagcaccacagcctgctgtacggcaccaaccccctggacggccagaagctggaccccagaatcctgctgggcgacgacagccagaagttcttcagcagcctgccctgcggcggcctgggcgtggacagcgacaccatctggaacgagctgcacagcagcggcgccgccagaatggccgtgggctgcgtgatcgagctggccagcaaggtggccagcggcgagctgaagaacggcttcgccgtggtgagaccccccggccaccacgccgaggagagcaccgccatgggcttctgcttcttcaacagcgtggccatcaccgccaagtacctgagagaccagctgaacatcagcaagatcctgatcgtggacctggacgtgcaccacggcaacggcacccagcaggccttctacgccgaccccagcatcctgtacatcagcctgcacagatacgacgagggcaacttcttccccggcagcggcgcccccaacgaggtgggcaccggcctgggcgagggctacaacatcaacatcgcctggaccggcggcctggacccccccatgggcgacgtggagtacctggaggccttcagaaccatcgtgaagcccgtggccaaggagttcgaccccgacatggtgctggtgagcgccggcttcgacgccctggagggccacaccccccccctgggcggctacaaggtgaccgccaagtgcttcggccacctgaccaagcagctgatgaccctggccgacggcagagtggtgctggccctggagggcggccacgacctgaccgccatctgcgacgccagcgaggcctgcgtgaacgccctgctgggcaacgagctggagcccctggccgaggacatcctgcaccagagccccaacatgaacgccgtgatcagcctgcagaagatcatcgagatccagagcaagtactggaagagcgtgagaatggtggccgtgcccagaggctgcgccctggccggcgcccagctgcaggaggagaccgagaccgtgagcgccctggccagcctgaccgtggacgtggagcagcccttcgcccaggaggacagcagaaccgccggcgagcccatggaggaggagcccgccctgtag

SEQ ID NO: 253752 - protein, 148 aa, Artificial Sequence
  derived and/or modified sequence
MHSMISSVDVKSEVPVGLEPISPLDLRTDLRMMMPVVDPVVREKQLQQELLLIQQQQQIQKQLLIAEFQKQHENLTRQHQAQLQEHIKLQQELLAIKQQQELLEKEQKLEQQRQEQEVERHRREQQLPPLRGKDRGRERAVASTEVKQ

SEQ ID NO: 253753 - DNA, 3210 bp, Artificial Sequence
  derived and/or modified sequence
atgcatagtatgattagcagcgtcgacgtgaaatcagaggttcccgtcgggctcgaacccattagtcctctggatctgcgaacagacctcaggatgatgatgcctgtggtggatcctgttgtcagagagaagcagttgcagcaagagctcttactgattcaacagcagcaacagatccagaagcagcttctaattgcggagttccaaaaacaacatgagaatttgaccaggcagcatcaagcacagctgcaggaacatatcaaactacaacaggaactcttggccataaaacaacagcaggaactgttagagaaggagcagaaactggagcagcagcgccaggagcaagaagtggaacggcacagacgagaacaacaactgcccccgttgcgagggaaggacagagggagggagcgagccgtcgccagcaccgaagtgaagcagaaactgcaggaattcctattgagcaagagtgctaccaaagatacccccaccaacggaaaaaatcacagcgtaagccgccaccctaagctgtggtatactgccgcccatcatacttccctggatcagagctctccccctctgagtgggacttctccgagttataaatatactctccccggagcccaggatgccaaggacgatttcccactccgcaagaccgcctctgagcccaacctcaaggttcggtccaggctgaaacaaaaagtagctgagagaagaagtagccccctgctgcgacgaaaggatggtaacgtagtcacgtcattcaaaaaaagaatgtttgaggtgaccgagagctccgtgagctcttcaagtcccgggagtggtccttctagcccaaataacggtcctactggttctgttactgaaaatgagacgagcgtgctacctcccactccccatgctgaacaaatggtgtcccagcagcgcatcctcatacatgaagatagcatgaatctgttatcgctctatacatcaccgtcactccctaatataactctggggctcccagctgtgccttcacagctgaacgccagcaattctctcaaggaaaagcagaagtgcgaaactcagaccctgcgacaaggggttcccttgcctgggcagtacgggggatcaatacctgcctcctcatcgcatccccatgtaacactggagggaaagccgcccaactcctctcaccaggcgctgcttcaacacttgctcctcaaggagcagatgagacagcagaaactgctcgtagcgggaggggtgccccttcatccacagagcccgctggccactaaggaacggatatccccaggcattcggggcacccacaaacttcctcgccacaggccactgaatcgaacacagtcagctcccttgccacaatcaaccctggcacagctcgtgatacagcagcagcatcagcagtttctggaaaaacaaaaacagtaccaacagcagattcacatgaataaactgctatccaagtccattgaacaactaaagcagccagggtcccatctcgaggaagccgaggaagagctacagggtgaccaagcaatgcaggaggacagggcgccctctagcggcaactccactcgctcagactcctctgcgtgcgtcgatgataccctgggacaggttggagctgttaaagttaaggaggagcccgtagactccgatgaagatgctcagatacaggaaatggaaagcggggaacaagccgccttcatgcagcagcctttcctcgagcccacacatactcgcgcccttagcgttaggcaagctcccttggcggccgtgggcatggacgggctggagaaacatagacttgtgtcaaggacccattcgtcacccgcagcttcagtgctgcctcacccggccatggacagacccctgcaacctggcagcgccacgggaattgcgtatgacccccttatgctgaaacaccagtgtgtatgcggtaacagcaccactcaccctgagcatgcgggaaggatccagtcgatttggagtcggctccaagagacaggattactaaacaagtgtgagcgcattcaggggcgcaaagcttcactggaggagatccagttggtgcactccgagcaccacagcctcctgtatgggactaatccacttgatggccagaaattggaccctagaatcctcctgggcgatgactctcagaagtttttcagtagtctgccttgtggcggattgggcgtggacagtgacactatctggaatgaattgcatagttcaggagcggctaggatggccgtggggtgcgtcatcgaattggctagcaaagtcgcttcgggcgaattaaaaaatggatttgccgtggtgcgaccacccggacaccacgctgaagagagtacagctatgggtttttgtttctttaactcggttgcaattaccgccaagtatcttagggaccaactgaatatctctaaaattcttattgtagacctggatgtgcatcatggcaatggaacccagcaggccttctacgcagacccaagtattttgtacatctcacttcatcgatatgacgaaggcaattttttcccgggaagtggtgctcctaacgaggtaggtacaggcttgggtgaagggtacaatattaatattgcctggacgggagggctcgaccccccaatgggagacgtggagtacctggaagctttcagaacaatcgtcaaaccagtagcaaaagagttcgatcctgacatggtcttggtgtcggccggattcgatgccctagagggccacactcctcctctggggggctataaggtgacagccaagtgcttcgggcacctgactaagcagttgatgaccctggctgacgggagagtcgttctcgccctagagggagggcatgacctgacagccatctgtgatgcctccgaagcgtgtgtgaatgctttgctgggtaacgagctggagccgctcgcggaggacatactgcaccagtctccgaatatgaacgctgttatcagcctccagaaaatcatcgagatccagtctaaatactggaaatccgtgcggatggtggcagtgccgcgaggttgtgcgctggccggagcccaactacaagaggagaccgagaccgtgtccgcgttggcaagcttgactgttgacgttgaacaaccttttgcccaagaagacagccgtactgccggtgagccaatggaggaagagccagccctgtag

SEQ ID NO: 253754 - DNA, 3210 bp, Artificial Sequence
  derived and/or modified sequence
atgcacagtatgatcagctcagtggatgtgaagtcagaagttcctgtgggcctggagcccatctcacctttagacctaaggacagacctcaggatgatgatgcccgtggtggaccctgttgtccgtgagaagcaattgcagcaggaattacttcttatccagcagcagcaacaaatccagaagcagcttctgatagcagagtttcagaaacagcatgagaacttgacacggcagcaccaggctcagcttcaggagcatatcaagttgcaacaggaacttctagccataaaacagcaacaagaactcctagaaaaggagcagaaactggagcagcagaggcaagaacaggaagtagagaggcatcgcagagaacagcagcttcctcctctcagaggcaaagatagaggacgagaaagggcagtggcaagtacagaagtaaagcagaagcttcaagagttcctactgagtaaatcagcaacgaaagacactccaactaatggaaaaaatcattccgtgagccgccatcccaagctctggtacacggctgcccaccacacatcattggatcaaagctctccaccccttagtggaacatctccatcctacaagtacacattaccaggagcacaagatgcaaaggatgatttcccccttcgaaaaactgcctctgagcccaacttgaaggtgcggtccaggttaaaacagaaagtggcagagaggagaagcagccccttactcaggcggaaggatggaaatgttgtcacttcattcaagaagcgaatgtttgaggtgacagaatcctcagtcagtagcagttctccaggctctggtcccagttcaccaaacaatgggccaactggaagtgttactgaaaatgagacttcggttttgccccctacccctcatgccgagcaaatggtttcacagcaacgcattctaattcatgaagattccatgaacctgctaagtctttatacctctccttctttgcccaacattaccttggggcttcccgcagtgccatcccagctcaatgcttcgaattcactcaaagaaaagcagaagtgtgagacgcagacgcttaggcaaggtgttcctctgcctgggcagtatggaggcagcatcccggcatcttccagccaccctcatgttactttagagggaaagccacccaacagcagccaccaggctctcctgcagcatttattattgaaagaacaaatgcgacagcaaaagcttcttgtagctggtggagttcccttacatcctcagtctcccttggcaacaaaagagagaatttcacctggcattagaggtacccacaaattgccccgtcacagacccctgaaccgaacccagtctgcacctttgcctcagagcacgttggctcagctggtcattcaacagcaacaccagcaattcttggagaagcagaagcaataccagcagcagatccacatgaacaaactgctttcgaaatctattgaacaactgaagcaaccaggcagtcaccttgaggaagcagaggaagagcttcagggggaccaggcgatgcaggaagacagagcgccctctagtggcaacagcactaggagcgacagcagtgcttgtgtggatgacacactgggacaagttggggctgtgaaggtcaaggaggaaccagtggacagtgatgaagatgctcagatccaggaaatggaatctggggagcaggctgcttttatgcaacagcctttcctggaacccacgcacacacgtgcgctctctgtgcgccaagctccgctggctgcggttggcatggatggattagagaaacaccgtctcgtctccaggactcactcttcccctgctgcctctgttttacctcacccagcaatggaccgccccctccagcctggctctgcaactggaattgcctatgaccccttgatgctgaaacaccagtgcgtttgtggcaattccaccacccaccctgagcatgctggacgaatacagagtatctggtcacgactgcaagaaactgggctgctaaataaatgtgagcgaattcaaggtcgaaaagccagcctggaggaaatacagcttgttcattctgaacatcactcactgttgtatggcaccaaccccctggacggacagaagctggaccccaggatactcctaggtgatgactctcaaaagtttttttcctcattaccttgtggtggacttggggtggacagtgacaccatttggaatgagctacactcgtccggtgctgcacgcatggctgttggctgtgtcatcgagctggcttccaaagtggcctcaggagagctgaagaatgggtttgctgttgtgaggccccctggccatcacgctgaagaatccacagccatggggttctgcttttttaattcagttgcaattaccgccaaatacttgagagaccaactaaatataagcaagatattgattgtagatctggatgttcaccatggaaacggtacccagcaggccttttatgctgaccccagcatcctgtacatttcactccatcgctatgatgaagggaactttttccctggcagtggagccccaaatgaggttggaacaggccttggagaagggtacaatataaatattgcctggacaggtggccttgatcctcccatgggagatgttgagtaccttgaagcattcaggaccatcgtgaagcctgtggccaaagagtttgatccagacatggtcttagtatctgctggatttgatgcattggaaggccacacccctcctctaggagggtacaaagtgacggcaaaatgttttggtcatttgacgaagcaattgatgacattggctgatggacgtgtggtgttggctctagaaggaggacatgatctcacagccatctgtgatgcatcagaagcctgtgtaaatgcccttctaggaaatgagctggagccacttgcagaagatattctccaccaaagcccgaatatgaatgctgttatttctttacagaagatcattgaaattcaaagcaagtattggaagtcagtaaggatggtggctgtgccaaggggctgtgctctggctggtgctcagttgcaagaggagacagagaccgtttctgccctggcctccctaacagtggatgtggaacagccctttgctcaggaagacagcagaactgctggtgagcctatggaagaggagccagccttgtga

SEQ ID NO: 253755 - DNA, 3210 bp, Artificial Sequence
  derived and/or modified sequence
atgcacagcatgatcagctctgtggatgtgaagtctgaggtgcctgtgggcctggagcccatcagccccctggacctgaggacagacctgaggatgatgatgcctgtggtggaccctgtggtgcgggagaagcagctgcagcaggagctgctgctgatccagcagcagcagcagatccagaagcagctgctgattgctgagttccagaagcagcacgagaacctgacccggcagcaccaggcccagctgcaggagcacatcaagctgcagcaggagctgctggccatcaagcagcagcaggagctgctggagaaggagcagaagctggagcagcagaggcaggagcaggaggtggagcggcaccggcgggagcagcagctgccccccctgcggggcaaggaccggggccgggagagagctgtggccagcacagaggtgaagcagaagctgcaggagttcctgctgagcaagagcgccaccaaggacacccccaccaacgggaagaaccacagcgtgagccgccaccccaagctgtggtacacagctgcccaccacaccagcctggaccagagcagcccccccctgagcggcaccagccccagctacaagtacaccctgcccggggcccaggatgccaaggatgacttccccctgaggaagacagccagcgagcccaacctgaaggtgcgcagccggctgaagcagaaggtggccgagcggcgcagcagccccctgctgcggaggaaggatggaaatgtggtgaccagcttcaagaagaggatgtttgaggtgacagagagctctgtgagcagcagcagccctggcagcggccccagcagccccaacaacggccccaccggctctgtgacagaaaatgagacctctgtgctgccccccacccctcatgctgagcagatggtgtcccagcagaggatcctgattcatgaggacagcatgaacctgctgagcctgtacaccagccccagcctgcccaacatcaccctgggcctgcctgctgtgcccagccagctgaatgccagcaacagcctgaaggagaagcagaagtgtgagacccagaccctgcggcagggcgtgcccctgcccggccagtatggaggcagcatcccagccagcagcagccacccccacgtgaccctggagggcaagccacccaacagcagccaccaggccctgctgcagcacctgctgctgaaggagcagatgaggcagcagaagctgctggtggccggcggcgtgcccctgcacccccagagccccctggccaccaaggagcgcatcagccctggcatccggggcacccacaagctgcccaggcaccggcccctgaacagaacccagagcgcccccctgccccagagcaccctggcccagctggtgatccagcagcagcaccagcagttcctggagaagcagaagcagtaccagcagcagatccacatgaacaagctgctgagcaagagcattgagcagctgaagcagcccggcagccacctggaggaggccgaggaggagctgcagggcgaccaggccatgcaggaggaccgggcccccagcagcggcaacagcaccaggagtgacagcagcgcctgtgtggatgacaccctgggccaggtgggcgctgtgaaggtgaaggaggagcctgtggacagtgatgaagatgcccagatccaggagatggagagcggggagcaggccgccttcatgcagcagcccttcctggagcccacccacacccgggccctgtctgtgcggcaggcccccctggccgctgtgggcatggatggcctggagaagcaccggctggtgtccaggacccacagcagccctgctgcctctgtgctgccccacccagccatggaccggcccctgcagcccggcagcgccaccggcatcgcctatgaccccctgatgctgaagcaccagtgtgtgtgtggcaacagcaccacccaccctgagcacgccggccgcatccagagcatctggagccggctgcaggagaccggcctgctgaacaagtgtgagcgcatccagggcaggaaggccagcctggaggagatccagctggtgcacagcgagcaccacagcctgctgtatggcaccaaccccctggatggccagaagctggacccccgcatcctgctgggagatgacagccagaagttcttcagcagcctgccctgtggcggcctgggcgtggacagcgacaccatctggaatgagctgcacagcagtggagctgccaggatggctgtgggctgcgtcatcgagctggccagcaaggtggccagcggggagctgaagaatggatttgctgtggtgcggcccccaggccaccacgccgaggagagcacagccatgggcttctgcttcttcaacagcgtggccatcacagccaagtacctgcgggaccagctgaacatcagcaagatcctgattgtggacctggatgtgcaccacggcaatggcacccagcaggccttctacgccgaccccagcatcctgtacatcagcctgcacagatatgatgagggcaacttcttccctggcagcggggccccaaatgaggtgggcaccggcctgggggagggctacaacatcaacatcgcctggacaggaggcctggacccccccatgggagatgtggagtacctggaggccttccgcaccatcgtgaagcctgtggccaaggagtttgatcctgacatggtgctggtgtctgctggctttgatgccctggagggccacaccccacccctgggcggctacaaggtgacagccaagtgcttcggccacctgaccaagcagctgatgaccctggctgatggccgggtggtgctggccctggagggcggccatgacctgacagccatctgtgatgccagcgaggcctgtgtgaatgccctgctgggcaatgagctggagcccctggccgaggacatcctgcaccagagccccaacatgaatgctgtgatcagcctgcagaagatcatcgagatccagagcaagtactggaagtctgtgaggatggtggccgtgccccggggctgtgccctggccggggcccagctgcaggaggagacagagaccgtgtctgccctggccagcctgactgtggatgtggagcagccctttgcccaggaggacagcaggacagctggggagcccatggaggaggagcccgccctgtag

SEQ ID NO: 253756 - DNA, 3210 bp, Artificial Sequence
  derived and/or modified sequence
atgcacagcatgatcagcagcgtggacgtgaagagcgaggtgcccgtgggtctggagcccatctctccactggatctacgaacagacctgagaatgatgatgcccgtggtcgatcccgtagtccgagagaagcagttgcagcaggagttactcctcattcaacagcagcagcagattcagaaacagctcctcatcgctgagttccagaagcagcacgaaaatcttactcgccagcatcaagctcagctccaggagcatataaaactgcaacaggagttgttggctatcaagcagcagcaggagctgctggagaaggaacagaaactggaacagcagcgccaggagcaggaggtggagcgacataggagagagcagcagctcccccctttacgtggcaaggatcgcgggcgggaaagagccgtggccagtactgaggtgaaacagaagctgcaggaatttttactgtccaaatcggctacaaaagacacgccgaccaacggcaagaaccacagcgtttcccgacacccgaagctatggtacaccgctgctcaccacacatcactggatcagtccagcccacctctttctgggactagcccctcgtacaaatataccttacctggggctcaagatgccaaggacgacttcccgttgcggaaaacagcttcagagccgaacttgaaggtgaggagcagactgaagcagaaggttgccgagcggcggtcctcgcccttactcagacggaaggacggtaacgtagtgaccagctttaagaagcgcatgttcgaggtgacagagagcagcgtgagttcctcttcaccaggaagtggacctagcagcccaaacaacggccctaccggctctgtgactgagaatgagacctccgtgttaccacctactccgcatgccgagcaaatggtgagccaacagaggattttgatccatgaggacagcatgaatctgttgagcttatacacctcaccaagtctacctaacatcacactcggcctccctgctgtgccttcacagctgaacgcatcaaactctctgaaagagaagcagaagtgcgaaacccagactctccggcagggtgtgcccttgcctggacagtacggaggctccatccctgcttcctcaagccatcctcacgtcaccctcgagggcaaacctcctaacagctcccatcaagcactcctccaacatctgttgcttaaggaacaaatgcgccagcaaaagctactcgtggctggcggcgtcccgctgcacccgcagtcccccctggccacaaaagagaggatctcgcccggtatacgcggtacccacaaactgcccagacataggcccctgaatagaactcagagcgcaccactaccacaatcaactctggcccaactcgtaattcagcagcagcaccagcagtttttggaaaagcagaaacaatatcagcagcagatacatatgaataaactgctgagtaagtcaatcgagcagttgaagcagccaggaagccacctggaggaagccgaggaggaactgcagggcgatcaggccatgcaggaggatagagccccctcatccgggaacagcactagatccgactcctctgcctgtgtagacgatacactcggacaggtcggtgcagtgaaggtgaaggaagagcccgtggattctgacgaagacgcccagatccaggagatggaatctggcgagcaggccgccttcatgcagcaaccatttctggaacccacacacactagggccctgtctgtccgacaggcacccctggcagcagtgggaatggacggcttagagaagcacaggctagttagtagaacccactcaagccccgccgcaagcgttctgccccacccagcgatggacaggcctctgcagccaggaagcgctaccgggatcgcctacgaccctctgatgctgaagcatcagtgcgtctgcggcaactccaccacccaccccgagcacgcaggcaggattcagtcaatttggtctcggttgcaggaaacggggctcttgaacaaatgtgaacgcatccaaggaagaaaagcatcattggaagagattcagttagtccacagtgaacatcatagcctcctttacgggactaatccgctggacggccagaaattggatccccgtatactgctgggggacgatagccagaagttcttttcgtccttgccatgtggcgggctcggcgtggattctgacactatttggaatgagctgcactcgagcggcgctgcgcggatggcagtgggctgcgtcatcgaactcgcatccaaggtagcctccggggaactcaagaatgggttcgcagtggtgcggcctcccgggcatcacgccgaagagtccactgcaatgggcttttgtttctttaatagcgtcgcgataacagctaagtacctcagggatcagttgaacatcagcaaaatcctcattgtcgacttagacgtccaccatggaaacggtactcagcaggccttttatgctgatccatccatcttatatatttcgttgcataggtatgatgaggggaatttttttcctgggagcggagcaccaaatgaagtgggcactggactcggcgaagggtacaacattaacatcgcgtggaccggtgggttagacccccccatgggagatgttgaatacctcgaggcctttcgaactatcgttaaacccgtggcgaaagagtttgatcctgatatggtcctggttagcgctggctttgatgccctggagggccacacaccaccactgggtggatacaaagtgacggccaagtgtttcggtcacctgaccaaacagctgatgactttagccgatggcagggtagtcctcgctctagaggggggtcacgatctgacagcgatctgtgatgcgtcggaggcatgcgtgaacgcccttctcggcaacgagctcgagccacttgctgaggatattttgcaccagtctcctaacatgaatgcggttatctcgctgcaaaagattatagaaatacagagcaagtactggaagtccgtgaggatggtggccgtgccgcgggggtgcgccctggccggggcgcagctgcaggaagagacagagacggtgagcgcattggcaagcctgaccgtggacgtggaacaaccctttgcacaggaagacagcagaactgcgggtgaacctatggaagaagaaccggccttgtag

SEQ ID NO: 253757 - DNA, 3210 bp, Artificial Sequence
  derived and/or modified sequence
atgcacagcatgatttcttctgtcgacgtgaaaagcgaggttcccgtgggtctggagcccatatctcccctggacctgcgcactgatttgcggatgatgatgccagtagtcgaccctgtggtaagagagaagcagctgcaacaagagctcctgctgattcagcagcaacagcagattcagaagcagttattgatagcagagtttcagaaacagcatgaaaatttaaccaggcagcaccaggcccagctgcaggagcacattaagctgcagcaagagctgcttgccattaaacagcagcaagagcttctggagaaggagcagaagcttgagcagcaacgacaggagcaagaagtagaacggcaccgacgggaacagcaattaccccctctccggggaaaagataggggaagggaacgcgctgtcgccagtacggaggttaaacagaaactgcaggaattcctcctgtcaaagtccgccacaaaggacacccctacaaatggcaagaaccactcagtgtctcgacacccgaagttatggtatacagctgcacatcacacaagtctggaccagagtagccctcctttaagtggaacatcaccttcctataaatatacgctgccgggagcacaggacgctaaggacgatttcccgctacgtaagacagcgtccgaacctaatctgaaggtgcgatcacgattgaaacagaaagtagctgagcgtcggagctcccctttactcagacgtaaagacggaaatgtcgtaacaagcttcaagaaacggatgtttgaggtaacagagagttcggtctcgagttcctctcctggcagtgggccaagctcacccaacaacggcccaaccggcagcgtgaccgaaaatgaaacaagcgtcctgcctcccaccccccatgccgagcagatggtgtctcaacagcggattctgattcatgaagacagcatgaaccttctcagcctttataccagtccttccttgccaaatattacgctgggattgccggcagtaccgtcccagctgaatgccagcaatagcctgaaagaaaaacaaaagtgtgagacacaaaccttaagacagggtgtaccactgcctggacagtacggcggttccattccagcttcctcttcacacccacatgtcaccttggaggggaaaccacctaacagttctcatcaggccttgctccagcatctgcttctgaaggagcaaatgcggcagcagaaactcctggtggcaggaggagtgcctttacatcctcagagcccattagccactaaggagagaatcagcccaggaattagaggcactcataaactgcccagacatagaccgctcaaccgtacccaaagcgctcccctcccccagagtacactggctcagctcgtgatccaacagcaacaccagcagtttctcgagaaacagaagcagtaccagcagcagattcatatgaacaaactgctaagtaaatccatcgaacagctgaagcagcctggatctcatctggaggaggctgaggaagagctccaaggggaccaagcaatgcaggaggatagggcccctagctctggcaattcgacccggagcgactctagcgcatgtgtcgatgacaccttgggccaagttggcgcagtaaaggtgaaagaagagccagtggattcggacgaagatgcccagatccaggagatggaatccggggaacaggccgctttcatgcaacagcctttcttggaaccaacccacactcgggctttgtctgtgcgccaggctcctctcgcagccgttggtatggatgggctcgaaaaacaccgcctggtcagtcgcacccacagctccccggctgcctctgtcctccctcatcccgcaatggatcgacctctccagcctggaagcgcaacaggcattgcttatgaccccctgatgctcaaacaccagtgcgtatgtggaaatagcacaacacacccagaacatgccggacgtatccagtccatatggtctcgtttgcaggagacgggactgcttaacaagtgtgagcgcatacaagggaggaaagctagcctggaagagatccagctcgtgcatagcgaacatcattccctgctttacggaaccaatccacttgacggtcagaagctcgatcctcgaatcctgcttggggacgacagtcagaagtttttttcatccctcccctgtggcggactcggggtggattcggacacaatctggaacgaacttcattccagtggtgccgcacgcatggccgtcgggtgtgtgatcgagcttgctagtaaagttgcctcaggcgagctgaagaatggctttgctgtcgtgcgaccacctgggcatcatgcggaggaatctaccgccatggggttttgttttttcaactctgttgccattacagcgaaatatctgcgtgatcaactgaatatcagcaagatactgatcgtggacctcgacgtccatcatggaaatgggactcagcaggcattctatgcagatcctagtattttatatatctcacttcatagatatgacgagggaaactttttcccgggtagtggtgccccaaacgaagtgggtacggggctgggagaggggtataacattaacatcgcgtggacagggggactggatccccctatgggcgacgtggaatacctcgaggcgttcaggaccatcgtaaagccagtagccaaggaatttgatccagatatggtgctggtttccgcaggatttgacgctcttgaggggcacactccccctctgggtgggtataaggtgacagctaaatgtttcgggcaccttacgaaacagctgatgacgctcgcggacggcagggtggtcctggccctggaaggcggtcacgatctaactgcaatatgcgacgcttccgaggcttgtgtgaatgcccttctcggtaacgaactggaacctcttgccgaagacatcctgcaccaatcacctaacatgaatgctgtgatcagtctgcagaaaatcatcgagattcagagcaagtactggaagagcgtcagaatggtcgctgttccacgcggttgtgcactggcaggagcacagctccaggaggagactgaaactgtttccgcattagccagcctaaccgtggacgttgagcaaccttttgcacaggaggatagtcgcacagccggtgaacccatggaggaagagcctgcactctag

SEQ ID NO: 253758 - DNA, 3210 bp, Artificial Sequence
  derived and/or modified sequence
atgcacagcatgatcagcagcgtggacgtgaagagcgaggtgcccgtgggcctggagcccatcagccccctggacctgagaaccgacctgagaatgatgatgcccgtggtggaccccgtggtgagagagaagcagctgcagcaggagctgctgctgatccagcagcagcagcagatccagaagcagctgctgatcgccgagttccagaagcagcacgagaacctgaccagacagcaccaggcccagctgcaggagcacatcaagctgcagcaggagctgctggccatcaagcagcagcaggagctgctggagaaggagcagaagctggagcagcagagacaggagcaggaggtggagagacacagaagagagcagcagctgccccccctgagaggcaaggacagaggcagagagagagccgtggccagcaccgaggtgaagcagaagctgcaggagttcctgctgagcaagagcgccaccaaggacacccccaccaacggcaagaaccacagcgtgagcagacaccccaagctgtggtacaccgccgcccaccacaccagcctggaccagagcagcccccccctgagcggcaccagccccagctacaagtacaccctgcccggcgcccaggacgccaaggacgacttccccctgagaaagaccgccagcgagcccaacctgaaggtgagaagcagactgaagcagaaggtggccgagagaagaagcagccccctgctgagaagaaaggacggcaacgtggtgaccagcttcaagaagagaatgttcgaggtgaccgagagcagcgtgagcagcagcagccccggcagcggccccagcagccccaacaacggccccaccggcagcgtgaccgagaacgagaccagcgtgctgccccccaccccccacgccgagcagatggtgagccagcagagaatcctgatccacgaggacagcatgaacctgctgagcctgtacaccagccccagcctgcccaacatcaccctgggcctgcccgccgtgcccagccagctgaacgccagcaacagcctgaaggagaagcagaagtgcgagacccagaccctgagacagggcgtgcccctgcccggccagtacggcggcagcatccccgccagcagcagccacccccacgtgaccctggagggcaagccccccaacagcagccaccaggccctgctgcagcacctgctgctgaaggagcagatgagacagcagaagctgctggtggccggcggcgtgcccctgcacccccagagccccctggccaccaaggagagaatcagccccggcatcagaggcacccacaagctgcccagacacagacccctgaacagaacccagagcgcccccctgccccagagcaccctggcccagctggtgatccagcagcagcaccagcagttcctggagaagcagaagcagtaccagcagcagatccacatgaacaagctgctgagcaagagcatcgagcagctgaagcagcccggcagccacctggaggaggccgaggaggagctgcagggcgaccaggccatgcaggaggacagagcccccagcagcggcaacagcaccagaagcgacagcagcgcctgcgtggacgacaccctgggccaggtgggcgccgtgaaggtgaaggaggagcccgtggacagcgacgaggacgcccagatccaggagatggagagcggcgagcaggccgccttcatgcagcagcccttcctggagcccacccacaccagagccctgagcgtgagacaggcccccctggccgccgtgggcatggacggcctggagaagcacagactggtgagcagaacccacagcagccccgccgccagcgtgctgccccaccccgccatggacagacccctgcagcccggcagcgccaccggcatcgcctacgaccccctgatgctgaagcaccagtgcgtgtgcggcaacagcaccacccaccccgagcacgccggcagaatccagagcatctggagcagactgcaggagaccggcctgctgaacaagtgcgagagaatccagggcagaaaggccagcctggaggagatccagctggtgcacagcgagcaccacagcctgctgtacggcaccaaccccctggacggccagaagctggaccccagaatcctgctgggcgacgacagccagaagttcttcagcagcctgccctgcggcggcctgggcgtggacagcgacaccatctggaacgagctgcacagcagcggcgccgccagaatggccgtgggctgcgtgatcgagctggccagcaaggtggccagcggcgagctgaagaacggcttcgccgtggtgagaccccccggccaccacgccgaggagagcaccgccatgggcttctgcttcttcaacagcgtggccatcaccgccaagtacctgagagaccagctgaacatcagcaagatcctgatcgtggacctggacgtgcaccacggcaacggcacccagcaggccttctacgccgaccccagcatcctgtacatcagcctgcacagatacgacgagggcaacttcttccccggcagcggcgcccccaacgaggtgggcaccggcctgggcgagggctacaacatcaacatcgcctggaccggcggcctggacccccccatgggcgacgtggagtacctggaggccttcagaaccatcgtgaagcccgtggccaaggagttcgaccccgacatggtgctggtgagcgccggcttcgacgccctggagggccacaccccccccctgggcggctacaaggtgaccgccaagtgcttcggccacctgaccaagcagctgatgaccctggccgacggcagagtggtgctggccctggagggcggccacgacctgaccgccatctgcgacgccagcgaggcctgcgtgaacgccctgctgggcaacgagctggagcccctggccgaggacatcctgcaccagagccccaacatgaacgccgtgatcagcctgcagaagatcatcgagatccagagcaagtactggaagagcgtgagaatggtggccgtgcccagaggctgcgccctggccggcgcccagctgcaggaggagaccgagaccgtgagcgccctggccagcctgaccgtggacgtggagcagcccttcgcccaggaggacagcagaaccgccggcgagcccatggaggaggagcccgccctgtag

SEQ ID NO: 253759 - protein, 89 aa, Artificial Sequence
  derived and/or modified sequence
MSCQQNQQQCQPPPKCPAKSPAQCLPPASSSCAPSSGGCGPSSERSCCLSHHRCRRSHRCRCQSSNSCDRGSGQQGGSSSCGHSSAGCC

SEQ ID NO: 253760 - protein, 338 aa, Artificial Sequence
  derived and/or modified sequence
MDQYCILGRIGEGAHGIVFKAKHVEPRVGWQCLPSILQTGEIVALKKVALRRLEDGFPNQALREIKALQEMEDNQYVVQLKAVFPHGGGFVLAFEFMLSDLAEVVRHAQRPLAQAQVKSYLQMLLKGVAFCHANNIVHRDLKPANLLISASGQLKIADFGLARVFSPDGSRLYTHQVATRSVGCIMGELLNGSPLFPGKNDIEQLCYVLRILGTPNPQVWPELTELPDYNKISFKEQVPMPLEEVLPDVSPQALDLLGQFLLYPPHQRIAASKALLHQYFFTAPLPAHPSELPIPQRLGGPAPKAHPGPPHIHDFHVDRPLEESLLNPELIRPFILEG

SEQ ID NO: 253761 - DNA, 2176 bp, Artificial Sequence
  derived and/or modified sequence
gtcgcctacaggaaccgccccagtggtcagctgccgcgctgttgctaggcaacagcgtgcgagctcagatcagcgtggggtggaggagaagtggagtttggaagttcaggggcacaggggcacaggcccacgactgcagcgggatggaccagtactgcatcctgggccgcatcggggagggcgcccacggcatcgtcttcaaggccaagcacgtggagccgagggtgggctggcagtgtctgccttctatcctgcagactggcgagatagttgccctcaagaaggtggccctaaggcggttggaggacggcttccctaaccaggccctgcgggagattaaggctctgcaggagatggaggacaatcagtatgtggtacaactgaaggctgtgttcccacacggtggaggctttgtgctggcctttgagttcatgctgtcggatctggccgaggtggtgcgccatgcccagaggccactagcccaggcacaggtcaagagctacctgcagatgctgctcaagggtgtcgccttctgccatgccaacaacattgtacatcgggacctgaaacctgccaacctgctcatcagcgcctcaggccagctcaagatagcggactttggcctggctcgagtcttttccccagacggcagccgcctctacacacaccaggtggccaccaggtctgtgggctgcatcatgggggagctgttgaatgggtccccccttttcccgggcaagaacgatattgaacagctttgctatgtgcttcgcatcttgggcaccccaaaccctcaagtctggccggagctcactgagctgccggactacaacaagatctcctttaaggagcaggtgcccatgcccctggaggaggtgctgcctgacgtctctccccaggcattggatctgctgggtcaattccttctctaccctcctcaccagcgcatcgcagcttccaaggctctcctccatcagtacttcttcacagctcccctgcctgcccatccatctgagctgccgattcctcagcgtctagggggacctgcccccaaggcccatccagggcccccccacatccatgacttccacgtggaccggcctcttgaggagtcgctgttgaacccagagctgattcggcccttcatcctggaggggtgagaagttggccctggtcccgtctgcctgctcctcaggaccactcagtccacctgttcctctgccacctgcctggcttcaccctccaaggcctccccatggccacagtgggcccacaccacaccctgccccttagcccttgcgagggttggtctcgaggcagaggtcatgttcccagccaagagtatgagaacatccagtcgagcagaggagattcatggcctgtgctcggtgagccttaccttctgtgtgctactgacgtacccatcaggacagtgagctctgctgccagtcaaggcctgcatatgcagaatgacgatgcctgccttggtgctgcttccccgagtgctgcctcctggtcaaggagaagtgcagagagtaaggtgtccttatgttggaaactcaagtggaaggaagatttggtttggttttattctcagagccattaaacactagttcagtatgtgagatatagattctaaaaacctcaggtggctctgccttatgtctgttcctccttcatttctctcaagggaaatggctaaggtggcattgtctcatggctctcgtttttggggtcatggggagggtagcaccaggcatagccacttttgccctgagggactcctgtgtacttcacatcactgagcactcatttagaagtgagggagacagaagtctaggcccagggatggctccagttggggatccagcaggagaccctctgcacatgaggctggtttaccaacatctactccctcaggatgagcgtgagccagaagcagctgtgtatttaaggaaacaagcgttcctggaattaatttataaatttaataaatcccaatataatcccagctagtgctttttccttattataatttgataaggtgattataaaagatacatggaaggaagtggaaccagatgcagaagaggaaatgatggaaggacttacggtatcagataccaatatttaaaagtttgtataataataaagagtatgattgtggttcaaggat

SEQ ID NO: 253762 - DNA, 1017 bp, Artificial Sequence
  derived and/or modified sequence
atggaccagtactgcatcctgggcagaatcggcgagggcgcccacggcatcgtgttcaaggccaagcacgtggagcccagagtgggctggcagtgcctgcccagcatcctgcagaccggcgagatcgtggccctgaagaaggtggccctgagaagactggaggacggcttccccaaccaggccctgagagagatcaaggccctgcaggagatggaggacaaccagtacgtggtgcagctgaaggccgtgttcccccacggcggcggcttcgtgctggccttcgagttcatgctgagcgacctggccgaggtggtgagacacgcccagagacccctggcccaggcccaggtgaagagctacctgcagatgctgctgaagggcgtggccttctgccacgccaacaacatcgtgcacagagacctgaagcccgccaacctgctgatcagcgccagcggccagctgaagatcgccgacttcggcctggccagagtgttcagccccgacggcagcagactgtacacccaccaggtggccaccagaagcgtgggctgcatcatgggcgagctgctgaacggcagccccctgttccccggcaagaacgacatcgagcagctgtgctacgtgctgagaatcctgggcacccccaacccccaggtgtggcccgagctgaccgagctgcccgactacaacaagatcagcttcaaggagcaggtgcccatgcccctggaggaggtgctgcccgacgtgagcccccaggccctggacctgctgggccagttcctgctgtaccccccccaccagagaatcgccgccagcaaggccctgctgcaccagtacttcttcaccgcccccctgcccgcccaccccagcgagctgcccatcccccagagactgggcggccccgcccccaaggcccaccccggccccccccacatccacgacttccacgtggacagacccctggaggagagcctgctgaaccccgagctgatcagacccttcatcctggagggctag

SEQ ID NO: 253763 - DNA, 1017 bp, Artificial Sequence
  derived and/or modified sequence
atggatcagtactgcatactcggacgaattggcgagggagcccacggtatagtcttcaaagctaaacacgttgagccccgggtcgggtggcagtgtctgccttcaattctgcagacgggcgagattgtcgcgcttaagaaggtggctctgcggcgcctggaggatggctttccaaaccaagccctgagggaaattaaagcactacaggaaatggaagataaccaatacgtagtgcagctgaaggcggtctttccccacggcggtggctttgttctggccttcgagttcatgctctctgaccttgccgaagtagtgagacacgcccagcgccctctcgcccaagcccaggttaagtcataccttcagatgctgttgaaaggtgtcgcgttttgtcacgccaacaacattgtgcatagagatttgaaaccggcaaacctcctaatctcagccagcggccagctgaaaatcgcagactttgggctggcacgcgtgtttagccctgacggcagcagactgtacacgcatcaggtggcaactcgatccgtgggatgcattatgggtgaactcctgaacggatctcccctattcccaggaaaaaacgacatcgaacagctgtgctatgtactccggatcctcggcaccccaaatcctcaggtctggccagagctgactgaactgcctgattacaacaagatttcctttaaagaacaggtaccgatgccactggaagaggtcctgccagacgtgagcccgcaggccctagatctgctcgggcagttcctcctatatcctccacatcaacggatcgctgcctcgaaggcactactccaccagtatttcttcacagcgccactgcccgcccatccctctgaactgcctattccccaaagacttggcggacccgctccaaaggctcatccaggccctccacacattcacgacttccatgtggatcggcctttggaggagtcattacttaatccggaactcatccgtccttttatccttgagggctag

SEQ ID NO: 253764 - DNA, 1017 bp, Artificial Sequence
  derived and/or modified sequence
atggaccagtactgcatcctgggccgcatcggggagggcgcccatggaattgtgttcaaggccaagcacgtggagccccgggtgggctggcagtgcctgcccagcatcctgcagacaggagagatcgtggccctgaagaaggtggccctgcggcggctggaggatggcttccccaaccaggccctgcgggagatcaaggccctgcaggagatggaggacaaccagtatgtggtgcagctgaaggctgtgttcccccacggcggcggctttgtgctggcctttgagttcatgctgagtgacctggccgaggtggtgagacatgcccagaggcccctggcccaggcccaggtgaagagctacctgcagatgctgctgaagggcgtggccttctgccacgccaacaacatcgtgcaccgggacctgaagccagccaacctgctgatcagcgccagcggccagctgaagattgctgactttggcctggcccgggtcttctccccagatggcagccggctgtacacccaccaggtggccaccaggtctgtgggctgcatcatgggagagctgctgaatggcagccccctcttccctgggaagaatgacatcgagcagctgtgctacgtgctgcgcatcctgggcacccccaacccccaggtgtggccagagctgacagagctgcctgactacaacaagatctccttcaaggagcaggtgcccatgcccctggaggaggtgctgcctgatgtgagcccccaggccctggacctgctgggccagttcctgctgtacccaccccaccagagaattgctgccagcaaggccctgctgcaccagtacttcttcaccgcccccctgcctgcccaccccagcgagctgcccatcccccagaggctgggcggccctgcccccaaggcccaccctggccccccccacatccatgacttccacgtggaccggcccctggaggagagcctgctgaaccctgagctgatccggcccttcatcctggagggctag

SEQ ID NO: 253765 - DNA, 1017 bp, Artificial Sequence
  derived and/or modified sequence
atggaccagtactgcatcctgggccggatcggcgagggcgcccacgggatagtattcaaggctaagcacgtcgaaccaagagtggggtggcaatgcctccccagcatcttgcagacgggagagatcgtggccctcaagaaggtggccttgcggcgtctggaagacggctttcccaatcaggctctccgcgaaatcaaagctttgcaggagatggaagacaaccagtatgtcgtgcagctgaaagcagtgtttccacatgggggagggtttgtactggccttcgaatttatgctgtcggacttagccgaggtcgtacggcacgctcagagaccactggcccaggcgcaggtgaaatcctacttgcagatgctgctcaagggcgttgccttttgccacgccaacaacattgtccatcgggatctcaagccagcgaacctgctaatcagcgctagtggacagctgaagatagctgattttgggttggcccgggtgttctctcccgatggcagccgcctatacactcatcaagtggcaacccggagcgtgggctgtattatgggcgaactcctgaatgggtcacccctatttcctggcaagaacgatatcgaacagctttgctacgtgctaaggatcttaggtacgcctaatccccaggtctggcccgagctgactgaacttcccgattataacaagatctcatttaaagaacaggtccccatgcctctggaagaggtgcttcctgatgtcagtccacaagccctggatttgctgggccagtttctactgtatccaccgcaccagagaatcgccgcatcaaaagctctcctgcaccagtacttcttcaccgcccctctccccgcccatcccagcgaactgcccattccccagcgcttgggtgggcctgcccccaaagcacaccccggacctccccacatccacgacttccatgtggaccgtcccctggaggagagtttgctaaatccggaactgattagacctttcattctggaaggctag

SEQ ID NO: 253766 - DNA, 1017 bp, Artificial Sequence
  derived and/or modified sequence
atggatcagtactgtatccttggcaggatcggcgagggcgcacacggcattgtcttcaaagccaaacacgtggagcccagagtgggatggcagtgtctgccgagcattttgcagaccggtgagatagtggctctcaagaaagtggcgttgcggaggctggaagatgggttccctaatcaggcccttagggaaattaaggccctacaggagatggaggataaccagtatgtcgtgcagttgaaggcagtgtttccccacggtggcggatttgttctcgcatttgaattcatgctttcagatctggccgaagtcgtgcgccacgcacaacggccattggctcaggctcaggtgaagagttacctccagatgctgctgaagggggtggcattctgtcacgccaataatatcgtgcaccgcgacctcaagcctgccaacctcctgattagcgcctctggccaactgaagatagccgatttcgggcttgctagggtgttctctcccgatggcagtagactatacacccaccaagttgccactaggtctgtaggctgcattatgggcgagctcctcaatggcagtcccttgtttcctgggaagaacgatatcgaacagctttgctatgtgcttagaattcttggtacccctaaccctcaggtgtggcccgagctgacagagctgcccgattacaataaaatcagctttaaggaacaggtacctatgccactcgaagaagttctgcccgatgtgtcaccacaggctctggatttgctgggccagttcctgctgtacccgcctcaccaacgtatcgctgcttcaaaagcactcttgcaccagtactttttcaccgcacctctgccggctcacccttccgaactgcccatcccccaacgcttgggaggcccagcccctaaagcccaccccggtcctccccatatccacgattttcatgtcgatagacctctagaggaatcccttctgaaccctgagctcatccgccctttcatacttgaaggatag

SEQ ID NO: 253767 - protein, 95 aa, Artificial Sequence
  derived and/or modified sequence
MSCQQNQQQCQPLPKCPSPKCPPKSSAQCLPPASSCCAPRPGCCGGPSSEGGCCLSHHRCCRSHRCRRQSSNSCDRGSGQQDGASDCGYGSGGCC

SEQ ID NO: 253768 - protein, 94 aa, Artificial Sequence
  derived and/or modified sequence
MSCQQNQQQCQPPPSCPSPKCPPKSPAQCLPPPSSDCALSSGGCGPSSESGCCLSHHRHFRSHQCRRQRSNSCDRGSGQQGGGSCRGHGSGGCC

SEQ ID NO: 253769 - DNA, 285 bp, Artificial Sequence
  derived and/or modified sequence
atgagttgtcagcaaaaccaacagcagtgtcagccaccaccatcctgtcctagcccaaagtgcccccctaaatctcccgcccagtgcttgcctccaccttcttccgactgcgcgctgtcatcgggcggctgtggaccaagtagtgagtctggctgctgtctgagtcatcaccgacacttcagaagccatcagtgccgtagacagcgctctaatagctgtgatcggggttccggacagcagggtggggggagttgcagaggccacgggagtggaggttgttgctag

SEQ ID NO: 253770 - DNA, 425 bp, Artificial Sequence
  derived and/or modified sequence
ggtctgagggttctgtgctcaaatgtttctattattctgttcaaggtaaaattcctgcattcctgcaaagatgtcctgccagcaaaaccagcagcagtgccagccccctcccagttgtccctcacccaagtgtcccccaaagagcccagcacagtgtctgcctccaccctcttctgactgtgctctaagctccgggggctgtggccccagttctgaaagtggctgctgcctgagccaccacaggcacttcaggtcccatcaatgccggcgccagagatccaactcctgtgacaggggcagtggtcagcaaggcgggggctcctgccgtggccatggctctgggggctgctgctgacctggatcctgatgatgagacaagtgatctttggaggaaacaaggatcccaaaggcccaggaaaagctcc

SEQ ID NO: 253771 - DNA, 285 bp, Artificial Sequence
  derived and/or modified sequence
atgagctgccagcagaaccagcagcagtgccagcccccacccagctgccccagccccaagtgcccccccaagagccctgcccagtgcctgcccccacccagcagtgactgtgccctgagcagcggcggctgcggccccagcagcgagagcggctgctgcctgagccaccaccgccacttccgcagccaccagtgccggcggcagaggagcaacagctgtgaccggggcagcggccagcagggcggcggcagctgccggggccacggcagcggcggctgctgctag

SEQ ID NO: 253772 - DNA, 285 bp, Artificial Sequence
  derived and/or modified sequence
atgagctgccagcagaaccagcagcagtgccagcccccccccagctgcccctctcccaagtgtccaccaaaaagtccagcccaatgtctcccgcccccgagcagcgactgtgccctgtcatctggtgggtgtggaccatctagtgaaagcgggtgctgtctgtcccatcatcggcacttcaggagccaccagtgcaggcgacagcggtcaaattcctgcgatcgaggctctggccagcaaggggggggctcgtgcaggggacacggctccggaggttgttgctag

SEQ ID NO: 253773 - DNA, 285 bp, Artificial Sequence
  derived and/or modified sequence
atgagctgccagcagaatcagcagcagtgccaacctcccccttcttgccctagccctaagtgccctcccaagagccccgcacaatgtctgccacccccttccagcgactgcgctttatcctcgggcggatgcggcccaagctccgagtccggttgctgtctgagccatcaccggcattttcggagccaccaatgcagaaggcagcgaagcaattcttgcgaccggggaagtggtcagcagggcggaggttcatgtagggggcatggatcaggcggatgctgttag

SEQ ID NO: 253774 - DNA, 285 bp, Artificial Sequence
  derived and/or modified sequence
atgagctgccagcagaaccagcagcagtgccagcccccccccagctgccccagccccaagtgcccccccaagagccccgcccagtgcctgcccccccccagcagcgactgcgccctgagcagcggcggctgcggccccagcagcgagagcggctgctgcctgagccaccacagacacttcagaagccaccagtgcagaagacagagaagcaacagctgcgacagaggcagcggccagcagggcggcggcagctgcagaggccacggcagcggcggctgctgctag

SEQ ID NO: 253775 - protein, 92 aa, Artificial Sequence
  derived and/or modified sequence
MSCQQNQKQCQPPPKCPSPKCPPKNPVQCLPPASSGCAPSSGGCGPSSEGGCFLNHHRRHHRCRRQRSNSCDRGSGQQGGGSGCCHGSGGCC

SEQ ID NO: 253776 - protein, 118 aa, Artificial Sequence
  derived and/or modified sequence
MSCQQSQQQCQPPPKCTPKCPPKCTPKCPPKCPPKCPPQCSAPCPPPVSSCCGSSSGGCCSSEGGGCCLSHHRPRQSLRRRPQSSSCCGSGSGQQSGGSSCCHSSGGSGCCHSSGGCC

SEQ ID NO: 253777 - DNA, 189 bp, Artificial Sequence
  derived and/or modified sequence
atgctgcaggtggtgcaggagggcaaccccgcccccttcatcatcaatacagtaaaaagagggcggagggatagggaacggcaacgaacaccttgggccccccatcctctcggctttcaagggcggcgctatatttacgaatctcctaatcaccggggtaaagactctagcttcctggcccagaagtag

SEQ ID NO: 253778 - protein, 515 aa, Artificial Sequence
  derived and/or modified sequence
MGSLSSRVLRQPRPALAQQAQGARAGGSARRPDTGDDAAGHGFCYCAGSHKRKRSSGSFCYCHPDSETDEDEEEGDEQQRLLNTPRRKKLKSTSKYIYQTLFLNGENSDIKICALGEEWSLHKIYLCQSGYFSSMFSGSWKESSMNIIELEIPDQNIDVEALQVAFGSLYRDDVLIKPSRVVAILAAACLLQLDGLIQQCGETMKETVNVKTVCGYYTSAGTYGLDSVKKKCLEWLLNNLMTHQNVELFKELSINVMKQLIGSSNLFVMQVEMDIYTALKKWMFLQLVPSWNGSLKQLLTETDVWFSKQRKDFEGMAFLETEQGKPFVSVFRHLRLQYIISDLASARIIEQDAVVPSEWLSSVYKQQWFAMLRAEQDSEVGPQEINKEELEGNSMRCGRKLAKDGEYCWRWTGFNFGFDLLVTYTNRYIIFKRNTLNQPCSGSVSLQPRRSIAFRLRLASFDSSGKLICSRTTGYQILTLEKDQEQVVMNLDSRLLIFPLYICCNFLYISPEKKN

SEQ ID NO: 253779 - DNA, 1548 bp, Artificial Sequence
  derived and/or modified sequence
atgggtagcttaagcagtcgcgtgctgaggcagccccgtcctgcgttagctcagcaagcccagggagctcgagcaggcgggagtgcaagacgccccgacacaggtgacgatgctgctggccatggcttttgctattgtgccggctcccacaagcgtaaacggagctccggctcattttgttactgccatcccgattccgagaccgacgaggatgaagaagagggcgacgagcaacagcgacttctgaatacaccacgaaggaaaaagctgaagagcacaagcaaatacatctatcagactctttttttaaacggggaaaatagcgatattaagatatgcgccctgggagaagaatggtccttgcataagatttacctgtgtcaatctggttatttctctagtatgtttagcggatcctggaaagagtcttcgatgaatataatcgagctggagatacccgatcaaaatatagacgtagaggccttgcaggttgccttcggcagtctgtatcgggatgacgtgctgatcaagccttcacgagtcgtggccatcctcgctgctgcctgcctcctgcagctagacggactgattcaacagtgcggagaaaccatgaaagagaccgtaaacgttaaaaccgtatgcggctactacacctccgcaggtacatatggtctggatagcgtgaagaagaaatgcttagagtggctcctcaataaccttatgacgcaccagaacgtggagctatttaaggaactctctatcaacgtgatgaaacagcttatagggtcttctaatctgtttgtgatgcaggtggagatggacatttacactgccctgaagaagtggatgttcttgcagctggtcccatcctggaacggctctctcaagcagcttctgactgaaaccgatgtgtggttcagtaaacagcgcaaggatttcgagggcatggctttcctggaaaccgaacagggcaagccatttgtgtccgtgtttcgccatctgcgactgcaatacattatctctgaccttgccagcgccagaatcatcgaacaagacgcggtggttccctcagaatggctctctagtgtatataaacagcaatggttcgcaatgctacgggcagaacaggactcagaggtcggcccacaagagatcaacaaagaggagttagagggaaacagcatgagatgcggtcggaagctggctaaagatggcgaatactgttggcgctggaccgggtttaacttcgggttcgatctattggtgacatacaccaataggtatattatttttaaacgaaacactctgaatcaaccctgctctggcagtgtttcccttcagccaagacggagcattgcatttcgcctcaggcttgcatcgtttgactcttcgggaaaattgatttgcagcaggaccaccgggtatcagatcctcaccctggagaaagatcaggaacaggtggtaatgaacctcgatagccgcttacttatcttcccactttacatctgttgtaatttcctttatatctctccagagaaaaagaattag

SEQ ID NO: 253780 - DNA, 1548 bp, Artificial Sequence
  derived and/or modified sequence
atgggcagcctgagcagccgggtgctgcggcagcccaggcctgccctggcccagcaggcccagggcgcccgggccggcggcagcgcccggcggccagacacaggagatgatgctgctggccacggcttctgctactgtgccggcagccacaagaggaagaggagcagcggcagcttctgctactgccacccagacagcgagacagatgaagatgaggaggagggagatgagcagcagaggctgctgaacacccccaggaggaagaagctgaagagcaccagcaagtacatctaccagaccctcttcctgaatggagagaacagcgacatcaagatctgtgccctgggggaggagtggagcctgcacaagatctacctgtgccagagcggctacttcagctccatgttttctggctcctggaaggagagctccatgaacatcatcgagctggagatcccagaccagaacattgatgtggaggccctgcaggtggccttcggcagcctgtacagagatgatgtgctgatcaagcccagccgggtggtggccatcctggccgccgcctgcctgctgcagctggatggcctcatccagcagtgtggggagaccatgaaggagaccgtgaatgtgaagacagtgtgtggctactacaccagcgctggcacctacggcctggacagcgtgaagaagaagtgcctggagtggctgctgaacaacctgatgacccaccagaatgtggagctgttcaaggagctgagcatcaacgtgatgaagcagctgattggcagcagcaacctgtttgtgatgcaggtggagatggacatctacacagccctgaagaagtggatgttcctgcagctggtgcccagctggaatggcagcctgaagcagctgctgacagaaacagatgtgtggttcagcaagcagaggaaggactttgagggcatggccttcctggagacagagcagggcaagccctttgtgtctgtgttccgccacctgcggctgcagtacatcatcagtgacctggccagcgcccgcatcatcgagcaggatgctgtggtgcccagcgagtggctgagctctgtgtacaagcagcagtggtttgccatgctgcgggcagagcaggacagcgaggtgggcccccaggagatcaacaaggaggagctggagggcaacagcatgagatgtggcaggaagctggccaaggatggagagtactgctggcgctggacaggcttcaactttggatttgacctgctggtgacctacaccaaccgctacatcatcttcaagaggaacaccctgaaccagccctgcagcggctctgtgtccctgcagcccaggaggagcatcgccttccggctgcggctggccagctttgacagcagcggcaagctgatctgcagcaggaccaccggctaccagatcctgaccctggagaaggaccaggagcaggtggtgatgaacctggacagccggctgctgatcttccccctgtacatctgctgcaacttcctgtacatcagccctgagaagaagaactag

SEQ ID NO: 253781 - DNA, 1548 bp, Artificial Sequence
  derived and/or modified sequence
atgggcagcctgagcagccgggtgctgcggcagccccggcccgcccttgctcagcaagctcagggagcccgcgccggcggctctgcaagacgccccgacaccggagatgacgccgcaggtcacgggttttgctactgtgctggctctcacaagcgaaagaggtctagtggctccttctgttactgccatcctgacagtgaaaccgacgaggatgaggaggagggagacgagcaacagagattgctgaacacccccaggagaaaaaagctcaagtccacctcaaagtatatataccaaacactgtttctgaacggcgagaacagcgacatcaaaatctgcgcccttggggaagagtggtcactccacaagatctacctatgtcaatctggctattttagttcaatgttcagtgggagctggaaggaaagctctatgaacatcatagagctggagatccccgatcaaaacattgacgtggaagccctccaagtggcgttcggctccctgtaccgcgacgatgtgctcattaagccttctagagtggtggcgatattagccgctgcttgcctattgcaactggatggactcatccagcagtgtggcgagacgatgaaggagacggtaaacgtgaagacggtatgcggatactacacctcggctggcacctacggactagatagtgtcaaaaagaaatgtctggaatggctgttgaacaatttgatgacccatcagaacgttgagctcttcaaggagctgtcaatcaatgttatgaaacagttaattggatcaagcaacttatttgtaatgcaggtcgagatggatatttacaccgccctcaaaaagtggatgttcttacagttggtacccagctggaacggatccttgaaacagctcctgacagagacagatgtgtggttctccaaacagcggaaagatttcgagggcatggccttcctagagacggagcaggggaagccctttgtgtccgtcttccgacacctgcggcttcaatatattatttcagatctggcctccgccagaattattgagcaggacgcggtagtgccaagcgagtggttatcgtccgtttataaacagcaatggttcgccatgttgcgcgctgagcaggactccgaggtcgggcctcaggagataaacaaggaggagctcgagggcaacagcatgaggtgcgggaggaagctggctaaagacggggagtactgttggcgctggacagggttcaatttcggattcgatcttctggttacatacacgaaccgctacatcatttttaagcggaatacactgaatcaaccatgttccggctccgtgtctctgcaaccccggcgaagcattgcctttcggttaaggctggccagctttgactcatcgggaaaactcatctgtagccgcacaacggggtatcaaatcctgaccctagagaaagaccaggaacaagttgtgatgaacctagacagcaggttactgatcttccccctttacatttgttgtaattttctgtacattagtcccgagaagaaaaattag

SEQ ID NO: 253782 - DNA, 1548 bp, Artificial Sequence
  derived and/or modified sequence
atggggtccctgagtagccgggtgcttagacagcccaggccagctctagcacaacaggcccagggggctcgtgcgggtggctcagctcggagaccagacacaggtgacgatgcagcaggccacgggttctgttactgtgccggatcacacaagcggaagcgctccagcggaagcttttgttattgccatccagattctgaaactgatgaggacgaggaagagggagatgagcagcagagattgctaaatactcctcggaggaaaaagttgaagagcacctctaaatacatctaccaaaccctgttcttgaatggcgagaactcagatatcaagatatgcgcattgggagaagagtggtctctgcataaaatctacctatgccaaagcggttactttagttcaatgttctcgggaagctggaaagaatctagcatgaacatcatcgagttggaaatccccgatcaaaatatcgacgtggaagccctgcaggtcgccttcggaagcctgtacagagatgatgtgctgatcaagcctagcagggttgttgcaattttggcagcggcttgcctcctgcaattggatgggctgatccagcagtgcggcgagaccatgaaggaaactgtgaatgtgaagaccgtttgcggttactatacgtctgcaggaacatatggattggattcagtgaagaagaagtgtttggaatggctgcttaataatctgatgacccaccaaaatgttgaactctttaaggagctttcgatcaatgtgatgaaacagctgattggttctagcaacctgttcgtcatgcaagtagagatggacatctacaccgcgctgaagaagtggatgttccttcagctggttcctagctggaacggctccctgaagcaactgctgaccgaaacagatgtttggttttccaaacagcgcaaggacttcgaggggatggccttcctggagacagagcagggaaagccgttcgtgtcagtgtttcgtcatctgcgcctgcagtatatcataagcgaccttgcaagtgctcgaatcatcgagcaggatgccgtcgtccccagcgagtggctctccagcgtgtataaacaacagtggttcgcgatgcttcgagccgagcaggacagtgaagtggggcctcaggaaatcaataaggaggaactcgagggcaacagcatgcgatgtgggagaaagctagccaaggacggcgagtattgctggagatggaccggctttaattttggttttgacctactggtgacctacaccaatagatacattattttcaaacgaaatacgctcaatcaaccctgcagtggtagcgtgtcattacagccaaggaggagcatcgccttccgactcaggctggcatccttcgactcctcgggcaaactgatttgcagtcggacaactggctaccagatactgacccttgagaaagatcaagagcaagtcgtcatgaacctggactccaggctccttattttccctctgtatatctgctgcaactttctttatatctcaccagaaaaaaagaattag

SEQ ID NO: 253783 - DNA, 4191 bp, Artificial Sequence
  derived and/or modified sequence
atgcgccctccgtcccgcgctttgttgcgaaagcgagggggcgaggtgctgcggtgctagagcgcggcgcgaccggacgctgcgggcggggaagaggatggagactgtggcgtccgctgcaacggttggggctgcgcgtgagaaggtggcggtgtaggcacctgcgctcggggaaggctggcggcggcggccgagccatggcgggagacccccttctctgggctccctgaagtctcggggagccgtgacccatgggatcgttgagcagccgggtgctgcgccagccaagaccagcccttgcccagcaggcgcagggtgccagggcggggggctcggcccggaggccggacactggagacgatgcggcgggccacggattctgttactgtgcgggcagccacaagcgcaagcggagcagcgggtccttctgctactgtcaccctgactcggagacggacgaggatgaggaggagggggacgagcagcagcggctcctcaacacccctcgaaggaaaaaattaaagagtacatctaaatatatttatcaaacattatttttgaatggtgaaaacagtgacattaagatttgtgctctaggagaagaatggagcttacacaaaatatatttatgtcaatctggctacttttctagtatgttcagtggttcttggaaagaatccagcatgaatattattgaactggagattcctgaccagaacattgatgtagaagcactgcaggttgcatttggttcactgtatcgagatgatgtcttgataaagcccagtcgagttgttgccattttggcagcagcttgtttgctgcagttggacggtttaatacagcagtgtggtgagacaatgaaggaaacagttaatgtgaaaactgtatgtggctattacacatcagcagggacctatggattagattctgtaaagaaaaagtgccttgaatggcttctaaacaatttgatgactcaccagaatgttgaactttttaaagaactcagtataaatgtcatgaaacagctcattggttcatctaacttatttgtgatgcaagtggagatggatatatacactgctctaaaaaagtggatgttccttcaacttgtgccttcttggaatggatctttaaaacagcttttgacagaaacagatgtctggttttctaaacagaggaaagattttgaaggtatggcctttcttgaaactgaacaaggaaaaccatttgtgtcagtattcagacatttaaggttacaatatattatcagtgatctggcttctgcaagaattattgaacaagatgctgtagtaccttcagaatggctctcttctgtgtataaacagcagtggtttgctatgctgcgggcagaacaggacagtgaggtggggcctcaagaaatcaataaagaagaactagagggaaacagcatgaggtgtggtagaaagcttgccaaagatggtgaatactgctggcgttggacaggttttaacttcggcttcgacctacttgtaacttacaccaatcgatacatcattttcaaacgcaatacactgaatcagccatgtagcggatctgtcagtttacagcctcgaaggagcatagcatttagattacgtttggcttcttttgatagtagtggaaaactaatatgtagtagaacaactggctatcaaatacttacacttgaaaaggatcaggaacaagtggtgatgaacttggacagcaggcttctgatcttccctttatatatctgctgtaacttcttgtatatatcaccagaaaaaaagaattgaaaataatcgtcacccagaaaatccagaaaactgaagatttcatcagttggaaacagtagcactttgaaaactttttaggccagctttaatttaatggccctactgatattcacatcgaaggtgactaacaatgacaaaggccttatgaactgtacagacaatacagaagattattcttatcctcattgcatttctatgcatatgcgtaagaacattttaaagccaagaaaatatctgtcaaaccatttctgttagaacgatgtcaattcatgcttttaatttagcatcaatagaaaattgctgtaggtaaatctcacatttatctgcaacaaaatatagatttaatttttagcttaaactttgtttctaccttatgttagtggacctcagttatccatctgtaaatttctttttatttggctaaaataatctaaaagaataatttggttggccaattagaaatgcctttttcagttggtgtattgaaagctttcctttaacattttcacctgctcattgtgattcctccttttagtctaatatctttccaggtcatacttgtttttaatcattaaatattttcttcctggttttggagactaagctgataaactttttttaaaacttaagcattgtcattgctattttttttaatttgactttcctaggagtttaagaacagtgaaagttagctttgcaccttcaaatgatcttgaatgagggaaaaatcagtttgattccaaggatatttcttgccttacatggtcttttctttgacagtctgtacacctttattattaggttttgaattatttatgtaccagatattatagttttaaacattttaatattctctgatctttagaattatttatgttcaaattttagttgggaactttgtttcctacttaagctcaggactttttaccctctgaattgagtgcctttgagtgacacatgctaatagaaatttcatagtaaatgtaaataaggtcagaggatgtaatatggagcctgatgatgaagcattaatgtaaaaatggaacttatttttgtcaaaaatgagatgtacacttgtcatgatttatgtatgttgaccttttgtgtttattactgttttgaaaatagccatgttcattttctttccagttagagtaagtacttctgtggttaatgtatatttttattatggtttttaaaatgggaatcatttttatgtatctgtgcaaataataaatgcccatttggaaaaagagtaagctcttacataaaatggaccaaaaaatcccccttaattgaaaccaaaattttttctttctagttaggtttttttcccaactccttttaacttttggaatttattaataatttttttcttttttaatgatatgcccataggttcataaattgcttttgttcttttaaaattcatccatttggtttaacttaaaggaaccttttaaatgcctcacccttgaccctcagagctggaatttaaatgtttctaatacagtgatttggctgttatcaagaggttacatttcagctgggtgtcagccaggtgtggtggctcacacttgtaagcccagcactttgggaggccgaggcaggcagatcatctgaggtcaggagtttaagatcagccatgaccaacatggtgaaaccccatctctattaaatacacaaaataaaaattagccaggcatggtggcacacgcctgtcatctcagctactcaggaggctgaggcaggagaatcacttgaacccaggaggcagaggttgcagtgagtggagattgcgccattgcactccaacctaggcgacagagtgagactccgtctcaaaaaaaaaaaaaaaaaaaaagaggctactgtacttatttttatatttgactacattaggtctttttcacgggaagctgttgttttctttccgtctcattactgtataagagtttccttaccctttatgtattgaaaaatatataaattccaaacttaaattatttggataattaagtttttgcagatcttggaagtaaagataatgttttgatcatattaatgaataaagttaactgtttcatttcacttacataagttaactggccaaattggatttatatgtggtttcatccattggttctgtcctggccaagttgcttatgtcatccatagacaggataattctttcttcaatcacaagtaggttaatgttcttatttgagaagttgataattgtcaggtagtaattcacactggtagtaaagatgtgcttttgttttcttaccaaatatttttatgtgtttccagagttcttttcaatagaaatattttcaataaagtgttaatagtgtaagataaagtattgtataaaccatggtttgtgaaa

SEQ ID NO: 253784 - DNA, 1548 bp, Artificial Sequence
  derived and/or modified sequence
atgggcagcctgagcagcagagtgctgagacagcccagacccgccctggcccagcaggcccagggcgccagagccggcggcagcgccagaagacccgacaccggcgacgacgccgccggccacggcttctgctactgcgccggcagccacaagagaaagagaagcagcggcagcttctgctactgccaccccgacagcgagaccgacgaggacgaggaggagggcgacgagcagcagagactgctgaacacccccagaagaaagaagctgaagagcaccagcaagtacatctaccagaccctgttcctgaacggcgagaacagcgacatcaagatctgcgccctgggcgaggagtggagcctgcacaagatctacctgtgccagagcggctacttcagcagcatgttcagcggcagctggaaggagagcagcatgaacatcatcgagctggagatccccgaccagaacatcgacgtggaggccctgcaggtggccttcggcagcctgtacagagacgacgtgctgatcaagcccagcagagtggtggccatcctggccgccgcctgcctgctgcagctggacggcctgatccagcagtgcggcgagaccatgaaggagaccgtgaacgtgaagaccgtgtgcggctactacaccagcgccggcacctacggcctggacagcgtgaagaagaagtgcctggagtggctgctgaacaacctgatgacccaccagaacgtggagctgttcaaggagctgagcatcaacgtgatgaagcagctgatcggcagcagcaacctgttcgtgatgcaggtggagatggacatctacaccgccctgaagaagtggatgttcctgcagctggtgcccagctggaacggcagcctgaagcagctgctgaccgagaccgacgtgtggttcagcaagcagagaaaggacttcgagggcatggccttcctggagaccgagcagggcaagcccttcgtgagcgtgttcagacacctgagactgcagtacatcatcagcgacctggccagcgccagaatcatcgagcaggacgccgtggtgcccagcgagtggctgagcagcgtgtacaagcagcagtggttcgccatgctgagagccgagcaggacagcgaggtgggcccccaggagatcaacaaggaggagctggagggcaacagcatgagatgcggcagaaagctggccaaggacggcgagtactgctggagatggaccggcttcaacttcggcttcgacctgctggtgacctacaccaacagatacatcatcttcaagagaaacaccctgaaccagccctgcagcggcagcgtgagcctgcagcccagaagaagcatcgccttcagactgagactggccagcttcgacagcagcggcaagctgatctgcagcagaaccaccggctaccagatcctgaccctggagaaggaccaggagcaggtggtgatgaacctggacagcagactgctgatcttccccctgtacatctgctgcaacttcctgtacatcagccccgagaagaagaactag

SEQ ID NO: 253785 - protein, 350 aa, Artificial Sequence
  derived and/or modified sequence
MALEQNQSTDYYYEENEMNGTYDYSQYELICIKEDVREFAKVFLPVFLTIVFVIGLAGNSMVVAIYAYYKKQRTKTDVYILNLAVADLLLLFTLPFWAVNAVHGWVLGKIMCKITSALYTLNFVSGMQFLACISIDRYVAVTKVPSQSGVGKPCWIICFCVWMAAILLSIPQLVFYTVNDNARCIPIFPRYLGTSMKALIQMLEICIGFVVPFLIMGVCYFITARTLMKMPNIKISRPLKVLLTVVIVFIVTQLPYNIVKFCRAIDIIYSLITSCNMSKRMDIAIQVTESIALFHSCLNPILYVFMGASFKNYVMKVAKKYGSWRRQRQSVEEFPFDSEGPTEPTSTFSI

SEQ ID NO: 253786 - protein, 274 aa, Artificial Sequence
  derived and/or modified sequence
MALEQNQSTDYYYEENEMNGTYDYSQYELICIKEDVREFAKVFLPVFLTIVFVIGLAGNSMVVAIYAYYKKQRTKTDVYILNLAVADLLLLFTLPFWAVNAVHGWVLGKIMCKITSALYTLNFVSGMQFLACISIDRYVAVTKVPSQSGVGKPCWIICFCVWMAAILLSIPQLVFYTVNDNARCIPIFPRYLGTSMKALIQMLEICIGFVVPFLIMGVCYFITARTLMKMPNIKISRPLKVLLTVVIVFIVTQLPFAWIHMNDAFPSNKTSALF

SEQ ID NO: 253787 - DNA, 1053 bp, Artificial Sequence
  derived and/or modified sequence
atggccctggaacagaatcagagtactgattactactatgaagagaacgagatgaatggcacctacgattactctcaatatgagctcatctgcattaaggaggacgtgcgagagtttgctaaggtgtttctccccgtctttctcacaatcgtattcgtgatcggcctggcaggcaattctatggtggtagcaatttacgcctattacaaaaaacagcggacaaaaaccgatgtatacatcctcaatctcgcagtggccgatctgctactgttgtttactctgccattttgggcagtgaacgcagtgcacggttgggtgctagggaagatcatgtgtaagataacttcagctttatacacactgaatttcgtcagcggtatgcagtttctagcatgcattagcatcgatcgctacgtggcagtaaccaaggtgcccagtcagtccggagtcggcaagccatgttggataatatgtttctgcgtatggatggcggctattctgttgtctattcctcagctggtgttttataccgtcaacgacaatgcgaggtgtatccctatctttcccagatacctaggcaccagcatgaaggctctcatccagatgctggagatttgtattgggtttgttgtcccctttctgattatgggggtctgctatttcataaccgccagaacgctgatgaaaatgccaaatatcaagattagcagacccttgaaggtactgctgacagtggttatcgtgttcatcgtgacacagctcccatacaatatagtaaaattctgccgggctatcgacattatctattccctgattaccagttgtaatatgagcaagaggatggacattgccatacaagtaactgagtcaattgctttattccactcttgtctcaatccgatcttgtatgtgtttatgggtgcttccttcaagaattacgtgatgaaagttgcaaaaaaatatgggtcatggcgccgacaaagacagagcgtcgaagagttcccatttgattcggaggggccgactgaacctacctcaacgttcagcatctag

SEQ ID NO: 253788 - DNA, 825 bp, Artificial Sequence
  derived and/or modified sequence
atggccttggagcagaatcagagtaccgactactattacgaagagaatgagatgaacgggacttacgactatagccaatatgagctgatttgtatcaaggaagacgtgcgtgagttcgcaaaggtctttctgccggtgttcctaactatcgttttcgtgattggcctcgcaggtaactcaatggtggtcgcaatttacgcctactacaaaaaacaaaggaccaagacagacgtgtacatcctgaacctggccgtggctgacctgctgctgctgtttactctgcccttttgggccgttaacgctgtgcatggatgggtgctcggcaagattatgtgcaagatcacatccgccctgtacactttgaacttcgtgtctgggatgcagttcctggcctgcatatctattgacagatatgtggctgtgacaaaggttccgtcccaatctggcgtcggtaagccttgttggataatctgcttttgcgtatggatggctgctatactgctctctatccctcagctggtgttttacacggtgaatgacaatgctagatgtattccgattttcccacgttacctcggcacttcaatgaaggccctcatccagatgttggaaatttgcatcggtttcgtggtgccattcttgatcatgggcgtatgctattttattactgcacgcacactcatgaaaatgcctaacatcaaaatctcacgaccgctgaaagtgctcctgactgtggttatcgtgtttatcgtgactcagctcccatttgcttggatccacatgaatgacgcctttccgagtaacaagaccagcgcccttttctag

SEQ ID NO: 253789 - DNA, 1053 bp, Artificial Sequence
  derived and/or modified sequence
atggccctggagcagaaccagagcacagactactactatgaagaaaatgagatgaatggcacctatgactacagccagtatgagctgatctgcatcaaggaggatgtgcgggagtttgccaaggtgttcctgcctgtgttcctgaccatcgtgtttgtgattggcctggccggcaacagcatggtggtggccatctatgcctactacaagaagcagaggaccaagacagatgtgtacatcctgaacctggccgtggccgacctgctgctgctcttcaccctgcccttctgggccgtgaatgctgtgcacggctgggtgctgggcaagatcatgtgcaagatcaccagcgccctgtacaccctgaactttgtgtctggcatgcagttcctggcctgcatcagcattgaccgctacgtggccgtgaccaaggtgcccagccagagcggcgtgggcaagccctgctggatcatctgcttctgtgtgtggatggccgccatcctgctgagcatcccccagctggtgttctacacagtgaatgacaatgcccgctgcatccccatcttcccccgctacctgggcacctccatgaaggccctgatccagatgctggagatctgcattggatttgtggtgcccttcctgatcatgggcgtgtgctacttcatcacagcccggaccctgatgaagatgcccaacatcaagatcagccggcccctgaaggtgctgctgactgtggtgattgtgttcatcgtgacccagctgccctacaacatcgtgaagttctgccgggccatcgacatcatctacagcctcatcaccagctgcaacatgagcaagaggatggacatcgccatccaggtgacagagagcatcgccctcttccacagctgcctgaaccccatcctgtatgtgttcatgggcgccagcttcaagaactacgtgatgaaggtggccaagaagtatggctcctggaggcggcagaggcagagcgtggaggagttcccctttgacagcgagggccccacagagcccaccagcaccttcagcatctag

SEQ ID NO: 253790 - DNA, 825 bp, Artificial Sequence
  derived and/or modified sequence
atggccctggagcagaaccagagcacagactactactatgaagaaaatgagatgaatggcacctatgactacagccagtatgagctgatctgcatcaaggaggatgtgcgggagtttgccaaggtgttcctgcctgtgttcctgaccatcgtgtttgtgattggcctggccggcaacagcatggtggtggccatctatgcctactacaagaagcagaggaccaagacagatgtgtacatcctgaacctggccgtggccgacctgctgctgctcttcaccctgcccttctgggccgtgaatgctgtgcacggctgggtgctgggcaagatcatgtgcaagatcaccagcgccctgtacaccctgaactttgtgtctggcatgcagttcctggcctgcatcagcattgaccgctacgtggccgtgaccaaggtgcccagccagagcggcgtgggcaagccctgctggatcatctgcttctgtgtgtggatggccgccatcctgctgagcatcccccagctggtgttctacacagtgaatgacaatgcccgctgcatccccatcttcccccgctacctgggcacctccatgaaggccctgatccagatgctggagatctgcattggatttgtggtgcccttcctgatcatgggcgtgtgctacttcatcacagcccggaccctgatgaagatgcccaacatcaagatcagccggcccctgaaggtgctgctgactgtggtgattgtgttcatcgtgacccagctgccctttgcctggatccacatgaatgatgccttccccagcaacaagaccagcgccctcttctag

SEQ ID NO: 253791 - DNA, 1053 bp, Artificial Sequence
  derived and/or modified sequence
atggccctggagcagaaccagagcaccgactactactacgaggagaatgaaatgaatggaacatacgattactcccagtacgagcttatatgtatcaaagaggacgtcagagaattcgccaaagtatttcttcccgtcttcctgaccatcgtgttcgtcataggactggctggcaacagcatggtggtagccatctacgcctattacaaaaaacagaggactaagactgatgtgtacattctgaatctggctgttgcggatctgctcctgctcttcactctgccattttgggccgtaaatgccgtgcacgggtgggtgcttggtaaaattatgtgtaagattacctctgccctttacacgttaaactttgtttcaggcatgcagtttttggcatgtatttctatcgataggtatgtcgctgtgacaaaagtcccaagccagtccggcgtgggaaagccttgttggattatctgcttctgtgtttggatggccgccatcctgctatccattccccagcttgtgttctataccgtgaacgacaacgcccgttgtattcccatctttccccggtacttgggtactagtatgaaggccctgatacaaatgctcgaaatctgcattggctttgtggttccgtttctgatcatgggggtgtgttattttatcaccgcaaggacacttatgaagatgcctaacatcaagattagtcggccgctgaaggtgcttttgacggttgtgatcgtctttatcgtgacccagctgccatataacatcgtgaagttctgcagagcaatcgatattatttattctttgattacttcatgtaatatgtcgaagagaatggatattgcgatccaagtgaccgaatcgatcgccttgttccactcgtgcctgaacccaatcctctatgtatttatgggcgcaagctttaagaactacgttatgaaggttgcaaagaagtacggttcctggaggaggcagcgccagtctgtcgaggagtttcccttcgatagtgagggcccgacagaacccacgtctaccttctccatctag

SEQ ID NO: 253792 - DNA, 825 bp, Artificial Sequence
  derived and/or modified sequence
atggccctggagcagaaccagagcaccgactactactacgaggagaacgagatgaatggcacttatgattacagccagtatgagctcatttgcatcaaggaagatgtcagggaatttgcgaaggtcttcttacccgttttcctgacgattgtgtttgtgatcggcctggccgggaacagcatggtcgtcgccatatatgcgtattacaagaaacagagaacgaagaccgatgtatacatcctgaatctcgccgtcgcggatttgctcctgctttttaccctgccattctgggcggttaatgctgtgcacggctgggtgcttggcaagattatgtgcaaaattacatctgcactctacaccctaaacttcgtatccggaatgcagttcctggcctgcatcagcattgacaggtatgtggcagtcaccaaagtaccttcacagagcggggtgggcaagccttgctggattatctgtttctgcgtgtggatggccgctatattgctctctatcccccagctggttttctataccgtgaatgataatgcaagatgtattcccatctttcctagatatctgggaactagcatgaaggctcttatccagatgttggagatctgtattgggttcgtcgttccattcctgataatgggcgtttgctattttatcaccgcccgcacactcatgaagatgccaaatattaagatttcacgtcctctgaaggtgctgctcacagtggtcatagtgtttatcgtcacccagctacctttcgcctggatccatatgaatgacgccttcccctccaataaaacctccgccttattctag

SEQ ID NO: 253793 - DNA, 1053 bp, Artificial Sequence
  derived and/or modified sequence
atggcactggagcagaaccagtcaacagattattattatgaagagaatgagatgaatggaacgtacgattactcccaatatgagcttatatgcatcaaggaagatgtgagggaatttgctaaggtgttcttacccgtgtttctaactatcgtttttgtgatcggcctcgccggaaattccatggttgtggctatctacgcctattacaagaaacagcggaccaaaaccgacgtctacatccttaacctcgccgtggctgacctgttgctactcttcacccttcccttctgggcggtgaacgctgtgcacggctgggttcttgggaaaatcatgtgtaaaataacatctgctttgtataccctgaacttcgttagtgggatgcagtttctggcgtgcatctcaatcgatcgttatgtagcagtgactaaggtcccctcgcagagtggagttgggaaaccctgctggatcatatgtttttgtgtgtggatggctgcgatcctactctccatcccccagttggtgttctacactgtcaatgataatgccagatgcatcccaattttcccaagatacttaggcaccagtatgaaagctcttattcagatgttagaaatctgtatcggattcgttgtgccctttcttatcatgggcgtgtgctacttcatcacggcacgcacactcatgaagatgcctaatattaagattagtagacctctgaaagtgctgctgaccgtggtgattgtgtttattgtgacacagttgccttacaacattgtcaaattctgtcgggctatcgatatcatctattccctgattacctcctgtaatatgagcaaacggatggacatcgctatccaggtgactgagtccatcgcactctttcactcctgtctgaaccccatcttatatgttttcatgggtgcatctttcaaaaactatgtgatgaaagtagctaaaaaatatggctcttggcgtcgacagcgtcaaagtgtcgaagaattcccatttgattccgaagggcctaccgaaccaacatctacttttagtatctag

SEQ ID NO: 253794 - DNA, 825 bp, Artificial Sequence
  derived and/or modified sequence
atggccctagagcaaaaccagtctacagactactactatgaggagaacgaaatgaatgggacctacgattactctcagtatgaattgatctgcatcaaggaagatgtcagagagtttgcaaaagtattcctcccagtgttcttgacgatcgtttttgtcattggacttgctggaaacagtatggtagtagccatctacgcgtactataaaaaacaaagaactaagaccgatgtgtacattctgaacctggcggttgccgatctgctgctgttgtttaccttgccattttgggcagtaaacgctgtccacggttgggtgttagggaagataatgtgcaagatcacgagcgccctttacacattaaatttcgtgagcggcatgcagttcttggcctgtatttctatcgatcgatacgttgcagtgaccaaggtgccctctcagagcggcgtcggcaagccatgttggatcatctgcttttgcgtgtggatggcggctatactgctttccattccacagctcgttttttacactgtgaacgataatgccagatgtattcctatcttcccgagatatctcggtactagcatgaaagcccttatccaaatgctggagatttgtattggatttgtggtgccattcctaatcatgggggtttgttatttcataactgccaggacactgatgaagatgccaaatataaaaatttcgcgtccattgaaagtcctcctgactgtggtgattgtattcattgtgacccagctgcccttcgcctggatccacatgaatgatgcattcccctccaataagacgagtgccctgttttag

SEQ ID NO: 253795 - DNA, 1914 bp, Artificial Sequence
  derived and/or modified sequence
gtaaagtgaaaacaaaagtagctggagttaggtcatttgattttatactctgtactcaagactgctcctctctgccgactacaacagattggagccatggctttggaacagaaccagtcaacagattattattatgaggaaaatgaaatgaatggcacttatgactacagtcaatatgaactgatctgtatcaaagaagatgtcagagaatttgcaaaagttttcctccctgtattcctcacaatagttttcgtcattggacttgcaggcaattccatggtagtggcaatttatgcctattacaagaaacagagaaccaaaacagatgtgtacatcctgaatttggctgtagcagatttactccttctattcactctgcctttttgggctgttaatgcagttcatgggtgggttttagggaaaataatgtgcaaaataacttcagccttgtacacactaaactttgtctctggaatgcagtttctggcttgtatcagcatagacagatatgtggcagtaactaaagtccccagccaatcaggagtgggaaaaccatgctggatcatctgtttctgtgtctggatggctgccatcttgctgagcataccccagctggttttttatacagtaaatgacaatgctaggtgcattcccattttcccccgctacctaggaacatcaatgaaagcattgattcaaatgctagagatctgcattggatttgtagtaccctttcttattatgggggtgtgctactttatcacagcaaggacactcatgaagatgccaaacattaaaatatctcgacccctaaaagttctgctcacagtcgttatagttttcattgtcactcaactgccttataacattgtcaagttctgccgagccatagacatcatctactccctgatcaccagctgcaacatgagcaaacgcatggacatcgccatccaagtcacagaaagcatcgcactctttcacagctgcctcaacccaatcctttatgtttttatgggagcatctttcaaaaactacgttatgaaagtggccaagaaatatgggtcctggagaagacagagacaaagtgtggaggagtttccttttgattctgagggtcctacagagccaaccagtacttttagcatttaaaggtaaaactgctctgccttttgcttggatacatatgaatgatgctttcccctcaaataaaacatctgcattattctgaaactcaaatctcagacgccgtggttgcaacttataataaagaatgggttgggggaagggggagaaataaaagccaagaagaggaaacaagataataaatgtacaaaacatgaaaattaaaatgaacaatataggaaaataattgtaacaggcataagtgaataacactctgctgtaacgaagaagagctttgtggtgataattttgtatcttggttgcagtggtgcttatacaaatctacacaagtgataaaatgacacagaactatatacacacattgtaccaatttcaatttcctggttttgacattatagtataattatgtaagatggaaccattggggaaaactgggtgaagggtacccaggaccactctgtaccatctttgtaacttcctgtgaatttataataatttcaaaataaaacaagttaaaaaaaaacccactatgctataagttaggccatctaaaacagattattaaagaggttcatgttaaaaggcatttataattatttttaattatctaagttttaatacaagaacgatttccctgcataattttagtacttgaataagtatgcagcagaactccaactatcttttttcctgttttttttaaatttgtaagtaattttataaaatccacctcctccaaaaaagcaataaaaaaaaaacaaactataataa

SEQ ID NO: 253796 - DNA, 1004 bp, Artificial Sequence
  derived and/or modified sequence
gtaaagtgaaaacaaaagtagctggagttaggtcatttgattttatactctgtactcaagactgctcctctctgccgactacaacagattggagccatggctttggaacagaaccagtcaacagattattattatgaggaaaatgaaatgaatggcacttatgactacagtcaatatgaactgatctgtatcaaagaagatgtcagagaatttgcaaaagttttcctccctgtattcctcacaatagttttcgtcattggacttgcaggcaattccatggtagtggcaatttatgcctattacaagaaacagagaaccaaaacagatgtgtacatcctgaatttggctgtagcagatttactccttctattcactctgcctttttgggctgttaatgcagttcatgggtgggttttagggaaaataatgtgcaaaataacttcagccttgtacacactaaactttgtctctggaatgcagtttctggcttgtatcagcatagacagatatgtggcagtaactaaagtccccagccaatcaggagtgggaaaaccatgctggatcatctgtttctgtgtctggatggctgccatcttgctgagcataccccagctggttttttatacagtaaatgacaatgctaggtgcattcccattttcccccgctacctaggaacatcaatgaaagcattgattcaaatgctagagatctgcattggatttgtagtaccctttcttattatgggggtgtgctactttatcacagcaaggacactcatgaagatgccaaacattaaaatatctcgacccctaaaagttctgctcacagtcgttatagttttcattgtcactcaactgccttttgcttggatacatatgaatgatgctttcccctcaaataaaacatctgcattattctgaaactcaaatctcagacgccgtggttgcaacttataataaagaatgggttgggggaagggggagaaataaaagccaagaagagg

SEQ ID NO: 253797 - DNA, 1053 bp, Artificial Sequence
  derived and/or modified sequence
atggccctggagcagaaccagagcaccgactactactacgaggagaacgagatgaacggcacctacgactacagccagtacgagctgatctgcatcaaggaggacgtgagagagttcgccaaggtgttcctgcccgtgttcctgaccatcgtgttcgtgatcggcctggccggcaacagcatggtggtggccatctacgcctactacaagaagcagagaaccaagaccgacgtgtacatcctgaacctggccgtggccgacctgctgctgctgttcaccctgcccttctgggccgtgaacgccgtgcacggctgggtgctgggcaagatcatgtgcaagatcaccagcgccctgtacaccctgaacttcgtgagcggcatgcagttcctggcctgcatcagcatcgacagatacgtggccgtgaccaaggtgcccagccagagcggcgtgggcaagccctgctggatcatctgcttctgcgtgtggatggccgccatcctgctgagcatcccccagctggtgttctacaccgtgaacgacaacgccagatgcatccccatcttccccagatacctgggcaccagcatgaaggccctgatccagatgctggagatctgcatcggcttcgtggtgcccttcctgatcatgggcgtgtgctacttcatcaccgccagaaccctgatgaagatgcccaacatcaagatcagcagacccctgaaggtgctgctgaccgtggtgatcgtgttcatcgtgacccagctgccctacaacatcgtgaagttctgcagagccatcgacatcatctacagcctgatcaccagctgcaacatgagcaagagaatggacatcgccatccaggtgaccgagagcatcgccctgttccacagctgcctgaaccccatcctgtacgtgttcatgggcgccagcttcaagaactacgtgatgaaggtggccaagaagtacggcagctggagaagacagagacagagcgtggaggagttccccttcgacagcgagggccccaccgagcccaccagcaccttcagcatctag

SEQ ID NO: 253798 - DNA, 825 bp, Artificial Sequence
  derived and/or modified sequence
atggccctggagcagaaccagagcaccgactactactacgaggagaacgagatgaacggcacctacgactacagccagtacgagctgatctgcatcaaggaggacgtgagagagttcgccaaggtgttcctgcccgtgttcctgaccatcgtgttcgtgatcggcctggccggcaacagcatggtggtggccatctacgcctactacaagaagcagagaaccaagaccgacgtgtacatcctgaacctggccgtggccgacctgctgctgctgttcaccctgcccttctgggccgtgaacgccgtgcacggctgggtgctgggcaagatcatgtgcaagatcaccagcgccctgtacaccctgaacttcgtgagcggcatgcagttcctggcctgcatcagcatcgacagatacgtggccgtgaccaaggtgcccagccagagcggcgtgggcaagccctgctggatcatctgcttctgcgtgtggatggccgccatcctgctgagcatcccccagctggtgttctacaccgtgaacgacaacgccagatgcatccccatcttccccagatacctgggcaccagcatgaaggccctgatccagatgctggagatctgcatcggcttcgtggtgcccttcctgatcatgggcgtgtgctacttcatcaccgccagaaccctgatgaagatgcccaacatcaagatcagcagacccctgaaggtgctgctgaccgtggtgatcgtgttcatcgtgacccagctgcccttcgcctggatccacatgaacgacgccttccccagcaacaagaccagcgccctgttctag

SEQ ID NO: 253799 - protein, 394 aa, Artificial Sequence
  derived and/or modified sequence
MAGAAMAERGRVPPPAPAPSTEGLPRAFLQSLRTLFDILDDRRRGCVHLREIESRWQGTDARELPRGVLEGLRQVAPASGYLTFERFVAGLRTSLLSADGGPRDPTRAPARPGDQPPPPPQRLVFAPADEPRTVLERKPLPLGVRAPLAGPSAAARSPEQLCAPAEAAPCPAEPERSQSAALEPSSSADAGAVACRALEADSGDARRAPRARGERRRHTIASGVDCGLLKQMKELEQEKEVLLQGLEMMARGRDWYQQQLQRVQERQRRLGQSRASADFGAAGSPRPLGRLLPKVQEVARCLGELLAAACASRALPPSSSGPPCPALTSTSPPVWQQQTILMLKEQNRLLTQEVTEKSERITQLEQEKSALIKQLFEARALSQQDGGPLDSTFI

SEQ ID NO: 253800 - DNA, 1185 bp, Artificial Sequence
  derived and/or modified sequence
atggccggagccgcgatggctgagagagggagagtgcctccgccagctcctgccccttccactgaaggacttccccgagcctttctccagtccctgagaaccctgtttgacatcctggacgacaggcgtcgaggctgtgtccacctgcgtgaaatcgagtcaaggtggcagggaacagatgcccgcgagttacctagaggagtactcgaaggactgcggcaggttgcccccgcatctggttatctaaccttcgaaaggtttgtcgctgggctgcggacgagccttctcagcgctgacgggggcccaagagaccctaccagagccccagcacgacctggtgatcagccaccaccacccccacagaggctggtgtttgcccccgccgacgaacctcggacagttctcgagcgaaagccgctaccccttggcgtacgggcaccgctggctgggccctctgcagccgcacggagccctgaacagctctgcgctccagctgaagctgcgccatgccccgccgaacctgaaaggtctcagagtgctgcccttgagccgtcaagcagtgcggatgctggcgctgtggcatgtagagccctggaggccgattctggcgacgctaggcgagccccacgtgccagaggggaaagaaggcgccacactatcgccagcggggtggactgcggccttctgaagcagatgaaggagctggaacaggaaaaagaggtgctactgcaaggccttgagatgatggctcgcgggagagactggtatcaacagcagcttcagagggtccaggaaaggcagcgcagactcggccagtcgcgcgcctccgctgactttggggccgcaggttccccccgtcctctggggcgccttctcccaaaggtgcaggaagtggctcgttgcttgggagaacttctagctgcagcttgtgcgagccgcgccctgcctccctccagctctgggccaccgtgtcctgctctgacctcaactagtccgcctgtgtggcaacagcaaaccatcctgatgctgaaggagcaaaaccggctgctgacacaggaggtgactgagaagtcagaacgcataacacagctagaacaagaaaagtcagctctgattaagcaattattcgaagcccgggctctgtcccagcaggatggcggcccactagactctacttttatttag

SEQ ID NO: 253801 - DNA, 1185 bp, Artificial Sequence
  derived and/or modified sequence
atggccggggccgccatggccgagcggggccgggtgcccccaccagccccagcccccagcacagagggcctgccccgggccttcctgcagagcctgcggaccctgtttgacatcctggatgacagaagaagaggctgtgtgcacctgcgggagattgagagccgctggcagggcacagatgcccgggagctgccccggggcgtgctggagggcctgcggcaggtggccccagccagcggctacctgacctttgaaagatttgtggccggcctgcggaccagcctgctgtctgcagatggcggcccccgggaccccacccgggccccagcccggcctggggaccagcccccacctccaccccagaggctggtgtttgccccagcagatgagcccaggacagtgctggagaggaagcccctgcccctgggcgtgcgggcccccctggccggccccagcgctgctgcccggagccctgagcagctgtgtgccccagctgaggccgccccctgcccagctgagcctgagaggagccagagcgctgccctggagcccagcagcagcgcagatgctggagctgtggcctgccgggccctggaggccgacagcggagatgcccggcgggccccccgggcccggggggagcggcggcggcacaccatcgccagcggcgtggactgtggcctgctgaagcagatgaaggagctggagcaggagaaggaggtgctgctgcagggcctggagatgatggcccggggccgggactggtaccagcagcagctgcagagggtgcaggagcggcagaggcggctgggccagagccgggccagcgctgactttggagctgctggcagcccccggcccctgggccgcctgctgcccaaggtgcaggaggtggcccgctgcctgggggagctgctggccgccgcctgtgccagccgggccctgccccccagcagcagcggccccccctgcccagccctgaccagcaccagcccccctgtgtggcagcagcagaccatcctgatgctgaaggagcagaaccggctgctgacccaggaggtgacagagaagtctgagcgcatcacccagctggagcaggagaagagcgccctgatcaagcagctgtttgaggcccgggccctgagccagcaggacggcggccccctggacagcaccttcatctag

SEQ ID NO: 253802 - DNA, 1185 bp, Artificial Sequence
  derived and/or modified sequence
atggccggcgccgccatggccgagcggggccgggtgcccccccccgcaccggcacccagcacagaggggctgcctagagcttttctgcagtccctgcgcactctgttcgacatactcgacgatcgtagacgtggctgcgtccatctcagagaaatcgagtctcgttggcaagggacagatgcccgggagctccctaggggggtcctagagggtctgaggcaggtggcccctgcgtcaggttacctgacctttgagcgattcgtcgcaggcttacgtaccagcctgctctctgctgatggtggacctcgcgatccgacgcgcgcccctgccagaccgggggatcagcctccaccaccccctcagaggctggtgttcgcacctgccgatgaaccgcggacggtgcttgaacgaaagcccctgccactgggcgtgagagccccccttgcaggaccttctgctgcagctcggagccctgagcagctctgcgctccggcggaagctgccccatgtccagccgaacccgagaggagccagtcagccgcactcgagcctagctctagtgccgatgccggagctgtcgcctgcagggctttagaagccgactctggagacgctaggcgcgcaccccgagcccgtggcgagcgcagaaggcatactattgccagtggcgttgattgcgggctactgaaacaaatgaaagagctcgaacaggagaaagaggtcctgctgcagggcctcgagatgatggccagaggcagggattggtatcagcagcagctgcagagggtccaggagagacagcggagactgggccagtctagagcctctgccgattttggggctgccgggtcaccccggccactcggccggttgcttccgaaggtccaagaagtggctaggtgccttggagagctgctggccgcagcctgcgccagccgtgcgctgcccccatcctcgtctggtcctccctgcccagcactgacgtcgacatcaccacctgtgtggcagcagcaaacaatcttgatgctgaaagagcagaacaggttattgactcaggaggttacggaaaaaagcgaacggattacccagcttgagcaagagaagtccgcgctgattaagcagctcttcgaagccagagccttgtcacagcaggatggtgggcccctcgatagcacgtttatctag

SEQ ID NO: 253803 - DNA, 1185 bp, Artificial Sequence
  derived and/or modified sequence
atggcgggagctgcaatggcggagaggggacgcgtgcccccacctgcacctgccccttccacagagggtttacctagggccttcttgcagtcacttaggacactgttcgacattctggacgatcgcagaagagggtgcgtccacctgagagaaattgagagtaggtggcaagggaccgacgctcgggaattaccacggggagtcttagaaggacttcgccaggtggcgccagccagtggatacctgacctttgagagattcgtagctggcctcaggacctccttgttgagcgcagatgggggacccagggatcccactagggcaccagcacgcccaggcgatcaaccgcctccaccaccacaaagattggtgttcgctcccgctgacgaaccacgcacagtgctggagagaaagccactgccactgggagttagagctcccctcgctggaccaagtgcagcagcgcgttcccccgaacagctctgtgcgccagccgaggccgcaccatgtcccgctgaaccggagcgttcccagagtgccgctctggagcccagctcctcagccgatgctggggctgtggcctgtcgagccctggaggcagactcaggcgacgccaggcgagcacctcgtgcaagaggggagagacggagacacacaatcgcaagcggggtggattgcggcttgcttaagcaaatgaaggaactcgagcaggaaaaagaagtgctcttacaaggcctggagatgatggcccgaggaagagattggtaccagcagcaactccagcgagtgcaggaacgacagcgcagacttggtcagtccagggcatcagctgacttcggagctgctggctcacctagaccgctagggaggctgctacctaaagtgcaggaagttgcccgttgccttggtgaactcttggcagcagcttgtgcgagcagggccctgcccccttccagcagcggtcccccttgcccagccttaacctccacttctccaccggtgtggcaacaacagacaatactaatgctaaaggagcagaataggctcctgactcaggaagtcactgaaaagagcgaaagaattacccagctcgaacaggaaaagagtgctctgataaaacagctgttcgaagcacgcgctctctctcaacaagacggagggccactcgactcgactttcatttag

SEQ ID NO: 253804 - DNA, 3843 bp, Artificial Sequence
  derived and/or modified sequence
gccgcgaggagggccccattcaaaagtagtcgctattgtcgccgtgggctgagctcgccgggccggcccctccgtggggccgcgctgggacgcacgcgggtggacgaggggaccgatcccgggcgcccatggccggggccgccatggccgagcggggccgcgtgcctccccccgcacccgcgcccagcacggaggggctgccgcgcgccttcctgcagagcctgcgcaccctgttcgacatcctggacgaccggcggcgcggctgcgtgcacctgcgcgagatcgagtcccgctggcagggcaccgacgcgcgggagctgccccgcggggtgctggagggcttgcgccaggtggccccggccagcggctacctgaccttcgagcgcttcgtggccggcctgcgcacctccctgctgagcgccgacggcggcccccgggaccccacgcgcgccccggcccggcccggggatcagccgccgccgccgccgcagcgcctggtgttcgctccggccgacgagccgcggacggtcctggagaggaagcccctgcccctgggcgtgcgcgcccctctggccggtcccagcgccgccgcccgcagcccggagcagctgtgcgccccggctgaggcggcgccctgccccgcggagcccgagcggtcccagagcgcggcgctggaaccgagctccagcgcggacgcaggtgcagtggcgtgcagggccctggaggcggactcaggggatgcccggcgggctccccgtgcccgaggggaacgtcggaggcacaccatcgccagcggcgtggactgcggcctgctgaagcagatgaaggagctggagcaggagaaggaggtgctgctgcagggtttggagatgatggcgcggggccgcgactggtaccagcagcagctgcaacgagtgcaggagcgccagcgccgcctgggccagagcagagccagcgccgactttggggctgcagggagcccccgcccactggggcggctactgcccaaggtacaagaggtggcccggtgcctgggggagctgctggctgcagcctgtgccagccgggccctgcccccgtcctcctccgggcccccctgccctgccctgacgtccacctcacccccggtctggcagcagcagaccatcctcatgctgaaggagcagaaccgactcctcacccaggaggtgaccgagaagagtgagcgcatcacgcagctggagcaggagaagtcggcgctcattaagcagctgtttgaggcccgcgccctgagccagcaggacgggggacctctggattccaccttcatctagtccttgtgggccgcgtgggcccccagggccagcctggcactcagcccttcgagggtgggcgccccatcgcacccaccctctctggctggagacccccggcaggcccaggcacagtcccggagtgggcgccttcctgccgcccttgccagatgggctccccaggcctgcccccggctggtccccgcaccgagcgcttgactccgttttggctcctggtgctgacatgggctggggctctcttgagtccgcatagtccgcagctactactgccgctgtcagtggacagtggggtacccctccatgagttagcgtccccccgtttccagcggtgccgccctgggtcccatcttcagggaaaggcactgcccacgccaggctgcacttccaacaacgggcagcagagggcgcggggcggctccgacgcgggtccaagggcagcttcccgctcaaccagggcaccaggacgaggtggctgtagctcggacggacggaagtagatggagggggtggggacggcctgtaagcggggggtgcctgcctggctggggagccccagggatagcggtcggacttcaggttctggccaaggctgagggaccctggctgcagcggatcggcacgccgggtgggcgagagcttggcctgcatgtgcctcccacagaccctggggtgatggccttccccctcttggccgggacgttgccccacgttgagtcccacacaacatcctgtgagcctggctccccaggagggcccccagacagctcccaggcacgtcataggcaaagcctgttcccccgactcaggatttccaaggcctggggtcctgctcacccccctttgctctcacgcccagcctgtccccaggtttcagctgggagaggccacctccctcagccaaggaaaacgagaacccccagggtacaggaggaggctggggcaggtccccttgggtgtcactccctcagcccctgcccaggcccactcccgctggtgctggagtacgcactggtgggggggccctgctcagcccaacctggagggtcccagtgtcaccagaaccaggggcacggcaacagcatcgatgggttctgcagcccagggcccccgatgcggggtcagtgcgtggggggcgcagggcccccgatgccgatgcggggtcagtgtgtgtggggcgcagggcctccgatgcggggtcagtgcgtggggggcgcagggccccctcgtgtccagggcactttggtacactgtcccacaaggcacctgtctcagaggaggggccctggcaggcagcgtggcaactcccttccggagcccagctccatgctaacctgcccacagcaaccccacagagccacattccctgctgcacctggtctgcaggggtgtcccaggacaggcccaagtcagcccagcatgcagctgccctcctaccctgaagatgggagtgggctttccaggggacataaggatgtcaggcctggacctcctgggcaggaaagggtgcaggtcctgagggcctgtgccccacagccccagcaccaggtggactgcagcgcagtgggtgggccagtggcagccagggagaagccccccgtcagcaggctggggtctgcccaccagggcctccccacgtctgcctttgagggtgcctgccatgccctgggggatcctggcatctttactggactggaagcaggagacagaacagtgtctgtcccggggtgacttcatcaggagaccgcccacatagagctggaccccgcagctgaagcggaaatgtgagacaggctggcacctccggaaaaactgcctttcagccttggtgttccgtgcaaggtgaaaagaaataggtcctcccagtttacagcttgaaatcaggctagtgagtggccctggagaccacgaggggagaatttaaaggccccggctggcagggtctaggtggctggcagaggcacatgcagaccctgcctggagcctgccctaggacgctgggcgggtcagtctccgtgcaggatgtgagcagcgtccctgggctctatccgcgaggtgccagtagcgtgtgcaggtacatacacgtgcgtgcacactgtgatgacacccggaaatgtctcaggatgttgaaatgtgtccttgggggcagaagtgtccccagttgagaatctgccccagaggaacacacccacaccaggcctcaggattttgtgttgatcaagttccaaggaaaaggaacatctcagccgggcgtggtggttcacgcctggaatcccagcacttgaggccaggagttccagagcagcctgggcaacgcagtgagagaccccatctctacaaaaaaaaaaaagaaagaaagaaaatgagagatccaggtttaaaaattcataaacaccacaaggaaacaatacactatgagacccagcagaagcaacagattgactctagacccagatactagaattatcagagagaatataaagtaacagtgttttatatatctaaagaaataaaagagatttctggaaacatg

SEQ ID NO: 253805 - DNA, 1185 bp, Artificial Sequence
  derived and/or modified sequence
atggccggcgccgccatggccgagagaggcagagtgcccccccccgcccccgcccccagcaccgagggcctgcccagagccttcctgcagagcctgagaaccctgttcgacatcctggacgacagaagaagaggctgcgtgcacctgagagagatcgagagcagatggcagggcaccgacgccagagagctgcccagaggcgtgctggagggcctgagacaggtggcccccgccagcggctacctgaccttcgagagattcgtggccggcctgagaaccagcctgctgagcgccgacggcggccccagagaccccaccagagcccccgccagacccggcgaccagccccccccccccccccagagactggtgttcgcccccgccgacgagcccagaaccgtgctggagagaaagcccctgcccctgggcgtgagagcccccctggccggccccagcgccgccgccagaagccccgagcagctgtgcgcccccgccgaggccgccccctgccccgccgagcccgagagaagccagagcgccgccctggagcccagcagcagcgccgacgccggcgccgtggcctgcagagccctggaggccgacagcggcgacgccagaagagcccccagagccagaggcgagagaagaagacacaccatcgccagcggcgtggactgcggcctgctgaagcagatgaaggagctggagcaggagaaggaggtgctgctgcagggcctggagatgatggccagaggcagagactggtaccagcagcagctgcagagagtgcaggagagacagagaagactgggccagagcagagccagcgccgacttcggcgccgccggcagccccagacccctgggcagactgctgcccaaggtgcaggaggtggccagatgcctgggcgagctgctggccgccgcctgcgccagcagagccctgccccccagcagcagcggccccccctgccccgccctgaccagcaccagcccccccgtgtggcagcagcagaccatcctgatgctgaaggagcagaacagactgctgacccaggaggtgaccgagaagagcgagagaatcacccagctggagcaggagaagagcgccctgatcaagcagctgttcgaggccagagccctgagccagcaggacggcggccccctggacagcaccttcatctag

SEQ ID NO: 253806 - DNA, 303 bp, Artificial Sequence
  derived and/or modified sequence
atggagaccaggcaggtctcacggtctccgagggtccgactgttactgctgctactacttttactggtggtcccatggggcgtgagaaccgcgtctggggtagccctcccgccagttggcgttctgtcactccgtccaccagggagagcctgggcagaccctgctaccccaaggcctcgccgatcattggctctggcggatgatgcagcttttcgcgagcgagccaggctattggccgctctggaaaggcggcattggctgaacagctatatgcacaaactcctggttctagatgcgccttag

SEQ ID NO: 253807 - DNA, 303 bp, Artificial Sequence
  derived and/or modified sequence
atggagacccgtcaagtgtcaaggagtccccgtgttcgtttgttactgctgctgctactgcttttggtggtgccttggggcgttagaacagcatcaggcgtggcactgccccctgtgggagtcctctctctgagaccgccaggaagggcatgggcagatcctgctacaccacggccgcgacgctctctggccttggcagatgacgcagcttttcgggaacgtgctcgtctcctggccgccctggaaagacgccattggcttaactcctatatgcataagctattagtcctcgatgccccttag

SEQ ID NO: 253808 - DNA, 303 bp, Artificial Sequence
  derived and/or modified sequence
atggagaccagacaggtgagcagaagccccagagtgagactgctgctgctgctgctgctgctgctggtggtgccctggggcgtgagaaccgccagcggcgtggccctgccccccgtgggcgtgctgagcctgagaccccccggcagagcctgggccgaccccgccacccccagacccagaagaagcctggccctggccgacgacgccgccttcagagagagagccagactgctggccgccctggagagaagacactggctgaacagctacatgcacaagctgctggtgctggacgccccctag

SEQ ID NO: 253809 - DNA, 303 bp, Artificial Sequence
  derived and/or modified sequence
atggagaccagacaggtttctcgctcccctcgagttcggctgctgctgctgctcctcctcctcctggtggtgccctggggggtgagaacagcgagcggggtcgccctcccccctgttggagtgctctccttaaggccacccggaagagcctgggcggatcctgcaacgccgagacctaggcgatccctcgcactcgccgacgacgctgcctttagagaaagggcccgtctgctcgccgcattagagagaaggcactggttgaacagttacatgcataagcttctggtcctagatgctccgtag

SEQ ID NO: 253810 - DNA, 303 bp, Artificial Sequence
  derived and/or modified sequence
atggagacccggcaggtgagccgcagcccccgggtgcggctgctgctgctgctgctgctgctgctggtggtgccctggggcgtgaggacagccagcggcgtggccctgccccctgtgggcgtgctgagcctgcggcccccaggccgggcctgggccgaccctgccaccccccggccccggcgcagcctggccctggctgatgatgctgccttccgggagcgggcccggctgctggccgccctggagaggaggcactggctgaacagctacatgcacaagctgctggtgctggatgccccctag

SEQ ID NO: 253811 - DNA, 303 bp, Artificial Sequence
  derived and/or modified sequence
atggagacccggcaggtgagccggagcccccgggtgcggctgctgctgttacttctgctcctcctggtcgtgccttggggcgttcgcacagcctcaggcgtggccttacccccggtaggggtgctgagcttgagacctcctggaagggcctgggctgatccagctacaccaagaccacggcggagcctggcactagctgacgacgccgcattcagagagagagcacgcttacttgcggctctggaaaggcggcactggttaaactcttatatgcacaagttactggtgctagacgccccttag

SEQ ID NO: 253812 - RNA, 303 nt, Artificial Sequence
  derived and/or modified sequence
auggagacccgucaagugucaaggaguccccguguucguuuguuacugcugcugcuacugcuuuugguggugccuuggggcguuagaacagcaucaggcguggcacugcccccugugggaguccucucucugagaccgccaggaagggcaugggcagauccugcuacaccacggccgcgacgcucucuggccuuggcagaugacgcagcuuuucgggaacgugcucgucuccuggccgcccuggaaagacgccauuggcuuaacuccuauaugcauaagcuauuaguccucgaugccccuuag

SEQ ID NO: 253813 - protein, 418 aa, Artificial Sequence
  derived and/or modified sequence
MHPEPSEPATGGAAELDCAQEPGVEESAGDHGSAGRGGCKEEINDPKEICVGSSDTSYHSQQKQSGDNGSGGHFAHPREDREDRGPRMTKSSLQKLCKQHKLYITPALNDTLYLHFKGFDRIENLEEYTGLRCLWLQSNGIQKIENLEAQTELRCLFLQMNLLRKIENLEPLQKLDALNLSNNYIKTIENLSCLPVLNTLQMAHNHLETVEDIQHLQECLRLCVLDLSHNKLSDPEILSILESMPDLRVLNLMGNPVIRQIPNYRRTVTVRLKHLTYLDDRPVFPKDRACAEAWARGGYAAEKEERQQWESRERKKITDSIEALAMIKQRAEERKRQRESQERGEMTSSDDGENVPASAEGKEEPPGDRETRQKMELFVKESFEAKDELCPEKPSGEEPPVEAKREDGDPATVTACEG

SEQ ID NO: 253814 - protein, 725 aa, Artificial Sequence
  derived and/or modified sequence
MHPEPSEPATGGAAELDCAQEPGVEESAGDHGSAGRGGCKEEINDPKEICVGSSDTSYHSQQKQSGDNGSGGHFAHPREDREDRGPRMTKSSLQKLCKQHKLYITPALNDTLYLHFKGFDRIENLEEYTGLRCLWLQSNGIQKIENLEAQTELRCLFLQMNLLRKIENLEPLQKLDALNLSNNYIKTIENLSCLPVLNTLQMAHNHLETVEDIQHLQECLRLCVLDLSHNKLSDPEILSILESMPDLRVLNLMGNPVIRQIPNYRRTVTVRLKHLTYLDDRPVFPKDRACAEAWARGGYAAEKEERQQWESRERKKITDSIEALAMIKQRAEERKRQRESQERGEMTSSDDGENVPASAEGKEEPPGDRETRQKMELFVKESFEAKDELCPEKPSGEEPPVEAKREDGGPEPEGTLPAETLLLSSPVEVKGEDGDGEPEGTLPAEAPPPPPPVEVKGEDGDQEPEGTLPAETLLLSPPVKVKGEDGDREPEGTLPAEAPPPPPLGAAREEPTPQAVATEGVFVTELDGTRTEDLETIRLETKETFCIDDLPDLEDDDETGKSLEDQNMCFPKIEVISSLSDDSDPELDYTSLPVLENLPTDTLSNIFAVSKDTSKAARVPFTDIFKKEAKRDLEIRKQDTKSPRPLIQELSDEDPSGQLLMPPTCQRDAAPLTSSGDRDSDFLAASSPVPTESAATPPETCVGVAQPSQALPTWDLTAFPAPKAS

SEQ ID NO: 253815 - DNA, 1257 bp, Artificial Sequence
  derived and/or modified sequence
atgcaccccgagcccagcgagcccgccaccggcggcgccgccgagctggactgcgcccaggagcccggcgtggaggagagcgccggcgaccacggcagcgccggcagaggcggctgcaaggaggagatcaacgaccccaaggagatctgcgtgggcagcagcgacaccagctaccacagccagcagaagcagagcggcgacaacggcagcggcggccacttcgcccaccccagagaggacagagaggacagaggccccagaatgaccaagagcagcctgcagaagctgtgcaagcagcacaagctgtacatcacccccgccctgaacgacaccctgtacctgcacttcaagggcttcgacagaatcgagaacctggaggagtacaccggcctgagatgcctgtggctgcagagcaacggcatccagaagatcgagaacctggaggcccagaccgagctgagatgcctgttcctgcagatgaacctgctgagaaagatcgagaacctggagcccctgcagaagctggacgccctgaacctgagcaacaactacatcaagaccatcgagaacctgagctgcctgcccgtgctgaacaccctgcagatggcccacaaccacctggagaccgtggaggacatccagcacctgcaggagtgcctgagactgtgcgtgctggacctgagccacaacaagctgagcgaccccgagatcctgagcatcctggagagcatgcccgacctgagagtgctgaacctgatgggcaaccccgtgatcagacagatccccaactacagaagaaccgtgaccgtgagactgaagcacctgacctacctggacgacagacccgtgttccccaaggacagagcctgcgccgaggcctgggccagaggcggctacgccgccgagaaggaggagagacagcagtgggagagcagagagagaaagaagatcaccgacagcatcgaggccctggccatgatcaagcagagagccgaggagagaaagagacagagagagagccaggagagaggcgagatgaccagcagcgacgacggcgagaacgtgcccgccagcgccgagggcaaggaggagccccccggcgacagagagaccagacagaagatggagctgttcgtgaaggagagcttcgaggccaaggacgagctgtgccccgagaagcccagcggcgaggagccccccgtggaggccaagagagaggacggcgaccccgccaccgtgaccgcctgcgagggctag

SEQ ID NO: 253816 - DNA, 1438 bp, Artificial Sequence
  derived and/or modified sequence
agtgcgcgtgcgcagcggttgcctgggcgaccggggaagcgttgggctgtaaagactagggcgccagcggctggcgaagaaggaaagagggtactctctggctgggctggggccgtagcgacgtccgccgcgaacctgggccccccaaagctgcggggcgttcggtgtcgccgaagtaaacatgcaccctgagccctcggagcctgcgacaggtggtgcagcagagctggattgcgcgcaggagcccggcgtggaggagtctgcgggtgaccacgggagcgcaggccgagggggctgcaaggaagaaattaatgatcctaaggaaatatgtgtgggttcttctgacacatcctaccacagccagcagaaacagagtggtgataatgggtcaggtggtcacttcgcacacccaagagaagacagggaagatcggggccccagaatgactaaaagttccctgcaaaaactctgcaagcagcacaagctttatattaccccagcattgaatgatacgctgtatttacactttaaaggttttgatcgcattgagaacctggaagagtacacagggctgcgctgtctctggctgcagagcaatggaatacagaaaatcgaaaacctggaggcccaaactgagttgcgttgcctcttcttgcaaatgaacttgctccgtaaaattgagaacctggaacctctgcagaaactggatgctcttaacctcagcaacaattacatcaagaccattgaaaacctctcctgcctcccagtcctgaacacattgcagatggcccacaatcacctggagaccgtggaggacattcagcatctacaagagtgtttgaggctttgtgtccttgacctttcgcacaacaagctgagtgacccggagatcctgagcattctggaaagcatgcccgatttgcgtgtactgaatttgatgggaaacccggttatcagacagattcctaattacagaaggacagtcactgtacgactaaagcacttaacatacctggatgatagaccagtgtttccaaaggacagagcttgtgcggaggcctgggctaggggagggtacgcagctgaaaaggaggagagacagcagtgggagagcagggagcggaagaagatcacagacagcattgaagccttggccatgatcaagcagcgggcagaggagaggaaaagacagagagagagtcaagagagaggggagatgacatcttcagatgatggtgagaatgtgcccgccagtgcggaaggcaaggaggagcctcccggggacagagaaacaaggcagaagatggagctatttgttaaggaaagctttgaggccaaggacgagctctgcccggaaaagccaagtggagaggagccgcctgtggaggctaaaagagaggatggagaccctgctactgtcaccgcctgtgaaggttaa

SEQ ID NO: 253817 - DNA, 2178 bp, Artificial Sequence
  derived and/or modified sequence
atgcaccccgagcccagcgagcccgccaccggcggcgccgccgagctggactgcgcccaggagcccggcgtggaggagagcgccggcgaccacggcagcgccggcagaggcggctgcaaggaggagatcaacgaccccaaggagatctgcgtgggcagcagcgacaccagctaccacagccagcagaagcagagcggcgacaacggcagcggcggccacttcgcccaccccagagaggacagagaggacagaggccccagaatgaccaagagcagcctgcagaagctgtgcaagcagcacaagctgtacatcacccccgccctgaacgacaccctgtacctgcacttcaagggcttcgacagaatcgagaacctggaggagtacaccggcctgagatgcctgtggctgcagagcaacggcatccagaagatcgagaacctggaggcccagaccgagctgagatgcctgttcctgcagatgaacctgctgagaaagatcgagaacctggagcccctgcagaagctggacgccctgaacctgagcaacaactacatcaagaccatcgagaacctgagctgcctgcccgtgctgaacaccctgcagatggcccacaaccacctggagaccgtggaggacatccagcacctgcaggagtgcctgagactgtgcgtgctggacctgagccacaacaagctgagcgaccccgagatcctgagcatcctggagagcatgcccgacctgagagtgctgaacctgatgggcaaccccgtgatcagacagatccccaactacagaagaaccgtgaccgtgagactgaagcacctgacctacctggacgacagacccgtgttccccaaggacagagcctgcgccgaggcctgggccagaggcggctacgccgccgagaaggaggagagacagcagtgggagagcagagagagaaagaagatcaccgacagcatcgaggccctggccatgatcaagcagagagccgaggagagaaagagacagagagagagccaggagagaggcgagatgaccagcagcgacgacggcgagaacgtgcccgccagcgccgagggcaaggaggagccccccggcgacagagagaccagacagaagatggagctgttcgtgaaggagagcttcgaggccaaggacgagctgtgccccgagaagcccagcggcgaggagccccccgtggaggccaagagagaggacggcggccccgagcccgagggcaccctgcccgccgagaccctgctgctgagcagccccgtggaggtgaagggcgaggacggcgacggcgagcccgagggcaccctgcccgccgaggccccccccccccccccccccgtggaggtgaagggcgaggacggcgaccaggagcccgagggcaccctgcccgccgagaccctgctgctgagcccccccgtgaaggtgaagggcgaggacggcgacagagagcccgagggcaccctgcccgccgaggcccccccccccccccccctgggcgccgccagagaggagcccaccccccaggccgtggccaccgagggcgtgttcgtgaccgagctggacggcaccagaaccgaggacctggagaccatcagactggagaccaaggagaccttctgcatcgacgacctgcccgacctggaggacgacgacgagaccggcaagagcctggaggaccagaacatgtgcttccccaagatcgaggtgatcagcagcctgagcgacgacagcgaccccgagctggactacaccagcctgcccgtgctggagaacctgcccaccgacaccctgagcaacatcttcgccgtgagcaaggacaccagcaaggccgccagagtgcccttcaccgacatcttcaagaaggaggccaagagagacctggagatcagaaagcaggacaccaagagccccagacccctgatccaggagctgagcgacgaggaccccagcggccagctgctgatgccccccacctgccagagagacgccgcccccctgaccagcagcggcgacagagacagcgacttcctggccgccagcagccccgtgcccaccgagagcgccgccaccccccccgagacctgcgtgggcgtggcccagcccagccaggccctgcccacctgggacctgaccgccttccccgcccccaaggccagctag

SEQ ID NO: 253818 - DNA, 1257 bp, Artificial Sequence
  derived and/or modified sequence
atgcatcctgaacctagcgagccagcaactggtggtgccgccgagcttgattgcgcccaagagcctggcgtggaggaaagtgccggtgaccacggttcagcaggacgcggagggtgtaaagaggaaatcaatgaccccaaggagatatgcgtcggaagctcagatacaagttaccacagccagcagaaacagtctggcgataatggaagtggagggcatttcgcccatccgagagaggatagggaagatcgcggccccaggatgactaagtcctcactacagaagctctgcaaacagcataaactatacattacacctgccttgaacgacacactgtacttacactttaaaggcttcgacaggatcgagaatttggaggagtataccggactgcgctgtctctggctgcagtctaatggcatccagaagatcgagaatctcgaagcacaaactgaactgagatgcctgttcctccagatgaaccttctacgcaaaatagagaacctggaacctctgcagaaacttgatgctttgaatctgtctaataattatattaagactatcgagaacttatcctgtttgcccgttcttaatactttgcaaatggcacataaccacctggaaacggtggaagacatccagcacctccaagaatgtctgcggctctgcgtgctcgatctttctcataacaagctcagcgaccccgagatccttagcattctggaatcaatgccagacctccgcgtccttaacctgatgggaaatcccgtgattcggcagatccccaactataggcgtacagtgacagtgaggctgaagcacctgacctatcttgacgatcgccccgtgttcccgaaggaccgggcatgcgccgaagcatgggccagaggaggatacgctgctgagaaagaggagagacagcagtgggaatctcgtgaaagaaaaaaaataacagattcgattgaggcactggcgatgatcaaacagagggctgaggagcggaaaagacaacgcgaatcccaagaacgcggtgaaatgacctcaagcgatgatggcgagaatgtgccagctagcgccgagggtaaagaagagcccccaggtgacagagagactagacagaagatggagctgttcgttaaagaatcatttgaggctaaagacgagctttgccccgagaaaccttccggtgaggagcctccagtagaggccaagcgcgaggatggagatcccgctactgtgactgcctgcgagggctag

SEQ ID NO: 253819 - DNA, 2178 bp, Artificial Sequence
  derived and/or modified sequence
atgcatcctgagcctagcgagcccgccaccggcggggccgccgaattggattgcgcacaagagcccggcgtggaagaaagtgcaggagatcatgggtcggccgggagggggggttgtaaggaagaaatcaacgaccccaaggagatatgtgtaggatcctccgatacatcctaccattcacaacaaaaacagagcggcgacaatggctccgggggtcattttgctcacccacgggaagatagagaagatcgagggcccagaatgacaaagtccagtctacagaagctatgcaagcagcacaaactgtatattacacctgccctgaacgacacactatatctgcacttcaaagggttcgaccgaatcgagaatttagaggagtatacggggctgcgctgtctgtggttgcagagcaacggcattcaaaaaattgagaatttggaagctcagactgagctgcggtgcctcttccttcagatgaatctgcttcgcaaaatcgaaaatctggagcccctccagaagctagacgccctgaatctgtcaaacaactatattaaaacgattgagaacctgagctgcttgcctgtgcttaacaccctgcagatggcacataaccatctggagaccgttgaagatatccagcatttgcaagaatgccttcgcctttgcgtgcttgatttatctcacaataaactgtcggatccagaaattctgagcatactagagtctatgcccgacttgagggtcctgaacctgatgggtaatcccgtaataagacaaatccccaattatcggaggacagtgaccgtgagacttaagcatctcacatacttggatgatcggcccgtcttccctaaagacagggcgtgcgcagaggcctgggctcggggagggtatgcagcagaaaaggaagagcgccagcagtgggaaagtcgagagcgcaagaaaattaccgattccatcgaggcactggccatgattaaacagagggccgaggaaagaaagcggcaacgtgagagccaggagagaggagagatgacaagctcagacgatggtgaaaacgttcccgcgtccgctgaaggaaaagaagagccccctggggatagggagacacgccagaagatggaactgtttgtcaaagaaagctttgaggctaaagacgaattgtgccctgaaaagccatccggggaagaaccaccagtggaggccaaaagggaagacggaggaccggagccagaaggaacactcccagctgagacactgttgttgtcctctccggtggaggtgaagggcgaggacggcgatggcgaacctgagggcactctaccagccgaggccccacccccaccgcctccagtcgaggtaaaaggcgaggatggcgatcaggagcccgaaggaaccctacccgccgagacattattgctgtctcctcccgttaaggttaaaggcgaggacggggaccgcgaacccgagggaacactgcccgccgaggccccgcctcctcctcctctgggagcagctagggaggagccaactcctcaagccgtggctacagagggcgtcttcgtgacagagctggacggaacaaggaccgaggacttagagaccatccggctagagaccaaagagaccttctgtatcgacgatctgcccgatctcgaagacgacgacgaaactggtaaatctcttgaggatcagaacatgtgttttccaaagatcgaggtaatcagttccttaagcgacgactctgaccccgaacttgattatacgtccctccccgtactggagaatctacccaccgacactctgtctaatatattcgccgtatccaaagatacctcaaaagcggctagggtcccttttacagatatcttcaaaaaggaggcaaaacgtgacctcgagatcaggaagcaggataccaagtccccccgccctcttatccaggagttatctgatgaggacccttccggccaactgctgatgccccctacttgtcagcgggatgccgccccgctcacctcctccggtgatcgggactctgacttcttggccgccagttctcctgtccccacagaaagcgccgcgactccccccgaaacctgtgttggggtggcccagccctcacaggctcttccgacttgggacctgactgcattcccagcccctaaggcgtcttag

SEQ ID NO: 253820 - DNA, 1257 bp, Artificial Sequence
  derived and/or modified sequence
atgcaccctgagcccagcgagcccgccaccggcggcgctgctgagctggactgtgcccaggagcccggggtggaggagagcgctggggaccacggcagcgctggccggggcggctgcaaggaggagatcaatgaccccaaggagatctgtgtgggcagcagtgacaccagctaccacagccagcagaagcagagcggggacaatggcagcggcggccactttgcccaccccagagaagatcgggaggaccggggccccaggatgaccaagagcagcctgcagaagctgtgcaagcagcacaagctgtacatcaccccagccctgaatgacaccctgtacctgcacttcaagggctttgacagaattgagaacctggaggagtacacaggcctgcgctgcctgtggctgcagagcaatggcatccagaagattgagaacctggaggcccagacagagctgcgctgcctcttcctgcagatgaacctgctgaggaagattgagaacctggagcccctgcagaagctggatgccctgaacctgagcaacaactacatcaagaccatcgagaacctgagctgcctgcctgtgctgaacaccctgcagatggcccacaaccacctggagaccgtggaggacatccagcacctgcaggagtgcctgcggctgtgtgtgctggacctgagccacaacaagctgagtgaccctgagatcctgagcatcctggagagcatgccagacctgcgggtgctgaacctgatgggcaaccctgtgatccggcagatccccaactacagaagaacagtgacagtgcggctgaagcacctgacctacctggatgacaggcctgtgttccccaaggaccgggcctgtgccgaggcctgggcccggggcggctacgccgctgagaaggaggagcggcagcagtgggagagccgggagaggaagaagatcacagacagcattgaggccctggccatgatcaagcagagagctgaggagaggaagaggcagcgggagagccaggagcggggggagatgaccagcagtgatgatggagaaaatgtgcctgccagcgctgagggcaaggaggagcccccaggggaccgggagacccggcagaagatggagctgtttgtgaaggagagctttgaggccaaggatgagctgtgcccagagaagcccagcggggaggagccccctgtggaggccaagcgggaggatggagaccctgccaccgtgacagcctgtgagggctag

SEQ ID NO: 253821 - DNA, 2178 bp, Artificial Sequence
  derived and/or modified sequence
atgcaccctgagcccagcgagcccgccaccggcggcgctgctgagctggactgtgcccaggagcccggggtggaggagagcgctggggaccacggcagcgctggccggggcggctgcaaggaggagatcaatgaccccaaggagatctgtgtgggcagcagtgacaccagctaccacagccagcagaagcagagcggggacaatggcagcggcggccactttgcccaccccagagaagatcgggaggaccggggccccaggatgaccaagagcagcctgcagaagctgtgcaagcagcacaagctgtacatcaccccagccctgaatgacaccctgtacctgcacttcaagggctttgacagaattgagaacctggaggagtacacaggcctgcgctgcctgtggctgcagagcaatggcatccagaagattgagaacctggaggcccagacagagctgcgctgcctcttcctgcagatgaacctgctgaggaagattgagaacctggagcccctgcagaagctggatgccctgaacctgagcaacaactacatcaagaccatcgagaacctgagctgcctgcctgtgctgaacaccctgcagatggcccacaaccacctggagaccgtggaggacatccagcacctgcaggagtgcctgcggctgtgtgtgctggacctgagccacaacaagctgagtgaccctgagatcctgagcatcctggagagcatgccagacctgcgggtgctgaacctgatgggcaaccctgtgatccggcagatccccaactacagaagaacagtgacagtgcggctgaagcacctgacctacctggatgacaggcctgtgttccccaaggaccgggcctgtgccgaggcctgggcccggggcggctacgccgctgagaaggaggagcggcagcagtgggagagccgggagaggaagaagatcacagacagcattgaggccctggccatgatcaagcagagagctgaggagaggaagaggcagcgggagagccaggagcggggggagatgaccagcagtgatgatggagaaaatgtgcctgccagcgctgagggcaaggaggagcccccaggggaccgggagacccggcagaagatggagctgtttgtgaaggagagctttgaggccaaggatgagctgtgcccagagaagcccagcggggaggagccccctgtggaggccaagcgggaggatggcggccctgagcctgagggcaccctgcctgctgagaccctgctgctgagcagccctgtggaggtgaagggggaggatggagatggagagcctgagggcaccctgcctgctgaggcccctcctcctcctcctcctgtggaggtgaagggggaggatggagaccaggagcctgagggcaccctgcctgctgagaccctgctgctgagcccccctgtgaaggtgaagggggaggatggagaccgggagcctgagggcaccctgcctgctgaggcccctcctcctccacccctgggcgccgcccgggaggagcccaccccccaggccgtggccacagagggcgtgtttgtgacagagctggatggcaccaggacagaggacctggagaccatccggctggagaccaaggagaccttctgcattgatgacctgcctgacctggaggatgatgatgaaacaggcaagagcctggaggaccagaacatgtgcttccccaagattgaagtcatcagcagcctgagtgatgacagcgaccctgagctggactacaccagcctgcctgtgctggagaacctgcccacagacaccctgagcaacatctttgctgtgtccaaggacaccagcaaggccgcccgggtgcccttcacagacatcttcaagaaggaggccaagagggacctggagatcaggaagcaggacaccaagagcccccggcccctcatccaggagctgagtgatgaggaccccagcggccagctgctgatgccacccacctgccagagagatgctgcccccctgaccagcagcggggaccgggacagcgacttcctggccgccagcagccctgtgcccacagaatctgctgccaccccacctgagacctgtgtgggcgtggcccagcccagccaggccctgcccacctgggacctgacagccttccctgcccccaaggccagctag

SEQ ID NO: 253822 - DNA, 3271 bp, Artificial Sequence
  derived and/or modified sequence
gcgtgcgcagcggttgcctgggcgaccggggaagcgttgggctgtaaagactagggcgccagcggctggcgaagaaggaaagagggtactctctggctgggctggggccgtagcgacgtccgccgcgaacctgggccccccaaagctgcggggcgttcggtgtcgccgaagtaaacatgcaccctgagccctcggagcctgcgacaggtggtgcagcagagctggattgcgcgcaggagcccggcgtggaggagtctgcgggtgaccacgggagcgcaggccgagggggctgcaaggaagaaattaatgatcctaaggaaatatgtgtgggttcttctgacacatcctaccacagccagcagaaacagagtggtgataatgggtcaggtggtcacttcgcacacccaagagaagacagggaagatcggggccccagaatgactaaaagttccctgcaaaaactctgcaagcagcacaagctttatattaccccagcattgaatgatacgctgtatttacactttaaaggttttgatcgcattgagaacctggaagagtacacagggctgcgctgtctctggctgcagagcaatggaatacagaaaatcgaaaacctggaggcccaaactgagttgcgttgcctcttcttgcaaatgaacttgctccgtaaaattgagaacctggaacctctgcagaaactggatgctcttaacctcagcaacaattacatcaagaccattgaaaacctctcctgcctcccagtcctgaacacattgcagatggcccacaatcacctggagaccgtggaggacattcagcatctacaagagtgtttgaggctttgtgtccttgacctttcgcacaacaagctgagtgacccggagatcctgagcattctggaaagcatgcccgatttgcgtgtactgaatttgatgggaaacccggttatcagacagattcctaattacagaaggacagtcactgtacgactaaagcacttaacatacctggatgatagaccagtgtttccaaaggacagagcttgtgcggaggcctgggctaggggagggtacgcagctgaaaaggaggagagacagcagtgggagagcagggagcggaagaagatcacagacagcattgaagccttggccatgatcaagcagcgggcagaggagaggaaaagacagagagagagtcaagagagaggggagatgacatcttcagatgatggtgagaatgtgcccgccagtgcggaaggcaaggaggagcctcccggggacagagaaacaaggcagaagatggagctatttgttaaggaaagctttgaggccaaggacgagctctgcccggaaaagccaagtggagaggagccgcctgtggaggctaaaagagaggatggaggtccagagccagaggggaccctcccagctgagaccctgctactgtcgtcacctgtggaggttaaaggagaggacggagatggagagccagaggggaccctcccagctgaggccccaccacccccgccacctgtggaggttaaaggagaggatggagatcaagagccagaggggaccctcccagctgagaccctgctactgtcaccgcctgtgaaggttaaaggagaggatggagatcgagagccagaggggaccctcccagctgaggccccaccaccaccgcccctgggagctgccagggaagaaccgactccccaggctgtggccactgagggtgtattcgttacagaacttgatggaacgagaacggaagatttagaaaccattagactggagacaaaggagacattctgcattgatgacctacctgacttggaagatgatgatgaaacaggcaaatctctggaagaccagaatatgtgctttccgaagattgaggtcatctcgagcttgagtgatgacagtgaccctgaactggactacacgtcactccctgtgctggaaaacctccccacagacactctgtcaaatatatttgcagtctctaaagacacctcaaaggcggctcgggtgcccttcacagacatctttaaaaaagaagctaagagggacttggaaatccgaaaacaagacaccaagtccccaagacccctgatccaggagctcagcgacgaggacccctctggccagctactgatgccccccacctgccaaagagatgctgcaccactcacttccagtggagacagggacagcgacttccttgcagcctcttctccggtgccgactgagagcgccgccacacccccagagacgtgtgtcggagttgcccagcccagccaagctctgcccacgtgggacctcactgcattcccagcaccgaaagcatcatagttttccccagttatatgtagcataaatggtttaatcataaatgtctcccttaggcatgataaacattttaacacccacgcgagtcagtgtatgattgggctagctcctgtttgtgtgagtcacatgcaattcctttcaccagccaacctgaaaaaagacctttctcttactatgtcatcagaaaccagacagacccgggtccctgcaaaatctcaagtgagcattttccccacaggaaaacagaatcttccactgcagctagagaaactccgaggaagagggacttgatgctttagacatcaaaatgagaaggggagggaggaaagaaaggggggagtctgtgaggcacaacagagaattcccccaaactgacatgaccgtgaccctctgctcagagggcactatcgacagcccacaggtgccagacccatgtcccaagggagaaggaacatcagccatcatctctctgcatgagctcagtgtcaggtagtagctgtggcgggacgctgtccagcctaaaaaacgtgaccattccaattcatcttcagctgccaagtgtatttagtccctgaacctggatccaaggcatctccctgtaggaaacatcagaccggggcagagattgacaaagcaacccacaacagcagctgccaacggccgctgtgcccacctcatcagcagctctgcaggggcctcactccaccctcaccaaacacgaggagccagcactcctggcccccattccactggacaggaaggcgtgagaactgagggacctgcctgaggcccccacagctgaggcgcagcggagccctgcctcccagcacagactaaaatcccagcaacacaggcccaccggcacctccagcctgccttgcgggatgatcttcaggcgaatatacaaaatacaaaagaaa

SEQ ID NO: 253823 - DNA, 1257 bp, Artificial Sequence
  derived and/or modified sequence
atgcaccccgagcccagcgagcccgccaccggcggcgccgccgagctggactgtgcacaggaacctggcgtcgaagagtctgcaggtgaccacggcagtgccggcagaggtgggtgtaaggaggagataaacgacccgaaagaaatatgtgtgggctctagtgacacatcctaccactctcagcagaagcagtccggggacaatgggtccggtggccatttcgcccacccacgcgaggatcgagaggacaggggccctcggatgacgaagtccagcttacaaaaactctgcaaacagcacaagttgtatataacccccgccttaaatgataccctgtacctgcacttcaagggatttgatcgcatcgagaatctggaggaatatacaggtctgcgctgtctgtggctgcagagcaacggaattcagaagattgagaatcttgaggctcagacagaactccgatgccttttcctacaaatgaaccttttgcgaaagattgaaaatttggaacccctgcagaagttggacgccctcaacttgtctaataattatatcaaaacaattgagaatctttcgtgtcttccggttctaaacacgctccagatggcccacaatcatctggaaaccgttgaagatattcagcacctccaagaatgtctccgactgtgtgtgctggacctgtctcacaacaagctaagcgacccagaaatcttgagcatcttggagtccatgccggatctgagagtgctgaacctgatggggaaccctgtgataaggcagattccaaactatagaagaactgtgacagtccggctgaaacatttgacttatttggatgataggcccgtcttccctaaggacagagcctgtgcggaggcgtgggcccgtggcggctacgccgcggagaaggaagagcggcagcagtgggagagtcgtgagcggaagaagatcacagacagcatcgaagctctagctatgatcaagcagagggccgaggagcgcaagcgacagcgggagtcacaggagcggggcgaaatgacatcttctgatgatggcgagaatgtccctgcctcagccgaggggaaggaggagccacccggggaccgcgagactaggcagaagatggaacttttcgttaaggaaagcttcgaagccaaagatgagctgtgcccagagaaaccatccggagaggagcctcctgtcgaagctaaaagagaagatggagatccagctaccgtaacagcgtgtgaaggctag

SEQ ID NO: 253824 - DNA, 2178 bp, Artificial Sequence
  derived and/or modified sequence
atgcaccccgagcccagcgagcccgccaccggcggcgccgccgagctcgactgcgctcaggaaccaggagtggaggagtcagccggagatcacggtagcgccggccgaggaggttgcaaggaggaaattaacgaccccaaagagatctgcgtcggaagttcagatacttcatatcattcccaacagaaacaaagcggggacaacggcagtggcggccactttgcccaccccagggaggaccgcgaagaccggggccctcgtatgaccaaaagctctctacagaagctgtgcaagcagcacaagctgtatataacccctgccctcaacgacactctgtatctgcatttcaaaggttttgaccgaattgagaatctggaggagtacacaggattgaggtgcctgtggcttcagtcgaacgggattcagaagatcgagaatctagaggcacagactgagctgcgctgcctgtttctccaaatgaacttgcttcggaagattgagaatctcgagccgctgcagaagctcgatgccctgaacctgtcgaacaactacatcaagacaatcgagaacctgtcatgcctcccagtcctcaatacacttcagatggctcacaaccacctggaaactgtcgaggatatccaacatttgcaagaatgtctcaggctgtgcgtactggacctgtcacacaataaactgtccgatccagaaatcctgagcatactggagtcgatgcccgatctgcgcgtcttaaatctaatgggtaatcccgtaatcagacagataccaaattaccggcgcactgtaactgtcagactgaagcacctgacttatttagatgatcggccagtatttccgaaggatcgggcctgcgccgaggcttgggctcgcggtgggtatgccgccgagaaagaagaaaggcagcagtgggagtctcgcgagagaaagaagatcactgatagcatcgaagcactcgctatgatcaagcagcgggccgaggagcggaagcgccaaagggagagtcaagaaaggggggagatgaccagcagcgatgacggggaaaacgtgcccgcctctgcagaagggaaagaggagcctccaggagaccgggaaacacggcaaaagatggaactgttcgtgaaggagtcctttgaagcgaaagatgagctctgccccgagaagcccagcggggaagaacctccagtggaagcaaaacgcgaggacggcggaccagagcccgagggaactttaccggccgagaccctactgcttagtagtccagttgaagtaaagggcgaagatggtgatggagagccagaagggaccctgcctgccgaggcaccacccccgccacccccagtggaggttaaaggcgaggatggggatcaggaacccgaaggcacgcttcccgctgaaactttgctgttgtcaccacctgtgaaagttaaaggcgaagatggcgacagagaacccgaggggactttgccggcagaagcaccaccaccaccccccttgggcgccgctcgcgaggagcccactccccaggcagttgcaacagaaggagtttttgtgactgaacttgacgggacacggactgaagatctcgaaaccatcaggctggaaaccaaggaaactttctgtatcgacgatctgcctgacttggaggacgatgatgagacaggaaagagcctcgaagaccagaacatgtgctttccgaagatcgaagtcatctcttccctgtcagatgactcagaccccgaactggattacacatcccttcctgtcctggagaacctacctacagatacactcagtaacatcttcgccgtgtccaaagacaccagcaaagcagcccgggtcccattcacggacatctttaaaaaagaagccaaacgggacctggagatccgcaaacaggatactaaaagcccgcggcccttaatccaggagctctcagatgaggatcctagtggacagctcctgatgcctcctacctgccagagggacgctgcaccattaactagtagcggtgaccgtgactcagattttcttgcggctagctccccggtgccaaccgaaagcgccgccacccctccagaaacctgtgtcggagtggcacaaccctcccaggctttgcccacgtgggacctgacggcttttcctgccccaaaggccagttag

SEQ ID NO: 253825 - DNA, 1257 bp, Artificial Sequence
  derived and/or modified sequence
atgcatcccgaaccaagcgagcccgctaccggcggtgcggcagaattagattgcgcgcaagaaccgggagtagaggagagcgcaggagaccacggtagcgctggcaggggcggatgtaaagaggaaattaacgatcccaaggagatctgcgtgggaagtagtgacaccagttaccatagtcaacagaaacaaagtggggacaacgggagtggagggcacttcgcacatccgcgagaggacagggaggacagaggacctaggatgacgaagtcaagtttacaaaagctgtgcaagcagcacaaactttacatcacgcccgctctcaacgatactctctacctgcactttaaaggcttcgatcgtatcgagaatttggaagagtacacaggactcaggtgtctttggttacagtctaacgggatccagaaaatcgagaatctcgaggctcagacggagcttcggtgtctgttcctgcagatgaacctccttaggaagattgagaacctggagcctttacagaaactggacgcacttaacttaagtaataactatattaagacaatcgaaaacctgagctgcttgccagtgctgaacacactacagatggcccacaaccaccttgagacggtcgaagacatccaacacttgcaggagtgccttaggctttgcgtactagacctgtcccataataagctgtctgacccagaaattcttagcatactggagtcaatgccagacctgcgcgttctcaaccttatgggaaaccctgtgatcagacaaattcccaactaccgaagaactgtcaccgttcgcctcaaacatctcacatatttagacgatcggccagtgttccctaaagatcgggcatgcgcagaggcctgggcaaggggtggatacgctgccgagaaggaggagcggcagcagtgggagagtagagaaagaaagaagatcactgattctattgaggcgctcgctatgatcaagcagcgggcagaagagcgcaagcgccagcgagaatcgcaggaacgtggagagatgacaagctcagatgatggcgaaaatgtaccagcatctgctgagggcaaagaggagccgccaggtgacagggagaccaggcagaagatggagctgttcgtgaaggagtctttcgaggccaaagatgaactatgtccagaaaagccaagtggggaagagcctccggtcgaggcgaaaagggaggacggagatcccgcaactgtcacggcatgtgagggctag

SEQ ID NO: 253826 - DNA, 2178 bp, Artificial Sequence
  derived and/or modified sequence
atgcaccccgaacccagcgaacccgctaccggcggagctgctgagctggattgtgctcaggagcctggcgtcgaggaatcagccggagaccatggtagcgccggaaggggcggttgtaaggaggagatcaatgatcccaaggagatctgcgtggggtcaagcgatacatcttaccactcccaacagaaacagtccggtgacaatggctctggcggacatttcgcacatccccgtgaggatagagaggaccggggtccccgaatgaccaagtcctcactccagaaactatgtaaacaacacaaactatatatcacgccagcgctgaacgacacgctctacttgcacttcaagggcttcgaccggatcgagaacctggaggagtacacaggactcagatgcctgtggctgcaatctaatggaatccagaaaatcgagaatctagaagctcaaaccgagttacgttgtctgttcttgcaaatgaatctgctccgcaagattgaaaacctggaaccgctgcagaagctggacgcccttaacctctcaaacaactacatcaagactatagagaacctctcttgtctgccagttcttaacactctgcagatggcccataaccacctggaaactgtagaggacatccagcatctacaagagtgtttgagactatgtgtgctcgacctttcgcacaacaagctgagcgatccagagatcctatcaatactggaatctatgcctgacctgagggtgctgaacttgatgggcaatcccgtaatccgccagataccgaactataggcgtaccgtcaccgttcggcttaagcacctgacctatctcgatgatcgccctgtgtttccgaaggatcgggcttgtgccgaggcctgggcccgtgggggttacgcagcagagaaggaggagcgccagcagtgggaatcgagagaacgtaagaagatcactgacagtattgaggcacttgctatgatcaagcagcgcgctgaagaaaggaagaggcagagggagtcccaggagcgtggggagatgaccagctcagacgatggagagaatgtgccagctagcgctgaggggaaggaagaaccgcctggagaccgcgaaacgcggcaaaagatggagctgtttgtaaaagaatccttcgaggccaaggacgaactgtgcccagaaaagccgagtggggaagaaccaccggtcgaggcgaagcgtgaagatggcggaccagagccagagggaaccctgcctgctgagacactgttgttgtctagccctgttgaggtaaaaggagaggacggcgatggggaacctgaggggacattacctgcagaagcaccgcctcctcctcccccagtcgaggtgaaaggtgaagacggtgatcaggagcctgaaggaacattaccggcagagaccctgctgctcagcccgcctgtgaaggtgaaaggggaggacggggaccgcgagcccgagggcactctccccgcagaggccccaccccctcctcctctgggtgctgcccgagaggagcccaccccacaagctgtagccaccgagggagtgtttgtcaccgagctggacgggacaagaaccgaagaccttgaaacaattcgccttgaaaccaaggagacattttgcatcgatgaccttccagacctcgaggacgatgacgaaaccggaaagagtctggaggaccagaacatgtgctttcctaaaattgaggttatttcatccctcagcgatgattcggacccggagttggactacacctctctccccgtcctggaaaacctgcctacagacactctgtccaatatcttcgccgtgagcaaggacaccagcaaagcagcgagggtaccgttcaccgacatcttcaagaaggaggcgaagcgggatctggagattagaaaacaggatacaaaaagtcccaggcctctgatccaggagttgtccgacgaagacccatccggccaacttttaatgcctccaacttgtcagcgcgatgccgctccactgacctcttccggcgaccgcgactccgactttctcgcggcaagttcacctgtcccaaccgaatctgctgctaccccccctgagacctgcgtgggcgtggcccagccttcccaggccttgccaacatgggacctgaccgctttcccagccccaaaggcctcttag

SEQ ID NO: 253827 - protein, 137 aa, Artificial Sequence
  derived and/or modified sequence
MAQKPLSTAAAERMNLVGQDEIWKYRLKAESEARQNWPQNWGFLTTPFEELIKCEEDLPTPKPKIELPERFRIRPVTPVEKYIKVFPSPPVPQTTQGFIGWRSAVPGLNKCLELDDAIRSCKGAFARELCWPKQGVH

SEQ ID NO: 253828 - DNA, 803 bp, Artificial Sequence
  derived and/or modified sequence
gagacgcgagacgctgagcccagggccagagcttgcggggcgcacagagcccccaggcctcatggcgcagaaacctctcagcaccgcggcggctgaacgcatgaaccttgtgggtcaggatgagatctggaaataccgtctgaaggctgaatcggaagcacggcagaactggccccagaactgggggtttttaacaaccccttttgaggagttgatcaagtgtgaagaagatctccccaccccaaagcccaaaatcgagcttcctgagcgtttccgcatccggccggtgaccccagtggagaagtacatcaaggtctttccatcccccccagtcccacagaccacccagggcttcatcggctggagatctgcagtgccaggcctgaacaagtgcctagagctcgacgatgcgatcagaagctgcaaaggtgcttttgcacgagagctgtgctggcccaagcagggcgtgcactgaatccagacggagttctgcccaggggtgctgcatatcggtcaccaggcacccagggccatgccagggaaaggaagagctcccctgaatcccgaggacacagtcccctgcgtacttgctcatgggatgttgcaaagaacacaaagtgtgccttagacattctcaagtcatcagcgtcacccttccagaatgttcacgtccacacccattcttggctaatgtaatgaataaggcttctctcatttgtttttgataccttgggaatttctatgcagggctttaaaaaaaaataagtgattcaattttaaaaatatttgtctaggtccttcaa

SEQ ID NO: 253829 - DNA, 414 bp, Artificial Sequence
  derived and/or modified sequence
atggcccagaagcccctgagcaccgccgccgccgagagaatgaacctggtgggccaggacgagatctggaagtacagactgaaggccgagagcgaggccagacagaactggccccagaactggggcttcctgaccacccccttcgaggagctgatcaagtgcgaggaggacctgcccacccccaagcccaagatcgagctgcccgagagattcagaatcagacccgtgacccccgtggagaagtacatcaaggtgttccccagcccccccgtgccccagaccacccagggcttcatcggctggagaagcgccgtgcccggcctgaacaagtgcctggagctggacgacgccatcagaagctgcaagggcgccttcgccagagagctgtgctggcccaagcagggcgtgcactag

SEQ ID NO: 253830 - DNA, 414 bp, Artificial Sequence
  derived and/or modified sequence
atggcgcagaaaccactgtctacggccgcagccgagcggatgaatctcgtgggccaggacgagatttggaagtacaggttgaaagctgagtccgaggctcggcagaattggccccagaattggggattcctcactacgccttttgaggaactgatcaaatgtgaggaggacctccccactcccaaacccaaaattgagcttcccgaaagattccgcattcgtccagtcacccctgtggagaagtatattaaagtgtttccgtctcctcccgttcctcagacaacccaagggttcatcgggtggagatctgctgtgcccggactaaataaatgcctcgaactggatgatgccatcagatcctgtaaaggcgcctttgctcgggaactatgctggcccaagcagggtgtacactag

SEQ ID NO: 253831 - DNA, 414 bp, Artificial Sequence
  derived and/or modified sequence
atggcccagaagcccctgagcacagctgctgctgagaggatgaacctggtgggccaggatgagatctggaagtaccgcctgaaggccgagagcgaggcccggcagaactggccccagaactggggcttcctgaccaccccatttgaggagctgatcaagtgtgaggaggacctgcccacccccaagcccaagattgagctgcctgagcgcttccgcatccggcctgtgacccctgtggagaagtacatcaaggtgttccccagcccccctgtgccccagaccacccagggcttcatcggctggaggtctgctgtgcccggcctgaacaagtgcctggagctggatgatgccatccgcagctgcaagggggcctttgcccgggagctgtgctggcccaagcagggcgtgcactag

SEQ ID NO: 253832 - DNA, 414 bp, Artificial Sequence
  derived and/or modified sequence
atggcccagaagcccctgagcaccgccgccgccgagcggatgaacttggttggacaggatgagatctggaagtatagacttaaggcagagtcagaggctcgacaaaactggccacaaaattggggcttcctgactacgccatttgaggaacttataaagtgcgaagaagatctccccacacccaagcccaaaattgaattacccgagcggttccgcatcaggccagtcactcctgtcgagaagtacattaaggtgttccccagtccccccgtcccgcagaccactcaaggttttatcgggtggagatccgccgtcccgggactcaataagtgtttagaacttgatgacgccattaggagttgcaaaggcgccttcgcacgcgaactatgctggccaaaacagggagtgcactag

SEQ ID NO: 253833 - DNA, 414 bp, Artificial Sequence
  derived and/or modified sequence
atggcgcagaaacccctgagcacggctgccgcagaaagaatgaatctggtgggccaggatgaaatctggaagtaccggctcaaagctgaatccgaagccaggcaaaactggccccagaactggggatttctaacaacaccattcgaggaattgatcaaatgtgaagaggacctccccacccccaagccaaagattgagctacctgagcggttcagaatcaggcctgttacacctgtagagaaatatattaaggtgttcccgagccccccagtgccgcaaaccacccaaggcttcattggctggcgctccgcggtccccggtctcaacaaatgtcttgagctggacgacgccattcgttcttgcaagggcgcatttgctagagaactatgttggcctaagcagggtgtgcactag

SEQ ID NO: 253834 - protein, 1677 aa, Artificial Sequence
  derived and/or modified sequence
MEVPEPTCPAPPARDQPAPTPGPPGAPGGQASPHLTLGPVLLPPEQGLAPPTVFLKALPIPLYHTVPPGGLQPRAPLVTGSLDGGNVPFILSPVLQPEGPGPTQVGKPAAPTLTVNIVGTLPVLSPGLGPTLGSPGKVRNAGKYLCPHCGRDCLKPSVLEKHIRSHTGERPFPCATCGIAFKTQSNLYKHRRTQTHLNNSRLSSESEGAGGGLLEEGDKAGEPPRPEGRGESRCQGMHEGASERPLSPGAHVPLLAKNLDVRTEAAPCPGSAFADREAPWDSAPMASPGLPAASTQPWRKLPEQKSPTAGKPCALQRQQATAAEKPWDAKAPEGRLRKCESTDSGYLSRSDSAEQPHAPCSPLHSLSEHSAESEGEGGPGPGPGVAGAEPGAREAGLELEKKRLEERIAQLISHNQAVVDDAQLDNVRPRKTGLSKQGSIDLPTPYTYKDSFHFDIRALEPGRRRAPGPVRSTWTPPDKSRPLFFHSVPTQLSTTVECVPVTRSNSLPFVEGSRTWLEPREPRDPWSRTQKPLSPRPGPARLGCRSGLSSTDVPSGHPRALVRQAAVEDLPGTPIGDALVPAEDTDAKRTAAREAMAGKGRAGGRKCGQRRLKMFSQEKWQVYGDETFKRIYQKMKASPHGGKKAREVGMGSGAELGFPLQKEAAGSSGTVPTQDRRTPVHEDISAGATPEPWGNPPALEASLVTEPTKHGETVARRGDSDRPRVEEAVSSPALGGRDSPCSGSRSPLVSPNGRLELGWQMPPAPGPLKGGDVEAPRPVWPDPKLEGGARGVGDVQETCLWAQTVLRWPSRGSGEDKLPSERKKLKVEDLHSWKQPEPVSAETPGGPTQPASLSSQKQDADPGEVPGGSKESARQVGEPLESSGASLAAASVALKRVGPRDKATPLHPAAPAPAEHPSLATPPQAPRVLSALADNAFSPKYLLRLPQAETPLPLPIPWGPRHSQDSLCSSGWPEERASFVGSGLGTPLSPSPASGPSPGEADSILEDPSCSRPQDGRKGAQLGGDKGDRMATSRPAARELPISAPGAPREATSSPPTPTCEAHLVQDMEGDSHRIHRLCMGSTLARARLSGDVLNPWVPNWELGEPPGNAPEDPSSGPLVGPDPCSPLQPGSFLTALTRPQGVPPGWPELALSSHSGTSRSHSTRSPHSTQNPFPSLKAEPRLTWCCLSRSVPLPAEQKAKAASVYLAVHFPGSSLRDEGPNGPPGSNGGWTWTSPGEGGPAQMSKFSYPTVPGVMPQHQVSEPEWKKGLPWRAKMSRGNSKQRKLKINPKRYKGNFLQSCVQLRASRLRTPTWVRRRSRHPPALEGLKPCRTPGQTSSEIAGLNLQEEPSCATSESPPCCGKEEKKEGDCRQTLGTLSLGTSSRIVREMDKRTVKDISPSAGEHGDCTTHSTAATSGLSLQSDTCLAVVNDVPLPPGKGLDLGLLETQLLASQDSVSTDPKPYIFSDAQRPSSFGSKGTFPHHDIATSVAAVCISLPVRTDHIAQEIHSAESRDHSQTAGRTLTSSSPDSKVTEEGRAQTLLPGRPSSGQRISDSVPLESTEKTHLEIPASGPSSASSHHKEGRHKTFFPSRGQYGCGEMTVPCPSLGSDGRKRQVSGLITRKDSVVPSKPEQPIEIPEAPSKSLKKRSLEGMRKQTRVEFSDTSSDDEDRLVIEI

SEQ ID NO: 253835 - DNA, 1936 bp, Artificial Sequence
  derived and/or modified sequence
tcttcctttgggtccaaaggaacttttccccaccatgacattgctacctctgtggctgccgtttgtatttctctgccagtgagaacagatcacatagcccaggaaattcacagtgctgaatcacgagaccacagccagactgcagggaggactctgacatcaagctccccagacagcaaagtcacagaagagggcagagcacagaccctcttgccagggagaccttcatctggacaaagaatttcagattcggttccactggagtcaactgaaaaaactcatcttgaaataccagcttcaggaccaagttcagctagttcacaccacaaggaagggagacacaagacgttttttccttccagaggccagtatgggtgtggggaaatgactgtcccctgcccctctttaggaagtgacggtaggaaacgtcaggtatctggattaatcactcggaaagattctgtggttccttctaagccagagcagcccatagaaattcctgaagccccttctaaatccctcaagaagaggagtctggaaggaatgagaaagcaaactcgagtagagttcagtgacaccagcagcgacgatgaagaccgattagttatagaaatatgaagcttccagagaaacatggtgtctggtcaaaaagactgttgacgcttcacaagtaaatgttgtcaggctggcggaagaactaaactctatctgtgaaacacctacagattaggaaagccattttgagttatttacaagccaactccaaccaacttctgacccccaactcagccgcagcgttccccagctccccttgggagtgctctgctcatcttcaaatggtgccaggcagggcagacatggcaaggaagcaaactctgcaaatggtcaacgtgcacagtgactgggccttgactcccagcctcgtcttctgcacctgtcccccactgcctctctgcaatcaaatggcactaaccaagaaagccaccatcaacacatttctccacaagtggaccccacacagtcgaggcaactggctttctccattagtaaactgaggatttgcttccaaggtggagagcacacttgggataattggagtagcttgacaaagagacgggggtgtgaactgggcacaaagatacttctgttcattttggagacaaaattcagatacattaaaaaactgaagcttgttcagagtaattcacgtccttggtggagttgtaaatacacttcaaaatgcctatgatccggtgacatgctgattacttttaaatgttgcacaaatggtcaatgcttatttatggtcagatgatgcaagcacatgctcttgtgcctggtgcgtttgctgtggagatctctgagactgtcggtttttctagttcttgcaaaggaacggtgttaaaagttaatagaactgtctctctgtaatgagtcattttttgagagggaaaaattcacttattttcctctgattcttcttgtcatattgtgctctgagcaatttcaattagagggttacattttagtaatctgtacagcttcaactgatgcctgctcgtcgtgacgggagccttttagatttccttcagaagcttcaaggatacaaaactaattggagttttgacgctgttttacatctcggtaattttattttcggggcttagtgttactttgctgtcaaattaaatcagcctctgtattgtgcacgtcagaactgcacagagaaaattccccagtattccaagccggtgcgcccctgtgcagaagaaaacagatctacgtcagccagcccggggggcaaagcctcagttccactgccttcctctccctctccttccacgggagaggagaaacttaaagaggtttacattgctgcatttcaataaaattttatacttgcttttggtaaaaaaaaaaaaaaaaaaaaaaaaaa

SEQ ID NO: 253836 - DNA, 5034 bp, Artificial Sequence
  derived and/or modified sequence
atggaggtgcccgagcccacctgccccgccccccccgccagagaccagcccgcccccacccccggcccccccggcgcccccggcggccaggccagcccccacctgaccctgggccccgtgctgctgccccccgagcagggcctggccccccccaccgtgttcctgaaggccctgcccatccccctgtaccacaccgtgccccccggcggcctgcagcccagagcccccctggtgaccggcagcctggacggcggcaacgtgcccttcatcctgagccccgtgctgcagcccgagggccccggccccacccaggtgggcaagcccgccgcccccaccctgaccgtgaacatcgtgggcaccctgcccgtgctgagccccggcctgggccccaccctgggcagccccggcaaggtgagaaacgccggcaagtacctgtgcccccactgcggcagagactgcctgaagcccagcgtgctggagaagcacatcagaagccacaccggcgagagacccttcccctgcgccacctgcggcatcgccttcaagacccagagcaacctgtacaagcacagaagaacccagacccacctgaacaacagcagactgagcagcgagagcgagggcgccggcggcggcctgctggaggagggcgacaaggccggcgagccccccagacccgagggcagaggcgagagcagatgccagggcatgcacgagggcgccagcgagagacccctgagccccggcgcccacgtgcccctgctggccaagaacctggacgtgagaaccgaggccgccccctgccccggcagcgccttcgccgacagagaggccccctgggacagcgcccccatggccagccccggcctgcccgccgccagcacccagccctggagaaagctgcccgagcagaagagccccaccgccggcaagccctgcgccctgcagagacagcaggccaccgccgccgagaagccctgggacgccaaggcccccgagggcagactgagaaagtgcgagagcaccgacagcggctacctgagcagaagcgacagcgccgagcagccccacgccccctgcagccccctgcacagcctgagcgagcacagcgccgagagcgagggcgagggcggccccggccccggccccggcgtggccggcgccgagcccggcgccagagaggccggcctggagctggagaagaagagactggaggagagaatcgcccagctgatcagccacaaccaggccgtggtggacgacgcccagctggacaacgtgagacccagaaagaccggcctgagcaagcagggcagcatcgacctgcccaccccctacacctacaaggacagcttccacttcgacatcagagccctggagcccggcagaagaagagcccccggccccgtgagaagcacctggaccccccccgacaagagcagacccctgttcttccacagcgtgcccacccagctgagcaccaccgtggagtgcgtgcccgtgaccagaagcaacagcctgcccttcgtggagggcagcagaacctggctggagcccagagagcccagagacccctggagcagaacccagaagcccctgagccccagacccggccccgccagactgggctgcagaagcggcctgagcagcaccgacgtgcccagcggccaccccagagccctggtgagacaggccgccgtggaggacctgcccggcacccccatcggcgacgccctggtgcccgccgaggacaccgacgccaagagaaccgccgccagagaggccatggccggcaagggcagagccggcggcagaaagtgcggccagagaagactgaagatgttcagccaggagaagtggcaggtgtacggcgacgagaccttcaagagaatctaccagaagatgaaggccagcccccacggcggcaagaaggccagagaggtgggcatgggcagcggcgccgagctgggcttccccctgcagaaggaggccgccggcagcagcggcaccgtgcccacccaggacagaagaacccccgtgcacgaggacatcagcgccggcgccacccccgagccctggggcaacccccccgccctggaggccagcctggtgaccgagcccaccaagcacggcgagaccgtggccagaagaggcgacagcgacagacccagagtggaggaggccgtgagcagccccgccctgggcggcagagacagcccctgcagcggcagcagaagccccctggtgagccccaacggcagactggagctgggctggcagatgccccccgcccccggccccctgaagggcggcgacgtggaggcccccagacccgtgtggcccgaccccaagctggagggcggcgccagaggcgtgggcgacgtgcaggagacctgcctgtgggcccagaccgtgctgagatggcccagcagaggcagcggcgaggacaagctgcccagcgagagaaagaagctgaaggtggaggacctgcacagctggaagcagcccgagcccgtgagcgccgagacccccggcggccccacccagcccgccagcctgagcagccagaagcaggacgccgaccccggcgaggtgcccggcggcagcaaggagagcgccagacaggtgggcgagcccctggagagcagcggcgccagcctggccgccgccagcgtggccctgaagagagtgggccccagagacaaggccacccccctgcaccccgccgcccccgcccccgccgagcaccccagcctggccacccccccccaggcccccagagtgctgagcgccctggccgacaacgccttcagccccaagtacctgctgagactgccccaggccgagacccccctgcccctgcccatcccctggggccccagacacagccaggacagcctgtgcagcagcggctggcccgaggagagagccagcttcgtgggcagcggcctgggcacccccctgagccccagccccgccagcggccccagccccggcgaggccgacagcatcctggaggaccccagctgcagcagaccccaggacggcagaaagggcgcccagctgggcggcgacaagggcgacagaatggccaccagcagacccgccgccagagagctgcccatcagcgcccccggcgcccccagagaggccaccagcagcccccccacccccacctgcgaggcccacctggtgcaggacatggagggcgacagccacagaatccacagactgtgcatgggcagcaccctggccagagccagactgagcggcgacgtgctgaacccctgggtgcccaactgggagctgggcgagccccccggcaacgcccccgaggaccccagcagcggccccctggtgggccccgacccctgcagccccctgcagcccggcagcttcctgaccgccctgaccagaccccagggcgtgccccccggctggcccgagctggccctgagcagccacagcggcaccagcagaagccacagcaccagaagcccccacagcacccagaaccccttccccagcctgaaggccgagcccagactgacctggtgctgcctgagcagaagcgtgcccctgcccgccgagcagaaggccaaggccgccagcgtgtacctggccgtgcacttccccggcagcagcctgagagacgagggccccaacggcccccccggcagcaacggcggctggacctggaccagccccggcgagggcggccccgcccagatgagcaagttcagctaccccaccgtgcccggcgtgatgccccagcaccaggtgagcgagcccgagtggaagaagggcctgccctggagagccaagatgagcagaggcaacagcaagcagagaaagctgaagatcaaccccaagagatacaagggcaacttcctgcagagctgcgtgcagctgagagccagcagactgagaacccccacctgggtgagaagaagaagcagacacccccccgccctggagggcctgaagccctgcagaacccccggccagaccagcagcgagatcgccggcctgaacctgcaggaggagcccagctgcgccaccagcgagagccccccctgctgcggcaaggaggagaagaaggagggcgactgcagacagaccctgggcaccctgagcctgggcaccagcagcagaatcgtgagagagatggacaagagaaccgtgaaggacatcagccccagcgccggcgagcacggcgactgcaccacccacagcaccgccgccaccagcggcctgagcctgcagagcgacacctgcctggccgtggtgaacgacgtgcccctgccccccggcaagggcctggacctgggcctgctggagacccagctgctggccagccaggacagcgtgagcaccgaccccaagccctacatcttcagcgacgcccagagacccagcagcttcggcagcaagggcaccttcccccaccacgacatcgccaccagcgtggccgccgtgtgcatcagcctgcccgtgagaaccgaccacatcgcccaggagatccacagcgccgagagcagagaccacagccagaccgccggcagaaccctgaccagcagcagccccgacagcaaggtgaccgaggagggcagagcccagaccctgctgcccggcagacccagcagcggccagagaatcagcgacagcgtgcccctggagagcaccgagaagacccacctggagatccccgccagcggccccagcagcgccagcagccaccacaaggagggcagacacaagaccttcttccccagcagaggccagtacggctgcggcgagatgaccgtgccctgccccagcctgggcagcgacggcagaaagagacaggtgagcggcctgatcaccagaaaggacagcgtggtgcccagcaagcccgagcagcccatcgagatccccgaggcccccagcaagagcctgaagaagagaagcctggagggcatgagaaagcagaccagagtggagttcagcgacaccagcagcgacgacgaggacagactggtgatcgagatctag

SEQ ID NO: 253837 - DNA, 5034 bp, Artificial Sequence
  derived and/or modified sequence
atggaggttcccgagccgacatgtcccgccccaccagctcgggatcagcctgctcccaccccaggcccaccaggtgctcccggggggcaggcctccccccacctgactctggggccagttttgctgccaccggaacagggcctcgcccctcccactgttttcttaaaggccttgccaatcccactctatcacacagttccaccaggcgggcttcagccacgtgctcccctggtaacaggctctctggacggagggaacgtgcctttcatcttatctcccgtgctgcagcctgagggccctggaccaacccaggtggggaagcctgccgcacccacgctgaccgtcaacattgtcgggacactgcctgtgttgtctccaggcttaggacctactttgggaagccccggtaaagtacggaacgcggggaaatacctgtgtccacattgcggccgggattgcctgaagccgagtgttctggaaaagcacataagaagccacactggcgagagaccattcccctgcgctacgtgcggtatcgcttttaaaacacaatctaacctgtataagcatcggcggacccagactcacctgaataactctcgtctgagctctgagtcggagggggccggcgggggcctattggaggagggagataaggcaggcgagcccccacggcctgaaggccgaggagagtccaggtgtcagggcatgcatgagggagccagtgagaggccgttgtcccccggagcacatgtcccacttctcgctaagaacctggacgttcgcaccgaagctgcgccatgccctgggagcgcattcgctgaccgggaagccccgtgggatagtgcgccaatggcatcgcccggccttcctgccgcgagcacccaaccatggagaaaactgcctgagcagaagtcccccactgccggcaagccttgtgccctgcagaggcaacaagctaccgccgccgagaagccatgggacgccaaagcacctgagggaaggctacgcaagtgcgaatcaaccgactccggctatttgagtcggtccgatagtgctgaacagccgcatgcaccctgttcaccactgcacagtctgtcggagcacagcgccgagtcagagggagagggaggcccgggcccaggtcccggtgtagctggcgccgagccaggggccagggaggctggactcgaactggaaaagaaacgtctcgaggaaagaattgcgcagttaatctcccacaaccaggcagtggtcgacgatgcacaacttgataatgtgagacctcggaaaacaggcctctccaaacaaggatctatcgatctgcccaccccctacacctacaaggacagctttcacttcgacataagagctttggagcctggccgcagacgcgcccccgggcctgttcggtccacatggaccccaccagacaaatctcggcctctgtttttccacagtgtgcctactcagctgtccaccactgtggaatgcgttcccgtcacgcggtccaattctttgccctttgttgaggggagccgcacttggcttgaacctcgagaaccacgggacccctggagtagaactcagaagcccctttccccaaggccgggccccgccaggttgggctgtagatccggactgagctccaccgacgtaccgtcaggacatcctcgggctctggttcgccaggccgccgttgaggatttgccggggaccccaattggggacgctctggttcccgccgaggacacagacgcaaagcgcaccgccgccagagaagccatggccggaaaaggtagggccgggggccgcaaatgtgggcaaagaaggcttaagatgtttagtcaagagaagtggcaggtgtacggtgatgaaacatttaaaaggatctaccagaagatgaaggcctcaccacatggaggcaaaaaagcccgcgaggtggggatgggctccggtgctgagcttgggtttcctctgcagaaagaagcggcaggttcgagtggaacagtgcctacacaggatcgaagaaccccagtgcatgaggacatatcggccggcgccaccccagaaccatgggggaacccacccgctcttgaggcatctttggttaccgagcctacaaagcatggtgagacggtggcaagacgcggggatagtgatagacccagagtcgaagaagccgtgtccagcccagcactgggcggccgcgacagtccttgcagcggcagtcgatctccgctggtttcaccgaacggtcggctggagctcgggtggcaaatgccgcccgcccccggcccccttaagggtggtgatgtggaggcccctcggcccgtgtggcctgaccccaagctggagggaggcgcccggggagtgggcgatgtacaggaaacttgcctgtgggcccaaactgtgctgagatggccttccagaggcagcggcgaggataagctgcccagtgagaggaagaagctcaaagtagaagatctgcactcatggaagcaaccggaaccagtgtccgctgaaacacccggcggtccgactcagcccgctagtctgtctagtcagaagcaggatgccgatccgggggaggtgccaggaggcagtaaggagagtgctagacaggtgggtgaacccctcgagtctagcggagcctccttggccgccgcgtctgtggctctgaagcgagttggtcctcgcgataaagctactcctctgcacccagccgctcccgcccccgctgagcatccgtccctcgcgacacctccgcaagccccgagagtcttaagtgccctcgccgacaacgcattttcacctaagtatttactacgcttaccccaggctgaaacacctttgcccctcccaataccatggggccctagacatagccaagactcactgtgttctagtggatggccggaggaacgcgcatcatttgttgggtcgggattggggactcccctctccccctccccagctagtggtccctcccctggagaagctgactctatcctggaagacccaagctgctctaggccccaggatgggcgcaagggggcccagcttggaggggataagggtgacagaatggctacttcaaggcctgccgcccgtgagctcccaatctctgcccccggcgctcctcgcgaggctacctcctcgccccctacccctacatgcgaggcccatttagtacaggatatggagggtgactctcatcgcatacaccgcctgtgtatgggttcaactctggcgcgcgcacgcctctcaggggatgtacttaacccttgggtccccaactgggagctcggagagcctccaggtaatgcacccgaagacccatctagtggacctctggtgggacccgacccctgcagccccctccagccggggtcattcctcaccgctctaacaagaccacagggcgtccccccggggtggcctgaattggcgctgagcagccattccggtacaagccgctctcatagcacaaggagcccacacagcacgcagaatcccttcccaagcctgaaggcggagccgaggctgacatggtgttgcctgagccggtccgtaccactacccgcagaacagaaggccaaagccgctagtgtttatttggctgtccacttcccagggtcctctttgcgagacgaaggacccaacggcccacctggaagtaatggagggtggacatggacaagcccaggggagggcggccctgctcagatgtccaaatttagctacccaactgttcccggtgtgatgccccaacatcaagtgtcagagcccgagtggaagaaagggctgccatggagagcaaagatgagcagaggcaattctaaacagcgcaagctcaaaatcaatccaaagcgttacaaaggcaactttctgcagagttgtgtgcagctcagggctagcaggcttcgtaccccaacgtgggtaagaaggcgctccagacatccaccagcccttgaggggctgaaaccctgccgcacacccggccagacatcatcggagattgccggtctcaatctgcaagaggaaccttcctgtgccacctctgagtctcccccttgctgcggaaaggaggaaaaaaaggaaggcgactgcagacaaactctcggcacactaagcctcggcactagttcccgtatcgtgcgcgagatggataagcggaccgtcaaggacatttcgccctcagccggcgagcatggcgattgcactacccattccacagccgcaacttcaggtttatctctccagtccgacacttgtctggccgtggttaatgatgttccactccctccaggcaaagggttggacctgggcttgttagagacccagttgctggcaagtcaggactctgtgtccactgacccaaagccctatatcttctccgatgcccagcgtccctccagcttcggctcaaagggaacattcccccatcacgacattgccacctcagtggctgctgtgtgtatttccctcccagtgaggactgaccacatcgctcaggaaattcactcagcggaaagtcgcgaccactcgcaaactgcgggaagaacactcacctctagttctcccgattcaaaagttacagaagaggggagagctcagaccctgctacctgggcgaccctcatcaggccagcgtatttccgattcagttcctctggagtcaacagagaagacccatctggaaatccccgcctccggtcccagttcagcctcctcccatcacaaagaaggaagacataaaaccttttttcccagtcgcggtcagtatgggtgcggggaaatgaccgtaccctgtcctagtttgggcagcgacggccggaaacggcaggtgtcgggtttgatcacccgaaaggattccgttgtcccgagcaagccggaacagcctattgaaatcccagaggcaccctcaaagagcctgaagaagcgatctttagaaggcatgagaaagcagaccagggttgagtttagcgacacaagctcggatgacgaagatcgattagtcatcgaaatctag

SEQ ID NO: 253838 - DNA, 5034 bp, Artificial Sequence
  derived and/or modified sequence
atggaggtgcctgagcccacctgcccagcccccccagcccgggaccagcctgcccccaccccaggccccccaggggcccctgggggccaggccagcccccacctgaccctgggccctgtgctgctgcccccagagcagggcctggccccacccaccgtcttcctgaaggccctgcccatccccctgtaccacacagtgcccccaggcggcctgcagccccgggcccccctggtgacaggcagcctggatggcggcaatgtgcccttcatcctgagccctgtgctgcagcctgagggccctggccccacccaggtgggcaagccagctgcccccaccctgactgtgaacatcgtgggcaccctgcctgtgctgagccctggcctgggccccaccctgggcagccctgggaaggtgagaaatgccggcaagtacctgtgcccccactgcggccgggactgcctgaagcccagcgtgctggagaagcacatccgcagccacactggagagcggcccttcccctgtgccacctgtggcatcgccttcaagacccagagcaacctgtacaagcacaggaggacccagacccacctgaacaacagccggctgagcagcgagagcgagggcgccggcggcggcctgctggaggagggggacaaggccggggagccccccaggcctgagggccgcggggagagccgctgccagggcatgcatgagggcgccagcgagcggcccctgagccctggggcccacgtgcccctgctggccaagaacctggatgtgaggacagaagctgccccctgccccggcagcgcctttgctgaccgggaggccccctgggacagcgcccccatggccagccctggcctgcctgctgccagcacccagccctggaggaagctgcctgagcagaagagccccacagctgggaagccctgtgccctgcagaggcagcaggccacagctgctgagaagccctgggatgccaaggcccctgagggccgcctgaggaaatgtgagagcacagacagcggctacctgagcagaagtgacagcgctgagcagccccacgccccctgcagccccctgcacagcctgtctgagcacagcgctgagagcgagggggagggcggccctggccctggccctggggtggccggggctgagcccggggcccgggaggccggcctggagctggagaagaagaggctggaggagcgcatcgcccagctgatcagccacaaccaggccgtggtggatgatgcccagctggacaacgtgcggcccaggaagacaggcctgagcaagcagggcagcattgacctgcccaccccctacacctacaaggacagcttccactttgacatccgggccctggagcctggaagaagaagagcccctggccctgtgcgcagcacctggaccccaccagacaagagccggcccctcttcttccacagcgtgcccacccagctgagcaccaccgtggagtgtgtgcctgtgaccaggagcaacagcctgccctttgtggagggcagcaggacctggctggagccccgggagccccgggacccctggagcaggacccagaagcccctgagccccaggcctggccctgcccggctgggctgccgcagcggcctgagcagcacagatgtgcccagcggccacccccgggccctggtgcggcaggccgctgtggaggacctgcccggcacccccatcggagatgccctggtgcctgctgaggacacagatgccaagaggacagctgcccgggaggccatggccggcaagggccgggccggcggcaggaaatgtggccagaggcggctgaagatgttcagccaggagaagtggcaggtgtatggagatgagaccttcaagaggatctaccagaagatgaaggccagcccccacggcggcaagaaggcccgggaggtgggcatgggcagcggggctgagctgggcttccccctgcagaaggaggccgccggcagcagcggcaccgtgcccacccaggacaggaggacccctgtgcatgaggacatctctgctggggccaccccagagccctggggcaaccccccagccctggaggccagcctggtgacagagcccaccaagcacggggagaccgtggcccggcggggggacagcgaccggccccgggtggaggaggccgtgagcagccctgccctgggcggccgggacagcccctgcagcggcagccgcagccccctggtgagccccaacggccgcctggagctgggctggcagatgcccccagcccctggccccctgaagggaggagatgtggaggcccccaggcctgtgtggccagaccccaagctggagggcggggcccggggcgtgggagatgtgcaggagacctgcctgtgggcccagacagtgctgcgctggcccagccggggcagcggggaggacaagctgcccagcgagaggaagaagctgaaggtggaggacctgcacagctggaagcagcctgagcctgtgtctgctgagacccctgggggccccacccagcctgccagcctgagcagccagaagcaggatgctgaccccggggaggtgcctgggggcagcaaggagagcgcccggcaggtgggggagcccctggagagcagcggggccagcctggccgccgcctctgtggccctgaagagggtgggcccccgggacaaggccacccccctgcaccctgctgccccagccccagctgagcaccccagcctggccaccccaccccaggccccccgggtgctgagcgccctggccgacaatgccttcagccccaagtacctgctgcggctgccccaggccgagacccccctgcccctgcccatcccctggggccccaggcacagccaggacagcctgtgcagcagcggctggccagaggagcgggccagctttgtgggcagcggcctgggcacccccctgagccccagccctgccagcggccccagccctggagaggccgacagcatcctggaggaccccagctgcagccggccccaggacggcaggaagggggcccagctgggcggggacaagggggacaggatggccaccagcaggcctgctgcccgggagctgcccatcagcgcccctggggccccccgggaggccaccagcagcccccccacccccacctgtgaggcccacctggtgcaggacatggagggggacagccaccgcatccaccggctgtgcatgggcagcaccctggcccgggcccggctgtctggagatgtgctgaacccctgggtgcccaactgggagctgggggagcccccaggaaatgcccctgaggaccccagcagcggccccctggtgggccctgacccctgcagccccctgcagcccggcagcttcctgacagccctgacccggccccagggcgtgcccccaggctggccagagctggccctgagcagccacagcggcaccagccgcagccacagcaccaggagcccccacagcacccagaaccccttccccagcctgaaggccgagccccggctgacctggtgctgcctgagccgctctgtgcccctgcctgctgagcagaaggccaaggccgcctctgtgtacctggccgtgcacttccctggcagcagcctgagagatgagggccccaacggccccccaggcagcaatggaggctggacctggaccagccctggagagggcggccctgcccagatgagcaagttctcctaccccaccgtgcctggggtgatgccccagcaccaggtgtctgagcctgagtggaagaagggcctgccctggagggccaagatgagccggggcaacagcaagcagaggaagctgaagatcaaccccaagcgctacaagggcaacttcctgcagagctgtgtgcagctgcgggccagccggctgcggacccccacctgggtgagaagaagaagccgccaccccccagccctggagggcctgaagccctgcaggaccccaggccagaccagcagcgagattgctggcctgaacctgcaggaggagcccagctgtgccaccagcgagagccccccctgctgcggcaaggaggagaagaaggagggggactgccggcagaccctgggcaccctgagcctgggcaccagcagccgcatcgtgcgggagatggacaagaggacagtgaaggacatcagccccagcgctggggagcacggggactgcaccacccacagcacagctgccaccagcggcctgagcctgcagagcgacacctgcctggccgtggtgaatgatgtgcccctgcccccaggcaagggcctggacctgggcctgctggagacccagctgctggccagccaggacagcgtgtccacagaccccaagccctacatcttcagtgatgcccagaggcccagcagctttggcagcaagggcaccttcccccaccacgacatcgccacctctgtggccgctgtgtgcatcagcctgcctgtgaggacagaccacatcgcccaggagatccacagcgctgagagccgggaccacagccagacagctggccgcaccctgaccagcagcagcccagacagcaaggtgacagaggagggccgggcccagaccctgctgcccggccggcccagcagcggccagaggatcagtgacagcgtgcccctggagagcacagagaagacccacctggagatcccagccagcggccccagcagcgccagcagccaccacaaggagggccgccacaagaccttcttccccagccggggccagtatggctgtggggagatgacagtgccctgccccagcctgggcagtgatggcaggaagaggcaggtgtctggcctcatcaccaggaaggacagcgtggtgcccagcaagccagagcagcccatcgagatccctgaggcccccagcaagagcctgaagaagaggagcctggagggcatgaggaagcagaccagggtggagttcagtgacaccagcagtgatgatgaggaccggctggtgattgagatctag

SEQ ID NO: 253839 - DNA, 5034 bp, Artificial Sequence
  derived and/or modified sequence
atggaggtgcccgagcccacctgccccgccccccccgcccgggaccagccagccccaaccccagggccacccggtgcccctggcggccaagccagtcctcacctgacacttggaccagtgctacttcccccagagcagggtctcgctccgccgacagtctttctgaaggccttgccaatccccctgtaccacaccgtgccccccggggggttgcagcctcgggctcctctggtaaccggaagcctcgacggagggaatgttccgtttatcctatccccggtcctgcagccagaggggcccgggcctactcaggttggcaagcccgcagctcctaccctcacagtgaacatcgtaggtacactgcccgtactgtccccaggcctcggccccaccctgggctcacctggaaaagtcagaaatgccgggaaatatctgtgtcctcactgtggcagagattgtcttaagcccagcgtcttggagaagcacattaggagccataccggagagaggccttttccttgtgctacttgtggaattgcatttaagacacaatctaacctttataaacatcgcagaactcagacacatttaaacaattccagacttagttcggagagcgagggggccggaggcggcctgcttgaggagggcgacaaagccggcgagcctccgcgtcccgaaggccggggagaaagcaggtgtcagggtatgcacgagggtgcctccgaacggcctctgtcaccaggggcgcacgtgcctctccttgcaaagaacttagatgtgcgaactgaggcggccccatgccccggaagcgcctttgccgaccgagaagctccatgggattcggcaccgatggcttcacccggactgcccgccgctagcacccagccttggcgaaaactacccgaacaaaaaagccccaccgccgggaagccttgcgccctccagaggcagcaggctactgccgcagaaaagccatgggatgctaaagccccagaaggcagattacgcaaatgcgagtcaaccgactccggatacctgtcccggtcagattctgctgaacaaccacatgcgccctgcagccccctgcatagcttgagcgagcactcggctgagtccgagggcgagggcggtccgggccccggcccaggtgtggcgggggcagaacccggagcacgcgaggctggactggaattggagaaaaaacggctggaggaacggattgctcaactgatcagccacaaccaggccgtggtcgacgatgctcagttggataatgtgagaccccggaaaacaggactgagcaagcaaggaagtatagacctgccaaccccttacacctacaaggactctttccacttcgatatcagagccttagagcccggccggcgcagggcccccggtcctgtccgctccacatggacgcctccagacaaaagcaggccgctgttcttccactcagttccgacacagctgtctacgactgtggaatgcgtacccgtcacaaggtccaacagtctgccatttgtcgagggatcgcgcacctggctggagccacgggaaccaagggacccatggtcacggacacagaaaccactcagcccacggcccgggccggcacgcttggggtgccgttctggtttgagttccactgatgtgccgagtgggcacccaagggcactggtgcggcaggctgcggttgaagacttaccggggacacctattggcgatgcgctagtcccagcggaagacactgacgccaaaagaaccgccgctcgcgaagccatggccggcaagggacgagccggggggagaaaatgcggccagaggcgcctgaaaatgttctcccaggaaaagtggcaagtttacggggacgaaacatttaaacgaatctatcagaagatgaaggcgagcccccacggaggtaaaaaggcccgcgaggtagggatgggaagtggagccgagttggggttcccgctgcagaaggaggcggctggatcctccggcaccgtgccaacacaagatcgtcgtactcctgttcatgaggatatcagcgccggggccaccccagaaccttggggaaaccctccagccctggaagcctctttagtgacagaacccactaagcacggggagactgtcgcccgccgaggggattctgatcgaccccgcgtcgaggaggcagtctccagcccagcgctggggggcagagactctccgtgtagcgggagccgatcacccctcgtttcccctaacggccgtcttgaactgggttggcagatgccaccagccccagggcccctgaagggcggcgatgtggaagcgcctaggcctgtctggccagatccaaaactagagggcggagcgcgaggcgtcggcgatgtccaggaaacctgtttgtgggcccagactgtgctgagatggccctctaggggatctggtgaggataagctgcccagcgagcggaagaaacttaaggtggaggacctccacagctggaaacagcctgaaccggtgtcagccgaaacgcctgggggaccaacccagcccgcttctttatcttcccagaagcaagatgcagacccaggcgaagttcccggcggcagtaaagagagcgcgaggcaggtgggagagccccttgagagttccggggcatctctagcggccgctagcgtggcccttaagcgcgtcggtcccagagataaagccacccctctgcacccagcggccccagcgcctgctgaacatccatccttggccactcctccccaggctcctcgcgtgctgtctgcccttgcggacaacgctttctctccaaaatatctgctcaggctaccccaggctgagaccccgttacccttgcccataccatggggtccacggcatagccaggatagcctgtgtagctctggatggcctgaagagcgggcctctttcgtcggctccggactcggaactccattgtctccaagtccggccagtggaccttctccgggggaggccgatagcattttagaagaccccagctgtagccgcccccaggatggaagaaagggtgctcagctgggtggcgataaaggcgaccgaatggccacaagtcgaccggcggcccgggaactgcccatttccgctccaggcgctcctcgggaggcaacatcatctccccccaccccaacctgtgaggctcacctggttcaagacatggagggcgatagccatagaattcaccgactgtgtatggggtcaacactggccagggctcgcttatcgggcgatgtgctgaacccatgggtgcccaattgggaactcggcgagcctccaggtaacgctccagaagacccaagttcaggaccgttggtcggaccagatccctgctcaccgctgcagcccggcagctttctgaccgcgttaacccggccccagggcgtgcctcctggctggccagagttggcgttatcttcccattcaggtaccagtagatctcactcaacaaggtcgcctcattccacgcaaaaccctttccccagtctgaaggcagaaccacgcctgacatggtgttgtctgagtcggtctgttcccctcccggctgagcagaaagccaaagccgccagcgtatacttggctgtgcattttcctggtagcagcctgcgcgatgagggccctaatgggcctccaggttcgaacggagggtggacgtggacatcccccggtgagggggggcctgcccagatgtcaaagttttcctaccctacagtcccgggagtcatgccacagcatcaagtgtcggaaccggaatggaagaaggggctgccttggagagccaaaatgtcaagaggcaatagcaagcagcggaagttgaaaatcaatcctaagcggtacaagggtaactttctccaaagctgtgtgcagttgagggccagccgtctgcggacaccaacctgggtgcgccgacgtagccgtcatcctcctgctcttgagggcttaaaaccctgcagaacacccggccagacaagttccgagattgcaggactcaaccttcaggaagagcccagctgcgcaacgagtgagagtcctccttgctgtgggaaggaggagaagaaagagggcgactgcaggcaaacccttgggactctgagcctggggacatcatcaagaatcgtcagggagatggataagcggaccgtgaaagacatctcgccaagtgcgggtgaacacggggactgcaccactcattccaccgccgccacctcaggcctctcactgcagtctgacacatgcctggccgtggtgaatgatgtccccctgccaccaggtaaaggcctggacttaggcttacttgaaacccagttgcttgcgagccaggactccgtgagcacagatccaaagccctacatcttctcagatgcccagagacccagttcgtttggcagtaaggggacgtttccccaccacgacatcgcgaccagcgtggccgcagtctgtattagcctcccggtgcgtaccgaccatattgcgcaggagattcacagcgccgagtctcgagatcattctcaaacagctgggcggacgcttacatcaagtagcccagactcaaaagttaccgaggagggtagggcccagaccctgctcccaggtcgtccctcctcaggacagcggatctccgactcggtcccccttgagagtacagaaaaaacacacctggaaattccagcatccggccctagtagcgcctcctcccaccacaaggagggccggcataagacgttttttccctccaggggccagtacggctgcggcgaaatgaccgtaccttgtccaagcctcggctcggacggccgcaaaaggcaagttagcggtctgatcacgcgaaaggattccgttgtcccctctaagccagagcagcctattgaaatacctgaagccccttctaagagtttgaaaaagcgatccttggagggtatgagaaaacaaactcgcgtggagtttagcgacacaagcagtgacgacgaggacaggctggtcattgagatctag

SEQ ID NO: 253840 - DNA, 5033 bp, Artificial Sequence
  derived and/or modified sequence
atggaagtgcccgaaccaacttgccccgctcctcctgcccgagaccaaccagccccaacacccggaccgccaggggctccgggaggacaggcgagtccccaccttacccttggtcctgtgctgctgcctcctgagcaaggcctagccccacccacagtctttctaaaagcccttccaataccactctaccacaccgttccccctgggggactgcagcctagggctcccctggtgacgggttctctggacggaggtaatgtgccttttattctctccccagtgttgcagccagaggggcctggacctacacaggttggtaagccagctgccccaacattaacagtgaacatcgtgggtaccctccccgtgctgtctccgggactgggcccaaccttgggcagtcctggcaaggtgcgtaacgccggaaaatacctctgcccccattgtggtcgggattgtcttaagccaagtgtcctggaaaagcacataagaagccatactggagagaggccctttccgtgtgctacatgcggtattgcttttaagacccagtccaatttatataaacaccgacgcacacagactcaccttaacaacagccggctgagctctgaatccgagggagccggagggggtttgctcgaagagggtgataaagccggtgagccaccaaggcccgagggacgaggagagtcccggtgccagggaatgcacgagggagctagtgaaagacctctgagtccaggagcgcacgtgcctctgcttgctaagaacctcgacgtccgtactgaggccgcaccttgccccggaagcgccttcgctgacagggaagccccatgggattctgccccaatggcgagtccgggactgccagcggcatctacccagccctggagaaaactgcccgaacaaaaatcaccaacagctggtaaaccttgcgcactgcagcgtcaacaggccacagcggctgaaaagccctgggacgctaaagctcccgaggggagacttcgcaaatgcgaaagtacggactctggctacctgtctcgcagcgactctgctgaacagccccacgcaccttgctcccctttacatagcctatcagagcactcggccgagtcagaaggcgagggaggacctgggccaggccctggcgttgctggggcagaacctggggcacgggaggccggtttagagctggagaagaagcgactggaggagcgaatcgcacagttaatctctcataaccaggcagtggtagatgacgcccagttggacaatgtgcgcccacggaaaaccggactctcaaagcagggctcaattgaccttccaactccttacacttataaggatagcttccattttgacatacgcgcactcgaacctggacggcgaagagctccagggccagtgagaagtacctggaccccgccagataagagccgaccacttttcttccactcagtgcctacacagctcagcacaactgtcgagtgcgtgccggtgactagaagtaactctctgccttttgtggaagggtctcgcacatggctggagccaagagaaccccgtgatccttggtcccgaacacaaaaacccctgagccctcgaccagggcctgcccgtctagggtgccgtagcggtctgtcaagcacggacgttcccagcggtcaccctcgcgcactggtgcgacaagccgcagttgaggacctgccaggcaccccgatcggcgacgctttagtaccggctgaggataccgatgcaaagagaacggcggctcgggaggctatggccggaaaaggcagagctgggggaagaaaatgtggacaacgcagattgaaaatgtttagccaggagaaatggcaagtgtacggggacgaaacctttaaacggatctaccaaaagatgaaagcgtctccacatggcggaaagaaagctagggaggtggggatgggttccggagctgagcttggatttccgttacagaaagaggccgcaggctctagcggcaccgtgcccacacaggatcgcaggaccccggtgcatgaagatattagtgccggagccaccccagagccctggggcaatccacctgcactcgaagcatccctggtaaccgaacctactaagcatggtgaaactgtcgcccgacgaggagattcagacaggcctagagtcgaagaggcagtttcttcaccggctcttggagggcgagatagcccatgcagcggatccaggagccccctggtgagcccaaacggacgtttagagctgggatggcagatgcctccggctccaggtcccttgaaaggcggagatgtcgaggcccctcgcccagtttggcccgatcccaaactggaaggaggcgcaagaggagttggggacgtccaggaaacctgtctctgggcacagaccgtcctgcggtggcccagccggggatcaggcgaagacaagttgccttcagagcgcaaaaaacttaaagtggaggacctgcattcctggaagcagcccgaacccgtatctgcagagacgccaggagggcctacccagcccgcttcactttcaagccagaagcaggacgccgatcccggagaagtaccaggtggctcaaaggaaagcgctcgacaggtgggagaaccactggagagtagcggggctagtctagccgcagcgtccgtcgcactgaaacgcgtcgggccaagggataaggctacacctctgcatccagcagcaccagcaccggcagagcacccctccctggccactccgcctcaggcccctcgggttctgtccgccctcgccgacaatgccttttcaccaaagtatctcttgcgactaccccaggctgagacccctcttcccctgcctataccctggggacccagacactcccaagattctctgtgctctagcggctggcctgaagaacgggcttcattcgtgggctctggtctggggaccccacttagtcctagtccagccagtggcccaagtcccggagaagcagacagtatacttgaggacccttcatgcagccgacctcaggacgggaggaaaggagcgcagcttgggggagacaagggcgaccgcatggcgacgtccagacccgctgctcgggaacttccgatctctgccccaggcgctccaagggaggccactagttcccctcctactccgacatgcgaagctcatctagttcaggacatggagggggattcacaccggatacaccggttgtgcatgggatcaaccctggctcgggctcggctttctggggatgtgctgaacccttgggtacccaactgggaattgggtgagccacccggtaatgccccagaggatcctagcagcggtcccctggtaggccctgatccctgcagccccctgcaacctggtagcttcctgaccgcattgacccgaccacagggagtgccccctggctggccagaacttgctttgtcctcacactctggcactagccgtagtcacagcacacgctccccccacagcacacagaacccatttcccagcctgaaggcagagccccgactgacgtggtgttgtctgtcaaggtccgtgcctcttcctgcagaacagaaagccaaagcagcaagtgtgtatctggccgtccattttccagggtcctctctgagggatgagggacctaacgggccaccaggtagtaatggcggatggacttggacaagccctggggagggaggaccagcacagatgtcaaagttttcctatcccaccgtgcctggtgttatgccacagcatcaagtaagcgaacccgaatggaaaaaaggactaccctggcgagccaagatgtcccgcggaaacagtaagcagcgcaaactgaaaatcaacccgaaaaggtataaggggaactttctgcagagctgtgtgcagctccgggcttccagattaagaactcctacatgggtgcgacggaggtcacggcatccccctgctctagaaggtctgaaaccttgtcgcacgcccggacagacatccagtgagatcgctgggctgaatcttcaagaggaaccaagttgcgctacatcagagagccccccatgctgcgggaaggaagagaagaaggagggtgactgcaggcagactttaggtacacttagcctagggacgagttctcgaatcgtaagagagatggataaacgcaccgtgaaagatatttccccaagcgccggagaacacggagattgcacgactcattcgacagctgctacctcaggccttagcctgcagagcgatacttgtcttgctgttgttaacgacgtcccactgcctcccggaaaggggcttgatctggggcttcttgagacacaactgcttgcgagccaagactccgtaagtacagatcccaagccttacatattctctgatgctcagcgcccatctagtttcggatcgaaagggacctttccccaccacgacattgcaacctcagtcgccgcagtgtgtatatccttgcccgtgcgcaccgaccatatcgcccaggagatccatagcgcagagtcccgagaccactcccaaaccgcagggcgtacccttacctcgtcttctcctgatagtaaagtgaccgaggaggggcgagcccagaccctgctcccagggcgtccctcttctggacagaggatcagcgatagcgtgccattggagagcaccgagaaaacacacctggaaatacctgcaagcggaccgtcttcagctagctctcaccacaaggagggtcgacacaaaactttctttccctcgcgtggccagtatggatgcggggaaatgaccgtcccatgtccaagcctggggagcgatggacgtaagcgacaggtgagcggactcataacaagaaaagattcagtcgtgccaagtaagcccgagcagcccatagaaatccccgaagctccatcaaagagtctgaaaaagcgctccttggagggcatgcggaaacagacacgggtggaattttctgatacaagcagcgatgatgaagacaggcttgttatagagatcta

SEQ ID NO: 253841 - DNA, 9404 bp, Artificial Sequence
  derived and/or modified sequence
atggaggttccagaacccacctgccctgcccctcctgcgagggaccagccagctcccactcctggccctccaggggccccaggtggccaggcctcacctcacctgaccctgggccctgtccttctgccgccagagcagggcctggccccccccactgtgttcctgaaggccctgcccatcccactgtaccacacggtgcctcccgggggcctccagccccgcgccccgctagtgacgggcagcctagatgggggcaacgtgcccttcatactcagccctgtgctgcagcctgaagggcctggccccacccaggtggggaagccggcggcccctacgctgacggtgaacatcgtgggcactctgcctgtcctgtcgccgggcctgggccccacgctgggcagcccaggcaaggtgcggaatgcgggcaagtacctgtgtccgcactgtggtcgcgactgcctgaagcccagtgttctagagaagcacatccggtcccacacgggtgagaggcccttcccgtgtgccacctgcggcatcgcctttaagacccagagcaatctctacaagcacaggcggacgcagacgcacctcaacaactcccggctgtcctcagagtccgagggcgccgggggcggcctcctggaggaaggggacaaggccggagagccccccagaccagagggcaggggcgagagcaggtgccaggggatgcacgaaggcgcctcggagagacccctttctccgggtgcccacgtgcccctacttgccaagaacctggatgtgaggaccgaagctgctccctgtccagggtccgcatttgccgacagagaggctccttgggactctgcccccatggcgtcacctgggctcccagcggccagcacacaaccctggcgtaagttgccagagcagaagtcgccgaccgccgggaagccgtgcgccctgcagcggcagcaggcgacggcagcggagaagccctgggatgccaaggcccccgagggccggctgcggaagtgtgagagcaccgactcggggtacctgtcgcgctccgacagcgcggagcagccgcatgcgccctgcagccccctgcacagcctttcggagcacagcgccgagtccgagggggagggcggcccgggcccggggccaggggtcgcaggggccgagcccggggcgcgagaagccggcctggagctggagaagaagcggctggaggagcgcatcgcccagctcatctcccacaaccaggcggtggtggacgatgcccagctggacaacgtgcggccccggaagaccgggctgtccaaacagggcagcatcgacctgcccacgccctacacctacaaggactccttccactttgacatccgcgcgctggagccaggccgtaggagggccccgggccccgtgcgctccacctggacgcccccagacaagtctcggcccctcttcttccactccgtccccactcagctctccaccaccgtggaatgtgtccccgtcaccaggagcaactcgctgcccttcgtcgagggctccaggacgtggctggagcccagggagccccgggacccctggtccaggacgcagaagcctctgagccccaggcccggcccagcccgcctgggctgccgctcgggactaagctcgactgacgttcccagtgggcatccccgggccctggtcagacaggccgcggtggaggacctgccaggcacccccattggcgatgccctggtgcccgcagaggacacagacgcaaagagaactgctgcgcgggaggccatggccggcaagggcagagcgggcggcaggaagtgcggccagagaaggctgaagatgttctcccaggagaagtggcaggtgtacggggatgagacgttcaaaaggatctaccagaaaatgaaagccagtccccatggaggcaagaaagccagggaggtgggaatgggcagtggggcagaactgggctttcctctgcagaaagaggcagcagggagctcaggcacagtccccacccaagacaggaggacccctgtccatgaggacatatccgcaggggcaacgccagagccttggggaaatccaccagccctggaggcctccttggtgactgaacccactaagcatggggagacggtggccaggagaggagacagtgaccgacccagggtggaagaggctgtgtcatcccctgcactgggtggcagagacagtccctgttcaggcagtaggagccccctggtctctccaaatgggaggctggaactggggtggcagatgcccccagcacctggccccctcaaagggggtgatgtagaggctcccaggccagtttggccggaccccaagctggaaggaggtgcccgaggtgtgggggatgttcaggagacctgcctgtgggcccagactgtcctgagatggcccagcaggggctcaggggaggacaagctcccctcagagaggaagaagctgaaagtggaggacctgcacagctggaagcaaccagagcctgtgagcgcagagaccccaggtgggcccacgcagcctgcctctttgtcatcccagaagcaggatgccgatcccggggaggtgccagggggctcaaaggagagtgccaggcaggtgggcgagcctctggagtcctctggagcctccttggctgctgcttctgttgccctgaagagggtggggccaagggacaaggctaccccactgcatcctgcagccccagcccccgcagagcacccctcgctggccaccccacctcaggctcctagagtgctctctgccctggcagataatgccttttcccccaagtacctcctcaggttacctcaggcagagacccccttaccactgcccattccctggggaccaaggcacagccaggactctctctgcagcagtgggtggcctgaagaacgggcatcatttgttgggtcaggactggggacccctctttctcccagcccagcctcaggcccctccccaggtgaggcggacagcatcctggaggaccccagctgttccaggccacaggatgggagaaaaggggcacagttggggggggacaagggggacaggatggccactagcaggccagcagccagggagttgcccatctcagcaccaggggctcccagggaggctacctcctccccgcccactccaacgtgtgaggcacacttagttcaggacatggagggtgacagccaccgtatccatcgcctctgcatgggcagcactttggcaagggccaggctctctggggatgtcctgaatccctgggtacccaactgggagctgggggagcctcctgggaatgccccagaagatccttcttcagggcccctggtgggccccgacccgtgttcccccctccagcctggctccttcctcactgccctcactcggcctcagggtgtgcccccaggctggccagagctggccttgtcttcccactcagggacgtcccggagccacagcacccgcagtccccacagcacccaaaacccctttccctcactgaaggctgagccgcggctcacgtggtgttgcctgagccgcagtgtccctctgcccgcggagcagaaggcaaaggcggcatctgtgtacttggcggtgcactttcctggtagcagcctccgagatgagggtcccaatggccctcctgggagcaatggaggatggacctggacaagccctggagaaggagggccggcgcagatgtccaagttctcctacccaacagtcccaggggtgatgccccagcaccaggtgtctgagccagaatggaagaaaggcctgccttggagggcaaagatgtctcgtgggaacagcaagcagagaaaactgaagatcaaccctaaaaggtacaaagggaatttcttgcagagctgtgttcagctgagagccagtagacttcgcacaccaacctgggtgcgaagaagaagccgccaccctcccgcacttgagggactgaagccatgcaggacccctgggcagacctcttcagaaatagcaggtctgaatctgcaagaggagccatcttgtgccacctcagaatcacctccttgttgtgggaaggaagagaagaaggaaggtgactgcagacaaaccttaggaaccctctctcttggtacaagttcaagaattgtcagggaaatggacaaacgaactgtgaaggatatttctccatctgctggtgagcatggtgactgtactactcacagcactgctgccacatcaggattatctctgcaatctgacacctgcctggcagtggttaatgacgtgcctctaccccctggcaaaggtcttgaccttgggttgctggagactcagctgctggcctcccaggattcagtctcaacagatcccaaaccatacatcttctcagatgctcaaaggccttcttcctttgggtccaaaggaacttttccccaccatgacattgctacctctgtggctgccgtttgtatttctctgccagtgagaacagatcacatagcccaggaaattcacagtgctgaatcacgagaccacagccagactgcagggaggactctgacatcaagctccccagacagcaaagtcacagaagagggcagagcacagaccctcttgccagggagaccttcatctggacaaagaatttcagattcggttccactggagtcaactgaaaaaactcatcttgaaataccagcttcaggaccaagttcagctagttcacaccacaaggaagggagacacaagacgttttttccttccagaggccagtatgggtgtggggaaatgactgtcccctgcccctctttaggaagtgacggtaggaaacgtcaggtatctggattaatcactcggaaagattctgtggttccttctaagccagagcagcccatagaaattcctgaagccccttctaaatccctcaagaagaggagtctggaaggaatgagaaagcaaactcgagtagagttcagtgacaccagcagcgacgatgaagaccgattagttatagaaatatgaagcttccagagaaacatggtgtctggtcaaaaagactgttgacgcttcacaagtaaatgttgtcaggctggcggaagaactaaactctatctgtgaaacacctacagattaggaaagccattttgagttatttacaagccaactccaaccaacttctgacccccaactcagccgcagcgttccccagctccccttgggagtgctctgctcatcttcaaatggtgccaggcagggcagacatggcaaggaagcaaactctgcaaatggtcaacgtgcacagtgactgggccttgactcccagcctcgtcttctgcacctgtcccccactgcctctctgcaatcaaatggcactaaccaagaaagccaccatcaacacatttctccacaagtggaccccacacagtcgaggcaactggctttctccattagtaaactgaggatttgcttccaaggtggagagcacacttgggataattggagtagcttgacaaagagacgggggtgtgaactgggcacaaagatacttctgttcattttggagacaaaattcagatacattaaaaaactgaagcttgttcagagtaattcacgtccttggtggagttgtaaatacacttcaaaatgcctatgatccggtgacatgctgattacttttaaatgttgcacaaatggtcaatgcttatttatggtcagatgatgcaagcacatgctcttgtgcctggtgcgtttgctgtggagatctctgagactgtcggtttttctagttcttgcaaaggaacggtgttaaaagttaatagaactgtctctctgtaatgagtcattttttgagagggaaaaattcacttattttcctctgattcttcttgtcatattgtgctctgagcaatttcaattagagggttacattttagtaatctgtacagcttcaactgatgcctgctcgtcgtgacgggagccttttagatttccttcagaagcttcaaggatacaaaactaattggagttttgacgctgttttacatctcggtaattttattttcggggcttagtgttactttgctgtcaaattaaatcagcctctgtattgtgcacgtcagaactgcacagagaaaattccccagtattccaagccggtgcgcccctgtgcagaagaaaacagatctacgtcagccagcccggggggcaaagcctcagttccactgccttcctctccctctccttccacgggagaggagaaacttaaagaggtttacattgctgcatttcaataaaattttatacttgcttttggtatgattttgtacaatttgaaatttgtagctgagctcttttggtgtaactttgatgtaatgatgttcatatgacatcttgtacttcagagacacagcagcaatgcagagcatctcacacatgtgaatacacttcagtcagtctgtgcctgtgactaagtatggtcaaatttcaagtatcttcatgtgaattttccaattttggtgtttttcatagaaaacttcaatgccagaccagcttccctggttacttagcatatatttgtgaccatttcatatgcactcataaatatccaaggatttcaggcccagccaagaaaaacataagaagggaggtaaaaaggatgttggacattgacttagtgtactttttaaacccaacaaaagcgatgtggtgattatctcccttttcgaaggattcatgccactgtaatgagagaggcagtgtaggcaaatggtctgagccttggatggagattgaagtcctgactttagctgggaaatcttggttaagagtctttctgtaccttagtttccctaagtgagaataagagagttggacaagacgaatgtatctccaggttccaatttttctgagaatggttgatagagaagctgctctctccttaaaatgcatggactcaatggcttgaagatattccccatggggaaccattgccacggaggccttgcatgcaagaagtttgggtggggacagtgaggaactgaaacacaagcaccttccaccaattattgctgtgaagaacctgagcctgaagaagctccatctaattttttccccagagttccagattttagggtgcaatcatccagcctatacatgtggctcatagttcaaaaaattaaaagcaaaaccagaactctccagtaggaatggagaaaacctatctgtaggctgaactggctcctttgtcttaggaggcactggtcaggggaaaaaagctgtcttccagacccctcctttctgggtggctactgtggaatcaacggggtcactggctgtaaatcagtaagtcatagctccaaacagcaccaacttcaggatgatggtggaagctctgtccctataggagccaccgttgccagctgtcacatcccaacctaggtcaaatatggcggaatattgatttcgtctctaactccctgtatctcttacaaaggtaaagcaggtagcgaagccaccttgcttccctggtctttgcctagtggctggcaatgtttacaagtgtaccttactttatatcaacatgaatttgtgaaaaagctgtatgtcaatggattttttaaaaattaaaaatgtattttgaatgaccctaagggagctggctctttaaaagcatcctaaggtaaagattttttttaaatgaagaatctttttataaagcaatgaacaatctctgattttataaatcttaattttcctatgggttttcttaaagtgaaatacaattataagaatacattttaagggtaacattaacaacctagaacccagtttgggttactaaaaataaaatgtcagtattatcaattgataactaccacagttttatactctgcaagtgtgtactgcatgatggttaaggaaaaacaaatttattttagaacaaagcaaaccagagtttaaagatcagggatttccttctttccccagtgctaattttcccagtgttaattttattatatctttaggtaagggtcttaaccaactgatgcctcagtttcttccacagagaatagttagagggatgctgtcatgaactaagggaagggcactgaatttttttttgccaatatcaaaagtgacatttccccatgatgttcaagactcaccaggtttctctctccacctgtacctacacccagctagatcttgtcgttaaagatgtatggagggaagaggtttcaatccttccctccttggcaacctacattgttaagtgactcaaagtcatgtgatttttggtggacaactggaatcctccttcttgtaaaacacattgaaaaacagctcatctctcctgttaggcttaacccttgagatttgagacaaagctaataatcccctttggttcacatctcacagtaaccaggagaacctatggttcatttgccaagtgattaaaaaaaaagatggaggagggtgtctctgaattttaatggaaacactgccaatagcatggtgggtaacctagggcaagacagactttttcttcctgaaatcactcttctaaagctgagaccggaagaggaaccttgcagaagtgcactgtgaccacagttcttggcatgaaagataaacaatttgcagtctcatgccaaaaagtatttccttgcatttacattcattacttagaatgatcacattattcatttttttccccagcacagaaatttgcattttgcacagaatttgcctggtgcagcagatctttatagttatggaaactgtcatcattatcggaatgtgctgctgctcaactccccagacataatttaatatggtgaggagaatatgacctgcctggctctatgggtgatcatatttctactgctgcagcaagctgggcttgtgtatttttcctcacttcagttgttcttcccatagttcatgtagggaggcactttggcttttgaaacactacatttctcaatatttaagcacaatttattgtccttatttttcagaacccattaaatataagggtcagaacctagaaaatcttatgtgctggatttctaccctgtatgattcttttcatccatgctttgcacttacgtaggaatatacataatttggtctgaagaagtataggaacagttgagcacattacttcaccactggaagaataggaaccagggaaaaacatcagcctctgccacttggagcactagaggatgacggaatgtcttgtatatgcggtcaactgttcaggatttactactcaattggttgttcacaatcagggaaatgattggcttcttggttgtttgttgaactttctttctttatatggttaaattattttgttttgataaaaataaaacttaaaatgcaaa

SEQ ID NO: 253842 - protein, 99 aa, Artificial Sequence
  derived and/or modified sequence
MDTGSREAAFTRDLPRKPADAQVSPEMSITHKEKENAHLKEILLFVNAEAFSQPQPHSAPVCEGQQLTGKFSTSVLTRAGGDASPCSWERLLCYGWSHC

SEQ ID NO: 253843 - protein, 117 aa, Artificial Sequence
  derived and/or modified sequence
MPSCSCALMAPCGPAAGPAAVERTQQVARGEPGSARGQLQVSPEMSITHKEKENAHLKEILLFVNAEAFSQPQPHSAPVCEGQQLTGKFSTSVLTRAGGDASPCSWERLLCYGWSHC

SEQ ID NO: 253844 - DNA, 426 bp, Artificial Sequence
  derived and/or modified sequence
tcgcctgcatcttcggagagaggtgctgagcccttcctcatggatacggggtcccgggaggcagccttcaccagggacctgcccaggaaaccagcagatgcccaggtcagccctgaaatgtccattactcacaaagaaaaggaaaatgctcatttgaaagaaattcttctctttgtcaatgctgaggcattctctcagccccagccccacagtgctccagtgtgtgaagggcaacagctgacggggaagttcagcacatctgtgctgaccagggctggaggcgatgccagtccgtgcagctgggaacgcctcctctgctatggctggagccactgctgaagggactccacctggcacctatgccaccaatggcccctgaacgggtatctaggcccacccttaataaagatgagctgctcattccca

SEQ ID NO: 253845 - DNA, 1107 bp, Artificial Sequence
  derived and/or modified sequence
gacccgaggggggcccccacgcccgctctggcctctcaggtcaggccctcccctcccctcccctcccctcccccgcccctgtgtctccgcgagccggctgtgtgcctgcgagagcgtgcacacccgcgggaccttcccttttgttccaccctgacctctaccttctctaccttgtgctgaccccgctggggtgcaggggttcccttcggaggaggccggggctcaaggtgtgcagctcggccgcctctccctaactctgcaccagcgccttctctctctctctctctctctctctctctctctctctctctcaagatctccctcctgctaagtctgcgctgctgcaggagggctgggggaagggcaggggtgtggagagggggtgcctggtgtcttctttctctctctgcccccaccaagtgcggacgcatcgagcttcggcccccacccctgcattcgcgattggctcccggaggaggtggctggtgctgccgccgctgcagcatctcctagggagccgcgaccctgcgcccgccgccgctgccgctgtcaccagcccggccccaggggtgccctgggctccgcggctgaggcacctagggagttgcccccctagtggacggcctctcaggagatcctgaccaccctctgggaacctggactcctccaagcatcgtctttctcgcctgcatcttcggagagaggtgctgagcccttcctcatggatacggggtcccgggaggcagccttcaccagggacctgcccaggaaaccagcagatgcccaggtcagccctgaaatgtccattactcacaaagaaaaggaaaatgctcatttgaaagaaattcttctctttgtcaatgctgaggcattctctcagccccagccccacagtgctccagtgtgtgaagggcaacagctgacggggaagttcagcacatctgtgctgaccagggctggaggcgatgccagtccgtgcagctgggaacgcctcctctgctatggctggagccactgctgaagggactccacctggcacctatgccaccaatggcccctgaacgggtatctaggcccacccttaataaagatgagctgctcattccc

SEQ ID NO: 253846 - DNA, 1220 bp, Artificial Sequence
  derived and/or modified sequence
gacccgaggggggcccccacgcccgctctggcctctcaggtcaggccctcccctcccctcccctcccctcccccgcccctgtgtctccgcgagccggctgtgtgcctgcgagagcgtgcacacccgcgggaccttcccttttgttccaccctgacctctaccttctctaccttgtgctgaccccgctggggtgcaggggttcccttcggaggaggccggggctcaaggtgtgcagctcggccgcctctccctaactctgcaccagcgccttctctctctctctctctctctctctctctctctctctctctcaagatctccctcctgctaagtctgcgctgctgcaggagggctgggggaagggcaggggtgtggagagggggtgcctggtgtcttctttctctctctgcccccaccaagtgcggacgcatcgagcttcggcccccacccctgcattcgcgattggctcccggaggaggtggctggtgctgccgccgctgcagcatctcctagggagccgcgaccctgcgcccgccgccgctgccgctgtcaccagcccggccccaggggtgccctgggctccgcggctgaggcacctagggagttgcccccctagtggacggcctctcaggagatcctgaccaccctctgggaacctggactcctccaagcatcgtctttctcgcctgcatcttcggagagaggtgctgagcccttcctcatggatacggggtcccgggaggcagccttcaccagggacctgcccaggaaaccagcagatgcccagctgtagctgtgcattgatggcgccgtgcggcccggccgcaggtcccgcagccgtggagaggacccagcaggtggcgcggggagagcccggctcggcacgtggtcagctccaagtcagccctgaaatgtccattactcacaaagaaaaggaaaatgctcatttgaaagaaattcttctctttgtcaatgctgaggcattctctcagccccagccccacagtgctccagtgtgtgaagggcaacagctgacggggaagttcagcacatctgtgctgaccagggctggaggcgatgccagtccgtgcagctgggaacgcctcctctgctatggctggagccactgctgaagggactccacctggcacctatgccaccaatggcccctgaacgggtatctaggcccacccttaataaagatgagctgctcattccca

SEQ ID NO: 253847 - DNA, 300 bp, Artificial Sequence
  derived and/or modified sequence
atggacaccggcagcagagaggccgccttcaccagagacctgcccagaaagcccgccgacgcccaggtgagccccgagatgagcatcacccacaaggagaaggagaacgcccacctgaaggagatcctgctgttcgtgaacgccgaggccttcagccagccccagccccacagcgcccccgtgtgcgagggccagcagctgaccggcaagttcagcaccagcgtgctgaccagagccggcggcgacgccagcccctgcagctgggagagactgctgtgctacggctggagccactgctag

SEQ ID NO: 253848 - DNA, 354 bp, Artificial Sequence
  derived and/or modified sequence
atgcccagctgcagctgcgccctgatggccccctgcggccccgccgccggccccgccgccgtggagagaacccagcaggtggccagaggcgagcccggcagcgccagaggccagctgcaggtgagccccgagatgagcatcacccacaaggagaaggagaacgcccacctgaaggagatcctgctgttcgtgaacgccgaggccttcagccagccccagccccacagcgcccccgtgtgcgagggccagcagctgaccggcaagttcagcaccagcgtgctgaccagagccggcggcgacgccagcccctgcagctgggagagactgctgtgctacggctggagccactgctag

SEQ ID NO: 253849 - DNA, 300 bp, Artificial Sequence
  derived and/or modified sequence
atggatactggtagccgcgaagccgctttcacgagagacctgcccaggaagcctgcagatgcgcaggtttcccctgagatgagcatcactcacaaggagaaagagaacgcacatcttaaggaaattctgctctttgtgaatgctgaagcattttcccaaccgcagccccattccgcaccggtatgcgaaggccaacagctgactggcaagttctccacgagcgtactgaccagggctgggggcgacgcaagcccctgctcttgggaaagactgctgtgctacggatggtctcactgttag

SEQ ID NO: 253850 - DNA, 300 bp, Artificial Sequence
  derived and/or modified sequence
atggatactggctcccgggaggctgccttcactagggaccttcctcgaaagccagcagacgcacaagtaagcccagaaatgagcattactcacaaagagaaggagaatgcccacctgaaagagatactgctctttgtaaacgccgaggcttttagtcagccccaaccccattctgcgccagtgtgcgaaggtcaacagcttaccggaaagttttcgacctcagtccttacccgggctggcggagatgccagcccttgttcttgggagcgcctcctctgctatgggtggagccactgctag

SEQ ID NO: 253851 - DNA, 354 bp, Artificial Sequence
  derived and/or modified sequence
atgcctagctgcagctgcgccctgatggccccgtgtggtcccgctgctggacctgcagccgtcgagagaacacagcaagtggcaagaggcgagccagggtcagcccggggccagttgcaggttagcccggagatgagcataacacacaaagaaaaagagaatgcccacctgaaagagatcctattattcgtgaacgctgaggctttctcacagccgcaaccccacagcgccccagtgtgtgaggggcagcagcttactggtaaattctctacgagcgtgctgacacgcgccgggggggatgcctccccttgctcttgggaacgactgctttgttatggttggagtcactgctag

SEQ ID NO: 253852 - DNA, 300 bp, Artificial Sequence
  derived and/or modified sequence
atggacaccggcagccgggaggccgccttcacccgggacctgcccaggaagccagcagatgcccaggtgtccccagagatgagcatcacccacaaggagaaggaaaatgcccacctgaaggagatcctgctgtttgtgaatgctgaggccttcagccagccccagccccacagcgcccctgtgtgtgagggccagcagctgaccgggaagttcagcacctctgtgctgaccagggctggaggagatgccagcccctgctcctgggagcggctgctgtgctacggctggagccactgctag

SEQ ID NO: 253853 - DNA, 354 bp, Artificial Sequence
  derived and/or modified sequence
atgcccagctgcagctgtgccctgatggccccctgtggccctgctgctggccctgctgctgtggagaggacccagcaggtggcccggggggagcccggcagcgcccggggccagctgcaggtgtccccagagatgagcatcacccacaaggagaaggaaaatgcccacctgaaggagatcctgctgtttgtgaatgctgaggccttcagccagccccagccccacagcgcccctgtgtgtgagggccagcagctgaccgggaagttcagcacctctgtgctgaccagggctggaggagatgccagcccctgctcctgggagcggctgctgtgctacggctggagccactgctag

SEQ ID NO: 253854 - DNA, 300 bp, Artificial Sequence
  derived and/or modified sequence
atggacaccggcagccgggaggccgccttcacccgggacctgcccaggaagccggctgacgcgcaagtgtccccggagatgagcattacacacaaggagaaagagaatgcccatttgaaggaaatcctgctgtttgttaacgccgaggccttttcgcagccccaacctcacagtgcaccggtttgcgaagggcagcagctcaccggtaaattttcgacatcagtgcttacacgggcaggcggggatgcgtccccttgctcctgggagaggctgctctgttatgggtggtcccactgctag

SEQ ID NO: 253855 - DNA, 300 bp, Artificial Sequence
  derived and/or modified sequence
atggacaccggcagccgggaggccgccttcacccgggacctgcccagaaaacctgcggatgctcaggtttcccccgagatgtcaatcactcacaaagagaaagagaacgcacatctgaaagaaattctgctgttcgtcaatgccgaggcattcagccagccacagcctcacagcgctccagtctgcgagggtcaacaattgacaggaaaattctccacctcagtgctcacacgtgctggtggcgatgcttctccttgtagttgggaacgcttgttgtgctacggctggtcgcattgctag

SEQ ID NO: 253856 - DNA, 354 bp, Artificial Sequence
  derived and/or modified sequence
atgcccagctgcagctgcgccctgatggccccctgcggccccgccgctggacccgccgccgtcgaacgcacacagcaagtcgccaggggcgaacctggctccgctaggggccaactacaagtatctccagagatgtccatcacacacaaggagaaggagaacgcacacctgaaagagattctgctgttcgtcaatgctgaggcattttcacaaccgcagccgcacagtgcacccgtatgtgagggtcagcagctgactggaaagttttccacttctgtgctgacccgtgccgggggcgatgcgtctccatgctcctgggaacgacttctgtgctatgggtggtcccattgctag

SEQ ID NO: 253857 - DNA, 300 bp, Artificial Sequence
  derived and/or modified sequence
atggatactggcagcagggaggccgctttcactagggatctccctcgaaagcctgctgatgcacaagtgtccccagaaatgtccataactcacaaagaaaaagaaaatgcccacctgaaggaaattcttctgtttgttaatgctgaagcatttagccagccccagccacatagcgccccagtctgtgagggccagcagcttacaggaaagttctcgacaagtgtgctgactagagcaggaggagatgccagcccttgtagttgggaaaggctgctttgttatggatggtcacactgctag

SEQ ID NO: 253858 - DNA, 300 bp, Artificial Sequence
  derived and/or modified sequence
atggacaccggctcacgggaggccgcattcacacgcgatttgccacggaagcccgctgacgcacaggtgagtccggagatgagtattacacataaggaaaaggagaacgctcacctgaaagaaatcctgcttttcgttaatgctgaagcgttcagtcagccccagccacactcagctcctgtctgcgaaggtcagcagctcaccggtaagttcagtacatccgtgctcacacgggcagggggagacgcctcgccatgttcctgggaaagacttctttgctatggatggagtcactgctag

SEQ ID NO: 253859 - DNA, 354 bp, Artificial Sequence
  derived and/or modified sequence
atgccctcctgcagctgcgcactcatggcgccatgtggccctgccgctgggcctgccgctgtggagcgaactcagcaggttgcgaggggggagcccggatcagcgagaggccagctccaggtttcccccgaaatgagcatcacccataaagaaaaggaaaatgctcacctgaaggagatcctgctgttcgtgaacgcggaggcctttagccagccccagccgcattccgcacccgtctgcgagggacagcaattgacaggtaaattttccacaagcgttctgactcgcgctggaggcgacgcatccccatgttcctgggaacggttgctgtgttacggttggagtcactgttag

SEQ ID NO: 253860 - protein, 254 aa, Artificial Sequence
  derived and/or modified sequence
MMCPLWRLLIFLGLLALPLAPHKQPWPGLAQAHRDNKSTLARIIAQGLIKHNAESRIQNIHFGDRLNASAQVAPGLVGWLISGRKHQQQQESSINITNIQLDCGGIQISFHKEWFSANISLEFDLELRPSFDNNIVKMCAHMSIVVEFWLEKDEFGRRDLVIGKCDAEPSSVHVAILTEAIPPKMNQFLYNLKENLQKVLPHMVESQVCPLIGEILGQLDVKLLKSLIEQEAAHEPTHHETSQPSACQAGESPS

SEQ ID NO: 253861 - DNA, 765 bp, Artificial Sequence
  derived and/or modified sequence
atgatgtgccccctgtggaggctcctcattttcttggggcttctggcactgccattagctccccacaagcagccctggccgggactggcgcaagcccatagagataacaagtctactctggctcgaattattgctcaaggcctcatcaaacataatgctgagtccagaatccagaatatccatttcggtgatcgactgaacgcttccgctcaagtcgctcctgggttggtcggttggctaatttcgggccgaaaacatcaacagcagcaggagtcatcaatcaatatcaccaatatacagttggattgcgggggtatccagatctcctttcataaggagtggttctccgccaatatctcgcttgaattcgatttggagctcaggccatcttttgacaacaacattgtcaaaatgtgcgcccatatgagtattgtggtggaattctggctggagaaagatgagtttgggaggcgtgatcttgtaattggaaaatgtgatgctgagccaagcagtgtccatgtcgctattctcactgaggcgatccccccaaaaatgaaccagtttctgtacaatctcaaagagaatctgcagaaagtgttgccccatatggtagagtcacaggtttgccctctgataggggagatactaggccaactggacgtgaagctgttaaaatcgctgatcgagcaggaggcagctcacgaacctacccatcatgagacttcacagccttctgcctgtcaagccggtgaatcgccaagctag

SEQ ID NO: 253862 - DNA, 765 bp, Artificial Sequence
  derived and/or modified sequence
atgatgtgtcccttatggagactgttaatatttctcgggcttctcgccctcccactcgccccacacaagcagccatggccaggcttagcacaggcccaccgggacaacaagagcacacttgcccgtatcattgcccagggtctgataaagcataatgcggagagcaggatccaaaatattcactttggcgatagactgaatgcttccgctcaggtcgctccgggtttggtagggtggctcatcagtggccggaaacaccagcagcagcaggagtcatctatcaatataacgaatatccagcttgattgtggcggcattcaaatatccttccacaaagagtggtttagcgccaatatcagtttagaatttgaccttgaacttcgaccaagctttgataacaatatagttaaaatgtgtgctcacatgtcaattgttgtggaattctggctagagaaagacgagtttgggcgccgagacttggtgataggcaaatgcgacgctgaacccagttctgtgcatgtcgctatcctgacagaagcaatcccccccaagatgaatcagttcctgtataacctgaaggagaacctgcaaaaagtactgccacacatggtagaatcccaggtctgccccctaattggtgagatcctaggccagttggacgtgaagcttcttaaatctctgattgaacaggaggccgcacacgagcctacgcatcacgaaacctctcagccctccgcctgtcaggctggcgagtcacccagttag

SEQ ID NO: 253863 - DNA, 765 bp, Artificial Sequence
  derived and/or modified sequence
atgatgtgtcccctttggcgactgctcatttttttaggccttctggcactgccccttgctccccataaacaaccttggccggggctcgcccaagctcatagagataacaaatcgaccctagcgcgcatcattgcacagggcctgatcaagcataacgcagaaagtcgaattcagaatatacacttcggcgacaggttaaacgcatcagcacaagtagcccccggcctggtgggctggctgataagcggccgaaaacaccagcagcaacaagagtcctctatcaacatcactaacatccaacttgattgtggcggcattcaaatatccttccacaaagagtggtttagcgccaatatcagtttagaatttgaccttgaacttcgaccaagctttgataacaatatagttaaaatgtgtgctcacatgtcaattgttgtggaattctggctagagaaagacgagtttgggcgccgagacttggtgataggcaaatgcgacgctgaacccagttctgtgcatgtcgctatcctgacagaagcaatcccccccaagatgaatcagttcctgtataacctgaaggagaacctgcaaaaagtactgccacacatggtcgagtcacaggtgtgccctcttattggcgagatcttaggccagctggacgttaagttattgaagagccttatcgagcaggaggccgctcacgaacctacccatcacgagacttcacagcccagtgcgtgtcaagcaggggagagcccatcctag

SEQ ID NO: 253864 - DNA, 765 bp, Artificial Sequence
  derived and/or modified sequence
atgatgtgccccctgtggagactgctgatcttcctgggcctgctggccctgcccctggccccccacaagcagccctggcccggcctggcccaggcccacagagacaacaagagcaccctggccagaatcatcgcccagggcctgatcaagcacaacgccgagagcagaatccagaacatccacttcggcgacagactgaacgccagcgcccaggtggcccccggcctggtgggctggctgatcagcggcagaaagcaccagcagcagcaggagagcagcatcaacatcaccaacatccagctggactgcggcggcatccagatcagcttccacaaggagtggttcagcgccaacatcagcctggagttcgacctggagctgagacccagcttcgacaacaacatcgtgaagatgtgcgcccacatgagcatcgtggtggagttctggctggagaaggacgagttcggcagaagagacctggtgatcggcaagtgcgacgccgagcccagcagcgtgcacgtggccatcctgaccgaggccatcccccccaagatgaaccagttcctgtacaacctgaaggagaacctgcagaaggtgctgccccacatggtggagagccaggtgtgccccctgatcggcgagatcctgggccagctggacgtgaagctgctgaagagcctgatcgagcaggaggccgcccacgagcccacccaccacgagaccagccagcccagcgcctgccaggccggcgagagccccagctag

SEQ ID NO: 253865 - DNA, 765 bp, Artificial Sequence
  derived and/or modified sequence
atgatgtgcccactctggcgactgctgattttcctggggctgctagccctgccgctagccccacacaaacagccttggcctggcttggctcaggcccatagggacaacaagagtacactggctcgcattattgctcagggtctcattaaacacaacgccgagtccaggatccagaacatccatttcggggacaggctgaacgcctctgcacaggtggcaccaggtcttgttgggtggttgataagtgggcgcaagcaccaacagcagcaggagtccagcatcaacatcactaacattcagctcgactgtggcggcattcaaatctccttccacaaagagtggttctcagccaacatcagcctggaatttgacctggaactgcgcccgtcttttgataacaacattgtcaagatgtgcgctcacatgagcatagtggtggagttctggctggaaaaagatgagtttgggcgtagggatctggttattgggaaatgtgatgccgagccatcatccgtgcacgtagctatacttaccgaggcaatccctcctaaaatgaaccaatttctctacaacctgaaagaaaatctgcagaaggtgctgccccacatggtcgagagtcaggtctgcccgctcattggagagatccttgggcagctagatgtcaaacttctcaagtccctcattgagcaggaagcagcccatgaacccacccaccacgagacttcccagccgtccgcctgccaagccggagagagtccgagttag

SEQ ID NO: 253866 - DNA, 765 bp, Artificial Sequence
  derived and/or modified sequence
atgatgtgccccctgtggaggctgctgatcttcctgggcctgctggccctgcccctggccccccacaagcagccctggccaggcctggcccaggcccaccgggacaacaagagcaccctggcccgcatcatcgcccagggcctcatcaagcacaatgctgagagccgcatccagaacatccactttggagaccggctgaatgccagcgcccaggtggcccctggcctggtgggctggctgatcagcggcaggaagcaccagcagcagcaggagagcagcatcaacatcaccaacatccagctggactgtggcggcatccagatctccttccacaaggagtggttcagcgccaacatcagcctggagtttgacctggagctgcggcccagctttgacaacaacatcgtgaagatgtgtgcccacatgagcatcgtggtggagttctggctggagaaggatgaatttggaagaagagacctggtgattggaaaatgtgatgctgagcccagctctgtgcacgtggccatcctgacagaggccatcccccccaagatgaaccagttcctgtacaacctgaaggagaacctgcagaaggtgctgccccacatggtggagagccaggtgtgccccctcatcggggagatcctgggccagctggatgtgaagctgctgaagagcctcatcgagcaggaggccgcccacgagcccacccaccacgagaccagccagcccagcgcctgccaggccggggagagccccagctag

SEQ ID NO: 253867 - DNA, 1116 bp, Artificial Sequence
  derived and/or modified sequence
ccagggttccacatgttgctctcccaatgtgagcaagccctggtggcagcgccagggtccagtgcagcccctccccacagcatgctgggggctaattctgatgtcatctttctgcagaaaaccattagaccatccctccagactgccaccctcaaagccgtctgcccaggccccatctgacactcttgacatctgcaggtcccagaccctatgatgtgtccactctggaggctcctcatcttcctcgggttgctggccttgcccttggcaccacacaagcagccttggcctggcctggcccaagcccacagagacaacaaatccaccctggcaagaattattgctcagggcctcataaagcacaacgcagaaagccgaattcagaacatccactttggggacagactgaatgcctcagcacaagtggccccagggctggtgggctggctaatcagcggcaggaaacaccagcagcagcaagagagcagcatcaacatcaccaacattcagctggactgtggtgggatccagatatcattccataaggagtggttctcggcaaatatctcacttgaatttgaccttgaattgagaccgtccttcgataacaacatcgtaaagatgtgtgcacatatgagcatcgttgtggagttctggctggagaaagacgagtttggccggagggatctggtgataggcaaatgcgatgcagagcccagcagtgtccatgtggccatcctcactgaggctatcccaccaaagatgaatcagtttctctacaacctcaaagagaatctgcaaaaagttctcccacacatggtagaaagtcaggtatgtcctctgatcggtgaaatcctcgggcagctggatgtgaaactgttgaaaagcctcatagaacaggaggctgctcatgaaccaacccaccatgaaaccagccaaccctctgcatgccaggctggagagtcccccagctgacttctgctgatcagaaggaaagtccacatcttgcaaccttaagtctcccttagagtggggcttctgctaccctaaaaactttaccccaggctctgtggacataccatcctctcctacaataaactctagctctgaagggtg

SEQ ID NO: 253868 - DNA, 765 bp, Artificial Sequence
  derived and/or modified sequence
atgatgtgccccctgtggcggctgctgatcttcctgggcctgctggctcttcctctcgcaccccataaacagccatggccaggcctagctcaggcccatagggacaacaaatccacccttgcccgcataatagcacagggtcttattaaacacaacgccgagagcaggatccagaatatccacttcggggaccggctgaatgcatctgcccaagtggctcctggtcttgtgggctggctcattagcggtaggaagcatcagcagcagcaagagtcttctattaacattaccaatattcagctggattgtggaggcatccaaatcagtttccacaaggaatggttcagtgccaatatatctctggaatttgacctcgaactgcgtcccagctttgacaataatatcgtgaagatgtgtgcacacatgagcatagtggtagagttttggctggaaaaggatgagttcgggaggcgggacctggtgatcggcaagtgtgacgctgaacccagctccgtacatgtggcaattctcaccgaggctatcccccccaagatgaaccagtttctctataatttgaaagagaatttgcagaaagtgctgccccacatggtcgagtcccaagtttgtccattgataggcgagatcttgggtcaattggatgtcaagctacttaagtcactgatcgaacaggaggccgctcatgaacccacccatcacgagacctctcagcctagtgcctgtcaggcaggagagtctccgagctag

SEQ ID NO: 253869 - RNA, 765 nt, Artificial Sequence
  derived and/or modified sequence
augaugugucccuuauggagacuguuaauauuucucgggcuucucgcccucccacucgccccacacaagcagccauggccaggcuuagcacaggcccaccgggacaacaagagcacacuugcccguaucauugcccagggucugauaaagcauaaugcggagagcaggauccaaaauauucacuuuggcgauagacugaaugcuuccgcucaggucgcuccggguuugguaggguggcucaucaguggccggaaacaccagcagcagcaggagucaucuaucaauauaacgaauauccagcuugauuguggcggcauucaaauauccuuccacaaagagugguuuagcgccaauaucaguuuagaauuugaccuugaacuucgaccaagcuuugauaacaauauaguuaaaaugugugcucacaugucaauuguuguggaauucuggcuagagaaagacgaguuugggcgccgagacuuggugauaggcaaaugcgacgcugaacccaguucugugcaugucgcuauccugacagaagcaaucccccccaagaugaaucaguuccuguauaaccugaaggagaaccugcaaaaaguacugccacacaugguagaaucccaggucugcccccuaauuggugagauccuaggccaguuggacgugaagcuucuuaaaucucugauugaacaggaggccgcacacgagccuacgcaucacgaaaccucucagcccuccgccugucaggcuggcgagucacccaguuag

SEQ ID NO: 253870 - RNA, 765 nt, Artificial Sequence
  derived and/or modified sequence
augauguguccccuuuggcgacugcucauuuuuuuaggccuucuggcacugccccuugcuccccauaaacaaccuuggccggggcucgcccaagcucauagagauaacaaaucgacccuagcgcgcaucauugcacagggccugaucaagcauaacgcagaaagucgaauucagaauauacacuucggcgacagguuaaacgcaucagcacaaguagcccccggccuggugggcuggcugauaagcggccgaaaacaccagcagcaacaagaguccucuaucaacaucacuaacauccaacuugauuguggcggcauucaaauauccuuccacaaagagugguuuagcgccaauaucaguuuagaauuugaccuugaacuucgaccaagcuuugauaacaauauaguuaaaaugugugcucacaugucaauuguuguggaauucuggcuagagaaagacgaguuugggcgccgagacuuggugauaggcaaaugcgacgcugaacccaguucugugcaugucgcuauccugacagaagcaaucccccccaagaugaaucaguuccuguauaaccugaaggagaaccugcaaaaaguacugccacacauggucgagucacaggugugcccucuuauuggcgagaucuuaggccagcuggacguuaaguuauugaagagccuuaucgagcaggaggccgcucacgaaccuacccaucacgagacuucacagcccagugcgugucaagcaggggagagcccauccuag

SEQ ID NO: 253871 - protein, 335 aa, Artificial Sequence
  derived and/or modified sequence
MESSFSFGVILAVLASLIIATNTLVAVAVLLLIHKNDGVSLCFTLNLAVADTLIGVAISGLLTDQLSSPSRPTQKTLCSLRMAFVTSSAAASVLTVMLITFDRYLAIKQPFRYLKIMSGFVAGACIAGLWLVSYLIGFLPLGIPMFQQTAYKGQCSFFAVFHPHFVLTLSCVGFFPAMLLFVFFYCDMLKIASMHSQQIRKMEHAGAMAGGYRSPRTPSDFKALRTVSVLIGSFALSWTPFLITGIVQVACQECHLYLVLERYLWLLGVGNSLLNPLIYAYWQKEVRLQLYHMALGVKKVLTSFLLFLSARNCGPERPRESSCHIVTISSSEFDG

SEQ ID NO: 253872 - DNA, 1008 bp, Artificial Sequence
  derived and/or modified sequence
atggagagcagcttcagcttcggcgtgatcctggccgtgctggccagcctgatcatcgccaccaacaccctggtggccgtggccgtgctgctgctgatccacaagaacgacggcgtgagcctgtgcttcaccctgaacctggccgtggccgacaccctgatcggcgtggccatcagcggcctgctgaccgaccagctgagcagccccagcagacccacccagaagaccctgtgcagcctgagaatggccttcgtgaccagcagcgccgccgccagcgtgctgaccgtgatgctgatcaccttcgacagatacctggccatcaagcagcccttcagatacctgaagatcatgagcggcttcgtggccggcgcctgcatcgccggcctgtggctggtgagctacctgatcggcttcctgcccctgggcatccccatgttccagcagaccgcctacaagggccagtgcagcttcttcgccgtgttccacccccacttcgtgctgaccctgagctgcgtgggcttcttccccgccatgctgctgttcgtgttcttctactgcgacatgctgaagatcgccagcatgcacagccagcagatcagaaagatggagcacgccggcgccatggccggcggctacagaagccccagaacccccagcgacttcaaggccctgagaaccgtgagcgtgctgatcggcagcttcgccctgagctggacccccttcctgatcaccggcatcgtgcaggtggcctgccaggagtgccacctgtacctggtgctggagagatacctgtggctgctgggcgtgggcaacagcctgctgaaccccctgatctacgcctactggcagaaggaggtgagactgcagctgtaccacatggccctgggcgtgaagaaggtgctgaccagcttcctgctgttcctgagcgccagaaactgcggccccgagagacccagagagagcagctgccacatcgtgaccatcagcagcagcgagttcgacggctag

SEQ ID NO: 253873 - DNA, 1193 bp, Artificial Sequence
  derived and/or modified sequence
tgaacccacagctcctctgcccctggcccatgagaatttcagctggagagatagcatgccctggtaagtgaagtcctgccacttcgagacatggaatcatctttctcatttggagtgatccttgctgtcctggcctccctcatcattgctactaacacactagtggctgtggctgtgctgctgttgatccacaagaatgatggtgtcagtctctgcttcaccttgaatctggctgtggctgacaccttgattggtgtggccatctctggcctactcacagaccagctctccagcccttctcggcccacacagaagaccctgtgcagcctgcggatggcatttgtcacttcctccgcagctgcctctgtcctcacggtcatgctgatcacctttgacaggtaccttgccatcaagcagcccttccgctacttgaagatcatgagtgggttcgtggccggggcctgcattgccgggctgtggttagtgtcttacctcattggcttcctcccactcggaatccccatgttccagcagactgcctacaaagggcagtgcagcttctttgctgtatttcaccctcacttcgtgctgaccctctcctgcgttggcttcttcccagccatgctcctctttgtcttcttctactgcgacatgctcaagattgcctccatgcacagccagcagattcgaaagatggaacatgcaggagccatggctggaggttatcgatccccacggactcccagcgacttcaaagctctccgtactgtgtctgttctcattgggagctttgctctatcctggacccccttccttatcactggcattgtgcaggtggcctgccaggagtgtcacctctacctagtgctggaacggtacctgtggctgctcggcgtgggcaactccctgctcaacccactcatctatgcctattggcagaaggaggtgcgactgcagctctaccacatggccctaggagtgaagaaggtgctcacctcattcctcctctttctctcggccaggaattgtggcccagagaggcccagggaaagttcctgtcacatcgtcactatctccagctcagagtttgatggctaagacggtaagggcagagaagtttcaaagtgcctttctcctccccactctggagccccaactagatcagcaggagctagggggatgagagcacttgc

SEQ ID NO: 253874 - DNA, 1008 bp, Artificial Sequence
  derived and/or modified sequence
atggaatccagcttttctttcggcgttatcctggccgtcctggccagcttaattatcgctacaaacacgctcgtggctgttgccgtactgctgctgatccataagaatgacggcgtcagcctttgcttcactctgaacctggccgtcgctgacactctgatcggcgtcgctatctcaggcttgcttacagatcagttgtccagcccgtctaggcccacgcagaagaccctgtgttctctcaggatggcgttcgtcacttcaagtgcggccgcatctgtgcttacagtgatgctgattacctttgataggtacttggccataaaacaacctttcagatatttgaaaattatgtcaggattcgtcgcaggggcatgcattgccggactctggctcgtctcctatctgattggatttctgcctctggggatccccatgtttcagcaaaccgcgtacaaaggccagtgctcatttttcgcggtcttccacccacactttgttctcactctgagctgcgttggtttctttcctgctatgctgttgttcgtgtttttttattgtgacatgctgaaaatagcaagtatgcatagtcagcaaatccgaaagatggaacatgcaggcgctatggccggtgggtacagaagccccagaacaccatctgattttaaggccctccgcaccgtgtctgtgttgataggatcctttgctctgagttggacgcccttcttgattaccggtatagttcaggtcgcctgtcaggaatgtcatctgtacctagtgttagaacgctatctgtggttgctgggggtgggaaatagccttctgaatccgctgatctatgcttactggcaaaaggaggtgcggttgcagctgtaccatatggctttaggagtaaaaaaagtgctgaccagcttcctgctgttcctctcagcaagaaattgcggacccgaaagacccagggagtcatcctgtcacatcgtgaccatttcctccagcgagttcgatggctag

SEQ ID NO: 253875 - DNA, 1008 bp, Artificial Sequence
  derived and/or modified sequence
atggagagcagcttctcctttggagtcatcctggccgtgctggccagcctcatcatcgccaccaacaccctggtggccgtggccgtgctgctgctgatccacaagaatgatggagtgtccctgtgcttcaccctgaacctggccgtggccgacaccctcatcggcgtggccatcagcggcctgctgacagaccagctgagcagccccagccggcccacccagaagaccctgtgcagcctgaggatggcctttgtgaccagcagcgctgctgcctctgtgctgactgtgatgctgatcacctttgaccgctacctggccatcaagcagcccttccgctacctgaagatcatgagcggctttgtggccggggcctgcatcgccggcctgtggctggtgtcctacctgattggcttcctgcccctgggcatccccatgttccagcagacagcctacaagggccagtgcagcttctttgctgtgttccacccccactttgtgctgaccctgagctgtgtgggcttcttccctgccatgctgctgtttgtgttcttctactgtgacatgctgaagatcgcctccatgcacagccagcagatcaggaagatggagcacgccggggccatggccggcggctaccgcagccccaggacccccagcgacttcaaggccctgaggacagtgtctgtgctgattggcagctttgccctgtcctggacccccttcctgatcaccggcatcgtgcaggtggcctgccaggagtgccacctgtacctggtgctggagcgctacctgtggctgctgggcgtgggcaacagcctgctgaaccccctcatctatgcctactggcagaaggaggtgcggctgcagctgtaccacatggccctgggcgtgaagaaggtgctgaccagcttcctgctcttcctgagcgccaggaactgtggccctgagcggccccgggagagcagctgccacatcgtgaccatcagcagcagcgagtttgatggatag

SEQ ID NO: 253876 - DNA, 1008 bp, Artificial Sequence
  derived and/or modified sequence
atggagagcagcttcagcttcggcgtgatcctggccgtgctggcctcattaatcatcgccacgaatacactcgtggccgtggccgtcctcctgctcatccacaagaacgacggagtgtccctgtgctttacactgaatcttgccgtagcagatacgttaatcggtgtcgcgatctccgggctgttgactgatcaattgagctcgccgtccaggcctacccagaaaactctgtgttccctgaggatggctttcgtgacctcttctgctgcagctagcgtactcaccgtaatgcttatcaccttcgacaggtacttggcaataaaacagcctttccggtatctgaaaattatgtctggctttgtggcgggggcttgtatcgcaggtctgtggctggttagctacttaatagggtttctgcctctgggaatccctatgttccagcagactgcctacaaggggcagtgctccttctttgctgtatttcacccccactttgtgttaaccctttcatgcgttggtttttttcccgccatgctgctcttcgtgtttttctactgcgatatgctgaaaattgctagtatgcattcccagcagatacgcaaaatggagcacgctggggctatggccggcgggtatcggtctcctcgcactccatcggacttcaaggcactgcggaccgtgtctgtgctgataggcagtttcgcgttgagctggacgccatttcttattacaggcatagtgcaggtggcatgtcaagaatgtcacctgtacctcgtcctcgaaagatatctgtggctgttgggcgtcgggaatagcctgctgaaccccctgatctatgcctactggcaaaaggaagtgaggctgcagttgtaccatatggcccttggcgtaaagaaagtcctgactagtttcctgctgtttctgtctgcacggaactgtggtcctgagaggccgagagagagtagctgtcacattgtgaccatctcctcctctgaatttgatggatag

SEQ ID NO: 253877 - DNA, 1008 bp, Artificial Sequence
  derived and/or modified sequence
atggagtcctcgttttcattcggcgttattctcgcagtattggcttctcttattattgctactaacactttggtcgccgtagctgtcctcctgctcatacacaagaacgacggtgtttccctctgctttaccctaaaccttgcggtcgccgatacactcattggtgtggccataagtggtctgcttactgatcagttgtcatccccttcgcgtcccacacagaaaactctctgcagcctgaggatggctttcgtgacgtcgtccgcggctgcctcagtgctgacagtgatgcttatcactttcgacagatacctggccatcaaacaacccttccgctatctcaaaatcatgtccggattcgttgccggtgcctgtattgctgggctgtggcttgtctcttacctcattggatttttgcccctcggcatacccatgttccagcagactgcatacaagggccagtgctccttcttcgctgtgtttcatcctcattttgtgctgactctgtcttgcgttgggtttttccccgcaatgctcctctttgtgtttttctattgtgacatgctgaaaatcgcctcaatgcatagccagcagatcaggaagatggaacatgcaggggctatggccggagggtaccgctctccccgaacacccagcgattttaaagccctgagaacagtgtccgtactgattggatcctttgccttgtcatggactccattcctcatcactggcattgtacaagttgcatgccaggaatgtcatctgtatctcgtcctcgaacgctatctctggttactgggcgtgggcaattctcttcttaatccccttatctacgcatattggcagaaagaggtgcgtttgcagctgtaccacatggctttgggtgtaaagaaagtcctcactagcttcctgttgtttcttagcgcacgaaattgtggtcctgaacgcccacgggagagtagttgtcacatcgtgactatctcttcatctgaattcgacggctag

SEQ ID NO: 253878 - protein, 156 aa, Artificial Sequence
  derived and/or modified sequence
MWKRSDHQPKIKAEDGPLVGQFEVLGSVPEPAMPHPLELSEFESFPVFQDIRLHIREVGAQLVKKVNAVFQLDITKNGKTILRWTIDLKNGSGDMYPGPARLPADTVFTIPESVFMELVLGKMNPQKAFLAGKFKVSGKVLLSWKLERVFKDWAKF

SEQ ID NO: 253879 - DNA, 664 bp, Artificial Sequence
  derived and/or modified sequence
ctttgatgtcacaatctgacctgtgggtattaatctggtcacagctgctcacagactagatggcaaggtccaggggactagcacaggaagatgtggaagagaagtgaccatcaacccaagatcaaagcagaggatggacctctggtgggccagttcgaggttctgggttcagttccagaacctgccatgccacatcctctagagctgtcagaatttgagagcttcccagtgtttcaggacattaggcttcacatcagggaagtgggagctcaattggtcaagaaagtcaatgccgtctttcagctggacatcaccaaaaatgggaagaccattttgcggtggaccattgatctgaagaatggttctggggacatgtatccgggacctgccaggctcccagcagacactgtctttacaatcccggagtctgtctttatggagctggttttgggcaaaatgaacccgcagaaggctttccttgccggaaagttcaaagtgagtggcaaggttctgcttagctggaagctggaaagggttttcaaagactgggctaaattttaagcatgcaaaaataccaaggaagaacttctcttcgatgataatgtcgagtggaaatcatgcttaatctgaagattaaagtaaaaagtatccaatatttttactc

SEQ ID NO: 253880 - DNA, 471 bp, Artificial Sequence
  derived and/or modified sequence
atgtggaagagaagcgaccaccagcccaagatcaaggccgaggacggccccctggtgggccagttcgaggtgctgggcagcgtgcccgagcccgccatgccccaccccctggagctgagcgagttcgagagcttccccgtgttccaggacatcagactgcacatcagagaggtgggcgcccagctggtgaagaaggtgaacgccgtgttccagctggacatcaccaagaacggcaagaccatcctgagatggaccatcgacctgaagaacggcagcggcgacatgtaccccggccccgccagactgcccgccgacaccgtgttcaccatccccgagagcgtgttcatggagctggtgctgggcaagatgaacccccagaaggccttcctggccggcaagttcaaggtgagcggcaaggtgctgctgagctggaagctggagagagtgttcaaggactgggccaagttctag

SEQ ID NO: 253881 - DNA, 471 bp, Artificial Sequence
  derived and/or modified sequence
atgtggaagaggtcagatcaccagcctaagatcaaggcagaagatggcccattggtcgggcagttcgaggtgcttggcagtgtgcctgagcccgccatgccgcatcccctcgaactatcagaattcgagagctttcctgtgtttcaggatatcagactacatatcagggaagtcggcgcacagctggttaagaaggtgaatgccgtttttcagttagacatcacaaaaaatgggaagacaatccttagatggacaattgatctcaaaaacggaagcggcgacatgtaccccgggcccgctcggctgcctgctgacaccgtgtttacgatcccagagagtgtgtttatggagttagtgttgggaaaaatgaaccctcagaaagccttcctagcagggaaattcaaagtctctggtaaggtgctgttaagctggaaactcgagcgggtattcaaagattgggccaagttttag

SEQ ID NO: 253882 - DNA, 471 bp, Artificial Sequence
  derived and/or modified sequence
atgtggaagagaagtgaccaccagcccaagatcaaggccgaggatggccccctggtgggccagtttgaggtgctgggctctgtgcctgagcccgccatgccccaccccctggagctgtctgaatttgagagcttccctgtgttccaggacatccggctgcacatccgggaggtgggcgcccagctggtgaagaaggtgaatgctgtgttccagctggacatcaccaagaatggcaagaccatcctgcgctggaccatcgacctgaagaatggcagcggggacatgtacccaggccctgcccggctgcctgctgacaccgtcttcaccatccctgagagcgtcttcatggagctggtgctgggcaagatgaacccccagaaggccttcctggccggcaagttcaaggtgtctgggaaggtgctgctgtcctggaagctggagagggtcttcaaggactgggccaagttctag

SEQ ID NO: 253883 - DNA, 471 bp, Artificial Sequence
  derived and/or modified sequence
atgtggaagcggagcgaccaccagcccaagatcaaggccgaggacggacctctggtcggacaatttgaggtgctgggctcagtgccggagcccgccatgcctcatccactcgagctttctgaattcgagagcttcccggtgttccaagatattcgtctacatattcgggaggtcggcgcgcagctggtgaagaaggtcaacgccgtgttccaactcgatataacaaaaaacgggaagacaattcttcggtggactattgacctaaaaaatggtagtggcgatatgtaccctggaccggctaggcttccagctgacactgtatttactattcccgagagcgtattcatggaactggtccttggaaaaatgaatccccagaaagcgtttttggccggcaagtttaaagtgagtggtaaagttctgctttcctggaagttggagagagtattcaaagactgggcaaaattttag

SEQ ID NO: 253884 - DNA, 471 bp, Artificial Sequence
  derived and/or modified sequence
atgtggaaaagatctgatcaccaacccaagatcaaggccgaggacggccctttagtgggccagttcgaagtgctcgggagcgtgcccgagccggcaatgccccacccactcgaactttcggagtttgagtcctttcctgtgtttcaagacatccggctgcatattcgggaggtgggcgcacaactggtgaaaaaggtcaatgccgtctttcaactggacattaccaaaaatggcaaaactatattacggtggaccattgatctaaagaacggctctggcgatatgtatcctggacccgcacggctgcccgcagataccgtgttcacaatcccggagtctgtatttatggaactcgtcctgggaaagatgaacccccagaaagcgttcctcgccggaaaatttaaagtctccggtaaggtactgctctcctggaaactggagcgagtttttaaagactgggccaaattttag

SEQ ID NO: 253885 - protein, 253 aa, Artificial Sequence
  derived and/or modified sequence
MPLLPSTVGLAGLLFWAGQAVNALIMPNATPAPAQPESTAMRLLSGLEVPRYRRKRHISVRDMNALLDYHNHIRASVYPPAANMEYMVWDKRLARAAEAWATQCIWAHGPSQLMRYVGQNLSIHSGQYRSVVDLMKSWSEEKWHYLFPAPRDCNPHCPWRCDGPTCSHYTQMVWASSNRLGCAIHTCSSISVWGNTWHRAAYLVCNYAIKGNWIGESPYKMGKPCSSCPPSYQGSCNSNMCFKGLKSNKFTWF

SEQ ID NO: 253886 - DNA, 1377 bp, Artificial Sequence
  derived and/or modified sequence
tgggcatctggaccagagctgcatctggaggtctttgccaagttcccaggaggcagcatcctctgggtcggcactgttggagaacgctcagggtctggtgctctcgtgcctgccccttccaggcagccggctctgattgcacaaggcagacctgtgactcctccatccagctatgcccctgctgcccagcaccgtgggcctggcaggcctgctcttctgggctggccaggcagtgaacgccttgataatgcctaatgctaccccagccccggcccagcccgagagcacggctatgcggctcctgagtggcctggaggtgcccaggtaccgccggaagcgccacatctctgtgagagacatgaatgccttactggattatcacaaccacatccgggccagtgtgtacccacctgccgccaacatggaatacatggtctgggacaagcggctggccagggctgccgaagcctgggccacccagtgcatctgggcacatgggccttcacagctgatgagatacgtgggccagaacctctccatccattctggccagtaccggtccgtagtggatctcatgaagtcctggtctgaggagaagtggcattacttgtttccggccccaagggactgtaacccacactgcccctggcgctgcgatggccccacctgctcccattatacccagatggtgtgggcatcctccaatcggctgggctgtgccatccacacctgtagtagcatcagtgtctggggcaacacctggcatcgggcggcatacctggtctgcaactatgccattaagggcaactggattggcgagtccccgtacaagatgggaaagccgtgctcctcctgtccccccagttatcaaggcagctgcaatagcaacatgtgcttcaaggggctgaaatccaacaagttcacgtggttctgaattttctctgggctttggtgcgcctccagctgggcctgaccctccatgtcctgccctcaaaaaactgggtggagaaataattgtttctttaaaggatatgagttagaatcaccccctgttgaattttccctcctagatccccttcttaaatgtccaacatgggtcaaaagaaaatgacctccttgccttccttctttcctagttgcatctttcttttcttgggcctctgggaaagagccctgcatctttcattaattcggttctcagagaaccaaggctggaaggcatagaactggcaccttgggaccaggcataatggctcacacctataatcccagtattttgggaggctgaggtgggagaatcacttgagtcctggagttggagaacagcctggaaagcctggcgataccccatctctatttagaaacaaacaaacaaac

SEQ ID NO: 253887 - DNA, 762 bp, Artificial Sequence
  derived and/or modified sequence
atgcccctgctgcccagcaccgtgggcctggccggcctgctgttctgggccggccaggccgtgaacgccctgatcatgcccaacgccacccccgcccccgcccagcccgagagcaccgccatgagactgctgagcggcctggaggtgcccagatacagaagaaagagacacatcagcgtgagagacatgaacgccctgctggactaccacaaccacatcagagccagcgtgtacccccccgccgccaacatggagtacatggtgtgggacaagagactggccagagccgccgaggcctgggccacccagtgcatctgggcccacggccccagccagctgatgagatacgtgggccagaacctgagcatccacagcggccagtacagaagcgtggtggacctgatgaagagctggagcgaggagaagtggcactacctgttccccgcccccagagactgcaacccccactgcccctggagatgcgacggccccacctgcagccactacacccagatggtgtgggccagcagcaacagactgggctgcgccatccacacctgcagcagcatcagcgtgtggggcaacacctggcacagagccgcctacctggtgtgcaactacgccatcaagggcaactggatcggcgagagcccctacaagatgggcaagccctgcagcagctgcccccccagctaccagggcagctgcaacagcaacatgtgcttcaagggcctgaagagcaacaagttcacctggttctag

SEQ ID NO: 253888 - DNA, 387 bp, Artificial Sequence
  derived and/or modified sequence
atggcttggcgtgtccctggagtacggcctgcatcaaccttcttcccccaggtgctgagggcatccagtgagctgcccaatcgcctccccgaggggtccaccgttggaccaaaaccagactcatcctgggaggctggcagccagggtaactggggattaacatcatctggggccggccaggatagttccgcccagaagcttggcattttgtcggtgcagatctcattgaagatttggacatgggagaaaccttcaggctggggacacctgcatgccgccgtaaccggggcatcctgctgcagccccctgtctcaggggggtgcgatctgcctggtgaccgcaccacaagacaagccagattgcagcccctgtacctcaggtcactag

SEQ ID NO: 253889 - DNA, 762 bp, Artificial Sequence
  derived and/or modified sequence
atgccactgctaccaagcaccgtgggcctggcaggactattgttctgggcaggtcaggccgtgaacgcattgattatgccaaacgccacacctgcccctgctcagcccgagagcactgccatgcggctgctgagcggcctcgaggtgccccggtaccggcgtaaaagacacatttcggtgagggacatgaacgcattattggattaccacaatcatatccgcgcctcagtgtaccccccagcggccaatatggagtatatggtgtgggataaaaggctggcacgagcggcagaagcatgggcaacgcaatgtatctgggcccatggtccaagccaattgatgaggtatgtgggccagaatctctcaatccattccggtcaatataggagcgtcgtggacctaatgaaatcctggagtgaggagaaatggcactatctcttccccgccccaagagactgtaatccccactgcccttggcggtgcgatggccccacatgcagccattatacccagatggtctgggcgtcgtccaatcgtctcggctgcgccatccatacctgtagctctataagtgtgtggggaaacacttggcatcgcgctgcctacctcgtctgtaattatgcaatcaaggggaattggattggggagtccccctataaaatggggaagccttgctcctcgtgccccccgagttaccagggttcgtgtaattccaacatgtgctttaagggactaaagagcaataaatttacatggttctag

SEQ ID NO: 253890 - DNA, 762 bp, Artificial Sequence
  derived and/or modified sequence
atgcccctgctgcccagcacagtgggcctggccggcctgctcttctgggccggccaggccgtgaatgccctgatcatgcccaatgccaccccagccccagcccagcctgagagcacagccatgaggctgctgagcggcctggaggtgccccgctacagaaggaagaggcacatctctgtgcgggacatgaatgccctgctggactaccacaaccacatccgggcctctgtgtacccacctgctgccaacatggagtacatggtgtgggacaagaggctggcccgggctgctgaggcctgggccacccagtgcatctgggcccacggccccagccagctgatgagatatgtgggccagaacctgagcatccacagcggccagtacagatctgtggtggacctgatgaagtcctggagcgaggagaagtggcactacctgtttcctgccccccgggactgcaacccccactgcccctggaggtgtgatggccccacctgcagccactacacccagatggtgtgggccagcagcaaccggctgggctgtgccatccacacctgcagcagcatctctgtgtggggcaacacctggcaccgggccgcctacctggtgtgcaactatgccatcaagggcaactggattggagagagcccctacaagatgggcaagccctgcagcagctgccccccatcctaccagggcagctgcaacagcaacatgtgcttcaagggcctgaagagcaacaagttcacctggttctag

SEQ ID NO: 253891 - DNA, 762 bp, Artificial Sequence
  derived and/or modified sequence
atgcccctgctgcccagcaccgtgggcctggccggcctgctgttctgggctggccaagcagtcaacgctcttatcatgccgaacgccactccggccccagcccagcctgagtccactgcgatgcgcctgctaagtggcctggaagttccccggtatagaaggaaacggcatatttcagttagagacatgaatgctctgctcgactatcataatcatatccgcgcttccgtctacccccctgcggccaacatggagtacatggtctgggataaacggctcgctagggctgcagaggcttgggcaacccaatgtatctgggcccacggaccatctcagttgatgaggtacgtcggccaaaatctgtccattcactcgggccagtataggagcgttgtggatctcatgaaatcttggtccgaggagaaatggcactacctgtttcccgcccctagggactgtaacccccattgtccctggagatgtgacggtcctacctgttcccattatacgcaaatggtctgggcctcatccaaccggcttggctgtgcaatccatacatgtagctccattagcgtatggggcaatacctggcaccgagctgcctacctggtatgtaactacgccataaaaggaaactggattggcgaaagcccatataagatgggaaaaccatgctcttcatgtccaccttcttatcaggggtcctgtaatagcaatatgtgcttcaaaggcttaaaaagcaacaaattcacctggttttag

SEQ ID NO: 253892 - DNA, 762 bp, Artificial Sequence
  derived and/or modified sequence
atgccgttgctaccttccacagtagggttggcagggttgctgttctgggctggtcaggccgtcaacgcactcataatgcccaacgctacccccgcacccgctcagcccgaatccacagccatgcggctgttaagcggcttagaagtcccaaggtaccggagaaaaaggcacatatctgtcagagacatgaacgcactgcttgactatcataatcatataagggcttccgtgtatcctcctgcggcaaacatggagtacatggtatgggacaaacgcctggctcgggcagcggaagcttgggctacccagtgcatttgggcccacgggccatcccagctcatgcgatacgttggacagaacctttccatacattcgggacaatatcgtagcgtagtggatttgatgaagtcatggagcgaggagaaatggcactatctatttcccgctccgagagattgcaatccacactgtccttggcggtgcgatggtcccacatgttcccactacactcagatggtctgggcctcctcaaatcgcttgggctgcgctattcacacttgctcaagtataagtgtctgggggaatacctggcaccgagctgcctacttagtgtgcaattacgccatcaagggcaactggataggagagagcccgtataaaatggggaagccatgctcatcgtgccccccaagttatcaaggcagttgcaattcaaacatgtgtttcaagggtcttaagtccaacaagttcacatggttttag

SEQ ID NO: 253893 - DNA, 762 bp, Artificial Sequence
  derived and/or modified sequence
atgcccttgctgccctccacagttggattagctggtttattgttctgggctgggcaggcagtgaatgcacttatcatgccaaacgcaactcccgccccggctcagcccgaatctactgccatgaggctgctatctggcctggaggtcccccggtaccgacgtaaaaggcacatttcagtgcgcgacatgaacgcactcctcgactatcacaaccacataagggctagtgtttatcccccagcggccaatatggagtacatggtgtgggataagagactggcacgtgccgctgaagcttgggcaactcaatgcatttgggcccatggaccctcacagttgatgagatacgttggacagaacctctctattcatagcggacagtaccggtctgtggtcgacttaatgaagagctggagcgaagagaagtggcactatctgttcccagcacccagagattgcaatccccattgtccatggagatgtgacggtcccacctgctcccactacacccagatggtctgggcatcaagcaatcgacttggatgcgcaatccacacatgttcgtcgatctccgtgtgggggaacacctggcatagagctgcctacctagtttgcaactacgcaataaaggggaactggattggcgaatcgccctacaagatgggaaaaccctgcagttcctgtcccccaagctatcagggctcctgcaattctaacatgtgtttcaaggggctgaagtcaaataaattcacctggttctag

SEQ ID NO: 253894 - DNA, 762 bp, Artificial Sequence
  derived and/or modified sequence
atgccactcctacccagtacagttgggcttgctgggttgcttttctgggctggacaagcagtgaacgccctgataatgcctaatgccaccccggctcctgcccaacctgagtcaaccgcgatgcggttactgtctggcctcgaagtgcccagatacagaaggaagagacatatcagcgtccgggacatgaacgccctgttagattatcacaatcacatacgcgcctctgtgtaccctccagccgccaatatggaatacatggtttgggacaagagactggcacgagctgctgaggcctgggcaacccagtgcatttgggcccatgggccctcccagctcatgaggtacgtaggacagaaccttagcatccactcaggccagtaccgaagtgtcgtagatctaatgaaaagttggtccgaggaaaagtggcattatctcttccctgcccctagagactgcaatccccactgcccatggagatgcgatggtcccacttgcagtcattatacacagatggtgtgggcttcctctaaccggcttggatgcgctatccacacatgctcttccatctctgtttggggcaacacatggcaccgggccgcttacttagtctgcaactacgctattaagggcaactggataggtgaatctccctacaagatgggtaaaccctgctcctcatgtcccccttcttatcagggctcatgcaacagtaatatgtgctttaaaggactgaaatccaataagtttacatggttttag

SEQ ID NO: 253895 - protein, 496 aa, Artificial Sequence
  derived and/or modified sequence
MGRGVRVLLLLSLLHCAGGSEGRKTWRRRGQQPPPPPRTEAAPAAGQPVESFPLDFTAVEGNMDSFMAQVKSLAQSLYPCSAQQLNEDLRLHLLLNTSVTCNDGSPAGYYLKESRGSRRWLLFLEGGWYCFNRENCDSRYDTMRRLMSSRDWPRTRTGTGILSSQPEENPYWWNANMVFIPYCSSDVWSGASSKSEKNEYAFMGALIIQEVVRELLGRGLSGAKVLLLAGSSAGGTGVLLNVDRVAEQLEKLGYPAIQVRGLADSGWFLDNKQYRHTDCVDTITCAPTEAIRRGIRYWNGVVPERCRRQFQEGEEWNCFFGYKVYPTLRCPVFVVQWLFDEAQLTVDNVHLTGQPVQEGLRLYIQNLGRELRHTLKDVPASFAPACLSHEIIIRSHWTDVQVKGTSLPRALHCWDRSLHDSHKASKTPLKGCPVHLVDSCPWPHCNPSCPTVRDQFTGQEMNVAQFLMHMGFDMQTVAQPQGLEPSELLGMLSNGS

SEQ ID NO: 253896 - protein, 295 aa, Artificial Sequence
  derived and/or modified sequence
MGRGVRVLLLLSLLHCAGGSEGRKTWRRRGQQPPPPPRTEAAPAAGQPVESFPLDFTAVEGNMDSFMAQVKSLAQSLYPCSAQQLNEDLRLHLLLNTSVTCNDGSPAGYYLKESRGSRRWLLFLEGGWYCFNRENCDSRYDTMRRLMSSRDWPRTRTGTGILSSQPEENPYWWNANMVFIPYCSSDVWSGASSKSEKNEYAFMGALIIQEVVRELLGRGLSGAKVLLLAGSSAGGTGVLLNVDRVAEQLEKLGYPAIQVRGLADSGWFLDNKQYRHTDCVDTITCAPTEAIRRGI

SEQ ID NO: 253897 - DNA, 1491 bp, Artificial Sequence
  derived and/or modified sequence
atgggacgcggagtcagagtgctgttactgctgtcccttctgcactgtgctggagggtctgaaggtcgaaaaacctggcgtagacggggacagcagccaccgcctcctcccagaactgaagctgcccctgccgcaggacagcctgtagaaagttttccgctagacttcaccgccgttgaaggaaatatggactcatttatggcacaggttaaatcccttgcccagagtctttatccatgcagcgctcaacagctgaacgaggacctccgccttcatctgctgctcaacaccagcgtgacctgcaacgacggatctcccgctgggtactatctgaaagaaagccgaggtagccgtcgctggttactgtttctggagggcggatggtattgctttaaccgcgagaattgcgacagcagatatgatacaatgagacgccttatgtcctcccgtgactggccccggactcgaacaggaaccgggatactgagctcgcagcccgaggagaatccatattggtggaatgccaacatggtgtttatcccctactgctcctcagatgtttggtcaggcgcctcttctaagtcggaaaaaaacgagtatgccttcatgggcgccctcatcatccaggaagtggtgcgagaattgctcggcagagggcttagtggtgccaaagtgttactgctagcaggtagctcagcgggtggtactggagttctcctaaatgttgatcgggtggccgaacagctggaaaagctgggttaccccgccattcaagtgagagggctggccgactctggatggtttctcgataataagcagtatagacacaccgattgcgtggatacaattacttgtgctccaactgaggctattaggcggggaattcggtactggaacggggtggtgccagagcgatgtagaagacagttccaagaaggggaagagtggaactgcttcttcggatataaggtgtatcctacgttgcggtgtcccgtgttcgtcgtccaatggctgtttgatgaagcccagctcaccgtagataacgtgcatctgacggggcagcccgtgcaggagggacttcggttgtacattcagaatttgggtcgggagctgaggcacacgcttaaggatgtgcccgctagtttcgcgcctgcttgcctgtctcatgaaatcatcatccggtcccattggactgatgtccaggtgaaggggacatctctccccagagcacttcactgctgggacagatccctgcacgactctcacaaggccagcaagaccccactgaagggatgtccagtgcacttggtcgacagttgtccctggccccattgcaacccgtcctgtcctaccgtgagggatcagttcaccgggcaggagatgaacgttgcccagttcctgatgcatatgggcttcgatatgcagaccgtggcccagcctcaaggactggaacctagcgagctacttggcatgctctcgaacgggtcttag

SEQ ID NO: 253898 - DNA, 888 bp, Artificial Sequence
  derived and/or modified sequence
atgggccgaggcgttcgagtgctgctgctactgagtctgctgcattgtgctggaggatctgaaggcagaaagacatggcggaggcggggacagcagccaccccctcccccaagaaccgaagctgcacccgccgcagggcagccagtggagtcgtttcctttagatttcacagccgtggaagggaacatggattctttcatggctcaagtgaagtctcttgctcagtcactatatccctgtagcgcacagcaactgaacgaggatctgagactccacctgttgctgaatacctctgtgacatgtaatgatggtagccctgctgggtattacctcaaggagagccggggcagtcgtcgctggctcctctttctggagggaggatggtattgcttcaatagggagaattgtgactctagatacgacacaatgcggcgactcatgtcaagccgagactggccccggactcgaacaggcaccgggatcctgtccagtcagcctgaggagaacccctattggtggaacgccaacatggttttcatcccgtattgtagcagcgacgtctggtcgggcgcttctagcaagtccgagaagaatgaatacgcatttatgggggcattgatcattcaggaagtggtgagggagctgctgggccggggcctgtccggtgctaaggtgctcttgctagcgggttcctccgcaggggggacaggcgtgctcctgaacgtggatagggttgctgagcagctcgagaaattaggataccctgctatacaggtgcggggcttagcagactccgggtggttcctagataataagcaatatcgccacacagactgcgttgacaccataacctgcgctcccacggaggctatcagacgcgggatttag

SEQ ID NO: 253899 - DNA, 1491 bp, Artificial Sequence
  derived and/or modified sequence
atgggccggggcgtgcgggtgctgctgctgctgagcctgctgcactgtgccggcggcagcgagggcaggaagacctggaggcggcggggccagcagcccccacctccacccaggacagaagctgccccagctgctggccagcctgtggagagcttccccctggacttcaccgctgtggagggcaacatggacagcttcatggcccaggtgaagagcctggcccagagcctgtacccctgcagcgcccagcagctgaatgaagacctgcggctgcacctgctgctgaacacctctgtgacctgcaatgatggcagccctgctggctactacctgaaggagagccggggcagccgccgctggctgctcttcctggagggcggctggtactgcttcaaccgggagaactgtgacagccgctatgacaccatgaggcggctgatgagcagccgggactggcccaggaccaggactggaacaggcatcctgagcagccagcctgaggagaacccctactggtggaatgccaacatggtgttcatcccctactgcagcagtgatgtgtggagcggggccagcagcaagtctgagaagaatgaatatgccttcatgggcgccctgatcatccaggaggtggtgcgggagctgctgggccggggcctgagcggggccaaggtgctgctgctggccggcagcagcgctgggggcaccggggtgctgctgaatgtggacagagtggccgagcagctggagaagctgggctacccagccatccaggtgcggggcctggccgacagcggctggttcctggacaacaagcagtaccgccacacagactgtgtggacaccatcacctgtgcccccacagaggccatccggcggggcatccgctactggaatggagtggtgcctgagcgctgccggcggcagttccaggagggggaggagtggaactgcttcttcggctacaaggtgtaccccaccctgcgctgccctgtgtttgtggtgcagtggctgtttgatgaggcccagctgactgtggacaacgtgcacctgaccggccagcctgtgcaggagggcctgcggctgtacatccagaacctgggccgggagctgcggcacaccctgaaggatgtgcctgccagctttgccccagcctgcctgagccatgagatcatcatccgcagccactggacagatgtgcaggtgaagggcaccagcctgccccgggccctgcactgctgggacaggagcctgcatgacagccacaaggccagcaagacccccctgaagggctgccctgtgcacctggtggacagctgcccctggccccactgcaaccccagctgccccaccgtgcgggaccagttcaccggccaggagatgaatgtggcccagttcctgatgcacatgggctttgacatgcagacagtggcccagccccagggcctggagcccagcgagctgctgggcatgctgagcaatggcagctag

SEQ ID NO: 253900 - DNA, 888 bp, Artificial Sequence
  derived and/or modified sequence
atgggccggggcgtgcgggtgctgctgctgctgagcctgctgcactgtgccggcggcagcgagggcaggaagacctggaggcggcggggccagcagcccccacctccacccaggacagaagctgccccagctgctggccagcctgtggagagcttccccctggacttcaccgctgtggagggcaacatggacagcttcatggcccaggtgaagagcctggcccagagcctgtacccctgcagcgcccagcagctgaatgaagacctgcggctgcacctgctgctgaacacctctgtgacctgcaatgatggcagccctgctggctactacctgaaggagagccggggcagccgccgctggctgctcttcctggagggcggctggtactgcttcaaccgggagaactgtgacagccgctatgacaccatgaggcggctgatgagcagccgggactggcccaggaccaggactggaacaggcatcctgagcagccagcctgaggagaacccctactggtggaatgccaacatggtgttcatcccctactgcagcagtgatgtgtggagcggggccagcagcaagtctgagaagaatgaatatgccttcatgggcgccctgatcatccaggaggtggtgcgggagctgctgggccggggcctgagcggggccaaggtgctgctgctggccggcagcagcgctgggggcaccggggtgctgctgaatgtggacagagtggccgagcagctggagaagctgggctacccagccatccaggtgcggggcctggccgacagcggctggttcctggacaacaagcagtaccgccacacagactgtgtggacaccatcacctgtgcccccacagaggccatccggcggggcatctag

SEQ ID NO: 253901 - DNA, 1491 bp, Artificial Sequence
  derived and/or modified sequence
atgggccggggcgtgcgggtgctgctgctgctgagcctgctgcactgcgcgggcggatcagaggggagaaagacctggagaagaaggggacagcagcccccaccaccacctaggaccgaagctgcacccgcagccggccagcctgtggagagttttccgcttgatttcacggcagtggagggtaatatggattcattcatggcacaagtgaaaagcttagctcagtcgctctatccttgttcagcccaacagctgaatgaagacttaaggctgcacttactgctaaatacatcagtaacgtgcaatgatggatccccagccggttactatctcaaagagtccagaggatctcggagatggttactgttcctggagggcggctggtattgtttcaaccgcgagaactgtgactcacggtacgacacaatgagaaggctaatgtcgtcccgagactggccgaggacccgaactggcaccgggattctctcttcacaacctgaggagaatccctactggtggaatgcaaacatggtgtttatcccttattgctcgtctgacgtctggtctggcgcctcttcgaaatcagaaaagaacgagtatgcattcatgggcgccttaatcatccaggaagtagtaagagaacttcttggtcgcggactctctggagctaaggtgctcctccttgccgggtcatctgcgggcggaactggagtattacttaacgtcgacagggtggccgagcagcttgagaagcttggatacccggctattcaggtcagaggactggcagatagcggatggttcttagacaacaagcagtacaggcacaccgactgcgtggataccatcacatgtgcccccacagaggcgattcgaagaggaattcggtattggaatggggttgtgccagagagatgtaggcgccagtttcaggagggggaggagtggaattgtttcttcggatacaaagtttatcctactttacgatgccctgtgttcgtggtacagtggctgtttgacgaggcccaacttacagtggataacgtgcatttaaccggacagcctgtacaggaggggcttagactctacattcaaaatttgggccgggagctgcggcatactctcaaagatgtgccggcttctttcgcccctgcctgcctgtctcacgagataattatcaggagtcattggactgacgtacaagtaaaagggactagcctgccccgcgcattgcactgctgggacaggtccctgcatgacagccataaagccagcaagacaccactcaaaggctgtccggtacatctcgtcgattcatgcccatggccgcattgcaacccaagctgtccaacagtaagggatcagttcacgggccaggagatgaacgtagcgcaatttctgatgcatatgggatttgacatgcagaccgtcgcacagccgcaagggcttgagccgtccgaactgctcggaatgctgtctaatggatcttag

SEQ ID NO: 253902 - DNA, 888 bp, Artificial Sequence
  derived and/or modified sequence
atgggccggggcgtgcgggtgctgctgctgctgagcctgctgcactgcgctggcggaagtgagggccgcaagacgtggagacgacgaggacagcagccgccccctcccccgagaactgaagcagcgccagctgctgggcagcccgtggaatcattccccctcgattttacagccgtagaagggaacatggattcttttatggcgcaagttaagtctttggcacagtcgctatatccctgcagtgcccaacagctgaacgaagatcttagactacacctgctgctgaacacatcggtaacctgtaacgacgggtccccagctggttattatttaaaggagtccagaggttcacgtcgttggctcctatttcttgagggggggtggtattgctttaaccgtgaaaattgtgactccagatatgacacgatgcgtagactgatgtcctctcgcgattggcccagaacacgaacgggaaccggcattctctcctcacaaccagaagagaatccatattggtggaatgccaacatggtatttattccctattgcagtagtgatgtgtggtccggggctagttcaaagagcgagaagaatgaatatgctttcatgggcgccctcatcatccaggaagtagtcagggagctccttggccgaggtctgtcgggcgcaaaggtgctgctcctggccggatcctctgctggagggaccggcgtgctgctcaacgtggaccgagtggcagaacagctagagaagttggggtatccagccattcaggttcggggcttagctgactcgggatggtttctggataataaacagtatcggcacaccgattgcgtggacacgattacctgcgcgccaaccgaagcaattcggcgcggcatctag

SEQ ID NO: 253903 - DNA, 2324 bp, Artificial Sequence
  derived and/or modified sequence
ctcccccctccgccgagcccgggcggcggcggcggcacatctaacgcgcgggcacccgggccgccgcggcccccgcaaataagcccagcctcggcccccgccgctcattggcgcgggccgcagccagcgcacccagaccctgcgctgccctcggacggccgggcgcggagccccagctgcggaggccgacggcacccggccccgagcgcctcgacgccgagccgcgcgcgccttctccgccaggcccggcgggcgggagcgggggcgagggagcaggagcggccagtgcccccgacacccccggcccggcacccccggcccggcatcccccgccgccgccgccgccgcctcaaggccgcccgctccccgcaggtggacgcggccatgggccgaggggtgcgcgtgctgctgctgctgagcctgctgcactgcgccgggggcagcgagggcaggaagacctggcggcgccggggtcagcagccgcctcctcccccgcggaccgaggcggcgccggcggccggacagcccgtggagagcttcccgctggacttcacggccgtggagggtaacatggacagcttcatggcgcaagtcaagagcctggcgcagtccctgtacccctgctccgcgcagcagctcaacgaggacctgcgcctgcacctcctactcaacacctcggtgacctgcaacgacggcagccccgccggctactacctgaaggagtccaggggcagccggcggtggctcctcttcctggaaggcggctggtactgcttcaaccgcgagaactgcgactccagatacgacaccatgcggcgcctcatgagctcccgggactggccgcgcactcgcacaggcacagggatcctgtcctcacagccggaggagaacccctactggtggaacgcaaacatggtcttcatcccctactgctccagtgatgtttggagcggggcttcatccaagtctgagaagaacgagtacgccttcatgggcgccctcatcatccaggaggtggtgcgggagcttctgggcagagggctgagcggggccaaggtgctgctgctggccgggagcagcgcggggggcaccggggtgctcctgaatgtggaccgtgtggctgagcagctggagaagctgggctacccagccatccaggtgcgaggcctggctgactccggctggttcctggacaacaagcagtatcgccacacagactgcgtcgacacgatcacgtgcgcgcccacggaggccatccgccgtggcatcaggtactggaacggggtggtcccggagcgctgccgacgccagttccaggagggcgaggagtggaactgcttctttggctacaaggtctacccgaccctgcgctgccctgtgttcgtggtgcagtggctgtttgacgaggcacagctgacggtggacaacgtgcacctgacggggcagccggtgcaggagggcctgcggctgtacatccagaacctcggccgcgagctgcgccacacactcaaggacgtgccggccagctttgcccccgcctgcctctcccatgagatcatcatccggagccactggacggatgtccaggtgaaggggacgtcgctgccccgagcactgcactgctgggacaggagcctccatgacagccacaaggccagcaagacccccctcaagggctgccccgtccacctggtggacagctgcccctggccccactgcaacccctcatgccccaccgtccgagaccagttcacggggcaagagatgaacgtggcccagttcctcatgcacatgggcttcgacatgcagacggtggcccagccgcagggactggagcccagtgagctgctggggatgctgagcaacggaagctaggcagactgtctggaggaggagccggcactgaggggcccagacacccgctgccccagtgccacctcaccccccaccagcaggccctcccgtctcttcgggacagggccccagccgtcccccctgtctgggtctgcccactgccctcctgccccggctttccctgcccctctcccacagcccagccagagacaagggacctgctgtcatccccatctgtggcctgggggtccttcctgacaacgagggggtagccagaagagaagcactggattcctcagtccaccagctcagacagcacccaccggccccacccatcaagcccttttatattattttataaagtgacttttttattactttaattttttaaaaaaaggaaaataagaatatatgatgaatgatattgttttgtaactttttaaaaatgattttaaagagacaaaaaagaa

SEQ ID NO: 253904 - DNA, 996 bp, Artificial Sequence
  derived and/or modified sequence
agagggggagcgcagccgagccgggcgcaccagcgggacggcgcagggccaggggcgctgagaggacggggccactgggccgcccgcgctggccgcggtggacgcggccatgggccgaggggtgcgcgtgctgctgctgctgagcctgctgcactgcgccgggggcagcgagggcaggaagacctggcggcgccggggtcagcagccgcctcctcccccgcggaccgaggcggcgccggcggccggacagcccgtggagagcttcccgctggacttcacggccgtggagggtaacatggacagcttcatggcgcaagtcaagagcctggcgcagtccctgtacccctgctccgcgcagcagctcaacgaggacctgcgcctgcacctcctactcaacacctcggtgacctgcaacgacggcagccccgccggctactacctgaaggagtccaggggcagccggcggtggctcctcttcctggaaggcggctggtactgcttcaaccgcgagaactgcgactccagatacgacaccatgcggcgcctcatgagctcccgggactggccgcgcactcgcacaggcacagggatcctgtcctcacagccggaggagaacccctactggtggaacgcaaacatggtcttcatcccctactgctccagtgatgtttggagcggggcttcatccaagtctgagaagaacgagtacgccttcatgggcgccctcatcatccaggaggtggtgcgggagcttctgggcagagggctgagcggggccaaggtgctgctgctggccgggagcagcgcggggggcaccggggtgctcctgaatgtggaccgtgtggctgagcagctggagaagctgggctacccagccatccaggtgcgaggcctggctgactccggctggttcctggacaacaagcagtatcgccacacagactgcgtcgacacgatcacgtgcgcgcccacggaggccatccgccgtggcatcag

SEQ ID NO: 253905 - DNA, 1491 bp, Artificial Sequence
  derived and/or modified sequence
atgggaaggggtgttagggtcttgcttttgttgtcccttctgcattgcgctggcggatcagaaggcagaaagacatggcggcgacgcggacagcagcctccgccacccccacgcactgaagcagctcctgctgctggtcagcctgtggagtccttccccttggatttcaccgccgttgaggggaatatggactcttttatggctcaggtgaaaagtttagctcagagcctgtacccatgtagcgcccagcagctgaacgaggacttgcgtctgcacttgctccttaatactagcgtcacctgtaacgacggttcgcctgccggatactacctgaaagagagcaggggttcacggcgttggctcctttttctggagggaggttggtactgtttcaacagagaaaactgcgatagcaggtacgataccatgaggagattgatgtctagtcgtgattggcctaggactcggacgggcactggaatcctttcctctcagcctgaagaaaacccatactggtggaacgcaaatatggttttcatcccatactgctcctcagatgtgtggtccggtgccagttctaaaagcgagaagaatgagtacgcctttatgggggctctgattatccaagaggtcgtccgcgagctgctaggtagaggacttagtggagctaaagtgttgctgttggctggttccagcgccggtggaacaggcgtattgttgaatgtcgaccgcgtggccgagcaattagaaaagctgggatacccagccatccaggtgcggggactggctgattctggctggttcctggataataaacaatatagacacaccgattgcgtcgatacaattacgtgcgcaccaaccgaagctatccgacgcggaatcagatattggaacggcgttgtccccgaaaggtgtaggagacagttccaagagggtgaggaatggaattgtttttttggctacaaagtttacccgacgctccgttgtcctgtatttgtggtgcaatggctgttcgatgaagcacaacttacggtcgataatgttcatctgacagggcaacctgttcaggaaggcctacgcctgtacatccaaaatctagggagggagctgcgccacaccttaaaggacgtgcccgcatcctttgctccagcatgtctgagtcatgagatcattatacggtcccactggacagacgttcaagtcaaagggacctccttgccaagggctttacactgctgggacagatccctgcatgacagtcataaggcatccaagacccccctgaaaggatgcccggtgcacctagttgactcctgcccctggccacattgtaacccttcttgtcccactgttcgcgaccagtttacaggccaagaaatgaacgttgcacaattccttatgcatatgggatttgacatgcaaaccgttgctcagcctcaggggctggagccttctgagctgctcggcatgctcagtaatgggtcctag

SEQ ID NO: 253906 - DNA, 888 bp, Artificial Sequence
  derived and/or modified sequence
atgggaagaggggtccgggtccttctgttgctgagcctgctgcactgtgccggaggatcagaggggcgtaagacctggagacgccgaggccaacaaccaccaccgcctccgaggaccgaggccgcaccggcagcaggacagccagtggaaagttttccactggacttcaccgccgtggagggtaacatggactcattcatggcccaggtgaagtctcttgcccagagtctctatccttgcagcgcccagcaacttaacgaggacctgagactacatcttctgctgaatacgagcgtgacttgcaacgatggatctcccgcagggtactatctgaaggagtcaaggggctcccgccgttggctgctattcctcgagggcggttggtattgttttaatcgggaaaattgcgacagccggtacgacactatgcggagacttatgagcagccgagattggccaaggaccaggaccggtacggggatcttaagcagccagcctgaggaaaatccttactggtggaacgccaacatggtgttcattccttattgcagcagtgacgtatggtcgggtgcaagcagcaaatctgaaaagaatgagtacgccttcatgggcgctctgataatccaggaggttgttcgtgagcttctgggacgaggtctcagtggcgctaaggttctccttctcgccggaagttcagcagggggaacaggggtactgctgaacgtggatcgggtagcagagcagttggaaaaattgggttaccccgctatacaggttcggggactcgctgactctgggtggtttctcgacaataaacagtatcggcacaccgactgtgtggacactatcacttgtgctccaactgaagctattcgacgtggaatctag

SEQ ID NO: 253907 - DNA, 1491 bp, Artificial Sequence
  derived and/or modified sequence
atgggcagaggcgtgagagtgctgctgctgctgagcctgctgcactgcgccggcggcagcgagggcagaaagacctggagaagaagaggccagcagcccccccccccccccagaaccgaggccgcccccgccgccggccagcccgtggagagcttccccctggacttcaccgccgtggagggcaacatggacagcttcatggcccaggtgaagagcctggcccagagcctgtacccctgcagcgcccagcagctgaacgaggacctgagactgcacctgctgctgaacaccagcgtgacctgcaacgacggcagccccgccggctactacctgaaggagagcagaggcagcagaagatggctgctgttcctggagggcggctggtactgcttcaacagagagaactgcgacagcagatacgacaccatgagaagactgatgagcagcagagactggcccagaaccagaaccggcaccggcatcctgagcagccagcccgaggagaacccctactggtggaacgccaacatggtgttcatcccctactgcagcagcgacgtgtggagcggcgccagcagcaagagcgagaagaacgagtacgccttcatgggcgccctgatcatccaggaggtggtgagagagctgctgggcagaggcctgagcggcgccaaggtgctgctgctggccggcagcagcgccggcggcaccggcgtgctgctgaacgtggacagagtggccgagcagctggagaagctgggctaccccgccatccaggtgagaggcctggccgacagcggctggttcctggacaacaagcagtacagacacaccgactgcgtggacaccatcacctgcgcccccaccgaggccatcagaagaggcatcagatactggaacggcgtggtgcccgagagatgcagaagacagttccaggagggcgaggagtggaactgcttcttcggctacaaggtgtaccccaccctgagatgccccgtgttcgtggtgcagtggctgttcgacgaggcccagctgaccgtggacaacgtgcacctgaccggccagcccgtgcaggagggcctgagactgtacatccagaacctgggcagagagctgagacacaccctgaaggacgtgcccgccagcttcgcccccgcctgcctgagccacgagatcatcatcagaagccactggaccgacgtgcaggtgaagggcaccagcctgcccagagccctgcactgctgggacagaagcctgcacgacagccacaaggccagcaagacccccctgaagggctgccccgtgcacctggtggacagctgcccctggccccactgcaaccccagctgccccaccgtgagagaccagttcaccggccaggagatgaacgtggcccagttcctgatgcacatgggcttcgacatgcagaccgtggcccagccccagggcctggagcccagcgagctgctgggcatgctgagcaacggcagctag

SEQ ID NO: 253908 - DNA, 888 bp, Artificial Sequence
  derived and/or modified sequence
atgggcagaggcgtgagagtgctgctgctgctgagcctgctgcactgcgccggcggcagcgagggcagaaagacctggagaagaagaggccagcagcccccccccccccccagaaccgaggccgcccccgccgccggccagcccgtggagagcttccccctggacttcaccgccgtggagggcaacatggacagcttcatggcccaggtgaagagcctggcccagagcctgtacccctgcagcgcccagcagctgaacgaggacctgagactgcacctgctgctgaacaccagcgtgacctgcaacgacggcagccccgccggctactacctgaaggagagcagaggcagcagaagatggctgctgttcctggagggcggctggtactgcttcaacagagagaactgcgacagcagatacgacaccatgagaagactgatgagcagcagagactggcccagaaccagaaccggcaccggcatcctgagcagccagcccgaggagaacccctactggtggaacgccaacatggtgttcatcccctactgcagcagcgacgtgtggagcggcgccagcagcaagagcgagaagaacgagtacgccttcatgggcgccctgatcatccaggaggtggtgagagagctgctgggcagaggcctgagcggcgccaaggtgctgctgctggccggcagcagcgccggcggcaccggcgtgctgctgaacgtggacagagtggccgagcagctggagaagctgggctaccccgccatccaggtgagaggcctggccgacagcggctggttcctggacaacaagcagtacagacacaccgactgcgtggacaccatcacctgcgcccccaccgaggccatcagaagaggcatctag

SEQ ID NO: 253909 - protein, 491 aa, Artificial Sequence
  derived and/or modified sequence
MKMAAPTANKAASLGCNNKPAFPELDFRSGARVEELNKLIQEFTKHDQREYDDQRALEIHTAKDFIFSMLGMVQKLDQKLPVANEYLLLSGGVREGVVDLDLDELNVYARGTDYDMDFTLLVPALKLHDRNQPVTLDMRHSALCHSWLSLRLFDEGTISKWKDCCTIVDHINGATNYFFSPTKVADWFYDSISIVLSEIQKKPQRGMPKVEKVEKNGTIISIILGVGSSRMLYDIVPVVSFKGWPAVAQSWLMENHFWDGKITEEEVISGFYLVPACSYKGKKDNEWRLSFARSEVQLKKCISSSLMQAYQACKAIIIKLLSRPKAISPYHLRSMMLWACDRLPANYLAQEDYAAHFLLGLIDDLQHCLVNKMCPNYFIPQCNMLEHLSEETVMLHARKLSSVRSDPAEHLRTAIEHVKAANRLTLELQRRGSTTSIPSPQSDGGDPNQPDDRLAKKLQQLVTENPGKSISVFINPDDVTRPHFRIDDKFF

SEQ ID NO: 253910 - DNA, 77 bp, Artificial Sequence
  derived and/or modified sequence
aagagtatcaacagtaaattacattagcagaagaatcaacaaacatgaaaatagaaattatggtagccaaagaacag

SEQ ID NO: 253911 - DNA, 1476 bp, Artificial Sequence
  derived and/or modified sequence
atgaagatggccgcccccaccgccaacaaggccgccagcctgggctgcaacaacaagcccgccttccccgagctggacttcagaagcggcgccagagtggaggagctgaacaagctgatccaggagttcaccaagcacgaccagagagagtacgacgaccagagagccctggagatccacaccgccaaggacttcatcttcagcatgctgggcatggtgcagaagctggaccagaagctgcccgtggccaacgagtacctgctgctgagcggcggcgtgagagagggcgtggtggacctggacctggacgagctgaacgtgtacgccagaggcaccgactacgacatggacttcaccctgctggtgcccgccctgaagctgcacgacagaaaccagcccgtgaccctggacatgagacacagcgccctgtgccacagctggctgagcctgagactgttcgacgagggcaccatcagcaagtggaaggactgctgcaccatcgtggaccacatcaacggcgccaccaactacttcttcagccccaccaaggtggccgactggttctacgacagcatcagcatcgtgctgagcgagatccagaagaagccccagagaggcatgcccaaggtggagaaggtggagaagaacggcaccatcatcagcatcatcctgggcgtgggcagcagcagaatgctgtacgacatcgtgcccgtggtgagcttcaagggctggcccgccgtggcccagagctggctgatggagaaccacttctgggacggcaagatcaccgaggaggaggtgatcagcggcttctacctggtgcccgcctgcagctacaagggcaagaaggacaacgagtggagactgagcttcgccagaagcgaggtgcagctgaagaagtgcatcagcagcagcctgatgcaggcctaccaggcctgcaaggccatcatcatcaagctgctgagcagacccaaggccatcagcccctaccacctgagaagcatgatgctgtgggcctgcgacagactgcccgccaactacctggcccaggaggactacgccgcccacttcctgctgggcctgatcgacgacctgcagcactgcctggtgaacaagatgtgccccaactacttcatcccccagtgcaacatgctggagcacctgagcgaggagaccgtgatgctgcacgccagaaagctgagcagcgtgagaagcgaccccgccgagcacctgagaaccgccatcgagcacgtgaaggccgccaacagactgaccctggagctgcagagaagaggcagcaccaccagcatccccagcccccagagcgacggcggcgaccccaaccagcccgacgacagactggccaagaagctgcagcagctggtgaccgagaaccccggcaagagcatcagcgtgttcatcaaccccgacgacgtgaccagaccccacttcagaatcgacgacaagttcttctag

SEQ ID NO: 253912 - DNA, 1476 bp, Artificial Sequence
  derived and/or modified sequence
atgaaaatggccgctcctacagcaaacaaagcagcctcactcggatgcaacaacaaaccagccttccccgagcttgactttagatcaggggcacgtgtcgaagagttgaacaagctcatccaggaatttaccaaacatgatcaaagagaatatgatgatcagcgtgctctggagatccatactgctaaagactttatcttcagtatgttaggtatggtgcaaaagctggatcagaagttgcccgtcgctaacgagtacctgttgctgagcggcggtgttcgcgaaggcgttgtagatcttgacctcgatgaactgaatgtctacgcacgaggaaccgactacgacatggactttacactgcttgtgccagcgcttaagctgcatgatcgcaatcagcccgtaaccctcgatatgcgccattctgccctctgccatagttggttgtcactgcggttgttcgatgaggggactatctccaaatggaaggattgttgcacaattgtggaccatattaatggtgctacgaactattttttttctcctactaaagtggctgattggttttatgactcgatctcaattgtgcttagtgagatacaaaagaaaccacaacgcggaatgcccaaggtggagaaagtggagaagaacggcacaattatctctatcatccttggggtgggcagctctcggatgctgtacgatattgtcccagttgtgagctttaaggggtggcccgctgtggcccagtcttggcttatggaaaatcacttttgggacggcaagatcaccgaggaagaggtgatttcggggttctatctcgtccccgcttgttcatacaagggaaaaaaggataacgagtggcgactgagtttcgccagatccgaggtacagctgaaaaaatgtatatcttcttctcttatgcaggcatatcaggcgtgtaaagcgattatcataaaacttctcagcaggcctaaggcgattagtccgtaccacttaaggtctatgatgctctgggcctgtgatcggcttcctgccaattacctggcacaggaggattacgcagcccatttcctgctcggtcttattgacgacctacagcattgtttagtcaataagatgtgccccaattattttataccacagtgtaatatgctcgaacaccttagcgaggagaccgtaatgctccatgcacgcaagttgtcttccgtcagaagtgaccccgctgagcaccttcgtactgcaatcgaacatgtgaaagccgccaacaggctaactctcgagttgcagagacggggatcaacgactagcatcccgagcccccagagcgacggtggtgacccaaaccaacccgatgacaggctggccaagaaactgcagcaactcgtcactgaaaatccgggaaagtctatttcagtgttcatcaatccagacgacgtcacaagaccccattttcgcatagacgataaatttttttag

SEQ ID NO: 253913 - DNA, 1476 bp, Artificial Sequence
  derived and/or modified sequence
atgaagatggccgcccccacagccaacaaggccgccagcctgggctgcaacaacaagccagccttccctgagctggacttccgcagcggggcccgggtggaggagctgaacaagctgatccaggagttcaccaagcatgaccagcgggagtatgatgaccagagggccctggagatccacacagccaaggacttcatcttctccatgctgggcatggtgcagaagctggaccagaagctgcctgtggccaatgagtacctgctgctgagcggcggcgtgcgggagggcgtggtggacctggacctggatgagctgaatgtgtatgcccggggcacagattatgacatggacttcaccctgctggtgcctgccctgaagctgcatgacaggaaccagcctgtgaccctggacatgaggcacagcgccctgtgccacagctggctgagcctgcggctgtttgatgagggcaccatcagcaagtggaaggactgctgcaccatcgtggaccacatcaacggggccaccaactacttcttcagccccaccaaggtggccgactggttctatgacagcatcagcatcgtgctgtctgagatccagaagaagccccagaggggcatgcccaaggtggagaaggtggagaagaatggcaccatcatcagcatcatcctgggcgtgggcagcagcaggatgctgtatgacatcgtgcctgtggtgtccttcaagggctggccagctgtggcccagagctggctgatggagaaccacttctgggatggcaagatcacagaggaggaggtgatcagcggcttctacctggtgcctgcctgcagctacaagggcaagaaggacaatgagtggaggctgagctttgcccggtctgaggtgcagctgaagaagtgcatcagcagcagcctgatgcaggcctaccaggcctgcaaggccatcatcatcaagctgctgagccggcccaaggccatcagcccctaccacctgcgctccatgatgctgtgggcctgtgaccggctgcctgccaactacctggcccaggaggactatgctgcccacttcctgctgggcctgattgatgacctgcagcactgcctggtgaacaagatgtgccccaactacttcatcccccagtgcaacatgctggagcacctgtctgaggagaccgtgatgctgcacgccaggaagctgagctctgtgcggagtgaccctgctgagcacctgaggacagccattgaacatgtgaaggccgccaaccggctgaccctggagctgcagaggcggggcagcaccaccagcatccccagcccccagagtgatggaggagaccccaaccagccagatgaccggctggccaagaagctgcagcagctggtgacagagaaccctgggaagagcatctctgtgttcatcaacccagatgatgtgacccggccccacttcagaattgatgacaagttcttctag

SEQ ID NO: 253914 - DNA, 3368 bp, Artificial Sequence
  derived and/or modified sequence
agttggctctacgaccgccgttgccgctgccagagagggccagggcagggcagggacgcgcagcatcggggcgggcgtggggccggagaaaagggtgtcggggccacacacgcaccctcgctgcagtccagctcctcccgaagctcgcacgcccagagcgcacggagcgggggactgcccgcccagacgcccgcccgccaacccgcccacgagccggggccaaagcctgggagcctgcgaggggaggaggcccaggggggcggggtggggggcgggggtgggtgccgcgctgccgcggagctgctactcggcgcgttttgcatgaagatggcggctcccaccgccaacaaggcagcctccctgggctgtaacaacaagcctgcgttcccggagctggatttcaggtcgggagctcgggtggaggaattgaacaaactcatccaagaatttacgaagcacgaccagcgggaatacgacgaccagagagcgctggagattcacacagccaaggatttcatcttttccatgctgggaatggtgcaaaagctggaccaaaagcttccagtggctaatgaatacctgttgctctctggaggtgtccgggaaggcgtggtggacctggacttagatgagcttaatgtctatgcccggggtactgactatgatatggactttaccctcttggtgccagccctcaagctgcatgaccgtaatcagcctgtgacactcgacatgcgccactcagccttgtgccactcttggctgagccttcggctctttgatgaggggacaatcagtaaatggaaagactgctgcaccattgtagatcacatcaatggtgccaccaactacttcttctcacctaccaaagtggctgactggttctatgactctatcagcattgtcctatcagaaatacagaagaaaccccagcgagggatgccaaaggtagaaaaggtggaaaaaaatgggaccatcatctccatcattctgggtgtagggagtagtcgcatgttgtatgatattgtccctgtggtatctttcaaaggttggcctgcagtggcccagagctggctcatggagaaccacttttgggatgggaagattactgaggaagaggtcatcagtgggttttacttggtgcctgcttgctcctacaagggtaagaaggacaatgaatggcggctgtcctttgccaggagcgaggtgcagttgaagaagtgcatctccagcagcctcatgcaggcctatcaggcctgcaaagccatcatcattaaactgctgtcccggcccaaggctattagcccctatcacctgcggagcatgatgctctgggcctgcgacagacttcctgccaactacttggctcaagaagactatgcagcccactttttgctgggcctcatcgatgacctgcaacactgtctggtcaacaagatgtgccccaattatttcatccctcagtgcaacatgctggaacatctgtctgaggagacagtcatgcttcacgcccggaagctgtcctctgtgcgctcagacccggcagagcacttgcgcaccgccattgagcatgtcaaggcagccaaccggctgacactggagctccagaggcgaggtagcaccaccagcatcccctctccacagtctgacggaggggaccccaaccagcctgatgaccgtttggcaaaaaaactgcagcagctagtgactgagaacccgggaaagtcaatctctgtctttatcaatcctgacgatgtcacaaggccccatttcagaattgatgacaaatttttctgagtgttagctgacttttttttttcctgattcttaaactctgataatgtgtcgtgtggtttgtgatgctatctttctgttttttacatatccagcctagattggatttgttaagaacaaattttaagtttcctggttctgcaggatggtgcaggctctgaaacagtatattactatttcatattctgcctctgatttcgttgtttactttttgtagttattgtcatgctctttagtttgttggagttttttttctttttaaggagatcttaagccatagatgaaaatgcccatgaatcctcttgcttttttctgtttcatacttggtgcaaatttgttcatgggtatggggaaacaaatctctttctgatgcttaacgattctatcctattatttttattattttgtttttgtcttttttcttatgagctttcaccactactgatatttgagaatcatatgaacctgggaactacttggcatgttagctggatttatttattttggccagtgaccagagtagtttccccccttttccaccaaacaatgtaaactttgaaagtgataatactacaaattgtgttttggagcaacttcattgaatgtaattgtcctcaaatcagagaacactgggtggtttgaagggtgtctttgacagttttccaagcagaattaaggtttccaaatgttaattttagcatatgtaattatttgaagccttatttaaatcctattaaagaacataccattataattattatttgcactaatctttgccattgtcagaattgcaaagtgtgtttcaatataaattaacaaccactctcgaaattctatcattttttcattttgcccatttctatcagtgaaatgattctttgcatttgcttagttctccttcagttgtggggtcctgctttgccctctttgatattcctggttcctgtcttactgagagaagttgttaaagctttatacatgttgaccccatctaaagctggggaaaatatacacttgatgaagtaggtgtctttgtatttatttcttttggggtcatagaggtaagcttttttgtaaaatctctactcttcctgagagttttgagaaaaactggcaggaagaacttataatccccaaatagaagataccacgtctgttcaaaagcaggtattgctatagagcagcacccaggaaatatctgtgggtggcagccttggtatagaggtgtcctgtcttcatgagtgaagttacttgcctgattaggtgctggaaggtattggctccctgttttggtgtggactcatggcaagctggtgtttaagaggtcaggaggcctgctgatctttcaaaggacacccatgatgtctactcatagaaagggcaagtaacgtgttcattttggtcttgaatgtccaaactcaagggttggattttggccaattgaaatcagacatatgcgatcttgggtttttgcatggaaattaatgtaatgcttataaatgaaaaatgaaaacatttcaaccatctaagtcaaacacaaaaataataaaaaaagaaacatactggccttgaaa

SEQ ID NO: 253915 - DNA, 1476 bp, Artificial Sequence
  derived and/or modified sequence
atgaagatggccgcccccaccgccaacaaggccgccagcctgggctgcaacaataaacccgcgttcccagagctagactttcgttctggagcccgggtggaagaattgaacaagctgatccaggaattcacaaaacatgatcagagagagtatgacgaccagcgcgcactggaaatacacacagccaaggactttatttttagtatgcttggcatggtgcaaaaactggaccaaaaactgcctgtagccaacgagtacttactgctgagcggtggcgttcgagagggagtggtggatctggatttggacgaactcaatgtttacgcgaggggcactgactacgatatggattttacgcttctagtgccagccctgaaactccatgaccgcaaccagcccgtgacattagacatgagacattccgctttatgccactcttggctttccctcagactgttcgacgagggcacgatctccaaatggaaggactgttgcactatagtggatcatataaacggtgccacaaactatttcttttctccaaccaaggtggccgactggttttacgactctatcagcattgtgctttccgaaatacagaagaagccccagcggggcatgccaaaagtggagaaggtagagaaaaacggcacaattatctctataattctcggagtcgggtccagccgcatgctatacgacatcgtccccgtagtgtcctttaaaggatggccagccgtagcacagagctggctgatggagaatcatttctgggacggtaagattactgaagaggaggttattagtgggttctacctcgtgcctgcctgctcatacaagggtaagaaggataacgaatggagactgagcttcgccaggtctgaggtgcagcttaagaaatgtattagcagcagtctaatgcaggcttaccaagcgtgtaaagctattattatcaaactgctgtctaggccaaaggccataagcccttatcatctgcggagcatgatgttatgggcctgtgatcgacttcccgctaattatctggcccaggaagactatgccgcccacttcctgctgggtctcatcgacgatctgcaacactgtctagtaaacaagatgtgtcctaactactttattccccagtgcaatatgttggaacacctctctgaggagaccgtgatgcttcacgcgaggaaattaagctcagttcgatcagatcctgctgaacatcttaggacagctatagagcacgtgaaggcggccaatcgcctgacacttgagctccaacggcgtggaagcacaaccagcataccctcccctcagtccgacgggggtgatccaaaccagccagacgatagactggcgaaaaaactacagcagctcgtaaccgagaatcccgggaagtcgatctcggtattcataaacccagacgatgtcacaaggccacatttccgtatcgacgacaaattcttctag

SEQ ID NO: 253916 - DNA, 1476 bp, Artificial Sequence
  derived and/or modified sequence
atgaagatggccgctccaaccgccaacaaggcagcctccctgggttgtaacaacaagccagcatttcccgagcttgattttcggtctggtgcacgtgtagaagagctgaacaaactcattcaagaatttaccaagcacgatcagcgcgaatacgacgaccaacgcgctctggaaatacacaccgccaaagactttatattttctatgttaggcatggtccagaagctcgaccagaaactgccagttgcaaatgagtatctgctgctttccggcggagtcagagagggggttgttgacctagatctggatgagctgaatgtgtacgccaggggcacagactacgacatggatttcacccttctcgttcccgcattgaaattgcatgaccgcaaccaacctgtgactctagacatgcggcactccgccctgtgtcacagctggctgtccttgcggctgtttgacgaggggacgatatcaaagtggaaagactgttgcacaatcgtggatcacattaatggtgccactaactatttcttcagtccaacaaaagtcgcagactggttttatgatagcatctccatcgtcctgtccgagatccagaaaaaaccccaaagaggcatgccaaaagtcgaaaaggtggaaaaaaacgggaccatcatctctatcattctgggggtcggatcaagcagaatgttgtacgacatcgtgcccgtggtgtcctttaaagggtggccggcagtggcccaaagttggctgatggagaaccacttctgggacggaaaaattactgaagaggaggtgatttccggcttttatctggtaccagcttgctcctacaagggcaaaaaagacaacgagtggaggctgtcatttgctagaagtgaggtgcagttgaagaaatgcatctccagcagcctcatgcaggcataccaggcctgcaaggccatcattataaagctcctttctcgcccaaaggccataagcccatatcatctgaggtccatgatgctgtgggcctgcgatcggctgccggctaattatctggctcaggaagactacgcagctcatttcctcctcggactgatcgatgacttgcaacactgccttgttaataaaatgtgccctaactactttattcctcagtgcaatatgcttgagcatctgtccgaggaaacggtcatgttgcacgcacgaaagctctcgtctgttaggtccgatcctgccgaacacctaagaactgctatcgaacatgtaaaggccgcaaaccggctaacattggaactgcagcgcaggggcagcactacgagcatccccagcccccagagcgacggcggtgacccaaaccaacctgacgaccgtctggccaagaaattgcagcagctggttaccgagaatcccggaaagagtatctcggtgtttatcaacccggatgatgtgactaggcctcactttagaattgatgacaaatttttctag

SEQ ID NO: 253917 - protein, 130 aa, Artificial Sequence
  derived and/or modified sequence
MARRHCFSYWLLVCWLVVTVAEGQEEVFTPPGDSQNNADATDCQIFTLTPPPAPRSPVTRAQPITKTPRCPFHFFPRRPRIHFRFPNRPFVPSRCNHRFPFQPFYWPHRYLTYRYFPRRRLQRGSSSEES

SEQ ID NO: 253918 - DNA, 393 bp, Artificial Sequence
  derived and/or modified sequence
atggcgaggaggcattgcttctcctactggctgctggtctgctggttagttgtaacagtggccgagggtcaagaagaggtttttacgcctcctggcgattcgcaaaacaacgccgacgccaccgactgtcagatctttactctaacaccaccacctgcacctaggtcccccgtgacgcgcgctcagcctataacaaaaaccccacgctgtccttttcacttcttccccaggagaccgagaatacactttaggttcccaaaccggccttttgtcccttccaggtgcaatcacagattcccttttcagcccttctattggccccacagatatctaacctaccgttattttccaagacggagactccagagaggtagttcttctgaagagagttag

SEQ ID NO: 253919 - DNA, 393 bp, Artificial Sequence
  derived and/or modified sequence
atggctagacgccactgtttttcatactggctcctagtatgctggctcgtcgttacagtggccgagggccaggaagaagtctttactccacccggagattcacagaataatgccgacgccaccgactgtcagattttcacattgactccacctcccgcccccagatcccccgttacacgcgcccagccaatcactaaaacaccacgttgcccctttcatttcttcccgcgtagacctcggattcacttcaggttcccgaatagacccttcgtaccctctaggtgcaaccataggtttccttttcaacctttctactggccacaccgctatctgacatacagatattttccaagacgtcgactgcagcggggtagctccagcgaagaaagctag

SEQ ID NO: 253920 - DNA, 393 bp, Artificial Sequence
  derived and/or modified sequence
atggctagacgccactgtttttcatactggctcctagtatgctggctcgtcgttacagtggccgagggccaggaagaagtctttactccacccggagattcacagaataatgccgacgccaccgactgtcagattttcacattgactccacctcccgcccccagatcccccgttacacgcgcccagccaatcactaaaacaccacgttgcccctttcatttcttcccgcgtagacctcggattcacttcaggttcccgaatagacccttcgtaccctctaggtgcaaccataggtttcctttccagcccttttactggccgcaccgctacctgacgtaccgttatttcccaagacgaagactgcaacgcgggtctagctctgaagaatcctag

SEQ ID NO: 253921 - DNA, 393 bp, Artificial Sequence
  derived and/or modified sequence
atggccagaagacactgcttcagctactggctgctggtgtgctggctggtggtgaccgtggccgagggccaggaggaggtgttcaccccccccggcgacagccagaacaacgccgacgccaccgactgccagatcttcaccctgacccccccccccgcccccagaagccccgtgaccagagcccagcccatcaccaagacccccagatgccccttccacttcttccccagaagacccagaatccacttcagattccccaacagacccttcgtgcccagcagatgcaaccacagattccccttccagcccttctactggccccacagatacctgacctacagatacttccccagaagaagactgcagagaggcagcagcagcgaggagagctag

SEQ ID NO: 253922 - DNA, 393 bp, Artificial Sequence
  derived and/or modified sequence
atggctcgcagacactgtttcagctactggctcctggtttgctggctggtcgttacagtggccgagggccaggaggaggtgttcacaccccctggtgatagccagaacaatgccgatgcaaccgactgccaaatcttcacactgaccccccccccagctccaaggtcacctgtcacacgagcgcagccaataaccaaaaccccacggtgtcccttccatttctttcctaggaggcctcgaatccattttcgatttccaaatagacctttcgtcccctcccgctgcaaccaccggttcccttttcagccattttattggccccatcgatatctgacttatcgatatttcccaaggcgtcggttgcagaggggcagctcgtccgaagagtcgtag

SEQ ID NO: 253923 - DNA, 393 bp, Artificial Sequence
  derived and/or modified sequence
atggcccggcggcactgcttctcctactggctgctggtgtgctggctggtggtgacagtggccgagggccaggaggaggtgttcaccccacctggggacagccagaacaatgctgatgccacagactgccagatcttcaccctgaccccacctccagcccccaggagccctgtgacccgggcccagcccatcaccaagaccccccgctgccccttccacttcttcccccggcggccccgcatccacttccgcttccccaaccggccctttgtgcccagccgctgcaaccaccgcttccccttccagcccttctactggccccaccgctacctgacctaccgctacttcccccggcggcggctgcagaggggcagcagcagcgaggagagctag

SEQ ID NO: 253924 - DNA, 393 bp, Artificial Sequence
  derived and/or modified sequence
atggcccggcggcactgcttcagctactggctgctggtgtgctggcttgttgtcacagtggcagaaggccaggaggaagtgtttacgcctccaggggattcccaaaacaacgccgatgcgactgattgtcagatttttactttaactcctccccccgcccctcgcagtccggtgacccgcgcacagccaatcactaagactccgagatgtcccttccacttttttccgcggagacccaggatccattttcgctttcccaaccgcccttttgtgcccagtcggtgcaatcaccggtttccttttcagccattctattggcctcaccggtacctcacctatcggtacttcccccgaaggcgcttacagcgcgggtccagcagtgaggagtcctag

SEQ ID NO: 253925 - RNA, 393 nt, Artificial Sequence
  derived and/or modified sequence
auggcuagacgccacuguuuuucauacuggcuccuaguaugcuggcucgucguuacaguggccgagggccaggaagaagucuuuacuccacccggagauucacagaauaaugccgacgccaccgacugucagauuuucacauugacuccaccucccgcccccagaucccccguuacacgcgcccagccaaucacuaaaacaccacguugccccuuucauuucuucccgcguagaccucggauucacuucagguucccgaauagacccuucguacccucuaggugcaaccauagguuuccuuuucaaccuuucuacuggccacaccgcuaucugacauacagauauuuuccaagacgucgacugcagcgggguagcuccagcgaagaaagcuag

SEQ ID NO: 253926 - RNA, 393 nt, Artificial Sequence
  derived and/or modified sequence
auggcuagacgccacuguuuuucauacuggcuccuaguaugcuggcucgucguuacaguggccgagggccaggaagaagucuuuacuccacccggagauucacagaauaaugccgacgccaccgacugucagauuuucacauugacuccaccucccgcccccagaucccccguuacacgcgcccagccaaucacuaaaacaccacguugccccuuucauuucuucccgcguagaccucggauucacuucagguucccgaauagacccuucguacccucuaggugcaaccauagguuuccuuuccagcccuuuuacuggccgcaccgcuaccugacguaccguuauuucccaagacgaagacugcaacgcgggucuagcucugaagaauccuag

SEQ ID NO: 253927 - protein, 618 aa, Artificial Sequence
  derived and/or modified sequence
MEVKNFAVWDYVVFAALFFISSGIGVFFAIKERKKATSREFLVGGRQMSFGPVGLSLTASFMSAVTVLGTPSEVYRFGASFLVFFIAYLFVILLTSELFLPVFYRSGITSTYEYLQLRFNKPVRYAATVIYIVQTILYTGVVVYAPALALNQVTGFDLWGSVFATGIVCTFYCTLGGLKAVVWTDAFQMVVMIVGFLTVLIQGSTHAGGFHNVLEQSTNGSRLHIFDFDVDPLRRHTFWTITVGGTFTWLGIYGVNQSTIQRCISCKTEKHAKLALYFNLLGLWIILVCAVFSGLIMYSHFKDCDPWTSGIISAPDQLMPYFVMEIFATMPGLPGLFVACAFSGTLSTVASSINALATVTFEDFVKSCFPHLSDKLSTWISKGLCLLFGVMCTSMAVAASVMGGVVQASLSIHGMCGGPMLGLFSLGIVFPFVNWKGALGGLLTGITLSFWVAIGAFIYPAPASKTWPLPLSTDQCIKSNVTATGPPVLSSRPGIADTWYSISYLYYSAVGCLGCIVAGVIISLITGRQRGEDIQPLLIRPVCNLFCFWSKKYKTLCWCGVQHDSGTEQENLENGSARKQGAESVLQNGLRRESLVHVPGYDPKDKSYNNMAFETTHF

SEQ ID NO: 253928 - DNA, 1857 bp, Artificial Sequence
  derived and/or modified sequence
atggaggtgaagaacttcgccgtgtgggactacgtggtgttcgccgccctgttcttcatcagcagcggcatcggcgtgttcttcgccatcaaggagagaaagaaggccaccagcagagagttcctggtgggcggcagacagatgagcttcggccccgtgggcctgagcctgaccgccagcttcatgagcgccgtgaccgtgctgggcacccccagcgaggtgtacagattcggcgccagcttcctggtgttcttcatcgcctacctgttcgtgatcctgctgaccagcgagctgttcctgcccgtgttctacagaagcggcatcaccagcacctacgagtacctgcagctgagattcaacaagcccgtgagatacgccgccaccgtgatctacatcgtgcagaccatcctgtacaccggcgtggtggtgtacgcccccgccctggccctgaaccaggtgaccggcttcgacctgtggggcagcgtgttcgccaccggcatcgtgtgcaccttctactgcaccctgggcggcctgaaggccgtggtgtggaccgacgccttccagatggtggtgatgatcgtgggcttcctgaccgtgctgatccagggcagcacccacgccggcggcttccacaacgtgctggagcagagcaccaacggcagcagactgcacatcttcgacttcgacgtggaccccctgagaagacacaccttctggaccatcaccgtgggcggcaccttcacctggctgggcatctacggcgtgaaccagagcaccatccagagatgcatcagctgcaagaccgagaagcacgccaagctggccctgtacttcaacctgctgggcctgtggatcatcctggtgtgcgccgtgttcagcggcctgatcatgtacagccacttcaaggactgcgacccctggaccagcggcatcatcagcgcccccgaccagctgatgccctacttcgtgatggagatcttcgccaccatgcccggcctgcccggcctgttcgtggcctgcgccttcagcggcaccctgagcaccgtggccagcagcatcaacgccctggccaccgtgaccttcgaggacttcgtgaagagctgcttcccccacctgagcgacaagctgagcacctggatcagcaagggcctgtgcctgctgttcggcgtgatgtgcaccagcatggccgtggccgccagcgtgatgggcggcgtggtgcaggccagcctgagcatccacggcatgtgcggcggccccatgctgggcctgttcagcctgggcatcgtgttccccttcgtgaactggaagggcgccctgggcggcctgctgaccggcatcaccctgagcttctgggtggccatcggcgccttcatctaccccgcccccgccagcaagacctggcccctgcccctgagcaccgaccagtgcatcaagagcaacgtgaccgccaccggcccccccgtgctgagcagcagacccggcatcgccgacacctggtacagcatcagctacctgtactacagcgccgtgggctgcctgggctgcatcgtggccggcgtgatcatcagcctgatcaccggcagacagagaggcgaggacatccagcccctgctgatcagacccgtgtgcaacctgttctgcttctggagcaagaagtacaagaccctgtgctggtgcggcgtgcagcacgacagcggcaccgagcaggagaacctggagaacggcagcgccagaaagcagggcgccgagagcgtgctgcagaacggcctgagaagagagagcctggtgcacgtgcccggctacgaccccaaggacaagagctacaacaacatggccttcgagaccacccacttctag

SEQ ID NO: 253929 - DNA, 1857 bp, Artificial Sequence
  derived and/or modified sequence
atggaagtcaaaaacttcgcggtttgggactatgtcgtttttgcggccctcttttttatctcatccggaatcggagtcttttttgctatcaaggagcgcaagaaagctacctcacgcgaattcctagttggaggcagacagatgagttttggccccgtcggcttgtccctgacagcgtcttttatgtctgcagtgacagttctgggaaccccatcggaagtttaccgtttcggcgcatctttcctggtgttcttcattgcatacctgttcgtgatcctgttgacctcagaactcttcctgccagtattttatcgcagcggaattacatccacgtacgagtacctgcagttaaggttcaataagcctgtgcgctacgcagccacagtaatttacatcgttcagacaatcctatatacaggagtggtcgtctacgccccagccttggctctcaaccaggttactggctttgatctgtgggggtcagtgttcgcaaccggcatagtgtgtactttttactgtacattggggggactgaaggccgttgtctggactgatgcttttcagatggtggttatgatcgtgggctttttgaccgtactcatccagggatcaacccatgccggcgggttccataacgtgctggagcagtccactaacggtagtcgtttgcatatctttgattttgacgtggacccgctacggaggcacaccttttggacgatcacggtgggaggaacattcacatggttaggcatctacggggtgaatcagagtacgatccagagatgcatttcctgtaaaaccgagaaacacgccaaactggccctctactttaaccttctggggctgtggatcattctcgtttgtgccgtgttcagtggccttattatgtactcccattttaaagactgtgacccctggacatcaggaatcatttctgctccagaccagctaatgccctactttgttatggaaatttttgccaccatgcctggactgcctggcctgttcgtggcatgcgcctttagtggcactctatccaccgtggcaagctcaatcaacgccctggcgactgtcacattcgaggacttcgtgaagtcttgcttcccacacctgagcgacaagctctccacttggatctcaaagggtctctgcctgctctttggggttatgtgcacgtctatggccgttgcagcttcagtgatgggcggcgttgtccaagcatctctgagtatacacggaatgtgtggaggcccaatgttgggtctgttctccctgggcatagtgttcccattcgtcaattggaaaggagcgctcgggggcctcttaacggggattactctgtccttttgggtagctatcggtgccttcatctatcctgcccccgcaagcaagacatggccgctccctctgagcacagatcagtgcattaagagcaacgtgactgccacaggaccccccgtcctcagcagtcgccctgggatcgcggacacttggtactcaatttcgtatctctattatagcgcagtcgggtgtctgggttgtattgtcgctggagtaataatttcccttatcacaggtcgtcagaggggggaagatatccaacctctccttatccgccccgtttgtaacctcttctgcttctggtcaaagaagtacaaaacactctgttggtgcggcgtgcaacatgactcaggcaccgagcaggaaaatctggagaacggaagcgctcgtaaacaaggcgccgagagcgtgctgcagaatggccttcgacgggaaagccttgtacacgttccaggatatgatccaaaggacaagagctacaacaacatggcctttgaaactactcacttttag

SEQ ID NO: 253930 - DNA, 1857 bp, Artificial Sequence
  derived and/or modified sequence
atggaggtgaagaactttgctgtgtgggactatgtggtgtttgctgccctcttcttcatcagcagcggcatcggggtcttctttgccatcaaggagaggaagaaggccaccagccgggagttcctggtgggcggccggcagatgagctttggacctgtgggcctgagcctgacagccagcttcatgtctgctgtgacagtgctgggcacccccagcgaggtgtacagatttggagccagcttcctggtgttcttcatcgcctacctgtttgtgatcctgctgaccagcgagctgttcctgcctgtgttctaccgcagcggcatcaccagcacctatgagtacctgcagctgcgcttcaacaagcctgtgcgctatgctgccaccgtcatctacatcgtgcagaccatcctgtacacaggagtggtggtgtatgccccagccctggccctgaaccaggtgacaggctttgacctgtggggctctgtgtttgccactggaattgtgtgcaccttctactgcaccctgggcggcctgaaggctgtggtgtggacagatgccttccagatggtggtgatgattgtgggcttcctgactgtgctgatccagggcagcacccatgctgggggcttccacaacgtgctggagcagagcaccaacggcagccggctgcacatctttgattttgatgtggaccccctgcggcggcacaccttctggaccatcaccgtgggcggcaccttcacctggctgggcatctatggagtgaaccagagcaccatccagcgctgcatcagctgcaagacagagaagcacgccaagctggccctgtacttcaacctgctgggcctgtggatcatcctggtgtgtgctgtgttttctggcctcatcatgtacagccacttcaaggactgtgacccctggaccagcggcatcatcagcgccccagaccagctgatgccctactttgtgatggagatctttgccaccatgcctggcctgcccggcctgtttgtggcctgtgccttcagcggcaccctgagcacagtggccagcagcatcaatgccctggccaccgtgacctttgaggactttgtgaagagctgcttcccccacctgagtgacaagctgagcacctggatcagcaagggcctgtgcctgctgtttggagtgatgtgcacctccatggctgtggccgcctctgtgatgggcggcgtggtgcaggccagcctgagcatccacggcatgtgtggcggccccatgctgggcctcttcagcctgggcatcgtgttcccctttgtgaactggaagggggccctgggcggcctgctgaccggcatcaccctgtccttctgggtggccatcggggccttcatctacccagccccagccagcaagacctggcccctgcccctgagcacagaccagtgcatcaagagcaatgtgacagccaccggcccccctgtgctgagcagcaggcctggcattgctgacacctggtacagcatctcctacctgtactacagcgctgtgggctgcctgggctgcatcgtggccggggtcatcatcagcctcatcaccggccggcagagaggagaggacatccagcccctgctgatccggcctgtgtgcaacctcttctgcttctggagcaagaagtacaagaccctgtgctggtgtggggtgcagcatgattctggaacagagcaggagaacctggagaatggcagcgccaggaagcagggcgctgagagcgtgctgcagaatggcctgcggcgggagagcctggtgcacgtgcccggctatgaccccaaggacaagagctacaacaacatggcctttgagaccacccacttctag

SEQ ID NO: 253931 - DNA, 1857 bp, Artificial Sequence
  derived and/or modified sequence
atggaggtgaagaacttcgccgtgtgggactacgtggtgttcgccgcactgttttttatttcgagcggaatcggggttttttttgccatcaaagaacggaaaaaagcaactagtcgggaattccttgtgggaggacgccaaatgagctttggccctgtgggcctgtctttgacagcctccttcatgtctgccgtaaccgtcctcggaacaccttcagaggtgtatcgtttcggagcaagcttcctagtgttcttcattgcttatctgttcgtaatcctcctcacatctgaactcttcctaccagtcttctataggtctggcatcacatccacttacgagtacctacagcttcgtttcaataagccagttagatacgccgctacagtcatatacatagtgcagaccatcttgtatacaggcgtggtggtgtatgcccccgcactcgctttgaatcaggtgacgggcttcgatctttgggggagtgtctttgcaaccggtatcgtgtgcacattctactgcaccctaggggggctgaaggccgtggtatggacagacgcctttcagatggtggttatgattgtgggctttctgacagtcctgatacagggcagtacccacgccgggggctttcacaacgtcctggaacaatctacgaacggtagcaggctgcatatattcgacttcgatgtggaccccctgcgccgccacaccttttggaccataactgtgggcggtactttcacatggcttgggatctacggggtgaaccagagcaccatccagagatgtattagctgtaaaaccgagaagcatgccaaactcgctctctatttcaatctcctcgggctctggataattcttgtctgtgccgtttttagcggcctgataatgtacagccacttcaaggattgtgatccgtggacttccgggatcatcagcgccccggatcagctcatgccttacttcgtgatggagatcttcgcaacgatgcctggccttcctggactgttcgtcgcctgcgcattttccgggaccttatccaccgtagcgtcatctataaatgcccttgctacagtgactttcgaagatttcgtgaagtcctgcttcccacatctctccgacaaattatcaacatggatctccaaggggctgtgcctcctctttggcgtaatgtgcacatcaatggccgtagctgctagcgtcatgggtggggtggtgcaggcatcactcagtatccacgggatgtgcggtggccctatgcttgggttgttttctcttggcattgtgttcccttttgtgaattggaaaggggccctcggagggctgctgaccggcattactctgtctttttgggtggctatcggcgcattcatttaccccgcacccgcttccaaaacctggcccctgcccctgtctacagatcaatgcattaagagtaatgtgaccgcgaccggcccgcctgttttgtctagtagaccagggatcgctgacacctggtattctattagctatttgtattattcggccgtcggctgccttgggtgtatcgttgccggtgtaataattagcctaattacgggaagacagcggggagaagatatacagccgttgctgatacgccctgtgtgcaatctattctgcttttggtctaaaaaatacaagacactgtgctggtgcggcgttcagcacgacagcgggacggagcaagaaaatctcgagaacggaagcgcccgcaagcaaggagcggaaagtgtcctccagaacggactgcggcgtgaaagccttgtgcatgtccctggatatgacccaaaagataagtcctataacaatatggcctttgaaacaactcacttctag

SEQ ID NO: 253932 - DNA, 1857 bp, Artificial Sequence
  derived and/or modified sequence
atggaagtgaaaaactttgcagtgtgggattatgtggtgtttgcggctctgttctttatctcttcaggaatcggggtcttcttcgctattaaggagcgcaagaaggccacatcccgggagtttctggtgggcggacgtcaaatgtcttttggacccgtcggacttagcttgacagcgtcttttatgtctgccgtgaccgttctagggacaccgtctgaggtatacaggtttggcgcatcatttctggttttcttcatcgcatacctgtttgtgatcctattgactagtgagttgttcctccctgtgttttataggagtggcataacgagcacatacgagtacttacagttgcggttcaacaagcccgtccggtatgccgcaaccgtgatttacatagtccaaaccatcctgtataccggggttgtggtttacgctccagccctggccctgaatcaagtgactgggttcgatctgtggggctctgtcttcgccacgggaattgtgtgcacattctactgtacactcggtggacttaaggccgtagtgtggactgacgctttccaaatggtcgtgatgatagttggcttcctgacggtattgattcagggctccacccatgccggagggtttcataacgtcctcgagcagtctaccaacggtagtaggctccacatttttgatttcgacgttgaccccctgcgcagacacaccttctggacaattaccgttggaggcacatttacatggctcggaatctacggagtgaaccagtcgactatccagcgctgtattagctgtaaaactgagaaacacgcaaagctagctttgtattttaacctgttgggactgtggatcatattggtatgcgccgtgtttagtggactaatcatgtactctcactttaaggattgcgatccatggacttccggtattatatctgctcctgaccaactcatgccttatttcgtcatggagattttcgccacaatgcctggattgcctggactttttgtggcttgcgcattcagcggaaccctgagtactgtcgcaagttctattaacgccttggccacagtcactttcgaagacttcgtgaaaagttgcttccctcatttgtcagacaagcttagtacatggatttctaagggactgtgccttctcttcggggtgatgtgcacctccatggctgtggcagcgagcgtcatgggaggcgtcgtacaggcctctctgtccattcacggcatgtgtggcggtccgatgcttggcttgttttccctcgggattgtcttcccattcgtgaactggaaaggcgcactgggcggactgctaacaggcatcacactgagcttctgggttgccataggtgctttcatctaccccgcaccggcttctaagacatggcccctcccactgtccaccgaccagtgcataaaaagtaacgtcaccgcaactggacctcctgtcttgtccagtaggccaggtatagccgatacctggtactccatttcctacctgtactactccgcagtcggatgcttgggatgcatcgtggcaggggtgataatcagccttattactgggagacagcgcggtgaggatattcagcctctgctgatcagacccgtgtgtaacttgttctgcttctggtctaaaaaatataagacactgtgctggtgtggagtgcagcacgattcaggcaccgaacaggagaacctggaaaatggatccgctaggaaacagggagccgagtccgttctgcagaatggactgcgcagagaatctctggtgcatgtgcctggatatgatccaaaagataagtcgtacaacaacatggcatttgagaccacccatttctag

SEQ ID NO: 253933 - DNA, 6250 bp, Artificial Sequence
  derived and/or modified sequence
ctgaattccttctctgtggcatatgctttaggagaggagcagacagctcttagctagggtcagatttcaaattctcatctcttggtgccaataccaccaccagattcttctttgaagtcaacttttgagatcttcactaagtacacgttggtgtctgaagattcacacgagtgcctctggtaatcattttcttcagggaatcacagtctctcctctcagcaaagcatccactgtactgaactttgcttttggaaacatcttcttcctgagacctcgttgaaagaaactctctggtgtcatactttccaatatggaggtgaagaactttgcagtttgggattatgttgtatttgcagccctctttttcatttcctctggaattggggtgttctttgccattaaggagagaaaaaaggcaacttcccgagagttcctggttgggggaaggcaaatgagctttggccctgtcggcttgtctctgacagccagcttcatgtcagctgtcacggtcctggggaccccttctgaagtctaccgctttggggcatccttcctagtcttcttcattgcttacctatttgtcatcctcttaacatcagagctctttctccctgtgttctacagatctggtatcaccagcacttatgagtacttacaactacgattcaacaaaccagttcgctatgctgccacggtcatctacattgtacagacgattctctacacaggagtggtggtgtatgctcctgccctggcactcaatcaagtgactgggtttgatctctggggctctgtgtttgcaacaggaattgtttgcacattctactgtaccctgggaggattaaaagcagtggtgtggacagatgcatttcagatggttgtcatgattgtgggcttcttaacggttctcattcaaggatcaactcatgctgggggattccacaatgtattagagcaatcaacaaatggatctcgactacatatatttgactttgatgtagatcctctcaggcgacacactttttggactatcacagtgggaggaacttttacttggctcggaatctatggggtcaatcaatcaactattcagcgatgcatctcttgcaaaacagaaaagcatgctaagcttgccttgtattttaacttgctgggtctctggatcattctggtgtgtgctgtcttctctggcttaatcatgtactctcactttaaagactgtgacccttggacttctggcatcatctcagcaccagaccagctgatgccgtactttgtcatggagatatttgccacaatgccaggactgccaggactttttgtggcttgtgccttcagtggaactctgagcaccgtggcttccagcatcaatgccttggcaacagtgacctttgaggattttgtcaagagctgttttcctcatctctccgacaagctgagcacctggatcagtaaaggcttatgtctcttatttggcgtgatgtgtacctctatggctgtggctgcatctgtcatgggaggtgttgtgcaggcttccctcagcattcacggcatgtgtggaggaccaatgctgggcttattctccctgggaatcgtgttcccttttgtgaattggaagggtgcactaggaggtcttcttactggaatcaccttgtcattttgggtggccattggggccttcatttaccctgcaccagcctctaagacatggcctttgcctctgtcaacagaccaatgtatcaaatcaaatgtgacagcaacagggcctccagtactatccagcagacctggaatagctgatacctggtactcgatctcctacctttactacagtgcagtgggctgcttaggatgcattgttgctggagtaatcatcagcctcataacaggtcgccaaagaggtgaggatattcaaccactgttaattagaccagtttgtaatttattttgcttttggtctaagaagtacaaaacactatgctggtgtggagttcagcatgacagtgggacagagcaggaaaaccttgagaatggcagtgcccggaaacagggggctgaatctgtcttacagaacggactcagaagagaaagcctggtacatgttccaggctatgatcctaaggacaaaagctacaacaatatggcatttgagactacccatttctaaggcaatacctgtatgaatgcacacacacacgtgcaatacacacacacacacacaaactccacatacttcttgcctacttgttagtagatatgtatagttgccattgctagaagacagggatgtctggtgcctatttctacttatttataactacatgcaaaatgactgtctctcgggatattctttgaaagactccaactttcacagagaaaaaccaacctgctccaaatgcccttgactacttccttcttgaataaattagggctggatttcattaccattcaagaaagcgaagtctttttgcttggtgtcatattaaacttcaggtttttcgttttagtagttttttaaccatcaaaatatcttggagtttagaggcagaacgggaaacagaaatatgcatatttaacactttcctgccacgagggataaaatagaggaatgacatccacccctgacctcatacctgacatacatgtagatatattttatgccacccatctcccatcctgtagctacaattggcatacaactactattaacctcccttcaccaccactgtcaggtcctcttccagtcattccagtcattagctgtcctgaccaaacattaaaaaaaaaattcagctaaatacagaagaagatggtatgtctggctagtgggagtgattataactaaaaactttgctccttttgtgctgtccatgcagtatgtcttcttcctttctatcactttacaatgaaaaattgcctcagagctcaataagaagtctagagcctttttccagggctaaggaaagagaaaaggaatgtcctatagaaggttgttaggatagaatttggtaaaagaacgttgcaaatattgtaacagaccataggagatttcatcagcaataggattcttctttggagaaaatacattgtccataagacttgtactctgctcattcaactcatgtgagcaagctcaactcactccacctgggttaggtaacagaagtggagaacttcatagttcgtgtctagaaaataatgtttaaagttctggagaatgagggtattgcagattaaaaggcgagttgacaaatgaaggagcagtgaaagatttttggaagaagtgaagaagtgaaattctgaaaaggtaaaagaaagaaccagtatgtcacaggggccaagtcagaggacagataataagaaacaaagttgtatctgagagtcatatattaggacaggtgtcagatatttattttggtggccagataaaagcaaaaggcctagaaacagtgtgttagcaaagtaagaagaaatggtccaaataggcaaggataaggaaatccaaaggttgtctttaaatatttctcaaaagagaaagccttgaaagaagcatacaatagagaaaaaataaattaccagtatttattattagaaaagatagaaagacagacaaatcagtggaggaattaaaacagagaaactggagtttataaaacagagcccaatccttgccttctctccctccactcaaatagaaaaggagaatggagaaagagaaagaaggtattaggctacagtttataagagagatgagaaaaaaatacatttgggaatagagggaaagggtcaaaaggggtcacatttggagaaatatctgaaaatgagaaggagcagaatttttggaaacattttttaaagtctggcaacgctaattaagctgttgatctaaggatttgcaaattgagaggtgcaattattttccaaatgatttgtgacactcttattaattagaatatatattttgtgaatattgaaatctgagccaaaactagttagctttattaatatcttagggaaagaagagagaaagaaagagggagggagagagagaaagaaagaaagaaagaaagaaagaaagaaaagaagaaagaaagaaagaaaaagacaggaagaggaagagagagacagaaagaataaaaaaacagcaattctgaggatgagaataaattaatggtaggtattacatatgcatatacatatatatatctgtacacatatatatgtaaatatgatttggaatacatcaggattgtgaacttccacttgggatagcataaaagcaaaatataccatacaatttttcattttactcacaaattttactcacaaattctcctaaagacatttcactaggtcagtacatttccgagaaagttttaaaaacgtttcttcttttatagtccctaattatcttacctggagtgttatcaaaatgtcatacaactggaaaatgcaattattattataaaaatatctctgccttctcttgtgtaatgaaatttatggcattaggagatgacatttcaagagattttagaggtcaatgtagagactccccccattcttcttaattgaacaaacatgcataaatctagggtttcaggtagagagcagatgggaatctacaggaaactgtcttccatagtgtatgaaaaccgtgtttgttgtgtggtgaagcaaaaggaaactatgaagcgcacagtcaatagattcagctagtgagtcccagcactcctttcaggccctcactaggattagcagcccagagtcatgccaaggccactggtgcagtacaaagacagttcagtgacaagttccatccataccatggaagagggttaaacttgtggctgtttttgccacagcatgaccagagacattctcaataaatggcactaggaatgatgagttttagaggggcctaaaatgttccaaacttgatactcaccactgtacctttaaagcacaaccacagatattggtaaaaatggaacagaattacctcaatacctctttaactcattctgtatgaattcattttgatgacagacattttttgtcaccatttggaataagaactacaacagcttatgattgaggtgaggaactgcagtcaaatggcttaggttcaaacacgagttctgacacaaatctaggtaattttgggcaatattttaaaatcttagtttattcaccaattaataggagtaaaaattacccctacttaatagaattattatgaagatttatataagtaaatcatataaagtgcttagcacagtgtgactggcccacatggaacatttaatacttggtctgcagtatatgaagaaaatggtgtacatgttaacttaaatggtttcattatttctcttcaggatttttaagatgtgggatcagaatatatgttactattttgagaattagaaataataagaaaaacagaatgtatacattaaaagtcatgcctaaatttccaaagagtagtttttttaatgccagagtttaaataaaatattattttccagagagtaacttttctaaaggtcctaaattctgaaaagagagaaaactactgttataaacaagtttattactaaaagatgcaattcattactatgatttattattattttgtacatgtaaaccttgataaataaacagcatctcaacccaagtttattactcattgcacagttcaaagcaactatgactctcaaaatagcaacagaaggtggggagggtcttttccctttgtttatatagtatttgctaaaaatgaactttactattttgtggctttatagggttacaccatttcattctaaagagaaacaaaaagtaaaccattggccatgtggctttcaaacagtatttcaaagagaatattactgaaatatttttgtgctgttacagtcttaatcaaacattattacaaagatcagatacggaaaaaatagaggagtctccccttaattgttccctttgaaataaattgttttaaattattacagaagttatagctgtatgtacatgcacatttgtatatttacaagtctcatgtacttaatctcaatattgcaaattagctaggtttactatagagttaactgcttttatctagcatttataatcttgtagtataacctattttcaaataactaaaatttaattgatgtcatcaatggtacacatgaaaatgatacaaatttataaactaataaaatgtaactcgtcattgatagtaaat

SEQ ID NO: 253934 - DNA, 1932 bp, Artificial Sequence
  derived and/or modified sequence
ggtaaatatattaaagaccaagatttgcagtaacatttatcatatcaaatctccaaatctagtggaggaatttaaacagaggacacagacagctcttgggagagtcttcatatttttattgtacttacaactacgattcaacaaaccagttcgctatgctgccacggtcatctacattgtacagacgattctctacacaggagtggtggtgtatgctcctgccctggcactcaatcaagtgactgggtttgatctctggggctctgtgtttgcaacaggaattgtttgcacattctactgtaccctgggaggattaaaagcagtggtgtggacagatgcatttcagatggttgtcatgattgtgggcttcttaacggttctcattcaaggatcaactcatgctgggggattccacaatgtattagagcaatcaacaaatggatctcgactacatatatttgactttgatgtagatcctctcaggcgacacactttttggactatcacagtgggaggaacttttacttggctcggaatctatggggtcaatcaatcaactattcagcgatgcatctcttgcaaaacagaaaagcatgctaagcttgccttgtattttaacttgctgggtctctggatcattctggtgtgtgctgtcttctctggcttaatcatgtactctcactttaaagactgtgacccttggacttctggcatcatctcagcaccagaccagctgatgccgtactttgtcatggagatatttgccacaatgccaggactgccaggactttttgtggcttgtgccttcagtggaactctgagcaccgtggcttccagcatcaatgccttggcaacagtgacctttgaggattttgtcaagagctgttttcctcatctctccgacaagctgagcacctggatcagtaaaggcttatgtaggtctcttatttggcgtgatgtgtacctctatggctgtggctgcatctgtcatgggaggtgttgtgcaggcttccctcagcattcacggcatgtgtggaggaccaatgctgggcttattctccctgggaatcgtgttcccttttgtgaattggaagggtgcactaggaggtcttcttactggaatcaccttgtcattttgggtggccattggggccttcatttaccctgcaccagcctctaagacatggcctttgcctctgtcaacagaccaatgtatcaaatcaaatgtgacagcaacagggcctccagtactatccagcagacctggaatagctgatacctggtactcgatctcctacctttactacagtgcagtgggctgcttaggatgcattgttgctggagtaatcatcagcctcataacaggtcgccaaagaggtgaggatattcaaccactgttaattagaccagtttgtaatttattttgcttttggtctaagaagtacaaaacactatgctggtgtggagttcagcatgacagtgggacagagcaggaaaaccttgagaatggcagtgcccggaaacagggggctgaatctgtcttacagaacggactcagaagagaaagcctggtacatgttccaggctatgatcctaaggacaaaagctacaacaatatggcatttgagactacccatttctaaggcaatacctgtatgaatgcacacacacacgtgcaatacacacacacacacacaaactccacatacttcttgcctacttgttagtagatatgtatagttgccattgctagaagacagggatgtctggtgcctatttctacttatttataactacatgcaaaatgactgtctctcgggatattctttgaaagactccaactttcacagagaaaaaccaacctgctccaaatgcccttgactacttccttcttgaataaattagggctggatttcattaccattcaagaaa

SEQ ID NO: 253935 - protein, 550 aa, Artificial Sequence
  derived and/or modified sequence
MTKVPATKKLQSSPNSGAVRPFYASENLRQVPDKPMKSIKYMDKEIINLKKDLIRSRFLIQSVKIGRGYFAILREETAKKKKQQQLQKLKEEERNKFQPAEKISEIHYGDTLLSTYDDEKLKTLGARVTRRPFTPIHSCIISPSLTEAHVEPLFRQLCALHWLLEALTIDHTHHTMKPVITCWNPKDPGGSKSTIKKINKDKSMGQKWEHFITAPKTKKFKIPTMRVTNRKPSRRGSTLSLSRASGGSSPQSSMISVNPGSDEPPSVNTQVTSSKDIEDNESSSTKPDEEPLYMNLQKLLEMVREDARRTVTIENGMQRKAPSILSVLKQNKSNSAYKEMQTTLKSSERSSSTSAESHIQPVQKKSKNRTNCDINIHYKSGVCNTMRAKFYSVAQEAGFCLQDKMEILMKRQEERGIQKFRAFVLVSNFQKDIAKMRHHISVVKGDAEEIADHWYFDLLSKLPEDLKNFRPAKKILVKLQKFGENLDLRIRPHVLLKVLQDLRIWELCSPDIAVAIEFVREHIIHMPQEDYISWLQSRINIPIGPYSALR

SEQ ID NO: 253936 - DNA, 1653 bp, Artificial Sequence
  derived and/or modified sequence
atgaccaaggtgcccgccaccaagaagctgcagagcagccccaacagcggcgccgtgagacccttctacgccagcgagaacctgagacaggtgcccgacaagcccatgaagagcatcaagtacatggacaaggagatcatcaacctgaagaaggacctgatcagaagcagattcctgatccagagcgtgaagatcggcagaggctacttcgccatcctgagagaggagaccgccaagaagaagaagcagcagcagctgcagaagctgaaggaggaggagagaaacaagttccagcccgccgagaagatcagcgagatccactacggcgacaccctgctgagcacctacgacgacgagaagctgaagaccctgggcgccagagtgaccagaagacccttcacccccatccacagctgcatcatcagccccagcctgaccgaggcccacgtggagcccctgttcagacagctgtgcgccctgcactggctgctggaggccctgaccatcgaccacacccaccacaccatgaagcccgtgatcacctgctggaaccccaaggaccccggcggcagcaagagcaccatcaagaagatcaacaaggacaagagcatgggccagaagtgggagcacttcatcaccgcccccaagaccaagaagttcaagatccccaccatgagagtgaccaacagaaagcccagcagaagaggcagcaccctgagcctgagcagagccagcggcggcagcagcccccagagcagcatgatcagcgtgaaccccggcagcgacgagccccccagcgtgaacacccaggtgaccagcagcaaggacatcgaggacaacgagagcagcagcaccaagcccgacgaggagcccctgtacatgaacctgcagaagctgctggagatggtgagagaggacgccagaagaaccgtgaccatcgagaacggcatgcagagaaaggcccccagcatcctgagcgtgctgaagcagaacaagagcaacagcgcctacaaggagatgcagaccaccctgaagagcagcgagagaagcagcagcaccagcgccgagagccacatccagcccgtgcagaagaagagcaagaacagaaccaactgcgacatcaacatccactacaagagcggcgtgtgcaacaccatgagagccaagttctacagcgtggcccaggaggccggcttctgcctgcaggacaagatggagatcctgatgaagagacaggaggagagaggcatccagaagttcagagccttcgtgctggtgagcaacttccagaaggacatcgccaagatgagacaccacatcagcgtggtgaagggcgacgccgaggagatcgccgaccactggtacttcgacctgctgagcaagctgcccgaggacctgaagaacttcagacccgccaagaagatcctggtgaagctgcagaagttcggcgagaacctggacctgagaatcagaccccacgtgctgctgaaggtgctgcaggacctgagaatctgggagctgtgcagccccgacatcgccgtggccatcgagttcgtgagagagcacatcatccacatgccccaggaggactacatcagctggctgcagagcagaatcaacatccccatcggcccctacagcgccctgagatag

SEQ ID NO: 253937 - DNA, 2450 bp, Artificial Sequence
  derived and/or modified sequence
agttgcctactttccccgcagtgcgataaacccctcgttggggccgccttagttctcggccgctctcggaggatggcgatctgggagcccctccatgggacccctctcacactttgtcactggaattttatttattttttagttcatattttattttgcttatagaagagaaagatatcccttccgaagaggaggaagcttacagaagtttataacctttcaaaaagtaaataagtccaggcttgcctgattctgccctacccggacttccttatcccgtctgtgggagacccaggtgctttctcattactcttcagaaggaaaccgctttggagttcgtgtaattgggacttggggatcagggagaagttgccgaaacttctcataccagtaactactgaagtagaagattctggaaaaatccttgtcttgggggcacaggctaaaacctgaaggatttttaagatgaccaaggttccagccaccaagaagcttcagagttcccccaactcgggggctgtccggcccttttatgcctcggagaacctaaggcaggtcccagacaagccaatgaagagcatcaagtatatggacaaggaaataataaacctcaaaaaggaccttatacgaagccgctttttgatccagtctgtgaagataggccgtggatattttgctattctgagggaagagactgcaaagaaaaagaagcaacaacaacttcagaaactgaaagaggaggaaagaaataaattccagccagccgaaaagatctcagaaatccactatggggacaccttattgagcacatatgatgatgagaagttgaagacactgggagctagagtcacacgtcgcccattcactcccatccacagctgcatcatttctccctcgctaaccgaggctcacgtcgagcccctcttccgccagctctgtgctctccactggcttctggaggccctgactattgaccacacccaccacaccatgaagcctgtgatcacctgctggaacccaaaggacccgggtggaagcaagagcaccattaaaaaaatcaataaggacaagtccatgggacagaaatgggagcatttcatcacagcgccaaagaccaagaaattcaaaattcccacaatgcgagtcaccaaccgcaaaccaagccggcgaggctccacactcagtctgagtcgggccagtggggggtcctctccccagagcagcatgatctctgtgaaccctggctcggatgagcccccaagtgtgaacacccaggtgaccagcagcaaggacattgaggacaatgagtcatcttcaaccaagccagatgaagaacctctgtatatgaatctgcagaagctcctggagatggttcgggaagatgcccggaggacagtcacaatagaaaatgggatgcaaagaaaagcacccagcatcttgtcagtgctgaaacaaaacaagagtaattctgcttataaggaaatgcagaccactctcaaatcaagtgagagatccagcagtacaagtgcagaaagccacatccaaccagtccagaagaagtctaaaaaccgcactaattgtgacatcaacatccactacaagagtggggtgtgtaacaccatgagggccaagttttacagcgtagcccaggaggctggcttctgcctgcaggacaagatggaaatcctcatgaagcgccaagaagagagaggtatccagaagttccgtgcttttgtccttgtctcaaattttcaaaaggacatagcaaaaatgagacatcacatatctgtagtaaaaggagatgcagaagaaattgcagaccactggtactttgatctgttgtccaaactgccagaggatctaaagaacttccgccccgccaaaaagatcctggtgaaactgcagaagtttggagaaaacctggacttgcggattcgaccccatgtcctcctgaaggtgctgcaggatctgaggatttgggaactgtgctcccctgacatcgctgtggctattgagtttgtgcgagaacacatcatccatatgcctcaagaggattacatcagctggctgcagagccggatcaacatacccattgggccctacagcgccctgaggtaggctgggcctgggttgaccagctgtctcagtggaggagtgtttgcctatatcatgttcctgtatcctgcctgtgttcctgcctcctgactaccctcatggatgctctttatggatgaccctttacagtagggtcatctggagactgacttccagcaacatttttagagggggatggccccggtggccctcccctcaattccacaccccagacccaacctaccagtctctgttcttcaatgatccagcctgactctacctacttcctcttcagattccttcaccctatttaccttcctcaagtactggagaataaaattgaactgaatgtttga

SEQ ID NO: 253938 - DNA, 1653 bp, Artificial Sequence
  derived and/or modified sequence
atgacaaaagttccagcaactaaaaagcttcagtcttctcccaattcgggtgcagtgagacccttctacgcatctgagaatttacggcaagtgccggataaaccaatgaaaagcatcaagtatatggacaaagagattattaacttgaagaaagatctgatcagatctcgcttccttatccagagcgtcaaaatcggccggggatactttgctattctacgcgaagagactgcgaaaaagaagaaacagcaacaactgcagaagctgaaggaagaagaacgtaacaaattccaacccgctgagaaaatttctgaaattcactacggcgacacactcctgtcaacctacgacgatgaaaagctgaaaacattgggagccagagttacgcggaggcccttcacccctatccacagctgtatcatctctccgtctctgacagaggcccatgtggagccactctttagacagctttgtgcccttcactggttgctagaggccctgactatcgaccacacccatcataccatgaaacccgtcatcacttgctggaatcccaaggatccaggggggagtaaaagcacaatcaagaaaattaacaaggacaagagcatggggcagaagtgggagcatttcattactgcccccaagacaaaaaagtttaaaattcccacaatgagggtcacaaataggaaaccgagccgccggggttccacgttatctctctcccgtgcttctgggggaagctctcctcaatccagcatgatcagcgtgaaccctggcagcgacgagcccccatcagtcaacacacaagtaacctcatcaaaggatatcgaggataatgaatcaagttctacgaaacccgacgaagaacccctgtacatgaatttacagaagctgcttgagatggtccgggaggacgccaggcgcacagtgactattgagaatggaatgcaacgaaaagctccctccattctaagtgtgcttaagcagaacaaatccaacagcgcctataaagaaatgcagacaactctgaagtcatctgaaaggtcttcaagcaccagtgccgaatctcatatccagccagttcagaagaagtctaagaaccgcacaaattgtgacatcaatattcactataagagtggcgtgtgtaacactatgcgggctaagttttattctgttgcccaggaggccggattttgtctgcaggataagatggagatccttatgaagaggcaggaggagcgggggatccagaaattccgcgcattcgtgctggtgtccaacttccaaaaggatatcgctaagatgcggcaccatatcagtgtggtgaaaggtgacgcagaagaaatcgcagaccactggtattttgatctgctcagcaaactaccagaggatcttaagaatttcaggccagcaaagaaaattttggtgaagctgcagaagttcggcgagaacctcgacctgcggattaggccacacgtgctcctgaaggtgctgcaggatttgagaatatgggaactgtgtagccccgacattgcagtggctattgaatttgtccgggaacacattattcacatgccacaggaggactatatatcatggctgcagagtagaattaatattcccattgggccctactctgctctcagatag

SEQ ID NO: 253939 - DNA, 1653 bp, Artificial Sequence
  derived and/or modified sequence
atgaccaaggtgcctgccaccaagaagctgcagagcagccccaacagcggggctgtgcggcccttctacgccagcgagaacctgcggcaggtgcctgacaagcccatgaagagcatcaagtacatggacaaggagatcatcaacctgaagaaggacctgatccgcagccgcttcctgatccagagcgtgaagattggccggggctactttgccatcctgcgggaggagacagccaagaagaagaagcagcagcagctgcagaagctgaaggaggaggagaggaacaagttccagcctgctgagaagatcagcgagatccactacggggacaccctgctgagcacctatgatgatgagaagctgaagaccctgggcgcccgggtgacccggcggcccttcacccccatccacagctgcatcatcagccccagcctgacagaggcccacgtggagcccctcttccggcagctgtgtgccctgcactggctgctggaggccctgaccatcgaccacacccaccacaccatgaagcctgtgatcacctgctggaaccccaaggaccccggcggcagcaagagcaccatcaagaagatcaacaaggacaagtccatgggccagaagtgggagcacttcatcacagcccccaagaccaagaagttcaagatccccaccatgagggtgaccaacaggaagcccagccggcggggcagcaccctgagcctgagccgggccagcggcggcagcagcccccagagctccatgatctctgtgaaccctggcagtgatgagccccccagcgtgaacacccaggtgaccagcagcaaggacatcgaggacaatgaaagcagcagcaccaagccagatgaggagcccctgtacatgaacctgcagaagctgctggagatggtgagagaagatgcccggaggacagtgaccattgaaaatggcatgcagaggaaggcccccagcatcctgtctgtgctgaagcagaacaagagcaacagcgcctacaaggagatgcagaccaccctgaagagcagcgagaggagcagcagcaccagcgctgagagccacatccagcctgtgcagaagaagagcaagaacagaaccaactgtgacatcaacatccactacaagagcggcgtgtgcaacaccatgagggccaagttctacagcgtggcccaggaggccggcttctgcctgcaggacaagatggagatcctgatgaagaggcaggaggagcggggcatccagaagttccgggcctttgtgctggtgagcaacttccagaaggacatcgccaagatgaggcaccacatctctgtggtgaagggagatgctgaggagattgctgaccactggtactttgacctgctgagcaagctgcctgaggacctgaagaacttccggcctgccaagaagatcctggtgaagctgcagaagtttggagagaacctggacctgcgcatccggccccacgtgctgctgaaggtgctgcaggacctgcgcatctgggagctgtgcagcccagacattgctgtggccatcgagtttgtgcgggagcacatcatccacatgccccaggaggactacatctcctggctgcagagccgcatcaacatccccatcggcccctacagcgccctgaggtag

SEQ ID NO: 253940 - DNA, 1653 bp, Artificial Sequence
  derived and/or modified sequence
atgaccaaggtgcccgccaccaagaagctgcagagcagccccaacagcggcgccgtgagaccgttttacgcgagcgagaatctgaggcaggtgcccgacaagcctatgaaatctataaagtatatggataaggagattattaacctcaaaaaggacctgattcgcagcagatttctgatccagtctgtcaagatagggcgcggctactttgcaatccttcgggaggagaccgctaaaaaaaaaaagcagcagcagctgcaaaagttgaaggaagaagagcggaacaagttccagccggccgaaaagatctccgagatacattatggggacaccctgctgtctacctacgatgacgaaaaactcaaaaccctcggggcccgggtgacccgcaggccttttacccctatacactcatgtatcatttcaccctctctcacagaagctcacgtggagccactgttcagacagctgtgcgccctgcactggttgttagaagccttgacaattgatcatacccaccacaccatgaaaccagttataacttgctggaatcccaaggaccccgggggcagcaaaagtaccatcaaaaagataaacaaagataagtcaatgggccagaagtgggaacacttcataacagcacccaaaactaaaaagtttaagattccgaccatgagggttacaaaccggaaaccctcaaggcgcggctccacccttagcttgtcccgcgcttctgggggcagcagcccccagtcttctatgatcagtgtgaaccctggctccgatgagcctcccagcgtgaacacacaggttaccagcagtaaagacatcgaggataatgagtcgtcctcaactaagcctgatgaggagccattatatatgaatctgcagaaattattagaaatggtgcgggaagacgcgcgtcggaccgtcactattgagaacggcatgcagcgcaaggccccaagcattttgtcagtgctgaaacagaataagtccaatagtgcctataaggaaatgcagaccactctgaagagtagcgagcgttcttcttccacatccgccgagtcgcatatacagcctgtccagaagaagtcaaaaaatcgaacgaattgcgacatcaacatccattacaaaagcggggtctgcaataccatgcgggccaaattttactccgttgcccaggaggctggcttttgcctccaagataagatggaaatcctgatgaagcgtcaggaggaacggggcatccagaagtttcgggccttcgtgttggtcagcaattttcaaaaagacatagctaagatgagacatcacattagtgttgtaaagggggacgcagaagaaattgcagatcattggtacttcgatctgttgagtaagctacccgaggatcttaagaattttcggcctgccaaaaagatcctggtcaaattgcagaagttcggagaaaacctagatctgcgaattagacctcacgtgttactcaaagtcctacaagacctgcgcatatgggagttgtgtagcccagatatcgccgtcgccatcgagttcgttcgggagcatatcatacatatgccccaggaagactacatctcctggctccagagccgcattaacatccccattggaccctattccgcgctacggtag

SEQ ID NO: 253941 - DNA, 1653 bp, Artificial Sequence
  derived and/or modified sequence
atgaccaaagttcccgcaacaaagaagctacagtcgagcccaaactccggcgcagtgcgaccattttacgcttccgagaatttgagacaggtgccagacaaaccaatgaaatcaatcaaatacatggacaaggaaatcatcaaccttaagaaagacctcatcagaagcaggtttctgattcaatccgtcaaaatcggtcggggatactttgcaatcctgagggaggagacagctaaaaaaaaaaagcagcagcagttgcagaaactaaaagaagaggagcgcaataagttccagcccgcagaaaagatctcagaaatccactacggagatacccttctgtccacatatgatgatgaaaagctgaaaacacttggcgcaagggtcacgcgacggccattcactccaattcatagctgcattatttccccctctttgacagaggcccacgtggagcctctgtttagacaactctgcgctctccattggctcctggaagccttgaccattgaccatacccaccataccatgaaacctgtgatcacttgttggaatccgaaagatcctgggggttctaagtcgaccattaagaagattaacaaggataagtctatggggcagaaatgggaacatttcattaccgctcccaaaactaaaaaatttaagattcccactatgcgtgtgactaaccgaaagcctagtcgaaggggaagcaccctctcgctgtcccgagcttctggagggagttcccctcaaagctctatgatctctgtgaatcctggaagcgatgagcctcctagcgtgaatacccaggttacatctagcaaagacattgaagataacgagtcgagttccactaagcctgatgaggagccactgtatatgaacttgcagaagttgttagagatggtccgtgaggacgcaagaaggactgtgactatcgagaacgggatgcagagaaaggcaccatctatcctttccgtcttgaagcagaacaaaagcaacagcgcctataaggaaatgcagaccactctcaaatcttcggagcgctccagctccactagcgctgaaagccatatacagcccgtgcagaaaaaaagtaaaaatcggacaaattgtgacataaacatccactataagtctggagtgtgtaatacaatgagagctaaattctacagcgtggctcaggaggctggattttgtctgcaggataaaatggagattctcatgaagagacaggaagagagaggaattcagaaattccgggcttttgtactcgtgagtaatttccagaaagatatcgcaaagatgcgtcatcatatttccgtggtcaagggagatgccgaggagatcgcggaccactggtatttcgatcttctcagcaaactgcccgaagatctgaaaaattttaggccagccaaaaagatcctggtgaagctccagaagttcggggagaacctggacttgcgcatcaggccgcacgtactgctgaaggtgctccaggacctccgcatatgggagctatgctcaccggacattgctgtcgccatcgagtttgtaagagaacacattatccatatgccccaggaggactacatctcttggctacaatcccgaatcaacattcctattggaccatactcagccctcaggtag

SEQ ID NO: 253942 - protein, 553 aa, Artificial Sequence
  derived and/or modified sequence
MNKNTSTVVSPSLLEKDPAFQMITIAKETGLGLKVLGGINRNEGPLVYIQEIIPGGDCYKDGRLKPGDQLVSVNKESMIGVSFEEAKSIITGAKLRLESAWEIAFIRQKSDNIQPENLSCTSLIEASGEYGPQASTLSLFSSPPEILIPKTSSTPKTNNDILSSCEIKTGYNKTVQIPITSENSTVGLSNTDVASAWTENYGLQEKISLNPSVRFKAEKLEMALNYLGIQPTKEQHQALRQQVQADSKGTVSFGDFVQVARNLFCLQLDEVNVGAHEISNILDSQLLPCDSSEADEMERLKCERDDALKEVNTLKEKLLESDKQRKQLTEELQNVKQEAKAVVEETRALRSRIHLAEAAQRQAHGMEMDYEEVIRLLEAKITELKAQLADYSDQNKESVQDLKKRIMVLDCQLRKSEMARKTFEASTEKLLHFVEAIQEVFSDNSTPLSNLSERRAVLASQTSLTPLGRNGRSIPATLALESKELVKSVRALLDMDCLPYGWEEAYTADGIKYFINHVTQTTSWIHPVMSVLNLSRSEENEEDCSRELPNQKS

SEQ ID NO: 253943 - DNA, 1662 bp, Artificial Sequence
  derived and/or modified sequence
atgaacaagaacaccagcaccgtggtgagccccagcctgctggagaaggaccccgccttccagatgatcaccatcgccaaggagaccggcctgggcctgaaggtgctgggcggcatcaacagaaacgagggccccctggtgtacatccaggagatcatccccggcggcgactgctacaaggacggcagactgaagcccggcgaccagctggtgagcgtgaacaaggagagcatgatcggcgtgagcttcgaggaggccaagagcatcatcaccggcgccaagctgagactggagagcgcctgggagatcgccttcatcagacagaagagcgacaacatccagcccgagaacctgagctgcaccagcctgatcgaggccagcggcgagtacggcccccaggccagcaccctgagcctgttcagcagcccccccgagatcctgatccccaagaccagcagcacccccaagaccaacaacgacatcctgagcagctgcgagatcaagaccggctacaacaagaccgtgcagatccccatcaccagcgagaacagcaccgtgggcctgagcaacaccgacgtggccagcgcctggaccgagaactacggcctgcaggagaagatcagcctgaaccccagcgtgagattcaaggccgagaagctggagatggccctgaactacctgggcatccagcccaccaaggagcagcaccaggccctgagacagcaggtgcaggccgacagcaagggcaccgtgagcttcggcgacttcgtgcaggtggccagaaacctgttctgcctgcagctggacgaggtgaacgtgggcgcccacgagatcagcaacatcctggacagccagctgctgccctgcgacagcagcgaggccgacgagatggagagactgaagtgcgagagagacgacgccctgaaggaggtgaacaccctgaaggagaagctgctggagagcgacaagcagagaaagcagctgaccgaggagctgcagaacgtgaagcaggaggccaaggccgtggtggaggagaccagagccctgagaagcagaatccacctggccgaggccgcccagagacaggcccacggcatggagatggactacgaggaggtgatcagactgctggaggccaagatcaccgagctgaaggcccagctggccgactacagcgaccagaacaaggagagcgtgcaggacctgaagaagagaatcatggtgctggactgccagctgagaaagagcgagatggccagaaagaccttcgaggccagcaccgagaagctgctgcacttcgtggaggccatccaggaggtgttcagcgacaacagcacccccctgagcaacctgagcgagagaagagccgtgctggccagccagaccagcctgacccccctgggcagaaacggcagaagcatccccgccaccctggccctggagagcaaggagctggtgaagagcgtgagagccctgctggacatggactgcctgccctacggctgggaggaggcctacaccgccgacggcatcaagtacttcatcaaccacgtgacccagaccaccagctggatccaccccgtgatgagcgtgctgaacctgagcagaagcgaggagaacgaggaggactgcagcagagagctgcccaaccagaagagctag

SEQ ID NO: 253944 - DNA, 1662 bp, Artificial Sequence
  derived and/or modified sequence
atgaacaagaacacctctaccgtggtttctcctagtctcctcgagaaagatcctgctttccagatgattacgatcgctaaggagacaggcttaggactgaaagtgttaggtggaatcaacagaaatgaagggcctctggtatatatccaggagattatccctggtggcgattgctacaaagatggcaggctcaaaccaggcgaccagctggtctcagtcaataaggagagcatgattggcgtcagctttgaagaggccaagagtataattaccggagcaaagcttcgactcgaaagcgcatgggaaattgcctttattagacagaagtccgataacatccaacccgagaacctgagttgtacatcactgattgaggcaagcggagaatacggtcctcaggcttccaccctctccctcttctcttcaccgccagaaattctgatccccaagacgtcttctacccctaagaccaacaatgatatccttagcagctgcgagatcaagacaggctataacaagacagttcaaataccaatcactagtgagaatagcactgtaggactcagcaatacagatgtcgcctcagcttggaccgagaactatggattgcaggagaagattagtctgaaccccagcgttaggttcaaagctgagaagctggagatggctctgaactacctgggcattcagccgacaaaggagcagcaccaggccctccgccagcaggtgcaagcagacagcaagggaactgtcagtttcggggatttcgtgcaggttgcccgtaatctgttttgtctgcaactggatgaagtgaatgtcggggcgcacgagatttccaatattttggatagtcaactcttgccatgcgattcaagcgaggctgacgagatggagcgtctcaagtgcgaaagagacgatgccctgaaggaggtaaacaccctgaaagagaagctgttagagagcgacaaacagcgcaagcaactgactgaagagttacagaatgtcaaacaggaagccaaagcggtcgtagaggagaccagggctctcagaagtaggatccaccttgcagaggccgcccaaaggcaggcccatggaatggagatggactatgaggaagtcatccgacttctcgaagccaagataaccgagctcaaggcgcagctggcagactactctgaccaaaataaagaatcagtccaggacctcaaaaaacgcataatggtgttggactgccagctgagaaagagcgagatggctcgcaagaccttcgaggcttctacggagaaactgctgcattttgtggaagccattcaagaggtattcagcgataattcgacccctttgtccaatttgtccgagcgaagggcggtgttagcctctcaaacctcgctgactccactgggtcggaatggcaggtcaatccctgctacgcttgccctggaatcgaaggaattggtcaaatcagtccgtgcattattggatatggattgtcttccttatgggtgggaggaagcctataccgcagatggcatcaaatactttataaatcacgtgacacagactacctcgtggattcatccagtcatgtctgttcttaacctgagtcgatcagaggagaatgaagaagattgttcccgcgaactcccaaaccaaaagtcatag

SEQ ID NO: 253945 - DNA, 6243 bp, Artificial Sequence
  derived and/or modified sequence
aggtggcagcgcttgcagtcgggctacggaggccgggttgccagattacgggaaagccatttaagaagttcctggaataatattagtcagagtaatataggatctgcaggaagtgtctcaagatagttggaaaagaagaatttctagactcttcatcaagatcttcatttatacagctgttaaatccaaggctactttggtgaaagcatgaataaaaatacatctactgtagtatcacccagtctacttgaaaaggatcctgcctttcagatgattacaattgccaaggaaacaggccttggcctgaaggtactaggaggaattaaccggaatgaaggcccattggtatatattcaggaaattattcctggaggagactgttataaggatggtcgtttgaagccaggagatcaacttgtctcagtcaacaaggaatctatgattggtgtatcatttgaagaagcaaaaagcataattaccggagccaagttgaggttagaatctgcttgggagatagcattcataagacaaaaatccgacaacattcagccagaaaatctgtcatgtacatcacttatagaagcttcaggagaatatggacctcaagcctcaacattaagtcttttttcttctcctcctgaaatactaatcccaaagacctcatccactcccaaaacaaataatgacattttatcttcttgtgagataaaaactggatacaacaaaacagtacagattccaattacttcagaaaacagtactgtgggtttgtctaatacagatgttgcttctgcctggactgaaaattatgggctacaagaaaagatctccctaaatccctctgttcgctttaaggcagagaaactggaaatggctctaaattatcttggtattcagcccacaaaggaacaacaccaagccctgagacagcaagtacaagcagactcaaaagggacagtgtcttttggagattttgtccaggttgccagaaacttgttttgcttgcagttggatgaagtaaatgttggtgcacatgaaatttccaatatattagattcacagcttcttccttgtgattcttcagaagcagatgaaatggaaaggctcaagtgtgaaagagatgatgccttgaaagaagtaaatacacttaaggaaaaattattggaatcagataagcaaaggaaacaattgacagaagagctccagaatgtgaaacaagaagccaaagctgtagttgaagaaacaagagccctgcgtagtcggattcatcttgctgaagctgctcagagacaggcacatggaatggaaatggactatgaagaagtgatccgtctgttagaggccaagattacagagctaaaggctcagcttgctgattattctgaccaaaataaagaaagtgttcaggatttaaaaaagagaatcatggtactcgactgccaattacgaaaatcagaaatggctcgaaaaacttttgaggcatccactgaaaagcttcttcattttgtagaggctattcaagaagtattttctgataattctactcctttatcaaatttaagtgaaagaagagctgtgttagcttctcagacttccctcacaccactgggaaggaatggacgtagcatcccagcaacgctggcgcttgaatctaaggaacttgttaaatctgttcgtgccttacttgatatggattgtttaccttatgggtgggaggaagcttacacagcagatggaatcaagtacttcatcaatcatgtaacacagactacatcctggatccatcccgtgatgagtgtcctgaatctatctcgctcagaggagaatgaagaggattgctctagagaactccccaaccagaaaagttgatggttttccttaggaagtggagctacatggatgatgtgagcagagacgcataacatccaattctgagatgaaacagtctaaaataggagtaaagcatgcactacttgttgaagtgtgaaatggagactctggactttgggtatttttgtaaaacttttgatatttctgtatacatttaaaaaatcaattgccactacagtagttccttaagaataatctagttatattttttgaaatcacatataattagactttataatatatatactttttcatatataattagatctttctttgtaatttcatatgtagttcttcatagggtctcagatacaatggtttttataattgacatattgaaaaagtatatgaacataatgaaacacctcatttatttgataattcactaatgttttatattcatatattaggaaagtgaacttagcaagctttttggaatttaaggatcacatttagacatctcatgggctgatgaatacagctggtatctttgtggagctttctaatttacaaaatgctttgtagaccccattgtctttaaaccatacaacatgcccgtgaagctgatctggtgggtatgtttattcttggttttcagtagggaaatagcagttcagagagaggaagctctctgtcccagcaccgagactcactcctaagtcttctgattccatgagcagtcccccttcccccataccctgctgtctccacggagggaggtcacagcccatcacgcaggacactgtgattgtgttgatgcagctggctccacagctgtgcattccacagagattcagaaggcacctcttcggtcaaacatggcccctctataaccccactattcttctcctataaacccttcccccttctctgcacccaagccttcgccaagtaggcgcactctttgtgatattgtttcagcagacttctttcagcagctcgtgtttttctaaagtgaaaggcatggtttgtcctgcttaggttgcccttcccagagggatggtttgaggggagctgatgagaagagaggtatctgttaaaacattactgctctactcgaaacaagatggaagcctaaagcccaagtcgagcagctcccagcactgctgtgcagacctagaggtccttagaacatagtctaagaaccattcattgtagccattttatagttgagtaaactgagatcttaagtctcctagtctactgaatttcatatggtgtataatacagatttatatggtaaagatatacatatacattgtgctcaactatacattcctgaatccatttaggatttgtgatttatgtcttgagtaataatataaagtcaactccagactgataggtagtcattagccatgagaaatgtttcaggatggctagggaagacttgtgttttgcctgacagccatttgaatgttaggaagcttcggggagacaagttttgagagaagccccagagggagctatttccttgcaccccccagaggtgaatgaggtattctataagttagtgtctataattgtgaaagtacaaacttcttgtttttgtcaaattaatggtatgaaatttctctccccctgcttgaagagttttctaattcgtttctagtgagcaaaacaaagaaggtgcttgagtcactgaaatcaaagtactcaggcacacagcccactgacaagagacacctcatccattaactgctgttttgtaccacttgccgccctgtttctgtcaaatacctagtgaaaaaggcctaaacaattgtaatgatattatttattgggcattttgtgccatacatggtgatgagcagtttgcatatatttatttatgatcttcttaaaaccattccatgaaataggaactgtaattatccccaattctaaaagaaaaaacttagttttagagagttagtaatctttgcctaagggtcacaaagcacctatgtgtagaagctagggttcaaggcagatctgtgattccagaagctgttctctaaaccactatggagaactgcttagattcattgtctatgggtacattttataaaaaggcagattctagttcagtgtcataaggaactttctagtaattagagctgataagaaaagaattccccaggagaaaatggaaacactatcccagcaatctgaattccttacttggggaatgttgctgaggaggttcagtgtgtgaatggactgaaccagttggccactctctcagattccctcttcataaagcttccgtgacttctaaaccatcaggtcggtgccataagagatgctcaaaaaagcatggtcagggcttagcaagaatccttttccagtgcaaatacgaccctcatattatgttttggcgagtagccagtctttctttaacatcaatcaaccgtagcaatgtggtcatcacgaagtcttcattgactcactggcttggattttagggttagaaaatctgaatgttcttatgtccttccgtctcactttactagagtgcccaagttgactcatccttactcactcattccctcaaaatatttattgagcaccaacaatgtcacaagcactgtgctaaacactgtggtgaagtagaacaattgctaatcatttcctgggttccacttactcttgatttaaaaaaaaaaaaacaacaaaagagtttgtgtgtggccaggactaaacagctgcttcttaatttttgaattttaaaactaatctattttatttaaaaaaaatcaagtactttggaagtgaataaagtaagagatagcctgtctcactttccagaggtagcagtcactaatactgtggtgagtgattttactcaaaggaaatcacactattaagcagcttggttttgacatgttatgttgtggtcatcttttcatgtcaatacatagattaatcttttatttcaaatgtctacataaaatatcactacccacataacctataatttgtgtggccagcaatttattgaacactaaaatgttttaagttttcttattgctaacaatgtcacagtgaacatttatatattcattaaatccttttcctcatgtatctttgcactcttgtgctagtatgtctatagtgtgaatacattcataaatttcttgatcaaagctaggtcaaagttacattcattttaattttggtacatatccataaattctccataaaagtaggaccaacttacattaccaccaatagtgtatgtgagccttatttttatgtatgataggactttttttagtccaaatgttcctatagattttctgggttttttttttttttttgtccttggaagaataaccttccttccaccaagtccaagaacctgagatttttaatcattaggttttagatttcctttagcagcagagactgacttgctgtatagagggaagtcaagtagtgactaactcactatatgtcaaacacatcattactcttctcttttcctactttacatgtaatggttgcgaggaccaactttcaaatgagctaacttgggtgagacgttcactaaagtaccaagcacaatacaaatgcatcttcgagttctttgggcctcactttccctatctgaataataaggatagtaatcccttgccttttctcaaaccagttcaactcagcaaacacttcctgagcacctgctacatgccaggcaaaatgtgaaatttgcatgctatgaggctaaatggtactgattctcaaaacaaggagctcatagtctaaaaccatttttctttcttttttttccccctaaacaacctcttaaaggggtaagaagttagggggttgtttattaagaacccctgaagagcaaccctttaccactctcttaaatttgaaaaattccaaaataatattaacacctcttgactagaaaaggaaaaaaaaggaacatgccgtatgaagagcctctccaataataaatgcaaagcagctgtcaaaatatagagtcaagtgatactttcataaagtgtttgcacaattagaaaatgttatcctttttctcgggagaaatgggacatttttattttctctgctaagtgaaatgcaactttttgaagaatcaacacgcttgacatttttacaatgtacataaagaactgaactattattaaaacaacttacacactccattgcttataacttttgagagaatgaaaagaaccttaaacagaatgtgcctgtggagcttcgctttagaaatgaaatacccaaggtgttttaactacaactgtctacatgtaatagtgtgtctgcataatgactttgtaaatattaactgcaattctgtatttgctttcttgatatgacttttaacatttaaactta

SEQ ID NO: 253946 - DNA, 1662 bp, Artificial Sequence
  derived and/or modified sequence
atgaacaagaacaccagcacagtggtgagccccagcctgctggagaaggaccctgccttccagatgatcaccatcgccaaggagaccggcctgggcctgaaggtgctgggcggcatcaacagaaatgaaggccccctggtgtacatccaggagatcatccctggaggagactgctacaaggatggccgcctgaagccaggggaccagctggtgtctgtgaacaaggagagcatgattggagtgtcctttgaggaggccaagagcatcatcactggagccaagctgcggctggagagcgcctgggagatcgccttcatccggcagaagagtgacaacatccagcctgagaacctgagctgcaccagcctcatcgaggccagcggggagtatggcccccaggccagcaccctgagcctcttcagcagccccccagagatcctgatccccaagaccagcagcacccccaagaccaacaatgacatcctgagcagctgtgagatcaagacaggctacaacaagacagtgcagatccccatcaccagcgagaacagcacagtgggcctgagcaacacagatgtggccagcgcctggacagaaaattatggcctgcaggagaagatcagcctgaaccccagcgtgcgcttcaaggccgagaagctggagatggccctgaactacctgggcatccagcccaccaaggagcagcaccaggccctgcggcagcaggtgcaggccgacagcaagggcaccgtgtcctttggagactttgtgcaggtggccaggaacctcttctgcctgcagctggatgaggtgaatgtgggcgcccacgagatcagcaacatcctggacagccagctgctgccctgtgacagcagcgaggctgatgagatggagcggctgaagtgtgaaagagatgatgccctgaaggaggtgaacaccctgaaggagaagctgctggagagtgacaagcagaggaagcagctgacagaggagctgcagaatgtgaagcaggaggccaaggctgtggtggaggagacccgggccctgcggagccgcatccacctggccgaggccgcccagaggcaggcccacggcatggagatggactatgaggaggtgatccggctgctggaggccaagatcacagagctgaaggcccagctggccgactacagcgaccagaacaaggagagcgtgcaggacctgaagaagaggatcatggtgctggactgccagctgaggaagtctgagatggccaggaagacctttgaggccagcacagagaagctgctgcactttgtggaggccatccaggaggtgttcagtgacaacagcacccccctgagcaacctgtctgagcggcgggctgtgctggccagccagaccagcctgacccccctgggcagaaatggccgcagcatcccagccaccctggccctggagagcaaggagctggtgaagtctgtgcgggccctgctggacatggactgcctgccctacggctgggaggaggcctacacagcagatggcatcaagtacttcatcaaccacgtgacccagaccacctcctggatccaccctgtgatgtctgtgctgaacctgagccgctcagaagaaaatgaggaggactgcagccgggagctgcccaaccagaagagctag

SEQ ID NO: 253947 - DNA, 1662 bp, Artificial Sequence
  derived and/or modified sequence
atgaacaagaacaccagcaccgtggtgagccccagcctgctggagaaagaccctgcttttcaaatgattaccattgctaaagagactggactggggcttaaagtgctgggaggcataaataggaacgaaggtcctcttgtgtacattcaggagattatccccggcggggactgctacaaggacggacgcctcaagccaggagaccagctggtctccgttaataaagaatctatgatcggggtgagtttcgaagaagctaaaagcattatcaccggtgcaaagttgcgcctggaaagcgcctgggaaattgcctttattcggcagaagtccgacaatattcagcccgaaaatctgtcttgtacctccctgatcgaggcttccggtgagtatggtccccaggcatcaacactctcactgttttcgagccctcccgagatcctgatacctaagacaagctccactcccaagactaacaatgatattctgtccagctgtgaaatcaagacaggatacaacaagacagtccaaattccaatcacctccgagaacagcacagtgggtctgtcaaacaccgatgttgcgtccgcctggactgagaactacggcctccaggagaagatcagcctgaatccaagcgtccgatttaaagccgagaaattagagatggcattgaattatctcggaatacagcccacgaaagaacagcatcaggcactgcggcagcaggtgcaggcagacagcaagggcaccgtctcctttggggatttcgtccaggtcgcacgtaatctgttttgtcttcagctggacgaggtgaatgtgggcgctcacgaaatctccaatatcttagatagccagttactcccttgcgacagcagcgaagccgacgaaatggaacgcctgaaatgtgaacgagatgacgcgcttaaggaagtaaacacattgaaggaaaagttgcttgaaagcgataagcagcggaaacagctgaccgaggaattacagaacgtcaaacaggaagctaaggccgtcgttgaagagaccagagctttgagatctagaatccatctggccgaggctgctcagaggcaggcgcacggaatggagatggattacgaagaagttatccgcctcctcgaagcaaaaattaccgaattgaaagctcaattggccgactattctgatcagaacaaagaatccgtacaagacctcaagaaacgaataatggtgctcgattgtcagctacgtaagagcgaaatggcacggaagacattcgaggcgagcacagagaagctccttcactttgtggaggccattcaagaggttttttctgacaactccacccccctgagcaacctgtctgagagaagggctgtgctggcttcgcaaacgagcttaactcccctgggtcgaaatgggcgatccattcccgcaactctcgccctggaatccaaggaactggtgaaatccgtgcgggcactcctggacatggactgcttaccctacggttgggaggaggcctacactgccgatggaatcaaatatttcatcaaccacgttacacaaacaaccagctggattcacccggtgatgtcggtactgaatctatctaggagcgaggaaaatgaagaagattgcagccgtgagctgcccaatcagaaatcctag

SEQ ID NO: 253948 - DNA, 1662 bp, Artificial Sequence
  derived and/or modified sequence
atgaacaagaacactagcacagtagtgtcaccgagcttactcgagaaggaccctgcctttcaaatgataacgatcgctaaggagaccggactcggactcaaagttctgggcggtatcaatcggaatgagggacctttggtgtatatacaggaaatcataccaggaggggattgctacaaggacgggcgattaaaaccaggtgatcagctggtgtcagtcaacaaggagagtatgatcggagtttcttttgaggaagccaagtctattattacaggggcaaagctccgcctggagtctgcctgggagatagcattcattcgccagaagagcgataatatccagcctgaaaacctaagctgtactagcctgatcgaggccagcggggagtacggcccacaggcctctacactgtccttgttctcctcacctccagagatactgatccccaaaacctctagcacccccaagacaaacaacgatatcctgagctcctgtgagatcaagactggatataacaagacagttcagattccaatcacaagcgagaactctacagtcggtttaagtaataccgatgtggcatccgcctggaccgagaactacggcctgcaggagaaaatttccttgaaccccagcgtgcgcttcaaggctgaaaaactcgagatggcattgaactacctgggaatccaaccaactaaagaacaacaccaagcgcttcgtcaacaggtgcaagccgattccaagggtactgtctccttcggtgacttcgtacaggtggcccgtaacctgttctgcctgcagttagacgaagtgaatgtaggcgctcacgagatcagcaacatattagactcccagttgctgccatgcgactccagtgaggccgatgagatggaacggctgaagtgcgaacgggatgatgctctcaaggaggtaaacaccctaaaggagaaactgttggagtccgacaaacaacggaaacagttaacggaggagctgcagaacgttaagcaggaggctaaagctgtggtggaggaaacgagagccctgaggtcgcgaatacatctggctgaggctgcccagcgccaagcccacggcatggaaatggattacgaggaggtaatccgtctcttagaggctaagattactgaactgaaagcacagcttgccgattactccgatcagaacaaagagagtgtccaagatctgaaaaagagaatcatggtgctggattgtcagctcagaaaatccgaaatggccaggaagacattcgaagcttccaccgagaagctattgcattttgtggaggctattcaggaggtctttagcgacaactccaccccactatccaacctgagcgagcgcagggccgtgctcgctagccaaacctctctgacccctctgggaaggaacgggaggagcatacctgccacattagctctagagtcgaaggaacttgtaaaatcggtacgcgcacttctggatatggactgcctgccatatgggtgggaggaagcatacacagcagacgggatcaagtactttattaatcacgtgacccagactacatcatggattcaccccgtcatgagcgttttgaacctttcacgaagcgaggagaacgaggaagattgcagccgcgaattacccaatcagaagtcctag

SEQ ID NO: 253949 - protein, 765 aa, Artificial Sequence
  derived and/or modified sequence
MAADPTELRLGSLPVFTRDDFEGDWRLVASGGFSQVFQARHRRWRTEYAIKCAPCLPPDAASSDVNYLIEEAAKMKKIKFQHIVSIYGVCKQPLGIVMEFMANGSLEKVLSTHSLCWKLRFRIIHETSLAMNFLHSIKPPLLHLDLKPGNILLDSNMHVKISDFGLSKWMEQSTRMQYIERSALRGMLSYIPPEMFLESNKAPGPKYDVYSFAIVIWELLTQKKPYSGFNMMMIIIRVAAGMRPSLQPVSDQWPSEAQQMVDLMKRCWDQDPKKRPCFLDITIETDILLSLLQSRVAVPESKALARKVSCKLSLRQPGEVNEDISQELMDSDSGNYLKRALQLSDRKNLVPRDEELCIYENKVTPLHFLVAQGSVEQVRLLLAHEVDVDCQTASGYTPLLIAAQDQQPDLCALLLAHGADANRVDEDGWAPLHFAAQNGDDGTARLLLDHGACVDAQEREGWTPLHLAAQNNFENVARLLVSRQADPNLHEAEGKTPLHVAAYFGHVSLVKLLTSQGAELDAQQRNLRTPLHLAVERGKVRAIQHLLKSGAVPDALDQSGYGPLHTAAARGKYLICKMLLRYGASLELPTHQGWTPLHLAAYKGHLEIIHLLAESHANMGALGAVNWTPLHLAARHGEEAVVSALLQCGADPNAAEQSGWTPLHLAVQRSTFLSVINLLEHHANVHARNKVGWTPAHLAALKGNTAILKVLVEAGAQLDVQDGVSCTPLQLALRSRKQGIMSFLEGKEPSVATLGGSKPGAEMEI

SEQ ID NO: 253950 - DNA, 2298 bp, Artificial Sequence
  derived and/or modified sequence
atggctgctgaccctactgaacttcggctgggcagcctccctgtgtttaccagggacgacttcgaaggtgattggaggttggtcgcctctggggggttttcccaagtcttccaagccaggcatcgtagatggcggacagagtacgccattaaatgtgccccttgtctgcccccggatgccgcatcttcggatgttaattatctgattgaggaagcagcaaagatgaaaaaaattaaattccaacacatcgtgagcatttacggggtatgtaagcaacctcttggcattgtgatggagttcatggctaacgggtccctagaaaaagtcctgtcaacacattccctctgctggaaattaaggttccgaattatacacgaaacatctctcgccatgaattttttgcatagtatcaagccaccactgcttcacctcgacctaaaacctggaaacatactgctcgactctaacatgcacgtcaaaatatccgacttcggactctcgaagtggatggagcaaagcactaggatgcagtatatagaaagaagcgcacttaggggaatgttaagctatatccctcctgaaatgttcttggaatcaaacaaagcccccgggccaaaatacgatgtgtatagttttgccattgtgatttgggagctccttacacaaaaaaagccctactctggctttaatatgatgatgattattatcagggtggcagccggcatgcgaccttcactgcagcccgtgagcgaccaatggccaagcgaggctcagcaaatggtcgacctgatgaagaggtgttgggaccaagatccgaagaaacgtccctgtttcctcgacatcacaattgagacagacatcttgctgtccctcctgcagtctagggtggccgtcccagagtccaaagcattggctcgtaaggtgtcttgcaagctgtctctgcgacagccaggcgaagtaaacgaagacatttctcaggaactgatggatagcgattctgggaactatctgaagagagccctgcagctgtctgataggaagaatctagtcccaagggatgaagagctgtgtatttacgaaaataaggtaacaccactacatttcctcgtggcacaaggctccgtggagcaggtccgcctgctgctggctcatgaggtggatgtggactgccagacagcctcgggatatactccactgctgatcgccgctcaggatcagcagcctgacctctgcgcactgctactggcacatggcgcagatgctaatagagtcgatgaagatggctgggcccctctgcatttcgctgcccaaaacggcgatgatggcacggcaaggctgcttctcgaccacggcgcctgtgtggatgcacaggagagagaaggttggactccgctgcatcttgcggctcagaacaatttcgagaatgttgccaggcttctagtgtctcgacaagcagacccaaacctccatgaagctgaggggaagacaccactccacgtcgcggcatatttcggtcacgtctcattagtcaaactcttgacaagccagggcgcagagctcgacgcacagcagaggaatctcaggactcctttgcatctcgccgtggaacggggcaaagtgagggccattcagcatctgctgaagtccggtgctgtccctgacgctttggatcagagcggctatggccctctccacacggctgccgcacgaggcaagtatctgatctgtaaaatgctccttagatatggagcaagcctagagttaccaacacaccaaggctggacccctctgcatctggcagcctataaaggacacctggaaattatccatctcttggccgagtctcatgcaaacatgggggcactcggtgctgtcaactggactccgcttcatctggccgcccgccatggcgaggaggctgtggtgtcggccctactccaatgcggcgccgatcctaatgccgctgagcagagcgggtggacacctttacacctcgcagtacagcgctctacttttctatcagtcataaaccttctcgaacatcacgctaatgttcacgccagaaacaaggtgggatggactcccgcccacctggccgccttaaaggggaacactgccatcctgaaggtgctggtggaagctggggcccagctggacgtgcaggacggcgtctcttgtaccccattacagttggctttgcggagccgaaagcaagggatcatgtccttccttgaggggaaagaacctagcgttgccacattggggggttccaagccaggggctgaaatggaaatttag

SEQ ID NO: 253951 - DNA, 2298 bp, Artificial Sequence
  derived and/or modified sequence
atggctgctgaccccacagagctgcggctgggcagcctgcccgtcttcaccagagatgactttgaaggagactggaggctggtggccagcggcggcttcagccaggtgttccaggcccggcaccggcgctggaggacagaatatgccatcaagtgtgccccctgcctgcccccagatgctgccagcagtgatgtgaactacctgattgaggaggccgccaagatgaagaagatcaagttccagcacatcgtgtccatctatggagtgtgcaagcagcccctgggcatcgtgatggagttcatggccaacggcagcctggagaaggtgctgagcacccacagcctgtgctggaagctgcgcttccgcatcatccacgagaccagcctggccatgaacttcctgcacagcatcaagccacccctgctgcacctggacctgaagccaggcaacatcctgctggacagcaacatgcacgtgaagatcagtgactttggcctgagcaagtggatggagcagagcaccaggatgcagtacatcgagaggtctgccctgcggggcatgctgagctacatccccccagagatgttcctggagagcaacaaggcccctggccccaagtatgatgtgtacagctttgccatcgtcatctgggagctgctgacccagaagaagccctacagcggcttcaacatgatgatgatcatcatccgggtggccgccggcatgaggcccagcctgcagcctgtgtctgaccagtggcccagcgaggcccagcagatggtggacctgatgaagcgctgctgggaccaggaccccaagaagaggccctgcttcctggacatcaccattgaaacagacatcctgctgagcctgctgcagagccgggtggccgtgcctgagagcaaggccctggccaggaaggtgtcctgcaagctgagcctgcggcagcctggagaggtgaatgaagacatcagccaggagctgatggacagcgacagcggcaactacctgaagagggccctgcagctgagtgacaggaagaacctggtgcccagagatgaggagctgtgcatctatgagaacaaggtgacccccctgcacttcctggtggcccagggctctgtggagcaggtgcggctgctgctggcccacgaggtggatgtggactgccagacagccagcggctacacccccctgctgattgctgcccaggaccagcagcctgacctgtgtgccctgctgctggcccatggagcagatgccaacagagtggatgaagatggctgggcccccctgcactttgctgcccagaatggagatgatggaacagcccggctgctgctggaccacggggcctgtgtggatgcccaggagcgggagggctggacccccctgcacctggccgcccagaacaactttgaaaatgtggcccggctgctggtgtcccggcaggccgaccccaacctgcacgaggccgagggcaagacccccctgcacgtggccgcctacttcggccacgtgtccctggtgaagctgctgaccagccagggcgctgagctggatgcccagcagaggaacctgcggacccccctgcacctggccgtggagcggggcaaggtgcgggccatccagcacctgctgaagtctggagctgtgcctgatgccctggaccagagcggctacggccccctgcacacagctgctgcccggggcaagtacctgatctgcaagatgctgctgcgctacggggccagcctggagctgcccacccaccagggctggacccccctgcacctggccgcctacaagggccacctggagatcatccacctgctggccgagagccacgccaacatgggcgccctgggcgctgtgaactggacccccctgcacctggccgcccggcacggggaggaggccgtggtgtctgccctgctgcagtgtggggctgaccccaatgctgctgagcagagcggctggacccccctgcacctggccgtgcagaggagcaccttcctgagcgtcatcaacctgctggagcaccacgccaacgtgcacgccaggaacaaggtgggctggaccccagcccacctggccgccctgaagggcaacacagccatcctgaaggtgctggtggaggccggggcccagctggatgtgcaggatggagtgtcctgcacccccctgcagctggccctgcggagcaggaagcagggcatcatgtccttcctggagggcaaggagcccagcgtggccaccctgggcggcagcaagccaggagctgagatggagatctag

SEQ ID NO: 253952 - DNA, 2298 bp, Artificial Sequence
  derived and/or modified sequence
atggccgccgaccccaccgagctgcggctgggcagcctgcccgtgttcacgcgcgacgactttgagggcgattggcggctggtggcatccggcggattctctcaagtttttcaggcacggcatcgccggtggcggaccgagtacgctataaagtgcgcgccctgcctgccgccggatgccgcttccagcgacgtgaattacctcattgaagaagcagcgaaaatgaaaaaaatcaagttccagcatatcgtgagcatctatggagtatgcaaacagcccctgggcatagtgatggaatttatggcgaacggctccctggagaaagtgctcagcacccattctctgtgctggaaactccgctttcgaattattcatgagacaagcctcgcgatgaactttcttcacagcatcaagcctcctttgctccacctggacctaaagccgggcaatatcctcctggatagcaacatgcacgtgaaaatttctgactttggcctgtccaagtggatggagcaaagtaccagaatgcaatacattgaaaggtcagcattgagaggaatgctcagttacattcccccagagatgttcctggaatctaacaaagcacccggcccaaagtatgacgtctatagttttgcaatcgtcatctgggaactgttgacgcagaagaaaccttactctgggtttaatatgatgatgattattattcgggtggctgctgggatgcgaccgtcccttcaacccgtgagtgatcaatggccctccgaggcccagcaaatggtggatctcatgaaacgctgttgggatcaagatcctaaaaaaaggccttgcttcctcgacatcaccattgagacagacattctgctgtctctcctgcagtccagagtggctgtgcccgagagtaaggccctcgcgcgtaaagtaagttgcaagcttagcctacggcaaccgggtgaagtgaacgaggacattagtcaggaattgatggacagcgattcggggaattacctcaagcgcgccctgcaattgtctgataggaagaatctagttccccgcgatgaggagctgtgcatttatgaaaacaaagtgactcctcttcacttcctggttgcacagggatccgtagaacaggtgcggttattactagcccatgaggtggatgtcgactgtcagaccgcatcagggtacactcctctgctcattgctgcccaggaccagcagcctgacctttgcgctctactgctggcccatggtgccgatgccaaccgggtggatgaggacggctgggcaccactccatttcgccgctcaaaatggagacgatggcactgcgcgactgctcctagaccatggcgcatgcgtagatgcgcaggagcgtgaaggttggaccccgttacatctggcagctcagaacaattttgaaaatgtcgcacgcctcttagtgtcgagacaggccgaccccaacttgcacgaggctgaggggaaaacacccctgcacgtggcagcctacttcggacacgtgagtctagtgaagttgttgacatcgcaaggcgcagaactcgatgcccaacaaagaaaccttcgtacccccctccacttggctgttgagcggggcaaagtgcgcgctatccaacatttattaaagagcggcgctgtgcctgatgcattagaccagtcaggatacgggcctttgcatactgccgctgccaggggaaaatatctgatttgcaagatgctgcttcggtatggcgcatctctagagctgcccacccaccaaggctggaccccactccacctggcggcttataaaggacacctggaaattatacaccttctcgccgagagtcacgccaacatgggggcgttgggtgccgtgaactggaccccacttcaccttgcagcgagacacggagaggaggccgtagtatctgcactcctccagtgtggagctgaccccaacgctgcggaacagtcaggctggacgccactgcatttagcagtccagcgctccaccttcttatccgttatcaatcttctagagcaccatgccaatgtccacgcccggaataaggtgggctggacaccagcccatctcgctgctcttaagggcaataccgcaatcctgaaagtcctggtcgaggctggtgcacagctagacgtgcaggatggcgtctcttgcacgcctctgcaacttgctttacgctcacggaaacaggggattatgtcctttttggaggggaaggaaccctccgtagccaccctaggcggatcaaaaccaggtgctgagatggaaatctag

SEQ ID NO: 253953 - DNA, 2543 bp, Artificial Sequence
  derived and/or modified sequence
cggacccgaggagcaggaagcggcggctccttcggccacccaggcagcagccacagcggggagtgcgcggcgcggggacaggaagagaggggcaatggctgccgaccccaccgagctgcggctgggcagcctccccgtcttcacccgcgacgacttcgagggcgactggcgcctagtggccagcggcggcttcagccaggtgttccaggcgcggcacaggcgctggcggacggagtacgccatcaagtgcgccccctgccttccacccgacgccgccagctctgatgtgaattacctcattgaagaagctgccaaaatgaagaagatcaagtttcagcacatcgtgtctatctacggggtgtgcaagcagcccctgggtattgtgatggagtttatggccaacggctccctggagaaggtgctgtccacccacagcctctgctggaagctcaggttccgcatcatccatgagaccagcttggccatgaacttcctgcacagcattaagccgcctctgctccacctggacctcaagccgggcaacatactcctggacagcaacatgcatgtcaaaatttcagacttcggcctgtccaagtggatggaacagtccacccggatgcagtacatcgagaggtcggctctgcggggcatgctcagctacatcccccctgagatgttcctggagagtaacaaggccccaggacctaaatatgatgtgtacagctttgcaattgtcatctgggagctactcactcagaagaaaccatactcagggttcaacatgatgatgattattatccgagtggcggcaggcatgcggccctccctacagcctgtctctgaccaatggccaagcgaggcccagcagatggtggacctgatgaaacgctgctgggaccaggaccccaagaagaggccatgctttctagacattaccatcgagacagacatactgctgtcactgctgcagagtcgtgtggcagtcccagagagcaaggccctggccaggaaggtgtcctgcaagctgtcgctgcgccagcccggggaggttaatgaggacatcagccaggaactgatggacagtgactcaggaaactacctgaagcgggcccttcagctctccgaccgtaagaatttggtcccgagagatgaggaactgtgtatctatgagaacaaggtcacccccctccacttcctggtggcccagggcagtgtggagcaggtgaggttgctgctggcccacgaggtagacgtggactgccagacggcctctggatacacgcccctcctgatcgccgcccaggaccagcaacccgacctctgtgccctgcttttggcacatggtgctgatgccaaccgagtggatgaggatggctgggccccactgcactttgcagcccagaatggggatgacggcactgcgcgcctgctcctggaccacggggcctgtgtggatgcccaggaacgtgaagggtggacccctcttcacctggctgcacagaataactttgagaatgtggcacggcttctggtctcccgtcaggctgaccccaacctgcatgaggctgagggcaagacccccctccatgtggccgcctactttggccatgttagcctggtcaagctgctgaccagccagggggctgagttggatgctcagcagagaaacctgagaacaccactgcacctggcagtagagcggggcaaagtgagggccatccaacacctgctgaagagtggagcggtccctgatgcccttgaccagagcggctacggcccactgcacactgcagctgccaggggcaaatacctgatctgcaagatgctgctcaggtacggagccagccttgagctgcccacccaccagggctggacacccctgcatctagcagcctacaagggccacctggagatcatccatctgctggcagagagccacgcaaacatgggtgctcttggagctgtgaactggactcccctgcacctagctgcacgccacggggaggaggcggtggtgtcagcactgctgcagtgtggggctgaccccaatgctgcagagcagtcaggctggacacccctccacctggcggtccagaggagcaccttcctgagtgtcatcaacctcctagaacatcacgcaaatgtccacgcccgcaacaaggtgggctggacacccgcccacctggccgccctcaagggcaacacagccatcctcaaagtgctggtcgaggcaggcgcccagctggacgtccaggatggagtgagctgcacacccctgcaactggccctccgcagccgaaagcagggcatcatgtccttcctagagggcaaggagccgtcagtggccactctgggtggttctaagccaggagccgagatggaaatttagacaacttggccagccgtggtggctcacgtctgtaatcccagcactttgggaggctgaggcaggcagatcacctgatatcaagagtttgaggccagcctggccaacatggcaaaaccctgtctctgctaaaaatacaaaatttagctgggta

SEQ ID NO: 253954 - DNA, 2298 bp, Artificial Sequence
  derived and/or modified sequence
atggccgcagatccaaccgaactaagactgggaagtctgcctgtgtttactagagacgatttcgagggtgactggagactggttgcaagcggcggattctcacaggtttttcaggcacggcatcggaggtggaggaccgagtacgctattaagtgtgcaccttgtctccccccagacgctgccagtagtgatgtgaattatttaattgaggaggccgctaagatgaagaagataaagttccagcacattgtgtccatctacggcgtctgtaagcagcccttaggaatcgtgatggagttcatggctaatggatcattggagaaagtgctcagcacacactctttgtgctggaagctgagattcagaatcatccacgaaacctccctcgctatgaactttctgcactccatcaaacccccattgctgcacctagatttaaaacctggcaacatccttttagattctaatatgcatgtgaaaattagcgattttggtctgtcaaaatggatggagcagagcacccgaatgcagtatatcgaacgcagcgccctccgaggcatgctgtcttatattccccctgagatgttccttgaatccaacaaggctcctggcccaaagtacgacgtttattctttcgccatcgtgatatgggagctgctgacacagaagaaaccctattccgggttcaacatgatgatgattatcatcagagtcgctgctgggatgcggccttctctacagccagtgagtgaccaatggccaagtgaggctcagcaaatggtagacctcatgaaacgttgctgggaccaggacccaaagaagagaccatgtttcttggatatcacgatagaaacagacatcctcctgtctctccttcagtctcgggtggccgtgccggaatctaaagcacttgcgcgaaaagtctcctgcaaactgagcctcaggcagcccggtgaagtgaacgaagatatctctcaggaactgatggactccgatagtggtaactatctgaaacgggctttgcaactgtctgatcgaaagaatctggtgccaagggatgaagaattatgcatctacgaaaacaaagtaaccccactgcatttccttgtcgcccaagggtccgtggaacaggtgcgacttctcttagcccatgaagtggatgtcgattgtcagaccgcctccgggtacacacccctgctgatcgctgcacaagaccagcagcctgatctttgtgctttgctgctggcccacggggctgatgccaacagggtggatgaggacggctgggccccactccatttcgctgcccagaacggagacgacggcacagcccgattgttactggaccatggcgcttgtgtggatgcccaggagcgggagggctggaccccactgcacttggcggcacaaaacaattttgaaaatgtcgctcggctcttggtaagccgccaggcggatcctaatttgcatgaggctgagggaaagactccactgcatgtggccgcttatttcggccacgtgtcgctcgtgaaactactaacctcgcaaggcgctgagctggacgctcaacagcggaacctgcgtacaccccttcacctggcggtggaacgtggtaaagtacgcgcaattcagcacttgctaaaaagcggtgctgtgccagacgcgctggatcagagcggatatggccctctccacacagccgctgctcgaggcaagtacctgatctgcaaaatgctgttgcgctacggagctagtctggagttgccaacacatcaggggtggactccactgcatcttgcagcttacaagggccatttggagatcattcacctcctcgcagaaagccatgctaatatgggtgcgctgggcgctgtcaactggacccccctgcatctcgccgctcgccacggagaggaggccgtcgtgtctgccctgcttcaatgtggggctgatcctaacgcagccgagcagtctggttggacccctctgcaccttgccgtgcagcgatctacctttttgtctgtgatcaatcttttagaacatcacgccaacgtgcatgcacggaacaaggtgggttggacacctgcccacttggccgctctgaaaggaaacactgccatcctaaaagttctggtggaagctggcgctcagctggatgtccaggacggagtgtcatgcactcccttacaattagctctgcgcagtaggaagcagggaatcatgtcgtttctggaagggaaagagccaagcgtggcaaccctgggaggatccaaaccaggagccgaaatggaaatttag

SEQ ID NO: 253955 - DNA, 2298 bp, Artificial Sequence
  derived and/or modified sequence
atggccgccgaccccaccgagctgagactgggcagcctgcccgtgttcaccagagacgacttcgagggcgactggagactggtggccagcggcggcttcagccaggtgttccaggccagacacagaagatggagaaccgagtacgccatcaagtgcgccccctgcctgccccccgacgccgccagcagcgacgtgaactacctgatcgaggaggccgccaagatgaagaagatcaagttccagcacatcgtgagcatctacggcgtgtgcaagcagcccctgggcatcgtgatggagttcatggccaacggcagcctggagaaggtgctgagcacccacagcctgtgctggaagctgagattcagaatcatccacgagaccagcctggccatgaacttcctgcacagcatcaagccccccctgctgcacctggacctgaagcccggcaacatcctgctggacagcaacatgcacgtgaagatcagcgacttcggcctgagcaagtggatggagcagagcaccagaatgcagtacatcgagagaagcgccctgagaggcatgctgagctacatcccccccgagatgttcctggagagcaacaaggcccccggccccaagtacgacgtgtacagcttcgccatcgtgatctgggagctgctgacccagaagaagccctacagcggcttcaacatgatgatgatcatcatcagagtggccgccggcatgagacccagcctgcagcccgtgagcgaccagtggcccagcgaggcccagcagatggtggacctgatgaagagatgctgggaccaggaccccaagaagagaccctgcttcctggacatcaccatcgagaccgacatcctgctgagcctgctgcagagcagagtggccgtgcccgagagcaaggccctggccagaaaggtgagctgcaagctgagcctgagacagcccggcgaggtgaacgaggacatcagccaggagctgatggacagcgacagcggcaactacctgaagagagccctgcagctgagcgacagaaagaacctggtgcccagagacgaggagctgtgcatctacgagaacaaggtgacccccctgcacttcctggtggcccagggcagcgtggagcaggtgagactgctgctggcccacgaggtggacgtggactgccagaccgccagcggctacacccccctgctgatcgccgcccaggaccagcagcccgacctgtgcgccctgctgctggcccacggcgccgacgccaacagagtggacgaggacggctgggcccccctgcacttcgccgcccagaacggcgacgacggcaccgccagactgctgctggaccacggcgcctgcgtggacgcccaggagagagagggctggacccccctgcacctggccgcccagaacaacttcgagaacgtggccagactgctggtgagcagacaggccgaccccaacctgcacgaggccgagggcaagacccccctgcacgtggccgcctacttcggccacgtgagcctggtgaagctgctgaccagccagggcgccgagctggacgcccagcagagaaacctgagaacccccctgcacctggccgtggagagaggcaaggtgagagccatccagcacctgctgaagagcggcgccgtgcccgacgccctggaccagagcggctacggccccctgcacaccgccgccgccagaggcaagtacctgatctgcaagatgctgctgagatacggcgccagcctggagctgcccacccaccagggctggacccccctgcacctggccgcctacaagggccacctggagatcatccacctgctggccgagagccacgccaacatgggcgccctgggcgccgtgaactggacccccctgcacctggccgccagacacggcgaggaggccgtggtgagcgccctgctgcagtgcggcgccgaccccaacgccgccgagcagagcggctggacccccctgcacctggccgtgcagagaagcaccttcctgagcgtgatcaacctgctggagcaccacgccaacgtgcacgccagaaacaaggtgggctggacccccgcccacctggccgccctgaagggcaacaccgccatcctgaaggtgctggtggaggccggcgcccagctggacgtgcaggacggcgtgagctgcacccccctgcagctggccctgagaagcagaaagcagggcatcatgagcttcctggagggcaaggagcccagcgtggccaccctgggcggcagcaagcccggcgccgagatggagatctag

SEQ ID NO: 253956 - protein, 677 aa, Artificial Sequence
  derived and/or modified sequence
MDSAAKDEMQPALSPGSSFPGPEWPEQERAEQLARGAALKWASGIFYRPEQLARLGQYRSREVQRTCSLESRLKSVMQSYLEGVQTVPAAVSHTQTLIDGQQFLEAYVSLRELEQLREDTWAPLGGLELPVFQGLDLLFEALGQAVEAAAGAAGKLAREDPALLVAAVRVAEVETGRTTPLGQVPRDWRQRCLRALQEGLEQAHFGSPLLPAPGALPGWLEALRVALPVELATAEALVAPCCPPQYNVVQLWAHTLHSGLRRSLQNLLAGPELEAADAFALLHWALHVYLGQEMMGSLELGPEADVSQLEPLLTLENIEQLEATFVANIQILEENIRVASLVSESLQQRVHGMALSELGTFLRSFSDALIRFSRDHFRGKSMAPHYVPYLLAALNHKSALSSSVSVLQLDGAPSGALAPVEAALDELQRRIYRLVLEALQAELQPLFADLPSRQWLSSPELLQSVCERTGRFCRDFWRVRNPTVQLLLAEAERAVVLQYLSALMQGRLVCRGADERTQAAERLRHDAAQLQQLFLSLVRASWAGRRARVSVAGWERGLARDPTPTCSGPGGERALRAGAARPEGAAKPPRPRAAGPGGGWPAATISRRERGPRLRPLGPARGLVPGAAPGRAQLPAGCAAAVAPREPPRPLQPSARARAPASCLPSGSCARALLLAE

SEQ ID NO: 253957 - protein, 746 aa, Artificial Sequence
  derived and/or modified sequence
MDSAAKDEMQPALSPGPEWPEQERAEQLARGAALKWASGIFYRPEQLARLGQYRSREVQRTCSLESRLKSVMQSYLEGVQTGVWQLAQAIEVVQGTREALSQARGLLQGMSQALQTLEPLRERVAQHKQLQALSHLLPRLRAVPAAVSHTQTLIDGQQFLEAYVSLRELEQLREDTWAPLGGLELPVFQGLDLLFEALGQAVEAAAGAAGKLAREDPALLVAAVRVAEVETGRTTPLGQVPRDWRQRCLRALQEGLEQAHFGSPLLPAPGALPGWLEALRVALPVELATAEALVAPCCPPQYNVVQLWAHTLHSGLRRSLQNLLAGPELEAADAFALLHWALHVYLGQEMMGSLELGPEADVSQLEPLLTLENIEQLEATFVANIQASVSQWLQNALDGEVAEWGREHGPNTDPSGSYYSPMPAIVLQILEENIRVASLVSESLQQRVHGMALSELGTFLRSFSDALIRFSRDHFRGKSMAPHYVPYLLAALNHKSALSSSVSVLQLDGAPSGALAPVEAALDELQRRIYRLVLEALQAELQPLFADLPSRQWLSSPELLQSVCERTGRFCRDFWRVRNPTVQLLLAEAERAVVLQYLSALMQGRLVCRGADERTQAAERLRHDAAQLQQLFLSLGLEENAHCAPVLLALRELLNLRDPALLGLEVAGLRQQFPDVSEDHVSALLGLRGDLSREQHLAALSSLQAALPPSPRASRRVLFSLVPAPALAPASCLPSGSCARALLLAE

SEQ ID NO: 253958 - protein, 679 aa, Artificial Sequence
  derived and/or modified sequence
MDSAAKDEMQPALSPGPEWPEQERAEQLARGAALKWASGIFYRPEQLARLGQYRSREVQRTCSLESRLKSVMQSYLEGVQTVPAAVSHTQTLIDGQQFLEAYVSLRELEQLREDTWAPLGGLELPVFQGLDLLFEALGQAVEAAAGAAGKLAREDPALLVAAVRVAEVETGRTTPLGQVPRDWRQRCLRALQEGLEQAHFGSPLLPAPGALPGWLEALRVALPVELATAEALVAPCCPPQYNVVQLWAHTLHSGLRRSLQNLLAGPELEAADAFALLHWALHVYLGQEMMGSLELGPEADVSQLEPLLTLENIEQLEATFVANIQILEENIRVASLVSESLQQRVHGMALSELGTFLRSFSDALIRFSRDHFRGKSMAPHYVPYLLAALNHKSALSSSVSVLQLDGAPSGALAPVEAALDELQRRIYRLVLEALQAELQPLFADLPSRQWLSSPELLQSVCERTGRFCRDFWRVRNPTVQLLLAEAERAVVLQYLSALMQGRLVCRGADERTQAAERLRHDAAQLQQLFLSLVRASWAGRRARVSVAGWERGLARDPTPTCSGPGGERALRAGAARPEGAAKPPRPRAAGPGGGWPAATISRRERGPRLRPLGPARGLVPGAAPGRAQLPAGCAAAVAPREPPRPLQPSARARARAGLLPALGVLRPSPAARRINHGCR

SEQ ID NO: 253959 - DNA, 2247 bp, Artificial Sequence
  derived and/or modified sequence
gagcctcggtgggaagaaggggcttctgggtggggagtgggagagagacttccttggggagaggaattcagctgcacgctggagtcagctggagttgcccaggccctgtgagcaagtggcaggcgtgcccagctgcattggggagagggctgttctcaaggccaaggtcatttttggagggagaactggacgcctgatcaaatctggcccacaatggactcagcagccaaggatgagatgcagccggcgttgtcccctggctcttccttcccaggacctgagtggccagagcaggagcgggcagagcagctggcccggggtgcagcgctcaagtgggcctcaggcatcttctaccggccggagcagctggccaggctaggccagtaccgcagccgcgaggtgcagcgtacctgctccctggaatcgcgcctcaagtcagtgatgcagtcatacctggaaggcgtgcagactgtgccggctgcagtgtcccacacacagactctgattgatggccaacagttcttggaggcatatgtgagccttcgggagctggagcagctgcgagaggatacgtgggcacccctggggggcctggagttgccagtcttccaggggctggaccttctgttcgaggcactgggccaggctgtggaagcagctgcaggggccgcagggaagctggcacgggaggacccagccctgttggtggctgctgtgcgtgtggcggaggtggagactggacgaacaacccccctgggccaggtcccccgggactggcgtcagcgctgtctgagggcactacaggagggcctggagcaggcccactttgggtcacctctgctgcctgcaccaggggccctaccagggtggctggaggctctgcgagtggccctgccagtcgagttggccacagctgaggcactagtagcgccttgctgcccgccacagtacaacgtggtccagctatgggcccacacgctgcatagtggtttgcgccgcagcctgcagaacctccttgcagggcctgagctagaagctgcggatgccttcgccttgctgcactgggcactgcatgtgtacctggggcaggaaatgatggggagcctggagttggggcctgaggctgatgtgtcccagctggagccccttctgaccttggagaacattgagcagctggaggcaacatttgtggccaacatccagatcctggaagagaacattcgtgtggccagcctggtcagtgagtcactgcaacagcgagtgcatggcatggcactgtcagaactgggcacattcttgaggagcttcagtgatgctctgatccgattctcccgagaccacttcagggggaaatcaatggcccctcattacgtgccctacctactggccgccctcaaccacaagtcagcactcagctcctcagtgtctgtcctgcagctggacggggcgccttcaggggccttggctccagtggaagctgcgctggacgagttgcagaggaggatctaccgcttggtgttggaggcgctgcaggcggagctccagcccctgttcgcggatctgccctcgcgccaatggctgtcgagccctgagctcctgcaaagtgtgtgtgaacggacggggcgcttctgccgggacttctggcgcgtgcggaaccccacggttcagctgctgctggctgaggccgagcgtgccgtggtgctccagtacctgagcgcgctgatgcaaggccgcctggtgtgccgcggagccgacgagaggacccaggcggccgagcgcctgcggcacgatgctgcccagcttcagcagcttttcctcagtttggtgagagcttcttgggcgggcagacgggcgagagtctcagtggctgggtgggagagagggctggcgcgagaccctaccccgacgtgctcagggcctggaggagaacgcgcactgcgcgccggtgctgctcgccctgagggagctgctaaacctccgcgaccccgcgctgctgggcctggaggtggctggcctgcggcaacaatttcccgacgtgagcgaggaccacgtctccgccctcttgggcctgcgcggggacttgtcccgggagcagcacctggccgcgctcagctccctgcaggctgcgctgccgccgtcgccccgcgcgagccgccgcgtcctcttcagcctagtgcccgcgcccgcgctccggcctcctgcctgccctcggggtcctgcgcccgagccctgctgctcgcagaataa

SEQ ID NO: 253960 - DNA, 2497 bp, Artificial Sequence
  derived and/or modified sequence
ctttctgttgatggccttggggagggaggagcctcggtgggaagaaggggcttctgggtggggagtgggagagagacttccttggggagaggaattcagctgcacgctggagtcagctggagttgcccaggccctgtgagcaagtggcaggcgtgcccagctgcattggggagagggctgttctcaaggccaaggtcatttttggagggagaactggacgcctgatcaaatctggcccacaatggactcagcagccaaggatgagatgcagccggcgttgtcccctggacctgagtggccagagcaggagcgggcagagcagctggcccggggtgcagcgctcaagtgggcctcaggcatcttctaccggccggagcagctggccaggctaggccagtaccgcagccgcgaggtgcagcgtacctgctccctggaatcgcgcctcaagtcagtgatgcagtcatacctggaaggcgtgcagactggtgtgtggcagctggcccaggccattgaggtggtgcagggaacccgggaggccctgagccaggcccgtgggttgctccagggcatgtcccaggccttacagactctagagcccctacgggagcgggttgcccagcacaagcaactgcaggccctgtctcacctgctgcctcggctgcgggcagtgccggctgcagtgtcccacacacagactctgattgatggccaacagttcttggaggcatatgtgagccttcgggagctggagcagctgcgagaggatacgtgggcacccctggggggcctggagttgccagtcttccaggggctggaccttctgttcgaggcactgggccaggctgtggaagcagctgcaggggccgcagggaagctggcacgggaggacccagccctgttggtggctgctgtgcgtgtggcggaggtggagactggacgaacaacccccctgggccaggtcccccgggactggcgtcagcgctgtctgagggcactacaggagggcctggagcaggcccactttgggtcacctctgctgcctgcaccaggggccctaccagggtggctggaggctctgcgagtggccctgccagtcgagttggccacagctgaggcactagtagcgccttgctgcccgccacagtacaacgtggtccagctatgggcccacacgctgcatagtggtttgcgccgcagcctgcagaacctccttgcagggcctgagctagaagctgcggatgccttcgccttgctgcactgggcactgcatgtgtacctggggcaggaaatgatggggagcctggagttggggcctgaggctgatgtgtcccagctggagccccttctgaccttggagaacattgagcagctggaggcaacatttgtggccaacatccaggcaagtgtgtctcagtggctgcagaatgcactggatggggaggtagctgagtggggccgggagcatgggcccaacacagacccgtctggctcctattactcaccaatgccagccattgtgctgcagatcctggaagagaacattcgtgtggccagcctggtcagtgagtcactgcaacagcgagtgcatggcatggcactgtcagaactgggcacattcttgaggagcttcagtgatgctctgatccgattctcccgagaccacttcagggggaaatcaatggcccctcattacgtgccctacctactggccgccctcaaccacaagtcagcactcagctcctcagtgtctgtcctgcagctggacggggcgccttcaggggccttggctccagtggaagctgcgctggacgagttgcagaggaggatctaccgcttggtgttggaggcgctgcaggcggagctccagcccctgttcgcggatctgccctcgcgccaatggctgtcgagccctgagctcctgcaaagtgtgtgtgaacggacggggcgcttctgccgggacttctggcgcgtgcggaaccccacggttcagctgctgctggctgaggccgagcgtgccgtggtgctccagtacctgagcgcgctgatgcaaggccgcctggtgtgccgcggagccgacgagaggacccaggcggccgagcgcctgcggcacgatgctgcccagcttcagcagcttttcctcagtttgggcctggaggagaacgcgcactgcgcgccggtgctgctcgccctgagggagctgctaaacctccgcgaccccgcgctgctgggcctggaggtggctggcctgcggcaacaatttcccgacgtgagcgaggaccacgtctccgccctcttgggcctgcgcggggacttgtcccgggagcagcacctggccgcgctcagctccctgcaggctgcgctgccgccgtcgccccgcgcgagccgccgcgtcctcttcagcctagtgcccgcgcccgcgctcgcgccggcctcctgcctgccctcggggtcctgcgcccgagccctgctgctcgcagaataaaccacggctgccgga

SEQ ID NO: 253961 - DNA, 2278 bp, Artificial Sequence
  derived and/or modified sequence
ctttctgttgatggccttggggagggaggagcctcggtgggaagaaggggcttctgggtggggagtgggagagagacttccttggggagaggaattcagctgcacgctggagtcagctggagttgcccaggccctgtgagcaagtggcaggcgtgcccagctgcattggggagagggctgttctcaaggccaaggtcatttttggagggagaactggacgcctgatcaaatctggcccacaatggactcagcagccaaggatgagatgcagccggcgttgtcccctggacctgagtggccagagcaggagcgggcagagcagctggcccggggtgcagcgctcaagtgggcctcaggcatcttctaccggccggagcagctggccaggctaggccagtaccgcagccgcgaggtgcagcgtacctgctccctggaatcgcgcctcaagtcagtgatgcagtcatacctggaaggcgtgcagactgtgccggctgcagtgtcccacacacagactctgattgatggccaacagttcttggaggcatatgtgagccttcgggagctggagcagctgcgagaggatacgtgggcacccctggggggcctggagttgccagtcttccaggggctggaccttctgttcgaggcactgggccaggctgtggaagcagctgcaggggccgcagggaagctggcacgggaggacccagccctgttggtggctgctgtgcgtgtggcggaggtggagactggacgaacaacccccctgggccaggtcccccgggactggcgtcagcgctgtctgagggcactacaggagggcctggagcaggcccactttgggtcacctctgctgcctgcaccaggggccctaccagggtggctggaggctctgcgagtggccctgccagtcgagttggccacagctgaggcactagtagcgccttgctgcccgccacagtacaacgtggtccagctatgggcccacacgctgcatagtggtttgcgccgcagcctgcagaacctccttgcagggcctgagctagaagctgcggatgccttcgccttgctgcactgggcactgcatgtgtacctggggcaggaaatgatggggagcctggagttggggcctgaggctgatgtgtcccagctggagccccttctgaccttggagaacattgagcagctggaggcaacatttgtggccaacatccagatcctggaagagaacattcgtgtggccagcctggtcagtgagtcactgcaacagcgagtgcatggcatggcactgtcagaactgggcacattcttgaggagcttcagtgatgctctgatccgattctcccgagaccacttcagggggaaatcaatggcccctcattacgtgccctacctactggccgccctcaaccacaagtcagcactcagctcctcagtgtctgtcctgcagctggacggggcgccttcaggggccttggctccagtggaagctgcgctggacgagttgcagaggaggatctaccgcttggtgttggaggcgctgcaggcggagctccagcccctgttcgcggatctgccctcgcgccaatggctgtcgagccctgagctcctgcaaagtgtgtgtgaacggacggggcgcttctgccgggacttctggcgcgtgcggaaccccacggttcagctgctgctggctgaggccgagcgtgccgtggtgctccagtacctgagcgcgctgatgcaaggccgcctggtgtgccgcggagccgacgagaggacccaggcggccgagcgcctgcggcacgatgctgcccagcttcagcagcttttcctcagtttggtgagagcttcttgggcgggcagacgggcgagagtctcagtggctgggtgggagagagggctggcgcgagaccctaccccgacgtgctcagggcctggaggagaacgcgcactgcgcgccggtgctgctcgccctgagggagctgctaaacctccgcgaccccgcgctgctgggcctggaggtggctggcctgcggcaacaatttcccgacgtgagcgaggaccacgtctccgccctcttgggcctgcgcggggacttgtcccgggagcagcacctggccgcgctcagctccctgcaggctgcgctgccgccgtcgccccgcgcgagccgccgcgtcctcttcagcctagtgcccgcgcccgcgctcgcgccggcctcctgcctgccctcggggtcctgcgcccgagccctgctgctcgcagaataaaccacggctgccgg

SEQ ID NO: 253962 - DNA, 2034 bp, Artificial Sequence
  derived and/or modified sequence
atggacagcgccgccaaggatgagatgcagccagcactaagccccggctctagttttcctggaccggagtggcccgaacaggaaagagcagaacaactggcccgaggggccgccttgaaatgggcctcagggatattttataggccagaacagctcgccagactggggcagtacagaagccgggaagtgcagcgcacctgttccctcgaatcacgcctaaagtcggtgatgcagtcatatttggagggggttcagaccgtgcctgcggccgtaagccatacccagactttaatagacggccagcaatttctcgaggcatacgtgtctttaagagaactggagcagctacgggaggatacgtgggctcctcttgggggtctggagcttcccgtgttccagggactcgacttactgtttgaagctctgggacaggcggttgaggctgccgccggggcagcaggtaaacttgccagagaagacccggcattgctagtcgcagctgtgcgcgtcgccgaagtcgagaccgggagaacaacacctcttggccaggtgcctagggattggcggcagcgctgtttgagggcactgcaggaaggacttgaacaggcccactttggttcccctctcttacctgctccaggagccttaccgggctggctcgaggctctgcgcgtagctctcccagtggaacttgccacagccgaagccctggtggccccttgctgtcccccgcagtacaacgtggttcagctatgggcccacaccctgcatagtggtcttaggcggtccctgcagaatttgctggctggccccgagctcgaggctgctgacgcgttcgctctcctgcactgggctctccacgtttacctgggccaggagatgatgggctccctggagctgggcccggaagccgacgtgagtcagctggagccactcctgaccctggagaatattgaacagttagaggccacttttgtcgcaaacatccagatcctggaggagaacatccgggtcgctagcctggtctctgagagccttcaacagcgggtccacggcatggctctctctgagcttggaaccttcctaagaagctttagcgatgcgctgatccgcttcagtcgtgatcacttcagagggaagagcatggcgcctcattacgtgccctacctactggcggccctgaatcacaaaagcgccctttcaagcagtgtgtcagtcctgcagttagacggagctccaagcggggccctggctcctgtggaagctgcgctagatgaactgcagcgcagaatctacaggctcgtcctggaagccctacaggctgagttacagcccctcttcgccgatcttccctcccgtcagtggttgagtagccctgaactgctgcagtcagtgtgcgaacgcacgggaagattttgtcgtgatttctggagagttaggaaccctaccgtgcagctacttctcgccgaggccgagcgggccgtggttctacagtacctgagcgctctcatgcaaggacgcttggtgtgccgcggggccgacgagcgcactcaggctgcagagcgattgcggcatgacgctgctcagcttcagcaactcttcctgagtctggtaagggccagttgggccggtcgccgcgcccgagtgtccgtcgcaggctgggagaggggcctcgcccgcgacccaacgcccacatgttccggtcctgggggagaacgggccctgagggcaggggcggcgcggcctgaaggtgctgccaagcctccccggccacgcgccgctggcccgggaggcggctggcccgccgccaccatttcaaggagggagcgcggtccgaggctacggcccctgggtcccgcacgggggctggtgccgggcgccgcacccgggagggcccagttgccagctggatgcgcggccgccgttgctccgcgggaaccccctaggcccctgcagccttccgcaagggcaagagctccggcgagttgtcttcctagtgggtcctgcgcacgggccctcctgttggccgagtag

SEQ ID NO: 253963 - DNA, 2241 bp, Artificial Sequence
  derived and/or modified sequence
atggattccgccgcgaaagatgagatgcagccagccctgagcccgggccccgagtggcctgaacaggaacgcgctgagcaattagccaggggagccgcactcaaatgggcatccggcattttctaccgccccgaacagctcgcccgcttaggccagtacagatcccgtgaggtccagcgcacgtgctcactcgaatctaggctgaagtctgtgatgcaatcctatttggagggagtccagactggagtttggcaactggcccaggctattgaggtagttcaggggacgcgcgaagccctgagtcaagcccgagggcttctccaagggatgagccaagcattacagaccttggaacctttgcgggaacgggtggcacagcataaacagctgcaagctctcagccacctcctgccaagactgcgagctgtgcctgcagccgtgagccatactcagacacttatagatggacaacagtttctcgaggcctacgtctccctgcgggaactcgaacagctccgggaagacacatgggccccattgggtggcttagagcttcccgtattccagggacttgatctgctgtttgaagccctgggacaggcagtggaagcagcagcgggcgccgcaggtaaactcgcccgtgaggatccagcactgctggtcgcggcagtgagggttgctgaagtagaaactggcagaaccactcctttaggacaagtgcccagagactggagacaacgatgcctccgggccctgcaggaggggcttgaacaggcacattttggaagccctctgctccctgctcccggcgcgctgccagggtggttggaagctttgcgtgtcgcgctcccggttgagctggccactgccgaggccctagtcgccccgtgttgtccgccccaatacaatgtcgtccaactttgggctcatacgctgcactccggactgaggcgctctctgcagaacctgctcgccggaccagagctggaggctgctgacgcgtttgccctattgcactgggccctgcatgtgtatcttggccaggaaatgatgggttccctggaactgggtcccgaagctgacgtgtcgcaactcgagccattgttgacactagagaatatagagcagctcgaagcgacatttgtggcaaatatccaggcatccgtgtcccagtggcttcagaacgccctcgacggtgaggtcgccgaatgggggagagagcacggtcctaacacagacccgagtggttcctactacagccctatgcccgccattgtgctgcaaattcttgaggagaacatccgggtggcatctcttgtgtccgagagcctccaacagcgggttcacggaatggcactgtccgagctagggaccttcttgagaagcttcagtgatgccctgatccgtttttctagagatcacttccggggaaaatctatggccccccactacgttccatacctcttggcagcactcaatcacaaaagcgctttgtccagctccgtctctgtgctgcaactggacggtgccccctccggagcactggcaccagttgaagctgctttggatgaactgcaaaggcggatttataggctggtcctggaagcgctgcaagccgagctccagcctctgttcgcagacctgcccagcaggcagtggctgtcaagccccgagctactgcagtccgtttgtgaacgcaccggccggttttgcagagatttctggagagtgcgcaacccaaccgtgcagctactcctagcagaagccgagcgggctgtggttctgcagtacttgagcgctctgatgcagggcagactcgtgtgtagaggcgctgatgaaaggactcaggctgccgaacgacttcgccacgacgctgcacaactgcagcagctatttctctctctgggactggaggagaacgctcactgtgcccccgttcttctggcattgcgcgaattgctcaacctgcgcgaccccgccctgctgggattagaagtggcaggactgcgacagcaatttccagatgtcagcgaggatcacgtgagcgcactgctcggcttgagaggcgacctcagccgggagcagcatctcgccgcgttgtcatctctacaagcagcactgcctccttccccaagggcgagccggagagttctcttcagtttggtacccgcgccggccctggcccctgccagctgtcttcctagtggatcttgtgcgcgcgccctccttctcgcggaatag

SEQ ID NO: 253964 - DNA, 2040 bp, Artificial Sequence
  derived and/or modified sequence
atggactctgccgccaaagacgaaatgcagccagctctgtctcctgggcctgaatggcccgagcaagaaagggcggaacaactggctcggggcgctgccctgaagtgggcttcaggcattttctacagacccgagcagctggccagactcgggcagtaccggagcagggaggttcagcggacatgctcccttgaaagtcggctgaagagcgtcatgcagagttacctcgagggtgtacagactgtacccgctgccgtgtcacatacgcaaaccctgatcgatggacagcaatttctggaagcttacgtctctctgagagagttagagcagctgagagaggacacctgggcacccttggggggtctggagctgccggtattccagggactggatctactgttcgaggcgcttgggcaagccgttgaagccgccgccggggctgcaggcaaactggccagagaagaccctgctctgctcgtggcggcagtccgcgtggcagaagtggagacaggccgcaccacccctcttggtcaggttccacgggactggaggcagcgctgcctgcgcgcgttacaggagggactagaacaggcccacttcggttccccactgctcccggctcccggagcgcttcccggatggttggaagcgttgagggttgctctacctgtggagttggcaactgccgaggccctggttgctccgtgctgcccacctcagtataatgttgtgcagctgtgggcacacacactccactctggactgagacgctctctgcaaaatcttctggctggccctgaattggaagccgctgatgctttcgctctcttgcactgggcccttcatgtttacctcggccaggagatgatgggcagcctagaattgggtcctgaggcagacgtgtcacagctggaacctcttctgacactcgaaaatatcgaacagttggaggctacttttgtcgccaatatacagatcctggaggagaacattcgtgtcgcatccttggtctcagagtccctccagcagagggtgcacggcatggctttatcagagctgggaactttcctaagatctttctcggacgccttaattaggtttagcagggaccactttcgcgggaagtccatggcaccgcattatgtgccttacctgctggctgcgttgaatcacaagtcggcactttcatcctctgtgtctgtcctgcaactcgatggggccccatccggagcattggccccagttgaggcggccttagacgagcttcaaagaagaatctacaggttagttttggaggctctgcaggccgagctgcagccactcttcgctgaccttcccagtcggcaatggctgagtagcccggaacttttacagtccgtgtgcgagcgaactggacgattctgccgagatttttggcgtgtgagaaatcccaccgtccaacttctcttagccgaggccgagagagccgttgtgcttcaatacctctcagccctcatgcaaggtcgcctcgtgtgcagaggagctgacgagagaacccaggccgcagaaaggctgcggcacgacgccgcgcaactgcagcagctctttttaagtcttgtccgggcctcctgggccgggcgaagggcccgcgtgagcgtagcaggatgggagcgaggactcgctcgggaccctaccccaacctgttcaggccctgggggcgaaagggccttgagagctggggcagctaggcccgagggggctgcaaaaccgccgaggccccgggccgccggcccaggtggcggctggccggctgcaaccatctccaggagggagagagggccccgcctgaggccacttgggccagctcgggggctggtgccaggggccgctcccggccgtgctcagctcccagccggctgcgccgcagcagttgcacctcgggagccacccagaccattgcagccttccgcaagggctcgggccagggcaggccttctcccagctctcggggtcttaagaccttcccccgcagccaggcgaataaaccacggctgcaggtag

SEQ ID NO: 253965 - DNA, 2034 bp, Artificial Sequence
  derived and/or modified sequence
atggattctgctgccaaggatgagatgcagcctgccctgagccctggcagcagcttccctggccctgagtggccagagcaggagcgggcagagcagctggcccggggagctgccctgaagtgggccagcggcatcttctacagacctgagcagctggcccggctgggccagtaccgcagccgggaggtgcagaggacctgcagcctggagagccggctgaagtctgtgatgcagagctacctggagggcgtgcagacagtgcctgctgctgtgagccacacccagaccctgattgatggccagcagttcctggaggcctacgtgtccctgcgggagctggagcagctgcgggaggacacctgggcccccctgggcggcctggagctgcccgtcttccagggcctggacctgctgtttgaggccctgggccaggccgtggaggccgccgccggggctgctgggaagctggccagagaagatcctgccctgctggtggccgctgtgcgggtggccgaggtggagactggaagaaccacccccctgggccaggtgccccgggactggaggcagcgctgcctgcgggccctgcaggagggcctggagcaggcccacttcggcagccccctgctgcctgcccctggggccctgcccggctggctggaggccctgcgggtggccctgcctgtggagctggccacagctgaggccctggtggccccctgctgccccccccagtacaacgtggtgcagctgtgggcccacaccctgcacagcggcctgcggcgcagcctgcagaacctgctggccggccctgagctggaggccgcagatgcctttgccctgctgcactgggccctgcacgtgtacctgggccaggagatgatgggcagcctggagctgggccctgaggctgatgtgtcccagctggagcccctgctgaccctggagaacatcgagcagctggaggccacctttgtggccaacatccagatcctggaggagaacatccgggtggccagcctggtgtctgagagcctgcagcagagggtgcacggcatggccctgtctgagctgggcaccttcctgcggagcttcagtgatgccctgatccgcttcagccgggaccacttccggggcaagtccatggccccccactacgtgccctacctgctggccgccctgaaccacaagagcgccctgagcagctctgtgtctgtgctgcagctggatggagcccccagcggggccctggcccctgtggaggccgccctggatgagctgcagaggcgcatctaccgcctggtgctggaggccctgcaggccgagctgcagcccctgtttgctgacctgcccagccggcagtggctgagcagccctgagctgctgcagagcgtgtgtgagaggacaggccgcttctgccgggacttctggagggtgaggaaccccaccgtgcagctgctgctggccgaggccgagagagctgtggtgctgcagtacctgagcgccctgatgcagggccgcctggtgtgcagaggagcagatgagaggacccaggccgctgagcggctgcggcatgatgctgcccagctgcagcagctgttcctgagcctggtgcgggcctcctgggccggcagaagagcccgggtgtctgtggccggctgggagcggggcctggcccgggaccccacccccacctgcagcggccctggaggagagcgggccctgcgggccggggccgcccggcctgagggcgccgccaagccaccccggcccagggctgctggccctgggggcggctggccagctgccaccatcagcagaagagagcggggcccccggctgcggcccctgggccctgcccggggcctggtgcctggagctgcccctggccgggcccagctgcctgctggctgtgccgctgctgtggccccccgggagcccccccggcccctgcagcccagcgcccgggcccgggccccagccagctgcctgcccagcggcagctgtgcccgggccctgctgctggccgagtag

SEQ ID NO: 253966 - DNA, 2241 bp, Artificial Sequence
  derived and/or modified sequence
atggattctgctgccaaggatgagatgcagcctgccctgagccctggccctgagtggccagagcaggagagagctgagcagctggcccggggggccgccctgaagtgggccagcggcatcttctacagacctgagcagctggcccggctgggccagtaccgcagccgggaggtgcagaggacctgcagcctggagagccggctgaagtctgtgatgcagagctacctggagggcgtgcagacaggagtgtggcagctggcccaggccatcgaggtggtgcagggcacccgggaggccctgagccaggcccggggcctgctgcagggcatgagccaggccctgcagaccctggagcccctgcgggagcgggtggcccagcacaagcagctgcaggccctgagccacctgctgccccggctgcgggctgtgcctgctgctgtgagccacacccagaccctgattgatggccagcagttcctggaggcctacgtgtccctgcgggagctggagcagctgcgggaggacacctgggcccccctgggcggcctggagctgcccgtcttccagggcctggacctgctgtttgaggccctgggccaggccgtggaggccgccgccggggctgctgggaagctggccagagaagatcctgccctgctggtggccgctgtgcgggtggccgaggtggagactggaagaaccacccccctgggccaggtgccccgggactggaggcagcgctgcctgcgggccctgcaggagggcctggagcaggcccacttcggcagccccctgctgcctgcccctggggccctgcccggctggctggaggccctgcgggtggccctgcctgtggagctggccacagctgaggccctggtggccccctgctgccccccccagtacaacgtggtgcagctgtgggcccacaccctgcacagcggcctgcggcgcagcctgcagaacctgctggccggccctgagctggaggccgcagatgcctttgccctgctgcactgggccctgcacgtgtacctgggccaggagatgatgggcagcctggagctgggccctgaggctgatgtgtcccagctggagcccctgctgaccctggagaacatcgagcagctggaggccacctttgtggccaacatccaggcctctgtgtcccagtggctgcagaatgccctggatggagaggtggccgagtggggccgggagcacggccccaacacagaccccagcggcagctactacagccccatgcctgccatcgtgctgcagatcctggaggagaacatccgggtggccagcctggtgtctgagagcctgcagcagagggtgcacggcatggccctgtctgagctgggcaccttcctgcggagcttcagtgatgccctgatccgcttcagccgggaccacttccggggcaagtccatggccccccactacgtgccctacctgctggccgccctgaaccacaagagcgccctgagcagctctgtgtctgtgctgcagctggatggagcccccagcggggccctggcccctgtggaggccgccctggatgagctgcagaggcgcatctaccgcctggtgctggaggccctgcaggccgagctgcagcccctgtttgctgacctgcccagccggcagtggctgagcagccctgagctgctgcagagcgtgtgtgagaggacaggccgcttctgccgggacttctggagggtgaggaaccccaccgtgcagctgctgctggccgaggccgagagagctgtggtgctgcagtacctgagcgccctgatgcagggccgcctggtgtgcagaggagcagatgagaggacccaggccgctgagcggctgcggcatgatgctgcccagctgcagcagctgttcctgagcctgggcctggaggagaatgcccactgtgcccctgtgctgctggccctgcgggagctgctgaacctgcgggaccctgccctgctgggcctggaggtggccggcctgcggcagcagttcccagatgtgtctgaggaccacgtgtctgccctgctgggcctgcggggggacctgagccgggagcagcacctggccgccctgagcagcctgcaggccgccctgccccccagcccccgggccagcagaagagtgctcttcagcctggtgcctgccccagccctggccccagccagctgcctgcccagcggcagctgtgcccgggccctgctgctggccgagtag

SEQ ID NO: 253967 - DNA, 2040 bp, Artificial Sequence
  derived and/or modified sequence
atggattctgctgccaaggatgagatgcagcctgccctgagccctggccctgagtggccagagcaggagagagctgagcagctggcccggggggccgccctgaagtgggccagcggcatcttctacagacctgagcagctggcccggctgggccagtaccgcagccgggaggtgcagaggacctgcagcctggagagccggctgaagtctgtgatgcagagctacctggagggcgtgcagacagtgcctgctgctgtgagccacacccagaccctgattgatggccagcagttcctggaggcctacgtgtccctgcgggagctggagcagctgcgggaggacacctgggcccccctgggcggcctggagctgcctgtgttccagggcctggacctgctgtttgaggccctgggccaggccgtggaggccgctgctggagctgctgggaagctggcccgggaggaccctgccctgctggtggccgctgtgcgggtggccgaggtggagaccggccgcaccacccccctgggccaggtgccccgggactggaggcagcgctgcctgcgggccctgcaggagggcctggagcaggcccacttcggcagccccctgctgcctgcccctggggccctgcccggctggctggaggccctgcgggtggccctgcctgtggagctggccacagctgaggccctggtggccccctgctgccccccccagtacaacgtggtgcagctgtgggcccacaccctgcacagcggcctgcggcgcagcctgcagaacctgctggccggccctgagctggaggccgcagatgcctttgccctgctgcactgggccctgcacgtgtacctgggccaggagatgatgggcagcctggagctgggccctgaggctgatgtgtcccagctggagcccctgctgaccctggagaacatcgagcagctggaggccacctttgtggccaacatccagatcctggaggagaacatccgggtggccagcctggtgtctgagagcctgcagcagagggtgcacggcatggccctgtctgagctgggcaccttcctgcgctccttcagtgatgccctgatccgcttcagccgggaccacttccggggcaagtccatggccccccactacgtgccctacctgctggccgccctgaaccacaagagcgccctgagcagctctgtgtctgtgctgcagctggatggagcccccagcggggccctggcccctgtggaggccgccctggatgagctgcagaggcgcatctaccgcctggtgctggaggccctgcaggccgagctgcagcccctgtttgctgacctgcccagccggcagtggctgagcagccctgagctgctgcagagcgtgtgtgagaggacaggccgcttctgccgggacttctggagggtgaggaaccccaccgtgcagctgctgctggccgaggccgagagagctgtggtgctgcagtacctgagcgccctgatgcagggccgcctggtgtgccgcggggctgatgagaggacccaggccgctgagcggctgcggcatgatgctgcccagctgcagcagctgttcctgagcctggtgcgggcctcctgggccggccggcgggcccgggtgtctgtggccggctgggagcggggcctggcccgggaccccacccccacctgcagcggccctggaggagagcgggccctgcgggccggggccgcccggcctgagggcgccgccaagccaccccggcccagggctgctggccctgggggcggctggccagctgccaccatcagccggcgggagcggggcccccggctgcggcccctgggccctgcccggggcctggtgcctggggccgcccctggccgggcccagctgcctgctggctgtgccgctgctgtggccccccgggagcccccccggcccctgcagcccagcgcccgggcccgggcccgggccggcctgctgcctgccctgggcgtgctgcggcccagccctgctgcccggcgcatcaaccacggctgcaggtag

SEQ ID NO: 253968 - DNA, 2034 bp, Artificial Sequence
  derived and/or modified sequence
atggacagcgccgccaaggacgagatgcagcccgccctgagccccggaagctcctttccaggaccggagtggcctgagcaggagagagccgagcagttggcccggggcgcagctctgaagtgggcatctgggatcttctatcggcccgaacagctcgcccggctgggtcagtatcggtcgcgggaggtccaacgcacgtgctctctcgagtctcggctgaagtccgttatgcagtcatatctcgaaggcgtgcagaccgtgcctgctgcagttagtcatactcagactctgatcgatggccaacagttcctagaggcatatgtgtctctgcgtgagctcgagcagttgcgggaggatacctgggccccgcttggcggcctggagttacccgtctttcagggtctggatctgcttttcgaagcgttgggtcaggccgtcgaggctgccgctggcgccgcagggaagctggcccgcgaggatccggcactgctggtggccgccgttcgggtggcagaggtcgaaaccggacggaccactccactaggacaggtcccccgtgattggaggcagaggtgtctgcgtgctctccaggaaggccttgaacaggcgcattttggctcccctctattgccagcccctggggcattgccagggtggctcgaagctttgagggtcgcgctgccagtggaactcgcaacagccgaggccttagttgcaccctgctgtcccccccagtataacgtagtgcagctgtgggctcatactctgcattccggattgcgtcgctccctccagaacctcctagccgggcctgagctcgaggccgctgacgcattcgcgctgcttcattgggctttacacgtctacctggggcaggagatgatgggtagcttggagctgggccctgaggccgatgtgagccagctcgagccgctcttgacactggagaatatcgaacagctggaagctacttttgttgctaacattcagatcttagaagagaatattcgggtggcatctctcgtatccgagtccctgcagcaacgcgtccatggaatggccttaagtgaactgggtacgttcttgaggtccttctcggacgctctgattcggttttctcgagaccactttaggggtaaatccatggctccccattacgtaccataccttctggccgctctcaatcacaagtcagccttgtcctcatctgtctcagtcctgcagctcgatggtgccccctccggggcgctggccccagtggaggccgccctggacgagttacaacgccgcatttataggctggttttggaagccctgcaagccgaactgcaacctctattcgcggatctgccctctagacagtggctgtcgagtcccgaactgctccagagcgtatgtgagcggactggacgattttgtcgcgacttctggagggtgaggaatccgactgtgcagctcctgttagctgaggccgaacgtgctgtggttctgcagtatctttcggctttaatgcagggccggctcgtctgtcggggggccgatgagaggactcaagctgctgagaggctaagacatgacgcagcacaattacagcagctgttccttagccttgtcagagctagctgggcagggcgtcgagcaagggtgtctgttgcgggctgggagagagggctggcccgtgatccaacccctacatgctcagggccaggaggcgagcgggccctgagggcaggtgccgctcgacctgaaggggcggccaaaccgccgcgacccagggccgccggtccaggcggaggctggccagcagccacaatatctcgaagagaacggggcccgagactcaggcccttagggccagcacgcgggctggtccccggagccgctcctggtcgggctcaactgcctgccgggtgtgcagcagctgttgcccccagagaaccccctaggccacttcagccatctgcccgtgctcgggccccggcttcttgtctgcccagcggtagctgtgcccgagcgctgttgctcgctgagtag

SEQ ID NO: 253969 - DNA, 2241 bp, Artificial Sequence
  derived and/or modified sequence
atggacagcgccgccaaggacgagatgcagcccgccctgagccccggacctgaatggcctgaacaggagcgggccgagcagctggcacggggagccgccttgaagtgggccagtgggatcttttatcgcccggaacagcttgctaggttaggacagtatcggtcacgggaagtccagcggacatgttccttggaatcccgcctcaagtcagtgatgcaaagctatttggagggtgtgcagacgggagtctggcagctggcgcaggccatcgaagtggtccagggtacaagagaagccctctcccaggcaagagggctgttgcaggggatgtcccaagcacttcagacactggaaccactgagagagagggtcgcccagcataagcaactgcaagctctctcccacttactgcccaggctgagggcagtgccagcagccgtgtcccacacacaaacgctgattgacgggcagcagttcttggaggcgtacgtaagtttgcgtgaactggaacagttgcgtgaggacacttgggcgcccctgggaggattggaactgcctgtctttcaggggctggaccttctgttcgaagccctaggccaggcggtggaggccgccgctggggccgcaggcaagttagctcgggaggatccggcgctccttgttgctgcagtgcgggtggccgaggttgaaacagggcggacaacaccactcggtcaggtgcctagagactggcgtcagcggtgcctccgcgcacttcaggaaggccttgagcaagcccattttggcagccccctgcttccagcaccgggggcactgcctggctggttagaggcactgcgcgttgccctgcctgtggagttggccactgcagaggcactggttgccccatgctgtcctccccaatacaatgtcgttcagctctgggcccacactctgcactccgggttacgacgttccctacagaacctgctcgccggcccagaacttgaggccgctgacgcctttgcactgctgcactgggctctgcacgtatacctcggccaggagatgatgggctccctcgagctcggaccggaggcagatgtgtcacaactcgagcctctcttaacccttgagaacatcgagcagctcgaggccacatttgtggcgaatatccaggcatcagtgagccagtggcttcagaacgccttagacggagaggtggccgaatggggcagagagcatggaccaaataccgacccaagcggcagctattactcgcctatgccagcgatcgtgctgcaaattttggaagagaacatcagggtagcttccctggtctcagaaagtttacagcagagagtacacggtatggctctgtcagagctgggaaccttcctgcggagctttagtgacgccctgatccgcttttcacgggaccactttcgcggtaaatcaatggctccccactacgtgccttaccttttagctgcgctgaatcataaaagcgcactcagttcatccgtgtccgtcctgcagttggatggcgcacccagtggggcgctggcaccagtggaggcagcccttgatgaactacagcgccgcatttacagactggttctggaggccctacaggcagagctgcagcccttattcgccgatctgccctccagacaatggctaagtagtcccgagctgcttcaaagcgtgtgcgagaggacaggacgattctgtcgcgacttctggcgcgtccgaaaccctaccgtgcagctgttgctcgccgaagcagagcgggcagttgtgcttcagtatctaagcgccctgatgcaggggagactcgtgtgtcgcggagctgacgaaagaactcaggcggctgagcgacttcgccatgacgcagctcaactacagcaactgtttttatccctcgggcttgaggagaatgcacattgcgcacccgtgctgctcgcactccgagagctgctgaatcttagagaccccgccctgcttggcttggaagttgctggactgagacaacagttcccggatgtgagtgaagatcatgtgtcagcccttctgggcctgcggggcgacctgtccagggagcagcacctggccgccctttcttcccttcaggccgcacttccacctagccccagggcctcaaggagggtgctgttctcattggtgcctgcacctgcactggctcctgcaagctgtctgccttctggttcctgtgctagggccctgctgctcgctgagtag

SEQ ID NO: 253970 - DNA, 2040 bp, Artificial Sequence
  derived and/or modified sequence
atggacagcgccgccaaggacgagatgcagcccgccctgagccccggccccgagtggcctgaacaggagcgtgctgagcaactcgcccgcggggcggcactgaagtgggcatcaggcatcttttaccggcctgaacagctagcgagactcggccagtaccgctccagggaagtgcagcgaacctgctctcttgaatcccgcctgaagagcgtgatgcaaagttacttagagggggttcagactgtgcctgctgctgtctcccatacccagacactgattgacgggcagcagtttcttgaggcttacgtttcactgagggaacttgagcagttgagggaggacacatgggcacccctcggcggcctggagttgcctgtttttcaggggcttgatctgctctttgaagcgcttggccaagcggtcgaagccgcagctggcgcagctgggaagctagcaagagaagacccggccctgttagtggccgcagtacgcgtcgccgaggtcgaaacgggtcgaactacaccactagggcaggtcccccgagactggagacagcggtgtttaagagcgctccaagagggcctagaacaggcgcacttcggaagtcctcttctgcccgctcctggcgcccttcctggctggctggaagctctcagggttgctctgcctgtcgaactcgcgactgcagaagcactggttgcaccttgttgtccacctcagtacaacgtggtccagctatgggctcataccctgcattccggcctgcgaagaagtcttcagaacctgctcgcgggaccagagcttgaggctgccgacgctttcgctctgcttcattgggcacttcatgtttacctggggcaggagatgatggggagtctggaactcgggccggaggccgatgtatcccagctcgaacctttgttgacactggagaacatcgaacagcttgaagcgacgttcgtggcaaatattcagattttggaagagaacatccgggtcgcttctctggtctccgagagcctccaacagcgtgtgcatggcatggctttatccgagctaggcacctttctcagaagtttttctgatgctttgatcagattcagtcgtgaccactttcgaggaaagagtatggccccacactatgtgccttacctcttggctgctctgaaccacaagtcagcactgtcatcctcagtatcggtgttgcagctagatggcgctcctagtggtgctctggctcccgttgaggcagctctagatgagctgcagaggcgtatataccgcctcgtactcgaggctctgcaggctgagctgcagccattgtttgccgatctcccgtccagacagtggctttccagtcccgagctgctacagagtgtctgcgaaaggacaggccggttttgcagggacttttggcgagtaaggaatcccactgtccaactgctgctcgcagaagctgagagagcagtggtattacagtacctgtccgcactgatgcaggggcgcctggtgtgcagaggcgcagacgaacggacccaggcagcggagagactgcgccatgatgctgcgcaattgcagcagctgttcctgtcactggtcagagccagttgggccggacgccgtgctcgtgtgtccgttgctgggtgggagcggggccttgcaagagatccaactcctacttgttctggacctggtggggaacgcgctctgcgcgccggagcagctcgccctgagggcgcagccaagcccccacggccccgagcggcagggccgggtggaggctggcccgcagccaccatctctaggcgcgagcgcggtccacgactccgcccgctcggaccggcccgcggtctggtgcccggtgccgccccaggtagagcccaattgcccgccggttgcgctgcagctgtggctccaagagagcccccaaggccacttcagccttctgctagagcacgtgcacgtgccggattactgcctgctctgggcgtcctgcgcccctctcccgctgccagaaggattaaccacggttgccgatag

SEQ ID NO: 253971 - DNA, 2034 bp, Artificial Sequence
  derived and/or modified sequence
atggatagcgctgcgaaagatgaaatgcagcccgctctgtctcccggatccagctttcccggtccagaatggccagaacaggagcgagcggagcagctcgcaaggggcgctgctctcaagtgggcttccggcatcttctaccgacctgagcagctggccagactggggcagtacagatccagagaagtgcagcgaacttgttctctagagtcgcgactaaagagtgttatgcaaagttacttagagggggtgcagactgtccccgctgcggtaagccacacccaaacactcattgatggacagcagttcctggaggcctatgtgtcgttgcgtgagcttgaacagctgcgcgaggatacatgggcaccgctcgggggattagaactgccggtgtttcaggggctagatctattgtttgaagctttggggcaggcagtggaggctgcagcaggggctgccggaaaactcgccagggaggaccccgcacttctcgtggcagcagtgcgcgttgcagaggtcgaaactgggcgtaccacaccactcggccaggttccaagggattggcgacaacggtgcttgagggcacttcaggagggtctggagcaagcccatttcggctccccgctgctgccagcccctggcgctttgcccggatggctggaagccctgcgcgttgccctcccagtggagttggctacggccgaagcactggtggccccttgttgccccccacagtataatgtggtgcaattatgggcccatacacttcacagtggactaaggaggtccctgcagaacctccttgccggaccagaactggaggccgctgatgctttcgctctgttgcattgggccttacacgtttatctgggccaagaaatgatgggatctctggagcttggcccagaggctgacgtgtcccagctggagccactccttacactcgagaacatcgaacagctcgaagccaccttcgtggcaaatattcagatcctggaagaaaacatcagagtcgcgtccctggtaagcgagagcctgcagcagagggtccacggcatggcgcttagcgagcttggcacattcctgcgcagcttcagcgacgctttaattaggttcagtagggatcacttcagaggaaaatccatggctccccactacgtaccctatctgttagctgctcttaatcataagagtgcactatcaagcagtgtcagcgtcctgcagcttgacggagctccaagcggcgctctggcaccagtggaggcagctctggatgagttgcagcggcgaatatacaggctggtcctcgaagccctccaggccgaacttcaacccctttttgcggatctaccctcccgccagtggctgagcagccccgagctgttgcagtctgtgtgtgagcggacaggtcgcttctgtcgagacttctggagagtcaggaacccaactgtgcagttgctactcgcagaagccgagagagccgtcgttctgcagtatctctccgccctcatgcagggtagactggtgtgcaggggagccgacgagcggacccaggccgcagagagactgcgtcatgatgcagctcagctgcagcaattgttcttgagtctggtaagagcctcctgggccggtaggcgcgctcgggtctcagtggccggatgggaacggggtctggcgcgagatcccacacccacatgttccggcccaggaggagagagagcgctgcgagctggcgctgcacggcctgaaggagccgctaagccacctcgacccagagccgcagggcctgggggtggatggcccgcagccacgatttctcgaagagagagagggccaaggctcagacccctcggcccagcaagaggactggtcccaggggcagcacccggacgggcacagcttcccgctggttgcgccgcagcagtcgctcctagagaacccccacggcctcttcagccaagcgccagggccagagctcccgcaagctgccttccaagcggctcgtgtgcccgtgccctgctgttagcagagtag

SEQ ID NO: 253972 - DNA, 2241 bp, Artificial Sequence
  derived and/or modified sequence
atggactcggcggctaaagacgaaatgcagccggcactgtcgccaggcccagagtggcccgagcaggagagggccgagcagctagccaggggggcagccctaaagtgggcttccggcattttctatagacctgagcagctggccagattggggcagtatcgatcccgagaagtccaaagaacctgctcactggaaagccggctgaagtcagtgatgcagtcatacctggagggggtgcagactggcgtgtggcagctggcccaggctatcgaggttgtccaaggcacgagagaggccctctcccaggcgcgtggactcctgcagggaatgagccaggccctgcagacactcgagcctctaagagaaagagtcgcccaacataagcagctccaggctctaagtcacttgctgcccaggttgcgagcagtgccagccgctgtttcccacacacagaccctcatcgacggccaacagtttttggaagcttatgtgagtctgagggaattggagcagctgcgcgaggatacctgggcccctctgggaggcctagaattgcctgtcttccagggcctggatttgctgtttgaggctctgggccaagccgtggaggccgcagcgggagcagcgggaaagctcgctcgggaagatcccgcactgcttgtcgcagctgtgagggtggccgaagtggaaacaggcagaacaacacctctcggacaagtgccaagagactggcgacagcggtgccttagagccctccaggagggactagagcaagcccatttcgggagcccactgctgcccgctcctggcgctctgcctggatggttggaggctcttcgagttgcgctgcctgtggagttggcaacagctgaggctcttgtggccccatgctgcccaccacaatacaatgtcgtccagttatgggctcacactctgcattccggtctgagaaggtccttgcagaacctgctggccggaccagagctggaggctgctgacgcattcgctttgttgcactgggccttgcacgtgtacctgggtcaggagatgatgggatccctggagcttggcccagaagccgacgtctctcagctggagcctctgctcactctcgagaacatagagcaactagaagctaccttcgttgccaacattcaggcttcagtcagccagtggctgcaaaacgctctggatggggaagtggcagaatggggtcgagaacacgggcctaataccgatccaagcggcagttactattctcctatgcctgccatcgtgctgcagatcctcgaggaaaacatacgggtcgcttctttggtgagtgaatcgctgcaacagcgcgtgcacggaatggccctcagcgaactgggcactttcctgagatctttctcagacgccctcatccgtttttcacgtgaccacttccgagggaagtcaatggctcctcattatgtgccatacttactcgccgcactgaaccataagagcgcacttagtagctccgtctcagtgctccagcttgatggcgcaccctctggcgctctggccccagtggaagcggcattggacgagttacagcggcgtatttatcggctcgtgctggaggccttacaagctgaacttcagcccctgtttgctgacctgcccagccggcagtggctgtcctctcccgaactgctgcagtctgtgtgcgaaaggactggcaggttttgtcgcgacttttggcgagtccgaaacccaacagtacagttgcttcttgccgaagcggaaagagccgtcgtactccaatacctgtcagcgctcatgcagggacgtctggtttgtcggggtgccgatgaacggacacaggctgccgagcgcctaaggcacgatgcagctcaattacagcagctcttcttgtctctggggctggaagaaaacgcccactgtgctcccgtgctactagcccttagggagctgctcaatcttagggatccagcactgctgggactggaggtggccggacttagacaacagtttccagatgtttcagaagatcacgtcagtgctctgcttggactccgaggcgacctctctcgagagcagcaccttgcagctctgtcatctctgcaggctgcactgcctcctagcccacgcgcttccagacgagtactgttcagtctggtacccgcaccggctcttgcccctgcatcctgcctccctagtggatcgtgcgctagagctttgctgcttgccgaatag

SEQ ID NO: 253973 - DNA, 2040 bp, Artificial Sequence
  derived and/or modified sequence
atggactctgcggcaaaggacgaaatgcaaccagccttgtcaccgggtcctgagtggccagaacaagagcgcgcagaacaattagcccgaggagctgccctaaagtgggcaagcggaatcttttaccgcccagagcaattggccaggctcggtcaatatcgatctagagaggtgcagaggacttgttcccttgaaagtcggctgaagagtgtgatgcagtcctatctggagggtgttcaaactgtgcctgccgctgtgagccacacccagaccttaatcgacgggcagcaatttcttgaagcgtacgtgtcattacgggagctcgagcaactgagagaggatacgtgggcaccattgggaggcctggagctcccagtgttccaggggctggatttactgttcgaggctctgggccaggccgtggaggccgcagcgggtgccgcaggcaaattggctagagaggatcctgcgctcctggtagccgcagtccgagtggccgaagtggaaaccggcagaactacccccctgggacaggtgccacgcgactggcgccagcgctgcctgcgagccctgcaggaaggccttgagcaggcccattttggttcccctctcctcccggcacccggagccttgcctggttggctggaggctctgagagtagcacttcccgtggaacttgcgaccgccgaggcactggtcgcaccttgttgtccaccccagtacaacgtggtgcaactgtgggctcacaccctgcattctggactcagaaggagcctccagaatcttcttgcagggcctgagctggaggccgctgacgcttttgccctgctccactgggccctgcatgtctacctgggtcaggaaatgatgggctcattggaactgggccctgaagctgacgtgtcacagttggagccgctattaacgttggaaaacatcgaacagcttgaagccacctttgtcgctaatatccaaatcctggaagagaacatccgcgtggcaagcctcgtctccgagagccttcagcagagagtccacggtatggccctaagcgagttgggaacgttcctcagatcattctccgacgccttgattagattttctagagaccattttagaggtaagtctatggcccctcactatgtgccttacctgctggctgctctcaatcacaaatcagcactaagttcatccgtctccgtgttacagctagacggcgcaccctccggagctcttgcccctgtcgaagccgctctcgacgagctgcagagacgcatctaccgactagtgctcgaggcccttcaggcagaactgcagcctctctttgctgatttaccgtctcgacagtggctgtcaagccctgaactgctacagtcagtgtgtgagcgtaccggcaggttttgtagggatttctggcgggtgcgcaatccgacagtccagctcctgttggcggaagccgaacgcgcagtcgtgctccagtaccttagcgctcttatgcaagggcgtctggtgtgtagaggagcggacgagcgaacgcaagccgcagagaggctcaggcacgacgcagctcagttgcaacagctctttctcagcctggtgcgcgcttcttgggcgggtcggagggcccgtgttagtgtcgctgggtgggagcgcggactggctcgcgaccctactcccacctgctctggcccaggcggagaaagggcactgagggctggagctgccagacctgaaggagcggcaaaaccccctcgtccgcgagccgcaggtccgggaggaggctggccagcagctacaattagtcgacgggaaagggggccacgactgcggcctctggggccagcacgcggactagtgccaggggcagcgccaggcagagcgcagctcccagccggatgcgctgcggctgtcgcaccccgagagcctccaagacctttgcaacccagtgcaagagcaagggccagggcgggactactgccagcactgggggtactgagacctagcccagccgcaaggaggattaatcacggttgccggtag

SEQ ID NO: 253974 - DNA, 2034 bp, Artificial Sequence
  derived and/or modified sequence
atggacagcgccgccaaggacgagatgcagcccgccctgagccccggcagcagcttccccggccccgagtggcccgagcaggagagagccgagcagctggccagaggcgccgccctgaagtgggccagcggcatcttctacagacccgagcagctggccagactgggccagtacagaagcagagaggtgcagagaacctgcagcctggagagcagactgaagagcgtgatgcagagctacctggagggcgtgcagaccgtgcccgccgccgtgagccacacccagaccctgatcgacggccagcagttcctggaggcctacgtgagcctgagagagctggagcagctgagagaggacacctgggcccccctgggcggcctggagctgcccgtgttccagggcctggacctgctgttcgaggccctgggccaggccgtggaggccgccgccggcgccgccggcaagctggccagagaggaccccgccctgctggtggccgccgtgagagtggccgaggtggagaccggcagaaccacccccctgggccaggtgcccagagactggagacagagatgcctgagagccctgcaggagggcctggagcaggcccacttcggcagccccctgctgcccgcccccggcgccctgcccggctggctggaggccctgagagtggccctgcccgtggagctggccaccgccgaggccctggtggccccctgctgccccccccagtacaacgtggtgcagctgtgggcccacaccctgcacagcggcctgagaagaagcctgcagaacctgctggccggccccgagctggaggccgccgacgccttcgccctgctgcactgggccctgcacgtgtacctgggccaggagatgatgggcagcctggagctgggccccgaggccgacgtgagccagctggagcccctgctgaccctggagaacatcgagcagctggaggccaccttcgtggccaacatccagatcctggaggagaacatcagagtggccagcctggtgagcgagagcctgcagcagagagtgcacggcatggccctgagcgagctgggcaccttcctgagaagcttcagcgacgccctgatcagattcagcagagaccacttcagaggcaagagcatggccccccactacgtgccctacctgctggccgccctgaaccacaagagcgccctgagcagcagcgtgagcgtgctgcagctggacggcgcccccagcggcgccctggcccccgtggaggccgccctggacgagctgcagagaagaatctacagactggtgctggaggccctgcaggccgagctgcagcccctgttcgccgacctgcccagcagacagtggctgagcagccccgagctgctgcagagcgtgtgcgagagaaccggcagattctgcagagacttctggagagtgagaaaccccaccgtgcagctgctgctggccgaggccgagagagccgtggtgctgcagtacctgagcgccctgatgcagggcagactggtgtgcagaggcgccgacgagagaacccaggccgccgagagactgagacacgacgccgcccagctgcagcagctgttcctgagcctggtgagagccagctgggccggcagaagagccagagtgagcgtggccggctgggagagaggcctggccagagaccccacccccacctgcagcggccccggcggcgagagagccctgagagccggcgccgccagacccgagggcgccgccaagccccccagacccagagccgccggccccggcggcggctggcccgccgccaccatcagcagaagagagagaggccccagactgagacccctgggccccgccagaggcctggtgcccggcgccgcccccggcagagcccagctgcccgccggctgcgccgccgccgtggcccccagagagccccccagacccctgcagcccagcgccagagccagagcccccgccagctgcctgcccagcggcagctgcgccagagccctgctgctggccgagtag

SEQ ID NO: 253975 - DNA, 2241 bp, Artificial Sequence
  derived and/or modified sequence
atggacagcgccgccaaggacgagatgcagcccgccctgagccccggccccgagtggcccgagcaggagagagccgagcagctggccagaggcgccgccctgaagtgggccagcggcatcttctacagacccgagcagctggccagactgggccagtacagaagcagagaggtgcagagaacctgcagcctggagagcagactgaagagcgtgatgcagagctacctggagggcgtgcagaccggcgtgtggcagctggcccaggccatcgaggtggtgcagggcaccagagaggccctgagccaggccagaggcctgctgcagggcatgagccaggccctgcagaccctggagcccctgagagagagagtggcccagcacaagcagctgcaggccctgagccacctgctgcccagactgagagccgtgcccgccgccgtgagccacacccagaccctgatcgacggccagcagttcctggaggcctacgtgagcctgagagagctggagcagctgagagaggacacctgggcccccctgggcggcctggagctgcccgtgttccagggcctggacctgctgttcgaggccctgggccaggccgtggaggccgccgccggcgccgccggcaagctggccagagaggaccccgccctgctggtggccgccgtgagagtggccgaggtggagaccggcagaaccacccccctgggccaggtgcccagagactggagacagagatgcctgagagccctgcaggagggcctggagcaggcccacttcggcagccccctgctgcccgcccccggcgccctgcccggctggctggaggccctgagagtggccctgcccgtggagctggccaccgccgaggccctggtggccccctgctgccccccccagtacaacgtggtgcagctgtgggcccacaccctgcacagcggcctgagaagaagcctgcagaacctgctggccggccccgagctggaggccgccgacgccttcgccctgctgcactgggccctgcacgtgtacctgggccaggagatgatgggcagcctggagctgggccccgaggccgacgtgagccagctggagcccctgctgaccctggagaacatcgagcagctggaggccaccttcgtggccaacatccaggccagcgtgagccagtggctgcagaacgccctggacggcgaggtggccgagtggggcagagagcacggccccaacaccgaccccagcggcagctactacagccccatgcccgccatcgtgctgcagatcctggaggagaacatcagagtggccagcctggtgagcgagagcctgcagcagagagtgcacggcatggccctgagcgagctgggcaccttcctgagaagcttcagcgacgccctgatcagattcagcagagaccacttcagaggcaagagcatggccccccactacgtgccctacctgctggccgccctgaaccacaagagcgccctgagcagcagcgtgagcgtgctgcagctggacggcgcccccagcggcgccctggcccccgtggaggccgccctggacgagctgcagagaagaatctacagactggtgctggaggccctgcaggccgagctgcagcccctgttcgccgacctgcccagcagacagtggctgagcagccccgagctgctgcagagcgtgtgcgagagaaccggcagattctgcagagacttctggagagtgagaaaccccaccgtgcagctgctgctggccgaggccgagagagccgtggtgctgcagtacctgagcgccctgatgcagggcagactggtgtgcagaggcgccgacgagagaacccaggccgccgagagactgagacacgacgccgcccagctgcagcagctgttcctgagcctgggcctggaggagaacgcccactgcgcccccgtgctgctggccctgagagagctgctgaacctgagagaccccgccctgctgggcctggaggtggccggcctgagacagcagttccccgacgtgagcgaggaccacgtgagcgccctgctgggcctgagaggcgacctgagcagagagcagcacctggccgccctgagcagcctgcaggccgccctgccccccagccccagagccagcagaagagtgctgttcagcctggtgcccgcccccgccctggcccccgccagctgcctgcccagcggcagctgcgccagagccctgctgctggccgagtag

SEQ ID NO: 253976 - DNA, 2040 bp, Artificial Sequence
  derived and/or modified sequence
atggacagcgccgccaaggacgagatgcagcccgccctgagccccggccccgagtggcccgagcaggagagagccgagcagctggccagaggcgccgccctgaagtgggccagcggcatcttctacagacccgagcagctggccagactgggccagtacagaagcagagaggtgcagagaacctgcagcctggagagcagactgaagagcgtgatgcagagctacctggagggcgtgcagaccgtgcccgccgccgtgagccacacccagaccctgatcgacggccagcagttcctggaggcctacgtgagcctgagagagctggagcagctgagagaggacacctgggcccccctgggcggcctggagctgcccgtgttccagggcctggacctgctgttcgaggccctgggccaggccgtggaggccgccgccggcgccgccggcaagctggccagagaggaccccgccctgctggtggccgccgtgagagtggccgaggtggagaccggcagaaccacccccctgggccaggtgcccagagactggagacagagatgcctgagagccctgcaggagggcctggagcaggcccacttcggcagccccctgctgcccgcccccggcgccctgcccggctggctggaggccctgagagtggccctgcccgtggagctggccaccgccgaggccctggtggccccctgctgccccccccagtacaacgtggtgcagctgtgggcccacaccctgcacagcggcctgagaagaagcctgcagaacctgctggccggccccgagctggaggccgccgacgccttcgccctgctgcactgggccctgcacgtgtacctgggccaggagatgatgggcagcctggagctgggccccgaggccgacgtgagccagctggagcccctgctgaccctggagaacatcgagcagctggaggccaccttcgtggccaacatccagatcctggaggagaacatcagagtggccagcctggtgagcgagagcctgcagcagagagtgcacggcatggccctgagcgagctgggcaccttcctgagaagcttcagcgacgccctgatcagattcagcagagaccacttcagaggcaagagcatggccccccactacgtgccctacctgctggccgccctgaaccacaagagcgccctgagcagcagcgtgagcgtgctgcagctggacggcgcccccagcggcgccctggcccccgtggaggccgccctggacgagctgcagagaagaatctacagactggtgctggaggccctgcaggccgagctgcagcccctgttcgccgacctgcccagcagacagtggctgagcagccccgagctgctgcagagcgtgtgcgagagaaccggcagattctgcagagacttctggagagtgagaaaccccaccgtgcagctgctgctggccgaggccgagagagccgtggtgctgcagtacctgagcgccctgatgcagggcagactggtgtgcagaggcgccgacgagagaacccaggccgccgagagactgagacacgacgccgcccagctgcagcagctgttcctgagcctggtgagagccagctgggccggcagaagagccagagtgagcgtggccggctgggagagaggcctggccagagaccccacccccacctgcagcggccccggcggcgagagagccctgagagccggcgccgccagacccgagggcgccgccaagccccccagacccagagccgccggccccggcggcggctggcccgccgccaccatcagcagaagagagagaggccccagactgagacccctgggccccgccagaggcctggtgcccggcgccgcccccggcagagcccagctgcccgccggctgcgccgccgccgtggcccccagagagccccccagacccctgcagcccagcgccagagccagagccagagccggcctgctgcccgccctgggcgtgctgagacccagccccgccgccagaagaatcaaccacggctgcagatag

SEQ ID NO: 253977 - protein, 504 aa, Artificial Sequence
  derived and/or modified sequence
MSEKQMKEAFVSNLNGTTVLEITQGLCFPAFCILCRGFLIIFSQYLCSFSPTWKTRFLTDFVVLIVPMVATLTIWASFILLELLGVIIFGAGLLYQIYRRRTCYARLPFLKILEKFLNISLESEYNPAISCFRVITSAFTAIAILAVDFPLFPRRFAKTELYGTGAMDFGVGGFVFGSAMVCLEVRRRKYMEGSKLHYFTNSLYSVWPLVFLGIGRLAIIKSIGYQEHLTEYGVHWNFFFTIIVVKLITPLLLIIFPLNKSWIIALGITVLYQLALDFTSLKRLILYGTDGSGTRVGLLNANREGIISTLGYVAIHMAGVQTGLYMHKNRSHIKDLIKVACFLLLAAISLFISLYVVQVNVEAVSRRMANLAFCIWIVASSLILLSSLLLGDIILSFAKFLIKGALVPCSWKLIQSPVTNKKHSESLVPEAERMEPSLCLITALNRKQLIFFLLSNITTGLINLMVDTLHSSTLWALFVVNLYMFSNCLIVYVLYLQDKTVQFW

SEQ ID NO: 253978 - protein, 105 aa, Artificial Sequence
  derived and/or modified sequence
MSEKQMKEAFVSNLNGTTVLEITQGLCFPAFCILCRGFLIIFSQYLCSFSPTWKTRFLTDFVVLIVPMVATLTIWASFILLELLGVIIFGAGLLYQIYRRRTCYA

SEQ ID NO: 253979 - DNA, 1515 bp, Artificial Sequence
  derived and/or modified sequence
atgagcgagaagcagatgaaggaggccttcgtgagcaacctgaacggcaccaccgtgctggagatcacccagggcctgtgcttccccgccttctgcatcctgtgcagaggcttcctgatcatcttcagccagtacctgtgcagcttcagccccacctggaagaccagattcctgaccgacttcgtggtgctgatcgtgcccatggtggccaccctgaccatctgggccagcttcatcctgctggagctgctgggcgtgatcatcttcggcgccggcctgctgtaccagatctacagaagaagaacctgctacgccagactgcccttcctgaagatcctggagaagttcctgaacatcagcctggagagcgagtacaaccccgccatcagctgcttcagagtgatcaccagcgccttcaccgccatcgccatcctggccgtggacttccccctgttccccagaagattcgccaagaccgagctgtacggcaccggcgccatggacttcggcgtgggcggcttcgtgttcggcagcgccatggtgtgcctggaggtgagaagaagaaagtacatggagggcagcaagctgcactacttcaccaacagcctgtacagcgtgtggcccctggtgttcctgggcatcggcagactggccatcatcaagagcatcggctaccaggagcacctgaccgagtacggcgtgcactggaacttcttcttcaccatcatcgtggtgaagctgatcacccccctgctgctgatcatcttccccctgaacaagagctggatcatcgccctgggcatcaccgtgctgtaccagctggccctggacttcaccagcctgaagagactgatcctgtacggcaccgacggcagcggcaccagagtgggcctgctgaacgccaacagagagggcatcatcagcaccctgggctacgtggccatccacatggccggcgtgcagaccggcctgtacatgcacaagaacagaagccacatcaaggacctgatcaaggtggcctgcttcctgctgctggccgccatcagcctgttcatcagcctgtacgtggtgcaggtgaacgtggaggccgtgagcagaagaatggccaacctggccttctgcatctggatcgtggccagcagcctgatcctgctgagcagcctgctgctgggcgacatcatcctgagcttcgccaagttcctgatcaagggcgccctggtgccctgcagctggaagctgatccagagccccgtgaccaacaagaagcacagcgagagcctggtgcccgaggccgagagaatggagcccagcctgtgcctgatcaccgccctgaacagaaagcagctgatcttcttcctgctgagcaacatcaccaccggcctgatcaacctgatggtggacaccctgcacagcagcaccctgtgggccctgttcgtggtgaacctgtacatgttcagcaactgcctgatcgtgtacgtgctgtacctgcaggacaagaccgtgcagttctggtag

SEQ ID NO: 253980 - DNA, 1515 bp, Artificial Sequence
  derived and/or modified sequence
atgtcggagaagcagatgaaggaggctttcgtaagcaaccttaacggcaccaccgtgctggagatcacacagggcttatgcttcccagcattttgcatcttatgtagaggcttcttgatcatattcagccaatatctgtgcagctttagtcccacctggaagactcggtttctcacggattttgtggtcctaatcgtccccatggtggccacactcaccatatgggctagctttattctgcttgaactcttaggcgtaatcattttcggcgctggcctgctgtatcagatctaccggcgtagaacatgttacgcacgcttacccttcctgaagattttggagaagtttctgaacatcagtctcgaatctgagtataaccccgccatttcctgttttcgcgtgatcacttcagcatttactgccatagccatcctggcagtggattttccattatttccacggcgatttgccaagactgagctgtacggcaccggagccatggacttcggcgtagggggttttgtgtttggttcagcaatggtttgtctggaggtgagacggagaaagtatatggaaggatccaagctgcattatttcactaattccctgtatagcgtgtggcccctcgtatttttaggcattggccgcctggccattataaagagcattggataccaagagcaccttaccgagtacggcgtccattggaatttttttttcactattatcgtagttaaactgattaccccgctgctgctgatcatctttcccctcaataagtcctggataatcgccctgggaattacagtgctgtaccagttggccctggattttacatctctgaaaaggctgatcctgtacgggaccgacgggtctggtactcgcgtcgggctcctgaacgctaaccgcgaggggataatttccaccctgggatatgtcgctatccacatggcaggtgtccaaacaggactgtatatgcacaagaatcgaagccacataaaggatctgataaaagtagcctgctttctgctgttggctgcaatctccctgtttatttcactttatgtcgtgcaggtgaacgtcgaagcagtatctaggcggatggcaaatctggctttctgcatttggatcgtagcaagctcacttatccttctcagtagtctgctgctgggggacatcatcctgagctttgcaaagtttctgatcaagggagcattggtgccttgctcttggaaactgattcagtctcccgtaactaacaagaagcatagcgaaagtctggtgcctgaggcagagaggatggaaccctcactgtgcttgattaccgcactcaacaggaagcagctgattttcttcctcctgtctaatatcacgactgggttgatcaatctgatggttgacaccctgcactcctccaccctctgggccctgttcgtggtcaatctctatatgttttccaactgcctcatcgtctatgtattatacctccaggacaaaacagtgcaattttggtag

SEQ ID NO: 253981 - DNA, 1515 bp, Artificial Sequence
  derived and/or modified sequence
atgtctgagaagcagatgaaggaggcctttgtgagcaacctgaatggcaccaccgtgctggagatcacccagggcctgtgcttccctgccttctgcatcctgtgccggggcttcctgatcatcttcagccagtacctgtgcagcttcagccccacctggaagacccgcttcctgacagactttgtggtgctgattgtgcccatggtggccaccctgaccatctgggccagcttcatcctgctggagctgctgggcgtcatcatctttggagctggcctgctgtaccagatctacagaagaaggacctgctacgcccggctgcccttcctgaagatcctggagaagttcctgaacatcagcctggagagcgagtacaacccagccatcagctgcttccgggtcatcaccagcgccttcaccgccatcgccatcctggccgtggacttccccctcttccccaggagatttgccaagacagagctgtatggcaccggggccatggactttggagtgggcggctttgtgtttggcagcgccatggtgtgcctggaggtgagaagaaggaagtacatggagggcagcaagctgcactacttcaccaacagcctgtacagcgtgtggcccctggtgttcctgggcatcggccgcctggccatcatcaagagcatcggctaccaggagcacctgacagaatatggagtgcactggaacttcttcttcaccatcatcgtggtgaagctgatcacccccctgctgctgatcatcttccccctgaacaagtcctggatcatcgccctgggcatcaccgtgctgtaccagctggccctggacttcaccagcctgaagaggctcatcctgtatggaacagatggcagcggcaccagggtgggcctgctgaatgccaaccgggagggcatcatcagcaccctgggctacgtggccatccacatggccggcgtgcagacaggcctgtacatgcacaagaacagaagccacatcaaggacctgatcaaggtggcctgcttcctgctgctggccgccatcagcctcttcatcagcctgtatgtggtgcaggtgaatgtggaggccgtgtccaggaggatggccaacctggccttctgcatctggatcgtggccagcagcctcatcctgctgagcagcctgctgctgggggacatcatcctgagctttgccaagttcctgatcaagggggccctggtgccctgctcctggaagctgatccagagccctgtgaccaacaagaagcacagcgagagcctggtgcctgaggccgagaggatggagcccagcctgtgcctgatcacagccctgaacaggaagcagctgatcttcttcctgctgagcaacatcaccaccggcctcatcaacctgatggtggacaccctgcacagcagcaccctgtgggccctgtttgtggtgaacctgtacatgttcagcaactgcctgattgtgtatgtgctgtacctgcaggacaagacagtgcagttctggtag

SEQ ID NO: 253982 - DNA, 1515 bp, Artificial Sequence
  derived and/or modified sequence
atgagcgagaagcagatgaaggaggccttcgtgagcaacctgaacggcaccaccgtactggaaatcactcaggggctgtgctttcctgccttctgcatcctatgccgtggctttttaattattttctcccagtatctgtgctccttctctccaacttggaaaacaaggtttcttacagacttcgttgtactgatcgtgccaatggtcgccactttgaccatctgggcgtctttcatcctgctggaattgctgggagttatcattttcggggccggcctgctctaccaaatttacaggagaaggacatgctatgccaggctgccttttctgaagattctggaaaaatttctgaacattagcctggaaagcgaatacaatccagcgattagttgtttccgcgtgatcacatcagcatttaccgcaattgcaatactggccgtggacttccccctgttcccacgaaggttcgcaaagacagaactgtatggcaccggagccatggacttcggagtgggcggcttcgtctttgggtctgctatggtgtgtttggaggtccgccgtcggaaatacatggaggggagtaagcttcactattttaccaatagcttgtactctgtctggcccttggttttcttgggaattgggcggctggcgataattaagtcaatcggatatcaggaacacttgacagagtatggcgtacattggaacttctttttcaccatcatcgtggtgaaactcatcaccccgttgctgctgatcattttcccccttaataaaagttggattatcgctctgggcatcacagtcctataccaacttgccttagacttcacctctctaaagcgtctcattctctacggaacagacggctctggcactagggtcggactcctgaacgcgaatcgcgagggtatcatcagcactcttggatatgtcgccatccatatggctggcgtacagaccgggctgtatatgcacaaaaaccgcagtcatatcaaggacctgatcaaggtcgcttgcttcctgcttcttgcagccatttcgttattcatcagtttgtacgtggttcaagtcaacgtcgaagccgtaagccgtcgcatggccaacctcgcattctgcatatggattgtggccagcagtctgatcttgctttcaagcctattacttggagatattattctcagctttgctaaattcctcattaaaggagcactcgttccttgcagctggaagttaattcaaagccccgtgacgaataagaagcatagtgaatctctcgttcctgaagcagaaaggatggaacccagtctatgtctaatcaccgccctgaatcggaaacagctgatttttttcctgctcagcaatattacgactggacttatcaacctgatggtggatactctccatagtagcactctctgggccctgtttgtcgtgaatctgtatatgttctccaactgtctgattgtgtacgttttataccttcaggacaagactgtgcagttttggtag

SEQ ID NO: 253983 - DNA, 2255 bp, Artificial Sequence
  derived and/or modified sequence
acgtagaccgtctgctgggggcgccggcaccatttggagtacgtgaggaagaaaaatgtctgaaaagcagatgaaggaagcttttgtcagtaacctcaatggaaccaccgtgctggaaatcacccagggattgtgctttcctgcattctgtatcctgtgcagagggttcctgatcattttctcacagtacttgtgttctttttcacctacctggaaaactagattcctcactgactttgttgtcctaatagttcccatggtagccactttgaccatttgggcttcatttatcctccttgagcttctcggtgtaattatctttggggcagggctgttgtatcaaatataccgaaggaggacctgctatgccagactgcctttcctaaaaatccttgaaaaattcttgaacatcagtctagaatcagaatacaatccagccatctcctgtttccgtgtaattaccagtgcgtttactgctattgctattttggctgtggacttcccactttttcccagaagatttgccaaaactgagctctatgggacaggagcaatggattttggagtaggtggctttgtttttgggtctgcaatggtttgtctagaggtcaggaggagaaaatatatggaagggtccaaattgcattactttacaaactcattgtactctgtttggccattagtcttcctaggaatcggacgattagccattataaaatcaataggctatcaggaacatttaacagagtatggagttcactggaactttttctttaccataatagttgtgaaattgataacaccactgctgttgattatttttcccctaaataagtcctggattattgccctcggcattactgtattataccagctagcccttgactttacctcactgaagaggttaatattatatggcactgatggtagtggcacacgggttggtctattaaatgccaaccgcgaaggaataatctctaccctggggtatgtggcaatacacatggctggtgtgcaaacagggttatatatgcataagaaccgatcacatatcaaagacttgataaaagtagcctgttttcttttactggcagctattagcctcttcatatctctttacgtagttcaagtaaatgtagaagcagtatctcgaagaatggcaaatttagccttttgtatttggatagttgcttctagcctgatccttcttagtagtttattactgggtgatataattttgagttttgccaaatttctaattaaaggagctctagtaccatgttcttggaaacttatccagtcacctgttacaaataaaaagcattcagaatctctagtccctgaagccgaaagaatggaacccagtctttgtttaatcacagctctaaacagaaaacagttaatatttttcttgctgtcaaatataacaactggcctgatcaacctgatggtagatacattacacagcagtaccttgtgggccttatttgtggtcaatctctatatgttttccaactgtttaattgtatatgtactatatttgcaagataagactgtacaattttggtgatcagcaggagtaggatatataagtatttgggcaatatttaatgaggaatattaattgtaaagaaattgtgcttttggcaacagtgttaaccatattttattataaaatagtttcagtcatctaaacagcagtgatgcttaattatttttttttttgagacagagtcttgctctgttacccaggctggagtgtagtggtgccatctcagctcactgcaacctccacctcccgggttcaagcaattctcctgcctcagcctcctgagtagctggcactgtaggcatgtaccaccatgcccagctaatttttatatttttagtagagatggggttttgccatattggccaggctggtctcaaactcctgaactcaagtgataacacccaccttggcctcccaaagtgctgggattacaggtgtgagccaccacactgggccaatgcttaatattttaatgtatctcaacaataaaaccaagaagaaacaaagccttttgacttgttagaatgtattaagtagtattttaaagaaactttatagttgtgacattgaaagactgttggggtggggggaggaaaatttttactttccatcttaatgtaaccttatgctattctgtatttttactgtatattgcttttacaataaatataaaatgaaatgtttatgttgacatttcagtgtg

SEQ ID NO: 253984 - DNA, 1515 bp, Artificial Sequence
  derived and/or modified sequence
atgagcgagaaacagatgaaggaagcatttgttagtaatctgaatgggaccacagttcttgaaatcacacaagggctgtgttttcccgcattttgtatcctgtgcagaggctttctcataatcttctcacagtatctttgctccttttcgccgacttggaagactcgctttcttactgattttgtggttcttatagtccctatggtggcaacactgacaatctgggccagctttatcttgctggagctgctgggagtgataattttcggcgcaggcctactgtaccaaatttatcggaggaggacatgttatgctcggcttcccttcctcaagattttggagaaatttctcaatattagcctcgaaagcgagtataaccccgctattagttgttttcgagtgatcacaagcgcattcacagctatagctatcctggctgttgacttcccattgtttccacgaaggttcgcaaaaaccgaactgtacggtacaggagctatggattttggggtcgggggattcgtgttcggctccgccatggtctgtctcgaggttcgaaggcgcaagtacatggagggttcgaagttgcactatttcaccaacagcttgtattccgtctggcccctggtgttcctcggaatcgggcgacttgctataatcaagagcattggctaccaagaacatcttacagaatacggagttcattggaactttttttttaccatcatcgtggtcaagctcataacacctctactgctcataatctttcctcttaataagtcctggatcatagcactgggcatcaccgtgctttaccagctcgcccttgatttcacgtccttaaaaagactcatactatatgggaccgatggctcaggaacccgtgttgggctccttaacgctaatcgggagggcatcatcagcacactgggatacgtggcaattcacatggccggtgtgcagaccggcctatacatgcacaagaatagatctcatatcaaggacttaattaaggtcgcttgctttctcctgttggcagccatatccctttttatctcattatatgtcgtacaggtgaacgtggaagccgtttctcgtaggatggctaacctcgccttctgtatctggatcgtcgcatctagcctgatcctgctatcctcccttctactgggcgacattatcttaagctttgcaaagttcctgattaagggggctctcgtgccgtgctcctggaaattaattcagagccctgtcacgaacaagaagcactctgagtcactggtgcctgaggcagaacggatggagccttcgttgtgcctgattactgctttgaacaggaaacaactcatcttcttcctcctcagcaatataaccaccggactgattaacttgatggtggacaccttgcactcctcaactctttgggctctatttgttgtaaatctgtatatgttttctaactgcctcatcgtgtacgtcctctacctgcaggacaaaacggtacagttttggtag

SEQ ID NO: 253985 - DNA, 1515 bp, Artificial Sequence
  derived and/or modified sequence
atgtcagagaagcagatgaaggaagctttcgtgagcaacctgaatgggacgactgtattagagatcacccagggtttgtgttttcccgccttttgtatcctgtgcagggggtttctgatcatcttctcgcagtatctttgttcctttagcccgacatggaaaaccagatttctaacagattttgtggtgctcatcgttccaatggtggccacactgacaatttgggcctcgttcatcctgctggagttgctcggtgtgattattttcggcgcggggctcctgtaccagatctacagacgcaggacgtgctatgcacgtctccctttcctgaaaattctcgaaaagtttctgaacataagcctagagtcagagtataatccggctattagctgcttccgggtcatcacctccgccttcaccgcaatcgcgatcctcgccgtggactttccgctctttcctagacgcttcgccaagactgaactgtacggcaccggtgctatggatttcggtgtcgggggattcgtctttgggtcagccatggtgtgcctcgaagtacgccgccgtaaatacatggagggttcgaaactccactactttactaactctctttatagcgtttggcccctcgtgtttttgggtatcggcagactggcaatcataaagtcgattggataccaggagcatttgactgaatacggtgtgcattggaactttttcttcacaatcattgtagttaaacttatcacgccccttctgttaatcatctttcctctcaataaatcttggatcatcgctttgggcattacagtactataccagttggcattggattttactagcctcaagagacttattctctatggtaccgacgggtcggggacaagggtgggactcctgaacgccaacagagaagggattatttcaactctgggttacgtcgccatccatatggcgggggttcaaacgggactgtatatgcacaagaaccggagccacatcaaggaccttatcaaggtggcgtgtttcctacttcttgccgccattagtctgtttatcagtttatatgtcgtgcaggtgaatgtcgaggcagtgtctaggcggatggccaatttagcattttgcatttggatcgtcgcctccagcctgatcttgttgtcctccctcctgctgggcgacatcatcttgtctttcgctaagttcctgattaaaggggctttagtcccatgctcctggaaactcatacagagccccgtcaccaataaaaaacactcagaatcactcgtcccagaggctgagcgcatggagccctcactgtgtctgatcactgctctcaaccggaagcagctcatattcttccttctctctaatattacgacaggcctcatcaaccttatggtggatacgctgcattccagtacgttgtgggctctgtttgtggttaacctgtacatgtttagcaactgtttgatcgtatatgtcctttacctccaggacaagaccgttcagttttggtag

SEQ ID NO: 253986 - DNA, 318 bp, Artificial Sequence
  derived and/or modified sequence
atgagcgagaaacagatgaaggaagcctttgtgagcaacctgaacgggacgactgttctggagataacccaaggcctgtgttttccagcattttgcattctctgtcggggcttcctgattattttctcccagtacctgtgctccttcagccccacgtggaaaacccggtttcttactgatttcgtggtcctgatcgtaccaatggtcgcaacactgaccatttgggcgtcttttatattgctggagcttctcggtgtcataatattcggggctggcctgctgtaccaaatctaccgaaggaggacgtgctacgcatag

SEQ ID NO: 253987 - DNA, 318 bp, Artificial Sequence
  derived and/or modified sequence
atgtctgagaagcagatgaaggaggcctttgtgagcaacctgaatggcaccaccgtgctggagatcacccagggcctgtgcttccctgccttctgcatcctgtgccggggcttcctgatcatcttcagccagtacctgtgcagcttcagccccacctggaagacccgcttcctgacagactttgtggtgctgattgtgcccatggtggccaccctgaccatctgggccagcttcatcctgctggagctgctgggcgtcatcatctttggagctggcctgctgtaccagatctacagaagaaggacctgctacgcctag

SEQ ID NO: 253988 - DNA, 1515 bp, Artificial Sequence
  derived and/or modified sequence
atgagcgagaagcagatgaaggaggccttcgtgagcaacctgaacggcacgacagtgcttgagataactcagggactctgcttccctgcattctgcatactctgtcgtgggttcctcatcatattttcacagtatctttgctcctttagcccgacatggaaaactcgcttcctgaccgactttgtggtcctgatcgtgcccatggtagctacccttacgatatgggcttcgtttatcctgctcgaactgcttggtgttatcatatttggagcaggcctgctctatcagatctataggcgaaggacctgttatgcacgacttcctttcctcaagattctcgaaaaatttttgaacatatcattagagtcagaatataatcccgcaattagctgcttccgcgtaattacatcagctttcactgctatcgctattctggctgttgactttcccctgtttcctagacgatttgcaaaaacagagctctacggcaccggagccatggatttcggcgtcggcggtttcgtctttggttctgccatggtctgcctagaagttcgccgtagaaaatatatggaggggagtaagcttcactattttaccaatagcctgtacagcgtgtggccactcgtgtttctggggatcggccgcctggcgatcattaagtctattggttatcaagagcatttaacagagtatggtgtgcactggaatttctttttcacaataatcgtggttaaacttatcacccctctgctgctgatcatctttccactgaacaagtcctggatcatcgccttggggattacagtgctgtatcagctggccttggactttacaagcctgaaaaggctgatcctatacggtactgatggaagtggaacccgtgtgggcctgctaaatgctaatagagagggcattatcagtacccttggatacgtcgccatccacatggccggagtccagaccggactctacatgcacaagaaccgctcacacatcaaggatctcataaaggtcgcttgttttcttcttctcgccgccataagtctgtttatcagcttatacgtggtccaggttaatgtggaggccgtgtcccggcggatggccaacctggcgttttgcatctggattgtggcttccagcttgatcctgctttccagtctgctgcttggcgatattatattgtcttttgcaaagttcctaataaaaggggccctggtgccatgttcatggaagctgatacagagccccgttacgaacaaaaaacatagcgaaagcctcgttcctgaagctgaacggatggagccgagcctctgcttgataacggcattaaaccggaagcaactgatcttttttctgctcagcaacataaccaccgggcttatcaatcttatggtagatactctgcatagcagtactctttgggcactttttgtggttaatctttacatgttctcgaactgcttaatcgtatatgtgctttacctgcaggacaagaccgtacagttttggtag

SEQ ID NO: 253989 - DNA, 318 bp, Artificial Sequence
  derived and/or modified sequence
atgagcgagaagcagatgaaggaggccttcgtgagcaacctgaacgggacaacagttctggagatcacccaggggctgtgcttccccgctttttgtattctgtgtcgcggctttctgattatttttagccagtacttatgttctttctcgcccacctggaagaccagatttttaacagatttcgtcgtgctgattgtacccatggttgctactctgactatttgggctagttttatcctcttggaactgttaggggtgataatcttcggcgccggccttttgtatcaaatttacagacggcggacctgctacgcgtag

SEQ ID NO: 253990 - DNA, 359 bp, Artificial Sequence
  derived and/or modified sequence
gggacgcctggtccggcttgctggcttcaactacggaagaaaaatgtctgaaaagcagatgaaggaagcttttgtcagtaacctcaatggaaccaccgtgctggaaatcacccagggattgtgctttcctgcattctgtatcctgtgcagagggttcctgatcattttctcacagtacttgtgttctttttcacctacctggaaaactagattcctcactgactttgttgtcctaatagttcccatggtagccactttgaccatttgggcttcatttatcctccttgagcttctcggtgtaattatctttggggcagggctgttgtatcaaatataccgaaggaggacctgctatgcca

SEQ ID NO: 253991 - DNA, 1515 bp, Artificial Sequence
  derived and/or modified sequence
atgtccgagaaacagatgaaggaagcatttgtcagtaatctcaacggaacaaccgtgctcgaaataacccagggactatgcttcccagctttctgtatcctgtgcagaggttttttgattatcttttcccaatacctgtgttcattctcccctacctggaaaactcggttcctgactgatttcgtggttctgatagttcccatggttgctaccctgaccatctgggccagctttattctacttgagctgctgggggtgatcattttcggggctggtttgctctatcaaatttacaggagaaggacctgttatgcccgtctgccttttttgaagatcctggagaaattcctgaatatcagtttagagtccgaatataatccagcgatttcatgcttccgggtcattacttcagcctttacagctattgcaatactggccgtggactttccccttttcccgagacgctttgccaagactgagttgtacggcacaggcgcaatggattttggcgtggggggattcgtcttcggaagtgccatggtgtgcctcgaggtgagacggaggaaatatatggagggaagtaagcttcactatttcaccaattcactgtatagcgtttggcctctggtgttcctcgggatcggtaggttggccatcatcaaaagcattgggtaccaagaacatttgaccgaatatggagttcactggaatttcttcttcactatcatcgtggtgaagcttatcacaccactcttgctgatcattttcccgctgaacaagtcatggatcatcgctttagggatcacagttttgtatcagctagcgctggacttcacttctctaaagagactcatcctgtacggcaccgacggctctggcacccgagttgggctgttgaacgcgaaccgggaaggcatcatcagtacgcttgggtacgttgcaattcacatggcaggggtgcaaactggattgtacatgcataaaaacaggagtcacattaaggatctcatcaaagtggcttgtttcctacttcttgctgccatctccctgtttatctccctttacgtggtccaggtaaatgttgaggcggtgagccggcgaatggcaaatctggcattttgcatatggattgtcgccagcagtctcatccttcttagttccctgctgctaggtgacatcatactgtctttcgccaagtttcttatcaaaggcgcactggttccttgctcgtggaaactgatacagtccccggttacaaataaaaagcactctgagtctcttgtccccgaggccgagagaatggagccctctctgtgcttgattaccgctcttaatcgtaagcagctgatattttttctgctttcaaatattacgactggcctgataaacctcatggtggacacccttcacagcagtactctgtgggccctctttgtcgtcaatttgtacatgttttccaattgcctcattgtctatgtcctctacctgcaggacaaaacagtccagttttggtag

SEQ ID NO: 253992 - DNA, 318 bp, Artificial Sequence
  derived and/or modified sequence
atgtcggaaaagcagatgaaggaagcattcgtaagtaacttaaacgggacaacggtgttggaaattacccagggcctgtgcttcccagcattttgtatactgtgtagaggttttctgattattttcagccagtacctatgttcgttcagtcctacctggaaaaccaggttcctgacagacttcgtggtgctgatagtgcctatggttgcgaccttaaccatatgggctagctttattttactcgaactcctgggcgtgatcattttcggcgctggacttctgtatcaaatttaccgcaggcggacatgctacgcatag

SEQ ID NO: 253993 - DNA, 318 bp, Artificial Sequence
  derived and/or modified sequence
atgagcgagaagcagatgaaggaggccttcgtgagcaacctgaacggcaccaccgtgctggagatcacccagggcctgtgcttccccgccttctgcatcctgtgcagaggcttcctgatcatcttcagccagtacctgtgcagcttcagccccacctggaagaccagattcctgaccgacttcgtggtgctgatcgtgcccatggtggccaccctgaccatctgggccagcttcatcctgctggagctgctgggcgtgatcatcttcggcgccggcctgctgtaccagatctacagaagaagaacctgctacgcctag

SEQ ID NO: 253994 - protein, 129 aa, Artificial Sequence
  derived and/or modified sequence
MLLKVRRASLKPPATPHQGAFRAGNVIGQLIYLLTWSLFTAWLRPPTLLQGPRTSPQGSPPRSPWGDCAEPSCLCEMKIRRRRHEGPAWGQSGFLAGGLHLVPSSLSLAACGVVRMKGLWGRGAGIRGR

SEQ ID NO: 253995 - DNA, 390 bp, Artificial Sequence
  derived and/or modified sequence
atgctgctgaaggtgagaagagccagcctgaagccccccgccaccccccaccagggcgccttcagagccggcaacgtgatcggccagctgatctacctgctgacctggagcctgttcaccgcctggctgagaccccccaccctgctgcagggccccagaaccagcccccagggcagcccccccagaagcccctggggcgactgcgccgagcccagctgcctgtgcgagatgaagatcagaagaagaagacacgagggccccgcctggggccagagcggcttcctggccggcggcctgcacctggtgcccagcagcctgagcctggccgcctgcggcgtggtgagaatgaagggcctgtggggcagaggcgccggcatcagaggcagatag

SEQ ID NO: 253996 - DNA, 390 bp, Artificial Sequence
  derived and/or modified sequence
atgctgctgaaggtccggcgcgcttccctgaaaccccctgctacaccacatcagggggcttttagagcaggaaacgtcattggacagctgatatacttgctcacttggtccctgttcaccgcatggctaaggcctccgacactgctgcagggacctagaactagtcctcagggctcacccccgcgatccccctggggcgactgcgcggaacccagctgtctctgcgagatgaaaatccgccgccggcgccacgaaggcccagcctggggacaatccggattcctggctggcggactacaccttgtgcctagtagtcttagccttgccgcctgcggggtagtccgcatgaaaggcctctggggtcgtggggccgggatacgaggaaggtag

SEQ ID NO: 253997 - DNA, 390 bp, Artificial Sequence
  derived and/or modified sequence
atgctgctgaaggtgcggcgggccagcctgaagcccccagccaccccccaccagggcgccttccgggctggaaatgtgattggccagctgatctacctgctgacctggagcctcttcaccgcctggctgcggccccccaccctgctgcagggccccaggaccagcccccagggcagcccccccaggagcccctggggagactgtgccgagcccagctgcctgtgtgagatgaagatcagaagaagaagacatgagggccctgcctggggccagagcggcttcctggccggcggcctgcacctggtgcccagcagcctgagcctggccgcctgtggggtggtgaggatgaagggcctgtggggccgcggggccggcatccggggccgctag

SEQ ID NO: 253998 - DNA, 390 bp, Artificial Sequence
  derived and/or modified sequence
atgctgctgaaggtgcggcgggccagcctgaagccccccgccaccccccaccagggagccttccgtgcaggcaacgtcatagggcagctgatttacctgttgacctggtctctgtttacagcgtggctacgacctccgactctccttcaggggccgcggacctcgccgcagggatccccacctagatcaccatggggggattgtgcagagccttcctgtctttgtgagatgaagattaggcggaggaggcacgaggggcctgcctggggccaaagcggattcttggcagggggtctccatctcgtaccttccagcctctctctggccgcctgtggagtcgtcagaatgaagggcctctgggggaggggcgccggtatccgagggcgctag

SEQ ID NO: 253999 - DNA, 390 bp, Artificial Sequence
  derived and/or modified sequence
atgctgctcaaagtgaggcgggctagcctgaagcccccagcgactccgcaccagggggcttttcgcgcaggtaacgttattggacagttgatttatttgttgacatggtcattgttcaccgcctggctgaggccacctacgctactccagggtccaagaacatccccccagggtagccccccacggagcccgtggggggattgcgccgaaccctcctgcctgtgcgaaatgaaaatcaggcgcaggcgccatgaggggccagcatggggccaatccggatttctggccggtgggctccatctggtccccagctccctctcccttgccgcatgcggcgtcgtgaggatgaagggtctgtggggccgaggcgcaggtatcaggggcagatag

SEQ ID NO: 254000 - DNA, 3317 bp, Artificial Sequence
  derived and/or modified sequence
acactgcgtccccatcagctcaaagaatacgcatggggacaagcctggggggccgtctgagagtcccccaaccctggatccccacggcagcccccactgttgggtttttcagtggctggtgtgccctgggctggtcacctctgcattttgctctgctgggagtttgctcctggccctccaacagcgcctcctctgtgaggaggaactcctgttcccgtggctctgctggctctggaggctggagttcccgtgctgggccctcctgggcgggttctctcttgctgccgccagtaccctgcccctctcgtcctcctgggtagcctgggaggaatggcagaagaaagcagtgaagccaggtagcagtagcccggccaccccaccaggctctgctgtaggctgggctctcaaggcagctgctccaggaggggccccctaggaagggactgccacactcctgggagcgttcctggccccctccagtgcaaatgaccctgggccccaaggctccgaacacccgcccctctgctccaggctagcttggctgagcccgatgcttctcaaggtgaggagggcgtccttgaagcctccggccaccccacaccaaggagctttcagggcaggaaatgtgatcgggcagctgatttatctccttacctggtctttgttcacagcctggctccggccccccaccctgctgcagggcccgaggacgtctccccaggggtccccacctcggtctccttggggggactgtgctgagcccagctgcctctgtgagatgaagataagaaggcgaagacatgaagggcctgcctgggggcagtctggctttcttgcaggggggctgcacctggttccctcctccctctcgctggcagcctgcggggtggtgaggatgaaggggctgtggggccggggtgcagggattagagggaggtgactgccatctcttcctcctcatcgtgtttttcacctcttaagtcaactttagattctcggactcagagttctctcctgacggtggcagggtcctcagatcaccggtgcagacagggccagacagggccaatgtggggacccactcagcctgtggcctctgcaggagggaggtcggaggcctcagcagccaccccggccacctcctgaaacagtgaatgtccttcattttcagctggcaagctctgatcttacaacgaggtatggaactgttcagaaaactttcagcagacgttcgagggaaaacagctcagcttcccatgccccccacctctgccaggagcgaccccatatcccccaaacagaattctggtagcccgggaccacagggtcttcctgtgcctcccctgccagctctgcatgactttgtcacgtacttgagtgctggctgagatgatgctaccgctaccaaacaggtgggaggccagccccagccccagccccagccccaccggggccggagctcccggtgaagaagcgtctgcctggttcgcaggtgtccaggacacaccagtcgcctgactcccggtcaggcaaacgcacacatcaagttcttgcaagccagggctctgctggcatcttcaagaggagggagggtcctggccctgaccacagggctcccttaacaggaggagttacaaactcggcttcctggggggcatcgtggggtgtgctgcctgccaggagaccccactcctggtcacggggttccgtcccacacagtggcaggagccatgcatgattcttggctgaagaagaacccgcacagctatgtggtctgccgcccagcagggaagcccccacatcagccctaagggaacttcccaaagctcagcaggtgcctcttcctgccatccgctaggtcttctcttggcccctctcccaagccttgacccatagctgacacttctagaaaagtctttaccgagaaacggaccggctgcatgggtggtgaggagggcagttgcccagggcctggcatcagaggggcctgtggctaaggctgtcctgaaattcttaatcattttacctctgaacttgcgggtttttgttgttgttttttgaggcagagtcttgctctgtcacccaggctggagtgcagtggtgcgatcttggcttactgcaacttccgactcccaggttcaagcgattctcctgcctcagcctcccgagtagctgggactacagaagtgcaccaccacacccggttaatttttgtatttttagtagagacggggtttcaccatgttggccaggctgatctcaaactcctgatacacccgcctcggcctctcaaagcactgggattacaggtgtgagccaccgcgcccggcccttttcctgcctcctaaacaagtggccaggaattctcctcctgcaccgggtccccagattgtgtggcaagccctgcagatggcacaggggactggttcttcctcgtggaaagccaggcccggacacctctcgggcatcgcctgttggggtgaccctcccacacccagcctggaaccctagccagctcagcctccgtccgctgagaaatcaaggtgaccttgtggctcagccctcagggggcactcaccacacaagagttccctttcaagaccccctgttcggggctggggcccccaggaacggttggggcaccttcctggggccctgtttttccccaggagcggggcctgggagctgagggcgtctcatctccccacaggcatctgctgctgctcctggctgccactcacccctgtgagatgctgagggcaggatacctgtctgtgcggggcgtgggaaaaagggagaaagcctggcagagggttgggggctaagaagcaaagggcgtggaagggccaccgtgcacttttgaagtctctacttgccagtggccaccccacctctccctgccctcatccaaggacggacaggcctggcaggtggaccggagctgtggggcagaagcatcccaggcctggcctcagaggagggaggccatggtgaaagtggaggctgtctgcatccacctccccagcctttgtcaccgggacctcagcctgaccccaggcccaccccaggctgctcaccgaggtgggtaccctgcccaccgccagctcagatgcggtgtgtggactcccttctctctgggggtgagcgggagttccctcccctccacatcaggagctgggggagagctggagggccctgggatccccttgaccctggtcatcagccccagccctgacaggccctgcgtgtgccatgtgtggcctgggtttggagctcagcaccctgcgggaattctattaaatctccgattttatctg

SEQ ID NO: 254001 - protein, 416 aa, Artificial Sequence
  derived and/or modified sequence
MDASRPKSSESQSSLEAPRPGPNPSPNVVNKPLQRDFPGMVADRLPPKTGVVVIDMGTGTCKVGFAGQASPTYTVATILGCQPKKPATSGQSGLQTFIGEAARVLPELTLVQPLRSGIVVDWDAAELIWRHLLEHDLRVATHDHPLLFSDPPFSPATNREKLVEVAFESLRSPAMYVASQSVLSVYAHGRVSGLVVDTGHGVTYTVPVFQGYNLLHATERLDLAGNHLTAFLAEMLLQAGLPLGQQDLDLVENIKHHYCYVASDFQKEQARPEQEYKRTLKLPDGRTVTLGKELFQCPELLFNPPEVPGLSPVGLSTMAKQSLRKLSLEMRADLAQNVLLCGGSSLFTGFEGRFRAELLRALPAETHVVVAAQPTRNFSVWIGGSILASLRAFQSCWVLREQYEEQGPYIVYRKCY

SEQ ID NO: 254002 - DNA, 1251 bp, Artificial Sequence
  derived and/or modified sequence
atggacgccagcagacccaagagcagcgagagccagagcagcctggaggcccccagacccggccccaaccccagccccaacgtggtgaacaagcccctgcagagagacttccccggcatggtggccgacagactgccccccaagaccggcgtggtggtgatcgacatgggcaccggcacctgcaaggtgggcttcgccggccaggccagccccacctacaccgtggccaccatcctgggctgccagcccaagaagcccgccaccagcggccagagcggcctgcagaccttcatcggcgaggccgccagagtgctgcccgagctgaccctggtgcagcccctgagaagcggcatcgtggtggactgggacgccgccgagctgatctggagacacctgctggagcacgacctgagagtggccacccacgaccaccccctgctgttcagcgacccccccttcagccccgccaccaacagagagaagctggtggaggtggccttcgagagcctgagaagccccgccatgtacgtggccagccagagcgtgctgagcgtgtacgcccacggcagagtgagcggcctggtggtggacaccggccacggcgtgacctacaccgtgcccgtgttccagggctacaacctgctgcacgccaccgagagactggacctggccggcaaccacctgaccgccttcctggccgagatgctgctgcaggccggcctgcccctgggccagcaggacctggacctggtggagaacatcaagcaccactactgctacgtggccagcgacttccagaaggagcaggccagacccgagcaggagtacaagagaaccctgaagctgcccgacggcagaaccgtgaccctgggcaaggagctgttccagtgccccgagctgctgttcaacccccccgaggtgcccggcctgagccccgtgggcctgagcaccatggccaagcagagcctgagaaagctgagcctggagatgagagccgacctggcccagaacgtgctgctgtgcggcggcagcagcctgttcaccggcttcgagggcagattcagagccgagctgctgagagccctgcccgccgagacccacgtggtggtggccgcccagcccaccagaaacttcagcgtgtggatcggcggcagcatcctggccagcctgagagccttccagagctgctgggtgctgagagagcagtacgaggagcagggcccctacatcgtgtacagaaagtgctactag

SEQ ID NO: 254003 - DNA, 1422 bp, Artificial Sequence
  derived and/or modified sequence
atagattgcgggcccacccctccccctgtctgcctgccctccccactggccgggcctcaacctcttctccccacaaccccaaccccagaggaaaagccccctcacctggcgtcccgcaaccatggatgcaagtcgccccaagtcctcggaatcccagtcctccctggaggcccccaggcccggcccaaaccccagtcccaacgtggtgaacaagcccctgcagcgggacttccccggcatggtggccgacaggctgccaccaaagaccggcgtggtggttattgacatgggcacaggcacctgtaaggtaggttttgctgggcaggccagccccacctacaccgtggccaccatcctgggctgccagcccaagaaacccgccacctcggggcagtccgggctgcagacgttcatcggcgaggcagcccgcgtgctcccagagctgacgctggtgcaacccctgcgcagcggcatcgtcgtggactgggatgccgccgagctcatctggcgccacctgctggagcacgacctccgagtggccacccacgaccacccgctgctgttctccgacccacccttcagcccggccaccaaccgcgagaagctagtggaggtggccttcgagtcgctgcgctccccagccatgtacgtggcatcgcagtcggtgctgtctgtctacgcccacggtcgtgtcagcgggctggtggtggacacgggacacggggtcacctacacagtgcccgtcttccagggctacaacctgctccacgccacggagcgtctggacctggcgggcaaccacctgaccgccttcctggcggagatgctgctccaggccggcctgcccctgggacagcaggacctggacctagtggagaacattaagcaccactattgctacgtggcctccgacttccagaaggagcaggcccggccggagcaggagtacaagcggactctgaagctgcccgatgggcgcacggtcaccctgggcaaggagctgttccagtgtccggagctgctgttcaaccccccagaggtcccggggctgtcacccgtcggcctctccaccatggccaagcagagtctccgcaagttgtcactggagatgcgcgcggacttggcccaaaacgtgcttctctgcggtgggtcctcgctcttcaccggcttcgagggtcgcttccgggcagagctgctgcgcgctctgccagccgagacccacgtggtggtggctgcccagcccaccaggaatttctccgtatggatcgggggctccatcctggcctccctgcgcgccttccagtcctgctgggtcctgcgggagcagtacgaggaacagggtccctatatcgtgtaccgcaaatgctactgaccagggcagagctggggagggcgtgggggcagtaaagcctctgctacagc

SEQ ID NO: 254004 - DNA, 1251 bp, Artificial Sequence
  derived and/or modified sequence
atggatgcatcacgtcccaaatccagcgagtctcaatcttccctggaggccccccgccccggtcctaatccaagtccgaacgtggtcaataaaccactgcagcgtgacttccccggtatggtagccgatcgcctcccaccgaaaaccggggttgtggtcatcgatatgggaactgggacatgcaaagtcggttttgctggtcaagcttctcccacctacacagtggccactatattggggtgtcagcctaagaagcccgctacttcagggcaatcgggcctgcaaacattcatcggtgaagcagctagggttctgccggagttgactctcgttcaacctctgaggagtggaattgtcgtcgactgggacgcggctgagcttatttggcgccacttgctggagcacgacctcagagttgctacccacgaccatccacttctcttttctgatccaccgttttcgcccgcgaccaaccgagaaaaattggtggaggtggcatttgagagcttgcgctctcccgcaatgtatgtcgctagtcagtctgtgttaagtgtgtacgcacatgggagagtgtcaggcctagtggttgacacgggacatggggttacttacactgtccccgttttccagggctacaacctgttgcacgcaacagagcgtttagatctcgccggaaatcatttgactgccttcctcgcggagatgctgctccaagcaggactccctttagggcaacaggatcttgacctggtggagaacatcaagcatcattactgctatgtggcctctgattttcagaaagagcaggcgcgaccagagcaggagtataaacgaactctgaaacttcctgacggtcgcaccgtgactttgggtaaggagttgtttcaatgcccagaacttttatttaaccctccagaggtgcctggcctttctcccgttggactttctaccatggctaagcagagtctgaggaagttgagccttgagatgcgcgcagacctggctcagaacgtcttattatgtgggggctctagtctgttcacaggtttcgaagggaggtttagagctgagctcttgcgagctctcccagcagagacccacgttgtagtagcagcgcagccgactcggaactttagtgtgtggatagggggttcaatcctcgcatcactgagagcttttcagtcatgctgggtgctgcgggaacagtacgaggagcaggggccgtacatagtgtataggaagtgttattag

SEQ ID NO: 254005 - DNA, 1251 bp, Artificial Sequence
  derived and/or modified sequence
atggatgccagccggcccaagagcagcgagagccagagcagcctggaggccccccggcccggccccaaccccagccccaacgtggtgaacaagcccctgcagagggacttccctggcatggtggccgaccggctgccccccaagacaggagtggtggtgattgacatgggcaccggcacctgcaaggtgggctttgctggccaggccagccccacctacacagtggccaccatcctgggctgccagcccaagaagccagccaccagcggccagagcggcctgcagaccttcatcggggaggccgcccgggtgctgcctgagctgaccctggtgcagcccctgcggagcggcatcgtggtggactgggatgctgctgagctgatctggaggcacctgctggagcatgacctgcgggtggccacccatgaccaccccctgctcttcagtgacccccccttctccccagccaccaaccgggagaagctggtggaggtggcctttgagagcctgcggagccctgccatgtatgtggccagccagagcgtgctgtctgtgtatgcccacggccgggtgtctggcctggtggtggacaccggccacggcgtgacctacacagtgcctgtgttccagggctacaacctgctgcacgccacagagcggctggacctggccggcaaccacctgacagccttcctggccgagatgctgctgcaggccggcctgcccctgggccagcaggacctggacctggtggagaacatcaagcaccactactgctacgtggccagtgacttccagaaggagcaggcccggcctgagcaggagtacaagaggaccctgaagctgcctgatggccgcacagtgaccctgggcaaggagctgttccagtgcccagagctgctcttcaaccccccagaggtgcccggcctgagccctgtgggcctgagcaccatggccaagcagagcctgaggaagctgagcctggagatgagagctgacctggcccagaatgtgctgctgtgtggcggcagcagcctcttcaccggctttgagggccgcttccgggcagagctgctgcgggccctgcctgctgagacccacgtggtggtggccgcccagcccaccaggaacttctctgtgtggattggaggcagcatcctggccagcctgcgggccttccagagctgctgggtgctgcgggagcagtatgaggagcagggcccctacatcgtgtacaggaagtgctactag

SEQ ID NO: 254006 - DNA, 1251 bp, Artificial Sequence
  derived and/or modified sequence
atggacgccagccggcccaagagcagcgagagccagagcagcctggaagctcctagaccagggccaaacccttcccctaacgtggtaaataagcctctccaacgagattttcccgggatggttgccgaccgactaccccctaaaaccggcgtcgtggtcattgacatgggaaccggaacgtgtaaagtcggattcgcagggcaggctagcccaacttacaccgtcgccaccatcctgggctgtcagcctaagaagcctgcgacatccgggcagagtggcctgcagacatttattggcgaggctgcaagagtgcttcctgaacttactctggttcaaccactcaggtcaggaattgtggtggactgggatgccgctgaactgatctggaggcacctactggagcatgacctcagagtggctacccacgatcaccccttgctgttttcggatcctcctttttcccctgccactaaccgagagaaacttgttgaggttgcctttgagtcactccgatctccagcaatgtacgtggcaagccagtctgtgctgagtgtttatgctcacggacgtgtgtctgggcttgtggtagacacagggcatggagtaacatacacagtaccagtgttccagggctacaacctgctgcatgcaacagagaggctagacttggctggcaaccatttgaccgccttcctggccgagatgctgctccaagccggcctgcctctcggccagcaggatcttgatttagtcgagaacatcaagcaccactattgttacgtcgccagtgatttccaaaaggagcaggcaaggccagagcaggaatataaaagaacactgaagctgcctgatggaaggaccgtgactctgggcaaggaactatttcagtgtcctgagttgttgttcaacccgccggaggtcccggggctgtccccggttggactgtcaacgatggccaagcagtctctgaggaagctgtctctagagatgcgggctgacctggcccaaaatgtgctgctctgcggcgggtcatccctgttcacaggctttgaggggaggttcagggcagaactcctgcgcgccctgcctgccgaaacacatgtggtggtggctgcccagccaactcgcaacttcagtgtttggatagggggcagtattctggcctcactgcgtgcttttcagagttgctgggtattaagagaacaatatgaggagcaagggccctatattgtgtacaggaagtgttactag

SEQ ID NO: 254007 - DNA, 1251 bp, Artificial Sequence
  derived and/or modified sequence
atggacgctagccggcctaagagtagcgagagtcagagctcattagaagctcccagaccaggacccaacccatctccaaacgttgtaaataaacctttgcaacgcgatttcccaggcatggtggccgacagactgccgccaaaaactggtgtcgtagtaatcgacatgggaacagggacctgcaaggtaggctttgccggacaggccagccccacctatactgtggcgaccatcttggggtgtcagcctaagaagcccgcaaccagcggccagagcggcctccaaaccttcataggtgaggccgcaagggtgctccccgaactgaccctagtgcaacccctacgcagtgggatcgtggtggattgggatgccgctgaactcatctggcgccatcttctcgagcacgatctgcgggtagcaacccatgatcaccccttgctgttctctgacccacctttttctccggcaactaacagggagaaattggtggaggttgctttcgagtctctgcggtcccccgctatgtacgtagcgtcgcagagcgttttatcagtgtatgcgcacgggagggtctccggcctggtggttgataccgggcatggtgtgacgtataccgtaccagtcttccaaggctataatctactgcatgcgacagaaagactagatctggctggaaatcatctgaccgcctttctggccgagatgctacttcaggccggtctccccctcggtcagcaagatctggatctcgtggaaaatatcaagcaccattattgttatgttgcaagcgatttccagaaggagcaggcaaggcccgaacaggagtacaagcgcacactgaagctgccggatggccgaacggtgaccctcggaaaagaattgtttcaatgccctgaattgctcttcaacccgcctgaagttcctgggctgtctccggtcggactttctactatggccaaacaaagcctgaggaagctgagtttggaaatgagagccgatcttgctcagaacgtactgctgtgcggtggatcctccctcttcacgggcttcgagggcagatttcgggcagaactcctcagagctctcccagccgagactcacgtagttgtggctgctcagcccacccgcaatttctctgtctggatcggagggtcaatactggcgtctcttcgggcattccagtcttgctgggtgctcagagagcaatacgaggaacagggtccctatattgtgtatcgcaaatgttactag

SEQ ID NO: 254008 - protein, 318 aa, Artificial Sequence
  derived and/or modified sequence
MGNGVKEGPVRLHEDAEAVLSSSVSSKRDHRQVLSSLLSGALAGALAKTAVAPLDRTKIIFQVSSKRFSAKEAFRVLYYTYLNEGFLSLWRGNSATMVRVVPYAAIQFSAHEEYKRILGSYYGFRGEALPPWPRLFAGALAGTTAASLTYPLDLVRARMAVTPKEMYSNIFHVFIRISREEGLKTLYHGFMPTVLGVIPYAGLSFFTYETLKSLHREYSGRRQPYPFERMIFGACAGLIGQSASYPLDVVRRRMQTAGVTGYPRASIARTLRTIVREEGAVRGLYKGLSMNWVKGPIAVGISFTTFDLMQILLRHLQS

SEQ ID NO: 254009 - DNA, 957 bp, Artificial Sequence
  derived and/or modified sequence
atgggaaatggagtgaaagagggaccggtgcgactgcacgaagatgccgaggccgtgctgtcttcttctgtgtcctctaaacgggaccaccgacaagtcctcagcagtctcttatcaggagctcttgccggtgctttagcaaagacagctgtggcaccgctcgacaggacaaagattattttccaggtatctagcaaacgattcagcgctaaggaagcctttagggttctatactacacctacctaaacgaaggtttcttaagcctgtggcgaggcaactctgccacaatggttagggttgtgccttacgccgctatccagtttagcgctcacgaagaatacaagcgaatacttggatcgtactacgggttccgaggcgaggccttgccaccttggccacgattgtttgccggggccctggcgggcacaaccgccgcctccctcacctacccacttgatctggtccgagcccgaatggctgtcacaccaaaggagatgtattccaacatttttcacgtttttattcgcatttcccgggaggaggggttgaagacactttaccacgggttcatgcccaccgtgttaggagtcataccctatgcaggcctttcattcttcacctacgagaccctgaaaagcttgcaccgggaatacagtggcaggcggcagccttacccgttcgagagaatgatctttggggcttgcgccggacttattgggcagagcgcctcctaccctctggacgtcgtgcgtcgccggatgcaaactgccggggtcacaggatacccgcgggccagcattgcccggaccctccggacaattgtacgtgaagaaggggccgtgcgaggcctctacaaaggattgtctatgaattgggtgaaggggcccatcgcagtcggaataagttttactacattcgacctgatgcagattctgctccggcatctgcagtcatag

SEQ ID NO: 254010 - DNA, 957 bp, Artificial Sequence
  derived and/or modified sequence
atgggaaatggagtgaaggagggccctgtgcggctgcatgaagatgctgaggccgtgctgagcagctctgtgagcagcaagagggaccaccggcaggtgctgagcagcctgctgagcggggccctggccggggccctggccaagacagctgtggcccccctggacaggaccaagatcatcttccaggtgagcagcaagcgcttcagcgccaaggaggccttccgggtgctgtactacacctacctgaatgaaggcttcctgagcctgtggaggggcaacagcgccaccatggtgcgggtggtgccctatgctgccatccagttcagcgcccacgaggagtacaagaggatcctgggcagctactacggcttccggggggaggccctgcccccctggccccggctgtttgctggggccctggccggcaccacagctgccagcctgacctaccccctggacctggtgcgggccaggatggctgtgacccccaaggagatgtacagcaacatcttccacgtgttcatccgcatcagccgggaggagggcctgaagaccctgtaccacggcttcatgcccaccgtgctgggcgtcatcccctatgccggcctgtccttcttcacctatgagaccctgaagagcctgcaccgggagtacagcggccggcggcagccctacccctttgagaggatgatctttggagcctgtgccggcctgattggccagagcgccagctaccccctggatgtggtgagaagaaggatgcagacagctggggtgacaggctacccccgggccagcatcgcccggaccctgcggaccatcgtgcgggaggagggcgctgtgcggggcctgtacaagggcctgtccatgaactgggtgaagggccccatcgctgtgggcatctccttcaccacctttgacctgatgcagatcctgctgcggcacctgcagagctag

SEQ ID NO: 254011 - DNA, 957 bp, Artificial Sequence
  derived and/or modified sequence
atgggcaacggcgtgaaggagggccccgtgcggctgcacgaggacgccgaagccgtgttatcctcaagtgtatcatcaaagagggaccacaggcaagtcctttctagtttactctctggcgcactcgctggggcccttgccaaaaccgctgtggcacccctagaccgtaccaagataattttccaggttagttcaaaaagattcagcgcaaaggaggcgtttcgcgtgttatattatacttatctcaacgagggatttcttagcctctggcggggcaactcagccaccatggttcgcgtggttccctatgccgcaatccaatttagcgctcacgaggagtacaagaggattctcggatcctattatgggttcagaggcgaggctcttcccccatggccacgtctgtttgctggagccttagctgggacaacagccgcctctctgacctacccattggacctcgtgagagccaggatggcagtgaccccgaaggagatgtattcgaacatcttccatgtttttatcagaatctccagagaggagggtttgaagactctctatcacggctttatgccaactgtgctcggtgtgattccctatgccggactctcctttttcacatacgagacattgaagtccttacacagggagtatagtggacggaggcagccctatccttttgaaaggatgatttttggcgcatgcgccggtctgatcggacaaagcgcctcgtacccacttgacgtggtgagaagacggatgcagaccgcaggagtgaccgggtatcctcgggcaagcatcgcgaggaccctcagaactattgtgcgggaggagggggctgtaagaggtttgtataaggggcttagtatgaattgggtgaaggggccaattgcagtggggatatcctttacgacctttgacttaatgcagattctgcttagacatctgcagagctag

SEQ ID NO: 254012 - DNA, 957 bp, Artificial Sequence
  derived and/or modified sequence
atgggcaatggggtaaaagaaggtcccgtgagactgcatgaggacgctgaggccgtgttaagctcgtctgtctcttccaagcgggatcatcggcaagtcctgtcctctctgttgtctggagcactggcgggtgccctagctaagaccgcggttgccccacttgacagaaccaagattatctttcaggtttctagtaagcgatttagtgccaaggaagctttcagggtgctgtattacacctatttgaacgaggggtttttgagcctctggcgtgggaacagcgccacaatggtgagagtggtgccctatgccgctatacagttctcagcccacgaggaatataagcggatcctgggctcctactatgggtttcgcggtgaggctcttcctccctggcctcgcttgttcgcaggcgctctggccggtacaactgctgcaagcttgacttatccgctggatcttgtaagagccagaatggcggtgactcccaaagagatgtatagcaacatcttccatgtgttcatccgcatcagcagagaagagggcctaaaaacactctaccacgggttcatgcccactgtgctcggcgtgataccatacgctggactctcattctttacatacgagactctaaagtcgttacaccgagagtattctggaaggagacagccttacccctttgagagaatgatcttcggggcttgcgcaggcctcattgggcagtcagctagttatccccttgatgttgtgcgcaggcggatgcaaacagctggagtcacgggatacccgcgagcatcaatagccaggacccttagaacaattgtcagagaggaaggcgcagtgcgagggctgtataagggtctatctatgaattgggtgaaaggcccaattgcggtgggcatttcctttactactttcgacctgatgcagatcctgctaagacacctgcagtcctag

SEQ ID NO: 254013 - DNA, 3132 bp, Artificial Sequence
  derived and/or modified sequence
gaggcggggccgtggcggctggaggtagcggcggcggcgacgcgtccgggccggtgagggggcgcggggggcgccgggggggcccaagcgtcagcggcccgcgcctgtcgggctgaactgaggaccgagtctcctgccattccgagcaggcctggtatgggtaatggtgtgaaggaaggcccggtgcgattgcatgaggatgctgaggctgtcctgtcctcgtccgtctcatcaaagcgtgaccacaggcaagtgctcagctccctgctgtctggggccctggctggtgcccttgccaaaacagcggtagctcccctggaccgaaccaaaatcatcttccaagtgtcttcaaaaagattttctgccaaggaggccttccgggtcctctactacacctacctcaacgagggatttctcagcttgtggcgcgggaactcggccaccatggtgcgcgtggtgccctacgccgccatccagttcagcgcacacgaggagtacaagcgcatcctgggcagctactatggcttccgtggagaagccctgcccccttggcctcgcctcttcgccggcgcactggctggaacgacagccgcttcactgacctaccccctggacctggtcagagcgcggatggccgtaaccccgaaggaaatgtacagcaacatctttcatgtcttcatccgcatctcgagagaagaggggctgaagactctctaccatggatttatgcccaccgtgctgggggtcattccctacgctggcctgagcttcttcacctatgagacgctcaagagcttgcacagagagtacagcggccgccggcagccctaccccttcgagcgcatgatcttcggcgcctgcgctggcctcatcgggcagtcggcctcgtacccgctggatgtggtgcggcggcgcatgcagacggccggcgtcacgggctacccgcgcgcctccatcgcccgcacgctgcgcaccatcgtgcgggaggagggcgccgtgcgcggcctctacaaaggcttgagcatgaactgggtcaagggtcccatcgccgtgggcatcagcttcaccaccttcgacctcatgcagatcctgctgcggcacctgcagagctaggggaccctgagctgctctcaggacggtggaccggtgacccctttgtattctgggcccatggaacggtgggggggtgcgcttgattctacttcaggaggcacatggggcgctttatggaacgagcaggtgggcctgaggggcctgggctcagagtccacgtccaaacgcaaagctggcagccctggaagtgcagtgttggggcgatggtgtggggggtcccgcagctcccctcttccttcctctgcagacgctggcgctgtctgccggaggtgttgcccaaaaggccctagtggggcgtggtcagctccacctcctgatcctgtgtgtcctccgacatgctgctgattctagtgacccctgtccccaccaggctcagagccagaccgcgcctggaccttcttgttctgactccacgtgcctgcccggcctccagggtgcgggggcgcctttcttgcaggcggaccctgcccaggatggggccagcctcgtgctcagctttggccacaaatgcagcccctggcccaccccaccctgccggccctgccttctccagtatttcccacatggccacgactcctcagtcactagagcctcctgctgggaacagtgtcccccagagcctcatgtctatcctagaccctgcaagcagctgggtccccaagagtgcatctccccctagagttgcctgcccatgcccacctgctttgtaaccttcccaggagattcatgcttgctctgcacagcagggctcgaggcccaggccatgacacggaactgcctcaggtttgggtcagacctgcatcctggggcatctgctgaaatgtgagcacacaaaccacctcctttggcccagaagccccccaggcctagcatctcagtgccccaaccctctgcccagctgtggtatccagcaggtccttgggtccccacttgagcaggcacttggctgggatatggagcaatttaaagcccacaggggttgttcagtttctatgaaatggagcatggggtgcctgctagcctcaatcccccgaagtgggagcctcatgatagagtatagcttgggggtgggaggtgaggaaaatctgaggtacccaggggaacccccagctaactggtctctcagaggagtcccccagggcccgccagctatcacagggactcagaaacacccatttcctaatgacatggtgagtttcttgatttcttttttttgtttgttttgttttggttttcaacttggctgaccccgggtctatgatctattcacatcgaacccctgactggtctgcctggtgccagggtgagcgtgaccgtgagtgttgctttcgacagctggctcagcacacgctgtgtgaagggatctgagcttgttcatctccagtcgtgacttcatttcccttccttctgtcctcctcctgttcttgccttggacctgcaggtgtgcagaccgctctctctgccttccttgcatgtggccaccagccatccctgatcttgtccccagaggcccaggcagcctgtgatggctgtgaggggctgtcccactgtgtgggtatcccttacccagcacttaaacttggcaggagaggcagggcaaccctcacagggagatgggagggcacccaactcccacaagcatgcaacagcagtaggaattgggggtctgccccaggtgggtgagaccaaatgagtggatttggggccacaggctaggcaggagagacaaggggtaggtgggagggtcccccagtccctgctgaccccagtgtgtctccccggagatggctcctagctgagtgggacccggcaggagttggggacagtgctgtcccccacccctgcacacagccaggccctcaggctctgcggtcactcgcctccctgctggtcactggtcttggtctggagttatattttgatgccatgaagacactgtttatatctaatgtttatatattttaaagatttgtgccaagagagtatatttaataaaaacttaaatgacttcttctcctg

SEQ ID NO: 254014 - DNA, 957 bp, Artificial Sequence
  derived and/or modified sequence
atgggcaacggcgtgaaggagggccccgtgagactgcacgaggacgccgaggccgtgctgagcagcagcgtgagcagcaagagagaccacagacaggtgctgagcagcctgctgagcggcgccctggccggcgccctggccaagaccgccgtggcccccctggacagaaccaagatcatcttccaggtgagcagcaagagattcagcgccaaggaggccttcagagtgctgtactacacctacctgaacgagggcttcctgagcctgtggagaggcaacagcgccaccatggtgagagtggtgccctacgccgccatccagttcagcgcccacgaggagtacaagagaatcctgggcagctactacggcttcagaggcgaggccctgcccccctggcccagactgttcgccggcgccctggccggcaccaccgccgccagcctgacctaccccctggacctggtgagagccagaatggccgtgacccccaaggagatgtacagcaacatcttccacgtgttcatcagaatcagcagagaggagggcctgaagaccctgtaccacggcttcatgcccaccgtgctgggcgtgatcccctacgccggcctgagcttcttcacctacgagaccctgaagagcctgcacagagagtacagcggcagaagacagccctaccccttcgagagaatgatcttcggcgcctgcgccggcctgatcggccagagcgccagctaccccctggacgtggtgagaagaagaatgcagaccgccggcgtgaccggctaccccagagccagcatcgccagaaccctgagaaccatcgtgagagaggagggcgccgtgagaggcctgtacaagggcctgagcatgaactgggtgaagggccccatcgccgtgggcatcagcttcaccaccttcgacctgatgcagatcctgctgagacacctgcagagctag

SEQ ID NO: 254015 - protein, 1124 aa, Artificial Sequence
  derived and/or modified sequence
MSSYFWAQNESNRPDLLCGQPADYLVEEKHFTTLVCFIVVLGGLLKMCLKNCEVIVLTILSLSGFVIGHMAYNSVEVHQIVYPLLRTSSFSLYSYFSPLIIFMVALDVEFYTLKKMFWQVLLTGLISFSTASIIIGYVVIKFNKDSWDLQSCLLFSITLGIIDPLRSVNSLKTIGISKIYIDLIRGESLIICSIASIFFGNFRGNRIHFSIFRDLHVGIELSYDILGSIIFGYWCAKIIQCILADVFSNMLTNIILCFSMVYMTFYIVEFLGMSGTLALAAVGLNLDSLTFKPKIELVITKFLRIFSSVYEHLIYAFFGIVIGCGELSHYEFHTIPFIFILFTTVNLVRLLTILLVSPILMHSNYEYNWRWGVVITWSGIKGVFNLLWAPDVYNLAERKVEVPQMFILYVQVISLLTMGINSYVMTQSARKLDLCVLSLPRQMILQNATQHIQEIVQNTITLFKTEKILTNVNWTLVEDKTRIEYIPFSHVSHNDMKTESTTDEALMEEARLHVAAIQMSSFEKQRNNGILEIEAARILIGAAKCYYSIQGKFMSIYDVSTYMRTRSWLIKFKNVLTFLEYCIEKIHFIPPESNTFLTFIFHIVFSEEFEYTGQIINLIYIYPMIIHLWPMARGLNVSALISINYYFMFLYVLESTLKIIILKRKYFQQCWNTLEFFILVIGIIDIFCVYFVKLRPDNLALIQLTVIMGYLRIIRFLPLFKIIVPILIRIADVQIKKRLSLMYSITKGYIKSQEDAKLLIKQIAVCESIYQKLCEILETNKQDAVKELVLMEHEGRDVVIALKTKQAIRNVIAKALKNLTFLCSRGIIDKHEVIEINKVLLKKLKALNNFPKAIPPPTPDIYLHNIIWLEGKDVLIDFFKERAKLACFDSGDTICKGGEMPQGIYLIISGMAILHSLSPTFGIESNQRCDRGSRDMFTEFCTTGDIIGELSCLLKREIEYTVICETSLQACFISLEDLYEGFDAFWPSLEYKIWLKLALSTAYQYFESSLIDEDLRFQNCVMFNQAYVETLSSYSDMIIDNMTMKFVIIVYGSVIDTKTEEPYFAPCIIPTTCEQVQGTSDLSKLLIIQASELTQRNSNTNVMASVNTVFEQPGKNINGRQKMS

SEQ ID NO: 254016 - DNA, 3375 bp, Artificial Sequence
  derived and/or modified sequence
atgagcagctacttctgggcccagaacgagagcaacagacccgacctgctgtgcggccagcccgccgactacctggtggaggagaagcacttcaccaccctggtgtgcttcatcgtggtgctgggcggcctgctgaagatgtgcctgaagaactgcgaggtgatcgtgctgaccatcctgagcctgagcggcttcgtgatcggccacatggcctacaacagcgtggaggtgcaccagatcgtgtaccccctgctgagaaccagcagcttcagcctgtacagctacttcagccccctgatcatcttcatggtggccctggacgtggagttctacaccctgaagaagatgttctggcaggtgctgctgaccggcctgatcagcttcagcaccgccagcatcatcatcggctacgtggtgatcaagttcaacaaggacagctgggacctgcagagctgcctgctgttcagcatcaccctgggcatcatcgaccccctgagaagcgtgaacagcctgaagaccatcggcatcagcaagatctacatcgacctgatcagaggcgagagcctgatcatctgcagcatcgccagcatcttcttcggcaacttcagaggcaacagaatccacttcagcatcttcagagacctgcacgtgggcatcgagctgagctacgacatcctgggcagcatcatcttcggctactggtgcgccaagatcatccagtgcatcctggccgacgtgttcagcaacatgctgaccaacatcatcctgtgcttcagcatggtgtacatgaccttctacatcgtggagttcctgggcatgagcggcaccctggccctggccgccgtgggcctgaacctggacagcctgaccttcaagcccaagatcgagctggtgatcaccaagttcctgagaatcttcagcagcgtgtacgagcacctgatctacgccttcttcggcatcgtgatcggctgcggcgagctgagccactacgagttccacaccatccccttcatcttcatcctgttcaccaccgtgaacctggtgagactgctgaccatcctgctggtgagccccatcctgatgcacagcaactacgagtacaactggagatggggcgtggtgatcacctggagcggcatcaagggcgtgttcaacctgctgtgggcccccgacgtgtacaacctggccgagagaaaggtggaggtgccccagatgttcatcctgtacgtgcaggtgatcagcctgctgaccatgggcatcaacagctacgtgatgacccagagcgccagaaagctggacctgtgcgtgctgagcctgcccagacagatgatcctgcagaacgccacccagcacatccaggagatcgtgcagaacaccatcaccctgttcaagaccgagaagatcctgaccaacgtgaactggaccctggtggaggacaagaccagaatcgagtacatccccttcagccacgtgagccacaacgacatgaagaccgagagcaccaccgacgaggccctgatggaggaggccagactgcacgtggccgccatccagatgagcagcttcgagaagcagagaaacaacggcatcctggagatcgaggccgccagaatcctgatcggcgccgccaagtgctactacagcatccagggcaagttcatgagcatctacgacgtgagcacctacatgagaaccagaagctggctgatcaagttcaagaacgtgctgaccttcctggagtactgcatcgagaagatccacttcatcccccccgagagcaacaccttcctgaccttcatcttccacatcgtgttcagcgaggagttcgagtacaccggccagatcatcaacctgatctacatctaccccatgatcatccacctgtggcccatggccagaggcctgaacgtgagcgccctgatcagcatcaactactacttcatgttcctgtacgtgctggagagcaccctgaagatcatcatcctgaagagaaagtacttccagcagtgctggaacaccctggagttcttcatcctggtgatcggcatcatcgacatcttctgcgtgtacttcgtgaagctgagacccgacaacctggccctgatccagctgaccgtgatcatgggctacctgagaatcatcagattcctgcccctgttcaagatcatcgtgcccatcctgatcagaatcgccgacgtgcagatcaagaagagactgagcctgatgtacagcatcaccaagggctacatcaagagccaggaggacgccaagctgctgatcaagcagatcgccgtgtgcgagagcatctaccagaagctgtgcgagatcctggagaccaacaagcaggacgccgtgaaggagctggtgctgatggagcacgagggcagagacgtggtgatcgccctgaagaccaagcaggccatcagaaacgtgatcgccaaggccctgaagaacctgaccttcctgtgcagcagaggcatcatcgacaagcacgaggtgatcgagatcaacaaggtgctgctgaagaagctgaaggccctgaacaacttccccaaggccatccccccccccacccccgacatctacctgcacaacatcatctggctggagggcaaggacgtgctgatcgacttcttcaaggagagagccaagctggcctgcttcgacagcggcgacaccatctgcaagggcggcgagatgccccagggcatctacctgatcatcagcggcatggccatcctgcacagcctgagccccaccttcggcatcgagagcaaccagagatgcgacagaggcagcagagacatgttcaccgagttctgcaccaccggcgacatcatcggcgagctgagctgcctgctgaagagagagatcgagtacaccgtgatctgcgagaccagcctgcaggcctgcttcatcagcctggaggacctgtacgagggcttcgacgccttctggcccagcctggagtacaagatctggctgaagctggccctgagcaccgcctaccagtacttcgagagcagcctgatcgacgaggacctgagattccagaactgcgtgatgttcaaccaggcctacgtggagaccctgagcagctacagcgacatgatcatcgacaacatgaccatgaagttcgtgatcatcgtgtacggcagcgtgatcgacaccaagaccgaggagccctacttcgccccctgcatcatccccaccacctgcgagcaggtgcagggcaccagcgacctgagcaagctgctgatcatccaggccagcgagctgacccagagaaacagcaacaccaacgtgatggccagcgtgaacaccgtgttcgagcagcccggcaagaacatcaacggcagacagaagatgagctag

SEQ ID NO: 254017 - DNA, 3375 bp, Artificial Sequence
  derived and/or modified sequence
atgtcctcttatttttgggcacagaatgaatctaacagaccagatctgctctgcggacagcctgcagactacctcgtggaagagaaacacttcaccactctagtgtgtttcatagttgtattgggtggactattgaaaatgtgtctcaagaattgcgaggtaattgttctcacaattctgtccctctctggtttcgttataggacacatggcatacaactctgtggaggtccaccaaatcgtgtaccccctgctgcggacaagctctttctccctctattcctatttctcaccattaatcatttttatggtggccttagacgtagaattttacaccctgaagaaaatgttttggcaggtccttctgacagggctcatcagtttctctactgcttccattattattgggtacgtcgtcatcaagtttaacaaggactcatgggaccttcaatcttgtctcttattctctataacattaggtatcatcgaccccctgcggtcagtgaacagcctcaagactatcggaataagtaagatctacatcgacctcattaggggggagtctctgatcatttgttcaatagcaagcatttttttcggaaatttcaggggaaacagaattcacttttccatcttcagagacttgcatgtgggaatcgagctctcttatgacatactaggatccatcatctttgggtactggtgtgccaaaatcatccagtgtatactcgcagatgtgttcagcaatatgctgaccaacatcattttatgctttagtatggtgtatatgaccttctatattgtcgaatttctcgggatgtcaggcactctggctttagcagcagtggggctaaatctcgactcgttgacattcaagcctaagatagaactagtgattaccaagtttctccgaattttctcaagtgtttacgagcatctcatttatgcatttttcgggattgttatcggttgcggtgaattgagccactacgaatttcacacaataccctttatcttcattctgtttactacagtgaatctggtgcgcctgcttacgatcttgctggtgtcacctatcctgatgcacagcaactacgagtacaactggcgttggggcgtcgtgattacgtggagtggaatcaagggagtcttcaatctgttgtgggcacccgacgtatataacctggccgaaagaaaggtagaggtgcctcagatgttcattctctacgtccaggtgatctccctcctgaccatggggataaacagctacgtgatgacacagtctgctaggaaactggacttgtgcgtgcttagtcttcctcgccagatgatccttcagaatgctactcagcatatccaagagatcgtgcagaacaccataacgcttttcaaaaccgagaaaatactgaccaacgtgaactggacgctggttgaggataagacccgaatcgagtatatcccattttctcacgtttcccacaatgacatgaagacagagtcgactacggatgaggcactgatggaggaagccagactccatgtggcggcaatccaaatgtcttctttcgagaagcagcggaataatggcatcctggaaatcgaagctgctcgcatacttattggtgccgccaagtgttattattcaatacagggaaaattcatgagcatttatgacgtcagcacctatatgcgcaccagatcctggttaatcaaattcaaaaacgtcctgaccttcctcgagtattgtatcgagaaaatccacttcattccaccggagtcaaataccttccttacattcatcttccatatcgtcttttcggaagaatttgaatacaccgggcaaattatcaacctaatctacatttatcccatgataattcacctgtggccgatggcccgtggattaaatgtgagtgcactgataagcattaattactactttatgtttctttatgtcttggagagcaccctgaaaatcattattctgaaaaggaaatacttccaacagtgctggaacactctggagttttttattctggttataggtataatcgacatattttgcgtatatttcgtcaaattacgccccgataatttggctctgatccagctgactgttattatgggatacctgagaattatcagattcctcccgcttttcaagattatagtgccaatacttatcaggattgccgatgtccagatcaaaaaaagactaagcctgatgtacagcatcacaaaagggtatattaaaagccaggaagacgccaagctgcttatcaagcagatcgctgtgtgtgagagcatttatcagaagctctgcgaaatcttagagaccaataagcaggatgctgtgaaagagctagttctgatggaacatgaagggcgggacgtggtcattgccctgaagacaaaacaagctatcagaaatgtgattgccaaagcccttaagaacctcacatttttatgcagtcgaggtatcatagacaagcacgaagttattgagattaataaggtactgctgaaaaagctaaaagcccttaacaatttcccaaaagctattcctcccccaacacccgacatttacctgcataatattatctggctcgagggaaaggacgtacttatcgacttcttcaaggagcgcgcaaaattggcctgttttgatagtggggacacaatctgcaaaggaggtgagatgccacagggaatttatctgattataagtgggatggccatccttcatagcctcagccccacgtttggaatcgaaagcaatcagaggtgcgaccggggatctagagacatgttcactgagttctgcacgactggagatatcatcggcgaactctcgtgcctgctcaaaagggaaatagaatataccgtgatttgcgagacgtcccttcaggcttgttttatcagcctcgaggacctctacgagggctttgacgcattctggccttctctagagtataagatttggctaaaactggcactcagtacagcctatcagtactttgagtcatccctgattgatgaggacttaaggttccagaattgtgtcatgttcaatcaagcttacgtggagaccctttcctcttacagcgatatgataattgacaatatgaccatgaaattcgtcattattgtttacgggtctgtcattgataccaaaacggaagagccttactttgccccttgcatcattccgactacttgtgaacaggttcaaggtacaagcgacctgtcgaagctgctgatcatacaggcgagtgagcttacacaaaggaattccaatactaacgtcatggcatccgtgaatacggtttttgagcagccagggaagaatatcaacggaaggcagaaaatgtcttag

SEQ ID NO: 254018 - DNA, 3375 bp, Artificial Sequence
  derived and/or modified sequence
atgagcagctacttctgggcccagaatgaaagcaacagaccagacctgctgtgtggccagcctgctgactacctggtggaggagaagcacttcaccaccctggtgtgcttcatcgtggtgctgggcggcctgctgaagatgtgcctgaagaactgtgaggtgattgtgctgaccatcctgagcctgagcggctttgtgattggccacatggcctacaacagcgtggaggtgcaccagatcgtgtaccccctgctgcggaccagcagcttcagcctgtacagctacttcagccccctcatcatcttcatggtggccctggatgtggagttctacaccctgaagaagatgttctggcaggtgctgctgaccggcctcatctccttcagcacagccagcatcatcatcggctacgtggtgatcaagttcaacaaggacagctgggacctgcagagctgcctgctcttcagcatcaccctgggcatcatcgaccccctgcggtctgtgaacagcctgaagaccatcggcatcagcaagatctacatcgacctgatccggggggagagcctcatcatctgcagcatcgccagcatcttctttggaaacttccggggcaaccgcatccacttcagcatcttccgggacctgcacgtgggcatcgagctgtcctatgacatcctgggcagcatcatcttcggctactggtgtgccaagatcatccagtgcatcctggctgatgtgttcagcaacatgctgaccaacatcatcctgtgcttctccatggtgtacatgaccttctacatcgtggagttcctgggcatgagcggcaccctggccctggccgctgtgggcctgaacctggacagcctgaccttcaagcccaagattgagctggtgatcaccaagttcctgcgcatcttcagctctgtgtatgagcacctgatctatgccttcttcggcatcgtcatcggctgtggggagctgagccactatgagttccacaccatccccttcatcttcatcctcttcaccaccgtgaacctggtgcggctgctgaccatcctgctggtgagccccatcctgatgcacagcaactatgagtacaactggcgctggggcgtggtgatcacctggagcggcatcaagggcgtcttcaacctgctgtgggccccagatgtgtacaacctggccgagaggaaggtggaggtgccccagatgttcatcctgtatgtgcaggtgatcagcctgctgaccatgggcatcaacagctatgtgatgacccagagcgccaggaagctggacctgtgtgtgctgagcctgccccggcagatgatcctgcagaatgccacccagcacatccaggagatcgtgcagaacaccatcaccctcttcaagacagagaagatcctgaccaacgtgaactggaccctggtggaggacaagaccagaattgagtacatccccttcagccacgtgagccacaatgacatgaagacagagagcaccacagatgaggccctgatggaggaggcccggctgcacgtggccgccatccagatgagcagctttgagaagcagaggaacaacggcatcctggagattgaagctgcccgcatcctgattggagctgccaagtgctactacagcatccagggcaagttcatgagcatctatgatgtgtccacctacatgaggaccaggtcctggctgatcaagttcaagaatgtgctgaccttcctggagtactgcatcgagaagatccacttcatccccccagagagcaacaccttcctgaccttcatcttccacatcgtgttcagcgaggagtttgagtacacaggccagatcatcaacctgatctacatctaccccatgatcatccacctgtggcccatggcccggggcctgaatgtgtctgccctgatcagcatcaactactacttcatgttcctgtatgtgctggagagcaccctgaagatcatcatcctgaagaggaagtacttccagcagtgctggaacaccctggagttcttcatcctggtgattggcatcatcgacatcttctgtgtgtactttgtgaagctgcggccagacaacctggccctgatccagctgaccgtcatcatgggctacctgcgcatcatccgcttcctgcccctcttcaagatcatcgtgcccatcctgatcagaattgctgatgtgcagatcaagaagaggctgagcctgatgtacagcatcaccaagggctacatcaagagccaggaggatgccaagctgctgatcaagcagattgctgtgtgtgagagcatctaccagaagctgtgtgagatcctggagaccaacaagcaggatgctgtgaaggagctggtgctgatggagcacgagggcagagatgtggtgattgccctgaagaccaagcaggccatcagaaatgtcatcgccaaggccctgaagaacctgaccttcctgtgcagccggggcatcatcgacaagcatgaagtcatcgagatcaacaaggtgctgctgaagaagctgaaggccctgaacaacttccccaaggccatccccccacccaccccagacatctacctgcacaacatcatctggctggagggcaaggatgtgctgattgacttcttcaaggagcgggccaagctggcctgctttgacagcggggacaccatctgcaagggcggggagatgccccagggcatctacctgatcatcagcggcatggccatcctgcacagcctgagccccacctttggaattgagagcaaccagagatgtgaccggggcagccgggacatgttcacagagttctgcaccactggagacatcattggagagctgagctgcctgctgaagcgggagattgagtacaccgtcatctgtgagaccagcctgcaggcctgcttcatcagcctggaggacctgtatgagggctttgatgccttctggcccagcctggagtacaagatctggctgaagctggccctgagcacagcctaccagtactttgagagcagcctgattgatgaggacctgcgcttccagaactgtgtgatgttcaaccaggcctacgtggagaccctgagcagctacagcgacatgatcatcgacaacatgaccatgaagtttgtgatcatcgtgtatggctctgtgattgacaccaagacagaggagccctactttgccccctgcatcatccccaccacctgtgagcaggtgcagggcaccagtgacctgagcaagctgctgatcatccaggccagcgagctgacccagaggaacagcaacaccaacgtgatggcctctgtgaacacagtgtttgagcagcccgggaagaacatcaatggccggcagaagatgtcctag

SEQ ID NO: 254019 - DNA, 3375 bp, Artificial Sequence
  derived and/or modified sequence
atgagcagctacttctgggcccagaacgagagcaaccggcccgacctgctgtgtgggcagccagccgactacctcgtggaagagaaacacttcactaccctggtgtgttttatagtagtgctgggcggactgctgaagatgtgtctaaagaattgtgaggtaatagtgctgacaatcctctctttaagcggattcgttataggacatatggcttacaactcggtggaagtacatcaaatcgtctacccgcttctgaggacatctagtttctccctctatagttatttctcaccgctcatcatttttatggtggcattggatgtggagttttacaccctgaaaaagatgttttggcaggtgctgctcacaggcctgatctcgttttcaaccgccagtattataattggttacgtcgtgatcaagtttaataaagattcctgggatctacagtcatgtctgctgttttccatcacactgggtattattgacccgctgcggagcgtaaatagtttgaagacaatcggcatcagtaagatctacatcgacttgatcaggggagaaagtttgataatatgtagtatcgccagcatattcttcgggaactttcgcgggaacagaattcacttcagtattttcagagatttacatgtcggtatcgaactctcttacgatatccttggatctattatatttggatactggtgcgccaagataatacaatgcatcttggccgacgtcttcagcaacatgctgactaacattatcctctgctttagcatggtatacatgaccttctacatcgtggagttcttggggatgtccgggacactggcactagctgcagtggggcttaatttagacagcctaaccttcaaaccaaaaatagagttagtgatcaccaagttcctccggatcttttcaagtgtgtacgagcatctaatatacgcgtttttcggaatcgtcattggatgcggtgaactgtcacactatgaatttcacacaatccctttcatctttatcctgttcacaactgttaatctcgtgaggttactgactatcttgcttgttagtccaatcctcatgcactccaactacgagtacaattggcggtggggggtcgtgattacctggagcggcattaaaggtgtgtttaatctgctgtgggcacccgatgtttataacttagccgagcgcaaggtcgaggtgccccagatgtttatcctgtacgtgcaggtcattagcctgctgacaatgggaattaactcatacgtgatgacgcagtcagcgagaaaactggatctgtgtgtactctctctcccaagacagatgatcctccagaatgcgacacagcatatccaggagatcgtgcaaaacaccatcacattattcaagactgagaaaattctcaccaatgtgaattggactttggtcgaggataagacacgaattgagtatatcccattcagccatgtgtcacacaacgacatgaagactgaatctacgacagacgaggccttgatggaggaggctaggctgcacgtggccgccatccaaatgtctagtttcgagaagcagcgcaacaatggcatcctggaaatcgaggctgcccggatcctgattggagccgctaagtgctactactcgatacaaggtaagttcatgagtatttatgacgttagtacctacatgaggacccgaagctggctgattaaatttaaaaacgtcttgactttcctcgaatattgtatagaaaagatccacttcattccccccgagtccaacacctttctcacatttatctttcatattgtcttctccgaggagttcgaatatactgggcagataattaacctgatttacatctacccaatgatcatacacctgtggccaatggcccggggcctgaacgtcagcgcacttatctccattaattattactttatgtttctttatgtgctggaaagcactttgaaaatcatcatactgaagaggaaatatttccagcagtgctggaacactctcgagttcttcatccttgtaataggtatcatcgacattttctgtgtatactttgtgaagctcagacccgataacctggccttgattcagttgactgtaattatgggttacctgcggattatcaggttcctgccactgtttaagatcatcgttccaatcctgattcgaatcgccgatgtccagattaagaagcgactgtcactcatgtactctatcaccaaggggtacatcaagagccaggaagacgccaagttgctaatcaagcagattgctgtctgtgaatcaatttaccagaaactttgtgagattcttgaaactaataaacaggatgcggtcaaggaactggttttaatggagcacgagggacgtgacgtggtgatcgcattaaagactaagcaggccattaggaatgtcatcgctaaggcattaaaaaacttgacgttcctttgttcccgaggcattatcgacaagcacgaggtgatcgagataaacaaagtcctgttgaaaaagctcaaagcgctgaataacttccctaaggctatacctcctccaacaccagacatttacttacataacattatctggctagaagggaaggatgtgctgatcgacttcttcaaagaaagggcgaagctggcctgcttcgactctggggatacaatttgtaagggcggagagatgcctcaggggatttacttaatcatatctggcatggccatcttacattcactgtctcccacatttgggatagagtcaaatcaacggtgcgacagagggagcagagacatgtttaccgagttttgtactacaggagatataatcggagagttgtcttgtctgctgaagcgtgagatcgaatacaccgtgatatgtgagaccagcctgcaagcctgtttcatcagcctggaagacctgtacgagggctttgatgccttctggccatctctggaatacaaaatatggctgaagctggctctgagcacagcataccaatacttcgagagtagtctaatcgatgaagatctccggtttcagaattgcgttatgtttaaccaggcctatgtagaaacactgagctcctatagtgatatgattatcgacaatatgacgatgaagtttgtgattattgtgtacggatccgtcattgacactaaaaccgaggagccatattttgcaccttgcattatacccacgacttgcgagcaagttcagggtacatcagacctaagcaagctgctgataattcaggcttctgagctcacccaacggaatagcaatacaaatgtcatggcgagtgtcaatacagtgtttgaacaacccggaaagaacataaacggaaggcagaagatgagttag

SEQ ID NO: 254020 - DNA, 3375 bp, Artificial Sequence
  derived and/or modified sequence
atgtcatcatatttttgggctcagaatgagtcaaaccgtcctgacctgttgtgcggccagccggctgactatctggtggaagagaaacatttcactacacttgtctgcttcatcgttgttctggggggactgttgaagatgtgcctaaagaattgtgaggtcattgtactgactatcctgtcactgtctggtttcgtgatcggacatatggcatataattctgtggaggtgcaccagatcgtgtacccgctcttgcgaactagctcattctctctatactcctacttcagcccgctgatcatttttatggtagctctggacgtggagttctacacacttaaaaaaatgttttggcaagtgctgctcactgggctcatttccttctctacagcttccatcatcatcggctatgtcgttattaaattcaacaaggattcatgggatttgcaaagttgcctgttgttctcaatcaccctggggatcatcgatccactacgtagcgtgaatagcttgaagaccatcggcatctcaaaaatctacattgacctgataaggggggagagtctgattatctgttccatcgcctccatctttttcggaaacttccggggaaatcgcatccacttttctattttccgggatttacacgtaggtatcgagttaagctacgacatcttgggcagcataatcttcggttactggtgcgcaaagatcatccagtgcattctggccgatgtgttcagtaacatgcttactaacatcatcctgtgcttttccatggtctatatgacattctacatagtagaattcctagggatgtcagggacattggcccttgctgccgtggggcttaatcttgatagtctgacctttaaaccgaagatcgagctggtgattaccaaatttctccgaatattttcctcagtgtacgagcacctcatctatgctttcttcggcatcgtcattggctgcggtgagctgtcccattacgaatttcatacaattccattcatctttattctcttcacaacggttaacctggttcgactcctgactatcctcctggtgtcacctatcctgatgcacagcaattacgaatataactggcggtggggcgtggttatcacctggagcggtattaagggtgtatttaacctactctgggctccagacgtctacaacctcgccgagaggaaagtggaagtacctcagatgtttatcctctacgtccaagtgatttctctgctgaccatgggtatcaattcatatgtgatgactcagagcgccagaaagctggacctgtgcgtccttagtctacccaggcaaatgatactgcaaaacgccacacagcacatccaagagattgttcagaacaccatcacgttgttcaaaactgaaaaaatcctgactaatgtgaattggactctggtggaggataaaacacgtattgaatacatccccttttctcacgtgtcccacaatgacatgaagaccgaaagcacaaccgacgaggccctgatggaagaggcacgtttacacgtcgcagcaattcagatgtcctccttcgagaaacagcgtaataatggtattctggagatcgaagcagctaggatcttgatcggagccgcaaaatgttactacagtattcagggcaaattcatgtccatctacgatgtcagcacctacatgcgcaccagatcttggctgatcaaattcaaaaacgtcctcaccttcttagagtattgcatcgaaaaaattcacttcattccacccgaatcaaataccttccttactttcatctttcatattgttttctctgaagagtttgagtacaccgggcagatcatcaatctgatctacatctaccctatgatcatccacctctggcctatggcaaggggactgaatgtgagcgctttgatttccattaactactattttatgtttctatacgttctggagtcaaccctgaagattataatactcaaacgcaagtatttccagcagtgttggaatacgttggagttcttcatcctggttattggaataattgatatcttttgtgtgtattttgtaaagcttcgccctgataacttggctttaatacagctcactgtgattatgggatatctgcgcattatccgattcctgcctttatttaagattatcgtcccaattttaatcagaatcgcggacgtacaaattaaaaagaggttatctttgatgtatagcattacaaagggatacatcaagtcccaagaagacgctaagttattgattaagcagatcgccgtgtgtgagagcatctatcagaaactttgtgagatccttgagacgaataagcaggacgccgtgaaggaacttgtactgatggaacacgagggaagggacgttgtcatagcgctgaaaaccaaacaggcaatccgtaatgttatcgccaaagcgctcaagaatcttactttcctgtgcagtcgcggaatcatcgacaagcacgaagtgattgaaataaacaaagtcctcctcaagaagcttaaagctctgaacaacttccctaaagccatcccacctcctactcctgatatttacctccataatattatttggctggaggggaaggatgtcttgatcgactttttcaaggagagagcgaaactggcgtgttttgattcaggggacaccatctgcaagggcggtgagatgccacagggcatttatctgattatcagtggtatggccattctccacagtctgtctccgacattcgggatcgagtcaaaccaaaggtgcgatagaggcagccgcgacatgttcacggaattttgtactactggggatataattggggagctctcttgtctgctgaagagggaaatagagtacaccgttatatgcgagacttctctgcaagcctgctttatttcactggaagatctctacgagggattcgatgccttttggccttctttggaatataagatctggctcaaattggcactctcaactgcatatcagtatttcgagtcctcccttatcgacgaggacctgagatttcagaactgtgtgatgttcaaccaggcatacgtcgagacactgagttcttactccgatatgattatcgataacatgaccatgaagtttgttattatcgtgtacgggagtgtgatcgacactaagaccgaagagccgtattttgctccatgcataatacccaccacttgcgagcaggtgcagggtacatccgacctgtcgaaattacttatcatccaagcttcagagctgacacagagaaactcaaacactaacgttatggcctccgtcaacaccgtgtttgagcagcccggaaagaatattaacggacggcagaagatgtcctag

SEQ ID NO: 254021 - DNA, 4428 bp, Artificial Sequence
  derived and/or modified sequence
aaatggattttggtgtgatatcagttggtagtactgtccctggcaaacagacgcataactgtgcattgttctttgggattttgagagccttcatctcaatttcaactttaaagcagcttaatctttaaggaacatatctctgatctgggtaatttgtagaacttaatttgagggtcattacatgtgaggatagcaggagttgaagatgccaaggacctgaagggctactggagggacaggtgaagtgatttgaagatgtagcattttgaatctctttctggcccatcctctgcttcacaccagaatcattgtgacctgtagacctgcaaaacaaaggaccaaaggttagcatgcagaagtgaaagtgtcaataataaccaaaccactccatcaagttaggtctggggaaaagcagcagcaaaaatgagttcttacttctgggcacaaaatgaaagtaacagacctgatttactctgcgggcagccagctgactaccttgttgaagagaaacatttcacaacgcttgtatgcttcattgttgttttgggagggcttttgaagatgtgtttaaagaattgtgaagtcattgttttgacgattctttctctatcaggattcgtgataggacacatggcctacaattctgttgaggtgcaccaaattgtctaccctcttctaagaacatcaagtttttcactttattcttacttttcacctttaattatatttatggttgctttggatgtagaattttatacactcaagaaaatgttttggcaggtcttgttaactggattaattagcttttctacagcaagcatcataattggatatgtcgttataaaattcaataaagattcatgggatttgcaatcttgcctactctttagcatcacccttggcattatagatcctcttcgttctgtgaattcactaaaaactattggcatttctaaaatatacattgatctcattagaggagaatcattgatcatttgtagcatcgcatcaattttttttggaaattttcggggcaacagaatccacttttctatttttagagatttacatgtaggcattgaactcagctatgacattttgggaagcataatatttggatattggtgtgcaaaaatcattcagtgtatattggctgacgtttttagcaatatgctgactaatatcattctctgcttttcaatggtgtacatgactttctatattgtggaatttttaggaatgtcaggcactcttgccttagccgctgtaggactgaatttagattctttaacttttaaaccgaagatcgaacttgtaattactaagttcttaagaattttttcatctgtatatgaacatttaatatatgctttctttggcattgtgattggatgtggagaactcagccactatgaatttcacactatacctttcatattcattttatttacaacagtgaatttggtaaggttgcttactattttgttagtgagccctattttgatgcattcaaattatgaatataattggcgatggggagttgtaatcacgtggtctggaattaaaggagtttttaatttactctgggctcctgatgtttataatctcgctgaacgaaaagtggaagtaccacaaatgtttatactctatgtacaagtaatatcattattgacaatgggaataaattcatacgtgatgactcagtcagccaggaagttagatttgtgtgttctttccctcccaagacaaatgatcttgcaaaatgccactcagcacatacaggagatagtacagaacacaataactttatttaaaacagaaaaaattttgacaaatgttaactggaccttagtagaagataaaacgaggatcgaatacattcctttttcccacgtttcacataatgatatgaagacagaatccacaacagatgaagctttaatggaggaagccagattgcatgtagctgcaatacaaatgagtagctttgaaaaacagcgtaacaatggaattcttgaaatagaggcagcccggatattaattggtgcagcaaaatgctattactccatccaaggaaaattcatgagtatttatgatgtttcaacttatatgagaactagaagttggcttataaagtttaaaaatgttttaactttcttggaatattgtatagaaaagatacattttattccacctgagagtaatacatttctgacttttatatttcacatagtattttctgaagaatttgaatatacaggacagattataaatttgatatatatttatcctatgataatacatctgtggccaatggcaagaggtttaaatgtatcagcactgatatcaataaactactattttatgtttttatatgtattagaatcaacattgaagataataattttgaaaaggaaatattttcaacaatgttggaatactttggaattttttatcctggttattggaatcattgatatcttttgtgtatactttgtgaaattgagaccagacaacttggctcttatacagcttacagtaataatgggatatttaagaataattaggtttcttcctctcttcaagataatagtaccaatactgataagaattgcagatgtgcagatcaaaaagcgcctcagcttgatgtatagtattacaaaaggctatatcaaaagtcaagaagatgccaaacttctaataaaacaaatagctgtctgtgaatcaatatatcagaaactatgtgaaattttggaaaccaacaaacaggatgctgtcaaagaattagtactcatggagcatgagggtcgtgatgttgtcattgctttgaagactaaacaggcaatccggaatgtgattgctaaagctctaaaaaatctcaccttcctttgttcaagaggcattattgataagcatgaagtcattgagataaataaggtacttcttaaaaaattaaaagcactaaataactttccaaaggcaatcccacccccaactcctgacatataccttcacaacatcatttggctggaaggtaaagatgttctcattgacttcttcaaggaaagagccaaacttgcctgttttgactctggagataccatttgtaaaggaggtgaaatgccacaaggaatctacttaattatttcaggaatggcaattttgcatagtttatctcctacctttggaatagagagtaatcaaaggtgtgatagagggtccagagacatgtttacagagttctgtactactggggacataattggagagctaagctgtctgcttaagcgtgaaattgaatataccgtcatctgtgaaactagtttacaggcctgctttatctccctggaggatttatatgaaggctttgatgccttctggccatctctggaatataaaatatggctaaagcttgctctcagtactgcctatcagtattttgaatcaagtcttattgatgaggacttaaggtttcagaactgtgtgatgttcaatcaagcatatgtggaaactttatcaagctatagtgacatgattattgataatatgaccatgaaatttgttatcattgtgtatggcagtgtaattgatactaagacagaggaaccatattttgcaccttgcattatacctacaacctgtgagcaggttcagggaacttctgatttaagcaagctgctgataatccaagcatctgagcttacccaaagaaatagtaacaccaatgtcatggcctcagtcaacacggtctttgaacaaccaggaaagaatataaatggaagacaaaagatgagttgaaaactggataccattttagaaaagggtattaatgatacaaatatgatgtgtggagtcaggttaaagaccaaactactttcctcgctcaaatactaaaggattatctgcaaggagtttacttagaagctactgaaacaggttactgctgcatttagtttataagcaatggatggacttctgtaaaacttcttaattttaagtagttgcattatatttgggatgttaaaaaagtcttcaggataatataaaatacactgaaacatatgtcctaccaaatgaaaccctgtttccagctaagagcaaattttaacatagtgcattataaaaagtgttgtataactgatatgttactctctaaagcatagaacctgtaattttcatttgtgaaattgttataattagtgcctccctaatattttcccgagtatagctattctccccttcccagtttggtaaatattgaaaaacagaattatattccacaatcttagtaactttcagtaagtaagtaacttttgctttcagtgaaatttaggagaaattaatattctcatattgcatagtactgtttgatgtcacctttcattttatttttaaaaatcaaataaagttgagttttatggttgtcta

SEQ ID NO: 254022 - protein, 416 aa, Artificial Sequence
  derived and/or modified sequence
MKRSKELITKNHSQEETSILRCWKCRKCIASSGCFMEYLENQVIKDKDDSVDAQNICHVWHMNVEALPEWISCLIQKAQWTVGKLNCPFCGARLGGFNFVSTPKCSCGQLAAVHLSKSRTDYQPTQAGRLMRPSVKYLSHPRVQSGCDKEALLTGGGSENRNHRLLNMARNNNDPGRLTEALCLEVRPTYFEMKNEKLLSKASEPKYQLFVPQLVTGRCATRAFHRKSHSLDLNISEKLTLLPTLYEIHSKTTAYSRLNETQPIDLSGLPLQSSKNSYSFQNPSSFDPSMLLQRFSVAPHETQTQRGGEFQCGLEAASVYSDHTNTNNLTFLMDLPSAGRSMPEASDQEEHLSPLDFLHSANFSLGSINQRLNKRERSKLKNLRRKQRRRERWLQKQGKYSGVGLLDHMVSIYLLI

SEQ ID NO: 254023 - protein, 107 aa, Artificial Sequence
  derived and/or modified sequence
MKRSKELITKNHSQEETSILRCWKCRKCIASSGCFMEYLENQVIKDKDDSVDAQNICHVWHMNVEALPEWISCLIQKAQWTVGKLNCPFCGARLGGFNFVSTPKCSC

SEQ ID NO: 254024 - DNA, 1251 bp, Artificial Sequence
  derived and/or modified sequence
atgaagagaagcaaggagctgatcaccaagaaccacagccaggaggagaccagcatcctgagatgctggaagtgcagaaagtgcatcgccagcagcggctgcttcatggagtacctggagaaccaggtgatcaaggacaaggacgacagcgtggacgcccagaacatctgccacgtgtggcacatgaacgtggaggccctgcccgagtggatcagctgcctgatccagaaggcccagtggaccgtgggcaagctgaactgccccttctgcggcgccagactgggcggcttcaacttcgtgagcacccccaagtgcagctgcggccagctggccgccgtgcacctgagcaagagcagaaccgactaccagcccacccaggccggcagactgatgagacccagcgtgaagtacctgagccaccccagagtgcagagcggctgcgacaaggaggccctgctgaccggcggcggcagcgagaacagaaaccacagactgctgaacatggccagaaacaacaacgaccccggcagactgaccgaggccctgtgcctggaggtgagacccacctacttcgagatgaagaacgagaagctgctgagcaaggccagcgagcccaagtaccagctgttcgtgccccagctggtgaccggcagatgcgccaccagagccttccacagaaagagccacagcctggacctgaacatcagcgagaagctgaccctgctgcccaccctgtacgagatccacagcaagaccaccgcctacagcagactgaacgagacccagcccatcgacctgagcggcctgcccctgcagagcagcaagaacagctacagcttccagaaccccagcagcttcgaccccagcatgctgctgcagagattcagcgtggccccccacgagacccagacccagagaggcggcgagttccagtgcggcctggaggccgccagcgtgtacagcgaccacaccaacaccaacaacctgaccttcctgatggacctgcccagcgccggcagaagcatgcccgaggccagcgaccaggaggagcacctgagccccctggacttcctgcacagcgccaacttcagcctgggcagcatcaaccagagactgaacaagagagagagaagcaagctgaagaacctgagaagaaagcagagaagaagagagagatggctgcagaagcagggcaagtacagcggcgtgggcctgctggaccacatggtgagcatctacctgctgatctag

SEQ ID NO: 254025 - DNA, 1251 bp, Artificial Sequence
  derived and/or modified sequence
atgaaacgaagcaaagaactcattacgaagaaccacagccaagaggagaccagtatcttgcggtgctggaagtgtaggaagtgcatcgccagtagcgggtgttttatggagtatctggagaatcaggttattaaggacaaagatgactcggtggacgcgcagaacatctgccacgtctggcatatgaacgtcgaagctctaccggagtggatctcctgtttgattcagaaagctcagtggacagtcggcaaattaaattgtccgttctgcggcgcccgcctgggggggttcaacttcgtatcaaccccaaagtgctcttgtgggcaactcgccgccgtgcacctaagtaaatctaggactgactatcagcctacccaggctggtcgccttatgagacccagcgttaagtacctcagtcacccacgcgtccagagtgggtgcgacaaggaggccctgctcaccggtgggggaagtgaaaaccgtaaccacaggctcctgaatatggccagaaacaacaatgatccggggcggctgacggaggccctctgtttagaggtacgacccacttatttcgagatgaagaacgagaaattacttagcaaggcaagcgaaccaaagtaccagctttttgtccctcagctggtgacaggtaggtgcgcaaccagggcctttcataggaagtcccattctctcgacctaaacatctccgaaaaattaacactgcttcctacgctgtacgagattcatagcaaaaccaccgcatacagtaggctcaatgagacacagcccattgacctgtccggcctaccacttcagagtagcaagaacagctatagttttcagaacccttccagcttcgacccctccatgttgctgcaacggttttcagtggctccgcacgaaacccagacacaacgtggcggggagttccaatgtggccttgaagccgcaagcgtttactcagatcataccaacactaacaacttgacctttcttatggacctaccttctgctgggcggtcgatgcccgaagctagcgaccaggaggagcatttgagtcctctggacttcctgcactccgcgaacttttcattgggtagcatcaaccaacgcctgaataaacgggagcggagcaagctgaagaatttacgccgaaaacaacggcggagggagagatggctccagaagcagggcaaatattctggcgtcggcctactggaccacatggtgagcatttacctattgatctag

SEQ ID NO: 254026 - DNA, 1251 bp, Artificial Sequence
  derived and/or modified sequence
atgaagaggagcaaggagctgatcaccaagaaccacagccaggaggagaccagcatcctgcgctgctggaagtgcaggaaatgtattgccagcagcggctgcttcatggagtacctggagaaccaggtgatcaaggacaaggatgacagcgtggatgcccagaacatctgccacgtgtggcacatgaatgtggaggccctgcctgagtggatcagctgcctgatccagaaggcccagtggacagtgggcaagctgaactgccccttctgtggggcccggctgggcggcttcaactttgtgtccacccccaagtgcagctgtggccagctggccgctgtgcacctgagcaagagcaggacagactaccagcccacccaggccggccgcctgatgaggcccagcgtgaagtacctgagccacccccgggtgcagagcggctgtgacaaggaggccctgctgaccggcggcggctctgaaaatagaaaccaccggctgctgaacatggccaggaacaacaatgaccccggccgcctgacagaggccctgtgcctggaggtgcggcccacctactttgagatgaagaatgagaagctgctgagcaaggccagcgagcccaagtaccagctgtttgtgccccagctggtgacaggccgctgtgccacccgggccttccacaggaagagccacagcctggacctgaacatcagcgagaagctgaccctgctgcccaccctgtatgagatccacagcaagaccacagcctacagccggctgaatgagacccagcccatcgacctgagcggcctgcccctgcagagcagcaagaacagctacagcttccagaaccccagcagctttgaccccagcatgctgctgcagcgcttctctgtggcccctcatgagacccagacccagagaggaggagagttccagtgtggcctggaggccgcctctgtgtacagcgaccacaccaacaccaacaacctgaccttcctgatggacctgcccagcgctggccgctccatgcctgaggccagtgaccaggaggagcacctgagccccctggacttcctgcacagcgccaacttcagcctgggcagcatcaaccagaggctgaacaagcgggagaggagcaagctgaagaacctgcggaggaagcagaggagaagagagcgctggctgcagaagcagggcaagtacagcggcgtgggcctgctggaccacatggtgtccatctacctgctgatctag

SEQ ID NO: 254027 - DNA, 1251 bp, Artificial Sequence
  derived and/or modified sequence
atgaagcggagcaaggagctgatcaccaagaaccacagccaggaggagacatctatccttcggtgctggaagtgccgaaaatgtatagcctcctccggctgcttcatggagtacctggagaaccaggttatcaaagataaggacgattcggtagacgcccagaacatctgccatgtctggcacatgaatgtggaggctctgccggagtggattagctgccttattcaaaaagcacagtggactgttggcaagctgaactgccctttttgtggtgcacgtcttggcggatttaacttcgtgtccaccccaaaatgcagttgcggccagctggccgcggtccacttgtcgaaatctcgaaccgactaccagccaactcaagccggccgactcatgcgcccttccgtgaaatatctgtcacacccgcgcgtgcagtcaggctgcgacaaggaggcgctgctgacgggagggggctcggagaacagaaaccacaggttactcaatatggccaggaataataatgatcctggacggctcacggaggctttgtgtctagaggtccgccctacctactttgaaatgaagaatgagaagctcctttcgaaggcttctgaacccaaatatcagctgtttgttccccagctggtcaccggccgatgcgccacacgcgcattccaccggaagtcccatagcctcgatctgaatatcagcgagaaattgactctcctacccactctgtatgagattcacagcaagaccaccgcctactcacgcctaaacgagacccaacccatagatctgagcggcctacctttgcagagcagcaaaaactcgtacagctttcaaaatccctcctcattcgatccatcaatgctgttgcaaagattcagtgttgctccccatgagactcagacgcagcggggcggcgagttccagtgtggcctcgaggcggcttccgtgtactcggaccatacaaacacaaacaacctcacctttttgatggacctgccttcagccgggcgttccatgcccgaagcctccgatcaggaggagcatctcagtcctctggattttcttcactcggccaatttcagcctgggctccattaaccaacgcctcaataaaagggagaggtcgaaattgaaaaatctcaggagaaagcagagacgtcgtgagaggtggttacaaaaacagggaaaatatagtggagtcgggctgctagatcacatggtaagtatctacctcttgatctag

SEQ ID NO: 254028 - DNA, 1251 bp, Artificial Sequence
  derived and/or modified sequence
atgaaaagatccaaggaattgattacgaagaatcactcacaggaggaaacgagcattctgcgatgttggaagtgtcgaaagtgcattgctagcagcggatgctttatggagtatctggagaatcaggtgattaaggataaggacgattccgtcgacgcccagaacatctgtcacgtttggcacatgaacgtggaagccttgccagagtggatctcatgcctcatccagaaggcacaatggaccgtgggcaagttgaactgtcccttctgcggcgctcggttaggcggattcaatttcgtgtccactcccaaatgctcatgtggtcagctcgcagctgtgcatctctctaaatcacgcaccgactatcagcccacccaggccggaaggttaatgagaccatctgttaagtacttgtcccaccctcgtgttcagtcagggtgcgataaagaagcactcttaacaggaggaggctcggagaatcggaatcaccgcttactgaacatggccagaaacaataatgatcctggcagactcactgaggctctgtgtctcgaggtgaggccaacctactttgagatgaagaacgaaaaactgctgtctaaggctagcgagcctaagtatcagttgttcgtgccacagcttgtgactggtcgctgtgctaccagagcctttcatcgtaagtctcatagtctggatctcaacatttctgaaaaactaacactgctaccaaccttgtacgagatccatagcaaaacaactgcttactctaggctgaacgagacgcagcccattgacctgagtggacttcctctgcaatcgtcaaagaattcctacagtttccagaaccccagctcgtttgacccaagcatgctgctacagcgcttctccgtcgcaccacatgagacacagacacagagggggggagaattccagtgtgggctggaggccgcttccgtatactcagatcacacaaacacaaacaatctgacgtttcttatggatctcccaagtgctggccgatccatgcctgaggcctctgaccaggaggagcacctgtctcccctggatttccttcactctgccaactttagtctcggctcgattaaccagcgtttgaacaagagagagcgaagcaagctaaaaaacttacgccgtaagcagagacggagagagaggtggttgcaaaaacaggggaaatattccggtgtgggcttgctggatcacatggtgagcatttacctgcttatttag

SEQ ID NO: 254029 - DNA, 1727 bp, Artificial Sequence
  derived and/or modified sequence
aaccggcatcgccgccgccggagccgcagcgagtcctcagagcctggctgctggcggccgggagcgccgggacggggcgcgaagccggaggctccgggacgtggatacagatgaaaagaagcaaagaattgataactaaaaatcatagtcaagaggaaacaagtattcttcgttgttggaaatgtagaaaatgtatagcaagctctggttgttttatggagtatcttgagaatcaagtgattaaggataaagatgattcagttgatgctcaaaatatttgtcatgtgtggcacatgaatgtagaagcccttccagaatggataagctgcctaatccaaaaagcccagtggacagttggaaaactgaattgtcctttctgtggggcccgtttagggggctttaattttgtcagcactccaaaatgttcctgtggccagcttgcagctgtacatctctccaagagccggactgattatcagccaacacaggcaggcagactaatgagaccatcagtgaaatacttgtcacatcctagagttcagtcaggttgtgacaaggaagctctgctgacaggtggtggctctgaaaacagaaatcacaggcttttaaacatggcccgaaataataatgaccctggaagattaacagaagcactctgcctggaggtgcgaccaacatattttgagatgaagaacgaaaaactgctgtccaaagcatcagaaccaaaataccagctttttgttccccagcttgtgactggcagatgcgctacaagagcttttcatagaaaatcacatagtttggatctgaacatcagtgagaaactgactttattacccactttatatgaaatacatagtaagactactgcctattccagactaaatgaaacacagcctattgacctttcaggcttgcctttacaatctagtaaaaatagctattcctttcagaatccatccagttttgatcctagtatgctgctgcaaagattttcagtggccccccatgagacccagacacaaagaggaggagaatttcagtgtggtctagaagctgcttcagtgtattctgaccatactaatactaacaatctgactttcctgatggacctgccctcagctggcaggagcatgccggaggcctcagaccaggaagagcacctctcccctctggacttcctgcactcagccaatttttcattgggcagcattaatcagaggcttaataagagagaaaggagcaagttgaagaatctaagaaggaaacaacgaaggcgtgaaagatggctacagaagcagggtaaatactcaggagtgggattgctggatcatatggtaagtatatatttacttatatgagaaattgtcaaattgttttccagaatggctgtaccattttgcattccaagcagcaaagacttccattttctgtgcgtccttgaaagcaagcactggtattctcagtgttttaaaattttagtcattcaaatacatagacagttgtatcacatcatgactttaatttgcttttccttaaggatgctgaacatatgtgcttattttacatttgtatatattctttagttaagtgtcttcaaatcttttgggctggtgtggcagcttatgtctataatcccagcacttttgagaggccaaggcaggaggattgcttgagttcaggagttcaagaccagcctgggcaacatagcaaaaccttatctctac

SEQ ID NO: 254030 - protein, 131 aa, Artificial Sequence
  derived and/or modified sequence
MSKRYLQKATKGKLLIIIFIVTLWGKVVSSANHHKAHHVKTGTCEVVALHRCCNKNKIEERSQTVKCSCFPGQVAGTTRAAPSCVDASIVEQKWWCHMQPCLEGEECKVLPDRKGWSCSSGNKVKTTRVTH

SEQ ID NO: 254031 - DNA, 396 bp, Artificial Sequence
  derived and/or modified sequence
atgagcaagagatacctgcagaaggccaccaagggcaagctgctgatcatcatcttcatcgtgaccctgtggggcaaggtggtgagcagcgccaaccaccacaaggcccaccacgtgaagaccggcacctgcgaggtggtggccctgcacagatgctgcaacaagaacaagatcgaggagagaagccagaccgtgaagtgcagctgcttccccggccaggtggccggcaccaccagagccgcccccagctgcgtggacgccagcatcgtggagcagaagtggtggtgccacatgcagccctgcctggagggcgaggagtgcaaggtgctgcccgacagaaagggctggagctgcagcagcggcaacaaggtgaagaccaccagagtgacccactag

SEQ ID NO: 254032 - DNA, 396 bp, Artificial Sequence
  derived and/or modified sequence
atgagcaaacgttacttacagaaggcaactaagggaaagttgctgatcataatctttattgtcaccttatggggtaaagtggtatctagcgcgaaccatcacaaggcacaccacgttaagaccggtacgtgtgaagtcgttgctctccatagatgctgcaacaagaataagatagaggagcggtcacagactgtgaagtgttcctgttttccagggcaggttgctgggacgaccagggccgccccctcttgcgtggatgcttccattgtcgagcaaaagtggtggtgccatatgcagccgtgtctggagggagaggagtgcaaagtcctccctgacagaaagggctggtcctgttcttccggtaataaagtgaaaactacccgagtgacccactag

SEQ ID NO: 254033 - DNA, 396 bp, Artificial Sequence
  derived and/or modified sequence
atgtctaagagatacctacagaaagccactaagggcaagctgttaattatcatcttcatcgtcaccctctggggaaaggtagtgagcagcgctaaccaccacaaagcacatcacgtgaaaacagggacttgcgaagtggttgctctgcataggtgttgcaacaaaaacaagatcgaagaaagaagccagacagtgaagtgctcttgtttccccggccaggtggcaggaaccacacgtgctgccccctcctgcgttgacgctagtattgttgaacaaaagtggtggtgccacatgcaaccctgcctggaaggtgaggaatgcaaagtgctcccggacagaaagggctggtcgtgtagctcaggtaataaagtgaagaccacacgggtaacacattag

SEQ ID NO: 254034 - DNA, 396 bp, Artificial Sequence
  derived and/or modified sequence
atgagcaagcgctacctgcagaaggccaccaagggcaagctgctgatcatcatcttcatcgtgaccctgtggggcaaggtggtgagcagcgccaaccaccacaaggcccaccacgtgaagacaggcacctgtgaggtggtggccctgcaccgctgctgcaacaagaacaagattgaggagaggagccagacagtgaagtgcagctgcttccctggccaggtggccggcaccacccgggccgcccccagctgtgtggatgccagcatcgtggagcagaagtggtggtgccacatgcagccctgcctggagggggaggagtgcaaggtgctgcctgacaggaagggctggagctgcagcagcggcaacaaggtgaagaccaccagggtgacccactag

SEQ ID NO: 254035 - DNA, 396 bp, Artificial Sequence
  derived and/or modified sequence
atgagcaagcggtacctgcagaaggccaccaagggcaagctgctgatcatcatttttatcgtgacactctgggggaaagtggtcagctctgcaaaccatcataaagctcatcacgtgaagacgggaacatgcgaagtcgtcgctttgcaccgttgctgcaacaaaaacaagatcgaggaacgatcccagaccgtgaagtgttcatgtttcccaggccaagtcgccggcaccacccgtgcagctccttcttgcgtggacgctagtatcgtggaacaaaagtggtggtgccatatgcagccatgcttggagggtgaagaatgtaaagtcctccccgaccgcaaggggtggagctgttcatcggggaataaagttaagacaacaagggtcacgcactag

SEQ ID NO: 254036 - DNA, 396 bp, Artificial Sequence
  derived and/or modified sequence
atgagcaagcggtacctgcagaaggccaccaagggcaagctgctgatcattatatttatcgttactctgtggggtaaagtggtatcctcagcaaaccaccacaaggcccatcacgtgaagacaggaacctgcgaggtggtggccctgcataggtgctgtaataaaaacaaaattgaagagagatcacagaccgtgaagtgctcatgttttcccggacaagtcgctgggacaacccgcgcagctccgtcctgtgtcgacgctagtatcgtcgaacagaaatggtggtgtcatatgcagccttgtctggaaggagaggagtgtaaggtgctcccggaccgtaagggttggagctgcagttccggcaacaaagtcaagaccacccgtgtaactcactag

SEQ ID NO: 254037 - DNA, 4128 bp, Artificial Sequence
  derived and/or modified sequence
ttttataccagttgcctcctcatcttttactgtctcgttctttttctgcaggaccgttgtttgctctcaacggcagttgctggggctaacagaactggctgttgggagagagaggcgaggcaacgccgcccggccctgccattccattttactgcttaactcaacctggagtgtcaggacctattctcctgcattctcgctgcactatacgggggagccaagtcactctgtactcactggacagccaggctgggtggaatagggttctagagtggagcaggggctctgccctttatggcgactttctaaaagattagcatcagtgtcttttgacagtatagcatctggggtgggacgcggagaggaggctttgcttgctaaacggcttctttctccgccggtgatctggatttgtttcctcggccccctccccccgctcctttctttctcccctcccgcctttagcaaagtgacacaggcgacacctgctcgcttgtgttcgatgttggaactcgcacctcctcggtggtgacggtgccagggcactgctaccagggggacatcggcgggtttcccttccttccagcccacgatgcctagaagggcagcgggtgggctgcgtggggctctgcccgcagcacttcgaggcgggattgaggggctgaagctggccaggagttgctgctaagtggattcgagtggaaggcgccaagtctccgcgagggcaccagcggggacctatctgcgagcagtgggaacaggggcacctggacggaggaacgcgggcgtctggaggggggacatcggctgagctcagagcctctcctccttcctgtcccgagcttcccagcaactccgccacgttggagacccggtacctgcgagagccagggaactcgagaagtgcgtggccgaggctgctttcctgaaggtgaatcattctgtccaattgcctttccccagagaacaagagggagggcgggagagagggaacggaggatgtgtgagtgtgtgtgtgtgtgagagggagagacgacgtgaggcgagaggaaaagtctttagtcggccttaaaagcaaacaaatcagagatggaataagagcggtaattgcagcaagaccgccttgattcttgcagtccagggagctgagcgcaccgcgcgcatccggcgaggacaggaggcgaccgcgggcgctgccaagggctgcgggactttggcttttcctcagtaaacaaatcttttgattactttgacactgtggaataaagaagcggggagaaggatcaggctcaccttcacccgcttcagggggattccagcttggatgtcagattcctgaaccgtctttgccatcggaggaggaaacacatccacacacgcgcgcgcacactcgcacgctcagggccacactcacacgccgccctccacgatcacacagcaccagacttcggttccctatgcccctggatggtgacggcggattggcatcttggaagcgatgcgagagcgataaggctggcgccggcccgcaaaagctgcaggagcatcgctaggtgttgccgccaccgggaagcggggctgcaggatgagtaagagatacttacagaaagcaacaaaaggaaaactgctaataataatatttattgtaaccttgtgggggaaagttgtatccagtgcaaaccatcataaagctcaccatgttaaaacgggaacttgtgaggtggtggcactccacagatgctgtaataagaacaagatagaagaacggtcacaaacagtcaagtgctcctgcttccctgggcaggtggcaggcaccacgcgagctgctccatcatgtgtggatgcttcaatagtggaacagaaatggtggtgccatatgcagccatgtctagagggagaagaatgtaaagttcttccggatcggaaaggatggagctgttcctctgggaataaagtcaaaacaactagggtaacccattaacccaggagaaatcaagtgatcctcaaggctgatgacattgaacatgcgcatagaaacttaactcaactcctgaggtgatcttgaagatttttataccacttgaaagaggcgctcaatagtctatttccaagggatttcatggcctcttcttgaaatcaagactttttaaaagtcagacatgaacttgcatgtcatgaagatttcagcagatttgaactgtgttcaacttgtaaattgttaaaagaatttgaagtcactgtctgaggagctggtgaagagttgtttttttcagggtgatgttagagacagtcaccttttgagttattggctccagatgtgactacttttcttgtttctgcaagctgtatcccaagtgcactgtccttctgtcctggatgtgttcctgggtcctatgttcatttgctagtgggactacacatggctttaatgacatttcctttgagaacttttcctctggcatggtgtagactgagacaattttatttatatcctaatcttggagctcagaaagcctacatgttttaacatcttaaagttgcttttgttaaaggaatggaaatatatatccattggtaataatgttggcaagtaatagttatctgaataaatcaatcatataagaatgtatagacaagctgacatatttccctaaggctaacaacaccctgctgaagctctttgtcaaataggtagtagttagaactggattgccattttcattatataatactttgtacctctagagcactctccctttctgtttttttttaagtgagcttttctttaattttttatgtttacttattcccttcacagaaatcagcagtgagcagtcaagttaatgggtagccttcagtttcaaaaaaattgacagggatgcatgtgagtttctgatttcttagcttgaacattattcacttagatttcttccagtattttttaaaaaactgtcctatctcattttaaaagactttcttttgcttgatcccaatgactgtttgaatgcttatatatttgttcaatctgttgatagaaaaaattgttcattttcctcagtctcaaatttataaatatttgcttacagttttcctattcaaacaatttgttaggccaatattttgtgacatttttgtagcgattttaacgtttatggttttggttctacaggaaagtcataaatatttaaaggccttaaacatgtatgtactttttttttctaagttatagaatgtataattttgtactacatttattttgtttcatttgtgatatgaagggagagaagaaagaaaagtgcatagccattctgtaacaatattgtgtaaacctatagtttgaaggaatgcaaggagaaggatttctgtgttttactcattttaggctgttcagaagatgcttcaaaaattgtcctgttagaatttccatcatggaaggtggtatggaagaaggtatggaaatactttgtattctaaaaactcactgacgtggtcagttagacatacgttggtttccaggatagaggcccatatatcctggggagctttggtctattagtttgtgacaatattcaaaggccaaaacactactcagacactttcctgggaagagcaactaaaaatgtaaaattggttaaaaataaaatctgaaaagtatgtatctcacattgaactaaaatccactgtctcataagttcatggaatgaaatggctttctgcctccattttaatcatgcataaaatgaattagatggctttgagtggattttcacaatggctcaagactatatgaaattataaaaaaaaagttgccctggggtttctgcatcaattagaatatcattaatttctttgtaaccaagtgaaaaactatactttttggaaattatgaatttgtcctaggtttgtttgagatttgaaattatacatcatgcttctcattttttaaactatgttctttaaatcaacactggaaactctgtattatatacaagtgtaatacatgcatataatagaaaaaaaacatggaatttcaaatatactaactagattatccccagtagattaatgttgtgactattcagaaaaggtgaataaaattgggatataaaatggactctctttcataaa

SEQ ID NO: 254038 - DNA, 396 bp, Artificial Sequence
  derived and/or modified sequence
atgtccaaacgctacctgcagaaagccaccaagggaaagctgctgatcattatctttatcgtcactctctggggtaaggtggtgagtagcgctaatcatcataaggcccaccacgtaaaaaccgggacatgcgaagtcgtggccctccaccgctgctgtaataagaacaagattgaagagagaagccagaccgtcaagtgcagctgtttccccggacaggtggccggaactacgcgcgctgccccatcttgtgtggatgcctcgatcgtagaacagaaatggtggtgtcatatgcaaccatgcctggaaggtgaggaatgtaaggtcttacctgacagaaaaggctggtcctgttccagtggcaacaaagtgaaaacaacccgggtcacacattag

SEQ ID NO: 254039 - DNA, 396 bp, Artificial Sequence
  derived and/or modified sequence
atgagcaagcgctacctccaaaaagcaacaaaggggaaattactcattataatcttcatagtcacactgtgggggaaagttgtgagtagcgccaaccatcataaagctcatcatgtaaagaccggtacctgtgaagtagtggccctgcatcggtgctgtaacaagaataaaatcgaagaacggtcccagactgtcaaatgctcttgcttcccgggacaggttgcagggaccacgcgtgctgccccttcgtgcgtagatgctagcatcgtcgaacagaaatggtggtgtcacatgcaaccttgtctcgagggagaggaatgtaaggtgctcccagaccgtaaggggtggtcctgtagttctggaaataaagtgaagacaactcgcgtcactcattag

SEQ ID NO: 254040 - DNA, 2718 bp, Artificial Sequence
  derived and/or modified sequence
aaagtaattttctgaagggaagctgcagaatatggaaaacatatattggagctacatggatcatgtcaagttcagactgtaaggagtagatgcagtagtgaagctgtccatctcaggtgaattgaaaaagtaaagaactacaaaatgccatcattccctctctgtgttgatttctggtgaagctcagaggatgagtaagagatacttacagaaagcaacaaaaggaaaactgctaataataatatttattgtaaccttgtgggggaaagttgtatccagtgcaaaccatcataaagctcaccatgttaaaacgggaacttgtgaggtggtggcactccacagatgctgtaataagaacaagatagaagaacggtcacaaacagtcaagtgctcctgcttccctgggcaggtggcaggcaccacgcgagctgctccatcatgtgtggatgcttcaatagtggaacagaaatggtggtgccatatgcagccatgtctagagggagaagaatgtaaagttcttccggatcggaaaggatggagctgttcctctgggaataaagtcaaaacaactagggtaacccattaacccaggagaaatcaagtgatcctcaaggctgatgacattgaacatgcgcatagaaacttaactcaactcctgaggtgatcttgaagatttttataccacttgaaagaggcgctcaatagtctatttccaagggatttcatggcctcttcttgaaatcaagactttttaaaagtcagacatgaacttgcatgtcatgaagatttcagcagatttgaactgtgttcaacttgtaaattgttaaaagaatttgaagtcactgtctgaggagctggtgaagagttgtttttttcagggtgatgttagagacagtcaccttttgagttattggctccagatgtgactacttttcttgtttctgcaagctgtatcccaagtgcactgtccttctgtcctggatgtgttcctgggtcctatgttcatttgctagtgggactacacatggctttaatgacatttcctttgagaacttttcctctggcatggtgtagactgagacaattttatttatatcctaatcttggagctcagaaagcctacatgttttaacatcttaaagttgcttttgttaaaggaatggaaatatatatccattggtaataatgttggcaagtaatagttatctgaataaatcaatcatataagaatgtatagacaagctgacatatttccctaaggctaacaacaccctgctgaagctctttgtcaaataggtagtagttagaactggattgccattttcattatataatactttgtacctctagagcactctccctttctgtttttttttaagtgagcttttctttaattttttatgtttacttattcccttcacagaaatcagcagtgagcagtcaagttaatgggtagccttcagtttcaaaaaaattgacagggatgcatgtgagtttctgatttcttagcttgaacattattcacttagatttcttccagtattttttaaaaaactgtcctatctcattttaaaagactttcttttgcttgatcccaatgactgtttgaatgcttatatatttgttcaatctgttgatagaaaaaattgttcattttcctcagtctcaaatttataaatatttgcttacagttttcctattcaaacaatttgttaggccaatattttgtgacatttttgtagcgattttaacgtttatggttttggttctacaggaaagtcataaatatttaaaggccttaaacatgtatgtactttttttttctaagttatagaatgtataattttgtactacatttattttgtttcatttgtgatatgaagggagagaagaaagaaaagtgcatagccattctgtaacaatattgtgtaaacctatagtttgaaggaatgcaaggagaaggatttctgtgttttactcattttaggctgttcagaagatgcttcaaaaattgtcctgttagaatttccatcatggaaggtggtatggaagaaggtatggaaatactttgtattctaaaaactcactgacgtggtcagttagacatacgttggtttccaggatagaggcccatatatcctggggagctttggtctattagtttgtgacaatattcaaaggccaaaacactactcagacactttcctgggaagagcaactaaaaatgtaaaattggttaaaaataaaatctgaaaagtatgtatctcacattgaactaaaatccactgtctcataagttcatggaatgaaatggctttctgcctccattttaatcatgcataaaatgaattagatggctttgagtggattttcacaatggctcaagactatatgaaattataaaaaaaaagttgccctggggtttctgcatcaattagaatatcattaatttctttgtaaccaagtgaaaaactatactttttggaaattatgaatttgtcctaggtttgtttgagatttgaaattatacatcatgcttctcattttttaaactatgttctttaaatcaacactggaaactctgtattatatacaagtgtaatacatgcatataatagaaaaaaaacatggaatttcaaatatactaactagattatccccagtagattaatgttgtgactattcagaaaaggtgaataaaattgggatataaaatgg

SEQ ID NO: 254041 - protein, 458 aa, Artificial Sequence
  derived and/or modified sequence
MRGLAVLLTVALATLLAPGAGAPVQSQGSQNKLLLVSFDGFRWNYDQDVDTPNLDAMARDGVKARYMTPAFVTMTSPCHFTLVTGKYIENHGVVHNMYYNTTSKVKLPYHATLGIQRWWDNGSVPIWITAQRQGLRAGSFFYPGGNVTYQGVAVTRSRKEGIAHNYKNETEWRANIDTVMAWFTEEDLDLVTLYFGEPDSTGHRYGPESPERREMVRQVDRTVGYLRESIARNHLTDRLNLIITSDHGMTTVDKRAGDLVEFHKFPNFTFRDIEFELLDYGPNGMLLPKEGRLEKVYDALKDAHPKLHVYKKEAFPEAFHYANNPRVTPLLMYSDLGYVIHGRINVQFNNGEHGFDNKDMDMKTIFRAVGPSFRAGLEVEPFESVHVYELMCRLLGIVPEANDGHLATLLPMLHTESALPPDGRPTLLPKGRSALPPSSRPLLVMGLLGTVILLSEVA

SEQ ID NO: 254042 - DNA, 1377 bp, Artificial Sequence
  derived and/or modified sequence
atgagaggcctggccgtgctgctgaccgtggccctggccaccctgctggcccccggcgccggcgcccccgtgcagagccagggcagccagaacaagctgctgctggtgagcttcgacggcttcagatggaactacgaccaggacgtggacacccccaacctggacgccatggccagagacggcgtgaaggccagatacatgacccccgccttcgtgaccatgaccagcccctgccacttcaccctggtgaccggcaagtacatcgagaaccacggcgtggtgcacaacatgtactacaacaccaccagcaaggtgaagctgccctaccacgccaccctgggcatccagagatggtgggacaacggcagcgtgcccatctggatcaccgcccagagacagggcctgagagccggcagcttcttctaccccggcggcaacgtgacctaccagggcgtggccgtgaccagaagcagaaaggagggcatcgcccacaactacaagaacgagaccgagtggagagccaacatcgacaccgtgatggcctggttcaccgaggaggacctggacctggtgaccctgtacttcggcgagcccgacagcaccggccacagatacggccccgagagccccgagagaagagagatggtgagacaggtggacagaaccgtgggctacctgagagagagcatcgccagaaaccacctgaccgacagactgaacctgatcatcaccagcgaccacggcatgaccaccgtggacaagagagccggcgacctggtggagttccacaagttccccaacttcaccttcagagacatcgagttcgagctgctggactacggccccaacggcatgctgctgcccaaggagggcagactggagaaggtgtacgacgccctgaaggacgcccaccccaagctgcacgtgtacaagaaggaggccttccccgaggccttccactacgccaacaaccccagagtgacccccctgctgatgtacagcgacctgggctacgtgatccacggcagaatcaacgtgcagttcaacaacggcgagcacggcttcgacaacaaggacatggacatgaagaccatcttcagagccgtgggccccagcttcagagccggcctggaggtggagcccttcgagagcgtgcacgtgtacgagctgatgtgcagactgctgggcatcgtgcccgaggccaacgacggccacctggccaccctgctgcccatgctgcacaccgagagcgccctgccccccgacggcagacccaccctgctgcccaagggcagaagcgccctgccccccagcagcagacccctgctggtgatgggcctgctgggcaccgtgatcctgctgagcgaggtggcctag

SEQ ID NO: 254043 - DNA, 1841 bp, Artificial Sequence
  derived and/or modified sequence
gtccatctggaaggcccagcatgagaggcctggccgtcctcctcactgtggctctggccacgctcctggctcccggggccggagcaccggtacaaagtcagggctcccagaacaagctgctcctggtgtccttcgacggcttccgctggaactacgaccaggatgtggacacccccaacctggacgccatggcccgagacggggtgaaggcacgctacatgacccccgcctttgtcaccatgaccagcccctgccacttcaccctggtcaccggcaaatatatcgagaaccacggggtggttcacaacatgtactacaacaccaccagcaaggtgaagctgccctaccacgccacgctgggcatccagaggtggtgggacaacggcagcgtgcccatctggatcacagcccagaggcagggcctgagggctggctccttcttctacccgggcgggaacgtcacctaccaaggggtggctgtgacgcggagccggaaagaaggcatcgcacacaactacaaaaatgagacggagtggagagcgaacatcgacacagtgatggcgtggttcacagaggaggacctggatctggtcacactctacttcggggagccggactccacgggccacaggtacggccccgagtccccggagaggagggagatggtgcggcaggtggaccggaccgtgggctacctccgggagagcatcgcgcgcaaccacctcacagaccgcctcaacctgatcatcacatccgaccacggcatgacgaccgtggacaaacgggctggcgacctggttgaattccacaagttccccaacttcaccttccgggacatcgagtttgagctcctggactacggaccaaacgggatgctgctccctaaagaagggaggctggagaaggtgtacgatgccctcaaggacgcccaccccaagctccacgtctacaagaaggaggcgttccccgaggccttccactacgccaacaaccccagggtcacacccctgctgatgtacagcgaccttggctacgtcatccatgggagaattaacgtccagttcaacaatggggagcacggctttgacaacaaggacatggacatgaagaccatcttccgcgctgtgggccctagcttcagggcgggcctggaggtggagccctttgagagcgtccacgtgtacgagctcatgtgccggctgctgggcatcgtgcccgaggccaacgatgggcacctagctactctgctgcccatgctgcacacagaatctgctcttccgcctgatggaaggcctactctcctgcccaagggaagatctgctctcccgcccagcagcaggcccctcctcgtgatgggactgctggggaccgtgattcttctgtctgaggtcgcataacgccccatggctcaaggaagccgccgggagctgcccgcaggccctgggccggctgtctcgctgcgatgctctgctggtcgcggacggaccctgcctccccagcttatcccaggccagaggctgcatgccactgtccccggcagcgccaacccctgcttggctgttatggtgctggtaataagcctcgcagcccaggtccagagcccccggcgagccggtcccataaccggccccctgcccctgcccctgctcctgctcctccccttcgggccccctcctcctgcaaaacccgctcccgaagcggcgctgccgtctgcagccacgcgggggcgcgcgggagctctgcgggcgctggaacctgcagacccggcctcggtcagctgggaggggcccgccccggcacaaagcacccatgggaataaaggccaagccgcgacagtcagc

SEQ ID NO: 254044 - DNA, 1377 bp, Artificial Sequence
  derived and/or modified sequence
atgcggggactggctgtgcttctgacagtggccctggctactttactggcccctggggcaggagctccagtgcaatcccaggggtcacagaataagctgctgttggtctcttttgacggtttcagatggaactacgaccaggatgtggacacacccaatctggacgcaatggctcgggacggagtgaaagcgaggtatatgaccccagcctttgtgacaatgacctcaccctgccactttacactggtgaccggaaaatatattgaaaaccatggggttgtccataatatgtattataacacaactagcaaggtcaagcttccctatcacgctactttggggattcagaggtggtgggataatggatctgtgccaatctggattaccgcccagcggcagggtctgagagccggctcattcttctacccaggtgggaatgtcacctaccagggtgttgcagttaccaggagccgtaaggagggaatcgcacacaactacaaaaacgagactgaatggagagctaacatagatactgtcatggcttggttcaccgaggaggatcttgatttggttaccctttactttggagagcccgattcaaccgggcacaggtacggacccgagtccccagaaaggcgcgagatggtacggcaagttgaccgcactgttggctacctgagagagagcattgcccggaatcatttgaccgaccggctcaatctcataatcactagcgaccatggtatgacgaccgtcgataaaagagccggcgatctagtggaatttcataaatttccaaattttacattccgcgacatcgagttcgagctgctggactatggccccaatgggatgctgttgcccaaggagggccgactcgaaaaggtctacgatgccttaaaagatgctcacccgaagctgcatgtgtataaaaaagaagcgtttcctgaagctttccactacgccaacaaccctcgggtgacccctctgctgatgtattcagacctgggttatgtgatccatggccgtatcaatgtgcagtttaataatggcgaacacggattcgacaataaagatatggatatgaaaaccatctttagggcagtaggtcccagtttcagggctggtcttgaggttgagcccttcgaaagtgtgcacgtatatgagctaatgtgcagactactggggatagtacccgaagcgaacgacggacacctggcaacccttctgcctatgctgcacaccgagtctgcactacctcctgatgggcgcccgaccttgcttccgaaaggccggtcggctctcccaccttccagcaggcccctcctggtcatgggactgctgggaaccgtgattctgctgtctgaggtggcgtag

SEQ ID NO: 254045 - DNA, 1377 bp, Artificial Sequence
  derived and/or modified sequence
atgaggggcctggccgtgctgctgactgtggccctggccaccctgctggcccctggggccggggcccctgtgcagagccagggcagccagaacaagctgctgctggtgtcctttgatggcttccgctggaactatgaccaggatgtggacacccccaacctggatgccatggccagagatggagtgaaggcccgctacatgaccccagcctttgtgaccatgaccagcccctgccacttcaccctggtgacaggcaagtacattgaaaatcatggagtggtgcacaacatgtactacaacaccaccagcaaggtgaagctgccctaccacgccaccctgggcatccagcgctggtgggacaatggatctgtgcccatctggatcacagcccagaggcagggcctgcgggccggcagcttcttctacccaggcggcaatgtgacctaccagggcgtggccgtgaccaggagcaggaaggagggcatcgcccacaactacaagaatgaaacagagtggagggccaacatcgacacagtgatggcctggttcacagaggaggacctggacctggtgaccctgtactttggagagccagacagcacaggccacagatatggccctgagagccctgagcggcgggagatggtgcggcaggtggacagaacagtgggctacctgcgggagagcatcgccaggaaccacctgacagaccggctgaacctgatcatcaccagtgaccacggcatgaccaccgtggacaagagagctggggacctggtggagttccacaagttccccaacttcaccttccgggacattgaatttgagctgctggactatggccccaacggcatgctgctgcccaaggagggccgcctggagaaggtgtatgatgccctgaaggatgcccaccccaagctgcacgtgtacaagaaggaggccttccctgaggccttccactacgccaacaacccccgggtgacccccctgctgatgtacagcgacctgggctacgtgattcatggccgcatcaacgtgcagttcaacaacggggagcacggctttgacaacaaggacatggacatgaagaccatcttccgggctgtgggccccagcttccgggccggcctggaggtggagccctttgagagcgtgcacgtgtatgagctgatgtgccgcctgctgggcatcgtgcctgaggccaatgatggccacctggccaccctgctgcccatgctgcacacagaaagtgccctgcccccagatggccggcccaccctgctgcccaagggccgcagcgccctgccccccagcagccggcccctgctggtgatgggcctgctgggcaccgtcatcctgctgtctgaggtggcctag

SEQ ID NO: 254046 - DNA, 1377 bp, Artificial Sequence
  derived and/or modified sequence
atgcggggcctggccgtgctgctgaccgtggccctggccaccctgttagcccctggtgcgggggcacccgttcagtcccagggaagccagaacaagctgctcctggtgtcttttgacgggttcagatggaactacgaccaagatgtcgacacccctaacctggatgccatggctcgagatggcgtgaaggccagatacatgactcctgcattcgttactatgacctctccatgtcacttcactctagtgacggggaaatatattgagaaccacggggtcgtgcacaacatgtactataacacaaccagtaaagtgaagctgccttaccacgcaactctgggtatccaaagatggtgggataacgggtctgtccccatctggattacagcacagagacagggtctgcgcgcaggctcattcttttatccaggaggcaatgtcacctaccagggggtggctgtgactcgaagcaggaaggagggaatcgcccataattataaaaacgagaccgaatggcgagcgaatatagatacggtcatggcatggtttaccgaagaggatctggacctggtgaccctgtacttcggtgaacctgacagtaccggccacagatatgggccagagtcaccagagaggcgcgagatggttaggcaggtggatcgaactgtagggtacctgcgagaatcaatagccaggaaccacttgaccgacaggttaaacctcatcatcacatctgatcacggaatgaccactgtggataagcgggcaggcgatcttgtggaattccacaagttcccgaattttacattccgggacatcgagtttgaactgctggactatggacccaacggcatgttacttcctaaggagggccgcctcgaaaaagtgtatgatgcattgaaagatgcccatcctaagctccacgtgtataaaaaggaggccttcccagaggcatttcattacgcaaataatccaagggttacgccgttgctcatgtactccgatctaggttatgtgatccatggccgcattaacgtccaattcaataatggagaacatgggtttgacaacaaagatatggacatgaagactatctttcgagcagtgggaccctccttccgcgctggattagaggtcgaacccttcgagagcgttcacgtgtatgagcttatgtgccgactgctgggaatagtcccagaggccaacgacggccatctggcaacactcctgcctatgcttcacacggaaagtgccctccctccggacggtcggccaacactgctcccaaaaggtcgctccgcactgccaccatcctcccggccactgctggttatgggtctcctgggcactgtcatcctgctgtctgaagtggcctag

SEQ ID NO: 254047 - DNA, 1377 bp, Artificial Sequence
  derived and/or modified sequence
atgagaggcttggctgtgttgcttacagttgctcttgcaaccctgctggctcctggagccggagctcccgtccagtcccagggctctcagaacaaattgctcctcgtgagcttcgatggctttcgatggaactacgaccaggatgtggacacccccaacttggatgccatggcccgagacggagtgaaagctagatacatgacccccgcattcgtgactatgacatctccgtgtcattttacactggtgactggtaaatatattgaaaaccatggtgtcgtgcataacatgtattacaacactacttctaaggtcaaattaccctatcatgctacattgggtatccagagatggtgggataacgggtccgtgccaatctggatcaccgcccagaggcaaggcctgagagccggatcctttttttatcccggaggcaatgtgacctatcagggggtcgctgtcaccagatccaggaaggagggcattgctcacaactataaaaacgagacagagtggcgggctaacatcgataccgtgatggcttggttcacggaggaggacttagatctggttacactgtactttggtgagccagactctactgggcatcgctatggccctgagtcaccagagagacgagaaatggtccggcaggtcgatcggactgtgggctatttacgggaatctattgcccgtaatcatctgacggaccgcctgaacctgatcatcaccagcgatcatggcatgaccaccgtggacaagcgcgcaggcgatttggttgaatttcacaagttccccaacttcacatttagggacatcgaatttgaactgctggattacggccctaacgggatgttactccctaaagagggcagactggagaaggtgtatgacgccttaaaggatgcccaccccaagcttcacgtctataagaaggaggccttcccagaggcgttccactacgccaataatccacgagtgacaccgttgttgatgtattccgatctgggttacgtcatccacggcaggattaatgtgcagttcaacaacggagagcatgggtttgataacaaagacatggatatgaagaccatattcagggcagtgggaccaagcttcagggctggcctagaggtcgagccttttgaatctgtacacgtatacgagctcatgtgtagactcctggggatcgtcccggaggccaacgatggccacctggcgacactgctgccaatgctccacaccgaatccgcattaccccctgatgggcgaccgacacttctgccaaaagggagatctgccctgcctccatcgtcgagaccgctattggtgatgggactgctggggactgtcattctcctctccgaagtggcctag

SEQ ID NO: 254048 - protein, 525 aa, Artificial Sequence
  derived and/or modified sequence
MGTISLCIGVCAFEGANTSTSFYKLVYTAILSYSIQDLLPEQDMKDLCQKVTLTRHRSWGLDNLHLVKDWRTVNEGKGQKEYCNRLTQCSSTKSKIFQCIECGRNFSWRSILTEHKRIHTGEKPYKCEECGKVFNRCSNLTKHKRIHTGEKPYKCDECGKVFNWWSQLTNHKKIHTGEKPYKCDECDKVFNWWSQLTSHKKIHSGEKPYPCEECGKAFTQFSNLTQHKRIHTGEKPYKCKECCKAFNKFSNLTQHKRIHTGEKPYKCEECGNVFNECSHLTRHRRIHTGEKPYKCEECGKAFTQFASLTRHKRIHTGEKPYQCEECGKTFNRCSHLSSHKRIHTGEKPYKCEECGRTFTQFSNLTQHKRIHTGEKPYKCKECGKAFNKFSSLTQHRRIHTGVKPYKCEECGKVFKQCSHLTSHKRIHTGEKPYKCKECGKAFYQSSILSKHKRIHTEEKPYKCEECGKAFNQFSSLTRHKRIHTGEKRYKCKECGKGFYQSSIHSKYKRIYTGEEPDKCKKCGSL

SEQ ID NO: 254049 - protein, 580 aa, Artificial Sequence
  derived and/or modified sequence
MPGHPESRKTRRILTMLPRLVLNSFPQVILLPNPPKVLRLQGLLAFSDVVIEFSPEEWACLDPAQRNLYRDVMFENYRNLVSLAILSYSIQDLLPEQDMKDLCQKVTLTRHRSWGLDNLHLVKDWRTVNEGKGQKEYCNRLTQCSSTKSKIFQCIECGRNFSWRSILTEHKRIHTGEKPYKCEECGKVFNRCSNLTKHKRIHTGEKPYKCDECGKVFNWWSQLTNHKKIHTGEKPYKCDECDKVFNWWSQLTSHKKIHSGEKPYPCEECGKAFTQFSNLTQHKRIHTGEKPYKCKECCKAFNKFSNLTQHKRIHTGEKPYKCEECGNVFNECSHLTRHRRIHTGEKPYKCEECGKAFTQFASLTRHKRIHTGEKPYQCEECGKTFNRCSHLSSHKRIHTGEKPYKCEECGRTFTQFSNLTQHKRIHTGEKPYKCKECGKAFNKFSSLTQHRRIHTGVKPYKCEECGKVFKQCSHLTSHKRIHTGEKPYKCKECGKAFYQSSILSKHKRIHTEEKPYKCEECGKAFNQFSSLTRHKRIHTGEKRYKCKECGKGFYQSSIHSKYKRIYTGEEPDKCKKCGSL

SEQ ID NO: 254050 - protein, 227 aa, Artificial Sequence
  derived and/or modified sequence
MPGHPESRKTRRILTMLPRLVLNSFPQVILLPNPPKVLRLQGLLAFSDVVIEFSPEEWACLDPAQRNLYRDVMFENYRNLVSLAILSYSIQDLLPEQDMKDLCQKVTLTRHRSWGLDNLHLVKDWRTVNEGKGQKEYCNRLTQCSSTKSKIFQCIECGRNFSWRSILTEHKRIHTGEKPYKCEECGKVFNRCSNLTKHKRIHTGEKPYKCDECGKVFNWWSQLTNHK

SEQ ID NO: 254051 - DNA, 1578 bp, Artificial Sequence
  derived and/or modified sequence
atgggcaccatcagcctgtgcatcggcgtgtgcgccttcgagggcgccaacaccagcaccagcttctacaagctggtgtacaccgccatcctgagctacagcatccaggacctgctgcccgagcaggacatgaaggacctgtgccagaaggtgaccctgaccagacacagaagctggggcctggacaacctgcacctggtgaaggactggagaaccgtgaacgagggcaagggccagaaggagtactgcaacagactgacccagtgcagcagcaccaagagcaagatcttccagtgcatcgagtgcggcagaaacttcagctggagaagcatcctgaccgagcacaagagaatccacaccggcgagaagccctacaagtgcgaggagtgcggcaaggtgttcaacagatgcagcaacctgaccaagcacaagagaatccacaccggcgagaagccctacaagtgcgacgagtgcggcaaggtgttcaactggtggagccagctgaccaaccacaagaagatccacaccggcgagaagccctacaagtgcgacgagtgcgacaaggtgttcaactggtggagccagctgaccagccacaagaagatccacagcggcgagaagccctacccctgcgaggagtgcggcaaggccttcacccagttcagcaacctgacccagcacaagagaatccacaccggcgagaagccctacaagtgcaaggagtgctgcaaggccttcaacaagttcagcaacctgacccagcacaagagaatccacaccggcgagaagccctacaagtgcgaggagtgcggcaacgtgttcaacgagtgcagccacctgaccagacacagaagaatccacaccggcgagaagccctacaagtgcgaggagtgcggcaaggccttcacccagttcgccagcctgaccagacacaagagaatccacaccggcgagaagccctaccagtgcgaggagtgcggcaagaccttcaacagatgcagccacctgagcagccacaagagaatccacaccggcgagaagccctacaagtgcgaggagtgcggcagaaccttcacccagttcagcaacctgacccagcacaagagaatccacaccggcgagaagccctacaagtgcaaggagtgcggcaaggccttcaacaagttcagcagcctgacccagcacagaagaatccacaccggcgtgaagccctacaagtgcgaggagtgcggcaaggtgttcaagcagtgcagccacctgaccagccacaagagaatccacaccggcgagaagccctacaagtgcaaggagtgcggcaaggccttctaccagagcagcatcctgagcaagcacaagagaatccacaccgaggagaagccctacaagtgcgaggagtgcggcaaggccttcaaccagttcagcagcctgaccagacacaagagaatccacaccggcgagaagagatacaagtgcaaggagtgcggcaagggcttctaccagagcagcatccacagcaagtacaagagaatctacaccggcgaggagcccgacaagtgcaagaagtgcggcagcctgtag

SEQ ID NO: 254052 - DNA, 1743 bp, Artificial Sequence
  derived and/or modified sequence
atgcccggccaccccgagagcagaaagaccagaagaatcctgaccatgctgcccagactggtgctgaacagcttcccccaggtgatcctgctgcccaacccccccaaggtgctgagactgcagggcctgctggccttcagcgacgtggtgatcgagttcagccccgaggagtgggcctgcctggaccccgcccagagaaacctgtacagagacgtgatgttcgagaactacagaaacctggtgagcctggccatcctgagctacagcatccaggacctgctgcccgagcaggacatgaaggacctgtgccagaaggtgaccctgaccagacacagaagctggggcctggacaacctgcacctggtgaaggactggagaaccgtgaacgagggcaagggccagaaggagtactgcaacagactgacccagtgcagcagcaccaagagcaagatcttccagtgcatcgagtgcggcagaaacttcagctggagaagcatcctgaccgagcacaagagaatccacaccggcgagaagccctacaagtgcgaggagtgcggcaaggtgttcaacagatgcagcaacctgaccaagcacaagagaatccacaccggcgagaagccctacaagtgcgacgagtgcggcaaggtgttcaactggtggagccagctgaccaaccacaagaagatccacaccggcgagaagccctacaagtgcgacgagtgcgacaaggtgttcaactggtggagccagctgaccagccacaagaagatccacagcggcgagaagccctacccctgcgaggagtgcggcaaggccttcacccagttcagcaacctgacccagcacaagagaatccacaccggcgagaagccctacaagtgcaaggagtgctgcaaggccttcaacaagttcagcaacctgacccagcacaagagaatccacaccggcgagaagccctacaagtgcgaggagtgcggcaacgtgttcaacgagtgcagccacctgaccagacacagaagaatccacaccggcgagaagccctacaagtgcgaggagtgcggcaaggccttcacccagttcgccagcctgaccagacacaagagaatccacaccggcgagaagccctaccagtgcgaggagtgcggcaagaccttcaacagatgcagccacctgagcagccacaagagaatccacaccggcgagaagccctacaagtgcgaggagtgcggcagaaccttcacccagttcagcaacctgacccagcacaagagaatccacaccggcgagaagccctacaagtgcaaggagtgcggcaaggccttcaacaagttcagcagcctgacccagcacagaagaatccacaccggcgtgaagccctacaagtgcgaggagtgcggcaaggtgttcaagcagtgcagccacctgaccagccacaagagaatccacaccggcgagaagccctacaagtgcaaggagtgcggcaaggccttctaccagagcagcatcctgagcaagcacaagagaatccacaccgaggagaagccctacaagtgcgaggagtgcggcaaggccttcaaccagttcagcagcctgaccagacacaagagaatccacaccggcgagaagagatacaagtgcaaggagtgcggcaagggcttctaccagagcagcatccacagcaagtacaagagaatctacaccggcgaggagcccgacaagtgcaagaagtgcggcagcctgtag

SEQ ID NO: 254053 - DNA, 684 bp, Artificial Sequence
  derived and/or modified sequence
atgcccggccaccccgagagcagaaagaccagaagaatcctgaccatgctgcccagactggtgctgaacagcttcccccaggtgatcctgctgcccaacccccccaaggtgctgagactgcagggcctgctggccttcagcgacgtggtgatcgagttcagccccgaggagtgggcctgcctggaccccgcccagagaaacctgtacagagacgtgatgttcgagaactacagaaacctggtgagcctggccatcctgagctacagcatccaggacctgctgcccgagcaggacatgaaggacctgtgccagaaggtgaccctgaccagacacagaagctggggcctggacaacctgcacctggtgaaggactggagaaccgtgaacgagggcaagggccagaaggagtactgcaacagactgacccagtgcagcagcaccaagagcaagatcttccagtgcatcgagtgcggcagaaacttcagctggagaagcatcctgaccgagcacaagagaatccacaccggcgagaagccctacaagtgcgaggagtgcggcaaggtgttcaacagatgcagcaacctgaccaagcacaagagaatccacaccggcgagaagccctacaagtgcgacgagtgcggcaaggtgttcaactggtggagccagctgaccaaccacaagtag

SEQ ID NO: 254054 - DNA, 1578 bp, Artificial Sequence
  derived and/or modified sequence
atgggcaccatatcactttgtattggcgtgtgtgccttcgaaggcgctaatacaagcacctctttttataagctggtatacacggccattctgtcttactccatccaggaccttctgccggaacaggatatgaaggacctatgtcagaaggtaacgttaacccggcatcgctcatggggattggacaacctgcaccttgtgaaggattggcgcaccgtgaacgaagggaaggggcagaaagaatactgcaatcggctcacccagtgttcatccacgaagtccaagattttccaatgtatcgagtgcgggcggaacttctcttggagaagtatcctgacagagcacaaacggatacataccggcgaaaagccttataagtgtgaagaatgtggaaaagtcttcaaccgctgcagtaaccttaccaagcataaaaggatacataccggcgagaagccatataaatgcgatgagtgtggcaaggttttcaactggtggtcacagctcaccaaccataagaagattcacaccggagagaaaccatataagtgtgacgaatgcgacaaagtgtttaattggtggtctcagcttacttcccacaaaaagatacactcaggcgaaaagccatacccatgcgaagagtgtggtaaagcctttacccagttcagcaacctgacccagcataagaggattcacacgggagagaagccctacaaatgtaaagagtgctgtaaagcgtttaacaaattctctaatcttactcagcataagcggatccatacgggagagaagccgtacaagtgcgaagaatgcgggaatgtgttcaacgaatgcagtcatctgactcgccaccgaagaatccataccggcgaaaagccatacaagtgtgaagagtgcggcaaggccttcacacagttcgcttcactgacacgacataagaggatccacaccggtgagaagccttatcagtgcgaagaatgcggcaaaacatttaataggtgttctcacctgagtagccacaaacgcatccacaccggggagaaaccctataagtgtgaagagtgtgggcgcaccttcacccagttttccaacctcacacagcacaagcggattcatactggcgagaagccatacaagtgtaaagagtgcggcaaggcattcaacaaattttcttctctgacgcagcaccggcgcatacatacaggcgtgaaaccctataaatgtgaggagtgtggaaaagtcttcaaacaatgctctcatctcacatcacacaagcgcatccacactggagaaaagccttacaagtgcaaggagtgtggcaaagccttctaccagtcttctatcttaagcaagcacaagcgcattcacaccgaggagaaaccttataagtgcgaggaatgcggaaaggccttcaatcaattttcttcactaacccgacataagaggatccacacgggtgagaaaagatataagtgcaaagagtgcggtaaagggttctatcagtcaagcattcacagcaaatataaacgaatctacaccggggaagaacccgacaagtgcaagaaatgtgggtctctttag

SEQ ID NO: 254055 - DNA, 1743 bp, Artificial Sequence
  derived and/or modified sequence
atgcccgggcatcccgagtccagaaaaactaggagaattctcaccatgctgccgagactggtcctgaactctttccctcaagtgattttgctccctaacccgcccaaggtgctgcggcttcagggactcttggctttctctgacgttgtcatcgaattcagcccagaggagtgggcatgtttagatccagctcagagaaatctgtatagggacgtgatgtttgaaaactatagaaatctggtttccctggctatcttgagttattctattcaagacctgttgccagagcaagatatgaaggacctctgccagaaagtgacactgactaggcaccgatcttggggcctggataacctgcacttggtgaaagattggagaaccgtgaatgaggggaagggacagaaagagtactgcaaccgtctgacccaatgtagctcaacaaagtctaagatctttcagtgcatcgagtgcggacggaacttttcatggaggagtattctgactgagcataagaggatccatactggtgaaaagccttacaaatgcgaggaatgcggaaaggtgttcaatcggtgcagcaacctcactaagcataaacgcattcacactggcgaaaaaccgtacaaatgtgatgagtgtggcaaggtcttcaattggtggagccaacttacaaaccataaaaagatccacaccggagagaaaccgtataagtgcgacgaatgcgacaaggtgtttaattggtggtctcagctgacctcccacaagaagattcatagtggagaaaaaccatacccgtgcgaggaatgtggtaaggcatttacccaattctccaaccttacgcagcacaagcgcatccataccggggagaaaccctataagtgtaaggagtgttgtaaagcattcaacaagttttcgaatctaacccagcacaaacgcatccacacgggggagaagccttataagtgtgaggagtgcggaaacgtcttcaacgaatgctcccatctcacgaggcataggaggatccatactggcgaaaagccgtataagtgtgaagagtgtggaaaggctttcacccagttcgccagcctgacacgccacaagcgcattcatacgggcgaaaagccgtaccagtgcgaggagtgcggcaagaccttcaatagatgcagccatttgtccagccacaaaaggatccacaccggagaaaagccgtataaatgtgaggagtgcggacgaaccttcactcagttcagtaacctgacacaacacaaacgcattcataccggggagaaaccttacaaatgcaaggaatgtggcaaagccttcaataagttctctagcctgacccagcaccgtagaatacacactggtgtaaagccttataaatgcgaggagtgcggaaaagtctttaaacagtgttcacatctaacgtcccataaacgtattcatacgggcgagaaaccctacaaatgtaaggagtgcggaaaagccttttatcaaagtagtatcttaagcaaacataagcgcatccacaccgaagagaagccctacaagtgcgaggagtgcggaaaggcattcaaccagtttagctcactcactaggcacaagcggattcatactggtgaaaagaggtacaaatgtaaggagtgtggaaagggtttttaccaaagctctatccattccaagtataagaggatttacacaggcgaggaaccggacaagtgcaagaagtgcggtagcttgtag

SEQ ID NO: 254056 - DNA, 684 bp, Artificial Sequence
  derived and/or modified sequence
atgccggggcaccccgaatcacggaagactagaaggatactcacaatgcttcctagactggtcttgaactcgtttccacaagtcatcctcctgccgaatccgcccaaagtcctgaggctccagggcctgttagccttctctgacgttgttatagagttctctcccgaggaatgggcttgcctcgaccccgcacagaggaatctctatagggacgtcatgttcgagaactatcggaacctggtaagccttgcgatcttgtcttacagtatacaggacctcctgcccgagcaagacatgaaagacctatgccaaaaagtcactttgacacgtcacagatcatgggggctggacaacctacacttggtcaaagattggcgcactgtgaacgaaggcaaggggcagaaggagtattgtaatcgcctgacacagtgttcctctacaaagtccaaaattttccaatgcattgaatgcggccggaactttagctggaggtcgatccttaccgaacacaaacgcatccacaccggggagaaaccatacaagtgcgaagaatgtggcaaagtgttcaataggtgcagtaacctgacaaaacacaaacgaatccacactggggagaagccctataagtgcgatgagtgtgggaaggtcttcaattggtggtctcagttgactaaccataaatag

SEQ ID NO: 254057 - DNA, 1578 bp, Artificial Sequence
  derived and/or modified sequence
atgggcaccatcagcctgtgcatcggcgtgtgtgcctttgaaggagccaacaccagcaccagcttctacaagctggtgtacacagccatcctgagctacagcatccaggacctgctgcctgagcaggacatgaaggacctgtgccagaaggtgaccctgaccaggcaccgctcctggggcctggacaacctgcacctggtgaaggactggaggacagtgaatgaaggcaagggccagaaggagtactgcaaccggctgacccagtgcagcagcaccaagagcaagatcttccagtgcattgaatgtggcaggaacttctcctggaggagcatcctgacagagcacaagaggatccacactggagagaagccctacaagtgtgaagaatgtgggaaggtgttcaaccgctgcagcaacctgaccaagcacaagaggatccacactggagagaagccctacaagtgtgatgaatgtgggaaggtgttcaactggtggagccagctgaccaaccacaagaagatccacactggagagaagccctacaagtgtgatgaatgtgacaaggtgttcaactggtggagccagctgaccagccacaagaagatccacagcggggagaagccctacccctgtgaagaatgtgggaaggccttcacccagttcagcaacctgacccagcacaagaggatccacactggagagaagccctacaagtgcaaggagtgctgcaaggccttcaacaagttcagcaacctgacccagcacaagaggatccacactggagagaagccctacaagtgtgaagaatgtggaaatgtgttcaatgaatgtagccacctgaccaggcaccggcgcatccacactggagagaagccctacaagtgtgaagaatgtgggaaggccttcacccagtttgccagcctgaccaggcacaagaggatccacactggagagaagccctaccagtgtgaagaatgtgggaagaccttcaaccgctgcagccacctgagcagccacaagaggatccacactggagagaagccctacaagtgtgaagaatgtggccgcaccttcacccagttcagcaacctgacccagcacaagaggatccacactggagagaagccctacaagtgcaaggaatgtgggaaggccttcaacaagttcagcagcctgacccagcaccggcgcatccacactggagtgaagccctacaagtgtgaagaatgtgggaaggtgttcaagcagtgcagccacctgaccagccacaagaggatccacactggagagaagccctacaagtgcaaggaatgtgggaaggccttctaccagagcagcatcctgagcaagcacaagaggatccacacagaggagaagccctacaagtgtgaagaatgtgggaaggccttcaaccagttcagcagcctgaccaggcacaagaggatccacactggagagaagcgctacaagtgcaaggaatgtgggaagggcttctaccagagcagcatccacagcaagtacaagaggatctacaccggggaggagccagacaagtgcaagaagtgtggcagcctgtag

SEQ ID NO: 254058 - DNA, 1743 bp, Artificial Sequence
  derived and/or modified sequence
atgcctggccaccctgagagcaggaagacccggcgcatcctgaccatgctgccccggctggtgctgaacagcttcccccaggtgatcctgctgcccaacccccccaaggtgctgcggctgcagggcctgctggccttcagtgatgtggtgattgagttcagccctgaggagtgggcctgcctggaccctgcccagaggaacctgtacagagatgtgatgtttgagaactacagaaacctggtgtccctggccatcctgagctacagcatccaggacctgctgcctgagcaggacatgaaggacctgtgccagaaggtgaccctgaccaggcaccgctcctggggcctggacaacctgcacctggtgaaggactggaggacagtgaatgaaggcaagggccagaaggagtactgcaaccggctgacccagtgcagcagcaccaagagcaagatcttccagtgcattgaatgtggcaggaacttctcctggaggagcatcctgacagagcacaagaggatccacactggagagaagccctacaagtgtgaggagtgtgggaaggtgttcaaccgctgcagcaacctgaccaagcacaagaggatccacactggagagaagccctacaagtgtgatgaatgtgggaaggtgttcaactggtggagccagctgaccaaccacaagaagatccacactggagagaagccctacaagtgtgatgaatgtgacaaggtgttcaactggtggagccagctgaccagccacaagaagatccacagcggggagaagccctacccctgtgaggagtgtgggaaggccttcacccagttcagcaacctgacccagcacaagaggatccacactggagagaagccctacaagtgcaaggagtgctgcaaggccttcaacaagttcagcaacctgacccagcacaagaggatccacactggagagaagccctacaagtgtgaggagtgtggaaatgtgttcaatgaatgtagccacctgaccaggcaccggcgcatccacactggagagaagccctacaagtgtgaggagtgtgggaaggccttcacccagtttgccagcctgaccaggcacaagaggatccacactggagagaagccctaccagtgtgaggagtgtgggaagaccttcaaccgctgcagccacctgagcagccacaagaggatccacactggagagaagccctacaagtgtgaggagtgtggccgcaccttcacccagttcagcaacctgacccagcacaagaggatccacactggagagaagccctacaagtgcaaggaatgtgggaaggccttcaacaagttcagcagcctgacccagcaccggcgcatccacactggagtgaagccctacaagtgtgaggagtgtgggaaggtgttcaagcagtgcagccacctgaccagccacaagaggatccacactggagagaagccctacaagtgcaaggaatgtgggaaggccttctaccagagcagcatcctgagcaagcacaagaggatccacacagaggagaagccctacaagtgtgaggagtgtgggaaggccttcaaccagttcagcagcctgaccaggcacaagaggatccacactggagagaagcgctacaagtgcaaggaatgtgggaagggcttctaccagagcagcatccacagcaagtacaagaggatctacacaggagaggagccagacaagtgcaagaagtgtggcagcctgtag

SEQ ID NO: 254059 - DNA, 684 bp, Artificial Sequence
  derived and/or modified sequence
atgcctggccaccctgagagcaggaagacccggcgcatcctgaccatgctgccccggctggtgctgaacagcttcccccaggtgatcctgctgcccaacccccccaaggtgctgcggctgcagggcctgctggccttcagtgatgtggtgattgagttcagccctgaggagtgggcctgcctggaccctgcccagaggaacctgtacagagatgtgatgtttgagaactacagaaacctggtgtccctggccatcctgagctacagcatccaggacctgctgcctgagcaggacatgaaggacctgtgccagaaggtgaccctgaccaggcaccgctcctggggcctggacaacctgcacctggtgaaggactggaggacagtgaatgaaggcaagggccagaaggagtactgcaaccggctgacccagtgcagcagcaccaagagcaagatcttccagtgcattgaatgtggcaggaacttctcctggaggagcatcctgacagagcacaagaggatccacactggagagaagccctacaagtgtgaggagtgtgggaaggtgttcaaccgctgcagcaacctgaccaagcacaagaggatccacactggagagaagccctacaagtgtgatgaatgtgggaaggtgttcaactggtggagccagctgaccaaccacaagtag

SEQ ID NO: 254060 - DNA, 1578 bp, Artificial Sequence
  derived and/or modified sequence
atgggcaccatcagcctgtgcatcggcgtgtgcgccttcgagggcgcaaatacctccacaagcttctacaaattagtgtacactgctatactatcatattcaatccaggacctcctgcccgagcaagacatgaaggatctgtgtcagaaggtaacactaacccgccatcggtcctggggactggataacctgcatcttgtaaaggactggagaacggtaaacgagggtaaaggccagaaagagtattgcaatcggctgactcaatgttcaagcaccaagagcaagatatttcagtgtattgagtgtgggcgcaatttttcttggcgctctattctgacagagcataagcggatccacacaggagagaagccatacaaatgtgaagaatgcggcaaggtctttaataggtgttctaacctcacgaagcataagaggattcacacaggagaaaaaccctataagtgtgacgaatgcggcaaagtgtttaactggtggagccagctgaccaatcataagaagatccatacaggggaaaagccctataagtgtgatgaatgtgacaaggtgttcaactggtggtcacagctcacatcacacaagaagatccatagcggcgagaaaccctacccttgcgaagagtgcggtaaagcctttacccaattttcaaacttgactcagcacaagcgcatccacactggcgagaagccctacaagtgcaaagagtgttgcaaagcattcaataagttctctaatctgacgcaacataagagaatacatacaggagagaaaccctataaatgtgaggagtgcgggaatgtgttcaacgagtgttcccacttgacaaggcatagaaggatccatactggcgagaaaccatataagtgcgaggaatgtgggaaggcctttacccagttcgctagtctgacccggcacaagcgcatccatacaggcgagaaaccctatcagtgtgaggagtgcgggaagacatttaaccgctgcagtcatctgtcatcccacaagcggatccatacaggagagaagccctataaatgtgaggagtgtggacgcacgtttactcagtttagcaatttaactcagcacaaaaggatccataccggcgaaaaaccctataagtgcaaggaatgcggcaaggcgttcaacaaattcagtagcctgacacagcaccggcggattcacacgggcgtcaaaccatataagtgcgaggagtgcggaaaggttttcaaacaatgcagccaccttacctcccataagaggattcataccggggaaaagccatataaatgcaaagaatgcgggaaagccttctaccagtcatcaatcctttccaaacataaacggattcataccgaagagaagccatacaagtgtgaagagtgtgggaaagcgtttaatcagttctcatcactcacccgccataagcgcatccatacgggcgagaaacgttacaagtgcaaggaatgtgggaaagggttctatcagagtagtatccattccaagtacaaaagaatctacacaggggaagagcctgacaaatgcaaaaagtgtggcagtctctag

SEQ ID NO: 254061 - DNA, 1743 bp, Artificial Sequence
  derived and/or modified sequence
atgcccggccaccccgagagccggaagacccggcggatcctgaccatgctacccaggttggtgctgaattcttttccacaagtgattttattaccaaaccctcccaaagttcttcgactccaggggctccttgctttctccgacgtcgtgatcgagttctcgcccgaagaatgggcctgccttgaccctgcccagagaaacttataccgggacgtgatgttcgagaactacagaaatttggttagtctggcaattctcagttattctatccaggatctgctgcccgagcaggatatgaaggatctctgtcagaaagttacactaacacggcaccggagctggggcttggataatctgcaccttgtgaaggattggagaaccgtcaacgagggcaagggtcagaaggagtactgtaacaggctcactcaatgctcctcgacaaaatcgaagatcttccagtgtatagaatgtgggcggaatttcagctggagaagcattctgacagagcataaacgcatccacacaggagaaaagccatacaaatgcgaggagtgcggtaaggtgttcaataggtgttcaaatctaactaaacacaagcgaatccacacgggggaaaaaccatataagtgcgatgagtgcggcaaggtattcaactggtggtctcagttgacaaatcacaaaaagatccacaccggggagaagccctacaaatgtgacgaatgcgacaaagtcttcaattggtggtcccagctgacttcacacaagaagattcatagtggggaaaagccctacccctgcgaagagtgtgggaaagcatttacccagttcagcaatctgacacaacacaaaagaatccacacgggcgagaaaccttacaagtgtaaagagtgttgtaaggcgtttaacaagttttcaaacctcacccagcataagcgaattcacacaggcgagaaaccgtacaaatgtgaggagtgtggaaatgtatttaacgagtgttctcacctgacccgtcatcggaggattcacacgggagagaagccttacaaatgcgaggagtgtgggaaagctttcacccagttcgccagcctgacaaggcataagagaattcataccggcgagaaaccgtatcagtgcgaggagtgcggcaaaaccttcaacaggtgttctcacctgagctcccataagcgaatccatactggagagaaaccatacaaatgcgaggaatgtgggcgcactttcacccagttcagcaatctcactcagcataaaagaattcacaccggagagaagccctacaaatgtaaagagtgcggtaaagccttcaataagttttcgtcactgacacaacaccgcaggatccataccggggtgaagccttacaagtgtgaggagtgcggcaaggtgtttaagcagtgttctcacttgacttctcataagcgtatccacacaggagaaaagccttacaagtgcaaagagtgcggtaaagctttttatcagtcctccatacttagcaaacacaaacgaatccatacagaggaaaaaccgtataaatgtgaggaatgtggcaaggcatttaatcagttttcgtctctgacccgccataaacggatccacacgggtgagaaacgctacaaatgcaaagaatgcgggaagggcttctatcagtcctcgatccattctaagtacaagagaatctataccggggaggaacccgataaatgtaaaaagtgcgggtccttatag

SEQ ID NO: 254062 - DNA, 684 bp, Artificial Sequence
  derived and/or modified sequence
atgcccggccaccccgagagccggaagacccggcggatcctgaccatgctgcccagactggtgctaaacagcttcccgcaggttatactactgccgaatccccctaaagtgttaaggctccaggggttgctggcattttctgacgtggtgatagaattttcccctgaagagtgggcatgtttggatccggctcagcgtaatctctaccgcgatgtcatgttcgaaaattaccggaacctggtttcattagccatcctgtcatacagcatacaggatctcctgcctgagcaggatatgaaggatctgtgtcagaaggttacgctgacccgccatagatcttgggggctagacaaccttcatctggtgaaagactggaggaccgtgaatgagggcaaaggccagaaggagtattgtaacaggttgacgcaatgctcttctacgaagtctaagatattccagtgtatcgagtgcggaaggaacttttcctggcgctcaatcctgaccgagcataagaggattcatactggtgaaaagccctataagtgtgaggagtgtggaaaagtgtttaaccgatgctctaatttgaccaagcataagcgaattcacacaggcgagaagccctataaatgtgacgaatgtgggaaggtgtttaattggtggtcccagttgacaaaccacaagtag

SEQ ID NO: 254063 - DNA, 1578 bp, Artificial Sequence
  derived and/or modified sequence
atgggcaccattagcctttgtattggagtgtgcgcgttcgaaggggcaaacacttcaacctccttctataaactcgtctacaccgcaattctcagttattctattcaggatttactgcctgaacaggatatgaaggatctctgtcaaaaagtcaccctgacgagacataggagttggggtcttgacaacttgcatttagtgaaggattggagaaccgtcaatgaaggaaaaggccagaaggaatattgtaatcgcctaacacagtgttcctctaccaaatcaaaaatctttcagtgtattgagtgcggcagaaacttctcatggaggtcaattctgaccgaacataaaagaattcacaccggcgaaaagccctacaaatgtgaggaatgcggcaaggtgtttaatcgctgctccaatctgacaaagcacaagcgaatccataccggagaaaagccgtataaatgcgacgaatgcgggaaagtgttcaactggtggagccaattgaccaaccacaagaagatacacacaggtgagaagccttacaaatgcgatgagtgtgataaagtattcaactggtggtctcagctgacaagccataagaaaatccacagtggagaaaaaccatacccttgtgaggaatgcggtaaggcatttacgcagttttctaatttgacacagcacaagcgcatccacaccggagagaagccttataagtgcaaagaatgttgtaaagcctttaacaagttctctaatctcacacagcataagcggatccatactggtgagaaaccctataagtgcgaggagtgtgggaacgtgtttaacgaatgcagccacctgacacggcacagacgcatccacacgggtgaaaaaccctataaatgcgaagagtgcggcaaggcttttacccaatttgccagccttaccagacacaaacggatccacaccggggaaaagccctaccagtgtgaggagtgcgggaaaacctttaatagatgttcccacctctctagtcataagcggattcataccggggaaaaaccttataaatgtgaagagtgcgggagaaccttcacacaattcagcaatctgacccaacataagcggatacacaccggagagaaaccatacaagtgtaaggagtgcggcaaggcttttaacaaattttcgtctctcactcagcatagacggatccatacaggggtcaagccctataagtgtgaggaatgcggcaaggtctttaagcagtgcagtcatctgactagccacaagagaattcatacaggcgagaagccttacaagtgcaaagaatgcggaaaggcattctatcagtccagcatcctctcaaagcacaagcgaatacatactgaggaaaaaccatacaagtgtgaagaatgcggaaaggcattcaaccaattttcaagcctcacgcggcacaaaaggattcacactggcgagaaaaggtataaatgcaaagaatgcgggaaaggcttctaccagagctctattcactctaaatataagcggatctacaccggagaggagccagataaatgcaagaagtgtgggagcctgtag

SEQ ID NO: 254064 - DNA, 1743 bp, Artificial Sequence
  derived and/or modified sequence
atgccaggccaccccgaatctcgcaaaacccgacgcattctcacaatgctaccacggttagtccttaattcattcccacaggtgatcttattgccaaatccacctaaagttctgcggctccagggactcctcgccttttcagatgtggtgatcgagttctctcccgaagagtgggcatgtttagaccctgcccaacgcaacttgtaccgcgatgtgatgtttgaaaactatagaaatttggtgagccttgcaatcctgtcctactctatccaggatttgctgcccgaacaagatatgaaagacctgtgtcaaaaggtgaccctgacaaggcacagatcatggggattagacaacctccacttggttaaggattggcggaccgtcaatgagggcaagggacagaaggaatactgcaataggctcacgcagtgttcctccaccaaaagcaaaatattccagtgtattgagtgcggcagaaacttttcttggagatctatattgactgagcacaaacgtatccacaccggggagaagccgtataaatgtgaggagtgcggcaaagtgttcaacaggtgcagcaacttaacaaagcacaaaagaatccacaccggggagaagccttacaaatgtgatgagtgcggtaaggtctttaattggtggtctcagctgaccaaccacaaaaagatacacacaggagaaaagccatacaagtgtgacgagtgtgacaaggtcttcaattggtggtcccaactcacatctcacaagaaaattcactccggcgaaaagccctatccgtgtgaggaatgcgggaaagccttcacccagttttctaatctgacccaacacaaacggatccataccggcgagaaaccttataaatgcaaggaatgttgcaaagcctttaacaaattcagcaatctgacgcagcacaaacggatccacaccggtgagaagccctacaaatgcgaggaatgtggcaatgtgtttaacgaatgctcacacctgaccaggcacagacggatccacaccggcgaaaagccctacaaatgcgaagaatgcggtaaggcatttacgcagttcgcctctctcacacgccacaagaggatacacacaggtgaaaaaccatatcagtgcgaggagtgtgggaagactttcaacagatgcagccatctgtcttctcataaacgtatccataccggcgagaagccatataagtgcgaagagtgcggcaggacctttactcagttttccaatctgactcagcacaaacgaatccacactggagaaaagccctacaagtgcaaggagtgtggaaaggcattcaataaattttcctccttgacccagcacaggcggattcatacgggagtgaaaccgtacaaatgcgaggagtgtggcaaagtattcaagcagtgttcccacctcaccagccacaaacgcatccatacaggcgaaaaaccttataagtgcaaagaatgcggaaaagccttttatcagtcatctatcctttccaaacacaaaaggattcacaccgaagagaaaccatacaaatgcgaagagtgtggaaaggccttcaaccagttctctagcctcacacggcataagagaatccacacaggggagaagagatacaagtgcaaggagtgcggaaagggtttctatcagagctcaatccatagtaaatacaagcgtatctacaccggtgaggagccagataaatgcaaaaagtgcggctccctctag

SEQ ID NO: 254065 - DNA, 684 bp, Artificial Sequence
  derived and/or modified sequence
atgcccggacaccctgagtcccggaagacacggaggattttaaccatgctccccaggttggtgctgaacagctttccgcaagtcatcctgctgcccaatcccccaaaagtgcttaggctgcagggactcctggcctttagcgatgtggtaatagagttctcgccagaggagtgggcatgtctggacccagcacagaggaacttatacagagacgtcatgttcgagaactaccgcaacctggtgagtctcgccattctgtcttattccatccaagacctcctacccgaacaggacatgaaggatctgtgtcagaaggtgacattgacccgccaccgcagctgggggcttgataacttacacttggtgaaggattggagaacagtcaacgagggcaagggccagaaagaatactgtaaccgcctcacacagtgctctagcactaagagtaagatcttccaatgcatcgagtgtggacgaaatttctcctggcggagcattttgacagaacataagaggatccatacaggcgagaaaccatataaatgcgaggagtgtggaaaggttttcaatcgatgctctaacctgacgaaacacaagaggatacatactggagaaaaaccctacaagtgtgatgagtgtggcaaggtgttcaattggtggtcccaattgaccaaccacaagtag

SEQ ID NO: 254066 - DNA, 2525 bp, Artificial Sequence
  derived and/or modified sequence
gatctggcggggcctttgtcttgtgctccagctggagctttggtcccgtattctcggctatttatccccagctgcgggaggccctggtgactctgctgctgcagtgtctggtttccctgtgacctgcaggtactgggagttacatagctaagatgccaggacaccccgaaagccggaaaacgggactactggcattcagtgatgtggtcatagaattctctccagaggagtgggcatgcctggaccctgcccagcgaaatttgtatagggatgtgatgttcgagaactacagaaacctggtctccctgggacttccaggactatgttaaaatagaagcattgataatgggcacaatatcactttgcattggtgtctgtgcatttgaaggagcaaacacctctaccagtttttataaactggtttatacagctattttatcttattccattcaagaccttttgccagagcaggatatgaaagatttatgccaaaaagtgacactgacaagacatagaagctggggccttgacaatttgcacttagtgaaagactggagaactgtgaatgaaggtaaggggcagaaagaatattgcaatagacttactcaatgttcatcaactaaaagcaaaatctttcaatgtattgaatgtggcagaaattttagctggaggtcaatccttactgaacataagagaattcatactggagagaagccatacaaatgtgaagaatgtggcaaagttttcaatcgatgttcaaacctaacaaaacataaaagaattcatactggagagaaaccctacaaatgtgacgaatgtggcaaagtttttaattggtggtcacaactaactaaccataagaaaattcatactggagagaaaccctacaaatgtgatgaatgtgacaaagtttttaattggtggtcacaactaactagccataagaaaattcatagtggagagaaaccatacccatgtgaagaatgtggcaaagcctttacccagttctcaaaccttacacaacataagagaattcatactggagagaaaccctacaaatgcaaagaatgttgcaaagcctttaacaagttctcaaaccttactcaacataagagaattcatactggagagaaaccttacaagtgtgaagaatgtggcaacgtttttaatgagtgctcacacctaactagacataggagaattcatactggagagaaaccctacaaatgtgaagaatgtggcaaagcctttacacagtttgcaagccttactcgtcataaaagaattcatactggagaaaaaccctaccaatgtgaagaatgtggcaaaacttttaatcggtgttcacacctaagtagccataagagaattcatactggagagaaaccctacaaatgtgaagaatgtggcagaacctttactcaattctcaaacctcactcagcataaaagaattcatactggagagaaaccctacaaatgcaaagaatgtggcaaagcgtttaacaagttctcaagccttactcaacataggagaattcatactggagtgaaaccctacaaatgtgaagaatgtgggaaagtttttaaacagtgctctcacctaactagccataagagaattcatactggagagaaaccctacaaatgtaaagaatgtggcaaagctttttaccaatcctcaatccttagtaagcataagagaattcatactgaagagaaaccctacaaatgtgaagaatgtggcaaagcctttaaccagttctcaagccttactcgtcataaaagaattcatactggagagaaacgctacaaatgtaaagaatgtggaaaaggtttttaccaatcctcaatccatagtaagtataagagaatttatactggagaggaacctgacaaatgtaaaaaatgtggcagtctttaaaaactgcttcattatacatggcttcactaatttcatactgaataaaagtggtatgagcataatgactgtttaaggatgtttcacaaaatgtaagcttcagagtgcacaacactatactgaatgaaatttataaatataaaagattacaatatctttatttcaaagatcttcctgtaaacagaatctgtactagaggaaaaacccttaaacaattattcagactttattcaactttagaggattttacgggggcaaaaaacctcctacaaatgtggaaaaacattttttcaagatatatgccttagaaaacaccagagtttatagtatagtagaatatattttacagatacagtgaatacaaacaaatgtccaaaattaagtctaaataaaacattacataatttactgtagaaagtactaaggcactaacagtttcagatgttactttaaagcagtgttgattgtcgagaataattcaaagttaaaatagataatttagttgtatgtaaatttaaatgaatcaagagatgatgtctttttgaagcacagttacattcatgttatacttttttgcattaaaagtttttatatttttgattata

SEQ ID NO: 254067 - DNA, 1895 bp, Artificial Sequence
  derived and/or modified sequence
gatctggcggggcctttgtcttgtgctccagctggagctttggtcccgtattctcggctatttatccccagctgcgggaggccctggtgactctgctgctgcagtgtctggtttccctgtgacctgcaggtactgggagttacatagctaagatgccaggacaccccgaaagccggaaaacgagacgcattctcactatgttgcccaggctggtcttgaactccttccctcaagtgattcttctgcctaatcctcccaaagttcttagattacagggactactggcattcagtgatgtggtcatagaattctctccagaggagtgggcatgcctggaccctgcccagcgaaatttgtatagggatgtgatgttcgagaactacagaaacctggtctccctggctattttatcttattccattcaagaccttttgccagagcaggatatgaaagatttatgccaaaaagtgacactgacaagacatagaagctggggccttgacaatttgcacttagtgaaagactggagaactgtgaatgaaggtaaggggcagaaagaatattgcaatagacttactcaatgttcatcaactaaaagcaaaatctttcaatgtattgaatgtggcagaaattttagctggaggtcaatccttactgaacataagagaattcatactggagagaagccatacaaatgtgaagaatgtggcaaagttttcaatcgatgttcaaacctaacaaaacataaaagaattcatactggagagaaaccctacaaatgtgacgaatgtggcaaagtttttaattggtggtcacaactaactaaccataagaaaattcatactggagagaaaccctacaaatgtgatgaatgtgacaaagtttttaattggtggtcacaactaactagccataagaaaattcatagtggagagaaaccatacccatgtgaagaatgtggcaaagcctttacccagttctcaaaccttacacaacataagagaattcatactggagagaaaccctacaaatgcaaagaatgttgcaaagcctttaacaagttctcaaaccttactcaacataagagaattcatactggagagaaaccttacaagtgtgaagaatgtggcaacgtttttaatgagtgctcacacctaactagacataggagaattcatactggagagaaaccctacaaatgtgaagaatgtggcaaagcctttacacagtttgcaagccttactcgtcataaaagaattcatactggagaaaaaccctaccaatgtgaagaatgtggcaaaacttttaatcggtgttcacacctaagtagccataagagaattcatactggagagaaaccctacaaatgtgaagaatgtggcagaacctttactcaattctcaaacctcactcagcataaaagaattcatactggagagaaaccctacaaatgcaaagaatgtggcaaagcgtttaacaagttctcaagccttactcaacataggagaattcatactggagtgaaaccctacaaatgtgaagaatgtgggaaagtttttaaacagtgctctcacctaactagccataagagaattcatactggagagaaaccctacaaatgtaaagaatgtggcaaagctttttaccaatcctcaatccttagtaagcataagagaattcatactgaagagaaaccctacaaatgtgaagaatgtggcaaagcctttaaccagttctcaagccttactcgtcataaaagaattcatactggagagaaacgctacaaatgtaaagaatgtggaaaaggtttttaccaatcctcaatccatagtaagtataagagaatttatactggagaggaacctgacaaatgtaaaaaatgtggcagtctttaa

SEQ ID NO: 254068 - DNA, 798 bp, Artificial Sequence
  derived and/or modified sequence
ctttggtcccgtattctcggctatttatccccagctgcgggaggccctggtgactctgctgctgcagtgtctggtttccctgtgacctgcaggtactgggagttacatagctaagatgccaggacaccccgaaagccggaaaacgagacgcattctcactatgttgcccaggctggtcttgaactccttccctcaagtgattcttctgcctaatcctcccaaagttcttagattacagggactactggcattcagtgatgtggtcatagaattctctccagaggagtgggcatgcctggaccctgcccagcgaaatttgtatagggatgtgatgttcgagaactacagaaacctggtctccctggctattttatcttattccattcaagaccttttgccagagcaggatatgaaagatttatgccaaaaagtgacactgacaagacatagaagctggggccttgacaatttgcacttagtgaaagactggagaactgtgaatgaaggtaaggggcagaaagaatattgcaatagacttactcaatgttcatcaactaaaagcaaaatctttcaatgtattgaatgtggcagaaattttagctggaggtcaatccttactgaacataagagaattcatactggagagaagccatacaaatgtgaagaatgtggcaaagttttcaatcgatgttcaaacctaacaaaacataaaagaattcatactggagagaaaccctacaaatgtgacgaatgtggcaaagtttttaattggtggtcacaactaactaaccataagaa

SEQ ID NO: 254069 - DNA, 909 bp, Artificial Sequence
  derived and/or modified sequence
atggagagacacatggtgagaggccagctgtacaagcacttcgacctggagagaaagaacgccaagcaggccgaggccagactggaccagagactgcagagactgaaggtgatctgcctgtaccacgtgaagctgctgacctgggagcagagacagctgcagaaggagctgcagagactgcagcaggccgagaccatgaagaagaagttcagcagctacctgggcaacggcttccagaagagacccgaggacgtgctggtgttcagcccccagggcagacagaagcacagagccccccaggccaagaagatgagagccctggccaccagaatggcccaggacacctgcaagagcaagagccaggtgccccccagccacgacgccggcctgaaggaccccatgaagagcaagaagcagcccctgagccagaacaacagaaccgcctgcttcatcaaggagcagccccaggcccaggagaaggacagcgtgaaccccagcaaggacgtggaccccagcaagggcatcagcgtgccctgccagaaccaggaggtgagcaccaacaccatcgagcagggccccagcagcagccccgccagcgacagcggcatggcctgcgccgacgagaccagaagcaaggacgtggccctgaagcccgacggcaacaccggcaagcagatcccccccaagcacatggagtgcgccggcagcttcgagggcgagttcaccaagcccaccttcctggagctgctgagcaaggccagaaacgcccactacctgagacacagagtgccccccgagagcgagagactgctgagcatcggcgagatcttcggccacggcgagagcagcagcagcagagccggcaaggagtgcgagaacagagtgcccagcaagttcctgcccctgtag

SEQ ID NO: 254070 - DNA, 909 bp, Artificial Sequence
  derived and/or modified sequence
atggaaagacatatggtgcgcgggcagctctacaaacattttgatctggaaaggaaaaacgccaaacaggccgaggcacgattagaccagagactccagcggctgaaagtgatctgcctctaccatgtgaaactgctgacatgggaacagcgccaactccagaaggagctccagagactacagcaagcagagacaatgaagaagaaattttccagctatctcgggaatggctttcaaaagagaccagaggacgttcttgtgttctcaccgcaaggccgccagaagcacagagccccacaggctaagaaaatgcgggccctggcaacaagaatggcacaggacacatgcaaaagcaaatcccaggtgccccctagtcacgacgcgggtttgaaggacccaatgaagagtaaaaaacaaccgttgagccagaacaatcggacggcctgcttcatcaaggagcagcctcaagcgcaggaaaaggacagtgtgaacccctcgaaggacgtggacccatccaaaggaattagcgtgccgtgccagaaccaggaagtatcaaccaatacaatcgaacagggtcccagtagttctccggcctctgattccgggatggcctgcgccgacgagacccggtcgaaggacgtcgcgcttaagcccgacggaaacacaggtaagcaaattcctcctaaacacatggagtgtgcggggagctttgaaggagaattcacaaagcccacctttctggaacttctgtccaaggcccgcaatgcacattatttacgccaccgcgtacctccagaaagtgaacgcctcctttctatcggggaaatctttggacacggtgagtcctcttctagccgagccggaaaggaatgcgaaaatagggtgccgtctaagttcttaccgctgtag

SEQ ID NO: 254071 - DNA, 909 bp, Artificial Sequence
  derived and/or modified sequence
atggagcggcacatggtgcggggccagctgtacaagcactttgacctggagaggaagaatgccaagcaggccgaggcccggctggaccagaggctgcagaggctgaaggtgatctgcctgtaccacgtgaagctgctgacctgggagcagaggcagctgcagaaggagctgcagaggctgcagcaggccgagaccatgaagaagaagttcagcagctacctgggcaatggcttccagaagaggccagaagatgtgctggtgttcagcccccagggccggcagaagcaccgggccccccaggccaagaagatgagggccctggccaccaggatggcccaggacacctgcaagagcaagagccaggtgccccccagccatgatgctggcctgaaggaccccatgaagagcaagaagcagcccctgagccagaacaacagaacagcctgcttcatcaaggagcagccccaggcccaggagaaggacagcgtgaaccccagcaaggatgtggaccccagcaagggcatctctgtgccctgccagaaccaggaggtgtccaccaacaccatcgagcagggccccagcagcagccctgccagtgacagcggcatggcctgtgctgatgagaccaggagcaaggatgtggccctgaagccagatggcaacacaggcaagcagatcccccccaagcacatggagtgtgccggcagctttgaaggagagttcaccaagcccaccttcctggagctgctgagcaaggccagaaatgcccactacctgcggcaccgggtgcccccagagagcgagcggctgctgagcattggagagatctttggacatggagagagcagcagcagcagagctgggaaggaatgtgagaacagagtgcccagcaagttcctgcccctgtag

SEQ ID NO: 254072 - DNA, 909 bp, Artificial Sequence
  derived and/or modified sequence
atggagcggcacatggtgcggggccagctgtacaagcacttcgacctggagcgaaaaaatgctaaacaggcggaggctaggttggatcagaggcttcagcggctgaaggtaatatgtctttatcacgtaaagctcttgacttgggagcagagacagttgcagaaggaacttcagagactccagcaggccgaaacaatgaaaaagaaattctcatcttatctaggaaatggctttcagaagaggcccgaggacgttttagtcttctcacctcaggggcggcagaaacatcgcgcgcctcaggccaaaaagatgagggccctggctactcgtatggctcaggatacatgcaaatccaagtctcaggtcccccctagccacgatgcaggtttgaaagatccaatgaagagcaagaaacaacccttgagccagaacaaccgtactgcctgctttattaaagaacaaccccaagcccaggaaaaagacagcgtgaatccatccaaggacgtcgacccctccaaagggatatccgttccgtgtcagaatcaagaagtatcgacaaataccatagagcaagggccatcatcatcacccgcatcagattccgggatggcctgcgccgacgaaacgaggtctaaagacgtcgcccttaagccggacggaaataccggtaagcagattccgccgaagcacatggagtgcgccggcagtttcgagggcgagtttacaaaacccacttttcttgaactgttgagtaaagcacgaaacgctcattacctgagacatcgggtgccgcctgaatccgaaaggttgttgagtatcggtgagatcttcggccatggagaaagctcttcgagcagagcaggaaaagagtgtgaaaacagagtaccttcaaagttcctgccactgtag

SEQ ID NO: 254073 - DNA, 909 bp, Artificial Sequence
  derived and/or modified sequence
atggaacgtcacatggtgcgagggcagttatataagcactttgaccttgagagaaaaaatgctaagcaggctgaggcccgacttgatcagagactgcagaggcttaaagttatatgcctgtatcacgtcaagctgctaacctgggagcagcgccagttacagaaggagctgcagagactgcaacaggccgagaccatgaagaagaaattctctagttatctgggaaacgggtttcagaagcggcctgaagacgtcttggtcttctcaccacaggggaggcaaaaacaccgagcacctcaggctaaaaagatgagggctctggccacacgaatggcccaggacacttgtaaaagcaaatcacaggtcccaccaagccacgacgccggactaaaggacccaatgaagtcgaaaaaacaaccactttcgcagaacaaccgcacagcatgcttcatcaaagagcagcctcaggcccaggagaaagatagcgtcaacccctctaaagatgtggacccttcaaagggaatatcagtgccgtgtcagaatcaggaggtgtccacaaatacaattgagcaagggcctagcagcagccccgcatccgactccggcatggcttgcgccgatgagacaaggtccaaggacgtggctcttaagcctgatggaaatacaggtaaacaaattcctccaaagcatatggaatgtgctggctccttcgaaggcgagttcaccaaacccaccttcctggaacttttatcaaaagcacggaacgctcattaccttaggcaccgagtccccccagagtcagagcgactcttaagcatcggtgagatctttggacacggtgaatcttcaagtagccgagccggtaaagagtgcgagaatcgagtcccgagcaagttcctccctctttag

SEQ ID NO: 254074 - protein, 134 aa, Artificial Sequence
  derived and/or modified sequence
MADIEQYYMKPPGSCFWVAVLDGNVVGIVAARAHEEDNTVELLRMSVDSRFRGKGIAKALGRKVLEFAVVHNYSAVVLGTTAVKVAAHKLYESLGFRHMGASDHYVLPGMTLSLAERLFFQVRYHRYRLQLREE

SEQ ID NO: 254075 - protein, 302 aa, Artificial Sequence
  derived and/or modified sequence
MHCGPPDMVCETKIVAAEDHEALPGAKKDALLAAAGAMWPPLPAAPGPAAAPPAPPPAPVAQPHGGAGGAGPPGGRGVCIREFRAAEQEAARRIFYDGIMERIPNTAFRGLRQHPRAQLLYALLAALCFAVSRSLLLTCLVPAALLGLRYYYSRKVIRAYLECALHTDMADIEQYYMKPPGSCFWVAVLDGNVVGIVAARAHEEDNTVELLRMSVDSRFRGKGIAKALGRKVLEFAVVHNYSAVVLGTTAVKVAAHKLYESLGFRHMGASDHYVLPGMTLSLAERLFFQVRYHRYRLQLREE

SEQ ID NO: 254076 - DNA, 405 bp, Artificial Sequence
  derived and/or modified sequence
atggcggatattgagcagtattatatgaaacctccggggtcgtgcttttgggtcgccgtgctggacggaaacgtggtaggaatagttgcagccagggcccacgaagaagacaataccgtcgaactgctgagaatgagcgtggatagccggttccggggaaagggcatcgcaaaggctttaggaaggaaggtgctcgagtttgcggtcgtccacaactatagcgctgtggttttggggactaccgcggttaaagttgccgcacataaactgtacgagtcccttggcttccgccacatgggggcctctgaccattacgtcttgcccgggatgactctgtcactcgcagaacgtctgttctttcaggttaggtaccacagatataggctgcagctcagagaggagtag

SEQ ID NO: 254077 - DNA, 909 bp, Artificial Sequence
  derived and/or modified sequence
atgcattgtggtcccccagatatggtctgcgaaaccaaaatcgtggcagccgaagaccacgaagcgttacccggcgccaaaaaagacgccctgctagcagccgccggagccatgtggccacccctgcccgccgcaccagggcctgcagccgccccgcccgcacctccacccgcacccgtggcacagcctcacggcggagccggtggcgcggggcctccaggcgggaggggtgtgtgcatacgcgaatttcgcgcagccgaacaggaggcagcccgccggatattttatgacggaattatggaaagaatcccaaatacagcctttcgggggctgcgccagcacccccgagctcagctgctgtatgcattgctggccgcgttgtgttttgctgttagtagatcacttctgctgacgtgtctggttccagccgctcttctgggtctgcgatattactactctaggaaggttattcgggcgtatctggagtgcgcactacacacggacatggccgatatagagcagtattacatgaaacccccggggtcctgcttctgggtggctgtcctcgatggtaacgtcgtgggcatagtggccgcgagagctcatgaggaggacaatacggtcgagcttctgaggatgagcgtcgatagcagatttcgcggtaaggggattgccaaagctcttggccgcaaagtgctggaatttgccgtggtacataactattctgccgtcgtgctggggacaactgccgtgaaagtcgcagcccataaactctatgagtccctcggcttccggcacatgggcgctagcgatcactacgttctccccggaatgactctgtccctcgctgaacgtcttttctttcaggttcgctatcaccgttaccggttgcaacttagggaagaatag

SEQ ID NO: 254078 - DNA, 405 bp, Artificial Sequence
  derived and/or modified sequence
atggctgacatcgagcagtactacatgaagcccccaggcagctgcttctgggtggccgtgctggatggaaatgtggtgggcatcgtggccgcccgggcccacgaggaggacaacacagtggagctgctgaggatgtctgtggacagccgcttccggggcaagggcatcgccaaggccctgggcaggaaggtgctggagtttgctgtggtgcacaactacagcgctgtggtgctgggcaccacagctgtgaaggtggccgcccacaagctgtatgagagcctgggcttccgccacatgggcgccagtgaccactacgtgctgcccggcatgaccctgagcctggccgagcggctcttcttccaggtgcgctaccaccgctaccgcctgcagctgcgggaggagtag

SEQ ID NO: 254079 - DNA, 909 bp, Artificial Sequence
  derived and/or modified sequence
atgcactgcggccccccagacatggtgtgtgagaccaagatcgtggccgctgaggaccacgaggccctgcccggggccaagaaggatgccctgctggccgctgctggggccatgtggccacccctgcctgctgcccctggccctgctgctgcccccccagcccctcctccagcccctgtggcccagccccacggcggggccggcggggccggccccccaggcggccggggcgtgtgcatccgggagttccgggctgctgagcaggaggccgcccggcgcatcttctatgatggcatcatggagcgcatccccaacacagccttccggggcctgcggcagcacccccgggcccagctgctgtatgccctgctggccgccctgtgctttgctgtgagccgcagcctgctgctgacctgcctggtgcctgctgccctgctgggcctgcgctactactacagcaggaaggtgatccgggcctacctggagtgtgccctgcacacagacatggctgacatcgagcagtactacatgaagcccccaggcagctgcttctgggtggccgtgctggatggaaatgtggtgggcatcgtggccgcccgggcccacgaggaggacaacacagtggagctgctgaggatgtctgtggacagccgcttccggggcaagggcatcgccaaggccctgggcaggaaggtgctggagtttgctgtggtgcacaactacagcgctgtggtgctgggcaccacagctgtgaaggtggccgcccacaagctgtatgagagcctgggcttccgccacatgggcgccagtgaccactacgtgctgcccggcatgaccctgagcctggccgagcggctcttcttccaggtgcgctaccaccgctaccgcctgcagctgcgggaggagtag

SEQ ID NO: 254080 - DNA, 5571 bp, Artificial Sequence
  derived and/or modified sequence
gagcgcatccctaacacggccttccgcggcctgcggcagcacccgcgcgcgcagctgctctacgccctgctggcggcgctgtgcttcgccgtgagccgctcgctgctgctgacgtgcctggtgccggccgcgctgctgggcctgcgctactactacagccgcaaggtgatccgcgcctacctggagtgcgcgctgcacacggacatggcggacatcgagcagtactacatgaagccgcccggctcctgcttctgggtggccgtgctggatggcaacgtggtgggcattgtggctgcacgggcccacgaggaggacaacacggtggagctgctgcggatgtctgtggactcacgtttccgaggcaagggcatcgccaaggcgctgggccggaaggtgctggagttcgccgtggtgcacaactactccgcggtggtgctgggcacgacggccgtcaaggtggccgcccacaagctctacgagtcgctgggcttcagacacatgggcgccagtgaccactacgtgctgccgggcatgaccctctcgctggctgagcgcctcttcttccaggtccgctaccaccgctaccgcctgcagctgcgcgaggagtgaccgccgccgctcgcccgcccgcccccccggccgccctgtccgcctttgcccgcctgcccgccgcccggcgcggcctgctttcagacgctcaattggcgtttgtgttgggtttccccttttcaacatcctgcggttgtctggctggttccggggggtgcggggctgttgttcttcggcgacactttggtgggggtgggttgtttgtcgccatagcccctcgcccttccccacctgcctgggcggcttgccacctgaagagtggcatcttggaccaccgcggctgtccatgacgctgccctgcccgccgccactggggaaggcccagccttgctcaccaagcacagaacctctgcagcagatcccggggccaggctccggccccgcctgcggccccagcgccactgcctgtggaggccccagctggccacggcgctgctttgctccgcgcatgccgagggtgtggcccggctgagcatgccgcatgcacacagccccgccctgccgccctgcccagactggacccggagacccgggctggtgagcgcccctgtccccagcccccagctggctgtgggagggcctgcccctgcccccacctcctggagggcctggtctgccccgcgccgcccggctctgtccacacctgctttgctctgacgccctccatttctctggctccggcccctcccctgcctgggctgtgctgactggtgtcatcacccaggtgactcccatggcgtccgtggcacagccagggtgggggtccatgggacccctctccccagtgcccactggatcgtgctggcctctcccagatgtccccggggacctcctgcctctggctgacggtccaccctgtgaatcttatcagcccaggctgctgccaacagcgcccagcccacagcttctcccagcctgaaaccaacacattttctaataagttatttagacagaatagcactctgcatgactttaattcttgggacaaaacggtagtttgtaccctaagacacagtttctggcccagtgtgatgggggtgggtggccgggtgggtggagcgttttgctgttggaaacctggagggaaaccctgattggatgtcatttcctgccatggagcacgcctcccagccctggcctgcagtgtgggcagggtggggggcaagggagtccgcagcctccgggaggaggggcagggcgctgccttgggctgggtgggaagaggggtggccgcctcggcttccgctggccatgctcctggtctctccttcctgaggtcacaggcaggggctgccctggacggggggcggggggggtggcctggaaggggagacagaggtggagggtggcacaggctgcacattcagcttagaagtggacctggctttggtggcaggagaagaataaacacttgcccagacccctttgtgtgggggaattggggaggggtcgtggcaggcagggtgggccacggaactgggtcccaggcatcaaggccacgtgcagggccatggagggatgcttctcacgaggcgcttcagaagcgagcgaagggacagagaagccctgcgtccaagggccttttgtcctgttagcaattgaggtgtgcagagcactgtacagaccccactcccctgtacattcctccctggaggtgcccggtccccgcttggggatgggagttttgtagactgtacagaaatcggcaccctattttcttgcagctcagattttgttaatctggaatatacagacagacgtaaagtgttttagcaaaatggaaacaaacagttgtgcctttttcctcttttggtttggtttgggtttggcctggggctggtcccagttggtgcggggcatgctgggggcaggaggggcagggcgggccaggtggagtcaggtcttgggggtgtcatgtcggggtgctgccagcgtcccttggtcctgtgcctttggagcctcgggctcctggggtgcagggtgcttgggggtggctgttggagcccaccgacgccagggcagggcctggaggcccagggactgccagtgtctccttgatattgatcctagcagatccccctcctgggggttctgagagtcctgggcagtgtggccttctctcattctggtggcatctgcgcccgtgagtgacctcttccttggctgcactgccctgtgggtggtgagacgcttggccttttttgttgctgccaggacttggtagagatggcaggaagggtgtgcggggtggttgtgtgcagaaccctgccgcccctgaggtgagcagaggcactggtgtgcctgccaggctggggcggagctgcccggaacccttgccaggccaatgtgtagcttggtggcgcccttgaaggccactggggggtaggtgtgtcctcccccggggctggaggccgggtgcctggtgggtgggcctgacctggcccacctcatccctccagcctgggatctcactgctctgcacatgtgcactgacgtgaattttatacgtttgtagaaactctgatgtaacttcttctacctctgaagcgccctcctgggccctgctgtcacgtggctggtgcggcttccccgagtgctggccccctgcccgctccccatgggcacccaccactcaaactctgcgtggtgaggcccggggaaagccaggccgggccctagcactgctcaggggcctggggctcctgggatttctgtgtgtttggaagcctctgtttttggagtggggggcgtggaaggcgggaggggctgacagtgcctggggccagagctgggcgaaggaggacatcctcactggacgagcactgcaggcctgacgagaggctccgggcagctgagggctgaagcgcctcgggatgccccacactgcccagagccacgggtcttgctgtgctgggggtggggtggccccaggcagctgccactgcccaggtgtgagtcgctgcagacctggtccctgagggtgggaggcctgcttgtgctgaagctgccatgtggtctggcccccagaagggctcctgagcgtagggagttgagccccgcagccgtggcggcatctcctcctccttcctccgccccatgcccagccttgcttccggctggtggcatgccttggggccgggcagcaggtgagaagctgcccccggagggaggggccaagggctgggtcagtctggcctgaggggtggatggctggccctgggggaaggctgggcctgggaggccctgtggacagcaggcctgaggccacgaggtcctggggccacccctctcctgctctgggtgtccttctcagagaagatggcagaaggctgcaggccctagaggggacgacgggctggggacgccctgagcttcctggctgtgtggcaggtgctggggaagctctctgggccatagggacctggctcccctctgagaggcccgcctgccctggggcacccagggctgtgctggtggcctgaggctgggaacttgggttcctgggctctgctggcgcctgggctttgtgggggccgaaggtggttgccccgccgggcagggggctgtgtgggccctcgtggggccaccttcctgtcagtgcccgagggacggtgggacagttgcccctgcgccaagggagcccactgccatcccccgtgggctggcgctgcagtcgcgcaccctgtgttgcctgctgacttgcttatgtctgtttggaagctgcttctgtttggccacaggcctgtgttcctgggctgatggccacagagctgacacttggggtttgagttccagacttgcagaccctgggatccgcttactcctccgcgccacggctgctgtgcttccagaggtggcgtgatgcctcccggggccatggtggggtgaaggatggcgagccggacataccattgttggatgtattttttttaaaacagcaataattagccattttaaaggagggatgtacctgtgtgtgtgcatgtgcacgtgtttgagcgtgtgtgtgtgtgcaagtgggttcttggatatgtgtagtgtgagcatgtgtgcatgtgtgagcctgtgcacgtgcatgttgtaggtgcataagcatgtacacgcgtgagcatgcatgtgtgtgtacacgtgtataggtgtacatgtgcatgagttgtgtacatgcgtgagcacgtgtatagatgtacgtgtgtgtgcgcatgtgtgcgtgtacatgtgtttgtgtcttgggtatgcataagcatgcacgtgtgtatgaatgtgcgtgtgtatgcatgagcacgtatgcatgtgtgatgcgcatgttcttgtgtacttctctgagggggcacatatgtatgagtgtatgagtgcatacatatgcatatggtgtacgtgtgtgtactttgtgtgtgggcatgtatgcgtatgagtacttgtgtgtggctggtgtatgggtgagcatgcacatgtgtatggatgcatatgtgagctgtacatgtagagtgtacatgtgtgttgcatgagcatgcatgcgtgcgagtgcctgtgtgtgtacttgcatatatgtggctgtgcaggtacccggcggtggtgggctggcagtgcccggggaagcaggtcctgctcacggcttccctgctgggccccaggccccgggctgagcctccctggcccctcttgcccctcagtggagcagggcctgggtggagggcctgggcagctccagggcaggtccggggaggccaggcttggggagcacagggggtggggttcacctgctgctgtttgttcccgaaactgtactgtgagcccacggcgggggcagattgttctgaggccccagatgtgccaaaacagcccccagggtgggggcgagcgagttctgaggagaggggctgcgggggccgggggtgggtgtgtgcccctcccctgaatggcccccaatgctgctgtttttcaataaaaccagagttgaaggca

SEQ ID NO: 254081 - DNA, 5870 bp, Artificial Sequence
  derived and/or modified sequence
atgcattgtgggcctcccgacatggtctgcgagacgaagatcgtggccgccgaggaccatgaggcgctgccgggggccaagaaggacgcgctgctcgccgccgccggcgccatgtggcccccgctgcccgccgcgcccgggccggccgccgcgccccccgcgcccccacctgccccggtggctcagcctcacggcggggcggggggcgcggggccgccgggggggcgcggcgtgtgcatccgcgagttccgtgcggccgagcaggaggcggcgcgccgcatcttctacgacggcatcatggagcgcatccctaacacggccttccgcggcctgcggcagcacccgcgcgcgcagctgctctacgccctgctggcggcgctgtgcttcgccgtgagccgctcgctgctgctgacgtgcctggtgccggccgcgctgctgggcctgcgctactactacagccgcaaggtgatccgcgcctacctggagtgcgcgctgcacacggacatggcggacatcgagcagtactacatgaagccgcccggctcctgcttctgggtggccgtgctggatggcaacgtggtgggcattgtggctgcacgggcccacgaggaggacaacacggtggagctgctgcggatgtctgtggactcacgtttccgaggcaagggcatcgccaaggcgctgggccggaaggtgctggagttcgccgtggtgcacaactactccgcggtggtgctgggcacgacggccgtcaaggtggccgcccacaagctctacgagtcgctgggcttcagacacatgggcgccagtgaccactacgtgctgccgggcatgaccctctcgctggctgagcgcctcttcttccaggtccgctaccaccgctaccgcctgcagctgcgcgaggagtgaccgccgccgctcgcccgcccgcccccccggccgccctgtccgcctttgcccgcctgcccgccgcccggcgcggcctgctttcagacgctcaattggcgtttgtgttgggtttccccttttcaacatcctgcggttgtctggctggttccggggggtgcggggctgttgttcttcggcgacactttggtgggggtgggttgtttgtcgccatagcccctcgcccttccccacctgcctgggcggcttgccacctgaagagtggcatcttggaccaccgcggctgtccatgacgctgccctgcccgccgccactggggaaggcccagccttgctcaccaagcacagaacctctgcagcagatcccggggccaggctccggccccgcctgcggccccagcgccactgcctgtggaggccccagctggccacggcgctgctttgctccgcgcatgccgagggtgtggcccggctgagcatgccgcatgcacacagccccgccctgccgccctgcccagactggacccggagacccgggctggtgagcgcccctgtccccagcccccagctggctgtgggagggcctgcccctgcccccacctcctggagggcctggtctgccccgcgccgcccggctctgtccacacctgctttgctctgacgccctccatttctctggctccggcccctcccctgcctgggctgtgctgactggtgtcatcacccaggtgactcccatggcgtccgtggcacagccagggtgggggtccatgggacccctctccccagtgcccactggatcgtgctggcctctcccagatgtccccggggacctcctgcctctggctgacggtccaccctgtgaatcttatcagcccaggctgctgccaacagcgcccagcccacagcttctcccagcctgaaaccaacacattttctaataagttatttagacagaatagcactctgcatgactttaattcttgggacaaaacggtagtttgtaccctaagacacagtttctggcccagtgtgatgggggtgggtggccgggtgggtggagcgttttgctgttggaaacctggagggaaaccctgattggatgtcatttcctgccatggagcacgcctcccagccctggcctgcagtgtgggcagggtggggggcaagggagtccgcagcctccgggaggaggggcagggcgctgccttgggctgggtgggaagaggggtggccgcctcggcttccgctggccatgctcctggtctctccttcctgaggtcacaggcaggggctgccctggacggggggcggggggggtggcctggaaggggagacagaggtggagggtggcacaggctgcacattcagcttagaagtggacctggctttggtggcaggagaagaataaacacttgcccagacccctttgtgtgggggaattggggaggggtcgtggcaggcagggtgggccacggaactgggtcccaggcatcaaggccacgtgcagggccatggagggatgcttctcacgaggcgcttcagaagcgagcgaagggacagagaagccctgcgtccaagggccttttgtcctgttagcaattgaggtgtgcagagcactgtacagaccccactcccctgtacattcctccctggaggtgcccggtccccgcttggggatgggagttttgtagactgtacagaaatcggcaccctattttcttgcagctcagattttgttaatctggaatatacagacagacgtaaagtgttttagcaaaatggaaacaaacagttgtgcctttttcctcttttggtttggtttgggtttggcctggggctggtcccagttggtgcggggcatgctgggggcaggaggggcagggcgggccaggtggagtcaggtcttgggggtgtcatgtcggggtgctgccagcgtcccttggtcctgtgcctttggagcctcgggctcctggggtgcagggtgcttgggggtggctgttggagcccaccgacgccagggcagggcctggaggcccagggactgccagtgtctccttgatattgatcctagcagatccccctcctgggggttctgagagtcctgggcagtgtggccttctctcattctggtggcatctgcgcccgtgagtgacctcttccttggctgcactgccctgtgggtggtgagacgcttggccttttttgttgctgccaggacttggtagagatggcaggaagggtgtgcggggtggttgtgtgcagaaccctgccgcccctgaggtgagcagaggcactggtgtgcctgccaggctggggcggagctgcccggaacccttgccaggccaatgtgtagcttggtggcgcccttgaaggccactggggggtaggtgtgtcctcccccggggctggaggccgggtgcctggtgggtgggcctgacctggcccacctcatccctccagcctgggatctcactgctctgcacatgtgcactgacgtgaattttatacgtttgtagaaactctgatgtaacttcttctacctctgaagcgccctcctgggccctgctgtcacgtggctggtgcggcttccccgagtgctggccccctgcccgctccccatgggcacccaccactcaaactctgcgtggtgaggcccggggaaagccaggccgggccctagcactgctcaggggcctggggctcctgggatttctgtgtgtttggaagcctctgtttttggagtggggggcgtggaaggcgggaggggctgacagtgcctggggccagagctgggcgaaggaggacatcctcactggacgagcactgcaggcctgacgagaggctccgggcagctgagggctgaagcgcctcgggatgccccacactgcccagagccacgggtcttgctgtgctgggggtggggtggccccaggcagctgccactgcccaggtgtgagtcgctgcagacctggtccctgagggtgggaggcctgcttgtgctgaagctgccatgtggtctggcccccagaagggctcctgagcgtagggagttgagccccgcagccgtggcggcatctcctcctccttcctccgccccatgcccagccttgcttccggctggtggcatgccttggggccgggcagcaggtgagaagctgcccccggagggaggggccaagggctgggtcagtctggcctgaggggtggatggctggccctgggggaaggctgggcctgggaggccctgtggacagcaggcctgaggccacgaggtcctggggccacccctctcctgctctgggtgtccttctcagagaagatggcagaaggctgcaggccctagaggggacgacgggctggggacgccctgagcttcctggctgtgtggcaggtgctggggaagctctctgggccatagggacctggctcccctctgagaggcccgcctgccctggggcacccagggctgtgctggtggcctgaggctgggaacttgggttcctgggctctgctggcgcctgggctttgtgggggccgaaggtggttgccccgccgggcagggggctgtgtgggccctcgtggggccaccttcctgtcagtgcccgagggacggtgggacagttgcccctgcgccaagggagcccactgccatcccccgtgggctggcgctgcagtcgcgcaccctgtgttgcctgctgacttgcttatgtctgtttggaagctgcttctgtttggccacaggcctgtgttcctgggctgatggccacagagctgacacttggggtttgagttccagacttgcagaccctgggatccgcttactcctccgcgccacggctgctgtgcttccagaggtggcgtgatgcctcccggggccatggtggggtgaaggatggcgagccggacataccattgttggatgtattttttttaaaacagcaataattagccattttaaaggagggatgtacctgtgtgtgtgcatgtgcacgtgtttgagcgtgtgtgtgtgtgcaagtgggttcttggatatgtgtagtgtgagcatgtgtgcatgtgtgagcctgtgcacgtgcatgttgtaggtgcataagcatgtacacgcgtgagcatgcatgtgtgtgtacacgtgtataggtgtacatgtgcatgagttgtgtacatgcgtgagcacgtgtatagatgtacgtgtgtgtgcgcatgtgtgcgtgtacatgtgtttgtgtcttgggtatgcataagcatgcacgtgtgtatgaatgtgcgtgtgtatgcatgagcacgtatgcatgtgtgatgcgcatgttcttgtgtacttctctgagggggcacatatgtatgagtgtatgagtgcatacatatgcatatggtgtacgtgtgtgtactttgtgtgtgggcatgtatgcgtatgagtacttgtgtgtggctggtgtatgggtgagcatgcacatgtgtatggatgcatatgtgagctgtacatgtagagtgtacatgtgtgttgcatgagcatgcatgcgtgcgagtgcctgtgtgtgtacttgcatatatgtggctgtgcaggtacccggcggtggtgggctggcagtgcccggggaagcaggtcctgctcacggcttccctgctgggccccaggccccgggctgagcctccctggcccctcttgcccctcagtggagcagggcctgggtggagggcctgggcagctccagggcaggtccggggaggccaggcttggggagcacagggggtggggttcacctgctgctgtttgttcccgaaactgtactgtgagcccacggcgggggcagattgttctgaggccccagatgtgccaaaacagcccccagggtgggggcgagcgagttctgaggagaggggctgcgggggccgggggtgggtgtgtgcccctcccctgaatggcccccaatgctgctgtttttcaataaaaccagagttgaaggc

SEQ ID NO: 254082 - DNA, 405 bp, Artificial Sequence
  derived and/or modified sequence
atggccgacatcgagcagtactacatgaagccccccggcagctgcttttgggtagccgtgctagacggtaacgtggtgggcatcgttgctgcccgggcacacgaggaggacaatacggttgagctcctgagaatgtcagtggacagccgatttaggggtaagggcatcgccaaggccctgggacgtaaggtactggagttcgcagttgtacacaactatagtgctgtggtcctagggaccaccgccgtgaaggtggctgcccataaactgtatgaatcacttggcttccgccacatgggcgccagcgaccactatgtgttgcctggaatgaccttatcactggctgagcgcttattttttcaggtcagatatcatcggtacagactccagctgcgcgaagaatag

SEQ ID NO: 254083 - DNA, 909 bp, Artificial Sequence
  derived and/or modified sequence
atgcactgcggcccccccgacatggtgtgcgagaccaagatcgtggcggcagaagaccacgaggcgcttcccggagcaaaaaaggacgccctcctggcagctgcgggagctatgtggcccccccttccagccgcccctggccctgctgcagctccacccgctccacccccagcacctgtagcccagccccacggcggtgccggtggcgcgggcccccccgggggacgcggggtgtgtatcagagagttccgggcggctgagcaggaagcagctaggcgcatcttctatgatggcattatggagcggattcccaacacagccttccgcggactgcggcagcaccccagggctcagttgctgtatgcgctgttggccgccctgtgctttgcagtgagtcgctctctgcttctgacctgtctcgtgccagccgcactcctgggattgaggtactattatagccgcaaggttattcgcgcatacctcgagtgcgcacttcatacggatatggcagatatcgaacagtactatatgaagccgcccggttcatgcttctgggtggccgtgcttgatggcaatgtcgtcggaatagtggccgcacgtgcacacgaagaagataacactgttgaacttctgcgcatgtctgtcgacagcaggtttcggggaaagggaatcgctaaagctctcggacgaaaagtgttagagttcgcggtcgtccacaactattctgctgttgtcctgggtactacagcagtcaaggtcgcggctcacaagctgtatgaaagtcttgggtttcgccacatgggggcttcagatcactacgtgctgcccggaatgacccttagtctggcagaaagattgtttttccaggtgagatatcaccggtaccgtctccagttaagggaggagtag

SEQ ID NO: 254084 - DNA, 405 bp, Artificial Sequence
  derived and/or modified sequence
atggctgacattgagcagtattatatgaagccgccaggctcatgcttttgggtggccgttcttgacggcaatgttgtgggcatagtggccgcaagagcccatgaggaagacaacaccgtggagttgctcagaatgtctgtggattcccggtttcgagggaagggaatcgccaaagcactagggcgtaaagtgctcgagttcgctgtggtacataattattctgccgtcgttttgggaaccactgctgttaaggtggctgctcacaagctgtacgaaagcctgggtttccgccatatgggcgcaagtgatcattacgtcctccctggcatgacgctctctcttgccgagagactcttttttcaggtacgataccaccggtacaggctccagttgcgagaggaatag

SEQ ID NO: 254085 - DNA, 909 bp, Artificial Sequence
  derived and/or modified sequence
atgcattgcggccctcctgacatggtttgtgagacaaagattgtagcggcagaagatcacgaggccctgccaggagctaaaaaagacgctctgctagcagcggctggcgcaatgtggcctcccttgcccgcagcaccaggccctgcggctgcgccacccgcaccgcctccagcaccagtggcccagcctcatggcggtgctggcggtgccggtccccctggcggaagaggggtgtgcatccgtgagtttcgagctgctgagcaggaggccgctagaagaatcttttacgatgggatcatggaaagaatccccaatacggctttccgtggactgcgacaacatccacgggctcaactcttgtacgccttgcttgctgcactgtgttttgcagtgagtagatcgctcctccttacatgtttggttccagccgctttgttgggactgagatattattactcacgaaaggtgatccgcgcttatcttgaatgcgctttgcacactgacatggccgacatcgagcagtactacatgaaaccgccaggaagttgcttttgggtggccgtgctggatggaaatgtggttggtatcgtcgcagcacgcgctcatgaggaagacaacaccgtcgagctactccggatgagtgttgattctaggtttcggggaaagggcatcgcgaaagcactcggaaggaaggtgctcgagtttgcagtcgtacacaactactcggcagtggtgctagggacaacagcagtcaaagtggcagcccacaaactttatgaatccctgggttttcgtcacatgggagcttcagatcactatgtgctccccggtatgaccctgtcccttgccgaacgcctgttttttcaggtaaggtatcatagatatcgattgcaattaagggaagagtag

SEQ ID NO: 254086 - DNA, 405 bp, Artificial Sequence
  derived and/or modified sequence
atggccgacatcgagcagtactacatgaagccccccggcagctgcttctgggtggccgtgctggacggcaacgtggtgggcatcgtggccgccagagcccacgaggaggacaacaccgtggagctgctgagaatgagcgtggacagcagattcagaggcaagggcatcgccaaggccctgggcagaaaggtgctggagttcgccgtggtgcacaactacagcgccgtggtgctgggcaccaccgccgtgaaggtggccgcccacaagctgtacgagagcctgggcttcagacacatgggcgccagcgaccactacgtgctgcccggcatgaccctgagcctggccgagagactgttcttccaggtgagataccacagatacagactgcagctgagagaggagtag

SEQ ID NO: 254087 - DNA, 909 bp, Artificial Sequence
  derived and/or modified sequence
atgcactgcggcccccccgacatggtgtgcgagaccaagatcgtggccgccgaggaccacgaggccctgcccggcgccaagaaggacgccctgctggccgccgccggcgccatgtggccccccctgcccgccgcccccggccccgccgccgccccccccgcccccccccccgcccccgtggcccagccccacggcggcgccggcggcgccggcccccccggcggcagaggcgtgtgcatcagagagttcagagccgccgagcaggaggccgccagaagaatcttctacgacggcatcatggagagaatccccaacaccgccttcagaggcctgagacagcaccccagagcccagctgctgtacgccctgctggccgccctgtgcttcgccgtgagcagaagcctgctgctgacctgcctggtgcccgccgccctgctgggcctgagatactactacagcagaaaggtgatcagagcctacctggagtgcgccctgcacaccgacatggccgacatcgagcagtactacatgaagccccccggcagctgcttctgggtggccgtgctggacggcaacgtggtgggcatcgtggccgccagagcccacgaggaggacaacaccgtggagctgctgagaatgagcgtggacagcagattcagaggcaagggcatcgccaaggccctgggcagaaaggtgctggagttcgccgtggtgcacaactacagcgccgtggtgctgggcaccaccgccgtgaaggtggccgcccacaagctgtacgagagcctgggcttcagacacatgggcgccagcgaccactacgtgctgcccggcatgaccctgagcctggccgagagactgttcttccaggtgagataccacagatacagactgcagctgagagaggagtag

SEQ ID NO: 254088 - protein, 812 aa, Artificial Sequence
  derived and/or modified sequence
MVDENDIRALNVRHYRDHIGVVSQEPVLFGTTISNNIKYGRDDVTDEEMERAAREANAYDFIMEFPNKFNTLVGEKGAQMSGGQKQRIAIARALVRNPKILILDEATSALDSESKSAVQAALEKASKGRTTIVVAHRLSTIRSADLIVTLKDGMLAEKGAHAELMAKRGLYYSLVMSQDIKKADEQMESMTYSTERKTNSLPLHSVKSIKSDFIDKAEESTQSKEISLPEVSLLKILKLNKPEWPFVVLGTLASVLNGTVHPVFSIIFAKIITMFGNNDKTTLKHDAEIYSMIFVILGVICFVSYFMQGLFYGRAGEILTMRLRHLAFKAMLYQDIAWFDEKENSTGGLTTILAIDIAQIQGATGSRIGVLTQNATNMGLSVIISFIYGWEMTFLILSIAPVLAVTGMIETAAMTGFANKDKQELKHAGKIATEALENIRTIVSLTREKAFEQMYEEMLQTQHRNTSKKAQIIGSCYAFSHAFIYFAYAAGFRFGAYLIQAGRMTPEGMFIVFTAIAYGAMAIGETLVLAPEYSKAKSGAAHLFALLEKKPNIDSRSQEGKKPDTCEGNLEFREVSFFYPCRPDVFILRGLSLSIERGKTVAFVGSSGCGKSTSVQLLQRLYDPVQGQVLFDGVDAKELNVQWLRSQIAIVPQEPVLFNCSIAENIAYGDNSRVVPLDEIKEAANAANIHSFIEGLPEKYNTQVGLKGAQLSGGQKQRLAIARALLQKPKILLLDEATSALDNDSEKVVQHALDKARTGRTCLVVTHRLSAIQNADLIVVLHNGKIKEQGTHQELLRNRDIYFKLVNAQSVQ

SEQ ID NO: 254089 - protein, 283 aa, Artificial Sequence
  derived and/or modified sequence
MARRPRAPAASGEEFSFVSPLVKYLLFFFNMLFWVISMVMVAVGVYARLMKHAEAALACLAVDPAILLIVVGVLMFLLTFCGCIGSLRENICLLQTFSLCLTAVFLLQLAAGILGFVFSDKARGKVSEIINNAIVHYRDDLDLQNLIDFGQKKFSCCGGISYKDWSQNMYFNCSEDNPSRERCSVPYSCCLPTPDQAVINTMCGQGMQAFDYLEASKVIYTNGCIDKLVNWIHSNLFLLGGVALGLAIPQLVGILLSQILVNQIKDQIKLQLYNQQHRADPWY

SEQ ID NO: 254090 - DNA, 852 bp, Artificial Sequence
  derived and/or modified sequence
atggccagaagacccagagcccccgccgccagcggcgaggagttcagcttcgtgagccccctggtgaagtacctgctgttcttcttcaacatgctgttctgggtgatcagcatggtgatggtggccgtgggcgtgtacgccagactgatgaagcacgccgaggccgccctggcctgcctggccgtggaccccgccatcctgctgatcgtggtgggcgtgctgatgttcctgctgaccttctgcggctgcatcggcagcctgagagagaacatctgcctgctgcagaccttcagcctgtgcctgaccgccgtgttcctgctgcagctggccgccggcatcctgggcttcgtgttcagcgacaaggccagaggcaaggtgagcgagatcatcaacaacgccatcgtgcactacagagacgacctggacctgcagaacctgatcgacttcggccagaagaagttcagctgctgcggcggcatcagctacaaggactggagccagaacatgtacttcaactgcagcgaggacaaccccagcagagagagatgcagcgtgccctacagctgctgcctgcccacccccgaccaggccgtgatcaacaccatgtgcggccagggcatgcaggccttcgactacctggaggccagcaaggtgatctacaccaacggctgcatcgacaagctggtgaactggatccacagcaacctgttcctgctgggcggcgtggccctgggcctggccatcccccagctggtgggcatcctgctgagccagatcctggtgaaccagatcaaggaccagatcaagctgcagctgtacaaccagcagcacagagccgacccctggtactag

SEQ ID NO: 254091 - DNA, 852 bp, Artificial Sequence
  derived and/or modified sequence
atggcccggaggcctcgggcacctgcagcctcaggggaggagtttagtttcgttagtccactcgttaagtatttgttatttttcttcaacatgctattctgggtgatcagcatggtcatggtggcagtgggggtatatgccaggctgatgaaacacgcagaggctgcactcgcttgcctcgcagtggatcccgccatcttacttatcgtcgttggagttctcatgttcctacttaccttttgcggatgcatcggctctctgagagaaaatatctgcctgctgcagaccttctctctgtgcctgactgccgtgttcttgctccagcttgctgctggtattctcggctttgtgtttagcgataaagcaagaggtaaggttagtgagataataaataatgccatcgtacactatcgcgatgacctggaccttcagaatctgatcgattttggacaaaagaagttttcttgctgcggtggaatctcatataaagactggtctcagaacatgtactttaactgctcagaggataatcccagcagagagcgctgctctgtgccatatagctgttgcctgcccacccctgatcaagccgtgattaatactatgtgcggacagggaatgcaggcattcgattacctggaggcctccaaggtgatctatacaaatggatgtatcgacaaacttgtgaattggattcacagtaacctttttttgctaggtggcgtggcactcggcctggcaatcccacagctcgtgggtatccttctctctcagattttggtgaaccagattaaggaccagatcaaattgcagctttataaccagcagcaccgcgcagacccttggtactag

SEQ ID NO: 254092 - DNA, 852 bp, Artificial Sequence
  derived and/or modified sequence
atggcccggcggccccgggccccagctgccagcggggaggagttctcctttgtgagccccctggtgaagtacctgctcttcttcttcaacatgctgttctgggtgatctccatggtgatggtggccgtgggcgtgtatgcccggctgatgaagcatgctgaggccgccctggcctgcctggccgtggaccctgccatcctgctgattgtggtgggcgtgctgatgttcctgctgaccttctgtggctgcatcggcagcctgcgggagaacatctgcctgctgcagaccttcagcctgtgcctgacagctgtgttcctgctgcagctggccgccggcatcctgggctttgtgttcagtgacaaggcccggggcaaggtgtctgagatcatcaacaatgccatcgtgcactacagagatgacctggacctgcagaacctgattgactttggccagaagaagttcagctgctgcggcggcatctcctacaaggactggagccagaacatgtacttcaactgcagcgaggacaaccccagccgggagcgctgcagcgtgccctacagctgctgcctgcccaccccagaccaggccgtcatcaacaccatgtgtggccagggcatgcaggcctttgactacctggaggccagcaaggtgatctacaccaacggctgcatcgacaagctggtgaactggatccacagcaacctcttcctgctgggcggcgtggccctgggcctggccatcccccagctggtgggcatcctgctgagccagatcctggtgaaccagatcaaggaccagatcaagctgcagctgtacaaccagcagcacagagctgacccctggtactag

SEQ ID NO: 254093 - DNA, 852 bp, Artificial Sequence
  derived and/or modified sequence
atggcccggcggccccgggcccccgccgccagcggcgaggagttctcattcgtgagtcccttggtgaagtacctgctgtttttcttcaacatgctgttttgggtgattagcatggtcatggtagccgtgggggtgtacgctcggctgatgaaacatgccgaagccgctcttgcttgtctagcagtagacccagctattcttctcatcgtggtgggggtgctgatgttcctgctgaccttttgtggctgtatcggatccctccgggagaacatttgcctcctccagaccttttctctgtgtctcaccgcagtttttctgcttcagctggccgctggcattctaggatttgtgtttagtgacaaggctagggggaaggtgtcggagattattaacaatgcaatagtgcattatagggatgacttagacttacagaatctgatcgattttgggcagaaaaagttctcttgttgtggcggaatttcgtacaaggattggtctcagaacatgtatttcaactgttccgaagataaccctagcagggaaagatgctccgtgccctactcgtgctgcctgcctacacccgaccaagccgtcatcaacaccatgtgtgggcagggaatgcaggcattcgattatctggaagctagcaaagtcatttatactaatggatgcatagacaagctagttaactggatacactccaacttatttctgctgggcggcgtggcgttgggcttggcaatcccccagctcgtggggatcctattgtcccaaatcttggtcaatcagatcaaagaccagatcaagctacagctgtataatcaacagcacagggctgatccgtggtactag

SEQ ID NO: 254094 - DNA, 852 bp, Artificial Sequence
  derived and/or modified sequence
atggcacgcagaccgagagctcccgcagcgagtggagaagagtttagtttcgtgtctcccctggttaaatacctgcttttcttttttaatatgctcttctgggtcataagtatggtgatggtagcagtgggcgtgtatgcccgtctcatgaagcatgccgaagccgcactagcctgtctggccgtcgacccagctatattgttgatcgtggtgggcgtcttaatgttcctgctgacattttgtggatgtatcggctccctgagagagaacatatgtctactgcagacattctcgctttgtctgaccgcagttttcttactgcagctcgctgcgggtattctgggctttgtgttttctgacaaagcacgcggaaaagtgtcagaaataatcaacaacgcaattgtgcactatagggatgatttggatttgcaaaacctgattgacttcgggcaaaagaagttttcatgctgcggtggcatttcatacaaagattggagccaaaacatgtacttcaattgttccgaggataacccatctagggagaggtgtagcgtgccttacagttgctgtctgccaacccccgatcaggccgtcatcaataccatgtgcgggcaagggatgcaggccttcgattacctggaagcaagcaaagtgatctacactaatggctgcatcgacaagctggttaattggattcattcgaaccttttcctgcttggaggtgtggcccttggcttagcgataccccagctggtcggcatcttactgagccagatcctcgtgaatcaaatcaaggaccagatcaagctccagttatacaaccagcagcacagagctgacccgtggtattag

SEQ ID NO: 254095 - DNA, 1883 bp, Artificial Sequence
  derived and/or modified sequence
cgggctcctgcacggcgcggctcggctcatgcccccgggcgcggggcacacaggccggccggcagccgctgggaaataggcccccgggggcggtggcggcggcggggccatggcgcggagaccccgggcgccggccgcctccggggaggagttctccttcgtcagcccgctggtgaaatacctgctcttcttcttcaacatgctcttctgggtgatttccatggtgatggtggctgtgggtgtctacgctcggctaatgaagcatgcagaagcagccctagcctgcctggcagtggaccctgccatcctgctgatcgtggtgggtgtcctcatgttcctgctcaccttctgtggctgcattgggtccctccgcgagaacatctgcctcctgcagacgttctccctctgcctcaccgctgtgttcctgctgcagctggccgctgggatcctgggcttcgtcttctcagacaaggctcgagggaaagtgagtgagatcatcaacaatgccattgtgcactaccgagatgacttggatctgcagaacctcattgattttggccagaaaaagtttagctgctgtggagggatttcctacaaggactggtctcagaacatgtatttcaactgctcagaagacaaccccagtcgagagcgctgctctgtgccttactcctgttgcttgcctactcctgaccaggcagtgatcaacactatgtgtggccaaggtatgcaggcctttgactacttggaagctagcaaagtcatctacaccaatggctgtattgacaagttggtcaactggatacacagcaacctattcttacttggtggtgtggctctaggcctggccatcccccagctggtgggaattctgctgtcccagatcctagtgaatcagatcaaagatcagatcaagctacagctctacaaccagcagcaccgggctgacccatggtactgagaatccatcctgcacctcctcaccatggaaactggcaagcctcataaacgaacagcagtgggtgctgaaagcagcaccaaatggagatttggattccagccccccagtgacagcccagtgggaagaagcaaactccagatgggcagaaggcagggtgcacaggtggctccagtctcaggaggatgcgcctcctctcccccatcccagccctcagcattgtgccagagtgatacccttaagtgtttgggtttatgttttcagttttgtttgggaaacagcagttgcacagagagttgggggtactgctgctgccttttcaccgaggcactgccaccaccagctctagcagggatgctcctgagcttggcggacatacttagatcctaacgtgccagtgagacctggctgtggagagtagcactggcagccctgcctggactccacttggcatgataccagctccagaagggaagggagtggagcaggcagtgaggagagagcctgggggtcggctggggacagccgtatgtgctaggtaggagtggagggagatatgtttaccaaatgcctgtcctgccatcctcccaggtagtcagagtgagctacatcctgccccgccttcatttccatggaaacatggcagctaggacacggggtacaacagcagccaaattcttccccacctcccttacttcgaaaaaaagtttggaaccctggtccctatactctgcagtcagaagtgggactgagccatacatgcccttgaattcctccctgtctggccctccctctccagcaagcagggttttctttaacttggcagtgtgcagaggagaagtggtaacacccccaccccattcccctgcatcggagctcagtattcctacagggtaagaggtaggaatcttgctgggacgagggg

SEQ ID NO: 254096 - protein, 177 aa, Artificial Sequence
  derived and/or modified sequence
MSEDSEKEDYSDRTISDEDESDEDMFMKFVSEDLHRCALLTADSFGDPFFPRTTQILLEYQLGRWVPRLREPRDLYGVSSSGPLSPTRWPYHCEVIDEKVQHIDGVSCWSESHQAGAQWCDLGSLQPPPPRFKRFACFSLLSSRDYRRVPPRSANFVFLVETGFHHVGQDGLRLLTS

SEQ ID NO: 254097 - protein, 920 aa, Artificial Sequence
  derived and/or modified sequence
MSEDSEKEDYSDRTISDEDESDEDMFMKFVSEDLHRCALLTADSFGDPFFPRTTQILLEYQLGRWVPRLREPRDLYGVSSSGPLSPTRWPYHCEVIDEKVQHIDWTPSCPEPVYIPTGLETEPLYPDSKEATVVYLAEDAYKEPCFVYSRVGGNRTPLKQPVDYRDNTLMFEARFESGNLQKVVKVAEYEYQLTVRPDLFTNKHTQWYYFQVTNMRAGIVYRFTIVNFTKPASLYSRGMRPLFYSEKEAKAHHIGWQRIGDQIKYYRNNPGQDGRHYFSLTWTFQFPHNKDTCYFAHCYPYTYTNLQEYLSGINNDPVRSKFCKIRVLCHTLARNMVYILTITTPLKNSDSRKRKAVILTARVHPGETNSSWIMKGFLDYILGNSSDAQLLRDTFVFKVVPMLNPDGVIVGNYRCSLAGRDLNRNYTSLLKESFPSVWYTRNMVHRLMEKREVILYCDLHGHSRKENIFMYGCDGSDRSKTLYLQQRIFPLMLSKNCPDKFSFSACKFNVQKSKEGTGRVVMWKMGIRNSFTMEATFCGSTLGNKRGTHFSTKDLESMGYHFCDSLLDYCDPDRTKYYRCLKELEEMERHITLEKVFEDSDTPVIDITLDVESSSRGSDSSESIDSLTYLLKLTSQKKHLKTKKERNSTIASHQNARGQEVYDRGHLLQRHTQSNSDVKDTRPNEPDDYMVDYFRRQLPNQGLDLHHNLKSKIKECISFQSKKTGINWTDDEKRSYKDKGIVQTQEILQYLLPIVHSTKNMQTTQIKQLFNPRTNFQIQHQLNPATCRNIKKYSTSWTAPRNHPFVIQGDVMANSSEWVQSKPHRSLESLSPLKGPKKNKHSQIWAIKNEDIKPLSSKWETASSSFGMDANVLKYKSLQAEETNQQSSKHTALHLTKNKDEQANKNDGQPTLYLKFQRES

SEQ ID NO: 254098 - protein, 975 aa, Artificial Sequence
  derived and/or modified sequence
MKFVSEDLHRCALLTADSFGDPFFPRTTQILLEYQLGRWVPRLREPRDLYGVSSSGPLSPTRWPYHCEVIDEKVQHIDWTPSCPEPVYIPTGLETEPLYPDSKEATVVYLAEDAYKEPCFVYSRVGGNRTPLKQPVDYRDNTLMFEARFESGNLQKVVKVAEYEYQLTVRPDLFTNKHTQWYYFQVTNMRAGIVYRFTIVNFTKPASLYSRGMRPLFYSEKEAKAHHIGWQRIGDQIKYYRNNPGQDGRHYFSLTWTFQFPHNKDTCYFAHCYPYTYTNLQEYLSGINNDPVRSKFCKIRVLCHTLARNMVYILTITTPLKNSDSRKRKAVILTARVHPGETNSSWIMKGFLDYILGNSSDAQLLRDTFVFKVVPMLNPDGVIVGNYRCSLAGRDLNRNYTSLLKESFPSVWYTRNMVHRLMEKREVILYCDLHGHSRKENIFMYGCDGSDRSKTLYLQQRIFPLMLSKNCPDKFSFSACKFNVQKSKEGTGRVVMWKMGIRNSFTMEATFCGSTLGNKRGTHFSTKDLESMGYHFCDSLLDYCDPDRTKYYRCLKELEEMERHITLEKVFEDSDTPVIDITLDVESSSRGSDSSESIDSLTYLLKLTSQKKHLKTKKERNSTIASHQNARGQEVYDRGHLLQRHTQSNSDVKDTRPNEPDDYMVDYFRRQLPNQGLAHCKLRLPGSRHSPASASRVAGTTGTRHHTWLIFVFLVEMGKKIPLKGTDLYGNCFKVTSLQSPMGKQTSTWTEKTRIPTEDLHHNLKSKIKECISFQSKKTGINWTDDEKRSYKDKGIVQTQEILQYLLPIVHSTKNMQTTQIKQLFNPRTNFQIQHQLNPATCRNIKKYSTSWTAPRNHPFVIQGDVMANSSEWVQSKPHRSLESLSPLKGPKKNKHSQIWAIKNEDIKPLSSKWETASSSFGMDANVLKYKSLQAEETNQQSSKHTALHLTKNKDEQANKNDGQPTLYLKFQRES

SEQ ID NO: 254099 - DNA, 2763 bp, Artificial Sequence
  derived and/or modified sequence
atgagcgaggacagcgagaaggaggactacagcgacagaaccatcagcgacgaggacgagagcgacgaggacatgttcatgaagttcgtgagcgaggacctgcacagatgcgccctgctgaccgccgacagcttcggcgaccccttcttccccagaaccacccagatcctgctggagtaccagctgggcagatgggtgcccagactgagagagcccagagacctgtacggcgtgagcagcagcggccccctgagccccaccagatggccctaccactgcgaggtgatcgacgagaaggtgcagcacatcgactggacccccagctgccccgagcccgtgtacatccccaccggcctggagaccgagcccctgtaccccgacagcaaggaggccaccgtggtgtacctggccgaggacgcctacaaggagccctgcttcgtgtacagcagagtgggcggcaacagaacccccctgaagcagcccgtggactacagagacaacaccctgatgttcgaggccagattcgagagcggcaacctgcagaaggtggtgaaggtggccgagtacgagtaccagctgaccgtgagacccgacctgttcaccaacaagcacacccagtggtactacttccaggtgaccaacatgagagccggcatcgtgtacagattcaccatcgtgaacttcaccaagcccgccagcctgtacagcagaggcatgagacccctgttctacagcgagaaggaggccaaggcccaccacatcggctggcagagaatcggcgaccagatcaagtactacagaaacaaccccggccaggacggcagacactacttcagcctgacctggaccttccagttcccccacaacaaggacacctgctacttcgcccactgctacccctacacctacaccaacctgcaggagtacctgagcggcatcaacaacgaccccgtgagaagcaagttctgcaagatcagagtgctgtgccacaccctggccagaaacatggtgtacatcctgaccatcaccacccccctgaagaacagcgacagcagaaagagaaaggccgtgatcctgaccgccagagtgcaccccggcgagaccaacagcagctggatcatgaagggcttcctggactacatcctgggcaacagcagcgacgcccagctgctgagagacaccttcgtgttcaaggtggtgcccatgctgaaccccgacggcgtgatcgtgggcaactacagatgcagcctggccggcagagacctgaacagaaactacaccagcctgctgaaggagagcttccccagcgtgtggtacaccagaaacatggtgcacagactgatggagaagagagaggtgatcctgtactgcgacctgcacggccacagcagaaaggagaacatcttcatgtacggctgcgacggcagcgacagaagcaagaccctgtacctgcagcagagaatcttccccctgatgctgagcaagaactgccccgacaagttcagcttcagcgcctgcaagttcaacgtgcagaagagcaaggagggcaccggcagagtggtgatgtggaagatgggcatcagaaacagcttcaccatggaggccaccttctgcggcagcaccctgggcaacaagagaggcacccacttcagcaccaaggacctggagagcatgggctaccacttctgcgacagcctgctggactactgcgaccccgacagaaccaagtactacagatgcctgaaggagctggaggagatggagagacacatcaccctggagaaggtgttcgaggacagcgacacccccgtgatcgacatcaccctggacgtggagagcagcagcagaggcagcgacagcagcgagagcatcgacagcctgacctacctgctgaagctgaccagccagaagaagcacctgaagaccaagaaggagagaaacagcaccatcgccagccaccagaacgccagaggccaggaggtgtacgacagaggccacctgctgcagagacacacccagagcaacagcgacgtgaaggacaccagacccaacgagcccgacgactacatggtggactacttcagaagacagctgcccaaccagggcctggacctgcaccacaacctgaagagcaagatcaaggagtgcatcagcttccagagcaagaagaccggcatcaactggaccgacgacgagaagagaagctacaaggacaagggcatcgtgcagacccaggagatcctgcagtacctgctgcccatcgtgcacagcaccaagaacatgcagaccacccagatcaagcagctgttcaaccccagaaccaacttccagatccagcaccagctgaaccccgccacctgcagaaacatcaagaagtacagcaccagctggaccgcccccagaaaccaccccttcgtgatccagggcgacgtgatggccaacagcagcgagtgggtgcagagcaagccccacagaagcctggagagcctgagccccctgaagggccccaagaagaacaagcacagccagatctgggccatcaagaacgaggacatcaagcccctgagcagcaagtgggagaccgccagcagcagcttcggcatggacgccaacgtgctgaagtacaagagcctgcaggccgaggagaccaaccagcagagcagcaagcacaccgccctgcacctgaccaagaacaaggacgagcaggccaacaagaacgacggccagcccaccctgtacctgaagttccagagagagagctag

SEQ ID NO: 254100 - DNA, 2928 bp, Artificial Sequence
  derived and/or modified sequence
atgaagttcgtgagcgaggacctgcacagatgcgccctgctgaccgccgacagcttcggcgaccccttcttccccagaaccacccagatcctgctggagtaccagctgggcagatgggtgcccagactgagagagcccagagacctgtacggcgtgagcagcagcggccccctgagccccaccagatggccctaccactgcgaggtgatcgacgagaaggtgcagcacatcgactggacccccagctgccccgagcccgtgtacatccccaccggcctggagaccgagcccctgtaccccgacagcaaggaggccaccgtggtgtacctggccgaggacgcctacaaggagccctgcttcgtgtacagcagagtgggcggcaacagaacccccctgaagcagcccgtggactacagagacaacaccctgatgttcgaggccagattcgagagcggcaacctgcagaaggtggtgaaggtggccgagtacgagtaccagctgaccgtgagacccgacctgttcaccaacaagcacacccagtggtactacttccaggtgaccaacatgagagccggcatcgtgtacagattcaccatcgtgaacttcaccaagcccgccagcctgtacagcagaggcatgagacccctgttctacagcgagaaggaggccaaggcccaccacatcggctggcagagaatcggcgaccagatcaagtactacagaaacaaccccggccaggacggcagacactacttcagcctgacctggaccttccagttcccccacaacaaggacacctgctacttcgcccactgctacccctacacctacaccaacctgcaggagtacctgagcggcatcaacaacgaccccgtgagaagcaagttctgcaagatcagagtgctgtgccacaccctggccagaaacatggtgtacatcctgaccatcaccacccccctgaagaacagcgacagcagaaagagaaaggccgtgatcctgaccgccagagtgcaccccggcgagaccaacagcagctggatcatgaagggcttcctggactacatcctgggcaacagcagcgacgcccagctgctgagagacaccttcgtgttcaaggtggtgcccatgctgaaccccgacggcgtgatcgtgggcaactacagatgcagcctggccggcagagacctgaacagaaactacaccagcctgctgaaggagagcttccccagcgtgtggtacaccagaaacatggtgcacagactgatggagaagagagaggtgatcctgtactgcgacctgcacggccacagcagaaaggagaacatcttcatgtacggctgcgacggcagcgacagaagcaagaccctgtacctgcagcagagaatcttccccctgatgctgagcaagaactgccccgacaagttcagcttcagcgcctgcaagttcaacgtgcagaagagcaaggagggcaccggcagagtggtgatgtggaagatgggcatcagaaacagcttcaccatggaggccaccttctgcggcagcaccctgggcaacaagagaggcacccacttcagcaccaaggacctggagagcatgggctaccacttctgcgacagcctgctggactactgcgaccccgacagaaccaagtactacagatgcctgaaggagctggaggagatggagagacacatcaccctggagaaggtgttcgaggacagcgacacccccgtgatcgacatcaccctggacgtggagagcagcagcagaggcagcgacagcagcgagagcatcgacagcctgacctacctgctgaagctgaccagccagaagaagcacctgaagaccaagaaggagagaaacagcaccatcgccagccaccagaacgccagaggccaggaggtgtacgacagaggccacctgctgcagagacacacccagagcaacagcgacgtgaaggacaccagacccaacgagcccgacgactacatggtggactacttcagaagacagctgcccaaccagggcctggcccactgcaagctgagactgcccggcagcagacacagccccgccagcgccagcagagtggccggcaccaccggcaccagacaccacacctggctgatcttcgtgttcctggtggagatgggcaagaagatccccctgaagggcaccgacctgtacggcaactgcttcaaggtgaccagcctgcagagccccatgggcaagcagaccagcacctggaccgagaagaccagaatccccaccgaggacctgcaccacaacctgaagagcaagatcaaggagtgcatcagcttccagagcaagaagaccggcatcaactggaccgacgacgagaagagaagctacaaggacaagggcatcgtgcagacccaggagatcctgcagtacctgctgcccatcgtgcacagcaccaagaacatgcagaccacccagatcaagcagctgttcaaccccagaaccaacttccagatccagcaccagctgaaccccgccacctgcagaaacatcaagaagtacagcaccagctggaccgcccccagaaaccaccccttcgtgatccagggcgacgtgatggccaacagcagcgagtgggtgcagagcaagccccacagaagcctggagagcctgagccccctgaagggccccaagaagaacaagcacagccagatctgggccatcaagaacgaggacatcaagcccctgagcagcaagtgggagaccgccagcagcagcttcggcatggacgccaacgtgctgaagtacaagagcctgcaggccgaggagaccaaccagcagagcagcaagcacaccgccctgcacctgaccaagaacaaggacgagcaggccaacaagaacgacggccagcccaccctgtacctgaagttccagagagagagctag

SEQ ID NO: 254101 - DNA, 2763 bp, Artificial Sequence
  derived and/or modified sequence
atgtctgaagattctgagaaggaggactattctgaccgaaccattagcgatgaggatgagtctgatgaggacatgttcatgaaattcgtttcagaggacctgcatagatgcgctctattaacagccgattcttttggcgacccattttttccccgcactacgcaaatcttgctcgaataccaactggggcgctgggtgccccggttgcgcgaaccgagagatctgtacggcgtgtccagttcaggccccctttcccctacccgctggccatatcattgtgaggtgatcgacgaaaaggtgcaacacatcgactggacaccatcctgtcccgagcccgtgtacataccgaccggcctcgaaaccgagcccctttaccctgattctaaagaggccactgttgtttaccttgccgaggacgcatacaaagagccttgctttgtgtacagcagggttggcggcaacaggactcccctgaaacaacctgtggactatagggataacactctcatgtttgaagcacgctttgaaagcggaaacctgcaaaaagttgtgaaagttgcagaatatgaatatcagctgacagtcaggcccgacctgttcacgaataagcacacccagtggtactattttcaggtgacaaatatgcgtgccggtatcgtttacagattcacgatcgtgaactttactaagcccgccagtctttattcccgcggtatgcggcccctgttttattcggagaaggaggcgaaggcccaccacattggttggcagaggattggggatcaaatcaagtactataggaacaacccgggacaggatggcagacactacttttccctgacatggaccttccaattcccccacaataaagatacttgctacttcgcccactgttatccatatacctacaccaatctccaggagtatctgtcgggtattaacaacgatcccgttaggagtaaattctgcaaaattagggtgctctgccacacactagcgagaaacatggtgtatatccttacgattaccacccctctcaaaaactccgatagccggaaaaggaaagcagtcatcctcaccgccagagtgcacccgggagaaaccaacagcagttggatcatgaaaggattcctagactatattctcggcaactctagcgacgctcaactactgcgcgatacatttgtgtttaaggtggtacccatgttgaatcctgacggggtaattgtcggaaactacaggtgttctctggccggacgcgatctgaatcggaactacacatctctcttgaaagagagcttcccctccgtctggtatacccgaaacatggttcataggctgatggagaagcgagaagttattctgtactgcgatctgcacgggcattccaggaaggagaacatctttatgtacgggtgcgatggcagtgatcgatccaaaacactctatcttcagcagagaatttttcccttaatgctatcgaagaattgtcccgataagttcagcttctccgcctgcaaatttaacgtccagaagagcaaggagggcacaggaagagtcgtgatgtggaaaatgggaatacgaaactccttcactatggaggctactttctgtggcagcaccctgggtaacaaaagaggtacccacttctcaaccaaggatctagagagcatgggttatcacttctgcgatagtctcttggactactgcgatcctgatcgtaccaaatactaccgatgcctcaaggagctagaggagatggagaggcacatcactttagaaaaggtgttcgaggacagtgataccccagtcatcgacatcacactcgacgtggagtcctctagcaggggatcggactcctctgagagcattgacagcttaacgtatctcttgaagctcacctcacagaagaaacacctcaagacaaaaaaagagaggaactctacaattgcctcacatcagaatgctcgaggacaggaagtgtatgaccgcgggcacctgttgcagcggcatacacagtcgaattcggatgtcaaggacactagacccaacgagccagacgactacatggtagactacttccgtaggcaactgcccaaccaggggctcgatctacaccataacctgaagagtaaaattaaggaatgtataagctttcagagcaagaaaactgggatcaattggacagacgacgaaaagcgttcttacaaggataagggcatcgttcaaacccaagagatcctgcagtacttgttaccgattgtccattctacaaagaacatgcaaaccactcaaatcaagcaactgtttaatccacgaaccaacttccaaattcagcaccagctcaaccctgctacatgcaggaatataaaaaagtactcaacttcttggacagctcctcggaaccaccccttcgtgatccaaggcgatgtgatggccaactcatcagagtgggttcagagtaaaccccacagatccctagaatcgctctctcccttaaaggggccaaagaagaataagcacagccagatctgggcaattaagaatgaggatatcaagccactttcatcaaagtgggagacagcaagtagtagcttcggcatggatgccaacgttttgaaatacaagtccttgcaggcggaagagactaatcaacagtcatcaaaacatactgcactgcatctgacgaagaataaggatgagcaggccaataaaaacgatgggcagccgaccctgtacctgaagtttcagcgggagtcctag

SEQ ID NO: 254102 - DNA, 2928 bp, Artificial Sequence
  derived and/or modified sequence
atgaaatttgttagtgaggaccttcatcgttgcgccttgctcaccgctgacagttttggagatcccttcttcccgcggacaacacagatactattggagtatcagctgggacgctgggtgcctcgcctccgggagccacgtgacctgtacggagtatcaagcagtggccctttgtctccaaccaggtggccgtaccattgcgaggtgatcgatgagaaggtgcaacatatcgattggacccctagctgtccggaaccagtgtacattcccacaggcctcgagacagaacctctgtatcccgacagcaaggaagccacagttgtgtacttggctgaagacgcatataaagagccctgttttgtctactctagggtgggaggaaatcgcacccccctcaaacagccagtcgactacagagataacacattaatgtttgaggctaggtttgaatcagggaacctccagaaagtcgttaaagtagccgagtacgagtaccagctgaccgttcgaccagatttattcactaacaagcatacccagtggtattatttccaagtcacaaacatgcgtgccggtattgtctatcgctttacaatagtaaatttcaccaaaccggccagtctctatagccgtgggatgcggcccctgttttatagcgaaaaagaggctaaggcccatcacattgggtggcagaggattggtgaccagattaaatactacagaaacaacccgggacaggacggacgtcattacttctctctgacttggacgttccagtttccgcataataaggacacatgttatttcgctcattgttacccatacacgtatacgaacctgcaggaatatctgtcagggatcaacaatgatcccgtccgcagcaagttctgcaagattagggtgctatgccataccctggcacgaaatatggtgtacattctgactatcaccacccccttgaaaaattccgactcccggaagaggaaggccgtcatcctgaccgcaagagtgcatcccggcgaaaccaacagttcttggatcatgaagggcttcctggattatatcctgggtaactcctcggacgcccagctgttacgtgacacatttgttttcaaggtcgttccgatgttaaacccagatggtgtgattgtcggaaattaccgctgctcacttgcagggcgtgatctgaatcgaaactatacgagcctgctcaaggagagcttcccttctgtatggtacaccagaaatatggtgcatcgcctcatggaaaaacgtgaggtcatcctgtattgcgacctccacggacattcaaggaaggagaatatcttcatgtatggctgtgatgggtctgataggtcaaaaaccttgtatctgcagcagcgcatcttccctctcatgctgagtaaaaactgccctgataagtttagcttctcagcctgcaaatttaatgttcagaaatccaaagaaggaacaggcagggtggtaatgtggaaaatgggaatccggaactcatttactatggaggcgacattttgcggcagcacactgggaaataagcgcggcacacacttcagcacaaaagatctggaaagtatggggtaccacttctgtgactccctacttgactattgtgaccccgaccggacaaagtactacaggtgtctgaaggaattggaggagatggaacgacacataacattagaaaaggtgttcgaagatagtgacacacctgttatcgatatcacgctagatgtcgaaagctcgagtagggggagcgatagtagtgagagtattgactccctgacctacttgctcaaactaacttcccaaaaaaagcacctaaaaacaaaaaaggagcgcaatagcacaatcgcttctcaccaaaacgcacgaggccaggaagtttacgatcgtggacacctattgcagcggcatacccaaagtaattcagacgtaaaagatacccggcctaatgagcccgatgactacatggtggactactttaggcggcaattgcccaaccaagggctggcacactgcaaattgcgcctgcctggtagccgtcactcccctgcatctgcctcgcgcgtcgccggtactaccggtaccagacaccatacttggctcattttcgtgtttcttgtggaaatgggtaagaagattccactgaagggcactgatctatacggcaattgcttcaaggtgacctcactgcagtcacccatgggcaagcagacctctacctggacggagaagacacgtatcccgaccgaggacttacaccacaatcttaagtcaaagattaaggagtgtatctcctttcagtccaaaaagaccggcatcaattggaccgacgatgagaagcgctcctacaaagacaagggaatcgtgcagacacaggaaatcttacagtacctgctcccgatcgtgcactcaacaaagaatatgcaaaccacacaaatcaaacagctttttaatcctcggaccaactttcagattcaacatcagctgaatcccgcaacttgccggaatattaaaaagtactcaactagttggacagctccgcggaaccaccccttcgtcatccagggtgatgtcatggcgaattcatctgagtgggtgcagagcaaaccacaccggagtctcgaatctctttcaccactcaaaggacctaagaaaaacaaacactcccagatctgggcaattaaaaacgaagacatcaaaccgctgtctagtaaatgggaaacagcttccagctcttttggcatggacgccaacgtattgaagtataaatccctgcaggcagaagaaacaaaccagcaatcctccaagcacacggcactgcatctcaccaaaaataaggacgaacaggcgaacaaaaacgacgggcagccaacactgtatctgaagtttcagcgagagtcttag

SEQ ID NO: 254103 - DNA, 2763 bp, Artificial Sequence
  derived and/or modified sequence
atgtctgaagattctgagaaggaggactacagcgacaggaccatcagtgatgaagatgaaagtgatgaggacatgttcatgaagtttgtgtctgaggacctgcaccgctgtgccctgctgacagctgacagctttggagaccccttcttccccaggaccacccagatcctgctggagtaccagctgggccgctgggtgccccggctgcgggagccccgggacctgtatggagtgagcagcagcggccccctgagccccacccgctggccctaccactgtgaggtgattgatgagaaggtgcagcacatcgactggacccccagctgcccagagcctgtgtacatccccaccggcctggagacagagcccctgtacccagacagcaaggaggccaccgtggtgtacctggccgaggatgcctacaaggagccctgctttgtgtacagccgggtgggcggcaacagaacacccctgaagcagcctgtggactacagagacaacaccctgatgtttgaggccaggtttgaaagtggcaacctgcagaaggtggtgaaggtggccgagtatgagtaccagctgactgtgcggccagacctcttcaccaacaagcacacccagtggtactacttccaggtgaccaacatgagagctggcatcgtgtaccgcttcaccatcgtgaacttcaccaagccagccagcctgtacagccggggcatgaggcccctcttctacagcgagaaggaggccaaggcccaccacatcggctggcagagaattggagaccagatcaagtactacagaaacaaccctggccaggacggccgccactacttcagcctgacctggaccttccagttcccccacaacaaggacacctgctactttgcccactgctacccctacacctacaccaacctgcaggagtacctgagcggcatcaacaatgaccctgtgcgcagcaagttctgcaagatccgggtgctgtgccacaccctggccaggaacatggtgtacatcctgaccatcaccacccccctgaagaacagcgacagcaggaagaggaaggccgtcatcctgacagcccgggtgcaccctggagagaccaacagctcctggatcatgaagggcttcctggactacatcctgggcaacagcagtgatgcccagctgctgcgggacacctttgtgttcaaggtggtgcccatgctgaacccagatggagtgattgtgggcaactaccgctgcagcctggccggccgggacctgaacagaaactacaccagcctgctgaaggagagcttccccagcgtgtggtacaccaggaacatggtgcaccggctgatggagaagcgggaggtgatcctgtactgtgacctgcacggccacagcaggaaggagaacatcttcatgtatggctgtgatggcagtgacaggagcaagaccctgtacctgcagcagaggatcttccccctgatgctgagcaagaactgcccagacaagttctccttcagcgcctgcaagttcaacgtgcagaagagcaaggagggcaccggccgggtggtgatgtggaagatgggcatccggaacagcttcaccatggaggccaccttctgtggcagcaccctgggcaacaagaggggcacccacttcagcaccaaggacctggagagcatgggctaccacttctgtgacagcctgctggactactgtgaccctgacaggaccaagtactaccgctgcctgaaggagctggaggagatggagcggcacatcaccctggagaaggtgtttgaggacagcgacacccctgtgattgacatcaccctggatgtggagagcagcagccggggcagtgacagcagcgagagcattgacagcctgacctacctgctgaagctgaccagccagaagaagcacctgaagaccaagaaggagaggaacagcaccatcgccagccaccagaatgcccggggccaggaggtgtatgaccggggccacctgctgcagaggcacacccagagcaacagtgatgtgaaggacacccggcccaatgaaccagatgactacatggtggactacttccggcggcagctgcccaaccagggcctggacctgcaccacaacctgaagagcaagatcaaggagtgcatctccttccagagcaagaagacaggcatcaactggacagatgatgagaagaggagctacaaggacaagggcatcgtgcagacccaggagatcctgcagtacctgctgcccatcgtgcacagcaccaagaacatgcagaccacccagatcaagcagctgttcaaccccaggaccaacttccagatccagcaccagctgaacccagccacctgcaggaacatcaagaagtacagcacctcctggacagcccccaggaaccacccctttgtgatccagggagatgtgatggccaacagcagcgagtgggtgcagagcaagccccacaggagcctggagagcctgagccccctgaagggccccaagaagaacaagcacagccagatctgggccatcaagaatgaagacatcaagcccctgagcagcaagtgggagacagccagcagcagctttggcatggatgccaacgtgctgaagtacaagagcctgcaggccgaggagaccaaccagcagagcagcaagcacacagccctgcacctgaccaagaacaaggatgagcaggccaacaagaatgatggccagcccaccctgtacctgaagttccagcgggagagctag

SEQ ID NO: 254104 - DNA, 2928 bp, Artificial Sequence
  derived and/or modified sequence
atgaagtttgtgtctgaggacctgcaccgctgtgccctgctgacagctgacagctttggagaccccttcttccccaggaccacccagatcctgctggagtaccagctgggccgctgggtgccccggctgcgggagccccgggacctgtatggagtgagcagcagcggccccctgagccccacccgctggccctaccactgtgaggtgattgatgagaaggtgcagcacatcgactggacccccagctgcccagagcctgtgtacatccccaccggcctggagacagagcccctgtacccagacagcaaggaggccaccgtggtgtacctggccgaggatgcctacaaggagccctgctttgtgtacagccgggtgggcggcaacagaacacccctgaagcagcctgtggactacagagacaacaccctgatgtttgaggccaggtttgaaagtggcaacctgcagaaggtggtgaaggtggccgagtatgagtaccagctgactgtgcggccagacctcttcaccaacaagcacacccagtggtactacttccaggtgaccaacatgagagctggcatcgtgtaccgcttcaccatcgtgaacttcaccaagccagccagcctgtacagccggggcatgaggcccctcttctacagcgagaaggaggccaaggcccaccacatcggctggcagagaattggagaccagatcaagtactacagaaacaaccctggccaggacggccgccactacttcagcctgacctggaccttccagttcccccacaacaaggacacctgctactttgcccactgctacccctacacctacaccaacctgcaggagtacctgagcggcatcaacaatgaccctgtgcgcagcaagttctgcaagatccgggtgctgtgccacaccctggccaggaacatggtgtacatcctgaccatcaccacccccctgaagaacagcgacagcaggaagaggaaggccgtcatcctgacagcccgggtgcaccctggagagaccaacagctcctggatcatgaagggcttcctggactacatcctgggcaacagcagtgatgcccagctgctgcgggacacctttgtgttcaaggtggtgcccatgctgaacccagatggagtgattgtgggcaactaccgctgcagcctggccggccgggacctgaacagaaactacaccagcctgctgaaggagagcttccccagcgtgtggtacaccaggaacatggtgcaccggctgatggagaagcgggaggtgatcctgtactgtgacctgcacggccacagcaggaaggagaacatcttcatgtatggctgtgatggcagtgacaggagcaagaccctgtacctgcagcagaggatcttccccctgatgctgagcaagaactgcccagacaagttctccttcagcgcctgcaagttcaacgtgcagaagagcaaggagggcaccggccgggtggtgatgtggaagatgggcatccggaacagcttcaccatggaggccaccttctgtggcagcaccctgggcaacaagaggggcacccacttcagcaccaaggacctggagagcatgggctaccacttctgtgacagcctgctggactactgtgaccctgacaggaccaagtactaccgctgcctgaaggagctggaggagatggagcggcacatcaccctggagaaggtgtttgaggacagcgacacccctgtgattgacatcaccctggatgtggagagcagcagccggggcagtgacagcagcgagagcattgacagcctgacctacctgctgaagctgaccagccagaagaagcacctgaagaccaagaaggagaggaacagcaccatcgccagccaccagaatgcccggggccaggaggtgtatgaccggggccacctgctgcagaggcacacccagagcaacagtgatgtgaaggacacccggcccaatgaaccagatgactacatggtggactacttccggcggcagctgcccaaccagggcctggcccactgcaagctgcggctgcccggcagccgccacagccctgccagcgccagccgggtggccggcaccaccggcaccaggcaccacacctggctgatctttgtgttcctggtggagatgggcaagaagatccccctgaagggcacagacctgtatggcaactgcttcaaggtgaccagcctgcagagccccatgggcaagcagaccagcacctggacagagaagacccgcatccccacagaggacctgcaccacaacctgaagagcaagatcaaggagtgcatctccttccagagcaagaagacaggcatcaactggacagatgatgagaagaggagctacaaggacaagggcatcgtgcagacccaggagatcctgcagtacctgctgcccatcgtgcacagcaccaagaacatgcagaccacccagatcaagcagctgttcaaccccaggaccaacttccagatccagcaccagctgaacccagccacctgcaggaacatcaagaagtacagcacctcctggacagcccccaggaaccaccccttcgtcatccagggagatgtgatggccaacagcagcgagtgggtgcagagcaagccccacaggagcctggagagcctgagccccctgaagggccccaagaagaacaagcacagccagatctgggccatcaagaatgaagacatcaagcccctgagcagcaagtgggagacagccagcagcagctttggcatggatgccaacgtgctgaagtacaagagcctgcaggccgaggagaccaaccagcagagcagcaagcacacagccctgcacctgaccaagaacaaggatgagcaggccaacaagaatgatggccagcccaccctgtacctgaagttccagcgggagagctag

SEQ ID NO: 254105 - DNA, 2763 bp, Artificial Sequence
  derived and/or modified sequence
atgagcgaggacagcgagaaggaggactacagcgaccggaccatcagtgacgaggatgagagtgacgaggatatgtttatgaagtttgtgagcgaggacctccacagatgcgcccttttgaccgccgattcctttggcgatccatttttccctcgcacgactcaaattttgctagaatatcagctgggccgatgggtccccagacttcgcgaaccacgggacctgtatggggtcagctcatctggccccttgagtcccacaaggtggccctaccattgcgaggtgatcgatgaaaaggtccagcacatcgattggacaccatcttgtcccgagccagtatatatccccacaggtttggaaaccgagccgttatatcccgacagcaaagaggctacagtggtgtacctggctgaggatgcttataaggagccttgcttcgtatatagcagagtgggcgggaataggacccctttgaagcaacccgttgactatcgggacaataccctgatgtttgaggcgaggtttgaatctggtaacttacagaaagtggtgaaggtggcggagtacgaatatcaactcacagtccgccctgacctatttactaacaagcacacccagtggtattacttccaggtgactaatatgcgtgcgggaatcgtataccgcttcactatagttaattttacaaaacccgccagtttgtattccagaggaatgcggccactgttctatagcgagaaggaggccaaagcacaccacattggttggcagcgaatcggtgatcagattaagtattacaggaacaatcccgggcaggacgggaggcattacttcagcttaacatggacctttcagtttcctcacaacaaggatacatgttatttcgctcactgctatccatatacttatactaacctgcaagaatatctgagcgggataaacaatgaccctgtcaggtcaaagttctgcaagataagggttctgtgccacacattagctcggaacatggtctatatattgacaataacaacgcctttaaaaaattctgattctcgcaaacggaaggccgtaattctgaccgcaagagtgcatccgggagaaacaaactcttcctggattatgaaaggctttctagactatattttaggtaattcgtctgacgctcagctcttacgagacacatttgtgttcaaggtagtgcctatgttgaacccagacggcgtgatcgtgggaaattatcgatgctcactggccggacgtgatttgaaccggaactatacaagcctcctgaaagaaagcttcccctcagtctggtatacccgcaacatggtccaccggcttatggaaaagcgagaggtcatactatattgcgatttgcacggccattccaggaaggagaatatcttcatgtatggctgtgatgggtcagacaggtctaagacactgtacctgcagcagcgaatctttccccttatgctgagcaaaaactgtcccgacaaatttagcttctccgcgtgcaagttcaatgtgcagaagtctaaggagggtaccggacgtgtggtcatgtggaagatgggcattcggaatagctttacaatggaagcgactttctgcggctccacgctcggaaacaaaagaggcactcacttcagcactaaggacctggagtccatggggtatcacttctgtgacagcctcctcgactactgcgatcccgatcggactaaatattatcgatgtcttaaggagttggaggagatggaacggcacatcacgctagaaaaagtgttcgaggactcagacaccccggttattgacatcaccttagatgttgaatcttcttcccgcggaagtgactcatccgagagtatagacagtctgacatacttgctgaagcttacctcccagaaaaaacatctgaagaccaaaaaggagagaaatagtacaatagcttctcaccagaatgccaggggccaggaggtttatgaccgagggcatctgctgcagcgccacacacagagcaattcagatgtgaaggacactcgccccaacgagcctgatgactatatggtcgattattttagaaggcagctccctaatcagggcttagatctgcatcacaacctgaagtcaaaaatcaaggagtgtataagtttccagagcaaaaagactgggatcaactggacagatgacgagaagagaagttacaaggacaaaggaatcgtgcagacacaggagatcttgcaatacctcctccctatcgtccactccaccaagaacatgcagacaacgcaaatcaagcagctgttcaaccctagaacaaactttcagatacagcaccagttgaaccccgccacctgccgcaatataaagaagtatagtacctcttggaccgcacctcgcaaccacccattcgtgattcagggcgacgtgatggctaactcttcagagtgggtgcagtctaaacctcacagaagcttggaatccctttcccccctgaaagggcctaagaaaaataagcactcccagatatgggccattaagaatgaagacatcaaacctctgtcatcaaagtgggagaccgccagcagttcatttggaatggatgctaatgtgcttaaatataaatcactgcaggctgaggaaaccaatcagcagtcctccaaacacactgcccttcatctgactaagaacaaagacgagcaggcaaataagaatgatgggcaaccaacattatatctaaaattccagagggagagttag

SEQ ID NO: 254106 - DNA, 2928 bp, Artificial Sequence
  derived and/or modified sequence
atgaagttcgtgagcgaggacctgcaccggtgcgccctgctgaccgctgacagcttcggcgatccattcttccctcggaccacacagatcctgctggaatatcaactggggcgctgggtgccccggctcagagagcctagagatctttacggcgtgagttcaagtggtcctctgtcaccgacacgatggccataccactgcgaggtcattgatgagaaagtccagcatattgattggacacccagctgccccgagccagtctacattccaacaggtttggagaccgagccactgtatccggactctaaggaggcaactgtggtttaccttgccgaggacgcgtataaagagccctgctttgtttactccagagtgggagggaaccgcacccccctcaaacagccagtagattaccgtgacaatacactgatgttcgaagcccgatttgagtctggaaacctccagaaggtagtgaaggtcgcagaatacgaatatcagttgaccgtgagaccagatttgtttaccaataagcacacccagtggtactactttcaggtcaccaatatgcgagccggaatagtgtatcggtttactatcgttaatttcacaaaaccagctagcctgtacagtagggggatgaggccgttattttacagcgagaaggaggctaaggcccatcatatcggctggcagcggattggtgaccaaattaaatattatagaaacaatccaggacaggatggcagacactatttcagcctgacctggacatttcagttccctcacaataaagacacatgctacttcgcccactgttacccttatacatacacaaacctgcaggaatatctgtcaggaatcaataatgatcccgtgcgtagcaagttctgcaaaatccgcgtgctgtgtcatacactggctcgtaatatggtatatatcctcactataacaacacccctcaagaattccgattctcggaaaagaaaagctgtgatattgactgccagagttcaccccggagaaactaactcctcttggatcatgaagggattcctcgactacatactgggtaacagctcagacgctcaactcctgcgggacactttcgtgtttaaagtggtgcccatgctgaacccagatggggtgattgtgggcaactatcgctgctccctggctgggagagacctcaaccggaactacacctcactgctgaaggagtcattcccatccgtatggtataccagaaacatggttcatagactcatggaaaaaagagaggtgatcctgtactgcgatcttcacggccacagccggaaggaaaatattttcatgtatgggtgtgatggctcagacaggagcaagacattgtatctccagcaacggattttccccctcatgcttagcaaaaactgtcctgataaatttagcttctccgcttgcaaatttaatgtgcagaagagtaaagaaggtactgggagagttgtgatgtggaaaatgggtataaggaactcttttaccatggaggcgactttttgcgggtccacccttggcaataaacgtggcacgcacttctctaccaaggacctggaatcaatgggatatcacttttgcgattctctattagattactgcgaccccgataggaccaagtactacagatgtcttaaggaactggaagagatggagagacatattaccctcgagaaggtcttcgaagatagcgacactccggtcattgacatcaccctggacgtagaatcatctagcaggggcagcgactcctcagagtcaatcgactctctgacttacctcctgaagctgacatcacaaaagaagcacctgaaaaccaaaaaagaaagaaactcaactattgcaagtcatcaaaatgcccgcggccaagaagtgtacgatcggggccaccttctgcaacggcatacccagtccaattccgacgtgaaggacacccgtccaaatgaacccgacgactacatggtcgactattttaggaggcagttacctaaccaaggtctagcccactgtaagctcaggctgcctggatctagacactcccctgccagcgccagccgcgtggccggcactaccgggacccgacaccacacctggttgatctttgtgttcttggtggagatggggaaaaagattccactgaaaggaaccgacctttacggaaattgcttcaaggttacaagcctccaatctcctatgggaaagcagacttcgacctggaccgagaagacgaggattccaacagaggatctccatcacaacctaaagtccaagattaaagagtgcatttcctttcagagtaaaaagaccggcattaattggaccgatgatgaaaagcgatcctataaagacaaaggaatagttcagacccaggaaatcctgcaatacctccttcctatcgtccactccaccaaaaacatgcaaaccacccagatcaagcagttgtttaaccccaggaccaatttccaaatacagcaccaacttaatccagccacgtgcagaaatattaagaaatactctacatcttggaccgcgccccgcaatcaccccttcgtgatccagggggatgtgatggccaatagttcagagtgggtacagtctaagccgcaccgtagcctagaatctttgagtcccctgaaaggtccaaaaaaaaacaagcatagccagatttgggcaatcaaaaatgaggatatcaaacccttgtctagtaagtgggagaccgcttccagcagtttcgggatggatgctaacgtgttgaagtacaagagtctgcaggccgaggaaacgaaccagcagagctcgaagcataccgctttgcacctcaccaagaacaaagatgaacaggccaataagaatgacggccagcctacgttgtacttaaagttccagagagagtcatag

SEQ ID NO: 254107 - DNA, 2763 bp, Artificial Sequence
  derived and/or modified sequence
atgagtgaggactcggagaaggaagactatagtgatcgcacgatttctgatgaggacgagagcgacgaagatatgtttatgaagttcgtttcagaggacctgcaccgctgtgcgctcttaacagcagattccttcggagacccattttttccccgtaccacccagatcctcctcgaataccagctgggacggtgggtgcccagactacgcgagccaagagacctttatggtgtgagttcctctgggcctttgagccccacccggtggccctatcactgtgaagtgatagacgagaaggtgcagcatatcgattggacaccaagttgccctgagcctgtgtacattccaaccggtctcgaaactgagcccctctaccctgattctaaagaggcaacagtggtttatctcgccgaagatgcatacaaagagccatgcttcgtgtacagcagggtgggcggtaataggaccccattgaaacagccggttgattatagagacaacactcttatgtttgaggccaggttcgaatccggaaatctccagaaagtcgtgaaagttgccgagtacgaatatcaactgaccgtgcgccctgacctctttaccaacaaacacacacagtggtactatttccaggtcacgaatatgcgtgctgggatcgtctatcgatttacaattgtgaactttacgaaacccgcttcactctattcccgagggatgcggcctttgttttattcagagaaagaagccaaagctcaccatattggctggcagaggataggcgatcagattaaatattaccggaacaatcctggacaggatgggcgacactatttttcccttacctggacgttccagtttccacataataaggacacgtgctactttgcccattgttacccgtacacgtataccaatctccaggagtatctgtcaggaatcaacaatgatccggttcggagcaagttctgcaaaataagggtcctatgtcacacactggccagaaatatggtgtacattctgacgatcacaacacctcttaagaactcagatagccgtaagaggaaagcagtgatcctcactgctcgcgtccaccccggagaaacaaactccagctggatcatgaaaggctttctcgattatatcctagggaactcatccgatgcccaattactgcgggacacatttgtgttcaaagttgtgccaatgctgaatccagatggcgtcatcgttgggaactatagatgttctctcgctggacgggatttgaatcggaattacacatcactcctgaaagagtccttccccagtgtgtggtatacccgcaatatggttcatagactcatggagaaaagagaggtgatcctgtattgcgacctgcacggacactcccgcaaggagaacatcttcatgtacggttgtgacggaagcgaccggtccaaaaccctctatctgcagcagaggattttccctctgatgttgagcaagaattgtcccgacaaattctccttttctgcatgcaaatttaatgtgcagaagagtaaagaggggaccggaagagtggtgatgtggaagatgggaatcaggaattctttcacaatggaagccacgttctgtggatccacactggggaacaaaagagggacccacttttcaacaaaggatttggaaagtatgggataccatttctgcgattccctcttagattattgcgaccctgaccggacaaaatactaccgctgtctgaaagagctcgaggaaatggagcgacatatcacattggaaaaagtttttgaggactctgatacacccgtaatcgacatcacacttgacgtggaatctagctctcgaggatcggactcctccgagagtatcgacagtctaacctatctcctcaagctaacctcccagaaaaagcatctgaagacaaagaaagagcgtaattccaccattgcatcccatcagaacgcgaggggccaagaggtgtatgaccggggacatctgctgcaacggcacacccagagtaattctgacgtgaaagacacaaggcctaacgaacccgacgattatatggttgactattttcggaggcaacttcccaaccagggtctagatctccaccataatcttaagagtaagatcaaagagtgcatctcattccaatccaaaaaaacaggaatcaactggacagacgatgaaaagagaagttataaagataaaggcatcgttcagactcaagagatactccagtacctgttgccgatcgtacattccacaaagaacatgcagaccacccagattaaacaactattcaacccaagaacgaacttccagatccagcatcagctgaatcccgctacatgccggaacattaaaaaatattcaacttcctggacagctcccagaaaccatccatttgtgatacagggcgacgttatggctaatagctcagaatgggtccagtcgaaaccgcacagaagcctggagtctttgtccccattgaaggggcctaaaaagaataagcactctcagatctgggccatcaagaatgaggatatcaagccactcagttccaagtgggaaaccgcttctagttccttcggcatggacgctaacgtgctgaaatacaagtccctccaagctgaagaaacgaatcagcagtctagcaaacacacagcactgcacctgactaagaataaggacgagcaggccaataagaatgacggccagcctactttgtatctgaaatttcagcgggaaagctag

SEQ ID NO: 254108 - DNA, 2928 bp, Artificial Sequence
  derived and/or modified sequence
atgaaattcgtgtcagaggacctgcatcggtgtgccctcctgacagctgactccttcggcgacccattctttcctagaaccacgcaaatcctgctggagtaccagcttggacgctgggtgccaaggctgagggagcccagagacctatacggtgtgagcagcagcgggccattatctcccacaagatggccttaccattgcgaggtaattgatgagaaagttcagcacattgattggacccctagctgtcctgagcccgtgtatattcctaccgggcttgagaccgagcccctctatcccgactcgaaggaggctactgtagtgtatctcgcggaggatgcttataaggaaccctgtttcgtttactcccgtgtggggggaaacaggacacctctgaaacagccggtggattacagagacaacacattgatgtttgaagctaggtttgagagcggcaatctgcagaaggtggtgaaggtggcagagtacgagtaccagctgacagttagaccagacctgtttactaacaagcacacccaatggtactattttcaggtgaccaacatgagggcaggtatagtttaccgctttacaattgtcaacttcactaaacctgcttcattatattcccgaggcatgcgtcctctcttttactctgagaaggaggcaaaggcacaccatattggctggcagcgcataggtgaccagattaaatactatcgtaacaacccagggcaggacgggagacattacttttcactgacttggacatttcagttcccacacaataaggatacatgctatttcgcgcactgctacccctacacatacacgaacttgcaagagtatctgagcggcatcaacaatgatcctgttcggagtaagttttgcaaaatccgtgtactctgccatactttggcgaggaacatggtgtatattctcactattacaacccccctcaaaaacagcgactccaggaagaggaaagcagtcatcctgaccgcccgtgtccaccccggagagacaaattcctcgtggattatgaagggatttctagactacatccttggtaacagttcggacgcgcaactgttgcgggacacattcgtgttcaaggtggttcccatgttaaatccggacggtgtcatcgtggggaattatagatgttcactggccggtcgcgatcttaatcgcaattatacttccctgcttaaggagtccttccctagcgtctggtacaccagaaacatggtacatcgcctcatggagaaacgcgaagtgatcctctactgcgacctccacggccactcacggaaggaaaacatttttatgtacggctgcgatggtagtgaccggagtaagactctgtacctgcagcagcgcatcttcccactaatgctgtctaaaaattgcccggacaagttctccttcagtgcttgcaagtttaacgttcaaaagtccaaggagggcacgggaagggtggtgatgtggaaaatgggcatcaggaactctttcactatggaagcgacattctgtgggtcaacactggggaacaaacgcggaactcactttagcacaaaagacttggagtccatgggctatcacttctgcgatagcctgcttgactactgcgatcccgaccggacaaaatactacagatgcctgaaggagctggaggaaatggaacggcacataacgttggaaaaggtttttgaggatagcgatacaccggtaatcgacatcacgctggatgttgagagctcctccagaggcagcgacagctccgaaagcattgactcattgacgtacttgttgaagctgacaagccaaaagaaacatttaaagaccaagaaggaaaggaattctacaatcgcaagccaccagaacgccagaggccaagaggtgtacgatcggggtcacttactgcaacgacatacccagtctaactccgacgtcaaggataccaggcccaacgaaccagatgattacatggtggactattttaggcgacagctgcctaaccaggggctggcccattgtaagctgcgattacccggtagtaggcacagccccgctagcgctagccgagtggcaggcaccacaggcaccaggcaccacacatggcttatatttgtcttccttgtggaaatgggaaagaaaattccgttgaaaggcactgatttatatggtaactgctttaaggtgacttctttgcaaagcccgatgggaaagcaaacttccacatggactgagaagactaggatccctacagaggacctccaccataatctgaagtctaaaataaaggagtgtatctcattccagtccaagaagacaggcatcaactggacggatgatgagaaacggagttacaaggataaagggatagtgcagacccaggaaattttacagtacctgctgcctattgtgcacagcactaaaaacatgcagactacccagattaagcaactattcaaccctaggaccaattttcaaatacaacaccagctgaatcccgctacgtgtcgcaacatcaaaaagtatagcactagctggactgcacccaggaaccatccctttgtgattcagggggatgtgatggcaaattcatctgagtgggttcagtcaaaaccacataggtccctggagagcctatcacctttgaaaggccctaagaaaaacaaacactcgcagatctgggccattaaaaatgaggacataaaacctctctccagtaagtgggagacagcctcctccagctttggaatggacgctaatgtcctgaagtataaatccttacaggccgaggagacgaaccagcaaagtagtaaacacaccgccctgcatctcacaaaaaataaagatgagcaagcaaataagaatgatggccagcctaccctgtaccttaagttccagcgcgagtcctag

SEQ ID NO: 254109 - DNA, 3533 bp, Artificial Sequence
  derived and/or modified sequence
gttgcctgatgacgagagttgggagtgtggctggggctgcggatctccagcagtggcgttacttctagcggctggataccgggttctccgcgagatcgcgagatcccgagatattctccccgcacggaagcgacgactggcctggccagaggactcgcgtgggagcgaggtgccggccccgacaggacggtgagaaattgttttacagcctacccgtatattacaagaaatctcaagtcaaacactggaaaagatgtcagaagattcagaaaaggaagactattcagacagaacaatcagtgatgaagatgaatcggatgaggatatgttcatgaaatttgtaagtgaagatcttcatcggtgtgcacttttaacagctgactcttttggtgatcccttcttcccccggactacacagatactattagaatatcagctagggagatgggtgccacgtcttcgtgaaccaagggatttatatggtgtctcttcttctggtccattgagcccaacacggtggccataccattgtgaagtcatcgatgaaaaagtccagcatattgattggactccttcttgtcctgagccagtgtatatcccaacgggcttagaaacggaacccctttatccagactccaaggaagctactgtggtttatctagctgaagatgcttacaaagagccctgttttgtgtattcccgagttgggggtaaccgaacacctttgaagcagcctgtggattaccgtgacaatactttgatgtttgaagcaaggtttgagagtggtaatctacagaaggtagtcaaagtggcagaatacgaataccaattgactgtacgccctgacctcttcacaaataaacacacccagtggtactatttccaagtcactaatatgcgagcaggaatagtctacagattcactattgtcaacttcaccaaacctgctagtctttacagtcggggtatgcgcccactgttctattctgaaaaagaggccaaggctcatcacattggctggcagagaataggagaccaaatcaagtattataggaacaacccaggccaagatgggcgccattatttctctcttacatggacatttcaatttccacacaacaaagatacctgctactttgctcattgctatccatacacttacaccaacctgcaagaatacctttctggcatcaataatgatccagtacggtcaaagttttgtaaaatacgtgttttgtgccacacgcttgctaggaacatggtgtatattttaacaatcactacccccttgaagaactctgactcaagaaagcggaaggctgtgattctgactgcaagggtccatccaggggaaaccaacagctcttggatcatgaaaggcttcctagattatattttaggaaactcaagtgatgcacagttgcttcgggacacttttgtcttcaaggtggtacccatgctcaatccagatggtgtgattgtgggaaattatcgctgttccttagctggacgggatttaaaccgtaattatacatctctcctgaaggaatcttttccttctgtatggtatacccggaacatggttcatagactgatggagaaacgagaggttattttatactgtgatcttcatggccatagtaggaaagagaacatcttcatgtatggctgtgatggtagtgacagatctaagacattatacttacagcaacgaatcttcccacttatgctaagcaaaaattgtccagataaattttcattctcagcttgcaagtttaatgtccagaagagcaaagaaggaacaggaagggtggtaatgtggaaaatgggaatcaggaacagctttaccatggaggccaccttctgtggatctactctgggtaacaaacgaggcactcatttcagcacgaaagacctggaatcaatgggatatcatttttgtgattctctcttggattattgtgatcccgaccggaccaagtattatcggtgcctgaaagaattagaagaaatggaaagacatataaccctggaaaaagtctttgaggattcagacacacctgtgatagacattacattggatgtagagtctagtagccgaggctctgacagttcagaatccattgactctctgacttaccttctcaagttaacttctcagaaaaaacatttgaaaacaaagaaggaaaggaattctaccatagcaagccaccaaaatgccagaggacaagaggtttatgatagagggcatttgctgcaaagacacacacaatcaaattctgatgtgaaagatacaaggccaaatgaaccagatgattatatggttgattatttcagaagacaattacctaatcaaggtttggatctgcaccacaacttaaaaagcaaaataaaagaatgcatatctttccaaagcaagaagactggcataaattggacagatgatgaaaaaagaagctacaaggataaaggaatagttcaaactcaagaaatattgcagtatttgctccccatcgtgcatagcactaaaaacatgcaaaccactcagataaaacagctattcaatccaagaaccaacttccaaatccaacatcaactaaatccggctacttgcagaaatataaagaaatacagcacatcttggacagcacccagaaatcacccttttgtaatccaaggggatgttatggcaaactcttcagaatgggtccagtctaagccccacaggtcattggaaagtttatcacctctcaaaggccccaagaagaataaacattctcaaatctgggccataaagaatgaagacataaaacctctcagcagcaagtgggagactgcttcttcaagctttggaatggatgcaaatgttctaaaatataagagtcttcaagctgaagaaactaaccagcaaagctctaagcatacagccctccatctaactaaaaataaggatgagcaggccaataagaatgatggacaacccaccttatatctgaagttccaaagggagagttaatctagctttatactgctctgagaactgtgaatgaaggataacatatgcttatgtagtaaaaagaaaaaaaggaaagccctccccttcccctttccctatctctccccttacacatgcatatgcataaactaaaaattttagatatcccatcttctgtagtgggaacatctttcagagatttaaaaagaaatccagagaaaatatggaaaaatattaaagcagatatttatatttagtttttatcagcatggaaaaaaatctctgaagttttgatttcttccaaaactacttacacattcgacaccaaaaaaacttaagaactcaaagtaggaatgacatataatatgtcactgattttaacctccctactagacactttaatcaattagtcaacaaacatcatttcctgattttctgttatatcattagtgtgctaggaaccatttctctctactaggagattaccacataattgtacagataaaacatacctgaataaaatgattacagaataaga

SEQ ID NO: 254110 - DNA, 3767 bp, Artificial Sequence
  derived and/or modified sequence
gttgcctgatgacgagagttgggagtgtggctggggctgcggatctccagcagtggcgttacttctagcggctggataccgggttctccgcgagatcgcgagatcccgagatattctccccgcacggaagcgacgactggcctggccagaggactcgcgtgggagcgaggtgccggccccgacaggacggtgagaaattgttttacagcctacccgtatattacaagaaatctcaagtcaaacactggaaaagatgtcagaagattcagaaaaggaagactattcagacagaacaatcagtgatgaagatgaatcggatgaggatatgttcatgaaatttgtaagtgaagatcttcatcggtgtgcacttttaacagctgactcttttggtgatcccttcttcccccggactacacagatactattagaatatcagctagggagatgggtgccacgtcttcgtgaaccaagggatttatatggtgtctcttcttctggtccattgagcccaacacggtggccataccattgtgaagtcatcgatgaaaaagtccagcatattgattggactccttcttgtcctgagccagtgtatatcccaacgggcttagaaacggaacccctttatccagactccaaggaagctactgtggtttatctagctgaagatgcttacaaagagccctgttttgtgtattcccgagttgggggtaaccgaacacctttgaagcagcctgtggattaccgtgacaatactttgatgtttgaagcaaggtttgagagtggtaatctacagaaggtagtcaaagtggcagaatacgaataccaattgactgtacgccctgacctcttcacaaataaacacacccagtggtactatttccaagtcactaatatgcgagcaggaatagtctacagattcactattgtcaacttcaccaaacctgctagtctttacagtcggggtatgcgcccactgttctattctgaaaaagaggccaaggctcatcacattggctggcagagaataggagaccaaatcaagtattataggaacaacccaggccaagatgggcgccattatttctctcttacatggacatttcaatttccacacaacaaagatacctgctactttgctcattgctatccatacacttacaccaacctgcaagaatacctttctggcatcaataatgatccagtacggtcaaagttttgtaaaatacgtgttttgtgccacacgcttgctaggaacatggtgtatattttaacaatcactacccccttgaagaactctgactcaagaaagcggaaggctgtgattctgactgcaagggtccatccaggggaaaccaacagctcttggatcatgaaaggcttcctagattatattttaggaaactcaagtgatgcacagttgcttcgggacacttttgtcttcaaggtggtacccatgctcaatccagatggtgtgattgtgggaaattatcgctgttccttagctggacgggatttaaaccgtaattatacatctctcctgaaggaatcttttccttctgtatggtatacccggaacatggttcatagactgatggagaaacgagaggttattttatactgtgatcttcatggccatagtaggaaagagaacatcttcatgtatggctgtgatggtagtgacagatctaagacattatacttacagcaacgaatcttcccacttatgctaagcaaaaattgtccagataaattttcattctcagcttgcaagtttaatgtccagaagagcaaagaaggaacaggaagggtggtaatgtggaaaatgggaatcaggaacagctttaccatggaggccaccttctgtggatctactctgggtaacaaacgaggcactcatttcagcacgaaagacctggaatcaatgggatatcatttttgtgattctctcttggattattgtgatcccgaccggaccaagtattatcggtgcctgaaagaattagaagaaatggaaagacatataaccctggaaaaagtctttgaggattcagacacacctgtgatagacattacattggatgtagagtctagtagccgaggctctgacagttcagaatccattgactctctgacttaccttctcaagttaacttctcagaaaaaacatttgaaaacaaagaaggaaaggaattctaccatagcaagccaccaaaatgccagaggacaagaggtttatgatagagggcatttgctgcaaagacacacacaatcaaattctgatgtgaaagatacaaggccaaatgaaccagatgattatatggttgattatttcagaagacaattacctaatcaaggtttggctcactgcaagctccgcctcccaggttcacgccattctcctgcctcagcctcccgagtagctggaactacaggcacccgccaccatacctggctaatttttgtatttttagtagagatggggaaaaaaattcccctcaagggaactgatttgtatggaaactgtttcaaagtgacatccctgcagtctcctatgggcaaacaaacttctacttggactgagaagacaaggataccaacagaagatctgcaccacaacttaaaaagcaaaataaaagaatgcatatctttccaaagcaagaagactggcataaattggacagatgatgaaaaaagaagctacaaggataaaggaatagttcaaactcaagaaatattgcagtatttgctccccatcgtgcatagcactaaaaacatgcaaaccactcagataaaacagctattcaatccaagaaccaacttccaaatccaacatcaactaaatccggctacttgcagaaatataaagaaatacagcacatcttggacagcacccagaaatcacccttttgtaatccaaggggatgttatggcaaactcttcagaatgggtccagtctaagccccacaggtcattggaaagtttatcacctctcaaaggccccaagaagaataaacattctcaaatctgggccataaagaatgaagacataaaacctctcagcagcaagtgggagactgcttcttcaagctttggaatggatgcaaatgttctaaaatataagagtcttcaagctgaagaaactaaccagcaaagctctaagcatacagccctccatctaactaaaaataaggatgagcaggccaataagaatgatggacaacccaccttatatctgaagttccaaagggagagttaatctagctttatactgctctgagaactgtgaatgaaggataacatatgcttatgtagtaaaaagaaaaaaaggaaagccctccccttcccctttccctatctctccccttacacatgcatatgcataaactaaaaattttagatatcccatcttctgtagtgggaacatctttcagagatttaaaaagaaatccagagaaaatatggaaaaatattaaagcagatatttatatttagtttttatcagcatggaaaaaaatctctgaagttttgatttcttccaaaactacttacacattcgacaccaaaaaaacttaagaactcaaagtaggaatgacatataatatgtcactgattttaacctccctactagacactttaatcaattagtcaacaaacatcatttcctgattttctgttatatcattagtgtgctaggaaccatttctctctactaggagattaccacataattgtacagataaaacatacctgaataaaatgattac

SEQ ID NO: 254111 - protein, 258 aa, Artificial Sequence
  derived and/or modified sequence
MCALEMAVLEIQTNGDTRVTEEAIARARHSLSDPNMREFILCCLARDPARRPSAHSLLFHRVLFEVHSLKLLAAHCFIQHQYLMPENVVEEKTKAMDLHAVLAELPRPRRPPLQWRYSEVSFMELDKFLEDVRNGIYPLMNFAATRPLGLPRVLAPPPEEVQKAKTPTPEPFDSETRKVIQMQCNLERSEDKARWHLTLLLVLEDRLHRQLTYDLLPTDSAQDLASELVHYGFLHEDDRMKLAAFLESTFLKYRGTQA

SEQ ID NO: 254112 - protein, 501 aa, Artificial Sequence
  derived and/or modified sequence
MAAPEPAPRRAREREREREDESEDESDILEESPCGRWQKRREQVNQGNMPGLQSTFLAMDTEEGVEVVWNELHFGDRKAFAAHEEKIQTVFEQLVLVDHPNIVKLHKYWLDTSEACARVIFITEYVSSGSLKQFLKKTKKNHKAMNARAWKRWCTQILSALSFLHACSPPIIHGNLTSDTIFIQHNGLIKIGSVWHRIFSNALPDDLRSPIRAEREELRNLHFFPPEYGEVADGTAVDIFSFGMCALEMAVLEIQTNGDTRVTEEAIARARHSLSDPNMREFILCCLARDPARRPSAHSLLFHRVLFEVHSLKLLAAHCFIQHQYLMPENVVEEKTKAMDLHAVLAELPRPRRPPLQWRYSEVSFMELDKFLEDVRNGIYPLMNFAATRPLGLPRVLAPPPEEVQKAKTPTPEPFDSETRKVIQMQCNLERSEDKARWHLTLLLVLEDRLHRQLTYDLLPTDSAQDLASELVHYGFLHEDDRMKLAAFLESTFLKYRGTQA

SEQ ID NO: 254113 - DNA, 777 bp, Artificial Sequence
  derived and/or modified sequence
atgtgcgccctggagatggccgtgctggagatccagaccaacggcgacaccagagtgaccgaggaggccatcgccagagccagacacagcctgagcgaccccaacatgagagagttcatcctgtgctgcctggccagagaccccgccagaagacccagcgcccacagcctgctgttccacagagtgctgttcgaggtgcacagcctgaagctgctggccgcccactgcttcatccagcaccagtacctgatgcccgagaacgtggtggaggagaagaccaaggccatggacctgcacgccgtgctggccgagctgcccagacccagaagaccccccctgcagtggagatacagcgaggtgagcttcatggagctggacaagttcctggaggacgtgagaaacggcatctaccccctgatgaacttcgccgccaccagacccctgggcctgcccagagtgctggcccccccccccgaggaggtgcagaaggccaagacccccacccccgagcccttcgacagcgagaccagaaaggtgatccagatgcagtgcaacctggagagaagcgaggacaaggccagatggcacctgaccctgctgctggtgctggaggacagactgcacagacagctgacctacgacctgctgcccaccgacagcgcccaggacctggccagcgagctggtgcactacggcttcctgcacgaggacgacagaatgaagctggccgccttcctggagagcaccttcctgaagtacagaggcacccaggcctag

SEQ ID NO: 254114 - DNA, 1506 bp, Artificial Sequence
  derived and/or modified sequence
atggccgcccccgagcccgcccccagaagagccagagagagagagagagagagagaggacgagagcgaggacgagagcgacatcctggaggagagcccctgcggcagatggcagaagagaagagagcaggtgaaccagggcaacatgcccggcctgcagagcaccttcctggccatggacaccgaggagggcgtggaggtggtgtggaacgagctgcacttcggcgacagaaaggccttcgccgcccacgaggagaagatccagaccgtgttcgagcagctggtgctggtggaccaccccaacatcgtgaagctgcacaagtactggctggacaccagcgaggcctgcgccagagtgatcttcatcaccgagtacgtgagcagcggcagcctgaagcagttcctgaagaagaccaagaagaaccacaaggccatgaacgccagagcctggaagagatggtgcacccagatcctgagcgccctgagcttcctgcacgcctgcagcccccccatcatccacggcaacctgaccagcgacaccatcttcatccagcacaacggcctgatcaagatcggcagcgtgtggcacagaatcttcagcaacgccctgcccgacgacctgagaagccccatcagagccgagagagaggagctgagaaacctgcacttcttcccccccgagtacggcgaggtggccgacggcaccgccgtggacatcttcagcttcggcatgtgcgccctggagatggccgtgctggagatccagaccaacggcgacaccagagtgaccgaggaggccatcgccagagccagacacagcctgagcgaccccaacatgagagagttcatcctgtgctgcctggccagagaccccgccagaagacccagcgcccacagcctgctgttccacagagtgctgttcgaggtgcacagcctgaagctgctggccgcccactgcttcatccagcaccagtacctgatgcccgagaacgtggtggaggagaagaccaaggccatggacctgcacgccgtgctggccgagctgcccagacccagaagaccccccctgcagtggagatacagcgaggtgagcttcatggagctggacaagttcctggaggacgtgagaaacggcatctaccccctgatgaacttcgccgccaccagacccctgggcctgcccagagtgctggcccccccccccgaggaggtgcagaaggccaagacccccacccccgagcccttcgacagcgagaccagaaaggtgatccagatgcagtgcaacctggagagaagcgaggacaaggccagatggcacctgaccctgctgctggtgctggaggacagactgcacagacagctgacctacgacctgctgcccaccgacagcgcccaggacctggccagcgagctggtgcactacggcttcctgcacgaggacgacagaatgaagctggccgccttcctggagagcaccttcctgaagtacagaggcacccaggcctag

SEQ ID NO: 254115 - DNA, 777 bp, Artificial Sequence
  derived and/or modified sequence
atgtgcgcacttgagatggccgtcctggaaatccagaccaacggtgacaccagagtgacagaagaggccatagcccgggcgcggcactctttatcagatccaaacatgagagaattcattttgtgttgtctcgcccgcgatcctgcaagacgccctagcgcccactcattgctgttccacagagtcctcttcgaggtgcatagcctgaagctgttagctgctcactgtttcatccagcaccagtatctcatgcccgagaatgtggtggaagagaagacaaaggcaatggacctacatgcagtgcttgcagagctccccagacctcgtcggcctcctctgcagtggagatactccgaagtatcatttatggagctggacaaatttctggaggatgttagaaacggtatttatccgctaatgaatttcgctgctacaagaccactgggattgccaagagtcctagctcctcccccagaagaggtccagaaagctaagacaccaacacctgagcccttcgactcggagactcgcaaggttatccagatgcagtgcaacctggagaggtccgaagacaaggcgagatggcatctgacactgctcttggtgctggaagaccgcctgcacaggcaactcacatacgacctactccccactgactctgcccaggacttggcaagcgagctggtccactacgggtttctgcacgaagatgatagaatgaagctcgcagcgttcttggaatccacatttctcaaatatcgaggaactcaggcgtag

SEQ ID NO: 254116 - DNA, 1506 bp, Artificial Sequence
  derived and/or modified sequence
atggccgcacccgagcctgctcccaggcgcgccagagagagagagcgggagcgcgaggacgagtccgaagacgaaagcgacatcttggaggagagtccttgtgggagatggcagaaaagacgcgaacaggtcaaccagggcaatatgcccggacttcaaagtacctttctggccatggacactgaagagggcgtcgaagtggtgtggaatgagctccacttcggcgaccgaaaagcctttgctgctcatgaagagaagatccaaacagtgtttgagcaactagtcctagtagaccatccgaacatcgtgaagctccacaagtattggctcgatacatcagaggcctgtgcccgggtcatctttataactgagtacgtcagttcaggttcattaaagcagtttttgaaaaaaaccaaaaagaatcataaagccatgaacgcccgggcctggaaaagatggtgtacacagatcttgtccgctctctctttcctgcacgcttgtagccctcctattatccacggaaatctgacatccgataccatctttatccagcataatgggctcatcaagatcggatcagtatggcatcggatcttttccaatgccttgccagatgacctcaggagcccgatccgcgccgagagagaagaattgaggaacctccatttttttcccccagagtatggcgaggtggctgatgggacggcggttgacatattctcttttggaatgtgcgctctggagatggccgtgctcgagatacagacaaatggagacactagagtgactgaggaggctatcgcgagagcgcgtcattccctctcagatccgaatatgagggagttcattctgtgttgcctcgctcgagatcctgccaggcgccctagtgcccactctctgctgtttcacagggtactgtttgaagtgcatagcttgaagctgcttgcggctcactgttttattcagcaccagtaccttatgcctgagaatgtagtggaggagaagactaaggcgatggatttgcacgcagtcttagctgagttgcccaggcccaggaggccccccttgcaatggcgatattccgaggtcagctttatggagctggacaagttcctggaggatgtgaggaacggcatttacccactgatgaattttgcggcgacacggcctctgggactgccccgcgtgctggcccccccacctgaggaggttcaaaaggctaaaactcctacgccagagccattcgactccgagacaaggaaggtgatccagatgcagtgcaacttggagagaagcgaggacaaagcgaggtggcacttgaccctcctccttgtgttggaggacaggttgcatcggcagttgacatatgacttactaccaaccgactcagcacaggatctggccagtgaactcgtgcattacggttttttgcacgaggacgatcgcatgaagcttgccgcgtttctggaaagtacatttctgaagtatagaggcactcaggcctag

SEQ ID NO: 254117 - DNA, 777 bp, Artificial Sequence
  derived and/or modified sequence
atgtgtgccctggagatggctgtgctggagatccagaccaacggggacaccagggtgacagaggaggccatcgcccgggcccggcacagcctgagtgaccccaacatgagggagttcatcctgtgctgcctggcccgggaccctgcccggcggcccagcgcccacagcctgctcttccaccgggtgctgtttgaggtgcacagcctgaagctgctggccgcccactgcttcatccagcaccagtacctgatgccagaaaatgtggtggaggagaagaccaaggccatggacctgcatgctgtgctggccgagctgccccggcccaggaggcctcccctgcagtggagatacagcgaggtgtccttcatggagctggacaagttcctggaggatgtgagaaatggcatctaccccctgatgaactttgctgccacccggcccctgggcctgccccgggtgctggcccctcctcctgaggaggtgcagaaggccaagacccccaccccagagccctttgacagcgagaccaggaaggtgatccagatgcagtgcaacctggagaggtctgaggacaaggcccgctggcacctgaccctgctgctggtgctggaggaccggctgcaccggcagctgacctatgacctgctgcccacagacagcgcccaggacctggccagcgagctggtgcactacggcttcctgcatgaagatgacaggatgaagctggccgccttcctggagagcaccttcctgaagtaccggggcacccaggcctag

SEQ ID NO: 254118 - DNA, 1506 bp, Artificial Sequence
  derived and/or modified sequence
atggccgcccctgagcccgccccccggcgggcccgggagcgggagcgggagagagaagatgaaagtgaagatgaaagtgacatcctggaggagagcccctgtggccgctggcagaagaggcgggagcaggtgaaccagggcaacatgcctggcctgcagagcaccttcctggccatggacacagaggagggcgtggaggtggtgtggaatgagctgcactttggagacaggaaggcctttgctgcccacgaggagaagatccagacagtgtttgagcagctggtgctggtggaccaccccaacatcgtgaagctgcacaagtactggctggacaccagcgaggcctgtgcccgggtcatcttcatcacagaatatgtgagcagcggcagcctgaagcagttcctgaagaagaccaagaagaaccacaaggccatgaatgcccgggcctggaagcgctggtgcacccagatcctgagcgccctgtccttcctgcacgcctgcagcccccccatcatccacggcaacctgaccagtgacaccatcttcatccagcacaacggcctcatcaagattggctctgtgtggcaccgcatcttcagcaatgccctgcctgatgacctgcggagccccatccgggcagagcgggaggagctgaggaacctgcacttcttccccccagaatatggagaggtggctgatggaacagctgtggacatcttctcctttggcatgtgtgccctggagatggctgtgctggagatccagaccaatggagacaccagggtgacagaggaggccatcgcccgggcccggcacagcctgagtgaccccaacatgagggagttcatcctgtgctgcctggcccgggaccctgcccggcggcccagcgcccacagcctgctcttccaccgggtgctgtttgaggtgcacagcctgaagctgctggccgcccactgcttcatccagcaccagtacctgatgccagaaaatgtggtggaggagaagaccaaggccatggacctgcatgctgtgctggccgagctgccccggccccggcggccccccctgcagtggagatacagcgaggtgtccttcatggagctggacaagttcctggaggatgtgagaaatggcatctaccccctgatgaactttgctgccacccggcccctgggcctgccccgggtgctggcccctcctcctgaggaggtgcagaaggccaagacccccaccccagagccctttgattctgagaccaggaaggtgatccagatgcagtgcaacctggagaggtctgaggacaaggcccgctggcacctgaccctgctgctggtgctggaggaccggctgcaccggcagctgacctatgacctgctgcccacagattctgcccaggacctggccagcgagctggtgcactacggcttcctgcatgaagatgacaggatgaagctggccgccttcctggagagcaccttcctgaagtaccggggcacccaggcctag

SEQ ID NO: 254119 - DNA, 777 bp, Artificial Sequence
  derived and/or modified sequence
atgtgcgccctggagatggccgtgctggagatccagaccaacggcgatacaagagtgaccgaagaggccatcgctcgagctcggcacagcttgtctgatcccaatatgcgcgaatttatattgtgctgcctcgcccgcgaccctgcccggcgtccgtctgctcactcactgctgttccatagggtactgttcgaagtccactctctcaagctgctcgccgcacactgttttattcagcaccagtacctgatgcccgagaatgtggtcgaggagaagacaaaggccatggatttgcacgcagtcctggcggaactgcccagaccccgcaggccacccctccagtggcgttactccgaagtgagcttcatggaactggacaaattcctagaggatgtccgtaacggaatctatcccctgatgaattttgcggccacacggcccctcggtctacccagggtccttgcaccgcctcccgaagaggtgcaaaaagccaaaacacccaccccagaaccattcgactccgagacaaggaaggtgatacagatgcagtgcaatttggaaaggtctgaagataaagcccgttggcatctaacactccttcttgttctcgaggaccgccttcaccggcagctgacttacgacctgttgccgactgattccgcccaggaccttgcttccgaattagtgcattatggcttccttcatgaggatgatcggatgaagctggccgcatttctagagtccacctttcttaagtatcggggaacacaggcttag

SEQ ID NO: 254120 - DNA, 1506 bp, Artificial Sequence
  derived and/or modified sequence
atggccgcccccgagcccgccccccggcgggcccgggagcgggagcgggagagagaagatgagtcagaggatgagagtgatatactcgaggaaagtccatgcggaagatggcaaaagcgtcgagaacaggttaatcaaggaaacatgccggggctgcagagcactttcctggccatggacactgaagagggggtcgaggtggtttggaacgagcttcatttcggcgatcggaaggcctttgccgcacatgaagaaaagattcagaccgtcttcgaacagctggtgctggtcgaccacccaaatattgtgaagcttcacaagtattggttggatactagcgaagcatgcgcgagggtgatctttatcacggagtatgtctcctcaggaagcctaaaacagtttttgaagaaaaccaagaagaatcacaaggctatgaacgcgcgtgcctggaaaaggtggtgtacccaaatcctatccgccctcagttttctgcatgcctgcagcccccccatcatacacggcaatctcacctccgatactatctttatacagcataatggactgattaaaattggctctgtatggcataggatatttagtaacgccttgcctgatgatctgcgctctcccatccgcgctgagcgagaagagctcaggaatctgcatttcttcccacctgaatacggggaggtggccgatggaaccgcagtagatatcttcagctttggcatgtgtgctctggagatggctgttctcgagatccagactaacggagacactagggtgacggaagaggcgattgccagagcacggcactcattgagcgaccccaatatgagagagttcatcctttgttgtctggctagagatcccgcaaggcgcccttctgcacactccctgttgtttcacagggtactcttcgaggtgcactcattgaagttgctcgccgcccactgctttatccagcaccagtatctgatgccagagaacgtcgttgaggaaaagacaaaggccatggacctccacgccgtcctggccgaactccctcgcccacgacgtcctcctctgcagtggagatactcggaggttagtttcatggaacttgataagtttttggaggacgtcaggaacggtatctaccctttaatgaacttcgccgctacccgtccccttgggctccctcgagtcctggcgcctccgccggaggaggtacaaaaagcaaagacccctacacccgagcccttcgattctgagaccaggaaggttattcagatgcagtgcaacctcgagcggtctgaggacaaggcccgctggcatctgactctgctgctggttctcgaggataggctgcacaggcagcttacttatgacctcctgcccaccgatagcgcccaggatctggcgtccgagctcgtccattacggcttcttgcacgaggatgacaggatgaagcttgccgcgttcttagaatcgaccttcctgaaatataggggcacacaagcatag

SEQ ID NO: 254121 - DNA, 777 bp, Artificial Sequence
  derived and/or modified sequence
atgtgtgcactcgagatggccgtgttggagatacagacaaacggcgatacacgagtgaccgaagaagccattgccagagcaaggcactccctctcagacccaaatatgcgggagtttatcctgtgctgtctggctcgggaccctgctagaagaccgagcgcccactcactactgttccaccgcgtcctgttcgaagtacacagcttaaaacttctcgcagctcattgctttatccaacaccaatacctcatgccagagaatgtcgtggaagagaagaccaaggcaatggacctccatgcagtgctggcggagctgccaagaccaaggagaccaccgctccagtggaggtattccgaggtgtccttcatggagctcgacaagttcctcgaggacgttcgaaacgggatctatcctctgatgaatttcgcggctacacgccctctggggctgccaagggtactggcgcctccaccagaggaggttcagaaggccaaaaccccaaccccagagccattcgatagcgagacccgaaaggtgattcagatgcagtgcaacctggaacggtccgaggacaaagcaagatggcatctgacattgttactggtcctggaggacagactccaccgacagctcacatacgacctgctgccaactgatagcgcacaagaccttgcctctgaactggtccattatggcttcttgcacgaagacgacaggatgaagttggctgcatttttagaatcaacattcctcaaataccgcggtacccaggcctag

SEQ ID NO: 254122 - DNA, 1506 bp, Artificial Sequence
  derived and/or modified sequence
atggccgctcccgaaccggctccaaggcgggctagagagagggagcgcgaacgagaagacgaatcagaagacgagtcagatatcctcgaggagagtccttgtggtcgctggcagaaaagacgggaacaagtgaatcagggaaatatgcccggtctccagtccacctttctggccatggacacagaggaaggagttgaggtcgtctggaacgagctacactttggcgacaggaaagccttcgctgctcacgaagaaaaaatacaaaccgtgtttgagcaactcgtgctggtcgatcatcctaacatcgttaaactgcataaatattggcttgatacttctgaagcttgtgctcgggtcatttttatcaccgaatatgtatcctccgggagcctgaagcaatttctgaaaaagaccaaaaagaatcacaaggcaatgaatgcgagggcatggaaacggtggtgtacccagattttatctgccctctccttcttgcacgcgtgttcaccccctatcattcacggtaatcttaccagcgatacaatctttatccagcacaacggtctgatcaagataggctcagtgtggcaccgcatattctctaacgcacttccagacgatctgaggtctccaataagagccgagagagaggagttgaggaatctccacttcttcccaccagaatatggcgaagtggccgatggaactgctgtggacattttcagctttgggatgtgcgctctggagatggcggtgctggagattcaaactaacggcgacactcgcgtcacagaagaagccatcgcacgagcacgccattcgctgagtgacccaaatatgcgagaatttatcctgtgttgcctggcgcgagatcccgcacggaggccgagcgcacattctctgctgtttcacagagtgctgtttgaagtgcactccctaaagttactcgcagcgcactgcttcattcaacaccagtacctcatgccagaaaacgtagtcgaagaaaagaccaaagctatggacctacatgccgtgttagccgagctgccgaggcctaggcggcctccactgcaatggcggtacagcgaagttagctttatggagctggacaagttccttgaggatgtgaggaatgggatttaccccctaatgaactttgcggctactagacccttagggctgccacgggttttagccccacctcctgaggaagtccagaaagctaaaaccccaacgcccgaaccattcgatagcgaaacgcgaaaggttattcagatgcagtgtaacctcgaaaggtcagaagacaaggcacgatggcatttaactctcctgctggtcctcgaggacagactccacagacagctgacctatgacctgctgcctaccgactcggctcaagatctcgcatcagagctggttcattacgggtttctccatgaagacgataggatgaagttggccgcatttctcgagtctaccttcttgaagtatagagggacccaggcatag

SEQ ID NO: 254123 - DNA, 3587 bp, Artificial Sequence
  derived and/or modified sequence
aattcccagagccggggctggggctctaggctgccgcggcggctctaggctgggctgctgggcgcgaggccagggcgggccgggagaggctgcgccggcggcggatcgcgcagagggcggtggcctgggctggccgaaccatggcggccccggagccggcgccgaggcgggcccgggaacgggagcgggagcgggaggacgagagcgaggacgagagcgacatcctggaggaaagcccgtgtggtcgctggcaaaagcgacgggagcaggtaaaccaagggaacatgccagggcttcagagcaccttcctagccatggacacggaggagggggtagaggtggtgtggaacgagctccacttcggagacaggaaggccttcgcggcgcacgaggagaagatccagaccgtgttcgagcagctggtgctggtggaccacccgaacatcgtgaagttgcacaagtactggctggatacctctgaggcctgcgcgagggtcatcttcatcacagagtacgtgtcatcaggcagcctcaagcaattcctcaaaaagaccaagaagaaccacaaggccatgaacgcccgggcctggaagcgctggtgcacgcagatcctgtctgcgctcagcttcctgcacgcctgcagccccccaatcatccacgggaacctgaccagcgacaccatcttcattcagcacaacggcctcatcaagatcggctccgtgtggcaccgaatcttctccaatgcacttccagatgatctccgaagccccatccgcgctgagcgagaggaacttcggaacctgcacttcttccccccagagtatggagaggtggccgatgggaccgctgtggacatcttctcctttgggatgtgtgcgctggagatggctgtactggaaatccagaccaatggggacacccgggtcacagaggaggccattgctcgcgccaggcactcgctgagtgaccccaacatgcgggagttcatcctttgctgcctggcccgggaccctgcccgccggccctctgcccacagcctcctcttccaccgcgtgctcttcgaggtgcactcgctgaagctcctggcagcccactgcttcatccagcaccagtacctcatgcctgagaatgtggtggaggagaagaccaaggccatggacctgcacgcggtcttggcggagcttccccggccccgcaggcccccgctgcagtggcggtactcggaagtctccttcatggagctggacaaattcctggaggatgtcaggaatggaatctacccactgatgaactttgcagccactcgacccctggggctgccccgtgtgctggccccacccccggaggaggtccaaaaggccaagaccccgacgccagagccctttgactctgagaccagaaaggtcatccagatgcagtgcaacctggagagaagcgaggacaaggcgcgctggcatctcactctgcttctggtgctggaagaccggctgcaccggcagctgacctacgacctgctcccaacggacagcgcccaggacctcgcctcggagctcgtgcactatggcttcctccacgaggacgaccggatgaagctggccgccttcctggagagcaccttcctcaagtaccgtgggacccaggcctgacccggagccccagccccaggggaccatgccggggtgctgcctgggcaggccatgttggggagactccagcaccgtggggctgccctcctccatgcgcctgggagcacaaaggccccggtagtgaaggaaccccccgtctcctgagagtggggctgaccctgccttgggcgccgaggggttggggggtgggtgtgggggagccgttaggcctcccaggtccttaggatcagggttgcccccagaaccccttcccatatcctccattctccgccctgagttcctacccaggctgcctggccggggccactgcctcctcagcatgcaggaggctgccctgtagggaaccccagctctggggcttgggggtgagggtcagccctggacagacctctgcccagggaactgctccatggggtctgggagagcagccatcccctgctggcaccatagacccacacaaggagcctgcacagcaagccagcggtgacacacctgcaggtgtcaggcatggcactgggcacaacagggacctggcaggagaaacagaccacagagaggtctggagttgaggctgttgtcagcaaagcccctggtcccacacagctctgccctagagccacctctttgaccctttacccaccctgagaccagaacttgcagcccctctgcagatctcctctggccactgcagcccctccaatgggctttttctctcatgcattccctggcctggaggcgtcagggaccccacatcctccctgctcctcagactcacagcccctccatgttacctcccgcacctcctccctggggcagctgctccctgggcctctgaggatgtcagctcctggctccctgcctctctcccactccactcctggctcagtcttagagatttctatgccctcatggattctacccctgccttcctggcctcttgattcttggcttgcctctcctccaattccaaacttagtgaaatggccttaagcattttaaactgtatgtatacattagcgcattcatgcctttctaaacgcatttcaaatgtcaaccaggaaggcacaccactgtattagttttatactgccgctgtaaaatttaccacaaacttagtgacttaacacaaatttattgcaattctgtaggctggaagtctgactatgggtctcactggactagaatcaaggctggcaggctgccttccttcctggaggttctaggggagactctgtctcctgctccttcaggctgctggcagaatccacatcctttcggtggcagggccaaggtccccactttcttgctgactgtaaactaaggccacttccagcttgtagaggctgcctacattccttggctcttggccccctcctccatcttcagagctagcaggttcagtctgtgtcacgaaccatttctctggttccctgcagacaggaaaggttgtccctaaggactcatgagattaggttgggcccagccagataatacatgataatctccctcctcaaggtttttaatattaaacacatctgcaggacacattttgccatgtaaactaacattcactggttccagggattaaggaatgaacctcttttgttggggaagggtggcattctgctgaccacagcactccaaccaaaagccaaaaaccaaagcaagacttactaacgcatatcaaataaattaaaggtacaaaatcgtgaatctcagttatcttaaatattccaatactatttacaaaattattcaaattctcacgccttccaactcaaaattagcaatctaaagtaatttccatatcctagatggaaaccctcatgctaaactgtctgattatgcatggttctaaatggtttcagtggcaaatacataacattgtactactgattaaactgaacttaaaagcatcaataccaccattgctgcacttaa

SEQ ID NO: 254124 - DNA, 3490 bp, Artificial Sequence
  derived and/or modified sequence
cagagagagaaggtaaaccaagggaacatgccagggcttcagagcaccttcctagccatggacacggaggagggggtagaggtggtgtggaacgagctccacttcggagacaggaaggccttcgcggcgcacgaggagaagatccagaccgtgttcgagcagctggtgctggtggaccacccgaacatcgtgaagttgcacaagtactggctggatacctctgaggcctgcgcgagggtcatcttcatcacagagtacgtgtcatcaggcagcctcaagcaattcctcaaaaagaccaagaagaaccacaaggccatgaacgcccgggtatggggagcgggctggggcagccacggggacaggacggggttggggcagcctcggggactgggatggtgagggggtgcccggcggcctcggacaggggctgggcgaggatgcggggcgggctccgcaggcccagccgcctctcctgcgcccacccgaccgacggagtcgtgcgtccgccgccaggcctggaagcgctggtgcacgcagatcctgtctgcgctcagcttcctgcacgcctgcagccccccaatcatccacgggaacctgaccagcgacaccatcttcattcagcacaacggcctcatcaagatcggctccgtgtggcaccgaatcttctccaatgcacttccagatgatctccgaagccccatccgcgctgagcgagaggaacttcggaacctgcacttcttccccccagagtatggagaggtggccgatgggaccgctgtggacatcttctcctttgggatgtgtgcgctggagatggctgtactggaaatccagaccaatggggacacccgggtcacagaggaggccattgctcgcgccaggcactcgctgagtgaccccaacatgcgggagttcatcctttgctgcctggcccgggaccctgcccgccggccctctgcccacagcctcctcttccaccgcgtgctcttcgaggtgcactcgctgaagctcctggcagcccactgcttcatccagcaccagtacctcatgcctgagaatgtggtggaggagaagaccaaggccatggacctgcacgcggtcttggcggagcttccccggccccgcaggcccccgctgcagtggcggtactcggaagtctccttcatggagctggacaaattcctggaggatgtcaggaatggaatctacccactgatgaactttgcagccactcgacccctggggctgccccgtgtgctggccccacccccggaggaggtccaaaaggccaagaccccgacgccagagccctttgactctgagaccagaaaggtcatccagatgcagtgcaacctggagagaagcgaggacaaggcgcgctggcatctcactctgcttctggtgctggaagaccggctgcaccggcagctgacctacgacctgctcccaacggacagcgcccaggacctcgcctcggagctcgtgcactatggcttcctccacgaggacgaccggatgaagctggccgccttcctggagagcaccttcctcaagtaccgtgggacccaggcctgacccggagccccagccccaggggaccatgccggggtgctgcctgggcaggccatgttggggagactccagcaccgtggggctgccctcctccatgcgcctgggagcacaaaggccccggtagtgaaggaaccccccgtctcctgagagtggggctgaccctgccttgggcgccgaggggttggggggtgggtgtgggggagccgttaggcctcccaggtccttaggatcagggttgcccccagaaccccttcccatatcctccattctccgccctgagttcctacccaggctgcctggccggggccactgcctcctcagcatgcaggaggctgccctgtagggaaccccagctctggggcttgggggtgagggtcagccctggacagacctctgcccagggaactgctccatggggtctgggagagcagccatcccctgctggcaccatagacccacacaaggagcctgcacagcaagccagcggtgacacacctgcaggtgtcaggcatggcactgggcacaacagggacctggcaggagaaacagaccacagagaggtctggagttgaggctgttgtcagcaaagcccctggtcccacacagctctgccctagagccacctctttgaccctttacccaccctgagaccagaacttgcagcccctctgcagatctcctctggccactgcagcccctccaatgggctttttctctcatgcattccctggcctggaggcgtcagggaccccacatcctccctgctcctcagactcacagcccctccatgttacctcccgcacctcctccctggggcagctgctccctgggcctctgaggatgtcagctcctggctccctgcctctctcccactccactcctggctcagtcttagagatttctatgccctcatggattctacccctgccttcctggcctcttgattcttggcttgcctctcctccaattccaaacttagtgaaatggccttaagcattttaaactgtatgtatacattagcgcattcatgcctttctaaacgcatttcaaatgtcaaccaggaaggcacaccactgtattagttttatactgccgctgtaaaatttaccacaaacttagtgacttaacacaaatttattgcaattctgtaggctggaagtctgactatgggtctcactggactagaatcaaggctggcaggctgccttccttcctggaggttctaggggagactctgtctcctgctccttcaggctgctggcagaatccacatcctttcggtggcagggccaaggtccccactttcttgctgactgtaaactaaggccacttccagcttgtagaggctgcctacattccttggctcttggccccctcctccatcttcagagctagcaggttcagtctgtgtcacgaaccatttctctggttccctgcagacaggaaaggttgtccctaaggactcatgagattaggttgggcccagccagataatacatgataatctccctcctcaaggtttttaatattaaacacatctgcaggacacattttgccatgtaaactaacattcactggttccagggattaaggaatgaacctcttttgttggggaagggtggcattctgctgaccacagcactccaaccaaaagccaaaaaccaaagcaagacttactaacgcatatcaaataaattaaaggtacaaaatcgtgaatctcagttatcttaaatattccaatactatttacaaaattattcaaattctcacgccttccaactcaaaattagcaatctaaagtaatttccatatcctagatggaaaccctcatgctaaactgtctgattatgcatggttctaaatggtttcagtggcaaatacataacattgtactactgattaaactgaacttaaaagc

SEQ ID NO: 254125 - protein, 243 aa, Artificial Sequence
  derived and/or modified sequence
MQFRLFSFALIILNCMDYSHCQGNRWRRSKRASYVSNPICKGCLSCSKDNGCSRCQQKLFFFLRREGMRQYGECLHSCPSGYYGHRAPDMNRCARCRIENCDSCFSKDFCTKCKVGFYLHRGRCFDECPDGFAPLEETMECVEGCEVGHWSEWGTCSRNNRTCGFKWGLETRTRQIVKKPVKDTILCPTIAESRRCKMTMRHCPGGKRTPKAKEKRNKKKKRKLIERAQEQHSVFLATDRANQ

SEQ ID NO: 254126 - protein, 121 aa, Artificial Sequence
  derived and/or modified sequence
MQFRLFSFALIILNCMDYSHCQGNRWRRSKRASYVSNPICKGCLSCSKDNGCSRCQQKLFFFLRREGMRQYGECLHSCPSGYYGHRAPDMNRCARCRIENCDSCFSKDFCTKCKVGFYLHR

SEQ ID NO: 254127 - protein, 77 aa, Artificial Sequence
  derived and/or modified sequence
MQFRLFSFALIILNCMDYSHCQGNRWRRSKRASYVSNPICKGCLSCSKDNGCSRCQQKLFFFLRREGMRQYGECLHS

SEQ ID NO: 254128 - DNA, 732 bp, Artificial Sequence
  derived and/or modified sequence
atgcagttccggctcttttcttttgctttaattattctaaactgcatggattactcgcactgccagggcaacagatggagacggtccaagagagcctcttacgttagcaacccaatatgtaagggatgtttgagttgttctaaggacaacgggtgctcaaggtgccaacagaagctatttttctttttgcgtagagaggggatgcgacagtacggtgaatgtctgcacagctgcccaagtgggtactacggccaccgcgcaccagacatgaatcgctgcgctaggtgtagaatcgagaattgtgatagctgcttcagtaaagacttttgcacaaagtgtaaagtgggcttctacctacacagaggacggtgttttgatgaatgtcccgacggcttcgccccgctggaagagaccatggagtgcgtggagggctgtgaggtggggcattggagtgagtggggcacatgctctcggaacaacagaacatgtggattcaaatggggactagaaacccggaccagacagattgtgaaaaaaccagttaaagataccattctgtgcccaacgattgctgaaagccgacgttgcaagatgaccatgcgccactgccccggcggaaagcggacaccaaaggccaaggaaaagagaaataaaaaaaagaagcgcaaacttatcgaacgggcccaagagcagcatagcgtgtttctagcgactgatagggctaatcagtag

SEQ ID NO: 254129 - DNA, 366 bp, Artificial Sequence
  derived and/or modified sequence
atgcaattcaggttgttctcattcgccctgatcatactcaattgcatggattactctcactgccagggtaatcgctggcggcgttcaaaaagggcgtcatacgtaagcaaccctatctgcaagggttgtctgtcgtgttctaaggacaacggttgctctcgctgtcagcagaagctttttttctttcttaggagggaaggcatgcgtcagtacggggagtgcctccactcatgtccttcagggtactatggacaccgggcccctgacatgaaccgatgcgctcgttgccgaattgagaattgtgactcttgcttctccaaggatttttgtacaaagtgcaaagtcggattttacctgcaccggtag

SEQ ID NO: 254130 - DNA, 234 bp, Artificial Sequence
  derived and/or modified sequence
atgcaatttcgccttttttcgtttgcccttattattcttaattgtatggactattcccattgtcagggtaaccgctggagaaggagcaagagagcttcatacgtgagcaaccccatctgtaaaggatgtcttagctgtagtaaggataatggttgctcacgctgtcagcagaaattatttttttttctaaggcgcgaagggatgaggcagtacggtgagtgtctgcatagctag

SEQ ID NO: 254131 - DNA, 732 bp, Artificial Sequence
  derived and/or modified sequence
atgcagttccgcctcttctcctttgccctgatcatcctgaactgcatggactacagccactgccagggcaaccgctggaggaggagcaagagggccagctatgtgagcaaccccatctgcaagggctgcctgagctgcagcaaggacaatggctgcagccgctgccagcagaagctgttcttcttcctgcggcgggagggcatgaggcagtatggagaatgtctgcacagctgccccagcggctactacggccaccgggccccagacatgaacagatgtgcccgctgcagaattgagaactgtgacagctgcttcagcaaggacttctgcaccaagtgcaaggtgggcttctacctgcaccggggccgctgctttgatgaatgtccagatggctttgcccccctggaggagaccatggagtgtgtggagggctgtgaggtgggccactggagcgagtggggcacctgcagcaggaacaacagaacctgtggcttcaagtggggcctggagaccaggacccggcagatcgtgaagaagcctgtgaaggacaccatcctgtgccccaccatcgccgagagccgccgctgcaagatgaccatgaggcactgccctgggggcaagaggacccccaaggccaaggagaagaggaacaagaagaagaagaggaagctgattgagcgggcccaggagcagcacagcgtcttcctggccacagaccgggccaaccagtag

SEQ ID NO: 254132 - DNA, 366 bp, Artificial Sequence
  derived and/or modified sequence
atgcagttccgcctcttctcctttgccctgatcatcctgaactgcatggactacagccactgccagggcaaccgctggaggaggagcaagagggccagctatgtgagcaaccccatctgcaagggctgcctgagctgcagcaaggacaatggctgcagccgctgccagcagaagctgttcttcttcctgcggcgggagggcatgaggcagtatggagaatgtctgcacagctgccccagcggctactacggccaccgggccccagacatgaacagatgtgcccgctgcagaattgagaactgtgacagctgcttcagcaaggacttctgcaccaagtgcaaggtgggcttctacctgcacaggtag

SEQ ID NO: 254133 - DNA, 234 bp, Artificial Sequence
  derived and/or modified sequence
atgcagttccgcctcttctcctttgccctgatcatcctgaactgcatggactacagccactgccagggcaaccgctggaggaggagcaagagggccagctatgtgagcaaccccatctgcaagggctgcctgagctgcagcaaggacaatggctgcagccgctgccagcagaagctgttcttcttcctgcggcgggagggcatgaggcagtatggagaatgtctgcacagctag

SEQ ID NO: 254134 - DNA, 732 bp, Artificial Sequence
  derived and/or modified sequence
atgcagttccggctgttcagcttcgccctgatcatcctgaactgcatggattactcgcactgtcagggaaataggtggcgccgcagtaagcgagcctcatacgtttccaatcccatatgtaagggatgtctgtcctgttctaaagacaacggctgtagcagatgccaacagaagctgttctttttcctgagaagagaaggaatgcgtcagtacggagaatgcctgcactcttgtcctagcggctattatggccacagagccccagacatgaatcggtgcgctcgttgtagaattgagaattgcgacagctgtttctcaaaggacttctgcacgaagtgtaaggtcggtttctatctccataggggcaggtgctttgatgaatgtcccgacgggtttgcaccgcttgaggaaacaatggagtgtgtggaaggttgcgaggttggccattggagcgagtggggtacctgctctcggaacaataggacatgtggatttaaatggggattagagacccgtacccggcagatagtgaaaaaacctgtgaaggataccattttatgtccaaccattgctgagagccgtcgttgcaagatgactatgcgccactgccctggtggcaagaggacacccaaggcaaaggagaagcgcaacaagaaaaaaaaacggaaactaatagagagagcccaggagcagcattcagtgtttctggcaactgatcgcgcaaaccagtag

SEQ ID NO: 254135 - DNA, 366 bp, Artificial Sequence
  derived and/or modified sequence
atgcagttccggctgttcagcttcgccctgatcatcctgaactgcatggattattctcattgtcaaggcaacaggtggagacggagtaaaagagcctcctacgtcagcaatcccatatgtaagggatgcttgtcttgcagcaaggacaatggctgctctcggtgtcagcaaaagctattctttttcttgaggcgcgagggaatgagacagtacggggagtgtctgcattcttgtccttctgggtattacggtcacagagcacctgacatgaaccgctgcgctagatgtaggattgaaaactgcgactcctgcttttcaaaagacttttgcacaaagtgtaaagtgggattctacctccataggtag

SEQ ID NO: 254136 - DNA, 234 bp, Artificial Sequence
  derived and/or modified sequence
atgcagttccggctgttcagcttcgccctgatcatcctgaactgcatggactattcgcactgtcagggtaacaggtggagacggagcaaaagggcatcttacgtcagcaacccaatctgtaaggggtgcttatcttgtagcaaggataacggatgctctaggtgtcagcaaaaactgtttttcttcctgcgccgggagggcatgaggcagtatggcgaatgtctgcatagctag

SEQ ID NO: 254137 - DNA, 732 bp, Artificial Sequence
  derived and/or modified sequence
atgcagttccgtctcttctctttcgccctcattatcctgaactgtatggactactcccattgtcaggggaatcgatggaggcgcagtaaacgcgcatcttatgtctctaatcctatatgtaagggctgcctgtcatgctccaaggataacgggtgttctcgctgccaacagaagctcttcttttttctgcgccgtgagggcatgcggcaatacggggaatgtctgcacagctgtcccagcggttattacgggcatcgagcccctgacatgaaccggtgcgccaggtgcaggattgagaattgcgacagctgctttagcaaggatttttgtacaaagtgtaaagtcggtttttatctccaccgaggcagatgcttcgacgaatgccccgatgggtttgcacctctggaagagacaatggagtgtgtagaggggtgtgaggtggggcactggtccgagtggggtacctgcagccgcaataatcgcacatgtggattcaaatggggattggagacgaggactaggcaaatcgtgaaaaagcctgttaaggatactatcctctgccccacaatcgctgaatctaggagatgtaaaatgaccatgaggcattgcccagggggtaaacgcactcccaaggcgaaggagaaaaggaacaaaaagaagaagagaaagctgatcgaacgcgcacaagagcagcattccgtctttctggcaactgatcgggctaatcagtag

SEQ ID NO: 254138 - DNA, 366 bp, Artificial Sequence
  derived and/or modified sequence
atgcagtttaggctcttcagcttcgctttaattatactgaactgtatggactatagtcactgtcagggcaataggtggaggagatcgaagagagccagctacgtgtcaaacccaatatgtaagggctgcctcagctgcagcaaggacaatggttgctcaagatgccaacagaagctcttttttttcttgaggcgggaaggcatgagacagtatggagaatgtctgcattcctgcccaagcgggtattatggtcaccgcgctccagacatgaaccggtgcgccagatgtaggatcgagaattgtgatagttgtttcagtaaggacttttgtacaaaatgcaaggttggattctatttgcacaggtag

SEQ ID NO: 254139 - DNA, 234 bp, Artificial Sequence
  derived and/or modified sequence
atgcagttcaggctgttctcattcgccttgattattttgaactgcatggactattctcactgtcaaggcaatcgttggcgacggagcaaaagggccagctatgtatcaaaccccatttgtaaaggatgtttgtcgtgtagtaaggataacggatgctcacgctgtcagcagaaactgtttttcttcctcagacgagaaggcatgcgacagtacggcgagtgtctacatagctag

SEQ ID NO: 254140 - DNA, 3111 bp, Artificial Sequence
  derived and/or modified sequence
acttatagaagcatcccaagcctcagccggtctgcatctccatcggaaagtgcgcttgccacatcccttcggatcacttcgtcctcccgagagcgttctgccttctacagctcggaaagaaagaaatcttagctgtgaagtgaccgtggagaaagcgcaggaagcgacacaattggttagggaggcagagagtgtgagcgggcgcaccccttgcctggggaccgcgctcgcgggcggggacggagcatcccagtggctgcacccgccgctccgcgctcctgcctggcgtcgccaaccccgcggcggccgctggaattccagagctgccaggcgctcccagccggtctcggcaaacttttccccagcccacgtgctaaccaagcggctcgcttcccgagcccgggatggagcaccgcgcctagggaggccgcgccgcccgagacgtgcgcacggttcgtggcggagagatgctgatcgcgctgaactgaccggtgcggcccgggggtgagtggcgagtctccctctgagtcctccccagcagcgcggccggcgccggctctttgggcgaaccctccagttcctagactttgagaggcgtctctcccccgcccgaccgcccagatgcagtttcgccttttctcctttgccctcatcattctgaactgcatggattacagccactgccaaggcaaccgatggagacgcagtaagcgagctagttatgtatcaaatcccatttgcaagggttgtttgtcttgttcaaaggacaatgggtgtagccgatgtcaacagaagttgttcttcttccttcgaagagaagggatgcgccagtatggagagtgcctgcattcctgcccatccgggtactatggacaccgagccccagatatgaacagatgtgcaagatgcagaatagaaaactgtgattcttgctttagcaaagacttttgtaccaagtgcaaagtaggcttttatttgcatagaggccgttgctttgatgaatgtccagatggttttgcaccattagaagaaaccatggaatgtgtggaaggatgtgaagttggtcattggagcgaatggggaacttgtagcagaaataatcgcacatgtggatttaaatggggtctggaaaccagaacacggcaaattgttaaaaagccagtgaaagacacaatactgtgtccaaccattgctgaatccaggagatgcaagatgacaatgaggcattgtccaggagggaagagaacaccaaaggcgaaggagaagaggaacaagaaaaagaaaaggaagctgatagaaagggcccaggagcaacacagcgtcttcctagctacagacagagctaaccaataaaacaagagatccggtagatttttaggggtttttgtttttgcaaatgtgcacaaagctactctccactcctgcacactggtgtgcagcctttgtgctgctctgcccagtatctgttcccagtaacatggtgaaaggaagcaccaccagcatggcccctgtgttatttatgctttgatttgaatctggagactgtgaaggcaggagtaagtgcacagcccgtgacttggctcagtgtgtgctgagagaatccgtccccggcaccatggacatgctagaggtgtgaggctgcagaacaccgctggaggacggacttgtgcctatttatgtgaaagaagatgcttggcaggcaatgcgctactcactcgtgacctttatttctcacattgtgcattttcaaggatatgtttgtgtggatatctgcttagtgttaccacatggtattctcagcatgttaccttcacactgttgtgcgatgaaactgcttttagctgaggatatgctctggaaattcctgctcagtttcactgcagccctaatatgtacatatactgcaggagctacatataaagctcttatttactgtatatttatgctttcttgtgggtaacaagtcatacctgattaatatgatgccactttgtttctagtggttcctaacccattgtctgataaatgacttttctagtttggggaattgacacttgttttgttgcctcttgaaactttttttttttcccctcattgtgggcttatttctcattgtaagggtaggataaactagtttttgtatatagagtcaaatgaccagtgtcaaagagtttgcatattgggtagaccttctccactccacatgtcccacacatatagataaagcagcaggcggcatctggcaatcagaagcccaaactgcctttgagtctaagatgtgatgactttgatgaaacacaactgaaaacatgagggactatatccagtcacttgtagccagtttcacaggccagctacagaattgtccaaacaaacattatttctgactgcaatttttttcccccaaatttaaagcaatccctggctttaaatgacaaggcacctaccaatgttcttgggtcactgaagaagctactaccatgagcctgggcatagaattttaggagataaaaggatgaatttctgtgactgccagtcagatcttaacaggtttctgttgagccagaatctgtttcagatccaagatggagaggaacactatggaaacttcccaggtgactttcagagcagttgtttcaaacacatcattgtccttttaggggaaccagtttttagaaggttgtgaattggctttttcacaaagcatgattatcttcctggctgatccaggagaaaattagaacagaaaaataatggttgtggattttgaaacaaagcaaggtaaagccttttttttttcaccttgcattggcaaaactacctcttcagtgtttttaacttttgattcaaaagcatcttaccaataaggataaatatcatatacatcgttatgaaaatattgctatgagataataagccacatatgaatgttgtatacaactttagggtttacatttaatcctgaagtgttacctcctttcatgtctatttacactattttcccatttactaagtggggagggggtctccttatatagtgcttcatcgttaataagtcaatacctgttgttcctgggatgttcttttttgtgcattaaaaacttcaaaatt

SEQ ID NO: 254141 - DNA, 674 bp, Artificial Sequence
  derived and/or modified sequence
acctcactgttttagtatctgtgagacacagatgtgaaagctacagatttaattaacatgcagctagttatgtatcaaatcccatttgcaagggttgtttgtcttgttcaaaggacaatgggtgtagccgatgtcaacagaagttgttcttcttccttcgaagagaagggatgcgccagtatggagagtgcctgcattcctgcccatccgggtactatggacaccgagccccagatatgaacagatgtgcaagatgcagaatagaaaactgtgattcttgctttagcaaagacttttgtaccaagtgcaaagtaggcttttatttgcatagaggccgttgctttgatgaatgtccagatggttttgcaccattagaagaaaccatggaatgtgtggaaggatgtgaagttggtcattggagcgaatggggaacttgtagcagaaataatcgcacatgtggatttaaatggggtctggaaaccagaacacggcaaattgttaaaaagccagtgaaagacacaatactgtgtccaaccattgctgaatccaggagatgcaagatgacaatgaggcattgtccaggagggaagagaacaccaaaggcgaaggagaagaggaacaagaaaaagaaaaggaagctgatagaaagggcccaggagcaacacagcgtcttc

SEQ ID NO: 254142 - DNA, 562 bp, Artificial Sequence
  derived and/or modified sequence
acaccctgttttcgcttcttgtctctcaggttcgtggcggagagatgctgatcgcgctgaactgaccggtgcggcccgggggtgagtggcgagtctccctctgagtcctccccagcagcgcggccggcgccggctctttgggcgaaccctccagttcctagactttgagaggcgtctctcccccgcccgaccgcccagatgcagtttcgccttttctcctttgccctcatcattctgaactgcatggattacagccactgccaaggcaaccgatggagacgcagtaagcgagctagttatgtatcaaatcccatttgcaagggttgtttgtcttgttcaaaggacaatgggtgtagccgatgtcaacagaagttgttcttcttccttcgaagagaagggatgcgccagtatggagagtgcctgcattcctgcccatccgggtactatggacaccgagccccagatatgaacagatgtgcaagatgcagaatagaaaactgtgattcttgctttagcaaagacttttgtaccaagtgcaaagtaggcttttatttgcatagag

SEQ ID NO: 254143 - DNA, 568 bp, Artificial Sequence
  derived and/or modified sequence
agaagcatcccaagcctcagccggtctgcatctccatcggaaagtgcgcttgccacatcccttcggatcacttcgtcctcccgagagcgttctgccttctacagctcggaaagaaagaaatcttagctgtgaagtgaccgtggagaaagcgcaggaagcgacacaattggttcgtggcggagagatgctgatcgcgctgaactgaccggtgcggcccgggggtgagtggcgagtctccctctgagtcctccccagcagcgcggccggcgccggctctttgggcgaaccctccagttcctagactttgagaggcgtctctcccccgcccgaccgcccagatgcagtttcgccttttctcctttgccctcatcattctgaactgcatggattacagccactgccaaggcaaccgatggagacgcagtaagcgagctagttatgtatcaaatcccatttgcaagggttgtttgtcttgttcaaaggacaatgggtgtagccgatgtcaacagaagttgttcttcttccttcgaagagaagggatgcgccagtatggagagtgcctgcattc

SEQ ID NO: 254144 - DNA, 732 bp, Artificial Sequence
  derived and/or modified sequence
atgcagttcagactgttcagcttcgccctgatcatcctgaactgcatggactacagccactgccagggcaacagatggagaagaagcaagagagccagctacgtgagcaaccccatctgcaagggctgcctgagctgcagcaaggacaacggctgcagcagatgccagcagaagctgttcttcttcctgagaagagagggcatgagacagtacggcgagtgcctgcacagctgccccagcggctactacggccacagagcccccgacatgaacagatgcgccagatgcagaatcgagaactgcgacagctgcttcagcaaggacttctgcaccaagtgcaaggtgggcttctacctgcacagaggcagatgcttcgacgagtgccccgacggcttcgcccccctggaggagaccatggagtgcgtggagggctgcgaggtgggccactggagcgagtggggcacctgcagcagaaacaacagaacctgcggcttcaagtggggcctggagaccagaaccagacagatcgtgaagaagcccgtgaaggacaccatcctgtgccccaccatcgccgagagcagaagatgcaagatgaccatgagacactgccccggcggcaagagaacccccaaggccaaggagaagagaaacaagaagaagaagagaaagctgatcgagagagcccaggagcagcacagcgtgttcctggccaccgacagagccaaccagtag

SEQ ID NO: 254145 - DNA, 366 bp, Artificial Sequence
  derived and/or modified sequence
atgcagttcagactgttcagcttcgccctgatcatcctgaactgcatggactacagccactgccagggcaacagatggagaagaagcaagagagccagctacgtgagcaaccccatctgcaagggctgcctgagctgcagcaaggacaacggctgcagcagatgccagcagaagctgttcttcttcctgagaagagagggcatgagacagtacggcgagtgcctgcacagctgccccagcggctactacggccacagagcccccgacatgaacagatgcgccagatgcagaatcgagaactgcgacagctgcttcagcaaggacttctgcaccaagtgcaaggtgggcttctacctgcacagatag

SEQ ID NO: 254146 - DNA, 234 bp, Artificial Sequence
  derived and/or modified sequence
atgcagttcagactgttcagcttcgccctgatcatcctgaactgcatggactacagccactgccagggcaacagatggagaagaagcaagagagccagctacgtgagcaaccccatctgcaagggctgcctgagctgcagcaaggacaacggctgcagcagatgccagcagaagctgttcttcttcctgagaagagagggcatgagacagtacggcgagtgcctgcacagctag

SEQ ID NO: 254147 - protein, 138 aa, Artificial Sequence
  derived and/or modified sequence
MVAPAARVFLRAVRAALTSTVPDLLCLLARGSPRGLASGRLPLAVHSAQHGPGSGAPWLRIARRALRFVLSKHWGDDCYLTNRLWQDLKPPSHVENGQELRLAPPVQWALQVQGNQLQTAVLCLRMAPPEPAGSRQRI

SEQ ID NO: 254148 - DNA, 417 bp, Artificial Sequence
  derived and/or modified sequence
atggtggctccagcagccagggttttcttgagggctgtaagggcagcattaacgtccacggtacccgacctgctctgtctccttgcgcgaggtagtccccgaggtttagcaagtggcaggttgcccctggcagtccattcagctcagcacggcccagggagcggtgccccttggctccgcatcgctagaagggctttacgattcgtactgtcaaagcactggggagacgattgttatctgactaacaggctctggcaggatcttaagcccccaagtcatgtggagaacggtcaagagctacgcttggcgccacctgttcagtgggccttgcaggtgcagggtaaccagctacagactgcagttctgtgtctaaggatggccccacccgagccagcaggctctcgacagcggatctag

SEQ ID NO: 254149 - DNA, 417 bp, Artificial Sequence
  derived and/or modified sequence
atggttgcacccgctgctagagtgtttctgagagcagttagagcagctttaacatctaccgtgccagatctgctctgtctactggctagaggctctcccaggggcttagcatcggggcggttaccgcttgcggtacactcggcacagcacggacccggatcaggtgccccttggcttagaattgcgaggagagcactgcgcttcgtactgtcgaaacactggggcgacgactgctaccttacgaatcgcctgtggcaggatttgaaacccccatctcacgtggagaatggtcaggagctgcggttggcccccccggtacagtgggctcttcaggtccagggcaaccagctgcaaacggctgtcctttgtctcagaatggcacctcccgaacccgctggctcaagacagagaatctag

SEQ ID NO: 254150 - DNA, 417 bp, Artificial Sequence
  derived and/or modified sequence
atggttgcacccgctgctagagtgtttctgagagcagttagagcagctttaacatctaccgtgccagatctgctctgtctactggctagaggctctcccaggggcttagcatcggggcggttaccgcttgcggtacactcggcacagcacggacccggatcaggtgccccttggcttagaattgcgaggagagcactgcgcttcgtactgtcgaaacactggggcgacgactgctaccttacgaatcgcctgtggcaggatttgaaacccccatctcacgtggagaatggtcaggagctgagacttgctccaccagtacagtgggccctccaggtgcagggtaatcagctccagaccgcagttctctgtttacggatggctcccccagaacctgctgggtccagacagagaatctag

SEQ ID NO: 254151 - DNA, 417 bp, Artificial Sequence
  derived and/or modified sequence
atggtggcccccgccgccagagtgttcctgagagccgtgagagccgccctgaccagcaccgtgcccgacctgctgtgcctgctggccagaggcagccccagaggcctggccagcggcagactgcccctggccgtgcacagcgcccagcacggccccggcagcggcgccccctggctgagaatcgccagaagagccctgagattcgtgctgagcaagcactggggcgacgactgctacctgaccaacagactgtggcaggacctgaagccccccagccacgtggagaacggccaggagctgagactggccccccccgtgcagtgggccctgcaggtgcagggcaaccagctgcagaccgccgtgctgtgcctgagaatggccccccccgagcccgccggcagcagacagagaatctag

SEQ ID NO: 254152 - DNA, 887 bp, Artificial Sequence
  derived and/or modified sequence
cgcggtcaggccaggccgggtccaattaggggactcacagcctgccccgctgtgcaccccgaggaggcccggcccctgtgtccaatccggaagtcgcagggaagtggggaggtcaggatggtggcgcccgcggctcgggtcttcctccgggcagtgcgcgcggctctcacttccacggtcccggacctgctctgcctcctggcccgaggctccccgcgtggcctcgcgtctggtcgcctacccctcgcggtccactccgcccagcatggacctggatccggggcgccttggttgcgaattgccaggagggccctgagatttgtgttgtcaaaacactggggggatgattgttacctgacaaaccgcctctggcaggacctgaagcctcccagtcacgtcgagaacgggcaggagctcaggttggcgccgccggtgcagtgggcattacaggtgcaagggaaccagttgcaaactgcagtgctgtgcttgaggatggctcctcctgagccggcaggctcccgccaaagaatttagaacgagtctacgtggacacgcaagtttcagcgagcggggatttcctgcgaggccgagcgcgaggaacagccggccccggaggctcgggctcggggtctccccggggacgcggccgactgagaaggccggggcgctcgccgggcgcggcgccgtcctccgtgtcgcggggacggaaggaggcgacgcaggccaggagtcgtgcgcgcgggcggcgagggggcgctgtggcccgtgtctgccggcccgagtcccggcaacggtgggcgcgacccacctcctcccccggcggcttaattcggggaagaagaaaaaacggcatcgaggcatttcaataaaacctaagcgactcctga

SEQ ID NO: 254153 - DNA, 417 bp, Artificial Sequence
  derived and/or modified sequence
atggttgctccggcagccagggtgtttcttagggccgttagggctgccctgacatcgactgtgccggatctcctgtgtctgctggctagagggtcaccacggggactagcgtccggacgcttaccactcgcagtccactcagcgcagcacggccctggatcaggagcaccatggctgaggattgctagacgcgcgctgaggtttgtgttaagcaagcattggggggacgattgctacttgactaataggctttggcaggatctcaaaccaccgagtcacgtggaaaatggccaggagttgagactggcccccccagtccagtgggcactgcaagtgcagggcaaccagttgcagactgctgtgctctgtctacggatggcccccccagagcccgccgggtctcgacagagaatttag

SEQ ID NO: 254154 - DNA, 417 bp, Artificial Sequence
  derived and/or modified sequence
atggtggccccagctgcccgggtcttcctgcgggctgtgcgggccgccctgaccagcacagtgcctgacctgctgtgcctgctggcccggggcagcccccggggcctggccagcggccgcctgcccctggccgtgcacagcgcccagcacggccctggcagcggggccccctggctgagaattgcccggcgggccctgcgctttgtgctgagcaagcactggggagatgactgctacctgaccaaccggctgtggcaggacctgaagccacccagccacgtggagaatggccaggagctgcggctggcccctcctgtgcagtgggccctgcaggtgcagggcaaccagctgcagacagctgtgctgtgcctgaggatggcccctcctgagcccgccggcagccggcagaggatctag

SEQ ID NO: 254155 - DNA, 417 bp, Artificial Sequence
  derived and/or modified sequence
atggtggcccccgccgcccgggtgttcctgcgggccgtgcgggccgccttaacaagcacagtccctgatcttctgtgcttgctagcccgcgggtcaccaagaggtctggccagtggacgtctgccacttgcagttcatagcgctcagcatggccctggctcgggcgctccatggttacggatagctcggcgagctctgaggtttgttctgtctaaacactggggcgacgattgctatctcacgaataggctttggcaggatttaaagcccccatctcacgttgagaacggtcaggagctcagactcgccccccccgtgcagtgggcactgcaagtccagggaaaccagctgcaaaccgccgtactgtgtctacgtatggcgcccccggaaccagcgggaagtaggcagcgcatttag

SEQ ID NO: 254156 - RNA, 417 nt, Artificial Sequence
  derived and/or modified sequence
augguugcacccgcugcuagaguguuucugagagcaguuagagcagcuuuaacaucuaccgugccagaucugcucugucuacuggcuagaggcucucccaggggcuuagcaucggggcgguuaccgcuugcgguacacucggcacagcacggacccggaucaggugccccuuggcuuagaauugcgaggagagcacugcgcuucguacugucgaaacacuggggcgacgacugcuaccuuacgaaucgccuguggcaggauuugaaacccccaucucacguggagaauggucaggagcugcgguuggcccccccgguacagugggcucuucagguccagggcaaccagcugcaaacggcuguccuuugucucagaauggcaccucccgaacccgcuggcucaagacagagaaucuag

SEQ ID NO: 254157 - RNA, 417 nt, Artificial Sequence
  derived and/or modified sequence
augguugcacccgcugcuagaguguuucugagagcaguuagagcagcuuuaacaucuaccgugccagaucugcucugucuacuggcuagaggcucucccaggggcuuagcaucggggcgguuaccgcuugcgguacacucggcacagcacggacccggaucaggugccccuuggcuuagaauugcgaggagagcacugcgcuucguacugucgaaacacuggggcgacgacugcuaccuuacgaaucgccuguggcaggauuugaaacccccaucucacguggagaauggucaggagcugagacuugcuccaccaguacagugggcccuccaggugcaggguaaucagcuccagaccgcaguucucuguuuacggauggcucccccagaaccugcuggguccagacagagaaucuag

SEQ ID NO: 254158 - protein, 271 aa, Artificial Sequence
  derived and/or modified sequence
MAGLEVLFASAAPAITCRQDALVCFLHWEVVTHGYFGLGVGDQPGPNDKKSELLPAGWNNNKDLYVLRYEYKDGSRKLLVKAITVESSMILNVLEYGSQQVADLTLNLDDYIDAEHLGDFHRTYKNSEELRSRIVSGIITPIHEQWEKANVSSPHREFPPATAREVDPLRIPPHHPHTSRQPPWCDPLGPFVVGGEDLDPFGPRRGGMIVDPLRSGFPRALIDPSSGLPNRLPPGAVPPGARFDPFGPIGTSPPGPNPDHLPPPGYDDMYL

SEQ ID NO: 254159 - protein, 107 aa, Artificial Sequence
  derived and/or modified sequence
  misc_feature (1)..(1): Xaa can be any naturally occurring amino acid
XIHEQWEKANVSSPHREFPPATAREVDPLRIPPHHPHTSRQPPWPRRGGMIVDPLRSGFPRALIDPSSGLPNRLPPGAVPPGARFDPFGPIGTSPPGPNPDHLPPPG

SEQ ID NO: 254160 - protein, 165 aa, Artificial Sequence
  derived and/or modified sequence
MILNVLEYGSQQVADLTLNLDDYIDAEHLGDFHRTYKNSEELRSRIVSGIITPIHEQWEKANVSSPHREFPPATAREVDPLRIPPHHPHTSRQPPWPRRGGMIVDPLRSGFPRALIDPSSGLPNRLPPGAVPPGARFDPFGPIGTSPPGPNPDHLPPPGYDDMYL

SEQ ID NO: 254161 - DNA, 816 bp, Artificial Sequence
  derived and/or modified sequence
atggccggcctggaggtgctgttcgccagcgccgcccccgccatcacctgcagacaggacgccctggtgtgcttcctgcactgggaggtggtgacccacggctacttcggcctgggcgtgggcgaccagcccggccccaacgacaagaagagcgagctgctgcccgccggctggaacaacaacaaggacctgtacgtgctgagatacgagtacaaggacggcagcagaaagctgctggtgaaggccatcaccgtggagagcagcatgatcctgaacgtgctggagtacggcagccagcaggtggccgacctgaccctgaacctggacgactacatcgacgccgagcacctgggcgacttccacagaacctacaagaacagcgaggagctgagaagcagaatcgtgagcggcatcatcacccccatccacgagcagtgggagaaggccaacgtgagcagcccccacagagagttcccccccgccaccgccagagaggtggaccccctgagaatccccccccaccacccccacaccagcagacagcccccctggtgcgaccccctgggccccttcgtggtgggcggcgaggacctggaccccttcggccccagaagaggcggcatgatcgtggaccccctgagaagcggcttccccagagccctgatcgaccccagcagcggcctgcccaacagactgccccccggcgccgtgccccccggcgccagattcgaccccttcggccccatcggcaccagcccccccggccccaaccccgaccacctgcccccccccggctacgacgacatgtacctgtag

SEQ ID NO: 254162 - DNA, 3686 bp, Artificial Sequence
  derived and/or modified sequence
agccaagttctttccatcatcctgggccctcacctctggcataggctcttggtagtgggggcccagacagggaggcacctgccacctgcttcccttctcagccacccacagccctcatagggcagaatgggactcttgctgatgtagacgccgaagtcgcgggcgctcatggcgggcctggaggtactgttcgcatcggcagcgccggccatcacctgcaggcaggacgcgctcgtctgcttcttgcattgggaagtggtgacacacggttacttcggcttgggtgtcggtgaccagccgggtcccaatgataagaagtcagaactgctgccagctgggtggaacaacaataaagacctgtatgtcctccggtatgagtataaggatgggtccagaaagctccttgtgaaagccatcaccgtggagagcagcatgatcctcaatgtgctggaatatggctcacagcaagtggcagacttgaccctgaacttggatgattatatcgatgcagaacacctgggtgacttccacaggacctacaagaacagtgaggagcttcggtctcgtattgtgtctggaatcatcacacctatccatgagcagtgggaaaaggctaatgtaagcagtccccaccgggagttcccccctgctaccgccagagaggtggacccactccggattcctccacaccacccacacaccagtcggcagcctccctggtgtgatcccctgggcccgtttgttgtcgggggagaagacttagacccttttgggcctcggagaggtggcatgattgtggatcccctgagatctggcttcccaagagcacttattgacccttcctcaggcctcccgaaccgacttcctccaggcgctgtgcccccaggagctcgctttgacccctttggacccattgggaccagcccacccggacctaacccagaccatctccccccgccgggctacgatgacatgtacctgtgaaggcctcaagaatgtaacatcccaggcttccctccattctcctggagctgccaccgctgtccccatcagcaaccatgttcttgcaggctgggggcaagggattctgctcatgtgtttgcagaccggctgggatagcctccccaccccttatcagagccaagacacctgctgcagctctccacctagctgcagatagctcccaaagagaaatcagtgtgtctctttcaccatcagctcctcccctttcaccaccagctcctctccacttcccaagggagactccggcaaccttcagcaacatatatcctcgaccagatgcagtgctataagaacagaacgcattttggatgttattattaagaaccaaatgtcaatacagaattcatgttgccggtttcccacttttctttttacattaatgcatagctgcttccatttatgagactttagagtttgagtttctgtagggctgaatgactctttttcctgcccagggcccattcttgcttctcaggcaccttccgtttattaattgccattgctcctgacatcactaagatgggtccccttctggctgcatgaatggaaatgagtgactggaaatcccataggccacaagaatgactttcacaagggcaggaacattgtggaaagactgcatcattctgatgaggcaaaatcctccagctattcctgtctgggccagttttgtaggtccatctgtgcatgggcagcagtagtcaaaaagccaaggaaaaaacagagcagacctgaaggctaatcttatttttgccactaacttagtgaatgaccctaagcaagttccttctcctcttagggccttgtgccaagcctatgaaattggaggtggctttcctgctctaaagcattttgatgtctcattctgtgtttggtaacccctataaactggggcagaggaaaagaatgatggttcaaggccatacttcccttgaaccttgtgtggttcttgcctaactctgtggtttttggaccccatggggcccagacagagcacaggagcatgggctgcctctgagtgtggtgttgaacttcgggaggagcagggagccctgcaccttgtgtcctggcccacctgacctttggtgttctccggatccttttcagcccgaggcctgacagacgcgggcagtgatgagccctgttctggagtggaaagagcacgatagagcaccaggctaagaggcacgagatcaaggcggtagtcacttccgctctgcagctagcatttcaaccatatgtggatcctttcatttctcagctccctggattccttcccctaaattaggacctattatttacctgtaggtaagcaagctactgtagctcttctgaggtatctgccaggctgttttctgtagcctcagattgcctatctgcttagcctgagaacaggtagatgaaaactaaactgatgcctaggcccagggtcagtctcagatggaagctgggcctgggtggggaggctagcatgcgtggctccctgggtatttctgtcagtccccatggcaagcagtgatttagtaaaacaccccagagtcagggaagccaaccaccttgaaacctttagaacatctctgctttggagaaagacccagagatcaggcagaggtgcagattcaatcattactcataacctttgagagatggcaaatgggaggagtgttagtctttgttttggaattggaccattcttgcaaccaaaaggacttagagcagtttgctcataaagacatcctttattataaaaggaagtatttaaaggatgatagagaccatcagatagaagcagggaaggtagataacttttaggaccttgatgtgaggaaaagataaaatttaaacaataaatttgccacttagattttctagcagcaaagtccgaaaagatagttatatacaaaattctgttttctgaaaacaaaattgtgattcaccttcagaattggccattttttttgtgagtttccttgcatcaaggacactgagaaacacagtcattgtcttaggtgttctatgggaggaagtgaatagagcctttaggaacttcctggtcaagcttatggtgcttattttgatctgggccacttccctccttccagtcatgagtaatcatcaaggagcaagttggagtgtttcaggtgtatattttgtagaacccaaaagattggagccttaacaataaacatcagcactaagtgacctgttcctccttttttaaatagcagctttattgagatataatttacatacccataatttacatacctgtttaaagtatacaattcagtggatttagtatgttcacagtgttgcacatccaccaccatttctaattcctgaacattttcaccacctcaaaaagaaaccacacacccattggcatgactccccattcccttgctcccagccccaggcaaccactaacatctgtctctaaagattttttttttttttctggacagttctcataagtggaatcactcagtattatggccttttgtgtctggcttctttcatttcatgtgatgttttcaagattcattcatgctgtagcatgtatccatggtatggatatatcacattttgcttatccttttatcagttgatggacagttgggttgtttctacaaaaaggctattatgagtaatgcagccaagaa

SEQ ID NO: 254163 - DNA, 4290 bp, Artificial Sequence
  derived and/or modified sequence
ttccggcttccccgccccgccccgtccccgggcgtctccattttggtctcaggtgtggactcggcaagaaccagcgcaagagggaagcagagttatagctaccccggccgcggagccggctcactgcactacccccgcccccttctttcctccagacgccgaagtcgcgggcgctcatggcgggcctggaggtactgttcgcatcggcagcgccggccatcacctgcaggcaggacgcgctcgtctgcttcttgcattgggaagtggtgacacacggttacttcggcttgggtgtcggtgaccagccgggtcccaatgataagaagtcagaactgctgccagctgggtggaacaacaataaagacctgtatgtcctccggtatgagtataaggatgggtccagaaagctccttgtgaaagccatcaccgtggagagcagcatgatcctcaatgtgctggaatatggctcacagcaagtggcagacttgaccctgaacttggatgattatatcgatgcagaacacctgggtgacttccacaggacctacaagaacagtgaggagcttcggtctcgtattgtgtctggaatcatcacacctatccatgagcagtgggaaaaggctaatgtaagcagtccccaccgggagttcccccctgctaccgccagagaggtggacccactccggattcctccacaccacccacacaccagtcggcagcctccctggtgtgatcccctgggcccgtttgttgtcgggggagaagacttagacccttttgggcctcggagaggtggcatgattgtggatcccctgagatctggcttcccaagagcacttattgacccttcctcaggcctcccgaaccgacttcctccaggcgctgtgcccccaggagctcgctttgacccctttggacccattgggaccagcccacccggacctaacccagaccatctccccccgccgggctacgatgacatgtacctgtgaaggcctcaagaatgtaacatcccaggcttccctccattctcctggagctgccaccgctgtccccatcagcaaccatgttcttgcaggctgggggcaagggattctgctcatgtgtttgcagaccggctgggatagcctccccaccccttatcagagccaagacacctgctgcagctctccacctagctgcagatagctcccaaagagaaatcagtgtgtctctttcaccatcagctcctcccctttcaccaccagctcctctccacttcccaagggagactccggcaaccttcagcaacatatatcctcgaccagatgcagtgctataagaacagaacgcattttggatgttattattaagaaccaaatgtcaatacagaattcatgttgccggtttcccacttttctttttacattaatgcatagctgcttccatttatgagactttagagtttgagtttctgtagggctgaatgactctttttcctgcccagggcccattcttgcttctcaggcaccttccgtttattaattgccattgctcctgacatcactaagatgggtccccttctggctgcatgaatggaaatgagtgactggaaatcccataggccacaagaatgactttcacaagggcaggaacattgtggaaagactgcatcattctgatgaggcaaaatcctccagctattcctgtctgggccagttttgtaggtccatctgtgcatgggcagcagtagtcaaaaagccaaggaaaaaacagagcagacctgaaggctaatcttatttttgccactaacttagtgaatgaccctaagcaagttccttctcctcttagggccttgtgccaagcctatgaaattggaggtggctttcctgctctaaagcattttgatgtctcattctgtgtttggtaacccctataaactggggcagaggaaaagaatgatggttcaaggccatacttcccttgaaccttgtgtggttcttgcctaactctgtggtttttggaccccatggggcccagacagagcacaggagcatgggctgcctctgagtgtggtgttgaacttcgggaggagcagggagccctgcaccttgtgtcctggcccacctgacctttggtgttctccggatccttttcagcccgaggcctgacagacgcgggcagtgatgagccctgttctggagtggaaagagcacgatagagcaccaggctaagaggcacgagatcaaggcggtagtcacttccgctctgcagctagcatttcaaccatatgtggatcctttcatttctcagctccctggattccttcccctaaattaggacctattatttacctgtaggtaagcaagctactgtagctcttctgaggtatctgccaggctgttttctgtagcctcagattgcctatctgcttagcctgagaacaggtagatgaaaactaaactgatgcctaggcccagggtcagtctcagatggaagctgggcctgggtggggaggctagcatgcgtggctccctgggtatttctgtcagtccccatggcaagcagtgatttagtaaaacaccccagagtcagggaagccaaccaccttgaaacctttagaacatctctgctttggagaaagacccagagatcaggcagaggtgcagattcaatcattactcataacctttgagagatggcaaatgggaggagtgttagtctttgttttggaattggaccattcttgcaaccaaaaggacttagagcagtttgctcataaagacatcctttattataaaaggaagtatttaaaggatgatagagaccatcagatagaagcagggaaggtagataacttttaggaccttgatgtgaggaaaagataaaatttaaacaataaatttgccacttagattttctagcagcaaagtccgaaaagatagttatatacaaaattctgttttctgaaaacaaaattgtgattcaccttcagaattggccattttttttgtgagtttccttgcatcaaggacactgagaaacacagtcattgtcttaggtgttctatgggaggaagtgaatagagcctttaggaacttcctggtcaagcttatggtgcttattttgatctgggccacttccctccttccagtcatgagtaatcatcaaggagcaagttggagtgtttcaggtgtatattttgtagaacccaaaagattggagccttaacaataaacatcagcactaagtgacctgttcctccttttttaaatagcagctttattgagatataatttacatacccataatttacatacctgtttaaagtatacaattcagtggatttagtatgttcacagtgttgcacatccaccaccatttctaattcctgaacattttcaccacctcaaaaagaaaccacacacccattggcatgactccccattcccttgctcccagccccaggcaaccactaacatctgtctctaaagattttttttttttttctggacagttctcataagtggaatcactcagtattatggccttttgtgtctggcttctttcatttcatgtgatgttttcaagattcattcatgctgtagcatgtatccatggtatggatatatcacattttgcttatccttttatcagttgatggacagttgggttgtttctacaaaaaggctattatgagtaatgcagccaagaacatttgtgtaccagtttttgagttttcagttgtttgagtttcagatgttttcagttcatttgggtatataccaaggagtggaattgctggttcacatggtagctctatattctactttgtgaggaattgtcagactgttttccacggaagctgcaccattttacatttccactggtaatttatgagggttccagtttccccacatcttcaccaactcttgttatttttcatgcttatggccatcctagttagcgtgaagtagcatctcattgtggtcttctcttccattttttaaaaaagaattttgacctacaccaagcaaggcagagaccagagtcagtcccccttggggagcaatctgtggttttgataatcaccaccttgggatgaacatggctggtgagctgcagagcagttgatttgacttttggggatggttctaggctggatgtgatacagggcaggttttgtctctagagaaagttctcatgaccttcaggtctaatgagattcagatcatcactttggtttggtttgaaatttctttgtttatccagtgaattacaagtagaataaagatctggttctaaattgtc

SEQ ID NO: 254164 - DNA, 498 bp, Artificial Sequence
  derived and/or modified sequence
atgatcctgaacgtgctggagtacggcagccagcaggtggccgacctgaccctgaacctggacgactacatcgacgccgagcacctgggcgacttccacagaacctacaagaacagcgaggagctgagaagcagaatcgtgagcggcatcatcacccccatccacgagcagtgggagaaggccaacgtgagcagcccccacagagagttcccccccgccaccgccagagaggtggaccccctgagaatccccccccaccacccccacaccagcagacagcccccctggcccagaagaggcggcatgatcgtggaccccctgagaagcggcttccccagagccctgatcgaccccagcagcggcctgcccaacagactgccccccggcgccgtgccccccggcgccagattcgaccccttcggccccatcggcaccagcccccccggccccaaccccgaccacctgcccccccccggctacgacgacatgtacctgtag

SEQ ID NO: 254165 - DNA, 816 bp, Artificial Sequence
  derived and/or modified sequence
atggcaggcctggaggtgctgtttgcctcagctgcacccgccatcacatgcaggcaggacgccctggtgtgttttttacattgggaggttgttacccacgggtattttggactcggagtgggggaccagccaggtcccaatgacaagaagtcggagctactgccggccggttggaataataacaaagacctgtacgtcctcaggtacgagtacaaggatggaagtagaaagctgctggttaaagccataacggtggagagttcgatgattctaaacgtcctggaatacggcagccagcaggtagctgaccttacccttaatctggacgactacatcgacgccgagcacctgggtgattttcaccgcacttacaagaattccgaggagttaaggtcacggattgtgtcaggaattatcacacctatccacgagcagtgggagaaggccaatgtgtcatccccccatagggagtttccacccgcaacggcacgggaggttgatcccctgcgaataccgccgcatcatccccatactagccgacaacccccatggtgtgatccccttggaccgttcgtagtgggaggagaagacctcgacccatttggaccccgacggggaggcatgatcgtcgatcccctccggtcaggctttccaagggccctgattgacccaagttctgggctgcccaacaggttgccacccggggcagtcccgccgggtgcccgttttgacccgtttggccccatcggaacttcccctccgggccccaacccagaccacctaccgcccccgggatacgatgatatgtacctctag

SEQ ID NO: 254166 - DNA, 816 bp, Artificial Sequence
  derived and/or modified sequence
atggcgggactggaggttctctttgcttcggctgccccagcgatcacatgcaggcaggacgccttagtgtgtttcctgcactgggaggtggtcacgcacggctatttcggcctgggggtcggcgaccagcccggtccaaacgataaaaaaagcgaactcctccctgcaggctggaataataataaagatctgtatgtacttaggtacgagtacaaggacggcagccggaagctactggttaaagctattaccgtggaatctagcatgattctgaacgtacttgagtacgggagtcagcaggtggccgacctgaccctaaaccttgacgattacatagatgctgagcatcttggggactttcaccggacgtacaagaatagcgaggagcttagatctagaatcgttagtggcatcatcacccccatccatgagcagtgggagaaagcgaatgtgagctctccacacagggaattcccccctgccaccgcgcgtgaggtggatcctctcagaatccctccacaccatcctcacacctctcgacaacccccatggtgcgatcccttgggacccttcgtggtagggggtgaggatctggacccttttgggcctcgtcgaggggggatgattgtggacccactccgcagtgggtttccaagagccctgatcgatccctcttccggtctcccgaataggctgccccctggggctgtgccacctggcgcgagattcgatccttttggtcctataggtacttcccctcccgggccgaatcccgaccaccttccccctcctggttacgacgatatgtatctgtag

SEQ ID NO: 254167 - DNA, 498 bp, Artificial Sequence
  derived and/or modified sequence
atgattttgaatgtgctcgaatacggctcacagcaggtagcagacctgaccttgaatctcgacgattacatagatgcggaacatcttggcgattttcacaggacatataagaattctgaagaactgcgaagccggattgtctccggcattatcactcctatccacgagcaatgggagaaggccaatgtatcaagtccccatagagagtttcctccggccaccgcgcgagaggttgatccactccgcatcccaccgcaccacccccacacgagtcgccagccgccttggccacgacgcggcggcatgatcgtagatccactgaggagcggctttcctcgcgccctcatcgacccttctagcggcctgccaaacaggctcccccctggggcagtgccacccggcgcacggtttgatccattcggccctatcggtacatctcctccaggtcctaaccctgaccatctgccacctcccggttatgatgatatgtatctgtag

SEQ ID NO: 254168 - DNA, 816 bp, Artificial Sequence
  derived and/or modified sequence
atggccggcctggaggtgctgtttgccagcgctgccccagccatcacctgccggcaggatgccctggtgtgcttcctgcactgggaggtggtgacccacggctacttcggcctgggcgtgggggaccagcccggccccaatgacaagaagtctgagctgctgcctgctggctggaacaacaacaaggacctgtatgtgctgcgctatgagtacaaggatggcagcaggaagctgctggtgaaggccatcaccgtggagagctccatgatcctgaatgtgctggagtatggcagccagcaggtggccgacctgaccctgaacctggatgactacattgatgctgagcacctgggggacttccacaggacctacaagaacagcgaggagctgcggagccgcatcgtgtctggcatcatcacccccatccacgagcagtgggagaaggccaacgtgagcagcccccaccgggagttccccccagccacagcccgggaggtggaccccctgcgcatccccccccaccacccccacaccagccggcagcccccctggtgtgaccccctgggcccctttgtggtgggcggggaggacctggaccccttcggcccccggcggggcggcatgattgtggaccccctgcggagcggcttcccccgggccctgattgaccccagcagcggcctgcccaaccggctgcccccaggagctgtgcccccaggggccaggtttgaccccttcggccccatcggcaccagccccccaggccccaacccagaccacctgcccccacctggctatgatgacatgtacctgtag

SEQ ID NO: 254169 - DNA, 498 bp, Artificial Sequence
  derived and/or modified sequence
atgatcctgaatgtgctggagtatggcagccagcaggtggccgacctgaccctgaacctggatgactacattgatgctgagcacctgggggacttccacaggacctacaagaacagcgaggagctgcggagccgcatcgtgtctggcatcatcacccccatccacgagcagtgggagaaggccaacgtgagcagcccccaccgggagttccccccagccacagcccgggaggtggaccccctgcgcatccccccccaccacccccacaccagccggcagcccccctggccccggcggggcggcatgattgtggaccccctgcggagcggcttcccccgggccctgattgaccccagcagcggcctgcccaaccggctgcccccaggagctgtgcccccaggggccaggtttgaccccttcggccccatcggcaccagccccccaggccccaacccagaccacctgcccccacctggctatgatgacatgtacctgtag

SEQ ID NO: 254170 - DNA, 816 bp, Artificial Sequence
  derived and/or modified sequence
atggccggcctggaggtgctgttcgccagcgccgcccccgccatcacctgccgccaagacgccctggtttgtttcctacattgggaagtggtcacgcacggttatttcggcttgggcgtgggtgaccagcccggtccaaacgataaaaagagcgagctcctccctgccggatggaacaacaacaaggatctctacgtgctcaggtacgagtacaaggacggctcccggaagttgcttgtgaaggcaatcacagttgagtccagcatgattctcaacgtcctggagtacggaagccaacaggtggccgacctgacactgaatcttgatgattatattgacgctgaacacttgggggattttcatagaacgtacaaaaattccgaggagctgagatcccgtatagtctcagggattattacccccatccatgaacaatgggagaaagccaatgtgtcctccccccaccgtgagttccctcctgcaacagctcgggaggtggaccctttgcggattccaccccatcacccacacacatcacgccagccgccctggtgcgatcctctgggtccatttgtcgtgggaggcgaggatttggatccttttgggcctagaagaggaggtatgattgtcgatccactccggtccggatttccccgtgcgctcatcgatccatcctctgggctgcccaatcgcttaccacccggcgctgtccctcctggtgcccgctttgacccattcggaccaatcggtaccagcccccccggacccaacccggatcacctcccaccacctgggtacgatgacatgtatttgtag

SEQ ID NO: 254171 - DNA, 816 bp, Artificial Sequence
  derived and/or modified sequence
atggccggcctggaggtgctgttcgccagcgccgcccccgccatcacatgtcgccaggacgccctggtatgtttcctgcattgggaagtggtcacacatgggtattttgggctaggagttggggatcagcccgggccaaacgacaagaagtcagagttactgccggccggctggaataacaataaggatctatacgtcttgcgctacgagtacaaggacgggtcacggaagctgctggtgaaagctataacagtcgaatccagcatgatattaaatgtactcgaatacgggagtcaacaagtagccgatctgacactgaatttggacgattacattgacgcggagcaccttggcgattttcataggacctacaagaattctgaggagctgcgaagtcggattgttagtggaatcattacgccaattcacgaacagtgggagaaagccaatgtttccagcccccacagagaatttccgcctgctaccgcgagggaggtcgaccctctgcggattcccccccatcatcctcacacttcgagacagccaccttggtgtgaccctttgggccccttcgtagtggggggggaggatctcgacccttttggcccccggcgcggaggcatgatcgttgacccactccggtccgggttccccagggccctgattgaccccagctcggggttgcctaatcgactccctcctggagcagtcccccccggcgccagatttgaccctttcgggcctattggaacctccccaccaggcccaaacccggaccacctccctcctcctggctacgatgacatgtacttgtag

SEQ ID NO: 254172 - DNA, 498 bp, Artificial Sequence
  derived and/or modified sequence
atgatcctgaacgtgctggagtacggcagccagcaggtggccgacctgactctcaatctcgatgattacatcgacgccgaacacctgggggactttcaccggacctacaaaaacagcgaagaactgagatcaagaattgttagcgggatcatcactcctatccacgagcaatgggaaaaggctaacgtgagctctccccaccgagagttcccacctgctaccgcccgggaggtggacccactgcgaatcccccctcaccatccacatacgtcccgacagcctccatggcctcgtcgcgggggaatgatcgtggaccccttaaggagcgggtttcctcgcgctctgattgaccccagttcaggactgccaaaccggctgccccccggagccgtgccaccgggagcccgcttcgatcccttcgggccaatcggcacttccccaccaggacccaaccctgaccatctcccccctccagggtatgatgatatgtatctctag

SEQ ID NO: 254173 - DNA, 816 bp, Artificial Sequence
  derived and/or modified sequence
atggctggtctggaagtgctgtttgcctcagcggcacccgctataacatgccgccaagatgctctcgtctgttttctgcactgggaagtggtaactcatggctacttcggcctcggggtgggtgaccagcccggtcccaacgacaaaaaaagcgagttgctccctgccggatggaataataataaagacctctacgtgctgcgatacgagtataaagacggttcccgaaaactgctggtcaaggcgataaccgttgagtcatcgatgatcctgaacgtgctggaatatggaagtcagcaggtagccgatctgaccctcaacctggatgactatatcgatgcagagcatctgggtgatttccacagaacctacaagaacagcgaggaactgcgaagccgaatcgtatccgggataatcacgccaatccacgaacagtgggagaaggccaacgtgtcaagcccccatcgagaattcccaccagctaccgcacgcgaggtggacccgctgagaattccccctcatcacccccacacgagccgccagcctccttggtgtgatccactgggacccttcgtagttggcggagaagatctggacccctttgggccaaggcgaggtggtatgatagtggaccctctgcggagcggtttccctagagcgctgatcgatccttcctctggccttcccaatcggctgccacctggcgcagtaccaccaggggctagattcgatccattcggccctattggcaccagtcccccaggtcctaaccctgaccacttacccccacccggatatgacgacatgtatctatag

SEQ ID NO: 254174 - DNA, 816 bp, Artificial Sequence
  derived and/or modified sequence
atggcgggtctggaggtccttttcgccagcgccgctccagcgattacctgtagacaggacgcgctcgtctgtttccttcactgggaagtggttactcatggatattttggactgggagtgggcgaccaaccaggcccaaacgataagaagtctgagttgcttccagctggttggaacaacaataaagatttgtacgtattgcgttacgagtacaaagacggctccaggaaactgttggtgaaagctattacagttgagtcatcaatgattttaaatgtactggaatatgggagccagcaggttgctgaccttactttaaatctcgatgactatattgacgcagaacacttgggcgactttcacaggacctacaaaaactcagaagagttgaggtcaaggatcgtcagtggaatcattacccctattcacgaacagtgggaaaaggctaatgtgagctccccccatcgcgagtttccaccagcaacggcacgcgaagtggatccactcaggatcccccctcatcatccacatacgagccgccagcctccatggtgtgaccctctcggacctttcgtggtgggaggcgaagacctggatcctttcggaccacggagagggggaatgatagtagaccctcttcggtctggtttccctcgcgcactcattgaccccagtagcgggctgccaaaccgactgccgcctggtgccgtgccccctggagctcgatttgatccgttcgggcctataggtaccagcccccctggccctaacccagaccacctgcctccgccaggttatgatgacatgtatctctag

SEQ ID NO: 254175 - DNA, 498 bp, Artificial Sequence
  derived and/or modified sequence
atgatcttgaacgtattggaatatggaagccagcaggtcgccgacctgaccctcaatttggacgactatatcgacgccgagcacctgggagacttccatcggacgtataaaaactccgaggagttgcggagtcgcatcgttagcggcataattacccccatccatgaacagtgggagaaggcaaacgtctcaagccctcaccgcgaattcccccctgcgacagcacgggaggtggacccccttagaattccgccacaccatcctcatacgtcccgccagcccccttggcctcgcagggggggtatgattgtcgacccgctacggagtgggtttccacgcgcattaatagatccaagttcgggtttaccaaaccgtcttccacctggggcagtcccgcctggagctcggttcgaccccttcggaccaatcggaacctcgccccctggtccaaatccagatcacctaccccctcccggttacgatgacatgtacttatag

SEQ ID NO: 254176 - DNA, 1228 bp, Artificial Sequence
  derived and/or modified sequence
gccctcatagggcagaatgggactcttgctgatgtagacgccgaagtcgcgggcgctcatggcgggcctggaggtactgttcgcatcggcagcgccggccatcacctgcaggcaggacgcgctcgtctgcttcttgcattgggaagtggtgacacacggttacttcggcttgggtgtcggtgaccagccgggtcccaatgataagaagtcagaactgctgccagctgggtggaacaacaataaagacctgtatgtcctccggtatgagtataaggatgggtccagaaagctccttgtgaaagccatcaccgtggagagcagcatgatcctcaatgtgctggaatatggctcacagcaagtggcagacttgaccctgaacttggatgattatatcgatgcagaacacctgggtgacttccacaggacctacaagaacagtgaggagcttcggtctcgtattgtgtctggaatcatcacacctatccatgagcagtgggaaaaggctaatgtaagcagtccccaccgggagttcccccctgctaccgccagagaggtggacccactccggattcctccacaccacccacacaccagtcggcagcctccctggcctcggagaggtggcatgattgtggatcccctgagatctggcttcccaagagcacttattgacccttcctcaggcctcccgaaccgacttcctccaggcgctgtgcccccaggagctcgctttgacccctttggacccattgggaccagcccacccggacctaacccagaccatctccccccgccgggctacgatgacatgtacctgtgaaggcctcaagaatgtaacatcccaggcttccctccattctcctggagctgccaccgctgtccccatcagcaaccatgttcttgcaggctgggggcaagggattctgctcatgtgtttgcagaccggctgggatagcctccccaccccttatcagagccaagacacctgctgcagctctccacctagctgcagatagctcccaaagagaaatcagtgtgtctctttcaccatcagctcctcccctttcaccaccagctcctctccacttcccaagggagactccggcaaccttcagcaacatatatcctcgaccagatgcagtgctataagaacagaacgcattttggatgttattattaagaaccaaatgtcaatacagaattcatgttgccggtttcccacttttct

SEQ ID NO: 254177 - DNA, 1185 bp, Artificial Sequence
  derived and/or modified sequence
atggattcagctctgtcagacccccacaatggcagtgccgaggcagggggtccaaccaactccacaaccaggccaccgagtacaccagaaggcatagcactcgcctacggcagcctcctgctcatggcactactccctatattctttggcgccttgcggagtgtcaggtgtgctcgggggaagaatgcctcggatatgccagaaacgatcactagtagggatgccgccagatttcccatcattgcttcttgtaccctcttaggcttgtacctgttcttcaaaatcttcagccaggaatacattaatctactgcttagcatgtacttcttcgtgttgggaatcctggccttgagccataccatctcaccatttatgaataaatttttcccggcctctttccctaacaggcaataccaactattgttcacacagggcagtggggaaaataaggaggagatcatcaattacgaattcgatacaaaggaccttgtgtgcctaggcctgtcttctatcgttggggtgtggtaccttctaaggaagcactggatcgcgaacaacctatttggtttggccttttctctgaatggggtggaattgctgcatctcaataacgtgagcaccggttgcattctcctgggtggcctgttcatttacgacgtcttctgggtgttcgggaccaatgtgatggtcacagtggctaaaagttttgaggcgcccattaaactggtcttcccacaggacttgttggagaaaggcctggaggccaataatttcgctatgttaggcctcggtgacgtggtgatcccgggaatcttcattgccctgctgctgcgtttcgacatatcccttaaaaaaaacacccacacctacttttacacatccttcgctgcttacatatttgggctgggcttaactattttcatcatgcatattttcaagcacgctcagcccgcgctgttatatctcgtacctgcctgtatcgggttccccgtgctggtggcattagctaagggcgaggtaactgagatgttctcctatgaatctagcgccgagattttgccgcatacacctcggcttacacacttcccgactgtgtccggatcccctgcttcactcgctgattctatgcagcagaagctggccgggcctcgccgtcgccggccccagaatccaagcgctatgtag

SEQ ID NO: 254178 - DNA, 1809 bp, Artificial Sequence
  derived and/or modified sequence
ggagggagcacgtcacttcctgttgccttaggggaacgtggctttccctgcagagccggtgtctccgcctgcgtccctgctgcagcaaccggagctggagtcggatcccgaacgcaccctcgccatggactcggccctcagcgatccgcataacggcagtgccgaggcaggcggccccaccaacagcactacgcggccgccttccacgcccgagggcatcgcgctggcctacggcagcctcctgctcatggcgctgctgcccatcttcttcggcgccctgcgctccgtacgctgcgcccgcggcaagaatgcttcagacatgcctgaaacaatcaccagccgggatgccgcccgcttccccatcatcgccagctgcacactcttggggctctacctctttttcaaaatattctcccaggagtacatcaacctcctgctgtccatgtatttcttcgtgctgggaatcctggccctgtcccacaccatcagccccttcatgaataagttttttccagccagctttccaaatcgacagtaccagctgctcttcacacagggttctggggaaaacaaggaagagatcatcaattatgaatttgacaccaaggacctggtgtgcctgggcctgagcagcatcgttggcgtctggtacctgctgaggaagcactggattgccaacaacctttttggcctggccttctcccttaatggagtagagctcctgcacctcaacaatgtcagcactggctgcatcctgctgggcggactcttcatctacgatgtcttctgggtatttggcaccaatgtgatggtgacagtggccaagtccttcgaggcaccaataaaattggtgtttccccaggatctgctggagaaaggcctcgaagcaaacaactttgccatgctgggacttggagatgtcgtcattccagggatcttcattgccttgctgctgcgctttgacatcagcttgaagaagaatacccacacctacttctacaccagctttgcagcctacatcttcggcctgggccttaccatcttcatcatgcacatcttcaagcatgctcagcctgccctcctatacctggtccccgcctgcatcggttttcctgtcctggtggcgctggccaagggagaagtgacagagatgttcagctacgagtcctcggcggaaatcctgcctcataccccgaggctcacccacttccccacagtctcgggctccccagccagcctggccgactccatgcagcagaagctagctggccctcgccgccggcgcccgcagaatcccagcgccatgtaatgcccagcgggtgcccacctgcccgcttccccctactgccccggggcccaagttatgaggagtcaaatcctaaggatccagcggcagtgacagaatccaaagagggaacagaggcatcagcatcgaaggggctggagaagaaagagaaatgatgcagctggtgcccgagcctctcagggccagaccagacagatgggggctgggcccacacaggcgtgcaccggtagagggcacaggaggccaagggcagctccaggacagggcagggggcagcaggatacctccagccaggcctctgtggcctctgtttccttctccctttcttggccctcctctgctcctccccacaccctgcaggcaaaagaaacccccagcttcccccctccccgggagccaggtgggaaaagtgggtgtgatttttagattttgtattgtggactgattttgcctcacattaaaaactcatcccatggccagggcgggccactgtgctcctggaa

SEQ ID NO: 254179 - DNA, 1185 bp, Artificial Sequence
  derived and/or modified sequence
atggattctgccctgagtgacccccacaacggcagcgctgaggccggcggccccaccaacagcaccaccaggcctcccagcaccccagagggcatcgccctggcctacggcagcctgctgctgatggccctgctgcccatcttctttggagccctgcggtctgtgcgctgtgcccggggcaagaatgccagtgacatgcctgagaccatcaccagcagagatgctgcccgcttccccatcatcgccagctgcaccctgctgggcctgtacctgttcttcaagatcttcagccaggagtacatcaacctgctgctgtccatgtacttctttgtgctgggcatcctggccctgagccacaccatcagccccttcatgaacaagttcttccctgccagcttccccaaccggcagtaccagctgctcttcacccagggcagcggggagaacaaggaggagatcatcaactatgaatttgacaccaaggacctggtgtgcctgggcctgagcagcatcgtgggcgtgtggtacctgctgaggaagcactggatcgccaacaacctgtttggcctggccttcagcctgaatggagtggagctgctgcacctgaacaacgtgtccacaggctgcatcctgctgggcggcctcttcatctatgatgtgttctgggtgtttggcaccaacgtgatggtgacagtggccaagagctttgaggcccccatcaagctggtgttcccccaggacctgctggagaagggcctggaggccaacaactttgccatgctgggcctgggagatgtggtgattcctggcatcttcatcgccctgctgctgcgctttgacatcagcctgaagaagaacacccacacctacttctacaccagctttgctgcctacatcttcggcctgggcctgaccatcttcatcatgcacatcttcaagcacgcccagcctgccctgctgtacctggtgcctgcctgcatcggcttccctgtgctggtggccctggccaagggggaggtgacagagatgttctcctatgagagcagcgctgagatcctgccccacaccccccggctgacccacttccccaccgtgtctggcagccctgccagcctggccgacagcatgcagcagaagctggccggccccaggagaagaagaccccagaaccccagcgccatgtag

SEQ ID NO: 254180 - DNA, 1185 bp, Artificial Sequence
  derived and/or modified sequence
atggacagcgccctgagcgacccccacaacggcagcgccgaggccgggggccccaccaattctacgacacgtccaccctctactccggagggaattgccctggcttatggtagccttctcttgatggccctgcttcccattttttttggcgcattaaggagtgtccgctgtgctagggggaagaatgcttccgacatgcccgaaactatcacctcccgggatgccgctaggtttccaataatcgcaagctgcaccctgctgggactatatcttttctttaaaattttctctcaagaatatatcaatctgctcttgagcatgtacttcttcgtgcttggaatccttgcgctgagtcacacaatctctccctttatgaataaattttttccggcctctttcccgaacaggcagtaccaactgctgttcacacagggcagcggtgaaaacaaagaagagataatcaactatgagttcgacacgaaagaccttgtgtgtctggggctctcatctattgttggggtctggtaccttcttcgcaaacattggatcgccaataacctgttcggcctcgctttttcgttgaatggggtggaactactgcatctgaacaacgtctctaccggctgtatcctcttgggtggcctgttcatctatgatgtgttttgggtcttcggaactaacgtcatggtgaccgtcgccaagtcttttgaagcgcccattaaattggtattccctcaggacctgctggagaaaggcttagaggctaacaattttgccatgctcgggcttggagatgtagtgatccccgggatattcattgctcttcttcttagatttgatatctccctcaagaaaaacactcatacctacttttacacttcttttgccgcctacatttttgggcttgggttgaccattttcattatgcacatctttaagcacgcacagcccgcgctgttgtatctagtgccggcgtgtattggttttccggtgctggtggcgctggcaaaaggggaggttacagaaatgttcagctatgagtcaagtgcagagatccttcctcatacacctcgccttacacacttccctactgtcagtggctcgcccgccagcctcgccgacagtatgcagcagaagctagcagggccaaggcgccggcgtcctcagaatccctccgcaatgtag

SEQ ID NO: 254181 - DNA, 1185 bp, Artificial Sequence
  derived and/or modified sequence
atggactctgcactgtctgatccacataatggcagcgccgaggcaggagggccaacgaactcaacgactagacccccatccacccccgagggaattgctcttgcatacggatcactgttgctgatggccttactccctatcttctttggtgctcttaggtccgtcaggtgtgcaagaggtaaaaacgcatctgacatgcctgagactatcacgtcgcgggacgcggctaggttcccaatcatcgctagctgtacactgttggggctgtacctgttctttaagattttcagccaggagtacatcaaccttcttttgtctatgtacttctttgtgctgggaatcctggccctgtctcacacgatttcacctttcatgaacaaattcttccccgcaagcttccctaaccgacagtaccaactgcttttcacacaagggagtggagaaaacaaggaggagatcattaattacgaattcgacaccaaagacctggtttgtctgggtctgagcagcatcgtgggcgtatggtatttgctgaggaagcattggatcgcaaacaatctctttggactagccttcagcctcaacggcgttgaactcttgcacctcaataacgtaagtacggggtgcattctgcttggcggactgttcatctacgatgttttttgggtgtttggcaccaacgtgatggtgaccgtggccaaatcattcgaggccccaattaaactggtgttcccacaggatctacttgagaaagggctggaggctaacaatttcgcaatgttgggattaggtgacgtggtgattcctggcattttcatcgcccttctgcttcgcttcgacatctcactgaagaagaatacacacacctatttttacacctcattcgctgcctacatctttggtcttggcctgacgatcttcatcatgcacattttcaagcatgcccaacctgcgctgctatacctggttccagcctgcataggcttcccggttctagtagcactggccaaaggcgaagtgaccgagatgttttcctacgagagctcagctgagattctaccccacacgccgcgactaacccattttcctaccgttagcggctcaccggcatccctggccgatagcatgcagcaaaaattagctggcccaaggcggaggaggcctcagaatccctctgctatgtag

SEQ ID NO: 254182 - DNA, 1185 bp, Artificial Sequence
  derived and/or modified sequence
atggacagcgccctgagcgacccccacaacggcagcgccgaggccggcggccccaccaacagcaccaccagaccccccagcacccccgagggcatcgccctggcctacggcagcctgctgctgatggccctgctgcccatcttcttcggcgccctgagaagcgtgagatgcgccagaggcaagaacgccagcgacatgcccgagaccatcaccagcagagacgccgccagattccccatcatcgccagctgcaccctgctgggcctgtacctgttcttcaagatcttcagccaggagtacatcaacctgctgctgagcatgtacttcttcgtgctgggcatcctggccctgagccacaccatcagccccttcatgaacaagttcttccccgccagcttccccaacagacagtaccagctgctgttcacccagggcagcggcgagaacaaggaggagatcatcaactacgagttcgacaccaaggacctggtgtgcctgggcctgagcagcatcgtgggcgtgtggtacctgctgagaaagcactggatcgccaacaacctgttcggcctggccttcagcctgaacggcgtggagctgctgcacctgaacaacgtgagcaccggctgcatcctgctgggcggcctgttcatctacgacgtgttctgggtgttcggcaccaacgtgatggtgaccgtggccaagagcttcgaggcccccatcaagctggtgttcccccaggacctgctggagaagggcctggaggccaacaacttcgccatgctgggcctgggcgacgtggtgatccccggcatcttcatcgccctgctgctgagattcgacatcagcctgaagaagaacacccacacctacttctacaccagcttcgccgcctacatcttcggcctgggcctgaccatcttcatcatgcacatcttcaagcacgcccagcccgccctgctgtacctggtgcccgcctgcatcggcttccccgtgctggtggccctggccaagggcgaggtgaccgagatgttcagctacgagagcagcgccgagatcctgccccacacccccagactgacccacttccccaccgtgagcggcagccccgccagcctggccgacagcatgcagcagaagctggccggccccagaagaagaagaccccagaaccccagcgccatgtag

SEQ ID NO: 254183 - protein, 394 aa, Artificial Sequence
  derived and/or modified sequence
MDSALSDPHNGSAEAGGPTNSTTRPPSTPEGIALAYGSLLLMALLPIFFGALRSVRCARGKNASDMPETITSRDAARFPIIASCTLLGLYLFFKIFSQEYINLLLSMYFFVLGILALSHTISPFMNKFFPASFPNRQYQLLFTQGSGENKEEIINYEFDTKDLVCLGLSSIVGVWYLLRKHWIANNLFGLAFSLNGVELLHLNNVSTGCILLGGLFIYDVFWVFGTNVMVTVAKSFEAPIKLVFPQDLLEKGLEANNFAMLGLGDVVIPGIFIALLLRFDISLKKNTHTYFYTSFAAYIFGLGLTIFIMHIFKHAQPALLYLVPACIGFPVLVALAKGEVTEMFSYESSAEILPHTPRLTHFPTVSGSPASLADSMQQKLAGPRRRRPQNPSAM

SEQ ID NO: 254184 - protein, 426 aa, Artificial Sequence
  derived and/or modified sequence
MDSALSDPHNGSAEAGGPTNSTTRPPSTPEGIALAYGSLLLMALLPIFFGALRSVRCARGKNASDMPETITSRDAARFPIIASCTLLGLYLFFKIFSQEYINLLLSMYFFVLGILALSHTISPFMNKFFPASFPNRQYQLLFTQGSGENKEEIINYEFDTKDLVCLGLSSIVGVWYLLRKHWIANNLFGLAFSLNGVELLHLNNVSTGCILLGGLFIYDVFWVFGTNVMVTVAKSFEAPIKLVFPQDLLEKGLEANNFAMLGLGDVVIPGIFIALLLRFDISLKKNTHTYFYTSFAAYIFGLGLTIFIMHIFKHAQPALLYLVPACIGFPVLVALAKGEVTEMFSYESSAEILPHTPRLTHFPTVSGSPASLADSMQQKLAGPRRRRPQNPSAIYEESNPKDPAAVTESKEGTEASASKGLEKKEK

SEQ ID NO: 254185 - DNA, 1281 bp, Artificial Sequence
  derived and/or modified sequence
atggactctgcgctgagcgacccacacaatgggagcgctgaggcgggcggaccaactaactccaccactcgtccaccatcaaccccagaagggatcgccttggcttatgggtcactcctcctcatggccctcttgccaatcttttttggagccttgagaagcgtgcgttgtgccaggggaaagaacgctagcgacatgcccgagaccatcaccagcagagacgcggcccgatttccaatcatcgcctcttgtacacttcttgggctttacttgtttttcaagattttttcgcaggagtatattaacctgttgttaagtatgtacttcttcgtactcgggatcttagcacttagccatacaatctcgcctttcatgaataaattcttcccagcaagttttcccaacaggcaatatcagttgctgttcacacagggcagcggggagaacaaggaggaaattattaattacgagtttgacacaaaagatttagtttgtctcggcctgagtagtatagtcggagtctggtaccttctcagaaagcactggatcgccaacaatctttttgggctggcattttctttgaatggtgtagaactgctgcacctcaacaacgtgtcgacgggttgcatcctccttgggggtttatttatttatgacgtgttctgggttttcggcaccaacgtgatggtgacggtcgctaagtctttcgaggcccccatcaagctggtgttccctcaggaccttctggaaaaagggcttgaggcaaataacttcgctatgttggggctgggtgacgtggtgattcccgggatattcattgccctgctgctgcggtttgatatttctctgaaaaagaacacacatacatatttctatacttccttcgcagcgtacatctttgggttgggtctaacaattttcattatgcatatctttaagcacgcccagccggcgcttttgtacctggtgcctgcttgcattggatttccagtccttgtggctctcgccaagggggaagttaccgagatgttctcctatgagtcttctgcggaaatcctgccccacacacctagactgacgcactttccaaccgttagcggctcaccagccagcctggctgattccatgcagcagaaactagccgggcccagaagaaggagaccccaaaaccctagtgctatttacgaggagagcaaccctaaagatcccgctgctgtgaccgagtcgaaggagggaacagaagccagtgcttccaaaggactggagaaaaaagagaaatag

SEQ ID NO: 254186 - DNA, 1753 bp, Artificial Sequence
  derived and/or modified sequence
ggagggagcacgtcacttcctgttgccttaggggaacgtggctttccctgcagagccggtgtctccgcctgcgtccctgctgcagcaaccggagctggagtcggatcccgaacgcaccctcgccatggactcggccctcagcgatccgcataacggcagtgccgaggcaggcggccccaccaacagcactacgcggccgccttccacgcccgagggcatcgcgctggcctacggcagcctcctgctcatggcgctgctgcccatcttcttcggcgccctgcgctccgtacgctgcgcccgcggcaagaatgcttcagacatgcctgaaacaatcaccagccgggatgccgcccgcttccccatcatcgccagctgcacactcttggggctctacctctttttcaaaatattctcccaggagtacatcaacctcctgctgtccatgtatttcttcgtgctgggaatcctggccctgtcccacaccatcagccccttcatgaataagttttttccagccagctttccaaatcgacagtaccagctgctcttcacacagggttctggggaaaacaaggaagagatcatcaattatgaatttgacaccaaggacctggtgtgcctgggcctgagcagcatcgttggcgtctggtacctgctgaggaagcactggattgccaacaacctttttggcctggccttctcccttaatggagtagagctcctgcacctcaacaatgtcagcactggctgcatcctgctgggcggactcttcatctacgatgtcttctgggtatttggcaccaatgtgatggtgacagtggccaagtccttcgaggcaccaataaaattggtgtttccccaggatctgctggagaaaggcctcgaagcaaacaactttgccatgctgggacttggagatgtcgtcattccagggatcttcattgccttgctgctgcgctttgacatcagcttgaagaagaatacccacacctacttctacaccagctttgcagcctacatcttcggcctgggccttaccatcttcatcatgcacatcttcaagcatgctcagcctgccctcctatacctggtccccgcctgcatcggttttcctgtcctggtggcgctggccaagggagaagtgacagagatgttcagctacgagtcctcggcggaaatcctgcctcataccccgaggctcacccacttccccacagtctcgggctccccagccagcctggccgactccatgcagcagaagctagctggccctcgccgccggcgcccgcagaatcccagcgccatttatgaggagtcaaatcctaaggatccagcggcagtgacagaatccaaagagggaacagaggcatcagcatcgaaggggctggagaagaaagagaaatgatgcagctggtgcccgagcctctcagggccagaccagacagatgggggctgggcccacacaggcgtgcaccggtagagggcacaggaggccaagggcagctccaggacagggcagggggcagcaggatacctccagccaggcctctgtggcctctgtttccttctccctttcttggccctcctctgctcctccccacaccctgcaggcaaaagaaacccccagcttcccccctccccgggagccaggtgggaaaagtgggtgtgatttttagattttgtattgtggactgattttgcctcacattaaaaactcatcccatggccagggcgggccactgtgctcctggaa

SEQ ID NO: 254187 - DNA, 1281 bp, Artificial Sequence
  derived and/or modified sequence
atggattctgccctgagtgacccccacaacggcagcgctgaggccggcggccccaccaacagcaccaccaggcctcccagcaccccagagggcatcgccctggcctacggcagcctgctgctgatggccctgctgcccatcttctttggagccctgcggtctgtgcgctgtgcccggggcaagaatgccagtgacatgcctgagaccatcaccagcagagatgctgcccgcttccccatcatcgccagctgcaccctgctgggcctgtacctgttcttcaagatcttcagccaggagtacatcaacctgctgctgtccatgtacttctttgtgctgggcatcctggccctgagccacaccatcagccccttcatgaacaagttcttccctgccagcttccccaaccggcagtaccagctgctcttcacccagggcagcggggagaacaaggaggagatcatcaactatgaatttgacaccaaggacctggtgtgcctgggcctgagcagcatcgtgggcgtgtggtacctgctgaggaagcactggatcgccaacaacctgtttggcctggccttcagcctgaatggagtggagctgctgcacctgaacaacgtgtccacaggctgcatcctgctgggcggcctcttcatctatgatgtgttctgggtgtttggcaccaacgtgatggtgacagtggccaagagctttgaggcccccatcaagctggtgttcccccaggacctgctggagaagggcctggaggccaacaactttgccatgctgggcctgggagatgtggtgattcctggcatcttcatcgccctgctgctgcgctttgacatcagcctgaagaagaacacccacacctacttctacaccagctttgctgcctacatcttcggcctgggcctgaccatcttcatcatgcacatcttcaagcacgcccagcctgccctgctgtacctggtgcctgcctgcatcggcttccctgtgctggtggccctggccaagggggaggtgacagagatgttctcctatgagagcagcgctgagatcctgccccacaccccccggctgacccacttccccaccgtgtctggcagccctgccagcctggccgacagcatgcagcagaagctggccggccccaggagaagaagaccccagaaccccagcgccatctatgaggagagcaaccccaaggaccctgctgctgtgacagagagcaaggagggcacagaggccagcgccagcaagggcctggagaagaaggagaagtag

SEQ ID NO: 254188 - DNA, 1281 bp, Artificial Sequence
  derived and/or modified sequence
atggacagcgccctgagcgacccccacaacggcagcgccgaggccgggggaccgaccaacagtaccacccgcccccccagcacgcccgagggtatcgcactcgcatacggctctcttctgctgatggctctgttacctatattttttggcgccttacgttctgtgcggtgtgcgcgggggaagaacgcctcagacatgcctgaaacaataacatctcgggacgcggccagatttccaattatagcatcctgcacattgctgggactctacctgtttttcaagatttttagccaggagtacataaacctgctgctatcgatgtacttcttcgtgcttggcattttggctctgtcacataccatatctccatttatgaataaatttttccccgccagtttccctaatagacaataccagctcctgtttacgcagggaagcggagaaaacaaagaagaaattattaactatgagtttgacaccaaagacttggtgtgtttaggattgtctagcatcgtgggtgtgtggtacctcttgcggaagcattggatcgctaataatttgttcgggctggcgttttctctgaacggggttgagctgctgcatttgaacaacgtttcaactggctgcatactgttaggggggcttttcatatacgacgttttctgggtgttcggcaccaatgtgatggtcacagtcgctaagtcctttgaggcaccaatcaagctagtctttccgcaagacctgctggagaaaggccttgaggctaacaactttgcgatgctgggtctgggcgatgtggtcattccgggcatcttcatcgcactgttgctgcggttcgacatctccttaaaaaagaatactcacacctatttctacaccagcttcgcagcctacattttcggactggggctcaccatcttcatcatgcacatttttaagcacgctcaaccagccctgctgtacctcgtgcccgcttgtatcggttttccagtgctcgttgccctcgctaagggggaggttacagagatgttttcctatgagtcgtcagccgaaatcctgcctcacacacctagattaacacactttccaactgtctcagggtctcctgctagcctcgcggattccatgcagcagaagctggcggggccccggagacgaaggccacagaacccatccgctatctacgaagaaagcaaccccaaggatccagctgccgtaaccgaatcaaaggagggtaccgaagctagcgcctctaagggcttggagaagaaggagaaatag

SEQ ID NO: 254189 - DNA, 1281 bp, Artificial Sequence
  derived and/or modified sequence
atggactcggcactttcagatccccacaatgggtcagcggaggcagggggtcccacaaattctactactcgtcccccaagtacgcctgagggaatcgctctcgcatatggttccctactgctaatggctctgctgcccattttttttggtgcccttaggtctgtcaggtgtgcccgagggaaaaatgcctcagatatgcctgagacaattacgtcccgagatgccgctaggtttcctattatcgcttcctgcaccttactgggcctgtatctgttcttcaagatcttttcacaggaatatataaatctcctgctatctatgtacttctttgttctcggaatactggccctgagccatactatctcaccttttatgaataagtttttccctgcctcgtttcctaaccgtcaataccagcttctcttcactcaaggcagtggagagaacaaagaagaaatcatcaactatgagttcgacacaaaggaccttgtatgtttgggcctgtccagcatcgtaggcgtgtggtatcttttacgcaaacattggattgctaataacctgttcggcttggccttctccctaaatggcgtcgagttgttgcatctgaacaatgtgtctacagggtgcatcctcctggggggtctcttcatttacgacgtgttctgggtcttcggtacaaatgtaatggtgaccgtggccaaatctttcgaggccccaattaagctagtgttcccacaagatctcctggagaaggggctggaagcaaacaattttgctatgctgggcctgggagatgtcgtgatccctggaatctttatcgcactcctgctccgcttcgatattagtttaaagaaaaatactcatacatacttttatacctctttcgccgcttatatctttgggctggggctgacgatttttatcatgcacattttcaaacatgcacagccggcacttctctacctggtgcctgcgtgtatcgggtttcccgttctcgtggcacttgccaagggtgaagtcaccgaaatgttcagctatgaatccagtgctgaaattttgccacacacccccagactgactcattttcccaccgtctccggtagtcctgcctccttagccgatagcatgcagcagaaactggctgggcctcggagacgaagaccgcagaaccctagcgcgatatacgaagaatctaatccaaaagatcccgcagctgtgaccgagagtaaggaggggactgaagcatccgcgagcaagggcttggagaagaaggaaaagtag

SEQ ID NO: 254190 - DNA, 1281 bp, Artificial Sequence
  derived and/or modified sequence
atggacagcgccctgagcgacccccacaacggcagcgccgaggccggcggccccaccaacagcaccaccagaccccccagcacccccgagggcatcgccctggcctacggcagcctgctgctgatggccctgctgcccatcttcttcggcgccctgagaagcgtgagatgcgccagaggcaagaacgccagcgacatgcccgagaccatcaccagcagagacgccgccagattccccatcatcgccagctgcaccctgctgggcctgtacctgttcttcaagatcttcagccaggagtacatcaacctgctgctgagcatgtacttcttcgtgctgggcatcctggccctgagccacaccatcagccccttcatgaacaagttcttccccgccagcttccccaacagacagtaccagctgctgttcacccagggcagcggcgagaacaaggaggagatcatcaactacgagttcgacaccaaggacctggtgtgcctgggcctgagcagcatcgtgggcgtgtggtacctgctgagaaagcactggatcgccaacaacctgttcggcctggccttcagcctgaacggcgtggagctgctgcacctgaacaacgtgagcaccggctgcatcctgctgggcggcctgttcatctacgacgtgttctgggtgttcggcaccaacgtgatggtgaccgtggccaagagcttcgaggcccccatcaagctggtgttcccccaggacctgctggagaagggcctggaggccaacaacttcgccatgctgggcctgggcgacgtggtgatccccggcatcttcatcgccctgctgctgagattcgacatcagcctgaagaagaacacccacacctacttctacaccagcttcgccgcctacatcttcggcctgggcctgaccatcttcatcatgcacatcttcaagcacgcccagcccgccctgctgtacctggtgcccgcctgcatcggcttccccgtgctggtggccctggccaagggcgaggtgaccgagatgttcagctacgagagcagcgccgagatcctgccccacacccccagactgacccacttccccaccgtgagcggcagccccgccagcctggccgacagcatgcagcagaagctggccggccccagaagaagaagaccccagaaccccagcgccatctacgaggagagcaaccccaaggaccccgccgccgtgaccgagagcaaggagggcaccgaggccagcgccagcaagggcctggagaagaaggagaagtag

SEQ ID NO: 254191 - protein, 431 aa, Artificial Sequence
  derived and/or modified sequence
MASSEVARHLKRENIRSLTMSGHVGFESLPDQLVNRSIQQGFCFNILCVGETGIGKSTLIDTLFNTNFEDYESSHFCPNVKLKAQTYELQESNVQLKLTIVNTVGFGDQINKEESYQPIVDYIDAQFEAYLQEELKIKRSLFTYHDSRIHVCLYFISPTGHSLKTLDLLTMKNLDSKVNIIPVIAKADTVSKTELQKFKIKLMSELVSNGVQIYQFPTDDDTIAKVNAAMNGQLPFAVVGSMDEVKVGNKMVKARQYPWGVVQVENENHCDFVKLREMLICTNMEDLREQTHTRHYELYRRCKLEEMGFTDVGPENKPVSVQETYEAKRHEFHGERQRKEEEMKQMFVQRVKEKEAILKEAERELQAKFEHLKRLHQEERMKLEEKRRLLEEEIIAFSKKKATSEIFHSQSFLATGSNLRKDKDRKNSNFL

SEQ ID NO: 254192 - DNA, 1296 bp, Artificial Sequence
  derived and/or modified sequence
atggcgtctagcgaagtcgccagacacctcaaaagagagaacatccgctccctcacgatgtccggccacgtcggcttcgagagtctgcccgaccaactggttaaccgcagcattcaacaaggcttttgctttaacatcctttgtgtgggggagacaggcattggtaagtctaccctgattgacacactcttcaacaccaatttcgaagattatgagagctctcatttttgtcctaacgttaaactcaaggcccagacctatgagctccaggagagcaacgtacagctgaagcttactatcgtaaacaccgtaggttttggcgaccagatcaataaggaagaatcttatcagccaattgttgattatattgacgctcagtttgaggcctatctgcaagaggaattaaaaatcaagcggtccttatttacctatcatgactcaagaattcacgtgtgcctgtacttcattagtccaactggacactcattgaaaacgcttgacctgctcacaatgaagaacctagacagcaaagtcaacattatccccgttatcgctaaggctgatacggtttctaagacagagctgcaaaaatttaagattaagctaatgagtgaactggtctcaaacggagtgcagatctaccaattccctactgatgacgatactatagcgaaagttaatgcggcaatgaacgggcaattaccgttcgcggtagtcgggtccatggatgaggtgaaggtgggtaataagatggtgaaagccaggcagtacccttggggggtggtgcaggttgaaaacgaaaaccactgtgacttcgtgaagttacgagaaatgttaatttgcacaaatatggaagaccttagagagcagacccatactagacactacgagctttatcggagatgcaagctggaggagatgggattcacagacgtaggtcctgaaaacaaaccagttagtgtacaggaaacctacgaggcaaagcgccacgagttccatggtgagcgtcagaggaaagaagaagagatgaagcagatgttcgttcagagggtcaaagaaaaagaggctatcctaaaggaggcagaacgggagttgcaggccaaattcgaacatttgaaaagactgcaccaggaggagagaatgaagctcgaggagaaaaggaggctactcgaggaggagattattgccttcagcaaaaagaaggctacctccgagatttttcatagccagtcctttctggccactggcagcaatcttaggaaggacaaggatcgtaagaacagtaatttcctttag

SEQ ID NO: 254193 - DNA, 1296 bp, Artificial Sequence
  derived and/or modified sequence
atggccagcagcgaggtggcccggcacctgaagcgggagaacatccgcagcctgaccatgagcggccacgtgggctttgagagcctgcctgaccagctggtgaacagaagcatccagcagggcttctgcttcaacatcctgtgtgtgggggagaccggcatcggcaagagcaccctgattgacaccctcttcaacaccaactttgaagattatgagagcagccacttctgccccaacgtgaagctgaaggcccagacctatgagctgcaggagagcaatgtgcagctgaagctgaccatcgtgaacacagtgggctttggagaccagatcaacaaggaggagagctaccagcccatcgtggactacattgatgcccagtttgaggcctacctgcaggaggagctgaagatcaagaggagcctcttcacctaccatgacagccgcatccacgtgtgcctgtacttcatcagccccaccggccacagcctgaagaccctggacctgctgaccatgaagaacctggacagcaaggtgaacatcatccctgtgattgccaaggctgacacagtgtccaagacagagctgcagaagttcaagatcaagctgatgtctgagctggtgtccaatggagtgcagatctaccagttccccacagatgatgacaccatcgccaaggtgaatgctgccatgaatggccagctgccctttgctgtggtgggctccatggatgaggtgaaggtgggcaacaagatggtgaaggcccggcagtacccctggggcgtggtgcaggtggagaatgaaaaccactgtgactttgtgaagctgcgggagatgctgatctgcaccaacatggaggacctgcgggagcagacccacaccaggcactatgagctgtaccgccgctgcaagctggaggagatgggcttcacagatgtgggccctgagaacaagcctgtgtctgtgcaggagacctatgaggccaagagacatgagttccatggagagcggcagaggaaggaggaggagatgaagcagatgtttgtgcagagggtgaaggagaaggaggccatcctgaaggaggccgagcgggagctgcaggccaagtttgagcacctgaagaggctgcaccaggaggagaggatgaagctggaggagaagaggcggctgctggaggaggagatcatcgccttcagcaagaagaaggccaccagcgagatcttccacagccagagcttcctggccaccggcagcaacctgaggaaggacaaggacaggaagaacagcaacttcctgtag

SEQ ID NO: 254194 - DNA, 1296 bp, Artificial Sequence
  derived and/or modified sequence
atggccagcagcgaggtggcccggcacctgaagcgggagaacatcaggagcctcaccatgtccggtcacgtcggattcgaatcactgccagaccagctggtaaaccgctccattcaacaaggcttttgttttaacatcttatgcgtcggtgaaacgggcattggcaagagcaccctcattgacaccttgttcaataccaatttcgaagattatgagtcgtcgcacttttgcccaaatgttaagctcaaggcgcagacgtatgaattgcaggagtcaaatgtgcagttaaaattaactatagtgaatacggtaggcttcggggatcagatcaacaaggaagagtcctatcagccaattgtcgactacatagacgctcagtttgaggcctacctgcaggaagagcttaaaattaagcggtctctgttcacctatcatgacagccgtattcacgtctgtctgtactttatttcacccactggacattccctcaagacactggatcttctaacaatgaaaaatttggacagtaaggtaaatatcatccctgtgatcgccaaggcagatacagtctccaagaccgaactccagaagtttaaaatcaagctgatgtccgagctggtgtcgaacggtgtacagatttaccaatttcccacagacgatgatactattgctaaggtgaacgccgcaatgaatgggcagctccctttcgccgttgtcggcagcatggatgaggtcaaggttggcaacaagatggtgaaagcccggcaatacccatggggggttgtacaagttgaaaatgagaatcactgtgactttgtgaaacttagagagatgctcatttgcacaaacatggaggatctgcgggaacagacacacaccaggcattacgagctatacagacgatgtaaactggaagagatgggattcacagacgttgggccagagaataaaccagtctctgtgcaagagacatacgaggcaaagcggcacgaatttcacggagagcggcagaggaaggaggaggagatgaagcagatgttcgttcagagggtcaaggagaaggaggcaatcctgaaggaggccgaacgcgagctgcaggccaaatttgagcacttaaaacggttacaccaggaggagcgcatgaagctcgaggagaagcgccgactgcttgaagaggagataattgctttctctaaaaaaaaggccaccagcgaaattttccacagtcagagctttttggctaccggtagtaatcttcgcaaggacaaagaccgcaaaaactccaattttctttag

SEQ ID NO: 254195 - DNA, 1296 bp, Artificial Sequence
  derived and/or modified sequence
atggctagtagcgaagtagcacgacaccttaagagggagaatattcgaagtcttactatgagtggtcacgtgggcttcgagtccttgccagaccagctggtgaatcggtcaattcagcaaggcttctgcttcaatatcctgtgtgtcggggagactggaataggtaagtccacactcattgataccctatttaataccaactttgaggactatgagagtagtcacttttgtcccaatgtcaagctgaaagcgcagacgtatgaactgcaggagtctaatgtgcaactgaaattaacaatcgtgaacactgtgggattcggagaccagatcaataaggaagaaagctatcagcccattgtggactatatcgacgcccaattcgaagcctacctccaggaggagctaaagattaagcggagtctcttcacctatcacgatagccggattcatgtttgcctttactttatcagtcctactggacattctttgaaaaccctggatctcttaactatgaaaaatctggatagcaaggtgaatattatcccagtgatcgccaaagctgatactgtaagcaagacagagctgcagaaattcaagatcaagttgatgtccgagctggtctcaaatggagtacagatctatcagtttccaacggatgatgataccatcgccaaggttaatgcagctatgaacggccaactgccctttgccgtcgtgggctctatggatgaggtcaaggtcggcaacaagatggtcaaagccagacagtatccatggggagtggtacaggtagagaacgaaaaccattgtgatttcgttaagctgagagaaatgctgatttgcactaacatggaagatctgagagagcagacccacactcggcattatgaactctatcggagatgcaaactcgaggagatgggatttacagatgtcggacccgagaataagcctgtttcggtgcaggagacctacgaagcaaagagacacgaattccacggcgaacgtcagaggaaggaagaggaaatgaaacagatgtttgttcagcgtgtgaaggagaaggaggccattctcaaggaagccgagcgagaattgcaggccaagttcgagcacctgaagcgacttcaccaggaggagagaatgaaactggaggaaaagagacggctgcttgaagaggagattatcgctttctccaagaagaaggccaccagtgagatcttccatagccagagctttctggctaccggcagcaatcttcgcaaagataaagaccgcaagaatagcaatttcttgtag

SEQ ID NO: 254196 - DNA, 2719 bp, Artificial Sequence
  derived and/or modified sequence
cccgttgcttctgccctccggccttcccgccgccgtcgccgggaccagccgctcggggccgggctgatacagccgcttcaccgtgcccctgcccgcgaccatggcctcctccgaggtggcgcggcacctgaaaagagaaaacattcgttcgttgactatgtctggccatgttggttttgagagtttgcctgatcagctggtgaacagatccattcagcaaggtttctgctttaatattctctgtgtgggggaaactggaattggaaaatcaacactgattgacacattgtttaatactaattttgaagactatgaatcctcacatttttgcccaaatgttaaacttaaagctcagacatatgaactccaggaaagtaatgttcaattgaaattgaccattgtgaatacagtgggatttggtgaccaaataaataaagaagagagctaccaaccaatagttgactacatagatgctcagtttgaggcctatctccaagaagaactgaagattaagcgttctctctttacctaccatgattctcgcatccatgtgtgtctctacttcatttcaccgacaggccactctctgaagacacttgatctcttaaccatgaagaaccttgacagcaaggtaaacattataccagtgattgccaaagcagatacggtttctaaaactgaattacagaagtttaagatcaagctcatgagtgaattggtcagcaatggcgtccagatataccagttcccaacggatgatgacactattgctaaggtcaacgctgcaatgaatggacagttgccgtttgctgttgtgggaagtatggatgaggtaaaagtcggaaacaagatggtcaaagctcgccagtacccttggggtgttgtacaagtggaaaatgaaaaccactgtgactttgtaaagctgcgggaaatgctcatttgtacaaatatggaggacctgcgagagcagacccataccaggcactatgagctttacaggcgctgcaaactggaggaaatgggctttacagatgtgggcccagaaaacaagccagtcagtgttcaagagacctatgaagccaaaagacatgagttccatggtgaacgtcagaggaaggaagaagaaatgaaacagatgtttgtgcagcgagtaaaggagaaagaagccatattgaaagaagctgagagagagctacaggccaaatttgagcaccttaagagacttcaccaagaagagagaatgaagcttgaagaaaagagaagacttttggaagaagaaataattgctttctctaaaaagaaagctacctccgagatatttcacagccagtcctttctggcaacaggcagcaacctgaggaaggacaaggaccgtaagaactccaattttttgtaaaacagaagttccagagcacagaaggtcatcatcacaagcaaactttattaaaaaaaaactagaagtgtgctttgattttgctgttatttgttttatcacttctatatttggtgaacagccacagttactgatatttatggaaaagtactttcaagtacaaggtcaatacataagccagagtgaatgatactacaagttgagcatctctaattcaaaaatctgaaatccagaagcttcaaaatctgaatctttttgagcactgacttgaccccacaagtggaaaattccccacccgacacctttgctttctgatggttcagtttaaacagattttgtttcttgcacaaaatttttgtataaattactttcaggctatatgtataaggtggatgtgaaacatgaattatgtaattagagtcgggtcccgttgtgtatatgcagatattccaaacctgaaatccaaaacacttctggtccctagcattttggataagggatactcagcttgtacctatatattcatatatattcactgttgttagaaatgtttaagttgctgttctgtgatgaatctaaatcttttctcttgctaccaagctattgtcactgcagtgcattataccaaagagcgaagtcagtgccactgaaaatacagaacccattaatatcgtggctatctgattacatttatattccaagatgaaccttttttatatatgctaaaaattttggggaatatgttttgggatgtattatggagctaaaactctaacctcttaatagttttatagaacttaaaaattttttatacaattacccaattggtgatatgatcttaagcttttgtgtcagattatttaatatgatgacttcatgctttattatgccttattatggctgacgtattactgtggtgaaacaaaatatctttaaaagttaaaacatccagatatataagctattttttcctaaggataaagtacctttgagcatgagtgtatcacagctttcattaggaaaacttttcattacatacttgtttaaactctgtcttccagggtaaaaataataaggttgaatcattttattaaaaatactttttaagaaaataactatgaacatctgaatattaaagatataaaaatgcacataattcatatttcaggtggtatttgcattcagtgccttactggtattctcagaacattttaatgatttctaacatttcttaacagtcatagatatatacattttcattttttgtacttgaatattctaaataaaactgacatttactcttgacaaataaaacatatatttact

SEQ ID NO: 254197 - DNA, 1296 bp, Artificial Sequence
  derived and/or modified sequence
atggccagcagcgaggtggccagacacctgaagagagagaacatcagaagcctgaccatgagcggccacgtgggcttcgagagcctgcccgaccagctggtgaacagaagcatccagcagggcttctgcttcaacatcctgtgcgtgggcgagaccggcatcggcaagagcaccctgatcgacaccctgttcaacaccaacttcgaggactacgagagcagccacttctgccccaacgtgaagctgaaggcccagacctacgagctgcaggagagcaacgtgcagctgaagctgaccatcgtgaacaccgtgggcttcggcgaccagatcaacaaggaggagagctaccagcccatcgtggactacatcgacgcccagttcgaggcctacctgcaggaggagctgaagatcaagagaagcctgttcacctaccacgacagcagaatccacgtgtgcctgtacttcatcagccccaccggccacagcctgaagaccctggacctgctgaccatgaagaacctggacagcaaggtgaacatcatccccgtgatcgccaaggccgacaccgtgagcaagaccgagctgcagaagttcaagatcaagctgatgagcgagctggtgagcaacggcgtgcagatctaccagttccccaccgacgacgacaccatcgccaaggtgaacgccgccatgaacggccagctgcccttcgccgtggtgggcagcatggacgaggtgaaggtgggcaacaagatggtgaaggccagacagtacccctggggcgtggtgcaggtggagaacgagaaccactgcgacttcgtgaagctgagagagatgctgatctgcaccaacatggaggacctgagagagcagacccacaccagacactacgagctgtacagaagatgcaagctggaggagatgggcttcaccgacgtgggccccgagaacaagcccgtgagcgtgcaggagacctacgaggccaagagacacgagttccacggcgagagacagagaaaggaggaggagatgaagcagatgttcgtgcagagagtgaaggagaaggaggccatcctgaaggaggccgagagagagctgcaggccaagttcgagcacctgaagagactgcaccaggaggagagaatgaagctggaggagaagagaagactgctggaggaggagatcatcgccttcagcaagaagaaggccaccagcgagatcttccacagccagagcttcctggccaccggcagcaacctgagaaaggacaaggacagaaagaacagcaacttcctgtag

SEQ ID NO: 254198 - protein, 485 aa, Artificial Sequence
  derived and/or modified sequence
MLTCNKAGSRMVVDAANSNGPFQPVVLLHIRDVPPADQEKLFIQKLRQCCVLFDFVSDPLSDLKWKEVKRAALSEMVEYITHNRNVITEPIYPEVVHMFAVNMFRTLPPSSNPTGAEFDPEEDEPTLEAAWPHLQLVYEFFLRFLESPDFQPNIAKKYIDQKFVLQLLELFDSEDPRERDFLKTTLHRIYGKFLGLRAYIRKQINNIFYRFIYETEHHNGIAELLEILGSIINGFALPLKEEHKIFLLKVLLPLHKVKSLSVYHPQLAYCVVQFLEKDSTLTEPVVMALLKYWPKTHSPKEVMFLNELEEILDVIEPSEFVKIMEPLFRQLAKCVSSPHFQVAERALYYWNNEYIMSLISDNAAKILPIMFPSLYRNSKTHWNKTIHGLIYNALKLFMEMNQKLFDDCTQQFKAEKLKEKLKMKEREEAWVKIENLAKANPQAQKDPKKDRPLARRKSELPQDPHTKKALEAHCRADELASQDGR

SEQ ID NO: 254199 - DNA, 1458 bp, Artificial Sequence
  derived and/or modified sequence
atgttgacttgcaataaggctggctcacgaatggtagtagacgcagccaactccaatggcccgttccagccagtggttctattacatattcgggatgtgcccccagccgatcaggagaaattatttatccagaagttgcggcagtgttgtgttctgttcgactttgtcagcgacccgttgtcagacctgaagtggaaagaagtcaagcgggccgcacttagcgaaatggtggaatacattactcacaaccgtaacgtgatcaccgagcctatttatccagaggtcgtccatatgtttgctgtgaatatgtttagaacgctaccgccatcatcaaatcctacgggggctgaatttgacccagaggaggatgaacctaccctagaagcagcctggcctcatctccaactggtgtatgagtttttcttgcggttccttgagtctcctgacttccagccgaacatcgctaagaaatacatcgatcagaagtttgtattgcagctgctcgagttgtttgactctgaagatccccgggaaagggatttcctcaaaacaacgctgcacagaatctacggcaaattccttggtcttagagcttatatccggaagcaaatcaacaacatattttacaggttcatatacgagacagaacatcacaatggtatcgcggagctgctagaaattctcggttctataatcaatgggtttgccctaccattaaaagaggaacacaagattttcctgctgaaggtgctgttgccgctgcacaaggtgaaatccctctctgtgtaccacccccagctggcctactgtgtcgtacaattcctcgagaaggacagcaccttaaccgagccagtcgttatggccctcctcaagtactggcctaagacacattcgccaaaggaagtcatgttcctgaatgaactggaggaaatcctggatgttattgagcccagtgagtttgtgaaaattatggaacctcttttcaggcaactggcaaagtgcgtatcctccccgcacttccaggtcgccgagagggcactatactactggaataacgagtacattatgagcctgataagtgacaatgccgctaagatcctccccattatgtttccttccttgtaccggaattctaagacacactggaataagaccattcacggcttgatttacaatgccctgaagttgtttatggaaatgaaccagaagttattcgacgattgcacacaacagttcaaagcagagaagctgaaggagaagttgaagatgaaagaaagggaggaggcctgggtcaagatcgaaaatctggctaaggctaaccctcaagctcaaaaagaccctaaaaaggacagaccacttgctcgcaggaagagcgaactcccccaggaccctcacaccaagaaagcgctcgaagcccattgccgagctgacgagctggcttcacaggatggcaggtag

SEQ ID NO: 254200 - DNA, 1458 bp, Artificial Sequence
  derived and/or modified sequence
atgctgacctgcaacaaggccggcagcaggatggtggtggatgctgccaacagcaatggccccttccagcctgtggtgctgctgcacatcagagatgtgcccccagctgaccaggagaagctgttcatccagaagctgcggcagtgctgcgtgctgtttgattttgtgtctgaccccctgagtgacctgaagtggaaggaggtgaagagagctgccctgtctgagatggtggagtacatcacccacaacagaaatgtcatcacagagcccatctacccagaggtggtgcacatgtttgctgtgaacatgttccgcaccctgccccccagcagcaaccccaccggggctgagtttgatcctgaggaggatgagcccaccctggaggccgcctggccccacctgcagctggtgtatgagttcttcctgcgcttcctggagagcccagacttccagcccaacatcgccaagaagtacatcgaccagaagtttgtgctgcagctgctggagctgtttgattctgaggacccccgggagcgggacttcctgaagaccaccctgcaccgcatctacggcaagttcctgggcctgcgggcctacatcaggaagcagatcaacaacatcttctaccgcttcatctatgaaacagagcaccacaatggaattgctgagctgctggagatcctgggcagcatcatcaatggatttgccctgcccctgaaggaggagcacaagatcttcctgctgaaggtgctgctgcccctgcacaaggtgaagagcctgtctgtgtaccacccccagctggcctactgtgtggtgcagttcctggagaaggacagcaccctgacagagcctgtggtgatggccctgctgaagtactggcccaagacccacagccccaaggaggtgatgttcctgaatgagctggaggagatcctggatgtgattgagcccagcgagtttgtgaagatcatggagcccctcttccggcagctggccaagtgtgtgagcagcccccacttccaggtggccgagcgggccctgtactactggaacaatgagtacatcatgagcctcatcagtgacaatgctgccaagatcctgcccatcatgttccccagcctgtacagaaacagcaagacccactggaacaagaccatccacggcctcatctacaatgccctgaagctgttcatggagatgaaccagaagctgtttgatgactgcacccagcagttcaaggccgagaagctgaaggagaagctgaagatgaaggagcgggaggaggcctgggtgaagattgagaacctggccaaggccaacccccaggcccagaaggaccccaagaaggaccggcccctggcccggaggaagtctgagctgccccaggacccccacaccaagaaggccctggaggcccactgcagagcagatgagctggccagccaggatggaagatag

SEQ ID NO: 254201 - DNA, 1458 bp, Artificial Sequence
  derived and/or modified sequence
atgctgacctgcaacaaggccggcagccggatggtggtggacgccgccaattcaaacgggccatttcagccggtggtcttactgcacattagggatgtacccccagcggatcaggagaaactgttcatccagaaactgagacagtgttgcgtactctttgacttcgtgtccgacccactgtctgacttgaagtggaaggaggtgaagcgcgctgctctgagcgaaatggttgaatacattacacacaaccgtaatgtgattaccgagcctatctatcctgaagttgtgcacatgttcgcagtcaacatgtttagaaccctgccgccgtccagtaaccctaccggcgccgaatttgaccctgaggaggatgagcccacattggaggccgcttggccacacttgcagctggtctatgagttcttccttcggtttctggaaagccccgactttcaacctaacatcgctaaaaagtatatcgaccagaagttcgttctgcagttactggaacttttcgactcagaggacccacgggagagagacttcttgaaaactaccctacacagaatatatggcaagtttcttggactcagggcctacatccgcaagcagattaacaacatcttctataggttcatttatgaaacagagcaccataatggcatcgccgagctgcttgaaatcctcggctctataattaacggttttgccctgcccctgaaggaagaacataagatttttctcctcaaagtgctgctccctctgcacaaggtgaagagcctgtccgtgtatcatccacaacttgcttactgtgtagtgcagtttctggagaaggactccactttgaccgaacccgtggttatggcactccttaagtattggcctaagacccatagtccaaaagaggtgatgttccttaatgaactggaggagatcctggacgttatcgaaccctccgagttcgtcaagataatggaaccattgtttagacaactggccaagtgcgtttcatccccgcacttccaggtcgccgagcgcgccttatactactggaataatgagtatatcatgagcctgattagcgacaatgccgcaaagattctccctattatgttccctagtttataccgaaattcgaaaacccattggaataagacaattcacggactcatctataacgctctgaagctgtttatggaaatgaatcaaaaattattcgacgactgcacccagcagtttaaggcagagaaactaaaggaaaaactcaagatgaaggagcgcgaggaggcatgggtgaagatcgaaaacctcgcgaaggcgaaccctcaggcacagaaagatcccaagaaggatagacccttagctaggaggaagtcagagcttcctcaggatcctcacactaagaaggccttagaggcacattgccgcgcagacgaattggcctcccaggatggcagatag

SEQ ID NO: 254202 - DNA, 1458 bp, Artificial Sequence
  derived and/or modified sequence
atgttgacatgcaataaggctggttcacgcatggtggtggatgccgcaaattccaacggtccttttcagcctgtcgtgttgctgcacatcagggacgtgcctccagctgaccaagagaaactatttattcagaagctgcggcagtgttgcgtgctgttcgactttgtctccgaccctcttagtgacctgaaatggaaggaagtgaagcgggcagccttgagcgaaatggtcgagtacatcacccataacaggaatgtcatcaccgaaccaatttaccccgaggtggttcatatgtttgccgtcaacatgttcaggaccttgccaccatcatcaaacccaactggggcagagttcgacccagaggaggacgagcctaccctagaggctgcgtggccccatctccaactggtgtacgaattctttctgaggttcctggaaagcccagacttccagcccaacatcgccaaaaaatatattgatcagaaatttgtgcttcaactcctagagctgttcgatagcgaggacccacgggagcgggattttctcaagactacacttcatagaatatatgggaaatttctcggcctgcgagcctatatccggaaacagataaacaatatcttttatcgattcatctatgagacagaacatcacaacggcattgcagagttgttggagatcctgggtagcatcatcaacggattcgccctgcctctcaaagaggaacacaaaatctttctgcttaaggtgctcctgccactccacaaggtgaaaagcctctcagtatatcacccgcaattagcgtactgtgtagtgcagtttctggaaaaggatagcaccctgaccgagcccgtcgtgatggcattgctgaaatactggccaaaaacccactcccccaaagaggtcatgtttctcaatgagctcgaagaaattttagacgtcattgagccatctgagttcgtgaagattatggagccgctcttcaggcagttggcaaagtgcgtgagctccccccatttccaggtggcagagcgagccctttactactggaataacgagtacatcatgtcgctgatatctgacaacgcagctaagatccttcctattatgttcccaagtttatatcgtaacagcaagacccactggaataaaaccatacacggtctcatctacaacgccctgaagctttttatggaaatgaatcagaagctttttgatgactgtacgcagcagtttaaagcagagaaattgaaagagaaacttaaaatgaaagaacgagaggaggcttgggttaaaatcgaaaatctcgccaaggcaaacccgcaggctcagaaggaccccaagaaagacaggccacttgctcgtagaaaatctgagctacctcaggatccacacacaaagaaagccctagaggcccattgcagagcagacgagctggccagccaggacgggcgatag

SEQ ID NO: 254203 - DNA, 3845 bp, Artificial Sequence
  derived and/or modified sequence
agcttcatgcctgctgacatcacgaaccagccagttccctccagctgcagagagcttcagtttgtctttttttttttaaactaaaatggaggctggtttcttgccttaaggagcccattgcctttcccgctgaagtctagatgttgacatgtaataaagcgggcagcaggatggtggtggatgcggccaactccaatgggcctttccagcccgtggtccttctccatattcgagatgttcctcctgctgatcaagagaagctttttatccagaagttacgtcagtgttgcgtcctctttgactttgtttctgatccactaagtgacctaaagtggaaggaagtaaaacgagctgctttaagtgaaatggtagaatatatcacccataatcggaatgtgatcacagagcctatttacccagaagtagtccatatgtttgcagttaacatgtttcgaacattaccaccttcctccaatcctacgggagcggaatttgacccggaggaagatgaaccaacgttagaagcagcctggcctcatctacagcttgtttatgaatttttcttaagatttttagagtctccagatttccaacctaatatagcgaagaaatatattgatcagaagtttgtattgcagcttttagagctctttgacagtgaagatcctcgggagagagattttcttaaaaccacccttcacagaatctatgggaaattcctaggcttgagagcttacatcagaaaacagataaataatatattttataggtttatttatgaaacagagcatcataatggcatagcagagttactggaaatattgggaagtataattaatggatttgccttaccactaaaagaagagcacaagattttcttattgaaggtgttactacctttgcacaaagtgaaatctctgagtgtctaccatccccagctggcatactgtgtagtgcagtttttagaaaaggacagcaccctcacggaaccagtggtgatggcacttctcaaatactggccaaagactcacagtccaaaagaagtaatgttcttaaacgaattagaagagattttagatgtcattgaaccatcagaatttgtgaagatcatggaacccctcttccggcagttggccaaatgtgtctccagcccacacttccaggtggcagagcgagctctctattactggaataatgaatacatcatgagtttaatcagtgacaacgcagcgaagattctgcccatcatgtttccttccttgtaccgcaactcaaagacccattggaacaagacaatacatggcttgatatacaacgccctgaagctcttcatggagatgaaccaaaagctatttgatgactgtacacaacagttcaaagcagagaaactaaaagagaagctaaaaatgaaagaacgggaagaagcatgggttaaaatagaaaatctagccaaagccaatccccaggcacagaaagatccgaagaaggaccgtcctcttgcacgccgcaagtccgagctgcctcaggacccccacaccaagaaagccttggaagctcactgcagggccgatgagctggcctcccaggacggccgctagcctccggggcgccgcgtcggggccgggcccgccagttcttttccggattctgtagaaaatacatacttcctgtgccataccaatcagttacactcaaagctttcttggaccccgttccgtaggcaataacgtgcgtccgcctcagcgcgagattaggagttcaaacaatggtgacttcccagagcccgctggcagagccgcgggttgacgacggtgtcctcgcagtgtcgccgccaccccagcgtagtccaagtcagactatttcacaaagtcagagcgataggaaagcaccctgcccttcatcttcatgttctcccaaatggaacttaggatcttttaacataggtggttctgtgataacatcagtgttttccaaatcaaaggaacgctttaaaaaataggacctattttttaagactttacagcctttgaaatggtttccacgtgattgttacgccagcagttctcgttttgtttgtttttcaatctcagtgaaatggctctttgctttcgagttctcacgcaacgtactgggcaaatgacaatcctcagccgctggtattttctaaggggtctcttcactttgatgagtgacatgaacaccgtgtctccttctcttgtgtgtacctaaagccatatttccaagtctgtggtactccaggattccaggagtaagcctgtagaagagatttattttaaaagagattgctctgaaatttatcttaaaagagcttgctctgtctaccttgacagaaattggagttttaaaattatgtgttaatatttttatttgcagatttcgtttccgtcaacttaaacattgttgcccttcaacaaggctcttgaattaataaaattatagtctctaagaattccacattttatggaaagttagagcaaaatcattttgagttaagccagttcttagcctaatgcaaactgcagcgcctttaagcataaagtaacacaacagcattgcacggggccggcactgccgctgccttcactgaaggctgcagtgctgttctgagagcttggaggaggcaccagcgaggatgacgtttagtggagctctttctgttgaaaagagctcacgttatcaacaccttgtaaggaaaatacagtgtctgagttttcatcggtcttcacatgctgctatatattccacagagttccttgcatgtactgagcttttgttttagatggaatagcacaaggagaaaaatctttaaacttagtgctttgtctattctttatttctctcagggtggccagtattttgacttatttatcctgcttgaaagctacttgagatgtgtactgctattctaaacacgtgatctagtttctttcatctctggcataagattatataacttaatgttaagtgtcttgaggcataaaagacaaaatgtggcttattttaggatctgttttttcatcgaggtctcgggtatcctttcaaagatagtgagaagcagacactgctccttgtgcagctctggtacctcctgcccactgctgtcacttcaagccactggcaatgcttctgtcctcgtgtcttggaggaaaatcacctggggggaggggacttcttgtggtaagagcaagtgcaggtatgaaatgcgaagattgccccagctaaaagtggacaagtccgctttgtgagatgaatacttcctgagaaacttgacaagtatctctccattttaccattatgaaaactatcattaaaaaaaacagtttagatgccttctccttttgagggaaaaagggtgctttttattgtataaagcagcgtcttatgtattttgatataccattgtttgaacttccgtctttagctgatagattctcaaatatccttgattttggatgttcagtatgtttgtgagagaggtttctgggaagactctctttttgccctcgggaaaaagcaaaatatcaatgtttgggtgactgtgtaaagctcagtgtgtaagaacatctttttgtctaggttttctttctgctctttattgaagacaaacactcaccaaaaagaaaaataaaagttttcagagaaactaattttctttggcaagagtattacttaatattttggcctcctaaagtttccctagttagtactcggactcctgtgctaattgtcagcttacatatcattgtatagagactgtttattctgtaccaaactgatttcaaaagtactacattgaaaataaaccggtgactgtttttcttcat

SEQ ID NO: 254204 - DNA, 1458 bp, Artificial Sequence
  derived and/or modified sequence
atgctgacctgcaacaaggccggcagcagaatggtggtggacgccgccaacagcaacggccccttccagcccgtggtgctgctgcacatcagagacgtgccccccgccgaccaggagaagctgttcatccagaagctgagacagtgctgcgtgctgttcgacttcgtgagcgaccccctgagcgacctgaagtggaaggaggtgaagagagccgccctgagcgagatggtggagtacatcacccacaacagaaacgtgatcaccgagcccatctaccccgaggtggtgcacatgttcgccgtgaacatgttcagaaccctgccccccagcagcaaccccaccggcgccgagttcgaccccgaggaggacgagcccaccctggaggccgcctggccccacctgcagctggtgtacgagttcttcctgagattcctggagagccccgacttccagcccaacatcgccaagaagtacatcgaccagaagttcgtgctgcagctgctggagctgttcgacagcgaggaccccagagagagagacttcctgaagaccaccctgcacagaatctacggcaagttcctgggcctgagagcctacatcagaaagcagatcaacaacatcttctacagattcatctacgagaccgagcaccacaacggcatcgccgagctgctggagatcctgggcagcatcatcaacggcttcgccctgcccctgaaggaggagcacaagatcttcctgctgaaggtgctgctgcccctgcacaaggtgaagagcctgagcgtgtaccacccccagctggcctactgcgtggtgcagttcctggagaaggacagcaccctgaccgagcccgtggtgatggccctgctgaagtactggcccaagacccacagccccaaggaggtgatgttcctgaacgagctggaggagatcctggacgtgatcgagcccagcgagttcgtgaagatcatggagcccctgttcagacagctggccaagtgcgtgagcagcccccacttccaggtggccgagagagccctgtactactggaacaacgagtacatcatgagcctgatcagcgacaacgccgccaagatcctgcccatcatgttccccagcctgtacagaaacagcaagacccactggaacaagaccatccacggcctgatctacaacgccctgaagctgttcatggagatgaaccagaagctgttcgacgactgcacccagcagttcaaggccgagaagctgaaggagaagctgaagatgaaggagagagaggaggcctgggtgaagatcgagaacctggccaaggccaacccccaggcccagaaggaccccaagaaggacagacccctggccagaagaaagagcgagctgccccaggacccccacaccaagaaggccctggaggcccactgcagagccgacgagctggccagccaggacggcagatag

SEQ ID NO: 254205 - protein, 449 aa, Artificial Sequence
  derived and/or modified sequence
MLTCNKAGSRMVVDAANSNGPFQPVVLLHIRDVPPADQEKLFIQKLRQCCVLFDFVSDPLSDLKWKEVKRAALSEMVEYITHNRNVITEPIYPEVVHMFAVNMFRTLPPSSNPTGAEFDPEEDEPTLEAAWPHLQLVYEFFLRFLESPDFQPNIAKKYIDQKFVLQLLELFDSEDPRERDFLKTTLHRIYGKFLGLRAYIRKQINNIFYRFIYETEHHNGIAELLEILGSIINGFALPLKEEHKIFLLKVLLPLHKVKSLSVYHPQLAYCVVQFLEKDSTLTEPVVMALLKYWPKTHSPKEVMFLNELEEILDVIEPSEFVKIMEPLFRQLAKCVSSPHFQVAERALYYWNNEYIMSLISDNAAKILPIMFPSLYRNSKTHWNKTIHGLIYNALKLFMEMNQKLFDDCTQQFKAEKLKEKLKMKEREEAWVKIENLAKANPQVLKKRIT

SEQ ID NO: 254206 - DNA, 783 bp, Artificial Sequence
  derived and/or modified sequence
atgtttcggacgctgcctccatcctccaatccaaccggcgccgagttcgacccagaggaggacgagccaaccctggaagccgcctggccgcacctgcagctcgtgtatgagttttttctgcgattcctcgagagtcctgactttcagccaaacatcgcaaaaaaatacattgatcaaaaattcgttctgcagctgctggaactgtttgactcagaggatcctcgggagagggactttcttaagacgactcttcacaggatatacggaaaattccttggcctccgcgcctacattagaaaacagattaataacattttttatagattcatatatgagaccgagcaccataacggaattgctgagctcctggaaatacttggtagcatcatcaacggtttcgctttgcccctcaaggaagagcataagatatttctgctgaaagtccttctgccgctacataaagtaaaatctctgagcgtttatcacccacagctggcttactgcgtggtgcagtttttggagaaggattccaccctcactgagcctgtagtgatggctctgctgaagtactggcccaagacccattcacctaaggaggttatgttcctcaacgaacttgaggagatcctcgatgtgatcgagccgtcagagtttgtaaaaatcatggaacctctattccggcagctggcaaagtgcgtgtcctctccacattttcaggacaatacctggctcgacattcaacgcccagaggctctgcacggggacgagcctaaggcaatctag

SEQ ID NO: 254207 - DNA, 1350 bp, Artificial Sequence
  derived and/or modified sequence
atgctgacatgtaacaaagccggcagtcggatggttgtggatgccgcaaattctaatgggccattccagccagtggttctgcttcatatacgagatgtgccacctgccgaccaagaaaagctgttcatccaaaagctgagacagtgttgcgtgctgttcgatttcgtgtccgatcccctttccgaccttaagtggaaggaagtgaaacgggcggctctgtccgagatggtggaatacatcacccacaacagaaatgtgatcaccgagccaatttaccccgaagttgtgcacatgttcgctgttaatatgttcaggacactccccccctcctccaatcccacaggcgccgagttcgatcccgaagaggacgagcctacgctcgaagcagcatggccccacttgcagttagtgtacgagttttttctgagattcctggagtccccggattttcaaccaaacatcgctaagaagtacatcgaccagaaattcgtgttgcaactgctggagctctttgattctgaggatccaagagagagagatttccttaagaccacattgcaccggatttacgggaaatttttgggtctcagggcctacatcaggaaacagattaacaacattttttaccgatttatctatgagacagagcatcacaacgggatcgccgaactgcttgaaatcctgggttctattatcaacggctttgctctcccgctcaaagaggaacacaaaatcttcctgctgaaggtcctcttaccactacacaaggtcaaatcactaagcgtgtaccacccccaactggcctactgcgtggtccagttcttggaaaaagatagtaccctgacagaacctgtggtgatggcacttttgaagtattggccgaaaacgcactcccccaaagaggtgatgttcttgaacgagttggaagagattctcgacgttatcgaaccctcagagtttgtcaaaattatggagccactcttccggcagctcgcgaagtgtgtgagttctcctcactttcaagtggctgagcgggctctctactactggaataacgaatacatcatgagcctgatctcagacaatgctgccaagatcctgccgatcatgttcccatcactgtatcggaactctaagactcactggaataaaacgattcatggcttaatttacaatgcactgaaactctttatggagatgaaccaaaagctattcgatgactgcacgcagcaatttaaagccgaaaagttgaaggagaagctgaagatgaaagaacgtgaggaagcgtgggtgaaaatcgagaacctggccaaagctaatccccaggtgctcaagaaaagaattacatag

SEQ ID NO: 254208 - DNA, 1155 bp, Artificial Sequence
  derived and/or modified sequence
atgctgacctgtaacaaagcagggagccgaatggtggtagatgcagcaaactcaaacggcccctttcagcccgtggtcctactgcatatccgtgacgtgcccccagcagaccaggagaagctgtttatccagaaactgcgccagtgttgcgtgctatttgactttgtttccgatcctctgagtgacctgaaatggaaagaggtaaagcgcgctgccctttctgagatggtcgagtacatcacgcacaaccgcaacgtgataaccgaacccatatatcctgaggtcgtgcacatgtttgcagtaaacatgttcagaacgctgcctccatcctcaaatccaacaggtgcagagtttgatcccgaagaggatgaaccaactttggaggctgcgtggccacacctacagcttgtgtatgagttttttttgagatttctggagagccccgatttccagcccaacatcgctaagaaatacattgaccaaaagtttgtcctgcagttgctagagctgttcgactctgaggacccgcgcgagcgggactttctcaaaacaactttgcatcgcatctatggcaaatttctgggcctgagagcctacatccgtaagcaaataaataatatattctatagatttatctatgagacagagcaccataatgggatcgcagagctcctggagatcctgggatcaatcataaacggttttgctctgcccctcaaagaagagcataagatcttcctcctgaaggttctcctgcctctccacaaagtgaaaagtctctctgtctatcatccccagttagcctactgtgtggtacagtttttggaaaaggactctacgctcactgagcccgtcgtgatggctctcttaaaatattggccgaagacacattcacccaaggaggttatgtttttgaacgagctggaagagattctggatgtgattgaacctagcgaattcgtgaaaataatggaaccactgttccgccagctggcaaaatgcgtcagttcaccccattttcaggtcgccgagagagcgttgtactattggaataacgagtacatcatgagtctcataagcgataacgcggcgaagatcttgccaatcatgttcccctctttataccgtaactctaagactcactggaataagtag

SEQ ID NO: 254209 - DNA, 783 bp, Artificial Sequence
  derived and/or modified sequence
atgttccgcaccctgccccccagcagcaaccccaccggggctgagtttgatcctgaggaggatgagcccaccctggaggccgcctggccccacctgcagctggtgtatgagttcttcctgcgcttcctggagagcccagacttccagcccaacatcgccaagaagtacatcgaccagaagtttgtgctgcagctgctggagctgtttgattctgaggacccccgggagcgggacttcctgaagaccaccctgcaccgcatctacggcaagttcctgggcctgcgggcctacatcaggaagcagatcaacaacatcttctaccgcttcatctatgaaacagagcaccacaatggaattgctgagctgctggagatcctgggcagcatcatcaatggatttgccctgcccctgaaggaggagcacaagatcttcctgctgaaggtgctgctgcccctgcacaaggtgaagagcctgtctgtgtaccacccccagctggcctactgtgtggtgcagttcctggagaaggacagcaccctgacagagcctgtggtgatggccctgctgaagtactggcccaagacccacagccccaaggaggtgatgttcctgaatgagctggaggagatcctggatgtgattgagcccagcgagtttgtgaagatcatggagcccctcttccggcagctggccaagtgtgtgagcagcccccacttccaggacaacacctggctggacatccagaggcctgaggccctgcatggagatgagcccaaggccatctag

SEQ ID NO: 254210 - DNA, 1350 bp, Artificial Sequence
  derived and/or modified sequence
atgctgacctgcaacaaggccggcagcaggatggtggtggatgctgccaacagcaatggccccttccagcctgtggtgctgctgcacatcagagatgtgcccccagctgaccaggagaagctgttcatccagaagctgcggcagtgctgcgtgctgtttgattttgtgtctgaccccctgagtgacctgaagtggaaggaggtgaagagagctgccctgtctgagatggtggagtacatcacccacaacagaaatgtcatcacagagcccatctacccagaggtggtgcacatgtttgctgtgaacatgttccgcaccctgccccccagcagcaaccccaccggggctgagtttgatcctgaggaggatgagcccaccctggaggccgcctggccccacctgcagctggtgtatgagttcttcctgcgcttcctggagagcccagacttccagcccaacatcgccaagaagtacatcgaccagaagtttgtgctgcagctgctggagctgtttgattctgaggacccccgggagcgggacttcctgaagaccaccctgcaccgcatctacggcaagttcctgggcctgcgggcctacatcaggaagcagatcaacaacatcttctaccgcttcatctatgaaacagagcaccacaatggaattgctgagctgctggagatcctgggcagcatcatcaatggatttgccctgcccctgaaggaggagcacaagatcttcctgctgaaggtgctgctgcccctgcacaaggtgaagagcctgtctgtgtaccacccccagctggcctactgtgtggtgcagttcctggagaaggacagcaccctgacagagcctgtggtgatggccctgctgaagtactggcccaagacccacagccccaaggaggtgatgttcctgaatgagctggaggagatcctggatgtgattgagcccagcgagtttgtgaagatcatggagcccctcttccggcagctggccaagtgtgtgagcagcccccacttccaggtggccgagcgggccctgtactactggaacaatgagtacatcatgagcctcatcagtgacaatgctgccaagatcctgcccatcatgttccccagcctgtacagaaacagcaagacccactggaacaagaccatccacggcctcatctacaatgccctgaagctgttcatggagatgaaccagaagctgtttgatgactgcacccagcagttcaaggccgagaagctgaaggagaagctgaagatgaaggagcgggaggaggcctgggtgaagattgagaacctggccaaggccaacccccaggtgctgaagaagaggatcacctag

SEQ ID NO: 254211 - DNA, 1155 bp, Artificial Sequence
  derived and/or modified sequence
atgctgacctgcaacaaggccggcagcaggatggtggtggatgctgccaacagcaatggccccttccagcctgtggtgctgctgcacatcagagatgtgcccccagctgaccaggagaagctgttcatccagaagctgcggcagtgctgcgtgctgtttgattttgtgtctgaccccctgagtgacctgaagtggaaggaggtgaagagagctgccctgtctgagatggtggagtacatcacccacaacagaaatgtcatcacagagcccatctacccagaggtggtgcacatgtttgctgtgaacatgttccgcaccctgccccccagcagcaaccccaccggggctgagtttgatcctgaggaggatgagcccaccctggaggccgcctggccccacctgcagctggtgtatgagttcttcctgcgcttcctggagagcccagacttccagcccaacatcgccaagaagtacatcgaccagaagtttgtgctgcagctgctggagctgtttgattctgaggacccccgggagcgggacttcctgaagaccaccctgcaccgcatctacggcaagttcctgggcctgcgggcctacatcaggaagcagatcaacaacatcttctaccgcttcatctatgaaacagagcaccacaatggaattgctgagctgctggagatcctgggcagcatcatcaatggatttgccctgcccctgaaggaggagcacaagatcttcctgctgaaggtgctgctgcccctgcacaaggtgaagagcctgtctgtgtaccacccccagctggcctactgtgtggtgcagttcctggagaaggacagcaccctgacagagcctgtggtgatggccctgctgaagtactggcccaagacccacagccccaaggaggtgatgttcctgaatgagctggaggagatcctggatgtgattgagcccagcgagtttgtgaagatcatggagcccctcttccggcagctggccaagtgtgtgagcagcccccacttccaggtggccgagcgggccctgtactactggaacaatgagtacatcatgagcctcatcagtgacaatgctgccaagatcctgcccatcatgttccccagcctgtacagaaacagcaagacccactggaacaagtag

SEQ ID NO: 254212 - DNA, 783 bp, Artificial Sequence
  derived and/or modified sequence
atgttccggaccctgccccccagcagcaaccccaccggcgccgagttcgaccccgaagaagatgagcctaccctggaagccgcctggccccaccttcagttagtttacgagttcttcctgagattcctagagtctcctgattttcagccgaacattgctaagaaatatattgatcaaaagttcgtcctccaattactggagctcttcgacagcgaggaccctagagagcgggactttttgaaaaccaccctccaccggatctacggcaaattccttggcttgcgcgcctatattaggaaacaaatcaacaacattttctaccggtttatctatgaaacagagcatcataacggtattgctgaactgttggaaattttgggtagcatcattaacggctttgcactcccacttaaagaggaacacaagatctttctgctaaaggtcttactgcctctccataaggttaagtcgctgagtgtttatcacccccagctcgcctattgcgtcgtacagttcttggagaaggattctaccctgacggaacctgtagtcatggcattgctgaagtactggcctaagacccacagtccgaaagaggttatgtttttgaacgagctggaggaaatactggacgttattgagccaagtgagttcgtcaagattatggagcccctgttccgtcagctggctaaatgtgtatcctctccgcactttcaggataacacttggctggacattcagaggcctgaagccctgcacggggacgagcctaaagcgatttag

SEQ ID NO: 254213 - DNA, 1350 bp, Artificial Sequence
  derived and/or modified sequence
atgctgacctgcaacaaggccggcagccggatggtggtggacgccgccaactcaaatggcccgttccagcccgtcgtattactccacattcgcgacgtcccacccgccgatcaagagaaactttttattcaaaaacttagacaatgctgtgttctgttcgatttcgtgagcgacccactgtccgaccttaagtggaaagaggtgaaaagggcggccctttcagaaatggtggagtacatcacccacaataggaatgttatcacggagcccatctatcctgaagtggtccatatgtttgctgtcaacatgtttcgtaccctgccacccagctccaacccaactggcgccgagttcgatcctgaggaggatgagcctacgctggaagccgcttggccacacctgcagctcgtgtatgagttctttctcaggtttctggaatcaccagacttccagcctaacatcgcaaagaaatatatcgatcagaaatttgtgctacagcttttggaattatttgatagcgaggacccacgtgagcgcgattttctcaaaacgacacttcacagaatttacggaaaattcctgggcctgcgtgcttatattcggaagcagatcaataacatattttatcgtttcatctacgagaccgagcaccacaacggaatcgccgaactgctggagatcctagggtctattatcaacggttttgctctgcctctgaaggaagagcacaaaatattcctcctgaaagtgctgttacctctgcataaggtaaagagcctgagtgtctaccacccacagctggcttactgcgtcgtgcagtttctcgaaaaagactccaccttgacagagcctgtggtgatggccctcctaaaatactggcctaaaacacacagccccaaagaggtgatgttcctcaacgaactggaagaaattctggacgtgattgaaccttccgagtttgttaagatcatggaaccactctttagacagcttgcaaagtgtgtctcttctccccattttcaggtggctgagcgggcactgtactactggaacaatgagtacatcatgagcctcatttcagataatgccgccaagatcctgcctatcatgttcccctccctgtatcggaatagcaagacccactggaacaagactatccacggactcatttataacgcacttaagctgttcatggagatgaaccaaaagcttttcgacgattgcactcagcaattcaaagctgagaaactaaaggagaagctgaagatgaaagagcgggaggaggcatgggtaaagatagagaacctcgcaaaggccaatccccaagtgctgaaaaaaagaattacatag

SEQ ID NO: 254214 - DNA, 1155 bp, Artificial Sequence
  derived and/or modified sequence
atgctgacctgcaacaaggccggcagccggatggtggtggacgccgctaacagcaatggcccattccagccagtcgtcctgctgcatatcagggacgtaccgcccgcagaccaggaaaaattgttcatccagaaactgcgacagtgttgcgtgctattcgacttcgtttccgatcccctgagtgatctgaaatggaaagaggtaaagcgagcggcgttgagtgagatggtagagtatataacacacaaccgcaacgttataaccgaacctatttacccagaagttgtgcacatgttcgcagtgaacatgttccgcactctccctccgtcatccaacccaactggggctgagttcgatccagaggaagacgaaccgactttggaagcggcatggccacatctccagctggtttacgagttcttcttaaggttcctggagagtccagacttccagcccaatatcgcaaaaaaatacattgaccaaaagtttgtgttacagctacttgaactgtttgattccgaggatcccagggaacgcgacttcctgaaaaccaccctccatcggatctacggcaagtttctcgggcttcgagcgtatatacgcaagcagatcaacaacatcttctaccgttttatatatgagacagagcatcacaatgggattgctgaattgctcgagattttaggcagcattataaacgggtttgctctcccactaaaggaggaacataagatattcctgctaaaggtgctcctccccctgcataaggtgaagagcctctccgtttatcatccccagcttgcgtactgcgtagtacagttcctcgagaaagatagtactctgactgaaccagtcgtcatggcactcctgaagtactggccgaagactcacagtcctaaggaagtcatgttcttgaacgaactggaagaaatcctggacgtcatcgagccatcagaatttgtgaagataatggaacctttattccgacagctagcaaagtgcgttagctccccacacttccaagtcgcggaacgcgccctgtattactggaacaatgaatacatcatgtcacttatatccgataatgcagccaagatcctgccaataatgttcccttccctgtacagaaactccaagactcattggaacaagtag

SEQ ID NO: 254215 - DNA, 783 bp, Artificial Sequence
  derived and/or modified sequence
atgttccggacattgcccccttctagtaatcccaccggtgctgagtttgaccccgaggaggacgagccaaccttagaagccgcatggccgcatttacagttagtttacgaattctttttgcgttttttagagtcacccgatttccagcctaacattgctaaaaaatacatcgatcagaagtttgtgttacagctgctcgagctgtttgatagtgaagaccctcgcgaaagggatttcttgaaaaccactctccaccgaatatacggaaagttcctcgggctgcgggcttacattagaaaacaaattaataacatattttaccggttcatctacgaaaccgagcaccacaatggcatcgcagaacttttggaaatcctaggcagcattatcaatggtttcgctttgccgcttaaagaagaacacaagatctttcttctcaaggtgctgctcccgttgcataaggttaaatccctgagcgtgtaccaccctcagctcgcgtactgtgttgtgcagtttcttgaaaaggatagcactttgacagagccggtggttatggcactgctgaaatactggccaaaaactcacagccctaaagaagtaatgttcctgaatgagcttgaggagatcttagacgtgattgaaccttccgaattcgtgaaaatcatggaacccctcttcagacagctggcaaagtgtgtgagtagccctcatttccaagacaatacgtggcttgatatccagaggccagaagccctgcacggcgacgaaccgaaagccatctag

SEQ ID NO: 254216 - DNA, 1350 bp, Artificial Sequence
  derived and/or modified sequence
atgttgacttgcaacaaggctggctcgcggatggtggtcgatgctgcgaattccaatggcccttttcagccagtagttctcctccacatccgagatgttccacccgcagaccaagagaagttgttcatccagaagttaaggcagtgttgcgtactgtttgactttgtatctgaccctctgagcgatcttaagtggaaagaggtcaaacgcgcagcgctttccgagatggtcgagtatataacgcataaccgaaacgtcattacagagcctatataccctgaggtcgtgcatatgttcgccgtcaatatgttccgcaccctgccaccctcctctaacccaactggggctgagtttgatcctgaggaagacgaaccaactctggaagctgcctggccacacttgcagctggtctacgagttcttcctgcggtttctggagtcgcctgattttcagcctaatattgccaaaaagtacatagaccagaagtttgtcctgcagctgttggagctgtttgactcagaggatcctagagagcgcgacttccttaagacaaccctgcacaggatctacggaaagtttcttggtctcagagcctatattcggaaacaaataaataatattttttacaggttcatatatgaaacagagcatcataatggcatagccgaattactcgaaatcctgggttccattatcaatggcttcgccctgcccctgaaagaagagcacaagatctttctgctcaaggtgctgcttcctctacataaagttaagagtctgtctgtataccacccgcagttggcttattgcgtcgtgcagttcctggagaaagactcaacgttgaccgaaccggtggtgatggcactgctgaaatattggcctaaaactcatagtccaaaagaggtaatgttcctcaacgaattggaggaaattttggacgtgatcgaaccttccgagtttgtcaaaattatggaacccttgtttcggcagcttgcaaagtgcgtgagtagtcctcacttccaagtggccgaacgagccctatattattggaacaacgaatatattatgagcctcatctcggataatgccgcaaagattctgcctattatgttcccctccctttatcggaactcaaaaacccattggaataaaacaattcacgggttgatttacaatgcactgaagctgttcatggaaatgaaccaaaaactgtttgatgactgcactcaacagtttaaagctgagaagctgaaagagaaactcaaaatgaaggagcgcgaggaagcatgggtcaaaatcgagaatctggctaaagccaacccccaagttttgaaaaagcggatcacctag

SEQ ID NO: 254217 - DNA, 1155 bp, Artificial Sequence
  derived and/or modified sequence
atgctgacctgcaataaggccggatcaaggatggtcgtggacgctgcaaacagtaacggcccatttcagcccgtggtgctgcttcacattagagatgttcctcctgcagatcaggagaagctttttattcagaagctgagacagtgctgtgtcttattcgatttcgtcagtgatcctctttctgatctcaaatggaaggaggtaaaaagagccgcattaagcgagatggtggagtatatcacacataacaggaatgtaatcaccgagcctatctatcctgaggtcgttcacatgtttgccgtgaacatgtttaggacacttcctccctcttccaaccccaccggcgctgagtttgacccagaagaggacgagccgacgctcgaagctgcctggccccatcttcagctggtgtacgagtttttcctacgctttctggagagtccagactttcagccgaacatcgccaagaaatacattgaccagaagttcgtgctccagctgctggaattattcgatagcgaggacccaagggagcgtgatttcctcaaaacaacgttacaccgaatatacggcaagtttctgggactcagggcctacattcggaaacaaatcaataacatcttttatagattcatttatgagacagaacatcacaacgggatcgccgaactcctcgagattttgggctcaataattaacggattcgcactgcccctgaaagaagaacataaaatattcttattgaaggttctattacccctgcataaggtcaagtcgctgtctgtgtaccacccacagctggcttattgtgtagtccagttcctggaaaaagactctactctgactgagcctgtcgttatggccctgctgaagtactggcccaaaacacattctcccaaggaagttatgttcctcaacgagctggaagagatcctggacgttatcgaaccgtcggaattcgtgaaaatcatggagcccttgtttaggcaacttgccaagtgtgtatcttctccccatttccaggtggccgaacgtgcgctctactattggaacaatgagtacatcatgtctttaatctccgataacgctgctaaaatcctgcccatcatgtttccttctctatataggaattcaaagacccactggaacaaatag

SEQ ID NO: 254218 - DNA, 1526 bp, Artificial Sequence
  derived and/or modified sequence
ctggtttcttgccttaaggagcccattgcctttcccgctgaagtctagatgttgacatgtaataaagcgggcagcaggatggtggtggatgcggccaactccaatgggcctttccagcccgtggtccttctccatattcgagatgttcctcctgctgatcaagagaagctttttatccagaagttacgtcagtgttgcgtcctctttgactttgtttctgatccactaagtgacctaaagtggaaggaagtaaaacgagctgctttaagtgaaatggtagaatatatcacccataatcggaatgtgatcacagagcctatttacccagaagtagtccatatgtttgcagttaacatgtttcgaacattaccaccttcctccaatcctacgggagcggaatttgacccggaggaagatgaaccaacgttagaagcagcctggcctcatctacagcttgtttatgaatttttcttaagatttttagagtctccagatttccaacctaatatagcgaagaaatatattgatcagaagtttgtattgcagcttttagagctctttgacagtgaagatcctcgggagagagattttcttaaaaccacccttcacagaatctatgggaaattcctaggcttgagagcttacatcagaaaacagataaataatatattttataggtttatttatgaaacagagcatcataatggcatagcagagttactggaaatattgggaagtataattaatggatttgccttaccactaaaagaagagcacaagattttcttattgaaggtgttactacctttgcacaaagtgaaatctctgagtgtctaccatccccagctggcatactgtgtagtgcagtttttagaaaaggacagcaccctcacggaaccagtggtgatggcacttctcaaatactggccaaagactcacagtccaaaagaagtaatgttcttaaacgaattagaagagattttagatgtcattgaaccatcagaatttgtgaagatcatggaacccctcttccggcagttggccaaatgtgtctccagcccacacttccaggtggcagagcgagctctctattactggaataatgaatacatcatgagtttaatcagtgacaacgcagcgaagattctgcccatcatgtttccttccttgtaccgcaactcaaagacccattggaacaagacaatacatggcttgatatacaacgccctgaagctcttcatggagatgaaccaaaagctatttgatgactgtacacaacagttcaaagcagagaaactaaaagagaagctaaaaatgaaagaacgggaagaagcatgggttaaaatagaaaatctagccaaagccaatccccaggtactaaaaaagagaataacatgaaaacgcccagggttacttgaatgtttttataagataggaatatatgtcttcaccatggggggggtctcgatttcactaacgttgtatatgaaaatgtctgcaataaaaagtacttttaaactttgtaa

SEQ ID NO: 254219 - DNA, 1307 bp, Artificial Sequence
  derived and/or modified sequence
gccttaaggagcccattgcctttcccgctgaagtctagatgttgacatgtaataaagcgggcagcaggatggtggtggatgcggccaactccaatgggcctttccagcccgtggtccttctccatattcgagatgttcctcctgctgatcaagagaagctttttatccagaagttacgtcagtgttgcgtcctctttgactttgtttctgatccactaagtgacctaaagtggaaggaagtaaaacgagctgctttaagtgaaatggtagaatatatcacccataatcggaatgtgatcacagagcctatttacccagaagtagtccatatgtttgcagttaacatgtttcgaacattaccaccttcctccaatcctacgggagcggaatttgacccggaggaagatgaaccaacgttagaagcagcctggcctcatctacagcttgtttatgaatttttcttaagatttttagagtctccagatttccaacctaatatagcgaagaaatatattgatcagaagtttgtattgcagcttttagagctctttgacagtgaagatcctcgggagagagattttcttaaaaccacccttcacagaatctatgggaaattcctaggcttgagagcttacatcagaaaacagataaataatatattttataggtttatttatgaaacagagcatcataatggcatagcagagttactggaaatattgggaagtataattaatggatttgccttaccactaaaagaagagcacaagattttcttattgaaggtgttactacctttgcacaaagtgaaatctctgagtgtctaccatccccagctggcatactgtgtagtgcagtttttagaaaaggacagcaccctcacggaaccagtggtgatggcacttctcaaatactggccaaagactcacagtccaaaagaagtaatgttcttaaacgaattagaagagattttagatgtcattgaaccatcagaatttgtgaagatcatggaacccctcttccggcagttggccaaatgtgtctccagcccacacttccaggtggcagagcgagctctctattactggaataatgaatacatcatgagtttaatcagtgacaacgcagcgaagattctgcccatcatgtttccttccttgtaccgcaactcaaagacccattggaacaagtaagaaagaactggctgccatctttttcagtcattttaaaatatggcacgttttactgctacttcagtaagaataaatatcagaattttaaatatcaattaaaaaacaagaaggtca

SEQ ID NO: 254220 - DNA, 783 bp, Artificial Sequence
  derived and/or modified sequence
atgttcagaaccctgccccccagcagcaaccccaccggcgccgagttcgaccccgaggaggacgagcccaccctggaggccgcctggccccacctgcagctggtgtacgagttcttcctgagattcctggagagccccgacttccagcccaacatcgccaagaagtacatcgaccagaagttcgtgctgcagctgctggagctgttcgacagcgaggaccccagagagagagacttcctgaagaccaccctgcacagaatctacggcaagttcctgggcctgagagcctacatcagaaagcagatcaacaacatcttctacagattcatctacgagaccgagcaccacaacggcatcgccgagctgctggagatcctgggcagcatcatcaacggcttcgccctgcccctgaaggaggagcacaagatcttcctgctgaaggtgctgctgcccctgcacaaggtgaagagcctgagcgtgtaccacccccagctggcctactgcgtggtgcagttcctggagaaggacagcaccctgaccgagcccgtggtgatggccctgctgaagtactggcccaagacccacagccccaaggaggtgatgttcctgaacgagctggaggagatcctggacgtgatcgagcccagcgagttcgtgaagatcatggagcccctgttcagacagctggccaagtgcgtgagcagcccccacttccaggacaacacctggctggacatccagagacccgaggccctgcacggcgacgagcccaaggccatctag

SEQ ID NO: 254221 - DNA, 1350 bp, Artificial Sequence
  derived and/or modified sequence
atgctgacctgcaacaaggccggcagcagaatggtggtggacgccgccaacagcaacggccccttccagcccgtggtgctgctgcacatcagagacgtgccccccgccgaccaggagaagctgttcatccagaagctgagacagtgctgcgtgctgttcgacttcgtgagcgaccccctgagcgacctgaagtggaaggaggtgaagagagccgccctgagcgagatggtggagtacatcacccacaacagaaacgtgatcaccgagcccatctaccccgaggtggtgcacatgttcgccgtgaacatgttcagaaccctgccccccagcagcaaccccaccggcgccgagttcgaccccgaggaggacgagcccaccctggaggccgcctggccccacctgcagctggtgtacgagttcttcctgagattcctggagagccccgacttccagcccaacatcgccaagaagtacatcgaccagaagttcgtgctgcagctgctggagctgttcgacagcgaggaccccagagagagagacttcctgaagaccaccctgcacagaatctacggcaagttcctgggcctgagagcctacatcagaaagcagatcaacaacatcttctacagattcatctacgagaccgagcaccacaacggcatcgccgagctgctggagatcctgggcagcatcatcaacggcttcgccctgcccctgaaggaggagcacaagatcttcctgctgaaggtgctgctgcccctgcacaaggtgaagagcctgagcgtgtaccacccccagctggcctactgcgtggtgcagttcctggagaaggacagcaccctgaccgagcccgtggtgatggccctgctgaagtactggcccaagacccacagccccaaggaggtgatgttcctgaacgagctggaggagatcctggacgtgatcgagcccagcgagttcgtgaagatcatggagcccctgttcagacagctggccaagtgcgtgagcagcccccacttccaggtggccgagagagccctgtactactggaacaacgagtacatcatgagcctgatcagcgacaacgccgccaagatcctgcccatcatgttccccagcctgtacagaaacagcaagacccactggaacaagaccatccacggcctgatctacaacgccctgaagctgttcatggagatgaaccagaagctgttcgacgactgcacccagcagttcaaggccgagaagctgaaggagaagctgaagatgaaggagagagaggaggcctgggtgaagatcgagaacctggccaaggccaacccccaggtgctgaagaagagaatcacctag

SEQ ID NO: 254222 - DNA, 1155 bp, Artificial Sequence
  derived and/or modified sequence
atgctgacctgcaacaaggccggcagcagaatggtggtggacgccgccaacagcaacggccccttccagcccgtggtgctgctgcacatcagagacgtgccccccgccgaccaggagaagctgttcatccagaagctgagacagtgctgcgtgctgttcgacttcgtgagcgaccccctgagcgacctgaagtggaaggaggtgaagagagccgccctgagcgagatggtggagtacatcacccacaacagaaacgtgatcaccgagcccatctaccccgaggtggtgcacatgttcgccgtgaacatgttcagaaccctgccccccagcagcaaccccaccggcgccgagttcgaccccgaggaggacgagcccaccctggaggccgcctggccccacctgcagctggtgtacgagttcttcctgagattcctggagagccccgacttccagcccaacatcgccaagaagtacatcgaccagaagttcgtgctgcagctgctggagctgttcgacagcgaggaccccagagagagagacttcctgaagaccaccctgcacagaatctacggcaagttcctgggcctgagagcctacatcagaaagcagatcaacaacatcttctacagattcatctacgagaccgagcaccacaacggcatcgccgagctgctggagatcctgggcagcatcatcaacggcttcgccctgcccctgaaggaggagcacaagatcttcctgctgaaggtgctgctgcccctgcacaaggtgaagagcctgagcgtgtaccacccccagctggcctactgcgtggtgcagttcctggagaaggacagcaccctgaccgagcccgtggtgatggccctgctgaagtactggcccaagacccacagccccaaggaggtgatgttcctgaacgagctggaggagatcctggacgtgatcgagcccagcgagttcgtgaagatcatggagcccctgttcagacagctggccaagtgcgtgagcagcccccacttccaggtggccgagagagccctgtactactggaacaacgagtacatcatgagcctgatcagcgacaacgccgccaagatcctgcccatcatgttccccagcctgtacagaaacagcaagacccactggaacaagtag

SEQ ID NO: 254223 - protein, 582 aa, Artificial Sequence
  derived and/or modified sequence
MAARSWQDELAQQAEEGSARLREMLSVGLGFLRTELGLDLGLEPKRYPGWVILVGTGALGLLLLFLLGYGWAAACAGARKKRRSPPRKREEAAAVPAAAPDDLALLKNLRSEEQKKKNRKKLSEKPKPNGRTVEVAEGEAVRTPQSVTAKQPPEIDKKNEKSKKNKKKSKSDAKAVQNSSRHDGKEVDEGAWETKISHREKRQQRKRDKVLTDSGSLDSTIPGIENTITVTTEQLTTASFPVGSKKNKGDSHLNVQVSNFKSGKGDSTLQVSSGLNENLTVNGGGWNEKSVKLSSQISAGEEKWNSVSPASAGKRKTEPSAWSQDTGDANTNGKDWGRSWSDRSIFSGIGSTAEPVSQSTTSDYQWDVSRNQPYIDDEWSGLNGLSSADPNSDWNAPAEEWGNWVDEERASLLKSQEPIPDDQKVSDDDKEKGEGALPTGKSKKKKKKKKKQGEDNSTAQDTEELEKEIREDLPVNTSKTRPKQEKAFSLKTISTSDPAEVLVKNSQPIKTLPPATSTEPSVILSKSDSDKSSSQVPPILQETDKSKSNTKQNSVPPSQTKSETSWESPKQIKKKKKARRET

SEQ ID NO: 254224 - DNA, 1749 bp, Artificial Sequence
  derived and/or modified sequence
atggccgccagaagctggcaggacgagctggcccagcaggccgaggagggcagcgccagactgagagagatgctgagcgtgggcctgggcttcctgagaaccgagctgggcctggacctgggcctggagcccaagagataccccggctgggtgatcctggtgggcaccggcgccctgggcctgctgctgctgttcctgctgggctacggctgggccgccgcctgcgccggcgccagaaagaagagaagaagcccccccagaaagagagaggaggccgccgccgtgcccgccgccgcccccgacgacctggccctgctgaagaacctgagaagcgaggagcagaagaagaagaacagaaagaagctgagcgagaagcccaagcccaacggcagaaccgtggaggtggccgagggcgaggccgtgagaaccccccagagcgtgaccgccaagcagccccccgagatcgacaagaagaacgagaagagcaagaagaacaagaagaagagcaagagcgacgccaaggccgtgcagaacagcagcagacacgacggcaaggaggtggacgagggcgcctgggagaccaagatcagccacagagagaagagacagcagagaaagagagacaaggtgctgaccgacagcggcagcctggacagcaccatccccggcatcgagaacaccatcaccgtgaccaccgagcagctgaccaccgccagcttccccgtgggcagcaagaagaacaagggcgacagccacctgaacgtgcaggtgagcaacttcaagagcggcaagggcgacagcaccctgcaggtgagcagcggcctgaacgagaacctgaccgtgaacggcggcggctggaacgagaagagcgtgaagctgagcagccagatcagcgccggcgaggagaagtggaacagcgtgagccccgccagcgccggcaagagaaagaccgagcccagcgcctggagccaggacaccggcgacgccaacaccaacggcaaggactggggcagaagctggagcgacagaagcatcttcagcggcatcggcagcaccgccgagcccgtgagccagagcaccaccagcgactaccagtgggacgtgagcagaaaccagccctacatcgacgacgagtggagcggcctgaacggcctgagcagcgccgaccccaacagcgactggaacgcccccgccgaggagtggggcaactgggtggacgaggagagagccagcctgctgaagagccaggagcccatccccgacgaccagaaggtgagcgacgacgacaaggagaagggcgagggcgccctgcccaccggcaagagcaagaagaagaagaagaagaagaagaagcagggcgaggacaacagcaccgcccaggacaccgaggagctggagaaggagatcagagaggacctgcccgtgaacaccagcaagaccagacccaagcaggagaaggccttcagcctgaagaccatcagcaccagcgaccccgccgaggtgctggtgaagaacagccagcccatcaagaccctgccccccgccaccagcaccgagcccagcgtgatcctgagcaagagcgacagcgacaagagcagcagccaggtgccccccatcctgcaggagaccgacaagagcaagagcaacaccaagcagaacagcgtgccccccagccagaccaagagcgagaccagctgggagagccccaagcagatcaagaagaagaagaaggccagaagagagacctag

SEQ ID NO: 254225 - DNA, 1749 bp, Artificial Sequence
  derived and/or modified sequence
atggccgcaagatcgtggcaggacgagttggcgcagcaggcagaagaagggtccgccagactcagagagatgctctctgtcggactggggtttctgcgcaccgagctgggtctcgaccttgggctggagccgaaacgctatcctggatgggtaatcctggtgggaaccggtgctctcgggctgctgctgcttttcctgctgggctatggctgggcggccgcatgcgctggagccaggaagaagcggcggtcccctccaagaaaaagagaggaggcggctgccgtccccgccgccgcaccagacgacctggccctcctcaaaaacctgagatctgaggagcagaagaagaaaaacaggaaaaagctttcagaaaagcccaagccaaatggacgcacagttgaagtggctgaaggtgaggccgtccgaaccccccagtcagttacagccaagcaacctcccgaaattgacaaaaagaacgaaaagtctaagaagaataagaagaaaagtaagagcgatgccaaggccgtgcaaaacagcagtaggcacgatggaaaggaagtggacgagggggcatgggagactaaaatctcacatcgagagaaacggcaacagaggaagagagataaggtcctcacggacagcggatcactcgactctacaatccccgggatcgagaatactatcaccgttacaaccgagcaattaacaactgcgtcttttcccgtcggctcaaagaaaaataagggcgattcacatctgaacgtacaggtgtccaacttcaaatccggaaagggagacagtaccttgcaggtgtcaagtggcctaaacgagaacttgacagtgaacgggggaggatggaatgagaagtcggtcaagctgtcgtcccaaatctcagcaggggaggaaaagtggaattctgtgtctcccgcgtccgccgggaagcggaaaactgagcccagcgcctggagccaggacacgggcgacgcaaacactaacgggaaagactggggccggtcttggtccgatagaagtatatttagcggtatcgggtcgacggccgaacctgtctctcagtctaccacttctgactaccagtgggatgttagcagaaaccagccttatatcgacgatgagtggtctggtctcaacggcctgtcaagcgccgacccaaattcagattggaatgcgcctgccgaggaatgggggaactgggtggacgaagaaagagctagcctccttaaaagtcaggagccgattcccgacgatcagaaagtgtccgacgatgataaagaaaaaggcgaaggtgcacttcctaccggaaaaagtaaaaaaaagaaaaaaaagaagaagaagcagggcgaagataatagcacagctcaggacacagaagagcttgaaaaagaaatcagggaggacctgcccgtaaacacctccaagacgcgccctaagcaagaaaaagcgttctctctgaagaccatcagcacttccgatccagccgaggtgcttgtgaaaaacagccagcccatcaagaccctgccaccagccacgtctaccgagccatctgtgattctcagcaagtctgatagcgacaagtccagttcccaagtgccaccaatcctgcaggagacagacaaatcaaaatctaacacaaaacagaattcagtgccgccgtcacagaccaaaagtgaaacctcatgggaatctccaaaacagattaagaagaagaagaaggctcggagggaaacttag

SEQ ID NO: 254226 - DNA, 1749 bp, Artificial Sequence
  derived and/or modified sequence
atggccgcccgctcctggcaggatgagctggcccagcaggccgaggagggcagcgcccggctgcgggagatgctgtctgtgggcctgggcttcctgaggacagagctgggcctggacctgggcctggagcccaagcgctacccaggctgggtgatcctggtgggcaccggggccctgggcctgctgctgctcttcctgctgggctacggctgggccgccgcctgtgccggggccaggaagaagaggaggagcccccccaggaagcgggaggaggccgctgctgtgcctgctgctgccccagatgacctggccctgctgaagaacctgcggtctgaggagcagaagaagaagaacaggaagaagctgtctgagaagcccaagcccaatggaagaacagtggaggtggccgagggggaggccgtgaggaccccccagagcgtgacagccaagcagcccccagaaattgacaagaagaatgagaagagcaagaagaacaagaagaagagcaagagtgatgccaaggctgtgcagaacagcagcagacatgatggcaaggaggtggatgagggcgcctgggagaccaagatcagccaccgggagaagaggcagcagaggaagagggacaaggtgctgacagacagcggcagcctggacagcaccatccctggcatcgagaacaccatcaccgtgaccacagagcagctgaccacagccagcttccctgtgggcagcaagaagaacaagggggacagccacctgaatgtgcaggtgagcaacttcaagagcggcaagggggacagcaccctgcaggtgagcagcggcctgaatgaaaacctgactgtgaatggaggcggctggaatgagaagtctgtgaagctgagcagccagatctctgctggggaggagaagtggaacagcgtgtccccagccagcgctgggaagaggaagacagagcccagcgcctggagccaggacacaggagatgccaacaccaacgggaaggactggggccgctcctggagcgacaggagcatcttctctggaattggcagcacagctgagcctgtgtcccagagcaccaccagtgactaccagtgggatgtgtccaggaaccagccctacattgatgatgagtggagcggcctgaatggcctgagcagcgctgaccccaacagcgactggaatgccccagctgaggagtggggcaactgggtggatgaggagcgggccagcctgctgaagagccaggagcccatcccagatgaccagaaggtgtctgatgatgacaaggagaagggggagggcgccctgcccaccgggaagagcaagaagaagaagaagaagaagaagaagcagggcgaggacaacagcacagcccaggacacagaggagctggagaaggagatccgggaggacctgcctgtgaacaccagcaagacccggcccaagcaggagaaggccttcagcctgaagaccatcagcaccagtgaccctgctgaggtgctggtgaagaacagccagcccatcaagaccctgcccccagccaccagcacagagcccagcgtcatcctgagcaagagtgacagcgacaagagcagcagccaggtgccccccatcctgcaggagacagacaagagcaagagcaacaccaagcagaacagcgtgccccccagccagaccaagtctgagacctcctgggagagccccaagcagatcaagaagaagaagaaggcccggcgggagacctag

SEQ ID NO: 254227 - DNA, 6177 bp, Artificial Sequence
  derived and/or modified sequence
ggcccaagccgccattgttccgccgagggaggacagcggggcctggcgctggcgccgagacgccgcttagcggccgccactggagacactccctcccgcctcccgggtctcctggcggcggcggagtgaggctgacagcggggaacctgggagacccctccgccctccccgcggtggcagcggccgatccccggctccggcgcgagggacggccgcgatgcgctcggcctgaggttacccggcccggcccttcctcgcttccctcgactattccactgcgtctccgcgccccggcgtcatcctgcgagtccctctgacgggagggaagatggctgcacggagctggcaggacgagctggcccagcaggccgaggagggctcggcccggctgcgggaaatgctctcggtcggcctaggctttctgcgcaccgagctgggcctcgacctggggctggagccgaaacggtaccccggctgggtgatcctggtgggcactggcgcgctcgggctgctgctgctgtttctgctgggctacggctgggccgcggcttgcgccggcgcccgcaaaaagcggaggagcccgccccgcaagcgggaggaggcggcggccgtgccggccgcggcccccgacgacctggccttgctgaagaatctccggagcgaggaacagaagaagaagaaccggaagaaactgtccgagaagcccaaaccaaatgggcggactgttgaagtggctgagggtgaagctgttcgaacacctcaaagtgtaacagcaaagcagccaccagagattgacaagaaaaatgaaaagtcaaagaaaaataagaagaaatcaaagtcagatgctaaagcagtgcaaaacagttcacgccatgatggaaaggaagttgatgaaggagcctgggaaactaaaattagtcacagagagaaacgacagcagcgtaaacgtgataaggtgctgactgattctggttcattggattcaactatccctgggatagaaaataccatcacagttaccaccgagcaacttacaaccgcatcatttcctgttggttccaagaagaataaaggtgattctcatctaaatgttcaagttagcaactttaaatctggaaaaggagattctacacttcaggtttcttcaggattgaatgaaaacctcactgtcaatggaggaggctggaatgaaaagtctgtaaaactctcctcacagatcagtgcaggtgaggagaagtggaactccgtttcacctgcttctgcaggaaagaggaaaactgagccatctgcctggagtcaagacactggagatgctaatacaaatggaaaagactggggaaggagttggagtgaccgttcaatattttctggcattgggtctactgctgagccagtttctcagtctaccacttctgattatcagtgggatgttagccgtaatcaaccctatatcgatgatgaatggtctgggttaaatggtctgtcttctgctgatcccaactctgattggaatgcaccagcagaagagtggggcaattgggtagacgaagaaagagcttcacttctaaagtcccaggaaccaattcctgatgatcaaaaggtctcagatgatgataaagaaaagggagagggagctcttccaactgggaaatccaaaaagaaaaaaaagaaaaagaagaagcaaggtgaagataactctactgcacaggacacagaagaattagaaaaagagattagagaagaccttccagtgaatacctctaaaacccgtccaaaacaggaaaaagctttttccttgaagaccataagcactagtgatccagccgaagtactcgtcaaaaatagccagcctatcaagactcttccacctgctacttctaccgagccatctgtaatcttatcaaaaagtgattctgacaagagctcttcccaagtgccgccaatactacaagagacagataaatccaagtcaaataccaagcaaaatagtgtgcctccttcacagaccaagtctgaaactagctgggaatctcccaaacaaataaaaaagaagaaaaaagccagacgagaaacgtgaaattttttttcctgaattggacatgtgtttgcaaacacttgtcttgaagattatgctgtttatgcaataatttgtgaacatgtacagagttttatataaatttaaaccaatttttaaaacaaaactgcggacaccaccataaaaatggaatcaaaagaaagttaatttatgaaattaagaggtcagcagaatatactcagtgatggaagacacttgggaaagtctttttaatagaacaagaacgatcttaatttaagaatattatcctggtttaacaacagtgccctgtttacaacagattgtgccctatctcatctgcagccgaggaataaaggattctgattagaaagagggttgcctacagattagtaagcaattccttggatcttatgcacagaacttgtaccatttgaatctgttttatgcttaaatcaaagtgctttgatcaaatgcataacctgccatatctttacatatttgttggtagcaatttgtattaaagaaatcacaagtgcaaataaaaagtcatttatcatttgtttaactaaactgtcatggtttagtttacaatttttaaaaagttcttaaaatactgaaaatgcagttgacacttgtgtatggcttatgaagttatttttgatagtcttacattacttgaattgttcaaagtacagtatattttaaattaagaaaagtgaactatatgtatttgttttatacatttaaggcttagactcataaataatgctattgtttatgatttgaaaactttcaggcaaaatccaatttacatttttcccttccctagcaattacttttttccagcttcaactcttcttagttactaatactttgttgactttaaaaatgaaatcattcacaaacttttggtatatgatggagaatgaaaaactagagtcagacagctttaattgacattgtcaacacctccagttatcaggaatacatttttttactgccttaacctgtagtgcgtagaatatgcatcaatttcttgaaggagattcatgtttttataagaattttcatgtaattattgcaattgtggtcaaataaggaacgtttcctgcttgaaattatattgatttaaatgatgtgtgagatgtttcaccattttcaggcactgtgtaattctattgtaataaactggcaggtatctttgtaactataaatagtgcatgctcagccatgtacactgtaaatagcctttaccaaacgtgtttgacaaggaccataattaacatcacttagtgaattgtgataaagaaaaaaaagccatgatttattcgatgtgattggcttgtttttatgtggcgccaagaacgaacctgtttaacagctgtaaccaatggtactgatctatccatccaatgttgtcattatatttgactgtggttcaacagtattgcgttgtcagactaggaaagctaaacgaacaaaatggttttagttttgctgaagactggccttattaatggacagctttcctaacaagagattattaacttttatcaggtgttaacatctgtttcaggaacatggcagtatgtttacatgtcagaagttttgtttaattctatggtatttctaaattgacttgtttaaataaattcagcaaatggatagcattgttttttatttgcttcaatatgggggtagataatagctaaagagccaaggatgaatttcttcaaatgactttattctgttagctttacataggtgttggaggattcctaaggtgtcagcattttgtaaaggtaccacaaaggagaagttgatagggaatctaattttagaatgtgccaaatggtctgtgctcaacaatataattgaactctctcaactctacctcaccatttctttatctcaaaattctgttggctttgtcaaacgttggattttatttctgcagcctagtatctccccattctaccacctatgccagatgttaaagacagcagatgttttgaggagaatggcattgtggagatgcagagatgcgttgctaagttgaggtggatccagtatagagatacctctatttcttctttatggctcaagagctaggacttggattttgttttaagagatggcagctggccgggtgcagtggctcacgtctgtaatcccagcactttgggaggccgaggcaggtggatcacgaggtcaggagttcaagaccagcctggccaagagggtgaaaccccatctttactaaaaatacaaaaaaaaaaattagctgggtgtggtggtgggctcctgtaatcccagctactcaggaggctaaggcagagaatcatttgaacccaggagacggagtttgcaaagccaagatcgtgccactgcactccagcctgggcaacagaaggagactccgtctcaaaaaaaaaaaaaagatggcagctatataaatgataaaattaattacattctctttcacatgcatgaggtgcaaactctgtcacaaagtattttaattaccttttaccttgtttcatagatctttatgtgacataaaaacagtttctggcacggtggctcacgcctgtaatcctagcactttgggaggctgaggcaggtggatcacctgaggtcaggagtttgagaccagcctggccaatatggtgaaaccccatctctacaaaatttgcaaaaagtagatgggtgtggtagtgggcgcctgtaatcccagctactcaggaggttgaggcagagaatcgcttgaacccggggggtggaggttgcagtgagctgagatcgcaccactgcactccagcatgaaagagcgagactcaatctcaaaaaaaaaaaagtttctggcacctgaacaggaactggtttccatcatcaactcagaaagcactaaaatctaggtggtgattcagggaggagcaggggaagacagcctcctatggtggcatgaataagatgcttccagaactagtagggaaataactaacctcttcaggctttatcaggcctggaggggaaccttgctcatgttagcaagaaaggtatcctagagaagccactcaaaaggctccctaatccagcctgtctccacatacatactgaaaattcttccctactctgaggcagggtgtagtggtttaggggtttctccagactggaatcctacctatctgtaccgacaattgagcaaacaacagttgagagagtccaaaaaaaaaagtattaaaatgtgattgatgtaatttaccatgtttactttatgcatgcattttattggggaggggaggtcagaataattcacccaaatctagtggtcttatttcataggctaatctggtttatatttgcattaaagatactggagggcaatatttacagagtttagtttttcttaattaaaaacagtcctctattaatatagtgtgaaatatctttcaaaatttagagtttaggtttaagatgtctactagatatctttaagattttcctgtaaactcactgcacaaactggaattactttccaaaagacttagggaatgcaaatatgttactcataagatgcattgagtattgtaaataaaacaaaccatttttgatttgtttaaattgctcgttacagttctcttgtggggagggactttgtcagtcattttgcatcttaagctagactaaactttttgttgttgttttcctaaaaccataggtgcaagctttgccgctgggaagtcatattgaattaagcacttttgaaaatgtcactgtttgtgacacacaatgttctctacagaaaacttcttctatcttatgtcattttagcagtagatgtagctgcctgccaccaggtgcaatatgtcatttgcatcagccttttcagttaaggaaattaaaacttggcatgcattagttcatatgtatgaggttggctgtgtccccaaacagcaattgcttgtacaagatagaagtttgcttctcagctgggcatggtggctcatgcctgtaatccaagctctttgggaggccaacgcgggaggattgtttgagcccaggagtttgaaaccatcctgagcaatagagagacccccatctcgacaaaaaaaaaaaaa

SEQ ID NO: 254228 - DNA, 1749 bp, Artificial Sequence
  derived and/or modified sequence
atggccgcccggagctggcaggacgagctggcccagcaggccgaggaggggtctgcacgacttcgcgagatgctctctgtgggactgggattccttaggaccgagctcgggctggatctaggcctggaacccaaacgttacccagggtgggtcatactggtgggcactggggccctgggcctgctgctgctgtttcttttgggttatggatgggccgcggcctgtgctggcgccagaaagaagaggaggtcccctcccagaaaacgcgaggaagcagccgcagtgccagccgcagcccccgacgacctggcccttttgaaaaacctgagatcggaagagcaaaaaaaaaaaaacaggaaaaagctgtcagaaaaacccaagccaaacggccggactgtagaagtggctgagggcgaagccgtgcgaaccccacaatcagtgacagccaaacaaccccctgaaatcgacaagaagaacgagaaaagcaagaagaacaagaaaaagtctaaatcggacgctaaggcagtccagaattcctcacgccacgatggtaaggaggtggatgaaggtgcctgggaaacaaagatatctcacagggagaaaagacagcagagaaagcgggataaggtcctgactgattctggatctctggacagcacaatccccggcatcgagaatacaataaccgtgaccactgaacagttgactaccgccagttttcccgtgggttccaagaaaaacaaaggggactcccatctaaacgttcaagtgagcaacttcaagagtggaaaaggggattccaccttacaggtaagttcaggattgaatgagaatttaacagtgaacggcggagggtggaatgaaaagtccgttaagctcagttcccagatctcggccggagaggaaaagtggaatagcgtaagtcctgcctctgcaggtaagcggaagacagagccctctgcatggagccaggacactggggacgccaacactaacggcaaagactggggaagaagctggagtgaccgcagcatattttcaggcatcgggtcaacggcagaaccagtgagtcagtccaccaccagtgactatcagtgggacgtctctcgcaaccaaccttacatcgatgatgaatggagcggactgaatggtctatcatctgctgatccaaatagcgattggaatgcacctgccgaagaatgggggaactgggtggatgaggagagggctagcctacttaagtctcaagaacccattcccgatgaccaaaaagtgagcgatgatgacaaagaaaaaggcgagggcgctctcccaaccggcaaatccaaaaagaaaaaaaagaaaaagaagaagcagggggaggataatagcaccgcacaagacactgaggagctcgagaaagagatccgcgaagacctccccgtgaatacctccaagacgcgtcccaagcaggagaaagccttcagcctgaagactatctcaacgtctgatccggccgaggtgcttgtgaaaaactcacaaccaattaaaacactgccacccgcaacaagcaccgagccgagtgtgatcctgtccaagagtgatagtgataagtcctcatctcaggtgcccccaatcctgcaggagactgacaaatcgaaaagcaacacaaagcagaattcggtgccccctagtcagacaaaatcagagacctcctgggagtctcctaaacagattaaaaagaagaaaaaggcgcgacgggagacctag

SEQ ID NO: 254229 - DNA, 1749 bp, Artificial Sequence
  derived and/or modified sequence
atggccgctcgcagctggcaggacgaactcgcacagcaggccgaagagggctccgctcgcttgcgggaaatgctatcagtagggttggggttcttgagaactgaacttggactggatctggggctcgaacctaagcggtatcccggatgggttattctcgtgggtacaggcgctctcggcctcctgctgcttttcttgctcggctacggctgggcagcagcatgtgcaggcgcacgcaaaaagcggaggagcccacccagaaaaagagaggaggccgctgccgtgcctgccgctgcgcctgatgatctcgccctgcttaaaaaccttaggagcgaggaacagaaaaagaagaaccgtaaaaaactgtcagagaaacctaaacccaacggcagaactgttgaagttgctgaaggagaagccgtccgcactccacaaagcgtaactgccaaacaacctcctgagattgataaaaaaaatgaaaagtctaagaagaataagaagaaatcaaagagtgacgctaaagccgttcaaaactcatcaaggcacgacggaaaggaggtggatgagggagcctgggagacaaagattagccatcgggagaaacggcaacaacgtaagcgcgataaggtgttaactgattccgggtccctggactcaacaatccctggtatcgagaatactatcactgtcacaaccgagcagctaacaactgcctcattccctgtgggttctaagaaaaataaaggagatagccacttgaatgtgcaggtgtcaaacttcaagagcggcaagggagattctactcttcaggtctccagtggactcaatgaaaacctcactgtgaacggtggcggatggaacgagaaaagcgtcaagctgtcttcccaaatatcagccggagaggagaaatggaactccgtctctccagcaagtgccggaaagcgcaaaactgagcccagtgcttggagccaggatactggcgacgcaaataccaacggaaaagattggggccgaagctggtcagaccgatcaattttttccggcatcggtagtaccgcagagcccgtcagccagtcaactacttccgattaccaatgggatgtgtcacggaatcaaccttatatcgacgatgagtggtcggggctgaatggcctctccagcgccgatcctaattccgattggaatgctcctgcagaggaatggggtaattgggttgacgaggagagggcctctctcctgaagagccaggaaccaatcccagatgaccagaaggtctctgatgacgataaagaaaagggcgaaggtgccctgccaaccggcaagtcaaagaagaagaagaaaaaaaaaaagaaacagggggaagataacagcacagctcaggatactgaggaattagagaaggaaatccgggaagatctgcccgtaaacacctcaaagacaaggccaaaacaggaaaaagctttcagtctaaagaccatttccacctctgacccagccgaggtgctggttaagaactcacagccaataaagacactgccacccgctacctctactgagccatctgttattttgagcaaaagtgatagcgataagtcctcttctcaggttccccctatcctgcaagaaaccgacaagtccaagagtaacaccaagcagaactctgtgcccccatctcagactaagtccgaaaccagctgggagtctccgaagcagattaagaaaaagaaaaaagcgaggcgcgaaacatag

SEQ ID NO: 254230 - protein, 179 aa, Artificial Sequence
  derived and/or modified sequence
MGLIFAKLWSLFCNQEHKVIIVGLDNAGKTTILYQFLMNEVVHTSPTIGSNVEEIVVKNTHFLMWDIGGQESLRSSWNTYYSNTEFIILVVDSIDRERLAITKEELYRMLAHEDLRKAAVLIFANKQDMKGCMTAAEISKYLTLSSIKDHPWHIQSCCALTGEGLCQGLEWMTSRIGVR

SEQ ID NO: 254231 - DNA, 540 bp, Artificial Sequence
  derived and/or modified sequence
atgggcctgatcttcgccaagctgtggagcctgttctgcaaccaggagcacaaggtgatcatcgtgggcctggacaacgccggcaagaccaccatcctgtaccagttcctgatgaacgaggtggtgcacaccagccccaccatcggcagcaacgtggaggagatcgtggtgaagaacacccacttcctgatgtgggacatcggcggccaggagagcctgagaagcagctggaacacctactacagcaacaccgagttcatcatcctggtggtggacagcatcgacagagagagactggccatcaccaaggaggagctgtacagaatgctggcccacgaggacctgagaaaggccgccgtgctgatcttcgccaacaagcaggacatgaagggctgcatgaccgccgccgagatcagcaagtacctgaccctgagcagcatcaaggaccacccctggcacatccagagctgctgcgccctgaccggcgagggcctgtgccagggcctggagtggatgaccagcagaatcggcgtgagatag

SEQ ID NO: 254232 - DNA, 540 bp, Artificial Sequence
  derived and/or modified sequence
atgggactgatctttgctaagctctggtctctgttctgcaaccaagaacacaaggtgatcattgtcgggctggacaacgccgggaagacaacgatcctctatcagttccttatgaacgaagtggtgcacaccagcccgacaattggcagcaacgttgaagagatcgttgtcaaaaacacacattttctgatgtgggacatcgggggacaagaaagcctacggagttcctggaatacatattactcaaatactgagttcattatactggtggttgactcaattgatcgtgagaggctcgcaattactaaggaggagctctatcgcatgctcgcccacgaggacctgagaaaggccgccgtgctgatttttgctaacaagcaggacatgaaaggatgcatgaccgccgccgaaatctcaaagtacctcacattatccagcatcaaagaccacccatggcatattcagagttgctgcgcactcaccggggagggcctgtgccagggactagagtggatgaccagtcggatcggcgtgagatag

SEQ ID NO: 254233 - DNA, 7196 bp, Artificial Sequence
  derived and/or modified sequence
ggggactacgggtcggcgttgggctcagtgggctcgaaacaaagggctgtccggtggggattcgtcgcggcgccttctgagtggtcgggtcgaggcttctcggcctagcagtgccctcgctgcgcgatctcaggcgggttctcctcggctccgcgcagcccgcgccgcggtgggggacccggcgcagcggcacctgctgccgagggaccccgcggcccgccccggtgctcgtgatggggctgatcttcgccaaactgtggagcctcttctgtaaccaagaacacaaagtaattatagtgggactggataatgcagggaaaaccaccattctttaccaattcttaatgaatgaagtggttcatacttctccaaccataggaagcaatgttgaagaaatagttgtgaagaacactcattttcttatgtgggatattggtggtcaggagtctctgcgatcatcctggaacacatattactcaaatacagagttcatcattcttgttgttgatagcattgacagggaacgactagctattacaaaagaagaattatacagaatgttggctcatgaggatttacggaaggctgcagtccttatctttgcaaataaacaggatatgaaagggtgtatgacagcagctgaaatctcgaaatacctcacccttagttcaattaaggatcatccatggcacattcaatcctgctgtgctctcacaggagaagggttatgccaaggtctagagtggatgacctcccggattggtgtgagataacttttttgcttgaaagagactgctctatttattctgtgacatgaacattttttcctagtacctttggctgctaaggcagcagcatgtttaatttataacaacacaaacctctgagagcaacacttgaatcaagtgcagctgaactggaacataaaagattttttcttaactttttttttttaacacactaatcttcagttggatgaatgtaatgtataactatgttttcagcaacaattcttctgtttattctaattaatcagtgactgccttgtaagaaatgtttgtcatatgcgtgatgtcttctgaaatattcttataaccttaatgaccaattgctttcaattcttgaccagcactccctcccaaccagagaattactggtttgatagagtagtcttggaaaccatcaggtactgcctgcagacttctccagcactaaatatatttgttccctctataaaccattcatctttcggacagaacttactgtaaagaaagaaatctgcctagaggatatatgtaaggaagattccacatcatgagtacttgccttttaactttcccccacattactgttgagtcatggaataatgtttaagttgttatttgcatggaaattaagtaggctgtttatttatctaaaggaatcaagtccactcttctgcctgcaacatttgttcaaaaactaaccaaggtaaaatatttatttgaaagcccaactttgatgttaaatattcttgaataaatctgttattttaagaatatcacattattcaatgcatataaaactatcagaagttagtaaatcataccagcactaaaaataagacaattggaatatattttagcatcagtttacaaacaactttattatcaacagaaattttagctcttttctttgcaagatatatcacagctgctttgggcagtagctgaagccgaagtatgaacagtccattttgtttcttaaaatttgaagtcgtgtctgtcatagcatttttactaccagcagtatgttacttaaaaaactacatggctttccttgaatttatttgacggtattatgtaatagacttgaaacaattgccatctttgtagttatgccttgggttctaaaatgttataggaaactgctgaattgaatcctagcttttagaatattaataggagactcaaagttaatattcttaacaacttaaaattaaaaaaagtcataatctatcaaaagtttatttattggatggcattaaaacatttttgaggcagttgtctaatatgaacaataatctaaacaatatattccttaaattaagaggaaagacaagtgtcgtatttcgatcctgtttattcaaatgtgtgattttgctgaaatgaaagggataaaatgaatacttagagaataatacttcatttttgcagtactttttaattttgataaaaaagatacaaagttcataatatcaaaatatgtgttcaaaattggtattttaattttaatatttttgtaagttgatttaaattttgctcttttttcaggtgtgcttggtttattatatttagtcaagttaatttagtcgaatgtggtaacatttttctgatttatctttagttggagcacacccttgaactgaacagtggccaaaggaaagctttctgggctttggaaagtagttgtttaactttgttttaagccgttttcttagtgattctgtatcaagtagaggataagtgtagtttaacttagtttttaatataacccataatcaagaacatgagcgaaaagcagacataaatcgatatggatggtttgtggtgtgtgtgggatgtgggggaattaagaaaatgccatttacctaagcacagtttgcctgaatttctgcttggttgtgttgtttaccgtaagtactgagggtagtttccctaagtctgtcctgagaaaaagcatacttagtactcctgtatttgttcttatgaaatgactatctgccttcttgtatctagtaagattggctggctcaattttcttctgtcaaattatatggttattttttatattaccacatcagcattatattaaaagtgtttttaatagttgattgtattttgccaactactagtatagactcaaatttgctatttaatttttaaaatacaatttattttgtaaatcctttaaaaaatatttggttagttttggattagaaatgatttatgttagccatgtgttgaagatgaaattggcatcagtgtagacggtgctgattgggaaaagttcatgattaggaaattcatgtaagactttttaagagtattttttaggttttcactcaatctttcctgtcacagtaacgtgaaaactgattattctttactccaagagaatgttttaacccaagcaagtatctaatactagagcattggttctgacattcattgtaaatcagtgaactgtaagatactgtctaaaaaatgtacatttgtaattagtgcctttattcatattttgaaataagttcttagttttatattatacctgttctttagaagtcatgttagcagctaattatttcagtgatgaaataatttgtgttttatatcccccttcacctccatgtattggttagcacagtttatagtaagtgaaaagcaagggacccacctacattaccttcaggagactgttctaccttttaatttgaaaacaaggaaattaaattttaacagaaatcttttaagtatgttataaccaaagtgttcaattatccttgcaagttcaaatacagcatttttcttaattttgagcgtgtcatgtccttcatctttaaacccatcattcttattgaagcccatttgagaactcttagaattaatagaaccttttataagggaatatatggaatattttttattgttaatgtaacttaattccttaaaacctggaatattaatatatataatctattaaaagctgaagattaaatatgtaatttttgcttttagtttcttgtgttagtatgcttaaaggtatcaatacttttattctatattcattagaagaaaggtaataaatttaagtttcattgctgaaaaattttaaatgagtgccaccccatagccatagtcattttgattaagcataatttaactttcattatagcataaagagaaaataattattttagtatggaaacagtgataggcagtgctgtaaacaatattctctgaaaagttgtgggggtcacaaagaaaattttaaagaatatagaagcttttttaaaaaatctttttagtgtagtttcttagaacaaattataaacataatcattctgaataatcaatttttatttagtccttaactatgtaaaaccgtatcagtagaaaaatgtgctggtgtcgtgtctaaagatggataaatttctttggaatttatctttggagaccaactttatgaggcagactttttgtctacagctttggaaccaaaaaaacttcactctaattcagtcctaaaggctattttacattttgccggggtaaagtgacttcaagatacagcatggtgtcttgtatctagtagaatattgtgctagccatctaaaaaagtggatttgagccttaatttggccgtttctcaattgtctagttgaccttagacaattagtgtccatggctttccttttgtttttcccatactgaggaacttaaactacagctctaaaatgtcttttggttttaaaattctgaatgcttatatactactattaaaaattaaaaatccctcaaatagtagggcaatacaggtaatatgaaattaaatgtatttttatccattatttgattcccacctgttattttatttagaatacgaatacaaccaagtagggaaaaacgtatcagtaactgctattcaacttaaattcagcgaattaatagctgaatagaaatagctaatgacaatgcaaaagagaaaacaagccatattgctaagaaaaggatagtaagctgcttagaaagaaccagcctgtgttggaaataattctcttctagataatttaccttattttcttggcttgtactaattgaatggaagtggttaatttgttcagagtttattgccgtttgatgccaccccagtctatagttctgtgtgactttccatattgaaagagtagggttagtagccaggttgtcagtcttttacaaatgtctacataaatgtctacataaatctgaaagtggtttatattcaaggttagtttttcagtagcgtctcctccttattcattcacttttactgtgaagactgaaatccaaaagccaggttccccaaaaaagtatttttaaaaaattttaggggaccaaaataaatagaggaagaccaatataaaaaaatatgttcaactattccattttaaatttaaagcagaaaaaaaaattgtgcccctcagacctaaaggcagctttaaatgtatatagtttggtgaaacatttgggaaatattaatttggaggtttagaagcatacgaaaaacaaattcaaagcacttgaaagtaaagacaatatcatgaggtcgaaaaaacttcaaaaggatattaggtaagagaaaatgtgaatgaaagcagtgaatttctgcctctcctcgtatttagggtacttaaaattactaaaaaatactgtctttttaccatacagctagatggcctgtattattcttaatgtggccaaaggagtgaagactgattagggttttagaatttggaactgtagtcacataaaggcatcttttgcatttcttaaaccagtaatctacattttctcctggaaatggagaaatatgaaatgtgctgtgcatagcttttggaatagaaaacaaagttttaaaagaatggatatgttttcttgcacaacttgtaaaattttaattaaaaaattacctcatttttcaatccataaggtgctttgctcaagtttgtgggatgtttgtaccatcccataaaaacccccttcacccaaactgtatttgaaatatgcaaaattcataactaagggatagcattccttggagactttgttttgttttactcttgtttaccagctgggccaacatggtagatatatgagattcacatatggtttcattaaagcacataggaaagtgctcagtcaatatttaattagtttaattagataagggaaaggagaaatcctaaatttgatggattcttttatactgtgaatatatttccatcagtgttggtaagatatcaaatgactatcagttgatcccagtcatcagtgacttatttgcatatttaagccctattcacaagagaccataatcattttaatcttatattttccctcaggaaatttagggactctgaagcccctattttattctcttggagtaaactgttgagtgtagttacaaaaacttttatttatgacttaaaaaaagtttagctgctatttcagtgaaagtgtaaaataaaacggtcatgatttttttcaattacagaatagttacaaattttaccatgttcatctattccacagagcatgttaaaaacaacaacaacaaaaacctaacagcaattacaaccttggtgttgcgtttattctaatcagagtgaatgattataatcacactttgctattttaacataaattggtgctttagagcattaaagaggaagcagcaggccctgtactcagtatttattatttcttgcctcagaatgcaaaacaactttaaagtgtctatattcatatatatgtgcatttcttaagatttaaatacaaactgttgttactccttaagcttcaggctttctgcgaaagctctaagaatatcttcattactatgcttggtcaactggaagatggtattaataaggtcagaattaggaattggattgctctgtgggtcctccggtattgtgcagaggaaagaaaaatgtctttcacaccacaaactgtgtgtctgaaccccagccaaacaaatgtgttccattggtccaatatataagcattaacaacaacaacaaaaaatttaaaacaagtaaattaatgcattcacatgatcacttcttgaaaatggttcaaagcatgttttcctgatggtgggattgtttaaatgacatgttttaaagtttttaatactttattagttatgaagtgcttcttttatatgttaagtttaggttgccagtactcataatttttatttctgcaattatgttataatgagttgtttgcatgcctacttaacccaagtaaaacgatgctgtttgctctggaatgttcatcttttagacaggttttggctcatttccaatcatggtgcaatatagtgtaacattcatttgttttcattcaacagttttatttttgtcataataaataattacttttccaata

SEQ ID NO: 254234 - DNA, 540 bp, Artificial Sequence
  derived and/or modified sequence
atgggcctcatctttgccaagctgtggagcctcttctgcaaccaggagcacaaggtgatcatcgtgggcctggacaatgccggcaagaccaccatcctgtaccagttcctgatgaatgaggtggtgcacaccagccccaccatcggcagcaatgtggaggagatcgtggtgaagaacacccacttcctgatgtgggacattggaggccaggagagcctgcggagctcctggaacacctactacagcaacacagagttcatcatcctggtggtggacagcattgaccgggagcggctggccatcaccaaggaggagctgtacaggatgctggcccacgaggacctgaggaaggctgctgtgctgatctttgccaacaagcaggacatgaagggctgcatgacagctgctgagatcagcaagtacctgaccctgagcagcatcaaggaccacccctggcacatccagagctgctgtgccctgactggagagggcctgtgccagggcctggagtggatgaccagccgcatcggcgtgaggtag

SEQ ID NO: 254235 - DNA, 540 bp, Artificial Sequence
  derived and/or modified sequence
atgggcctgatcttcgccaagctgtggagcctgttctgcaaccaggagcataaagtcatcatagtaggccttgacaacgccgggaagaccacaatcctataccaattcctcatgaacgaggtggtccacacatcgcctacaatcggctccaatgtcgaagagatcgtggtcaagaacactcactttcttatgtgggatatcggtggtcaggaatccttgcggtccagttggaatacttactattccaacaccgagttcatcatcctggtcgtggacagcattgatagggaacgacttgccatcactaaggaagaactgtataggatgcttgcccatgaagatctgcggaaagctgccgtgttgattttcgctaacaaacaggacatgaaagggtgcatgaccgccgccgagatcagtaaatacttgacattgtcctccattaaagaccatccatggcacatccagagctgctgcgcactgaccggcgagggactttgccaagggctggaatggatgactagcagaattggggtgagatag

SEQ ID NO: 254236 - DNA, 540 bp, Artificial Sequence
  derived and/or modified sequence
atgggactgattttcgctaaattatggtccctcttctgcaatcaagagcacaaggtgatcatagtcggacttgataatgcgggtaaaacgactattctttaccagtttctgatgaatgaggtggtacatacctcacccaccattggcagcaacgtggaggagatcgtggtcaaaaacactcatttcctgatgtgggacataggagggcaggaaagcctcagatcaagttggaacacctactattccaatactgaattcataatcctggtggtcgatagcattgatcgtgagaggcttgccattaccaaggaagaactgtatcgcatgctagctcatgaagacctgcgcaaggccgcagtcttaatttttgctaacaagcaggatatgaagggttgcatgacagccgcagaaataagcaagtatctgacactatccagcatcaaggaccacccttggcacatccagagctgctgcgccctgacaggagaaggattgtgccagggcctggagtggatgacaagtcggataggcgttcgatag

SEQ ID NO: 254237 - protein, 172 aa, Artificial Sequence
  derived and/or modified sequence
MANGTNASAPYYSYEYYLDYLDLIPVDEKKLKAHKHSIVIAFWVSLAAFVVLLFLILLYMSWSASPQMRNSPKHHQTCPWSHGLNLHLCIQKCLPCHREPLATSQAQASSVEPGSRTGPDQPLRQESSSTLPLGGFQTHPTLLWELTLNGGPLVRSKPSEPPPGDRTSQLQS

SEQ ID NO: 254238 - DNA, 519 bp, Artificial Sequence
  derived and/or modified sequence
atggctaacggcactaacgcatccgccccttactacagttatgaatattatttagactacctcgatctaatccctgtggacgagaagaagctcaaggctcacaagcatagcatcgtgatcgctttttgggtttccctcgccgcatttgtggtactactattcctgatactgctctatatgtcctggagtgcaagcccacagatgaggaactcaccaaagcaccaccagacctgtccctggtctcatggcctcaatctgcatctgtgcattcagaagtgtctgccatgccacagggaaccgcttgcaacatcgcaggcgcaggcctccagcgtggagcctgggtctcgtaccggaccagatcagccgctccggcaggaatccagctccacactgccgctgggtggatttcagacccacccaactctgctgtgggaattgaccctcaacgggggcccactggtcaggagcaaaccatctgaaccaccacccggcgataggacttcacagttgcaatcctag

SEQ ID NO: 254239 - DNA, 519 bp, Artificial Sequence
  derived and/or modified sequence
atggccaatgggactaatgctagtgccccctactattcatatgaatactacctcgattatctggacctgatccccgttgacgagaaaaagctgaaggcccacaaacactctattgtgattgcattttgggtgagtcttgctgcttttgtggttttactgtttctgatcctactgtatatgagctggtcagctagtccccaaatgcggaactctccgaaacaccatcaaacgtgcccttggagccacggactgaacttgcatctctgcattcagaagtgtctaccttgccaccgggagcctctggccacgtcacaagcacaggcatctagcgtcgagcctggatcaagaaccgggccagaccagcctctgaggcaggagtccagctcgaccctacctctgggggggtttcagacgcaccccacactgctgtgggagttgaccctgaacggaggcccactggtgagatcgaagccatctgagcctcctccgggagaccgaacaagccaactgcagtcctag

SEQ ID NO: 254240 - DNA, 519 bp, Artificial Sequence
  derived and/or modified sequence
atggccaacggcaccaatgccagcgccccctactacagctatgagtactacctggactacctggacctgatccctgtggatgagaagaagctgaaggcccacaagcacagcatcgtcatcgccttctgggtgtccctggccgcctttgtggtgctgctcttcctgatcctgctgtacatgtcctggagcgccagcccccagatgaggaacagccccaagcaccaccagacctgcccctggagccacggcctgaacctgcacctgtgcatccagaagtgcctgccctgccaccgggagcccctggccaccagccaggcccaggccagctctgtggagcccggcagcaggactggaccagaccagcccctgcggcaggagagcagcagcaccctgcccctgggcggcttccagacccaccccaccctgctgtgggagctgaccctgaatggaggccccctggtgcgcagcaagcccagcgagcccccacctggggacaggaccagccagctgcagagctag

SEQ ID NO: 254241 - DNA, 935 bp, Artificial Sequence
  derived and/or modified sequence
gacccacagacacacttggacgattcctgcagaaatcagtgaggcagtctcctcccaggggcttggcgcctggctcgaggcgaggctgccggcccggacgctgactgcccagtgccacagacatggccaacgggaccaacgcctctgccccatactacagctatgaatactacctggactatctggacctcattcccgtggacgagaagaagctgaaagcccacaaacattccatcgtgatcgcattctgggtgagcctggctgccttcgtggtgctgctcttcctcatcttgctctacatgtcctggtccgcctccccgcagatgaggaacagccccaagcaccaccaaacatgcccctggagtcacggcctcaacctccacctctgcatccagaagtgcctgccgtgccacagggaacccctggcaacctcacaggctcaggcgagctcagtggagccagggagcagaactggccctgaccagccgctacgacaggagagctcctccaccttgcccctcgggggtttccagacccaccccactctcctctgggaactgaccctcaatgggggtcccctcgtcaggagcaagcccagcgagcctccccctggagacaggacctctcaattgcagagctgatgtcagtaaatcgtggccatagctgagtgaactggtgaaatcaagccaacctggacacatacgttcctcgttcttcttagaggccatttgcatgtagcagaaagggcacctaggtcaagtgcaactagagcaggagcatcctatgcctttgacaaagattgcagtggcccctcgagtgcagaggtcatcccaggtgttgctgagtttattgagcacacctagcctgcttgcttactgcttatatttgctcagggaagagtaggaaaataaaatatatgcaaatcaagaggaaaa

SEQ ID NO: 254242 - DNA, 1000 bp, Artificial Sequence
  derived and/or modified sequence
ggataatggggaggctatgcaggtgtgtgggctggagggactttgcagatgtgattaaggattgtgagatggaaaaattatccttgattacctgcacggacccagtataatcacaactgtccttataagaagaggagctttggaagaagagagagttgactacggaagagggaaaagtgccacagacatggccaacgggaccaacgcctctgccccatactacagctatgaatactacctggactatctggacctcattcccgtggacgagaagaagctgaaagcccacaaacattccatcgtgatcgcattctgggtgagcctggctgccttcgtggtgctgctcttcctcatcttgctctacatgtcctggtccgcctccccgcagatgaggaacagccccaagcaccaccaaacatgcccctggagtcacggcctcaacctccacctctgcatccagaagtgcctgccgtgccacagggaacccctggcaacctcacaggctcaggcgagctcagtggagccagggagcagaactggccctgaccagccgctacgacaggagagctcctccaccttgcccctcgggggtttccagacccaccccactctcctctgggaactgaccctcaatgggggtcccctcgtcaggagcaagcccagcgagcctccccctggagacaggacctctcaattgcagagctgatgtcagtaaatcgtggccatagctgagtgaactggtgaaatcaagccaacctggacacatacgttcctcgttcttcttagaggccatttgcatgtagcagaaagggcacctaggtcaagtgcaactagagcaggagcatcctatgcctttgacaaagattgcagtggcccctcgagtgcagaggtcatcccaggtgttgctgagtttattgagcacacctagcctgcttgcttactgcttatatttgctcagggaagagtaggaaaataaaatatatgcaaatcaagaggaaaa

SEQ ID NO: 254243 - DNA, 519 bp, Artificial Sequence
  derived and/or modified sequence
atggccaacggcaccaacgccagcgccccctactacagctacgagtattatctggactatctagatcttatacccgtcgacgagaaaaaattaaaggcccataaacacagtattgtaatcgccttctgggtgtctctggctgctttcgtagtgctgctatttctaatcctgttatatatgtcctggtctgccagcccccaaatgcggaattctcctaagcatcatcagacatgtccctggtcacatgggctcaacctgcacttatgcattcaaaagtgtctgccctgtcacagggagcctttggcgacatctcaggctcaggccagtagcgtagaacctgggtcccgcacgggacccgaccagcctctcaggcaggagagctcttccaccctgcctttgggaggcttccagactcacccgaccctcctctgggaattaacactgaatggagggcctctggtccgaagcaaaccttcggagcctccgccaggcgacaggacttcacagctccagagctag

SEQ ID NO: 254244 - DNA, 519 bp, Artificial Sequence
  derived and/or modified sequence
atggccaacggcaccaacgccagcgccccctactacagctacgagtactacttggactatctcgatctaatccctgtggacgagaaaaagctgaaggcacacaagcatagcattgtgattgcattctgggtctcattagccgcttttgtcgtgttactctttctcattttgctttacatgagctggtccgcgtcaccccagatgagaaatagtccaaagcaccatcaaacatgcccttggtcacatggcctgaacctgcacctgtgcatccaaaagtgcctcccctgccacagggaaccactggcaacctcacaagctcaagcctcaagcgtcgagccaggctcccggacaggacctgaccagcctctcagacaagagagtagctctactctgccactcggcggcttccagacacaccccaccctgctgtgggagctcactctcaacggcggacctttagtgcgatcaaagccctccgagccgccacctggtgaccgcacttcccagttacagtcatag

SEQ ID NO: 254245 - DNA, 519 bp, Artificial Sequence
  derived and/or modified sequence
atggccaacggcaccaatgcctctgccccttattatagctacgaatactatctggattatctagacctgatcccagtggacgaaaaaaagctgaaagcacataagcactcgatcgtaatcgcattttgggtgagtctcgccgcttttgtggtgctccttttcctgatccttctgtacatgagctggtctgccagcccgcaaatgcgaaattcaccaaagcaccatcaaacatgcccttggtcacatggtctgaacctgcatctctgtatccagaagtgcttgccatgtcacagagagccattggctacttcccaggcacaagcatctagtgtggagcctggatcccggaccggtccagatcagcccctgcggcaagagagctcttctactctacccctcggcggtttccaaacccatcctacccttttatgggaattgactttgaacggtggtcccttggtgcgctcgaagccttcagagcctccaccgggagaccggaccagccagctccagtcttag

SEQ ID NO: 254246 - DNA, 519 bp, Artificial Sequence
  derived and/or modified sequence
atggcaaacggcacaaacgccagtgctccttattattcctacgaatattaccttgactacttggacctgatccccgtcgatgagaagaagctcaaagcacataagcattctatcgtcatcgcattctgggtttctctggccgcttttgtcgtacttctgtttctcattctgttgtatatgtcatggtcagccagcccccagatgcggaatagccctaaacaccatcagacttgcccttggtcacatggcctgaacctccacctgtgtatccaaaagtgcctaccctgtcatcgtgagcccttggctacttcccaggcgcaagcatccagcgtagagcctggatcaagaacgggacctgatcaacccttacgtcaggagagctcttcaacactgccattaggaggcttccagacccaccctacattattgtgggaattaactcttaacggagggcctctggtacggagcaagccctccgaaccccctcccggagacagaaccagccagctccagagctag

SEQ ID NO: 254247 - DNA, 519 bp, Artificial Sequence
  derived and/or modified sequence
atggccaacggcaccaacgccagcgccccctactacagctacgagtactacctggactacctggacctgatccccgtggacgagaagaagctgaaggcccacaagcacagcatcgtgatcgccttctgggtgagcctggccgccttcgtggtgctgctgttcctgatcctgctgtacatgagctggagcgccagcccccagatgagaaacagccccaagcaccaccagacctgcccctggagccacggcctgaacctgcacctgtgcatccagaagtgcctgccctgccacagagagcccctggccaccagccaggcccaggccagcagcgtggagcccggcagcagaaccggccccgaccagcccctgagacaggagagcagcagcaccctgcccctgggcggcttccagacccaccccaccctgctgtgggagctgaccctgaacggcggccccctggtgagaagcaagcccagcgagcccccccccggcgacagaaccagccagctgcagagctag

SEQ ID NO: 254248 - protein, 415 aa, Artificial Sequence
  derived and/or modified sequence
MKLKSLLLRYYPPGIMLEYEKHGELKTKSIDLLDLGPSTDVSALVEEIQKAEPLLTASRTEQVKLLIQRLQEKLGQNSNHTFYLFKVLKAHILPLTNVALNKSGSCFITGSYDRTCKLWDTASGEELNTLEGHRNVVYAIAFNNPYGDKIATGSFDKTCKLWSVETGKCYHTFRGHTAEIVCLSFNPQSTLVATGSMDTTAKLWDIQNGEEVYTLRGHSAEIISLSFNTSGDRIITGSFDHTVVVWDADTGRKVNILIGHCAEISSASFNWDCSLILTGSMDKTCKLWDATNGKCVATLTGHDDEILDSCFDYTGKLIATASADGTARIFSAATRKCIAKLEGHEGEISKISFNPQGNHLLTGSSDKTARIWDAQTGQCLQVLEGHTDEIFSCAFNYKGNIVITGSKDNTCRIWR

SEQ ID NO: 254249 - protein, 400 aa, Artificial Sequence
  derived and/or modified sequence
MLEYEKHGELKTKSIDLLDLGPSTDVSALVEEIQKAEPLLTASRTEQVKLLIQRLQEKLGQNSNHTFYLFKVLKAHILPLTNVALNKSGSCFITGSYDRTCKLWDTASGEELNTLEGHRNVVYAIAFNNPYGDKIATGSFDKTCKLWSVETGKCYHTFRGHTAEIVCLSFNPQSTLVATGSMDTTAKLWDIQNGEEVYTLRGHSAEIISLSFNTSGDRIITGSFDHTVVVWDADTGRKVNILIGHCAEISSASFNWDCSLILTGSMDKTCKLWDATNGKCVATLTGHDDEILDSCFDYTGKLIATASADGTARIFSAATRKCIAKLEGHEGEISKISFNPQGNHLLTGSSDKTARIWDAQTGQCLQVLEGHTDEIFSCAFNYKGNIVITGSKDNTCRIWR

SEQ ID NO: 254250 - DNA, 1248 bp, Artificial Sequence
  derived and/or modified sequence
atgaagctgaagagcctgctgctgagatactacccccccggcatcatgctggagtacgagaagcacggcgagctgaagaccaagagcatcgacctgctggacctgggccccagcaccgacgtgagcgccctggtggaggagatccagaaggccgagcccctgctgaccgccagcagaaccgagcaggtgaagctgctgatccagagactgcaggagaagctgggccagaacagcaaccacaccttctacctgttcaaggtgctgaaggcccacatcctgcccctgaccaacgtggccctgaacaagagcggcagctgcttcatcaccggcagctacgacagaacctgcaagctgtgggacaccgccagcggcgaggagctgaacaccctggagggccacagaaacgtggtgtacgccatcgccttcaacaacccctacggcgacaagatcgccaccggcagcttcgacaagacctgcaagctgtggagcgtggagaccggcaagtgctaccacaccttcagaggccacaccgccgagatcgtgtgcctgagcttcaacccccagagcaccctggtggccaccggcagcatggacaccaccgccaagctgtgggacatccagaacggcgaggaggtgtacaccctgagaggccacagcgccgagatcatcagcctgagcttcaacaccagcggcgacagaatcatcaccggcagcttcgaccacaccgtggtggtgtgggacgccgacaccggcagaaaggtgaacatcctgatcggccactgcgccgagatcagcagcgccagcttcaactgggactgcagcctgatcctgaccggcagcatggacaagacctgcaagctgtgggacgccaccaacggcaagtgcgtggccaccctgaccggccacgacgacgagatcctggacagctgcttcgactacaccggcaagctgatcgccaccgccagcgccgacggcaccgccagaatcttcagcgccgccaccagaaagtgcatcgccaagctggagggccacgagggcgagatcagcaagatcagcttcaacccccagggcaaccacctgctgaccggcagcagcgacaagaccgccagaatctgggacgcccagaccggccagtgcctgcaggtgctggagggccacaccgacgagatcttcagctgcgccttcaactacaagggcaacatcgtgatcaccggcagcaaggacaacacctgcagaatctggagatag

SEQ ID NO: 254251 - DNA, 1248 bp, Artificial Sequence
  derived and/or modified sequence
atgaaacttaaaagtctcctactcagatattatcccccaggaataatgcttgaatacgagaagcatggagaactgaagaccaagtccatagatctgctggacctagggccaagcacagatgtgagcgcgctcgtggaagaaattcaaaaggcagaaccgctcttgaccgcgtcccggacggagcaggtcaaactgttaattcaaaggctgcaagagaaactgggacagaatagcaatcatacgttctacctgtttaaagtactgaaggcccacatcctcccactgacgaacgtggccttaaataaatcaggctcatgctttattacagggtcttatgaccggacatgcaagttatgggacactgcatctggtgaggagttgaacacgctcgaaggtcaccggaacgttgtgtatgcgatcgccttcaataacccttacggcgataagatcgccactggctcctttgataaaacctgcaagctttggtctgttgaaactggaaagtgctaccatacatttaggggccacacagcagaaattgtgtgtctgtcctttaatcctcagtctaccttggtggccactgggagcatggacacaaccgcaaagctgtgggatattcagaacggcgaggaggtatatacgctcaggggtcattccgcggagattatatccctgtcgttcaacaccagcggcgaccgcattattacggggagctttgaccacaccgtcgtagtatgggatgctgacaccggtcgaaaggtcaacatcctcatcggtcattgtgctgaaatttcctcagcctctttcaactgggattgcagcctgattctaacaggaagcatggacaagacctgcaaactatgggatgctacaaatggcaaatgcgtcgccacgcttaccggccacgatgacgagatcttggatagctgcttcgattacaccggaaaactgatagcaacagccagtgcagacgggactgctcggatcttttcggccgcaacacgtaagtgcattgcaaagctcgagggccatgagggcgagatcagcaagatcagctttaatcctcagggcaaccacctcctgactggttcaagcgacaaaactgcccgcatctgggacgcacaaacgggacaatgtctccaggtgctggaaggacacacagatgaaatcttcagttgtgcctttaattacaaggggaacatcgtgatcacgggctcaaaagataacacctgccgcatttggcggtag

SEQ ID NO: 254252 - DNA, 1248 bp, Artificial Sequence
  derived and/or modified sequence
atgaagctgaagagcctgctgctgcgctactacccacctggcatcatgctggagtatgagaagcacggggagctgaagaccaagagcattgacctgctggacctgggccccagcacagatgtgtctgccctggtggaggagatccagaaggccgagcccctgctgacagccagcaggacagagcaggtgaagctgctgatccagaggctgcaggagaagctgggccagaacagcaaccacaccttctacctgttcaaggtgctgaaggcccacatcctgcccctgaccaacgtggccctgaacaagagcggcagctgcttcatcaccggcagctatgacaggacctgcaagctgtgggacacagccagcggggaggagctgaacaccctggagggccacagaaatgtggtgtatgccatcgccttcaacaacccctacggggacaagatcgccaccggcagctttgacaagacctgcaagctgtggagcgtggagaccgggaagtgctaccacaccttccggggccacacagctgagatcgtgtgcctgtccttcaacccccagagcaccctggtggccaccggctccatggacaccacagccaagctgtgggacatccagaatggagaggaggtgtacaccctgcggggccacagcgctgagatcatcagcctgtccttcaacaccagcggggaccgcatcatcaccggcagctttgaccacacagtggtggtgtgggatgctgacaccggcaggaaggtgaacatcctgattggccactgtgccgagatcagcagcgccagcttcaactgggactgcagcctcatcctgaccggctccatggacaagacctgcaagctgtgggatgccaccaacgggaaatgtgtggccaccctgaccggccatgatgatgagatcctggacagctgctttgactacaccgggaagctgattgccacagccagcgcagatggaacagcccgcatcttctctgctgccaccaggaagtgcatcgccaagctggagggccacgagggggagatcagcaagatctccttcaacccccagggcaaccacctgctgaccggcagcagtgacaagacagcccgcatctgggatgcccagacaggccagtgcctgcaggtgctggagggccacacagatgagatcttcagctgtgccttcaactacaagggcaacatcgtcatcaccggcagcaaggacaacacctgccgcatctggaggtag

SEQ ID NO: 254253 - DNA, 1248 bp, Artificial Sequence
  derived and/or modified sequence
atgaagctgaagagcctgctgctgcggtactacccccccggcatcatgctcgagtacgaaaaacacggcgaactaaagacaaagtccattgatcttttagaccttggaccctctacagacgtgtcagcactagtcgaagagattcagaaggctgaacctctactgacagctagtaggacggaacaagtgaagctacttattcagaggttgcaggagaagttgggccagaactccaaccacacattttatctgtttaaggttctaaaagcgcatattttgcctttaacaaacgtcgccttgaacaagtcaggcagctgtttcatcacggggtcttacgacaggacatgcaaattgtgggatactgcatccggcgaagaactgaatacattggaaggacatagaaatgtggtttatgcaattgcctttaacaacccctatggcgacaaaatcgccactggcagtttcgataagacatgcaaactttggagcgtcgagacaggtaaatgctatcatactttcagagggcatacggctgaaattgtgtgtttaagcttcaacccccagagtaccctagtggcgacaggctcaatggacaccactgccaagctgtgggatattcaaaatggggaggaagtttatacactgaggggtcactccgctgagatcatctctctgtcttttaatacatccggggatcgaataattacaggaagctttgatcataccgtcgtggtctgggacgcggacaccgggcgtaaagtaaatatactcatcggacactgtgccgagatctcctccgcatcctttaactgggactgtagcttgatcttaaccggctctatggacaaaacatgtaagctatgggatgccacaaatggcaagtgcgtggctactctcacaggtcatgacgacgaaatcttagattcctgctttgattatactgggaaactgatcgccaccgcaagcgcagacgggaccgccagaattttctctgcagccactagaaaatgtattgcaaaactggagggacatgagggcgagatcagtaagataagttttaatcctcaggggaatcatttgttgacgggctcgagcgataagactgccagaatatgggacgctcagaccggccagtgtttgcaggtgttagagggtcatacagatgagatcttttcctgcgctttcaattataagggcaatatagtgatcactggctcaaaggataacacgtgccggatctggaggtag

SEQ ID NO: 254254 - DNA, 1248 bp, Artificial Sequence
  derived and/or modified sequence
atgaagctcaagagtctcttgctgcggtattaccctcccggaattatgttagaatacgagaagcacggggagctgaagacaaaaagcatcgatttactggacctcggacctagcacggatgtttcagctctagtggaagaaatccagaaggcagagcctttacttactgctagccggaccgagcaagtgaagttgctgattcagagattgcaagaaaaactgggtcagaattctaaccatacattctacctttttaaagtccttaaggctcacattttgccactgaccaatgttgctctaaacaaatctgggtcctgttttataacagggagctacgatcgtacttgtaagctgtgggataccgctagtggcgaggaactgaacacactggagggccaccgcaacgtggtttatgctattgctttcaacaacccgtatggtgataagatagctaccggcagctttgacaaaacctgcaagctgtggtccgtagagactggtaagtgttatcacacattccggggacatacggccgagattgtgtgcctgagctttaatcctcaaagcacacttgtggcaacaggctccatggatacaaccgctaaactgtgggatattcagaacggcgaggaagtctacactctgaggggccactcagcggaaattatcagcctctctttcaataccagcggtgaccgaatcatcacgggctcgtttgaccatacagtcgtggtctgggacgccgacaccggccgtaaagttaacatactgataggccattgcgctgaaattagctctgcatcctttaactgggactgcagcttgattctgacagggtccatggataaaacttgcaaactgtgggatgccactaacgggaaatgtgtggccacactgaccggccacgatgatgaaatcctggactcctgcttcgactataccggcaaactcatcgccaccgcatcggcagacggaacagctcggattttcagcgctgccacaagaaagtgtatagctaaactagagggccatgagggagaaatctccaagatctcctttaacccccaaggcaaccaccttctaacaggttccagcgataagacagccaggatctgggatgctcaaacaggccagtgcctacaggtcttagagggacatacagatgagatctttagttgtgctttcaattataaagggaatattgttatcaccggctctaaggataacacatgccgcatctggcggtag

SEQ ID NO: 254255 - DNA, 1704 bp, Artificial Sequence
  derived and/or modified sequence
gcgcatgcgcacccgcgtcccgctgctgtttagccgtttccaaggctacgaagcccatcggccggggataagagagcaagaaaatgaagctcaagagcctcctgctccggtattacccgccaggaattatgttggaatatgaaaaacatggagaattaaagactaagtccatagatttgcttgatcttggtcccagcactgatgtcagtgcgttagtagaagaaatccagaaggcagaacctctactcacagcttcacgaacagagcaagtcaaacttttgatacagaggttgcaagagaaactcggccagaacagcaatcacacgttctatctttttaaggttctcaaagcacatatattgccactgactaatgttgcacttaacaaatcgggctcatgctttatcacaggaagctatgatcggacgtgcaagctctgggacactgcgtctggagaggagctgaacacgctggagggccacaggaatgtggtttatgccatagcattcaacaatccttacggtgacaaaatcgccactgggtcctttgataaaacttgtaaactctggagtgtggaaacaggaaaatgttaccataccttcaggggtcatacagcagaaatagtgtgtttatcatttaaccctcaaagcacattggtggcgactggaagtatggacacaacagccaaattgtgggacattcagaatggcgaggaagtttacaccttaagaggacattctgccgaaatcatctccttgtcatttaacacctcaggagacagaatcatcacggggtcttttgatcataccgttgtagtgtgggacgctgatactggaaggaaggtaaatatcttaattggtcattgtgctgagattagcagtgcctcattcaattgggattgctctctaatattaactggctctatggacaaaacctgcaagctgtgggatgctacaaatggaaaatgtgtggcaaccttaacaggccatgatgatgaaatactagacagctgctttgattacactggaaagcttattgcaactgcttcagctgatggaacagcaagaattttcagtgctgccacaagaaaatgcattgccaaactggaaggtcatgaaggtgaaatttcaaagatttctttcaaccctcaagggaaccatcttctaactggcagctctgacaaaacggctagaatctgggatgctcagactggccagtgcctccaggttcttgaggggcacactgatgaaatcttttcatgtgctttcaactataaaggcaacatagtcattacaggcagcaaggataatacctgtaggatatggcgttgactgaaggaagctggtcagtgagcaaccttgctagcaatggtaatcaagaactggaacttcacagacagcagctctcttaatatttcttatactttctctttttctgcaagtcaactatttctacaactgtccttcatttcacagatatgaccattaaacatgacaaagttatgccactccaatattattatttgatggcgatggcaggacacagcataatgtttggctaatgccaccagttatttcagttgtgtttgttttttaaaagcattatgatactgaaaaaggagaccagaacaacttaacaacgtgtctcctggattttactttgaagcctattgttataatttctgttgaataaagtgtttggagg

SEQ ID NO: 254256 - DNA, 1335 bp, Artificial Sequence
  derived and/or modified sequence
atcggccggggataagagagcaagaaaatgaagctcaagagcctcctgctccggtattacccgccagtctttggtgagccaaatcatatgcaagtttccaagatactactgaatagcaggaattatgttggaatatgaaaaacatggagaattaaagactaagtccatagatttgcttgatcttggtcccagcactgatgtcagtgcgttagtagaagaaatccagaaggcagaacctctactcacagcttcacgaacagagcaagtcaaacttttgatacagaggttgcaagagaaactcggccagaacagcaatcacacgttctatctttttaaggttctcaaagcacatatattgccactgactaatgttgcacttaacaaatcgggctcatgctttatcacaggaagctatgatcggacgtgcaagctctgggacactgcgtctggagaggagctgaacacgctggagggccacaggaatgtggtttatgccatagcattcaacaatccttacggtgacaaaatcgccactgggtcctttgataaaacttgtaaactctggagtgtggaaacaggaaaatgttaccataccttcaggggtcatacagcagaaatagtgtgtttatcatttaaccctcaaagcacattggtggcgactggaagtatggacacaacagccaaattgtgggacattcagaatggcgaggaagtttacaccttaagaggacattctgccgaaatcatctccttgtcatttaacacctcaggagacagaatcatcacggggtcttttgatcataccgttgtagtgtgggacgctgatactggaaggaaggtaaatatcttaattggtcattgtgctgagattagcagtgcctcattcaattgggattgctctctaatattaactggctctatggacaaaacctgcaagctgtgggatgctacaaatggaaaatgtgtggcaaccttaacaggccatgatgatgaaatactagacagctgctttgattacactggaaagcttattgcaactgcttcagctgatggaacagcaagaattttcagtgctgccacaagaaaatgcattgccaaactggaaggtcatgaaggtgaaatttcaaagatttctttcaaccctcaagggaaccatcttctaactggcagctctgacaaaacggctagaatctgggatgctcagactggccagtgcctccaggttcttgaggggcacactgatgaaatcttttcatgtgctttcaactataaaggcaacatagtcattacaggcagcaaggataatacctgtaggatatggcgttgactgaagga

SEQ ID NO: 254257 - protein, 2623 aa, Artificial Sequence
  derived and/or modified sequence
MKVKGRGITCLLVSFAVICLVATPGGKACPRRCACYMPTEVHCTFRYLTSIPDSIPPNVERINLGYNSLVRLMETDFSGLTKLELLMLHSNGIHTIPDKTFSDLQALQVLKMSYNKVRKLQKDTFYGLRSLTRLHMDHNNIEFINPEVFYGLNFLRLVHLEGNQLTKLHPDTFVSLSYLQIFKISFIKFLYLSDNFLTSLPQEMVSYMPDLDSLYLHGNPWTCDCHLKWLSDWIQEKPDVIKCKKDRSPSSAQQCPLCMNPRTSKGKPLAMVSAAAFQCAKPTIDSSLKSKSLTILEDSSSAFISPQGFMAPFGSLTLNMTDQSGNEANMVCSIQKPSRTSPIAFTEENDYIVLNTSFSTFLVCNIDYGHIQPVWQILALYSDSPLILERSHLLSETPQLYYKYKQVAPKPEDIFTNIEADLRADPSWLMQDQISLQLNRTATTFSTLQIQYSSDAQITLPRAEMRPVKHKWTMISRDNNTKLEHTVLVGGTVGLNCPGQGDPTPHVDWLLADGSKVRAPYVSEDGRILIDKSGKLELQMADSFDTGVYHCISSNYDDADILTYRITVVEPLVEAYQENGIHHTVFIGETLDLPCHSTGIPDASISWVIPGNNVLYQSSRDKKVLNNGTLRILQVTPKDQGYYRCVAANPSGVDFLIFQVSVKMKGQRPLEHDGETEGSGLDESNPIAHLKEPPGAQLRTSALMEAEVGKHTSSTSKRHNYRELTLQRRGDSTHRRFRENRRHFPPSARRIDPQHWAALLEKAKKNAMPDKRENTTVSPPPVVTQLPNIPGEEDDSSGMLALHEEFMVPATKALNLPARTVTADSRTISDSPMTNINYGTEFSPVVNSQILPPEEPTDFKLSTAIKTTAMSKNINPTMSSQIQGTTNQHSSTVFPLLLGATEFQDSDQMGRGREHFQSRPPITVRTMIKDVNVKMLSSTTNKLLLESVNTTNSHQTSVREVSEPRHNHFYSHTTQILSTSTFPSDPHTAAHSQFPIPRNSTVNIPLFRRFGRQRKIGGRGRIISPYRTPVLRRHRYSIFRSTTRGSSEKSTTAFSATVLNVTCLSCLPRERLTTATAALSFPSAAPITFPKADIARVPSEESTTLVQNPLLLLENKPSVEKTTPTIKYFRTEISQVTPTGAVMTYAPTSIPMEKTHKVNASYPRVSSTNEAKRDSVITSSLSGAITKPPMTIIAITRFSRRKIPWQQNFVNNHNPKGRLRNQHKVSLQKSTAVMLPKTSPALPRDKVSPFHFTTLSTSVMQIPSNTLTTAHHTTTKTHNPGSLPTKKELPFPPLNPMLPSIISKDSSTKSIISTQTAIPATTPTFPASVITYETQTERSRAQTIQREQEPQKKNRTDPNISPDQSSGFTTPTAMTPPVLTTAETSVKPSVSAFTHSPPENTTGISSTISFHSRTLNLTDVIEELAQASTQTLKSTIASETTLSSKSHQSTTTRKAIIRHSTIPPFLSSSATLMPVPISPPFTQRAVTDNVATPISGLMTNTVVKLHESSRHNAKPQQLVAEVATSPKVHPNAKFTIGTTHFIYSNLLHSTPMPALTTVKSQNSKLTPSPWAENQFWHKPYSEIAEKGKKPEVSMLATTGLSEATTLVSDWDGQKNTKKSDFDKKPVQEATTSKLLPFDSLSRYIFEKPRIVGGKAASFTIPANSDAFLPCEAVGNPLPTIHWTRVPSGLDLSKRKQNSRVQVLPNGTLSIQRVEIQDRGQYLCSASNLFGTDHLHVTLSVVSYPPRILERRTKEITVHSGSTVELKCRAEGRPSPTVTWILANQTVVSESSQGSRQAVVTVDGTLVLHNLSIYDRGFYKCVASNPGGQDSLLVKIQVIAAPPVILEQRRQVIVGTWGESLKLPCTAKGTPQPSVYWVLSDGTEVKPLQFTNSKLFLFSNGTLYIRNLASSDRGTYECIATSSTGSERRVVMLTMEERVTSPRIEAASQKRTEVNFGDKLLLNCSATGEPKPQIMWRLPSKAVVDQQHRVGSWIHVYPNGSLFIGSVTEKDSGVYLCVARNKMGDDLILMHVSLRLKPAKIDHKQYFRKQVLHGKDFQVDCKASGSPVPEISWSLPDGTMINNAMQADDSGHRTRRYTLFNNGTLYFNKVGVAEEGDYTCYAQNTLGKDEMKVHLTVITAAPRIRQSNKTNKRIKAGDTAVLDCEVTGDPKPKIFWLLPSNDMISFSIDRYTFHANGSLTINKVKLLDSGEYVCVARNPSGDDTKMYKLDVVSKPPLINGLYTNRTVIKATAVRHSKKHFDCRAEGTPSPEVMWIMPDNIFLTAPYYGSRITVHKNGTLEIRNVRLSDSADFICVARNEGGESVLVVQLEVLEMLRRPTFRNPFNEKIVAQLGKSTALNCSVDGNPPPEIIWILPNGTRFSNGPQSYQYLIASNGSFIISKTTREDAGKYRCAARNKVGYIEKLVILEIGQKPVILTYAPGTVKGISGESLSLHCVSDGIPKPNIKWTMPSGYVVDRPQINGKYILHDNGTLVIKEATAYDRGNYICKAQNSVGHTLITVPVMIVAYPPRITNRPPRSIVTRTGAAFQLHCVALGVPKPEITWEMPDHSLLSTASKERTHGSEQLHLQGTLVIQNPQTSDSGIYKCTAKNPLGSDYAATYIQVI

SEQ ID NO: 254258 - protein, 632 aa, Artificial Sequence
  derived and/or modified sequence
MTPPVLTTAETSVKPSVSAFTHSPPENTTGISSTISFHSRTLNLTDVIEELAQASTQTLKSTIASETTLSSKSHQSTTTRKAIIRHSTIPPFLSSSATLMPVPISPPFTQRAVTDNVATPISGLMTNTVVKLHESSRHNAKPQQLVAEVATSPKVHPNAKFTIGTTHFIYSNLLHSTPMPALTTVKSQNSKLTPSPWAENQFWHKPYSEIAEKGKKPEVSMLATTGLSEATTLVSDWDGQKNTKKSDFDKKPVQEATTSKLLPFDSLSRYIFEKPRIVGGKAASFTIPANSDAFLPCEAVGNPLPTIHWTRVPSGLDLSKRKQNSRVQVLPNGTLSIQRVEIQDRGQYLCSASNLFGTDHLHVTLSVVSYPPRILERRTKEITVHSGSTVELKCRAEGRPSPTVTWILANQTVVSESSQGSRQAVVTVDGTLVLHNLSIYDRGFYKCVASNPGGQDSLLVKIQVIAAPPVILEQRRQVIVGTWGESLKLPCTAKGTPQPSVYWVLSDGTEVKPLQFTNSKLFLFSNGTLYIRNLASSDRGTYECIATSSTGSERRVVMLTMEERVTSPRIEAASQKRTEVNFGDKLLLNCSATGEPKPQIMWRLPSKAVVDQQHRVAAGSTSTLMDPCLLDQ

SEQ ID NO: 254259 - DNA, 1899 bp, Artificial Sequence
  derived and/or modified sequence
atgaccccccccgtgctgaccaccgccgagaccagcgtgaagccctcagtcagtgctttcactcacagtccccctgagaatacaactggaatcagcagcactatttcctttcactccagaacactgaacctgactgacgtaatagaggagctggcacaggcttcaacccagaccttaaagtctacaatcgcctccgaaactaccctttctagtaaaagtcaccagagcactacaacccgaaaagcgataatccggcattcaaccatccccccgttcctgagctcctccgctaccctgatgcctgtccccatatctccgcccttcacacagagagcagtgaccgacaacgtggcaaccccaattagcgggctgatgacaaacacagtggtgaagctacacgagagctcccgccacaacgctaagcctcaacaattggtggccgaagtggccacctctcccaaggtgcaccctaatgctaagttcaccattgggacgacccattttatttactctaacttgctacattcaacccctatgcccgcactaacaacagtcaagtcgcagaattctaagcttaccccatcaccttgggcagaaaaccagttctggcacaagccctattctgagatcgccgaaaaaggcaaaaaaccggaggtgtccatgttggctacgaccgggctgtccgaagcaaccaccctggtgagcgactgggacggccaaaagaacactaagaaatccgattttgacaaaaagcccgtccaggaggctacaacctccaaactccttccattcgactccctctcaagatacatctttgagaagccgaggatcgttgggggtaaggcagccagctttacaatacccgctaactctgatgcatttctcccatgcgaagctgtgggcaaccccctgccgaccatccattggacacgggtcccatctggactggatttatctaaacggaaacagaattcacgcgtccaagttttacctaacgggactttgtctattcagagggttgagattcaagatcgtggtcagtatctgtgcagtgcaagcaatctattcgggacagaccatcttcacgtgaccctctctgttgtgagttacccccctcgcatcctagaaaggcgtaccaaggaaatcaccgtgcatagcggttcaactgttgaacttaagtgcagggcggaggggcgacccagcccaacggttacctggattctggctaaccagacagtggtctctgaaagtagtcagggatctcggcaggcggtggtaacagtggatgggacgctggtgctacacaatttatcgatatatgacagagggttctataagtgcgtggccagcaatcccgggggacaggattcgctcttggtcaagatccaggtgatagcggccccaccagtcatcctggaacagaggcggcaggtcatcgttggaacatggggagagagccttaaactgccatgcaccgcaaaagggaccccccagccctcggtgtactgggtgctaagcgatggaactgaagttaaacccttacagttcacaaactcaaagctgttcctgtttagcaatggtaccttgtacatcagaaacctcgcctctagcgacagagggacctacgagtgcatcgccacctcgagtacaggctctgagagaagagtggtcatgctgactatggaggagcgggtcacttcacccaggatcgaagcagccagtcaaaaaagaactgaagtgaactttggggataagcttctgctgaactgtagcgctaccggcgaacctaaaccacagataatgtggaggctgccctctaaggccgtcgtcgatcagcagcaccgggttgctgcgggctcgaccagtaccctgatggatccctgtctgctggaccagtag

SEQ ID NO: 254260 - DNA, 7871 bp, Artificial Sequence
  derived and/or modified sequence
atgaaagtaaagggccgagggattacgtgccttctcgtctcttttgccgtgatttgcctggtggcgactcccggaggaaaggcttgcccaaggcggtgcgcttgctatatgcctaccgaggtccactgcactttccgatatttgacatcgatcccagatagcatacccccaaacgtggaaagaataaacctgggctacaatagcctcgtgaggctgatggagactgatttcagcggcctgaccaagctggagctgttgatgctccattctaatggcatacacacaattccggacaaaaccttctcagaccttcaagctctgcaggtgctgaagatgagctacaataaagttcgtaagctccagaaagacaccttttacggactgcgcagccttactcgcctgcacatggatcacaacaatattgaattcattaacccagaggtgttctatggactcaactttttgaggctcgtgcacctcgaaggcaatcagctaaccaaacttcacccagatacatttgtcagcctgagttatttgcagatattcaaaattagtttcattaagtttctgtatctctcagataacttcctgacatctctaccccaggaaatggtgtcctacatgcccgatctcgacagcctctacctgcacgggaacccgtggacctgcgactgccatctgaagtggctgagcgactggattcaggaaaaacccgacgtgataaagtgtaaaaaggatagaagcccttcaagtgcacagcaatgtcctctgtgtatgaaccctcgtacgagtaaagggaagcctcttgctatggtgagcgcggcagccttccagtgtgctaaaccaactatagactcttcattgaaatctaaatcattgaccattctcgaggatagtagttcagcattcatttcacctcagggcttcatggcaccgttcgggtcgctgacactgaatatgacagaccagagtgggaacgaagccaacatggtatgctctatacagaagccttcaaggacaagtcctatagccttcactgaggaaaatgactacatcgtcctcaacacctccttttcgaccttccttgtctgcaatatcgactatgggcacatccagcctgtctggcagatcttggccttgtattcagatagcccactgatcctggaaaggtctcacctcctgagcgagacaccacagttgtattataagtacaagcaagtggccccaaagcctgaagatatctttaccaacatcgaggctgacctacgagcagacccaagctggctgatgcaggaccaaatttcactgcagctgaatcgtactgcaaccaccttctctacgcttcaaattcagtattccagcgatgcccagataaccctgccaagagccgaaatgagaccagtgaaacacaaatggacgatgatcagcagggacaacaacacgaaattggagcacaccgtgctcgtcggcggaaccgtgggcttgaattgcccaggacagggagatcccacaccgcacgtagactggctgcttgctgatgggtcgaaggtcagagccccatacgtttctgaagacggcaggattctgatcgataaaagtggcaagctggaactgcagatggcagactcctttgacaccggcgtctaccactgcatctctagcaattatgacgatgccgatatactgacctaccgtatcaccgtggtcgaacccttagttgaggcctaccaggagaacggaatccatcacactgtgttcattggagagacacttgacttgccttgtcactcaaccggaatcccagatgcgagtattagttgggtgatcccaggcaataacgttctctaccagagctctagagacaagaaagtgttgaacaatgggactctaagaatcctccaggttaccccaaaggatcaaggatactaccgatgcgttgccgcaaatccatcaggggtggacttcttgattttccaagtgagtgtgaaaatgaagggtcagcgcccactggaacacgacggggaaacagagggctcaggattggacgagtctaaccccatagctcacttaaaggaaccccctggagcccaactgcggacttccgctctgatggaggcagaggtgggcaagcacacctcctccactagcaagcgccacaactaccgcgaactaacgttacagcgaaggggggattctactcaccgcagatttcgagaaaatcgccgacacttccctcccagcgccagacgaattgatccacagcactgggcagccttattggagaaggcaaaaaaaaacgccatgcccgacaaaagagaaaacaccactgtgtcaccgccacctgtggtaacccagttgccaaacatcccaggcgaggaagacgacagctccgggatgctggccttacacgaggagttcatggtgcctgcaacaaaagccttaaacctcccggctagaactgtcaccgccgatagtaggaccatatcagattctcctatgaccaacattaattatgggactgaattctctcccgtggtcaatagtcaaatcctgccgcctgaagagccaacagactttaagctctcgacggcaattaaaactaccgccatgtcaaaaaacatcaaccctacgatgtcctcacagattcagggtaccacaaatcagcactcatctacagttttcccactgctgctcggggctactgagttccaagacagcgatcagatggggagagggcgagaacatttccaaagtagaccacctatcacagttaggactatgattaaggatgtcaacgtcaagatgttgtcatctaccaccaacaagctactcctcgaaagcgtgaatacaaccaactctcaccaaactagtgttcgggaagtgtccgagccaagacacaatcatttttattcccacacgacgcagattctctccaccagcactttccccagcgatcctcacacagcagctcacagtcaatttccaatacctcgaaactcaaccgtgaatatccccctcttccggaggttcgggaggcagcgtaaaattggaggtcgtggaaggatcattagcccctaccgaacccctgtgcttaggcgacataggtattctatcttcaggagcactactcgaggctcttccgagaaatccactactgccttctcagcgaccgtccttaacgtgacctgcctaagctgtttgccacgggagcggctgacgactgccaccgccgctctgagctttccctccgcagcaccgataaccttccccaaggccgatattgccagagttccaagtgaggaatcaacaaccctggtgcagaaccccctcctgttgttggagaataagccttcagttgagaagaccacgccaactataaagtacttccgcaccgagatcagccaggtgaccccgaccggcgcagtgatgacttacgccccaacttcgatcccaatggaaaagacccataaggtgaatgctagttacccacgggtgagtagcactaatgaggccaaacgagatagtgtaattacctcctccctctccggcgctattaccaagccccctatgacaataattgctattacaaggtttagccggcgaaaaattccttggcagcagaatttcgtcaacaaccacaaccccaagggcaggcttcgaaatcaacacaaggtttccctgcagaagtcaacagccgttatgttgcccaaaacctcaccggctttgcccagggacaaggttagtccctttcacttcacaaccctctccacgtcagtgatgcaaattccatccaacacccttacaacagcccatcataccacaaccaagacgcataatccagggagtttaccgacaaagaaagaactgccctttccacccctcaaccccatgctgcccagcattatttccaaagactcctctaccaaatcaataataagtactcagaccgcaatccctgcaacaacgcctacatttcctgcctccgtgattacatacgagacgcagacagaaagatcacgagcacagacaatccaaagggaacaggagccacagaagaagaaccggacagatcctaatatttctccagatcagtcatctggtttcaccacaccaacagcaatgaccccaccagtcctgaccaccgctgaaacaagcgttaaaccaagtgtctctgcattcacacacagtcccccagaaaatacaacagggataagctccactatatcattccatagccgcaccctgaatctgacagacgtgatcgaggagctggcacaggccagcacccagactctgaagtccactatcgccagtgagaccacccttagcagcaaatctcaccagtccacaacaaccagaaaggccataattcggcacagcactatccctccctttctctcctcgtcagccacattgatgcccgtccccattagccccccattcacccagagagccgtgacggataacgtggctacccccatatcaggcttgatgaccaataccgttgtcaagttgcacgaatcgagccggcataacgctaagccccagcagctcgttgctgaggtagccaccagtccgaaagtgcacccaaacgctaaattcaccatcggcactacccactttatttactcgaacttgcttcactctacacctatgcccgcactgaccactgtgaagagtcagaactctaagctgacccccagcccatgggccgagaaccagttctggcacaagccgtactcggaaattgctgaaaaaggaaaaaagcctgaagtcagtatgctagccactacaggactgagcgaagcgaccacccttgtgtccgattgggacggacagaagaatacaaagaaatcagacttcgacaagaagcctgtccaagaagcaaccacatcgaagctcctacctttcgattccctgtccagatacatattcgaaaaacccagaatagtgggtgggaaggcagctagtttcacaatcccagctaatagcgacgcattcctgccgtgcgaagccgtggggaatccgttgccaactattcactggactcgtgtccctagtggcctggacctttctaagagaaagcaaaactctcgggtgcaagttctccccaacggtaccctgagtatccagagggtggagatacaagatagagggcagtacttatgtagtgctagtaatttattcggcaccgatcacttacacgtcacactgagtgtggtctcctatcctccaaggatcttggagagaaggacaaaagagattactgtgcatagcggttccacagtcgagcttaaatgcagagccgagggtagaccatcacccactgtgacctggattttagcgaaccagactgtggtgtccgagagcagccaaggaagcagacaggctgtagtcaccgtcgacggaaccctggttcttcataatctgtcaatttatgatcgcggtttttataaatgcgtggcctctaacccgggagggcaggattctttactggtcaagattcaggtcattgctgcccctcccgttatcctggagcagcgcagacaagtgatcgttggcacctggggcgaatcccttaagttgccttgcactgccaaaggcacccctcagccatcagtctattgggtcctcagcgatggcaccgaggtgaaacctctgcaattcaccaactccaagctcttcctcttcagcaacggtaccttgtacatccgcaacctggcaagtagcgaccggggtacttacgaatgtatcgccaccagttccacaggctcggagcggagggtggtgatgctcacaatggaggaacgggtgacctcaccccgtatcgaggccgcatcccagaaacgtaccgaggtcaacttcggggacaagctacttctcaattgcagcgccacaggggaacctaaacctcaaatcatgtggcggttgccctccaaagcagttgtggaccagcaacatcgcgttggcagctggatacatgtttatccaaacgggagtctcttcataggctcggttacagagaaagacagcggagtgtacctatgcgttgctcgcaacaagatgggagacgatctgatcttgatgcatgtctcactgagactgaagcccgctaagattgaccacaagcagtatttccggaagcaagtcctccacggtaaagacttccaggtcgattgcaaggctagtggatctcctgtgccggagattagctggtcattgcctgatggcacaatgattaataatgcaatgcaggcagatgacagtggacaccggacccgtcggtacaccttgttcaataacggaacactgtactttaacaaagtcggggtggctgaggagggcgactacacctgttatgcgcagaatacattgggcaaagacgagatgaaggtacacctcaccgtaatcacggccgcaccccgtatccggcagagcaacaagacaaataaacgcataaaggccggagacactgccgtccttgattgtgaagtcactggagaccctaaaccaaagatcttttggctgcttccctcaaacgacatgatttccttctctatcgacagatacactttccacgccaacggatcacttactatcaacaaggtaaagttgctggattccggcgaatatgtgtgcgtcgcgaggaatccaagtggagatgacaccaaaatgtacaaattagacgtggtgtcaaaacctcccctcatcaatggtctttacacgaatagaactgtcataaaagctactgcagttaggcattcaaaaaaacacttcgactgtcgcgctgagggcaccccctcaccagaggttatgtggattatgccagataatatctttttgacagccccatactacgggagtagaatcaccgtccataaaaatgggactcttgagattcgaaatgtcagactgagtgattctgccgatttcatttgcgtcgccagaaatgagggaggcgagagcgtacttgtcgtgcagctggaggttctggaaatgcttcgcaggccaacatttaggaacccctttaacgagaaaatcgttgcacagcttgggaaatcgactgccctgaactgctccgtcgacggcaatccaccacccgagatcatctggatcctgcctaatgggaccagattctcaaatggtccgcagtcttatcaatacctgatcgccagcaatggttccttcatcattagtaaaactacgagagaggacgccggaaaatataggtgcgctgctcggaacaaggtggggtatatagaaaagctcgttatcctcgagatcgggcagaaacctgtgatccttacctatgccccaggtactgtgaaggggatctcaggtgagagcctcagcttgcactgtgtgtccgatggaatccccaagccaaatatcaaatggacaatgccgtcaggctacgtggttgaccgccctcagatcaatgggaagtacatcctgcatgataatggcaccctggtgatcaaagaagcgaccgcgtacgaccgcggaaattatatatgcaaggcccagaattctgtcggccacaccctgattacagtgcctgtgatgattgtggcttaccccccacggattaccaacagacccccaaggagcattgtgaccagaacaggcgctgcctttcaactccattgtgtggccctgggcgtgccaaaaccggagataacatgggaaatgccagaccactcgctgctgagcacagcaagcaaagaacgtactcacggtagtgagcagctccatctgcagggaaccctcgtcattcagaaccctcagacgtccgattccgggatctacaagtgtacagccaagaatccattgggtagcgactacgcggcaacttacatccaggtcattta

SEQ ID NO: 254261 - DNA, 1899 bp, Artificial Sequence
  derived and/or modified sequence
atgaccccacctgtcctgactactgctgaaacctccgtcaagccctctgtttctgcctttacccatagcccccctgagaacaccactggcatatcatcaactatttccttccattctagaaccctcaatctgactgatgtgattgaagagttggctcaagctagcactcagaccctgaagtccactatagctagcgagaccacactatcatctaagtctcatcaaagcactacaacgcgtaaggcaattatccgtcactctacaatccctcctttcctgtcctcatctgctactttaatgccagtccctatatctccaccatttacccagcgggctgttacagataacgtggccacacctatcagcggcctgatgacgaatactgtggtgaaattacatgagtcaagcagacataatgccaaaccccagcagcttgtggccgaagtggctacttctcccaaggtgcacccgaatgctaagtttaccattggcaccactcactttatttattcaaatttgctgcatagtaccccaatgcctgccctgacaactgtgaagagtcagaatagcaaactgacgcctagcccatgggccgagaaccaattttggcacaagccctactctgaaatcgcagagaaagggaaaaagcctgaggtgagtatgctagccacgaccggactctccgaggccaccactttagtttccgattgggacggacagaaaaatacaaagaaatcggatttcgataagaagccagtgcaggaggcaaccacaagtaaattgctcccatttgattctctctctcgttacatctttgaaaaaccgagaatagtcggcggtaaggcagcgagttttaccatccctgccaactctgacgcgttcctaccctgtgaagccgttggcaaccctctgcccacaatccactggacgcgggtgccctccggtctggatctcagtaaaagaaagcagaactcccgggtgcaagtcctgcctaatggcacactctccatccagcgagtggaaattcaggacaggggacagtacctctgtagcgccagcaacctgttcggcaccgaccacctccatgtgaccctctctgtagtgtcttacccaccaaggattcttgagcgcagaacaaaagagattactgtgcacagtggttctaccgtcgagctgaaatgtagggccgaagggagaccttcccccaccgtcacatggattctggccaatcagaccgtggtttcagagagctcgcagggctctagacaggctgtggtaactgttgatggcacactcgtcctgcacaacttgtccatctatgatagagggttctacaagtgcgttgctagcaatccaggaggccaagactctctgctggtgaaaatacaagttatcgcggctcctccagtcatcctggagcagcgaagacaagttatcgttggtacgtggggagagtcactgaagctcccttgcacagcgaaaggtactcctcaaccttcagtgtactgggtgctgtccgatggcaccgaggtgaagcctctgcagtttaccaattcgaagctgtttctgttttccaacgggacactgtacatacggaatctggcatcatcggatagaggtacatatgaatgcattgcaactagctccactggctccgaacgcagagtggtaatgctcaccatggaggagcgggttacgtctccccgtattgaagctgcaagccaaaaaagaaccgaagtcaattttggggacaagttgcttctgaattgcagcgccactggggagcctaagccacagatcatgtggagactgccatcaaaggccgtggtagatcagcagcacagggtggccgctggctctacctctactctgatggatccatgtctcctagatcagtag

SEQ ID NO: 254262 - DNA, 7872 bp, Artificial Sequence
  derived and/or modified sequence
atgaaagtgaagggcagaggtatcacatgtctgctagtgagcttcgccgtgatatgccttgtggccactcctggaggaaaagcctgcccaaggcgctgtgcctgctatatgcccacagaagttcactgtacatttaggtatctgacatcaatcccagatagtattccaccaaatgtggagaggatcaacctgggatacaattcgctggttaggcttatggaaaccgatttctctggccttacgaaactggaactgctgatgctgcattcgaacggaatccacactatccccgataagacgttctcagacttgcaggcgctgcaggtgctgaagatgtcgtacaacaaggtgagaaagctccagaaagacaccttttacggactccggtcccttacaagattgcatatggaccataataatatcgaattcattaatcccgaagtgttttatgggctgaattttctgcgcctggttcatcttgaaggcaaccagctcaccaaactacatcctgatacattcgtgagtctatcgtatctgcagattttcaagataagcttcattaaatttctctacctgtcagataactttttgacctcactccctcaagaaatggtgagctacatgccagacttggacagcctgtatttacacggaaatccttggacctgcgactgccacctgaagtggctgtcagattggatccaggaaaaaccagacgtcattaagtgcaaaaaggaccgcagccccagcagtgctcagcaatgccccctctgtatgaaccctaggacctctaaaggcaaacccctggccatggtttctgccgccgccttccaatgtgccaagcctactatagacagtagtcttaagagtaagagtctgaccatcctggaggatagcagcagcgcattcataagcccgcagggctttatggctcctttcggatccctcacattgaatatgacggatcaaagtggtaatgaagccaacatggtgtgctctatccagaaaccttctcgcactagccctatagcctttaccgaggagaatgactacattgtgctgaatacctcattctcaacatttcttgtgtgtaacattgattacggacacattcagcctgtgtggcagattctggctctctactctgacagcccccttatccttgagaggagccatctgttgagcgagaccccacagctgtactacaaatacaagcaggtcgccccaaagcccgaggatatcttcaccaacattgaagcggacctgagggccgacccaagctggctgatgcaggatcaaatcagcctgcagctgaatagaacagcgaccacttttagtacactgcagattcaatattcctctgacgctcaaataacacttccacgggcagagatgcgacctgtgaagcacaaatggactatgatctcgagggacaataatacaaagctggaacacaccgtcctcgtcggaggcaccgtcgggctaaactgtcccggacaaggagacccaactccacatgtggattggctgctagctgacggcagcaaagttcgagccccttatgtgagcgaagatggccgcatcttgattgacaagtccggaaagcttgagctgcagatggcagactcttttgatacaggcgtatatcattgtattagttctaattatgatgatgctgacattttgacctacaggatcacagtcgtcgagccgcttgtcgaggcataccaagagaacggcatccatcacactgtctttatcggggagactttggacttgccttgccattccacaggaatccccgacgcctcaatcagctgggttattcccggaaacaacgtattatatcagtctagtagagataaaaaggtcctaaataacggaactctccgaatcctgcaagtaacacctaaagatcagggatattacagatgtgttgccgcaaaccctagcggagtggatttcttaatcttccaagtgagcgtgaagatgaaaggccagaggcctctcgaacatgatggcgaaacagaagggtcaggccttgatgaatccaatcccatcgcgcacctgaaagagcccccaggcgctcaactccgtacaagcgcccttatggaggcagaagttggcaaacatacaagttctacgtccaagaggcataactacagagagctgaccttgcagagaagaggcgactcaacccatagacgtttccgagaaaaccgtagacacttccctccttctgcacgacgcatagaccctcagcactgggccgctctgctcgagaaggccaagaaaaatgccatgccagataaacgcgagaacacaaccgtgagcccgccccccgtggtgacacaactccccaatatccccggggaggaggacgatagttcaggcatgttagccctccacgaggagttcatggtgcctgctacaaaggccctgaacctcccagctcgaaccgtcactgccgactccagaacgatttccgactctcccatgaccaacattaactacggtacagagttctctcccgtggtcaacagccagattctcccgcccgaggagcccacagattttaaactatctactgcaattaaaacaactgcgatgagtaaaaatatcaacccgactatgtctagccagattcaaggtactaccaatcaacattcctctacagttttcccgcttctgctaggcgcaacggaatttcaagactctgatcaaatgggaagaggaagagaacatttccagagtagaccgcccattaccgtgaggacaatgatcaaggatgtgaatgtgaaaatgctgagttctacaaccaacaaactgcttttagaaagcgttaacaccactaattcccatcaaacgtccgttagagaagttagcgagcctagacacaaccacttctatagccacacaacccagatacttagcaccagtacgtttcccagcgacccacacacagccgcccactcacaatttcccatacctagaaacagcacagtcaatatcccactgttccgccggttcgggaggcaacgtaaaattggtggccgaggccgaattatttccccctatagaacccccgtcttgcgacgccaccgctattcaatttttcgatcaactaccagaggctcttcagagaaaagcaccaccgctttctccgcaaccgtgcttaacgttacatgcctgagctgcttaccccgtgaacgcctaaccaccgcaacagcagctctaagttttcccagcgctgcccccataacgttccctaaagccgacatagctagagtcccatctgaggaatccacgacacttgtccagaatcctctgttgctgttagagaacaagccttctgtcgaaaaaaccacaccaaccatcaagtactttaggacagagattagccaggtgaccccaacaggtgcagtgatgacctacgccccgacatctatccctatggagaaaacgcacaaagtgaacgcttcgtacccaagggtttctagcaccaacgaagcaaagcgcgatagcgtgatcacttcttccctctccggagccataactaagcctcccatgacaattatcgctattacccgatttagccggcgaaaaatcccttggcaacagaacttcgtaaataatcacaatccaaaagggcgtctgagaaaccagcacaaagtcagcctgcagaagtcaacagcggtcatgctcccaaaaacttcccccgcactccctagggacaaggtgtccccattccatttcactacattatctacctcagtaatgcagataccgagcaacaccctaactaccgctcatcacactactactaagacccataatccaggctctctgcctaccaaaaaagagctacctttcccccccttgaatcccatgctgccctcaattatcagcaaggactcatctaccaagagcatcattagcacccaaacagcaatccctgctacaacacctacctttcccgcttcggtgatcacatatgagactcagaccgaacgatcccgcgcacaaacaattcaacgagagcaggagccacagaaaaaaaaccggaccgaccctaatatctctccagaccagagctccggtttcacgacccctactgcaatgacccctccagtattaaccacagctgaaacatctgtgaagccttcggtgtcagcattcactcactctccacctgagaacaccaccggtatctcgtcgaccataagctttcatagcaggacactcaatctgaccgacgtgatagaggagctcgcccaggcatctacccaaacgctgaaaagcactattgcttctgagaccaccctgtcatcaaagtcgcaccagtctactaccacacgcaaggctatcattcgccactcgactattcccccttttctgtcaagctctgcaacactgatgcctgttcctatatctccccccttcactcagagagcagtgaccgataatgtcgctacccctatcagcggcctgatgaccaacaccgttgtgaagctgcatgaaagctcgcggcacaacgcaaagccccaacaacttgtcgccgaggtcgccacgtccccaaaagtccaccccaatgcaaagttcactattggaactactcacttcatatattccaacctgctgcacagtacccctatgcccgccctcaccacggtaaaatcacaaaattctaaactcaccccatctccctgggccgagaaccaattttggcacaagccttactcggaaatcgcagaaaagggaaagaagcctgaagttagcatgctcgcgactacgggattaagcgaggccacaacactcgtaagtgactgggacggccagaaaaacacaaagaaatcagacttcgacaaaaagccggtccaggaggccactactagcaagcttctcccatttgactccctgagtcggtacatcttcgagaaaccccgcattgtcggaggaaaggccgccagttttaccatcccagccaacagcgatgcattcctgccctgcgaagctgttggcaacccactgccgactattcactggacaagggtcccatcgggcctcgatctgtcaaagcgcaaacaaaactcaagggtccaggtcttgccaaatggcaccctgagcatccagagggtggaaattcaagatcgaggacagtatctctgctcagcctctaacttattcggcaccgatcacctgcacgtgactttgtctgttgtaagctatccccctaggatccttgagcgacggacgaaggagattaccgtgcactctgggtcgactgtggagctgaaatgtagggctgagggaagaccttcccctactgtgacatggatcctggcaaaccagaccgtcgtttctgagtcatcccagggctctcgccaggctgtggtgacagtggacggcacattggtgctgcacaacctcagcatctacgatagaggcttctacaaatgcgtggctagtaatcctgggggccaggactctcttcttgtgaaaatccaggtgatagccgcaccccccgtgatcttagaacagagacgccaggtcatcgtcggcacctggggcgaatctctcaagctcccatgcacagccaagggaaccccgcagccgtcggtgtactgggttctatccgacggaactgaggtgaaaccccttcagttcaccaattcgaagctgtttctgttcagcaatggcactttgtatatccgtaatctcgctagcagtgatagaggtacctatgagtgcattgccacaagctccaccggtagcgaacgtagggtcgtcatgttaacgatggaggaacgagttacatcacctcgcatcgaagctgcgagtcagaagcgaacggaagtgaattttggggacaagctgttattaaattgctcagcaacaggcgaacccaagccccagatcatgtggaggcttccctctaaggcagtggtcgaccagcaacatagggtgggatcttggatacatgtttatccaaatggctcactctttataggaagcgtgactgagaaagattcaggcgtctatctttgcgtggccagaaataaaatgggcgacgatcttattttgatgcatgtctcccttcggcttaaaccagctaagatcgaccacaagcagtacttccgcaagcaggtgcttcacgggaaggacttccaggtggactgcaaagcctcaggtagccccgtcccagagatttcatggagcctgcccgacgggaccatgatcaataatgccatgcaggccgatgactcgggtcaccgaacaagaaggtacacattgttcaataatgggacattgtatttcaacaaagtcggagtggctgaagaaggcgactacacttgttatgcgcagaataccctcggaaaagacgagatgaaagtgcatctgactgtaatcactgcagccccaagaatacgtcaatcgaacaagacaaacaagcgaatcaaggctggtgataccgcagtgctcgattgcgaggtcacgggggatcccaagcccaaaattttctggttgctaccctccaatgacatgattagtttttcgatcgaccgatatacctttcacgctaacgggtccctgacgatcaacaaggtgaagctcttggattccggggagtacgtctgtgttgcgcgcaatcccagtggggatgacacgaagatgtacaaactcgatgtcgtcagcaaaccccccctaatcaatggattgtacacaaataggacggttatcaaggctacagcagtacgtcattctaagaaacatttcgactgcagagccgagggcaccccatctcccgaggtgatgtggatcatgcccgataacattttcctcaccgcgccttattatggatctaggatcacagtgcacaaaaacggcaccttggaaatacgaaatgtcaggctctccgactcagctgacttcatttgcgtcgcaaggaacgagggcggggaaagcgttctagtggtccaactggaagtgttggaaatgctgagacgacccacctttcgaaacccctttaatgaaaaaatcgttgcccagctgggaaaaagcacggcattgaactgctctgtcgacggaaaccccccgcctgagatcatttggatcttacccaacggaactagattcagtaatgggccgcagtcttaccaatatcttatcgccagtaacggctccttcattatttccaaaaccactcgtgaggacgcaggaaagtaccggtgcgctgcgagaaacaaagtgggctatatagaaaaacttgtcattttagagattgggcagaaacctgttatcctgacctatgcacccgggaccgtcaaggggatctctggggagtcactaagcctccactgcgtgtctgatggcattcccaagcccaacatcaaatggaccatgccatctggatacgtggtggacagaccccaaatcaacggtaaatatatccttcacgataacggcaccctcgtgatcaaggaggcaacagcttacgacaggggaaactatatatgtaaggcacagaattccgtcggtcatactctgatcaccgtgcccgtcatgattgtagcttatccacctcgaattaccaatcgacccccgcggagtatagtcactcgtacaggcgcagcatttcaactacactgcgtggctctcggcgtgcctaaaccagaaatcacctgggagatgccggaccatagtctgctctcaacagcctctaaagagcgtactcacggatctgaacagttacacctgcaaggtaccctggtcatccagaaccctcagacatccgacagcgggatctacaagtgcaccgcaaaaaaccccttaggaagcgactatgccgccacgtatatccaggtgatctag

SEQ ID NO: 254263 - DNA, 1899 bp, Artificial Sequence
  derived and/or modified sequence
atgactccccccgttttaacgacagcagaaacatcagtgaagcccagtgtatccgcctttacccactctccccctgagaatactaccggcatcagctccaccataagctttcactctcgaacgctcaacctgaccgacgtgatagaagagctcgctcaggcctccacgcagactctgaaatccacgatcgcttcagagaccaccctttcgagtaaaagtcatcaatcaaccactactcgaaaagcgattatccgccattccaccatccccccatttctgtccagctcggctaccctaatgccagtgcccatttccccacccttcacccagagagccgtcacagacaatgttgccactccgatttctggacttatgacaaatactgtggtgaaactgcatgagtcctctcggcataatgccaaacctcaacagctagtcgccgaagtcgctaccagtccaaaagtgcaccccaatgctaagtttacgatcggcacaactcactttatctacagtaatctccttcatagcactccaatgccagcactcaccaccgtgaagtctcagaattctaaactgacaccatccccttgggcagaaaaccagttctggcataagccttatagtgagatcgccgaaaaaggtaaaaaacccgaagtgtctatgctggccaccaccggcttgtctgaagctactactttagtgtctgactgggatggccaaaaaaatacgaagaagagtgacttcgataagaagcctgtgcaagaagccacgacctctaaattgctccctttcgacagcttgagcagatacattttcgagaagccccgcatagtggggggcaaagccgcctctttcacgattcctgccaatagcgatgcctttctcccttgcgaggcagtcggaaatccacttcctacaatccactggacacgcgtaccatccgggcttgatctctctaaacggaagcaaaactctcgcgtacaggtgctccccaacggcacacttagcatccagagagtggagatccaggatagaggacaatacctgtgttcagcttccaacctatttggcactgaccaccttcatgtcaccctcagcgtcgtatcctatcctcctagaattttggaacgcagaacaaaagagataacagtgcactccggctccactgtcgagctgaaatgccgcgccgaggggcggccatcacctaccgtgacatggattctggcaaatcagacagtcgtgtcagagtcaagccagggtagccgacaagcggtggttaccgtggacggaaccctggtgctgcataacctgtccatctacgaccgaggattctataagtgcgtcgccagcaaccccggaggacaggactcgctgctggtaaaaatccaagttatcgcagcccctcctgtcattctggaacaacggagacaggttatcgtcggcacctggggagaatcgctcaaactcccatgtactgccaaaggcactccacagcccagtgtctactgggtgctctctgatggtaccgaagtgaagccactccagtttaccaactctaagctgtttctcttctctaatggaacattgtatatcaggaacctagccagctctgacagaggaacatatgagtgcatcgctacatctagtactggcagtgaaagacgggttgtaatgctcaccatggaggagagagtaacttctccccggatcgaagccgcaagccagaaacgaaccgaggtgaactttggcgataagttgctgctcaattgctccgccactggggagcctaagccccagattatgtggcgactgccttccaaagccgtggttgatcaacagcaccgggtggcagcaggctcaacttctaccctgatggacccatgtctactcgaccaatag

SEQ ID NO: 254264 - DNA, 7872 bp, Artificial Sequence
  derived and/or modified sequence
atgaaagtgaaaggtcggggtattacatgcttactcgtgagcttcgcagttatttgcctcgtggctacaccaggcggtaaagcctgtcctagacgatgtgcctgctatatgcccactgaggttcattgcacttttcgatacttaacttctatacccgactccattccaccaaacgtcgaacgtatcaatttggggtacaactcattggtccgtctgatggagaccgacttctcagggctaactaaactggagctccttatgctgcactccaatggaatccatacaattccagataaaaccttttcagatctacaagcactccaagttctcaaaatgagctataacaaagtgagaaaactacaaaaggacactttttacggcttgcgatctctgacgcgacttcatatggaccataacaacatcgagttcataaatcctgaagtcttctacgggctcaatttcctcaggttggtgcacctggagggcaaccagctcacaaaactgcaccccgacacctttgtatcactgagttacttgcaaatatttaaaatctcatttatcaaatttctgtaccttagcgataacttcttgacctctctaccacaggagatggtctcctacatgcccgacctcgattccttatacctgcatggaaacccctggacatgtgactgtcatctgaaatggctcagcgattggatacaagagaagcccgatgtcattaaatgcaagaaggacagaagtccctcctccgcacagcagtgccccctgtgcatgaaccccagaacctccaagggaaaaccactagccatggtgtcagccgccgcctttcagtgcgccaaacccactattgacagttccctgaaatctaagagcctgacaatcctggaagatagttcttcagctttcatttctccccaaggcttcatggcacctttcggatcgttaactctcaacatgaccgaccagtctgggaacgaggccaatatggtgtgttctatccaaaaaccttctcggacctctccaattgcattcacagaagagaacgactatatagtcctcaataccagtttttctaccttcctcgtttgcaatattgattacggacacatacagcccgtttggcagatactggcactctacagcgactccccattgatcctggagcgaagtcatcttttgtcagaaactccccaactgtattataagtacaaacaagtcgctccaaagccagaggatatctttacaaacatagaagcagacttaagggccgatcccagctggttgatgcaagatcaaatctccctccagctcaacagaactgccaccacatttagcactctccagatccagtactcttcagacgcccagatcactttaccaagagccgaaatgcgccctgtgaaacacaaatggactatgatctcgagggataataacacgaagcttgagcatacagtgctcgtgggcggaactgtaggactgaactgccctggccagggggaccccactcctcacgtggattggctgttggcggatggatctaaggttagagctccttacgtgtcggaggacggcagaatccttatagataaatcaggcaagctcgaactacagatggctgattcctttgatactggtgtgtaccactgcatttccagcaactacgatgacgcggacattctgacatacagaataaccgtagttgagcctctagtggaagcttaccaagaaaacgggattcaccacacggtcttcatcggagaaactcttgacctgccatgtcattcaactggtatccccgacgcctcaatcagctgggttattcccggaaacaacgtattatatcagtctagtagagataaaaaggtcctaaataacggaactctccgaatcctgcaagtaacacctaaagatcagggatattacagatgtgttgccgcaaaccctagcggagtggatttcttaatcttccaagtgagcgtgaagatgaaaggccagaggcctctcgaacatgatggcgaaacagaagggtcaggccttgatgaatccaatcccatcgcgcacctgaaagagcccccaggcgctcaactccgtacatcagccttaatggaagccgaggtgggcaagcacacctcttcaacttcgaaacgccataactaccgcgaactcacactgcaacgaagaggagatagcacccacaggcgcttccgcgagaatagaaggcacttcccaccctcagcacgtcgaatcgatccacagcactgggcagccctgcttgaaaaggctaagaagaatgccatgcccgataaaagagagaatactaccgttagcccccctccagtcgtaacacaactccccaatatccccggagaagaagatgacagttccggcatgttggccttacacgaggaatttatggtgcccgccactaaagcattgaatctacctgcccgcacagtaaccgctgacagcagaactatttccgattccccaatgactaacatcaattacggaactgaattttctccagttgtgaactctcaaattctcccccctgaagagcctacggattttaagttatccacagccattaaaacaaccgcaatgagcaaaaacataaatcctacaatgagcagtcaaattcagggcacgacaaatcaacacagttcaacagtctttccgctcctcctgggagccactgagtttcaagattctgatcaaatgggccgtggacgggaacacttccagagtcgccctcctatcaccgtccggaccatgataaaggatgtgaacgtaaagatgctgtcctcaactaccaataaactattactggagtccgttaataccaccaacagtcaccagaccagtgtgcgtgaagtttcagaaccgcgccataaccacttttattcccatactacccaaattctctctacctccacctttccctctgatccccatacggccgcccattcacagtttccaatacctcgcaatagcacagtcaatatcccactgttccgccggttcgggaggcaacgtaaaattggtggccgaggccgaattatttccccctatagaacccccgtcttgcgacgccaccgctattcaatttttcgatcaactaccagaggctcttcagagaaaagcaccaccgctttctccgcaaccgtgcttaacgttacatgcctgagctgcttaccccgtgaacgcctaaccaccgcaacagcagctctaagttttcccagcgctgcccccataacgttccctaaagccgacatagctagagtcccatctgaggaaagcacgacactggtccaaaatcccctgttactcctggaaaacaaacctagcgtggaaaagacaactccaactataaaatatttccgaacagaaatctcacaggtcaccccaaccggagccgtgatgacctatgcccctaccagcatccctatggaaaaaactcacaaggttaacgcatcctacccccgggtcagtagcacaaatgaggccaagagggacagtgttatcacatcttctttatcaggcgcaattaccaagccaccgatgacaatcatagccatcactcgattctcccgcagaaagatcccttggcagcagaacttcgtaaacaatcataacccaaaaggaagactgagaaatcagcacaaagtatccttgcaaaagtctaccgctgtcatgttaccaaagacctcccccgccttgcctcgcgacaaagtgtctcctttccattttaccactctgagcaccagcgtcatgcagattccctctaataccttgaccacagcccatcatacaacaacgaagacccataacccaggctcgcttcccaccaaaaaggaactccccttcccacctctgaacccgatgttgcccagcatcatcagtaaagactccagtaccaagagtatcatttcaacccaaacagctatccccgccactactccaaccttcccagcatcagttatcacctatgagacccaaaccgaacggtccagggcccagacaattcagcgcgaacaggaaccacagaaaaaaaatcgaacagaccctaatatcagtccggaccaaagctccggctttacaactccaacagctatgacccctccagtcttaacaaccgctgaaacatccgtgaagccctcagtgtctgcctttacccattcgccccccgagaatacgaccggaatatctagtacaatttcatttcactctcgcacattaaacctcaccgatgttatcgaagagctggcccaagcaagtacccagacactgaagagcactatcgctagcgaaaccactctgagttctaaaagtcatcagtccaccacaacccggaaggcaatcatccgccacagtaccatccctcccttcctgtccagtagcgctaccctcatgcccgtcccgatctcccctccgtttactcagcgcgccgtcactgacaatgtggccacccccattagcgggttaatgacaaataccgtggtcaagctccatgaaagctctagacataatgcgaagccccagcaattagtcgctgaagtcgcgacgtccccaaaagtgcacccaaacgccaagttcaccataggcacaactcatttcatctactctaatcttttgcactcaacacctatgccggccttgacaacagtgaagtcccagaattctaaactgacaccatccccatgggcggaaaaccagttctggcataaaccctattcagaaattgccgaaaagggcaagaaacccgaggtctcaatgctagccacaacaggtttatctgaggcgacaacattggtatccgattgggatggccagaagaataccaagaagtcagatttcgacaaaaagccagttcaggaggcaacaaccagcaagctcttaccattcgactccctttcccgttacatatttgagaaacctagaatcgtcggcggaaaagccgcttcttttactatccccgcaaattcagatgcatttcttccttgcgaggctgtaggtaatcctctgccaacaatccattggacgcgcgtgccttctgggctcgaccttagcaaaagaaagcagaacagccgagtgcaggtgctgccaaatgggaccctgagtatccagagggtagagatccaagaccggggccaatatctgtgttcagcctcgaacctattcggtactgaccacttacatgtaacgcttagcgtggtatcttatccaccaagaatcttagaaaggaggaccaaagagataactgtacactccggatccaccgtggagttgaaatgccgggcagagggaagacctagccctacagtgacgtggattctcgcaaatcagactgtggtgtccgaatcctctcagggctccagacaggctgttgtcacggtggacgggactctggtactgcataatctctcaatttacgatcggggattttataagtgcgtggcctcaaaccctggcgggcaggactctcttctcgtcaaaatacaagttattgctgcaccccccgtaatcttagagcaacgaaggcaagtaatcgtcggaacttggggggagtcacttaaactcccatgtaccgctaaaggcaccccacaaccttctgtctactgggtgttgagcgatggaactgaggtcaaacccctgcagttcaccaactccaagctcttcctgtttagcaatggaacgctctatattagaaatcttgcctcttctgataggggcacatatgaatgcatcgctactagttcaaccgggagcgagcgacgagtcgtgatgttgacgatggaagaaagggtaacatctcccagaattgaggctgccagccaaaaacgtactgaggtgaatttcggagacaagctacttctcaactgtagcgcaacaggcgagcctaaacctcaaataatgtggagactccccagcaaagccgtggtggatcaacagcacagagtaggaagttggattcacgtgtatccaaatggatccttgtttatcggcagtgtgacagaaaaagactccggagtctacttatgcgtggcacggaacaagatgggtgacgacctcattcttatgcacgttagcctccgactaaagcccgctaaaatcgaccataagcagtattttcggaagcaggttttacacggtaaggattttcaagtggactgtaaagctagcggaagccctgtaccagaaatcagttggtctctgccggacgggacgatgattaacaacgctatgcaggctgacgattcaggccatagaactcgcagatatactctgttcaacaatggtacactctattttaataaggtcggagtggctgaggaaggggactacacgtgctatgcccaaaataccctggggaaagacgagatgaaagtacatcttactgttattaccgctgcaccaagaattagacaaagcaataagacaaacaagaggatcaaggccggcgacactgcagtgctggattgtgaagtcactggagacccgaaaccgaagatcttttggctcctcccgagtaatgatatgatctcattttctattgatcggtatacctttcatgcaaatgggtccctcacaatcaacaaagtgaaactgctggactccggggaatatgtatgcgtggccagaaacccctcaggggacgacactaaaatgtataaacttgatgtggtgtccaaaccacccctgatcaacggactttacaccaatcggactgtcattaaagctactgccgtgcgccactccaaaaaacactttgattgcagagccgaaggaacaccctccccagaagtgatgtggattatgcccgacaacatctttctaaccgccccctattacgggtctaggatcaccgtccataaaaacggaaccttagagattaggaacgtgcgactgagcgactcagccgatttcatttgtgtggcgcggaatgaaggaggtgaatccgtcctagttgtgcagctggaagtgctcgaaatgctgcggagaccaacctttagaaaccccttcaatgaaaagatcgtcgcgcagttgggcaagtcgaccgcattaaattgttctgttgatggtaacccacccccggagattatttggatacttcctaacggtacaagattttccaatggcccacagtcataccaatatctgattgcaagtaacggctctttcatcatatcaaagactacacgggaagatgcaggaaaataccgttgcgcagctcgcaataaagttgggtacatcgaaaaattggttatcctcgagatcggccagaagcccgtcatcctcacttacgcccctggtacagttaaagggatttccggagagagcctgtcactgcactgtgtgtcagacggcatccccaaacccaacatcaagtggaccatgccgagtggttatgtagtcgatcggcctcagattaatggaaaatatatactgcacgacaacgggactttagttataaaggaggccacggcgtatgatcgcggaaattatatttgtaaagctcagaactccgttggccatactttaataaccgtcccggtcatgatcgtcgcctatcctccgcggatcacgaaccgccccccacgatctatagtaacccgaaccggcgccgctttccaactgcattgcgtggcgcttggcgttcccaaacctgaaattacgtgggagatgccagatcattcactgttgtcgactgcatccaaagaaagaacccacggttccgagcagctacatttacaaggcacattggtgatccaaaacccccagacgagtgactccggcatatataagtgcacagccaaaaacccactcggatctgactacgccgctacatacatacaggttatttag

SEQ ID NO: 254265 - DNA, 1899 bp, Artificial Sequence
  derived and/or modified sequence
atgacgcccccggttttaacaactgcggaaacatcggtaaaacctagcgtgagcgccttcacacacagcccacccgaaaacacaaccggcatctcaagcacaatctctttccactcccgtactttaaatttgacagacgtaatcgaagagctcgcccaggcatcgacacaaactttaaagtctacaatcgcctccgagaccaccctatcgtctaagtcacatcagtcgaccaccacccgaaaggcaatcatccggcattctactattccacctttcctttccagctccgcaactctgatgcctgtgcctatcagtcctcctttcactcagagggccgtcaccgataatgttgcaactccgattagcggccttatgaccaatacagttgtcaagcttcacgagtctagcagacataacgcaaagccccagcagcttgttgctgaggtagccactagccctaaagtgcaccccaacgccaagtttaccataggaaccactcactttatttatagcaatttactccactctacccctatgccagctctcacaacagtgaaatctcaaaactccaaactgactccatcaccatgggcagaaaatcagttttggcacaaaccctattccgaaatcgcagagaaaggcaagaaacctgaagtcagtatgctggcgacgactggcttatcggaagcaacaacccttgtttcagactgggacggccaaaagaacactaagaagtcagactttgacaagaagcctgtgcaagaggcgaccactagcaaacttttgccatttgactcattaagccgctatattttcgaaaagcctaggattgtaggtgggaaagccgcgagtttcaccattcctgccaattccgacgctttcctcccatgtgaagccgtcggaaaccctctcccgaccatacattggactcgcgtaccctccggattagacctttccaaacggaaacagaacagcagagtacaagtgctccccaatggtacactgagcatccaaagagtggaaatccaggaccgcggccagtatttgtgttccgcctctaatctattcggcaccgaccacttacatgttaccttgagcgtagtttcttacccaccacggattttggagagacgcaccaaagaaatcaccgtgcactcaggctccactgtagagttaaaatgcagagctgaaggcagaccctcccccacagtgacttggatcctggctaaccagaccgtggtgtcagaaagtagccaaggcagccgtcaagccgtcgttactgtggatggtactcttgtgttacataatcttagcatttatgatagaggcttctataagtgtgtcgcttccaatcctggagggcaggattcattactggtaaaaatccaagtgattgccgcaccaccagtcattctggagcagcggagacaggtgatagtaggcacctggggcgagtcattaaagttaccctgtacagctaaagggactcctcaacctagcgtttactgggttttgtcagatggcacagaagtcaaacccctccagttcacaaactcaaaactcttcctttttagcaacgggactctgtacatccgcaatttagcctccagcgatcgcggaacttacgaatgcatcgcaacctcttcaacagggtccgaaaggcgcgtcgtgatgttaactatggaagaacgcgtcacctccccccggattgaagctgcatcgcagaaacggaccgaggttaatttcggagataaactgcttctaaactgctcagccacaggggagccgaaaccccagatcatgtggcgactacccagtaaagcagttgttgatcagcagcatagagtggctgccggttctacatcaaccctcatggacccctgcctgcttgaccaatag

SEQ ID NO: 254266 - DNA, 4086 bp, Artificial Sequence
  derived and/or modified sequence
aataccagcaacaactcctaccttccctgcatctgtcatcacttatgaaacccaaacagagagatctagagcacaaacaatacaaagagaacaggagcctcaaaagaagaacaggactgacccaaacatctctccagaccagagttctggcttcactacacccactgctatgacacctcctgttctaaccacagccgaaacttcagtcaagcccagtgtctctgcattcactcattccccaccagaaaacacaactgggatttcaagcacaatcagttttcattcaagaactcttaatctgacagatgtgattgaagaactagcccaagcaagtactcagactttgaagagcacaattgcttctgaaacaactttgtccagcaaatcacaccagagtaccacaactaggaaagcaatcattagacactcaaccataccaccattcttgagcagcagtgctactctaatgccagttcccatctcccctccctttactcagagagcagttactgacaacgtggcgactcccatttccgggcttatgacaaatacagtggtcaagctgcacgaatcctcaaggcacaatgctaaaccacagcaattagtagcagaggttgcaacatcccccaaggttcacccaaatgccaagttcacaattggaaccactcacttcatctactctaatctgttacattctactcccatgccagcactaacaacagttaaatcacagaattctaaattaactccatctccctgggcagaaaaccaattttggcacaaaccatactcagaaattgctgaaaaaggcaaaaagccagaagtaagcatgttggctactacaggcctgtccgaggccaccactcttgtttcagattgggatggacagaagaacacaaagaagagtgactttgataagaaaccagttcaagaagcaacaacttccaaactccttccctttgactctttgtctaggtatatatttgaaaagcccaggatagttggaggaaaagctgcaagttttactattccagctaactcagatgcctttcttccctgtgaagctgttggaaatcccctgcccaccattcattggaccagagtcccatcaggacttgatttatctaagaggaaacagaatagcagggtccaggttctccccaatggtaccctgtccatccagagggtggaaattcaggaccgcggacagtacttgtgttccgcatccaatctgtttggcacagaccaccttcatgtcaccttgtctgtggtttcctatcctcccaggatcctggagagacgtaccaaagagatcacagttcattccggaagcactgtggaactgaagtgcagagcagaaggtaggccaagccctacagttacctggattcttgcaaaccaaacagttgtctcagaatcatcccagggaagtaggcaggctgtggtgacggttgacggaacattggtcctccacaatctcagtatttatgaccgtggcttttacaaatgtgtggccagcaacccaggtggccaggattcactgctggttaaaatacaagtcattgcagcaccacctgttattctagagcaaaggaggcaagtcattgtaggcacttggggtgaaagtttaaaactgccctgtactgcaaaaggaactcctcagcccagcgtttactgggtcctctctgatggcactgaagtgaaaccattacagtttaccaattccaagttgttcttattttcaaatgggactttgtatataagaaacctagcctcttcagacaggggcacttatgaatgcattgctaccagttccactggttcggagcgaagagtagtaatgcttacaatggaagagcgagtgaccagccccaggatagaagctgcatcccagaaaaggactgaagtgaattttggggacaaattactactgaactgctcagccactggggagcccaaaccccaaataatgtggaggttaccatccaaggctgtggtcgaccagcagcatagagtggcagctggatccacgtctaccctaatggatccctgtttattggatcagtaacagaaaaagacagtggtgtctacttgtgtgtggcaagaaacaaaatgggggatgatctgatactgatgcatgttagcctaagactgaaacctgccaaaattgaccacaagcagtattttagaaagcaagtgctccatgggaaagatttccaagtagattgcaaagcttccggctccccagtgccagagatatcttggagtttgcctgatggaaccatgatcaacaatgcaatgcaagccgatgacagtggccacaggactaggagatatacccttttcaacaatggaactttatacttcaacaaagttggggtagcggaggaaggagattatacttgctatgcccagaacaccctagggaaagatgaaatgaaggtccacttaacagttataacagctgctccccggataaggcagagtaacaaaaccaacaagagaatcaaagctggagacacagctgtccttgactgtgaggtcactggggatcccaaaccaaaaatattttggttgctgccttccaatgacatgatttccttctccattgataggtacacatttcatgccaatgggtctttgaccatcaacaaagtgaaactgctcgattctggagagtacgtatgtgtagcccgaaatcccagtggggatgacaccaaaatgtacaaactggatgtggtctctaaacctccattaatcaatggtctgtatacaaacagaactgttattaaagccacagctgtgagacattccaaaaaacactttgactgcagagctgaagggacaccatctcctgaagtcatgtggatcatgccagacaatattttcctcacagccccatactatggaagcagaatcacagtccataaaaatggaaccttggaaattaggaatgtgaggctttcagattcagccgactttatctgtgtggcccgaaatgaaggtggagagagcgtgttggtagtacagttagaagtactggaaatgctgagaagaccgacatttagaaatccatttaatgaaaaaatagttgcccagctgggaaagtccacagcattgaattgctctgttgatggtaacccaccacctgaaataatctggattttaccaaatggcacacgattttccaatggaccacaaagttatcagtatctgatagcaagcaatggttcttttatcatttctaaaacaactcgggaggatgcaggaaaatatcgctgtgcagctaggaataaagttggctatattgagaaattagtcatattagaaattggccagaagccagttattcttacctatgcaccagggacagtaaaaggcatcagtggagaatctctatcactgcattgtgtgtctgatggaatccctaagccaaatatcaaatggactatgccaagtggttatgtagtagacaggcctcaaattaatgggaaatacatattgcatgacaatggcaccttagtcattaaagaagcaacagcttatgacagaggaaactatatctgtaaggctcaaaatagtgttggtcatacactgattactgttccagtaatgattgtagcctaccctccccgaattacaaatcgtccacccaggagtattgtcaccaggacaggggcagcctttcagctccactgtgtggccttgggagttcccaagccagaaatcacatgggagatgcctgaccactcccttctctcaacggcaagtaaagagaggacacatggaagtgagcagcttcacttacaaggtaccctagtcattcagaatccccaaacctccgattctgggatatacaaatgcacagcaaagaacccacttggtagtgattatgcagcaacgtatattcaagtaatctgacatgaaataataaagtcaacaacatctgggcagaatttattttttggaagaagtttaatcaaaggcagccataggcatgtaaatgaatttgaatacatttacagtattaaatttacaatgaacatgcaaaataaaaggacttgtaaataaatgcattatgaactg

SEQ ID NO: 254267 - DNA, 11067 bp, Artificial Sequence
  derived and/or modified sequence
atgaaggtaaaaggcagaggaatcacctgcttgctggtctcctttgctgtgatctgcctggtcgccacccctgggggcaaggcctgtcctcgccgctgtgcctgttatatgcctacggaggtacactgcacatttcggtacctgacttccatcccagacagcatcccgcccaatgtggaacgcatcaatttaggatacaacagcttggttagattgatggaaacagatttttctggcctgaccaaactggagttactcatgcttcacagcaatggcattcacacaatccctgacaagaccttctcagatttgcaggccttgcaggtcttaaaaatgagctataataaagtccgaaaacttcagaaagatactttttatggcctcaggagcttgacacgattgcacatggaccacaacaatattgagtttataaacccagaggttttttatgggctcaactttctccgcctggtgcacttggaaggaaatcagctcactaagctccacccagatacatttgtctctttgagctacctccagatatttaaaatctctttcattaagttcctatacttgtctgataacttcctgacctccctccctcaagagatggtctcctatatgcctgacctagacagcctttacctgcatggaaacccatggacctgtgattgccatttaaagtggttgtctgactggatacaggagaagccagatgtaataaaatgcaaaaaagatagaagtccctctagtgctcagcagtgtccactttgcatgaaccctaggacttctaaaggcaagccgttagctatggtctcagctgcagctttccagtgtgccaagccaaccattgactcatccctgaaatcaaagagcctgactattctggaagacagtagttctgctttcatctctccccaaggtttcatggcaccctttggctccctcactttgaatatgacagatcagtctggaaatgaagctaacatggtctgcagtattcaaaagccctcaaggacatcacccattgcattcactgaagaaaatgactacatcgtgctaaatacttcattttcaacatttttggtgtgcaacatagattacggtcacattcagccagtgtggcaaattttggctttgtacagtgattctcctctgatactagaaaggagccacttgcttagtgaaacaccgcagctctattacaaatataaacaggtggctcctaagcctgaagacatttttaccaacatagaggcagatctcagagcagatccctcttggttaatgcaagaccaaatttccttgcagctgaacagaactgccaccacattcagtacattacagatccagtactccagtgatgctcaaatcactttaccaagagcagagatgaggccagtgaaacacaaatggactatgatttcaagggataacaatactaagctggaacatactgtcttggtaggtggaaccgttggcctgaactgcccaggccaaggagaccccaccccacacgtggattggcttctagctgatggaagtaaagtgagagccccttatgtcagtgaggatggacggatcctaatagacaaaagtggaaaattggaactccagatggctgatagttttgacacaggcgtatatcactgtataagcagcaattatgatgatgcagatattctcacctataggataactgtggtagaacctttggtcgaagcctatcaggaaaatgggattcatcacacagttttcattggtgaaacacttgatcttccatgccattctactggtatcccagatgcctctattagctgggttattccaggaaacaatgtgctctatcagtcatcaagagacaagaaagttctaaacaatggcacattaagaatattacaggtcaccccgaaagaccaaggttattatcgctgtgtggcagccaacccatcaggggttgattttttgattttccaagtttcagtcaagatgaaaggacaaaggcccttggagcatgatggagaaacagagggatctggacttgatgagtccaatcctattgctcatcttaaggagccaccaggtgcacaactccgtacatctgctctgatggaggctgaggttggaaaacacacctcaagcacaagtaagaggcacaactatcgggaattaacactccagcgacgtggagattcaacacatcgacgttttagggagaataggaggcatttccctccctctgctaggagaattgacccacaacattgggcggcactgttggagaaagctaaaaagaatgctatgccagacaagcgagaaaataccacagtgagcccacccccagtggtcacccaactcccaaacatacctggtgaagaagacgattcctcaggcatgctcgctctacatgaggaatttatggtcccggccactaaagctttgaaccttccagcaaggacagtgactgctgactccagaacaatatctgatagtcctatgacaaacataaattatggcacagaattctctcctgttgtgaattcacaaatactaccacctgaagaacccacagatttcaaactgtctactgctattaaaactacagccatgtcaaagaatataaacccaaccatgtcaagccaaatacaaggcacaaccaatcaacattcatccactgtctttccactgctacttggagcaactgaatttcaggactctgaccagatgggaagaggaagagagcatttccaaagtagacccccaataacagtaaggactatgatcaaagatgtcaatgtcaaaatgcttagtagcaccaccaacaaactattattagagtcagtaaataccacaaatagtcatcagacatctgtaagagaagtgagtgaacccaggcacaatcacttctattctcacactactcaaatacttagcacctccacgttcccttcagatccacacacagctgctcattctcagtttccgatccctagaaatagtacagttaacatcccgctgttcagacgctttgggaggcagaggaaaattggcggaagggggcggattatcagcccatatagaactccagttctgcgacggcatagatacagcattttcaggtcaacaaccagaggttcttctgaaaaaagcactactgcattctcagccacagtgctcaatgtgacatgtctgtcctgtcttcccagggagaggctcaccactgccacagcagcattgtcttttccaagtgctgctcccatcaccttccccaaagctgacattgctagagtcccatcagaagagtctacaactctagtccagaatccactattactacttgagaacaaacccagtgtagagaaaacaacacccacaataaaatatttcaggactgaaatttcccaagtgactccaactggtgcagtcatgacatatgctccaacatccatacccatggaaaaaactcacaaagtaaacgccagttacccacgtgtgtctagcaccaatgaagctaaaagagattcagtgattacatcgtcactttcaggtgctatcaccaagccaccaatgactattatagccattacaaggttttcaagaaggaaaattccctggcaacagaactttgtaaataaccataacccaaaaggcagattaaggaatcaacataaagttagtttacaaaaaagcacagctgtgatgcttcctaaaacatctcctgctttacccagagacaaagtctcccctttccatttcaccacactttcaacaagtgtgatgcaaattccatctaataccttgactaccgctcaccacactacgaccaaaacacacaatcctggaagtcttccaacaaagaaggagcttcccttcccaccccttaaccctatgcttcctagtattataagcaaagactcaagtacaaaaagcatcatatcaacgcaaacagcaataccagcaacaactcctaccttccctgcatctgtcatcacttatgaaacccaaacagagagatctagagcacaaacaatacaaagagaacaggagcctcaaaagaagaacaggactgacccaaacatctctccagaccagagttctggcttcactacacccactgctatgacacctcctgttctaaccacagccgaaacttcagtcaagcccagtgtctctgcattcactcattccccaccagaaaacacaactgggatttcaagcacaatcagttttcattcaagaactcttaatctgacagatgtgattgaagaactagcccaagcaagtactcagactttgaagagcacaattgcttctgaaacaactttgtccagcaaatcacaccagagtaccacaactaggaaagcaatcattagacactcaaccataccaccattcttgagcagcagtgctactctaatgccagttcccatctcccctccctttactcagagagcagttactgacaacgtggcgactcccatttccgggcttatgacaaatacagtggtcaagctgcacgaatcctcaaggcacaatgctaaaccacagcaattagtagcagaggttgcaacatcccccaaggttcacccaaatgccaagttcacaattggaaccactcacttcatctactctaatctgttacattctactcccatgccagcactaacaacagttaaatcacagaattctaaattaactccatctccctgggcagaaaaccaattttggcacaaaccatactcagaaattgctgaaaaaggcaaaaagccagaagtaagcatgttggctactacaggcctgtccgaggccaccactcttgtttcagattgggatggacagaagaacacaaagaagagtgactttgataagaaaccagttcaagaagcaacaacttccaaactccttccctttgactctttgtctaggtatatatttgaaaagcccaggatagttggaggaaaagctgcaagttttactattccagctaactcagatgcctttcttccctgtgaagctgttggaaatcccctgcccaccattcattggaccagagtcccatcaggacttgatttatctaagaggaaacagaatagcagggtccaggttctccccaatggtaccctgtccatccagagggtggaaattcaggaccgcggacagtacttgtgttccgcatccaatctgtttggcacagaccaccttcatgtcaccttgtctgtggtttcctatcctcccaggatcctggagagacgtaccaaagagatcacagttcattccggaagcactgtggaactgaagtgcagagcagaaggtaggccaagccctacagttacctggattcttgcaaaccaaacagttgtctcagaatcatcccagggaagtaggcaggctgtggtgacggttgacggaacattggtcctccacaatctcagtatttatgaccgtggcttttacaaatgtgtggccagcaacccaggtggccaggattcactgctggttaaaatacaagtcattgcagcaccacctgttattctagagcaaaggaggcaagtcattgtaggcacttggggtgaaagtttaaaactgccctgtactgcaaaaggaactcctcagcccagcgtttactgggtcctctctgatggcactgaagtgaaaccattacagtttaccaattccaagttgttcttattttcaaatgggactttgtatataagaaacctagcctcttcagacaggggcacttatgaatgcattgctaccagttccactggttcggagcgaagagtagtaatgcttacaatggaagagcgagtgaccagccccaggatagaagctgcatcccagaaaaggactgaagtgaattttggggacaaattactactgaactgctcagccactggggagcccaaaccccaaataatgtggaggttaccatccaaggctgtggtcgaccagcagcatagagtgggcagctggatccacgtctaccctaatggatccctgtttattggatcagtaacagaaaaagacagtggtgtctacttgtgtgtggcaagaaacaaaatgggggatgatctgatactgatgcatgttagcctaagactgaaacctgccaaaattgaccacaagcagtattttagaaagcaagtgctccatgggaaagatttccaagtagattgcaaagcttccggctccccagtgccagagatatcttggagtttgcctgatggaaccatgatcaacaatgcaatgcaagccgatgacagtggccacaggactaggagatatacccttttcaacaatggaactttatacttcaacaaagttggggtagcggaggaaggagattatacttgctatgcccagaacaccctagggaaagatgaaatgaaggtccacttaacagttataacagctgctccccggataaggcagagtaacaaaaccaacaagagaatcaaagctggagacacagctgtccttgactgtgaggtcactggggatcccaaaccaaaaatattttggttgctgccttccaatgacatgatttccttctccattgataggtacacatttcatgccaatgggtctttgaccatcaacaaagtgaaactgctcgattctggagagtacgtatgtgtagcccgaaatcccagtggggatgacaccaaaatgtacaaactggatgtggtctctaaacctccattaatcaatggtctgtatacaaacagaactgttattaaagccacagctgtgagacattccaaaaaacactttgactgcagagctgaagggacaccatctcctgaagtcatgtggatcatgccagacaatattttcctcacagccccatactatggaagcagaatcacagtccataaaaatggaaccttggaaattaggaatgtgaggctttcagattcagccgactttatctgtgtggcccgaaatgaaggtggagagagcgtgttggtagtacagttagaagtactggaaatgctgagaagaccgacatttagaaatccatttaatgaaaaaatagttgcccagctgggaaagtccacagcattgaattgctctgttgatggtaacccaccacctgaaataatctggattttaccaaatggcacacgattttccaatggaccacaaagttatcagtatctgatagcaagcaatggttcttttatcatttctaaaacaactcgggaggatgcaggaaaatatcgctgtgcagctaggaataaagttggctatattgagaaattagtcatattagaaattggccagaagccagttattcttacctatgcaccagggacagtaaaaggcatcagtggagaatctctatcactgcattgtgtgtctgatggaatccctaagccaaatatcaaatggactatgccaagtggttatgtagtagacaggcctcaaattaatgggaaatacatattgcatgacaatggcaccttagtcattaaagaagcaacagcttatgacagaggaaactatatctgtaaggctcaaaatagtgttggtcatacactgattactgttccagtaatgattgtagcctaccctccccgaattacaaatcgtccacccaggagtattgtcaccaggacaggggcagcctttcagctccactgtgtggccttgggagttcccaagccagaaatcacatgggagatgcctgaccactcccttctctcaacggcaagtaaagagaggacacatggaagtgagcagcttcacttacaaggtaccctagtcattcagaatccccaaacctccgattctgggatatacaaatgcacagcaaagaacccacttggtagtgattatgcagcaacgtatattcaagtaatctgacatgaaataataaagtcaacaacatctgggcagaatttattttttggaagaagtttaatcaaaggcagccataggcatgtaaatgaatttgaatacatttacagtattaaatttacaatgaacatgcaaaataaaaggacttgtaaataaatgcattatgaactgatgatactgatttatttaatggatctcaaaacaaacttttaacttaaggcacttttattttgccaacaaataacaataaacaaacattgaaacggttcactataaaataacaaatggctaatgtacctgaatttttcagtaaaaaaatgaacttctaataccagttgcctagtgtccacctcctatcaatgttacaagcatggcactcagaacagagacaatggaaaatattaaatctgcaatctttatgatgtaaatttaccatcctgatgtataaatattttgtggtttataaatttttttgctaaaacctacagaaaataagcactgaactgtcttatgattcaccatttgttcacactgaaaattttcattgatggggaatacaaaaatgttttaataactgcatttaaaaataaatgcaggctcacttttccacatgtaaaaagcaatgtaatacctgcacatcataaaatgtgaaaagggggttatttttgtccaaatacacccattaaaaaggttttaaaaatacaatgaaacttctttataactttaaaatctagctcaggcacccctggtttggagctgtttataaggaaatttttctgagcaggaatcgttgctctataagcatttcatttcattaattctttatgggatgggaaaatgcttgggagggtctaggtctattatatataatgaagtttcactgtatttaaaatctgatcaatcctacacaaaatgtgtttttgtaattcactgaatttatattacatgcttaattcaacctgaattaatttggggaatattaaatgattgatcttatctaaatctaggggtggggttttccagtgtaatttctccagcatctattcaaacattcacctagtacttacttaagaattataggagctttataaatgggaaaaaaatgccataggtcttagatatctcagtgcacaaaaccgagaattactaataagttagcccctgccaatcatttgagacatgtggaatagcgcccttgggttttcatcacactgactttcagttagccccatctcagcctaaaatgtgacctggttgcaacttatgtctgatgttagtaccctgtggctggaagtggtcaaagctacgcattgatctcctctacttccaggccaagaagggtaaatgcaatgactgacaaatgcaaccctattaagaaaaagcctacagtgtaaacaagagagtctatgggcttcttatatccaagaactgtgattgattgataggtatagctgactccatttgatttcaaggtcttgtctttaaggggagctggggtctcgctccatcttattctaaggtaatttcctctggtaaggtaaagtaccaggttctgccacagggctttaccttgtgaccatcttaatgcaaaagaatgcatttgcaagaaaagaaaaaaaaaaaaaaaaaaaagaaacctctcaagatacagaattaacagggagaaaatctgaagactaaagtaattctagttattttctttataatgcgcaggggtaaaacagcattcctcaactttcaatagaatcgtggaattaattagagtcgtagcataacttcctcacctaaaaaaagaaaaaagatatgccccacagctttcatgtgcaaaatgattaataatttaactcacctctgcaaagtataaagtgcatacaaatgctatgcaattataacactcattcttaaaacagtattactgttgtttgcaatgctgagctacaaaatatatggttcaaactgaactggcaaagaaatttggaaagaaataatgatggaacatgactcactcactaggcacaacattcacatttcggttgatttgccaatgcagtcattatatagatatattactttgaagaaaacaacttcattagcttatctaagtatgtttcttgagaggaaaaaatctgatatacaaaaccagcaaaaatgtgtacagatagatgatacatcttctgaaagcagatagactattaatttagtgaaaagaatagtttttaatgttttggcaaagtcttttccagcccagagtaaacacaaaatgggcaggctggagtgaaatattttcacagtgtacaaagcagttcacatggatgttgccacagcaaagtaagctgacatgtatttgaggtcatttgcatgagtcaaactttgcaatgagtaactcacccaggaagatataaattatttatagataatgatttgcaaaagaaaatgtctactaaagttgtactagctacattttaaaaaaagtagatttacatggtctgctcattatagacaagtctattcacagtatgcttgactatattatatgtaaaatcatatggcaaaagaaaatgaaataacagagaacatgggaaaatatcccccacatatgttttaaaatgccctgcaattttcacattcaaaattttatgcatctaaatctaaaaaaatattatatagaatactcttaagttacacaaactgataatttactggtttcttttttactctaataggagcaaattaccacatacttgaacaaagttaaaatagttactatttctttataataaatttgatgtataatttacttgtgctttttgcaccaatttataaatacagtatatgcaatacacaaccaagactgacactgacagtaataattaaattcaaaagagcaaatacttaccatacaaaataaacagcaaatacaccttttatgaaaaccagagccttctggactttggggccagattctctggaaaccatgtcaagtgtgagcactggaatctcaagccagctactggatttttttttccccttaaggtggcataaggttcaggagaaccaaaactggcaataaatagttggacgattccactgcagttctttcaggcctttaggatttacatgttgtaccttcacaatgactctcatcaatgatcttgcctcaaaacaaatttgagtacagctacttctaacaggtttccgcac

SEQ ID NO: 254268 - DNA, 7872 bp, Artificial Sequence
  derived and/or modified sequence
atgaaggtgaagggcagaggcatcacctgcctgctggtgagcttcgccgtgatctgcctggtggccacccccggcggcaaggcctgccccagaagatgcgcctgctacatgcccaccgaggtgcactgcaccttcagatacctgaccagcatccccgacagcatcccccccaacgtggagagaatcaacctgggctacaacagcctggtgagactgatggagaccgacttcagcggcctgaccaagctggagctgctgatgctgcacagcaacggcatccacaccatccccgacaagaccttcagcgacctgcaggccctgcaggtgctgaagatgagctacaacaaggtgagaaagctgcagaaggacaccttctacggcctgagaagcctgaccagactgcacatggaccacaacaacatcgagttcatcaaccccgaggtgttctacggcctgaacttcctgagactggtgcacctggagggcaaccagctgaccaagctgcaccccgacaccttcgtgagcctgagctacctgcagatcttcaagatcagcttcatcaagttcctgtacctgagcgacaacttcctgaccagcctgccccaggagatggtgagctacatgcccgacctggacagcctgtacctgcacggcaacccctggacctgcgactgccacctgaagtggctgagcgactggatccaggagaagcccgacgtgatcaagtgcaagaaggacagaagccccagcagcgcccagcagtgccccctgtgcatgaaccccagaaccagcaagggcaagcccctggccatggtgagcgccgccgccttccagtgcgccaagcccaccatcgacagcagcctgaagagcaagagcctgaccatcctggaggacagcagcagcgccttcatcagcccccagggcttcatggcccccttcggcagcctgaccctgaacatgaccgaccagagcggcaacgaggccaacatggtgtgcagcatccagaagcccagcagaaccagccccatcgccttcaccgaggagaacgactacatcgtgctgaacaccagcttcagcaccttcctggtgtgcaacatcgactacggccacatccagcccgtgtggcagatcctggccctgtacagcgacagccccctgatcctggagagaagccacctgctgagcgagaccccccagctgtactacaagtacaagcaggtggcccccaagcccgaggacatcttcaccaacatcgaggccgacctgagagccgaccccagctggctgatgcaggaccagatcagcctgcagctgaacagaaccgccaccaccttcagcaccctgcagatccagtacagcagcgacgcccagatcaccctgcccagagccgagatgagacccgtgaagcacaagtggaccatgatcagcagagacaacaacaccaagctggagcacaccgtgctggtgggcggcaccgtgggcctgaactgccccggccagggcgaccccaccccccacgtggactggctgctggccgacggcagcaaggtgagagccccctacgtgagcgaggacggcagaatcctgatcgacaagagcggcaagctggagctgcagatggccgacagcttcgacaccggcgtgtaccactgcatcagcagcaactacgacgacgccgacatcctgacctacagaatcaccgtggtggagcccctggtggaggcctaccaggagaacggcatccaccacaccgtgttcatcggcgagaccctggacctgccctgccacagcaccggcatccccgacgccagcatcagctgggtgatccccggcaacaacgtgctgtaccagagcagcagagacaagaaggtgctgaacaacggcaccctgagaatcctgcaggtgacccccaaggaccagggctactacagatgcgtggccgccaaccccagcggcgtggacttcctgatcttccaggtgagcgtgaagatgaagggccagagacccctggagcacgacggcgagaccgagggcagcggcctggacgagagcaaccccatcgcccacctgaaggagccccccggcgcccagctgagaaccagcgccctgatggaggccgaggtgggcaagcacaccagcagcaccagcaagagacacaactacagagagctgaccctgcagagaagaggcgacagcacccacagaagattcagagagaacagaagacacttcccccccagcgccagaagaatcgacccccagcactgggccgccctgctggagaaggccaagaagaacgccatgcccgacaagagagagaacaccaccgtgagccccccccccgtggtgacccagctgcccaacatccccggcgaggaggacgacagcagcggcatgctggccctgcacgaggagttcatggtgcccgccaccaaggccctgaacctgcccgccagaaccgtgaccgccgacagcagaaccatcagcgacagccccatgaccaacatcaactacggcaccgagttcagccccgtggtgaacagccagatcctgccccccgaggagcccaccgacttcaagctgagcaccgccatcaagaccaccgccatgagcaagaacatcaaccccaccatgagcagccagatccagggcaccaccaaccagcacagcagcaccgtgttccccctgctgctgggcgccaccgagttccaggacagcgaccagatgggcagaggcagagagcacttccagagcagaccccccatcaccgtgagaaccatgatcaaggacgtgaacgtgaagatgctgagcagcaccaccaacaagctgctgctggagagcgtgaacaccaccaacagccaccagaccagcgtgagagaggtgagcgagcccagacacaaccacttctacagccacaccacccagatcctgagcaccagcaccttccccagcgacccccacaccgccgcccacagccagttccccatccccagaaacagcaccgtgaacatccccctgttcagaagattcggcagacagagaaagatcggcggcagaggcagaatcatcagcccctacagaacccccgtgctgagaagacacagatacagcatcttcagaagcaccaccagaggcagcagcgagaagagcaccaccgccttcagcgccaccgtgctgaacgtgacctgcctgagctgcctgcccagagagagactgaccaccgccaccgccgccctgagcttccccagcgccgcccccatcaccttccccaaggccgacatcgccagagtgcccagcgaggagagcaccaccctggtgcagaaccccctgctgctgctggagaacaagcccagcgtggagaagaccacccccaccatcaagtacttcagaaccgagatcagccaggtgacccccaccggcgccgtgatgacctacgcccccaccagcatccccatggagaagacccacaaggtgaacgccagctaccccagagtgagcagcaccaacgaggccaagagagacagcgtgatcaccagcagcctgagcggcgccatcaccaagccccccatgaccatcatcgccatcaccagattcagcagaagaaagatcccctggcagcagaacttcgtgaacaaccacaaccccaagggcagactgagaaaccagcacaaggtgagcctgcagaagagcaccgccgtgatgctgcccaagaccagccccgccctgcccagagacaaggtgagccccttccacttcaccaccctgagcaccagcgtgatgcagatccccagcaacaccctgaccaccgcccaccacaccaccaccaagacccacaaccccggcagcctgcccaccaagaaggagctgcccttcccccccctgaaccccatgctgcccagcatcatcagcaaggacagcagcaccaagagcatcatcagcacccagaccgccatccccgccaccacccccaccttccccgccagcgtgatcacctacgagacccagaccgagagaagcagagcccagaccatccagagagagcaggagccccagaagaagaacagaaccgaccccaacatcagccccgaccagagcagcggcttcaccacccccaccgccatgaccccccccgtgctgaccaccgccgagaccagcgtgaagcccagcgtgagcgccttcacccacagcccccccgagaacaccaccggcatcagcagcaccatcagcttccacagcagaaccctgaacctgaccgacgtgatcgaggagctggcccaggccagcacccagaccctgaagagcaccatcgccagcgagaccaccctgagcagcaagagccaccagagcaccaccaccagaaaggccatcatcagacacagcaccatcccccccttcctgagcagcagcgccaccctgatgcccgtgcccatcagcccccccttcacccagagagccgtgaccgacaacgtggccacccccatcagcggcctgatgaccaacaccgtggtgaagctgcacgagagcagcagacacaacgccaagccccagcagctggtggccgaggtggccaccagccccaaggtgcaccccaacgccaagttcaccatcggcaccacccacttcatctacagcaacctgctgcacagcacccccatgcccgccctgaccaccgtgaagagccagaacagcaagctgacccccagcccctgggccgagaaccagttctggcacaagccctacagcgagatcgccgagaagggcaagaagcccgaggtgagcatgctggccaccaccggcctgagcgaggccaccaccctggtgagcgactgggacggccagaagaacaccaagaagagcgacttcgacaagaagcccgtgcaggaggccaccaccagcaagctgctgcccttcgacagcctgagcagatacatcttcgagaagcccagaatcgtgggcggcaaggccgccagcttcaccatccccgccaacagcgacgccttcctgccctgcgaggccgtgggcaaccccctgcccaccatccactggaccagagtgcccagcggcctggacctgagcaagagaaagcagaacagcagagtgcaggtgctgcccaacggcaccctgagcatccagagagtggagatccaggacagaggccagtacctgtgcagcgccagcaacctgttcggcaccgaccacctgcacgtgaccctgagcgtggtgagctacccccccagaatcctggagagaagaaccaaggagatcaccgtgcacagcggcagcaccgtggagctgaagtgcagagccgagggcagacccagccccaccgtgacctggatcctggccaaccagaccgtggtgagcgagagcagccagggcagcagacaggccgtggtgaccgtggacggcaccctggtgctgcacaacctgagcatctacgacagaggcttctacaagtgcgtggccagcaaccccggcggccaggacagcctgctggtgaagatccaggtgatcgccgccccccccgtgatcctggagcagagaagacaggtgatcgtgggcacctggggcgagagcctgaagctgccctgcaccgccaagggcaccccccagcccagcgtgtactgggtgctgagcgacggcaccgaggtgaagcccctgcagttcaccaacagcaagctgttcctgttcagcaacggcaccctgtacatcagaaacctggccagcagcgacagaggcacctacgagtgcatcgccaccagcagcaccggcagcgagagaagagtggtgatgctgaccatggaggagagagtgaccagccccagaatcgaggccgccagccagaagagaaccgaggtgaacttcggcgacaagctgctgctgaactgcagcgccaccggcgagcccaagccccagatcatgtggagactgcccagcaaggccgtggtggaccagcagcacagagtgggcagctggatccacgtgtaccccaacggcagcctgttcatcggcagcgtgaccgagaaggacagcggcgtgtacctgtgcgtggccagaaacaagatgggcgacgacctgatcctgatgcacgtgagcctgagactgaagcccgccaagatcgaccacaagcagtacttcagaaagcaggtgctgcacggcaaggacttccaggtggactgcaaggccagcggcagccccgtgcccgagatcagctggagcctgcccgacggcaccatgatcaacaacgccatgcaggccgacgacagcggccacagaaccagaagatacaccctgttcaacaacggcaccctgtacttcaacaaggtgggcgtggccgaggagggcgactacacctgctacgcccagaacaccctgggcaaggacgagatgaaggtgcacctgaccgtgatcaccgccgcccccagaatcagacagagcaacaagaccaacaagagaatcaaggccggcgacaccgccgtgctggactgcgaggtgaccggcgaccccaagcccaagatcttctggctgctgcccagcaacgacatgatcagcttcagcatcgacagatacaccttccacgccaacggcagcctgaccatcaacaaggtgaagctgctggacagcggcgagtacgtgtgcgtggccagaaaccccagcggcgacgacaccaagatgtacaagctggacgtggtgagcaagccccccctgatcaacggcctgtacaccaacagaaccgtgatcaaggccaccgccgtgagacacagcaagaagcacttcgactgcagagccgagggcacccccagccccgaggtgatgtggatcatgcccgacaacatcttcctgaccgccccctactacggcagcagaatcaccgtgcacaagaacggcaccctggagatcagaaacgtgagactgagcgacagcgccgacttcatctgcgtggccagaaacgagggcggcgagagcgtgctggtggtgcagctggaggtgctggagatgctgagaagacccaccttcagaaaccccttcaacgagaagatcgtggcccagctgggcaagagcaccgccctgaactgcagcgtggacggcaaccccccccccgagatcatctggatcctgcccaacggcaccagattcagcaacggcccccagagctaccagtacctgatcgccagcaacggcagcttcatcatcagcaagaccaccagagaggacgccggcaagtacagatgcgccgccagaaacaaggtgggctacatcgagaagctggtgatcctggagatcggccagaagcccgtgatcctgacctacgcccccggcaccgtgaagggcatcagcggcgagagcctgagcctgcactgcgtgagcgacggcatccccaagcccaacatcaagtggaccatgcccagcggctacgtggtggacagaccccagatcaacggcaagtacatcctgcacgacaacggcaccctggtgatcaaggaggccaccgcctacgacagaggcaactacatctgcaaggcccagaacagcgtgggccacaccctgatcaccgtgcccgtgatgatcgtggcctacccccccagaatcaccaacagaccccccagaagcatcgtgaccagaaccggcgccgccttccagctgcactgcgtggccctgggcgtgcccaagcccgagatcacctgggagatgcccgaccacagcctgctgagcaccgccagcaaggagagaacccacggcagcgagcagctgcacctgcagggcaccctggtgatccagaacccccagaccagcgacagcggcatctacaagtgcaccgccaagaaccccctgggcagcgactacgccgccacctacatccaggtgatctag

SEQ ID NO: 254269 - DNA, 1899 bp, Artificial Sequence
  derived and/or modified sequence
atgaccccccccgtgctgaccaccgccgagaccagcgtgaagcccagcgtgagcgccttcacccacagcccccccgagaacaccaccggcatcagcagcaccatcagcttccacagcagaaccctgaacctgaccgacgtgatcgaggagctggcccaggccagcacccagaccctgaagagcaccatcgccagcgagaccaccctgagcagcaagagccaccagagcaccaccaccagaaaggccatcatcagacacagcaccatcccccccttcctgagcagcagcgccaccctgatgcccgtgcccatcagcccccccttcacccagagagccgtgaccgacaacgtggccacccccatcagcggcctgatgaccaacaccgtggtgaagctgcacgagagcagcagacacaacgccaagccccagcagctggtggccgaggtggccaccagccccaaggtgcaccccaacgccaagttcaccatcggcaccacccacttcatctacagcaacctgctgcacagcacccccatgcccgccctgaccaccgtgaagagccagaacagcaagctgacccccagcccctgggccgagaaccagttctggcacaagccctacagcgagatcgccgagaagggcaagaagcccgaggtgagcatgctggccaccaccggcctgagcgaggccaccaccctggtgagcgactgggacggccagaagaacaccaagaagagcgacttcgacaagaagcccgtgcaggaggccaccaccagcaagctgctgcccttcgacagcctgagcagatacatcttcgagaagcccagaatcgtgggcggcaaggccgccagcttcaccatccccgccaacagcgacgccttcctgccctgcgaggccgtgggcaaccccctgcccaccatccactggaccagagtgcccagcggcctggacctgagcaagagaaagcagaacagcagagtgcaggtgctgcccaacggcaccctgagcatccagagagtggagatccaggacagaggccagtacctgtgcagcgccagcaacctgttcggcaccgaccacctgcacgtgaccctgagcgtggtgagctacccccccagaatcctggagagaagaaccaaggagatcaccgtgcacagcggcagcaccgtggagctgaagtgcagagccgagggcagacccagccccaccgtgacctggatcctggccaaccagaccgtggtgagcgagagcagccagggcagcagacaggccgtggtgaccgtggacggcaccctggtgctgcacaacctgagcatctacgacagaggcttctacaagtgcgtggccagcaaccccggcggccaggacagcctgctggtgaagatccaggtgatcgccgccccccccgtgatcctggagcagagaagacaggtgatcgtgggcacctggggcgagagcctgaagctgccctgcaccgccaagggcaccccccagcccagcgtgtactgggtgctgagcgacggcaccgaggtgaagcccctgcagttcaccaacagcaagctgttcctgttcagcaacggcaccctgtacatcagaaacctggccagcagcgacagaggcacctacgagtgcatcgccaccagcagcaccggcagcgagagaagagtggtgatgctgaccatggaggagagagtgaccagccccagaatcgaggccgccagccagaagagaaccgaggtgaacttcggcgacaagctgctgctgaactgcagcgccaccggcgagcccaagccccagatcatgtggagactgcccagcaaggccgtggtggaccagcagcacagagtggccgccggcagcaccagcaccctgatggacccctgcctgctggaccagtag

SEQ ID NO: 254270 - DNA, 7872 bp, Artificial Sequence
  derived and/or modified sequence
atgaaagtcaaaggaagaggcatcacgtgtctgctcgtgagcttcgctgtgatttgccttgtggcaacacccggcggaaaagcgtgcccgcgccgatgcgcctgctacatgccaacagaagtccactgtacgtttagatacttgacctctatccctgatagcatcccgccgaacgtggagcgaattaaccttgggtataattcattagtgcgcctgatggaaactgatttctctgggttaaccaagctcgagcttctgatgttacattccaacggaatccacacaattcctgacaaaacattttccgacttgcaggctttgcaggtgctaaagatgagctacaataaggtcaggaagctgcagaaggataccttctatggcttacgctctctaacacgtctccacatggatcacaataatatagaatttatcaaccccgaagtgttctatggcctgaactttcttagactggtccacctggagggaaaccaactaacaaagctgcaccctgacacatttgtctccctgagctatctgcagatttttaagatatctttcattaagtttctgtatctgtccgataatttcctgacttcactgccacaggagatggtgtcctatatgcctgacctggacagtttgtatcttcatggtaatccgtggacctgtgactgtcacctgaaatggctctccgactggatacaagaaaagcctgatgttatcaagtgcaaaaaggaccgatcgccctcttctgcacaacagtgtccactctgtatgaatccccgcaccagcaagggcaagccattggcaatggtgagtgcagccgccttccaatgtgccaaaccaaccatagattccagtctaaagagcaagtccctgaccatactcgaagacagctcaagtgccttcatcagcccacagggatttatggctcctttcggaagcctcaccttgaacatgacagaccagtcgggtaacgaggccaacatggtctgttccattcaaaagccaagcaggaccagccccatcgcctttactgaggagaacgattacatcgtgctaaatacctccttttctactttcctagtctgtaacattgactatgggcatattcaacccgtctggcaaatcctggcgctttactctgatagccccctgatcttggagagatcccatctgctgtccgaaacccctcaattgtattacaagtacaaacaggtagctccgaaacccgaggacatcttcactaacatcgaagccgacttgagagccgaccccagctggcttatgcaggatcagataagtctccaactgaatcgtaccgctacaacattctccaccctgcagattcaatacagttccgacgcccaaatcacactcccacgggcagagatgcggcccgttaagcataaatggaccatgatctcgagagataacaatacgaaattagaacatactgtgctggtgggggggaccgtgggactcaactgtccaggacagggcgaccctacaccccatgtagactggctgctggcagacgggagcaaagttcgagctccatatgtttctgaggacgggcggattttgatagataaaagcggcaagctggagctccaaatggcagatagtttcgatactggcgtgtaccattgtatctcatctaattatgacgacgccgacatactgacttaccggattaccgtcgtagaacctctggtagaagcttaccaggagaatggcatccaccacacggtgttcattggagagacccttgatctgccttgtcactccacaggtattcccgacgcttctattagctgggtcattcccggcaataacgtgctgtaccagtcatccagagataagaaagtcctcaataacgggacacttcgtatactgcaggtcacgccgaaagatcagggttattatagatgcgttgctgccaaccctagtggggtggacttcctgatcttccaggtatccgtgaaaatgaaaggccagagaccactggagcatgatggcgagacagaaggttctgggctggatgagagcaaccccattgctcacttgaaggaaccaccaggggcgcaactaaggacatccgccctgatggaggctgaggtggggaagcatacgtcctccacttctaagaggcacaactacagagaactaacacttcagagacggggcgactcaacacaccggcggttccgcgaaaatcgaagacactttcccccctccgctagacggatcgatccgcaacattgggcagctctcctcgaaaaggccaagaaaaacgctatgcctgataagcgcgagaacactaccgtttcacctcctcctgttgtgacacagctccctaacattccgggggaggaagatgatagttctggaatgcttgccctccatgaagagtttatggtacctgctactaaggctctaaatttgcctgcccgcaccgttaccgcagactcgagaaccatcagtgattccccaatgacaaacattaattacggaactgagttctctcctgtcgttaactcccagatcctgccgccagaggaaccaacagactttaagcttagcacggccataaagactacagccatgagtaagaatattaaccccacaatgtcaagtcaaatccagggtaccactaaccaacactcctccaccgtattccctctgcttctgggcgctaccgagttccaggactccgatcagatgggccgaggtagggaacatttccagtcacgccccccaataaccgttcgaactatgattaaggatgtgaatgtcaagatgctgtcgtctaccaccaataaactgttgcttgaatcagtaaacacaaccaattcccatcaaacaagtgtccgcgaggtaagtgagccccggcacaaccatttctacagccacacaacgcagattctgtccacgtccacattcccgtctgatccccataccgccgcccacagccagttcccaataccaaggaacagcacagtgaatattcctctgttcaggcgctttgggaggcagaggaaaatcggtggccgcggacgaattatcagcccctatagaactcccgtcctgcggcgccacagatattcgatattccgaagtactactagggggtccagcgagaagagcaccactgctttcagcgctactgttctgaatgtcacgtgcctgtcctgcctcccacgcgagcgcctaaccactgccactgcagctctaagtttccctagtgcagcccctattacatttcccaaagctgatatcgcgagggtgccaagcgaggagagcaccaccctggtacagaacccactgctcctgctcgaaaacaagcctagtgtggaaaagactacacccacgatcaaatacttcaggaccgagatttcccaggtcactccaaccggcgccgtgatgacatacgcacccacaagcatcccaatggaaaaaactcacaaagtgaacgcaagctatccaagagtctcgagcaccaatgaagctaaaagggattctgtgatcacaagcagcttatctggcgcaataacgaaaccaccaatgacgatcatagctatcacacgtttcagtaggcgaaagattccttggcaacaaaacttcgttaataaccataacccaaagggccgcttgagaaaccagcataaggtttcactgcagaaaagtacagcagtcatgttacctaagaccagtccggctctaccaagagacaaggtatcaccctttcatttcacaactctgagcaccagtgtcatgcaaattccttccaacactctcaccaccgctcaccacactactaccaagacccataatccaggaagtcttcctactaagaaagaacttcccttccctcctttaaaccccatgctgcccagtattatctcaaaagacagtagcactaaaagtatcatttccacacagactgctattcctgccactactccgacctttccagcatctgtgattacctatgaaacacagactgagaggtctcgcgctcagacaattcagagagagcaggaaccgcaaaagaagaatcgtactgacccgaacatctccccggaccagtcctccggatttacaacgcccacagcgatgactccccccgtgctgactaccgctgaaacaagtgtaaagccatctgtgtccgcgtttacgcattccccccccgaaaataccaccggcatcagcagcacaatatcatttcacagccgaactctcaatcttaccgacgtgatcgaagaattggcccaggcatcaactcagaccttgaagtctactatcgcatcggaaacaacactgagcagcaaaagccatcagtctacgacaacacgcaaagcaataattagacattcaactatcccaccattcctgagttcttccgcaactttgatgccggtccccatcagccctccttttacccagcgggccgtgaccgataatgtagccacaccaatcagtggactgatgaccaacacagtggtgaagctgcacgagtcttcacggcataacgctaaaccccaacagctggtggcagaagtggccactagccccaaggtacacccaaacgctaagtttacaataggcacaacccatttcatctattcaaatctgcttcactcaaccccgatgccggcccttacaacggtgaagagtcagaattccaagctcacacccagtccttgggccgagaaccagttttggcataagccctacagcgagattgctgagaagggaaagaagccggaagtgtccatgctcgccactaccggactgagcgaagccactaccctggtctcggattgggatgggcagaaaaacactaaaaagtcagacttcgacaagaagcccgttcaggaggcgaccacttcaaagctcctgccctttgattcactttcaaggtacattttcgagaagccaaggatagtcggcggcaaggccgcgtcattcacaatacctgccaatagcgacgccttcctaccctgcgaggctgtaggaaatccactgcccaccattcattggacgcgagtgccttcgggactcgacttgtctaaacgcaagcagaacagcagagttcaagtcctgccaaatggtactctgtctatccagagggtggagatccaggatcgtggccagtacctctgctccgcttcaaacctgttcggcaccgatcatctgcatgttacactgagcgtggtcagctatcctccccgtatcttggaaagacggactaaggagatcacggtgcatagcgggtccacagtcgagctgaagtgccgggccgagggccgcccatcccctaccgtgacatggatcttggcgaatcagactgtggtctctgagtcttcccagggttcacggcaggccgtggtgacagtggacgggactttggtgttacataacctcagcatctatgacagagggttctacaagtgtgtggcctctaaccccggtggacaagattcactgttggtgaagatccaggtcattgcagctcctccagtgattttggaacagaggaggcaagtgatcgtcggtacgtggggcgaatcactgaagctaccttgtacggctaaggggacccctcagccatccgtgtattgggttttatcggacggcactgaagttaaaccactgcagtttaccaacagtaagctttttctgttttccaacggtactctatacattcggaacctggccagcagtgaccgcggcacatatgaatgcattgctaccagctctacaggatcagaacggcgggtagtaatgttgactatggaggagagagtcacctccccgcggatcgaggctgcgtcccagaagcgaaccgaagtcaactttggagacaaactgctcctgaactgctctgccacgggagaacctaagccccaaatcatgtggagattgcctagtaaggctgtggtcgatcagcaacatcgagtcggatcgtggatccacgtgtaccctaacgggtctctgtttattggatctgttactgagaaggattccggcgtttacctttgtgtcgcaaggaataagatgggtgatgacttgatcctcatgcatgtctcactcaggcttaaaccagctaaaattgatcacaagcagtatttcaggaagcaggtgctccacgggaaggattttcaggtagactgtaaggcttcagggagtcctgtgccagaaatctcttggtcgctgccggacggtactatgataaacaacgcaatgcaggctgacgactcagggcaccgaacgagaagatacacactgttcaataatgggaccctgtattttaacaaagtgggtgttgctgaggagggggactatacatgttacgcacagaatactctgggtaaagatgagatgaaggtgcacctgaccgtgatcacagccgctccccgcatccgccaatctaataagaccaacaagcggattaaagcaggagataccgcagtgctggattgcgaggtgacgggcgacccaaaaccaaagatcttttggctgttgccatcgaacgacatgatttctttttcaattgaccgatatacgtttcatgccaacgggagtttgaccataaataaggtcaaactgctggatagcggcgaatacgtgtgtgtcgccagaaatccatccggcgacgatactaaaatgtataagctagatgtggtatctaaacctccgctgataaacggcttatatacaaacagaaccgtcattaaagccaccgcagtccgacatagcaagaagcacttcgactgccgggccgagggaacaccttcccccgaagttatgtggattatgccagacaatatcttcctcacagccccctactacgggtcgcggattacagttcacaaaaatgggactcttgaaattagaaatgtaagattgtctgacagcgctgacttcatctgcgtcgcgcgtaacgaaggcggagaaagcgttctagtggtccagttagaggtcctggaaatgttacggcgcccaaccttccgcaatcctttcaatgagaagatcgtggcccagctcggaaaaagcactgcattaaactgttctgtggacgggaatcctccacctgaaatcatttggatacttccaaatggtacaaggttctcaaatggcccccagtcctaccagtacctaattgcaagcaacggttccttcatcatcagcaagaccactcgagaagacgccggcaaataccgatgcgccgcaaggaataaagtaggctatattgagaagctggtgatcctggaaatcggccagaaacccgtgatcctgacttacgctccgggaacagttaagggtatcagtggcgagagcttgtcactccactgcgtttccgatggcatccctaagcccaacatcaaatggaccatgccctccggctatgtggtagaccgtccgcagatcaatggcaagtacattctgcacgataatgggaccttggtcataaaggaggcgactgcctacgatcgcgggaactatatttgcaaagcacagaattcagtgggacacacccttataactgtaccagtgatgatcgtcgcttatccacccagaatcactaacagaccaccaagaagcatcgtaacaaggacaggggctgcgtttcagctgcattgtgtggctttgggcgtcccaaaacccgagatcacgtgggaaatgcctgaccactctttactgtccacggcctccaaggaacgcacacatgggtcggagcagcttcacctgcaaggtaccctggtgatccagaatccccagacaagtgattctggaatttataaatgtaccgccaagaaccctttaggctcagattacgctgcgacttacatccaagtcatctag

SEQ ID NO: 254271 - DNA, 1899 bp, Artificial Sequence
  derived and/or modified sequence
atgacgccacccgtcctcacaaccgccgaaactagcgtgaagccttctgtaagcgcatttacccatagtcctcccgaaaacaccaccggtattagctcaactatctccttccactcacgcactttgaacctgacagatgttattgaagagcttgctcaggcttccacccagacactgaaatcaactatcgccagcgagaccacactcagcagtaagtctcaccagagcacgactacaagaaaagccatcatccgacactccaccattccacctttcttgtctagttctgccacactcatgcctgtccccatttcaccacccttcacccagagagctgtgactgacaatgtcgctacacccatatcagggttgatgacaaacaccgtcgttaaacttcacgaaagcagccgacataacgccaagcctcagcaactggtggccgaagtcgctacatctcccaaggtccacccgaacgcgaagttcaccattggcacaacccactttatctactccaatctgctgcatagcaccccaatgccagccctgacaaccgtgaagtctcagaatagtaagcttacaccctcgccttgggccgaaaaccagttttggcacaaaccatattctgagatagctgagaagggtaagaagccagaggtatctatgctggctacgactggtctgtctgaggccaccacattggtgtcggattgggacggccagaagaacactaaaaagagtgatttcgataaaaagcccgttcaggaggccacgacatcaaaattgctgccatttgattcactctccaggtatattttcgagaaaccgcgcattgtcggtggcaaggcggcaagctttactatccccgcaaacagcgatgcctttcttccttgcgaggcagttgggaaccctctccccactattcactggacaagggtaccgagtggactggatctcagcaaaagaaaacaaaacagccgagtccaggtccttccaaatggcacactcagcattcagagagtggagattcaggaccgtggacaatatctttgttctgcatcaaacttgtttggcaccgaccatctccatgttacactatccgttgtgagctacccccctaggatcctggagcgacggaccaaagagataacagtgcatagcggctccacggtggaactaaagtgcagggctgaaggccggcccagtccaaccgtcacctggatactcgccaaccagaccgtggtatccgagagtagccagggatcgcggcaggccgtagtgacagtagacggaaccctggtgctccacaacctgtcaatttacgataggggcttttataaatgtgtagcctcgaatcctgggggtcaggacagtctgctggtgaaaatccaagtgatcgctgcccccccagtgatcctggaacagcggagacaagttatcgtggggacctggggcgagtctttgaaactcccttgcacagccaagggaaccccgcagccaagtgtttactgggtcctaagtgacggcacggaggtcaagcctcttcagtttacaaacagcaaactatttttgttttctaacggtacgctctacatccgaaacctggcttcctcagaccggggcacttacgagtgtatcgcaacctcatcgacaggcagcgaacggcgggttgtcatgctcactatggaagaaagggtgaccagcccgaggatcgaagcagcctcccaaaagagaactgaagtgaacttcggagataagttgttgctcaactgttcagcgactggagaacccaaaccacagattatgtggaggctaccaagtaaggcggtagttgatcaacagcaccgggtggcagctggatccacaagtacactgatggatccatgcttgctggatcagtag

SEQ ID NO: 254272 - DNA, 7872 bp, Artificial Sequence
  derived and/or modified sequence
atgaaggtgaagggccggggcatcacctgcctgctggtgtcctttgctgtgatctgcctggtggccacccctgggggcaaggcctgcccccggcgctgtgcctgctacatgcccacagaggtgcactgcaccttccgctacctgaccagcatcccagacagcatcccccccaacgtggagcgcatcaacctgggctacaacagcctggtgcggctgatggagacagacttcagcggcctgaccaagctggagctgctgatgctgcacagcaatggcatccacaccatcccagacaagaccttcagtgacctgcaggccctgcaggtgctgaagatgagctacaacaaggtgaggaagctgcagaaggacaccttctacggcctgcggagcctgacccggctgcacatggaccacaacaacatcgagttcatcaaccctgaggtgttctacggcctgaacttcctgcggctggtgcacctggagggcaaccagctgaccaagctgcacccagacacctttgtgtccctgagctacctgcagatcttcaagatctccttcatcaagttcctgtacctgagtgacaacttcctgaccagcctgccccaggagatggtgtcctacatgccagacctggacagcctgtacctgcacggcaacccctggacctgtgactgccacctgaagtggctgagtgactggatccaggagaagccagatgtgatcaagtgcaagaaggacaggagccccagcagcgcccagcagtgccccctgtgcatgaaccccaggaccagcaagggcaagcccctggccatggtgtctgctgctgccttccagtgtgccaagcccaccatcgacagcagcctgaagagcaagagcctgaccatcctggaggacagcagcagcgccttcatcagcccccagggcttcatggcccccttcggcagcctgaccctgaacatgacagaccagagcggaaatgaggccaacatggtgtgcagcatccagaagcccagcaggaccagccccatcgccttcacagaggagaatgactacatcgtgctgaacaccagcttcagcaccttcctggtgtgcaacatcgactatggccacatccagcctgtgtggcagatcctggccctgtacagcgacagccccctcatcctggagaggagccacctgctgtctgagaccccccagctgtactacaagtacaagcaggtggcccccaagccagaggacatcttcaccaacatcgaggccgacctgcgggctgaccccagctggctgatgcaggaccagatcagcctgcagctgaacagaacagccaccaccttcagcaccctgcagatccagtacagcagtgatgcccagatcaccctgcccagggctgagatgaggcctgtgaagcacaagtggaccatgatcagccgggacaacaacaccaagctggagcacacagtgctggtgggcggcaccgtgggcctgaactgccccggccagggcgaccccaccccccacgtggactggctgctggctgatggcagcaaggtgcgggccccctacgtgtctgaagatggccgcatcctgattgacaagagcggcaagctggagctgcagatggctgacagctttgacaccggggtgtaccactgcatcagcagcaactatgatgatgctgacatcctgacctaccgcatcaccgtggtggagcccctggtggaggcctaccaggagaatggcatccaccacacagtgttcatcggggagaccctggacctgccctgccacagcacaggcatcccagatgccagcatctcctgggtgattcctggcaacaacgtgctgtaccagagcagccgggacaagaaggtgctgaacaacggcaccctgcgcatcctgcaggtgacccccaaggaccagggctactaccgctgtgtggccgccaaccccagcggcgtggacttcctgatcttccaggtgtctgtgaagatgaagggccagaggcccctggagcatgatggagaaacagagggcagcggcctggatgagagcaaccccatcgcccacctgaaggagcccccaggggcccagctgcggaccagcgccctgatggaggccgaggtgggcaagcacaccagcagcaccagcaagaggcacaactaccgggagctgaccctgcagaggagaggagacagcacccaccggcgcttcagagaaaatagaagacacttccccccatctgccaggagaattgacccccagcactgggccgccctgctggagaaggccaagaagaatgccatgccagacaagcgggagaacaccaccgtgtccccacctcctgtggtgacccagctgcccaacatccctggagaagaagatgacagcagcggcatgctggccctgcacgaggagttcatggtgcctgccaccaaggccctgaacctgcctgccaggacagtgacagctgacagcaggaccatcagtgacagccccatgaccaacatcaactacggcacagagttcagccctgtggtgaacagccagatcctgcccccagaggagcccacagacttcaagctgagcacagccatcaagaccacagccatgagcaagaacatcaaccccaccatgagcagccagatccagggcaccaccaaccagcacagcagcaccgtcttccccctgctgctgggcgccacagagttccaggacagcgaccagatgggccggggccgggagcacttccagagccggccccccatcaccgtgaggaccatgatcaaggatgtgaatgtgaagatgctgagcagcaccaccaacaagctgctgctggagagcgtgaacaccaccaacagccaccagacctctgtgcgggaggtgtctgagcccaggcacaaccacttctacagccacaccacccagatcctgagcaccagcaccttccccagcgacccccacacagctgcccacagccagttccccatccccaggaacagcacagtgaacatccccctcttccgccgcttcggccggcagaggaagattggaggccggggccgcatcatcagcccctaccgcacccctgtgctgcggcggcaccgctacagcatcttccgcagcaccacccggggcagcagcgagaagagcaccacagccttcagcgccaccgtgctgaatgtgacctgcctgagctgcctgccccgggagcggctgaccacagccacagctgccctgtccttccccagcgctgcccccatcaccttccccaaggctgacatcgcccgggtgcccagcgaggagagcaccaccctggtgcagaaccccctgctgctgctggagaacaagcccagcgtggagaagaccacccccaccatcaagtacttcagaacagagatcagccaggtgacccccactggagctgtgatgacctacgcccccaccagcatccccatggagaagacccacaaggtgaatgccagctacccccgggtgagcagcaccaatgaggccaagagggacagcgtcatcaccagcagcctgagcggggccatcaccaagccacccatgaccatcatcgccatcacccgcttcagcaggaggaagatcccctggcagcagaactttgtgaacaaccacaaccccaagggccgcctgaggaaccagcacaaggtgtccctgcagaagagcacagctgtgatgctgcccaagaccagccctgccctgccccgggacaaggtgagccccttccacttcaccaccctgagcacctctgtgatgcagatccccagcaacaccctgaccacagcccaccacaccaccaccaagacccacaaccctggcagcctgcccaccaagaaggagctgcccttcccccccctgaaccccatgctgcccagcatcatcagcaaggacagcagcaccaagagcatcatcagcacccagacagccatcccagccaccacccccaccttccctgccagcgtcatcacctatgagacccagacagagaggagccgggcccagaccatccagcgggagcaggagccccagaagaagaacagaacagaccccaacatcagcccagaccagagcagcggcttcaccacccccacagccatgaccccacctgtgctgaccacagctgagacctctgtgaagcccagcgtgtctgccttcacccacagccccccagagaacaccaccggcatcagcagcaccatctccttccacagcaggaccctgaacctgacagatgtgattgaggagctggcccaggccagcacccagaccctgaagagcaccatcgccagcgagaccaccctgagcagcaagagccaccagagcaccaccaccaggaaggccatcatccgccacagcaccatcccccccttcctgagcagcagcgccaccctgatgcctgtgcccatcagcccccccttcacccagagagctgtgacagacaacgtggccacccccatcagcggcctgatgaccaacacagtggtgaagctgcacgagagcagccgccacaatgccaagccccagcagctggtggccgaggtggccaccagccccaaggtgcaccccaatgccaagttcaccatcggcaccacccacttcatctacagcaacctgctgcacagcacccccatgcctgccctgaccaccgtgaagagccagaacagcaagctgacccccagcccctgggccgagaaccagttctggcacaagccctacagcgagattgctgagaagggcaagaagccagaggtgtccatgctggccaccaccggcctgtctgaggccaccaccctggtgtctgactgggatggccagaagaacaccaagaagagtgactttgacaagaagcctgtgcaggaggccaccaccagcaagctgctgccctttgacagcctgagccgctacatctttgagaagccccgcatcgtgggcggcaaggccgccagcttcaccatcccagccaacagtgatgccttcctgccctgtgaggccgtgggcaaccccctgcccaccatccactggaccagggtgcccagcggcctggacctgagcaagaggaagcagaacagccgggtgcaggtgctgcccaacggcaccctgagcatccagagggtggagatccaggaccggggccagtacctgtgcagcgccagcaacctgtttggaacagaccacctgcacgtgaccctgtctgtggtgtcctacccaccccgcatcctggagaggaggaccaaggagatcaccgtgcacagcggcagcacagtggagctgaagtgcagagctgagggccggcccagccccaccgtgacctggatcctggccaaccagacagtggtgtctgagagcagccagggcagccggcaggccgtggtgacagtggatggcaccctggtgctgcacaacctgagcatctatgaccggggcttctacaagtgtgtggccagcaaccctgggggccaggacagcctgctggtgaagatccaggtgattgctgcccctcctgtgatcctggagcagaggcggcaggtgattgtgggcacctggggcgagagcctgaagctgccctgcacagccaagggcaccccccagcccagcgtgtactgggtgctgagtgatggaacagaggtgaagcccctgcagttcaccaacagcaagctgttcctgttcagcaatggcaccctgtacatccggaacctggccagcagtgaccggggcacctatgagtgcatcgccaccagcagcactggaagtgaaagaagagtggtgatgctgaccatggaggagcgggtgaccagccccagaattgaagctgccagccagaagaggacagaggtgaactttggagacaagctgctgctgaactgcagcgccaccggggagcccaagccccagatcatgtggaggctgcccagcaaggctgtggtggaccagcagcaccgggtgggctcctggatccacgtgtaccccaacggcagcctcttcatcggctctgtgacagagaaggacagcggcgtgtacctgtgtgtggccaggaacaagatgggagatgacctgatcctgatgcacgtgtccctgcggctgaagccagccaagattgaccacaagcagtacttcaggaagcaggtgctgcacggcaaggacttccaggtggactgcaaggccagcggcagccctgtgcctgagatctcctggagcctgcctgatggcaccatgatcaacaatgccatgcaggctgatgattctggccacaggacccggcgctacaccctcttcaacaacggcaccctgtacttcaacaaggtgggcgtggccgaggagggggactacacctgctacgcccagaacaccctgggcaaggatgagatgaaggtgcacctgaccgtcatcacagctgccccccgcatccggcagagcaacaagaccaacaagaggatcaaggccggggacacagctgtgctggactgtgaggtgactggagaccccaagcccaagatcttctggctgctgcccagcaatgacatgatctccttcagcattgaccgctacaccttccacgccaacggcagcctgaccatcaacaaggtgaagctgctggacagcggggagtatgtgtgtgtggccaggaaccccagcggagatgacaccaagatgtacaagctggatgtggtgtccaagccacccctcatcaatggcctgtacaccaacagaactgtcatcaaggccacagctgtgcgccacagcaagaagcactttgactgcagagctgagggcacccccagccctgaggtgatgtggatcatgccagacaacatcttcctgacagccccctactacggcagccgcatcaccgtgcacaagaatggcaccctggagatcagaaatgtgcggctgagtgacagcgctgacttcatctgtgtggccagaaatgaaggaggagagagcgtgctggtggtgcagctggaggtgctggagatgctgcggcggcccaccttcaggaaccccttcaatgagaagatcgtggcccagctgggcaagagcacagccctgaactgcagcgtggatggcaaccccccacctgagatcatctggatcctgcccaacggcacccgcttcagcaatggcccccagagctaccagtacctgattgccagcaatggcagcttcatcatcagcaagaccacccgggaggatgctgggaagtaccgctgtgccgccaggaacaaggtgggctacatcgagaagctggtgatcctggagatcggccagaagcctgtgatcctgacctacgcccctggcaccgtgaagggcatcagcggggagagcctgagcctgcactgtgtgtctgatggcatccccaagcccaacatcaagtggaccatgcccagcggctacgtggtggaccggccccagatcaacgggaagtacatcctgcatgacaatggcaccctggtgatcaaggaggccacagcctatgaccggggcaactacatctgcaaggcccagaacagcgtgggccacaccctcatcaccgtgcctgtgatgattgtggcctacccaccccgcatcaccaaccggccccccaggagcatcgtgaccaggactggagctgccttccagctgcactgtgtggccctgggcgtgcccaagccagagatcacctgggagatgccagaccacagcctgctgagcacagccagcaaggagaggacccacggcagcgagcagctgcacctgcagggcaccctggtgatccagaacccccagaccagtgacagcggcatctacaagtgcacagccaagaaccccctgggcagtgactatgctgccacctacatccaggtgatctag

SEQ ID NO: 254273 - DNA, 1899 bp, Artificial Sequence
  derived and/or modified sequence
atgaccccacctgtgctgaccacagctgagacctctgtgaagcccagcgtgtctgccttcacccacagccccccagagaacaccaccggcatcagcagcaccatctccttccacagcaggaccctgaacctgacagatgtgattgaggagctggcccaggccagcacccagaccctgaagagcaccatcgccagcgagaccaccctgagcagcaagagccaccagagcaccaccaccaggaaggccatcatccgccacagcaccatcccccccttcctgagcagcagcgccaccctgatgcctgtgcccatcagcccccccttcacccagagagctgtgacagacaacgtggccacccccatcagcggcctgatgaccaacacagtggtgaagctgcacgagagcagccgccacaatgccaagccccagcagctggtggccgaggtggccaccagccccaaggtgcaccccaatgccaagttcaccatcggcaccacccacttcatctacagcaacctgctgcacagcacccccatgcctgccctgaccaccgtgaagagccagaacagcaagctgacccccagcccctgggccgagaaccagttctggcacaagccctacagcgagattgctgagaagggcaagaagccagaggtgtccatgctggccaccaccggcctgtctgaggccaccaccctggtgtctgactgggatggccagaagaacaccaagaagagtgactttgacaagaagcctgtgcaggaggccaccaccagcaagctgctgccctttgacagcctgagccgctacatctttgagaagcccagaattgtgggcggcaaggccgccagcttcaccatcccagccaacagtgatgccttcctgccctgtgaggccgtgggcaaccccctgcccaccatccactggaccagggtgcccagcggcctggacctgagcaagaggaagcagaacagccgggtgcaggtgctgcccaacggcaccctgagcatccagagggtggagatccaggaccggggccagtacctgtgcagcgccagcaacctgtttggaacagaccacctgcacgtgaccctgtctgtggtgtcctacccaccccgcatcctggagaggaggaccaaggagatcaccgtgcacagcggcagcacagtggagctgaagtgcagagctgagggccggcccagccccaccgtgacctggatcctggccaaccagacagtggtgtctgagagcagccagggcagccggcaggccgtggtgacagtggatggcaccctggtgctgcacaacctgagcatctatgaccggggcttctacaagtgtgtggccagcaaccctgggggccaggacagcctgctggtgaagatccaggtgattgctgcccctcctgtgatcctggagcagaggcggcaggtgattgtgggcacctggggcgagagcctgaagctgccctgcacagccaagggcaccccccagcccagcgtgtactgggtgctgagtgatggaacagaggtgaagcccctgcagttcaccaacagcaagctgttcctgttcagcaatggcaccctgtacatccggaacctggccagcagtgaccggggcacctatgaatgtattgccaccagcagcacaggcagcgagcggcgggtggtgatgctgaccatggaggagcgggtgaccagcccccgcatcgaggccgccagccagaagaggacagaggtgaactttggagacaagctgctgctgaactgcagcgccactggagagcccaagccccagatcatgtggaggctgcccagcaaggctgtggtggaccagcagcaccgggtggccgccggcagcaccagcaccctgatggacccctgcctgctggaccagtag

SEQ ID NO: 254274 - DNA, 7872 bp, Artificial Sequence
  derived and/or modified sequence
atgaaggtgaagggccggggcatcacctgcctgctggtgagcttcgcggtgatttgtctggtggccacaccaggggggaaggcgtgtccgagacggtgtgcttgttatatgcccacagaagtccactgtacctttcgatacctgacatccatccccgattctatcccccctaacgtcgagagaatcaatttaggctataactcccttgtgcgtctgatggaaaccgatttctctggtctcacaaaactcgaactgcttatgctgcacagcaacggaatccataccatccctgataagacatttagcgatctccaggcactgcaggtactgaagatgagttacaataaagtgcgtaagctgcagaaggatactttctatggtcttagaagcctcacaagactccatatggaccacaataatatcgaatttatcaatcctgaagttttctacggcttaaatttcttgcgcttggtgcacctggagggcaaccaactaacgaagctgcaccccgatacattcgtaagcctgtcttatctgcaaatattcaaaatcagtttcatcaaattcctgtacctcagcgacaacttcctgactagccttccccaggagatggtgtcgtatatgcccgatttggattcactgtatctgcatgggaatccatggacatgcgactgccatcttaaatggctgtcagattggatccaggaaaagccggacgtcattaaatgcaaaaaggaccgtagtccgagctcagcgcagcagtgccccctctgcatgaacccccggacaagtaagggtaaacccctagccatggtctccgctgcagcatttcaatgtgctaaaccaaccattgatagctccttgaagtctaaatccctgacaattctcgaagactcaagctctgccttcataagcccacaaggttttatggcaccattcggctccctgacccttaacatgacagaccagagtggaaacgaggccaatatggtgtgcagtatccagaagccctcccgcacgtcccccatcgccttcacagaggagaatgattatattgtgctgaacaccagcttctccacgtttctggtttgcaatatcgactacgggcatatccagcctgtgtggcagatcctcgccctatactcggacagtccccttattctcgaacgttcccatcttctaagcgaaacaccccagctctactataaatataaacaggtggcccctaagcctgaggacattttcaccaacatagaagcagatctgagagcagatccttcatggttaatgcaggatcagatttcattacagctgaacagaacagccactacgttttcaaccttacaaatccagtattcatcagatgctcagattactctccctcgcgcagaaatgaggcccgtcaaacacaaatggaccatgatctctagagataataacacgaaactggaacacaccgtccttgtgggaggcacagtcggcctaaactgccctgggcagggggatcctaccccacatgtggattggctgcttgcggatgggtcgaaagtccgtgccccgtacgtgtccgaagacggaagaattctaattgataaaagtggcaagcttgaacttcagatggccgacagtttcgacacaggtgtatatcattgcatttcctccaactatgacgatgcagatattctgacctatagaatcactgtcgtggagccccttgtcgaggcttatcaagagaacggtatccaccacacagtgtttataggagagaccctggacctgccatgtcacagtactggcatccccgatgcgtccatatcctgggtaatccccgggaacaatgtactctatcaatcatctagggataagaaggtgctgaataacggcaccctgcggatcctgcaggttacaccaaaagaccaggggtattataggtgcgtggccgctaatccttcaggcgtggactttcttatatttcaggtgtctgtcaagatgaaaggacaacgaccgctcgagcatgatggggaaaccgagggtagtggattagatgaaagcaatcccattgctcatttgaaggagccacccggcgcacagctgaggactagcgccctgatggaggccgaggtaggcaagcatacttcttccacttctaagagacataattaccgggagttaactctacagaggcgcggagacagcactcacagaagatttagagagaaccggcggcatttccctccttccgcaagacgcatcgatccccagcactgggcagctttactagagaaagctaagaagaatgccatgcctgacaaacgcgagaataccaccgtgtcacccccccctgtggtcacgcaattgccaaatatccctggagaggaggatgatagttctggcatgttggcacttcacgaagagtttatggtgcctgccacgaaggctctgaaccttccggcaaggacggttactgccgatagcaggacaatttcggattcccccatgaccaatattaattacggcacagaattttctcctgtggtaaattcacaaatcctgccgcccgaggaacccactgatttcaaactcagcaccgcaattaagaccaccgccatgagtaaaaatatcaatcccaccatgtcctcccagattcagggaacaacaaatcagcattcatcaactgtcttccctctcctcctgggcgctacggagttccaagattctgaccagatgggtcgcggccgagaacattttcagtctagaccccccatcacagtgaggacgatgatcaaggatgtgaacgtgaaaatgctgtcctctactacaaacaagctgctcctggagtcagtgaacactactaattctcatcaaacctcggttagagaggtgtcagagcctcggcacaatcacttttactcacacactactcagatactgagtacgtccaccttcccctctgaccctcataccgccgcacatagccaatttcccatccctcgcaacagtaccgtcaatatccctctctttagacggtttggcagacagaggaaaatcggcggccgcggccgcataatctcaccttaccggacaccagtcttgaggagacatagatactccatttttcgcagcaccacgcgggggtcatcagagaagtctacaacagcatttagcgctacagtactgaatgtcacgtgtcttagctgtcttccgcgcgagagattgacaactgctaccgccgctttgtcctttcccagcgccgccccaattacctttcctaaagccgatattgctcgagtcccctcagaggagagcaccacattagtgcagaaccctttactcttactggaaaataagccctccgtagagaaaactactccaacaatcaagtacttcagaacggagatctcgcaggtgaccccgaccggcgctgtaatgacatatgctcctaccagcatcccgatggaaaaaacccataaggtgaacgctagctatccccgcgtttcaagtaccaacgaagcaaagcgcgacagcgtgattacttccagcctgagtggggcaattacgaaacctcccatgaccattatcgcgatcaccagattctccagaaggaaaataccctggcagcagaactttgtgaataaccataaccccaaggggcgattgagaaaccagcacaaggtctctctgcagaaatctacagcagtgatgttgcccaagacctcaccagcgctcccgagagacaaagtgtctccttttcatttcacaactttgagtacgtctgtgatgcaaataccttccaataccctgaccacagcccaccacacaaccaccaagacccacaatcctggttcgctccccacgaaaaaggagctgccattccctcccttaaatcccatgctgcctagtatcatcagtaaggatagtagtaccaagagcattatctcaacccagaccgccattccggcaacaactccaacctttcctgcatcagtgataacttatgagacacagactgaacgaagccgcgctcagacaatccaacgtgagcaggaaccgcaaaagaagaaccgcactgatcccaatatcagtccagaccaaagttctggttttactacgccaactgccatgacaccacccgttctgaccactgctgaaacttcagtgaaaccctcagtcagcgcatttacccactccccacccgagaatactactgggatctcctcaaccattagctttcactccaggaccctaaacctgaccgatgttattgaggaacttgctcaggcatccacccaaactctaaaaagtacaattgcgtctgagacgacgctgagttctaagtcgcatcagagcacaactacccgtaaggcaattatccggcatagcacaattccacctttcctgtctagcagcgcaaccctgatgcccgtgcctatctccccacctttcacacaaagagccgttaccgacaacgtggctacacctattagcgggcttatgactaacacagtggtgaagctccatgaatcttcccgccacaatgccaagcctcagcaactcgtggcagaggtggctactagcccaaaggtgcacccaaatgccaagttcacaatcgggacaacccacttcatatacagtaaccttctgcacagcacccccatgcccgcattaacgacggttaaatctcagaacagtaaactcacaccgtccccctgggccgagaatcaattctggcataagccctattccgagatcgctgagaaagggaaaaagccagaagtctccatgctcgcaaccaccgggctatccgaagccacaaccttggtgtctgactgggacgggcagaagaatactaaaaagtccgacttcgataagaagcccgttcaagaggctacaacctcgaaactcctccctttcgactccctcagcaggtatatatttgaaaaacccagaatcgtggggggtaaggccgcctcgtttactatcccagctaattccgatgcctttcttccgtgtgaggccgtcggtaatcctctccccaccattcactggactcgcgtaccttcagggctggatctgtccaagcgcaagcagaactcccgggtgcaagtccttccaaacggcacgttatccattcagcgagtggaaattcaagaccggggtcagtacctgtgtagtgcctccaatctcttcggcaccgaccatctacatgttaccttgtcagtagtgtcttacccacccaggatcctggagcgtcgtactaaagaaattactgtccactccgggtctacggtggaactcaagtgccgcgccgaaggtcgcccatcaccgacagtgacttggattttggctaatcagacagtggtaagtgagtccagccagggctcacgccaggccgttgtgacggttgacggtaccctggttctccataacctgagtatctacgaccgtggcttctataagtgtgtggccagcaatcccggcggccaagacagcctgctcgtgaaaattcaggtgatagcggcgccacccgtgatccttgaacaacgcaggcaggtcattgtgggtacttggggggagtccttgaaactcccctgtacagccaaaggcacaccacagccctctgtctactgggtcctaagtgatgggaccgaggtgaaaccactccaatttactaatagtaagcttttcctgttctctaatggaactctttatattcgcaatttggcttcaagcgatcgggggacttatgaatgtatcgccactagtagcaccgggtccgaaaggcgtgtagtgatgctcaccatggaagagagagtcacctctccaaggattgaggccgcgtcccagaagcgaaccgaggtgaattttggcgataaactgttgcttaattgttcagcaacgggcgaacctaagccacagattatgtggcggttgccatcaaaggcagtggtggatcagcagcatagggtgggatcatggatacatgtctatccaaacggaagcctgttcatcggaagtgtcactgaaaaagacagtggcgtctatctgtgcgttgcccggaacaagatgggggatgacctcatccttatgcatgtgagcctgagattgaaacccgctaaaattgaccataaacagtatttcaggaagcaggtactgcatggcaaagactttcaggttgattgcaaagcttctggctctcccgttcctgagatctcctggagcttaccggatgggacgatgataaataatgctatgcaggccgacgatagcgggcacagaactaggagatataccttgtttaataatgggaccctgtattttaacaaggttggagttgctgaggagggcgactatacctgttacgcacagaacacccttggaaaagacgagatgaaggtgcacttgacggttatcactgctgcccctaggatccggcaatccaacaaaactaataagagaattaaggccggcgatacagctgtgctggactgtgaggtaacaggggaccccaagcccaagattttttggctgctaccctccaatgatatgattagcttttcgattgataggtatacattccacgcaaatggctctctgaccataaacaaggtcaaattgttagactcaggggaatatgtgtgcgtcgctcgaaacccctccggggacgacacaaaaatgtacaaactggacgtggtgtctaaacctcccttgataaatgggttgtatacaaaccgaaccgtcataaaagcaactgcagtgcgccattctaagaagcacttcgattgcagggccgaaggaaccccttctcccgaggtaatgtggatcatgcctgacaatatttttttgaccgcaccctattatggcagcagaattacagtgcataagaatgggaccctggagatcagaaatgtaaggttgagcgactcggctgatttcatctgtgtcgcgcgaaatgaaggcggagagagcgtactcgttgtgcagcttgaagtgttggagatgctaagaaggcccacctttcggaacccatttaatgaaaagatcgtggcccagctgggaaaatcaacggccctgaattgttccgtggacggtaatcctccgcctgaaatcatctggatactccccaatggaacccggttttctaatggcccacagtcctatcagtacttgattgcttcaaacggaagtttcataatctcaaagacgacacgggaagacgcaggtaaatacaggtgtgcagcacgaaataaggtggggtatatagagaaactcgtgatccttgaaatcggccagaaacccgttattcttacatatgcccccggaaccgttaagggcatctctggcgaaagcctctcgttgcattgcgtatccgacggcataccaaagcccaacatcaagtggaccatgcctagcgggtacgtagtcgacagaccgcagataaacgggaagtacatcttacacgataatggtacactggtaattaaggaagccaccgcttacgataggggaaattacatatgcaaggcacagaattcggtaggacacacactcatcacagtccccgtgatgatcgtcgcatatccgccaagaatcaccaacaggccacctcgttctattgtcaccagaacgggagctgcttttcaactacattgtgtggctctgggggtgccaaagcccgaaataacttgggagatgcccgatcactcgctgttgagtacagcatccaaagaacggactcatggaagtgaacagctacacctgcagggaacactcgtgatccaaaacccgcaaacatctgatagcggcatctacaagtgtactgccaagaatccacttggaagcgactatgccgctacctacattcaggttatctag

SEQ ID NO: 254275 - DNA, 556 bp, Artificial Sequence
  derived and/or modified sequence
gcacattcaagtgtttccccagctgtgtttacagctttgggtttctaagcctcttgagaagtaatcagttttgatcatcttaaatcccaaagtaaattttcttttctggatattatcctagttgctaacacaggttagtctggcctattgaaccatcttttactgctgtgaccttcaaaaatgaaagctgtggttttgccctgagaagaagaaaaggagatttgaaatatgactcagattcttccctgcaaaaggctgggacccttgaaaactatctacgtggaaaagtgagagaacaaggggacacaagcaaagctgcccaggcacctgttcaccgaagttgaggctggtcacaactccggcggcccaaggagctgctcggttcacccacaaggaatgagagctgcctgcctgctgctgcttggagagccccagacagtcgcttgaagaggtgtgtggatgtctcctagatcttgacttgctcctgaggaaatattgtgtgactgagtttcctgttatactgctctccaatccatcatgaaccagccagagtctg

SEQ ID NO: 254276 - RNA, 7872 nt, Artificial Sequence
  derived and/or modified sequence
augaaagugaagggcagagguaucacaugucugcuagugagcuucgccgugauaugccuuguggccacuccuggaggaaaagccugcccaaggcgcugugccugcuauaugcccacagaaguucacuguacauuuagguaucugacaucaaucccagauaguauuccaccaaauguggagaggaucaaccugggauacaauucgcugguuaggcuuauggaaaccgauuucucuggccuuacgaaacuggaacugcugaugcugcauucgaacggaauccacacuauccccgauaagacguucucagacuugcaggcgcugcaggugcugaagaugucguacaacaaggugagaaagcuccagaaagacaccuuuuacggacuccggucccuuacaagauugcauauggaccauaauaauaucgaauucauuaaucccgaaguguuuuaugggcugaauuuucugcgccugguucaucuugaaggcaaccagcucaccaaacuacauccugauacauucgugagucuaucguaucugcagauuuucaagauaagcuucauuaaauuucucuaccugucagauaacuuuuugaccucacucccucaagaaauggugagcuacaugccagacuuggacagccuguauuuacacggaaauccuuggaccugcgacugccaccugaaguggcugucagauuggauccaggaaaaaccagacgucauuaagugcaaaaaggaccgcagccccagcagugcucagcaaugcccccucuguaugaacccuaggaccucuaaaggcaaaccccuggccaugguuucugccgccgccuuccaaugugccaagccuacuauagacaguagucuuaagaguaagagucugaccauccuggaggauagcagcagcgcauucauaagcccgcagggcuuuauggcuccuuucggaucccucacauugaauaugacggaucaaagugguaaugaagccaacauggugugcucuauccagaaaccuucucgcacuagcccuauagccuuuaccgaggagaaugacuacauugugcugaauaccucauucucaacauuucuuguguguaacauugauuacggacacauucagccuguguggcagauucuggcucucuacucugacagcccccuuauccuugagaggagccaucuguugagcgagaccccacagcuguacuacaaauacaagcaggucgccccaaagcccgaggauaucuucaccaacauugaagcggaccugagggccgacccaagcuggcugaugcaggaucaaaucagccugcagcugaauagaacagcgaccacuuuuaguacacugcagauucaauauuccucugacgcucaaauaacacuuccacgggcagagaugcgaccugugaagcacaaauggacuaugaucucgagggacaauaauacaaagcuggaacacaccguccucgucggaggcaccgucgggcuaaacugucccggacaaggagacccaacuccacauguggauuggcugcuagcugacggcagcaaaguucgagccccuuaugugagcgaagauggccgcaucuugauugacaaguccggaaagcuugagcugcagauggcagacucuuuugauacaggcguauaucauuguauuaguucuaauuaugaugaugcugacauuuugaccuacaggaucacagucgucgagccgcuugucgaggcauaccaagagaacggcauccaucacacugucuuuaucggggagacuuuggacuugccuugccauuccacaggaauccccgacgccucaaucagcuggguuauucccggaaacaacguauuauaucagucuaguagagauaaaaagguccuaaauaacggaacucuccgaauccugcaaguaacaccuaaagaucagggauauuacagauguguugccgcaaacccuagcggaguggauuucuuaaucuuccaagugagcgugaagaugaaaggccagaggccucucgaacaugauggcgaaacagaagggucaggccuugaugaauccaaucccaucgcgcaccugaaagagcccccaggcgcucaacuccguacaagcgcccuuauggaggcagaaguuggcaaacauacaaguucuacguccaagaggcauaacuacagagagcugaccuugcagagaagaggcgacucaacccauagacguuuccgagaaaaccguagacacuucccuccuucugcacgacgcauagacccucagcacugggccgcucugcucgagaaggccaagaaaaaugccaugccagauaaacgcgagaacacaaccgugagcccgccccccguggugacacaacuccccaauauccccggggaggaggacgauaguucaggcauguuagcccuccacgaggaguucauggugccugcuacaaaggcccugaaccucccagcucgaaccgucacugccgacuccagaacgauuuccgacucucccaugaccaacauuaacuacgguacagaguucucucccguggucaacagccagauucucccgcccgaggagcccacagauuuuaaacuaucuacugcaauuaaaacaacugcgaugaguaaaaauaucaacccgacuaugucuagccagauucaagguacuaccaaucaacauuccucuacaguuuucccgcuucugcuaggcgcaacggaauuucaagacucugaucaaaugggaagaggaagagaacauuuccagaguagaccgcccauuaccgugaggacaaugaucaaggaugugaaugugaaaaugcugaguucuacaaccaacaaacugcuuuuagaaagcguuaacaccacuaauucccaucaaacguccguuagagaaguuagcgagccuagacacaaccacuucuauagccacacaacccagauacuuagcaccaguacguuucccagcgacccacacacagccgcccacucacaauuucccauaccuagaaacagcacagucaauaucccacuguuccgccgguucgggaggcaacguaaaauugguggccgaggccgaauuauuucccccuauagaacccccgucuugcgacgccaccgcuauucaauuuuucgaucaacuaccagaggcucuucagagaaaagcaccaccgcuuucuccgcaaccgugcuuaacguuacaugccugagcugcuuaccccgugaacgccuaaccaccgcaacagcagcucuaaguuuucccagcgcugcccccauaacguucccuaaagccgacauagcuagagucccaucugaggaauccacgacacuuguccagaauccucuguugcuguuagagaacaagccuucugucgaaaaaaccacaccaaccaucaaguacuuuaggacagagauuagccaggugaccccaacaggugcagugaugaccuacgccccgacaucuaucccuauggagaaaacgcacaaagugaacgcuucguacccaaggguuucuagcaccaacgaagcaaagcgcgauagcgugaucacuucuucccucuccggagccauaacuaagccucccaugacaauuaucgcuauuacccgauuuagccggcgaaaaaucccuuggcaacagaacuucguaaauaaucacaauccaaaagggcgucugagaaaccagcacaaagucagccugcagaagucaacagcggucaugcucccaaaaacuucccccgcacucccuagggacaagguguccccauuccauuucacuacauuaucuaccucaguaaugcagauaccgagcaacacccuaacuaccgcucaucacacuacuacuaagacccauaauccaggcucucugccuaccaaaaaagagcuaccuuucccccccuugaaucccaugcugcccucaauuaucagcaaggacucaucuaccaagagcaucauuagcacccaaacagcaaucccugcuacaacaccuaccuuucccgcuucggugaucacauaugagacucagaccgaacgaucccgcgcacaaacaauucaacgagagcaggagccacagaaaaaaaaccggaccgacccuaauaucucuccagaccagagcuccgguuucacgaccccuacugcaaugaccccuccaguauuaaccacagcugaaacaucugugaagccuucggugucagcauucacucacucuccaccugagaacaccaccgguaucucgucgaccauaagcuuucauagcaggacacucaaucugaccgacgugauagaggagcucgcccaggcaucuacccaaacgcugaaaagcacuauugcuucugagaccacccugucaucaaagucgcaccagucuacuaccacacgcaaggcuaucauucgccacucgacuauucccccuuuucugucaagcucugcaacacugaugccuguuccuauaucuccccccuucacucagagagcagugaccgauaaugucgcuaccccuaucagcggccugaugaccaacaccguugugaagcugcaugaaagcucgcggcacaacgcaaagccccaacaacuugucgccgaggucgccacguccccaaaaguccaccccaaugcaaaguucacuauuggaacuacucacuucauauauuccaaccugcugcacaguaccccuaugcccgcccucaccacgguaaaaucacaaaauucuaaacucaccccaucucccugggccgagaaccaauuuuggcacaagccuuacucggaaaucgcagaaaagggaaagaagccugaaguuagcaugcucgcgacuacgggauuaagcgaggccacaacacucguaagugacugggacggccagaaaaacacaaagaaaucagacuucgacaaaaagccgguccaggaggccacuacuagcaagcuucucccauuugacucccugagucgguacaucuucgagaaaccccgcauugucggaggaaaggccgccaguuuuaccaucccagccaacagcgaugcauuccugcccugcgaagcuguuggcaacccacugccgacuauucacuggacaagggucccaucgggccucgaucugucaaagcgcaaacaaaacucaaggguccaggucuugccaaauggcacccugagcauccagaggguggaaauucaagaucgaggacaguaucucugcucagccucuaacuuauucggcaccgaucaccugcacgugacuuugucuguuguaagcuaucccccuaggauccuugagcgacggacgaaggagauuaccgugcacucugggucgacuguggagcugaaauguagggcugagggaagaccuuccccuacugugacauggauccuggcaaaccagaccgucguuucugagucaucccagggcucucgccaggcuguggugacaguggacggcacauuggugcugcacaaccucagcaucuacgauagaggcuucuacaaaugcguggcuaguaauccugggggccaggacucucuucuugugaaaauccaggugauagccgcaccccccgugaucuuagaacagagacgccaggucaucgucggcaccuggggcgaaucucucaagcucccaugcacagccaagggaaccccgcagccgucgguguacuggguucuauccgacggaacugaggugaaaccccuucaguucaccaauucgaagcuguuucuguucagcaauggcacuuuguauauccguaaucucgcuagcagugauagagguaccuaugagugcauugccacaagcuccaccgguagcgaacguagggucgucauguuaacgauggaggaacgaguuacaucaccucgcaucgaagcugcgagucagaagcgaacggaagugaauuuuggggacaagcuguuauuaaauugcucagcaacaggcgaacccaagccccagaucauguggaggcuucccucuaaggcaguggucgaccagcaacauagggugggaucuuggauacauguuuauccaaauggcucacucuuuauaggaagcgugacugagaaagauucaggcgucuaucuuugcguggccagaaauaaaaugggcgacgaucuuauuuugaugcaugucucccuucggcuuaaaccagcuaagaucgaccacaagcaguacuuccgcaagcaggugcuucacgggaaggacuuccagguggacugcaaagccucagguagccccgucccagagauuucauggagccugcccgacgggaccaugaucaauaaugccaugcaggccgaugacucgggucaccgaacaagaagguacacauuguucaauaaugggacauuguauuucaacaaagucggaguggcugaagaaggcgacuacacuuguuaugcgcagaauacccucggaaaagacgagaugaaagugcaucugacuguaaucacugcagccccaagaauacgucaaucgaacaagacaaacaagcgaaucaaggcuggugauaccgcagugcucgauugcgaggucacgggggaucccaagcccaaaauuuucugguugcuacccuccaaugacaugauuaguuuuucgaucgaccgauauaccuuucacgcuaacgggucccugacgaucaacaaggugaagcucuuggauuccggggaguacgucuguguugcgcgcaaucccaguggggaugacacgaagauguacaaacucgaugucgucagcaaacccccccuaaucaauggauuguacacaaauaggacgguuaucaaggcuacagcaguacgucauucuaagaaacauuucgacugcagagccgagggcaccccaucucccgaggugauguggaucaugcccgauaacauuuuccucaccgcgccuuauuauggaucuaggaucacagugcacaaaaacggcaccuuggaaauacgaaaugucaggcucuccgacucagcugacuucauuugcgucgcaaggaacgagggcggggaaagcguucuagugguccaacuggaaguguuggaaaugcugagacgacccaccuuucgaaaccccuuuaaugaaaaaaucguugcccagcugggaaaaagcacggcauugaacugcucugucgacggaaaccccccgccugagaucauuuggaucuuacccaacggaacuagauucaguaaugggccgcagucuuaccaauaucuuaucgccaguaacggcuccuucauuauuuccaaaaccacucgugaggacgcaggaaaguaccggugcgcugcgagaaacaaagugggcuauauagaaaaacuugucauuuuagagauugggcagaaaccuguuauccugaccuaugcacccgggaccgucaaggggaucucuggggagucacuaagccuccacugcgugucugauggcauucccaagcccaacaucaaauggaccaugccaucuggauacgugguggacagaccccaaaucaacgguaaauauauccuucacgauaacggcacccucgugaucaaggaggcaacagcuuacgacaggggaaacuauauauguaaggcacagaauuccgucggucauacucugaucaccgugcccgucaugauuguagcuuauccaccucgaauuaccaaucgacccccgcggaguauagucacucguacaggcgcagcauuucaacuacacugcguggcucucggcgugccuaaaccagaaaucaccugggagaugccggaccauagucugcucucaacagccucuaaagagcguacucacggaucugaacaguuacaccugcaagguacccuggucauccagaacccucagacauccgacagcgggaucuacaagugcaccgcaaaaaaccccuuaggaagcgacuaugccgccacguauauccaggugaucuag

SEQ ID NO: 254277 - RNA, 1899 nt, Artificial Sequence
  derived and/or modified sequence
augacuccccccguuuuaacgacagcagaaacaucagugaagcccaguguauccgccuuuacccacucucccccugagaauacuaccggcaucagcuccaccauaagcuuucacucucgaacgcucaaccugaccgacgugauagaagagcucgcucaggccuccacgcagacucugaaauccacgaucgcuucagagaccacccuuucgaguaaaagucaucaaucaaccacuacucgaaaagcgauuauccgccauuccaccauccccccauuucuguccagcucggcuacccuaaugccagugcccauuuccccacccuucacccagagagccgucacagacaauguugccacuccgauuucuggacuuaugacaaauacuguggugaaacugcaugaguccucucggcauaaugccaaaccucaacagcuagucgccgaagucgcuaccaguccaaaagugcaccccaaugcuaaguuuacgaucggcacaacucacuuuaucuacaguaaucuccuucauagcacuccaaugccagcacucaccaccgugaagucucagaauucuaaacugacaccauccccuugggcagaaaaccaguucuggcauaagccuuauagugagaucgccgaaaaagguaaaaaacccgaagugucuaugcuggccaccaccggcuugucugaagcuacuacuuuagugucugacugggauggccaaaaaaauacgaagaagagugacuucgauaagaagccugugcaagaagccacgaccucuaaauugcucccuuucgacagcuugagcagauacauuuucgagaagccccgcauaguggggggcaaagccgccucuuucacgauuccugccaauagcgaugccuuucucccuugcgaggcagucggaaauccacuuccuacaauccacuggacacgcguaccauccgggcuugaucucucuaaacggaagcaaaacucucgcguacaggugcuccccaacggcacacuuagcauccagagaguggagauccaggauagaggacaauaccuguguucagcuuccaaccuauuuggcacugaccaccuucaugucacccucagcgucguauccuauccuccuagaauuuuggaacgcagaacaaaagagauaacagugcacuccggcuccacugucgagcugaaaugccgcgccgaggggcggccaucaccuaccgugacauggauucuggcaaaucagacagucgugucagagucaagccaggguagccgacaagcggugguuaccguggacggaacccuggugcugcauaaccuguccaucuacgaccgaggauucuauaagugcgucgccagcaaccccggaggacaggacucgcugcugguaaaaauccaaguuaucgcagccccuccugucauucuggaacaacggagacagguuaucgucggcaccuggggagaaucgcucaaacucccauguacugccaaaggcacuccacagcccagugucuacugggugcucucugaugguaccgaagugaagccacuccaguuuaccaacucuaagcuguuucucuucucuaauggaacauuguauaucaggaaccuagccagcucugacagaggaacauaugagugcaucgcuacaucuaguacuggcagugaaagacggguuguaaugcucaccauggaggagagaguaacuucuccccggaucgaagccgcaagccagaaacgaaccgaggugaacuuuggcgauaaguugcugcucaauugcuccgccacuggggagccuaagccccagauuauguggcgacugccuuccaaagccgugguugaucaacagcaccggguggcagcaggcucaacuucuacccugauggacccaugucuacucgaccaauag

SEQ ID NO: 254278 - RNA, 7872 nt, Artificial Sequence
  derived and/or modified sequence
augaaagugaaaggucgggguauuacaugcuuacucgugagcuucgcaguuauuugccucguggcuacaccaggcgguaaagccuguccuagacgaugugccugcuauaugcccacugagguucauugcacuuuucgauacuuaacuucuauacccgacuccauuccaccaaacgucgaacguaucaauuugggguacaacucauugguccgucugauggagaccgacuucucagggcuaacuaaacuggagcuccuuaugcugcacuccaauggaauccauacaauuccagauaaaaccuuuucagaucuacaagcacuccaaguucucaaaaugagcuauaacaaagugagaaaacuacaaaaggacacuuuuuacggcuugcgaucucugacgcgacuucauauggaccauaacaacaucgaguucauaaauccugaagucuucuacgggcucaauuuccucagguuggugcaccuggagggcaaccagcucacaaaacugcaccccgacaccuuuguaucacugaguuacuugcaaauauuuaaaaucucauuuaucaaauuucuguaccuuagcgauaacuucuugaccucucuaccacaggagauggucuccuacaugcccgaccucgauuccuuauaccugcauggaaaccccuggacaugugacugucaucugaaauggcucagcgauuggauacaagagaagcccgaugucauuaaaugcaagaaggacagaagucccuccuccgcacagcagugcccccugugcaugaaccccagaaccuccaagggaaaaccacuagccauggugucagccgccgccuuucagugcgccaaacccacuauugacaguucccugaaaucuaagagccugacaauccuggaagauaguucuucagcuuucauuucuccccaaggcuucauggcaccuuucggaucguuaacucucaacaugaccgaccagucugggaacgaggccaauaugguguguucuauccaaaaaccuucucggaccucuccaauugcauucacagaagagaacgacuauauaguccucaauaccaguuuuucuaccuuccucguuugcaauauugauuacggacacauacagcccguuuggcagauacuggcacucuacagcgacuccccauugauccuggagcgaagucaucuuuugucagaaacuccccaacuguauuauaaguacaaacaagucgcuccaaagccagaggauaucuuuacaaacauagaagcagacuuaagggccgaucccagcugguugaugcaagaucaaaucucccuccagcucaacagaacugccaccacauuuagcacucuccagauccaguacucuucagacgcccagaucacuuuaccaagagccgaaaugcgcccugugaaacacaaauggacuaugaucucgagggauaauaacacgaagcuugagcauacagugcucgugggcggaacuguaggacugaacugcccuggccagggggaccccacuccucacguggauuggcuguuggcggauggaucuaagguuagagcuccuuacgugucggaggacggcagaauccuuauagauaaaucaggcaagcucgaacuacagauggcugauuccuuugauacugguguguaccacugcauuuccagcaacuacgaugacgcggacauucugacauacagaauaaccguaguugagccucuaguggaagcuuaccaagaaaacgggauucaccacacggucuucaucggagaaacucuugaccugccaugucauucaacugguauccccgacgccucaaucagcuggguuauucccggaaacaacguauuauaucagucuaguagagauaaaaagguccuaaauaacggaacucuccgaauccugcaaguaacaccuaaagaucagggauauuacagauguguugccgcaaacccuagcggaguggauuucuuaaucuuccaagugagcgugaagaugaaaggccagaggccucucgaacaugauggcgaaacagaagggucaggccuugaugaauccaaucccaucgcgcaccugaaagagcccccaggcgcucaacuccguacaucagccuuaauggaagccgaggugggcaagcacaccucuucaacuucgaaacgccauaacuaccgcgaacucacacugcaacgaagaggagauagcacccacaggcgcuuccgcgagaauagaaggcacuucccacccucagcacgucgaaucgauccacagcacugggcagcccugcuugaaaaggcuaagaagaaugccaugcccgauaaaagagagaauacuaccguuagccccccuccagucguaacacaacuccccaauauccccggagaagaagaugacaguuccggcauguuggccuuacacgaggaauuuauggugcccgccacuaaagcauugaaucuaccugcccgcacaguaaccgcugacagcagaacuauuuccgauuccccaaugacuaacaucaauuacggaacugaauuuucuccaguugugaacucucaaauucuccccccugaagagccuacggauuuuaaguuauccacagccauuaaaacaaccgcaaugagcaaaaacauaaauccuacaaugagcagucaaauucagggcacgacaaaucaacacaguucaacagucuuuccgcuccuccugggagccacugaguuucaagauucugaucaaaugggccguggacgggaacacuuccagagucgcccuccuaucaccguccggaccaugauaaaggaugugaacguaaagaugcuguccucaacuaccaauaaacuauuacuggaguccguuaauaccaccaacagucaccagaccagugugcgugaaguuucagaaccgcgccauaaccacuuuuauucccauacuacccaaauucucucuaccuccaccuuucccucugauccccauacggccgcccauucacaguuuccaauaccucgcaauagcacagucaauaucccacuguuccgccgguucgggaggcaacguaaaauugguggccgaggccgaauuauuucccccuauagaacccccgucuugcgacgccaccgcuauucaauuuuucgaucaacuaccagaggcucuucagagaaaagcaccaccgcuuucuccgcaaccgugcuuaacguuacaugccugagcugcuuaccccgugaacgccuaaccaccgcaacagcagcucuaaguuuucccagcgcugcccccauaacguucccuaaagccgacauagcuagagucccaucugaggaaagcacgacacugguccaaaauccccuguuacuccuggaaaacaaaccuagcguggaaaagacaacuccaacuauaaaauauuuccgaacagaaaucucacaggucaccccaaccggagccgugaugaccuaugccccuaccagcaucccuauggaaaaaacucacaagguuaacgcauccuacccccgggucaguagcacaaaugaggccaagagggacaguguuaucacaucuucuuuaucaggcgcaauuaccaagccaccgaugacaaucauagccaucacucgauucucccgcagaaagaucccuuggcagcagaacuucguaaacaaucauaacccaaaaggaagacugagaaaucagcacaaaguauccuugcaaaagucuaccgcugucauguuaccaaagaccucccccgccuugccucgcgacaaagugucuccuuuccauuuuaccacucugagcaccagcgucaugcagauucccucuaauaccuugaccacagcccaucauacaacaacgaagacccauaacccaggcucgcuucccaccaaaaaggaacuccccuucccaccucugaacccgauguugcccagcaucaucaguaaagacuccaguaccaagaguaucauuucaacccaaacagcuauccccgccacuacuccaaccuucccagcaucaguuaucaccuaugagacccaaaccgaacgguccagggcccagacaauucagcgcgaacaggaaccacagaaaaaaaaucgaacagacccuaauaucaguccggaccaaagcuccggcuuuacaacuccaacagcuaugaccccuccagucuuaacaaccgcugaaacauccgugaagcccucagugucugccuuuacccauucgccccccgagaauacgaccggaauaucuaguacaauuucauuucacucucgcacauuaaaccucaccgauguuaucgaagagcuggcccaagcaaguacccagacacugaagagcacuaucgcuagcgaaaccacucugaguucuaaaagucaucaguccaccacaacccggaaggcaaucauccgccacaguaccaucccucccuuccuguccaguagcgcuacccucaugcccgucccgaucuccccuccguuuacucagcgcgccgucacugacaauguggccacccccauuagcggguuaaugacaaauaccguggucaagcuccaugaaagcucuagacauaaugcgaagccccagcaauuagucgcugaagucgcgacguccccaaaagugcacccaaacgccaaguucaccauaggcacaacucauuucaucuacucuaaucuuuugcacucaacaccuaugccggccuugacaacagugaagucccagaauucuaaacugacaccauccccaugggcggaaaaccaguucuggcauaaacccuauucagaaauugccgaaaagggcaagaaacccgaggucucaaugcuagccacaacagguuuaucugaggcgacaacauugguauccgauugggauggccagaagaauaccaagaagucagauuucgacaaaaagccaguucaggaggcaacaaccagcaagcucuuaccauucgacucccuuucccguuacauauuugagaaaccuagaaucgucggcggaaaagccgcuucuuuuacuauccccgcaaauucagaugcauuucuuccuugcgaggcuguagguaauccucugccaacaauccauuggacgcgcgugccuucugggcucgaccuuagcaaaagaaagcagaacagccgagugcaggugcugccaaaugggacccugaguauccagaggguagagauccaagaccggggccaauaucuguguucagccucgaaccuauucgguacugaccacuuacauguaacgcuuagcgugguaucuuauccaccaagaaucuuagaaaggaggaccaaagagauaacuguacacuccggauccaccguggaguugaaaugccgggcagagggaagaccuagcccuacagugacguggauucucgcaaaucagacugugguguccgaauccucucagggcuccagacaggcuguugucacgguggacgggacucugguacugcauaaucucucaauuuacgaucggggauuuuauaagugcguggccucaaacccuggcgggcaggacucucuucucgucaaaauacaaguuauugcugcaccccccguaaucuuagagcaacgaaggcaaguaaucgucggaacuuggggggagucacuuaaacucccauguaccgcuaaaggcaccccacaaccuucugucuacuggguguugagcgauggaacugaggucaaaccccugcaguucaccaacuccaagcucuuccuguuuagcaauggaacgcucuauauuagaaaucuugccucuucugauaggggcacauaugaaugcaucgcuacuaguucaaccgggagcgagcgacgagucgugauguugacgauggaagaaaggguaacaucucccagaauugaggcugccagccaaaaacguacugaggugaauuucggagacaagcuacuucucaacuguagcgcaacaggcgagccuaaaccucaaauaauguggagacuccccagcaaagccgugguggaucaacagcacagaguaggaaguuggauucacguguauccaaauggauccuuguuuaucggcagugugacagaaaaagacuccggagucuacuuaugcguggcacggaacaagaugggugacgaccucauucuuaugcacguuagccuccgacuaaagcccgcuaaaaucgaccauaagcaguauuuucggaagcagguuuuacacgguaaggauuuucaaguggacuguaaagcuagcggaagcccuguaccagaaaucaguuggucucugccggacgggacgaugauuaacaacgcuaugcaggcugacgauucaggccauagaacucgcagauauacucuguucaacaaugguacacucuauuuuaauaaggucggaguggcugaggaaggggacuacacgugcuaugcccaaaauacccuggggaaagacgagaugaaaguacaucuuacuguuauuaccgcugcaccaagaauuagacaaagcaauaagacaaacaagaggaucaaggccggcgacacugcagugcuggauugugaagucacuggagacccgaaaccgaagaucuuuuggcuccucccgaguaaugauaugaucucauuuucuauugaucgguauaccuuucaugcaaaugggucccucacaaucaacaaagugaaacugcuggacuccggggaauauguaugcguggccagaaaccccucaggggacgacacuaaaauguauaaacuugaugugguguccaaaccaccccugaucaacggacuuuacaccaaucggacugucauuaaagcuacugccgugcgccacuccaaaaaacacuuugauugcagagccgaaggaacacccuccccagaagugauguggauuaugcccgacaacaucuuucuaaccgcccccuauuacgggucuaggaucaccguccauaaaaacggaaccuuagagauuaggaacgugcgacugagcgacucagccgauuucauuuguguggcgcggaaugaaggaggugaauccguccuaguugugcagcuggaagugcucgaaaugcugcggagaccaaccuuuagaaaccccuucaaugaaaagaucgucgcgcaguugggcaagucgaccgcauuaaauuguucuguugaugguaacccacccccggagauuauuuggauacuuccuaacgguacaagauuuuccaauggcccacagucauaccaauaucugauugcaaguaacggcucuuucaucauaucaaagacuacacgggaagaugcaggaaaauaccguugcgcagcucgcaauaaaguuggguacaucgaaaaauugguuauccucgagaucggccagaagcccgucauccucacuuacgccccugguacaguuaaagggauuuccggagagagccugucacugcacugugugucagacggcauccccaaacccaacaucaaguggaccaugccgagugguuauguagucgaucggccucagauuaauggaaaauauauacugcacgacaacgggacuuuaguuauaaaggaggccacggcguaugaucgcggaaauuauauuuguaaagcucagaacuccguuggccauacuuuaauaaccgucccggucaugaucgucgccuauccuccgcggaucacgaaccgccccccacgaucuauaguaacccgaaccggcgccgcuuuccaacugcauugcguggcgcuuggcguucccaaaccugaaauuacgugggagaugccagaucauucacuguugucgacugcauccaaagaaagaacccacgguuccgagcagcuacauuuacaaggcacauuggugauccaaaacccccagacgagugacuccggcauauauaagugcacagccaaaaacccacucggaucugacuacgccgcuacauacauacagguuauuuag

SEQ ID NO: 254279 - RNA, 1899 nt, Artificial Sequence
  derived and/or modified sequence
augacgcccccgguuuuaacaacugcggaaacaucgguaaaaccuagcgugagcgccuucacacacagcccacccgaaaacacaaccggcaucucaagcacaaucucuuuccacucccguacuuuaaauuugacagacguaaucgaagagcucgcccaggcaucgacacaaacuuuaaagucuacaaucgccuccgagaccacccuaucgucuaagucacaucagucgaccaccacccgaaaggcaaucauccggcauucuacuauuccaccuuuccuuuccagcuccgcaacucugaugccugugccuaucaguccuccuuucacucagagggccgucaccgauaauguugcaacuccgauuagcggccuuaugaccaauacaguugucaagcuucacgagucuagcagacauaacgcaaagccccagcagcuuguugcugagguagccacuagcccuaaagugcaccccaacgccaaguuuaccauaggaaccacucacuuuauuuauagcaauuuacuccacucuaccccuaugccagcucucacaacagugaaaucucaaaacuccaaacugacuccaucaccaugggcagaaaaucaguuuuggcacaaacccuauuccgaaaucgcagagaaaggcaagaaaccugaagucaguaugcuggcgacgacuggcuuaucggaagcaacaacccuuguuucagacugggacggccaaaagaacacuaagaagucagacuuugacaagaagccugugcaagaggcgaccacuagcaaacuuuugccauuugacucauuaagccgcuauauuuucgaaaagccuaggauuguaggugggaaagccgcgaguuucaccauuccugccaauuccgacgcuuuccucccaugugaagccgucggaaacccucucccgaccauacauuggacucgcguacccuccggauuagaccuuuccaaacggaaacagaacagcagaguacaagugcuccccaaugguacacugagcauccaaagaguggaaauccaggaccgcggccaguauuuguguuccgccucuaaucuauucggcaccgaccacuuacauguuaccuugagcguaguuucuuacccaccacggauuuuggagagacgcaccaaagaaaucaccgugcacucaggcuccacuguagaguuaaaaugcagagcugaaggcagacccucccccacagugacuuggauccuggcuaaccagaccguggugucagaaaguagccaaggcagccgucaagccgucguuacuguggaugguacucuuguguuacauaaucuuagcauuuaugauagaggcuucuauaagugugucgcuuccaauccuggagggcaggauucauuacugguaaaaauccaagugauugccgcaccaccagucauucuggagcagcggagacaggugauaguaggcaccuggggcgagucauuaaaguuacccuguacagcuaaagggacuccucaaccuagcguuuacuggguuuugucagauggcacagaagucaaaccccuccaguucacaaacucaaaacucuuccuuuuuagcaacgggacucuguacauccgcaauuuagccuccagcgaucgcggaacuuacgaaugcaucgcaaccucuucaacaggguccgaaaggcgcgucgugauguuaacuauggaagaacgcgucaccuccccccggauugaagcugcaucgcagaaacggaccgagguuaauuucggagauaaacugcuucuaaacugcucagccacaggggagccgaaaccccagaucauguggcgacuacccaguaaagcaguuguugaucagcagcauagaguggcugccgguucuacaucaacccucauggaccccugccugcuugaccaauag

SEQ ID NO: 254280 - protein, 697 aa, Artificial Sequence
  derived and/or modified sequence
MAWREKSKKRLNMTSFNIAQGIHAFDYHSRLNLIATAGINNKVCLWNPYVVSKPVGVLWGHSASVIAVQFFVERKQLFSFSKDKVLRLWDIQHQLSIQRIACSFPKSQDFRCLFHFDEAHGRLFISFNNQLALLAMKSEASKRVKSHEKAVTCVLYNSILKQVISSDTGSTVSFWMIDTGQKIKQFTGCHGNAEISTMALDANETRLLTGSTDGTVKIWDFNGYCHHTLNVGQDGAVDISQILILKKKILVTGWERAITVFRPQNFNQFFIQPEEWKGGIQHHDDILCAAFLPPQTLVTGSYDGEIVLWNNSTENAHHVLHPDYQRLLKSKLDTKPQKLLSAGRSQPSHPMADHSTTGVRNFEIDTEGKNAVMRLCFLKARKNTAVTGGANLVSCGGSGYVRFWDIYKKQLLAEFLAHSGVGSIIMSTDKMNRYLTTGDLDGWLKIWNIEEYCLNSSKNKITKAPTLIRSFQPHEDRISSLEMCEPGGQLLIISSSADCSICVTGVCNAPVWIFGQAKHWHIENCLFLPKRDTNLVESEIQKEISLFSKEESCLDPTEHSLLNKKNKDDSTYNVRPSEDINLDIKYKERSTCMKETQKPYYGEVIKKSFSTFRSLNIGALEELPEVNKPAFLLDPEKYFRKEPEEERPQILEAPSLFKTLKAVFDEKNLFPKEILHHERKAKQLCQEKSCEVKKNKK

SEQ ID NO: 254281 - protein, 662 aa, Artificial Sequence
  derived and/or modified sequence
MTINWAELLSGCHKCCHILEHKLHQGDWVRQVTYNASLDAIISSTTSNTNSVVMAWREKSKKRLNMTSFNIAQGIHAFDYHSRLNLIATAGINNKVCLWNPYVVSKPVGVLWGHSASVIAVQFFVERKQLFSFSKDKVLRLWDIQHQLSIQRIACSFPKSQDFRCLFHFDEAHGRLFISFNNQLALLAMKSEASKRVKSHEKAVTCVLYNSILKQVISSDTGSTVSFWMIDTGQKIKQFTGCHGNAEISTMALDANETRLLTGSTDGTVKIWDFNGYCHHTLNVGQDGAVDISQILILKKKILVTGWERYDYASWKTIGRAITVFRPQNFNQFFIQPEEWKGGIQHHDDILCAAFLPPQTLVTGSYDGEIVLWNNSTENAHHVLHPDYQRLLKSKLDTKPQKLLSAGRSQPSHPMADHSTTGVRNFEIDTEGKNAVMRLCFLKARKNTAVTGGANLVSCGGSGYVRFWDIYKKQLLAEFLAHSGVGSIIMSTDKMNRYLTTGDLDGWLKIWNIEEESCLDPTEHSLLNKKNKDDSTYNVRPSEDINLDIKYKERSTCMKETQKPYYGEVIKKSFSTFRSLNIGALEELPEVNKPAFLLDPEKYFRKEPEEERPQILEAPSLFKTLKAVFDEKNLFPKEILHHERKAKQLCQEKSCEVKKNKK

SEQ ID NO: 254282 - DNA, 2094 bp, Artificial Sequence
  derived and/or modified sequence
atggcctggagagagaagagcaagaagagactgaacatgaccagcttcaacatcgcccagggcatccacgccttcgactaccacagcagactgaacctgatcgccaccgccggcatcaacaacaaggtgtgcctgtggaacccctacgtggtgagcaagcccgtgggcgtgctgtggggccacagcgccagcgtgatcgccgtgcagttcttcgtggagagaaagcagctgttcagcttcagcaaggacaaggtgctgagactgtgggacatccagcaccagctgagcatccagagaatcgcctgcagcttccccaagagccaggacttcagatgcctgttccacttcgacgaggcccacggcagactgttcatcagcttcaacaaccagctggccctgctggccatgaagagcgaggccagcaagagagtgaagagccacgagaaggccgtgacctgcgtgctgtacaacagcatcctgaagcaggtgatcagcagcgacaccggcagcaccgtgagcttctggatgatcgacaccggccagaagatcaagcagttcaccggctgccacggcaacgccgagatcagcaccatggccctggacgccaacgagaccagactgctgaccggcagcaccgacggcaccgtgaagatctgggacttcaacggctactgccaccacaccctgaacgtgggccaggacggcgccgtggacatcagccagatcctgatcctgaagaagaagatcctggtgaccggctgggagagagccatcaccgtgttcagaccccagaacttcaaccagttcttcatccagcccgaggagtggaagggcggcatccagcaccacgacgacatcctgtgcgccgccttcctgcccccccagaccctggtgaccggcagctacgacggcgagatcgtgctgtggaacaacagcaccgagaacgcccaccacgtgctgcaccccgactaccagagactgctgaagagcaagctggacaccaagccccagaagctgctgagcgccggcagaagccagcccagccaccccatggccgaccacagcaccaccggcgtgagaaacttcgagatcgacaccgagggcaagaacgccgtgatgagactgtgcttcctgaaggccagaaagaacaccgccgtgaccggcggcgccaacctggtgagctgcggcggcagcggctacgtgagattctgggacatctacaagaagcagctgctggccgagttcctggcccacagcggcgtgggcagcatcatcatgagcaccgacaagatgaacagatacctgaccaccggcgacctggacggctggctgaagatctggaacatcgaggagtactgcctgaacagcagcaagaacaagatcaccaaggcccccaccctgatcagaagcttccagccccacgaggacagaatcagcagcctggagatgtgcgagcccggcggccagctgctgatcatcagcagcagcgccgactgcagcatctgcgtgaccggcgtgtgcaacgcccccgtgtggatcttcggccaggccaagcactggcacatcgagaactgcctgttcctgcccaagagagacaccaacctggtggagagcgagatccagaaggagatcagcctgttcagcaaggaggagagctgcctggaccccaccgagcacagcctgctgaacaagaagaacaaggacgacagcacctacaacgtgagacccagcgaggacatcaacctggacatcaagtacaaggagagaagcacctgcatgaaggagacccagaagccctactacggcgaggtgatcaagaagagcttcagcaccttcagaagcctgaacatcggcgccctggaggagctgcccgaggtgaacaagcccgccttcctgctggaccccgagaagtacttcagaaaggagcccgaggaggagagaccccagatcctggaggcccccagcctgttcaagaccctgaaggccgtgttcgacgagaagaacctgttccccaaggagatcctgcaccacgagagaaaggccaagcagctgtgccaggagaagagctgcgaggtgaagaagaacaagaagtag

SEQ ID NO: 254283 - DNA, 1989 bp, Artificial Sequence
  derived and/or modified sequence
atgaccatcaactgggccgagctgctgagcggctgccacaagtgctgccacatcctggagcacaagctgcaccagggcgactgggtgagacaggtgacctacaacgccagcctggacgccatcatcagcagcaccaccagcaacaccaacagcgtggtgatggcctggagagagaagagcaagaagagactgaacatgaccagcttcaacatcgcccagggcatccacgccttcgactaccacagcagactgaacctgatcgccaccgccggcatcaacaacaaggtgtgcctgtggaacccctacgtggtgagcaagcccgtgggcgtgctgtggggccacagcgccagcgtgatcgccgtgcagttcttcgtggagagaaagcagctgttcagcttcagcaaggacaaggtgctgagactgtgggacatccagcaccagctgagcatccagagaatcgcctgcagcttccccaagagccaggacttcagatgcctgttccacttcgacgaggcccacggcagactgttcatcagcttcaacaaccagctggccctgctggccatgaagagcgaggccagcaagagagtgaagagccacgagaaggccgtgacctgcgtgctgtacaacagcatcctgaagcaggtgatcagcagcgacaccggcagcaccgtgagcttctggatgatcgacaccggccagaagatcaagcagttcaccggctgccacggcaacgccgagatcagcaccatggccctggacgccaacgagaccagactgctgaccggcagcaccgacggcaccgtgaagatctgggacttcaacggctactgccaccacaccctgaacgtgggccaggacggcgccgtggacatcagccagatcctgatcctgaagaagaagatcctggtgaccggctgggagagatacgactacgccagctggaagaccatcggcagagccatcaccgtgttcagaccccagaacttcaaccagttcttcatccagcccgaggagtggaagggcggcatccagcaccacgacgacatcctgtgcgccgccttcctgcccccccagaccctggtgaccggcagctacgacggcgagatcgtgctgtggaacaacagcaccgagaacgcccaccacgtgctgcaccccgactaccagagactgctgaagagcaagctggacaccaagccccagaagctgctgagcgccggcagaagccagcccagccaccccatggccgaccacagcaccaccggcgtgagaaacttcgagatcgacaccgagggcaagaacgccgtgatgagactgtgcttcctgaaggccagaaagaacaccgccgtgaccggcggcgccaacctggtgagctgcggcggcagcggctacgtgagattctgggacatctacaagaagcagctgctggccgagttcctggcccacagcggcgtgggcagcatcatcatgagcaccgacaagatgaacagatacctgaccaccggcgacctggacggctggctgaagatctggaacatcgaggaggagagctgcctggaccccaccgagcacagcctgctgaacaagaagaacaaggacgacagcacctacaacgtgagacccagcgaggacatcaacctggacatcaagtacaaggagagaagcacctgcatgaaggagacccagaagccctactacggcgaggtgatcaagaagagcttcagcaccttcagaagcctgaacatcggcgccctggaggagctgcccgaggtgaacaagcccgccttcctgctggaccccgagaagtacttcagaaaggagcccgaggaggagagaccccagatcctggaggcccccagcctgttcaagaccctgaaggccgtgttcgacgagaagaacctgttccccaaggagatcctgcaccacgagagaaaggccaagcagctgtgccaggagaagagctgcgaggtgaagaagaacaagaagtag

SEQ ID NO: 254284 - DNA, 2094 bp, Artificial Sequence
  derived and/or modified sequence
atggcttggcgggaaaaatccaagaaacgccttaacatgacgtcgtttaatatagcccaagggatccacgctttcgattaccatagtagactgaacctgatcgcgacagctggtatcaacaacaaggtgtgcttgtggaacccctatgtggtgtcaaaacccgtgggagtgctatgggggcacagtgctagcgttatcgccgtccagttctttgtggagaggaaacagctattctccttttctaaagataaagtgttgcgcctttgggatatccagcaccagctatcaatccagcgtattgcgtgttcgttcccaaaaagtcaggattttcgatgtctatttcacttcgacgaagctcatggaaggctattcatcagcttcaacaatcagttggccctcctcgccatgaagagtgaagcgagtaaacgagttaagagtcacgaaaaggccgtcacatgtgtcctttataattccatcttaaagcaggtaatctcaagtgataccggatctaccgtttctttctggatgattgacaccggacagaagattaagcagttcacgggttgccacggaaacgcggagatttctactatggcactggatgcgaatgaaacgcggttactcacggggtctaccgatggaaccgtgaagatttgggattttaacgggtactgccaccacacccttaatgtagggcaagacggggcagtggatatctctcagattttaattctgaagaagaagatcctagtgacaggatgggagcgggctatcaccgtgtttcgacctcagaactttaaccagttcttcatacagccggaagagtggaagggaggcatccagcatcatgacgatattttgtgtgcagcctttttacccccacaaactctcgtaaccggtagctacgacggagaaatcgtcttatggaacaattccacagaaaatgcccaccacgtgctgcaccctgattaccagcggctcttgaaatcaaagctggacacaaaaccccagaagctcctgagcgccggaaggagccagccctcacatcccatggccgatcatagcaccacaggcgtgaggaactttgagattgacactgagggtaaaaatgcggtgatgcgtctttgcttcctcaaggcacggaaaaacaccgccgtgacagggggtgcaaacttagtgagctgcgggggatctggatatgtccgcttctgggatatctataaaaagcaactactagctgagtttcttgcccactccggagtcggctcgataattatgtccactgacaagatgaacaggtacctgaccacgggtgatctcgatggttggctgaaaatttggaatatcgaggagtattgcctcaactcttccaagaacaagattaccaaagctcccacccttattcgctcatttcagcctcacgaagacagaatcagctcactagagatgtgtgagcctggaggccagctcttgatcatctcatcctccgctgattgctcaatctgtgtaaccggggtgtgcaacgctccagtttggatcttcggccaggcgaaacattggcacattgaaaactgcctgtttctccccaagagagataccaacctcgtggagtctgagattcagaaagagattagccttttctcaaaagaggagagttgtttagacccgaccgagcattctcttctcaacaaaaaaaataaggatgattcaacgtataacgttcgcccgagcgaagacattaacctggacatcaaatacaaggagcgatccacttgtatgaaagagacacaaaagccctattatggcgaggtaatcaaaaagtccttttccaccttccgctcacttaatattggggctctcgaggaactgccagaggtgaacaaaccagcgtttctgcttgatccggagaaatactttcgcaaggagccagaagaagaacggccccaaatacttgaagcaccgtctttgtttaagaccttaaaagctgtcttcgacgagaagaatttattccctaaagaaatactccatcacgaaagaaaagctaagcaactctgccaggagaagtcctgcgaagtaaagaaaaataagaaatag

SEQ ID NO: 254285 - DNA, 1989 bp, Artificial Sequence
  derived and/or modified sequence
atgaccatcaactgggctgaactgctttcaggctgccacaaatgctgtcatatattggagcataagctgcaccagggcgactgggttcgacaggtgacttacaatgccagtcttgatgccataatcagtagtaccacgtctaatactaacagcgtggtgatggcttggcgcgagaagtccaagaagagattaaatatgacgtcatttaatattgctcagggaatccatgcgtttgactatcacagccgtctgaatctcattgccaccgcaggaatcaacaataaagtgtgcctttggaatccttacgtcgtcagcaagccagtcggtgtgctctggggtcattctgcctctgtaatcgccgtacaattctttgttgagaggaagcagcttttctcattttccaaggataaggtgctgcgcttatgggatattcagcaccagttatccatccagcgaatcgcctgctcatttcctaaatctcaggacttccgatgtttgttccacttcgacgaagcacatgggcggctgttcatctctttcaacaatcaactggcattactcgcgatgaagtccgaagcgtctaagagagtcaagagtcatgagaaagccgtgacttgcgtgctgtacaactccatcctcaagcaggtgattagttccgacactgggagcaccgtatcattttggatgatcgataccgggcagaagattaagcagttcacaggctgccatggcaacgccgaaatttcaactatggcactggatgccaatgagacccgcctgcttactggtagtactgatgggaccgtgaagatatgggactttaatgggtactgccaccataccctgaacgttggccaggatggggcagtcgacatcagccagatcctcattcttaaaaagaaaattttagtcaccggctgggaacgttacgattacgcgagttggaagacaatcggcagggcaattaccgtgtttcggcctcagaattttaatcagttctttattcaacctgaagaatggaaaggtgggatccagcatcatgatgacattttgtgcgccgcttttcttccgccacaaacacttgtgaccggcagctacgatggcgagatcgtgctgtggaataattccaccgagaatgcgcaccacgtactccaccctgactaccagcggcttttgaaatcaaagctggatactaagcctcagaagctcttatcagctggaagatcacaaccgtcacatccaatggccgatcactcaacgactggcgtgagaaactttgagatcgataccgagggcaagaacgcggttatgcgcctctgtttcctgaaggccaggaaaaatacagcggtaactgggggcgctaacctggtctcttgtggcggctctgggtacgttcgattttgggacatttacaagaagcagctcctcgccgaattcttggctcacagcggcgttggatccataatcatgagcacggacaagatgaaccgctacctcactacaggtgacctggatggctggctcaagatttggaatatcgaggaggaatcttgcttggaccctaccgagcattctctgttgaacaaaaagaacaaggatgacagcacatacaacgtccgtccaagtgaagacattaacttagacataaagtataaagagcggtcaacctgcatgaaggagacacagaagccgtactatggcgaggtcatcaaaaagagtttctctacctttagatccctgaacatcggtgctttggaagaactaccagaggtcaataagcctgctttccttctcgatccagaaaagtacttccggaaagagcccgaggaagaacgcccgcaaattctggaagcaccgtccctgttcaaaactctcaaagcagtgtttgacgaaaagaacctctttcctaaggaaattctccaccatgaaagaaaagctaaacagttatgtcaagagaagtcctgcgaggtgaagaagaacaaaaaatag

SEQ ID NO: 254286 - DNA, 2094 bp, Artificial Sequence
  derived and/or modified sequence
atggcctggagggagaagagcaagaagaggctgaacatgaccagcttcaacatcgcccagggcatccacgcctttgactaccacagccggctgaacctgattgccacagctggcatcaacaacaaggtgtgcctgtggaacccctacgtggtgtccaagcctgtgggcgtgctgtggggccacagcgcctctgtgattgctgtgcagttctttgtggagaggaagcagctgttctccttcagcaaggacaaggtgctgcggctgtgggacatccagcaccagctgagcatccagagaattgcctgcagcttccccaagagccaggacttccgctgcctcttccactttgatgaggcccacggccgcctcttcatctccttcaacaaccagctggccctgctggccatgaagtctgaggccagcaagagggtgaagagccatgagaaggctgtgacctgtgtgctgtacaacagcatcctgaagcaggtgatcagcagtgacaccggcagcacagtgtccttctggatgattgacaccggccagaagatcaagcagttcaccggctgccacggcaatgctgagatcagcaccatggccctggatgccaatgagacccggctgctgaccggcagcacagatggcaccgtgaagatctgggacttcaacggctactgccaccacaccctgaatgtgggccaggatggagctgtggacatcagccagatcctgatcctgaagaagaagatcctggtgacaggctgggagcgggccatcaccgtcttccggccccagaacttcaaccagttcttcatccagcctgaggagtggaagggcggcatccagcaccatgatgacatcctgtgtgccgccttcctgcccccccagaccctggtgacaggcagctatgatggagagatcgtgctgtggaacaacagcacagaaaatgcccaccacgtgctgcacccagactaccagaggctgctgaagagcaagctggacaccaagccccagaagctgctgtctgctggccgcagccagcccagccaccccatggctgaccacagcaccactggagtgaggaactttgaaattgacacagagggcaagaatgctgtgatgaggctgtgcttcctgaaggccaggaagaacacagctgtgactggaggagccaacctggtgtcctgtggcggcagcggctacgtgcgcttctgggacatctacaagaagcagctgctggccgagttcctggcccacagcggcgtgggcagcatcatcatgagcacagacaagatgaaccgctacctgaccactggagacctggatggctggctgaagatctggaacatcgaggagtactgcctgaacagcagcaagaacaagatcaccaaggcccccaccctcatccgctccttccagccccatgaagatcgcatcagcagcctggagatgtgtgagcccggcggccagctgctgatcatcagcagcagcgctgactgcagcatctgtgtgactggagtgtgcaatgcccctgtgtggatcttcggccaggccaagcactggcacatcgagaactgcctcttcctgcccaagagggacaccaacctggtggagagcgagatccagaaggagatcagcctcttcagcaaggaggagagctgcctggaccccacagagcacagcctgctgaacaagaagaacaaggatgacagcacctacaacgtgcggcccagcgaggacatcaacctggacatcaagtacaaggagaggagcacctgcatgaaggagacccagaagccctactatggagaggtgatcaagaagagcttcagcaccttccgcagcctgaacattggagccctggaggagctgcctgaggtgaacaagccagccttcctgctggaccctgagaagtacttcaggaaggagcctgaggaggagcggccccagatcctggaggcccccagcctcttcaagaccctgaaggctgtgtttgatgagaagaacctcttccccaaggagatcctgcaccacgagaggaaggccaagcagctgtgccaggagaagagctgtgaggtgaagaagaacaagaagtag

SEQ ID NO: 254287 - DNA, 1989 bp, Artificial Sequence
  derived and/or modified sequence
atgaccatcaactgggccgagctgctgagcggctgccacaagtgctgccacatcctggagcacaagctgcaccagggcgactgggtgcggcaggtgacctacaatgccagcctggatgccatcatcagcagcaccaccagcaacaccaacagcgtggtgatggcctggagggagaagagcaagaagaggctgaacatgaccagcttcaacatcgcccagggcatccacgcctttgactaccacagccggctgaacctgattgccacagctggcatcaacaacaaggtgtgcctgtggaacccctacgtggtgtccaagcctgtgggcgtgctgtggggccacagcgcctctgtgattgctgtgcagttctttgtggagaggaagcagctgttctccttcagcaaggacaaggtgctgcggctgtgggacatccagcaccagctgagcatccagagaattgcctgcagcttccccaagagccaggacttccgctgcctcttccactttgatgaggcccacggccgcctcttcatctccttcaacaaccagctggccctgctggccatgaagtctgaggccagcaagagggtgaagagccatgagaaggctgtgacctgtgtgctgtacaacagcatcctgaagcaggtgatcagcagtgacaccggcagcacagtgtccttctggatgattgacaccggccagaagatcaagcagttcaccggctgccacggcaatgctgagatcagcaccatggccctggatgccaatgagacccggctgctgaccggcagcacagatggcaccgtgaagatctgggacttcaacggctactgccaccacaccctgaatgtgggccaggatggagctgtggacatcagccagatcctgatcctgaagaagaagatcctggtgacaggctgggagagatatgactatgcctcctggaagaccatcggccgggccatcaccgtcttccggccccagaacttcaaccagttcttcatccagcctgaggagtggaagggcggcatccagcaccatgatgacatcctgtgtgccgccttcctgcccccccagaccctggtgacaggcagctatgatggagagatcgtgctgtggaacaacagcacagaaaatgcccaccacgtgctgcacccagactaccagaggctgctgaagagcaagctggacaccaagccccagaagctgctgtctgctggccgcagccagcccagccaccccatggctgaccacagcaccactggagtgaggaactttgaaattgacacagagggcaagaatgctgtgatgaggctgtgcttcctgaaggccaggaagaacacagctgtgactggaggagccaacctggtgtcctgtggcggcagcggctacgtgcgcttctgggacatctacaagaagcagctgctggccgagttcctggcccacagcggcgtgggcagcatcatcatgagcacagacaagatgaaccgctacctgaccactggagacctggatggctggctgaagatctggaacatcgaggaggagagctgcctggaccccacagagcacagcctgctgaacaagaagaacaaggatgacagcacctacaacgtgcggcccagcgaggacatcaacctggacatcaagtacaaggagaggagcacctgcatgaaggagacccagaagccctactacggggaggtgatcaagaagagcttcagcaccttccgcagcctgaacatcggggccctggaggagctgcctgaggtgaacaagccagccttcctgctggaccctgagaagtacttcaggaaggagcctgaggaggagcggccccagatcctggaggcccccagcctcttcaagaccctgaaggctgtgtttgatgagaagaacctcttccccaaggagatcctgcaccacgagaggaaggccaagcagctgtgccaggagaagagctgtgaggtgaagaagaacaagaagtag

SEQ ID NO: 254288 - DNA, 2094 bp, Artificial Sequence
  derived and/or modified sequence
atggcctggcgggagaagagcaagaagcggctgaacatgaccagctttaacatcgcacaaggaatccacgcattcgactaccattccagacttaaccttatcgcaaccgcagggatcaacaacaaggtgtgtttgtggaacccatatgtagtgtccaaaccggttggggtgctgtggggccactctgccagcgtgattgcggtccagttttttgtagagcgtaagcaacttttttcattcagcaaagacaaagtcctgaggctgtgggatatccagcatcagctgtctatacagcgtatagcgtgtagctttccaaagagccaggacttccggtgcctgtttcattttgatgaagctcacggaagactcttcatcagctttaataaccagcttgcattactcgcgatgaagagcgaagcctcgaagcgagtgaagagccacgaaaaagctgtgacttgcgtgctgtataacagcattctgaaacaggtgatttctagtgacaccggatccactgtctccttctggatgatagacactggccagaagatcaagcagtttacagggtgccatggcaatgcagaaatttcaactatggcgctggatgccaatgaaacccggctgctgactggcagcaccgacgggactgtaaagatctgggacttcaacggatactgccaccacacgctgaatgtggggcaggacggggccgtggatatctcacagattctcattctcaagaaaaagattctggtgacgggttgggagcgcgcaatcacagtctttagaccccagaattttaaccagtttttcattcagccagaggagtggaagggagggatccagcaccacgacgatatcctgtgcgccgccttcttgcctcctcagacactcgtaactggctcatacgacggagagattgtgttgtggaataactctaccgaaaatgcgcatcacgtcctgcatcctgattaccagaggctgctgaagtccaagctggacaccaagcctcagaagctactttcggccggaagaagccagccttcccacccgatggctgaccattctaccactggagttcgaaatttcgagatcgacacagaaggaaagaatgctgtaatgcgcctctgctttctcaaagcgcggaagaataccgctgttaccggcggggcaaacctggtgagctgcgggggatccggatacgttcgattttgggatatatataagaagcaactgttagccgaatttcttgcacattccggcgtgggtagcattattatgtctacagacaagatgaaccgctacctgacaaccggggacctcgacggctggttgaagatctggaacatcgaggagtactgtcttaactcttccaagaataaaattacaaaagcccctacacttattagatcgttccagcctcacgaggatagaatcagctcccttgaaatgtgcgaacctggtgggcagttgcttattatttcctcttccgcggactgtagcatttgcgttacaggtgtctgtaacgcccctgtgtggatttttgggcaagctaaacactggcatatcgagaactgcctttttctgcctaagagagacaccaacctcgtagagtcagagattcagaaagagatatccctgttcagcaaagaggaatcatgcctggatcccacagagcattcattgctgaacaagaagaataaagatgacagcacttacaatgtcagaccttctgaagatatcaacctggacatcaaatataaggaaaggtccacttgcatgaaagaaacccaaaaaccatactatggagaggtcatcaagaaatctttctctactttcaggtcactcaatattggcgccttggaggaactcccagaggtgaataaacccgcgtttctcctggaccccgagaagtactttcggaaggagccagaggaggaacgacctcaaatattggaggcaccatctttatttaagacgctaaaggcggtattcgatgagaaaaacctctttccaaaagagattctgcaccacgagcggaaggctaagcagctctgccaggagaagagctgcgaggtgaagaaaaataaaaagtag

SEQ ID NO: 254289 - DNA, 1989 bp, Artificial Sequence
  derived and/or modified sequence
atgaccatcaactgggccgagctgctgagcggctgccacaagtgctgccacattctggagcataaactgcatcagggtgattgggtcagacaggtgacatacaatgcatcattagatgccatcatctcatcgaccacgtcgaacaccaacagcgttgtcatggcctggcgcgagaagagcaagaagcgtctaaacatgacgagtttcaacatcgcccaaggtatccacgccttcgactaccattctcggcttaacctcatcgccaccgccgggattaacaataaggtttgcctctggaatccctatgttgtcagcaaaccagtgggcgtgctctgggggcacagcgcttcagtcatcgccgtccagtttttcgttgagcggaagcaattgttttcattttctaaggataaggtgttacgtctatgggatatccagcaccaactcagcatacagcggatcgcttgcagcttccctaagtcccaggattttaggtgtcttttccacttcgacgaagcccatggacggctgtttattagcttcaataatcaactggcgttacttgccatgaaatccgaagcctcgaaacgggttaagtctcacgaaaaagccgtgacctgcgtgttgtataactcgatcctgaaacaggtgattagcagcgacacgggttctacagttagcttctggatgatcgacaccggccagaagatcaagcagttcactggatgccacgggaacgccgagatttcaaccatggcccttgatgccaacgaaacgcgcctgctgacgggcagcaccgatggcacagtgaagatttgggactttaacggttactgccaccacacacttaatgtcggtcaggacggcgctgttgatattagccaaatcctgatactgaagaagaagatcctggtgaccggctgggagcggtacgactatgcttcttggaaaaccataggtcgggctataactgttttccggccccagaacttcaaccagttctttattcagccagaagaatggaagggtgggatccagcaccatgacgacatcttgtgtgctgccttcctgccaccccagacactcgtcacaggttcctacgatggagaaatagtgctatggaacaattctactgagaatgcccaccacgtgctgcatccagattaccagcggctgctgaagtcgaaactcgacaccaaaccccagaaactgttgagcgctggcaggagccagcccagccaccctatggctgatcacagtacgaccggagtgagaaacttcgaaatagacacagagggcaaaaatgctgttatgcggctctgtttcctcaaggcgcgcaaaaacaccgctgtaactggcggcgccaaccttgtgtcttgcgggggcagtggatacgttagattctgggatatttacaagaagcagctcttagccgagttcctggctcattcaggggtggggagtattatcatgtcaactgataaaatgaaccggtatctcaccactggggacctcgatggctggttgaagatatggaacattgaagaggagtcgtgcctcgatcctaccgaacactctttgctgaataagaagaacaaggatgattccacatataacgtgcggccctcggaggatatcaacctggatattaaatataaggagcggtccacctgcatgaaagagacacagaagccatactatggagaagtgatcaaaaaatcctttagtacgttcaggtccttgaacatcggcgcccttgaggaattgcctgaggtgaataaacctgcttttttactcgaccccgagaagtattttcgaaaagagcctgaagaggaacgcccgcaaattctagaagccccgtctttatttaagacactaaaagccgttttcgacgagaagaacctattccctaaggagatactccaccacgaaaggaaggccaagcagttgtgtcaggaaaagagctgcgaggtgaaaaagaacaaaaagtag

SEQ ID NO: 254290 - DNA, 2094 bp, Artificial Sequence
  derived and/or modified sequence
atggcctggcgggagaaaagcaagaaacgccttaacatgaccagttttaatattgcacagggaattcatgcctttgactaccactctcggctgaacttgatcgctaccgccggtatcaacaacaaggtgtgcctgtggaatccttatgtcgtgagtaaacctgtaggggtactttgggggcattccgcaagtgtgatagccgttcagttctttgtcgagcgtaagcagctattcagcttctccaaggacaaagttctgcgtttatgggatatccaacatcaactatccattcaaaggattgcttgttcttttccaaaatcacaagactttaggtgcctgttccacttcgacgaggctcatggccgactgtttatttctttcaacaatcagcttgccttactggcgatgaagagcgaggcttctaaaagagtgaagtcccacgagaaagccgttacttgtgtgctgtacaacagtattttaaagcaggtgatatcaagcgataccggctcaaccgtttcattttggatgattgacactggccaaaagatcaaacaatttacaggatgtcacggcaatgcagagatttcaaccatggctctggatgccaacgagacccgactgttgacaggctcgactgacggcaccgtgaaaatatgggacttcaatgggtactgtcatcacacactgaatgtgggccaggatggagctgtcgacatttcccagattttgattctaaaaaagaaaatcttggtcacgggctgggaacgggctataactgtgtttaggccccaaaactttaaccagttctttatccagccagaagagtggaagggcggaattcagcaccatgacgacatactgtgtgctgcctttctgccaccgcagacactcgttactggttcttacgacggggagattgttctgtggaataacagtaccgagaacgcccaccacgtgctgcaccccgactatcagaggctactaaaaagtaaacttgacaccaagccacaaaaacttttatctgcgggacgatcccagcccagccatccgatggccgaccactctaccacaggtgtaaggaactttgagattgatacagaagggaagaatgccgtgatgcggctgtgcttccttaaggccaggaagaataccgcagtcacaggtggagctaatttagtgagttgtggaggctccggttatgtgcggttctgggacatttacaaaaaacaactgctggccgaatttctcgcacactctggtgtaggcagcatcattatgtcaacagataaaatgaaccgctacttaaccactggagatcttgacggctggctgaagatctggaacatcgaggaatattgcctgaactcaagtaagaacaaaattacgaaggcacctactctcattagatccttccagcctcatgaagatagaatttcatcactggagatgtgtgagcctggtggacagctcctcatcatttcctcatctgccgactgcagtatctgtgtcaccggagtgtgcaacgccccagtgtggatatttgggcaggctaagcattggcacatagagaattgtttatttctgccaaaacgggatacgaatctggtggaatccgaaattcagaaagagatttctctgttttccaaagaggaatcctgcctcgacccgactgaacactccctgctgaataagaagaataaagacgacagcacgtacaacgtgcgtcctagcgaggacatcaacctggacataaaatacaaagaacggtctacttgcatgaaggaaacccagaaaccctattatggagaggtaattaaaaagagcttctccacttttcggtccctcaacattggcgctctcgaggagctgcctgaggtaaacaaacctgcgttcctgctggaccctgagaaatactttcgcaaggagcctgaggaggagagaccccaaatcttggaggccccttcactctttaagacactgaaggcagtgttcgatgagaagaatttattcccgaaggagattttgcaccacgaaagaaaggctaaacagttgtgtcaggagaagagctgtgaggtaaaaaaaaataagaagtag

SEQ ID NO: 254291 - DNA, 1989 bp, Artificial Sequence
  derived and/or modified sequence
atgacaatcaattgggcggaattactttccggttgccataagtgttgccatatcttggagcacaaactgcaccagggagactgggtgagacaggtgacatacaacgcgagcttagatgcgattattagctctaccacctctaacactaactcagtggtgatggcatggagggaaaaaagtaagaaaagactcaatatgacgtcttttaatattgcccagggcatccatgctttcgattatcactccagactcaaccttattgcgaccgcaggcatcaataataaggtctgtctttggaatccttacgtggtgagtaaacctgttggggttctgtgggggcactccgcttctgtgatcgcggtccagttttttgtcgaacgcaaacaactatttagcttcagtaaggacaaagttctgcggctgtgggatatccagcaccagttgtccattcagcggattgcatgctcatttcccaagtcacaggactttcgctgcctgtttcactttgatgaagcgcatgggaggcttttcatctcatttaataaccagctcgccttgttagccatgaaaagtgaggccagtaaaagggtgaagtcacacgaaaaagccgtgacatgtgtgttgtataacagcatcctcaagcaagtgatttcaagtgacactggaagcacagtcagtttctggatgattgacaccggccagaagatcaaacagttcaccggttgtcatggaaatgccgagattagtacgatggccctcgatgcaaatgaaactcggctcctcaccgggtcaacggatggcacagttaaaatatgggatttcaatggttattgtcatcacacacttaacgtgggccaggatggcgcagtggatatatcacagatactgattcttaagaaaaagatacttgtcaccggatgggaacgctacgattatgcctcttggaaaacaatcggtagagcaatcactgtttttcggccacagaatttcaaccagttcttcattcaacccgaggaatggaaaggcggtatccagcatcacgacgacattctttgtgctgcatttttgcctcctcaaaccctcgtcaccggctcttacgacggggaaatcgtcctctggaataacagcacagagaatgcacaccacgtgctgcatccagactaccagcggctcctgaaaagtaaactcgatactaagccacagaagctcttgagcgcgggtcgaagtcagccatcgcatcccatggctgatcattcaacgacaggggtgcggaattttgagattgacacagagggtaagaatgccgtgatgagactttgttttctaaaagctcggaaaaacaccgccgtgactggtggcgctaacctggtgtcatgtgggggaagtggatacgtgagattctgggacatttataaaaagcagctgctggcagagttcctggctcacagcggagtcgggtctatcattatgtcaacagacaaaatgaacaggtacctaaccactggcgatttggacggatggctgaaaatatggaatattgaggaagaaagctgcctggacccaaccgagcactcactgctgaacaagaagaacaaagacgactctacctacaacgtgaggccttctgaggatatcaatctggacatcaaatacaaggaaaggtcaacttgcatgaaggagacccagaaaccctactacggtgaagtgattaaaaagagcttttccactttccgcagcctaaatattggcgcactcgaggaactccctgaggttaacaagcctgcttttctccttgaccctgagaagtattttcgcaaggagcctgaggaagagagaccacaaatcctggaggccccatcattatttaagactctaaaggcagtcttcgacgaaaaaaacttgtttcctaaggagattttgcatcacgagagaaaggcaaagcaactctgccaggagaagagctgcgaggtaaagaagaacaagaaatag

SEQ ID NO: 254292 - DNA, 2594 bp, Artificial Sequence
  derived and/or modified sequence
aggcacctgttgaaggaaaaagaagatccatccttatagaaatagttgaaggcaactgagaaaaggtgaagccattatgagttgccagaaagctgtacttgagttaaacatagggtcacagcttgggccaaagagtcctgagagaacagaaggtgtaactgcatttgaagactatggcacaggcctgcttgaaaaccaactcagcgtgggtgactttgtaaaaatacagaaggcctttgagttacttacaatgcatctttagacgctatcatttccagtacaaccagcaatacaaatagtgtggtgatggcttggagagagaaatcaaaaaagcgtcttaatatgacatccttcaacattgcccagggcattcatgcttttgattatcactctcggctcaatttaattgcaactgctggcattaacaataaagtttgcctttggaatccctatgttgtctctaaaccagtgggtgtcctttggggccactcagccagtgtaatagccgtccaattctttgtggaaagaaaacaacttttcagcttctccaaggataaagttttgagactctgggatattcaacaccagctgtccatccagaggatagcttgttctttccccaaaagtcaggacttcagatgtctcttccactttgatgaagcccatggacgacttttcatctcgtttaataaccagctagcattgttggcaatgaaaagtgaagccagcaagagggtgaaaagccatgagaaagcagtcacttgtgttctttacaattctatcttgaagcaggtaatcagctctgatacagggtctactgtttccttctggatgatagacactgggcagaaaatcaaacagtttactggttgccacggcaacgcagaaatcagcactatggcccttgatgcaaatgagactcggcttttgactggcagcacagatgggactgtaaagatatgggacttcaatggatattgtcaccatacactaaatgttgggcaagatggagctgtggatatttcacaaatcctcattcttaagaagaaaatactggttacaggctgggagagggctattactgtgtttcgaccccaaaacttcaatcaatttttcatccagcctgaagaatggaaaggaggtatacagcaccatgatgacatcttgtgtgctgcgtttttacctccacaaactcttgttacggggagttatgatggagaaattgttctatggaacaatagcacagagaatgctcaccatgttcttcaccctgattaccagaggttgctaaagtcaaaattagatacaaaacctcaaaaacttctcagtgctgggagaagccaaccctcccaccccatggcagaccattctaccacgggagtccgcaactttgagattgacactgagggcaaaaatgctgttatgagactttgctttcttaaagcaagaaaaaacactgcagtgacaggaggagctaacctggtatcatgtggaggatctggttatgtcagattttgggatatatataagaagcaacttctggctgaatttttggctcatagtggagttggatcgattattatgtctactgataagatgaatcgataccttaccacaggagatcttgatggatggttgaaaatctggaatatagaggagtactgtcttaactccagtaagaacaaaatcaccaaggccccaactctgataagatcattccaacctcatgaggaccgaataagttccttagagatgtgtgagccaggtggtcagttactgattatctcctcctctgcagactgcagtatttgtgtgactggtgtctgcaatgctcctgtttggatctttggtcaggcaaagcactggcatattgaaaactgccttttccttcctaaaagagatactaatttagtggaaagtgagattcaaaaggaaatttctttattttctaaggaggaatcttgtttagacccaacagaacattctctacttaataagaaaaacaaagatgactcaacatacaatgtcagaccatcagaagatataaatttagatataaaatataaggaaagaagtacctgcatgaaagaaacacaaaaaccttattatggtgaagttataaaaaaatcattcagtacatttaggtcattaaacattggagccctggaagagctgcctgaagtgaataaacctgctttccttctagaccctgagaaatactttaggaaagaaccagaggaagagcgtccccaaattctggaggccccgtcactttttaaaactttgaaagctgtatttgatgagaaaaacctgtttcccaaggaaattctgcatcatgaacgaaaagccaagcaattatgccaagaaaaaagttgtgaagtgaagaaaaataagaagtaattacaacagaaaaaccttcactgttacataaggtacagatataaaatgcagaaaaagcatcaagaattctgccttttattttattttatatttaaacttcaggaagttttctcttcatgggataatttagtactgcttttatctatcatctgtcaatttctctgtattcttaataaaataaatattgaactaaa

SEQ ID NO: 254293 - DNA, 2215 bp, Artificial Sequence
  derived and/or modified sequence
ggcctgctagtgcatgtgaagatggagaagccactatgaccattaactgggcagagctgctctctggatgtcacaaatgttgccatatattagagcataaacttcatcaaggagattgggtcaggcaagttacttacaatgcatctttagacgctatcatttccagtacaaccagcaatacaaatagtgtggtgatggcttggagagagaaatcaaaaaagcgtcttaatatgacatccttcaacattgcccagggcattcatgcttttgattatcactctcggctcaatttaattgcaactgctggcattaacaataaagtttgcctttggaatccctatgttgtctctaaaccagtgggtgtcctttggggccactcagccagtgtaatagccgtccaattctttgtggaaagaaaacaacttttcagcttctccaaggataaagttttgagactctgggatattcaacaccagctgtccatccagaggatagcttgttctttccccaaaagtcaggacttcagatgtctcttccactttgatgaagcccatggacgacttttcatctcgtttaataaccagctagcattgttggcaatgaaaagtgaagccagcaagagggtgaaaagccatgagaaagcagtcacttgtgttctttacaattctatcttgaagcaggtaatcagctctgatacagggtctactgtttccttctggatgatagacactgggcagaaaatcaaacagtttactggttgccacggcaacgcagaaatcagcactatggcccttgatgcaaatgagactcggcttttgactggcagcacagatgggactgtaaagatatgggacttcaatggatattgtcaccatacactaaatgttgggcaagatggagctgtggatatttcacaaatcctcattcttaagaagaaaatactggttacaggctgggagaggtatgattatgcctcatggaaaactataggaagggctattactgtgtttcgaccccaaaacttcaatcaatttttcatccagcctgaagaatggaaaggaggtatacagcaccatgatgacatcttgtgtgctgcgtttttacctccacaaactcttgttacggggagttatgatggagaaattgttctatggaacaatagcacagagaatgctcaccatgttcttcaccctgattaccagaggttgctaaagtcaaaattagatacaaaacctcaaaaacttctcagtgctgggagaagccaaccctcccaccccatggcagaccattctaccacgggagtccgcaactttgagattgacactgagggcaaaaatgctgttatgagactttgctttcttaaagcaagaaaaaacactgcagtgacaggaggagctaacctggtatcatgtggaggatctggttatgtcagattttgggatatatataagaagcaacttctggctgaatttttggctcatagtggagttggatcgattattatgtctactgataagatgaatcgataccttaccacaggagatcttgatggatggttgaaaatctggaatatagaggaggaatcttgtttagacccaacagaacattctctacttaataagaaaaacaaagatgactcaacatacaatgtcagaccatcagaagatataaatttagatataaaatataaggaaagaagtacctgcatgaaagaaacacaaaaaccttattatggtgaagttataaaaaaatcattcagtacatttaggtcattaaacattggagccctggaagagctgcctgaagtgaataaacctgctttccttctagaccctgagaaatactttaggaaagaaccagaggaagagcgtccccaaattctggaggccccgtcactttttaaaactttgaaagctgtatttgatgagaaaaacctgtttcccaaggaaattctgcatcatgaacgaaaagccaagcaattatgccaagaaaaaagttgtgaagtgaagaaaaataagaagtaattacaacagaaaaaccttcactgttacataaggtacagatataaaatgcagaaaaagcatcaagaattctgccttttattttattttatatttaaacttcaggaagttttctcttcatgggataatttagtactgcttttatctatcatctgtcaatttctctgtattcttaataaaataaatattgaact

SEQ ID NO: 254294 - protein, 920 aa, Artificial Sequence
  derived and/or modified sequence
MEASSSGITNGKTKVFHPVAKDVNILFDELEAVSSPCKDDDSLLHPGNLTSTSDDASRLEAGGETVPERNKSNGLYFRDGKCRIDYILVYRKSNPQTEKREVFERNIRAEGLQMEKESSLINSDIIFVKLHAPWEVLGRYAEQMNVRMPFRRKIYYLPRRYKFMSRIDKQISRFRRWLPKKPMRLDKETLPDLEENDCYTAPFSQQRIHHFIIHNKETFFNNATRSRIVHHILQRIKYEEGKNKIGLNRLLTNGSYEAAFPLHEGSYRSKNSIRTHGAENHRHLLYECWASWGVWYKYQPLDLVRRYFGEKIGLYFAWLGWYTGMLFPAAFIGLFVFLYGVTTLDHSQVSKEVCQATDIIMCPVCDKYCPFMRLSDSCVYAKVTHLFDNGATVFFAVFMAVWATVFLEFWKRRRAVIAYDWDLIDWEEEEEEIRPQFEAKYSKKERMNPISGKPEPYQAFTDKCSRLIVSASGIFFMICVVIAAVFGIVIYRVVTVSTFAAFKWALIRNNSQVATTGTAVCINFCIIMLLNVLYEKVALLLTNLEQPRTESEWENSFTLKMFLFQFVNLNSSTFYIAFFLGRFTGHPGAYLRLINRWRLEECHPSGCLIDLCMQMGIIMVLKQTWNNFMELGYPLIQNWWTRRKVRQEHGPERKISFPQWEKDYNLQPMNAYGLFDEYLEMILQFGFTTIFVAAFPLAPLLALLNNIIEIRLDAYKFVTQWRRPLASRAKDIGIWYGILEGIGILSVITNAFVIAITSDFIPRLVYAYKYGPCAGQGEAGQKCMVGYVNASLSVFRISDFENRSEPESDGSEFSGTPLKYCRYRDYRDPPHSLVPYGYTLQFWHVLAARLAFIIVFEHLVFCIKHLISYLIPDLPKDLRDRMRREKYLIQEMMYEAELERLQKERKERKKNGKAHHNEWP

SEQ ID NO: 254295 - DNA, 2763 bp, Artificial Sequence
  derived and/or modified sequence
atggaggccagcagcagcggcatcaccaacggcaagaccaaggtgttccaccccgtggccaaggacgtgaacatcctgttcgacgagctggaggccgtgagcagcccctgcaaggacgacgacagcctgctgcaccccggcaacctgaccagcaccagcgacgacgccagcagactggaggccggcggcgagaccgtgcccgagagaaacaagagcaacggcctgtacttcagagacggcaagtgcagaatcgactacatcctggtgtacagaaagagcaacccccagaccgagaagagagaggtgttcgagagaaacatcagagccgagggcctgcagatggagaaggagagcagcctgatcaacagcgacatcatcttcgtgaagctgcacgccccctgggaggtgctgggcagatacgccgagcagatgaacgtgagaatgcccttcagaagaaagatctactacctgcccagaagatacaagttcatgagcagaatcgacaagcagatcagcagattcagaagatggctgcccaagaagcccatgagactggacaaggagaccctgcccgacctggaggagaacgactgctacaccgcccccttcagccagcagagaatccaccacttcatcatccacaacaaggagaccttcttcaacaacgccaccagaagcagaatcgtgcaccacatcctgcagagaatcaagtacgaggagggcaagaacaagatcggcctgaacagactgctgaccaacggcagctacgaggccgccttccccctgcacgagggcagctacagaagcaagaacagcatcagaacccacggcgccgagaaccacagacacctgctgtacgagtgctgggccagctggggcgtgtggtacaagtaccagcccctggacctggtgagaagatacttcggcgagaagatcggcctgtacttcgcctggctgggctggtacaccggcatgctgttccccgccgccttcatcggcctgttcgtgttcctgtacggcgtgaccaccctggaccacagccaggtgagcaaggaggtgtgccaggccaccgacatcatcatgtgccccgtgtgcgacaagtactgccccttcatgagactgagcgacagctgcgtgtacgccaaggtgacccacctgttcgacaacggcgccaccgtgttcttcgccgtgttcatggccgtgtgggccaccgtgttcctggagttctggaagagaagaagagccgtgatcgcctacgactgggacctgatcgactgggaggaggaggaggaggagatcagaccccagttcgaggccaagtacagcaagaaggagagaatgaaccccatcagcggcaagcccgagccctaccaggccttcaccgacaagtgcagcagactgatcgtgagcgccagcggcatcttcttcatgatctgcgtggtgatcgccgccgtgttcggcatcgtgatctacagagtggtgaccgtgagcaccttcgccgccttcaagtgggccctgatcagaaacaacagccaggtggccaccaccggcaccgccgtgtgcatcaacttctgcatcatcatgctgctgaacgtgctgtacgagaaggtggccctgctgctgaccaacctggagcagcccagaaccgagagcgagtgggagaacagcttcaccctgaagatgttcctgttccagttcgtgaacctgaacagcagcaccttctacatcgccttcttcctgggcagattcaccggccaccccggcgcctacctgagactgatcaacagatggagactggaggagtgccaccccagcggctgcctgatcgacctgtgcatgcagatgggcatcatcatggtgctgaagcagacctggaacaacttcatggagctgggctaccccctgatccagaactggtggaccagaagaaaggtgagacaggagcacggccccgagagaaagatcagcttcccccagtgggagaaggactacaacctgcagcccatgaacgcctacggcctgttcgacgagtacctggagatgatcctgcagttcggcttcaccaccatcttcgtggccgccttccccctggcccccctgctggccctgctgaacaacatcatcgagatcagactggacgcctacaagttcgtgacccagtggagaagacccctggccagcagagccaaggacatcggcatctggtacggcatcctggagggcatcggcatcctgagcgtgatcaccaacgccttcgtgatcgccatcaccagcgacttcatccccagactggtgtacgcctacaagtacggcccctgcgccggccagggcgaggccggccagaagtgcatggtgggctacgtgaacgccagcctgagcgtgttcagaatcagcgacttcgagaacagaagcgagcccgagagcgacggcagcgagttcagcggcacccccctgaagtactgcagatacagagactacagagaccccccccacagcctggtgccctacggctacaccctgcagttctggcacgtgctggccgccagactggccttcatcatcgtgttcgagcacctggtgttctgcatcaagcacctgatcagctacctgatccccgacctgcccaaggacctgagagacagaatgagaagagagaagtacctgatccaggagatgatgtacgaggccgagctggagagactgcagaaggagagaaaggagagaaagaagaacggcaaggcccaccacaacgagtggccctag

SEQ ID NO: 254296 - DNA, 2763 bp, Artificial Sequence
  derived and/or modified sequence
atggaggcaagtagttccggcattaccaatgggaaaactaaagtgtttcaccccgtcgcaaaagatgttaacatactctttgatgaactggaagctgtctcctcgccctgcaaagacgacgactcccttctgcatcctggaaacttgaccagtacttcggacgatgcctcccgcctggaggctggcggagagactgttccagaacgtaacaagagcaacgggctctatttcagagatggcaaatgccgcatcgattatatcctggtctataggaaaagtaatccgcagactgaaaaaagggaagttttcgagcgaaacatacgggccgaggggctgcagatggaaaaggaatctagcctcattaattctgacattatctttgttaagctccacgccccttgggaggtcctaggtcggtatgccgagcagatgaacgtgcgcatgccattccgacggaaaatttattacctcccgagaagatacaagtttatgtcccgtatcgacaagcagatctcaagattccgaaggtggctgccgaagaagcccatgaggctagataaggagaccctgcccgatttggaggagaatgactgttacaccgcaccgttctctcagcagcggatacaccacttcataatccataataaggagaccttctttaacaacgctacccgaagtcgcattgtgcaccacatcctgcaacgtataaaatacgaggagggcaaaaacaaaattggattgaacagattgctcaccaatggctcttacgaggccgccttccctttacacgagggttcgtaccgctccaagaacagcatacggacacatggcgctgaaaaccacaggcatctcctgtatgagtgttgggctagctggggtgtttggtacaaatatcagcctctcgacctggtaagaagatatttcggggagaaaataggcctttacttcgcctggctcggctggtacactggcatgttgttcccagcagccttcattggactgtttgtgttcctgtatggagtgactactctagaccactctcaagtgtcaaaagaagtctgccaggcaaccgatatcatcatgtgtccagtctgcgacaaatactgcccatttatgaggctgtctgacagttgtgtgtatgctaaggtgacacatctcttcgacaacggtgctacggttttttttgccgtgttcatggcagtctgggcaaccgtgttccttgaattttggaagcggcgccgagctgtgattgcttatgactgggatctgattgattgggaagaggaggaagaggaaatccggccacaattcgaggcgaagtactcgaaaaaagagcgcatgaacccgatatcaggaaagcctgagccatatcaggcctttacagataaatgctcaaggctgatcgtatctgctagcggaattttttttatgatttgtgtggtgattgctgctgtgtttggcatcgttatttacagggtcgtaacagtcagtacatttgccgccttcaaatgggcactgatcagaaacaactctcaggtggcgactactggcacagccgtctgcattaatttctgcatcatcatgctgttgaatgttctctacgagaaagtggcactgttactcacaaatctggaacaacccagaacggaatccgagtgggagaactccttcacattaaaaatgttcctgttccagtttgtgaatttgaactcgtctacattctatattgccttttttcttgggcggttcactgggcaccctggcgcctacctgcggctgatcaacaggtggcggctggaagagtgccacccgagtggttgcctcattgatctgtgcatgcagatgggaataatcatggtgttgaaacaaacatggaataacttcatggaattggggtacccgctgatacagaattggtggacccgaaggaaggtcaggcaggagcacgggccggaacgcaagattagcttcccccagtgggaaaaagattataatctccaaccaatgaatgcctatggactgttcgatgagtacctggagatgattctgcagtttggcttcactacgatctttgtggctgcatttccacttgcgccccttttggccctgttaaataatatcattgaaattcgtttggacgcttacaagtttgtcacccagtggaggcgcccactcgcctcgcgggctaaggatatcggtatctggtacggaatcctggaggggatcggcatattatccgtgataaccaacgcgtttgtgatcgccattacctccgactttatcccacgcctcgtgtacgcatataaatacggcccttgcgcgggccagggagaggccgggcaaaagtgtatggtgggctacgtaaacgccagcctgagcgtgttccgaatttcggactttgagaatcgctccgaaccagagtcagatggtagcgagtttagtgggacaccacttaagtactgccgttatagagactacagggaccccccacattctttggtcccatacggctatacattacagttctggcacgtcctggctgcgagactcgctttcataatagtgtttgaacatctagtgttctgtatcaagcatttgattagttatttgatcccggacctccctaaggacctgcgggaccgcatgaggcgggaaaaatacctgatccaggaaatgatgtacgaagcagagttggaacgactccagaaagaacgtaaggaacgaaagaagaatggaaaagcacaccacaatgagtggccgtag

SEQ ID NO: 254297 - DNA, 2763 bp, Artificial Sequence
  derived and/or modified sequence
atggaggccagcagcagcggcatcaccaacgggaagaccaaggtgttccaccctgtggccaaggatgtgaacatcctgtttgatgagctggaggccgtgagcagcccctgcaaggatgatgacagcctgctgcaccctggcaacctgaccagcaccagtgatgatgccagccggctggaggccggcggggagaccgtgcctgagaggaacaagagcaatggcctgtacttcagagatggaaaatgtagaattgactacatcctggtgtacaggaagagcaacccccagacagagaagcgggaggtgtttgaaagaaacatccgggcagagggcctgcagatggagaaggagagcagcctcatcaacagcgacatcatctttgtgaagctgcacgccccctgggaggtgctgggccgctatgcagagcagatgaatgtgaggatgcccttccggaggaagatctactacctgccccggcgctacaagttcatgagcagaattgacaagcagatcagccgcttccgccgctggctgcccaagaagcccatgaggctggacaaggagaccctgcctgacctggaggagaatgactgctacacagcccccttcagccagcagaggatccaccacttcatcatccacaacaaggagaccttcttcaacaatgccaccaggagccgcatcgtgcaccacatcctgcagaggatcaagtatgaggagggcaagaacaagattggcctgaaccggctgctgaccaacggcagctatgaggccgccttccccctgcacgagggcagctaccgcagcaagaacagcatccgcacccacggggctgagaaccaccgccacctgctgtatgagtgctgggcctcctggggcgtgtggtacaagtaccagcccctggacctggtgcggcgctactttggagagaagattggcctgtactttgcctggctgggctggtacacaggcatgctgtttcctgctgccttcatcggcctgtttgtgttcctgtatggagtgaccaccctggaccacagccaggtgtccaaggaggtgtgccaggccacagacatcatcatgtgccctgtgtgtgacaagtactgccccttcatgaggctgagtgacagctgtgtgtatgccaaggtgacccacctgtttgacaatggagccaccgtcttctttgctgtgttcatggctgtgtgggccaccgtcttcctggagttctggaagagaagaagagctgtgattgcctatgactgggacctgattgactgggaggaggaggaggaggagatccggccccagtttgaggccaagtacagcaagaaggagaggatgaaccccatcagcggcaagccagagccctaccaggccttcacagacaagtgcagccgcctcatcgtgtctgccagcggcatcttcttcatgatctgtgtggtgattgctgctgtgtttggcatcgtcatctacagagtggtgacagtgtccacctttgctgccttcaagtgggccctgatccggaacaacagccaggtggccaccaccggcacagctgtgtgcatcaacttctgcatcatcatgctgctgaatgtgctgtatgagaaggtggccctgctgctgaccaacctggagcagcccaggacagaaagtgagtgggagaacagcttcaccctgaagatgttcctgttccagtttgtgaacctgaacagcagcaccttctacatcgccttcttcctgggccgcttcaccggccaccctggggcctacctgcggctcatcaaccgctggaggctggaggagtgccaccccagcggctgcctgattgacctgtgcatgcagatgggcatcatcatggtgctgaagcagacctggaacaacttcatggagctgggctaccccctcatccagaactggtggaccaggaggaaggtgcggcaggagcacggccctgagaggaagatctccttcccccagtgggagaaggactacaacctgcagcccatgaatgcctacggcctgtttgatgagtacctggagatgatcctgcagtttggcttcaccaccatctttgtggccgccttccccctggcccccctgctggccctgctgaacaacatcatcgagatccggctggatgcctacaagtttgtgacccagtggaggcggcccctggccagccgggccaaggacatcggcatctggtacggcatcctggagggcatcggcatcctgagcgtcatcaccaatgccttcgtcatcgccatcaccagtgacttcatcccccggctggtgtatgcctacaagtatggcccctgtgccggccagggcgaggccggccagaagtgcatggtgggctacgtgaatgccagcctgtctgtgttccgcatcagtgactttgaaaatagaagtgagcctgagagtgatggcagcgagttcagcggcacccccctgaagtactgccgctacagagactacagagatcctccccacagcctggtgccctacggctacaccctgcagttctggcacgtgctggccgcccggctggccttcatcatcgtgtttgagcacctggtgttctgcatcaagcacctgatctcctacctgatcccagacctgcccaaggacctgcgggacaggatgagaagagagaagtacctgatccaggagatgatgtatgaggccgagctggagcggctgcagaaggagaggaaggagaggaagaagaatggcaaggcccaccacaatgagtggccctag

SEQ ID NO: 254298 - DNA, 2763 bp, Artificial Sequence
  derived and/or modified sequence
atggaggccagcagcagcggcatcaccaacggcaagaccaaggtgttccatcccgtggcgaaggacgttaatatccttttcgatgagttagaagcagtcagctcaccgtgcaaagatgacgactctttacttcacccgggtaacctgacctctacgtcagacgacgcaagccggctggaggccgggggggagacagtgccggagaggaacaagtccaacgggctgtatttccgtgatggaaaatgccggatcgattatatcctggtttataggaaatcaaaccctcagacagaaaaacgagaggtgttcgagaggaatatcagggcagagggcctgcagatggagaaggagtccagcctgatcaacagcgacattatttttgtaaagctgcacgctccgtgggaggtgttaggtagatacgctgagcagatgaacgtgcggatgccctttcgacgaaagatctactacctgcctcggaggtacaagtttatgtctcgaattgataaacaaatatctcggttcagaagatggctgcccaaaaagcccatgagactggataaggaaaccctgccagatttggaggaaaatgactgttatacagcccctttttcccagcagagaattcaccattttataatccacaataaagagacattttttaataatgctacacggtcacgaatcgtgcatcacatccttcagcgcatcaaatatgaggagggaaagaataagataggccttaatcggctgttgaccaacgggtcatatgaagccgcctttcccctgcacgagggcagctaccgatcaaagaactcaatccgtactcatggagcagagaatcacaggcacctcctctatgaatgctgggcctcatggggtgtatggtataaataccaaccactggatttagtgcggcggtactttggggaaaagatcggcttgtactttgcatggttgggctggtacaccggtatgctttttcctgcagctttcattgggttattcgtgtttctgtatggtgtaaccaccttagatcatagccaggtgagtaaggaggtgtgccaggcaacggacatcatcatgtgtcccgtctgtgataagtattgtcctttcatgagactgtccgacagctgcgtgtatgcgaaagtcactcatctgtttgataatggcgccacagttttttttgctgtatttatggcagtgtgggcaacagtcttcttggagttctggaagaggaggagggcagtcatagcgtacgactgggacctgattgactgggaggaggaggaagaggagatcaggccacagttcgaagcaaaatattcgaagaaggagcgcatgaaccccattagtggtaagcctgaaccgtaccaggcctttacagacaagtgtagccgtttaatcgtcagtgcatccgggatttttttcatgatttgtgttgtgatcgcagcagtcttcggtatcgtgatttatagagtggtcaccgtgagcacattcgccgcattcaagtgggcactaatcaggaacaactcccaggtcgctaccactggaactgccgtttgcatcaacttttgcattattatgttacttaacgtcctgtatgaaaaggtagcattactgctcactaatctagaacaacctagaaccgaaagcgaatgggagaacagtttcactcttaagatgtttctcttccagtttgtgaacctgaacagtagtacgttctacatagcctttttcctcgggcgtttcaccgggcaccccggggcctatcttaggctgatcaatcgatggcggctagaagaatgccacccttccgggtgtctgattgatctgtgcatgcagatgggcatcataatggtcttaaagcaaacgtggaacaactttatggagcttggttaccctctcatacagaattggtggacacggcgaaaggtgcggcaggagcacggcccagagcgaaagatctctttcccccaatgggaaaaggattataatctgcagccaatgaacgcctacggcttgtttgatgaatacctcgagatgatcttacagtttggattcaccactattttcgtagccgccttccctttggcaccactgctcgcgctcttaaacaacattatcgaaatcagacttgacgcctacaagtttgtgactcaatggcggaggcctctggcgagtcgcgccaaggatatcggaatctggtatggcatcctggagggcatcggaatattaagcgtgatcaccaatgcgttcgtgatcgctatcactagcgacttcatcccaagactggtctatgcgtataaatatgggccatgtgccggccaaggcgaggccggccaaaaatgcatggttgggtatgtgaacgctagccttagtgtcttccgtatctccgatttcgagaacagatccgagcccgagtcagatgggagcgaattctctggtacccctttgaagtactgtcgctaccgggactacagagacccaccgcattctttagtaccttatggttatactcttcagttctggcatgtccttgctgcaagactggcatttatcatcgtcttcgagcacctggtcttctgcatcaaacacttgatttcttatctcatacccgatctgccgaaagacctgcgtgacaggatgaggagagaaaagtacctcatacaggagatgatgtatgaggccgaattagaacggctgcaaaaagaacgaaaggaacggaagaaaaacggcaaggctcaccacaatgagtggccatag

SEQ ID NO: 254299 - DNA, 2763 bp, Artificial Sequence
  derived and/or modified sequence
atggaggctagcagctcgggaataaccaatggcaaaactaaagtgtttcacccggtggccaaagatgtgaacatcctcttcgatgagctggaggccgtctctagtccctgtaaggatgatgattccctgctccaccctgggaatcttacctccacaagcgacgacgcgtctcggcttgaagcaggaggtgaaaccgttccagagaggaataaaagcaacggattatattttcgcgatgggaagtgcagaattgattacattctggtatataggaagtcgaatccccaaacagaaaagcgggaagtgtttgagcggaatattcgggctgaaggtttgcaaatggagaaagaaagttccctgattaactccgatatcatattcgttaagctgcatgccccttgggaggttctgggacgctatgccgaacagatgaacgtccgcatgccatttagaagaaagatctactacttgccaagacgatacaagttcatgagcagaatagacaaacagatttcaagattcagacgctggctgcccaagaagcccatgcgtctcgacaaggaaactctacccgacttggaagaaaacgattgctacacagccccattttcacagcagcggatccatcactttatcatccacaataaggagacattcttcaataacgccaccagatctaggattgtccaccatattctgcagcggatcaaatacgaggagggtaagaataagattggtctgaataggctgctgacgaatggctcttacgaggctgcttttccgttacacgagggttcctaccggagcaaaaactcaatcagaacacacggggcagaaaatcatagacacttgctttacgagtgttgggcaagttggggtgtgtggtataaataccagccgctagacctggtgcgcagatatttcggcgaaaaaatcggtctttacttcgcatggctgggatggtacactggtatgctgtttcctgcggcttttattggcctgttcgtcttcctatacggtgttaccacacttgaccattcacaagtttctaaagaggtgtgccaggctaccgacattattatgtgcccagtgtgcgacaaatactgcccctttatgcgactgtctgactcatgcgtgtacgctaaagtgacgcatctctttgataacggcgctacagtgttttttgccgtgttcatggctgtttgggccactgtgttcctagaattctggaagagaagaagggccgtgatcgcttatgactgggaccttatagactgggaggaagaagaagaagaaatccggccacagtttgaggctaagtattcaaagaaggagcggatgaaccccattagcggtaaaccagagccttatcaggcctttaccgacaaatgctccagactgatagtgtccgcatccggcatattttttatgatctgcgtagtgattgccgcagtgtttggcatcgtgatctaccgggtggtcacagtgagtacttttgcggctttcaaatgggccctgatccgaaataactcccaggtggcaacgacaggtaccgccgtgtgtatcaatttctgcatcataatgctgctgaatgtgctgtatgaaaaggtggccctgctattgactaacctggagcaacccagaaccgagtccgagtgggagaacagctttacactgaagatgtttctcttccagtttgtgaatttaaactcctcaaccttttatattgccttttttctcggtagatttactgggcatccaggagcatacctcagattgattaacagatggcgcctggaagagtgtcaccctagcggatgtttgattgatctgtgtatgcagatgggcatcattatggtgctcaaacagacctggaacaactttatggagctgggatatcccctgatccaaaactggtggacccgaagaaaggtgcggcaggaacacgggcctgagcggaaaatatctttcccacaatgggagaaagattataaccttcagcccatgaacgcgtatgggctcttcgatgagtaccttgagatgatccttcaattcggcttcacaacgatttttgtggcagctttccctctcgctcctctactggccttactgaacaatatcattgagatacggctcgatgcttacaagttcgtgacacagtggagaagaccgctggcttcccgagctaaggacatcggcatctggtacggcatattggaagggatcggaatactgagcgtgattaccaatgcgttcgtgattgcaattacttctgacttcattcccagactggtgtatgcctacaaatatgggccatgcgccggacagggagaggccggacagaagtgcatggtcgggtatgttaatgccagtctctccgtcttccggatatccgattttgagaacaggagcgaacccgagtccgacggctcagaattctcgggaactccccttaaatactgcaggtatcgggactacagagacccaccccattcacttgttccctacggctatactctgcagttttggcacgttcttgccgctaggctggccttcatcattgtcttcgaacacttagtattttgcatcaagcatctgatttcttaccttatccccgatctccccaaggacctccgcgaccgaatgcgcagggagaagtacttaatccaggagatgatgtacgaagccgagctcgagcgcctgcagaaagagagaaaagagaggaagaaaaatggcaaagcacaccataatgagtggccctag

SEQ ID NO: 254300 - protein, 374 aa, Artificial Sequence
  derived and/or modified sequence
MRPGTALQAVLLAVLLVGLRAATGRLLSGQPVCRGGTQRPCYKVIYFHDTSRRLNFEEAKEACRRDGGQLVSIESEDEQKLIEKFIENLLPSDGDFWIGLRRREEKQSNSTACQDLYAWTDGSISQFRNWYVDEPSCGSEVCVVMYHQPSAPAGIGGPYMFQWNDDRCNMKNNFICKYSDEKPAVPSREAEGEETELTTPVLPEETQEEDAKKTFKESREAALNLAYILIPSIPLLLLLVVTTVVCWVWICRKRKREQPDPSTKKQHTIWPSPHQGNSPDLEVYNVIRKQSEADLAETRPDLKNISFRVCSGEATPDDMSCDYDNMAVNPSESGFVTLVSVESGFVTNDIYEFSPDQMGRSKESGWVENEIYGY

SEQ ID NO: 254301 - protein, 337 aa, Artificial Sequence
  derived and/or modified sequence
MRPGTALQAVLLAVLLVGLRAATGRLLSGQPVCRGGTQRPCYKVIYFHDTSRRLNFEEAKEACRRREEKQSNSTACQDLYAWTDGSISQFRNWYVDEPSCGSEVCVVMYHQPSAPAGIGGPYMFQWNDDRCNMKNNFICKYSDEKPAVPSREAEGEETELTTPVLPEETQEEDAKKTFKESREAALNLAYILIPSIPLLLLLVVTTVVCWVWICRKRKREQPDPSTKKQHTIWPSPHQGNSPDLEVYNVIRKQSEADLAETRPDLKNISFRVCSGEATPDDMSCDYDNMAVNPSESGFVTLVSVESGFVTNDIYEFSPDQMGRSKESGWVENEIYGY

SEQ ID NO: 254302 - protein, 134 aa, Artificial Sequence
  derived and/or modified sequence
MRPGTALQAVLLAVLLVGLRAATGRLLSGQPVCRGGTQRPCYKVIYFHDTSRRLNFEEAKEACRRDGGQLVSIESEDEQKLIEKFIENLLPSDGDFWIGLRRREEKQSNSTACQDLYAWTDGSISQFRETSSSF

SEQ ID NO: 254303 - DNA, 1125 bp, Artificial Sequence
  derived and/or modified sequence
atgagacccggcaccgccctgcaggccgtgctgctggccgtgctgctggtgggcctgagagccgccaccggcagactgctgagcggccagcccgtgtgcagaggcggcacccagagaccctgctacaaggtgatctacttccacgacaccagcagaagactgaacttcgaggaggccaaggaggcctgcagaagagacggcggccagctggtgagcatcgagagcgaggacgagcagaagctgatcgagaagttcatcgagaacctgctgcccagcgacggcgacttctggatcggcctgagaagaagagaggagaagcagagcaacagcaccgcctgccaggacctgtacgcctggaccgacggcagcatcagccagttcagaaactggtacgtggacgagcccagctgcggcagcgaggtgtgcgtggtgatgtaccaccagcccagcgcccccgccggcatcggcggcccctacatgttccagtggaacgacgacagatgcaacatgaagaacaacttcatctgcaagtacagcgacgagaagcccgccgtgcccagcagagaggccgagggcgaggagaccgagctgaccacccccgtgctgcccgaggagacccaggaggaggacgccaagaagaccttcaaggagagcagagaggccgccctgaacctggcctacatcctgatccccagcatccccctgctgctgctgctggtggtgaccaccgtggtgtgctgggtgtggatctgcagaaagagaaagagagagcagcccgaccccagcaccaagaagcagcacaccatctggcccagcccccaccagggcaacagccccgacctggaggtgtacaacgtgatcagaaagcagagcgaggccgacctggccgagaccagacccgacctgaagaacatcagcttcagagtgtgcagcggcgaggccacccccgacgacatgagctgcgactacgacaacatggccgtgaaccccagcgagagcggcttcgtgaccctggtgagcgtggagagcggcttcgtgaccaacgacatctacgagttcagccccgaccagatgggcagaagcaaggagagcggctgggtggagaacgagatctacggctactag

SEQ ID NO: 254304 - DNA, 1014 bp, Artificial Sequence
  derived and/or modified sequence
atgagacccggcaccgccctgcaggccgtgctgctggccgtgctgctggtgggcctgagagccgccaccggcagactgctgagcggccagcccgtgtgcagaggcggcacccagagaccctgctacaaggtgatctacttccacgacaccagcagaagactgaacttcgaggaggccaaggaggcctgcagaagaagagaggagaagcagagcaacagcaccgcctgccaggacctgtacgcctggaccgacggcagcatcagccagttcagaaactggtacgtggacgagcccagctgcggcagcgaggtgtgcgtggtgatgtaccaccagcccagcgcccccgccggcatcggcggcccctacatgttccagtggaacgacgacagatgcaacatgaagaacaacttcatctgcaagtacagcgacgagaagcccgccgtgcccagcagagaggccgagggcgaggagaccgagctgaccacccccgtgctgcccgaggagacccaggaggaggacgccaagaagaccttcaaggagagcagagaggccgccctgaacctggcctacatcctgatccccagcatccccctgctgctgctgctggtggtgaccaccgtggtgtgctgggtgtggatctgcagaaagagaaagagagagcagcccgaccccagcaccaagaagcagcacaccatctggcccagcccccaccagggcaacagccccgacctggaggtgtacaacgtgatcagaaagcagagcgaggccgacctggccgagaccagacccgacctgaagaacatcagcttcagagtgtgcagcggcgaggccacccccgacgacatgagctgcgactacgacaacatggccgtgaaccccagcgagagcggcttcgtgaccctggtgagcgtggagagcggcttcgtgaccaacgacatctacgagttcagccccgaccagatgggcagaagcaaggagagcggctgggtggagaacgagatctacggctactag

SEQ ID NO: 254305 - DNA, 405 bp, Artificial Sequence
  derived and/or modified sequence
atgagacccggcaccgccctgcaggccgtgctgctggccgtgctgctggtgggcctgagagccgccaccggcagactgctgagcggccagcccgtgtgcagaggcggcacccagagaccctgctacaaggtgatctacttccacgacaccagcagaagactgaacttcgaggaggccaaggaggcctgcagaagagacggcggccagctggtgagcatcgagagcgaggacgagcagaagctgatcgagaagttcatcgagaacctgctgcccagcgacggcgacttctggatcggcctgagaagaagagaggagaagcagagcaacagcaccgcctgccaggacctgtacgcctggaccgacggcagcatcagccagttcagagagaccagcagcagcttctag

SEQ ID NO: 254306 - DNA, 1125 bp, Artificial Sequence
  derived and/or modified sequence
atgcggcccggcaccgctctgcaagcagtgttgctggccgtcctgttagtgggacttcgggccgcaacgggccggctgctgtctgggcagcccgtgtgtagaggtggtacacaacggccctgctacaaggtgatttactttcacgacacctcccgccggctcaatttcgaagaagccaaagaagcgtgcaggcgcgacgggggacaactggtgagcattgaatctgaagacgaacaaaaactgatagaaaagtttattgaaaacctgcttccatctgacggcgacttttggataggtctgcgccgacgggaagagaagcaaagtaattctaccgcctgccaagacctctatgcctggactgacggaagtatttcacagttccgcaattggtatgtggacgagccatcgtgtgggtcggaggtatgtgtggtcatgtaccatcagccgagtgcccccgctggaatcggcggaccttacatgttccagtggaacgatgatagatgcaacatgaaaaataactttatttgcaaatattcggacgagaaacccgctgtgcccagtagagaggcggaaggagaggagaccgagctaacaaccccagtgcttccagaagaaacccaagaggaagacgcaaagaagaccttcaaggaatctcgggaggcggcgctgaacctggcatacattttaatcccctctattccacttctcctcctccttgtggtgacaaccgttgtgtgctgggtgtggatttgccggaagcgaaagcgagagcaacctgacccttctacaaagaaacaacatacaatttggccatctcctcatcagggaaactcccccgacctggaggtgtacaacgtgatccgcaaacagagtgaggcggatctcgcggagacgagacctgacctcaaaaatattagtttccgcgtgtgtagcggggaggccacacctgacgatatgtcatgcgactatgataacatggccgtcaacccatccgaatcaggctttgtgactcttgtgagcgtggaaagcgggttcgttaccaacgatatctatgaattttctccggaccagatgggaaggtccaaagagtccggctgggtcgagaatgaaatctatggctattag

SEQ ID NO: 254307 - DNA, 1014 bp, Artificial Sequence
  derived and/or modified sequence
atgcgccccggtacggccctacaggctgtgcttctggctgtcttgctggtgggcttgcgagcggctactggccggctgctgagcgggcaaccggtgtgtcggggcggaacacagagaccatgttacaaggtgatctacttccacgacaccagtcggagactcaacttcgaggaggccaaagaggcctgtcgtcgtcgagaagagaagcagtcaaattcaacagcctgtcaggatctgtacgcttggacagacgggtctatttcccaatttagaaattggtacgtcgacgagccctcctgtgggtctgaggtctgcgtcgtgatgtatcatcaaccatctgcgcctgcaggcattggaggcccatacatgttccagtggaacgacgaccggtgtaatatgaagaataatttcatctgcaaatacagcgatgagaagcctgcagtgccgagccgggaggcagaaggtgaggaaaccgagcttactacccccgttctgccggaggagacccaggaggaagacgccaaaaagacttttaaggagtctcgagaagccgccctgaacctagcttatatcctgatcccgagcattccgctcctcttactccttgttgtgaccaccgttgtgtgctgggtctggatttgccggaagagaaaacgtgagcaaccagacccttccacgaaaaagcagcatactatttggccaagcccacaccaaggcaatagtcccgacctggaggtttataacgttataaggaaacaatccgaggccgacctcgcagaaaccagacctgatctcaaaaacattagctttagggtctgctccggcgaggctacccccgatgatatgtcatgtgactatgataatatggcagtgaacccttccgaatccgggttcgtgactctggtgagtgttgagagcggtttcgtgactaacgatatttatgagtttagtccggaccagatgggccggtccaaggaatcaggatgggtggaaaacgagatctacggctactag

SEQ ID NO: 254308 - DNA, 405 bp, Artificial Sequence
  derived and/or modified sequence
atgaggcctggcaccgccctgcaggccgtgcttctagcagtcctgcttgttggactaagggctgcgacgggccgcttgctatccggacagcctgtgtgtcgaggcgggactcagcggccctgttataaggtgatctattttcacgatacatcccgcagactcaatttcgaggaggcaaaagaagcctgccgcagagatggcggccagttggtttctatcgagtccgaggacgagcagaagctcattgaaaaattcatcgagaacctgttgcccagcgacggtgatttctggatcgggctgcggcgccgcgaggagaagcagtccaactctacagcctgtcaggatttatacgcttggacagacgggtccatttctcagttcagggagacgtcttcctcattctag

SEQ ID NO: 254309 - DNA, 2066 bp, Artificial Sequence
  derived and/or modified sequence
aaacgcgggatctcccagggaagctcggagggggacagggagctggttcccctctgcgactcgcccctctctggctggccgagtgtctggcgccaacctcgctggaggaggctgtcgggggcgggccagccagcggggctgccctcctcgcagtgacgtcccagggggcggaggggcgaccgactgactccgcgccctcccccccgcctcccgtgcggtccgtcggtggcctagagatgctgctgccgcggttgcagttgtcgcgcacgcctctgcccgccagcccgctccaccgccgtagcgcccgagtgtcggggggcgcacccgagtcgggccatgaggccgggaaccgcgctacaggccgtgctgctggccgtgctgctggtggggctgcgggccgcgacgggtcgcctgctgagtgggcagccagtctgccggggagggacacagaggccttgttataaagtcatttacttccatgatacttctcgaagactgaactttgaggaagccaaagaagcctgcaggagggatggaggccagctagtcagcatcgagtctgaagatgaacagaaactgatagaaaagttcattgaaaacctcttgccatctgatggtgacttctggattgggctcaggaggcgtgaggagaaacaaagcaatagcacagcctgccaggacctttatgcttggactgatggcagcatatcacaatttaggaactggtatgtggatgagccatcctgcggcagcgaggtctgcgtggtcatgtaccatcagccatcggcacccgctggcatcggaggcccctacatgttccagtggaatgatgaccggtgcaacatgaagaacaatttcatttgcaaatattctgatgagaaaccagcagttccttctagagaagctgaaggtgaggaaacagagctgacaacacctgtacttccagaagaaacacaggaagaagatgccaaaaaaacatttaaagaaagtagagaagctgccttgaatctggcctacatcctaatccccagcattccccttctcctcctccttgtggtcaccacagttgtatgttgggtttggatctgtagaaaaagaaaacgggagcagccagaccctagcacaaagaagcaacacaccatctggccctctcctcaccagggaaacagcccggacctagaggtctacaatgtcataagaaaacaaagcgaagctgacttagctgagacccggccagacctgaagaatatttcattccgagtgtgttcgggagaagccactcccgatgacatgtcttgtgactatgacaacatggctgtgaacccatcagaaagtgggtttgtgactctggtgagcgtggagagtggatttgtgaccaatgacatttatgagttctccccagaccaaatggggaggagtaaggagtctggatgggtggaaaatgaaatatatggttattaggacatataaaaaactgaaactgacaacaatggaaaagaaatgataagcaaaatcctcttattttctataaggaaaatacacagaaggtctatgaacaagcttagatcaggtcctgtggatgagcatgtggtccccacgacctcctgttggacccccacgttttggctgtatcctttatcccagccagtcatccagctcgaccttatgagaaggtaccttgcccaggtctggcacatagtagagtctcaataaatgtcacttggttggttgtatctaacttttaagggacagagctttacctggcagtgataaagatgggctgtggagcttggaaaaccacctctgttttccttgctctatacagcagcacatattatcatacagacagaaaatccagaatcttttcaaagcccacatatggtagcacaggctggcctgtgcatcggcaattctcatatctgtttttttcaaagaataataaaatcaaataaagagcaggaaacagagtgttagtctgtgtctacagcccttcctctgcatgtggccacaggggacctttttttgtttctcctgacatccagacttggaaatatctaactacttgc

SEQ ID NO: 254310 - DNA, 1376 bp, Artificial Sequence
  derived and/or modified sequence
gatgctgctgccgcggttgcagttgtcgcgcacgcctctgcccgccagcccgctccaccgccgtagcgcccgagtgtcggggggcgcacccgagtcgggccatgaggccgggaaccgcgctacaggccgtgctgctggccgtgctgctggtggggctgcgggccgcgacgggtcgcctgctgagtgggcagccagtctgccggggagggacacagaggccttgttataaagtcatttacttccatgatacttctcgaagactgaactttgaggaagccaaagaagcctgcaggaggcgtgaggagaaacaaagcaatagcacagcctgccaggacctttatgcttggactgatggcagcatatcacaatttaggaactggtatgtggatgagccatcctgcggcagcgaggtctgcgtggtcatgtaccatcagccatcggcacccgctggcatcggaggcccctacatgttccagtggaatgatgaccggtgcaacatgaagaacaatttcatttgcaaatattctgatgagaaaccagcagttccttctagagaagctgaaggtgaggaaacagagctgacaacacctgtacttccagaagaaacacaggaagaagatgccaaaaaaacatttaaagaaagtagagaagctgccttgaatctggcctacatcctaatccccagcattccccttctcctcctccttgtggtcaccacagttgtatgttgggtttggatctgtagaaaaagaaaacgggagcagccagaccctagcacaaagaagcaacacaccatctggccctctcctcaccagggaaacagcccggacctagaggtctacaatgtcataagaaaacaaagcgaagctgacttagctgagacccggccagacctgaagaatatttcattccgagtgtgttcgggagaagccactcccgatgacatgtcttgtgactatgacaacatggctgtgaacccatcagaaagtgggtttgtgactctggtgagcgtggagagtggatttgtgaccaatgacatttatgagttctccccagaccaaatggggaggagtaaggagtctggatgggtggaaaatgaaatatatggttattaggacatataaaaaactgaaactgacaacaatggaaaagaaatgataagcaaaatcctcttattttctataaggaaaatacacagaaggtctatgaacaagcttagatcaggtcctgtggatgagcatgtggtccccacgacctcctgttggacccccacgttttggctgtatcctttatcccagccagtcatccagctcgaccttatgagaaggtaccttgcccaggtctggcacatagtagagtctcaataaatgtcactt

SEQ ID NO: 254311 - DNA, 1125 bp, Artificial Sequence
  derived and/or modified sequence
atgaggcctggaacagccctgcaggccgtgctgctggccgtgctgctggtgggcctgcgggccgccaccggccgcctgctgagcggccagcctgtgtgccggggcggcacccagaggccctgctacaaggtgatctacttccatgacaccagccggcggctgaactttgaggaggccaaggaggcctgcagaagagatggcggccagctggtgtccattgaaagtgaagatgagcagaagctgattgagaagttcatcgagaacctgctgcccagtgatggagacttctggattggcctgcggcggcgggaggagaagcagagcaacagcacagcctgccaggacctgtatgcctggacagatggcagcatcagccagttcaggaactggtacgtggatgagcccagctgtggcagcgaggtgtgtgtggtgatgtaccaccagcccagcgccccagctggcattggaggcccctacatgttccagtggaatgatgaccgctgcaacatgaagaacaacttcatctgcaagtacagtgatgagaagccagctgtgcccagccgggaggccgagggggaggagacagagctgaccacccctgtgctgcctgaggagacccaggaggaggatgccaagaagaccttcaaggagagccgggaggccgccctgaacctggcctacatcctgatccccagcatccccctgctgctgctgctggtggtgaccaccgtggtgtgctgggtgtggatctgcaggaagaggaagcgggagcagcctgaccccagcaccaagaagcagcacaccatctggcccagcccccaccagggcaacagcccagacctggaggtgtacaacgtcatcaggaagcagagcgaggccgacctggccgagaccaggccagacctgaagaacatctccttccgggtgtgcagcggggaggccaccccagatgacatgagctgtgactatgacaacatggctgtgaaccccagcgagagcggctttgtgaccctggtgtctgtggagagcggctttgtgaccaatgacatctatgagttctccccagaccagatgggccgcagcaaggagagcggctgggtggagaatgagatctacggctactag

SEQ ID NO: 254312 - DNA, 1014 bp, Artificial Sequence
  derived and/or modified sequence
atgaggcctggaacagccctgcaggccgtgctgctggccgtgctgctggtgggcctgcgggccgccaccggccgcctgctgagcggccagcctgtgtgccggggcggcacccagaggccctgctacaaggtgatctacttccatgacaccagccggcggctgaactttgaggaggccaaggaggcctgcagaagaagagaggagaagcagagcaacagcacagcctgccaggacctgtatgcctggacagatggcagcatcagccagttcaggaactggtacgtggatgagcccagctgtggcagcgaggtgtgtgtggtgatgtaccaccagcccagcgccccagctggcatcggcggcccctacatgttccagtggaatgatgaccgctgcaacatgaagaacaacttcatctgcaagtacagtgatgagaagccagctgtgcccagccgggaggccgagggggaggagacagagctgaccacccctgtgctgcctgaggagacccaggaggaggatgccaagaagaccttcaaggagagccgggaggccgccctgaacctggcctacatcctgatccccagcatccccctgctgctgctgctggtggtgaccaccgtggtgtgctgggtgtggatctgcaggaagaggaagcgggagcagcctgaccccagcaccaagaagcagcacaccatctggcccagcccccaccagggcaacagcccagacctggaggtgtacaacgtcatcaggaagcagagcgaggccgacctggccgagaccaggccagacctgaagaacatctccttccgggtgtgcagcggggaggccaccccagatgacatgagctgtgactatgacaacatggctgtgaaccccagcgagagcggctttgtgaccctggtgtctgtggagagcggctttgtgaccaatgacatctatgagttctccccagaccagatgggccgcagcaaggagagcggctgggtggagaatgagatctacggctactag

SEQ ID NO: 254313 - DNA, 405 bp, Artificial Sequence
  derived and/or modified sequence
atgaggcctggaacagccctgcaggccgtgctgctggccgtgctgctggtgggcctgcgggccgccaccggccgcctgctgagcggccagcctgtgtgccggggcggcacccagaggccctgctacaaggtgatctacttccatgacaccagccggcggctgaactttgaggaggccaaggaggcctgcagaagagatggcggccagctggtgtccattgaaagtgaagatgagcagaagctgattgagaagttcatcgagaacctgctgcccagtgatggagacttctggattggcctgcggcggcgggaggagaagcagagcaacagcacagcctgccaggacctgtatgcctggacagatggcagcatcagccagttccgggagaccagcagcagcttctag

SEQ ID NO: 254314 - DNA, 1125 bp, Artificial Sequence
  derived and/or modified sequence
atgcggcccggcaccgccctgcaggccgtgctgctggccgtgctgctggtggggctgcgggccgccaccggccgacttttgagcgggcaaccagtgtgtcgcggaggcacccagcgcccctgctataaggtcatttacttccatgacacttcacgccgactgaacttcgaggaggctaaagaggcctgccgtagagacggcggccagctcgtgagtatagagtctgaagacgaacagaagctcatagaaaaattcatcgagaacctgctccccagtgacggtgatttctggatcgggctgaggcggcgggaggaaaagcaatcaaacagcaccgcctgccaggacctgtacgcctggaccgatggatctatctcacagttccggaactggtacgtcgacgagccgtcctgcggctccgaagtatgtgtggttatgtatcatcagccatcggcgcccgcaggaataggaggaccttatatgtttcagtggaatgacgaccggtgtaacatgaaaaacaacttcatctgtaagtactctgacgaaaagcctgcggtcccttctcgagaggcagagggagaagaaaccgagctcacgacaccagtcttgcccgaggaaacccaggaagaggatgccaaaaaaaccttcaaggagagcagggaggccgcgctgaacctcgcatacatcctgattccctctatacctctgcttctgctactggtggtcactacagtagtttgttgggtttggatttgccgcaagagaaagcgagagcagccggaccccagcacaaaaaagcagcataccatatggccctcacctcaccaaggcaattctccggacctggaggtttataacgtgatccggaaacaaagcgaagcagacttggctgagactagacccgacctgaaaaatatttcattcagggtttgcagtggagaagctaccccagatgatatgtcttgcgattatgataacatggcagtaaatcccagcgaaagcggatttgtgaccctggttagcgtcgagagcggcttcgtgactaatgatatatatgaattctctccggatcagatgggccggagtaaagagtccgggtgggtggagaacgagatctacggctactag

SEQ ID NO: 254315 - DNA, 1014 bp, Artificial Sequence
  derived and/or modified sequence
atgcggcccggcaccgccctgcaggccgtgctgctggccgtgctgctggtcggactacgggctgcaactggacggctgctttccgggcagcccgtgtgcagaggaggcacccaacggccttgctacaaagttatctattttcatgatacaagtcggagattgaactttgaggaggcaaaggaggcctgccggagacgtgaggagaaacagtccaatagcacggcctgtcaggacctgtacgcgtggacagatggttccattagtcagttccgtaactggtacgtggatgagccttcctgcggtagtgaggtctgtgtggtgatgtatcatcagccctccgccccggctgggatcggcggcccttacatgttccagtggaacgacgacagatgtaatatgaaaaacaactttatttgcaagtactctgacgagaaacccgcggtcccctccagggaggccgaaggcgaagaaaccgaattgactacccctgtacttccagaggagacccaggaggaggacgccaaaaagaccttcaaggagagcagagaggccgccttgaatctggcctacattttgatcccttctatcccgctgttgctgttgctagtggtgacgaccgtagtgtgctgggtttggatctgtcgaaaacgcaagcgcgagcagcctgatccaagtactaaaaagcagcacactatttggccctcgccgcatcagggaaactctccagacctagaggtgtataacgtcatacggaaacagtccgaagccgatctggccgaaactcgaccagatctgaaaaacatctcctttagagtctgttccggcgaagctactccggacgacatgtcttgcgactatgacaacatggccgtgaatccaagcgagagcgggtttgttacactcgtgtctgttgaatctgggtttgtgacaaatgacatctacgagtttagcccggatcagatgggccggtctaaagagtctggctgggtcgagaatgagatctacggctattag

SEQ ID NO: 254316 - DNA, 405 bp, Artificial Sequence
  derived and/or modified sequence
atgcggcccggcaccgccctgcaggccgtgctgctggccgtgctgctggtggggttacgggcagctacaggacggttgttgtcaggccagccagtgtgccggggcgggacccagcgaccatgttataaggttatttattttcacgacacatcacgtcgcctcaacttcgaggaagctaaggaagcatgccgacgcgacgggggtcagctcgttagcatcgagtccgaagacgagcaaaaattgatagagaaatttatcgaaaatttgctgccaagcgatggcgacttctggattggcctccggaggagagaggagaagcagtctaactctacggcatgtcaagatttatatgcctggactgacggatctattagccagtttagagagacgtcaagtagcttttag

SEQ ID NO: 254317 - DNA, 1125 bp, Artificial Sequence
  derived and/or modified sequence
atgcggcctgggaccgcgctccaggccgttctgctcgccgtgctgctggttggtctccgagccgctactggccgtctattgagcgggcagcccgtgtgccgcggagggacccaacgcccttgttataaagtcatctacttccatgacacatctagacgcctgaatttcgaagaagcaaaggaggcatgccgcagagatggcggacagctagtgagcatcgaaagtgaggacgagcagaagctcattgagaaattcatcgaaaatctgttgcctagcgacggcgacttctggataggtctgcgccgacgagaagaaaagcagtccaactcaaccgcctgtcaggatttatatgcctggaccgatgggtctatttcccaattccgaaactggtatgtggatgagccaagttgcggaagcgaggtatgtgtagttatgtatcatcagcccagcgctcctgcgggtattggcggaccttacatgtttcagtggaatgacgatagatgtaatatgaagaataattttatctgcaagtactccgatgaaaagccagcagtgccctcccgggaagctgagggggaagagaccgagctgaccacacctgtgttgcctgaggaaacccaggaagaagacgcaaagaagacttttaaggagtcccgcgaggctgctctcaatctggcctacatcttgatcccttccatccccctcctcctcctgctagtggtgactaccgtggtttgttgggtgtggatctgcagaaaacgtaagcgggagcagcccgatccttctacaaagaaacagcatactatctggccttctccccaccagggcaattctccagatttggaggtctacaatgtgatccgaaagcaatctgaggctgatctggccgagaccagacccgacctgaaaaatatcagcttcagagtgtgcagcggggaggccactcctgacgatatgtcctgtgactatgacaacatggcagtgaacccgagcgaaagcggcttcgtgaccctggtgagcgtggaatccggcttcgtgacaaacgacatatatgagtttagcccagatcaaatggggagatccaaggaaagcggctgggtcgagaacgagatctacggctactag

SEQ ID NO: 254318 - DNA, 1014 bp, Artificial Sequence
  derived and/or modified sequence
atgcgaccaggaacggccctgcaggcagtgctgctggcagtactcttggttggcctgcgcgcagccacaggcagactgctgtccggacagccggtgtgccgcggaggcacccagcggccatgctacaaggtcatttattttcatgacaccagtcggcgactaaatttcgaggaagcaaaggaagcctgtaggagaagggaagaaaagcagtcaaatagtaccgcctgccaggatttatatgcgtggacggacgggtctatcagccaattccggaattggtatgtcgacgagccttcctgtggtagcgaagtctgtgtcgtgatgtatcaccagccctccgcccctgccggaatcggtggcccatacatgtttcagtggaatgacgacaggtgtaatatgaagaataacttcatctgtaaatatagcgatgagaaacccgcagttccctctagggaggcagaaggcgaggagaccgaacttactacaccagtcttgcctgaggagacgcaggaggaagatgcgaagaaaaccttcaaagaatcccgtgaggcagctctgaatctcgcctatattttgatacctagcattcccctgctgctactcctagtggttacaacagttgtgtgttgggtctggatttgtaggaagcgaaagagggagcagccagatccatcaacaaaaaagcagcacacaatttggccctccccacaccagggaaacagtcccgatctcgaggtgtataacgtgattaggaagcaaagcgaggctgatctggccgagacacgccctgatttgaagaatatctcattccgggtgtgcagcggagaggcaaccccagatgatatgtcctgtgactatgataatatggccgttaaccccagcgaatccggattcgtgacactggtctccgtggaaagtggttttgtaactaatgacatctacgaatttagccccgatcagatggggaggagtaaggaatcaggctgggtggagaacgaaatttacggatattag

SEQ ID NO: 254319 - DNA, 405 bp, Artificial Sequence
  derived and/or modified sequence
atgagaccaggcacagcgttgcaggccgtattgctcgccgtccttctcgtgggcctgagagcagcaactgggagactgttgtcgggacaacccgtatgccggggagggacccaaagaccatgctataaagtaatatatttccacgacacgtcgagacgccttaacttcgaggaggccaaagaagcctgtagacgggatggcggacagctggtttccatagaatctgaagacgaacagaagttgattgaaaagtttatcgagaaccttctgcccagcgacggggatttctggattgggctgagacggagggaggagaagcaatcaaactcgaccgcctgccaagacctgtatgcctggaccgatgggagtatttcacagttccgcgagaccagtagtagtttctag

SEQ ID NO: 254320 - protein, 1077 aa, Artificial Sequence
  derived and/or modified sequence
MPRRKQEQPKRLPSHVSRQEEAEGELSEGEHWYGNSSETPSEASYGEVQENYKLSLEDRIQEQSTSPDTSLGSTTPSSHTLELVALDSEVLRDSLQCQDHLSPGVSSLCDDDPGSNKPLSSNLRRLLEAGSLKLDAAATANGRVESPVNVGSNLSFSPPSHHAQQLSVLARKLAEKQEQNDQYTPSNRFIWNQGKWLPNSTTTCSLSPDSAILKLKAAANAVLQDKSLTRTEETMRFESFSSPFSSQSASSTLAALSKKVSERSLTPGQEHPPPASSFLSLASMTSSAALLKEVAARAAGSLLAEKSSLLPEDPLPPPPSEKKPEKVTPPPPPPPPPPPPPPPQSLELLLLPVPKGRVSKPSNSASEEESGKPFQCPICGLVIKRKSYWKRHMVIHTGLKSHQCPLCPFRCARKDNLKSHMKVHQHQDRGETFQCQLCPFTSSRHFSLKLHMRCHQHFLRTEAKVKEEIPDPDVKGSPHLSDSACLGQQREGGGTELVGTMMTSNTPERTSQGGAGVSPLLVKEEPKEDNGLPTSFTLNAADRPANHTKLKDPSEYVANSASALFSQDISVKMASDFLMKLSAANQKEPMNLNFKVKEEPKEGESLSTTLPRSSYVFSPESEVSAPGVSEDALKPQEGKGSVLRRDVSVKAASELLMKLSAESYKETQMVKIKEEPMEVDIQDSHVSISPSRNVGYSTLIGREKTEPLQKMPEGRVPPERNLFSQDISVKMASELLFQLSEKVSKEHNHTKENTIRTTTSPFFSEDTFRQSPFTSNSKELLPSDSVLHGRISAPETEKIVLEAGNGLPSWKFNDQLFPCDVCGKVFGRQQTLSRHLSLHTEERKYKCHLCPYAAKCRANLNQHLTVHSVKLVSTDTEDIVSAVTSEGSDGKKHPYYYSCHVCGFETELNVQFVSHMSLHVDKEQWMFSICCTACDFVTMEEAEIKTHIGTKHTGEDRKTPSESNSPSSSSLSALSDSANSKDDSDGSQKNKGGNNLLVISVMPGSQPSLNSEEKPEKGFECVFCNFVCKTKNMFERHLQIHLITRMFECDVCHKFMKTPEQLLEHKKCHTVPTGGLK

SEQ ID NO: 254321 - DNA, 3234 bp, Artificial Sequence
  derived and/or modified sequence
atgcccagaagaaagcaggagcagcccaagagactgcccagccacgtgagcagacaggaggaggccgagggcgagctgagcgagggcgagcactggtacggcaacagcagcgagacccccagcgaggccagctacggcgaggtgcaggagaactacaagctgagcctggaggacagaatccaggagcagagcaccagccccgacaccagcctgggcagcaccacccccagcagccacaccctggagctggtggccctggacagcgaggtgctgagagacagcctgcagtgccaggaccacctgagccccggcgtgagcagcctgtgcgacgacgaccccggcagcaacaagcccctgagcagcaacctgagaagactgctggaggccggcagcctgaagctggacgccgccgccaccgccaacggcagagtggagagccccgtgaacgtgggcagcaacctgagcttcagcccccccagccaccacgcccagcagctgagcgtgctggccagaaagctggccgagaagcaggagcagaacgaccagtacacccccagcaacagattcatctggaaccagggcaagtggctgcccaacagcaccaccacctgcagcctgagccccgacagcgccatcctgaagctgaaggccgccgccaacgccgtgctgcaggacaagagcctgaccagaaccgaggagaccatgagattcgagagcttcagcagccccttcagcagccagagcgccagcagcaccctggccgccctgagcaagaaggtgagcgagagaagcctgacccccggccaggagcaccccccccccgccagcagcttcctgagcctggccagcatgaccagcagcgccgccctgctgaaggaggtggccgccagagccgccggcagcctgctggccgagaagagcagcctgctgcccgaggaccccctgccccccccccccagcgagaagaagcccgagaaggtgaccccccccccccccccccccccccccccccccccccccccccccccccagagcctggagctgctgctgctgcccgtgcccaagggcagagtgagcaagcccagcaacagcgccagcgaggaggagagcggcaagcccttccagtgccccatctgcggcctggtgatcaagagaaagagctactggaagagacacatggtgatccacaccggcctgaagagccaccagtgccccctgtgccccttcagatgcgccagaaaggacaacctgaagagccacatgaaggtgcaccagcaccaggacagaggcgagaccttccagtgccagctgtgccccttcaccagcagcagacacttcagcctgaagctgcacatgagatgccaccagcacttcctgagaaccgaggccaaggtgaaggaggagatccccgaccccgacgtgaagggcagcccccacctgagcgacagcgcctgcctgggccagcagagagagggcggcggcaccgagctggtgggcaccatgatgaccagcaacacccccgagagaaccagccagggcggcgccggcgtgagccccctgctggtgaaggaggagcccaaggaggacaacggcctgcccaccagcttcaccctgaacgccgccgacagacccgccaaccacaccaagctgaaggaccccagcgagtacgtggccaacagcgccagcgccctgttcagccaggacatcagcgtgaagatggccagcgacttcctgatgaagctgagcgccgccaaccagaaggagcccatgaacctgaacttcaaggtgaaggaggagcccaaggagggcgagagcctgagcaccaccctgcccagaagcagctacgtgttcagccccgagagcgaggtgagcgcccccggcgtgagcgaggacgccctgaagccccaggagggcaagggcagcgtgctgagaagagacgtgagcgtgaaggccgccagcgagctgctgatgaagctgagcgccgagagctacaaggagacccagatggtgaagatcaaggaggagcccatggaggtggacatccaggacagccacgtgagcatcagccccagcagaaacgtgggctacagcaccctgatcggcagagagaagaccgagcccctgcagaagatgcccgagggcagagtgccccccgagagaaacctgttcagccaggacatcagcgtgaagatggccagcgagctgctgttccagctgagcgagaaggtgagcaaggagcacaaccacaccaaggagaacaccatcagaaccaccaccagccccttcttcagcgaggacaccttcagacagagccccttcaccagcaacagcaaggagctgctgcccagcgacagcgtgctgcacggcagaatcagcgcccccgagaccgagaagatcgtgctggaggccggcaacggcctgcccagctggaagttcaacgaccagctgttcccctgcgacgtgtgcggcaaggtgttcggcagacagcagaccctgagcagacacctgagcctgcacaccgaggagagaaagtacaagtgccacctgtgcccctacgccgccaagtgcagagccaacctgaaccagcacctgaccgtgcacagcgtgaagctggtgagcaccgacaccgaggacatcgtgagcgccgtgaccagcgagggcagcgacggcaagaagcacccctactactacagctgccacgtgtgcggcttcgagaccgagctgaacgtgcagttcgtgagccacatgagcctgcacgtggacaaggagcagtggatgttcagcatctgctgcaccgcctgcgacttcgtgaccatggaggaggccgagatcaagacccacatcggcaccaagcacaccggcgaggacagaaagacccccagcgagagcaacagccccagcagcagcagcctgagcgccctgagcgacagcgccaacagcaaggacgacagcgacggcagccagaagaacaagggcggcaacaacctgctggtgatcagcgtgatgcccggcagccagcccagcctgaacagcgaggagaagcccgagaagggcttcgagtgcgtgttctgcaacttcgtgtgcaagaccaagaacatgttcgagagacacctgcagatccacctgatcaccagaatgttcgagtgcgacgtgtgccacaagttcatgaagacccccgagcagctgctggagcacaagaagtgccacaccgtgcccaccggcggcctgaagtag

SEQ ID NO: 254322 - DNA, 3234 bp, Artificial Sequence
  derived and/or modified sequence
atgcctagacggaaacaggaacagccgaaacgcttacctagtcacgtatctcgtcaggaagaggcggaaggtgagctcagcgagggagagcactggtacggcaactcttcagagacacctagtgaggcatcttacggcgaggtgcaagagaactacaagcttagtttggaggacaggattcaggagcagagcacaagcccggacacctccctgggctcaacaactccatcttcccatactctcgagctggttgccctcgactccgaggtactccgggacagccttcagtgtcaggatcacttgtcgccaggcgtatctagtctatgcgacgatgatcctggatcgaacaagccactttccagtaacctccggaggcttctcgaggctggcagcctgaagctggacgcggccgccactgccaacggcagggtggagtcccccgtcaacgtaggcagtaatttgagtttttctccgcctagtcatcacgcccagcagctgtctgtcctcgctcgcaaacttgccgagaaacaggagcagaatgaccaatacacgcccagcaaccgcttcatttggaatcagggcaagtggctgcccaattccacaaccacctgctctttatccccagattccgcaatcttgaaactgaaagcggcagccaatgctgttctccaggacaagtccctgaccaggaccgaagaaacgatgcgttttgaatcattttcgtctccattctcctcccagagcgccagctccacactcgcagctttgagtaaaaaggtcagcgagcgcagcctaactccaggccaggaacacccgcctcctgccagctcctttcttagtctggcaagtatgaccagttcagccgccttgttgaaagaagtggccgccagagccgccggaagtttgttggcggagaagtcttctctgctccctgaggaccccctacctccccctccaagtgagaagaaaccggaaaaggtgaccccacccccacctccaccacctccaccccctccaccccccccgcctcagagcctggagttgctcctgctgccagtgcccaaggggcgggtctccaagccatcaaacagtgcgtccgaagaagaaagcggcaagccttttcagtgccccatctgcgggctggtgatcaaaagaaagtcctactggaaacggcacatggtgatccacacaggcttaaaaagccatcagtgtcccctgtgtcctttccgctgcgcccggaaggataatttgaaaagccatatgaaggtgcaccagcaccaagataggggcgaaacgtttcaatgccaattatgtccctttacatcaagccggcatttctcgcttaagttgcacatgagatgccaccagcacttcctcaggaccgaggcaaaagtcaaagaggagatacctgacccagacgtgaaaggctcacctcatttatctgattccgcgtgtctggggcagcagagagaaggcggaggaaccgaactggtcggcacaatgatgacgagtaacacacctgagagaacgagtcagggcggagcaggcgtctctcccctgctggtcaaggaggagcccaaagaagacaacgggttgcctacatcctttactttgaatgctgcagatcgtcccgcaaatcacaccaagttgaaagacccctccgagtatgtggccaatagtgcttcggccctgttttcccaggatatctcggtcaaaatggcaagcgatttcttgatgaagctgtctgccgctaaccagaaggaacccatgaacctaaactttaaagtgaaggaggaacccaaagagggcgaatcattgtctacgaccctcccgcgctcttcgtacgtatttagccctgagtcagaggtctcagcaccgggggtcagtgaagacgccctgaaacctcaagagggaaaaggcagtgtgctccggcgggatgtttccgtgaaggcagctagcgaactgctgatgaagctctccgcagaatcctataaagagacgcagatggtgaagattaaagaggaacctatggaagtagacattcaggattctcacgtttccatctctccaagtcgtaacgtggggtattcgacattaattggccgggaaaagaccgaaccactgcaaaaaatgccggaaggccgcgtgccccctgagagaaacttgttcagtcaggatattagtgtaaaaatggctagcgagctcctttttcagctcagtgaaaaggttagcaaggagcacaatcatactaaagagaatacaataagaaccactactagtccattttttagcgaagacacctttcgacagtctcctttcacctctaactctaaggaactccttcctagtgattccgtgttgcacggtcggatcagcgccccagagacagagaagattgtactagaagctggaaacggcctgccaagctggaagtttaatgatcagttgttcccatgcgacgtttgtggcaaagtctttgggagacagcaaacgttgagccggcatctctcactccatacagaagagagaaagtataagtgtcacctgtgcccctacgctgcaaaatgtagggccaacctcaatcagcacctgactgtacactccgttaagctcgtttcgacggacaccgaggacatcgtctctgccgtgacctctgaggggagtgacggaaagaaacacccttactactacagctgccacgtgtgtggatttgagaccgaactaaatgtccaatttgtgagtcacatgtcacttcatgtggacaaggagcagtggatgttctcgatttgttgtactgcgtgcgatttcgtgacgatggaggaagctgaaatcaaaacgcacatcggaacaaagcacaccggagaagatcgtaagacgccgagcgagagcaactcacccagttctagctcattatccgccttgtctgattcggcaaattcaaaagatgatagcgacggcagccagaagaacaaagggggaaacaacctgcttgttatttcagtgatgcctggctctcaaccaagtctgaattcggaggaaaagccagaaaaagggtttgagtgtgtgttctgtaatttcgtgtgcaaaactaaaaacatgtttgaacgtcacctgcaaattcatctcatcactaggatgttcgaatgtgatgtctgccataagttcatgaaaacacccgagcagctccttgagcataagaaatgccacacagttccaaccggtggcctgaaatag

SEQ ID NO: 254323 - DNA, 3234 bp, Artificial Sequence
  derived and/or modified sequence
atgcccaggaggaagcaggagcagcccaagaggctgcccagccacgtgtcccggcaggaggaggccgagggggagctgtctgagggggagcactggtacggcaacagcagcgagaccccatctgaggccagctatggagaggtgcaggagaactacaagctgagcctggaggaccgcatccaggagcagagcaccagcccagacaccagcctgggcagcaccacccccagcagccacaccctggagctggtggccctggacagcgaggtgctgcgggacagcctgcagtgccaggaccacctgagccctggggtgagcagcctgtgtgatgatgatcctggcagcaacaagcccctgagcagcaacctgcggcggctgctggaggccggcagcctgaagctggatgctgctgccacagccaacggccgggtggagagccctgtgaatgtgggcagcaacctgtccttcagcccccccagccaccacgcccagcagctgtctgtgctggccaggaagctggccgagaagcaggagcagaatgaccagtacacccccagcaaccgcttcatctggaaccagggcaagtggctgcccaacagcaccaccacctgcagcctgagcccagacagcgccatcctgaagctgaaggccgccgccaatgctgtgctgcaggacaagagcctgaccaggacagaggagaccatgagatttgagagcttcagcagccccttcagcagccagagcgccagcagcaccctggccgccctgagcaagaaggtgtctgagaggagcctgaccccaggccaggagcaccccccaccagccagcagcttcctgagcctggcctccatgaccagcagcgctgccctgctgaaggaggtggccgcccgggctgctggcagcctgctggccgagaagagcagcctgctgcctgaggaccccctgcccccaccacccagcgagaagaagccagagaaggtgaccccacctcctcctcctcctcctcctcctcctcctcctcctccaccccagagcctggagctgctgctgctgcctgtgcccaagggccgggtgtccaagcccagcaacagcgccagcgaggaggagagcggcaagcccttccagtgccccatctgtggcctggtgatcaagaggaagagctactggaagaggcacatggtgatccacacaggcctgaagagccaccagtgccccctgtgccccttccgctgtgccaggaaggacaacctgaagagccacatgaaggtgcaccagcaccaggacagaggagagaccttccagtgccagctgtgccccttcaccagcagccgccacttcagcctgaagctgcacatgcgctgccaccagcacttcctgaggacagaggccaaggtgaaggaggagatcccagaccctgatgtgaagggcagcccccacctgagtgacagcgcctgcctgggccagcagcgggagggcggcggcacagagctggtgggcaccatgatgaccagcaacaccccagagaggaccagccagggcggggccggcgtgagccccctgctggtgaaggaggagcccaaggaggacaatggcctgcccaccagcttcaccctgaatgctgctgacaggcctgccaaccacaccaagctgaaggaccccagtgaatatgtggccaacagcgccagcgccctcttcagccaggacatctctgtgaagatggccagtgacttcctgatgaagctgtctgctgccaaccagaaggagcccatgaacctgaacttcaaggtgaaggaggagcccaaggagggggagagcctgagcaccaccctgcccaggagcagctatgtgttcagccctgagagcgaggtgtctgcccctggggtgtctgaagatgccctgaagccccaggagggcaaaggatctgtgctgcggagagatgtgtctgtgaaggccgccagcgagctgctgatgaagctgtctgctgagagctacaaggagacccagatggtgaagatcaaggaggagcccatggaggtggacatccaggacagccacgtgtccatcagccccagcagaaatgtgggctacagcaccctcatcggccgggagaagacagagcccctgcagaagatgcctgagggccgggtgcccccagagaggaacctcttcagccaggacatctctgtgaagatggccagcgagctgctcttccagctgtctgagaaggtgtccaaggagcacaaccacaccaaggagaacaccatccgcaccaccaccagccccttcttcagcgaggacaccttccggcagagccccttcaccagcaacagcaaggagctgctgcccagcgacagcgtgctgcacggccgcatcagcgcccctgagacagagaagatcgtgctggaggccggaaatggcctgcccagctggaagttcaatgaccagctgttcccctgtgatgtgtgtgggaaggtgtttggccggcagcagaccctgagccgccacctgagcctgcacacagaggagaggaagtacaagtgccacctgtgcccctatgctgccaagtgccgggccaacctgaaccagcacctgactgtgcacagcgtgaagctggtgtccacagacacagaagatattgtgtctgctgtgaccagcgagggcagtgatggcaagaagcacccctactactacagctgccacgtgtgtggctttgaaacagagctgaatgtgcagtttgtgagccacatgagcctgcacgtggacaaggagcagtggatgttcagcatctgctgcacagcctgtgactttgtgaccatggaggaggccgagatcaagacccacatcggcaccaagcacactggagaggacaggaagaccccatctgagagcaacagccccagcagcagcagcctgagcgccctgagtgacagcgccaacagcaaggatgacagtgatggcagccagaagaacaagggcggcaacaacctgctggtgatctctgtgatgcctggcagccagcccagcctgaacagcgaggagaagccagagaagggctttgaatgtgtgttctgcaactttgtgtgcaagaccaagaacatgtttgagcggcacctgcagatccacctgatcaccaggatgtttgaatgtgatgtgtgccacaagttcatgaagaccccagagcagctgctggagcacaagaagtgccacacagtgcccactggaggcctgaagtag

SEQ ID NO: 254324 - DNA, 3234 bp, Artificial Sequence
  derived and/or modified sequence
atgccccggcggaagcaggagcagcccaagcggctgcccagccacgttagccgacaggaagaggcagagggagagttgtctgaaggcgagcactggtacgggaacagctccgaaactcccagcgaagcctcctatggcgaggtgcaggaaaattacaagttgtctctggaagatcggattcaagaacaaagcacatcccccgatacttcattgggttctacaactccttctagtcacactctggagcttgtggcgctcgattcggaagtgctaagagactcactgcagtgccaggaccatctgtcccctggtgtgagctccctctgcgatgatgacccaggaagtaataaaccacttagttctaatctgcgacgactgttagaagcaggctctctgaaactcgacgctgcagcaacggccaatgggagggtggagtcacctgttaacgttggatccaatctgtccttttctccgccctctcatcacgctcagcaacttagtgtcctggcgaggaaactcgccgagaagcaggagcaaaatgatcagtacactccgagtaaccgattcatctggaatcaggggaagtggctgccaaatagcactactacatgtagcctcagtcctgactccgccatactgaagctgaaggctgcagcaaacgcggtccttcaggataaatcccttacccggactgaagagacgatgagatttgagagtttctcctctcccttttcatcccaatcagctagctcaaccctggcagcactttccaagaaagtgtctgagagatcactcacacccggccaagagcatcctccccctgcttccagctttttaagcttggcgagcatgaccagttcggcagctttactcaaagaagttgcggctagagcggctgggagcttactggctgagaagtcttctttgctcccagaagacccactgcccccccccccttccgaaaagaaacccgagaaggtgacaccaccaccacccccaccaccgccaccccccccgcccccccctcctcagtcactggagctgcttctccttcccgtgcccaagggtagggtctcaaaaccttctaattctgcatctgaggaggaatctgggaaaccatttcagtgtcccatctgtggtttggtgatcaagaggaagtcgtactggaagcgccatatggtcatacatactggcttaaagtcacaccagtgtcccttgtgtcctttccgctgcgctaggaaggataatctgaagtcgcatatgaaagttcaccaacaccaagacaggggcgagacgtttcaatgtcagctttgccccttcacctccagtaggcactttagtctgaagctgcacatgaggtgtcatcaacacttcttgaggactgaggcaaaagtgaaggaggaaatcccagacccggacgtgaagggttccccccacctgtctgattcagcttgtcttggccagcagagggagggaggtggtacagaactcgtgggcaccatgatgacaagtaacaccccagaacgtacgtcccaggggggcgcgggggtgtcaccccttctggtaaaagaggagcccaaggaagataacggcctgcctaccagcttcacactgaatgctgctgatcgccccgctaaccacacgaagcttaaggaccccagtgagtatgtagccaatagcgccagtgcactgttctcacaggatataagcgtcaaaatggctagtgactttcttatgaaactgagcgccgctaaccaaaaagagcccatgaaccttaacttcaaagtgaaagaggagcctaaggagggcgaatctctatccaccactctgcctaggtcctcctacgtgttttcacctgagagcgaagtttccgctcctggagtgtcagaagatgcgctgaaaccccaggaaggcaagggatcagtgctgagaagggacgtgtcagtgaaagcagcctctgagctgctgatgaagctctctgctgagtcctacaaggagacccagatggttaagataaaggaagagcctatggaggttgatatccaagacagccacgtaagtatttccccgagccgaaacgtgggctattccactctcataggccgcgaaaagacagagcctcttcagaagatgcccgaaggaagggtgccccccgaacgcaacctgtttagccaggatatctcagtgaagatggcgagtgagctgttattccagttaagtgaaaaggtcagcaaggagcataaccacacaaaggagaacacaatcaggacaacgacaagcccttttttctcggaggatactttccgacagagtccatttacatccaattctaaagaactgttgcccagcgactccgtcctgcacggtcgaatctccgcacccgaaaccgagaagatcgtgttggaggccggcaatggtttgccttcttggaagttcaacgaccagcttttcccctgcgatgtatgcgggaaagtgtttggccggcagcagaccctgtcacgtcacttatctttgcacacagaggaaagaaaatataaatgtcacttgtgcccttatgctgccaaatgtagagctaacttaaaccagcacctcacagtgcacagtgttaagcttgtttccactgatactgaggacattgtgtcagcggtcaccagcgaggggtctgatggcaagaagcatccttactattactcttgtcacgtgtgcggctttgaaaccgagctgaacgtgcagttcgtcagccacatgagcctccatgtggataaagagcagtggatgttttctatctgttgtactgcgtgcgatttcgtcacgatggaggaagctgagatcaaaacccacatagggactaagcatacaggggaggaccggaagaccccgagtgaatctaattcaccttcgtctagctcccttagtgcgctgagcgattcagctaactccaaagacgactcagatggtagccagaagaataagggaggcaacaatctgttggttatctccgtgatgccggggagtcagcctagcctgaactccgaggagaagccggagaagggctttgaatgcgtgttctgcaatttcgtctgtaaaactaaaaacatgttcgagagacacctccagatccatctgataacccggatgtttgagtgcgacgtgtgccacaagtttatgaagacccctgagcagctgctggaacacaaaaagtgtcatacagtccctacggggggcttgaagtag

SEQ ID NO: 254325 - DNA, 3234 bp, Artificial Sequence
  derived and/or modified sequence
atgccgagaagaaaacaggagcaacccaaaagattgccatcacacgtctcccggcaggaagaggccgagggcgagctctctgaaggagagcattggtacggaaatagcagcgaaacaccgtccgaagcctcgtacggtgaagtgcaggaaaattataagctgagcctcgaagatcgaatccaggaacagagtacctcgcctgatacaagcttaggcagtaccacgccaagcagccacacacttgagttggtcgctctcgattcagaggtgctccgcgacagcttgcagtgtcaagaccacttgagccccggagtaagttccctgtgcgacgacgaccccggatcaaataaacctttgtcttctaacctgagacgcctgttggaggccggatctctgaagcttgacgcagccgcaacagcaaacggacgcgtggagtcccctgtaaatgtgggcagcaatctgtctttctccccccctagccaccatgcacagcagcttagtgttctagccagaaagctggccgagaagcaggaacaaaacgatcagtacacccctagtaatcggtttatttggaatcaagggaaatggctacccaattcaacaacaacgtgcagcctttcgcccgatagcgctatactgaaacttaaggcggctgcaaatgccgtgttgcaggacaaatctcttaccaggactgaggaaacaatgcggtttgagtccttttcctcgccattctcctcgcaaagcgcatcttcaacactagctgcactgtccaaaaaagtgtccgaacggagtctgacacccggacaggaacatccaccgcctgccagcagctttctgagtctcgctagtatgacatcatctgctgcattgctgaaagaggtggccgctcgcgcagctggctcgttgcttgcagagaagtcttccctgctgcctgaggacccactgcctcctccaccatctgagaaaaaacccgaaaaggttacaccccctccccctccacccccaccccctccacccccaccacccccacagagtttagagctactgctgctgccagtccctaaaggacgcgtgtccaaacctagcaactctgcgagcgaggaggaaagcggtaagccatttcagtgtccaatctgtggacttgtgattaagcggaaaagttactggaaaaggcacatggtcattcataccggattgaaaagtcaccaatgtcccctgtgccccttccggtgtgccaggaaggacaacctgaagtctcatatgaaggtgcaccaacaccaggatcggggagagactttccagtgtcagctttgcccttttacaagctcaaggcactttagtctgaaactgcatatgagatgccaccagcattttcttagaactgaagcgaaggtgaaggaggagattcccgaccctgacgtgaagggttccccccatctgagcgattcagcctgcttggggcagcagagagagggagggggaaccgaactagtgggtacaatgatgacttctaatacccccgagcggacctcacagggcggagccggagtctctccactgttggttaaggaggagcctaaagaggacaatgggcttccaactagtttcaccctgaacgcagctgaccgcccagccaaccacacaaagctaaaggatccttcagagtatgtggcaaactccgcatctgctctgttttcccaggacattagtgtaaagatggcttctgattttctcatgaaactctcagccgcaaaccagaaagagcccatgaacctcaactttaaagttaaggaggagcctaaggagggcgagtcgctctctacaacacttccaaggagttcttatgtgttctcccctgaatctgaagtgtccgcccctggtgtctcagaggatgccttgaaacctcaggagggcaagggtagtgtccttagacgtgatgtcagcgtaaaagcagcaagcgagctgctaatgaagcttagcgctgaaagctacaaggaaacacaaatggttaagatcaaggaagaaccaatggaggtagacattcaagatagccatgtgtctatctctccgagtcggaacgtaggatactcgaccctgattggaagggagaagacagagccattgcaaaagatgcccgaggggagagtcccgccagagcgcaatcttttttctcaggatatctccgtcaagatggcttctgaactgctttttcagctgtccgagaaggtttccaaagagcacaaccacacaaaagagaacaccatcaggacaacaacaagtccttttttctcggaagataccttcaggcagagcccgtttacgtctaactcaaaggaactcctcccttctgactcagtgctacatggcagaatctctgccccagaaacagagaagatcgtgttggaggccggaaacgggctcccttcatggaaatttaatgaccagctgtttccctgtgacgtttgcggcaaggtatttggacgccagcagacactcagccgccacctctcactgcacactgaggagagaaaatataaatgccacctgtgcccgtatgccgcaaagtgtcgggcaaatctcaaccagcatctcacagtgcactccgttaagctagtctcaacggatacagaggacatcgttagtgccgtgacaagcgagggtagtgatggtaagaaacatccgtattattattcttgccacgtttgtggatttgagaccgagctaaatgtccaatttgtgtctcacatgtccctgcatgtcgataaagaacagtggatgttctccatttgttgtacggcttgcgattttgtaaccatggaggaggctgaaatcaaaactcacatcggaaccaagcatacgggagaggaccggaaaacaccttccgagtccaactctccttcaagcagctccctgtctgctctgtccgactctgccaattccaaggatgactcagatggcagtcagaagaacaagggcggtaacaacctgctggtcatctcagtgatgcccggttcccaaccttccctcaacagtgaagaaaaacctgagaaaggattcgagtgcgtattttgtaacttcgtctgcaaaaccaagaacatgtttgagaggcacctgcagatacatctgataacaagaatgttcgaatgcgatgtgtgccacaaattcatgaaaaccccggagcagctcctggagcataaaaagtgtcacactgtccctaccgggggtctcaagtag

SEQ ID NO: 254326 - protein, 588 aa, Artificial Sequence
  derived and/or modified sequence
MLPLLDSSKRAGTLGSGCGVPRVHSAALSREEGASRDIWRIKVWARVMTTPAGSGSGFGSVSWWGLSPALDLQAESPPVDPDSQADTVHSNPELDVLLLGSVDGRHLLRTLSRAKFWPRRRFNFFVLENNLEAVARHMLIFSLALEEPEKMGLQERSETFLEVWGNALLRPPVAAFVRAQADLLAHLVPEPDRLEEQLPWLSLRALKFRERDALEAVFRFWAGGEKGPQAFPMSRLWDSRLRHYLGSRYDARRGVSDWDLRMKLHDRGAQVIHPQEFRRWRDTGVAFELRDSSAYHVPNRTLASGRLLSYRGERVAARGYWGDIATGPFVAFGIEADDESLLRTSNGQPVKTAGEITQHNVTELLRDVAAWGRARATGGDLEEQQHAEGSPEPGTPAAPTPESFTVHFLPLDSAQTLHHKSCYNGRFQLLYVACGMVHLLIPELGACVAPGGNLIVELARYLVDVRQEQLQGFNTRVRELAQAAGFAPQTGARPSETFARFCKSQESALGNTVPAVEPGTPPLDILAQPLEASNPALEGLTQPLQGGTPHCEPCQLPSESPGSLSEVLAQPQGALAPPNCESDSKTGV

SEQ ID NO: 254327 - DNA, 2167 bp, Artificial Sequence
  derived and/or modified sequence
cacatgcttccattgcttgattcctcgaaaagggcggggactctgggcagcggttgtggagtgccgcgggtccacagtgctgcactgagcagagaggaaggggcgtcccgggatatttggaggataaaggtgtgggcaagggtgatgaccacacctgccggctccggcagcggcttcggctccgtgtcctggtggggcctgtccccggcgctggacctgcaggctgaaagtcctcctgtggacccagactcccaggccgatacagtgcacagcaaccccgagctagatgtgctgcttctgggctctgtggatggacggcacctgctgcggaccctgtcccgagcgaagttctggcctcgcaggaggttcaacttctttgtgctggagaataatctggaagctgtggcccgacacatgctgatcttcagcctagccctggaggaaccggagaagatggggctgcaagagcgaagcgagaccttcctggaagtgtgggggaacgcgctgctgcgcccgccagtggccgccttcgtgcgtgcccaggccgacctgctggcgcacctggtccccgagcccgaccgcctggaggaacagctgccctggctcagcctccgcgccctcaagttccgcgagcgggatgccctggaggccgtattccgcttctgggctggcggcgagaaagggccccaggcgttccccatgagccgcctctgggactcgcgcctgcgccactacctgggctcccgctacgacgcccggcgcggtgtcagcgactgggacctgcgcatgaagctgcatgaccgcggggctcaagtcattcacccccaggagttccgacgctggcgggacacaggcgtcgcctttgaactcagggactccagcgcctatcatgtgcccaaccggaccctggcgtccggtcgcctcctgagctaccgtggggagcgcgtggcagcgcgcgggtactggggggacatcgccacggggcccttcgtggccttcggcatcgaagcggacgacgagagcctcctgcggacgagcaacggccagccagtcaagacggccggggagatcactcaacacaacgtgacggagctgctccgcgacgtggccgcctgggggcgcgcgagagccaccgggggggacctggaggagcagcagcacgcggagggaagcccggagccagggactccagcagccccgaccccggaatctttcaccgtccacttcctgccgctcgattctgctcagactctccaccacaagagctgctacaacggccgattccagctcctctatgtggcctgtggtatggtccatcttctcatccctgagcttggggcctgtgtggcacccggagggaacttgattgtggaattagcccggtacctggtggacgtgcggcaggagcagctgcagggattcaacacccgggtcagggagctagctcaggcagctggatttgctccacagaccggggccaggccttcagagaccttcgcacgtttctgcaagtcccaggaatcagctctgggcaacactgtcccagctgtggaacccggaactccgccccttgacatcctggcccagcctcttgaagccagcaacccagcccttgagggcctgacccagcctctgcagggtgggaccccacactgtgagccctgccagctgccctctgagtctccaggttcactctcagaggttctggctcagcctcagggggccttggctccgcccaactgtgagtcagactccaaaactggagtctgacccaacccctagacaccccttatctccaacttccaaagtcaggttgtaggatgagaacccgctgataccattctaagtccgctgctagagtcctcaattttattctaatcattcccactcagtacccgccacccccaccccgggagtgttggtagactttcaaattccatttctgagattctatggtctattcctagaattctagattgttctctcagaattccaaattccacttctgaggctctaagcccagcctaggatctgacactgagtctcaggcccttgactttggcccccttgttcccaggcaccctgtggctgactaggggctggggtgtctcctcaccagggcctggtcagcacccagatggttcaagtaaagcaagttgtgtccacc

SEQ ID NO: 254328 - DNA, 1767 bp, Artificial Sequence
  derived and/or modified sequence
atgctgcccctgctggacagcagcaagagagccggcaccctgggcagcggctgcggcgtgcccagagtgcacagcgccgccctgagcagagaggagggcgccagcagagacatctggagaatcaaggtgtgggccagagtgatgaccacccccgccggcagcggcagcggcttcggcagcgtgagctggtggggcctgagccccgccctggacctgcaggccgagagcccccccgtggaccccgacagccaggccgacaccgtgcacagcaaccccgagctggacgtgctgctgctgggcagcgtggacggcagacacctgctgagaaccctgagcagagccaagttctggcccagaagaagattcaacttcttcgtgctggagaacaacctggaggccgtggccagacacatgctgatcttcagcctggccctggaggagcccgagaagatgggcctgcaggagagaagcgagaccttcctggaggtgtggggcaacgccctgctgagaccccccgtggccgccttcgtgagagcccaggccgacctgctggcccacctggtgcccgagcccgacagactggaggagcagctgccctggctgagcctgagagccctgaagttcagagagagagacgccctggaggccgtgttcagattctgggccggcggcgagaagggcccccaggccttccccatgagcagactgtgggacagcagactgagacactacctgggcagcagatacgacgccagaagaggcgtgagcgactgggacctgagaatgaagctgcacgacagaggcgcccaggtgatccacccccaggagttcagaagatggagagacaccggcgtggccttcgagctgagagacagcagcgcctaccacgtgcccaacagaaccctggccagcggcagactgctgagctacagaggcgagagagtggccgccagaggctactggggcgacatcgccaccggccccttcgtggccttcggcatcgaggccgacgacgagagcctgctgagaaccagcaacggccagcccgtgaagaccgccggcgagatcacccagcacaacgtgaccgagctgctgagagacgtggccgcctggggcagagccagagccaccggcggcgacctggaggagcagcagcacgccgagggcagccccgagcccggcacccccgccgcccccacccccgagagcttcaccgtgcacttcctgcccctggacagcgcccagaccctgcaccacaagagctgctacaacggcagattccagctgctgtacgtggcctgcggcatggtgcacctgctgatccccgagctgggcgcctgcgtggcccccggcggcaacctgatcgtggagctggccagatacctggtggacgtgagacaggagcagctgcagggcttcaacaccagagtgagagagctggcccaggccgccggcttcgccccccagaccggcgccagacccagcgagaccttcgccagattctgcaagagccaggagagcgccctgggcaacaccgtgcccgccgtggagcccggcaccccccccctggacatcctggcccagcccctggaggccagcaaccccgccctggagggcctgacccagcccctgcagggcggcaccccccactgcgagccctgccagctgcccagcgagagccccggcagcctgagcgaggtgctggcccagccccagggcgccctggccccccccaactgcgagagcgacagcaagaccggcgtgtag

SEQ ID NO: 254329 - DNA, 1767 bp, Artificial Sequence
  derived and/or modified sequence
atgctcccattgcttgattcctccaaacgcgcaggtacactaggctcggggtgcggcgtgcctagagtgcactccgcggccctttctagggaggagggcgcaagtcgtgatatttggcggataaaagtctgggcacgggtaatgaccacacctgctgggagcgggtccggctttggatctgtctcctggtggggcctttcacccgcactggatctgcaggccgaaagtcccccggtggatcctgactctcaggcagatacagtgcacagcaatccagagcttgacgtccttcttttaggttctgtggacggtcgccaccttctgagaaccttgtcaagggccaagttttggccccgccgccgcttcaacttcttcgtccttgagaacaacctcgaggcagttgcccggcatatgctgatattttctttagcattagaagaacctgagaagatggggttgcaggagcgctctgagactttcctcgaggtttggggaaatgcccttctgcgaccgcccgttgcagctttcgtgagagcccaggccgacctgttagctcaccttgtacccgaacctgacaggctggaggaacagctgccatggttgtccttaagggcccttaaattcagggagagagatgcccttgaggcagtgtttaggttttgggctggcggagaaaagggcccacaggctttcccaatgagccggctttgggattcaaggctgaggcattatctgggaagccggtacgatgcgcgcagaggggtctcagactgggatctaagaatgaagctgcacgataggggcgctcaggtgatccatccccaagagttccgtcgttggagggataccggagtagcttttgagcttcgcgactctagcgcttaccatgtgccaaacaggactctcgcatccggccggctgctttcataccgtggggaaagagtagccgcccggggatattggggggatatagcaaccggtccatttgtagccttcgggatcgaggctgacgacgagtctttgctgaggactagtaacgggcaacccgttaaaaccgcgggggagattacccaacataatgtgacagaactcctccgtgatgtagcagcttggggcagggcacgggccaccgggggtgatcttgaagaacaacagcacgctgaaggaagccctgaacctggcacgccagccgctcccacaccagagagtttcacggtccatttcctgcctctggatagtgcacagaccctgcaccacaaatcctgttataatgggagattccagttgttatacgtggcttgcgggatggttcaccttctgatccctgagctcggggcgtgcgtcgccccaggcggaaatcttatcgtcgagctggcacggtacttggtcgatgttaggcaggagcagctacagggattcaataccagagtacgagagttagcccaagctgccggcttcgctccgcagaccggcgccaggccgtcggaaacgttcgctagattctgcaagagtcaggaaagcgcgctcggtaatactgtgccggccgtggaaccaggcactccacccttggacatcctcgctcagcctctcgaggccagcaatcctgccttggaggggctgacacagcctcttcaagggggtacaccacattgcgagccttgccagctaccctcagaatcacctgggtccttgagcgaagtgctggcccagccgcaaggggcacttgcgccacccaactgtgaaagcgatagcaagactggcgtatag

SEQ ID NO: 254330 - DNA, 1767 bp, Artificial Sequence
  derived and/or modified sequence
atgctgcccctgctggactcaagtaagagggccggcacgctgggatcaggctgtggcgtcccgagagtccactccgcggctctgtcaagagaagaaggcgccagccgggatatttggagaattaaagtgtgggcacgggtgatgactaccccggctggttctgggtccggtttcgggtctgtatcttggtggggattgtcccccgcactggacctgcaggccgaatcccctcccgttgatcccgactctcaggccgacaccgtgcactccaacccagagttggacgtgcttctcctgggctctgtggacggtcgacacctgctgagaaccttgtccagggctaagttctggcctcggcggagattcaacttctttgtgctggagaataacctcgaggccgtggcccggcacatgctcatctttagccttgctcttgaagaacctgaaaagatgggactgcaggagagatctgagaccttcctggaagtgtgggggaacgcactgctacgtcctccagtagctgcatttgttcgggcacaagccgatctgctcgcgcacctggtgcccgagcccgacagactcgaggaacaactaccatggctgtcactccgggctctcaagttccgagagcgggacgccctggaggcagtgttcaggttttgggccggtggggaaaagggtccgcaggccttccctatgagccgcctgtgggatagcaggctgaggcactacctgggttcccgatacgatgctcggaggggtgtgagcgattgggacctgcggatgaaactccacgacagaggagcccaggtcattcatcctcaagaattcagacgctggagagataccggggtcgcattcgagctgagggattcctctgcctaccacgtgccaaataggacgttagcttccggacgactgctgagttatcgcggagaaagggtcgccgccaggggttattggggtgatatcgctactgggcctttcgtggcctttggaattgaagcggacgacgaatctctccttcggacttccaatggccaacccgttaagactgccggagaaatcacccagcacaacgtgactgaactactacgcgacgtcgcagcttgggggcgggctcgcgcaacagggggggacctggaggagcagcaacacgctgaaggcagccctgagccggggactcctgctgcccccaccccggagtcctttacggtccacttccttcctttagacagtgcccaaaccttacaccacaaaagttgctataacggacgctttcagctgctgtacgtcgcctgcgggatggtacacttgctcatccccgagttgggggcctgtgttgcaccgggagggaacctcatcgttgagttagcgcggtatctggttgacgtgcgacaggagcaactccagggctttaatacgcgcgtcagggagctggctcaagcagccggattcgccccccaaacaggggcccgcccttcagagacattcgcccggttttgtaaatcccaggagtcagcgctcgggaacactgtgcctgctgtggagccaggcactcctccccttgacatattagcacagcccttggaggcctccaaccctgcactcgagggactcacacagcccctccagggcggtactccccattgcgaaccttgtcagttaccaagcgagtcacccgggagccttagtgaagttctcgcacagccacaaggggccctggctcctcccaattgcgagagcgactccaaaacaggcgtatag

SEQ ID NO: 254331 - DNA, 2168 bp, Artificial Sequence
  derived and/or modified sequence
acatgcttccattgcttgattcctcgaaaagggcggggactctgggcagcggttgtggagtgccgcgggtccacagtgctgcactgagcagagaggaaggggcgtcccgggatatttggaggataaaggtgtgggcaagggtgatgaccacacctgccggctccggcagcggcttcggctccgtgtcctggtggggcctgtccccggcgctggacctgcaggctgaaagtcctcctgtggacccagactcccaggccgatacagtgcacagcaaccccgagctagatgtgctgcttctgggctctgtggatggacggcacctgctgcggaccctgtcccgagcgaagttctggcctcgcaggaggttcaacttctttgtgctggagaataatctggaagctgtggcccgacacatgctgatcttcagcctagccctggaggaaccggagaagatggggctgcaagagcgaagcgagaccttcctggaagtgtgggggaacgcgctgctgcgcccgccagtggccgccttcgtgcgtgcccaggccgacctgctggcgcacctggtccccgagcccgaccgcctggaggaacagctgccctggctcagcctccgcgccctcaagttccgcgagcgggatgccctggaggccgtattccgcttctgggctggcggcgagaaagggccccaggcgttccccatgagccgcctctgggactcgcgcctgcgccactacctgggctcccgctacgacgcccggcgcggtgtcagcgactgggacctgcgcatgaagctgcatgaccgcggggctcaagtcattcacccccaggagttccgacgctggcgggacacaggcgtcgcctttgaactcagggactccagcgcctatcatgtgcccaaccggaccctggcgtccggtcgcctcctgagctaccgtggggagcgcgtggcagcgcgcgggtactggggggacatcgccacggggcccttcgtggccttcggcatcgaagcggacgacgagagcctcctgcggacgagcaacggccagccagtcaagacggccggggagatcactcaacacaacgtgacggagctgctccgcgacgtggccgcctgggggcgcgcgagagccaccgggggggacctggaggagcagcagcacgcggagggaagcccggagccagggactccagcagccccgaccccggaatctttcaccgtccacttcctgccgctcgattctgctcagactctccaccacaagagctgctacaacggccgattccagctcctctatgtggcctgtggtatggtccatcttctcatccctgagcttggggcctgtgtggcacccggagggaacttgattgtggaattagcccggtacctggtggacgtgcggcaggagcagctgcagggattcaacacccgggtcagggagctagctcaggcagctggatttgctccacagaccggggccaggccttcagagaccttcgcacgtttctgcaagtcccaggaatcagctctgggcaacactgtcccagctgtggaacccggaactccgccccttgacatcctggcccagcctcttgaagccagcaacccagcccttgagggcctgacccagcctctgcagggtgggaccccacactgtgagccctgccagctgccctctgagtctccaggttcactctcagaggttctggctcagcctcagggggccttggctccgcccaactgtgagtcagactccaaaactggagtctgacccaacccctagacaccccttatctccaacttccaaagtcaggttgtaggatgagaacccgctgataccattctaagtccgctgctagagtcctcaattttattctaatcattcccactcagtacccgccacccccaccccgggagtgttggtagactttcaaattccatttctgagattctatggtctattcctagaattctagattgttctctcagaattccaaattccacttctgaggctctaagcccagcctaggatctgacactgagtctcaggcccttgactttggcccccttgttcccaggcaccctgtggctgactaggggctggggtgtctcctcaccagggcctggtcagcacccagatggttcaagtaaagcaagttgtgtccaccct

SEQ ID NO: 254332 - DNA, 1767 bp, Artificial Sequence
  derived and/or modified sequence
atgctgcccctgctggacagcagcaagagagctggcaccctgggcagcggctgcggcgtgccccgggtgcacagcgctgccctgagccgggaggagggcgccagccgggacatctggaggatcaaggtgtgggcccgggtgatgaccaccccagctggcagcggcagcggcttcggctctgtgtcctggtggggcctgagccctgccctggacctgcaggccgagagcccccctgtggaccctgacagccaggccgacacagtgcacagcaaccctgagctggatgtgctgctgctgggctctgtggatggccgccacctgctgcggaccctgagccgggccaagttctggccccggcggcgcttcaacttctttgtgctggagaacaacctggaggccgtggcccggcacatgctgatcttcagcctggccctggaggagcctgagaagatgggcctgcaggagaggtctgagaccttcctggaggtgtggggcaatgccctgctgcggccccctgtggccgcctttgtgcgggcccaggccgacctgctggcccacctggtgcctgagccagaccggctggaggagcagctgccctggctgagcctgcgggccctgaagttccgggagagagatgccctggaggccgtgttccgcttctgggccggcggggagaagggcccccaggccttccccatgagccggctgtgggacagccggctgcggcactacctgggcagccgctatgatgcccggcggggcgtgtctgactgggacctgaggatgaagctgcatgacagaggagcccaggtgatccacccccaggagttccgccgctggagggacacaggagtggcctttgagctgcgggacagcagcgcctaccacgtgcccaacagaaccctggccagcggccgcctgctgagctacagaggagagcgggtggccgcccggggctactggggagacatcgccaccggcccctttgtggccttcggcatcgaggctgatgatgagagcctgctgcggaccagcaatggccagcctgtgaagacagctggggagatcacccagcacaacgtgacagagctgctgagagatgtggccgcctggggccgggcccgggccactggaggagacctggaggagcagcagcacgccgagggcagccctgagcccggcaccccagctgcccccaccccagagagcttcaccgtgcacttcctgcccctggacagcgcccagaccctgcaccacaagagctgctacaacggccgcttccagctgctgtatgtggcctgtggcatggtgcacctgctgatccctgagctgggcgcctgtgtggcccctgggggcaacctgattgtggagctggcccgctacctggtggatgtgcggcaggagcagctgcagggcttcaacaccagggtgcgggagctggcccaggccgccggctttgccccccagacaggagcccggcccagcgagacctttgcccgcttctgcaagagccaggagagcgccctgggcaacacagtgcctgctgtggagcccggcaccccacccctggacatcctggcccagcccctggaggccagcaacccagccctggagggcctgacccagcccctgcagggcggcaccccccactgtgagccctgccagctgcccagcgagagccctggcagcctgtctgaggtgctggcccagccccagggcgccctggccccacccaactgtgagagtgacagcaagacaggagtgtag

SEQ ID NO: 254333 - DNA, 1767 bp, Artificial Sequence
  derived and/or modified sequence
atgctgcccctgctggacagcagcaagcgggccggcaccctgggctccggatgcggcgtgccccgggtgcacagcgcggcgctcagtcgcgaggagggggcgtctagggatatctggaggattaaggtgtgggcccgcgtcatgaccacgcctgctggaagtggcagcggattcggatctgtgagctggtgggggctgtcacctgctttggatctgcaggccgagtcgcctccagtcgaccctgacagccaagccgataccgtgcacagcaatcccgagctggacgtcctgttgttaggctcagtggatggacgtcatttactgcggaccctgtctcgggccaaattctggccccgtcggagatttaatttttttgtgctggaaaacaacctggaggccgtggccaggcacatgttaatcttttccctggctcttgaggaaccagagaagatgggacttcaagaacgcagcgaaacttttctggaggtgtggggaaacgctctgttgcggccacccgtcgccgcatttgttagagctcaggcagacctattggctcatcttgtgcctgaaccagaccggttagaagagcagctgccctggctgtcacttcgggcactgaagtttcgagagcgggatgcgcttgaggccgtgttcaggttctgggcagggggtgaaaagggcccccaggcatttcctatgtcccgcctctgggattcacgcctgcggcattacctgggatccaggtacgatgcaagaaggggagtgagtgattgggatctgcgtatgaagttgcatgacaggggggcccaagtgattcacccacaggagtttcgccgctggcgcgatacaggggtggcttttgaattacgagatagctcggcatatcatgtaccaaaccgaactctagcctcaggccggctgctgagttaccggggcgaacgtgttgcagccaggggctactggggagatatagcaaccggaccctttgtagcctttgggatcgaggcggatgacgagagcttgcttaggactagtaatggtcagccggttaagaccgcaggagaaataacgcagcacaatgtgaccgaactcctgcgagatgttgccgcatgggggcgggctcgagcaaccggaggagacttggaggagcagcagcatgccgaagggtcacctgagccaggaacaccagccgccccaacccctgagtcattcacagtgcactttctgcccttagattctgcacaaacccttcaccataagtcatgctacaatgggcgttttcagctgctgtatgtggcatgtggaatggttcatttactgatacctgaattgggggcatgcgtggcacctggtgggaatctcattgtggagttagccagatatctggtagacgtcagacaagagcagttgcagggctttaatacaagagtgagagaattagctcaggccgccggtttcgcgcctcaaacaggagccaggccaagcgaaactttcgcccggttctgcaagtcacaggaatcagcgctgggcaataccgttccggcagtcgagccagggacaccacccctggacatcctcgcccagcccttggaagcttccaatccagcactagaggggctgacgcaaccacttcagggaggtacaccgcactgcgaaccttgtcagctgcctagcgaatcacccggtagtctgagtgaggtgctcgcgcagccacagggtgctcttgctccccctaattgcgagtccgacagtaaaacaggcgtttag

SEQ ID NO: 254334 - DNA, 1767 bp, Artificial Sequence
  derived and/or modified sequence
atgctgcccctgctggacagcagcaagcgggccggcaccctgggctcaggttgtggagtgccccgggtccatagcgccgccctgtccagggaggagggtgcttcacgggacatatggcgcatcaaggtttgggccagggttatgacaacaccagcagggagcggctccggttttggctcagtttcatggtgggggttgtctccggctctcgatctccaggctgagtctccaccagtggaccctgatagtcaagcagatacagtccactcaaacccagagctggatgtcttgctcctcggctctgtcgatgggagacatcttctcagaacactctctcgcgctaaattttggccccgtaggcgattcaatttcttcgtgcttgagaataatctcgaggccgtggccaggcacatgcttatcttcagcctcgcgctggaggagcccgaaaagatgggtctgcaggaacgttcagaaacttttttagaagtatggggcaatgctctgttgaggccgcctgtggcggcgtttgtaagggcccaagctgatctgctagcccacctggtgccggagcctgaccggctagaggagcagctcccttggctgtcactacgagccctcaaattcagagagcgggatgcgttggaggcagtgttccgcttttgggccggaggagagaaggggccacaggcctttcctatgtccaggctttgggattcccgcttacgccactatttaggtagtagatacgatgcacgtcggggtgttagtgactgggatcttaggatgaaattgcatgatcgcggcgcacaggtgatacaccctcaggagttcaggcggtggcgcgatactggcgtggctttcgaactgagagatagtagtgcctatcatgttcctaaccgaaccctggcttccggacgactgttgtcctatcgcggcgaacgcgttgcagcacgcggttactggggcgacatcgccacgggaccgttcgtcgcctttgggatagaggccgatgacgagagcctgctccgcacaagcaatggccagccggttaaaaccgccggagaaataacccagcacaacgtaacggagctgcttagggacgtggcggcgtgggggcgggctcgggccacgggcggcgatcttgaagaacagcagcatgcggagggctcacctgagcccggaacccccgcagcacccaccccagagagtttcacagtgcatttcctgcctctggattcagcccagaccctccaccacaagtcttgctacaatggccgtttccagttactttacgtggcctgcggcatggtccatcttctgatacccgaactgggggcctgcgtggccccaggcgggaatttaattgttgaactcgcccgttacttggtcgacgtgagacaggaacagctacagggctttaacacgagggttcgcgaactcgcgcaggcggcaggcttcgctccacagactggggcaagaccatccgagacattcgcccggttctgtaagtctcaggaaagcgcactcggtaatactgtgcctgccgtggagccgggcacacccccactggatatcttggctcagcctctggaagcttccaaccccgccttggagggattgacacagccactgcaagggggaaccccccactgcgagccgtgccaattgccctctgagtcgcctggaagcctgagtgaggtgctggcccaacctcagggagccctggctcctcccaattgcgagtctgacagcaagactggggtgtag

SEQ ID NO: 254335 - DNA, 1767 bp, Artificial Sequence
  derived and/or modified sequence
atgctgcccctgctcgacagctctaagcgcgcaggaaccctggggtcaggctgtggggtcccacgagtccatagtgcggctctgtctcgggaggaaggggcatctcgggacatctggcgtataaaggtgtgggctcgtgtcatgactacccccgctgggtcaggatctggtttcggctccgtgtcctggtggggactctctcccgctctggatttgcaagccgaaagccctccggtggacccagacagtcaagctgatacagtacacagtaatcccgagctggatgtactgctcctgggaagtgtggatgggagacatctgctcagaactctgtctcgggcaaaattttggccaaggcggaggttcaatttttttgtcttagaaaacaacctcgaagctgtcgctaggcatatgctcattttttcccttgcccttgaagagccagagaagatgggtttgcaagagcggtctgagaccttcctggaagtgtggggtaatgccctgctccgaccccctgtggccgcttttgttcgcgctcaagctgaccttttggcccacctcgtcccagagcctgacagacttgaagagcagttgccgtggctgtccctccgcgctctgaaattcagggaacgcgatgccttggaggctgtttttcgcttttgggcaggtggagagaaggggcctcaagcttttcctatgagtcgcttatgggatagcaggttgagacactaccttggttctcggtacgatgcacggaggggggtatccgactgggatctgcggatgaaattacacgatcggggagcacaggtgatccacccacaagagttcaggcggtggagagacacaggcgtggcattcgagcttagagactcatccgcctaccatgtgcccaaccgcacgttggcatcggggagacttctttcatacaggggagaacgcgtagccgctcgaggctactggggggatatcgccacgggcccttttgttgcatttggaattgaggctgacgatgaatctttacttcggacaagcaatggtcagccagtgaagacagcaggcgagatcacccagcataacgtgacagaactgctcagagacgttgcggcatggggtagggccagagcaactggtggagacctggaagagcagcagcatgccgagggtagtcctgagcctgggacccccgctgcaccaacacctgaaagtttcactgttcactttttaccgctcgactctgcccagacgctgcatcataagtcctgttacaacgggagatttcaacttttgtatgtcgcatgtggcatggtacatctcctgatacctgaactgggagcttgcgtggccccaggtggtaatcttattgtagagctggcacgctacttggtcgacgtcagacaggagcagctgcagggctttaacacacgggtgcgagaactggcccaggccgcaggcttcgcaccccagaccggcgctcggccttcagagacatttgccagattctgtaagtcacaggagagtgcccttgggaacacagttcccgcagtagagcccggaacgccaccattggacattctagcccagccattagaggcaagtaatccggcacttgaagggctaacccaaccactgcaagggggaacacctcactgtgaaccttgccagctgccctctgaatccccgggtagcctcagcgaggtgctggctcaaccccagggcgctttggccccacccaactgtgagagtgattcaaagaccggcgtgtag

SEQ ID NO: 254336 - DNA, 1767 bp, Artificial Sequence
  derived and/or modified sequence
atgctcccactcttggactccagtaaacgagcgggaactttgggatctggctgtggcgtgccacgagtccacagtgctgccctgtcaagagaagagggcgcatcacgcgatatttggaggatcaaggtgtgggctcgggttatgaccacccccgcaggatcagggtcaggattcggtagcgtgtcctggtggggcctgtcacctgcactagacctgcaggctgagtcacctccagtcgatcctgacagccaggccgataccgttcattcgaatcctgagctggacgtgcttttacttggttcggtggatgggaggcacctgcttcgaactctgtcacgggcaaagttttggccccgacgacgcttcaatttctttgtcttagagaataacttggaggctgtggccaggcacatgttgatcttcagcctggccctggaagagcccgagaagatggggcttcaagaacgaagcgagacctttttagaagtgtggggtaatgctttgctccgacctccagtggcagcctttgtccgtgcgcaggctgatttgttagctcaccttgtccctgagcctgaccgcctggaagagcagctcccctggctctcccttcgtgccttgaaatttcgcgagcgggacgcacttgaggccgtttttcggttctgggcaggaggtgaaaagggccctcaggccttcccaatgtcacggctctgggactcccgcctgcgtcactatttaggatcccgctatgacgccagaagaggcgtctcggattgggatttacgcatgaagctccacgaccgcggtgctcaggtcatccacccccaggagtttcggcgatggcgcgatactggtgttgcttttgagctgagagactcctctgcctaccacgtgccaaacaggacacttgcatcgggcagactactctcctatcggggtgaacgggtagctgctagaggctactggggcgacatcgccaccggaccgttcgtagctttcggtatagaagcagacgatgaaagtcttttaaggacctccaatggtcagcccgtgaagacagcaggcgaaattacacaacataacgtgacggaactattaagagatgtcgctgcctggggcagggcaagagctaccggaggggacctcgaggaacagcaacatgccgaaggttcccccgagccaggtacccccgcagcacccacccctgagtcatttactgtccactttttgccgttggactccgcacaaaccctgcatcacaaatcctgttacaatggccgttttcaactgctctatgtggcttgtggcatggtgcacctccttatcccagagctaggcgcttgtgtcgccccagggggaaacctgatcgtggaactcgccaggtatctcgtggacgtccgccaggagcagctccagggatttaatacacgcgtacgcgagctggcccaggctgctggcttcgctccacaaacaggcgctagacccagcgagacctttgccagattctgcaagagccaggaaagcgctttaggaaacactgtgcccgcagtcgagcccggtactccaccactcgatatcctcgctcaacctttggaggcctcaaatcctgctctggaaggccttacccagcccctacaaggcggaactcctcattgcgaaccttgtcaactcccctcagagtcccccggatcactgtccgaggtactggcgcagccacagggcgctctcgctcctccaaattgcgaaagtgatagtaagacgggcgtgtag

SEQ ID NO: 254337 - protein, 522 aa, Artificial Sequence
  derived and/or modified sequence
MDFLLLGLCLYWLLRRPSGVVLCLLGACFQMLPAAPSGCPQLCRCEGRLLYCEALNLTEAPHNLSGLLGLSLRYNSLSELRAGQFTGLMQLTWLYLDHNHICSVQGDAFQKLRRVKELTLSSNQITQLPNTTFRPMPNLRSVDLSYNKLQALAPDLFHGLRKLTTLHMRANAIQFVPVRIFQDCRSLKFLDIGYNQLKSLARNSFAGLFKLTELHLEHNDLVKVNFAHFPRLISLHSLCLRRNKVAIVVSSLDWVWNLEKMDLSGNEIEYMEPHVFETVPHLQSLQLDSNRLTYIEPRILNSWKSLTSITLAGNLWDCGRNVCALASWLNNFQGRYDGNLQCASPEYAQGEDVLDAVYAFHLCEDGAEPTSGHLLSAVTNRSDLGPPASSATTLADGGEGQHDGTFEPATVALPGGEHAENAVQIHKVVTGTMALIFSFLIVVLVLYVSWKCFPASLRQLRQCFVTQRRKQKQKQTMHQMAAMSAQEYYVDYKPNHIEGALVIINEYGSCTCHQQPARECEV

SEQ ID NO: 254338 - protein, 109 aa, Artificial Sequence
  derived and/or modified sequence
MDFLLLGLCLYWLLRRPSGVVLCLLGACFQMLPAAPSGCPQLCRCEGRLLYCEALNLTEAPHNLSGLLGLSLRYNSLSELRAGQFTGLMQLTWLYLDHNHICSVQGDAF

SEQ ID NO: 254339 - protein, 223 aa, Artificial Sequence
  derived and/or modified sequence
MDFLLLGLCLYWLLRRPSGVVLCLLGACFQMLPAAPSGCPQLCRCEGRLLYCEALNLTEAPHNLSGLLGLSLRYNSLSELRAGQFTGLMQLTWLYLDHNHICSVQGDAFQKLRRVKELTLSSNQITQLPNTTFRPMPNLRSVDLSYNKLQALAPDLFHGLRKLTTLHMRANAIQFVPVRIFQDCRSLKFLDIGYNQLKSLARNSFAGLFKLTELHLEHNDLVK

SEQ ID NO: 254340 - protein, 183 aa, Artificial Sequence
  derived and/or modified sequence
MDFLLLGLCLYWLLRRPSGVVLCLLGACFQMLPAAPSGCPQLCRCEGRLLYCEALNLTEAPHNLSGLLGLSLRYNSLSELRAGQFTGLMQLTWLYLDHNHICSVQGDAFQKLRRVKELTLSSNQITQLPNTTFRPMPNLRSVDLSYNKLQALAPDLFHGLRKLTTLHMRANAIQFVPVRIFQD

SEQ ID NO: 254341 - DNA, 546 bp, Artificial Sequence
  derived and/or modified sequence
agccacggtaacggcggggtggaaagctaaggcctttgaagacctgggaccccgtagtttcgggagagggtgaggggtgaatggtgctgaggtttttggctttcatcgctttttctacatgtttttagcctcaccagaagtctttcatctcggtggtccaactcaggatctcagcctcattattttcttacccttctggagtgcatatgtgcctttacagtttctgtttgcaaacgctgtctagcatactaagaggatgttagcaaacctgttccatggacactaaatggcagttgtacatctcccctcatcagtcatagtgacaaccagaaatgccctccatattttccagtgatcccagtcttcaatgcgtctgtctcataatttgtaaacgtttattatcttgaagtcattgttaatctgtggtgaaaagtaattgctaaatagaaattctgagaagaaaaaggcctcatccttttcacatgatgtaggaaggtctgttgcatgagcaatgggaaatccagaaaacatagaagatgcatatgt

SEQ ID NO: 254342 - DNA, 1569 bp, Artificial Sequence
  derived and/or modified sequence
atggatttcctgttactgggtctatgcctctactggctcttgagacgaccgtccggggtcgtcctttgtctgctcggagcttgcttccaaatgttacctgccgcacctagtggctgcccccagctgtgtcggtgcgaaggccgccttctttactgtgaggccctcaacctcacagaagcccctcacaatctgagtgggcttctgggcctctcgctgagatataattcactgtcggagttgcgggctggtcagtttacagggttgatgcagttaacctggctataccttgaccataaccatatttgttcagtccagggcgatgcctttcaaaaactgcggcgagtcaaagagctcacgctttcctcaaatcagattacacagctgcccaacactacttttagacctatgcccaatctgcgtagtgtggacctttcatacaataaactccaggccctggcccccgatctattccatggtctgaggaagctgaccaccctccacatgcgcgccaatgccatccaatttgtgcccgttcggatcttccaggattgtaggtcactcaaatttctggatatagggtacaatcagctaaaatccttggcacgaaatagcttcgccggcttattcaagctgactgagcttcacctggagcataatgatctggttaaagtgaattttgcccattttccccgtctgatttccctacactcactgtgcttacggaggaacaaggtagcgatcgtggtctctagcctggattgggtgtggaacctggaaaaaatggacctcagcgggaacgagattgaatacatggaaccccacgtctttgagaccgtccctcacctgcagtcccttcagcttgatagcaaccgtctcacctatatagagccaaggatcctgaattcttggaaaagcctaaccagcattacccttgcaggcaatctttgggattgcggtcggaacgtttgcgccctggccagctggctgaataatttccagggtagatacgatggaaatttacagtgcgcatccccagagtatgcacagggagaggatgtcctggatgctgtctatgccttccacttgtgtgaagatggagctgaacccactagtggccacttgctctcggctgttaccaaccgaagtgatctgggcccccctgcttccagcgctacaaccctggctgacggcggcgagggccaacatgacggaacattcgaacccgccaccgttgctttgcccggtggtgaacatgccgagaatgcggtccagattcacaaggtggtcacaggcactatggcccttatattttcattcttgatcgtagtgctcgtgctttacgtgtcctggaaatgttttccggcatctttgcgccagctgaggcagtgctttgtgacccagcggcgcaagcagaaacaaaagcagacaatgcatcagatggcagcgatgtccgctcaggagtactacgtggactataaacctaaccacatagagggagcccttgtgatcattaacgagtatgggagctgtacctgtcaccaacagccagctcgcgagtgcgaagtgtag

SEQ ID NO: 254343 - DNA, 1569 bp, Artificial Sequence
  derived and/or modified sequence
atggattttctgctgctagggttgtgcctgtactggttgctaaggcgccctagcggcgtagtgctctgcctcttgggggcatgtttccaaatgttaccagccgctccatcagggtgccctcaactgtgtagatgcgagggaagattgttgtactgcgaagcactgaatctgacggaggccccccataatcttagcggccttctcgggctgagtctgcggtataacagtctcagcgagcttcgggccggtcaattcactggactaatgcagctgacatggctttatctagatcataaccacatctgcagcgtgcagggcgacgccttccagaaattaagacgcgtcaaagagctaacactctcttccaatcagattactcagctcccaaatactactttccggcctatgcctaacctcagaagcgtggatctttcttataataagctccaggcccttgctcctgatttgttccacggtctaagaaaacttaccaccttgcacatgagggctaatgccatccagtttgtgccagtgcgcatttttcaggactgtaggtctctcaagttcctcgatatcgggtacaaccaactgaagagtctggctaggaactcctttgctggtttatttaagttaacagagctgcatctggaacacaatgacctggtgaaggtcaacttcgcccactttcccagacttatctctctgcattctttgtgcctccggagaaacaaggtggcgatagtggtgtcctctctcgattgggtgtggaacctcgaaaaaatggatctatccgggaacgagattgagtacatggagccacacgtgttcgaaactgtcccccatctgcagagtttacaactcgattcaaacaggctgacttacatagaacccaggattctgaacagttggaagagcctgacaagtatcactctggcaggaaatctatgggactgcgggagaaacgtttgtgctctggcttcctggctgaataattttcagggacgttacgacggcaacctacagtgtgcatctccggaatacgcccagggagaagatgtgttggatgccgtgtacgccttccacttatgcgaggacggggcagagccaacctcgggccatcttctgtctgctgtcactaatcgatccgatcttggccccccagctagttccgctaccaccctggctgatggcggtgaagggcagcatgacggcacatttgagccagcaacagttgccttaccggggggtgaacatgctgaaaatgccgtgcagatccacaaagtagtgactggaactatggctcttatcttcagctttcttatcgttgttctcgtcctgtatgtcagctggaagtgctttcccgcaagcctccgccagcttaggcagtgctttgtgacacaacgcagaaaacagaagcaaaaacagacaatgcaccagatggcagctatgagtgcccaagaatattacgtcgactacaagccgaaccatatcgagggggctctggtcataatcaacgagtatggatcctgcacctgtcaccagcagccagcccgcgagtgcgaagtttag

SEQ ID NO: 254344 - DNA, 330 bp, Artificial Sequence
  derived and/or modified sequence
atggatttcctattgctcgggctgtgtctgtactggctgttacggcggccgtccggggttgtcctctgtctgctcggggcctgcttccagatgctcccagcagcaccctctgggtgcccacagctgtgccgctgcgaaggacgcctgctctactgtgaagccttgaacctcacagaagctcctcataatctcagtggactgctgggcctgtccttgcggtataacagtctctcagagctccgagcgggacagtttaccggcctgatgcagttgacctggctgtacttggatcacaatcatatctgctcagtccagggtgatgcattctag

SEQ ID NO: 254345 - DNA, 672 bp, Artificial Sequence
  derived and/or modified sequence
atggattttctgctgcttgggctctgcctctactggctcctgcgacgccccagcggagtggtgctctgcctgctgggagcatgtttccagatgctcccggccgcaccgtccggctgccctcagctttgccggtgcgaaggcaggctcctttactgcgaggctttgaacctgaccgaggctccccacaacctgtccggcctgctggggctctcccttcgttataactccctgagcgaacttcgtgctgggcaattcacgggcctgatgcagctgacatggttgtatctggaccacaaccatatttgctcggtgcagggggacgcgttccagaaactgcggagggtcaaggaactgaccctctccagtaatcaaattacccagctaccaaatacaactttcagaccaatgcctaacctcagatcggtcgaccttagctataacaaactgcaggccttggcccctgatttattccatggcctccggaagctgaccactttacatatgagagcaaatgcgattcagtttgtgccggtgcgaatatttcaggactgtagatccttgaagtttctggacattgggtacaaccagctaaaatcattagctcggaacagcttcgctgggttgtttaaactgacagagctgcacctggaacacaatgatctcgtgaaatag

SEQ ID NO: 254346 - DNA, 1569 bp, Artificial Sequence
  derived and/or modified sequence
atggacttccttctgctcgggctgtgcctctattggttactgaggagacccagtggcgtcgtcctgtgcctgctgggcgcatgcttccagatgctccctgctgccccctctgggtgtccccaactctgtcgatgcgaaggcaggttgttgtactgcgaggctctgaacctcacagaggctccccataacctctccggcttgctcgggctctctcttaggtataacagtttatcagaactgcgagcaggacaattcaccggcctcatgcagctgacctggctgtatctcgatcacaatcatatatgtagcgtgcaaggcgacgctttccagaaactgcgtagagtgaaggagctgacgcttagttctaaccaaataacccagctccctaatactaccttccggcctatgccgaatcttaggtcagtcgacttatcatacaataaacttcaagctcttgctccagacctgttccacggactaaggaaactcaccactctgcatatgcgcgccaacgccatccagtttgtgccagtccgtattttccaggactgccggagcctgaagttcctggacatcggttacaaccagctgaaatccttagccagaaactcgttcgccggtttattcaaactgacggagctccatcttgagcacaacgatctggttaaagtcaacttcgctcattttccacgtctcatctccttacattcactctgcttgaggcggaataaagtcgctatcgtggttagttcccttgactgggtgtggaacctcgaaaagatggacctgtcaggaaacgagatcgagtacatggagccgcacgtgttcgagaccgtcccccacctccagagcctgcagttagacagtaatcgattaacctacattgagccacgcattcttaattcttggaagtctctcacaagcatcaccctggcaggcaatctgtgggactgtggccgcaacgtttgcgccctagcctcttggctcaacaactttcagggccgttatgatggaaatctccagtgcgcgagcccagaatacgctcagggagaggacgtcctagatgctgtgtatgcattccacttatgtgaggacggcgcagagcctacgtcggggcacttgctaagtgccgtgaccaaccgatccgatctggggcctcctgccagcagcgccaccacacttgccgatggtggagaaggtcagcacgacggcaccttcgaacctgctacagttgccttgcctggtggggagcacgcggaaaacgccgttcagattcacaaagtcgtcaccggcaccatggcattgatattttcattcctgattgtagtgctcgtgttgtatgtgagctggaagtgctttcccgcatctctacggcagttacgccaatgcttcgtgacccagagacgaaaacaaaagcagaagcaaaccatgcatcaaatggcggctatgtctgcccaggaatattatgtggattacaaaccaaaccacattgagggggccctggtcattattaatgaatatggttcctgtacctgccaccagcagcctgctcgtgagtgtgaagtgtag

SEQ ID NO: 254347 - DNA, 1569 bp, Artificial Sequence
  derived and/or modified sequence
atggacttcctgcttctgggcttgtgcctatactggctgctaaggagacccagcggagtcgtcctttgtttactgggggcttgctttcagatgttgccagcggccccttctggatgtccccagctatgccgctgcgaggggcggctactgtactgtgaagccctgaacctgaccgaggcaccacacaatctcagtggtttgcttggcctgagccttaggtacaattcgctgtctgaactgcgggctggacagttcacaggccttatgcagctcacgtggctgtatttagatcataatcatatttgtagtgtccaaggcgacgcattccagaagctgagaagggtgaaggagctcacgttgtcatctaatcaaattacccaactgccaaatacgacatttaggcctatgcccaatttgagatccgtcgacctgtcgtataacaagctgcaagctctggctcccgatctgtttcacggtctgcgaaaactgacaaccctgcacatgagagcgaatgctattcagtttgtccctgtgagaatttttcaggactgccgctctctcaagttcctggacattgggtacaaccaattgaaatccctggctcgcaactcttttgccgggttgtttaaacttaccgagttgcacctcgaacacaatgacctcgttaaagtgaacttcgcccattttcctaggctgatctctcttcatagcctttgtttaagaagaaacaaggtggccatcgtcgtgtcaagcttggactgggtctggaacctggaaaaaatggatctgtccggaaacgagatcgagtacatggaaccacacgtgttcgagactgtgcctcacctccagagcctccagctcgattcaaaccgactcacttatatcgagccccgtatcctgaattcctggaaaagcctcacatccatcacattggctgggaatctgtgggattgtggccggaatgtgtgcgccctcgcatcatggctaaataattttcaagggcgatatgacggtaatcttcagtgtgcctcaccagagtacgcccagggcgaggacgttctcgatgccgtgtatgcgttccatctgtgtgaggatggtgccgagcctacttccggccatctactgtcagctgtgacgaatcgcagcgacttgggccctccagcttcgagtgccacaacgctagctgatggcggagagggacagcacgacggcacctttgaacccgctaccgttgccttgcccggcggcgaacacgccgagaacgccgtacaaattcacaaggtcgtgacgggaactatggcactgatcttctccttccttattgtcgttttggtgttatatgtctcatggaaatgtttccctgcaagcctccgtcaactcagacagtgtttcgtgacacagcgccggaagcagaagcagaaacagaccatgcaccagatggccgcaatgtccgcacaggaatattacgtcgactacaagcctaaccacatcgagggggccctggtgatcattaacgaatacggctcctgcacatgccaccagcagcctgcccgtgagtgtgaggtctag

SEQ ID NO: 254348 - DNA, 552 bp, Artificial Sequence
  derived and/or modified sequence
atggatttccttctcctcggcctgtgcctgtactggctactgcgccgcccatccggagtggtcctctgcttactgggagcatgctttcagatgctgccggcggcaccatccggctgtcctcaactgtgccgctgtgagggaagattgctctactgcgaagcactcaacttgacagaggccccccacaatctgagcggactgttagggcttagtctgagatacaattcactgagtgagctgagggcaggtcagttcacaggtttgatgcagctgacctggctctaccttgaccacaatcatatctgttcggtgcagggagacgcattccagaaattaagacgggtgaaggaactgacgctcagctccaatcagatcacccaattgccaaacacgacctttaggccaatgcctaacctgaggtcagttgacctcagctacaacaagttacaggctttagcgcccgatctcttccacggtcttagaaagctgaccaccctacatatgcgagccaacgcaatacaatttgtccccgtcaggatttttcaggactag

SEQ ID NO: 254349 - DNA, 1569 bp, Artificial Sequence
  derived and/or modified sequence
atggacttcctgctgctgggcctgtgcctgtactggctgctgcggcggcccagcggcgtggtgctgtgcctgctgggcgcctgcttccagatgctgcctgctgcccccagcggctgcccccagctgtgccgctgtgagggccgcctgctgtactgtgaggccctgaacctgacagaggccccccacaacctgagcggcctgctgggcctgagcctgcgctacaacagcctgtctgagctgcgggccggccagttcaccggcctgatgcagctgacctggctgtacctggaccacaaccacatctgcagcgtgcagggagatgccttccagaagctgcggcgggtgaaggagctgaccctgagcagcaaccagatcacccagctgcccaacaccaccttccggcccatgcccaacctgcggtctgtggacctgagctacaacaagctgcaggccctggccccagacctcttccacggcctgaggaagctgaccaccctgcacatgagggccaatgccatccagtttgtgcctgtgcgcatcttccaggactgccgcagcctgaagttcctggacatcggctacaaccagctgaagagcctggccaggaacagctttgctggcctcttcaagctgacagagctgcacctggagcacaatgacctggtgaaggtgaactttgcccacttccccaggctcatcagcctgcacagcctgtgcctgcggaggaacaaggtggccatcgtggtgagcagcctggactgggtgtggaacctggagaagatggacctgtctggaaatgaaattgagtacatggagccccacgtgtttgagaccgtgccccacctgcagagcctgcagctggacagcaaccggctgacctacatcgagccccgcatcctgaacagctggaagagcctgaccagcatcaccctggccggcaacctgtgggactgtggcagaaatgtgtgtgccctggcctcctggctgaacaacttccagggccgctatgatggcaacctgcagtgtgccagcccagaatatgcccagggagaagatgtgctggatgctgtgtatgccttccacctgtgtgaagatggagctgagcccaccagcggccacctgctgtctgctgtgaccaacagaagtgacctgggccccccagccagcagcgccaccaccctggctgatggaggagagggccagcatgatggcacctttgagcccgccaccgtggccctgcccggcggggagcacgccgagaatgctgtgcagatccacaaggtggtgacaggcaccatggccctgatcttctccttcctgattgtggtgctggtgctgtatgtgtcctggaagtgcttccctgccagcctgcggcagctgcggcagtgctttgtgacccagaggaggaagcagaagcagaagcagaccatgcaccagatggccgccatgtctgcccaggagtactacgtggactacaagcccaaccacattgaaggagccctggtgatcatcaatgaatatggcagctgcacctgccaccagcagcctgccagagaatgtgaggtgtag

SEQ ID NO: 254350 - DNA, 330 bp, Artificial Sequence
  derived and/or modified sequence
atggacttcctgctgctgggcctgtgcctgtactggctgctgcggcggcccagcggcgtggtgctgtgcctgctgggcgcctgcttccagatgctgcctgctgcccccagcggctgcccccagctgtgccgctgtgagggccgcctgctgtactgtgaggccctgaacctgacagaggccccccacaacctgagcggcctgctgggcctgagcctgcgctacaacagcctgtctgagctgcgggccggccagttcaccggcctgatgcagctgacctggctgtacctggaccacaaccacatctgcagcgtgcagggagatgccttctag

SEQ ID NO: 254351 - DNA, 672 bp, Artificial Sequence
  derived and/or modified sequence
atggacttcctgctgctgggcctgtgcctgtactggctgctgcggcggcccagcggcgtggtgctgtgcctgctgggcgcctgcttccagatgctgcctgctgcccccagcggctgcccccagctgtgccgctgtgagggccgcctgctgtactgtgaggccctgaacctgacagaggccccccacaacctgagcggcctgctgggcctgagcctgcgctacaacagcctgtctgagctgcgggccggccagttcaccggcctgatgcagctgacctggctgtacctggaccacaaccacatctgcagcgtgcagggagatgccttccagaagctgcggcgggtgaaggagctgaccctgagcagcaaccagatcacccagctgcccaacaccaccttccggcccatgcccaacctgcggtctgtggacctgagctacaacaagctgcaggccctggccccagacctcttccacggcctgaggaagctgaccaccctgcacatgagggccaatgccatccagtttgtgcctgtgcgcatcttccaggactgccgcagcctgaagttcctggacatcggctacaaccagctgaagagcctggccaggaacagctttgctggcctcttcaagctgacagagctgcacctggagcacaatgacctggtgaagtag

SEQ ID NO: 254352 - DNA, 552 bp, Artificial Sequence
  derived and/or modified sequence
atggacttcctgctgctgggcctgtgcctgtactggctgctgcggcggcccagcggcgtggtgctgtgcctgctgggcgcctgcttccagatgctgcctgctgcccccagcggctgcccccagctgtgccgctgtgagggccgcctgctgtactgtgaggccctgaacctgacagaggccccccacaacctgagcggcctgctgggcctgagcctgcgctacaacagcctgtctgagctgcgggccggccagttcaccggcctgatgcagctgacctggctgtacctggaccacaaccacatctgcagcgtgcagggagatgccttccagaagctgcggcgggtgaaggagctgaccctgagcagcaaccagatcacccagctgcccaacaccaccttccggcccatgcccaacctgcggtctgtggacctgagctacaacaagctgcaggccctggccccagacctcttccacggcctgaggaagctgaccaccctgcacatgagggccaatgccatccagtttgtgcctgtgcgcatcttccaggactag

SEQ ID NO: 254353 - DNA, 2599 bp, Artificial Sequence
  derived and/or modified sequence
actcagtgagcagtaggtgcctgtgcaagctcgcgccgcacactgcctggtggagggaaggagcccgggcgccgctcgccgctccccgcgccgccgtccgcacctccccaccgcccgccgcccgccgcccgccgcccgcaaagcatgagtgagcccgctctctgcagctgcccggggcgcgaatggcaggctgtttccgcggagtaaaaggtggcgccggtcagtggtcgtttccaatgacggacattaaccagactgtcagatcctggggagtcgcgagccccgagtttggagttttttccccccacaacgtcacagtccgaactgcagagggaaaggaaggcggcaggaaggcgaagctcgggctccggcacgtagttgggaaacttgcgggtcctagaagtcgcctccccgccttgccggccgcccttgcagccccgagccgagcagcaaagtgagacattgtgcgcctgccagatccgccggccgcggaccggggctgcctcggaaacacagaggggtcttctctcgccctgcatataattagcctgcacacaaagggagcagctgaatggaggttgtcactctctggaaaaggatttctgaccgagcgcttccaatggacattctccagtctctctggaaagattctcgctaatggatttcctgctgctcggtctctgtctatactggctgctgaggaggccctcgggggtggtcttgtgtctgctgggggcctgctttcagatgctgcccgccgcccccagcgggtgcccgcagctgtgccggtgcgaggggcggctgctgtactgcgaggcgctcaacctcaccgaggcgccccacaacctgtccggcctgctgggcttgtccctgcgctacaacagcctctcggagctgcgcgccggccagttcacggggttaatgcagctcacgtggctctatctggatcacaatcacatctgctccgtgcagggggacgcctttcagaaactgcgccgagttaaggaactcacgctgagttccaaccagatcacccaactgcccaacaccaccttccggcccatgcccaacctgcgcagcgtggacctctcgtacaacaagctgcaggcgctcgcgcccgacctcttccacgggctgcggaagctcaccacgctgcatatgcgggccaacgccatccagtttgtgcccgtgcgcatcttccaggactgccgcagcctcaagtttctcgacatcggatacaatcagctcaagagtctggcgcgcaactctttcgccggcttgtttaagctcaccgagctgcacctcgagcacaacgacttggtcaaggtgaacttcgcccacttcccgcgcctcatctccctgcactcgctctgcctgcggaggaacaaggtggccattgtggtcagctcgctggactgggtttggaacctggagaaaatggacttgtcgggcaacgagatcgagtacatggagccccatgtgttcgagaccgtgccgcacctgcagtccctgcagctggactccaaccgcctcacctacatcgagccccggatcctcaactcttggaagtccctgacaagcatcaccctggccgggaacctgtgggattgcgggcgcaacgtgtgtgccctagcctcgtggctcaacaacttccaggggcgctacgatggcaacttgcagtgcgccagcccggagtacgcacagggcgaggacgtcctggacgccgtgtacgccttccacctgtgcgaggatggggccgagcccaccagcggccacctgctctcggccgtcaccaaccgcagtgatctggggccccctgccagctcggccaccacgctcgcggacggcggggaggggcagcacgacggcacattcgagcctgccaccgtggctcttccaggcggcgagcacgccgagaacgccgtgcagatccacaaggtggtcacgggcaccatggccctcatcttctccttcctcatcgtggtcctggtgctctacgtgtcctggaagtgtttcccagccagcctcaggcagctcagacagtgctttgtcacgcagcgcaggaagcaaaagcagaaacagaccatgcatcagatggctgccatgtctgcccaggaatactacgttgattacaaaccgaaccacattgagggagccctggtgatcatcaacgagtatggctcgtgtacctgccaccagcagcccgcgagggaatgcgaggtgtgattgtcccagtggctctcaacccatgcgctaccaaatacgcctgggcagccgggacgggccggcgggcaccaggctggggtctccttgtctgtgctctgatatgctccttgactgaaactttaaggggatctctcccagagacttgacattttagctttattgtgtcttaaaaacaaaagcgaattaaaacacaacaaaaaaccccaccccacaaccttcaggacagtctatcttaaatttcatatgagaactccttcctccctttgaagatctgtccatattcaggaatctgagagtgtaaaaaaggtaccaatcattgattttttttttttttgtaaactaaaatgtttaaaataaaatagcatttacagtt

SEQ ID NO: 254354 - DNA, 2126 bp, Artificial Sequence
  derived and/or modified sequence
agatccgccggccgcggaccggggctgcctcggaaacacagaggggtcttctctcgccctgcatataattagcctgcacacaaagggagcagctgaatggaggttgtcactctctggaaaagggtggatttctgaccgagcgcttccaatggacattctccagtctctctggaaagattctcgctaatggatttcctgctgctcggtctctgtctatactggctgctgaggaggccctcgggggtggtcttgtgtctgctgggggcctgctttcagatgctgcccgccgcccccagcgggtgcccgcagctgtgccggtgcgaggggcggctgctgtactgcgaggcgctcaacctcaccgaggcgccccacaacctgtccggcctgctgggcttgtccctgcgctacaacagcctctcggagctgcgcgccggccagttcacggggttaatgcagctcacgtggctctatctggatcacaatcacatctgctccgtgcagggggacgcctttcagaaactgcgccgagttaaggaactcacgctgagttccaaccagatcacccaactgcccaacaccaccttccggcccatgcccaacctgcgcagcgtggacctctcgtacaacaagctgcaggcgctcgcgcccgacctcttccacgggctgcggaagctcaccacgctgcatatgcgggccaacgccatccagtttgtgcccgtgcgcatcttccaggactgccgcagcctcaagtttctcgacatcggatacaatcagctcaagagtctggcgcgcaactctttcgccggcttgtttaagctcaccgagctgcacctcgagcacaacgacttggtcaaggtgaacttcgcccacttcccgcgcctcatctccctgcactcgctctgcctgcggaggaacaaggtggccattgtggtcagctcgctggactgggtttggaacctggagaaaatggacttgtcgggcaacgagatcgagtacatggagccccatgtgttcgagaccgtgccgcacctgcagtccctgcagctggactccaaccgcctcacctacatcgagccccggatcctcaactcttggaagtccctgacaagcatcaccctggccgggaacctgtgggattgcgggcgcaacgtgtgtgccctagcctcgtggctcaacaacttccaggggcgctacgatggcaacttgcagtgcgccagcccggagtacgcacagggcgaggacgtcctggacgccgtgtacgccttccacctgtgcgaggatggggccgagcccaccagcggccacctgctctcggccgtcaccaaccgcagtgatctggggccccctgccagctcggccaccacgctcgcggacggcggggaggggcagcacgacggcacattcgagcctgccaccgtggctcttccaggcggcgagcacgccgagaacgccgtgcagatccacaaggtggtcacgggcaccatggccctcatcttctccttcctcatcgtggtcctggtgctctacgtgtcctggaagtgtttcccagccagcctcaggcagctcagacagtgctttgtcacgcagcgcaggaagcaaaagcagaaacagaccatgcatcagatggctgccatgtctgcccaggaatactacgttgattacaaaccgaaccacattgagggagccctggtgatcatcaacgagtatggctcgtgtacctgccaccagcagcccgcgagggaatgcgaggtgtgattgtcccagtggctctcaacccatgcgctaccaaatacgcctgggcagccgggacgggccggcgggcaccaggctggggtctccttgtctgtgctctgatatgctccttgactgaaactttaaggggatctctcccagagacttgacattttagctttattgtgtcttaaaaacaaaagcgaattaaaacacaacaaaaaaccccaccccacaaccttcaggacagtctatcttaaatttcatatgagaactccttcctccctttgaagatctgtccatattcaggaatctgagagtgtaaaaaaggtaccaatcattgattttttttttttttgtaaactaaaatgtttaaaataaaatagcatttacag

SEQ ID NO: 254355 - DNA, 578 bp, Artificial Sequence
  derived and/or modified sequence
cttgcagccccgagccgagcagcaaagtgagacattgtgcgcctgccagatccgccggccgcggaccggggctgcctcggaaacacagaggggtcttctctcgccctgcatataattagcctgcacacaaagggagcagctgaatggaggttgtcactctctggaaaagggtggctttctgcatgcttagagatttctgaccgagcgcttccaatggacattctccagtctctctggaaagattctcgctaatggatttcctgctgctcggtctctgtctatactggctgctgaggaggccctcgggggtggtcttgtgtctgctgggggcctgctttcagatgctgcccgccgcccccagcgggtgcccgcagctgtgccggtgcgaggggcggctgctgtactgcgaggcgctcaacctcaccgaggcgccccacaacctgtccggcctgctgggcttgtccctgcgctacaacagcctctcggagctgcgcgccggccagttcacggggttaatgcagctcacgtggctctatctggatcacaatcacatctgctccgtgcagggggacgccttt

SEQ ID NO: 254356 - DNA, 879 bp, Artificial Sequence
  derived and/or modified sequence
ccgctctctgcagctgcccggggcgcgaatggcaggctgtttccgcggagtaaaaggtggcgccgcatctaacatggaccaaatcaccatctctttgatctttccgtggctgtgaactttctatgctgcccagctttctgcatgcttagagatttctgaccgagcgcttccaatggacattctccagtctctctggaaagattctcgctaatggatttcctgctgctcggtctctgtctatactggctgctgaggaggccctcgggggtggtcttgtgtctgctgggggcctgctttcagatgctgcccgccgcccccagcgggtgcccgcagctgtgccggtgcgaggggcggctgctgtactgcgaggcgctcaacctcaccgaggcgccccacaacctgtccggcctgctgggcttgtccctgcgctacaacagcctctcggagctgcgcgccggccagttcacggggttaatgcagctcacgtggctctatctggatcacaatcacatctgctccgtgcagggggacgcctttcagaaactgcgccgagttaaggaactcacgctgagttccaaccagatcacccaactgcccaacaccaccttccggcccatgcccaacctgcgcagcgtggacctctcgtacaacaagctgcaggcgctcgcgcccgacctcttccacgggctgcggaagctcaccacgctgcatatgcgggccaacgccatccagtttgtgcccgtgcgcatcttccaggactgccgcagcctcaagtttctcgacatcggatacaatcagctcaagagtctggcgcgcaactctttcgccggcttgtttaagctcaccgagctgcacctcgagcacaacgacttggtcaag

SEQ ID NO: 254357 - DNA, 3014 bp, Artificial Sequence
  derived and/or modified sequence
aagctcgggctccggcacgtagttgggaaacttgcgggtcctagaagtcgcctccccgccttgccggccgcccttgcagccccgagccgagcagcaaagtgagacattgtgcgcctgccagatccgccggccgcggaccggggctgcctcggaaacacagaggggtcttctctcgccctgcatataattagcctgcacacaaagggagcagctgaatggaggttgtcactctctggaaaaggatttctgaccgagcgcttccaatggacattctccagtctctctggaaagattctcgctaatggatttcctgctgctcggtctctgtctatactggctgctgaggaggccctcgggggtggtcttgtgtctgctgggggcctgctttcagatgctgcccgccgcccccagcgggtgcccgcagctgtgccggtgcgaggggcggctgctgtactgcgaggcgctcaacctcaccgaggcgccccacaacctgtccggcctgctgggcttgtccctgcgctacaacagcctctcggagctgcgcgccggccagttcacggggttaatgcagctcacgtggctctatctggatcacaatcacatctgctccgtgcagggggacgcctttcagaaactgcgccgagttaaggaactcacgctgagttccaaccagatcacccaactgcccaacaccaccttccggcccatgcccaacctgcgcagcgtggacctctcgtacaacaagctgcaggcgctcgcgcccgacctcttccacgggctgcggaagctcaccacgctgcatatgcgggccaacgccatccagtttgtgcccgtgcgcatcttccaggactgccgcagcctcaagtttctcgacatcggatacaatcagctcaagagtctggcgcgcaactctttcgccggcttgtttaagctcaccgagctgcacctcgagcacaacgacttggtcaaggtgaacttcgcccacttcccgcgcctcatctccctgcactcgctctgcctgcggaggaacaaggtggccattgtggtcagctcgctggactgggtttggaacctggagaaaatggacttgtcgggcaacgagatcgagtacatggagccccatgtgttcgagaccgtgccgcacctgcagtccctgcagctggactccaaccgcctcacctacatcgagccccggatcctcaactcttggaagtccctgacaagcatcaccctggccgggaacctgtgggattgcgggcgcaacgtgtgtgccctagcctcgtggctcaacaacttccaggggcgctacgatggcaacttgcagtgcgccagcccggagtacgcacagggcgaggacgtcctggacgccgtgtacgccttccacctgtgcgaggatggggccgagcccaccagcggccacctgctctcggccgtcaccaaccgcagtgatctggggccccctgccagctcggccaccacgctcgcggacggcggggaggggcagcacgacggcacattcgagcctgccaccgtggctcttccaggcggcgagcacgccgagaacgccgtgcagatccacaaggtggtcacgggcaccatggccctcatcttctccttcctcatcgtggtcctggtgctctacgtgtcctggaagtgtttcccagccagcctcaggcagctcagacagtgctttgtcacgcagcgcaggaagcaaaagcagaaacagaccatgcatcagatggctgccatgtctgcccaggaatactacgttgattacaaaccgaaccacattgagggagccctggtgatcatcaacgagtatggctcgtgtacctgccaccagcagcccgcgagggaatgcgaggtgtgattgtcccagtggctctcaacccatgcgctaccaaatacgcctgggcagccgggacgggccggcgggcaccaggctggggtctccttgtctgtgctctgatatgctccttgactgaaactttaaggggatctctcccagagacttgacattttagctttattgtgtcttaaaaacaaaagcgaattaaaacacaacaaaaaaccccaccccacaaccttcaggacagtctatcttaaatttcatatgagaactccttcctccctttgaagatctgtccatattcaggaatctgagagtgtaaaaaagttctgtcaacagattcagtccccagtcctccttctctgagcagacctctcatccgcagcatatatctgctagatcttctaagagctgaaatggagacttctggaagaaggtgggaaagaaatccatctcggcttaattaaccatttatcgcatcatattactcccatcttaaaagtgcacgcgttgtttttctgaaccctcacacaaaggctactactgtggtcccatatctgtcggcccatgagaaacagtgttcttggacctcacagccaagcagcactgaactgcagcaaaatccagcaacacattcagcagcgagcagcctgctgagctccactggtttatccggggccaccaaccccaaagaactgggatgaaagcagatgtgagagaggaaaaggatctgtttttgttttattttctaccaggcccagctctttgtggggggaataaaaaagaagaaaaatcgagctccaagctggtgccctgccaagcttcctcccctcccttcctagtccaagcactccaccgtctgtgcagactgcataacagcaatttctggaaacaggctgaagaatctgggccagtccagaggcagtggattcctggtttatgtgtggtggggtttttaggaattttatttttcaccttaattctttcaacaactgccagctgtttgaagcacatctgtaataaacagcttctgtttgtaaaatgagactgaagttatcctctccagagaaattcctgaatcttctctgtagttcaatgccttcactgacagtttggctcaaaaagtatgagtgtggtaaatattaaagaatgttaatacaagtgt

SEQ ID NO: 254358 - DNA, 4023 bp, Artificial Sequence
  derived and/or modified sequence
cctgtgcaagctcgcgccgcacactgcctggtggagggaaggagcccgggcgccgctcgccgctccccgcgccgccgtccgcacctccccaccgcccgccgcccgccgcccgccgcccgcaaagcatgagtgagcccgctctctgcagctgcccggggcgcgaatggcaggctgtttccgcggagtaaaaggtggcgccggtcagtggtcgtttccaatgacggacattaaccagactgtcagatcctggggagtcgcgagccccgagtttggagttttttccccccacaacgtcacagtccgaactgcagagggaaaggaaggcggcaggaaggcgaagctcgggctccggcacgtagttgggaaacttgcgggtcctagaagtcgcctccccgccttgccggccgcccttgcagccccgagccgagcagcaaagtgagacattgtgcgcctgccagatccgccggccgcggaccggggctgcctcggaaacacagaggggtcttctctcgccctgcatataattagcctgcacacaaagggagcagctgaatggaggttgtcactctctggaaaaggatttctgaccgagcgcttccaatggacattctccagtctctctggaaagattctcgctaatggatttcctgctgctcggtctctgtctatactggctgctgaggaggccctcgggggtggtcttgtgtctgctgggggcctgctttcagatgctgcccgccgcccccagcgggtgcccgcagctgtgccggtgcgaggggcggctgctgtactgcgaggcgctcaacctcaccgaggcgccccacaacctgtccggcctgctgggcttgtccctgcgctacaacagcctctcggagctgcgcgccggccagttcacggggttaatgcagctcacgtggctctatctggatcacaatcacatctgctccgtgcagggggacgcctttcagaaactgcgccgagttaaggaactcacgctgagttccaaccagatcacccaactgcccaacaccaccttccggcccatgcccaacctgcgcagcgtggacctctcgtacaacaagctgcaggcgctcgcgcccgacctcttccacgggctgcggaagctcaccacgctgcatatgcgggccaacgccatccagtttgtgcccgtgcgcatcttccaggactgccgcagcctcaagtttctcgacatcggatacaatcagctcaagagtctggcgcgcaactctttcgccggcttgtttaagctcaccgagctgcacctcgagcacaacgacttggtcaaggtgaacttcgcccacttcccgcgcctcatctccctgcactcgctctgcctgcggaggaacaaggtggccattgtggtcagctcgctggactgggtttggaacctggagaaaatggacttgtcgggcaacgagatcgagtacatggagccccatgtgttcgagaccgtgccgcacctgcagtccctgcagctggactccaaccgcctcacctacatcgagccccggatcctcaactcttggaagtccctgacaagcatcaccctggccgggaacctgtgggattgcgggcgcaacgtgtgtgccctagcctcgtggctcaacaacttccaggggcgctacgatggcaacttgcagtgcgccagcccggagtacgcacagggcgaggacgtcctggacgccgtgtacgccttccacctgtgcgaggatggggccgagcccaccagcggccacctgctctcggccgtcaccaaccgcagtgatctggggccccctgccagctcggccaccacgctcgcggacggcggggaggggcagcacgacggcacattcgagcctgccaccgtggctcttccaggcggcgagcacgccgagaacgccgtgcagatccacaaggtggtcacgggcaccatggccctcatcttctccttcctcatcgtggtcctggtgctctacgtgtcctggaagtgtttcccagccagcctcaggcagctcagacagtgctttgtcacgcagcgcaggaagcaaaagcagaaacagaccatgcatcagatggctgccatgtctgcccaggaatactacgttgattacaaaccgaaccacattgagggagccctggtgatcatcaacgagtatggctcgtgtacctgccaccagcagcccgcgagggaatgcgaggtgtgattgtcccagtggctctcaacccatgcgctaccaaatacgcctgggcagccgggacgggccggcgggcaccaggctggggtctccttgtctgtgctctgatatgctccttgactgaaactttaaggggatctctcccagagacttgacattttagctttattgtgtcttaaaaacaaaagcgaattaaaacacaacaaaaaaccccaccccacaaccttcaggacagtctatcttaaatttcatatgagaactccttcctccctttgaagatctgtccatattcaggaatctgagagtgtaaaaaaggtggccataagacagagagagaataatcgtgctttgttttatgctactcctcccaccctgcccatgattaaacatcatgtatgtagaagatcttaagtccatacgcatttcatgaagaaccattggaaagaggaatctgcaatctgggagcttaagagcaaatgatgaccatagaaagctatgttcttactttgtgtgtgtgtctgtatgtttctgcgttgtgtgtctttgtaggcaagcaaacgttgtctacacaaacgggaatttagctcacatcatttcatgcccctgtgcctctagctctggagattggtggggggaggtggggggaaacggcaggaataagggaaagtggtagttttaactaaggttttgtaacacttgaaatcttttctttctcaaattaattaatctttaagcttcaagaaacttgctctgacccctctaagcaaactactaagcatttaaaagagaatctaatttttaaaggtgtagcaccttttttttattcttcccacagagggtgctaatctcattatgctgtgctatctgaaaagaacttaaggccacaattcacgtctcgtcctgggcattgtgatggattgaccctccatttgcagtaccttcccagctgattaaagttcagcagtggtattgaggtttttcgaatatttatatagaaaaaaagtcttttcacatgacaaatgacactctcacaccagtcttagccctagtagttttttaggttggaccagaggaagcaggttaaatgagacctgtcctctgctgcactcagaaaaaataggcagtccctgatgctcagatcttagccttgatattaatagttgagaccacctacccacaatgcagcctatactcccaagactacaaagttaccatcgcaaaggaaaggttattccagtaaaaggaaatagttttctcaaccatttaaaaatattcttctgaactcatcaaagtagaagagcccccaaccttttctctctgccttcaagaaggcagacatttggtatgatttagcatcaacaacacatttatgagtatatgtaagtaatcagaggggcaaatgccacttgttattcctcccaagttttccaagcaagtacacacagatctctggtaggattaggggccacttgtgtttccggcttattttagtcgacttgtcagcaagtttgatgcctagtctatctgacatggcccagtagaacagggcattgatggatcacatgagatggtagaaggaacatcatcacatacccctctcacagagaaaattatcaaagaaccagaaattatatctgttttggagcaagagtgtcataatgtttcagggtagtcaaaataaacataaattatctcctctagatgagtggcgatgttggctgatttgggtctgccattgacagaatgtcaaataaaaaggaattagctagaatatgaccattaaatgtgcttctgaaatatattttgagataggtttagaatgtca

SEQ ID NO: 254359 - DNA, 765 bp, Artificial Sequence
  derived and/or modified sequence
acgtcacagtccgaactgcagagggaaaggaaggcggcaggaaggcgaagctcgggctccggcacgtagttgggaaacttgcgggtcctagaagtcgcctccccgccttgccggccgcccttgcagccccgagccgagcagcaaagtgagacattatttctgaccgagcgcttccaatggacattctccagtctctctggaaagattctcgctaatggatttcctgctgctcggtctctgtctatactggctgctgaggaggccctcgggggtggtcttgtgtctgctgggggcctgctttcagatgctgcccgccgcccccagcgggtgcccgcagctgtgccggtgcgaggggcggctgctgtactgcgaggcgctcaacctcaccgaggcgccccacaacctgtccggcctgctgggcttgtccctgcgctacaacagcctctcggagctgcgcgccggccagttcacggggttaatgcagctcacgtggctctatctggatcacaatcacatctgctccgtgcagggggacgcctttcagaaactgcgccgagttaaggaactcacgctgagttccaaccagatcacccaactgcccaacaccaccttccggcccatgcccaacctgcgcagcgtggacctctcgtacaacaagctgcaggcgctcgcgcccgacctcttccacgggctgcggaagctcaccacgctgcatatgcgggccaacgccatccagtttgtgcccgtgcgcatcttccaggactg

SEQ ID NO: 254360 - DNA, 1569 bp, Artificial Sequence
  derived and/or modified sequence
atggacttcctgctgctgggcctgtgcctgtactggctgctgcggcgcccctccggagtggtcttgtgcttacttggcgcttgttttcagatgctcccagctgcacccagcggttgccctcaactgtgtcgctgcgagggtcgcttactgtactgtgaggcacttaatctcaccgaagcacctcacaacctgtccggacttcttggcctttctctgcggtataatagtctatccgagctgagagctgggcaatttacgggcctgatgcagctaacctggctgtacctcgatcacaaccacatctgcagcgtgcagggtgacgctttccagaagctgagaagggttaaggagcttaccctgagctccaaccagatcacccagttacccaataccaccttccggcccatgcctaacctgagaagcgtggacctgagctataacaagcttcaagccctggctccagatctgtttcacggacttcgcaaactgactaccctgcacatgcgagcaaatgccatccagtttgtgcctgtgcgcatctttcaggactgtcgctccttaaagttcctggatatcggctataatcaactgaaaagtctggctcggaactcctttgcaggcctgttcaagttgactgaattgcatctggagcataatgacttggttaaggtgaattttgcacactttccacggctgattagcctgcactccttgtgtcttaggcgtaacaaggttgcaatcgtggtgtcttcactggattgggtttggaaccttgaaaaaatggacctgagcggcaatgagatcgaatacatggaaccacatgtcttcgaaaccgtgccacatctccaatccctccagctggactcaaacaggctgacctatatcgagccaagaatcttaaactcatggaagagcctcaccagcatcaccctggcgggcaacctttgggactgcgggagaaacgtgtgtgcccttgcatcgtggttgaacaatttccagggcagatacgatggtaacctgcagtgcgcttcgcccgagtatgcccagggggaagatgtgctggacgcagtgtatgcctttcacctttgcgaagacggggcggagccgacctccggacatcttctttctgcagtaacaaaccgcagcgacctgggacctccagccagcagcgcaaccacacttgccgacgggggcgaggggcagcacgacggcactttcgaaccagcaactgtggccttgcccggcggcgaacatgccgagaatgcagtccagatccacaaggtggttactggaactatggccctaatattctcattccttatagtcgttctggttctgtacgtttcttggaagtgtttccccgccagcctacgccagcttaggcagtgctttgtgactcagaggagaaagcagaagcagaagcagactatgcatcaaatggccgccatgtctgctcaggaatactacgtcgattacaagccgaatcatatcgaaggtgccctggtgatcataaacgaatacggatcctgcacttgccaccaacaaccagcacgcgaatgcgaagtgtag

SEQ ID NO: 254361 - DNA, 1569 bp, Artificial Sequence
  derived and/or modified sequence
atggacttcctgctgctgggcctgtgcctgtactggctgctgcggcggccttccggggtggttctgtgtctcctgggggcctgcttccagatgctcccagctgcccccagtggctgccctcagttgtgccgctgtgagggacgtttgctctactgtgaggccttaaatttgacagaggcccctcataacttaagtgggcttctaggactatcccttagatacaactccctgagcgagttgcgcgcagggcagttcacgggtctgatgcagctgacctggctatatctggatcataatcatatttgctcagtgcagggcgatgccttccagaaactgagacgggtgaaggagctgacattaagtagtaaccagattacgcaactgcccaatacaacattcaggcctatgcccaatctgcggagtgtggacctgtcatataataaactccaggccctggcccctgatctgttccatggcttgaggaaactgacaacattgcacatgcgggctaacgcaatacagttcgtacccgtgagaatctttcaggattgtaggtccttgaaatttctggatatcgggtacaatcagctcaagtccctcgcacgaaactcctttgcgggtctgttcaagcttaccgagctgcatttggaacataacgatcttgtgaaagtgaattttgcgcactttccgcggctgatttcgttacactctctctgccttaggcgtaacaaggtggccatagtcgtctccagcctcgactgggtttggaacttggagaagatggacctctccggaaatgagatcgagtacatggaaccccacgtgttcgagacagtgcctcatcttcagtcactgcagctggatagcaaccgccttacctatattgaaccccgcatactcaattcatggaaaagtctcacttctattacacttgctggaaatctctgggattgtggtcgcaacgtatgcgctcttgcctcatggctgaacaatttccaggggcgctatgacggtaacctgcagtgcgcttcacccgagtacgcccagggggaggatgtgctggatgcagtgtatgcctttcacttgtgtgaagatggcgccgagccaacgtccggacatctgctgagcgccgtaacaaatagaagcgacctgggccctcccgcatcatccgcaacaaccttagccgacggaggcgaggggcagcatgacggaacattcgagcccgcaacggtggccctgccagggggggagcatgcagaaaacgctgtgcagattcataaagttgtgacgggcacaatggccctgattttcagcttcctgattgtggtactggtgctttatgtttcctggaaatgcttccccgcctctctgcgacaattgcggcagtgtttcgtaacccagaggcgcaaacagaaacagaaacaaaccatgcatcagatggcagccatgagcgctcaagagtattacgtggattacaaaccaaaccacatcgagggggccctggtcattataaacgaatacggcagctgtacatgccatcaacagccggcgagagaatgcgaggtgtag

SEQ ID NO: 254362 - DNA, 330 bp, Artificial Sequence
  derived and/or modified sequence
atggacttcctgctgctgggcctgtgcctgtactggctgctgcggcgtcctagcggcgtggtcctgtgcctgctaggtgcctgctttcaaatgttaccagccgcgcccagcggatgccctcaattgtgcagatgcgaaggcaggctgctgtattgcgaagccctcaacctgacagaagctcctcataacctgtcgggcctgctgggactgagcttaagatataatagtctatcagagctgagagccggtcagtttactggcttgatgcagttgacctggttatacctggatcacaaccatatatgttcggtgcagggagatgcattctag

SEQ ID NO: 254363 - DNA, 672 bp, Artificial Sequence
  derived and/or modified sequence
atggacttcctgctgctgggcctgtgcctgtactggctgctgcggcgacccagcggggtagtcctctgcctcctgggagcctgcttccagatgcttccagctgccccgtcagggtgccctcagctgtgtagatgtgaaggaaggctcctttattgcgaagctttaaacttgaccgaagccccccacaacctttcaggattactgggcctgagcttgcgatataacagcctctctgagctaagagctggacagtttaccggcttgatgcaattaacctggctgtacctcgatcacaaccacatatgtagtgtacagggcgatgcattccagaaattgagacgagtgaaggagttgactctgagtagcaatcagatcacccagctgcccaatacaacctttcggccaatgccaaacctccggagcgtcgatctgtcctacaataaactccaggccttggcccccgacctgttccatggtctccgaaagctgacaaccctacatatgagagccaatgcaattcagttcgtgccagtcaggatcttccaggattgcagaagcttgaagtttctggacattggctacaatcagctcaaaagcctggctaggaattcatttgccggactctttaaactgacagagctccacctggaacataatgatctcgtgaagtag

SEQ ID NO: 254364 - DNA, 1569 bp, Artificial Sequence
  derived and/or modified sequence
atggacttcctgctgctgggcctgtgcctgtactggctgctgcggcggccttctggcgtggtgctgtgcctcctcggcgcatgttttcagatgttgccagcggccccctccgggtgccctcagctctgtagatgtgaggggcgactgctctactgcgaagccctcaacctcactgaagctcctcataatttatcaggccttctcgggcttagcctgaggtataactctttgtccgagctgagggcaggacagttcacagggctaatgcagctgacatggctctacctcgaccacaatcacatatgttccgttcaaggagacgccttccagaaactgcggagagtaaaggagctgacactgagctcaaatcagataacacagcttccaaataccacctttagacccatgccaaatttgcggtcagtggaccttagctacaataagctgcaagctctcgcccctgatttatttcacgggctgaggaagctcaccacccttcatatgcgagctaatgcgattcagttcgtgccagtgcgaattttccaggattgccgttcactcaagttccttgacatcggatataaccagctgaagtccctggccaggaactcttttgccggcttgttcaaactgacagaattgcatctggaacataatgacctggtgaaagtgaattttgctcattttccccgactgatcagcttgcattctttgtgtctgcggcgcaacaaagtcgctatcgtggtctcctctctcgattgggtgtggaatctcgaaaagatggatctgtctggtaacgagatcgagtacatggaaccgcatgtgttcgagaccgtgccacatctgcagtccctgcaactggacagcaataggctcacctatattgaaccccgcattctcaacagctggaaaagcctgactagcatcactctggccgggaacctctgggattgcggaaggaacgtctgcgcactagcaagttggctaaataacttccagggtaggtacgatggcaatctgcaatgtgcttcaccggaatacgcccaaggcgaggatgtcctcgacgcagtgtacgctttccatctgtgcgaagacggggcagaacctacatctggtcatctgctgagcgccgtcacaaatcggtcagatctagggccgcctgctagtagcgctaccacgctcgcagacgggggggagggtcagcatgacggcactttcgagcctgccacagtggccctcccaggaggggagcatgccgagaatgccgttcagatccacaaagtagtgactggcacaatggcgctcatattctcatttctgatcgtggttcttgttctgtatgtcagttggaaatgctttcccgcctctcttcgccagcttaggcagtgcttcgtcactcagcggcggaaacagaagcaaaagcagactatgcaccagatggccgctatgagtgcgcaggaatattacgtggactacaaacccaatcatatcgagggcgcactggtgattatcaatgagtatggatcttgcacttgccaccagcaacctgcacgagaatgcgaggtgtag

SEQ ID NO: 254365 - DNA, 1569 bp, Artificial Sequence
  derived and/or modified sequence
atggacttcctgctgctgggcctgtgcctgtactggctgctgcggaggcccagtggtgtcgtgttgtgtcttcttggagcgtgctttcaaatgcttcctgctgctcccagtgggtgtcctcaactgtgccgctgcgaaggacgtctattgtactgtgaagcactgaacctgacggaggccccacacaatctttctgggctcctaggcctatctctgagatacaactcgctgtctgagctacgcgcaggccaatttacaggattgatgcagctgacctggctgtatctggatcacaaccacatctgttccgtgcagggcgacgcgttccagaagctgaggcgcgtaaaggaactgaccctgtcttccaatcagatcacccagctgcccaacaccaccttcaggccgatgcccaatctccggagcgttgacctatcttacaacaaactgcaagccttggctccagacctgttccacggactcagaaaattgacgacccttcacatgcgcgcaaatgcaattcagtttgtgcctgtaaggatcttccaagattgcaggtctcttaaatttctcgacattggctataaccaactaaaaagtctggcacgcaactcattcgccggtctcttcaagttgacggaacttcacctcgaacacaatgatttggttaaggtcaatttcgcccatttcccgagactgatttctctgcacagtttatgtcttcggcgtaacaaagtcgccatagtggtatcttccttagattgggtgtggaacctggaaaagatggatctgtccgggaacgaaatcgaatacatggagccacacgtgtttgaaaccgtcccccatctgcaatctctccagctggactccaataggctcacctatattgaaccccgaatcctcaatagttggaagagtctcacctcgatcaccctggccggaaatctctgggactgtggcagaaatgtatgtgcgctggcctcttggctgaacaacttccagggacgttacgatggcaatctccagtgcgcatctccagagtatgcacagggagaagacgtgttggatgcggtttatgcctttcacttatgtgaggacggggcagaaccaacgtcaggacaccttttatcagctgtcaccaatagatccgatctcggtccgcccgctagcagtgccacaactctggccgatgggggagaggggcagcacgacggaacatttgagccagccactgttgctcttcccggcggcgaacatgccgagaacgccgtgcagattcacaaagtggtcactgggaccatggctcttatctttagcttcctgattgttgtattggtgttgtatgtgtcctggaaatgctttcccgcgagtttgagacagctgcggcaatgtttcgtgactcagcggaggaaacagaagcaaaagcagaccatgcaccagatggccgccatgagtgcccaggagtattacgtggactacaagccgaaccacatcgaaggcgctttggtcatcattaacgaatatggcagttgtacctgtcaccagcaaccagcgcgcgaatgcgaggtctag

SEQ ID NO: 254366 - DNA, 552 bp, Artificial Sequence
  derived and/or modified sequence
atggacttcctgctgctgggcctgtgcctgtactggctgctgcggcgcccctcaggtgtcgtgctgtgtctgctgggggcatgctttcaaatgctgcccgccgcgccctccgggtgcccacagctctgtaggtgcgagggaaggcttctctactgtgaggcactgaacttgacagaagcgccacacaacctatcggggctgctgggactgtccttgaggtacaattctctcagtgagcttcgggctgggcagttcacaggtcttatgcagctgacatggttatatctcgatcacaaccacatctgctccgtgcagggggatgcctttcagaaactccggcgggtgaaggagctgactctgtctagcaatcaaattacacagttacctaataccacattccgccctatgcctaacttacggtcagtcgatctctcttacaacaaactccaggctttggccccagacctattccacggtctgcgcaagcttacaacactgcatatgcgggccaatgctatccaattcgtgcccgtgagaatctttcaggactag

SEQ ID NO: 254367 - DNA, 1569 bp, Artificial Sequence
  derived and/or modified sequence
atggatttcctgctgttaggtctgtgcctctactggctgttgcgcagaccgtccggagtggtgctatgcctgctgggtgcgtgttttcaaatgctacccgctgccccatctggctgtccccagctgtgcagatgcgaaggtagactcttgtactgtgaagcgctgaatctcaccgaagcaccgcacaacctgagcggccttctggggctgtctctgaggtacaattctttatcagagctgcgggcaggccagtttactggcctcatgcagctcacttggttgtatttggatcacaaccacatttgttcagtacagggggatgcttttcaaaaacttcgccgagtaaaagagctgactctgtcatctaatcagatcactcagctgcccaacaccacctttagacccatgcccaatcttcggtccgtggacctgtcttacaataaactgcaggctttggcccctgacttgtttcatggactgcggaagctcaccacacttcatatgagagctaacgccatacagttcgtcccagtgcggatctttcaggactgtagatctttgaagttcctcgatattggttataatcagttaaaaagcctcgcccgaaatagctttgccggtctgtttaagctcaccgagctccatctagagcataatgatctcgtgaaagttaatttcgcccatttccccaggttaattagtctgcactcactgtgtcttcgcagaaataaagtggccatcgtggtaagctccctggactgggtgtggaaccttgaaaagatggatctttccggcaacgaaattgaatatatggagcctcatgtttttgagacggtgccccacttgcagagcctgcagttagattctaatagattaacctacattgagcctaggatcctcaactcttggaagtcactgacgtcgatcacgttagctggcaatctctgggactgtggacggaacgtctgcgctctggctagctggctgaataacttccaaggtcgctatgacggcaatctccaatgtgccagcccagaatatgcacaaggggaggacgttcttgatgctgtgtatgcattccatctctgcgaggacggagcggagcctacctcaggccatcttttaagtgccgtgactaacagaagcgatctcggcccacccgcaagcagtgctacaaccctcgccgatggtggagagggacagcacgatggaaccttcgagcctgctacagtggctctgccagggggagagcatgccgagaatgcggtccagatccacaaggtagtgaccggcacaatggccctgatatttagcttcctgatcgtggtgttggtattgtatgttagctggaaatgtttcccagcttcactgaggcagcttcggcagtgcttcgtgacacagcggagaaagcagaaacagaaacaaaccatgcaccaaatggctgccatgtccgcccaggagtattatgtcgattataagccaaatcatattgagggcgctctcgtgatcatcaacgaatacggcagctgcacatgtcaccagcagcccgcacgggagtgcgaagtttag

SEQ ID NO: 254368 - DNA, 1569 bp, Artificial Sequence
  derived and/or modified sequence
atggacttcctgctgctcggtctttgtctgtactggcttttgaggcgaccttccggtgttgtcctatgtcttctgggggcatgttttcaaatgctccccgcagcgccatcaggctgccctcagctgtgccggtgcgaaggacgactactgtattgtgaggcgctgaacttgactgaggcaccacacaatctgagcggcctgctgggactctctctgcggtataacagcctgagcgagttacgggctggacagtttaccggtctgatgcaattgacctggctgtatctggatcataaccatatctgctctgtgcaaggcgacgctttccagaagctccggcgagtgaaggagcttaccctttcaagcaaccagataacacaactgcccaacaccacatttcgaccaatgccgaatctgagatcagtcgacctatcttacaacaagcttcaggccctggcaccagacctcttccacggattaagaaaacttactacccttcacatgcgtgctaacgccattcaatttgtgccggtaaggatttttcaggattgtaggtccctgaaattcctagacatcgggtataaccagctgaagagcctcgcacgaaattcttttgccggtttattcaaactaacagaactccatttggagcacaacgaccttgtaaaagttaactttgcccacttccctcgattgattagtctgcattccctttgccttcggagaaacaaagtggccatagtggtgtcatctctggactgggtgtggaacctggagaagatggatctgtcaggtaacgaaattgagtacatggaaccacacgtgtttgagactgtaccacatctgcaaagcctacagttggacagcaataggctcacttacatcgagccacgcatactcaattcttggaaaagtctgactagcattaccctggccggaaacctatgggactgtgggaggaatgtctgcgcgctggcaagctggctcaataacttccagggtcggtacgacggaaacctccaatgtgcttcgcccgaatatgctcaaggcgaggacgttctggatgcggtctacgcctttcatctttgcgaggatggtgccgagcctacgtcaggtcacctactctcagccgtcactaaccggtcagacctgggcccacctgcatccagtgcaactactttggcagatgggggagagggtcagcatgatggaactttcgaacccgcaacagtggccctcccaggtggggagcacgccgaaaatgcagtgcagatccacaaggtggttactggaaccatggctctcatcttctcattcctaattgtcgttctggtgttgtatgtaagctggaaatgcttcccagcaagcttgcgccagctgaggcagtgttttgtgactcagcggaggaagcagaaacagaagcagaccatgcaccagatggccgcaatgtctgcacaggaatattatgtggactataaaccaaaccacattgagggagctctcgtcatcatcaatgagtacggctcctgcacctgtcaccaacaacccgcaagagagtgtgaggtctag

SEQ ID NO: 254369 - DNA, 330 bp, Artificial Sequence
  derived and/or modified sequence
atggatttcctcctcctgggactctgtctttattggctgctccggcgaccttctggagtggtactttgcctactgggggcttgtttccagatgctgccagccgctccatctggctgcccccaactctgccgatgcgaagggagattgctctactgtgaggcactgaacctgacagaagcaccccacaatctgtccggactgttagggctaagtctccggtataattcactgagcgaactacgcgcaggccagtttacaggactgatgcagttaacttggttgtatctagaccataaccatatctgttcggtccaaggcgacgccttctag

SEQ ID NO: 254370 - DNA, 672 bp, Artificial Sequence
  derived and/or modified sequence
atggacttcttgctattgggcctgtgtctgtactggctgctccgcagacccagcggtgtcgtactgtgtctgttaggcgcttgttttcagatgctgcccgctgcacccagcggctgccctcagttatgtcggtgtgagggaagactgctatattgtgaggcgctgaatcttactgaggccccacacaatctgagcggactgctcggcttatcgctgcgctataatagcctgtcggagctccgcgctgggcagtttacagggttgatgcagctaacttggctgtatctggaccataatcacatttgtagcgtacagggtgacgcttttcagaaacttcgaagagtgaaggagctgacactcagctccaaccagatcacacagttacctaatactacattcagacctatgccaaatcttaggagtgttgacctgtcttataacaaattgcaagcgttagctcccgaccttttccacggacttagaaaacttactacactccatatgagagccaatgccatccagttcgtgcccgtgcgcatcttccaggattgtagatcattaaagtttttggacatcggatataaccaattgaagtccctggcacgaaacagcttcgcgggattgttcaagctcactgagttgcacctcgaacacaacgatctggttaagtag

SEQ ID NO: 254371 - DNA, 1569 bp, Artificial Sequence
  derived and/or modified sequence
atggatttccttctcctgggtctctgtctgtactggctgcttcgacggccttccggagtagtgctgtgcctactcggagcctgttttcagatgctgcctgctgccccatcaggatgtccacagctctgtcgctgcgagggccgtctcctttactgtgaagcgctgaatcttacagaggcgcctcacaacctaagcggtttgctcggcttaagtctgcgctacaactcactgagcgagctaagggctggccagtttaccggactgatgcagctcacatggctgtacctcgaccacaaccatatctgtagtgtccaaggagacgccttccagaagcttcggcgtgtgaaggaattaaccctctctagtaaccagattacgcagctgccgaacactacctttcgcccaatgccaaatcttcgcagcgtggacctttcctataacaagctgcaggctctcgccccagacctgttccacggactgagaaaactaacaaccctccacatgagagcgaacgccattcagtttgtcccagttcgtatttttcaagattgtcggtctttgaaattccttgatatcggatataaccagctgaaatctctcgctcgcaacagcttcgcgggtttgtttaagctgacggagctgcacctcgagcataacgacctcgtcaaggttaacttcgcccactttcctcgcctgatttctcttcatagcctgtgtctgcgcagaaacaaggtagctatagtcgtttcttcactggattgggtatggaacttggagaagatggacctaagcggaaacgaaattgaatatatggaaccccacgtgttcgaaacggtaccccacttgcaatctctccagctggactctaacaggctgacgtacattgagcctcgcatactcaactcttggaaaagcctgaccagcatcactttggctgggaatctctgggactgtggacgaaacgtctgtgccttggcgtcctggcttaataactttcagggtagatatgatggaaatctgcaatgcgcatctcccgaatacgctcaaggggaagatgtcctggacgctgtatatgcatttcacttatgcgaagacggggctgagcccacgagtggccatctgctgagtgctgtcacgaatcgctctgacttggggcctccggctagcagcgccactacgctggccgatggaggagagggccagcacgacggcactttcgagcctgccacagttgctcttccgggtggcgagcatgcagaaaatgcggtccaaattcacaaggtcgtgactggcactatggccctcatcttcagctttcttatcgtagttctggttctctacgtatcctggaaatgttttcccgctagtctgcgacagctgcgacaatgctttgtcactcaacgtcggaagcagaagcagaagcagaccatgcatcagatggctgccatgtccgcccaagagtactatgttgattacaaacccaatcacattgagggagcgctcgtgataatcaatgaatacggcagctgcacatgccaccagcagcccgcaagagagtgcgaggtgtag

SEQ ID NO: 254372 - DNA, 1569 bp, Artificial Sequence
  derived and/or modified sequence
atggacttcttgttgcttggtctctgcctttattggctgcttcgacgtcctagtggcgtggtgttgtgcctccttggtgcctgctttcagatgctgccagctgctccctctggatgcccccagctgtgtaggtgtgaaggccgtctgttgtactgcgaagctttgaacctgacagaggctccccataacctgagtggactgctgggtctgtcgctgcggtataactccttatcagagttgagagcaggtcagtttaccggcctcatgcagctgacatggctgtatttggatcataaccacatctgcagcgtgcaaggcgacgcatttcaaaagctccgaagggtaaaggaacttacgctgagcagtaatcaaatcactcaactaccaaacactacctttagacccatgcctaatcttcggagcgtggacttgagctataataaactgcaggccctcgctccagacctcttccatggactcagaaaattgacaactctccatatgagagcgaatgccatccagttcgtccccgtgaggatctttcaggactgtaggagcctcaagttcctcgatataggctacaaccagctgaagtcacttgctagaaatagtttcgccggacttttcaaactgacagaactgcaccttgaacacaacgacctggtcaaagtgaattttgcacactttcctcggcttatctccctgcactccctctgcctgagaagaaacaaagtagcgatcgttgtgtcctctctggattgggtttggaacctggagaagatggatctgagtggaaacgaaatcgagtacatggagccccacgtgttcgagaccgtcccccatctgcaatctctgcaacttgattcaaacagactgacctacatcgagccgaggatactcaacagctggaagtcgctgacctcaattacacttgccggtaacttatgggactgcggcaggaacgtgtgcgccctcgccagctggttgaacaactttcaggggcgatacgatggcaatctacagtgtgcttcgccggaatacgcgcagggcgaggatgtccttgatgcagtgtacgcctttcatctttgtgaagacggtgccgagccaacctccgggcacttgctcagcgcagtgacaaatcggtctgatctcggccctcctgcctcgtcggccacaactctggccgatggcggagagggtcagcacgacggcacatttgaacccgctactgttgctctgcccggaggcgaacacgccgagaacgctgttcagattcacaaggtggttactgggaccatggccctgattttctcgttcttaattgtggtgctggtgctttacgtctcatggaaatgcttccctgcttcactgagacagcttaggcagtgctttgtgactcagcgaagaaagcaaaaacagaagcagacaatgcatcagatggcagccatgagcgcccaggagtattacgttgattacaaaccgaatcacatcgaaggcgcactggtgataatcaatgaatacgggtcttgtacctgccaccagcaaccggctcgcgaatgtgaagtgtag

SEQ ID NO: 254373 - DNA, 552 bp, Artificial Sequence
  derived and/or modified sequence
atggactttctcctcctggggctgtgtctttactggttgctacgcagaccctctggagtggtgctctgcctcctgggagcgtgctttcagatgctgcccgctgctccttcgggttgtccgcagttgtgtaggtgtgaaggacggctgctgtactgcgaggcactcaacctgaccgaggcccctcacaacctatcaggccttcttggtctctcattaagatataacagcctgagcgaactccgagccggtcagtttaccggtctgatgcagctgacgtggctgtatttagaccataaccacatatgcagcgtccaaggcgacgctttccagaaactcagacgcgtgaaagaactgaccctctcctcaaaccaaatcactcagcttcccaacactactttcagacctatgcccaatctgcgctctgtggatctgtcctataacaagcttcaggcactagcccctgacctgtttcatggacttcgcaagcttacaacattgcacatgagagcaaatgcaatccagttcgtccccgtgaggattttccaggattag

SEQ ID NO: 254374 - DNA, 1569 bp, Artificial Sequence
  derived and/or modified sequence
atggacttcctgctgctgggcctgtgcctgtactggctgctgagaagacccagcggcgtggtgctgtgcctgctgggcgcctgcttccagatgctgcccgccgcccccagcggctgcccccagctgtgcagatgcgagggcagactgctgtactgcgaggccctgaacctgaccgaggccccccacaacctgagcggcctgctgggcctgagcctgagatacaacagcctgagcgagctgagagccggccagttcaccggcctgatgcagctgacctggctgtacctggaccacaaccacatctgcagcgtgcagggcgacgccttccagaagctgagaagagtgaaggagctgaccctgagcagcaaccagatcacccagctgcccaacaccaccttcagacccatgcccaacctgagaagcgtggacctgagctacaacaagctgcaggccctggcccccgacctgttccacggcctgagaaagctgaccaccctgcacatgagagccaacgccatccagttcgtgcccgtgagaatcttccaggactgcagaagcctgaagttcctggacatcggctacaaccagctgaagagcctggccagaaacagcttcgccggcctgttcaagctgaccgagctgcacctggagcacaacgacctggtgaaggtgaacttcgcccacttccccagactgatcagcctgcacagcctgtgcctgagaagaaacaaggtggccatcgtggtgagcagcctggactgggtgtggaacctggagaagatggacctgagcggcaacgagatcgagtacatggagccccacgtgttcgagaccgtgccccacctgcagagcctgcagctggacagcaacagactgacctacatcgagcccagaatcctgaacagctggaagagcctgaccagcatcaccctggccggcaacctgtgggactgcggcagaaacgtgtgcgccctggccagctggctgaacaacttccagggcagatacgacggcaacctgcagtgcgccagccccgagtacgcccagggcgaggacgtgctggacgccgtgtacgccttccacctgtgcgaggacggcgccgagcccaccagcggccacctgctgagcgccgtgaccaacagaagcgacctgggcccccccgccagcagcgccaccaccctggccgacggcggcgagggccagcacgacggcaccttcgagcccgccaccgtggccctgcccggcggcgagcacgccgagaacgccgtgcagatccacaaggtggtgaccggcaccatggccctgatcttcagcttcctgatcgtggtgctggtgctgtacgtgagctggaagtgcttccccgccagcctgagacagctgagacagtgcttcgtgacccagagaagaaagcagaagcagaagcagaccatgcaccagatggccgccatgagcgcccaggagtactacgtggactacaagcccaaccacatcgagggcgccctggtgatcatcaacgagtacggcagctgcacctgccaccagcagcccgccagagagtgcgaggtgtag

SEQ ID NO: 254375 - DNA, 330 bp, Artificial Sequence
  derived and/or modified sequence
atggacttcctgctgctgggcctgtgcctgtactggctgctgagaagacccagcggcgtggtgctgtgcctgctgggcgcctgcttccagatgctgcccgccgcccccagcggctgcccccagctgtgcagatgcgagggcagactgctgtactgcgaggccctgaacctgaccgaggccccccacaacctgagcggcctgctgggcctgagcctgagatacaacagcctgagcgagctgagagccggccagttcaccggcctgatgcagctgacctggctgtacctggaccacaaccacatctgcagcgtgcagggcgacgccttctag

SEQ ID NO: 254376 - DNA, 672 bp, Artificial Sequence
  derived and/or modified sequence
atggacttcctgctgctgggcctgtgcctgtactggctgctgagaagacccagcggcgtggtgctgtgcctgctgggcgcctgcttccagatgctgcccgccgcccccagcggctgcccccagctgtgcagatgcgagggcagactgctgtactgcgaggccctgaacctgaccgaggccccccacaacctgagcggcctgctgggcctgagcctgagatacaacagcctgagcgagctgagagccggccagttcaccggcctgatgcagctgacctggctgtacctggaccacaaccacatctgcagcgtgcagggcgacgccttccagaagctgagaagagtgaaggagctgaccctgagcagcaaccagatcacccagctgcccaacaccaccttcagacccatgcccaacctgagaagcgtggacctgagctacaacaagctgcaggccctggcccccgacctgttccacggcctgagaaagctgaccaccctgcacatgagagccaacgccatccagttcgtgcccgtgagaatcttccaggactgcagaagcctgaagttcctggacatcggctacaaccagctgaagagcctggccagaaacagcttcgccggcctgttcaagctgaccgagctgcacctggagcacaacgacctggtgaagtag

SEQ ID NO: 254377 - DNA, 552 bp, Artificial Sequence
  derived and/or modified sequence
atggacttcctgctgctgggcctgtgcctgtactggctgctgagaagacccagcggcgtggtgctgtgcctgctgggcgcctgcttccagatgctgcccgccgcccccagcggctgcccccagctgtgcagatgcgagggcagactgctgtactgcgaggccctgaacctgaccgaggccccccacaacctgagcggcctgctgggcctgagcctgagatacaacagcctgagcgagctgagagccggccagttcaccggcctgatgcagctgacctggctgtacctggaccacaaccacatctgcagcgtgcagggcgacgccttccagaagctgagaagagtgaaggagctgaccctgagcagcaaccagatcacccagctgcccaacaccaccttcagacccatgcccaacctgagaagcgtggacctgagctacaacaagctgcaggccctggcccccgacctgttccacggcctgagaaagctgaccaccctgcacatgagagccaacgccatccagttcgtgcccgtgagaatcttccaggactag

SEQ ID NO: 254378 - DNA, 1152 bp, Artificial Sequence
  derived and/or modified sequence
atgttctggaccttcaaggagtggttctggctggagagattctggctgccccccaccatcaagtggagcgacctggaggaccacgacggcctggtgttcgtgaagcccagccacctgtacgtgaccatcccctacgccttcctgctgctgatcatcagaagagtgttcgagaagttcgtggccagccccctggccaagagcttcggcatcaaggagaccgtgagaaaggtgacccccaacaccgtgctggagaacttcttcaagcacagcaccagacagcccctgcagaccgacatctacggcctggccaagaagtgcaacctgaccgagagacaggtggagagatggttcagaagcagaagaaaccaggagagacccagcagactgaagaagttccaggaggcctgctggagattcgccttctacctgatgatcaccgtggccggcatcgccttcctgtacgacaagccctggctgtacgacctgtgggaggtgtggaacggctaccccaagcagcccctgctgcccagccagtactggtactacatcctggagatgagcttctactggagcctgctgttcagactgggcttcgacgtgaagagaaaggacttcctggcccacatcatccaccacctggccgccatcagcctgatgagcttcagctggtgcgccaactacatcagaagcggcaccctggtgatgatcgtgcacgacgtggccgacatctggctggagagcgccaagatgttcagctacgccggctggacccagacctgcaacaccctgttcttcatcttcagcaccatcttcttcatcagcagactgatcgtgttccccttctggatcctgtactgcaccctgatcctgcccatgtaccacctggagcccttcttcagctacatcttcctgaacctgcagctgatgatcctgcaggtgctgcacctgtactggggctactacatcctgaagatgctgaacagatgcatcttcatgaagagcatccaggacgtgagaagcgacgacgaggactacgaggaggaggaggaggaggaggaggaggaggccaccaagggcaaggagatggactgcctgaagaacggcctgagagccgagagacacctgatccccaacggccagcacggccactag

SEQ ID NO: 254379 - DNA, 468 bp, Artificial Sequence
  derived and/or modified sequence
atgttctggaccttcaaggagtggttctggctggagagattctggctgccccccaccatcaagtggagcgacctggaggaccacgacggcctggtgttcgtgaagcccagccacctgtacgtgaccatcccctacgccttcctgctgctgatcatcagaagagtgttcgagaagttcgtggccagccccctggccaagagcttcggcatcaaggagaccgtgagaaaggtgacccccaacaccgtgctggagaacttcttcaagcacagcaccagacagcccctgcagaccgacatctacggcctggccaagaagtgcaacctgaccgagagacaggtggagagatggttcagaagcagaagaaaccaggagagacccagcagactgaagaagttccaggaggcctgctggagattcgccttctacctgatgatcaccgtggccggcatcgccttcctgtacgactag

SEQ ID NO: 254380 - DNA, 174 bp, Artificial Sequence
  derived and/or modified sequence
atgttctggaccttcaaggagtggttctggctggagagattctggctgccccccaccatcaagtggagcgacctggaggaccacgacggcctggtgttcgtgaagcccagccacctgtacgtgaccatcccctacgccttcctgctgctgatcatcagaagagtgttcgagtag

SEQ ID NO: 254381 - DNA, 1152 bp, Artificial Sequence
  derived and/or modified sequence
atgttctggacctttaaggaatggttctggctggagagattttggctgcccccaaccattaaatggtccgatctggaagaccatgacggcctggtcttcgtgaaaccatcccacctgtacgtgaccatcccttatgcttttcttctgctgatcattcggagggtgttcgagaaatttgtcgcaagcccattggctaaatcatttgggattaaggaaacagtgcgcaaggtaacccctaataccgttttggagaattttttcaagcacagcacgcgccagcccttacaaacagacatatacggcctcgcaaagaaatgcaatctgactgagcgccaagtggaacgttggtttcgcagccgccgaaaccaagaaaggccatccagactaaagaaattccaggaggcttgttggcgatttgctttctatttgatgataaccgtggccgggattgccttcctgtacgataagccatggctttatgatctctgggaggtttggaacggctatccgaaacagccgctcctaccatctcagtattggtactatatactcgagatgtccttttattggagtcttctcttcaggctcggcttcgacgtcaaacgcaaggatttcttagcgcacattatccaccacttggccgctataagcctcatgtcttttagctggtgtgcgaactatatacggtccggaacattggtgatgatagtgcacgatgtcgcagacatttggctggagtctgctaagatgttcagctacgcagggtggacacagacctgtaataccttattcttcatcttctcgactatcttttttattagtcgactgattgtcttcccgttctggattctttactgcactctcattttgccaatgtatcacctggagccgttctttagctacatctttctgaatctgcagttgatgatcctccaggtgctacacctgtactggggctactatatcttgaaaatgctgaataggtgcatttttatgaagagcattcaagacgtgcgcagtgacgatgaggactatgaagaggaagaagaagaggaggaagaagaggccacgaagggcaaggagatggattgtcttaaaaatggcctgcgcgcggagaggcacctgatcccaaatggccagcacggacattag

SEQ ID NO: 254382 - DNA, 1152 bp, Artificial Sequence
  derived and/or modified sequence
atgttctggacatttaaggagtggttctggctggaacgcttctggttgcccccaacaattaagtggtcagacctggaagatcacgatggtttggtgtttgtcaagcccagccacctctacgtaacaattccctacgcctttcttcttctgatcattcggagagtgtttgagaaatttgtggcttcaccactcgccaaatccttcggcatcaaagagaccgttagaaaggttacccctaatactgtactggaaaatttctttaaacacagtaccaggcagcccctgcaaaccgacatatatggtctggcaaaaaagtgcaatctgaccgaacggcaggtggaaagatggttccgctcccgtaggaatcaggagaggccttcccgtttgaaaaaattccaggaagcatgctggcgctttgctttctatctgatgatcacggtagctggaatcgcatttctatacgacaagccctggttgtatgatctctgggaggtatggaacggatatcccaagcaaccccttctgccgtcacagtattggtattatatcctggagatgagcttctactggagcttgcttttcaggctcggcttcgatgtgaagcggaaagactttctggcacacattatacatcacctggctgctatctcgctgatgtctttctcatggtgcgctaactatattagatcagggacacttgtgatgatagtccacgatgtggccgacatatggctcgaaagcgccaagatgttttcttacgcaggctggacccagacctgcaacacactgttttttattttttcaactatcttcttcatttccaggctcatcgttttccccttttggattctgtattgcactctgattctgccgatgtatcacctggagccattcttttcctacattttcctgaatttgcagttaatgatactgcaggtgctccacctgtactgggggtactatatcctcaagatgttgaacagatgcatcttcatgaaaagcatccaagacgtgcgttccgatgacgaagactatgaagaggaggaggaggaggaggaggaggaggcgacgaagggtaaggaaatggactgcctgaaaaacggactgcgggcagagagacaccttattcccaatggtcagcacggccattag

SEQ ID NO: 254383 - DNA, 1152 bp, Artificial Sequence
  derived and/or modified sequence
atgttctggacttttaaagagtggttctggctggaaagattctggctcccgcccaccattaaatggtcggatctagaagatcacgatggcctagtgttcgtaaaaccgagccatctgtacgtgaccatcccttacgctttcttgctgctgattatcaggagagtgttcgagaagtttgtggcaagccctctggctaaatcatttggcataaaggaaacagtgaggaaggtgacgccaaatacagtgttggaaaacttcttcaagcacagcacccggcaacctctgcagactgacatctacggattggctaaaaagtgcaacttaaccgaacggcaggtagaacggtggtttcggagcagaaggaatcaagagcggcctagcaggttaaagaagtttcaagaggcctgctggcgcttcgcattctatcttatgatcacagtggcagggatcgccttcctgtacgataaaccatggttgtacgatctgtgggaggtctggaatggatacccaaagcaacctctcctgccctcccagtactggtattatattctcgaaatgagcttctactggtccctcctgttcagactgggattcgatgttaagcggaaggattttctcgcccacatcattcatcatctggccgccatctctttgatgagcttctcttggtgtgccaactatattaggagtggcacactggtgatgatcgtccatgatgtggcagatatctggttggagtcagctaagatgttttcatacgccggttggacccaaacgtgtaacaccctctttttcatcttcagcactatcttcttcattagtcgcctgattgtgtttcccttttggatcctctattgcacactgattttacctatgtatcatttggagcctttcttttcatatatctttctgaacctgcagctgatgatcctccaggtcctgcacctctactgggggtattacattctgaaaatgcttaatagatgtattttcatgaagagtatccaggatgtgaggagcgatgacgaggattacgaggaagaggaggaagaagaagaagaagaggctaccaaggggaaagagatggactgtctaaaaaatggcctgagggctgaacgccatctgattcctaacgggcagcacggacactag

SEQ ID NO: 254384 - DNA, 468 bp, Artificial Sequence
  derived and/or modified sequence
atgttctggacctttaaggaatggttctggctggagcgcttttggctaccacccaccattaagtggtccgatcttgaagaccatgatgggctcgtattcgttaagccatcacacttgtatgttacaatcccctatgccttcctgctgctcataattcgacgggtgttcgagaagtttgttgcatcccccttggcaaagagctttggcataaaagagactgtgagaaaggtcacgccgaacactgtccttgagaacttcttcaagcactcaacccgtcagcccctccaaactgacatatacgggctggctaaaaaatgcaatctgactgagaggcaggtggaacggtggttccgatcgagacgtaaccaggagcggcctagccgtttaaaaaagtttcaggaagcctgctggcggttcgctttttacttgatgattaccgtggccggaatagcctttttatacgactag

SEQ ID NO: 254385 - DNA, 174 bp, Artificial Sequence
  derived and/or modified sequence
atgttctggaccttcaaggagtggttttggttggaacgcttctggttgcctccaaccatcaagtggtccgacctggaggaccatgatggactggtattcgtcaagccctcccatctttacgtgaccatcccctatgcattcctccttctaatcattagacgggtgtttgagtag

SEQ ID NO: 254386 - DNA, 1152 bp, Artificial Sequence
  derived and/or modified sequence
atgttctggaccttcaaggagtggttctggctggagcgcttctggctgccccccaccatcaagtggagcgacctggaggaccatgatggcctggtgtttgtgaagcccagccacctgtatgtgaccatcccctatgccttcctgctgctgatcatcagaagagtgtttgagaagtttgtggccagccccctggccaagagctttggcatcaaggagaccgtgaggaaggtgacccccaacacagtgctggagaacttcttcaagcacagcacccggcagcccctgcagacagacatctacggcctggccaagaagtgcaacctgacagagcggcaggtggagcgctggttccgcagcagaagaaaccaggagcggcccagccggctgaagaagttccaggaggcctgctggaggtttgccttctacctgatgatcaccgtggccggcatcgccttcctgtatgacaagccctggctgtatgacctgtgggaggtgtggaatggctaccccaagcagcccctgctgcccagccagtactggtactacatcctggagatgtccttctactggagcctgctcttccggctgggctttgatgtgaagaggaaggacttcctggcccacatcatccaccacctggccgccatcagcctgatgtccttctcctggtgtgccaactacatccgcagcggcaccctggtgatgattgtgcatgatgtggccgacatctggctggagagcgccaagatgttctcctatgccggctggacccagacctgcaacaccctcttcttcatcttcagcaccatcttcttcatcagccggctgattgtgttccccttctggatcctgtactgcaccctcatcctgcccatgtaccacctggagcccttcttctcctacatcttcctgaacctgcagctgatgatcctgcaggtgctgcacctgtactggggctactacatcctgaagatgctgaaccgctgcatcttcatgaagagcatccaggatgtgcggagtgatgatgaagattatgaggaggaggaggaggaggaggaggaggaggccaccaagggcaaggagatggactgcctgaagaatggcctgcgggcagagcggcacctgatccccaacggccagcacggccactag

SEQ ID NO: 254387 - DNA, 468 bp, Artificial Sequence
  derived and/or modified sequence
atgttctggaccttcaaggagtggttctggctggagcgcttctggctgccccccaccatcaagtggagcgacctggaggaccatgatggcctggtgtttgtgaagcccagccacctgtatgtgaccatcccctatgccttcctgctgctgatcatcagaagagtgtttgagaagtttgtggccagccccctggccaagagctttggcatcaaggagaccgtgaggaaggtgacccccaacacagtgctggagaacttcttcaagcacagcacccggcagcccctgcagacagacatctacggcctggccaagaagtgcaacctgacagagcggcaggtggagcgctggttccgcagcagaagaaaccaggagcggcccagccggctgaagaagttccaggaggcctgctggaggtttgccttctacctgatgatcaccgtggccggcatcgccttcctgtatgactag

SEQ ID NO: 254388 - DNA, 174 bp, Artificial Sequence
  derived and/or modified sequence
atgttctggaccttcaaggagtggttctggctggagcgcttctggctgccccccaccatcaagtggagcgacctggaggaccatgatggcctggtgtttgtgaagcccagccacctgtatgtgaccatcccctatgccttcctgctgctgatcatcagaagagtgtttgaatag

SEQ ID NO: 254389 - DNA, 1152 bp, Artificial Sequence
  derived and/or modified sequence
atgttctggaccttcaaggagtggttctggctggagcggttctggctgcccccaactatcaagtggagtgatctggaagaccatgatggcttggtgttcgtgaaaccttctcacctttatgtgactatcccttatgccttcctgctgcttatcattcgtagggttttcgagaagtttgtcgcctcacccctggcgaagagctttgggatcaaggaaacggtacggaaagtgacaccaaacaccgtcctggaaaatttctttaaacactcaacccgccagccactgcagacagacatttacggcctcgccaagaagtgtaacctgaccgagagacaagtcgaacggtggtttcgctctagaaggaatcaggagaggccatccaggcttaagaaatttcaggaggcttgttggagatttgccttctaccttatgatcaccgtagccggaattgctttcctctacgataagccatggttgtacgatttatgggaggtgtggaacgggtatcccaaacaacctctgctgccctctcagtactggtattatatcctcgaaatgtcattctattggtcattgctattccgcctagggtttgacgttaaacggaaggattttttggcccacattatccatcacctggcggcgatctcactgatgtcttttagctggtgtgccaattatattagaagtggaactctggtgatgattgtacacgacgtggcagacatatggctagaatcagccaagatgttcagctacgctggttggacccagacgtgtaatacacttttcttcatcttctctaccatattctttatctcccggctgattgtgtttccattctggatcctctactgtactctgatcctccctatgtatcacctcgagccatttttcagttacatctttctgaacttgcagcttatgatcctgcaggtgcttcacctgtactggggctattacattctgaaaatgttaaacaggtgtatctttatgaagtccatccaagacgtacggagtgatgatgaagattacgaggaagaggaggaagaggaggaagaggaagccacaaagggaaaagagatggactgtctcaaaaatggactaagggccgagagacacctcatacctaacggacagcacggccattag

SEQ ID NO: 254390 - DNA, 1152 bp, Artificial Sequence
  derived and/or modified sequence
atgttctggaccttcaaggagtggttctggctggagcggttctggctgcctcccactataaaatggtctgatttggaggaccacgacgggctggtatttgtcaagccatcacatctgtatgtgaccattccctacgcatttttgttgctcattatccgcagagtgtttgagaaatttgtagctagccccctcgctaaatcatttgggataaaagaaaccgtgcgtaaggtcaccccgaacacggttttggaaaattttttcaaacattccacaaggcagcctctgcagaccgacatttatgggctggcaaagaaatgtaatttgacagagcgtcaagtggagagatggttccgctcgcgaagaaaccaggaaaggccctctcggttaaagaagttccaggaggcctgctggaggttcgccttctacctaatgatcacagtagctggaattgcatttttatacgataaaccctggctgtatgacttgtgggaagtgtggaatggctatcccaaacaacctttgctgcccagccagtactggtattatattcttgaaatgtccttctattggtctcttctctttagactgggttttgatgtgaagcgaaaggacttcctggcgcatataatccaccatctcgccgctatctcacttatgtcgttcagctggtgcgccaattacatccgctctggcacgttagtcatgatcgtccacgacgtggctgatatatggttggaatcggcaaagatgttcagttacgccgggtggacccaaacctgcaataccctgtttttcatcttcagtaccatattcttcatcagcagactgatcgttttcccgttttggatcctatattgtacccttatcttgcctatgtatcatttggaaccttttttctcttacatctttctaaacctgcagctaatgatcctgcaggttctgcatttgtattggggatattatattttgaaaatgctcaaccgatgcattttcatgaaaagcatccaggacgtgagatctgacgatgaagactacgaggaagaagaggaggaagaggaagaggaagccaccaagggaaaggagatggactgcttgaaaaacggactgcgcgccgaaagacacctaattcctaacggccagcacggccactag

SEQ ID NO: 254391 - DNA, 1152 bp, Artificial Sequence
  derived and/or modified sequence
atgttctggaccttcaaggagtggttctggctggagcggttctggctgccgcccactatcaagtggtccgatctggaggatcatgacggcctcgtgtttgtgaagcccagccacttgtatgtaaccattccttatgcctttctactcctgatcattcgaagggtctttgaaaagttcgttgcatcacccctggctaaatcatttggcattaaagagaccgtacgcaaagtgacacctaataccgttctggaaaatttcttcaagcactcaacaaggcaacccttgcagactgacatttacgggctcgcaaaaaaatgcaatctgaccgaaagacaggttgagaggtggttccgatcaaggcgcaaccaggaacggccttcgagactgaaaaagttccaggaggcttgctggcgtttcgccttttatcttatgatcacagtcgcaggcatcgccttcctgtatgacaagccctggctctacgacctctgggaagtgtggaacggctatccaaaacaacccctgcttccgagtcaatactggtactatatccttgaaatgtctttttactggagtctcctctttaggttgggcttcgacgtaaaaaggaaggatttcctcgcgcatatcatccaccatctggctgccataagcctgatgtccttttcttggtgcgccaattatatccgatctggcaccctggtgatgatcgtgcacgatgtcgctgatatctggctggaaagtgcgaagatgttctcgtacgccggctggacccaaacctgtaacactctttttttcatttttagcactattttctttatatctagactgattgtcttcccattttggatcctgtattgcacattgattctgcccatgtaccacctggagcctttctttagctacatatttctcaatttgcagctcatgatcctccaggtgcttcacctctactggggctactacattctgaaaatgctcaaccggtgcatattcatgaaaagtattcaggacgtgaggagcgatgacgaggattacgaggaggaagaggaggaagaagaagaagaagctacaaaaggaaaagagatggattgtctgaagaatggacttcgggcagaaagacatcttatccctaacggccaacacggccattag

SEQ ID NO: 254392 - DNA, 468 bp, Artificial Sequence
  derived and/or modified sequence
atgttctggaccttcaaggagtggttctggctggagcggttctggctgccaccgacaatcaaatggtctgacctagaggaccacgacggcctggtgttcgtcaagcctagccacctctatgtgaccatcccttatgcctttctcctcttaatcattagacgagtatttgaaaaatttgtggcctctcctctggctaagtcctttgggattaaggagacagtccggaaggttactccaaatactgtgctggagaacttcttcaagcactcgacaaggcagccgctccagaccgacatctatggcctggctaaaaagtgcaatctgaccgaaaggcaagtggaaaggtggttccgctcgcgccggaaccaagagcgccctagccggctaaaaaagtttcaagaagcctgttggagatttgcattctatttgatgataactgttgctggaatcgccttcttgtacgactag

SEQ ID NO: 254393 - DNA, 174 bp, Artificial Sequence
  derived and/or modified sequence
atgttctggaccttcaaggagtggttctggctggagcggttctggctaccgcctaccatcaagtggagcgatttggaagaccatgatggccttgtcttcgtcaagccttctcatctgtacgtaactatcccgtatgctttcctgctccttataatcagacgtgtgtttgagtag

SEQ ID NO: 254394 - DNA, 1152 bp, Artificial Sequence
  derived and/or modified sequence
atgttttggaccttcaaggagtggttctggttagagcgattctggcttccacctacaattaaatggagcgatctggaggatcatgacgggttagtcttcgtgaagcctagccatctatacgtgactattccctatgcctttctgctgttaatcatacggagggtcttcgagaaatttgtggcaagccctctggccaaaagctttgggatcaaagagaccgttagaaaagttactccaaataccgtgctggaaaatttttttaagcatagtacgcgacaaccactccagaccgatatttacggcttggcgaaaaagtgcaatctgacagagcggcaggtggagaggtggttccgcagtaggagaaatcaggaacggccttcacggctgaaaaagttccaggaagcctgctggaggttcgctttctatctgatgattacagtagcaggaattgcgtttctttacgacaagccttggctttacgacctctgggaggtctggaatgggtatcccaagcagcctttgctcccatcccagtactggtactatatcctcgaaatgtctttttattggtcattgctttttcgcctaggcttcgatgtgaagcgtaaggatttcctagcccatatcatccaccacctagcggctatttccctgatgagcttcagttggtgtgccaattatattaggtcaggtactctagtcatgattgtacacgatgtggcagacatctggctggagtcagccaagatgtttagctatgccggatggacacagacttgcaataccctgttttttatcttctcaacaatcttctttattagtcgcttgatagtgttccccttttggattctgtactgcacccttattctgccaatgtaccatctggagccgtttttctcctatatctttctgaatctccagttgatgatattgcaggttctccatctttattggggttattacattcttaaaatgctgaacaggtgtatttttatgaaatcaatccaagacgtacgcagcgatgatgaggactacgaggaggaagaagaagaggaggaggaagaggccacgaaaggaaaagagatggattgcctcaagaatggactgagagcagaacgacatctgattcccaacggacaacacgggcattag

SEQ ID NO: 254395 - DNA, 1152 bp, Artificial Sequence
  derived and/or modified sequence
atgttttggacattcaaggagtggttttggttagagcggttctggttgccaccgaccatcaagtggagtgacctcgaagatcatgacgggttagtctttgtgaagccaagtcacctgtatgttacaatcccgtacgccttcctcctcctgattattcggcgagtattcgaaaagttcgtcgcttccccccttgcaaaatcgtttgggatcaaggagacagtccgaaaggttaccccaaataccgtccttgaaaacttctttaagcactccacccgccaacccctccaaacagacatatacggtttggccaaaaaatgcaacctgaccgaacggcaggtggaacgctggttcagatcccgcaggaatcaagagcgaccatctcgcctgaagaagttccaagaagcctgctggaggttcgccttttacctcatgataacggtggcaggtatcgcatttctctatgataagccatggctttatgatctgtgggaggtatggaacggatatccaaagcagcccctgctgccatcccagtattggtactatatcctcgagatgtctttctactggtcactcctctttcggcttgggttcgacgtgaagagaaaagactttctcgcgcatataattcaccatctggctgccataagtctgatgtcatttagctggtgtgccaattatatacgttctggcacccttgtgatgatcgtgcacgacgtcgcagacatttggctggaatctgcaaaaatgtttagctatgccggatggacccagacgtgtaacactctttttttcattttcagtactatcttcttcatcagccgcctcatcgtgttcccattttggattctctactgcaccctcatccttccgatgtatcatctggaacccttcttctcatacatcttcttaaatctccagctaatgatactccaggtgcttcacctctactggggctattatattctgaagatgctcaatcgttgcatatttatgaagtcaattcaggacgtcagaagcgatgatgaagactatgaggaggaggaagaggaagaggaggaagaagccaccaagggtaaagaaatggactgtctcaaaaatggcttgcgcgcagagcgccacctcattccaaacggccagcacggccattag

SEQ ID NO: 254396 - DNA, 1152 bp, Artificial Sequence
  derived and/or modified sequence
atgttctggacttttaaagaatggttttggcttgagaggttctggctgcctccaacaatcaaatggtcagacttagaggaccatgacggactcgtttttgttaagccttcgcacctctatgtgaccataccctacgcatttctgcttctcattataaggagagtgtttgaaaagtttgtcgccagtcctctggccaagtcattcggtatcaaagagacagtccgaaaagtgactccgaatactgtactcgaaaatttcttcaagcacagtacaaggcagccactgcagacagacatatacggtcttgctaagaaatgtaatctgacggagagacaagtagaaagatggttcaggtctcggagaaaccaggagcgcccatcacgcctgaaaaagtttcaggaagcatgctggagatttgcgttctatcttatgattacagtcgcagggatagccttcttatatgataaaccatggttatacgatctctgggaagtgtggaacggatatcctaaacagcccctgctgccttcccagtattggtactacattctagaaatgagtttctactggagcctgctcttccgcttgggctttgatgtgaaacgcaaagatttcctggctcatattatacatcatcttgctgcgattagtctgatgtccttctcctggtgtgctaactacattcgttctggcactctggtgatgatagtgcacgatgtggctgacatttggctggaaagtgctaagatgttctcctacgccggatggacacagacctgcaatacactgttctttattttctcaaccatctttttcatttctagactgatcgtgtttcccttctggatcctgtattgcactcttattctgccaatgtatcatcttgagcctttcttctcctacatttttctcaacttacagctcatgattttacaggtgctgcacctgtattggggctattatatcttgaaaatgctcaacagatgtatatttatgaagagtatccaggatgtgcggtcggatgatgaggactacgaggaagaggaggaagaggaggaagaagaggccactaagggcaaggaaatggattgcttgaagaatggtctgcgcgctgaacgtcacctcattcctaatggccagcatggccattag

SEQ ID NO: 254397 - DNA, 468 bp, Artificial Sequence
  derived and/or modified sequence
atgttttggacctttaaggaatggttctggcttgaaaggttttggctcccccctactattaaatggtcagatttggaggaccacgatggactggtcttcgtgaaacccagccatctctacgtgacaattccctacgctttcctactcttgatcatcagaagagtgtttgaaaaattcgtcgcatcccccttagcgaaatcgtttgggataaaagaaactgtgaggaaggtgacccctaacactgttctggagaactttttcaagcactccacccggcagcccttacagaccgacatctacgggctcgctaagaaatgtaatctcacagaacgccaggttgaacgctggttcagaagtcgcaggaaccaagagcgccctagccggctgaagaaatttcaggaggcctgctggcgcttcgctttctatctgatgattaccgttgccggtattgcattcctgtacgattag

SEQ ID NO: 254398 - DNA, 174 bp, Artificial Sequence
  derived and/or modified sequence
atgttttggacctttaaagagtggttctggctggagagattttggctgccacctacaatcaaatggtccgacctggaggaccacgacggccttgtgtttgtgaaaccatcccatctgtatgtgacaataccgtacgctttcctgttactgattattagaagagtctttgaatag

SEQ ID NO: 254399 - protein, 1065 aa, Artificial Sequence
  derived and/or modified sequence
MRKQEVRTGREAGQGHGTGSPAEQVKALMDLLAGKGSQGSQAPQALDRTPDAPLGPCSNDSRIQRHRKALLSKVGGGPELGGPWHRLASLLLVEGLTDLQLREHDFTQVEATRGGGHPARTVALDRLFLPLSRVSVPPRVSITIGVAGMGKTTLVRHFVRLWAHGQVGKDFSLVLPLTFRDLNTHEKLCADRLICSVFPHVGEPSLAVAVPARALLILDGLDECRTPLDFSNTVACTDPKKEIPVDHLITNIIRGNLFPEVSIWITSRPSASGQIPGGLVDRMTEIRGFNEEEIKVCLEQMFPEDQALLGWMLSQVQADRALYLMCTVPAFCRLTGMALGHLWRSRTGPQDAELWPPRTLCELYSWYFRMALSGEGQEKGKASPRIEQVAHGGRKMVGTLGRLAFHGLLKKKYVFYEQDMKAFGVDLALLQGAPCSCFLQREETLASSVAYCFTHLSLQEFVAAAYYYGASRRAIFDLFTESGVSWPRLGFLTHFRSAAQRAMQAEDGRLDVFLRFLSGLLSPRVNALLAGSLLAQGEHQAYRTQVAELLQGCLRPDAAVCARAINVLHCLHELQHTELARSVEEAMESGALARLTGPAHRAALAYLLQVSDACAQEANLSLSLSQGVLQSLLPQLLYCRKLRLDTNQFQDPVMELLGSVLSGKDCRIQKISLAENQISNKGAKALARSLLVNRSLTSLDLRGNSIGPQGAKALADALKINRTLTSLSLQGNTVRDDGARSMAEALASNRTLSMLHLQKNSIGPMGAQRMADALKQNRSLKELMFSSNSIGDGGAKALAEALKVNQGLESLDLQSNSISDAGVAALMGALCTNQTLLSLSLRENSISPEGAQAIAHALCANSTLKNLDLTANLLHDQGARAIAVAVRENRTLTSLHLQWNFIQAGAAQALGQALQLNRSLTSLDLQENAIGDDGACAVARALKVNTALTALYLQVASIGASGAQVLGEALAVNRTLEILDLRGNAIGVAGAKALANALKVNSSLRRLNLQENSLGMDGAICIATALSGNHRLQHINLQGNHIGDSGARMISEAIKTNAPTCTVEM

SEQ ID NO: 254400 - protein, 660 aa, Artificial Sequence
  derived and/or modified sequence
LSLPSVTYLLLEVIPDSMRKQEVRTGREAGQGHGTGSPAEQVKALMDLLAGKGSQGSQAPQALDRTPDAPLGPCSNDSRIQRHRKALLSKVEATRGGGHPARTVALDRLFLPLSRVSVPPRVSITIGVAGMGKTTLVRHFVRLWAHGQVGKDFSLVLPLTFRDLNTHEKLCADRLICSVFPHVGEPSLAVAVPARALLILDGLDECRTPLDFSNTVACTDPKKEIPVDHLITNIIRGNLFPEVSIWITSRPSASGQIPGGLVDRMTEIRGFNEEEIKVCLEQMFPEDQALLGWMLSQVQADRALYLMCTVPAFCRLTGMALGHLWRSRTGPQDAELWPPRTLCELYSWYFRMALSGEGQEKGKASPRIEQVAHGGRKMVGTLGRLAFHGLLKKKYVFYEQDMKAFGVDLALLQGAPCSCFLQREETLASSVAYCFTHLSLQEFVAAAYYYGASRRAIFDLFTESGVSWPRLGFLTHFRSAAQRAMQAEDGRLDVFLRFLSGLLSPRVNALLAGSLLAQGEHQAYRTQVAELLQGCLRPDAAVCARAINVLHCLHELQHTELARSVEEAMESGALARLTGPAHRAALAYLLQVSDACAQEANLSLSLSQGVLQSLLPQLLYCRKLRWIPGQGAGAGEGAEERAEAVPSPPPSFSVSLLGLP

SEQ ID NO: 254401 - protein, 1036 aa, Artificial Sequence
  derived and/or modified sequence
MRKQEVRTGREAGQGHGTGSPAEQVKALMDLLAGKGSQGSQAPQALDRTPDAPLGPCSNDSRIQRHRKALLSKVGGGPELGGPWHRLASLLLVEGLTDLQLREHDFTQVEATRGGGHPARTVALDRLFLPLSRVSVPPRVSITIGVAGMGKTTLVRHFVRLWAHGQVGKDFSLVLPLTFRDLNTHEKLCADRLICSVFPHVGEPSLAVAVPARALLILDGLDECRTPLDFSNTVACTDPKKEIPVDHLITNIIRGNLFPEVSIWITSRPSASGQIPGGLVDRMTEIRGFNEEEIKVCLEQMFPEDQALLGWMLSQVQADRALYLMCTVPAFCRLTGMALGHLWRSRTGPQDAELWPPRTLCELYSWYFRMALSGEGQEKGKASPRIEQVAHGGRKMVGTLGRLAFHGLLKKKYVFYEQDMKAFGVDLALLQGAPCSCFLQREETLASSVAYCFTHLSLQEFVAAAYYYGASRRAIFDLFTESGVSWPRLGFLTHFRSAAQRAMQAEDGRLDVFLRFLSGLLSPRVNALLAGSLLAQGEHQAYRTQVAELLQGCLRPDAAVCARAINVLHCLHELQHTELARSVEEAMESGALARLTGPAHRAALAYLLQVSDACAQEANLSLSLSQGVLQSLLPQLLYCRKLRLDTNQFQDPVMELLGSVLSGKDCRIQKISLAENQISNKGAKALARSLLVNRSLTSLDLRGNSIGPQGAKALADALKINRTLTSLSLQGNTVRDDGARSMAEALASNRTLSMLHLQKNSIGPMGAQRMADLKQNRSLKELMFSSNSIGDGGAKALAEALKVNQGLESLDLQSNSISDAGVAALMGALCTNQTLLSLSLRENSISPEGAQAIAHALCANSTLKNLDLQWNFIQAGAAQALGQALQLNRSLTSLDLQENAIGDDGACAVARALKVNTALTALYLQVASIGASGAQVLGEALAVNRTLEILDLRGNAIGVAGAKALANALKVNSSLRRLNLQENSLGMDGAICIATALSGNHRLQHINLQGNHIGDSGARMISEAIKTNAPTCTVEM

SEQ ID NO: 254402 - protein, 761 aa, Artificial Sequence
  derived and/or modified sequence
MRKQEVRTGREAGQGHGTGSPAEQVKALMDLLAGKGSQGSQAPQALDRTPDAPLGPCSNDSRIQRHRKALLSKVGGGPELGGPWHRLASLLLVEGLTDLQLREHDFTQVEATRGGGHPARTVALDRLFLPLSRVSVPPRVSITIGVAGMGKTTLVRHFVRLWAHGQVGKDFSLVLPLTFRDLNTHEKLCADRLICSVFPHVGEPSLAVAVPARALLILDGLDECRTPLDFSNTVACTDPKKEIPVDHLITNIIRGNLFPEVSIWITSRPSASGQIPGGLVDRMTEIRGFNEEEIKVCLEQMFPEDQALLGWMLSQVQADRALYLMCTVPAFCRLTGMALGHLWRSRTGPQDAELWPPRTLCELYSWYFRMALSGEGQEKGKASPRIEQVAHGGRKMVGTLGRLAFHGLLKKKYVFYEQDMKAFGVDLALLQGAPCSCFLQREETLASSVAYCFTHLSLQEFVAAAYYYGASRRAIFDLFTESGVSWPRLGFLTHFRSAAQRAMQAEDGRLDVFLRFLSGLLSPRVNALLAGSLLAQGEHQAYRTQVAELLQGCLRPDAAVCARAINVLHCLHELQHTELARSVEEAMESGALARLTGPAHRAALAYLLQVSDACAQEANLSLSLSQGVLQSLLPQLLYCRKLRLDTNQFQDPVMELLGSVLSGKDCRIQKISLAENQISNKGAKALARSLLVNRSLTSLDLRGNSIGPQGAKALADALKINRTLTSLRVKFMYHKIDCFRRVPEADACNPSTLGGQGRWIT

SEQ ID NO: 254403 - protein, 1111 aa, Artificial Sequence
  derived and/or modified sequence
MEMDAPRPPSLAVPGAASRPGRLLDGGHGRQQVQALSSQLLEVIPDSMRKQEVRTGREAGQGHGTGSPAEQVKALMDLLAGKGSQGSQAPQALDRTPDAPLGPCSNDSRIQRHRKALLSKVGGGPELGGPWHRLASLLLVEGLTDLQLREHDFTQVEATRGGGHPARTVALDRLFLPLSRVSVPPRVSITIGVAGMGKTTLVRHFVRLWAHGQVGKDFSLVLPLTFRDLNTHEKLCADRLICSVFPHVGEPSLAVAVPARALLILDGLDECRTPLDFSNTVACTDPKKEIPVDHLITNIIRGNLFPEVSIWITSRPSASGQIPGGLVDRMTEIRGFNEEEIKVCLEQMFPEDQALLGWMLSQVQADRALYLMCTVPAFCRLTGMALGHLWRSRTGPQDAELWPPRTLCELYSWYFRMALSGEGQEKGKASPRIEQVAHGGRKMVGTLGRLAFHGLLKKKYVFYEQDMKAFGVDLALLQGAPCSCFLQREETLASSVAYCFTHLSLQEFVAAAYYYGASRRAIFDLFTESGVSWPRLGFLTHFRSAAQRAMQAEDGRLDVFLRFLSGLLSPRVNALLAGSLLAQGEHQAYRTQVAELLQGCLRPDAAVCARAINVLHCLHELQHTELARSVEEAMESGALARLTGPAHRAALAYLLQVSDACAQEANLSLSLSQGVLQSLLPQLLYCRKLRLDTNQFQDPVMELLGSVLSGKDCRIQKISLAENQISNKGAKALARSLLVNRSLTSLDLRGNSIGPQGAKALADALKINRTLTSLSLQGNTVRDDGARSMAEALASNRTLSMLHLQKNSIGPMGAQRMADLKQNRSLKELMFSSNSIGDGGAKALAEALKVNQGLESLDLQSNSISDAGVAALMGALCTNQTLLSLSLRENSISPEGAQAIAHALCANSTLKNLDLTANLLHDQGARAIAVAVRENRTLTSLHLQWNFIQAGAAQALGQALQLNRSLTSLDLQENAIGDDGACAVARALKVNTALTALYLQVASIGASGAQVLGEALAVNRTLEILDLRGNAIGVAGAKALANALKVNSSLRRLNLQENSLGMDGAICIATALSGNHRLQHINLQGNHIGDSGARMISEAIKTNAPTCTVEM

SEQ ID NO: 254404 - DNA, 3111 bp, Artificial Sequence
  derived and/or modified sequence
atgagaaagcaggaggtgagaaccggcagagaggccggccagggccacggcaccggcagccccgccgagcaggtgaaggccctgatggacctgctggccggcaagggcagccagggcagccaggccccccaggccctggacagaacccccgacgcccccctgggcccctgcagcaacgacagcagaatccagagacacagaaaggccctgctgagcaaggtgggcggcggccccgagctgggcggcccctggcacagactggccagcctgctgctggtggagggcctgaccgacctgcagctgagagagcacgacttcacccaggtggaggccaccagaggcggcggccaccccgccagaaccgtggccctggacagactgttcctgcccctgagcagagtgagcgtgccccccagagtgagcatcaccatcggcgtggccggcatgggcaagaccaccctggtgagacacttcgtgagactgtgggcccacggccaggtgggcaaggacttcagcctggtgctgcccctgaccttcagagacctgaacacccacgagaagctgtgcgccgacagactgatctgcagcgtgttcccccacgtgggcgagcccagcctggccgtggccgtgcccgccagagccctgctgatcctggacggcctggacgagtgcagaacccccctggacttcagcaacaccgtggcctgcaccgaccccaagaaggagatccccgtggaccacctgatcaccaacatcatcagaggcaacctgttccccgaggtgagcatctggatcaccagcagacccagcgccagcggccagatccccggcggcctggtggacagaatgaccgagatcagaggcttcaacgaggaggagatcaaggtgtgcctggagcagatgttccccgaggaccaggccctgctgggctggatgctgagccaggtgcaggccgacagagccctgtacctgatgtgcaccgtgcccgccttctgcagactgaccggcatggccctgggccacctgtggagaagcagaaccggcccccaggacgccgagctgtggccccccagaaccctgtgcgagctgtacagctggtacttcagaatggccctgagcggcgagggccaggagaagggcaaggccagccccagaatcgagcaggtggcccacggcggcagaaagatggtgggcaccctgggcagactggccttccacggcctgctgaagaagaagtacgtgttctacgagcaggacatgaaggccttcggcgtggacctggccctgctgcagggcgccccctgcagctgcttcctgcagagagaggagaccctggccagcagcgtggcctactgcttcacccacctgagcctgcaggagttcgtggccgccgcctactactacggcgccagcagaagagccatcttcgacctgttcaccgagagcggcgtgagctggcccagactgggcttcctgacccacttcagaagcgccgcccagagagccatgcaggccgaggacggcagactggacgtgttcctgagattcctgagcggcctgctgagccccagagtgaacgccctgctggccggcagcctgctggcccagggcgagcaccaggcctacagaacccaggtggccgagctgctgcagggctgcctgagacccgacgccgccgtgtgcgccagagccatcaacgtgctgcactgcctgcacgagctgcagcacaccgagctggccagaagcgtggaggaggccatggagagcggcgccctggccagactgaccggccccgcccacagagccgccctggcctacctgctgcaggtgagcgacgcctgcgcccaggaggccaacctgagcctgagcctgagccagggcgtgctgcagagcctgctgccccagctgctgtactgcagaaagctgagactggacaccaaccagttccaggaccccgtgatggagctgctgggcagcgtgctgagcggcaaggactgcagaatccagaagatcagcctggccgagaaccagatcagcaacaagggcgccaaggccctggccagaagcctgctggtgaacagaagcctgaccagcctggacctgagaggcaacagcatcggcccccagggcgccaaggccctggccgacgccctgaagatcaacagaaccctgaccagcctgagcctgcagggcaacaccgtgagagacgacggcgccagaagcatggccgaggccctggccagcaacagaaccctgagcatgctgcacctgcagaagaacagcatcggccccatgggcgcccagagaatggccgacctgaagcagaacagaagcctgaaggagctgatgttcagcagcaacagcatcggcgacggcggcgccaaggccctggccgaggccctgaaggtgaaccagggcctggagagcctggacctgcagagcaacagcatcagcgacgccggcgtggccgccctgatgggcgccctgtgcaccaaccagaccctgctgagcctgagcctgagagagaacagcatcagccccgagggcgcccaggccatcgcccacgccctgtgcgccaacagcaccctgaagaacctggacctgcagtggaacttcatccaggccggcgccgcccaggccctgggccaggccctgcagctgaacagaagcctgaccagcctggacctgcaggagaacgccatcggcgacgacggcgcctgcgccgtggccagagccctgaaggtgaacaccgccctgaccgccctgtacctgcaggtggccagcatcggcgccagcggcgcccaggtgctgggcgaggccctggccgtgaacagaaccctggagatcctggacctgagaggcaacgccatcggcgtggccggcgccaaggccctggccaacgccctgaaggtgaacagcagcctgagaagactgaacctgcaggagaacagcctgggcatggacggcgccatctgcatcgccaccgccctgagcggcaaccacagactgcagcacatcaacctgcagggcaaccacatcggcgacagcggcgccagaatgatcagcgaggccatcaagaccaacgcccccacctgcaccgtggagatgtag

SEQ ID NO: 254405 - DNA, 2286 bp, Artificial Sequence
  derived and/or modified sequence
atgagaaagcaggaggtgagaaccggcagagaggccggccagggccacggcaccggcagccccgccgagcaggtgaaggccctgatggacctgctggccggcaagggcagccagggcagccaggccccccaggccctggacagaacccccgacgcccccctgggcccctgcagcaacgacagcagaatccagagacacagaaaggccctgctgagcaaggtgggcggcggccccgagctgggcggcccctggcacagactggccagcctgctgctggtggagggcctgaccgacctgcagctgagagagcacgacttcacccaggtggaggccaccagaggcggcggccaccccgccagaaccgtggccctggacagactgttcctgcccctgagcagagtgagcgtgccccccagagtgagcatcaccatcggcgtggccggcatgggcaagaccaccctggtgagacacttcgtgagactgtgggcccacggccaggtgggcaaggacttcagcctggtgctgcccctgaccttcagagacctgaacacccacgagaagctgtgcgccgacagactgatctgcagcgtgttcccccacgtgggcgagcccagcctggccgtggccgtgcccgccagagccctgctgatcctggacggcctggacgagtgcagaacccccctggacttcagcaacaccgtggcctgcaccgaccccaagaaggagatccccgtggaccacctgatcaccaacatcatcagaggcaacctgttccccgaggtgagcatctggatcaccagcagacccagcgccagcggccagatccccggcggcctggtggacagaatgaccgagatcagaggcttcaacgaggaggagatcaaggtgtgcctggagcagatgttccccgaggaccaggccctgctgggctggatgctgagccaggtgcaggccgacagagccctgtacctgatgtgcaccgtgcccgccttctgcagactgaccggcatggccctgggccacctgtggagaagcagaaccggcccccaggacgccgagctgtggccccccagaaccctgtgcgagctgtacagctggtacttcagaatggccctgagcggcgagggccaggagaagggcaaggccagccccagaatcgagcaggtggcccacggcggcagaaagatggtgggcaccctgggcagactggccttccacggcctgctgaagaagaagtacgtgttctacgagcaggacatgaaggccttcggcgtggacctggccctgctgcagggcgccccctgcagctgcttcctgcagagagaggagaccctggccagcagcgtggcctactgcttcacccacctgagcctgcaggagttcgtggccgccgcctactactacggcgccagcagaagagccatcttcgacctgttcaccgagagcggcgtgagctggcccagactgggcttcctgacccacttcagaagcgccgcccagagagccatgcaggccgaggacggcagactggacgtgttcctgagattcctgagcggcctgctgagccccagagtgaacgccctgctggccggcagcctgctggcccagggcgagcaccaggcctacagaacccaggtggccgagctgctgcagggctgcctgagacccgacgccgccgtgtgcgccagagccatcaacgtgctgcactgcctgcacgagctgcagcacaccgagctggccagaagcgtggaggaggccatggagagcggcgccctggccagactgaccggccccgcccacagagccgccctggcctacctgctgcaggtgagcgacgcctgcgcccaggaggccaacctgagcctgagcctgagccagggcgtgctgcagagcctgctgccccagctgctgtactgcagaaagctgagactggacaccaaccagttccaggaccccgtgatggagctgctgggcagcgtgctgagcggcaaggactgcagaatccagaagatcagcctggccgagaaccagatcagcaacaagggcgccaaggccctggccagaagcctgctggtgaacagaagcctgaccagcctggacctgagaggcaacagcatcggcccccagggcgccaaggccctggccgacgccctgaagatcaacagaaccctgaccagcctgagagtgaagttcatgtaccacaagatcgactgcttcagaagagtgcccgaggccgacgcctgcaaccccagcaccctgggcggccagggcagatggatcacctag

SEQ ID NO: 254406 - DNA, 3336 bp, Artificial Sequence
  derived and/or modified sequence
atggagatggacgcccccagaccccccagcctggccgtgcccggcgccgccagcagacccggcagactgctggacggcggccacggcagacagcaggtgcaggccctgagcagccagctgctggaggtgatccccgacagcatgagaaagcaggaggtgagaaccggcagagaggccggccagggccacggcaccggcagccccgccgagcaggtgaaggccctgatggacctgctggccggcaagggcagccagggcagccaggccccccaggccctggacagaacccccgacgcccccctgggcccctgcagcaacgacagcagaatccagagacacagaaaggccctgctgagcaaggtgggcggcggccccgagctgggcggcccctggcacagactggccagcctgctgctggtggagggcctgaccgacctgcagctgagagagcacgacttcacccaggtggaggccaccagaggcggcggccaccccgccagaaccgtggccctggacagactgttcctgcccctgagcagagtgagcgtgccccccagagtgagcatcaccatcggcgtggccggcatgggcaagaccaccctggtgagacacttcgtgagactgtgggcccacggccaggtgggcaaggacttcagcctggtgctgcccctgaccttcagagacctgaacacccacgagaagctgtgcgccgacagactgatctgcagcgtgttcccccacgtgggcgagcccagcctggccgtggccgtgcccgccagagccctgctgatcctggacggcctggacgagtgcagaacccccctggacttcagcaacaccgtggcctgcaccgaccccaagaaggagatccccgtggaccacctgatcaccaacatcatcagaggcaacctgttccccgaggtgagcatctggatcaccagcagacccagcgccagcggccagatccccggcggcctggtggacagaatgaccgagatcagaggcttcaacgaggaggagatcaaggtgtgcctggagcagatgttccccgaggaccaggccctgctgggctggatgctgagccaggtgcaggccgacagagccctgtacctgatgtgcaccgtgcccgccttctgcagactgaccggcatggccctgggccacctgtggagaagcagaaccggcccccaggacgccgagctgtggccccccagaaccctgtgcgagctgtacagctggtacttcagaatggccctgagcggcgagggccaggagaagggcaaggccagccccagaatcgagcaggtggcccacggcggcagaaagatggtgggcaccctgggcagactggccttccacggcctgctgaagaagaagtacgtgttctacgagcaggacatgaaggccttcggcgtggacctggccctgctgcagggcgccccctgcagctgcttcctgcagagagaggagaccctggccagcagcgtggcctactgcttcacccacctgagcctgcaggagttcgtggccgccgcctactactacggcgccagcagaagagccatcttcgacctgttcaccgagagcggcgtgagctggcccagactgggcttcctgacccacttcagaagcgccgcccagagagccatgcaggccgaggacggcagactggacgtgttcctgagattcctgagcggcctgctgagccccagagtgaacgccctgctggccggcagcctgctggcccagggcgagcaccaggcctacagaacccaggtggccgagctgctgcagggctgcctgagacccgacgccgccgtgtgcgccagagccatcaacgtgctgcactgcctgcacgagctgcagcacaccgagctggccagaagcgtggaggaggccatggagagcggcgccctggccagactgaccggccccgcccacagagccgccctggcctacctgctgcaggtgagcgacgcctgcgcccaggaggccaacctgagcctgagcctgagccagggcgtgctgcagagcctgctgccccagctgctgtactgcagaaagctgagactggacaccaaccagttccaggaccccgtgatggagctgctgggcagcgtgctgagcggcaaggactgcagaatccagaagatcagcctggccgagaaccagatcagcaacaagggcgccaaggccctggccagaagcctgctggtgaacagaagcctgaccagcctggacctgagaggcaacagcatcggcccccagggcgccaaggccctggccgacgccctgaagatcaacagaaccctgaccagcctgagcctgcagggcaacaccgtgagagacgacggcgccagaagcatggccgaggccctggccagcaacagaaccctgagcatgctgcacctgcagaagaacagcatcggccccatgggcgcccagagaatggccgacctgaagcagaacagaagcctgaaggagctgatgttcagcagcaacagcatcggcgacggcggcgccaaggccctggccgaggccctgaaggtgaaccagggcctggagagcctggacctgcagagcaacagcatcagcgacgccggcgtggccgccctgatgggcgccctgtgcaccaaccagaccctgctgagcctgagcctgagagagaacagcatcagccccgagggcgcccaggccatcgcccacgccctgtgcgccaacagcaccctgaagaacctggacctgaccgccaacctgctgcacgaccagggcgccagagccatcgccgtggccgtgagagagaacagaaccctgaccagcctgcacctgcagtggaacttcatccaggccggcgccgcccaggccctgggccaggccctgcagctgaacagaagcctgaccagcctggacctgcaggagaacgccatcggcgacgacggcgcctgcgccgtggccagagccctgaaggtgaacaccgccctgaccgccctgtacctgcaggtggccagcatcggcgccagcggcgcccaggtgctgggcgaggccctggccgtgaacagaaccctggagatcctggacctgagaggcaacgccatcggcgtggccggcgccaaggccctggccaacgccctgaaggtgaacagcagcctgagaagactgaacctgcaggagaacagcctgggcatggacggcgccatctgcatcgccaccgccctgagcggcaaccacagactgcagcacatcaacctgcagggcaaccacatcggcgacagcggcgccagaatgatcagcgaggccatcaagaccaacgcccccacctgcaccgtggagatgtag

SEQ ID NO: 254407 - DNA, 3198 bp, Artificial Sequence
  derived and/or modified sequence
atgcgcaaacaggaggtgcgtacaggacgcgaggcaggacagggtcatgggaccggcagtccagcggagcaggtgaaagccctgatggacctacttgcaggaaagggctctcaaggtagtcaggcgcctcaggccttggaccgtactcccgacgcccctttgggcccttgttctaatgattccaggatccagcggcatagaaaggccctgttatcaaaagtcggaggagggcccgagcttggcggcccatggcatcgacttgcgtctcttctacttgtagaagggctaacggaccttcaacttagggagcacgactttactcaggtagaagccacccggggaggaggccacccagcccggacagtggctctcgatcgactgtttttaccgctctctagagtcagcgttccccccagggtaagcattacgattggcgttgcgggtatggggaagaccactctggtgaggcacttcgtgcgtctgtgggcccacgggcaagtaggcaaagatttttcactggtgttgcccctcaccttcagagatctgaatactcacgagaagctgtgcgctgataggctaatctgttccgtgttcccacacgtaggtgagccttccttggccgttgctgtccctgcccgagccttgttgatcttggacggcctggacgagtgcaggacaccattggacttcagcaacaccgtggcttgcacagacccaaaaaaagaaatcccagtagaccatttgatcaccaatatcattagggggaatctctttcctgaggtgagtatttggattactagtagacctagcgccagcggtcagattcccggaggcttggtggatcgaatgactgaaattagggggttcaatgaggaggagatcaaagtgtgtctcgaacagatgtttcccgaggatcaagccctgctaggctggatgctctcacaggtgcaggcggatcgcgcgttgtatcttatgtgtacagtacccgccttttgccgactgactgggatggcgctgggtcacctgtggcgctcccgtactggaccccaggatgcggaactctggccgccacggactctatgcgaactttattcatggtatttcagaatggctctgagcggagaaggccaagaaaaagggaaggcctctcctcggatcgaacaagtggcccatggcggtcggaagatggtaggaacactaggccggctggcgtttcacggcctcctcaagaagaagtatgttttctatgaacaggatatgaaggcctttggcgtcgacctagccttactccagggcgcgccctgcagctgctttcttcagagggaggaaactttggcctccagcgtagcatattgtttcacccatctgagcctacaggagttcgtggctgccgcctactattatggggcaagcagacgcgccatcttcgatctctttaccgagagcggcgtttcttggcctcggctgggtttcttgacacattttagaagcgccgctcagcgagccatgcaagctgaggatggtcgccttgatgtgttcctgcgcttcctgtcaggcctgctgtccccccgagtgaacgccctgctggccggtagcctgctcgcccagggcgagcaccaagcctacagaacacaggtcgcagagctgctgcagggatgtctccgtccagacgccgccgtttgcgcacgcgccattaatgttttacactgcctgcacgaactccagcatacagagctggcccgctccgtcgaagaggctatggagagcggcgccctggcccgtctcaccggaccagcacaccgcgcggcactggcttacctgctgcaggtcagcgatgcctgtgcacaagaggccaacctaagtcttagcctctctcaaggcgtgctccagtccctgctgccacagctcctgtactgccggaagttgaggctggatacaaatcaatttcaggatcccgtaatggagttgttaggaagtgtgctgtctggaaaggattgcaggatccaaaagatcagcttagcagagaaccagatttcaaataagggggctaaagctctcgcaaggtccctcctggtgaatcggtccttgacttcgctggacctgagaggcaattccatcgggccacagggggctaaggccctggctgatgctctcaaaattaatcggacgctgacaagcctgagccttcagggcaataccgtgcgagatgatggggctcgctccatggccgaagctctcgcgtccaatagaactctctctatgctgcatctccagaaaaattccattggtccaatgggcgcccagagaatggcggacgccctgaaacagaatcgcagtctcaaggagttgatgttcagttccaattctataggcgatggcggcgccaaggctctcgcagaggctctgaaggtgaaccaaggcctcgagtcgctggatctgcaatcaaactctatatcagatgccggggttgccgccttaatgggcgctctgtgcaccaaccagacgctcctgtctttgtccctgcgggagaatagtatttctccagaaggggctcaggcaattgcacatgctctatgcgcaaactctactttaaagaatctggacttaactgcgaatctgctccatgaccagggcgctcgcgcaatcgcagtggccgtccgggagaataggactctgacatcactgcatctccagtggaacttcatccaggccggagcggcgcaggccctgggtcaggctctgcagttaaatcggtctttaacctctctggacctccaggagaacgcgatcggcgatgacggagcatgcgccgtggcgcgggccctgaaggttaatacagcactgaccgcactatatctccaagtcgcctctattggggcttcaggggcgcaggtgctgggagaagctctcgcagttaatcgaacattggaaatcctggacctgcgcggaaacgccatcggcgtggcgggcgcaaaagccctcgccaatgctctgaaggtcaattcttccctgcgtagactgaatttgcaggagaattctctgggaatggatggagctatatgcatcgctaccgcactgagcgggaaccatcgtctacagcacatcaacctgcaggggaaccacattggcgattctggcgcccggatgatctctgaagcaatcaagaccaacgctcccacctgcacggttgagatgtag

SEQ ID NO: 254408 - DNA, 1983 bp, Artificial Sequence
  derived and/or modified sequence
ctaagcctcccgagtgtgacgtatctgctgttagaggtgattccggactctatgcggaaacaagaggtgaggaccggacgtgaggccggccagggccacgggacgggtagtcctgccgaacaggtaaaggctctgatggacctactcgctggaaaggggtcacaggggtctcaggcccctcaggcgctggaccgaacccccgacgcacccttaggcccctgcagtaatgacagccgcatccagcgccaccggaaagccctcctcagtaaggttgaagctacacggggcggcggacacccagctcggacagtagcattggacaggctgttcttgccgttatcccgagtttctgtgccacctagggtcagcattaccatcggggtcgcaggcatgggcaaaacaaccctggttaggcacttcgtgcgcctgtgggcccatggccaggtcggcaaggatttctccctggtgctgcctttgactttccgagacttgaacacccatgaaaaattgtgcgccgatcgcctcatctgttcagtgtttccccatgtaggcgagccctccctggcagttgcagtccccgctcgggcactactgatactggacggtctcgacgagtgcagaactccattggatttctccaacactgtggcctgtactgacccaaagaaggaaatacccgtggaccatcttatcaccaatattatccggggcaacttatttccagaggtgagtatctggattacgtcgcgtccttcagcaagcggccagattcctggaggactcgtcgatcgcatgaccgaaattaggggctttaatgaagaagaaattaaggtttgtctggagcagatgtttccagaagaccaggccctcctcggctggatgctatctcaggtgcaggccgatagagccctctacctcatgtgcaccgtgcccgctttctgccgcctgacgggcatggccctgggccacttgtggcggtccaggacaggcccccaggacgcagagctgtggccacctcgaaccttgtgcgagctttacagttggtactttaggatggctctgtccggagagggacaggagaagggcaaggcatcaccaaggatcgaacaggtggcacacggcggccgaaagatggtcgggacgttaggacggctggctttccacgggctcctgaaaaagaaatacgtgttttacgaacaggacatgaaggcctttggagtggatctcgccctgctgcaaggcgcgccatgctcatgcttccttcagcgcgaggaaaccttagcatcgagcgtggcgtactgtttcactcatctcagtctccaggaattcgtggccgctgcctactactacggagcctctagacgcgccattttcgacctctttacagagtcaggggtgtcgtggccaagactcggctttctgacgcacttccgctctgccgcccagcgagctatgcaggccgaagacggccggctcgacgtgttcctcaggtttctgagcggccttttatctcccagagttaacgcactactggccgggtccttattggcccagggggagcaccaggcctatcggactcaggtggctgagctccttcaggggtgcttgcgccccgatgctgcagtatgcgcccgtgctattaacgtgcttcattgccttcacgaactccagcacaccgagctggccaggtcagtcgaagaagccatggagtccggcgcactggcccggctcactgggccagcccatagagctgcactggcatacctcctacaagtgagcgacgcctgtgcccaggaagcaaatctgagccttagcctgagccaaggcgtccttcagtccctgctgccccagctcctgtactgcaggaagcttcggtggatcccgggtcagggggccggggccggcgagggtgcggaggagagagccgaggcggtcccttctccccctccaagcttctccgtaagcctgctgggcctcccatag

SEQ ID NO: 254409 - DNA, 6379 bp, Artificial Sequence
  derived and/or modified sequence
gccacagggacagccggtgggctcggtggggctgcagaaggtcggggctgcactgctctcggcccccacacggttggttggttggcgtggtaagtgccctgatccctggtcctgagaactcaggctggcacagggattcccagggcatctaccaccacgcagctggagcagggctgagcccaggagcatggagatggacgcccccaggccccccagtcttgctgtccctggagcagcatcgaggcccgggagggctgccatcagcagcagtgagccatcacctctgctggccacattgtgttttttctcctagaactgtggacaacggaaggctgagccccatccattgagttcctggggccccactggaggggctgctgtggccagggtgcacggtcacaaatgaagacaccaaggcgcagagaggtgactcagcctgccctcagtcacctatctgctcctggaggtgatccccgactccatgaggaagcaagaggtgcggacgggcagggaggccggccagggccacggtacgggctccccagccgagcaggtgaaagccctcatggatctgctggctgggaagggcagtcaaggctcccaggccccgcaggccctggataggacaccggatgccccgctggggccctgcagcaatgactcaaggatacagaggcaccgcaaggccctgctgagcaaggtgggaggtggcccggagctgggcggaccctggcacaggctggcctccctcctgctggtggagggcctgacggacctgcagctgagggaacacgacttcacacaggtggaggccacccgcgggggcgggcaccccgccaggaccgtcgccctggaccggctcttcctgcctctctcccgggtgtctgtcccaccccgggtctccatcactatcggggtggccggcatgggcaagaccaccctggtgaggcacttcgtccgcctctgggcccatgggcaggtcggcaaggacttctcgctggtgctgcctctgaccttccgggatctcaacacccacgagaagctgtgtgccgaccgactcatctgctcggtcttcccgcacgtcggggagcccagcctggcggtggcagtcccagccagggccctcctgatcctggacggcttggatgagtgcaggacgcctctggacttctccaacaccgtggcctgcacggacccaaagaaggagatcccggtggaccacctgatcaccaacatcatccgtggcaacctctttccggaagtttccatctggatcacctcccgtcccagtgcatctggccagatcccagggggcctggtggaccggatgacggagatccggggctttaacgaggaggagatcaaggtgtgtttggagcagatgttccccgaggaccaggcccttctgggctggatgctgagccaagtgcaggctgacagggccctgtacctgatgtgcaccgtcccagccttctgcaggctcacggggatggcgctaggccacctgtggcgcagcaggacggggccccaggatgcagagctgtggcccccgaggaccctgtgcgagctctactcatggtactttaggatggccctcagcggggaggggcaggagaagggcaaggcaagccctcgcatcgagcaggtggcccatggtggccgcaagatggtggggacattgggccgtctggccttccatgggctgctcaagaagaaatacgtgttttacgagcaagacatgaaggcgtttggtgtagacctcgctctgctgcagggcgccccgtgcagctgcttcctgcagagagaggagacgttggcatcgtcagtggcctactgcttcacccacctgtccctgcaggagtttgtggcagccgcgtattactatggcgcatccaggagggccatcttcgacctcttcactgagagcggcgtatcctggcccaggctgggcttcctcacgcatttcaggagcgcagcccagcgggccatgcaggcagaggacgggaggctggacgtgttcctgcgcttcctctccggcctcttgtctccgagggtcaatgccctcctggccggctccctgctggcccaaggcgagcaccaggcctaccggacccaggtggctgagctcctgcagggctgcctgcgccccgatgccgcagtctgtgcacgggccatcaacgtgttgcactgcctgcatgagctgcagcacaccgagctggcccgcagcgtggaggaggccatggagagcggggccctggccaggctgactggtcccgcgcaccgcgctgccctggcctacctcctgcaggtgtccgacgcctgtgcccaggaggccaacctgtccctgagcctcagccagggcgtccttcagagcctgctgccccagctgctctactgccggaagctcaggctggacaccaaccagttccaggaccccgtgatggagctgctgggcagcgtgctgagtgggaaggactgtcgcattcagaagatcagcttggcggagaaccagatcagtaacaaaggggccaaagctctggccagatccctcttggtcaacagaagtctgacctctctggacctccgcggtaactccattggaccacaaggggccaaggcgctggcagacgctttgaagatcaaccgcaccctgacctccctgagcctccagggcaacaccgttagggatgatggtgccaggtccatggctgaggccttggcctccaaccggaccctctccatgctgcacctgcagaagaacagcatcgggcccatgggagcccagcggatggcagatttgaagcagaacaggagtctgaaagagctcatgttctccagtaatagtattggtgatggaggtgccaaggccctggctgaggccctgaaggtgaaccagggcctggagagcctggacctgcagagcaattccatcagtgacgcaggagtggcagcactgatgggggccctctgcaccaaccagaccctcctcagcctcagccttcgagaaaactccatcagtcccgagggagcccaggccatcgctcatgccctctgcgccaacagcaccctgaagaacctggacctgcagtggaacttcatccaggccggcgctgcccaggccctgggacaagcactacagctcaacaggagcctcaccagcttagatttacaggagaacgccatcggggatgacggagcgtgtgcggtggcccgtgcactgaaggtcaacacagccctcactgctctctatctccaggtggcctcaattggtgcttcaggcgcccaggtgctaggggaagccttggctgtgaacagaaccttggagattctcgacttaagaggaaatgccattggggtggctggagccaaagccctggcaaatgctctgaaggtaaactcaagtctccggagactcaatcttcaagagaattctctggggatggacggggcgatatgcattgccacagcactgtctggaaaccacaggctccagcatatcaatctccagggaaaccacattggggactccggggccaggatgatctcagaggccatcaagacaaatgctcccacgtgcactgttgaaatgtgatcctggtggacggatcaggagaatgggcagatgctcagctggaagcttttgaacagaaaggccgacttctggggggcctgtctgggagctgggaacgctgcttgctcagcacgagagccgggctctgcagggaggaaggagaggtgctgccggaggaggtcgtgagctcctcttctgctgcaggagtggtccaggcagggggtgacgggtactctgttatggcacagagaagggaggggccacccccaagggactaggggccaaaggcctgaaagctgagcagtacaggaggctggttccagctttacaccctgaggacttcatgtgtccccaacctttaaaaatgtttattactgcccctttccactcacctggttaaaaatcatcccatgctctgagatgagctgccacctcaagcccgtgaggagcatccgtttggtaggggtaacagaggggacccttctttatcttctcaagaagaagatttcagggtatcatccttacagacatgaaaaagctatgggaaaattgtgaagataaatgaaagttttaattctaggattctggaaacagagacagtaagagttctccaaggattttgccttttttgtttgtttttgagatggagtctcgctcttgtcgcccaggctggagtgcagtggcacgatctcagctccctgcaacctccgcctcccgggttcatgtgattctcctgcctcagcctccccagtagctgggaatacaggcacccgccaccatgcccggctaatttttgtagttttagtagagacggggtttcatcatgttggccaggctggtctcgaactcctgacctcaggtgatccatcagcctgggcctcccaaagtactgggattacaggcatgagccaccacacctggccccattttttatttattacaaaatcaaagacatgggtgatgcctggcacatgttgtctggagtctggcacactggttatcaatagcacattcagtgtattcagtgatgtcattctttatttatttttgagacagaatctgtcacccaggctggagtgcagtggcatgatctcagctcactgtaggctctacctcatgggttccagtgattctcctgcctcggcctcccaagtagttgggtctacaggcacgcaccaccacacccagctaatttttgtatttttagtagagatggggtttcaccatgttgatcaggctggtctttaactcctgacctcaagtgatccacccacctcagcctcccaaagtgctgggattacaggtgtgagccactgcacctggcagtgatgtcattccttactaggcttccaaagccactgctgtggccacagcttccatggagacaggcaagctgagcctctatgtggcaccaattcctgcagctgtttgtgttggagggaaaaaaatccaaatggacatcaacagctttcatcaactaaataaccacagaaaatatttatgaagactataaagcaatgattacttttgaattggaaaggaatcactattatttgaaatgtttcttcaaaagtgagcatccggacaggaaccatcatggatgctgaggccatggatgaaggcctactcgggaagatgatatccttgcagtctcaaaacggcaccccacaaaggtgatatcctaatttacaaagggaaaaaggtaccttaatctgaaatctggcaaatgcagcctcaacagaagtgacagaattgaacatcgccaataatgggacacacagacatcacatgcccccagtctgatgcaccacggagtcgtctctgatgtattcttgtcaaaaaatgtttgcctgattctaatcatgaaagaacaattagaaaaaatccaaattgacagatattctgcagaataaatggcctgacctcatcaaaaacatcaatgtcatgaaaaacacaaaacattgcagatagcgtgaaattaaagattacagagatataatttaatgcaagatctctgactggatcctagactgcaggaaaaagtctgctataaagaacatttggatcacttgtagtagctgggaaataaaacaaaacattatttgtaaaaggggggaaatctgaacatgggtcttgcagtatttatgacagtttttgcggggcagagatttctagattgacagctgttttagtactttcaaggtgatgctctgtctgctggtttgcattgtttctgtctgagttaagagactggcagaacacagagttgcagtagccaaacactggagaaagctgggccctacagaaacctaacgctgaagaaacctcaggagccaaactggtggagaaaacaaagagtcctccctctctcccttttcaaataatgatcatacatcttcaagctgtctgaaatggttaaggagttcagtctgtcgtcaggcacacaccagagccagctagcccacacagaccccatcagagcaaaacagacaagagaatttaattcatatccacatagaaaggacttctaggtaggaggtagaccctttagctcccttccaattaaaggagtccccaattctggcacctgagagtcccctgggtctaacagctatgatatttatgtagtgtgttgcttacctaaatgaatacaatttccttccagacacgtgacactgatattaaagtgctaatgagagggatctatttcttcttgtacgctaaaagagaaacagcagttcagatttcccatcagaagtccgaggactttgttcttgataactactaccaataaaaattgagtatttg

SEQ ID NO: 254410 - DNA, 3111 bp, Artificial Sequence
  derived and/or modified sequence
atgaggaagcaggaggtgcgaaccggacgagaagccgggcaggggcatggcacaggctctcccgccgagcaggtgaaggcacttatggatctgctggcgggcaaaggctcccaaggttcccaagctccgcaagccctcgataggacacctgacgccccactgggaccttgttccaatgacagccgtatccagagacatagaaaggcgctccttagcaaggtaggtggaggtccagaattgggcggtccatggcatcggctagccagccttttgctagtggaagggctcactgacctgcagctccgtgaacatgacttcactcaggtggaagccacacgcggcggagggcaccccgctcgtacggtggccttggaccggctttttctgcccctgtctagggtgtctgtgccgccacgcgtgagtataaccataggggtggcaggcatgggcaaaacaacgctcgtgcggcattttgtccggctgtgggcacatggccaagtcggcaaggatttcagcttagtgctcccactaacctttcgggacttaaatacccacgaaaaactttgcgccgaccgattgatttgtagcgttttcccccacgtcggcgagccctccctggcagtcgccgtccctgctagagcattgctgatacttgatggattagatgaatgccgaacgcctctggacttttccaatacagtggcatgcacagaccccaagaaggaaatcccggtagatcaccttatcaccaatattatcagaggaaatctcttcccagaagtgagcatttggatcaccagtcgcccaagtgcgtcaggccaaatccctggggggttggttgatcggatgacggagatacgtggattcaatgaagaagaaataaaggtttgcttggaacagatgttccccgaagatcaggctctgctgggatggatgctttcacaggtgcaggctgatagggctctctatttaatgtgtacagtccctgccttttgcaggttgactgggatggccctgggccatctctggaggtccaggactggcccacaggatgctgagctctggccacccagaaccttgtgtgagctctacagctggtattttcggatggctctttcaggcgagggccaggaaaaaggcaaggcatcgcccaggatcgaacaggtggcacacggtggtaggaagatggtaggcacgctgggccgtctcgcgttccacgggttgctgaaaaagaagtacgtgttctacgagcaggatatgaaagccttcggtgtggatttagcccttcttcagggagcaccatgctcctgttttctgcagcgtgaggagacactcgcttcctcggttgcctactgttttacccacctgtcccttcaggaattcgtcgcggcagcctactattacggggcctctcgacgcgccatttttgacttgttcacagaaagtggtgtctcctggcctcggctaggctttctgactcattttcgaagtgccgcccagcgtgcgatgcaggccgaagatgggcggctggacgtgtttctaagattcctgagtggtctgctctcgccacgtgtcaacgcgctcttggcgggtagtctacttgctcaaggagagcaccaagcttaccggacacaggtggctgagctcctccagggctgtttgcggcctgatgccgcggtctgcgctcgtgctatcaacgtgttgcattgcttacatgagctccagcatactgaactggcgcgaagcgtggaggaagccatggaatcgggtgctcttgctaggctcaccggcccagcgcaccgagctgcgttagcgtacctgctgcaggtgtcggacgcatgcgcccaagaggccaacctgagccttagtctgtcacaaggcgtcctacaatcactcttaccacaactgctctattgtcgcaagctgcgtcttgacactaaccagtttcaggatcccgtcatggagctgctgggatcagtgctcagtggcaaggactgtcgaatccaaaaaatctccctggctgagaaccagatctcgaataaaggcgctaaggctctggcccgctccctcctcgtgaatcgtagcctcaccagcctcgacctcagaggaaattcaatcggaccacagggcgctaaggccctggcagacgccctgaagattaaccgcacactcacctcattgtctctacaaggcaacacagtcagagacgacggtgccagaagcatggcagaggctctggcttccaaccggacattaagcatgttgcatctgcagaaaaatagtattggccccatgggtgctcagcgtatggctgatctcaagcaaaatcgctccctgaaggagcttatgttctcctcaaactctataggggacggtggcgccaaggcattagccgaggccctgaaagttaaccaaggccttgagtccctggacctgcagtctaactccatcagtgacgcaggggtggctgccctcatgggtgcactttgtaccaaccagacccttctcagcttgagtctgagggagaactcaatttcgccggaaggtgctcaagctatagcccatgccctctgcgctaacagtaccctaaagaacctcgatctgcagtggaattttatccaagctggggccgcacaggcattaggacaagcactgcaattaaaccggagccttacctccctcgatctgcaagaaaacgccatcggagacgatggggcttgtgccgtggcgagggctttgaaggtcaacactgccctcacggcgttatacttacaggttgcctcaattggggcctcaggcgcccaggttcttggagaagccctggcagttaaccgcactctggagatccttgatttgaggggcaacgctattggcgtggcgggcgcaaaagctctcgccaatgcactcaaggtgaactctagcctgagacgactcaatctgcaggagaactccctggggatggacggcgcaatttgcattgccactgccctgtctggcaatcacaggcttcagcacatcaacctgcagggaaatcatatcggggactccggggcccggatgatttccgaagccatcaagaccaatgccccaacttgtaccgtggagatgtag

SEQ ID NO: 254411 - DNA, 2286 bp, Artificial Sequence
  derived and/or modified sequence
atgcgtaagcaggaggtgaggacaggacgcgaagctggacagggccatgggacagggtcgcccgctgaacaggtaaaggctttaatggatttgcttgccggaaagggatcccagggctcgcaggccccccaggcactggataggaccccagacgcaccgctgggtccatgttccaatgactctcgtatccaacgccaccgcaaggccctgctctcaaaggtcggaggcggcccggaactgggaggaccatggcaccgcctagctagcctgctcctcgtcgaagggctcacagacctccagctgcgcgaacacgatttcactcaggtggaggctacacgaggaggaggccatcccgctcggaccgtcgctttagaccgcctctttctgcctctgagtagggtctctgtccccccccgagtcagcattactatcggagtggccgggatggggaagactaccctggttcggcatttcgtgagactgtgggcccacggtcaagtcgggaaggattttagcctggtgctgcctttaactttccgggacctgaacacccacgagaaactgtgcgctgatcgcttaatctgctcagtatttccccatgtgggcgagccaagtcttgcagttgcagtacccgcccgagccctcctgatcctggacggtctcgatgagtgtcggacgcctctcgatttttccaacaccgtggcctgcaccgaccctaagaaggaaattcccgtggatcatcttatcactaatattatacggggaaatctgttccccgaagtttcaatctggatcactagtagaccaagcgcgtccggtcagattcctggcggtctcgtagatcggatgaccgagatccgcggcttcaatgaagaagaaatcaaggtctgcctggaacagatgttccccgaggatcaagctctgctgggatggatgctaagccaagtgcaggctgaccgcgcactctatctgatgtgtactgtgcccgcattttgccgactaaccggcatggctctgggccatttgtggcggagcagaacaggaccccaggatgctgagttatggcctccacgcacactgtgtgagttgtatagttggtactttagaatggccctttccggcgagggacaggaaaaaggcaaggcatccccacgcatcgagcaggtagctcacggaggacgcaaaatggtcgggactcttggcaggcttgccttccacgggctcttaaagaagaaatatgtgttttacgagcaagacatgaaggcattcggagtggaccttgccttgctgcaaggagctccatgttcatgcttcttacagcgcgaggaaactcttgccagcagtgttgcgtattgctttacacacctgagcctccaagaatttgtggcggcagcctactattacggtgctagccgacgcgctatcttcgacctgtttactgagagcggagtatcatggccccgcttaggattcctgactcatttcagatcagcagctcagcgcgccatgcaggcagaggacggtcggcttgacgtcttcctgcgattcctgagcggcctcctgagcccacgcgttaacgctttgctggcaggcagtcttctggctcagggggagcaccaggcctaccgtactcaggtcgctgaattacttcagggctgcctgcgtccagacgcagccgtgtgcgctagagccatcaatgtcctgcactgcttgcacgagttgcagcacactgaactcgcaagaagtgttgaggaagcaatggagagcggtgcactggcgcgtttgaccggacctgctcaccgggcagcactcgcttatctcctgcaggtttctgacgcttgtgcacaggaggcaaacctgagcttaagcctgtcccagggtgtgttgcagagtctgctgccgcagctcctctattgtcggaaactgaggctggataccaatcagttccaggacccagtcatggagcttctgggcagtgtgctgagcgggaaagactgcagaatccagaagatcagccttgctgaaaaccaaatctctaacaaaggagctaaagccctggctaggtcccttctggtgaatcggagcctgacctcactggacctccgcgggaattccattggcccgcagggcgcaaaggctctcgccgacgctcttaagatcaatcggactttaacttctctccgggtaaagttcatgtatcacaaaatcgattgtttcagaagagtaccagaggctgatgcatgtaatccatcaacgctcggagggcagggcaggtggattacatag

SEQ ID NO: 254412 - DNA, 3336 bp, Artificial Sequence
  derived and/or modified sequence
atggaaatggacgcgcctaggcccccttccttggctgtacctggggccgcatcccgccctgggagactcttggatggaggccacggccggcagcaggtacaggctctaagctcccaattgctcgaggtgatccctgattccatgcggaaacaggaggttcgtaccggaagggaggctggtcaaggccacggcacaggctcaccagccgagcaggtgaaagctcttatggacttgctcgcaggcaaaggctcccagggcagccaggcaccccaagccctcgaccgcactcccgacgcccctctcgggccttgctcaaacgacagtcggattcaaagacacagaaaagcgctccttagtaaggtcggtgggggtccggagctcggcggaccatggcacagactcgcttcgttattgctggtggaaggcctgaccgatctccagctgcgggagcatgactttacgcaggtagaggcgacccgcggtggaggacatcccgccagaactgtagctctggatagattgtttctgccactgtcccgagtctccgtccctcctcgagtgagtattactattggtgtggccggcatgggaaaaacaacgctcgtgagacattttgtgcggctctgggctcacggtcaagtagggaaggacttttctctggtcctcccactcactttccgtgatctgaatacccacgagaagttgtgcgccgatagactcatctgcagtgtgttcccacacgtcggagagccttccctggctgtcgcagttccagccagggcactgctaattttggacggtctggacgaatgtcggacacctttggattttagcaacacagtcgcatgtacagatccgaaaaaagagatcccagtagatcacttgattaccaatattatccgcggtaatctcttccccgaagtgtctatctggatcaccagtaggccctccgcctccggacagattcctggcgggttggtcgatcgtatgaccgagattcgggggttcaacgaagaagagatcaaagtctgcctcgaacagatgtttccagaagatcaggccctcctcggatggatgctcagtcaggtgcaggccgatagggctctatatctcatgtgcacggtgcctgctttttgtcgactaacgggtatggcactgggacatctatggcgtagcaggacaggccctcaagatgcggagctctggccgccccgaactttatgtgagctgtattcctggtatttcaggatggcactctccggggagggccaggaaaaagggaaggcctctccgagaatagagcaagtggcacacggcggccgcaaaatggtcgggacattgggccggctggctttccacggtctgctgaagaagaaatacgtcttctacgagcaggatatgaaggcgtttggagtggatctggctctgctccagggcgctccatgcagttgcttcctgcagcgggaagaaactctggcctcttccgtggcatattgtttcactcacctgagtttgcaggaatttgtagctgctgcctattattacggagccagtcggcgagcaatctttgatttgttcacagagtccggtgtatcttggcctcgcctaggatttctgacacacttccgatccgccgcccaacgtgccatgcaggctgaggatggacgactcgatgtgtttcttcgcttcttatctggcctgctctcccccagagtcaacgcccttttggccggatctctgttggcacaaggagagcatcaagcttatagaacccaggtggcagagctcctccagggctgcctccgccctgacgctgctgtatgtgcccgagcaataaacgtgcttcactgtctccacgagctccagcacactgaattggccaggtccgtcgaggaggctatggaatcaggggctcttgctcgtctgaccggcccggctcaccgtgcagctctagcctatctacttcaggttagcgatgcatgtgctcaggaggccaacctgagtctgagtctgagccagggggtgctgcagtctctgctgccccaactgctatactgcaggaagctgcgcttggatactaatcagttccaggatccagtgatggagctgttgggctccgtgctctcaggtaaagattgcaggattcaaaagatctccctcgctgaaaaccagatctccaacaagggggccaaagctctagcgcggtcgctgctcgtgaatcgcagcctgactagtctggatctgcgcggaaattctatcggaccccagggcgctaaggccctggccgacgctctcaaaattaatagaacactcactagcctttctcttcagggaaacacagtccgcgacgatggcgcccgctcaatggccgaggcactggcctcaaataggaccctgtcaatgttgcatctgcagaagaacagcatcggacccatgggcgcccaaaggatggccgacctcaaacagaaccggtctttaaaggaactgatgttctcgtcaaattccatcggtgacggcggcgccaaggccttggctgaagcccttaaagttaaccaggggttagaaagtctcgatctccagtccaacagcatttctgacgccggtgtcgcggccctgatgggggcattgtgtacgaaccaaactttacttagcctgtcacttagagaaaacagcattagcccggaaggtgcccaggctattgctcacgccttgtgcgcgaactccactctcaagaatctggacttgaccgcaaatctgctgcatgaccagggcgcacgcgctattgcagtcgcagtgcgagaaaacaggaccctgactagcctacatcttcaatggaacttcatccaggctggagccgcccaggcactggggcaagcattgcagctaaataggtccctcacctcacttgacctgcaggagaatgctataggggatgatggagcctgcgcagtggctcgtgctctgaaggtcaacacagccctcacagctctataccttcaggtggcatctatcggagcttcaggcgcccaagttcttggggaagctttggcagtaaaccgtacgctcgagattctggatctcagagggaatgctatcggagtggccggcgccaaggccttggctaacgccctcaaagtgaattcttcactgcggcggctgaatctgcaggaaaacagtctgggaatggacggcgccatctgtatagccactgccctatcgggcaaccaccggctgcagcacatcaacctgcagggaaaccacataggcgactccggagcccgcatgatatccgaggctattaaaaccaacgctccaacctgtactgtcgagatgtag

SEQ ID NO: 254413 - DNA, 3198 bp, Artificial Sequence
  derived and/or modified sequence
atgaggaagcaggaggtgaggacaggccgggaggccggccagggccacggcaccggcagccctgctgagcaggtgaaggccctgatggacctgctggccggcaagggcagccagggcagccaggccccccaggccctggacaggaccccagatgcccccctgggcccctgcagcaatgacagccgcatccagaggcacaggaaggccctgctgagcaaggtgggcggcggccctgagctgggcggcccctggcaccggctggccagcctgctgctggtggagggcctgacagacctgcagctgcgggagcatgacttcacccaggtggaggccacccggggcggcggccacccagccaggacagtggccctggacaggctcttcctgcccctgagccgggtgtctgtgcccccccgggtgtccatcaccatcggcgtggccggcatgggcaagaccaccctggtgcgccactttgtgcggctgtgggcccacggccaggtgggcaaggacttcagcctggtgctgcccctgaccttccgggacctgaacacccatgagaagctgtgtgccgacaggctcatctgcagcgtcttcccccacgtgggggagcccagcctggccgtggccgtgcctgcccgggccctgctgatcctggatggcctggatgaatgtaggacccccctggacttcagcaacacagtggcctgcacagaccccaagaaggagatccctgtggaccacctgatcaccaacatcatccggggcaacctcttccctgaggtgtccatctggatcaccagccggcccagcgccagcggccagatccctgggggcctggtggacaggatgacagagatccggggcttcaatgaggaggagatcaaggtgtgcctggagcagatgtttcctgaggaccaggccctgctgggctggatgctgagccaggtgcaggccgaccgggccctgtacctgatgtgcaccgtgcctgccttctgccgcctgaccggcatggccctgggccacctgtggaggagcaggacaggcccccaggatgctgagctgtggccacccaggaccctgtgtgagctgtacagctggtacttcaggatggccctgtctggagagggccaggagaagggcaaggccagcccccgcatcgagcaggtggcccatggaggcaggaagatggtgggcaccctgggccgcctggccttccacggcctgctgaagaagaagtatgtgttctatgagcaggacatgaaggcctttggagtggacctggccctgctgcagggcgccccctgcagctgcttcctgcagcgggaggagaccctggccagctctgtggcctactgcttcacccacctgagcctgcaggagtttgtggccgccgcctactactacggggccagccggcgggccatctttgacctcttcacagagagcggcgtgtcctggccccggctgggcttcctgacccacttccgctctgctgcccagagggccatgcaggccgaggatggccgcctggatgtgttcctgcgcttcctgagcggcctgctgagcccccgggtgaatgccctgctggccggcagcctgctggcccagggcgagcaccaggcctaccgcacccaggtggccgagctgctgcagggctgcctgcggccagatgctgctgtgtgtgcccgggccatcaacgtgctgcactgcctgcacgagctgcagcacacagagctggcccggtctgtggaggaggccatggagagcggggccctggcccggctgaccggccctgcccaccgggccgccctggcctacctgctgcaggtgtctgatgcctgtgcccaggaggccaacctgagcctgagcctgagccagggcgtgctgcagagcctgctgccccagctgctgtactgcaggaagctgcggctggacaccaaccagttccaggaccctgtgatggagctgctgggctctgtgctgagcggcaaggactgccgcatccagaagatcagcctggccgagaaccagatcagcaacaagggggccaaggccctggcccggagcctgctggtgaacagaagcctgaccagcctggacctgcggggcaacagcatcggcccccagggcgccaaggccctggctgatgccctgaagatcaacagaaccctgaccagcctgagcctgcagggcaacacagtgagagatgatggagcccgctccatggccgaggccctggccagcaacagaaccctgtccatgctgcacctgcagaagaacagcatcggccccatgggcgcccagaggatggctgatgccctgaagcagaacagaagcctgaaggagctgatgttcagcagcaacagcattggagatggaggagccaaggccctggccgaggccctgaaggtgaaccagggcctggagagcctggacctgcagagcaacagcatcagtgatgctggggtggccgccctgatgggcgccctgtgcaccaaccagaccctgctgagcctgagcctgagagaaaattccatcagccctgagggcgcccaggccatcgcccacgccctgtgtgccaacagcaccctgaagaacctggacctgacagccaacctgctgcatgaccagggcgcccgggccatcgctgtggccgtgcgggagaacagaaccctgaccagcctgcacctgcagtggaacttcatccaggccggggccgcccaggccctgggccaggccctgcagctgaacagaagcctgaccagcctggacctgcaggagaatgccatcggagatgatggagcctgtgctgtggcccgggccctgaaggtgaacacagccctgacagccctgtacctgcaggtggccagcatcggggccagcggggcccaggtgctgggggaggccctggccgtgaacagaaccctggagatcctggacctgcggggaaatgccatcggcgtggccggggccaaggccctggccaatgccctgaaggtgaacagcagcctgcggcggctgaacctgcaggagaacagcctgggcatggatggagccatctgcatcgccacagccctgagcggcaaccaccggctgcagcacatcaacctgcagggcaaccacatcggggacagcggggccaggatgatcagcgaggccatcaagaccaatgcccccacctgcaccgtggagatgtag

SEQ ID NO: 254414 - DNA, 1983 bp, Artificial Sequence
  derived and/or modified sequence
ctgagcctgcccagcgtgacctacctgctgctggaggtgatcccagacagcatgaggaagcaggaggtgaggacaggccgggaggccggccagggccatggaacaggcagccctgctgagcaggtgaaggccctgatggacctgctggccggcaagggcagccagggcagccaggccccccaggccctggacaggaccccagatgcccccctgggcccctgcagcaatgacagccgcatccagaggcacaggaaggccctgctgagcaaggtggaggccacccggggcggcggccacccagccaggacagtggccctggacaggctcttcctgcccctgagccgggtgtctgtgcccccccgggtgtccatcaccatcggcgtggccggcatgggcaagaccaccctggtgcgccactttgtgcggctgtgggcccacggccaggtgggcaaggacttcagcctggtgctgcccctgaccttccgggacctgaacacccatgagaagctgtgtgccgacaggctcatctgcagcgtcttcccccacgtgggggagcccagcctggccgtggccgtgcctgcccgggccctgctgatcctggatggcctggatgaatgtaggacccccctggacttcagcaacacagtggcctgcacagaccccaagaaggagatccctgtggaccacctgatcaccaacatcatccggggcaacctcttccctgaggtgtccatctggatcaccagccggcccagcgccagcggccagatccctgggggcctggtggacaggatgacagagatccggggcttcaatgaggaggagatcaaggtgtgcctggagcagatgtttcctgaggaccaggccctgctgggctggatgctgagccaggtgcaggccgaccgggccctgtacctgatgtgcaccgtgcctgccttctgccgcctgaccggcatggccctgggccacctgtggaggagcaggacaggcccccaggatgctgagctgtggccacccaggaccctgtgtgagctgtacagctggtacttcaggatggccctgtctggagagggccaggagaagggcaaggccagcccccgcatcgagcaggtggcccatggaggcaggaagatggtgggcaccctgggccgcctggccttccacggcctgctgaagaagaagtatgtgttctatgagcaggacatgaaggcctttggagtggacctggccctgctgcagggcgccccctgcagctgcttcctgcagcgggaggagaccctggccagctctgtggcctactgcttcacccacctgagcctgcaggagtttgtggccgccgcctactactacggggccagccggcgggccatctttgacctcttcacagagagcggcgtgtcctggccccggctgggcttcctgacccacttccgctctgctgcccagagggccatgcaggccgaggatggccgcctggatgtgttcctgcgcttcctgagcggcctgctgagcccccgggtgaatgccctgctggccggcagcctgctggcccagggcgagcaccaggcctaccgcacccaggtggccgagctgctgcagggctgcctgcggccagatgctgctgtgtgtgcccgggccatcaacgtgctgcactgcctgcacgagctgcagcacacagagctggcccggtctgtggaggaggccatggagagcggggccctggcccggctgaccggccctgcccaccgggccgccctggcctacctgctgcaggtgtctgatgcctgtgcccaggaggccaacctgagcctgagcctgagccagggcgtgctgcagagcctgctgccccagctgctgtactgcaggaagctgcgctggatccctggccagggcgctggggccggggagggcgctgaggagcgggcagaggccgtgcccagccccccacccagcttctctgtgtccctgctgggcctgccctag

SEQ ID NO: 254415 - DNA, 3111 bp, Artificial Sequence
  derived and/or modified sequence
atgaggaagcaggaggtgaggacaggccgggaggccggccagggccacggcaccggcagccctgctgagcaggtgaaggccctgatggacctgctggccggcaagggcagccagggcagccaggccccccaggccctggacaggaccccagatgcccccctgggcccctgcagcaatgacagccgcatccagaggcacaggaaggccctgctgagcaaggtgggcggcggccctgagctgggcggcccctggcaccggctggccagcctgctgctggtggagggcctgacagacctgcagctgcgggagcatgacttcacccaggtggaggccacccggggcggcggccacccagccaggacagtggccctggacaggctcttcctgcccctgagccgggtgtctgtgcccccccgggtgtccatcaccatcggcgtggccggcatgggcaagaccaccctggtgcgccactttgtgcggctgtgggcccacggccaggtgggcaaggacttcagcctggtgctgcccctgaccttccgggacctgaacacccatgagaagctgtgtgccgacaggctcatctgcagcgtcttcccccacgtgggggagcccagcctggccgtggccgtgcctgcccgggccctgctgatcctggatggcctggatgaatgtaggacccccctggacttcagcaacacagtggcctgcacagaccccaagaaggagatccctgtggaccacctgatcaccaacatcatccggggcaacctcttccctgaggtgtccatctggatcaccagccggcccagcgccagcggccagatccctgggggcctggtggacaggatgacagagatccggggcttcaatgaggaggagatcaaggtgtgcctggagcagatgtttcctgaggaccaggccctgctgggctggatgctgagccaggtgcaggccgaccgggccctgtacctgatgtgcaccgtgcctgccttctgccgcctgaccggcatggccctgggccacctgtggaggagcaggacaggcccccaggatgctgagctgtggccacccaggaccctgtgtgagctgtacagctggtacttcaggatggccctgtctggagagggccaggagaagggcaaggccagcccccgcatcgagcaggtggcccatggaggcaggaagatggtgggcaccctgggccgcctggccttccacggcctgctgaagaagaagtatgtgttctatgagcaggacatgaaggcctttggagtggacctggccctgctgcagggcgccccctgcagctgcttcctgcagcgggaggagaccctggccagctctgtggcctactgcttcacccacctgagcctgcaggagtttgtggccgccgcctactactacggggccagccggcgggccatctttgacctcttcacagagagcggcgtgtcctggccccggctgggcttcctgacccacttccgctctgctgcccagagggccatgcaggccgaggatggccgcctggatgtgttcctgcgcttcctgagcggcctgctgagcccccgggtgaatgccctgctggccggcagcctgctggcccagggcgagcaccaggcctaccgcacccaggtggccgagctgctgcagggctgcctgcggccagatgctgctgtgtgtgcccgggccatcaacgtgctgcactgcctgcacgagctgcagcacacagagctggcccggtctgtggaggaggccatggagagcggggccctggcccggctgaccggccctgcccaccgggccgccctggcctacctgctgcaggtgtctgatgcctgtgcccaggaggccaacctgagcctgagcctgagccagggcgtgctgcagagcctgctgccccagctgctgtactgcaggaagctgcggctggacaccaaccagttccaggaccctgtgatggagctgctgggctctgtgctgagcggcaaggactgccgcatccagaagatcagcctggccgagaaccagatcagcaacaagggggccaaggccctggcccggagcctgctggtgaacagaagcctgaccagcctggacctgcggggcaacagcatcggcccccagggcgccaaggccctggctgatgccctgaagatcaacagaaccctgaccagcctgagcctgcagggcaacacagtgagagatgatggagcccgctccatggccgaggccctggccagcaacagaaccctgtccatgctgcacctgcagaagaacagcatcggccccatgggcgcccagaggatggctgacctgaagcagaacagaagcctgaaggagctgatgttcagcagcaacagcattggagatggaggagccaaggccctggccgaggccctgaaggtgaaccagggcctggagagcctggacctgcagagcaacagcatcagtgatgctggggtggccgccctgatgggcgccctgtgcaccaaccagaccctgctgagcctgagcctgcgggagaacagcatcagccctgagggcgcccaggccatcgcccacgccctgtgtgccaacagcaccctgaagaacctggacctgcagtggaacttcatccaggccggggccgcccaggccctgggccaggccctgcagctgaacagaagcctgaccagcctggacctgcaggagaatgccatcggagatgatggagcctgtgctgtggcccgggccctgaaggtgaacacagccctgacagccctgtacctgcaggtggccagcattggagccagcggggcccaggtgctgggggaggccctggccgtgaacagaaccctggagatcctggacctgcggggaaatgccatcggcgtggccggggccaaggccctggccaatgccctgaaggtgaacagcagcctgcggcggctgaacctgcaggagaacagcctgggcatggatggagccatctgcatcgccacagccctgagcggcaaccaccggctgcagcacatcaacctgcagggcaaccacatcggggacagcggggccaggatgatcagcgaggccatcaagaccaatgcccccacctgcaccgtggagatgtag

SEQ ID NO: 254416 - DNA, 2286 bp, Artificial Sequence
  derived and/or modified sequence
atgaggaagcaggaggtgaggacaggccgggaggccggccagggccacggcaccggcagccctgctgagcaggtgaaggccctgatggacctgctggccggcaagggcagccagggcagccaggccccccaggccctggacaggaccccagatgcccccctgggcccctgcagcaatgacagccgcatccagaggcacaggaaggccctgctgagcaaggtgggcggcggccctgagctgggcggcccctggcaccggctggccagcctgctgctggtggagggcctgacagacctgcagctgcgggagcatgacttcacccaggtggaggccacccggggcggcggccacccagccaggacagtggccctggacaggctcttcctgcccctgagccgggtgtctgtgcccccccgggtgtccatcaccatcggcgtggccggcatgggcaagaccaccctggtgcgccactttgtgcggctgtgggcccacggccaggtgggcaaggacttcagcctggtgctgcccctgaccttccgggacctgaacacccatgagaagctgtgtgccgacaggctcatctgcagcgtcttcccccacgtgggggagcccagcctggccgtggccgtgcctgcccgggccctgctgatcctggatggcctggatgaatgtaggacccccctggacttcagcaacacagtggcctgcacagaccccaagaaggagatccctgtggaccacctgatcaccaacatcatccggggcaacctcttccctgaggtgtccatctggatcaccagccggcccagcgccagcggccagatccctgggggcctggtggacaggatgacagagatccggggcttcaatgaggaggagatcaaggtgtgcctggagcagatgtttcctgaggaccaggccctgctgggctggatgctgagccaggtgcaggccgaccgggccctgtacctgatgtgcaccgtgcctgccttctgccgcctgaccggcatggccctgggccacctgtggaggagcaggacaggcccccaggatgctgagctgtggccacccaggaccctgtgtgagctgtacagctggtacttcaggatggccctgtctggagagggccaggagaagggcaaggccagcccccgcatcgagcaggtggcccatggaggcaggaagatggtgggcaccctgggccgcctggccttccacggcctgctgaagaagaagtatgtgttctatgagcaggacatgaaggcctttggagtggacctggccctgctgcagggcgccccctgcagctgcttcctgcagcgggaggagaccctggccagctctgtggcctactgcttcacccacctgagcctgcaggagtttgtggccgccgcctactactacggggccagccggcgggccatctttgacctcttcacagagagcggcgtgtcctggccccggctgggcttcctgacccacttccgctctgctgcccagagggccatgcaggccgaggatggccgcctggatgtgttcctgcgcttcctgagcggcctgctgagcccccgggtgaatgccctgctggccggcagcctgctggcccagggcgagcaccaggcctaccgcacccaggtggccgagctgctgcagggctgcctgcggccagatgctgctgtgtgtgcccgggccatcaacgtgctgcactgcctgcacgagctgcagcacacagagctggcccggtctgtggaggaggccatggagagcggggccctggcccggctgaccggccctgcccaccgggccgccctggcctacctgctgcaggtgtctgatgcctgtgcccaggaggccaacctgagcctgagcctgagccagggcgtgctgcagagcctgctgccccagctgctgtactgcaggaagctgcggctggacaccaaccagttccaggaccctgtgatggagctgctgggctctgtgctgagcggcaaggactgccgcatccagaagatcagcctggccgagaaccagatcagcaacaagggggccaaggccctggcccggagcctgctggtgaacagaagcctgaccagcctggacctgcggggcaacagcatcggcccccagggcgccaaggccctggctgatgccctgaagatcaacagaaccctgaccagcctgcgggtgaagttcatgtaccacaagattgactgcttccggcgggtgcctgaggctgatgcctgcaaccccagcaccctgggcggccagggccgctggatcacctag

SEQ ID NO: 254417 - DNA, 3336 bp, Artificial Sequence
  derived and/or modified sequence
atggagatggatgccccccggccccccagcctggccgtgcctggggccgccagccggcccggccgcctgctggatggcggccacggccggcagcaggtgcaggccctgagcagccagctgctggaggtgatcccagacagcatgaggaagcaggaggtgaggacaggccgggaggccggccagggccatggaacaggcagccctgctgagcaggtgaaggccctgatggacctgctggccggcaagggcagccagggcagccaggccccccaggccctggacaggaccccagatgcccccctgggcccctgcagcaatgacagccgcatccagaggcacaggaaggccctgctgagcaaggtgggcggcggccctgagctgggcggcccctggcaccggctggccagcctgctgctggtggagggcctgacagacctgcagctgcgggagcatgacttcacccaggtggaggccacccggggcggcggccacccagccaggacagtggccctggacaggctcttcctgcccctgagccgggtgtctgtgcccccccgggtgtccatcaccatcggcgtggccggcatgggcaagaccaccctggtgcgccactttgtgcggctgtgggcccacggccaggtgggcaaggacttcagcctggtgctgcccctgaccttccgggacctgaacacccatgagaagctgtgtgccgacaggctcatctgcagcgtcttcccccacgtgggggagcccagcctggccgtggccgtgcctgcccgggccctgctgatcctggatggcctggatgagtgcaggacccccctggacttcagcaacacagtggcctgcacagaccccaagaaggagatccctgtggaccacctgatcaccaacatcatccggggcaacctcttccctgaggtgtccatctggatcaccagccggcccagcgccagcggccagatccctgggggcctggtggacaggatgacagagatccggggcttcaatgaggaggagatcaaggtgtgcctggagcagatgtttcctgaggaccaggccctgctgggctggatgctgagccaggtgcaggccgaccgggccctgtacctgatgtgcaccgtgcctgccttctgccgcctgaccggcatggccctgggccacctgtggaggagcaggacaggcccccaggatgctgagctgtggccacccaggaccctgtgtgagctgtacagctggtacttcaggatggccctgagcggggagggccaggagaagggcaaggccagccccagaattgagcaggtggcccacggcggcaggaagatggtgggcaccctgggccgcctggccttccacggcctgctgaagaagaagtatgtgttctatgagcaggacatgaaggccttcggcgtggacctggccctgctgcagggcgccccctgcagctgcttcctgcagcgggaggagaccctggccagctctgtggcctactgcttcacccacctgagcctgcaggagtttgtggccgccgcctactactatggagccagcagaagagccatctttgacctcttcacagaaagtggagtgtcctggccccggctgggcttcctgacccacttccgctctgctgcccagagggccatgcaggctgaagatggccgcctggatgtgttcctgcgcttcctgagcggcctgctgagcccccgggtgaatgccctgctggccggcagcctgctggcccagggcgagcaccaggcctaccgcacccaggtggccgagctgctgcagggctgcctgcggccagatgctgctgtgtgtgcccgggccatcaacgtgctgcactgcctgcacgagctgcagcacacagagctggcccggtctgtggaggaggccatggagagcggggccctggcccggctgactggacctgcccacagagctgccctggcctacctgctgcaggtgtctgatgcctgtgcccaggaggccaacctgagcctgagcctgagccagggcgtgctgcagagcctgctgccccagctgctgtactgcaggaagctgcggctggacaccaaccagttccaggaccctgtgatggagctgctgggctctgtgctgagcggcaaggactgccgcatccagaagatcagcctggccgagaaccagatcagcaacaagggggccaaggccctggcccggagcctgctggtgaacagaagcctgaccagcctggacctgcggggcaacagcatcggcccccagggcgccaaggccctggctgatgccctgaagatcaacagaaccctgaccagcctgagcctgcagggcaacacagtgagagatgatggagcccgctccatggccgaggccctggccagcaacagaaccctgtccatgctgcacctgcagaagaacagcatcggccccatgggcgcccagaggatggctgacctgaagcagaacagaagcctgaaggagctgatgttcagcagcaacagcattggagatggaggagccaaggccctggccgaggccctgaaggtgaaccagggcctggagagcctggacctgcagagcaacagcatcagtgatgctggggtggccgccctgatgggcgccctgtgcaccaaccagaccctgctgagcctgagcctgagagaaaattccatcagccctgagggcgcccaggccatcgcccacgccctgtgtgccaacagcaccctgaagaacctggacctgacagccaacctgctgcatgaccagggcgcccgggccatcgctgtggccgtgcgggagaacagaaccctgaccagcctgcacctgcagtggaacttcatccaggccggggccgcccaggccctgggccaggccctgcagctgaacagaagcctgaccagcctggacctgcaggagaatgccatcggagatgatggagcctgtgctgtggcccgggccctgaaggtgaacacagccctgacagccctgtacctgcaggtggccagcatcggggccagcggggcccaggtgctgggggaggccctggccgtgaacagaaccctggagatcctggacctgcggggaaatgccatcggcgtggccggggccaaggccctggccaatgccctgaaggtgaacagcagcctgcggcggctgaacctgcaggagaacagcctgggcatggatggagccatctgcatcgccacagccctgagcggcaaccaccggctgcagcacatcaacctgcagggcaaccacatcggggacagcggggccaggatgatcagcgaggccatcaagaccaatgcccccacctgcaccgtggagatgtag

SEQ ID NO: 254418 - DNA, 3198 bp, Artificial Sequence
  derived and/or modified sequence
atgcggaagcaggaggtgcggaccggccgggaggccggccagggccatggaaccggaagccctgccgaacaggtaaaggccctaatggacctgttggcaggaaaagggtcacagggctcacaggccccacaagcactggatagaacgccagacgcgcctctcggcccgtgtagtaatgactccagaattcaacgacaccggaaggctttgttgtctaaggtgggagggggccctgaactgggaggtccttggcaccggctagcctccttgctgctggtagaagggctcactgatttacagctgagagagcacgattttacccaggtcgaagctaccagaggcggtggacacccagcccgcaccgtggccctggacaggctcttccttcctctaagcagagtctctgtgccacccagagtgagtatcaccattggggtggctgggatgggtaaaacgaccctggtccgccatttcgtacgactgtgggcccacggtcaggtgggaaaagattttagtctcgtcctaccgttgacttttagagatctgaatacccatgagaagctatgcgcagatcgtctgatctgctctgtcttcccacacgtgggagagcccagcctggccgtggcagtgcccgcccgcgctttgctcatccttgatggcttggacgagtgtaggacaccgctcgatttcagtaacactgtcgcctgtactgaccccaagaaggaaattcccgttgaccaccttatcacgaatataatccggggcaatctgtttccggaggtgagcatatggatcaccagtaggccttccgccagcggtcagattccagggggcctcgtggaccgcatgacagaaatccggggctttaatgaagaagaaattaaggtttgcctagagcagatgttcccggaagaccaggcactcttagggtggatgctctcacaagttcaggcggatagagccctttatctcatgtgtactgtgcctgccttctgtcgactgaccggaatggccctcggccacttatggcgcagcaggactggccctcaggacgcagagctgtggccgccaaggacgctctgtgagctctattcatggtacttcaggatggctctgagtggggaggggcaagagaagggcaaggcgagcccccggatagaacaggtggcacacggtggaaggaaaatggttggcaccttgggacgtcttgctttccacggactgctgaaaaagaagtacgtattttacgagcaggacatgaaagcctttggagtcgacctggccctcctccaaggagctccctgtagctgctttttacagcgggaggagacactggcatcctccgttgcgtattgcttcacccaccttagtctgcaggaattcgtggccgctgcatactattacggagcatctcggcgggctatcttcgacctgtttacggaatccggagtgagttggccaagactgggatttttgacacatttccgcagtgcagcccagcgagctatgcaggctgaggacggaagattagacgtgttcctcaggtttttaagcggtttattgtctccgcgggtgaatgccttattagcaggtagtcttttggcccagggagaacaccaagcctaccgtacccaagttgccgaactgctacaggggtgtttgcgaccggacgcagcggtatgcgcacgggcaattaacgtcctgcactgcctgcacgaacttcagcatactgagctggcaaggtccgttgaggaggccatggaatctggagccctggctaggttgaccggccccgctcaccgtgcggcattggcctatttactccaggttagcgatgcttgtgcccaggaggcaaacctctcattgagtttatcacagggcgtactccagtctctgctacctcaacttctgtactgccggaagctccgattggataccaaccaattccaggacccggtgatggagcttctcgggtccgttctctcaggcaaagactgcaggattcagaagatttctttagctgagaaccagatctcaaataaaggggccaaggctcttgctaggtcccttttggtaaatcgcagcctaactagcctggatttgagaggaaattccatcggcccccaaggtgcaaaggcactggcagacgcactgaagattaatcggactttgacaagtttaagtttgcaggggaacaccgtgagagatgatggagctcggtctatggcggaagctctggcaagcaatcggacgttaagtatgctgcacttgcagaaaaatagcataggccctatgggagcccaacgaatggctgacgcccttaaacagaatcgatctcttaaggagttaatgttctctagtaattcaattggcgatggcggggccaaggccctagcggaggcccttaaagtcaatcagggactagaatcattagaccttcaatccaatagtatttctgacgcaggagtagctgctctcatgggcgccctgtgtacgaaccagacactgttatctctgtccctgagggagaattctatctctcccgaaggcgcccaggcaatagctcacgcattgtgcgctaatagcaccctcaagaatctagaccttactgctaatctgttgcacgatcagggggctagggcaattgccgtggcagtacgggaaaatcggactctgactagcctgcacttacaatggaactttatacaagccggtgccgcccaggctctgggtcaggcccttcaactgaacagatccctgacttccctggaccttcaggagaatgctattggagatgatggggcttgtgccgtggcacgcgcactgaaggtgaataccgccttgaccgccctgtacctgcaggtggcgtctattggggctagtggcgctcaggttctgggtgaagcactcgcagtcaatcggaccctggaaatcctagacctaagaggaaacgccattggggttgctggagccaaagcattagccaacgcattgaaagtcaacagcagtttgcgacgcttaaatctgcaggagaatagcttaggaatggacggggccatttgcatcgccaccgccctgagcggaaaccacaggctgcaacatataaacctccagggcaaccatatcggagacagcggggcccgtatgatctccgaagctatcaagactaatgcacctacgtgtacagtggagatgtag

SEQ ID NO: 254419 - DNA, 1983 bp, Artificial Sequence
  derived and/or modified sequence
ctgagcctgcccagcgtgacctacctgctgctggaggtgatccccgacagcatgaggaagcaggaagtccgcaccggacgtgaggccggacagggccacggcacaggaagtccagcagaacaagttaaagcactgatggatctactcgctggcaaggggagtcaaggaagccaggctcctcaagcattagatcggacacccgacgcgcctctcggaccgtgctctaatgactcaagaattcagaggcatcgtaaagctctcttgagcaaagtggaggcaactcggggcggaggacatcctgctagaacagtggcactcgacagactgttccttcccctgtcacgtgtttccgtgcctcctcgcgtgtctattacaatcggagttgccggaatgggaaaaactaccctggttaggcacttcgtgcggctgtgggcccatggtcaggtggggaaagacttctctctagtccttcccctgactttccgagatctaaatacgcacgagaagctgtgtgccgatcgactcatttgttctgtgtttcctcacgtgggcgagccgtcactggccgtggccgtgcctgccagggctttactcatcctggacggattggacgaatgccggactccactagacttcagtaatactgttgcctgcaccgacccaaagaaagagattcctgtcgatcatctgattactaatataatccggggtaacctgttccccgaggtgagtatctggatcacctcaaggccgtctgcttccggccagatccccggggggctggtagaccggatgaccgaaattagaggctttaacgaagaagagattaaggtctgcttagagcagatgtttcctgaagatcaggctttactcggctggatgctctcacaggtccaggcagacagggccctatatctgatgtgcacggtccccgcattttgcaggctcaccgggatggcactcggtcacctgtggagaagtcggaccggtccacaggacgctgagctctggccccctcgcaccttgtgcgagctgtattcctggtacttcagaatggccctgtccggcgagggacaagaaaaaggcaaagcctcacctcgtattgagcaagtcgcccacggagggagaaagatggtcggaacgctcggacggttggcatttcacggactgctcaagaagaaatacgtgttttatgaacaggatatgaaagcttttggcgttgatctagccctgctgcagggagccccctgttcttgttttctacagcgcgaagagaccctggcctctagtgtagcttattgtttcacacacctgagcttgcaagaatttgtggcagctgcctactattacggtgcatcgcgccgcgccatcttcgatttattcacagagtctggagttagttggccacgcctgggtttccttactcacttccgttctgctgcccagcgggctatgcaggcagaagatggaagattagatgttttcctcaggtttctgtccggcctgctgtcacccagagtgaatgctctgttggccggatccctcctcgcacagggcgagcatcaggcttaccggacccaagtagcagaactcctccaagggtgccttagacctgacgctgccgtgtgcgcgagagccattaacgtgctgcattgtctccatgaactgcagcacaccgagctggcaagatctgttgaggaggcgatggagtcgggggctctagccaggctcaccggccccgcccacagagccgcccttgcgtatctcttacaggtttccgatgcctgtgctcaggaggctaatctgagccttagtcttagtcagggggtgctccagtccttacttccccagctgctgtactgtcgcaagctcagatggatccctggtcagggcgccggggccggggaaggagctgaggaacgcgctgaggcggttcctagcccacccccttcttttagcgtgagccttctagggctcccttag

SEQ ID NO: 254420 - DNA, 3111 bp, Artificial Sequence
  derived and/or modified sequence
atgcggaagcaggaggtgcggaccggccgggaggccggccagggccatggaaccggaagccccgctgaacaggtgaaggcgcttatggatctgctggccgggaaaggttcccagggctcccaggccccacaagccttggatcggactcccgacgcgccgctcggaccatgttcaaacgattcgagaatccaaaggcacaggaaggctttgctctcgaaggtcggcggcgggcccgagcttgggggaccctggcatcgcctcgccagtctgctgctggtggagggtttgacagacctgcagttgcgagagcacgactttacccaggtggaagctacccgcgggggcggccatcctgctcggacagtggccctcgaccgcctgttcctgccactgagcagagtgtccgttcctcctcgcgtcagcataactattggggtggctgggatggggaagaccactctcgtcagacattttgtgaggttgtgggcccacggccaggtcggcaaggacttttcgctcgtgttgccgcttaccttcagggatttaaatacccatgagaagctttgcgctgatcggctcatctgctccgtattccctcatgtgggagaaccatcactggccgtggccgtccccgcaagagccctcttgattctcgacggactggacgagtgtcgtaccccgctcgatttctctaacaccgtagcctgcaccgaccctaagaaggagattccggtcgatcacctaatcaccaacatcatacgcggaaatctgtttccggaggtttcaatctggattactagccgaccttccgcctcaggccagattccaggagggctggtggatcggatgaccgaaatccggggattcaatgaagaggagattaaggtttgcctggagcaaatgtttcctgaagaccaagccttactcggctggatgctcagtcaggtacaggcagaccgagcactgtatttgatgtgtacagtcccagccttctgcagattgactgggatggccttgggccacctatggcgttccaggactggaccacaggacgctgaactgtggcccccccgaacattgtgtgagctgtacagctggtacttccgtatggctctgtctggggagggacaggagaagggtaaagcctccccaaggatcgagcaggtggctcatgggggccggaagatggtggggactctgggaaggctggcttttcatggtttgctgaagaagaagtatgttttctacgagcaggacatgaaggcttttggtgtggatcttgcccttctgcagggggctccgtgttcctgtttcctccagcgggaggagacactggcctcttccgttgcgtattgcttcactcacctgtcattacaagaatttgtggcggcagcatattattacggcgcttcccgaagagctattttcgatctgtttaccgaatctggcgtgtcatggccccgtttgggatttttgacacactttcggtcagccgctcaacgagcaatgcaagcggaggacgggcgcctggatgtctttctccgattcctttctggcttgctctctccacgggttaacgccttacttgccggctctctgttggcccagggcgagcaccaggcttacagaacacaggtggccgagctgctgcagggctgccttagacctgatgcggcggtctgcgcccgagctatcaatgtcctccattgtctccatgagctccaacatactgagcttgccagatctgtggaggaggctatggagtctggtgccctggctagacttaccggtccagcacacagagccgcactggcatatcttctacaggtctctgacgcctgcgcccaggaggccaatttgtctctgtctttgagccaaggcgtgctgcaaagtttgctaccacagctgctgtactgcagaaagctgcggctggatactaaccagtttcaggatccagtgatggaattactgggaagcgttctgagtgggaaggattgcagaatccagaagatctcgctggccgagaaccaaatcagcaacaagggtgcgaaagctctagcccgatccctgctcgtaaaccgatctttgactagcctggacttgcgtggaaactccatcggaccacagggagctaaggcgctcgctgacgcgctgaagatcaaccgtactctcacttccctgtcactccaaggcaatacagttcgggatgatggcgcgagatcaatggcggaggccctggctagtaatagaactctcagtatgttacacttgcagaaaaatagcattggccctatgggggctcaacgaatggctgacttgaaacagaaccgtagcctgaaagaattgatgtttagcagcaacagcattggggacggtggcgccaaagcattggctgaggcccttaaggtgaaccagggcctggagtcactggacctacaatcaaactccatctcagacgcaggggtggccgctctgatgggcgctctgtgtactaatcagacgctcctctctctgtccctccgcgaaaattcaatcagtcctgagggggcccaggcaatcgctcacgcactgtgcgccaatagtaccctcaaaaatctcgatcttcagtggaattttattcaagcaggtgccgcgcaggctttgggacaggccctgcaactaaaccggagtctgactagcctggacctccaagaaaacgccattggcgatgacggggcatgcgcagtggctagagctctgaaagtgaacacggcgctcactgcactttacctacaggttgcttccatcggcgcttccggcgcccaggtccttggtgaggcattggccgttaatagaacactggaaatcttggatctgagggggaacgccatcggcgtggccggtgctaaagcactggcaaacgctttgaaggtgaatagctcgctacggcggctgaacttgcaagagaattctctgggcatggacggggcgatctgtatagcaaccgcgctgtcgggcaaccatcgcctgcagcacattaatctacagggcaaccatatcggggacagcggggcccggatgatctcggaggctatcaagaccaacgctccgacctgcaccgtggagatgtag

SEQ ID NO: 254421 - DNA, 2286 bp, Artificial Sequence
  derived and/or modified sequence
atgcggaagcaggaggtgcggaccggccgggaggccggccagggccacgggaccggctcccccgccgagcaggtgaaggcactgatggacctgttagctggaaagggctcccaggggtcgcaagcaccacaggcccttgaccgtactcctgacgctccactgggaccttgctccaacgattcccgcatacagaggcataggaaagcccttcttagcaaggtgggggggggcccagaactggggggcccttggcacaggctggcaagcttgctattggtggaagggctgaccgatttacaattacgggaacacgatttcacgcaggtagaagcgactaggggaggaggccatcctgcacggactgtcgctctcgacaggctatttctgccgctgtctcgtgtgagtgtcccaccacgtgtgtctattacaattggggttgcagggatgggtaagaccacccttgtacgccatttcgtcagattgtgggcgcatgggcaagtagggaaggatttcagcctggtgctccccttaaccttcagggacctcaacacccacgagaagctttgcgccgaccgattaatctgttcagtattcccccatgttggagagcccagcctggccgtggctgtgccagccagggctctgctcatcctggacggtctagatgaatgcaggaccccacttgatttcagtaataccgtcgcatgtacagaccctaagaaagaaattccagttgatcacctaattacaaatatcattcggggtaatctgtttcctgaggtgtctatttggatcacctcccgtcccagcgcctccggacagataccaggaggtcttgttgatagaatgaccgaaatcaggggcttcaatgaggaggagatcaaagtgtgtcttgaacagatgtttcctgaagaccaagccttgcttggatggatgctgagtcaggtgcaggcagaccgtgctctgtatttaatgtgtacagtgccagcattttgcaggctcacagggatggccctggggcacctgtggcgcagcagaaccggccctcaagacgccgagctgtggcctccacggaccttgtgcgagttgtattcatggtattttcgaatggcactttccggagagggccaagagaagggaaaagctagcccacgcatcgagcaagtcgcccatggaggcagaaagatggtgggtacgctgggtaggctcgcctttcatggcctcctgaagaaaaaatatgtcttctacgagcaggacatgaaggcctttggggtggatctggctctgcttcagggagctccctgtagctgtttccttcagcgcgaggagacacttgccagctctgtagcctactgtttcacacatctgagcctccaggagttcgtggccgcagcttattattatggagcttcacggcgggccattttcgacctgtttacggagagcggtgtgagctggccgcgccttggctttcttactcattttcgcagcgccgctcagagggctatgcaagccgaggacggaagactggatgtatttttgcgcttcctgagcggtctgcttagtccaagggtgaatgcattgctggcaggatccctcctggcccagggcgagcaccaagcgtaccgaacgcaggtggccgagctgttacagggctgcctccggccggatgcggcagtttgtgcccgggcaatcaacgtgttgcactgtctccatgaactgcagcataccgagcttgcccggagcgtagaggaagctatggagtccggcgcgctggcccggctaacaggacctgcccaccgggctgccctggcctacctgctgcaggtgtctgatgcctgtgcacaggaggccaatctttccctgagtctatcgcagggcgtccttcaatcgctacttccacagctgctttattgccgcaagcttcggcttgacacaaatcagttccaagaccctgtcatggagctcctgggaagcgtacttagtggtaaagactgcaggatccagaaaatctcactggccgagaaccaaattagtaacaagggcgccaaagccctggcccgctccttactggtcaataggtccttgacctccctggacttacgtgggaacagcattggaccccagggagcgaaggctctggccgacgcccttaagatcaataggacacttactagcctgagagttaagtttatgtatcacaaaatcgattgtttccgccgcgtgcctgaggctgatgcttgcaaccctagcacgctagggggccagggaagatggatcacttag

SEQ ID NO: 254422 - DNA, 3336 bp, Artificial Sequence
  derived and/or modified sequence
atggagatggacgccccccggccccccagcctggccgtgcccggcgccgcctctcgtcccggccgtttgttagacgggggtcatggaaggcagcaagtgcaggcgttaagctcccaacttctcgaagtgatcccggacagtatgcgcaagcaggaggtgaggacgggaagagaagccggtcaaggacacgggaccgggagccccgcagaacaagttaaggctctgatggaccttctggctggtaagggctcccaagggagccaagcaccgcaggccctggaccggactcccgacgctcctctgggaccctgctctaacgactcccgcatccagcggcacagaaaggctctgttatccaaggttgggggggggcccgagcttggcgggccctggcaccgcttagcttccctgctgctagttgaaggcctcaccgacctgcagcttagggagcacgattttacccaggtcgaggccaccaggggaggggggcacccagccaggacagttgcattagatcggctcttcttgcctctgtcacgcgtgagcgtgccaccccgtgtgtctataacaattggggttgccgggatggggaaaaccacattggtgagacactttgtgaggctctgggcccacggacaggtcggcaaggacttcagtttggtgctgcccctgactttcagagacctcaatactcacgagaagctgtgtgccgatcgactgatttgctcagttttcccccatgttggtgaaccctcgctcgccgtcgctgtccccgcccgggccctgttgattctggatggattggatgaatgccgtacaccactagatttttccaacacagtcgcctgtaccgatcccaagaaggaaatccctgtggaccacctgatcacgaacattattagggggaacttatttcctgaggtgtcaatatggataacatcccgcccaagtgcgtccggtcagattcccggagggctggtcgatcgaatgacagagataagggggttcaacgaggaggagatcaaggtttgcctggagcagatgttccctgaggatcaggcgttgcttgggtggatgctgagccaggtgcaggccgacagagccttatacttgatgtgtacagttcccgcattctgtagactaacagggatggctctaggtcacctgtggcgcagccgcacgggaccccaggacgccgaactgtggccgccaaggacattgtgcgaactctattcatggtatttccgcatggccctgagcggggagggccaagaaaagggtaaagctagtcctcgcattgaacaggtggctcacggcggacggaagatggtgggtaccctagggcgcctcgcttttcatgggcttctgaagaagaagtacgtattttatgaacaagatatgaaggcattcggggtggaccttgcgctgttgcagggcgctccttgttcttgcttcctgcagagggaggaaacccttgcatcttctgtggcctactgctttacacatctttctctgcaggaattcgttgcagcagcgtattactatggcgcgagcagaagggccattttcgatcttttcacagagagcggagtgtcgtggcccaggctcggtttcctgactcacttccgctccgctgcccagcgggccatgcaagctgaagacgggaggctggacgtgttcctgcggttcctctcgggcctccttagcccccgcgtcaatgcactgctcgccggatcattgctcgcacagggcgaacatcaggcataccgcacacaggtggctgagttacttcagggctgcctcaggcctgacgcggccgtgtgcgcacgagccatcaatgtcctacactgtctgcacgagctgcagcataccgagctcgctcgttccgtggaggaagctatggaatccggggctttagctcgtctgacaggccctgcgcaccgtgcagccctcgcttaccttctccaggtgtctgatgcatgtgcccaggaggctaacctgagcctcagtctgtcccagggggtactgcagagcctcctgccgcagctgctgtactgtaggaaattgcggctggacacaaatcagttccaggaccctgtaatggagcttctgggcagcgtcttaagcgggaaagactgtagaattcagaagattagcctggccgagaaccagatctccaacaagggcgctaaggctctcgcgagatcactcctggtgaaccgttccctgaccagtttggacctgagagggaactctatcggcccgcagggggctaaggcccttgctgatgccctcaagatcaataggacacttactagcttgagcctccagggcaatacggtgcgggatgatggggcccggtcaatggccgaggcgctagcgtccaaccgaacactatcgatgcttcatctgcagaaaaattccattggtcctatgggggcacagagaatggctgatttaaagcagaaccggtccctgaaggagttgatgttctcatctaacagtattggggatggcggggcaaaagcactggccgaggctttaaaagtgaatcagggcctggagagtctggacctccagagcaactccatttccgacgctggtgttgccgccttaatgggtgccctatgcacaaatcagaccctgctctccctgtctctccgggagaacagcatctctcctgaaggtgctcaggccatcgcccacgccctgtgcgctaatagtacgcttaagaatctcgatctgacagctaacttgcttcatgaccaaggggctagagcaatagcagttgccgtccgtgagaatcgaacgcttaccagcctgcatcttcagtggaacttcattcaggccggcgcagcacaggctctgggtcaggctttacagcttaacaggagccttacaagcctggatctgcaggaaaatgccattggggacgacggggcatgcgccgtggctcgcgccctgaaggtcaacacggcgttgaccgcactgtatctgcaggtcgcatccatcggagcaagcggggcccaggtgctgggcgaggcactggcggtcaatcgcaccctggagatacttgatctgcgggggaacgcaatcggcgtcgccggcgcaaaggcattagcaaacgctttgaaggtgaacagcagtctgagacgccttaacctgcaagagaactctctggggatggacggcgctatttgcatcgccactgcactctccggcaaccatcggctacagcatataaacctgcagggcaaccatataggagactcaggtgcacgaatgatatcagaggccattaagacgaatgctccgacgtgcacagtggaaatgtag

SEQ ID NO: 254423 - DNA, 3198 bp, Artificial Sequence
  derived and/or modified sequence
atgagaaagcaggaagtaaggaccggcagagaagctggtcagggccacggaactgggtcaccggcagagcaagtcaaggccctgatggacctgctggcagggaaaggcagccaggggagccaagcacctcaggcactggatcgtacccctgacgcacctctgggcccttgttcgaacgactcccgaatccagaggcaccgcaaagccttgttgtcaaaggtgggtgggggaccagagctgggcggtccatggcatcgcctggcgtcactgctgctggtcgagggcctgactgacttacagctgcgcgaacacgacttcacgcaggtggaagcaaccagagggggaggccatccagcacgtacagtcgcactcgaccgcttattcctgccgctgagccgggtgagtgtaccaccaagagtttctattactatcggcgtggccggaatgggtaagacaactcttgtgagacatttcgtcagactttgggcccacggacaggttgggaaggacttttcgctggtgctgcctttgaccttcagagatctaaacacccacgagaagctgtgtgccgacaggctgatatgtagcgtctttcctcacgtgggcgaaccctccctcgccgtcgcagttccggctagagctctgctcatactcgacggactggacgaatgtcggacccccctcgatttcagcaacaccgtggcatgtactgatcctaagaaggagattccagtggaccaccttattacaaatattatcagaggcaatctgttccccgaagtctcgatttggattacttcgaggccttctgccagtggacagattcccggaggcctggtggatagaatgaccgagatccggggttttaacgaagaggagataaaggtctgcttagaacagatgtttcctgaggaccaagccctgcttggctggatgctgtcacaagttcaggccgaccgcgctctgtacctgatgtgtactgtgcccgcattctgtaggctcacggggatggcactgggtcacctctggcgctcccgaacgggaccccaggatgccgaactgtggccacccagaaccctgtgcgagctgtattcctggtactttaggatggcactgtcaggggagggacaggagaagggaaaggcctcccccagaatcgagcaggtagcccatggcggacggaaaatggtaggcaccctgggaaggctggcattccatggcctgctaaagaagaagtatgtgttctacgaacaagacatgaaggccttcggtgtggatttggccctgctccagggtgccccatgttcttgcttcctgcagcgcgaggagactctggcctccagcgtcgcctactgcttcacccacctcagtctgcaggagttcgtggcagcagcttactactatggggcaagccggagggcgatctttgatctgttcacagaatcgggcgtgagctggccaagattgggcttcctaactcacttcagatccgcagcccagcgggctatgcaggccgaagacggcaggttagacgtgttcctgaggtttcttagcggcttattgtcacccagagtcaatgccttgcttgctggaagtctcctggcacaaggtgaacaccaagcctaccgcacacaagtagcagaactgctgcaggggtgtttaagacccgatgccgcagtgtgtgccagggcgattaacgtgctacactgtttgcatgaactacagcatactgagctggccagatccgtggaggaggcaatggaatccggcgctctcgctcgacttacaggtccagcccatcgcgctgctttagcctacctgctgcaagtctcggatgcctgtgctcaggaggcaaatctttcactgtctcttagccagggcgtgctgcagagcctcctgccccagcttctgtattgtcggaagctgcgcctggacacaaaccagttccaagatcccgttatggaactgttggggtccgtgttaagcggaaaggactgtagaattcagaagatcagtcttgcggaaaatcagatttccaataaaggggcaaaggccctcgctcggtctctgctggtgaataggtctctgaccagcttggacctgcgcggaaacagcattgggccacagggagccaaggcactagcggacgccttaaaaatcaacaggacattgacatccctgtcactgcaaggaaacaccgtccgggatgacggggctagatccatggcggaagctctagcatccaataggactctttcaatgctacacctacagaagaattccataggacccatgggggcacagcgcatggctgacgccctgaaacagaatagatccttgaaagaactgatgttttcatcaaacagtattggagatggaggtgccaaggcacttgctgaggccctcaaagtcaaccagggattggagtccctggacctgcagtccaattcgatcagcgatgcaggtgtggctgcccttatgggagcactctgtaccaaccaaactctgttatccctaagtctgcgggagaatagtatatcccccgaaggcgctcaggctattgcacatgccctgtgcgcgaactctacgctgaagaatttggacttgaccgctaacttactccacgatcaaggagcaagggctatcgctgtcgccgtgcgggagaatagaacactgacttcactccacttgcagtggaacttcatccaggctggcgctgcccaagccctgggccaagccctacagctgaatcggtcgttgacttcgctggacctccaggagaacgccattggcgacgacggggcatgcgccgtcgctcgggcactgaaggtcaacacagccctgaccgcactgtatcttcaggtcgccagtattggggctagcggcgcacaggtgcttggcgaagcgctagcagtgaatagaacactggagattctggacctcaggggaaatgctattggggtagcaggagccaaggccctggctaacgccctgaaagttaacagttcattgcgcaggcttaacctgcaagagaattcgttgggaatggacggagccatttgtatcgctaccgcactctccggaaaccacagactgcaacatattaacctgcagggaaatcacataggggattccggtgcgcgtatgataagcgaagcaataaagactaacgctccaacgtgcacggtggagatgtag

SEQ ID NO: 254424 - DNA, 1983 bp, Artificial Sequence
  derived and/or modified sequence
ctgagcctgccgtcagtgacctacctgctgctcgaggtcatccccgattctatgcggaagcaggaggtccggacagggagagaggctggacagggtcatggaacaggctccccagctgagcaggttaaggcactgatggatctcctggccggaaaggggagccaggggtcccaggccccacaggcactcgatcgcactcctgacgctcctctggggccttgcagtaacgactctcgaatacagcggcatagaaaagcattacttagcaaggtggaagcaacacggggaggtggacatccggctagaaccgtagctctggataggctgtttttgcctcttagcagggtgagtgttcctccaagagtgagcatcacaataggagtcgcgggaatgggtaagaccactcttgtacggcactttgtgaggctgtgggctcacggtcaggttggaaaagacttcagcctagttctgccactgacatttcgggaccttaatacacatgaaaagctgtgtgctgaccggctgatctgtagtgttttcccacacgtgggggaaccatcgctggccgtggcagtacctgcaagggcactactcatccttgacggactcgacgagtgccggacacctctggacttcagcaacacagtcgcttgtaccgatcccaaaaaagagatcccagtggatcacctgattactaatatcattcgaggtaacctgttcccggaagtgtcaatctggattacaagtcgaccatcggcatccggccaaattcctggagggctggttgaccgaatgaccgagatcagaggcttcaacgaagaagagataaaagtgtgcttggagcagatgttccctgaagatcaggccctgctaggttggatgctgagccaagtccaggccgatagggctctttacttgatgtgtaccgttcccgctttctgcagacttacagggatggcccttgggcatctctggaggagccgcacaggtccccaagacgccgagctgtggcccccacgaactctgtgtgagttatattcatggtacttccgaatggccctgagcggcgaagggcaggagaagggaaaggcctcacccaggatcgaacaggtagcacatggcggtcggaaaatggttgggactttagggcgtttagcctttcacggtctgctgaagaaaaaatatgtgttctatgaacaggatatgaaagctttcggcgtggaccttgccctgcttcaaggggctccttgttcttgcttcctgcagagggaggaaacccttgcgtcatctgtcgcctattgttttacacacctgagtctgcaagaattcgtggccgctgcttattattatggggcttctaggcgagccatctttgatctgtttacagagtccggagtaagttggccacgtcttggcttcctgacacattttagaagtgccgctcagcgggctatgcaggccgaagacgggcgtctggacgtgtttttacggttcttgagcggcttgctttccccccgtgtaaacgccctgctggccggatcccttctagcacaaggagaacaccaggcatatagaactcaggttgctgaactccttcaggggtgcttgcggcctgacgccgctgtttgtgccagggccatcaatgtgctccactgcttacatgagctccaacacacagagttggctaggtccgtggaagaggccatggaaagtggtgcattggccaggcttacaggtcccgcacaccgtgctgcactggcctatcttttgcaagtttcagatgcatgcgcacaggaagctaacctttccctgtctctgagccaaggcgttctgcagtcccttctgcctcagctcctctactgtcggaagctccggtggattcctggccagggagctggagccggtgaaggggcagaggagcgcgcagaggcagtgccctcgcccccaccaagcttttctgtgtccctcctcggcctgccgtag

SEQ ID NO: 254425 - DNA, 3111 bp, Artificial Sequence
  derived and/or modified sequence
atgaggaaacaggaggtgcgaaccggaagggaggccggacaggggcacgggacgggatcgccagcagagcaggtgaaggccctgatggacctattggcaggcaaagggagtcaaggctcccaagctccgcaggcactggatcggactcctgacgcgccactgggcccttgctccaatgatagccgtatccagagacatcgaaaggccctcctgtccaaagttggcggtggcccagagcttgggggaccatggcaccgtttagctagccttctgctggtggaggggctgacagaccttcagctccgggagcacgactttacacaagtcgaggcaacccgtggcggtgggcatcccgcacgcacagtggctcttgatcgattgttcctgcctctgtcaagagtgtccgtgcctcctcgggtgtcaataaccataggagtggccggaatgggtaaaacaacactggtgcgccattttgtgcggttgtgggcacacgggcaggtcggcaaggatttctctctggtcctaccactgacattcagggatctaaatacccacgagaagttatgcgcagacaggttgatctgctccgtcttcccacacgtgggcgaaccgtctcttgcagtggctgtcccagctagggctctgttgatcctagatggtctggacgaatgccggaccccactggactttagtaatacagtcgcttgcactgatcctaagaaagagattcccgtagatcatctgataacaaacattatccgtggcaacctgtttccggaagttagtatctggatcacttcacgaccctcagccagtggacagatacctggagggctggtcgaccggatgaccgagattagaggcttcaacgaggaggaaattaaagtgtgtttggagcagatgtttcctgaggatcaggccctgcttggatggatgctgagtcaggtgcaggccgatcgcgctctatacctgatgtgcactgtgccggctttttgcaggctgaccggcatggcactcggccatctttggcgttccagaactggccctcaagatgctgagctttggcctcccaggactctgtgtgaactctattcctggtatttcagaatggcgctaagtggcgagggacaagagaaaggtaaggcgtcacctagaatcgaacaagttgcccatggagggagaaaaatggtcggcacacttggtcgactggccttccacgggctgctgaagaagaagtacgtgttctatgagcaggatatgaaagcatttggagtcgaccttgctctcctccagggcgcaccttgtagctgcttccttcagagagaagaaacgttggcatcaagcgtggcttactgcttcacgcacctctctctgcaggagttcgtggcagccgcatactattacggagccagcaggcgggctattttcgacctctttaccgagtccggcgtctcttggccgcgattaggctttttaactcatttcaggtcagcagcccagcgagccatgcaggcggaggacggcaggctagatgtgtttcttcggttcctgtctggcctgctttcgccacgcgtgaacgctctgctcgccggatctctccttgcacaaggtgagcatcaggcctatcggacacaggtagccgagctcctgcaagggtgtctgcgcccagatgccgcagtgtgtgctagagccatcaatgtcctccattgtctgcatgaactccaacacaccgaactggccaggagcgtcgaagaagccatggaatctggtgcgttggcacgcctgactggcccagcccaccgagcagccctggcctatttactccaagtctctgatgcctgtgcgcaggaagcgaacctctcattatctctatcccagggtgtactgcaaagtctgctcccgcagttgctgtattgccgaaagttgcgcttagatacaaaccaattccaggatcctgtcatggaactgctggggtctgtgctgtccggcaaggactgtcgtatacagaagatttccttggccgagaatcagatcagcaataagggggctaaagctctggccaggtctctcttagtgaacaggagtttgacatccctggatctaaggggcaattcaattggccctcagggagcgaaggctctcgcagatgctttgaaaatcaaccgtactcttacatctctcagtttacagggtaacacggtcagggacgatggcgctagaagcatggctgaggctctagcctccaacaggactcttagcatgttgcatttacagaaaaacagtattggacccatgggcgcacagcgtatggctgacttaaagcaaaaccgcagcctgaaagaactcatgttctcatccaactccatcggagacggaggggctaaagctctggcagaggctctcaaggtgaatcaggggctggaaagtctcgatctccaaagtaactctatttctgatgctggggtcgctgccctaatgggggctttatgcactaaccaaaccttactttccttgagcctaagagagaactctatttctccggagggggcacaggctattgcccacgctctgtgtgcaaattcaacgctcaagaatctggatctccagtggaactttatccaagccggagctgctcaagctctcggtcaggccttgcagctgaatcgtagtctcacctctcttgacttgcaggaaaatgcaatcggagacgatggagcctgtgccgttgctagagctctaaaggtcaacacagccctgaccgccttgtacctgcaggtcgcctctattggcgcatccggggctcaggtgctgggggaggctcttgcagttaatcggacactcgaaattctggacttgaggggtaatgccatcggagtagccggtgcaaaggctttggcaaacgccttgaaagtaaatagctcactgagacgtctgaacctccaggaaaactccttgggaatggatggagccatctgtattgccacagccctgtctggaaaccatcggttgcagcacataaacctgcagggtaatcacataggagactccggcgctcgaatgatctccgaggcaatcaaaaccaacgcccctacttgcaccgtcgaaatgtag

SEQ ID NO: 254426 - DNA, 6603 bp, Artificial Sequence
  derived and/or modified sequence
gccacagggacagccggtgggctcggtggggctgcagaaggtcggggctgcactgctctcggcccccacacggttggttggttggcgtggtaagtgccctgatccctggtcctgagaactcaggctggcacagggattcccagggcatctaccaccacgcagctggagcagggctgagcccaggagcatggagatggacgcccccaggccccccagtcttgctgtccctggagcagcatcgaggcccgggagggctgccatcagcagcagtgagccatcacctctgctggccacattgtgttttttctcctagaactgtggacaacggaaggctgagccccatccattgagttcctggggccccactggaggggctgctgtggccagggtgcacggtcacaaatgaagacaccaaggcgcagagaggtgactcagcctgccctcagtcacctatctgctcctggaggtgatccccgactccatgaggaagcaagaggtgcggacgggcagggaggccggccagggccacggtacgggctccccagccgagcaggtgaaagccctcatggatctgctggctgggaagggcagtcaaggctcccaggccccgcaggccctggataggacaccggatgccccgctggggccctgcagcaatgactcaaggatacagaggcaccgcaaggccctgctgagcaaggtgggaggtggcccggagctgggcggaccctggcacaggctggcctccctcctgctggtggagggcctgacggacctgcagctgagggaacacgacttcacacaggtggaggccacccgcgggggcgggcaccccgccaggaccgtcgccctggaccggctcttcctgcctctctcccgggtgtctgtcccaccccgggtctccatcactatcggggtggccggcatgggcaagaccaccctggtgaggcacttcgtccgcctctgggcccatgggcaggtcggcaaggacttctcgctggtgctgcctctgaccttccgggatctcaacacccacgagaagctgtgtgccgaccgactcatctgctcggtcttcccgcacgtcggggagcccagcctggcggtggcagtcccagccagggccctcctgatcctggacggcttggatgagtgcaggacgcctctggacttctccaacaccgtggcctgcacggacccaaagaaggagatcccggtggaccacctgatcaccaacatcatccgtggcaacctctttccggaagtttccatctggatcacctcccgtcccagtgcatctggccagatcccagggggcctggtggaccggatgacggagatccggggctttaacgaggaggagatcaaggtgtgtttggagcagatgttccccgaggaccaggcccttctgggctggatgctgagccaagtgcaggctgacagggccctgtacctgatgtgcaccgtcccagccttctgcaggctcacggggatggcgctaggccacctgtggcgcagcaggacggggccccaggatgcagagctgtggcccccgaggaccctgtgcgagctctactcatggtactttaggatggccctcagcggggaggggcaggagaagggcaaggcaagccctcgcatcgagcaggtggcccatggtggccgcaagatggtggggacattgggccgtctggccttccatgggctgctcaagaagaaatacgtgttttacgagcaagacatgaaggcgtttggtgtagacctcgctctgctgcagggcgccccgtgcagctgcttcctgcagagagaggagacgttggcatcgtcagtggcctactgcttcacccacctgtccctgcaggagtttgtggcagccgcgtattactatggcgcatccaggagggccatcttcgacctcttcactgagagcggcgtatcctggcccaggctgggcttcctcacgcatttcaggagcgcagcccagcgggccatgcaggcagaggacgggaggctggacgtgttcctgcgcttcctctccggcctcttgtctccgagggtcaatgccctcctggccggctccctgctggcccaaggcgagcaccaggcctaccggacccaggtggctgagctcctgcagggctgcctgcgccccgatgccgcagtctgtgcacgggccatcaacgtgttgcactgcctgcatgagctgcagcacaccgagctggcccgcagcgtggaggaggccatggagagcggggccctggccaggctgactggtcccgcgcaccgcgctgccctggcctacctcctgcaggtgtccgacgcctgtgcccaggaggccaacctgtccctgagcctcagccagggcgtccttcagagcctgctgccccagctgctctactgccggaagctcaggctggacaccaaccagttccaggaccccgtgatggagctgctgggcagcgtgctgagtgggaaggactgtcgcattcagaagatcagcttggcggagaaccagatcagtaacaaaggggccaaagctctggccagatccctcttggtcaacagaagtctgacctctctggacctccgcggtaactccattggaccacaaggggccaaggcgctggcagacgctttgaagatcaaccgcaccctgacctccctgagggtgaaattcatgtaccataaaattgactgttttaggcgggtcccagaggctgatgcctgtaatcccagcactttgggaggccaaggcaggtggatcacttgaggtcgggagttcgagaccagcctggccaacatgcctccagggcaacaccgttagggatgatggtgccaggtccatggctgaggccttggcctccaaccggaccctctccatgctgcacctgcagaagaacagcatcgggcccatgggagcccagcggatggcagatgcccttgaagcagaacaggagtctgaaagagctcatgttctccagtaatagtattggtgatggaggtgccaaggccctggctgaggccctgaaggtgaaccagggcctggagagcctggacctgcagagcaattccatcagtgacgcaggagtggcagcactgatgggggccctctgcaccaaccagaccctcctcagcctcagccttcgagaaaactccatcagtcccgagggagcccaggccatcgctcatgccctctgcgccaacagcaccctgaagaacctggacctgacagccaacctcctccacgaccagggtgcccgggccatcgcagtggcagtgagagaaaaccgcaccctcacctcccttcacctgcagtggaacttcatccaggccggcgctgcccaggccctgggacaagcactacagctcaacaggagcctcaccagcttagatttacaggagaacgccatcggggatgacggagcgtgtgcggtggcccgtgcactgaaggtcaacacagccctcactgctctctatctccaggtggcctcaattggtgcttcaggcgcccaggtgctaggggaagccttggctgtgaacagaaccttggagattctcgacttaagaggaaatgccattggggtggctggagccaaagccctggcaaatgctctgaaggtaaactcaagtctccggagactcaatcttcaagagaattctctggggatggacggggcgatatgcattgccacagcactgtctggaaaccacaggctccagcatatcaatctccagggaaaccacattggggactccggggccaggatgatctcagaggccatcaagacaaatgctcccacgtgcactgttgaaatgtgatcctggtggacggatcaggagaatgggcagatgctcagctggaagcttttgaacagaaaggccgacttctggggggcctgtctgggagctgggaacgctgcttgctcagcacgagagccgggctctgcagggaggaaggagaggtgctgccggaggaggtcgtgagctcctcttctgctgcaggagtggtccaggcagggggtgacgggtactctgttatggcacagagaagggaggggccacccccaagggactaggggccaaaggcctgaaagctgagcagtacaggaggctggttccagctttacaccctgaggacttcatgtgtccccaacctttaaaaatgtttattactgcccctttccactcacctggttaaaaatcatcccatgctctgagatgagctgccacctcaagcccgtgaggagcatccgtttggtaggggtaacagaggggacccttctttatcttctcaagaagaagatttcagggtatcatccttacagacatgaaaaagctatgggaaaattgtgaagataaatgaaagttttaattctaggattctggaaacagagacagtaagagttctccaaggattttgccttttttgtttgtttttgagatggagtctcgctcttgtcgcccaggctggagtgcagtggcacgatctcagctccctgcaacctccgcctcccgggttcatgtgattctcctgcctcagcctccccagtagctgggaatacaggcacccgccaccatgcccggctaatttttgtagttttagtagagacggggtttcatcatgttggccaggctggtctcgaactcctgacctcaggtgatccatcagcctgggcctcccaaagtactgggattacaggcatgagccaccacacctggccccattttttatttattacaaaatcaaagacatgggtgatgcctggcacatgttgtctggagtctggcacactggttatcaatagcacattcagtgtattcagtgatgtcattctttatttatttttgagacagaatctgtcacccaggctggagtgcagtggcatgatctcagctcactgtaggctctacctcatgggttccagtgattctcctgcctcggcctcccaagtagttgggtctacaggcacgcaccaccacacccagctaatttttgtatttttagtagagatggggtttcaccatgttgatcaggctggtctttaactcctgacctcaagtgatccacccacctcagcctcccaaagtgctgggattacaggtgtgagccactgcacctggcagtgatgtcattccttactaggcttccaaagccactgctgtggccacagcttccatggagacaggcaagctgagcctctatgtggcaccaattcctgcagctgtttgtgttggagggaaaaaaatccaaatggacatcaacagctttcatcaactaaataaccacagaaaatatttatgaagactataaagcaatgattacttttgaattggaaaggaatcactattatttgaaatgtttcttcaaaagtgagcatccggacaggaaccatcatggatgctgaggccatggatgaaggcctactcgggaagatgatatccttgcagtctcaaaacggcaccccacaaaggtgatatcctaatttacaaagggaaaaaggtaccttaatctgaaatctggcaaatgcagcctcaacagaagtgacagaattgaacatcgccaataatgggacacacagacatcacatgcccccagtctgatgcaccacggagtcgtctctgatgtattcttgtcaaaaaatgtttgcctgattctaatcatgaaagaacaattagaaaaaatccaaattgacagatattctgcagaataaatggcctgacctcatcaaaaacatcaatgtcatgaaaaacacaaaacattgcagatagcgtgaaattaaagattacagagatataatttaatgcaagatctctgactggatcctagactgcaggaaaaagtctgctataaagaacatttggatcacttgtagtagctgggaaataaaacaaaacattatttgtaaaaggggggaaatctgaacatgggtcttgcagtatttatgacagtttttgcggggcagagatttctagattgacagctgttttagtactttcaaggtgatgctctgtctgctggtttgcattgtttctgtctgagttaagagactggcagaacacagagttgcagtagccaaacactggagaaagctgggccctacagaaacctaacgctgaagaaacctcaggagccaaactggtggagaaaacaaagagtcctccctctctcccttttcaaataatgatcatacatcttcaagctgtctgaaatggttaaggagttcagtctgtcgtcaggcacacaccagagccagctagcccacacagaccccatcagagcaaaacagacaagagaatttaattcatatccacatagaaaggacttctaggtaggaggtagaccctttagctcccttccaattaaaggagtccccaattctggcacctgagagtcccctgggtctaacagctatgatatttatgtagtgtgttgcttacctaaatgaatacaatttccttccagacacgtgacactgatattaaagtgctaatgagagggatctatttcttcttgtacgctaaaagagaaacagcagttcagatttcccatcagaagtccgaggactttgttcttgataactactaccaataaaaattgagtatttg

SEQ ID NO: 254427 - DNA, 2286 bp, Artificial Sequence
  derived and/or modified sequence
atgaggaagcaggaggtgaggacagggagagaggctggtcagggacacggcacaggctcacctgccgaacaggtcaaggcactgatggatctcctagccggtaaaggctcacagggatcacaggccccacaggccctggatcgcacacctgacgcccctctgggcccttgctctaacgacagtagaatccagcgccaccgaaaagcattactatctaaggtcggagggggacccgagttgggcggaccttggcaccgactcgcatctttgcttttggtcgagggtttgaccgatctgcagctgagggaacacgactttactcaagtcgaagctacaagaggcggaggccacccagctcgcacagtggccctcgatagactgttcctcccgctctctcgagtgtcagtaccgccaagggtctctatcacgatcggggtagccggaatggggaagactacgcttgtgaggcactttgtgaggctctgggcgcatggtcaggtcggaaaggacttttctttagtcttacccctcacattcagagacctgaatacacacgagaaactctgcgccgatcggctgatttgttccgttttcccacatgtaggcgaaccatccctcgctgtggccgtgcctgctagggccctcctgatcttagatggattggatgaatgtcggactcctctcgatttctcaaatactgtcgcatgtaccgatccaaaaaaggaaatccccgtcgaccatctgattacaaacatcatccgcggaaatttgtttcctgaggtctctatctggatcacttcgcgaccgtccgcaagcgggcagatacccggtgggctcgtcgaccgaatgactgagatccgcggatttaacgaggaggagatcaaagtttgtctggagcagatgttccctgaagaccaggccctcctcggatggatgctgtcccaggtgcaagcggatcgggctttgtatctgatgtgtactgtaccagctttctgtagactcaccgggatggccctcggacatctgtggcgttcccggactggaccacaggacgctgagctgtggcctccccgaactctatgtgaactgtactcttggtatttccgcatggccttgtccggcgagggacaggaaaagggcaaagcctcaccaaggattgaacaggtcgctcacgggggtagaaagatggttggaactctaggtcgacttgccttccacggtctattaaaaaagaagtacgttttttatgagcaggacatgaaggccttcggcgtcgacctggccctcctgcaaggagccccttgttcctgcttcctgcagagagaggagaccctggcatccagtgttgcttattgcttcacccacctctcactgcaggagttcgtggcagctgcatattactacggagcctcacggagagctatttttgatctcttcacggagtctggcgtgtcctggcctcgcctcggatttctgacccactttcggagcgccgctcaacgggctatgcaggcagaggacggacgccttgacgtcttcttgaggttcctcagcggcttactgtcccccagagtgaatgccctgctggccggaagcctactggctcagggagagcatcaggcatacaggacccaggttgccgagctgctgcaggggtgtcttagacctgacgccgcagtgtgcgctcgcgctatcaatgtgttgcattgtctccatgagctccagcatactgagctagccagatctgttgaggaagcaatggagagtggcgcattagctagactcaccgggcctgcccatagagcagcactcgcgtacctgttgcaggtgagtgacgcctgtgctcaagaggcaaacctctcactcagtttaagccagggggtgctccaatccctcctgccccagttgctgtattgtcgcaagctgagactcgacactaaccagttccaggaccccgtcatggagcttttgggttctgtcctttcaggcaaggactgccggattcagaagatctctctggccgaaaatcagatctccaataagggagcgaaagcgctagcaagaagcttgctggtcaacaggtcactgacctccttggacctccggggtaattccatcggcccacagggagcgaaagccctcgcagacgccttgaagattaacagaactctgacatctttacgcgtgaaatttatgtaccataaaattgactgcttccggagagtccccgaagcggacgcatgtaacccatctactctcgggggacagggccgatggattacttag

SEQ ID NO: 254428 - DNA, 3336 bp, Artificial Sequence
  derived and/or modified sequence
atggagatggacgcgcctcgacctccaagcctcgcggtcccaggcgcagcctcccgcccaggcaggctgcttgacggaggacacgggaggcagcaggtgcaggctttgtcaagtcaattgttggaggtgatacccgattccatgcgaaagcaggaagttaggactggcagagaggccggacaggggcacggaacaggatcacctgccgaacaggttaaggccctgatggatctcttagcgggaaagggatcccagggttcccaggcacctcaggccctggacagaacacctgacgctccactgggaccctgtagtaacgacagccggattcagcgtcacaggaaggcgctcctgtccaaagtgggaggtggtcctgagttggggggtccttggcatcgccttgcaagtcttctactggtggaggggctgaccgatctgcaactgcgtgaacacgacttcactcaagtggaggcaacaagaggcggtggacatccggctaggaccgtcgccctggacaggctgttccttccactgagccgcgtgtccgtcccacccagggtatccattactatcggagtggcgggaatgggcaaaacaaccttggtgaggcattttgtgaggctctgggcgcatggccaagtcggaaaagacttttctttggtgctaccactgaccttccgagatctcaacactcacgagaagctatgtgcagatcgcttaatctgttcagtctttccacacgtgggggaacctagcctggccgtggccgtgcctgcgcgagctctgctgattttagacggcctggacgagtgtagaactcccctcgactttagcaataccgtggcttgcaccgaccccaaaaaggagatcccagttgatcacctaattaccaatatcatccggggtaatctgtttcctgaagtgtctatctggataacaagtaggcccagcgcatcgggacagattcccggaggattggtggacagaatgaccgagataagagggttcaacgaagaagagatcaaggtgtgcctggagcagatgtttccggaggaccaagccctgctgggctggatgctctctcaggtgcaggcggaccgcgctctatatttgatgtgcacggtgcccgctttctgcagacttaccggaatggctctcgggcacctctggagatcgagaaccggccctcaagacgccgagttgtggccccctcgaaccctgtgcgaattatatagttggtatttcagaatggctctgagtggggaaggacaggagaagggtaaggcatcacctcgaatcgaacaggtcgcgcacggaggtagaaagatggtcgggacgctgggacggctcgcatttcatggtctcctgaagaagaaatatgtgttttatgagcaagatatgaaggcatttggtgtggatcttgctctgctgcaaggcgcaccctgttcttgttttttacagagggaggaaaccttggcgagtagcgtcgcttattgctttactcatctgagcttgcaggaatttgtggccgctgcctattattatggtgccagtcgcagggctatctttgatctgtttactgagtcaggcgtctcatggccgagactcgggtttctgactcatttcagaagcgccgcacagcgcgctatgcaagctgaagacgggagactcgacgtgtttttgcggtttctgtcgggattgctgagtccccgtgtcaatgcactgctggctggctctctcctagcccaaggagagcaccaggcttaccggacacaggtcgccgagcttctgcagggctgcctgcggcctgatgccgctgtctgcgcccgagccatcaacgtcctgcattgtctgcatgaactacagcacacagaactcgcaagaagcgttgaagaggcaatggagagcggcgctttagctagactgactgggccagcccaccgagctgctctcgcctacctgctccaggtatctgatgcgtgtgctcaggaggctaatctttcgctgtcactgtcacagggggtgttgcaatccctgttgcctcagcttctgtattgccggaagctgcgattggataccaaccaatttcaggatccagtgatggaactcttgggaagtgtactgtctgggaaagactgcaggattcagaagatcagcctggctgagaaccagattagtaataaaggagccaaagctctggctcgctcactattagtcaatcgatccttgacctcacttgatctgcgcggaaacagtatcggaccacagggggctaaggcgctggcggatgccctgaagataaacagaacactgaccagtctttccctgcaaggcaacacagtgagggatgatggcgctagatcaatggccgaggccctcgcgtcaaaccggactctgtccatgttgcatctgcagaaaaatagtattgggccaatgggggcacagcggatggccgatttaaaacagaatcggagtctaaaggagctgatgttttcttccaactcaatcggagatggaggagccaaagccctcgcagaagcgctgaaggttaatcaggggttggagtctctcgaccttcagtctaacagcatatctgatgccggagtggctgccctgatgggcgctctgtgtaccaatcaaactcttctgagtctatcgctgagggaaaattctatttcaccagagggtgctcaagcaatcgctcacgccttatgtgccaactccactctgaaaaacctggacctgaccgccaatttgctgcatgatcagggggcaagagcgattgccgttgctgtcagagaaaaccgaactctcacctctttacacctgcagtggaatttcattcaagccggagcggctcaggcgctcggccaggctctgcagctgaacagatccttaacatccctagatctgcaggaaaatgcaattggggacgatggcgcttgcgctgtggccagggctctgaaggtcaacacagctctcacagccctgtacttgcaagtggcttctattggtgcgtctggagcccaggttcttggggaagcactcgctgtgaacaggactttagaaatcctggacttgagggggaatgcgataggggttgcaggagcaaaggccctggccaacgccctcaaagtgaattcttctctgcggagactgaacctgcaggaaaactctctcggaatggatggagccatctgcattgccactgcgctttccggcaatcatagactgcaacacatcaacctccagggtaaccacatcggagattctggtgcgaggatgatctctgaggcgatcaaaactaatgctccaacttgcacagtcgagatgtag

SEQ ID NO: 254429 - DNA, 6310 bp, Artificial Sequence
  derived and/or modified sequence
gccacagggacagccggtgggctcggtggggctgcagaaggtcggggctgcactgctctcggcccccacacggttggttggttggcgtggtaagtgccctgatccctggtcctgagaactcaggctggcacagggattcccagggcatctaccaccacgcagctggagcagggctgagcccaggagcatggagatggacgcccccaggccccccagtcttgctgtccctggagcagcatcgaggcccgggaggctgctggatggggggcacggcaggcagcaggttcaggccctctcttcacagctcctggaggtgatccccgactccatgaggaagcaagaggtgcggacgggcagggaggccggccagggccacggtacgggctccccagccgagcaggtgaaagccctcatggatctgctggctgggaagggcagtcaaggctcccaggccccgcaggccctggataggacaccggatgccccgctggggccctgcagcaatgactcaaggatacagaggcaccgcaaggccctgctgagcaaggtgggaggtggcccggagctgggcggaccctggcacaggctggcctccctcctgctggtggagggcctgacggacctgcagctgagggaacacgacttcacacaggtggaggccacccgcgggggcgggcaccccgccaggaccgtcgccctggaccggctcttcctgcctctctcccgggtgtctgtcccaccccgggtctccatcactatcggggtggccggcatgggcaagaccaccctggtgaggcacttcgtccgcctctgggcccatgggcaggtcggcaaggacttctcgctggtgctgcctctgaccttccgggatctcaacacccacgagaagctgtgtgccgaccgactcatctgctcggtcttcccgcacgtcggggagcccagcctggcggtggcagtcccagccagggccctcctgatcctggacggcttggatgagtgcaggacgcctctggacttctccaacaccgtggcctgcacggacccaaagaaggagatcccggtggaccacctgatcaccaacatcatccgtggcaacctctttccggaagtttccatctggatcacctcccgtcccagtgcatctggccagatcccagggggcctggtggaccggatgacggagatccggggctttaacgaggaggagatcaaggtgtgtttggagcagatgttccccgaggaccaggcccttctgggctggatgctgagccaagtgcaggctgacagggccctgtacctgatgtgcaccgtcccagccttctgcaggctcacggggatggcgctaggccacctgtggcgcagcaggacggggccccaggatgcagagctgtggcccccgaggaccctgtgcgagctctactcatggtactttaggatggccctcagcggggaggggcaggagaagggcaaggcaagccctcgcatcgagcaggtggcccatggtggccgcaagatggtggggacattgggccgtctggccttccatgggctgctcaagaagaaatacgtgttttacgagcaagacatgaaggcgtttggtgtagacctcgctctgctgcagggcgccccgtgcagctgcttcctgcagagagaggagacgttggcatcgtcagtggcctactgcttcacccacctgtccctgcaggagtttgtggcagccgcgtattactatggcgcatccaggagggccatcttcgacctcttcactgagagcggcgtatcctggcccaggctgggcttcctcacgcatttcaggagcgcagcccagcgggccatgcaggcagaggacgggaggctggacgtgttcctgcgcttcctctccggcctcttgtctccgagggtcaatgccctcctggccggctccctgctggcccaaggcgagcaccaggcctaccggacccaggtggctgagctcctgcagggctgcctgcgccccgatgccgcagtctgtgcacgggccatcaacgtgttgcactgcctgcatgagctgcagcacaccgagctggcccgcagcgtggaggaggccatggagagcggggccctggccaggctgactggtcccgcgcaccgcgctgccctggcctacctcctgcaggtgtccgacgcctgtgcccaggaggccaacctgtccctgagcctcagccagggcgtccttcagagcctgctgccccagctgctctactgccggaagctcaggctggacaccaaccagttccaggaccccgtgatggagctgctgggcagcgtgctgagtgggaaggactgtcgcattcagaagatcagcttggcggagaaccagatcagtaacaaaggggccaaagctctggccagatccctcttggtcaacagaagtctgacctctctggacctccgcggtaactccattggaccacaaggggccaaggcgctggcagacgctttgaagatcaaccgcaccctgacctccctgagcctccagggcaacaccgttagggatgatggtgccaggtccatggctgaggccttggcctccaaccggaccctctccatgctgcacctgcagaagaacagcatcgggcccatgggagcccagcggatggcagatttgaagcagaacaggagtctgaaagagctcatgttctccagtaatagtattggtgatggaggtgccaaggccctggctgaggccctgaaggtgaaccagggcctggagagcctggacctgcagagcaattccatcagtgacgcaggagtggcagcactgatgggggccctctgcaccaaccagaccctcctcagcctcagccttcgagaaaactccatcagtcccgagggagcccaggccatcgctcatgccctctgcgccaacagcaccctgaagaacctggacctgacagccaacctcctccacgaccagggtgcccgggccatcgcagtggcagtgagagaaaaccgcaccctcacctcccttcacctgcagtggaacttcatccaggccggcgctgcccaggccctgggacaagcactacagctcaacaggagcctcaccagcttagatttacaggagaacgccatcggggatgacggagcgtgtgcggtggcccgtgcactgaaggtcaacacagccctcactgctctctatctccaggtggcctcaattggtgcttcaggcgcccaggtgctaggggaagccttggctgtgaacagaaccttggagattctcgacttaagaggaaatgccattggggtggctggagccaaagccctggcaaatgctctgaaggtaaactcaagtctccggagactcaatcttcaagagaattctctggggatggacggggcgatatgcattgccacagcactgtctggaaaccacaggctccagcatatcaatctccagggaaaccacattggggactccggggccaggatgatctcagaggccatcaagacaaatgctcccacgtgcactgttgaaatgtgatcctggtggacggatcaggagaatgggcagatgctcagctggaagcttttgaacagaaaggccgacttctggggggcctgtctgggagctgggaacgctgcttgctcagcacgagagccgggctctgcagggaggaaggagaggtgctgccggaggaggtcgtgagctcctcttctgctgcaggagtggtccaggcagggggtgacgggtactctgttatggcacagagaagggaggggccacccccaagggactaggggccaaaggcctgaaagctgagcagtacaggaggctggttccagctttacaccctgaggacttcatgtgtccccaacctttaaaaatgtttattactgcccctttccactcacctggttaaaaatcatcccatgctctgagatgagctgccacctcaagcccgtgaggagcatccgtttggtaggggtaacagaggggacccttctttatcttctcaagaagaagatttcagggtatcatccttacagacatgaaaaagctatgggaaaattgtgaagataaatgaaagttttaattctaggattctggaaacagagacagtaagagttctccaaggattttgccttttttgtttgtttttgagatggagtctcgctcttgtcgcccaggctggagtgcagtggcacgatctcagctccctgcaacctccgcctcccgggttcatgtgattctcctgcctcagcctccccagtagctgggaatacaggcacccgccaccatgcccggctaatttttgtagttttagtagagacggggtttcatcatgttggccaggctggtctcgaactcctgacctcaggtgatccatcagcctgggcctcccaaagtactgggattacaggcatgagccaccacacctggccccattttttatttattacaaaatcaaagacatgggtgatgcctggcacatgttgtctggagtctggcacactggttatcaatagcacattcagtgtattcagtgatgtcattctttatttatttttgagacagaatctgtcacccaggctggagtgcagtggcatgatctcagctcactgtaggctctacctcatgggttccagtgattctcctgcctcggcctcccaagtagttgggtctacaggcacgcaccaccacacccagctaatttttgtatttttagtagagatggggtttcaccatgttgatcaggctggtctttaactcctgacctcaagtgatccacccacctcagcctcccaaagtgctgggattacaggtgtgagccactgcacctggcagtgatgtcattccttactaggcttccaaagccactgctgtggccacagcttccatggagacaggcaagctgagcctctatgtggcaccaattcctgcagctgtttgtgttggagggaaaaaaatccaaatggacatcaacagctttcatcaactaaataaccacagaaaatatttatgaagactataaagcaatgattacttttgaattggaaaggaatcactattatttgaaatgtttcttcaaaagtgagcatccggacaggaaccatcatggatgctgaggccatggatgaaggcctactcgggaagatgatatccttgcagtctcaaaacggcaccccacaaaggtgatatcctaatttacaaagggaaaaaggtaccttaatctgaaatctggcaaatgcagcctcaacagaagtgacagaattgaacatcgccaataatgggacacacagacatcacatgcccccagtctgatgcaccacggagtcgtctctgatgtattcttgtcaaaaaatgtttgcctgattctaatcatgaaagaacaattagaaaaaatccaaattgacagatattctgcagaataaatggcctgacctcatcaaaaacatcaatgtcatgaaaaacacaaaacattgcagatagcgtgaaattaaagattacagagatataatttaatgcaagatctctgactggatcctagactgcaggaaaaagtctgctataaagaacatttggatcacttgtagtagctgggaaataaaacaaaacattatttgtaaaaggggggaaatctgaacatgggtcttgcagtatttatgacagtttttgcggggcagagatttctagattgacagctgttttagtactttcaaggtgatgctctgtctgctggtttgcattgtttctgtctgagttaagagactggcagaacacagagttgcagtagccaaacactggagaaagctgggccctacagaaacctaacgctgaagaaacctcaggagccaaactggtggagaaaacaaagagtcctccctctctcccttttcaaataatgatcatacatcttcaagctgtctgaaatggttaaggagttcagtctgtcgtcaggcacacaccagagccagctagcccacacagaccccatcagagcaaaacagacaagagaatttaattcatatccacatagaaaggacttctaggtaggaggtagaccctttagctcccttccaattaaaggagtccccaattctggcacctgagagtcccctgggtctaacagctatgatatttatgtagtgtgttgcttacctaaatgaatacaatttccttccagacacgtgacactgatattaaagtgctaatgagagggatctatttcttcttgtacgctaaaagagaaacagcagttcagatttcccatcagaagtccgaggactttgttcttgataactactaccaataaaaattgagtatttg

SEQ ID NO: 254430 - DNA, 6391 bp, Artificial Sequence
  derived and/or modified sequence
acagccggtgggctcggtggggctgcagaaggtcggggctgcactgctctcggcccccacacggttggttggttggcgtggtaagtgccctgatccctggtcctgagaactcaggctggcacagggattcccagggcatctaccaccacgcagctggagcagggctgagcccaggagcatggagatggacgcccccaggccccccagtcttgctgtccctggagcagcatcgaggcccgggagaactgtggacaacggaaggctgagccccatccattgagttcctggggccccactggaggggctgctgtggccagggtgcacggtgaggaggcgagcagggtgggtgggggcgagttcccggcctgccctctcttcacagctcctggaggtgatccccgactccatgaggaagcaagaggtgcggacgggcagggaggccggccagggccacggtacgggctccccagccgagcaggtgaaagccctcatggatctgctggctgggaagggcagtcaaggctcccaggccccgcaggccctggataggacaccggatgccccgctggggccctgcagcaatgactcaaggatacagaggcaccgcaaggccctgctgagcaaggtgggaggtggcccggagctgggcggaccctggcacaggctggcctccctcctgctggtggagggcctgacggacctgcagctgagggaacacgacttcacacaggtggaggccacccgcgggggcgggcaccccgccaggaccgtcgccctggaccggctcttcctgcctctctcccgggtgtctgtcccaccccgggtctccatcactatcggggtggccggcatgggcaagaccaccctggtgaggcacttcgtccgcctctgggcccatgggcaggtcggcaaggacttctcgctggtgctgcctctgaccttccgggatctcaacacccacgagaagctgtgtgccgaccgactcatctgctcggtcttcccgcacgtcggggagcccagcctggcggtggcagtcccagccagggccctcctgatcctggacggcttggatgagtgcaggacgcctctggacttctccaacaccgtggcctgcacggacccaaagaaggagatcccggtggaccacctgatcaccaacatcatccgtggcaacctctttccggaagtttccatctggatcacctcccgtcccagtgcatctggccagatcccagggggcctggtggaccggatgacggagatccggggctttaacgaggaggagatcaaggtgtgtttggagcagatgttccccgaggaccaggcccttctgggctggatgctgagccaagtgcaggctgacagggccctgtacctgatgtgcaccgtcccagccttctgcaggctcacggggatggcgctaggccacctgtggcgcagcaggacggggccccaggatgcagagctgtggcccccgaggaccctgtgcgagctctactcatggtactttaggatggccctcagcggggaggggcaggagaagggcaaggcaagccctcgcatcgagcaggtggcccatggtggccgcaagatggtggggacattgggccgtctggccttccatgggctgctcaagaagaaatacgtgttttacgagcaagacatgaaggcgtttggtgtagacctcgctctgctgcagggcgccccgtgcagctgcttcctgcagagagaggagacgttggcatcgtcagtggcctactgcttcacccacctgtccctgcaggagtttgtggcagccgcgtattactatggcgcatccaggagggccatcttcgacctcttcactgagagcggcgtatcctggcccaggctgggcttcctcacgcatttcaggagcgcagcccagcgggccatgcaggcagaggacgggaggctggacgtgttcctgcgcttcctctccggcctcttgtctccgagggtcaatgccctcctggccggctccctgctggcccaaggcgagcaccaggcctaccggacccaggtggctgagctcctgcagggctgcctgcgccccgatgccgcagtctgtgcacgggccatcaacgtgttgcactgcctgcatgagctgcagcacaccgagctggcccgcagcgtggaggaggccatggagagcggggccctggccaggctgactggtcccgcgcaccgcgctgccctggcctacctcctgcaggtgtccgacgcctgtgcccaggaggccaacctgtccctgagcctcagccagggcgtccttcagagcctgctgccccagctgctctactgccggaagctcaggctggacaccaaccagttccaggaccccgtgatggagctgctgggcagcgtgctgagtgggaaggactgtcgcattcagaagatcagcttggcggagaaccagatcagtaacaaaggggccaaagctctggccagatccctcttggtcaacagaagtctgacctctctggacctccgcggtaactccattggaccacaaggggccaaggcgctggcagacgctttgaagatcaaccgcaccctgacctccctgagcctccagggcaacaccgttagggatgatggtgccaggtccatggctgaggccttggcctccaaccggaccctctccatgctgcacctgcagaagaacagcatcgggcccatgggagcccagcggatggcagatgccttgaagcagaacaggagtctgaaagagctcatgttctccagtaatagtattggtgatggaggtgccaaggccctggctgaggccctgaaggtgaaccagggcctggagagcctggacctgcagagcaattccatcagtgacgcaggagtggcagcactgatgggggccctctgcaccaaccagaccctcctcagcctcagccttcgagaaaactccatcagtcccgagggagcccaggccatcgctcatgccctctgcgccaacagcaccctgaagaacctggacctgacagccaacctcctccacgaccagggtgcccgggccatcgcagtggcagtgagagaaaaccgcaccctcacctcccttcacctgcagtggaacttcatccaggccggcgctgcccaggccctgggacaagcactacagctcaacaggagcctcaccagcttagatttacaggagaacgccatcggggatgacggagcgtgtgcggtggcccgtgcactgaaggtcaacacagccctcactgctctctatctccaggtggcctcaattggtgcttcaggcgcccaggtgctaggggaagccttggctgtgaacagaaccttggagattctcgacttaagaggaaatgccattggggtggctggagccaaagccctggcaaatgctctgaaggtaaactcaagtctccggagactcaatcttcaagagaattctctggggatggacggggcgatatgcattgccacagcactgtctggaaaccacaggctccagcatatcaatctccagggaaaccacattggggactccggggccaggatgatctcagaggccatcaagacaaatgctcccacgtgcactgttgaaatgtgatcctggtggacggatcaggagaatgggcagatgctcagctggaagcttttgaacagaaaggccgacttctggggggcctgtctgggagctgggaacgctgcttgctcagcacgagagccgggctctgcagggaggaaggagaggtgctgccggaggaggtcgtgagctcctcttctgctgcaggagtggtccaggcagggggtgacgggtactctgttatggcacagagaagggaggggccacccccaagggactaggggccaaaggcctgaaagctgagcagtacaggaggctggttccagctttacaccctgaggacttcatgtgtccccaacctttaaaaatgtttattactgcccctttccactcacctggttaaaaatcatcccatgctctgagatgagctgccacctcaagcccgtgaggagcatccgtttggtaggggtaacagaggggacccttctttatcttctcaagaagaagatttcagggtatcatccttacagacatgaaaaagctatgggaaaattgtgaagataaatgaaagttttaattctaggattctggaaacagagacagtaagagttctccaaggattttgccttttttgtttgtttttgagatggagtctcgctcttgtcgcccaggctggagtgcagtggcacgatctcagctccctgcaacctccgcctcccgggttcatgtgattctcctgcctcagcctccccagtagctgggaatacaggcacccgccaccatgcccggctaatttttgtagttttagtagagacggggtttcatcatgttggccaggctggtctcgaactcctgacctcaggtgatccatcagcctgggcctcccaaagtactgggattacaggcatgagccaccacacctggccccattttttatttattacaaaatcaaagacatgggtgatgcctggcacatgttgtctggagtctggcacactggttatcaatagcacattcagtgtattcagtgatgtcattctttatttatttttgagacagaatctgtcacccaggctggagtgcagtggcatgatctcagctcactgtaggctctacctcatgggttccagtgattctcctgcctcggcctcccaagtagttgggtctacaggcacgcaccaccacacccagctaatttttgtatttttagtagagatggggtttcaccatgttgatcaggctggtctttaactcctgacctcaagtgatccacccacctcagcctcccaaagtgctgggattacaggtgtgagccactgcacctggcagtgatgtcattccttactaggcttccaaagccactgctgtggccacagcttccatggagacaggcaagctgagcctctatgtggcaccaattcctgcagctgtttgtgttggagggaaaaaaatccaaatggacatcaacagctttcatcaactaaataaccacagaaaatatttatgaagactataaagcaatgattacttttgaattggaaaggaatcactattatttgaaatgtttcttcaaaagtgagcatccggacaggaaccatcatggatgctgaggccatggatgaaggcctactcgggaagatgatatccttgcagtctcaaaacggcaccccacaaaggtgatatcctaatttacaaagggaaaaaggtaccttaatctgaaatctggcaaatgcagcctcaacagaagtgacagaattgaacatcgccaataatgggacacacagacatcacatgcccccagtctgatgcaccacggagtcgtctctgatgtattcttgtcaaaaaatgtttgcctgattctaatcatgaaagaacaattagaaaaaatccaaattgacagatattctgcagaataaatggcctgacctcatcaaaaacatcaatgtcatgaaaaacacaaaacattgcagatagcgtgaaattaaagattacagagatataatttaatgcaagatctctgactggatcctagactgcaggaaaaagtctgctataaagaacatttggatcacttgtagtagctgggaaataaaacaaaacattatttgtaaaaggggggaaatctgaacatgggtcttgcagtatttatgacagtttttgcggggcagagatttctagattgacagctgttttagtactttcaaggtgatgctctgtctgctggtttgcattgtttctgtctgagttaagagactggcagaacacagagttgcagtagccaaacactggagaaagctgggccctacagaaacctaacgctgaagaaacctcaggagccaaactggtggagaaaacaaagagtcctccctctctcccttttcaaataatgatcatacatcttcaagctgtctgaaatggttaaggagttcagtctgtcgtcaggcacacaccagagccagctagcccacacagaccccatcagagcaaaacagacaagagaatttaattcatatccacatagaaaggacttctaggtaggaggtagaccctttagctcccttccaattaaaggagtccccaattctggcacctgagagtcccctgggtctaacagctatgatatttatgtagtgtgttgcttacctaaatgaatacaatttccttccagacacgtgacactgatattaaagtgctaatgagagggatctatttcttcttgtacgctaaaagagaaacagcagttcagatttcccatcagaagtccgaggactttgttcttgataactactaccaataaaaattgagtatttg

SEQ ID NO: 254431 - DNA, 2413 bp, Artificial Sequence
  derived and/or modified sequence
gccacagggacagccggtgggctcggtggggctgcagaaggtcggggctgcactgctctcggcccccacacggttggttggttggcgtggtaagtgccctgatccctggtcctgagaactcaggctggcacagggattcccagggcatctaccaccacgcagctggagcagggctgagcccaggagcatggagatggacgcccccaggccccccagtcttgctgtccctggagcagcatcgaggcccgggagggctgccatcagcagcagtgagccatcacctctgctggccacattgtgttttttctcctagaactgtggacaacggaaggctgagccccatccattgagttcctggggccccactggaggggctgctgtggccagggtgcacggtcacaaatgaagacaccaaggcgcagagaggtgactcagcctgccctcagtcacctatctgctcctggaggtgatccccgactccatgaggaagcaagaggtgcggacgggcagggaggccggccagggccacggtacgggctccccagccgagcaggtgaaagccctcatggatctgctggctgggaagggcagtcaaggctcccaggccccgcaggccctggataggacaccggatgccccgctggggccctgcagcaatgactcaaggatacagaggcaccgcaaggccctgctgagcaaggtggaggccacccgcgggggcgggcaccccgccaggaccgtcgccctggaccggctcttcctgcctctctcccgggtgtctgtcccaccccgggtctccatcactatcggggtggccggcatgggcaagaccaccctggtgaggcacttcgtccgcctctgggcccatgggcaggtcggcaaggacttctcgctggtgctgcctctgaccttccgggatctcaacacccacgagaagctgtgtgccgaccgactcatctgctcggtcttcccgcacgtcggggagcccagcctggcggtggcagtcccagccagggccctcctgatcctggacggcttggatgagtgcaggacgcctctggacttctccaacaccgtggcctgcacggacccaaagaaggagatcccggtggaccacctgatcaccaacatcatccgtggcaacctctttccggaagtttccatctggatcacctcccgtcccagtgcatctggccagatcccagggggcctggtggaccggatgacggagatccggggctttaacgaggaggagatcaaggtgtgtttggagcagatgttccccgaggaccaggcccttctgggctggatgctgagccaagtgcaggctgacagggccctgtacctgatgtgcaccgtcccagccttctgcaggctcacggggatggcgctaggccacctgtggcgcagcaggacggggccccaggatgcagagctgtggcccccgaggaccctgtgcgagctctactcatggtactttaggatggccctcagcggggaggggcaggagaagggcaaggcaagccctcgcatcgagcaggtggcccatggtggccgcaagatggtggggacattgggccgtctggccttccatgggctgctcaagaagaaatacgtgttttacgagcaagacatgaaggcgtttggtgtagacctcgctctgctgcagggcgccccgtgcagctgcttcctgcagagagaggagacgttggcatcgtcagtggcctactgcttcacccacctgtccctgcaggagtttgtggcagccgcgtattactatggcgcatccaggagggccatcttcgacctcttcactgagagcggcgtatcctggcccaggctgggcttcctcacgcatttcaggagcgcagcccagcgggccatgcaggcagaggacgggaggctggacgtgttcctgcgcttcctctccggcctcttgtctccgagggtcaatgccctcctggccggctccctgctggcccaaggcgagcaccaggcctaccggacccaggtggctgagctcctgcagggctgcctgcgccccgatgccgcagtctgtgcacgggccatcaacgtgttgcactgcctgcatgagctgcagcacaccgagctggcccgcagcgtggaggaggccatggagagcggggccctggccaggctgactggtcccgcgcaccgcgctgccctggcctacctcctgcaggtgtccgacgcctgtgcccaggaggccaacctgtccctgagcctcagccagggcgtccttcagagcctgctgccccagctgctctactgccggaagctcaggtggataccagggcagggggcaggggctggggaaggggcagaggagagagcagaagccgtcccctccccaccaccaagcttctctgtcagtctcctagggctgccgtaa

SEQ ID NO: 254432 - DNA, 3198 bp, Artificial Sequence
  derived and/or modified sequence
atgagaaagcaggaggtgagaaccggcagagaggccggccagggccacggcaccggcagccccgccgagcaggtgaaggccctgatggacctgctggccggcaagggcagccagggcagccaggccccccaggccctggacagaacccccgacgcccccctgggcccctgcagcaacgacagcagaatccagagacacagaaaggccctgctgagcaaggtgggcggcggccccgagctgggcggcccctggcacagactggccagcctgctgctggtggagggcctgaccgacctgcagctgagagagcacgacttcacccaggtggaggccaccagaggcggcggccaccccgccagaaccgtggccctggacagactgttcctgcccctgagcagagtgagcgtgccccccagagtgagcatcaccatcggcgtggccggcatgggcaagaccaccctggtgagacacttcgtgagactgtgggcccacggccaggtgggcaaggacttcagcctggtgctgcccctgaccttcagagacctgaacacccacgagaagctgtgcgccgacagactgatctgcagcgtgttcccccacgtgggcgagcccagcctggccgtggccgtgcccgccagagccctgctgatcctggacggcctggacgagtgcagaacccccctggacttcagcaacaccgtggcctgcaccgaccccaagaaggagatccccgtggaccacctgatcaccaacatcatcagaggcaacctgttccccgaggtgagcatctggatcaccagcagacccagcgccagcggccagatccccggcggcctggtggacagaatgaccgagatcagaggcttcaacgaggaggagatcaaggtgtgcctggagcagatgttccccgaggaccaggccctgctgggctggatgctgagccaggtgcaggccgacagagccctgtacctgatgtgcaccgtgcccgccttctgcagactgaccggcatggccctgggccacctgtggagaagcagaaccggcccccaggacgccgagctgtggccccccagaaccctgtgcgagctgtacagctggtacttcagaatggccctgagcggcgagggccaggagaagggcaaggccagccccagaatcgagcaggtggcccacggcggcagaaagatggtgggcaccctgggcagactggccttccacggcctgctgaagaagaagtacgtgttctacgagcaggacatgaaggccttcggcgtggacctggccctgctgcagggcgccccctgcagctgcttcctgcagagagaggagaccctggccagcagcgtggcctactgcttcacccacctgagcctgcaggagttcgtggccgccgcctactactacggcgccagcagaagagccatcttcgacctgttcaccgagagcggcgtgagctggcccagactgggcttcctgacccacttcagaagcgccgcccagagagccatgcaggccgaggacggcagactggacgtgttcctgagattcctgagcggcctgctgagccccagagtgaacgccctgctggccggcagcctgctggcccagggcgagcaccaggcctacagaacccaggtggccgagctgctgcagggctgcctgagacccgacgccgccgtgtgcgccagagccatcaacgtgctgcactgcctgcacgagctgcagcacaccgagctggccagaagcgtggaggaggccatggagagcggcgccctggccagactgaccggccccgcccacagagccgccctggcctacctgctgcaggtgagcgacgcctgcgcccaggaggccaacctgagcctgagcctgagccagggcgtgctgcagagcctgctgccccagctgctgtactgcagaaagctgagactggacaccaaccagttccaggaccccgtgatggagctgctgggcagcgtgctgagcggcaaggactgcagaatccagaagatcagcctggccgagaaccagatcagcaacaagggcgccaaggccctggccagaagcctgctggtgaacagaagcctgaccagcctggacctgagaggcaacagcatcggcccccagggcgccaaggccctggccgacgccctgaagatcaacagaaccctgaccagcctgagcctgcagggcaacaccgtgagagacgacggcgccagaagcatggccgaggccctggccagcaacagaaccctgagcatgctgcacctgcagaagaacagcatcggccccatgggcgcccagagaatggccgacgccctgaagcagaacagaagcctgaaggagctgatgttcagcagcaacagcatcggcgacggcggcgccaaggccctggccgaggccctgaaggtgaaccagggcctggagagcctggacctgcagagcaacagcatcagcgacgccggcgtggccgccctgatgggcgccctgtgcaccaaccagaccctgctgagcctgagcctgagagagaacagcatcagccccgagggcgcccaggccatcgcccacgccctgtgcgccaacagcaccctgaagaacctggacctgaccgccaacctgctgcacgaccagggcgccagagccatcgccgtggccgtgagagagaacagaaccctgaccagcctgcacctgcagtggaacttcatccaggccggcgccgcccaggccctgggccaggccctgcagctgaacagaagcctgaccagcctggacctgcaggagaacgccatcggcgacgacggcgcctgcgccgtggccagagccctgaaggtgaacaccgccctgaccgccctgtacctgcaggtggccagcatcggcgccagcggcgcccaggtgctgggcgaggccctggccgtgaacagaaccctggagatcctggacctgagaggcaacgccatcggcgtggccggcgccaaggccctggccaacgccctgaaggtgaacagcagcctgagaagactgaacctgcaggagaacagcctgggcatggacggcgccatctgcatcgccaccgccctgagcggcaaccacagactgcagcacatcaacctgcagggcaaccacatcggcgacagcggcgccagaatgatcagcgaggccatcaagaccaacgcccccacctgcaccgtggagatgtag

SEQ ID NO: 254433 - DNA, 1983 bp, Artificial Sequence
  derived and/or modified sequence
ctgagcctgcccagcgtgacctacctgctgctggaggtgatccccgacagcatgagaaagcaggaggtgagaaccggcagagaggccggccagggccacggcaccggcagccccgccgagcaggtgaaggccctgatggacctgctggccggcaagggcagccagggcagccaggccccccaggccctggacagaacccccgacgcccccctgggcccctgcagcaacgacagcagaatccagagacacagaaaggccctgctgagcaaggtggaggccaccagaggcggcggccaccccgccagaaccgtggccctggacagactgttcctgcccctgagcagagtgagcgtgccccccagagtgagcatcaccatcggcgtggccggcatgggcaagaccaccctggtgagacacttcgtgagactgtgggcccacggccaggtgggcaaggacttcagcctggtgctgcccctgaccttcagagacctgaacacccacgagaagctgtgcgccgacagactgatctgcagcgtgttcccccacgtgggcgagcccagcctggccgtggccgtgcccgccagagccctgctgatcctggacggcctggacgagtgcagaacccccctggacttcagcaacaccgtggcctgcaccgaccccaagaaggagatccccgtggaccacctgatcaccaacatcatcagaggcaacctgttccccgaggtgagcatctggatcaccagcagacccagcgccagcggccagatccccggcggcctggtggacagaatgaccgagatcagaggcttcaacgaggaggagatcaaggtgtgcctggagcagatgttccccgaggaccaggccctgctgggctggatgctgagccaggtgcaggccgacagagccctgtacctgatgtgcaccgtgcccgccttctgcagactgaccggcatggccctgggccacctgtggagaagcagaaccggcccccaggacgccgagctgtggccccccagaaccctgtgcgagctgtacagctggtacttcagaatggccctgagcggcgagggccaggagaagggcaaggccagccccagaatcgagcaggtggcccacggcggcagaaagatggtgggcaccctgggcagactggccttccacggcctgctgaagaagaagtacgtgttctacgagcaggacatgaaggccttcggcgtggacctggccctgctgcagggcgccccctgcagctgcttcctgcagagagaggagaccctggccagcagcgtggcctactgcttcacccacctgagcctgcaggagttcgtggccgccgcctactactacggcgccagcagaagagccatcttcgacctgttcaccgagagcggcgtgagctggcccagactgggcttcctgacccacttcagaagcgccgcccagagagccatgcaggccgaggacggcagactggacgtgttcctgagattcctgagcggcctgctgagccccagagtgaacgccctgctggccggcagcctgctggcccagggcgagcaccaggcctacagaacccaggtggccgagctgctgcagggctgcctgagacccgacgccgccgtgtgcgccagagccatcaacgtgctgcactgcctgcacgagctgcagcacaccgagctggccagaagcgtggaggaggccatggagagcggcgccctggccagactgaccggccccgcccacagagccgccctggcctacctgctgcaggtgagcgacgcctgcgcccaggaggccaacctgagcctgagcctgagccagggcgtgctgcagagcctgctgccccagctgctgtactgcagaaagctgagatggatccccggccagggcgccggcgccggcgagggcgccgaggagagagccgaggccgtgcccagccccccccccagcttcagcgtgagcctgctgggcctgccctag

SEQ ID NO: 254434 - protein, 107 aa, Artificial Sequence
  derived and/or modified sequence
MRLSKTLVDMDMADYSAALDPAYTTLEFENVQVLTMGNDFVAAASRQIEASPPTSLEHIWRGGQFSTGRHVPIRRHQPQRAQQPGCQRPVCHLRGPGHGQTLRCLEL

SEQ ID NO: 254435 - protein, 464 aa, Artificial Sequence
  derived and/or modified sequence
MRLSKTLVDMDMADYSAALDPAYTTLEFENVQVLTMGNDTSPSEGTNLNAPNSLGVSALCAICGDRATGKHYGASSCDGCKGFFRRSVRKNHMYSCRFSRQCVVDKDKRNQCRYCRLKKCFRAGMKKEAVQNERDRISTRRSSYEDSSLPSINALLQAEVLSRQITSPVSGINGDIRAKKIASIADVCESMKEQLLVLVEWAKYIPAFCELPLDDQVALLRAHAGEHLLLGATKRSMVFKDVLLLGNDYIVPRHCPELAEMSRVSIRILDELVLPFQELQIDDNEYAYLKAIIFFDPDAKGLSDPGKIKRLRSQVQVSLEDYINDRQYDSRGRFGELLLLLPTLQSITWQMIEQIQFIKLFGMAKIDNLLQEMLLGGSPSDAPHAHHPLHPHLMQEHMGTNVIVANTMPTHLSNGQMSTPETPQPSPPGGSGSEPYKLLPGAVATIVKPLSAIPQPTITKQEVI

SEQ ID NO: 254436 - DNA, 1395 bp, Artificial Sequence
  derived and/or modified sequence
atgcgactatctaagacactggtcgacatggatatggcggactactccgccgcccttgacccagcctacactactctcgagtttgagaatgtgcaggtcctgacgatgggtaatgatacatcaccttcagagggcaccaatctaaacgcaccaaactctctgggcgtctccgccttgtgcgctatatgcggagaccgagccacaggaaaacattatggtgcaagcagttgcgatggatgtaaagggttttttaggcgctctgtcagaaagaatcatatgtattcctgtcggttctcccgccagtgcgtcgtagataaggataaaagaaaccagtgtcgctattgcagactgaagaaatgctttcgcgcgggtatgaagaaggaggccgttcaaaacgaacgagacaggatctccacaagacgcagttcgtatgaagactcaagccttccgtcgataaacgcactgcttcaagctgaggtcctgtccaggcagatcacctctcctgtgagcggcataaacggcgatatccgagctaagaaaatcgcatccatcgccgatgtgtgcgagtctatgaaggagcagctcctcgtgctggtggagtgggcaaaatacattcccgctttttgcgaactgcctctcgacgatcaggtcgccctactgcgggcccacgcaggagagcacctgctgttaggcgccaccaagagatctatggtctttaaggacgtactgctgctcggaaatgattatatcgtgcccaggcactgtcctgagctggctgagatgtctagagtctctattcgaattctggatgaactcgttctgcctttccaggagctgcagatcgatgacaatgaatacgcatacctgaaagccattatcttctttgaccctgacgcaaaaggactgtccgatcccggtaagatcaaaaggctgcgaagccaggtgcaggtctcattggaggactatatcaatgacaggcaatatgacagccgcggcaggttcggcgaattactcctgctgctgccaactctccagagcattacctggcagatgattgaacagatccagttcattaaactctttgggatggcaaaaattgacaatctgctgcaagaaatgctgttgggggggagcccatctgatgcaccgcatgctcatcatcctctgcacccacacctgatgcaagagcatatggggacaaatgtgattgtcgccaatacgatgcccacgcatctcagcaacggccagatgagtactcccgagacccctcaacctagcccacccgggggatctggttcagagccatataaactcctgccgggagccgtggccacgattgtcaagcccttatcagcgatcccccagcctactatcaccaagcaagaggttatttag

SEQ ID NO: 254437 - DNA, 3209 bp, Artificial Sequence
  derived and/or modified sequence
gggaggaggcagtgggagggcggagggcgggggccttcggggtgggcgcccagggtagggcaggtggccgcggcgtggaggcagggagaatgcgactctccaaaaccctcgtcgacatggacatggccgactacagtgctgcactggacccagcctacaccaccctggaatttgagaatgtgcaggtgttgacgatgggcaatgacacgtccccatcagaaggcaccaacctcaacgcgcccaacagcctgggtgtcagcgccctgtgtgccatctgcggggaccgggccacgggcaaacactacggtgcctcgagctgtgacggctgcaagggcttcttccggaggagcgtgcggaagaaccacatgtactcctgcagatttagccggcagtgcgtggtggacaaagacaagaggaaccagtgccgctactgcaggctcaagaaatgcttccgggctggcatgaagaaggaagccgtccagaatgagcgggaccggatcagcactcgaaggtcaagctatgaggacagcagcctgccctccatcaatgcgctcctgcaggcggaggtcctgtcccgacagatcacctcccccgtctccgggatcaacggcgacattcgggcgaagaagattgccagcatcgcagatgtgtgtgagtccatgaaggagcagctgctggttctcgttgagtgggccaagtacatcccagctttctgcgagctccccctggacgaccaggtggccctgctcagagcccatgctggcgagcacctgctgctcggagccaccaagagatccatggtgttcaaggacgtgctgctcctaggcaatgactacattgtccctcggcactgcccggagctggcggagatgagccgggtgtccatacgcatccttgacgagctggtgctgcccttccaggagctgcagatcgatgacaatgagtatgcctacctcaaagccatcatcttctttgacccagatgccaaggggctgagcgatccagggaagatcaagcggctgcgttcccaggtgcaggtgagcttggaggactacatcaacgaccgccagtatgactcgcgtggccgctttggagagctgctgctgctgctgcccaccttgcagagcatcacctggcagatgatcgagcagatccagttcatcaagctcttcggcatggccaagattgacaacctgttgcaggagatgctgctgggagggtcccccagcgatgcaccccatgcccaccaccccctgcaccctcacctgatgcaggaacatatgggaaccaacgtcatcgttgccaacacaatgcccactcacctcagcaacggacagatgtccacccctgagaccccacagccctcaccgccaggtggctcagggtctgagccctataagctcctgccgggagccgtcgccacaatcgtcaagcccctctctgccatcccccagccgaccatcaccaagcaggaagttatctagcaagccgctggggcttgggggctccactggctccccccagccccctaagagagcacctggtgatcacgtggtcacggcaaaggaagacgtgatgccaggaccagtcccagagcaggaatgggaaggatgaagggcccgagaacatggcctaagggccacatcccactgccacccttgacgccctgctctggataacaagactttgacttggggagacctctactgccttggacaacttttctcatgttgaagccactgccttcaccttcaccttcatccatgtccaacccccgacttcatcccaaaggacagccgcctggagatgacttgaggccttacttaaacccagctcccttcttccctagcctggtgcttctcctctcctagcccctgtcatggtgtccagacagagccctgtgaggctgggtccaattgtggcacttggggcaccttgctcctccttctgctgctgcccccacctctgctgcctccctctgctgtcaccttgctcagccatcccgtcttctccaacaccacctctccagaggccaaggaggccttggaaacgattcccccagtcattctgggaacatgttgtaagcactgactgggaccaggcaccaggcagggtctagaaggctgtggtgagggaagacgcctttctcctccaacccaacctcatcctccttcttcagggacttgggtgggtacttgggtgaggatccctgaaggccttcaacccgagaaaacaaacccaggttggcgactgcaacaggaacttggagtggagaggaaaagcatcagaaagaggcagaccatccaccaggcctttgagaaagggtagaattctggctggtagagcaggtgagatgggacattccaaagaacagcctgagccaaggcctagtggtagtaagaatctagcaagaattgaggaagaatggtgtgggagagggatgatgaagagagagagggcctgctggagagcatagggtctggaacaccaggctgaggtcctgatcagcttcaaggagtatgcagggagctgggcttccagaaaatgaacacagcagttctgcagaggacgggaggctggaagctgggaggtcaggtggggtggatgatataatgcgggtgagagtaatgaggcttggggctggagaggacaagatgggtaaaccctcacatcagagtgacatccaggaggaataagctcccagggcctgtctcaagctcttccttactcccaggcactgtcttaaggcatctgacatgcatcatctcatttaatcctcccttcctccctattaacctagagattgtttttgttttttattctcctcctccctccccgccctcacccgccccactccctcctaacctagagattgttacagaagctgaaattgcgttctaagaggtgaagtgattttttttctgaaactcacacaactaggaagtggctgagtcaggacttgaacccaggtctccctggatcagaacaggagctcttaactacagtggctgaatagcttctccaaaggctccctgtgttctcaccgtgatcaagttgaggggcttccggctcccttctacagcctcagaaaccagactcgttcttctgggaaccctgcccactcccaggaccaagattggcctgaggctgcactaaaattcacttagggtcgagcatcctgtttgctgataaatattaaggagaattca

SEQ ID NO: 254438 - DNA, 1395 bp, Artificial Sequence
  derived and/or modified sequence
atgaggctgagcaagaccctggtggacatggacatggctgactacagcgctgccctggaccctgcctacaccaccctggagtttgaaaatgtgcaggtgctgaccatgggaaatgacaccagccccagcgagggcaccaacctgaatgcccccaacagcctgggcgtgtctgccctgtgtgccatctgtggggaccgggccaccgggaagcactacggggccagcagctgtgatggctgcaagggcttcttcagaagatctgtgaggaagaaccacatgtacagctgccgcttcagccggcagtgtgtggtggacaaggacaagaggaaccagtgccgctactgccgcctgaagaagtgcttccgggccggcatgaagaaggaggccgtgcagaatgaaagagaccgcatcagcacccggcgcagcagctatgaggacagcagcctgcccagcatcaatgccctgctgcaggccgaggtgctgagccggcagatcaccagccctgtgtctggcatcaatggagacatccgggccaagaagatcgccagcattgctgatgtgtgtgagagcatgaaggagcagctgctggtgctggtggagtgggccaagtacatcccagccttctgtgagctgcccctggatgaccaggtggccctgctgcgggcccacgccggggagcacctgctgctgggcgccaccaagaggtccatggtgttcaaggatgtgctgctgctgggcaatgactacatcgtgcccaggcactgcccagagctggccgagatgagccgggtgtccatccgcatcctggatgagctggtgctgcccttccaggagctgcagattgatgacaatgaatatgcctacctgaaggccatcatcttctttgatcctgatgccaagggcctgagtgaccccgggaagatcaagaggctgcggagccaggtgcaggtgtccctggaggactacatcaatgaccggcagtatgacagccggggccgctttggagagctgctgctgctgctgcccaccctgcagagcatcacctggcagatgattgagcagatccagttcatcaagctgtttggcatggccaagattgacaacctgctgcaggagatgctgctgggcggcagccccagtgatgccccccacgcccaccaccccctgcacccccacctgatgcaggagcacatgggcaccaacgtgattgtggccaacaccatgcccacccacctgagcaatggccagatgagcaccccagagaccccccagcccagccccccaggcggcagcggcagcgagccctacaagctgctgcccggggctgtggccaccatcgtgaagcccctgagcgccatcccccagcccaccatcaccaagcaggaggtgatctag

SEQ ID NO: 254439 - DNA, 1395 bp, Artificial Sequence
  derived and/or modified sequence
atgcggctgagcaagaccctggtggacatggacatggccgactactcggcagcactggatccagcgtataccacactcgagttcgaaaacgtgcaggtgctcactatgggaaacgatacgtcaccatctgaaggcaccaatttgaacgcccctaactccctgggagtttcagctctttgtgcaatatgtggcgacagagctacagggaagcactacggggccagctcgtgcgacggatgtaagggtttctttcggcggagcgtccgtaagaatcatatgtatagctgcagattctctagacagtgcgttgtagataaagataagcgcaaccagtgtcgctattgccggctgaaaaagtgtttccgcgccggaatgaaaaaagaagccgtgcagaacgaacgagatcggataagtaccaggcggtcaagttacgaagactcctctctgccatcaataaatgctctgctgcaggcagaagttttgtctcgtcagatcacttcccctgtgtcaggtatcaatggagacattagagccaagaagatagcatccatcgcagatgtgtgtgaaagcatgaaggagcagctcctagttctcgtggagtgggctaaatatatccccgctttttgtgaactgccacttgacgaccaggtggcacttctccgcgcacacgccggtgagcatcttctgctcggagccacaaaaagaagtatggtgtttaaagacgtccttttgttaggaaatgattatatagtcccgcggcattgccccgagctggctgaaatgtctcgcgtcagcatccgcattctggatgagcttgtgctgccatttcaggaattacagatcgacgataatgagtacgcctacctcaaggctatcatttttttcgaccccgacgcaaaggggttgtccgatcccggaaaaatcaaacgtctccgctcccaggtccaggtgagccttgaggattacattaatgataggcagtacgactcgagaggccgctttggcgaattactgctccttttgccaacactccagtccattacctggcagatgatcgagcaaattcaattcattaaactctttggcatggctaaaatcgataatctgctccaggaaatgctgctgggggggtctccatccgacgccccacacgcccaccatcctctacacccacacctgatgcaggaacatatggggacaaatgtgatagtagctaatactatgccaacccacttgtccaatgggcagatgtccacaccggagaccccacagccctcacccccaggcggctcagggtcagaaccatacaaactcctgcctggagctgtcgcaacaatagtgaagcctctgtccgctattccacagcccaccataaccaagcaggaagttatttag

SEQ ID NO: 254440 - DNA, 1395 bp, Artificial Sequence
  derived and/or modified sequence
atgagactctccaaaaccctcgtggatatggacatggctgactactccgccgctctggatcctgcttacactaccttggaattcgagaatgtgcaggtgctaactatggggaatgacactagtccctcagagggtacaaacctgaatgcaccgaatagcctcggtgtctccgcgctgtgcgcgatttgcggcgatagggctaccggcaagcactacggcgcatccagctgcgatggttgcaaaggatttttccggaggagcgtgcggaaaaatcatatgtacagttgcaggttttctcgacagtgtgtggttgataaagataagagaaatcagtgccgctactgccgtctaaaaaagtgctttcgggctggaatgaaaaaggaggcagtgcagaatgagcgtgacaggatttcgacaaggagaagctcctacgaggactcctctttaccatcaatcaatgccctgcttcaagctgaagtactcagtagacagattaccagccccgtttcaggtattaacggtgatataagggccaagaaaatagcaagcattgccgacgtctgcgaatctatgaaggagcagttgcttgtgttggtggaatgggctaagtatataccagccttctgcgaactgcccctggatgaccaggtggccctgctgagagcccacgcaggagagcacttgctcttgggagctactaagaggtctatggttttcaaagacgtcctgctgctgggaaatgactatatagtcccacgccactgccccgaactggctgagatgagtcgggtctcaatccgcatccttgacgaactcgtactgcccttccaggaattacagatcgacgacaacgagtatgcgtaccttaaggccatcattttcttcgacccagacgccaagggcctgtcagatccagggaaaattaagcgcctcaggtcacaggtgcaagtgtccctcgaggactacatcaatgaccgccaatatgactctcgcggtagattcggagaactgttgctactccttccaaccttacagtctataacctggcagatgattgagcagattcaattcatcaaactgttcggaatggccaaaatagataacctcctgcaagagatgctcctggggggaagtccttcggacgccccacatgcccaccaccccctgcaccctcacctgatgcaggagcatatgggcactaacgtgatcgtggcgaacactatgcccacacatctttcaaatggccagatgagtacgccagaaacaccccagccgtcccctcctgggggatcaggctctgaaccatacaagcttctccctggcgctgtggccaccatagtcaaacctctgagcgctataccacagcctaccatcaccaagcaggaagtaatatag

SEQ ID NO: 254441 - DNA, 1395 bp, Artificial Sequence
  derived and/or modified sequence
atgagactgagcaagaccctggtggacatggacatggccgactacagcgccgccctggaccccgcctacaccaccctggagttcgagaacgtgcaggtgctgaccatgggcaacgacaccagccccagcgagggcaccaacctgaacgcccccaacagcctgggcgtgagcgccctgtgcgccatctgcggcgacagagccaccggcaagcactacggcgccagcagctgcgacggctgcaagggcttcttcagaagaagcgtgagaaagaaccacatgtacagctgcagattcagcagacagtgcgtggtggacaaggacaagagaaaccagtgcagatactgcagactgaagaagtgcttcagagccggcatgaagaaggaggccgtgcagaacgagagagacagaatcagcaccagaagaagcagctacgaggacagcagcctgcccagcatcaacgccctgctgcaggccgaggtgctgagcagacagatcaccagccccgtgagcggcatcaacggcgacatcagagccaagaagatcgccagcatcgccgacgtgtgcgagagcatgaaggagcagctgctggtgctggtggagtgggccaagtacatccccgccttctgcgagctgcccctggacgaccaggtggccctgctgagagcccacgccggcgagcacctgctgctgggcgccaccaagagaagcatggtgttcaaggacgtgctgctgctgggcaacgactacatcgtgcccagacactgccccgagctggccgagatgagcagagtgagcatcagaatcctggacgagctggtgctgcccttccaggagctgcagatcgacgacaacgagtacgcctacctgaaggccatcatcttcttcgaccccgacgccaagggcctgagcgaccccggcaagatcaagagactgagaagccaggtgcaggtgagcctggaggactacatcaacgacagacagtacgacagcagaggcagattcggcgagctgctgctgctgctgcccaccctgcagagcatcacctggcagatgatcgagcagatccagttcatcaagctgttcggcatggccaagatcgacaacctgctgcaggagatgctgctgggcggcagccccagcgacgccccccacgcccaccaccccctgcacccccacctgatgcaggagcacatgggcaccaacgtgatcgtggccaacaccatgcccacccacctgagcaacggccagatgagcacccccgagaccccccagcccagcccccccggcggcagcggcagcgagccctacaagctgctgcccggcgccgtggccaccatcgtgaagcccctgagcgccatcccccagcccaccatcaccaagcaggaggtgatctag

SEQ ID NO: 254442 - protein, 417 aa, Artificial Sequence
  derived and/or modified sequence
MRLSKTLVDMDMADYSAALDPAYTTLEFENVQVLTMGNDTSPSEGTNLNAPNSLGVSALCAICGDRATGKHYGASSCDGCKGFFRRSVRKNHMYSCRFSRQCVVDKDKRNQCRYCRLKKCFRAGMKKEAVQNERDRISTRRSSYEDSSLPSINALLQAEVLSRQITSPVSGINGDIRAKKIASIADVCESMKEQLLVLVEWAKYIPAFCELPLDDQVALLRAHAGEHLLLGATKRSMVFKDVLLLGNDYIVPRHCPELAEMSRVSIRILDELVLPFQELQIDDNEYAYLKAIIFFDPDAKGLSDPGKIKRLRSQVQVSLEDYINDRQYDSRGRFGELLLLLPTLQSITWQMIEQIQFIKLFGMAKIDNLLQEMLLGGPCQAQEGRGWSGDSPGDRPHTVSSPLSSLASPLCRFGQVA

SEQ ID NO: 254443 - DNA, 324 bp, Artificial Sequence
  derived and/or modified sequence
atgagattgagcaagacacttgtcgatatggacatggctgactactctgctgccctggatccagcctacacaactctggagttcgagaacgtgcaagtactgaccatggggaacgacttcgtggccgccgccagtagacagatcgaagcctcacctcccactagtctcgaacacatctggaggggggggcagtttagcactggaagacatgtgcctatcaggcggcaccagcctcagcgagcacagcagcccgggtgccagagacctgtgtgccatctacgcggaccgggacacggacagacacttagatgtctggaactttag

SEQ ID NO: 254444 - DNA, 1254 bp, Artificial Sequence
  derived and/or modified sequence
atgcggttgagtaagacccttgtcgatatggatatggctgactattctgcagcattagatcccgcttatacaacattggagttcgaaaacgtgcaggtacttactatgggcaacgatacttcaccatccgaagggaccaatttgaacgcaccgaactctctgggcgtgagtgccctttgtgctatatgcggggaccgggccaccgggaagcattacggcgccagctcttgcgacggttgcaaggggttttttcggcggtcagtccgtaaaaatcacatgtatagctgtcggtttagccgacagtgcgtcgtcgacaaggataaacgcaaccagtgcaggtactgcaggcttaaaaaatgttttcgggccgggatgaagaaagaggccgtccagaacgaaagggacagaatcagtactcgaaggagcagctacgaagatagtagtctcccttcaatcaatgccttacttcaggctgaagtgctctcccgccaaattacgtcaccagtatcggggataaatggagacatcagggctaaaaaaatagcaagcatagcggatgtttgcgaatcaatgaaagagcaactgctcgtcctggttgaatgggctaagtatatccctgccttctgcgagttacctctggatgaccaggttgccttgcttagggcacacgccggagagcatctgttgctgggagctacgaaacgaagtatggtgttcaaagacgttctgctcctgggtaacgattatatagttccccggcactgtcccgagctggcagaaatgtcacgtgtgtctatccgaattctcgatgaattggtcctccccttccaggagctccagatagatgacaatgagtacgcttacttgaaggccattattttcttcgatcctgatgcaaagggattgagtgaccctgggaaaattaaaagactccgttcacaggtgcaggtgtcactggaggactacatcaatgaccgccagtacgatagccgggggaggttcggcgagctcctgctactcctgcctacactacaatccattacctggcaaatgatcgagcaaatacagtttattaaactcttcggaatggccaaaatcgacaacttgctccaggagatgttgcttggcggaccgtgccaggcacaggaaggacgtggatggtcaggcgattcacctggcgacaggccccacactgtgtcttccccactgtcatcactggccagtcctctttgccgctttggtcaggtggcatag

SEQ ID NO: 254445 - DNA, 1603 bp, Artificial Sequence
  derived and/or modified sequence
gggaggaggcagtgggagggcggagggcgggggccttcggggtgggcgcccagggtagggcaggtggccgcggcgtggaggcagggagaatgcgactctccaaaaccctcgtcgacatggacatggccgactacagtgctgcactggacccagcctacaccaccctggaatttgagaatgtgcaggtgttgacgatgggcaatgacacgtccccatcagaaggcaccaacctcaacgcgcccaacagcctgggtgtcagcgccctgtgtgccatctgcggggaccgggccacgggcaaacactacggtgcctcgagctgtgacggctgcaagggcttcttccggaggagcgtgcggaagaaccacatgtactcctgcagatttagccggcagtgcgtggtggacaaagacaagaggaaccagtgccgctactgcaggctcaagaaatgcttccgggctggcatgaagaaggaagccgtccagaatgagcgggaccggatcagcactcgaaggtcaagctatgaggacagcagcctgccctccatcaatgcgctcctgcaggcggaggtcctgtcccgacagatcacctcccccgtctccgggatcaacggcgacattcgggcgaagaagattgccagcatcgcagatgtgtgtgagtccatgaaggagcagctgctggttctcgttgagtgggccaagtacatcccagctttctgcgagctccccctggacgaccaggtggccctgctcagagcccatgctggcgagcacctgctgctcggagccaccaagagatccatggtgttcaaggacgtgctgctcctaggcaatgactacattgtccctcggcactgcccggagctggcggagatgagccgggtgtccatacgcatccttgacgagctggtgctgcccttccaggagctgcagatcgatgacaatgagtatgcctacctcaaagccatcatcttctttgacccagatgccaaggggctgagcgatccagggaagatcaagcggctgcgttcccaggtgcaggtgagcttggaggactacatcaacgaccgccagtatgactcgcgtggccgctttggagagctgctgctgctgctgcccaccttgcagagcatcacctggcagatgatcgagcagatccagttcatcaagctcttcggcatggccaagattgacaacctgttgcaggagatgctgctgggaggtccgtgccaagcccaggaggggcggggttggagtggggactccccaggagacaggcctcacacagtgagctcacccctcagctccttggcttccccactgtgccgctttgggcaagttgcttaacctgtctgtgcctcagtttcctcaccagaaaaatgggaacaaggcaatggtctatttgttcaggcaccgagaacctagcacgtgccagtcactgttctaagtgctggcaattcagcaaagaacaagatctttgccctcggggaggctgtgtgtgtgtgagtatgtatggatgcgtggatatctgtgtatatgcccgtatgtgcgtgcatgtgtatataaagcctcacattttatgattttgaaataaacaggtaatatga

SEQ ID NO: 254446 - DNA, 324 bp, Artificial Sequence
  derived and/or modified sequence
atgaggctgagcaagaccctggtggacatggacatggctgactacagcgctgccctggaccctgcctacaccaccctggagtttgaaaatgtgcaggtgctgaccatgggaaatgactttgtggccgccgccagccggcagatcgaggccagcccccccaccagcctggagcacatctggaggggcggccagttcagcacaggccgccacgtgcccatccgccgccaccagccccagagggcccagcagcccggctgccagaggcctgtgtgccacctgcggggccctggccacggccagaccctgcgctgcctggagctgtag

SEQ ID NO: 254447 - DNA, 1254 bp, Artificial Sequence
  derived and/or modified sequence
atgaggctgagcaagaccctggtggacatggacatggctgactacagcgctgccctggaccctgcctacaccaccctggagtttgaaaatgtgcaggtgctgaccatgggaaatgacaccagccccagcgagggcaccaacctgaatgcccccaacagcctgggcgtgtctgccctgtgtgccatctgtggggaccgggccaccgggaagcactacggggccagcagctgtgatggctgcaagggcttcttcagaagatctgtgaggaagaaccacatgtacagctgccgcttcagccggcagtgtgtggtggacaaggacaagaggaaccagtgccgctactgccgcctgaagaagtgcttccgggccggcatgaagaaggaggccgtgcagaatgaaagagaccgcatcagcacccggcgcagcagctatgaggacagcagcctgcccagcatcaatgccctgctgcaggccgaggtgctgagccggcagatcaccagccctgtgtctggcatcaatggagacatccgggccaagaagatcgccagcattgctgatgtgtgtgagagcatgaaggagcagctgctggtgctggtggagtgggccaagtacatcccagccttctgtgagctgcccctggatgaccaggtggccctgctgcgggcccacgccggggagcacctgctgctgggcgccaccaagaggtccatggtgttcaaggatgtgctgctgctgggcaatgactacatcgtgcccaggcactgcccagagctggccgagatgagccgggtgtccatccgcatcctggatgagctggtgctgcccttccaggagctgcagattgatgacaatgaatatgcctacctgaaggccatcatcttctttgatcctgatgccaagggcctgagtgaccccgggaagatcaagaggctgcggagccaggtgcaggtgtccctggaggactacatcaatgaccggcagtatgacagccggggccgctttggagagctgctgctgctgctgcccaccctgcagagcatcacctggcagatgattgagcagatccagttcatcaagctgtttggcatggccaagattgacaacctgctgcaggagatgctgctgggcggcccctgccaggcccaggagggccggggctggagcggggacagccctggggaccggccccacacagtgagcagccccctgagcagcctggccagccccctgtgccgcttcggccaggtggcctag

SEQ ID NO: 254448 - DNA, 324 bp, Artificial Sequence
  derived and/or modified sequence
atgcggctgagcaagaccctggtggacatggacatggccgactactctgctgcacttgacccagcctacacaacactggaattcgaaaatgtgcaggtgctgacaatgggtaacgacttcgtggccgcggcttcccggcaaatagaggccagtccccctacttctctggagcacatttggagagggggccaatttagcaccggacgccacgtccccattcgcaggcatcagccgcagcgagcacagcagcccgggtgtcagcggccagtgtgccatcttcgaggacccgggcacggccagactttgcgctgtctagagctctag

SEQ ID NO: 254449 - DNA, 1254 bp, Artificial Sequence
  derived and/or modified sequence
atgcggctgagcaagaccctggtggacatggacatggccgactacagcgccgccctcgatcccgcttacactaccctcgaattcgaaaacgtacaagtgttgacaatggggaacgatacctcccctagcgagggaactaaccttaacgctcccaattccctgggggtctccgcattatgtgcgatatgcggggaccgcgccacgggtaagcactatggcgccagttcttgtgatggatgtaagggattctttaggcgtagcgtacgaaagaatcatatgtatagctgcagattctcgcgacagtgtgtcgtcgacaaagacaaaagaaaccagtgccggtactgtcgccttaagaaatgctttagagccggcatgaagaaggaagcagtacagaacgagagggacaggatcagcaccaggaggtcttcatatgaggacagctccctgccatccataaacgcgctactgcaggcagaggttctgtcgagacagatcacatccccagtatctggcatcaatggcgatattcgtgctaaaaaaatcgcttcaatcgcagatgtgtgtgagtctatgaaggagcagctcctggtgctggttgaatgggccaaatatataccagctttttgtgaacttcccttggacgatcaggtggcactgctccgtgctcatgcaggggaacatctgctcctgggggcgactaaacggtccatggtattcaaggacgtcctgcttctcggaaacgactatatcgtaccacgacactgccctgagctggctgagatgagcagggtgtccatccgcatcctggatgagctggtactgccgttccaagaactccagatagacgacaatgaatacgcctatctaaaggcaataatcttctttgaccccgatgccaaggggttgagtgaccctggaaaaatcaaacggcttagatcacaggtccaggtctctcttgaggactatatcaacgacagacaatacgatagtcggggaagatttggggaactactgctgctgctcccaacactgcaatctattacctggcagatgatagaacagatccagttcattaagctgttcggaatggcaaagattgataacctgcttcaggagatgctgctcggcggtccctgtcaggctcaagagggccggggctggtccggtgactcacctggggataggccccacacagttagctcacccctgtcctctctggcttcccctttgtgtcgctttggacaggttgcctag

SEQ ID NO: 254450 - DNA, 1254 bp, Artificial Sequence
  derived and/or modified sequence
atgcgcctgagtaaaacccttgttgatatggacatggccgactattcagctgctttagatcccgcatatacaacactcgagtttgagaacgtgcaggttctcacaatgggtaatgacacatcacccagcgagggaactaacttaaacgcgcctaacagcctgggagtgtctgccctctgcgccatatgcggggatcgggctactggcaaacattatggcgctagctcctgcgacggctgtaagggcttttttaggcgcagtgtcagaaaaaaccacatgtactcctgccggtttagccggcaatgcgtggtggataaggacaaaaggaatcaatgtagatactgccggctcaaaaagtgcttcagagccggaatgaagaaggaagcagtgcagaatgaaagagaccgaatttcaactaggagatcatcatacgaggattcctcgctgccatctatcaacgccctgctgcaagccgaagtcctttcccggcagattactagtcccgtgtcgggcataaatggagatatacgagccaagaagattgccagcatcgccgatgtgtgtgagtcaatgaaggagcagctgttggtgctcgtggagtgggcaaagtatattcccgctttttgtgagctccctctagacgaccaggtcgccctgctgagagcccatgctggtgaacacctgctgttgggcgctacaaagcggtccatggtcttcaaggacgtcctcctgctgggtaacgactatattgtcccgaggcactgtcctgaactggctgaaatgtcccgggtctccatcagaattcttgacgagttggtgctgcccttccaggagctccaaatcgacgataatgaatacgcctacctgaaagctataatattcttcgatcccgacgccaaaggattatctgaccccggaaaaataaagagactacggtcccaagtccaagtgagtctggaggattatattaatgaccgacagtacgattcccggggaagattcggggagctgctgctgcttctgcccactttgcagtccattacgtggcagatgatagagcagatccagttcattaaattattcggtatggccaagatcgataatctcttgcaggagatgcttttgggtggtccgtgccaagcacaagaaggccgagggtggtctggggacagccctggcgatagaccccatacagtatctagccccctatcgtcactggccagtcccttgtgccgtttcgggcaggtggcctag

SEQ ID NO: 254451 - DNA, 324 bp, Artificial Sequence
  derived and/or modified sequence
atgagactgagcaagaccctggtggacatggacatggccgactacagcgccgccctggaccccgcctacaccaccctggagttcgagaacgtgcaggtgctgaccatgggcaacgacttcgtggccgccgccagcagacagatcgaggccagcccccccaccagcctggagcacatctggagaggcggccagttcagcaccggcagacacgtgcccatcagaagacaccagccccagagagcccagcagcccggctgccagagacccgtgtgccacctgagaggccccggccacggccagaccctgagatgcctggagctgtag

SEQ ID NO: 254452 - DNA, 1254 bp, Artificial Sequence
  derived and/or modified sequence
atgagactgagcaagaccctggtggacatggacatggccgactacagcgccgccctggaccccgcctacaccaccctggagttcgagaacgtgcaggtgctgaccatgggcaacgacaccagccccagcgagggcaccaacctgaacgcccccaacagcctgggcgtgagcgccctgtgcgccatctgcggcgacagagccaccggcaagcactacggcgccagcagctgcgacggctgcaagggcttcttcagaagaagcgtgagaaagaaccacatgtacagctgcagattcagcagacagtgcgtggtggacaaggacaagagaaaccagtgcagatactgcagactgaagaagtgcttcagagccggcatgaagaaggaggccgtgcagaacgagagagacagaatcagcaccagaagaagcagctacgaggacagcagcctgcccagcatcaacgccctgctgcaggccgaggtgctgagcagacagatcaccagccccgtgagcggcatcaacggcgacatcagagccaagaagatcgccagcatcgccgacgtgtgcgagagcatgaaggagcagctgctggtgctggtggagtgggccaagtacatccccgccttctgcgagctgcccctggacgaccaggtggccctgctgagagcccacgccggcgagcacctgctgctgggcgccaccaagagaagcatggtgttcaaggacgtgctgctgctgggcaacgactacatcgtgcccagacactgccccgagctggccgagatgagcagagtgagcatcagaatcctggacgagctggtgctgcccttccaggagctgcagatcgacgacaacgagtacgcctacctgaaggccatcatcttcttcgaccccgacgccaagggcctgagcgaccccggcaagatcaagagactgagaagccaggtgcaggtgagcctggaggactacatcaacgacagacagtacgacagcagaggcagattcggcgagctgctgctgctgctgcccaccctgcagagcatcacctggcagatgatcgagcagatccagttcatcaagctgttcggcatggccaagatcgacaacctgctgcaggagatgctgctgggcggcccctgccaggcccaggagggcagaggctggagcggcgacagccccggcgacagaccccacaccgtgagcagccccctgagcagcctggccagccccctgtgcagattcggccaggtggcctag

SEQ ID NO: 254453 - protein, 2400 aa, Artificial Sequence
  derived and/or modified sequence
MNSTPRNAQAPSHRECFLPSVARTPSVTKVTPAKKITFLKRGDPRFAGVRLAVHQRAFKTFSALMDELSQRVPLSFGVRSVTTPRGLHSLSALEQLEDGGCYLCSDKKPPKTPSGPGRPQERNPTAQQLRDVEGQREAPGTSSSRKSLKTPRRILLIKNMDPRLQQTVVLSHRNTRNLAAFLGKASDLLRFPVKQLYTTSGKKVDSLQALLHSPSVLVCAGHEAFRTPAMKNARRSEAETLSGLTSRNKNGSWGPKTKPSVIHSRSPPGSTPRLPERPGPSNPPVGPAPGRHPQDTPAQSGPLVAGDDMKKKVRMNEDGSLSVEMKVRFHLVGEDTLLWSRRMGRASALTAASGEDPVLGEVDPLCCVWEGYPWGFSEPGVWGPRPCRVGCREVFGRGGQPGPKYEIWTNPLHASQGERVAARKRWGLAQHVRCSGLWGHGTAGRERCSQDSASPASSTGLPEGSEPESSCCPRTPEDGVDSASPSAQIGAERKAGGSLGEDPGLCIDGAGLGGPEQGGRLTPRARSEEGASSDSSASTGSHEGSSEWGGRPQGCPGKARAETSQQEASEGGDPASPALSLSSLRSDDLQAETQGQGTEQATGAAVTREPLVLGLSCSWDSEGASSTPSTCTSSQQGQRRHRSRASAMSSPSSPGLGRVAPRGHPRHSHYRKDTHSPLDSSVTKQVPRPPERRRACQDGSVPRYSGSSSSTRTQASGNLRPPSSGSLPSQDLLGTSSATVTPAVHSDFVSGVSPHNAPSAGWAGDAGSRTCSPAPIPPHTSDSCSKSGAASLGEEARDTPQPSSPLVLQVGRPEQGAVGPHRSHCCSQPGTQPAQEAQRGPSPEASWLCGRYCPTPPRGRPCPQRRSSSCGSTGSSHQSTARGPGGSPQEGTRQPGPTPSPGPNSGASRRSSASQGAGSRGLSEEKTLRSGGGPQGQEEASGVSPSSLPRSSPEAVVREWLDNIPEEPILMTYELADETTGAAGGGLRGPEVDPGDDHSLEGLGEPAQAGQQSLEGDPGQDPEPEGALLGSSDTGPQSGEGVPQGAAPEGVSEAPAEAGADREAPAGCRVSLRALPGRVSASTQIMRALMGSKQGRPSSVPEVSRPMARRLSCSAGALITCLASLQLFEEDLGSPASKVRFKDSPRYQELLSISKDLWPGCDVGEDQLDSGLWELTWSQALPDLGSHAMTENFTPTSSSGVDISSGSGGSGESSVPCAMDGTLVTQGTELPLKTSNQRPDSRTYESPGDLENQQQCCFPTFLNARACACATNEDEAERDSEEQRASSNLEQLAENTVQEEVQLEETKEGTEGEGLQEEAVQLEETKTEEGLQEEGVQLEETKETEGEGQQEEEAQLEEIEETGGEGLQEEGVQLEEVKEGPEGGLQGEALEEGLKEEGLPEEGSVHGQELSEASSPDGKGSQEDDPVQEEEAGRASASAEPCPAEGTEEPTEPPSHLSETDPSASERQSGSQLEPGLEKPPGATMMGQEHTQAQPTQGAAERSSSVACSAALDCDPIWVSVLLKKTEKAFLAHLASAVAELRARWGLQDNDLLDQMAAELQQDVAQRLQDSTKRELQKLQGRAGRMVLEPPREALTGELLLQTQQRRHRLRGLRNLSAFSERTLGLGPLSFTLEDEPALSTALGSQLGEEAEGEEFCPCEACVRKKVSPMSPKATMGATRGPIKEAFDLQQILQRKRGEHTDGEAAEVAPGKTHTDPTSTRTVQGAEGGLGPGLSQGPGVDEGEDGEGSQRLNRDKDPKLGEAEGDAMAQEREGKTHNSETSAGSELGEAEQEGEGISERGETGGQGSGHEDNLQGEAAAGGDQDPGQSDGAEGIEAPEAEGEAQPESEGVEAPEAEGDAQEAEGEAQPESEDVEAPEAEGEAQPESEDVETPEAEWEVQPESEGAEAPEAEKEAQPETESVEALETEGEDEPESEGAEAQEAEEAAQEAEGQTQPESEVIESQEAEEEAQPESEDVEALEVEVETQEAEGEAQPESEDVEAPEAEGEMQEAEEEAQPESDGVEAQPKSEGEEAQEVEGETQKTEGDAQPESDGVEAPEAEEEAQEAEGEVQEAEGEAHPESEDVDAQEAEGEAQPESEGVEAPEAEGEAQKAEGIEAPETEGEAQPESEGIEAPEAEGEAQPESEGVEAQDAEGEAQPESEGIEAQEAEEEAQPELEGVEAPEAEGEAQPESEGIEAPEAEGEAQPELEGVEAPEAEEEAQPEPEGVETPEAEGEAQPESEGETQGEKKGSPQVSLGDGQSEEASESSSPVPEDRPTPPPSPGGDTPHQRPGSQTGPSSSRASSWGNCWQKDSENDHVLGDTRSPDAKSTGTPHAERKATRMYPESSTSEQEEAPLGSRTPEQGASEGYDLQEDQALGSLAPTEAVGRADGFGQDDLDF

SEQ ID NO: 254454 - DNA, 237 bp, Artificial Sequence
  derived and/or modified sequence
atgggccagggccagcaggccatgtgccacgaggccctgagccacatctgggtgcccttcgacctgaagagatggctgctgtacaccttctgcaactggttcgacgtgaccttccagctgcagctgtgcatcctgagaaccctgaagagattctgcagaagcatcctgtacaacctgaaggacagaaagaccttctggctgccccaggcctacctgagcttcctgctgatccagtag

SEQ ID NO: 254455 - DNA, 7203 bp, Artificial Sequence
  derived and/or modified sequence
atgaacagtacccccaggaatgcccaggcccctagccacagggagtgcttcctccccagcgtggcccgtacaccatcagtcaccaaagtgaccccagccaaaaagattactttcttaaagaggggagacccacgctttgcaggcgtccgcctggcagtgcaccagcgagcctttaagacatttagcgccctgatggacgaactgagccagcgtgtgcccttgagcttcggtgtgcggagcgtgacgacgcctcgcggacttcattctttatccgccctcgaacagcttgaagacggtgggtgctacttgtgctccgataaaaagccccctaaaacaccaagcggcccgggacggccacaagagcgaaacccaacagcacaacaacttagagatgtggagggtcagcgtgaagctccaggaacaagctcctccaggaaatcgctgaaaacccctcggcggattctgctcatcaagaatatggatccacggctgcagcaaactgtcgtcctgtcccataggaatacacggaacttggccgccttcctgggaaaagcaagcgatttactgcggttccctgtgaaacagttgtacaccacgagtggcaagaaggtggatagcctccaggcgctgttgcacagcccttccgtcctcgtgtgtgccggacacgaggcttttaggaccccggccatgaagaacgctcgcagatctgaggctgaaaccctgagcgggctgacttcacggaataagaacggatcctggggaccgaagactaagccgagcgtgattcactccagatctccccccggctcgactcccagactgcctgagcggcccgggccgagcaatcccccagtaggaccagcaccgggccgccatccccaagatacaccagcccagtctgggcccctcgtggcaggggacgatatgaaaaaaaaggtccggatgaacgaggacggttccctgagtgtcgagatgaaggtgcgctttcatctcgtgggagaagacacattgctgtggtcacgtaggatggggagagcaagcgctctgacggcagcgagcggcgaggatcccgtgctcggcgaggtggacccactgtgctgcgtctgggaggggtacccctggggattttcagagccaggagtgtggggcccccgaccctgcagagtcgggtgcagagaggtctttggcaggggaggtcagcctggaccgaagtacgagatttggactaaccctctccacgcatcacagggcgagcgggtggccgcgagaaagcgctgggggcttgcccaacatgttcgctgtagcggcttgtggggccacggcaccgcagggcgggaaaggtgctcgcaggatagtgccagcccagctagcagtactggactccctgaagggtcagagccagagagcagctgctgccctcggacacctgaagacggagtggattctgcatccccaagcgcgcagatcggcgctgagaggaaagccgggggctccttgggtgaggaccccggtttgtgcatcgacggagcggggctggggggccctgaacagggtgggcgactgacgcctcgggccagatccgaggagggggcttcatcagacagttccgcatctacaggtagccatgaaggatcttccgaatggggaggaaggcctcaagggtgtcctggaaaagcccgcgctgagaccagtcagcaagaggcctcagaagggggtgaccctgcgagtcctgcactgagcttgtccagtctgagaagtgacgatctccaagccgagactcagggacagggtaccgagcaagccaccggcgcagccgttaccagagagcctctggttctaggcctcagttgtagctgggactctgagggagcctcaagtacacccagcacgtgcacaagtagtcaacaggggcaaaggcgccacagatctcgggcaagcgccatgtcatcccccagcagcccgggcctgggacgagtggcacccagaggccaccccaggcacagccattaccgcaaagatacacactccccactggatagcagcgtgacaaaacaggtgccgcggccccctgagagaaggcgagcttgccaggacggatcggtgccccggtatagcggatcatctagctcaacgagaactcaggcaagcggtaatttaagaccgccaagctcaggatccctgccgagtcaggatttgcttggaacttcgtcagccacggtcactccagcagtgcatagcgatttcgtgtcaggtgtttcccctcataatgcacctagcgccggttgggcaggtgatgcgggctccaggacctgctcccccgctcccatcccgccacatacatctgatagctgttccaagagtggtgcagcctccctgggagaagaggctcgggatacacctcaacctagcagtcctctggtcctgcaggtcggacgcccagagcaaggggccgtcggcccacaccgctctcactgctgtagccaaccaggtacccaacctgcacaggaagcacagcgaggcccatcacccgaagcgtcctggctgtgcggacggtactgccccactccgccgcgtggccggccgtgtcctcagagacgttcatccagttgtgggtctaccggtagcagccaccagtccaccgctcgcggaccaggcggtagcccccaggaggggacgaggcaacccggccccaccccctccccaggtcctaactccggcgcatcccgacggtccagcgcctctcagggagcaggaagccgaggtctgagcgaagaaaagactctgaggagcggtggtgggccccagggtcaggaggaagcctccggcgtgagcccatcgagcctccccagaagttcacctgaggcagtcgtgagggagtggctggacaacatccctgaggaacccatcctgatgacctatgagctcgccgatgaaaccactggggctgcgggcggaggactccgtggtcccgaggtcgatccaggagatgatcacagcctggagggcttaggagaaccagcacaggccggccagcagtccctggaaggggatccaggccaggaccctgagccagaaggggccctgcttgggtcaagcgatacaggcccccagtccggcgaaggcgtgcctcagggcgcagcccctgaaggagtaagcgaggccccagcagaagcaggcgcggacagagaggctccagcagggtgtagggtaagcctccgcgctctacccggacgcgtctctgcttccacccaaatcatgagagccctaatgggttcaaagcagggtcgcccttcctcagtacctgaggtttcacgtcccatggccaggcgtctctcctgctccgcgggtgccctaataacatgtctcgcctcgctccagctattcgaggaagacctgggatcacccgctagcaaggtgcggttcaaggatagtcctcggtatcaagagctgctgtcgatctccaaagatctgtggcccgggtgtgatgtgggagaagaccagctcgactctggactgtgggagttaacgtggtcccaggctcttcccgatctcggaagccacgcgatgaccgagaactttactccaacaagcagcagcggggtggatatctcctctggatctggcgggagcggcgagtcgtccgtgccttgtgcaatggatggaacattggtcactcagggcaccgagttacctttaaagaccagcaaccagaggccagactcccgaacatacgaaagtcctggtgatcttgagaatcagcagcaatgctgtttcccaacctttctcaatgctcgagcctgcgcatgcgctacaaatgaggacgaggccgagagggattctgaggagcagagagctagttcaaatttagagcagctggctgaaaacaccgtgcaggaggaagtgcaactcgaggagacaaaggagggtaccgagggggaaggcttacaagaggaggctgtgcagctggaggaaacgaagaccgaagagggactgcaggaggagggcgtgcaattggaggaaactaaagagacggaaggggaagggcagcaggaggaagaggcccagctcgaggagatcgaagaaacagggggcgaagggctccaagaagagggcgtccagctggaagaagttaaagagggacctgaaggcggcctccagggtgaggctctggaggagggcctaaaagaagaagggttgcccgaggaggggtctgtccatggacaagaactcagcgaagcgtcctctcctgatgggaagggcagccaggaggatgatcccgtacaagaggaggaagccgggcgtgcatccgcttcggcagaaccttgcccggcagaaggtacagaagaacccaccgagcccccgtcccacctgtcggagacagatccgagtgcctccgaaaggcagtccggcagtcagcttgagcctggtctggaaaaacctccaggggctacgatgatgggacaggaacacacccaggcacaacctacccagggcgcagctgagcgcagcagttctgtagcctgttctgctgctctcgattgtgatcccatttgggtctccgtgctcttgaagaagacggaaaaagcctttttggctcatctcgcatctgccgtggctgagttgagagcccggtggggactgcaggataatgatctattggaccagatggcagccgagctccaacaggatgtcgcccagagactccaggattccaccaagagggagctgcagaagttacagggtagggctggtcggatggtattggaaccacctcgcgaagctctaaccggcgagcttttgctgcagacccaacagaggagacaccgacttaggggtctgagaaatttgtctgccttcagcgaacgtacattgggtctcggacctctgagctttactctcgaggacgagcctgctctcagtacagccttggggtcccagctgggggaagaggctgaaggagaggaattctgcccgtgcgaagcgtgtgttcggaaaaaagtgagcccaatgtctcccaaggccacgatgggcgctacccgcgggcccattaaggaagccttcgaccttcagcaaatactccagcgaaaaaggggagaacacactgatggagaagctgccgaggtggctcccgggaagactcacaccgaccccacctcaacaagaactgtgcagggcgcggagggggggcttggaccaggtctctcccaaggcccgggggtcgatgagggtgaggacggcgagggcagccagaggctgaatcgagataaagaccccaaactgggagaggcggagggcgatgcaatggcacaagaacgggaaggcaagacccataattccgagacctctgctgggagcgaactgggagaggcggaacaggaaggagaggggattagcgagcgcggagaaactgggggtcagggcagtggccatgaagataacctgcagggagaggccgcggccggaggagatcaggatcctgggcagagtgacggcgcggaaggtattgaggctccggaggcagagggggaggcacaaccggagtctgagggcgtcgaggcccctgaggctgaaggggatgcacaggaggcggagggggaagctcagcctgaatcagaagatgttgaggcccctgaagccgaaggcgaggcacagccagaaagtgaggatgtggagacacctgaagcagagtgggaggtgcagccagaaagcgagggcgctgaggcccccgaagcagaaaaagaggcgcagcctgagacagagagcgtcgaggcattggagacggagggcgaagatgagccggaatccgagggcgcagaggcccaggaggccgaggaggcagcgcaagaagctgaagggcaaacgcaaccagaaagcgaggttatagaaagtcaggaggctgaagaggaagcccaaccagagtccgaagacgtagaggcattggaggtcgaagtagagacacaggaagctgaaggggaggcccagcccgaaagtgaggatgtggaggctcctgaagcggagggggagatgcaagaggcggaagaagaagcccagcccgagtctgacggcgtggaggctcagcctaaatccgaaggcgaagaagcacaggaggtggaaggtgagacgcagaagacagagggggacgcacaacctgagtctgacggcgtggaagcccctgaagctgaggaggaggctcaggaagccgagggggaagtgcaagaggctgaaggagaggcgcatcctgagagcgaagatgtcgacgcgcaagaggctgagggagaagcacagcctgagtctgagggagtcgaggccccagaggcagagggggaggcacagaaggctgagggtatcgaagccccagagaccgagggtgaggcgcagcccgagagcgaggggatagaggctcctgaggcggaaggcgaagctcaaccagaatcagagggagttgaagcccaggacgccgaaggcgaggctcagccggaatctgagggcattgaagcccaggaagcggaggaggaggcccagccagagctggagggcgttgaagctccagaggcagaaggggaagcccagccggagtccgagggcatagaggcccctgaagccgaaggagaggcccagcccgagttagagggcgttgaggctcccgaagccgaggaggaagctcaacctgagcccgaaggagtggagacccctgaagcagagggggaagcacagcccgagtcagagggcgaaactcaaggcgagaaaaagggatccccacaggtgtcgttgggcgatgggcaatctgaggaagccagtgagagttcttctcccgttccggaggaccgaccgacgccaccgccctctcccgggggcgacactcctcatcagcgcccaggctcccagacaggcccaagctcatcccgcgcatcctcatggggaaactgttggcagaaagatagcgaaaacgatcatgtgctaggcgatacgaggagcccagatgctaaatccacggggaccccccacgctgagaggaaagcaacgcgtatgtatccggagagttctacaagcgaacaggaagaggctcccctgggctctaggacgccagagcagggggcatcggaaggatacgacctccaggaggaccaggccctgggaagcctggcacccaccgaagctgtgggccgggccgatgggtttgggcaggacgatctcgatttctag

SEQ ID NO: 254456 - DNA, 7203 bp, Artificial Sequence
  derived and/or modified sequence
atgaacagcaccccaagaaatgcccaggcccccagccaccgggagtgcttcctgcccagcgtggcccggacccccagcgtgaccaaggtgaccccagccaagaagatcaccttcctgaagagaggagaccccaggtttgctggggtgcggctggccgtgcaccagagggccttcaagaccttcagcgccctgatggatgagctgagccagagggtgcccctgagctttggagtgcgctctgtgaccaccccccggggcctgcacagcctgagcgccctggagcagctggaggatggcggctgctacctgtgcagcgacaagaagccacccaagacccccagcggccctggccggccccaggagaggaaccccacagcccagcagctgagagatgtggagggccagcgggaggcccctggcaccagcagcagcaggaagagcctgaagaccccccggcgcatcctgctgatcaagaacatggacccccggctgcagcagacagtggtgctgagccacaggaacaccaggaacctggccgccttcctgggcaaggccagtgacctgctgcgcttccctgtgaagcagctgtacaccaccagcggcaagaaggtggacagcctgcaggccctgctgcacagccccagcgtgctggtgtgtgccggccacgaggccttccgcaccccagccatgaagaatgcccggcgctctgaggccgagaccctgagcggcctgaccagcaggaacaagaatggctcctggggccccaagaccaagcccagcgtcatccacagccgcagccccccaggcagcaccccccggctgcctgagcggcccggccccagcaacccccctgtgggccctgcccctggccgccacccccaggacaccccagcccagagcggccccctggtggccggagatgacatgaagaagaaggtgaggatgaatgaagatggcagcctgtctgtggagatgaaggtgcgcttccacctggtgggggaggacaccctgctgtggagcaggaggatgggccgggccagcgccctgacagctgccagcggagaagatcctgtgctgggggaggtggaccccctgtgctgcgtgtgggagggctacccctggggcttcagcgagcccggggtgtggggcccccggccctgccgggtgggctgccgggaggtgtttggccggggcggccagcccggccccaagtatgagatctggaccaaccccctgcacgccagccagggcgagcgggtggccgccaggaagcgctggggcctggcccagcacgtgcgctgcagcggcctgtggggccacggcacagctggccgggagcgctgcagccaggacagcgccagccctgccagcagcacaggcctgcctgagggcagcgagcctgagagcagctgctgccccaggaccccagaagatggagtggacagcgccagccccagcgcccagattggagctgagaggaaggccggcggcagcctgggagaagatcctggcctgtgcattgatggagctggcctgggcggccctgagcagggcggccgcctgaccccccgggcccggtctgaggagggcgccagcagtgacagcagcgccagcacaggcagccatgagggcagcagcgagtggggcggccggccccagggctgccctgggaaggcccgggcagagaccagccagcaggaggccagcgagggcggggaccctgccagccctgccctgagcctgagcagcctgcggagtgatgacctgcaggccgagacccagggccagggcacagagcaggccaccggggctgctgtgacccgggagcccctggtgctgggcctgagctgctcctgggacagcgagggcgccagcagcacccccagcacctgcaccagcagccagcagggccagaggaggcacaggagccgggccagcgccatgagcagccccagcagccctggcctgggccgggtggccccccggggccaccccaggcacagccactacaggaaggacacccacagccccctggacagctctgtgaccaagcaggtgcccaggcctcctgagaggagaagagcctgccaggacggctctgtgccccgctacagcggcagcagcagcagcaccaggacccaggccagcggcaacctgcggccccccagcagcggcagcctgcccagccaggacctgctgggcaccagcagcgccaccgtgaccccagctgtgcacagcgactttgtgtctggagtgagcccccacaatgcccccagcgctggctgggccggagatgctggcagcaggacctgcagccctgcccccatccccccccacaccagtgacagctgcagcaagtctggagctgccagcctgggggaggaggcccgggacaccccccagcccagcagccccctggtgctgcaggtgggccggcctgagcagggcgctgtgggcccccacaggagccactgctgcagccagcccggcacccagcctgcccaggaggcccagaggggccccagccctgaggcctcctggctgtgtggccgctactgccccaccccaccccggggccggccctgcccccagaggaggagcagcagctgtggcagcacaggcagcagccaccagagcacagcccggggccctgggggcagcccccaggagggcacccggcagcccggccccacccccagccctggccccaacagcggggccagcagaagaagcagcgccagccagggcgccggcagccggggcctgtctgaggagaagaccctgcggagcggcggcggcccccagggccaggaggaggccagcggcgtgagccccagcagcctgcccaggagcagccctgaggccgtggtgcgggagtggctggacaacatccctgaggagcccatcctgatgacctatgagctggctgatgagaccaccggggctgctgggggcggcctgcggggccctgaggtggaccctggagatgaccacagcctggagggcctgggggagcccgcccaggccggccagcagagcctggagggggaccccggccaggaccctgagcctgagggcgccctgctgggcagcagtgacaccggcccccagagcggggagggcgtgccccagggcgccgcccctgagggcgtgtctgaggccccagctgaggccggggctgaccgggaggccccagctggctgccgggtgtccctgcgggccctgcccggccgggtgtctgccagcacccagatcatgagggccctgatgggcagcaagcagggccggcccagctctgtgcctgaggtgtcccggcccatggcccggcggctgagctgcagcgctggggccctgatcacctgcctggccagcctgcagctgtttgaggaggacctgggcagccctgccagcaaggtgcgcttcaaggacagcccccgctaccaggagctgctgagcatcagcaaggacctgtggccaggctgtgatgtgggggaggaccagctggacagcggcctgtgggagctgacctggagccaggccctgcctgacctgggcagccacgccatgacagagaacttcacccccaccagcagcagtggagtggacatcagcagcggcagcggcggcagcggggagagctctgtgccctgtgccatggatggcaccctggtgacccagggcacagagctgcccctgaagaccagcaaccagaggccagacagcaggacctatgagagccctggggacctggagaaccagcagcagtgctgcttccccaccttcctgaatgcccgggcctgtgcctgtgccaccaatgaagatgaggccgagcgggacagcgaggagcagagggccagcagcaacctggagcagctggccgagaacacagtgcaggaggaggtgcagctggaggagaccaaggagggcacagaaggagagggcctgcaggaggaggccgtgcagctggaggagaccaagacagaggagggcctgcaggaggagggcgtgcagctggaggagaccaaggagacagaaggagagggccagcaggaggaggaggcccagctggaggagattgaggagaccggcggggagggcctgcaggaggagggcgtgcagctggaggaggtgaaggagggccctgagggcggcctgcagggcgaggccctggaggagggcctgaaggaggagggcctgcctgaggagggctctgtgcacggccaggagctgtctgaggccagcagcccagatggcaagggcagccaggaggatgatcctgtgcaggaggaggaggccggccgggccagcgccagcgctgagccctgcccagctgagggcacagaggagcccacagagccccccagccacctgtctgaaacagaccccagcgccagcgagcggcagagcggcagccagctggagcccggcctggagaagcccccaggggccaccatgatgggccaggagcacacccaggcccagcccacccagggcgctgctgagaggagcagctctgtggcctgcagcgctgccctggactgtgaccccatctgggtgtctgtgctgctgaagaagacagagaaggccttcctggcccacctggccagcgctgtggccgagctgcgggcccgctggggcctgcaggacaatgacctgctggaccagatggctgctgagctgcagcaggatgtggcccagaggctgcaggacagcaccaagcgggagctgcagaagctgcagggccgggccggccgcatggtgctggagcccccccgggaggccctgaccggggagctgctgctgcagacccagcagaggaggcaccggctgcggggcctgaggaacctgagcgccttcagcgagaggaccctgggcctgggccccctgtccttcaccctggaggatgagcccgccctgagcacagccctgggcagccagctgggggaggaggccgagggggaggagttctgcccctgtgaggcctgtgtgaggaagaaggtgagccccatgagccccaaggccaccatgggcgccacccggggccccatcaaggaggcctttgacctgcagcagatcctgcagaggaagagaggagagcacacagatggagaggccgctgaggtggcccctgggaagacccacacagaccccaccagcaccaggacagtgcagggcgctgagggcggcctgggccctggcctgagccagggccctggggtggatgaaggagaagatggagagggcagccagaggctgaacagagacaaggaccccaagctgggggaggccgagggagatgccatggcccaggagcgggagggcaagacccacaacagcgagaccagcgctggcagcgagctgggggaggccgagcaggagggggagggcatcagcgagcggggggagactggaggccagggcagcggccacgaggacaacctgcagggcgaggccgccgccggcggggaccaggaccccggccagagtgatggagctgagggcatcgaggcccctgaggccgagggggaggcccagcctgagagcgagggcgtggaggcccctgaggccgagggagatgcccaggaggccgagggggaggcccagcctgagagtgaagatgtggaggcccctgaggccgagggggaggcccagcctgagagtgaagatgtggagaccccagaggccgagtgggaggtgcagcctgagagcgagggcgctgaggcccctgaggccgagaaggaggcccagcctgagacagaatctgtggaggccctggagacagaaggagaagatgagcctgagagcgagggcgctgaggcccaggaggccgaggaggccgcccaggaggccgagggccagacccagcctgagagcgaggtgattgagagccaggaggccgaggaggaggcccagcctgagagtgaagatgtggaggccctggaggtggaggtggagacccaggaggccgagggggaggcccagcctgagagtgaagatgtggaggcccctgaggccgagggggagatgcaggaggccgaggaggaggcccagcctgagagtgatggagtggaggcccagcccaagtctgagggggaggaggcccaggaggtggagggggagacccagaagacagaaggagatgcccagcctgagagtgatggagtggaggcccctgaggccgaggaggaggcccaggaggccgagggggaggtgcaggaggccgagggggaggcccaccctgagagtgaagatgtggatgcccaggaggccgagggggaggcccagcctgagagcgagggcgtggaggcccctgaggccgagggggaggcccagaaggccgagggcatcgaggcccctgagacagaaggagaggcccagcctgagagcgagggcatcgaggcccctgaggccgagggggaggcccagcctgagagcgagggcgtggaggcccaggatgctgagggggaggcccagcctgagagcgagggcatcgaggcccaggaggccgaggaggaggcccagcctgagctggagggcgtggaggcccctgaggccgagggggaggcccagcctgagagcgagggcatcgaggcccctgaggccgagggggaggcccagcctgagctggagggcgtggaggcccctgaggccgaggaggaggcccagcctgagcctgagggcgtggagaccccagaggccgagggggaggcccagcctgagagcgagggggagacccagggcgagaagaagggcagcccccaggtgtccctgggagatggccagagcgaggaggccagcgagagcagcagccctgtgcctgaggaccggcccaccccaccacccagccctggaggagacaccccccaccagaggcctggcagccagacaggccccagcagcagccgggccagctcctggggcaactgctggcagaaggacagtgaaaatgaccacgtgctgggggacaccaggagcccagatgccaagagcacaggcacccctcatgctgagaggaaggccaccaggatgtacccagagagcagcaccagcgagcaggaggaggcccccctgggcagcaggaccccagagcagggcgccagcgagggctatgacctgcaggaggaccaggccctgggcagcctggcccccacagaggccgtgggccgggcagatggcttcggccaggatgacctggacttctag

SEQ ID NO: 254457 - DNA, 7203 bp, Artificial Sequence
  derived and/or modified sequence
atgaacagcaccccccggaacgcccaggcccccagccaccgggagtgcttcctcccaagtgtcgcacgcactccttccgtaactaaggtgacaccagccaaaaagataacgttcctgaagcggggagatcctcggtttgccggggtccgtttggctgtgcaccagagggctttcaaaaccttttccgcactgatggacgagttaagtcaacgggtcccactgagctttggggtcagatccgttaccactcctagaggcctgcatagtttgtcggctttagagcagctggaggatggaggatgctacctgtgctcagataaaaagccacccaaaacgccctcgggacccggccgcccccaggaacgaaaccctacagctcagcagctcagagatgtggaagggcaacgggaggctcccggcaccagctcctcaaggaaatccctcaagacccctagacgtattctccttattaagaacatggatccccgtcttcagcagactgtagtgctcagccatagaaatacccgtaacctggccgcttttctgggcaaggccagcgacctcctccggttcccagtcaaacagctgtacacgacctccggaaagaaggtggatagcctgcaggccttgcttcactctccaagcgttctggtgtgcgcagggcacgaagcgtttagaactcccgccatgaaaaacgccagaaggtctgaagctgagaccttgagcggcttaacctcaagaaacaagaacggctcatggggcccaaagactaaaccatcagtgatccactccagatctccaccaggcagcactcctcggctgccagagcgcccaggaccctccaatccaccagtggggcctgctcccgggaggcatccacaggacacgccagcccagtccggcccgttagtggctggagacgatatgaaaaaaaaagtgagaatgaacgaggacggttccctcagcgtcgagatgaaagtcaggtttcatctggtgggcgaggacaccctcttgtggtcgcggcgaatgggacgtgctagcgctctcacagctgcaagtggagaggatcctgtgctgggggaggtggatcccctgtgttgcgtgtgggagggatacccgtggggattctccgagccaggtgtgtggggcccccgaccatgtcgcgtggggtgtcgggaagtattcggtcggggagggcagcctggccccaaatacgaaatatggactaatccgctgcacgcttcccagggggaacgggtcgccgcaagaaaacggtggggactagcccaacatgtgaggtgctctggcctttggggccacgggaccgctggccgcgagcgttgctcccaggactccgcatcaccagcctcctcaacaggcttgcctgagggatccgaacccgaaagcagttgttgtccaagaacccctgaggatggagtggactctgcatcaccaagcgcacagattggtgctgagcgtaaagctggcggaagcctgggtgaagaccctggactctgcatagacggcgcgggtctgggcggacctgagcaaggcggccggctgaccccccgcgcacgatcagaggagggcgccagtagcgactcttcagcgtccaccggctcacacgagggatcgtcagagtggggcggccggccccaggggtgcccaggcaaagctcgagctgaaacttcacagcaagaggcgagcgagggaggtgatccggcctcccctgctctcagcttatccagcctgcggtctgatgatttgcaggccgaaacacaaggacaaggcacagagcaggctacgggggcagccgtaaccagggaaccgctggtgctgggactttcttgttcttgggatagtgagggcgcgagttctacccccagcacctgcacatcctctcagcagggacagaggaggcacaggagccgcgctagcgccatgagctcacccagcagtccagggctgggtagagtggccccacggggtcacccacggcatagccactacaggaaggacactcatagccctctagacagttcagtgactaagcaggtgccgcgccctccagagcggcggcgcgcctgccaagacggctccgtccctcgatacagcggttcctcctcttcaacccgcacccaggcttctggaaacctgagaccacccagtagcggctccttgccatctcaagatctgctcggtacatcttccgcgaccgttacaccagctgtccatagcgatttcgtcagcggcgtgtcaccccataacgcgccctccgccgggtgggccggcgatgccggaagtcgaacgtgctcgccagccccaatcccgccacacacaagcgattcttgtagcaaatctggtgccgcgagcctgggggaggaggccagggataccccccagccttcttcacccctggttcttcaagttggccgccctgaacagggagctgtgggtccccatcgatctcattgctgttcacagccgggcacccagccggcccaggaggcccaacggggtcccagtccagaagccagctggctgtgcggccgatattgcccaactccgcctagaggtcgcccttgcccgcaaaggaggtccagcagctgcggttccactggatctagccatcaatccactgcccgaggccctggcggatcaccacaagaaggcactcgtcagcccgggccaacaccatcccctgggccaaatagtggagcttctaggaggtcaagcgcgagccagggggcgggctcccgcggcctctctgaagaaaagacactgcgctctgggggagggccacaaggccaggaggaggccagcggagtcagcccctcgtcgctgccccgatcgtcacctgaggcggtggtacgtgaatggctggacaacattcctgaggaacctatccttatgacctacgaattggccgatgagactacaggcgctgccggagggggactgcgcggccctgaagtcgaccccggtgacgaccacagtctggaaggtcttggagagccagcccaggcgggtcaacagtccctcgagggcgatcctggtcaggacccagagccggagggcgcactgctaggcagcagcgacacagggcctcaatcaggcgagggagttccgcagggcgccgcccccgaaggagtttctgaggcacccgccgaagctggagctgacagggaggcccccgccgggtgccgcgtgtccctccgggcactgccaggtcgggtctccgcgtccactcagataatgagagccttgatgggctctaagcaggggagaccttcaagtgtgccagaggtttcccgacctatggcaagacgactttcgtgcagcgcgggcgctctgattacttgtctcgcgtccctgcagctgtttgaagaggatctgggtagtcctgcaagcaaggtgagatttaaagactcaccccgttaccaggagttattaagtatctccaaagatctttggcccgggtgtgacgtgggcgaagatcagcttgattcgggtctctgggagttaacatggtcacaagctctgccagatctgggcagccacgctatgacggagaatttcactccaacttcttcttcgggggtggacatctcaagcggatccggggggtcgggagaatcatcagtcccctgcgctatggatggcacgttggtaacacagggcactgagttacccctgaaaacatctaaccagcgcccagattcgagaacttacgagtcacccggcgatctcgagaatcagcagcagtgttgctttccgaccttcctgaatgcgagggcttgtgcatgcgcaacaaacgaagatgaggcagaaagagattctgaagaacagcgggcctccagcaacctcgagcagctcgcggaaaataccgtgcaggaggaagtgcagttagaagagacaaaagaaggaaccgagggtgagggcctgcaggaagaggcggtccagctggaggagactaagactgaggagggtctgcaagaggaaggcgtgcagctcgaagagaccaaagagaccgagggcgagggccagcaagaggaggaagctcaactggaagaaatcgaggaaacaggaggggaagggctacaggaagagggggtccagctggaggaggtgaaagaaggacctgagggcggattgcaaggagaagctctagaagaaggcctcaaggaagaggggctgcctgaagagggtagtgttcacgggcaggaactctccgaggcttctagcccagatggaaaagggtcccaggaggatgaccctgtgcaggaggaggaagccggacgagcttccgcttcagcagagccttgtcctgctgagggcactgaggagcccaccgagccgccttctcacttgtctgagactgaccctagcgcctctgagagacagtcagggtcccaactggagcccggcttagaaaagccaccaggagctacaatgatgggccaagaacatacccaggcgcaaccaactcagggggccgccgaacggagcagcagcgtggcctgttcggcagccctggactgcgacccaatctgggtttctgttcttttgaagaaaacggagaaagctttcctggctcacctggcctcagcagtggccgagcttcgggcccggtggggcctccaggataatgacctgctggaccagatggcggctgaactgcaacaagacgttgcacagcggctgcaagacagcacaaaacgtgagctccagaagttgcaaggccgcgcaggcaggatggtgctggagccgccccgcgaagccctgaccggcgaattgctgctgcagacgcagcagcgccgtcaccggctgcggggcctgcgaaatctgtcagctttctccgagcggactctagggctgggccctttgagcttcacgctggaagacgaacccgccctctcaactgcgcttggatcgcagctcggcgaagaggccgagggagaggaattttgtccatgtgaggcatgcgtccggaagaaggtgtcccctatgtcaccaaaagcaaccatgggcgccacccgaggccctatcaaagaagccttcgacctgcagcaaattctgcagcgcaagagaggcgagcacactgatggggaggctgctgaggttgcccccggtaaaacacacaccgatccaacatccacaagaacagtgcagggtgcggaaggcggactgggaccaggtctgagccagggcccaggcgtggatgaaggcgaagatggggaagggagtcaacgattgaacagggataaagaccccaagctcggagaagccgaaggagacgccatggcgcaggagcgggaggggaagacacacaattcagaaacgtccgcaggaagcgagcttggcgaggcagaacaggagggggagggaatcagtgaacggggcgagactggcggccagggcagtggccacgaggataatctccagggcgaggcggctgcagggggcgatcaggatcctggtcagtctgatggggcagagggtatcgaggcccctgaggctgaaggtgaagctcagccagaaagcgaaggggttgaagctcccgaagcggagggtgacgctcaggaagccgagggcgaagcgcagcccgagagcgaggacgtagaggcccccgaagctgagggggaggctcagccagaaagtgaggatgtggagacaccggaggccgagtgggaggtccagcccgaaagcgaaggagcagaggcgcccgaggctgagaaggaagcacagcccgagactgagtctgtggaagccctggagacggagggggaagacgaacccgagtcagaaggggctgaggcgcaggaagcggaggaggccgcgcaagaggccgagggccagacccagccagaaagcgaagtgattgagtcgcaagaggccgaggaagaggctcagcctgagtcagaggatgtggaggctctggaggtggaggttgagacacaggaggctgaaggcgaagcccagcctgaatctgaagatgtggaggccccagaagcggaaggtgagatgcaggaggcggaggaggaggcacagccagagtccgacggcgtggaagcgcaacccaagtcagaaggtgaagaggcacaggaagtggagggtgagactcagaagacagaaggcgacgcccagcccgagtctgacggggtggaagctcccgaggccgaagaagaggcccaggaagccgagggggaggtgcaagaggccgaaggcgaagcacaccctgagtcggaagacgtggatgcgcaggaagccgagggagaagcacaacccgaaagtgagggtgtagaagcccccgaggctgagggggaagcacagaaggcagaggggatcgaggcgcccgagaccgagggggaagcgcaacccgagagcgaaggtatcgaggccccggaggcagagggtgaggcccagcccgaatctgagggcgtagaggcccaggatgcagaaggcgaagcccagcctgagtccgaaggaatcgaggcccaagaagctgaggaggaagcgcagcccgagcttgaaggtgtcgaggcaccagaggccgagggggaggcacaacccgagagtgaggggatcgaagcccctgaggccgaaggggaggcccagccggagctggagggagtggaagcaccagaggccgaagaggaagcccagccagagcccgaaggggtagagacccccgaggctgaaggggaggcacaaccagaatcagagggtgaaacgcagggagagaaaaaaggatcaccacaggtgtccctgggtgatgggcagtccgaagaagcatccgagagcagttctcctgtgcctgaagaccggcccacacccccaccaagtccaggcggcgacacaccccaccagagacctgggtctcaaacaggtccctcttccagccgtgccagctcctggggcaactgttggcaaaaggactctgaaaacgaccatgtgctgggcgacacacgcagcccggacgcaaaatcaacaggcactccacacgctgagagaaaagctacaaggatgtaccctgagtcgagcactagcgaacaggaagaggcacccttgggttcccgcacacccgagcagggcgctagcgaaggatacgacttgcaggaagaccaggccctcggtagcctggctccaacggaagcagtcggaagggccgacgggtttggtcaggacgacctggatttttag

SEQ ID NO: 254458 - DNA, 7202 bp, Artificial Sequence
  derived and/or modified sequence
atgaattcaacacccagaaatgcccaggcacccagccatcgcgaatgctttctcccatccgtagctcgcaccccaagcgtgacaaaagtaacccccgcaaagaaaatcacgttccttaaacgtggggatccaagattcgctggtgttcgtctagcagtccatcagagagcttttaaaacatttagtgccttgatggatgaactttcgcagcgtgtgccactctcattcggggtgcgaagcgttaccactcctaggggcctgcattcgctgtccgctctggagcaactggaggacggcggatgttacctgtgctcagacaaaaaaccgccaaagacaccctcaggcccagggcgaccccaggagcggaaccccactgctcagcagctacgcgatgtcgaaggacagagagaggccccaggcacatcctcgtccagaaaatccttgaaaaccccgaggagaatattgcttataaagaatatggatcctcggctccagcagacagtagtgctgtcacatagaaacacccgtaacctggccgctttcttaggcaaggccagcgatttgttgcgcttccctgtcaaacagctgtacacaacctcaggaaaaaaagtcgattctctacaggccctcttgcattcgccctctgtgctggtgtgcgctggacatgaagctttcagaacacctgccatgaaaaacgccagacgctctgaggctgaaacactgagcggactaacatcaaggaacaagaacggttcctggggcccaaagacaaaaccttctgtcattcatagcaggagtccccctgggtcaacccccagactaccagagcggccaggcccttccaacccacccgtgggacctgctcccggtaggcacccccaggacactcccgctcaatccggtccattggttgccggagacgacatgaagaagaaggtgcgcatgaatgaggatggttccctgtccgtggagatgaaggttcgctttcatctggtcggcgaagacactctgctatggtcaaggcgtatgggacgcgctagcgcactgaccgctgcctcaggtgaagaccctgtcttaggcgaagtcgaccccctctgttgcgtctgggaaggctacccatggggattctcggagcccggagtctggggcccaaggccgtgccgggtgggctgcagggaggtctttgggcgaggaggacagcccggtccaaagtatgagatctggacaaatccccttcacgcaagtcaaggggaaagagtcgctgcacgaaagagatgggggctggcccaacatgttaggtgctcgggtctgtggggccacggaaccgccggaagagaaaggtgcagccaagatagcgcgagtcctgcttcatccacagggctgccagaggggtctgaacccgaaagttcttgctgtccccgaactccagaggacggagtggattcagcctctccatccgcccagattggggctgaacgcaaagcaggcggtagcctgggcgaagatcccggactgtgcatcgacggtgctggcctcggaggacctgagcaaggagggagacttacaccacgagcacgatccgaagaaggcgctagcagcgactccagtgcatcaactggcagccatgagggaagctccgaatggggtgggaggccccagggctgccccggaaaagctcgcgcagagacttctcagcaggaggcgtctgagggcggagaccccgctagcccagccctgtcactaagctccttgcgctcagatgacctccaggcagagacgcagggccaggggacggaacaggccactggggcagcagtgactcgcgaaccacttgtgctggggctatcctgttcctgggactctgagggcgctagcagcactccatctacgtgtacttcttcacagcagggccagcgaaggcaccggtccagggcgagtgctatgtcctctccgtccagtcctggacttggtagggtagctcctcgcggacaccccagacactcccactatcgcaaagacacacattctcccctggactcatctgtaaccaagcaggtgccgcgaccccctgagcgcagaagggcttgccaggatggcagcgtgccgcgatatagcgggagctctagctccacccgtacgcaggcttctggcaatctgagaccacctagctccggctccctcccatcacaggacctgttaggaacgagtagcgccacggttaccccagctgtccattccgacttcgtgagcggagtaagcccccacaatgccccttcagccggttgggccggagatgctggcagtagaacttgtagtcccgctccaatccctccccacaccagtgattcttgttcgaagtccggagctgcctcactgggagaagaggcaagggacaccccacagccaagtagtccccttgttctgcaggttggcaggcctgaacagggggctgtgggtccccatcggagtcactgctgttctcagcccggaacacagcccgcacaggaagcccagcggggaccctcaccggaagcctcctggctctgcggtcggtattgtcccaccccgcctagaggcagaccttgcccgcagcggcgatcctctagctgcggcagcacaggctcaagtcatcagtccactgctagaggccctggtggcagcccccaggaaggtacaaggcagccaggcccaaccccttcacctgggccaaattccggagcttcacggagatcctctgcttcccaaggcgctggatccagaggcctttccgaagaaaaaaccctgcgatcaggagggggaccacaaggtcaggaggaagccagcggggtctctccgtcctcgctcccccgatcaagtccagaggccgtggtcagagagtggctcgacaacatccccgaggagcccatattaatgacttatgagttagctgatgaaaccaccggagcggctggaggtgggctgcggggaccagaggtagatccaggcgacgaccacagcctggaaggcctgggagagcctgcccaggccggacaacagagtcttgagggggaccctggacaggacccagaaccagaaggagccttgttaggctcatcagacacaggtccgcagagcggggaaggggttcctcaaggagcggcacctgaaggtgtctccgaagcccctgcagaagcaggcgctgaccgggaagccccagctggttgccgcgtaagcttgcgagccttgcccggaagagtatccgccagcacacagattatgcgagctctcatggggagtaaacaaggtagaccaagcagcgtaccagaggtgtcgcgtccgatggctagaaggttgagctgcagtgccggagcactcatcacttgcttggcttctctgcagctctttgaggaagaccttgggtcccccgcaagtaaggtgagatttaaggattctcctcgataccaggaacttctgtccatctccaaggatctatggcccggatgcgatgtcggcgaggaccagttggacagtggtctgtgggagctgacatggtcacaagcactgccagatctgggatctcacgccatgacagaaaactttactcctacctcaagtagcggagtagatatcagttcgggatctgggggatccggcgaatcatctgtgccttgcgcaatggatgggaccttagtcactcaagggacagaattgcctctgaaaacctccaatcagcgtcctgatagtaggacctatgaatcacccggtgatctggaaaaccagcagcagtgctgtttccccacattcttgaatgcaagagcatgtgcctgtgccacgaatgaggacgaagcggagcgcgattcagaggagcagcgggcatcctcgaatctggagcagttggcagagaatactgtccaagaggaagtccagcttgaagaaactaaggaagggaccgaaggagaaggccttcaggaggaagcagtacagctggaagagactaagacagaagaggggcttcaggaggagggcgtgcaacttgaggagaccaaggaaacagagggagagggtcagcaggaggaagaggcccagctcgaagagatagaggaaactgggggtgagggactgcaggaagagggggtccagctcgaggaagtcaaagagggccctgaggggggtttgcaaggagaggctctagaagaaggcctgaaagaggaaggccttccggaagaagggagcgtgcacggtcaggagcttagtgaggcatctagccccgatggcaagggatcacaggaggacgatccagtccaggaggaagaggctggtagagcttcggcgagcgctgagccctgtccggctgagggaacagaggagccaaccgagcctcccagccatctttctgaaacggaccccagcgcttccgaacggcagagtggctcccagttggagccagggttagaaaagccacccggagctaccatgatgggtcaggagcacacccaggcgcagcccacccagggagctgcggaaagaagcagctctgtggcctgcagcgctgctcttgactgtgaccccatctgggtgtccgttctccttaagaaaaccgagaaggcttttcttgctcacctggccagcgccgtagccgaactgagggccagatgggggttgcaggataatgacctgctggaccagatggctgccgaactgcagcaggacgtagcccagcggttacaggattcaactaagcgggagttacaaaaactgcagggtagagcgggacgtatggtcctcgaaccccctagagaggcattaacaggggagctgctgttacaaacgcagcagcgaagacatcgcctgcgaggccttagaaatttgtcagccttttccgagagaaccctcgggttgggcccattgtcatttaccctcgaagacgagcctgccctgtcaacggccctggggtctcagctaggcgaggaggctgaaggcgaggagttttgtccctgcgaagcgtgtgtcagaaagaaggtgagtcccatgtctcctaaagccacgatgggagctacccgcggaccgattaaagaggcctttgacctccaacagatcctgcagcggaaacgcggtgaacacaccgacggtgaggctgcggaagtagcaccaggcaagacccataccgacccaacaagtacaaggacggtgcaaggagcagagggaggtttaggacctggtctaagccaaggccctggcgtggatgagggcgaggacggcgagggcagtcagcggctgaatcgagacaaagatcccaagctcggtgaagcagagggtgatgcaatggcccaggaacgcgaaggaaagacccacaactccgaaacctctgcagggtctgaattgggggaagccgagcaagagggggaagggatatctgaaagaggcgagaccggcggacagggctcgggccacgaagataatttacagggggaggcagcagcaggcggagaccaggatcctggtcagtctgacggcgctgagggcatagaagcacccgaagccgaaggcgaggcccaaccagagtctgagggtgttgaagccccagaagccgagggcgacgctcaggaagccgaaggagaggcacagcccgaaagcgaggacgttgaggcacccgaggctgagggcgaggcccagccagaaagcgaggatgtggagactcccgaggctgaatgggaagtgcaacccgagagcgagggcgctgaggccccagaggcagagaaggaggcccagcctgaaactgagtccgttgaggccctggaaaccgaaggagaggacgaaccagagtctgaaggggctgaggcacaggaagcagaagaagccgctcaggaagctgaagggcaaacgcagcccgaaagtgaagttattgagtctcaagaggccgaggaagaggcccagccagaatccgaagacgtggaggctctggaggtggaggtggagactcaggaggccgagggggaggcccaacccgaaagcgaggacgttgaagctccggaggccgagggtgaaatgcaggaggccgaggaggaggcgcaacccgagagcgatggggtggaggctcagccaaaatcagagggtgaggaagctcaggaggtcgaaggtgaaacacagaaaacagagggcgacgctcagcccgaatccgacggggttgaggcccctgaggcagaggaagaggcccaggaggcagaaggggaggttcaagaagctgagggcgaagctcaccccgaatcagaagatgtggacgcccaggaggcggagggcgaggcccagcctgagagcgagggagtggaagctccggaagcggaaggtgaggcccagaaggctgaaggaatcgaggctccggagacagaaggggaagctcagcctgagtctgaaggcatcgaggcgccagaggctgagggcgaagctcagccagaaagcgaaggcgtcgaagctcaagatgccgaaggcgaggcccagcccgaatctgaaggcatcgaggcacaagaggccgaggaagaagcccaacccgaactggaaggtgtcgaggcacccgaggccgagggcgaagcacagcctgaatccgaagggatcgaagcacctgaggctgaaggtgaagcccagcccgaacttgagggagttgaggctcccgaggccgaggaggaagcacagccagaacccgagggggttgagactcctgaagcggagggcgaagcccaaccggagagcgagggtgaaacccagggggaaaagaagggcagcccacaggtgagtttaggcgacggacagtcagaagaggctagtgagagcagttcacccgtaccggaggatcgccctacccccccacccagccctgggggtgacacaccacaccagcgcccaggctcacagactgggccaagtagttctcgcgcttcatcttgggggaactgttggcagaaggatagcgagaatgaccacgtcctgggagataccaggtctccagatgctaagagcacggggacacctcatgccgaaagaaaggcgaccaggatgtacccggaatcaagtaccagtgagcaagaggaggcccctctggggtctagaactccggaacagggggctagcgaaggctatgacctgcaggaagaccaagcactgggatctctggcacctaccgaggctgtgggaagggctgacgggttcggacaggacgacctggacttcta

SEQ ID NO: 254459 - DNA, 7973 bp, Artificial Sequence
  derived and/or modified sequence
gcccaagggactggggcctcaggctctcaggccaaggagagtggccccgaggactgtccggaggagggtggccagccctgctgcccagagggactgagccactggcagggaaggaggcggtgttccccctggcctgactttcctccaaaggacgtccccctgaggcttaggggctgagccatgcccttgtgctccctggaggacgcggccagagcccccacaccatgaacagcacccccaggaatgcccaggccccgagccaccgtgagtgcttcctgccctctgtggctcgcaccccctcggtcaccaaggtcacgccagccaagaagatcaccttcctcaagcgaggggatccacggtttgctggggtccgcctggccgttcaccagcgcgcctttaagaccttcagcgccctcatggacgagctctcccagcgcgtgcctctctcctttggggtgcgctctgtcaccacaccccggggcctgcatagcctcagcgccctggagcagctggaagatggaggctgctacctctgctctgataagaagccccccaagacccccagtggaccaggccggccacaggagagaaaccccactgctcagcagttgcgggatgtcgaaggccagcgtgaagccccaggcacctcctcctcccggaagagtcttaaaaccccccggaggatactgctgattaagaacatggaccctcgcctccagcagacagtggttctcagtcacaggaatactaggaacctggccgcctttctcggcaaagcctcagatctcctgcgctttcctgtgaagcagttgtacacgaccagcgggaaaaaggtggactcgctgcaggccctgctgcacagcccctctgtgctggtgtgtgccgggcatgaggccttcagaaccccagccatgaaaaatgccaggagaagcgaggctgaaactttatctgggctgacttcaagaaacaaaaacgggagctgggggccaaagaccaagccgagtgtgatccattcgcggtctccgccaggcagcacgccacggctgccagaaaggcctggtcctagcaaccccccggtgggccctgctcctggcaggcaccctcaggacacgccagctcagtcgggcccgctggtggctggcgatgacatgaagaagaaggtccgcatgaatgaggacggcagcctgtccgtggagatgaaagtccgcttccacctggtcggcgaggacacgctcctatggtcccggaggatgggcagggccagcgccctcacggcagccagtggggaagaccccgttctgggggaggtagaccccctctgctgtgtgtgggagggctacccttggggcttctcagagcctggggtgtggggaccccggccctgcagggtgggatgcagggaagtctttggccgaggcgggcagccagggcccaagtatgaaatctggacgaatcccctgcatgcctcccagggagagagagtggcagctcggaagaggtggggactggcccagcacgtccgctgcagtggcctgtggggccacgggactgccgggagggagagatgcagccaggacagtgccagcccagcctccagcaccggcctccccgagggctcggagccagagtcctcctgctgccccaggaccccggaggacggggtggacagtgccagcccctctgcccagataggggctgagcggaaagctggagggagcctgggtgaggaccccggcctatgcatagatggagcagggctgggcggcccagagcaaggcggccgcctgacaccgagggcccggagtgaggagggggcttcttcggactcgtcagccagcaccggctctcatgagggatccagcgaatggggtgggcggccccagggctgtccaggcaaggcaagggccgagacctctcagcaggaggccagcgagggaggcgaccccgcttctccagccctgagtctttcatctttaaggagtgacgacctgcaggcagagacgcaaggacagggcaccgagcaggccacgggagcggctgtgacaagggagcctctggttctgggcctttcctgctcctgggactcggaaggagcctcttccaccccttccacctgcacttcatcccagcaggggcagagaaggcacagaagccgggccagtgcaatgtcctcacccagcagccctggccttggccgagtggccccgagaggccatcccaggcattctcactaccgcaaggacacccacagcccactggactcctctgtaaccaagcaagtgccgaggcctcctgagcggcgaagggcctgccaggatggctcagtgccacgatattctggaagctcatcgagcaccaggacacaggcctctgggaacctgagacctccctcctcgggctctcttccttcccaggaccttctgggaaccagcagtgccactgtcacccctgcagtccactcggattttgtttctggagtctccccgcacaacgctccctctgccgggtgggcaggggacgcggggtccaggacatgctcgccggcccccatacctccccacacatccgactcctgctcaaaatctggggctgccagcctgggggaagaggccagggacacgcctcagccctcctcacccttggttctgcaggttggacggcctgagcaaggggcggtgggcccccaccgaagccactgctgctcacagcctgggacgcagccggcccaagaggcccagcggggaccctcccctgaggctagctggctgtgtggcaggtactgtcccaccccgcccagggggcggccctgcccccagaggcgctcttccagctgtgggagcaccggcagcagccaccaaagcactgcccgggggccaggtgggagcccgcaggaggggacacgccagccaggccccacgccgtccccaggccccaattcaggggcatcaaggagaagcagtgccagccagggtgcggggtctcgggggctgtccgaggagaagaccttgaggagtgggggaggcccccaggggcaggaggaggccagtggtgtgtcacccagctctctgccccgctcgtctccagaggctgtggtccgcgaatggctggacaacattccagaagagcccatactcatgacatatgagttggcggacgagaccacaggtgcagctgggggtggcctgagaggccccgaggtggaccctggggatgaccattctctggaaggcctgggggagccagctcaggcgggacagcagtccctggaaggggaccccggccaggacccagagccagagggagccctcctggggagtagtgacactggtccccaatcaggagagggtgtcccccaaggggcagctccagagggagtttccgaggcccctgcagaggccggagcagacagagaggccccagcaggctgcagggtgagcctgcgggcacttcctggccgggtgtctgcctccacgcagatcatgagggcgctgatgggctccaagcagggccggcccagcagcgtgcccgaagtgtctaggcccatggccaggaggctcagctgctcagccggggccctcattacttgtctggccagtctgcagttatttgaggaagaccttgggtctcctgccagcaaagtgaggttcaaagactcccctcggtaccaggagctgctcagcatctcgaaggacctgtggccaggatgtgacgttggggaagaccagctggactcaggcctctgggagctcacatggagccaggctctgccagaccttgggtcccatgccatgacggagaacttcacgcccacatcctcctctggtgtggacatcagcagcggctctggaggctcaggggagagtagcgtaccctgtgccatggacggcaccctggtgacacaggggacagagctgcccctgaaaacctccaaccagaggcctgattcaagaacttatgagagcccaggggatctggaaaaccaacagcagtgttgtttcccaaccttcttgaacgcccgagcctgcgcttgtgccaccaatgaggatgaagcagaaagagacagtgaggagcagagggcgagctcgaacctggagcagttagctgaaaacacagtgcaagaagaggtgcaattagaggaaactaaagaaggaacagaaggagaagggctgcaagaagaggcggtgcagttagaggaaactaaaacagaagaagggctgcaagaagagggggtgcagttagaggaaactaaagaaacagaaggagaaggacagcaagaagaagaggcgcagttagaggaaattgaagaaacaggaggagaagggctgcaagaagagggggtgcagttagaggaagttaaagaagggccagaaggaggactgcaaggagaggctcttgaagagggtctcaaagaggaaggacttccagaagaaggaagcgtccacgggcaggaattgtcagaggccagctctccggatgggaaaggctcccaggaagatgacccagtccaggaggaggaagcaggaagagcctctgcctctgcagagccgtgccccgcagagggcacagaggaacccacagagccccctagtcatctcagcgagacggacccaagtgccagcgagaggcagagtggctcccagcttgagcctggtttggaaaagccgcccggagccaccatgatgggccaagagcacacgcaggcccaacccacccagggggctgcagagaggagctcttcggtggcctgcagcgcggctctggactgcgaccccatctgggtgtccgtgttactgaagaagacggagaaggccttcctggcccaccttgccagtgcggtggctgagctccgagcacgctggggcctgcaggacaatgatctgctggaccagatggcggccgagctgcagcaggacgtggcccaacgcctccaggacagcaccaagagagagctccagaagctccagggccgggcgggtaggatggtgctggagcctccaagggaggccctcaccggggagctgctcctgcagacccagcagcgcagacaccgtctccggggcctgcgaaacctctcggccttctctgagcggaccctgggcctggggcccctctccttcaccctggaggacgagccagccctcagcacagccctggggagccagctgggcgaggaggcggagggggaggagttctgtccctgcgaggcctgcgtgaggaagaaagtgagccctatgtcccccaaggccacaatgggggcaaccagaggtcccatcaaagaggcctttgacctgcagcagattctgcagaggaagaggggagaacacactgatggggaggcagcagaggtggcccctggcaagacccacacggaccccacgagcactaggactgtccagggagctgagggagggctggggccggggctgagccaggggcctggagtggacgagggtgaggatggcgaggggagccagagactcaacagagacaaagatcccaaactcggggaggcagagggagatgcaatggctcaggagagagaagggaaaacccacaacagtgaaaccagtgcgggcagtgagttgggggaagctgagcaggagggagagggcataagtgaaaggggagaaactgggggtcaaggctctgggcatgaggacaacttgcagggtgaagctgcggcaggaggtgaccaagatccaggacagagtgatggggccgaaggcatagaggccccggaggctgaaggggaggcccagccagagtcagaaggtgtagaggccccagaggcagaaggggatgcccaggaggctgaaggggaggcccagccagagtcagaagatgtagaggccccagaggcagaaggagaggcccagccagagtcagaagatgtagagaccccagaggcagaatgggaggtccagccagagtcagaaggtgcagaagccccggaggcagaaaaggaggcccagccagagacagaaagtgtagaggccctggagactgaaggggaggacgagccagagtcagaaggtgcagaggcccaagaggcagaagaggcggcccaggaggcagaagggcagacccagccagagtcagaagttatagagtcccaggaggcagaagaggaagcccagccagagtcagaagatgtagaggccctggaggttgaagtggagacccaggaggcagaaggggaggcccagccagagtcagaagatgtagaggccccagaggctgaaggggagatgcaagaggcagaagaggaggcccagccagagtcagacggtgtagaggcccagccaaagtcagaaggtgaagaggcccaggaggttgaaggggagacccagaagacagaaggggatgcccagccagagtcagacggtgtagaggccccggaggcagaagaggaggcacaggaggctgaaggggaggtccaggaggcagaaggggaggcccacccagagtcagaagatgtagatgcccaggaggcagaaggggaggcccagccagaatcagaaggtgtagaggccccagaggcagaaggggaggcccagaaggcagaaggtatagaggccccagagactgaaggggaggcccagccagagtcagaaggtatagaggccccagaggctgaaggggaggcccagcctgagtcagaaggtgtagaggcccaggatgcagaaggggaggcccagccagagtcagaaggtatagaggcccaggaggctgaagaggaggcccaaccagagttagaaggtgtagaggccccagaggcagaaggggaggcccagccagagtcagaaggtatagaggccccagaggcagaaggggaggcccaaccagagttagaaggtgtagaggccccggaggctgaagaggaggcccagccagagccagaaggcgtagagaccccggaggctgaaggggaggcccagccagagtcagaaggagaaactcaaggtgagaaaaaggggagccctcaggtcagtctaggagatggccaatctgaggaggcttctgaaagcagcagcccagtccctgaggacaggcccactccacccccttccccaggtggagacactccccaccaaaggccaggctcccaaacaggcccttcctcctccagagcatcctcttggggcaactgctggcagaaagactcagaaaatgaccatgtacttggagacacaaggagccctgatgccaagtccacggggacccctcatgcagagaggaaggccaccaggatgtacccagaaagttctacttctgagcaagaagaggcccctttgggctcaaggactccagagcagggggccagtgaaggttatgacctacaagaggaccaggcactcggaagtctcgcccccactgaggcagtgggcagggcagacggctttggccaagatgacttagatttctagacaagatcaagctagaaaacaatcacgagcttgggagctctgtttttattcatattttttctacaaaactgagcaacgttcagtccactggagatgtccatagtacatggacaaagaccaaggacttgccaaggacacagcccatgccatgctgtcctgggactcttaagtccagaagtgtcagagagctctgcggcccgtcccacacgcagtgtgaagaaagggggtgtctgcggatctgcccggttatcggaggtcagcccggctcctatttatttgtctgcagagcccgaaagatggaactgattggaaaggctccagtttagcttttgtttgtgggtttgttttctgctagcaagtgttgctctctgtcttttccctgttgatctcctgttacttttctccttggcttctgttggcactcacctcatttgactttgaggtgctttttttctagtcttgaatatatttgatgactctgcagaaatacttgggcaaagcaggtaacttcagagtcattggataaagtttgttctcaactccaaa

SEQ ID NO: 254460 - DNA, 7203 bp, Artificial Sequence
  derived and/or modified sequence
atgaacagcacccccagaaacgcccaggcccccagccacagagagtgcttcctgcccagcgtggccagaacccccagcgtgaccaaggtgacccccgccaagaagatcaccttcctgaagagaggcgaccccagattcgccggcgtgagactggccgtgcaccagagagccttcaagaccttcagcgccctgatggacgagctgagccagagagtgcccctgagcttcggcgtgagaagcgtgaccacccccagaggcctgcacagcctgagcgccctggagcagctggaggacggcggctgctacctgtgcagcgacaagaagccccccaagacccccagcggccccggcagaccccaggagagaaaccccaccgcccagcagctgagagacgtggagggccagagagaggcccccggcaccagcagcagcagaaagagcctgaagacccccagaagaatcctgctgatcaagaacatggaccccagactgcagcagaccgtggtgctgagccacagaaacaccagaaacctggccgccttcctgggcaaggccagcgacctgctgagattccccgtgaagcagctgtacaccaccagcggcaagaaggtggacagcctgcaggccctgctgcacagccccagcgtgctggtgtgcgccggccacgaggccttcagaacccccgccatgaagaacgccagaagaagcgaggccgagaccctgagcggcctgaccagcagaaacaagaacggcagctggggccccaagaccaagcccagcgtgatccacagcagaagcccccccggcagcacccccagactgcccgagagacccggccccagcaacccccccgtgggccccgcccccggcagacacccccaggacacccccgcccagagcggccccctggtggccggcgacgacatgaagaagaaggtgagaatgaacgaggacggcagcctgagcgtggagatgaaggtgagattccacctggtgggcgaggacaccctgctgtggagcagaagaatgggcagagccagcgccctgaccgccgccagcggcgaggaccccgtgctgggcgaggtggaccccctgtgctgcgtgtgggagggctacccctggggcttcagcgagcccggcgtgtggggccccagaccctgcagagtgggctgcagagaggtgttcggcagaggcggccagcccggccccaagtacgagatctggaccaaccccctgcacgccagccagggcgagagagtggccgccagaaagagatggggcctggcccagcacgtgagatgcagcggcctgtggggccacggcaccgccggcagagagagatgcagccaggacagcgccagccccgccagcagcaccggcctgcccgagggcagcgagcccgagagcagctgctgccccagaacccccgaggacggcgtggacagcgccagccccagcgcccagatcggcgccgagagaaaggccggcggcagcctgggcgaggaccccggcctgtgcatcgacggcgccggcctgggcggccccgagcagggcggcagactgacccccagagccagaagcgaggagggcgccagcagcgacagcagcgccagcaccggcagccacgagggcagcagcgagtggggcggcagaccccagggctgccccggcaaggccagagccgagaccagccagcaggaggccagcgagggcggcgaccccgccagccccgccctgagcctgagcagcctgagaagcgacgacctgcaggccgagacccagggccagggcaccgagcaggccaccggcgccgccgtgaccagagagcccctggtgctgggcctgagctgcagctgggacagcgagggcgccagcagcacccccagcacctgcaccagcagccagcagggccagagaagacacagaagcagagccagcgccatgagcagccccagcagccccggcctgggcagagtggcccccagaggccaccccagacacagccactacagaaaggacacccacagccccctggacagcagcgtgaccaagcaggtgcccagaccccccgagagaagaagagcctgccaggacggcagcgtgcccagatacagcggcagcagcagcagcaccagaacccaggccagcggcaacctgagaccccccagcagcggcagcctgcccagccaggacctgctgggcaccagcagcgccaccgtgacccccgccgtgcacagcgacttcgtgagcggcgtgagcccccacaacgcccccagcgccggctgggccggcgacgccggcagcagaacctgcagccccgcccccatccccccccacaccagcgacagctgcagcaagagcggcgccgccagcctgggcgaggaggccagagacaccccccagcccagcagccccctggtgctgcaggtgggcagacccgagcagggcgccgtgggcccccacagaagccactgctgcagccagcccggcacccagcccgcccaggaggcccagagaggccccagccccgaggccagctggctgtgcggcagatactgccccaccccccccagaggcagaccctgcccccagagaagaagcagcagctgcggcagcaccggcagcagccaccagagcaccgccagaggccccggcggcagcccccaggagggcaccagacagcccggccccacccccagccccggccccaacagcggcgccagcagaagaagcagcgccagccagggcgccggcagcagaggcctgagcgaggagaagaccctgagaagcggcggcggcccccagggccaggaggaggccagcggcgtgagccccagcagcctgcccagaagcagccccgaggccgtggtgagagagtggctggacaacatccccgaggagcccatcctgatgacctacgagctggccgacgagaccaccggcgccgccggcggcggcctgagaggccccgaggtggaccccggcgacgaccacagcctggagggcctgggcgagcccgcccaggccggccagcagagcctggagggcgaccccggccaggaccccgagcccgagggcgccctgctgggcagcagcgacaccggcccccagagcggcgagggcgtgccccagggcgccgcccccgagggcgtgagcgaggcccccgccgaggccggcgccgacagagaggcccccgccggctgcagagtgagcctgagagccctgcccggcagagtgagcgccagcacccagatcatgagagccctgatgggcagcaagcagggcagacccagcagcgtgcccgaggtgagcagacccatggccagaagactgagctgcagcgccggcgccctgatcacctgcctggccagcctgcagctgttcgaggaggacctgggcagccccgccagcaaggtgagattcaaggacagccccagataccaggagctgctgagcatcagcaaggacctgtggcccggctgcgacgtgggcgaggaccagctggacagcggcctgtgggagctgacctggagccaggccctgcccgacctgggcagccacgccatgaccgagaacttcacccccaccagcagcagcggcgtggacatcagcagcggcagcggcggcagcggcgagagcagcgtgccctgcgccatggacggcaccctggtgacccagggcaccgagctgcccctgaagaccagcaaccagagacccgacagcagaacctacgagagccccggcgacctggagaaccagcagcagtgctgcttccccaccttcctgaacgccagagcctgcgcctgcgccaccaacgaggacgaggccgagagagacagcgaggagcagagagccagcagcaacctggagcagctggccgagaacaccgtgcaggaggaggtgcagctggaggagaccaaggagggcaccgagggcgagggcctgcaggaggaggccgtgcagctggaggagaccaagaccgaggagggcctgcaggaggagggcgtgcagctggaggagaccaaggagaccgagggcgagggccagcaggaggaggaggcccagctggaggagatcgaggagaccggcggcgagggcctgcaggaggagggcgtgcagctggaggaggtgaaggagggccccgagggcggcctgcagggcgaggccctggaggagggcctgaaggaggagggcctgcccgaggagggcagcgtgcacggccaggagctgagcgaggccagcagccccgacggcaagggcagccaggaggacgaccccgtgcaggaggaggaggccggcagagccagcgccagcgccgagccctgccccgccgagggcaccgaggagcccaccgagccccccagccacctgagcgagaccgaccccagcgccagcgagagacagagcggcagccagctggagcccggcctggagaagccccccggcgccaccatgatgggccaggagcacacccaggcccagcccacccagggcgccgccgagagaagcagcagcgtggcctgcagcgccgccctggactgcgaccccatctgggtgagcgtgctgctgaagaagaccgagaaggccttcctggcccacctggccagcgccgtggccgagctgagagccagatggggcctgcaggacaacgacctgctggaccagatggccgccgagctgcagcaggacgtggcccagagactgcaggacagcaccaagagagagctgcagaagctgcagggcagagccggcagaatggtgctggagccccccagagaggccctgaccggcgagctgctgctgcagacccagcagagaagacacagactgagaggcctgagaaacctgagcgccttcagcgagagaaccctgggcctgggccccctgagcttcaccctggaggacgagcccgccctgagcaccgccctgggcagccagctgggcgaggaggccgagggcgaggagttctgcccctgcgaggcctgcgtgagaaagaaggtgagccccatgagccccaaggccaccatgggcgccaccagaggccccatcaaggaggccttcgacctgcagcagatcctgcagagaaagagaggcgagcacaccgacggcgaggccgccgaggtggcccccggcaagacccacaccgaccccaccagcaccagaaccgtgcagggcgccgagggcggcctgggccccggcctgagccagggccccggcgtggacgagggcgaggacggcgagggcagccagagactgaacagagacaaggaccccaagctgggcgaggccgagggcgacgccatggcccaggagagagagggcaagacccacaacagcgagaccagcgccggcagcgagctgggcgaggccgagcaggagggcgagggcatcagcgagagaggcgagaccggcggccagggcagcggccacgaggacaacctgcagggcgaggccgccgccggcggcgaccaggaccccggccagagcgacggcgccgagggcatcgaggcccccgaggccgagggcgaggcccagcccgagagcgagggcgtggaggcccccgaggccgagggcgacgcccaggaggccgagggcgaggcccagcccgagagcgaggacgtggaggcccccgaggccgagggcgaggcccagcccgagagcgaggacgtggagacccccgaggccgagtgggaggtgcagcccgagagcgagggcgccgaggcccccgaggccgagaaggaggcccagcccgagaccgagagcgtggaggccctggagaccgagggcgaggacgagcccgagagcgagggcgccgaggcccaggaggccgaggaggccgcccaggaggccgagggccagacccagcccgagagcgaggtgatcgagagccaggaggccgaggaggaggcccagcccgagagcgaggacgtggaggccctggaggtggaggtggagacccaggaggccgagggcgaggcccagcccgagagcgaggacgtggaggcccccgaggccgagggcgagatgcaggaggccgaggaggaggcccagcccgagagcgacggcgtggaggcccagcccaagagcgagggcgaggaggcccaggaggtggagggcgagacccagaagaccgagggcgacgcccagcccgagagcgacggcgtggaggcccccgaggccgaggaggaggcccaggaggccgagggcgaggtgcaggaggccgagggcgaggcccaccccgagagcgaggacgtggacgcccaggaggccgagggcgaggcccagcccgagagcgagggcgtggaggcccccgaggccgagggcgaggcccagaaggccgagggcatcgaggcccccgagaccgagggcgaggcccagcccgagagcgagggcatcgaggcccccgaggccgagggcgaggcccagcccgagagcgagggcgtggaggcccaggacgccgagggcgaggcccagcccgagagcgagggcatcgaggcccaggaggccgaggaggaggcccagcccgagctggagggcgtggaggcccccgaggccgagggcgaggcccagcccgagagcgagggcatcgaggcccccgaggccgagggcgaggcccagcccgagctggagggcgtggaggcccccgaggccgaggaggaggcccagcccgagcccgagggcgtggagacccccgaggccgagggcgaggcccagcccgagagcgagggcgagacccagggcgagaagaagggcagcccccaggtgagcctgggcgacggccagagcgaggaggccagcgagagcagcagccccgtgcccgaggacagacccacccccccccccagccccggcggcgacaccccccaccagagacccggcagccagaccggccccagcagcagcagagccagcagctggggcaactgctggcagaaggacagcgagaacgaccacgtgctgggcgacaccagaagccccgacgccaagagcaccggcaccccccacgccgagagaaaggccaccagaatgtaccccgagagcagcaccagcgagcaggaggaggcccccctgggcagcagaacccccgagcagggcgccagcgagggctacgacctgcaggaggaccaggccctgggcagcctggcccccaccgaggccgtgggcagagccgacggcttcggccaggacgacctggacttctag

SEQ ID NO: 254461 - DNA, 969 bp, Artificial Sequence
  derived and/or modified sequence
atggaggccgacctgagcggcttcaacatcgacgcccccagatgggaccagagaaccttcctgggcagagtgaagcacttcctgaacatcaccgaccccagaaccgtgttcgtgagcgagagagagctggactgggccaaggtgatggtggagaagagcagaatgggcgtggtgccccccggcacccaggtggagcagctgctgtacgccaagaagctgtacgacagcgccttccaccccgacaccggcgagaagatgaacgtgatcggcagaatgagcttccagctgcccggcggcatgatcatcaccggcttcatgctgcagttctacagaaccatgcccgccgtgatcttctggcagtgggtgaaccagagcttcaacgccctggtgaactacaccaacagaaacgccgccagccccaccagcgtgagacagatggccctgagctacttcaccgccaccaccaccgccgtggccaccgccgtgggcatgaacatgctgaccaagaaggccccccccctggtgggcagatgggtgcccttcgccgccgtggccgccgccaactgcgtgaacatccccatgatgagacagcaggagctgatcaagggcatctgcgtgaaggacagaaacgagaacgagatcggccacagcagaagagccgccgccatcggcatcacccaggtggtgatcagcagaatcaccatgagcgcccccggcatgatcctgctgcccgtgatcatggagagactggagaagctgcacttcatgcagaaggtgaaggtgctgcacgcccccctgcaggtgatgctgagcggctgcttcctgatcttcatggtgcccgtggcctgcggcctgttcccccagaagtgcgagctgcccgtgagctacctggagcccaagctgcaggacaccatcaaggccaagtacggcgagctggagccctacgtgtacttcaacaagggcctgtag

SEQ ID NO: 254462 - DNA, 969 bp, Artificial Sequence
  derived and/or modified sequence
atggaggcagacctgtcaggcttcaacatcgacgctccgagatgggaccagcgtacatttctagggcgcgtgaaacactttctgaacataaccgacccccgcactgtgttcgtctccgaacgggagctggactgggccaaagtaatggtggaaaagtctagaatgggggtcgttcccccagggacacaagttgagcagctgttgtatgccaaaaagctgtacgatagtgcattccacccggacaccggggagaagatgaacgtgatcggcaggatgagcttccagctcccaggcggaatgattattactggctttatgctccagttctaccgcacaatgccagctgtgatattttggcagtgggtgaaccagtcttttaatgctctcgtcaactacacaaatagaaatgcggcgtctccaacctctgttcgccagatggccctctcgtacttcacggcgaccaccacagccgtcgctaccgctgtcggtatgaacatgctcactaaaaaagcgccacccttagtaggacggtgggtgccctttgcggccgtagcagctgcaaattgtgtgaacattccaatgatgagacagcaggaactcatcaagggtatttgcgtaaaagatcgcaatgagaatgaaatagggcactctcggcgcgctgcggccattgggataactcaggtggtcattagtcgtatcactatgtccgctcccggcatgattcttctccctgtgatcatggaaagactggagaagcttcactttatgcagaaggtcaaagtgctccacgcaccactccaagtgatgctttccggttgcttcctgattttcatggttccggttgcttgcgggttgttcccacagaagtgcgaactccctgtctcctatctagaacctaagctgcaagacaccatcaaagctaaatacggcgagctggagccttacgtgtactttaataagggactgtag

SEQ ID NO: 254463 - DNA, 969 bp, Artificial Sequence
  derived and/or modified sequence
atggaggccgacctgagcggcttcaacattgatgccccccgctgggaccagaggaccttcctgggccgggtgaagcacttcctgaacatcacagaccccaggacagtgtttgtgtctgagcgggagctggactgggccaaggtgatggtggagaagagcaggatgggcgtggtgcccccaggcacccaggtggagcagctgctgtatgccaagaagctgtatgacagcgccttccacccagacaccggggagaagatgaatgtgattggaaggatgtccttccagctgcccggcggcatgatcatcaccggcttcatgctgcagttctaccgcaccatgcctgctgtgatcttctggcagtgggtgaaccagagcttcaatgccctggtgaactacaccaacagaaatgctgccagccccacctctgtgcggcagatggccctgagctacttcaccgccaccaccacagctgtggccacagctgtgggcatgaacatgctgaccaagaaggccccacccctggtgggccgctgggtgccctttgctgctgtggccgccgccaactgtgtgaacatccccatgatgaggcagcaggagctgatcaagggcatctgtgtgaaggacagaaatgaaaatgagatcggccacagccggcgggctgctgccatcggcatcacccaggtggtgatcagccgcatcaccatgtctgcccctggcatgatcctgctgcccgtcatcatggagcggctggagaagctgcacttcatgcagaaggtgaaggtgctgcacgcccccctgcaggtgatgctgagcggctgcttcctgatcttcatggtgcctgtggcctgtggcctcttcccccagaagtgtgagctgcctgtgtcctacctggagcccaagctgcaggacaccatcaaggccaagtatggagagctggagccctacgtgtacttcaacaagggcctgtag

SEQ ID NO: 254464 - DNA, 969 bp, Artificial Sequence
  derived and/or modified sequence
atggaggccgacctgagcggcttcaacatcgacgccccccggtgggaccagcgtacattcttagggagagtcaagcattttttaaacattaccgatcccaggaccgtgttcgtatcggaacgagagctcgactgggctaaagtgatggttgagaaatcccgaatgggtgtggttcctcctgggactcaagtggagcagctgctctacgcaaagaagctttatgatagcgccttccaccccgacacaggagagaagatgaacgtgatcgggcggatgagtttccagcttcccggtggtatgattatcaccggcttcatgttgcagttctatagaaccatgcctgctgtgattttctggcagtgggtgaatcagagcttcaacgccctggttaattacactaaccgaaatgctgcctcccccacatccgtgcggcagatggcccttagttacttcaccgcgaccaccaccgccgtcgccacggccgtgggcatgaacatgctcaccaagaaggcaccgcctctggttggaagatgggtaccctttgccgcggttgccgcagctaactgcgtgaacattcctatgatgagacagcaagagttgataaagggaatttgtgttaaggacagaaatgagaacgagatcggccactcccgccgcgccgcagccatcgggatcacccaggtcgttatcagtcgtatcaccatgtcagctccaggcatgatcctactgccagtgattatggagagattggagaaattacatttcatgcagaaggtcaaggtccttcacgcccccctccaagttatgctatcaggatgttttcttatattcatggttccagtggcatgcggcctatttcctcagaaatgcgagctccctgtttcctatctcgagccaaaattgcaggacaccattaaagccaagtacggcgaacttgaaccctacgtttatttcaacaagggactatag

SEQ ID NO: 254465 - DNA, 969 bp, Artificial Sequence
  derived and/or modified sequence
atggaggctgatttgagtggtttcaatatcgacgccccaaggtgggaccaaaggacatttctcggaagggtgaagcattttctgaatataaccgaccctcggacagtctttgtatctgaacgagaactcgactgggccaaggtgatggtcgagaagtctcggatgggcgtggtgccaccaggtacgcaggtagaacagcttttgtacgctaaaaaactttacgactccgcatttcatcctgacaccggggagaaaatgaatgtgataggacgcatgtccttccagttgcctgggggaatgatcattaccggctttatgctgcagttctaccgaactatgcccgctgtcatcttttggcagtgggtaaaccagtcttttaatgctttggtcaactacacaaatagaaacgccgcttcccccacatcagtccggcagatggctctgtcatacttcactgcaactactactgccgtggcaacagccgtaggcatgaatatgctgacaaagaaagcaccacccttagtgggcagatgggtgccgttcgcagcagtggctgctgcgaattgcgtgaatattcccatgatgaggcagcaagagctaatcaagggtatttgcgtcaaggataggaatgagaatgagatcggtcattctcgacgagccgcagcaatagggatcacacaggtggtgatctcacggattaccatgtcggccccaggtatgatcctgctaccagtcattatggaaaggctcgagaagttacacttcatgcagaaggtaaaggtactgcacgcccctctgcaggtcatgcttagcgggtgttttctgatcttcatggtgcccgtggcctgtgggctgtttccacagaaatgtgaactgcccgtgagctatctggagccaaagctgcaggatacgattaaggccaagtatggcgagttggaaccttacgtgtactttaacaaaggtctgtag

SEQ ID NO: 254466 - protein, 128 aa, Artificial Sequence
  derived and/or modified sequence
MEHSEGAPGDPAGTVVPQELLEEMLWFFRVEDASPWNHSILALAAVVVIISMVLLGRSIQASRKEKMQPPEKETPEVLHLDEAKDHNSLNNLRETLLSEKPNLAQVELELKERDVLSVFLPDVPETES

SEQ ID NO: 254467 - DNA, 387 bp, Artificial Sequence
  derived and/or modified sequence
atggagcacagcgagggcgcccccggcgaccccgccggcaccgtggtgccccaggagctgctggaggagatgctgtggttcttcagagtggaggacgccagcccctggaaccacagcatcctggccctggccgccgtggtggtgatcatcagcatggtgctgctgggcagaagcatccaggccagcagaaaggagaagatgcagccccccgagaaggagacccccgaggtgctgcacctggacgaggccaaggaccacaacagcctgaacaacctgagagagaccctgctgagcgagaagcccaacctggcccaggtggagctggagctgaaggagagagacgtgctgagcgtgttcctgcccgacgtgcccgagaccgagagctag

SEQ ID NO: 254468 - DNA, 387 bp, Artificial Sequence
  derived and/or modified sequence
atggagcactctgagggagctcccggcgacccagccggcaccgtggtgccccaggaacttttggaagaaatgctgtggttcttcagagtggaggatgcatcgccctggaaccatagcatcctggctctggccgcagtcgtggtcatcattagcatggttctgctcggcagaagtattcaggcttccaggaaagagaaaatgcagcccccagaaaaggagacccctgaggtgctgcacctcgatgaggctaaagaccacaatagcctgaataatctccgggagaccctgctatcggaaaagccaaaccttgctcaggttgagctcgaactgaaagagagagacgtactctcagtttttttgcccgacgttcctgaaacagaatcatag

SEQ ID NO: 254469 - DNA, 387 bp, Artificial Sequence
  derived and/or modified sequence
atggagcacagcgagggcgcccctggggaccctgctggcaccgtggtgccccaggagctgctggaggagatgctgtggttcttccgggtggaggatgccagcccctggaaccacagcatcctggccctggccgctgtggtggtgatcatctccatggtgctgctgggccgcagcatccaggccagcaggaaggagaagatgcagcccccagagaaggagaccccagaggtgctgcacctggatgaggccaaggaccacaacagcctgaacaacctgcgggagaccctgctgtctgagaagcccaacctggcccaggtggagctggagctgaaggagagagatgtgctgtctgtgttcctgcctgatgtgcctgagacagagagctag

SEQ ID NO: 254470 - DNA, 387 bp, Artificial Sequence
  derived and/or modified sequence
atggagcacagcgagggcgcccccggcgaccccgccggcaccgtggtccctcaggagctcttggaggagatgctctggttttttagagtcgaagatgcttccccatggaatcacagtattttggctttggccgccgtcgtggtgatcattagcatggtgctccttggccggtccatccaagcttctcgaaaggagaagatgcagccacctgaaaaggagacaccggaagtcctgcacctcgatgaggctaaggatcacaatagtctgaacaacctccgagaaaccctactgagtgaaaaaccaaacctggcccaggtggagctggagctgaaagaacgcgatgttcttagcgtatttttacctgatgtgcctgagaccgagtcttag

SEQ ID NO: 254471 - DNA, 940 bp, Artificial Sequence
  derived and/or modified sequence
cctgggcgtgtgctaaggccagagctaccagatgggtccagctgccgcaggctctccaggcactgtcccctaagtgacagctgttactgcctgggagagctcaagtgcaaagactatcctgttctcccataaagaggaggaaaaggaagatacagaaatcggtgctgctcccaacagcagatcaaggcagtcgtcaggaactcaggatccggggggtcttcacggcttctctgcccaggggccagaaccgaggaggccaggagggctgctggggctaaggggtctaaggacctcgttgcacacgctaccaggagcaggggcatggagcacagtgagggggctcccggagacccagccggtactgtggtaccccaggagctgctggaagagatgctttggttttttcgtgtggaagatgcatctccctggaatcattccatccttgccctggcagctgtggtggtcattataagcatggtcctcctgggaagaagcatccaggcaagcagaaaagaaaagatgcagccaccagaaaaagaaactccagaagtcctgcatttggatgaggccaaggatcacaacagcctaaacaacctaagagaaactttgctctcagaaaagccaaacttggcccaggtggaacttgagttaaaagagagagatgtgctgtcagttttccttccggatgtaccagaaactgagagctagtgagggttcagagaagccccatcctaagccagacacatgatgtgggctcagctcagtggcctgaaacctctcaggttttagagtctctcccaagaagccgcttttttctttttctttctttctttttttttttcttagcagatacaatgaatgaactgcaagcaaactaaaattctgttattaaaaaaaatcttttattaaaatgctcctggaagggagcaggtggtattgc

SEQ ID NO: 254472 - DNA, 387 bp, Artificial Sequence
  derived and/or modified sequence
atggagcattcagaaggcgcaccgggtgatcctgctggcaccgtggttccccaggaactcctggaagaaatgctgtggtttttccgagtggaggacgcttctccgtggaatcattcgatcttggccctggccgcagtggtcgttatcatcagcatggttctccttggccgatccattcaggccagccgaaaggaaaagatgcagccccctgaaaaggaaaccccagaggtgctacaccttgatgaggcgaaggatcataactccctgaacaacctccgtgaaaccctgctgtccgagaaacccaatttggcccaggtggaattggagctgaaagagagggacgtcttgtcagtcttcctcccagatgtgcccgagacagaaagctag

SEQ ID NO: 254473 - protein, 869 aa, Artificial Sequence
  derived and/or modified sequence
MAAVPTQPQSKEGPWSPESESPMLRITAPLPPGPSMAVPTLGPGEIASTTPPSRAWTPTQEGPGDMGRPWVAEVVSQGAGIGIQGTITSSTASGDDEETTTTTTIITTTITTVQTPGPCSWNFSGPEGSLDSPTDLSSPTDVGLDCFFYISVYPGYGVEIKVQNISLREGETVTVEGLGGPDPLPLANQSFLLRGQVIRSPTHQAALRFQSLPPPAGPGTFHFHYQAYLLSCHFPRRPAYGDVTVTSLHPGGSARFHCATGYQLKGARHLTCLNATQPFWDSKEPVCIAACGGVIRNATTGRIVSPGFPGNYSNNLTCHWLLEAPEGQRLHLHFEKVSLAEDDDRLIIRNGDNVEAPPVYDSYEVEYLPIEGLLSSGKHFFVELSTDSSGAAAGMALRYEAFQQGHCYEPFVKYGNFSSSTPTYPVGTTVEFSCDPGYTLEQGSIIIECVDPHDPQWNETEPACRAVCSGEITDSAGVVLSPNWPEPYGRGQDCIWGVHVEEDKRIMLDIRVLRIGPGDVLTFYDGDDLTARVLGQYSGPRSHFKLFTSMADVTIQFQSDPGTSVLGYQQGFVIHFFEVPRNDTCPELPEIPNGWKSPSQPELVHGTVVTYQCYPGYQVVGSSVLMCQWDLTWSEDLPSCQRVTSCHDPGDVEHSRRLISSPKFPVGATVQYICDQGFVLMGSSILTCHDRQAGSPKWSDRAPKCLLEQLKPCHGLSAPENGARSPEKQLHPAGATIHFSCAPGYVLKGQASIKCVPGHPSHWSDPPPICRAASLDGFYNSRSLDVAKAPAASSTLDAAHIAAAIFLPLVAMVLLVGGVYFYFSRLQGKSSLQLPRPRPRPYNRITIESAFDNPTYETGSLSFAGDERI

SEQ ID NO: 254474 - protein, 994 aa, Artificial Sequence
  derived and/or modified sequence
MRPVALLLLPSLLALLAHGLSLEAPTVGKGQAPGIEETDGELTAAPTPEQPERGVHFVTTAPTLKLLNHHPLLEEFLQEGLEKGDEELRPALPFQPDPPAPFTPSPLPRLANQDSRPVFTSPTPAMAAVPTQPQSKEGPWSPESESPMLRITAPLPPGPSMAVPTLGPGEIASTTPPSRAWTPTQEGPGDMGRPWVAEVVSQGAGIGIQGTITSSTASGDDEETTTTTTIITTTITTVQTPGPCSWNFSGPEGSLDSPTDLSSPTDVGLDCFFYISVYPGYGVEIKVQNISLREGETVTVEGLGGPDPLPLANQSFLLRGQVIRSPTHQAALRFQSLPPPAGPGTFHFHYQAYLLSCHFPRRPAYGDVTVTSLHPGGSARFHCATGYQLKGARHLTCLNATQPFWDSKEPVCIAACGGVIRNATTGRIVSPGFPGNYSNNLTCHWLLEAPEGQRLHLHFEKVSLAEDDDRLIIRNGDNVEAPPVYDSYEVEYLPIEGLLSSGKHFFVELSTDSSGAAAGMALRYEAFQQGHCYEPFVKYGNFSSSTPTYPVGTTVEFSCDPGYTLEQGSIIIECVDPHDPQWNETEPACRAVCSGEITDSAGVVLSPNWPEPYGRGQDCIWGVHVEEDKRIMLDIRVLRIGPGDVLTFYDGDDLTARVLGQYSGPRSHFKLFTSMADVTIQFQSDPGTSVLGYQQGFVIHFFEVPRNDTCPELPEIPNGWKSPSQPELVHGTVVTYQCYPGYQVVGSSVLMCQWDLTWSEDLPSCQRVTSCHDPGDVEHSRRLISSPKFPVGATVQYICDQGFVLMGSSILTCHDRQAGSPKWSDRAPKCLLEQLKPCHGLSAPENGARSPEKQLHPAGATIHFSCAPGYVLKGQASIKCVPGHPSHWSDPPPICRAASLDGFYNSRSLDVAKAPAASSTLDAAHIAAAIFLPLVAMVLLVGGVYFYFSRLQGKSSLQLPRPRPRPYNRITIESAFDNPTYETGSLSFAGDERI

SEQ ID NO: 254475 - DNA, 2985 bp, Artificial Sequence
  derived and/or modified sequence
atgagacccgtggccctgctgctgctgcccagcctgctggccctgctggcccacggcctgagcctggaggcccccaccgtgggcaagggccaggcccccggcatcgaggagaccgacggcgagctgaccgccgcccccacccccgagcagcccgagagaggcgtgcacttcgtgaccaccgcccccaccctgaagctgctgaaccaccaccccctgctggaggagttcctgcaggagggcctggagaagggcgacgaggagctgagacccgccctgcccttccagcccgacccccccgcccccttcacccccagccccctgcccagactggccaaccaggacagcagacccgtgttcaccagccccacccccgccatggccgccgtgcccacccagccccagagcaaggagggcccctggagccccgagagcgagagccccatgctgagaatcaccgcccccctgccccccggccccagcatggccgtgcccaccctgggccccggcgagatcgccagcaccaccccccccagcagagcctggacccccacccaggagggccccggcgacatgggcagaccctgggtggccgaggtggtgagccagggcgccggcatcggcatccagggcaccatcaccagcagcaccgccagcggcgacgacgaggagaccaccaccaccaccaccatcatcaccaccaccatcaccaccgtgcagacccccggcccctgcagctggaacttcagcggccccgagggcagcctggacagccccaccgacctgagcagccccaccgacgtgggcctggactgcttcttctacatcagcgtgtaccccggctacggcgtggagatcaaggtgcagaacatcagcctgagagagggcgagaccgtgaccgtggagggcctgggcggccccgaccccctgcccctggccaaccagagcttcctgctgagaggccaggtgatcagaagccccacccaccaggccgccctgagattccagagcctgcccccccccgccggccccggcaccttccacttccactaccaggcctacctgctgagctgccacttccccagaagacccgcctacggcgacgtgaccgtgaccagcctgcaccccggcggcagcgccagattccactgcgccaccggctaccagctgaagggcgccagacacctgacctgcctgaacgccacccagcccttctgggacagcaaggagcccgtgtgcatcgccgcctgcggcggcgtgatcagaaacgccaccaccggcagaatcgtgagccccggcttccccggcaactacagcaacaacctgacctgccactggctgctggaggcccccgagggccagagactgcacctgcacttcgagaaggtgagcctggccgaggacgacgacagactgatcatcagaaacggcgacaacgtggaggccccccccgtgtacgacagctacgaggtggagtacctgcccatcgagggcctgctgagcagcggcaagcacttcttcgtggagctgagcaccgacagcagcggcgccgccgccggcatggccctgagatacgaggccttccagcagggccactgctacgagcccttcgtgaagtacggcaacttcagcagcagcacccccacctaccccgtgggcaccaccgtggagttcagctgcgaccccggctacaccctggagcagggcagcatcatcatcgagtgcgtggacccccacgacccccagtggaacgagaccgagcccgcctgcagagccgtgtgcagcggcgagatcaccgacagcgccggcgtggtgctgagccccaactggcccgagccctacggcagaggccaggactgcatctggggcgtgcacgtggaggaggacaagagaatcatgctggacatcagagtgctgagaatcggccccggcgacgtgctgaccttctacgacggcgacgacctgaccgccagagtgctgggccagtacagcggccccagaagccacttcaagctgttcaccagcatggccgacgtgaccatccagttccagagcgaccccggcaccagcgtgctgggctaccagcagggcttcgtgatccacttcttcgaggtgcccagaaacgacacctgccccgagctgcccgagatccccaacggctggaagagccccagccagcccgagctggtgcacggcaccgtggtgacctaccagtgctaccccggctaccaggtggtgggcagcagcgtgctgatgtgccagtgggacctgacctggagcgaggacctgcccagctgccagagagtgaccagctgccacgaccccggcgacgtggagcacagcagaagactgatcagcagccccaagttccccgtgggcgccaccgtgcagtacatctgcgaccagggcttcgtgctgatgggcagcagcatcctgacctgccacgacagacaggccggcagccccaagtggagcgacagagcccccaagtgcctgctggagcagctgaagccctgccacggcctgagcgcccccgagaacggcgccagaagccccgagaagcagctgcaccccgccggcgccaccatccacttcagctgcgcccccggctacgtgctgaagggccaggccagcatcaagtgcgtgcccggccaccccagccactggagcgaccccccccccatctgcagagccgccagcctggacggcttctacaacagcagaagcctggacgtggccaaggcccccgccgccagcagcaccctggacgccgcccacatcgccgccgccatcttcctgcccctggtggccatggtgctgctggtgggcggcgtgtacttctacttcagcagactgcagggcaagagcagcctgcagctgcccagacccagacccagaccctacaacagaatcaccatcgagagcgccttcgacaaccccacctacgagaccggcagcctgagcttcgccggcgacgagagaatctag

SEQ ID NO: 254476 - DNA, 2985 bp, Artificial Sequence
  derived and/or modified sequence
atgagaccggtggcactactcctcctgccaagcttgctggccctgctggcacatggcctgtctctagaggctcctactgtgggcaaaggtcaggcccctgggatcgaggagacagatggcgagctgactgctgcacccacaccagaacagccagaacggggggttcactttgtgactacagctccgacattgaagctgctcaatcatcatccactcttggaggagttcctccaggagggactggaaaaaggagacgaagagttacgtcctgctctgccttttcaacctgatcctcccgcaccgtttactcctagtcccctgcccagactggctaaccaggattctaggcccgtattcacctcaccgactcccgctatggccgctgtgcccacccagccacagagcaaggaaggcccatggagtccagaaagcgagtcacccatgctacgtattaccgctcctctacctcctgggccctccatggctgtgccaacactaggtcctggggaaattgcctctaccacacctccaagcagggcttggacacctactcaggagggccccggtgatatgggccgtccatgggttgctgaagttgtgtctcagggagctggcattggtattcagggaacgatcacctcatctacagctagtggggacgatgaggagacaacaaccaccacgaccattattactacaactataacaaccgttcagactcccgggccttgtagctggaacttctccggccctgagggctcccttgatagtcctacggacctctccagtcctactgacgtaggactggattgcttcttttacatctcggtctaccccggttatggcgtggaaattaaggtgcagaacatctccctgcgagagggggagaccgtgacagtcgagggactcggtggccccgaccctctgccactggccaatcagagcttcctcctacgaggacaggtcattcggtcgcctacccaccaagccgcccttcggttccagtctctccctcctccagccggcccagggacatttcattttcactaccaggcatacctcctttcttgccatttcccacggaggcctgcctacggcgacgttacagtcacatctctccatcctggtggctcggctcggtttcactgcgcaacaggctaccagctgaagggcgctcggcatctgacttgtctgaatgcgacccagcctttttgggatagtaaggagcctgtatgcattgctgcctgtggtggcgtaattagaaatgcaaccaccggacggatcgtgtctcctgggttccctggaaactactcaaacaacttaacctgccattggctcctggaggcccccgagggccagcgactgcaccttcactttgagaaggtctccctggccgaagatgacgatcgcctgatcatacgaaatggtgacaatgtcgaggccccgcccgtgtacgattcctatgaggtcgagtatttgccaatcgaagggctgctgtcctccggcaagcacttcttcgttgaactctccacggatagtagcggagccgccgccggaatggccctgcggtatgaggcattccaacaaggtcactgttacgaaccttttgtgaaatacggcaatttcagcagcagcactcctacctaccctgtcggaacaactgtggagttctcttgcgaccccggttacacacttgagcaaggttcaattattatagagtgtgtggatccacacgacccgcagtggaatgaaacagagcccgcgtgtcgggccgtgtgtagtggtgaaatcacggactcagccggcgtggttctaagtcctaattggcccgagccatatggacgcggacaggactgcatttggggagtgcacgtcgaggaggataaacgaataatgctcgacatacgggttctccgtataggccctggagacgtgctgactttctatgacggagatgacttaactgcccgcgtattaggacaatatagtggaccccgctcgcacttcaagctgtttacatcaatggcagacgtgacaatccagttccagagcgatcccggaacatccgtactgggatatcaacaagggttcgtcatacactttttcgaagttccaagaaacgacacatgtccagaacttcccgaaattccaaacggctggaaatccccctcacagccagagttggtgcacggaaccgttgtgacctaccagtgctacccagggtaccaggtcgtgggaagctctgtcctgatgtgccagtgggatctgacctggagcgaggatcttcctagctgccagcgtgtgacttcctgccacgatccaggcgacgtggagcattcaaggagactgatttcatcccctaaattccccgtgggggcgacggtccagtacatctgcgaccagggcttcgtgcttatggggagcagcattctcacatgtcatgaccggcaagcggggagtccaaaatggtctgatcgtgccccaaagtgccttcttgaacagctgaaaccttgccacggactatccgcaccagaaaacggcgctcgcagccccgaaaagcagctgcaccccgcaggggccaccattcacttcagttgtgcacccggttacgttttgaagggccaggcctccatcaaatgcgttccaggccatccaagccactggtctgacccacccccaatctgccgagcagccagtctcgacgggttctacaatagcaggtctttagacgtggccaaggccccggcggccagcagcactttagacgcagcccatatagccgctgcaatcttcttgcctctagtggcaatggttctgctggtagggggggtttatttctattttagtagactccaaggcaagtcttcactgcaactgccccgccctaggcccagaccctataatcgaattacaattgaaagcgccttcgataaccccacctatgaaaccggtagcctgtcgttcgccggcgatgaaaggatttag

SEQ ID NO: 254477 - DNA, 2985 bp, Artificial Sequence
  derived and/or modified sequence
atgaggcctgtggccctgctgctgctgcccagcctgctggccctgctggcccacggcctgagcctggaggcccccaccgtgggcaagggccaggcccctggcatcgaggagacagatggagagctgacagctgcccccaccccagagcagcctgagcggggcgtgcactttgtgaccacagcccccaccctgaagctgctgaaccaccaccccctgctggaggagttcctgcaggagggcctggagaagggagatgaggagctgcggcctgccctgcccttccagcctgaccccccagcccccttcacccccagccccctgccccggctggccaaccaggacagcaggcctgtgttcaccagccccaccccagccatggctgctgtgcccacccagccccagagcaaggagggcccctggagccctgagagcgagagccccatgctgcgcatcacagcccccctgcccccaggccccagcatggctgtgcccaccctgggccctggagaaattgccagcaccaccccacccagccgggcctggacccccacccaggagggccctggggacatgggccggccctgggtggccgaggtggtgtcccagggcgccggcatcggcatccagggcaccatcaccagcagcacagccagcggagatgatgaggagaccaccaccaccaccaccatcatcaccaccaccatcaccaccgtgcagaccccaggcccctgctcctggaacttcagcggccctgagggcagcctggacagccccacagacctgagcagccccacagatgtgggcctggactgcttcttctacatctctgtgtacccaggctatggagtggagatcaaggtgcagaacatcagcctgcgggagggggagaccgtgacagtggagggcctgggcggccctgaccccctgcccctggccaaccagagcttcctgctgcggggccaggtgatccgcagccccacccaccaggccgccctgcgcttccagagcctgcccccacctgctggccctggcaccttccacttccactaccaggcctacctgctgagctgccacttccccaggaggcctgcctatggagatgtgacagtgaccagcctgcaccctgggggcagcgcccgcttccactgtgccaccggctaccagctgaagggggcccggcacctgacctgcctgaatgccacccagcccttctgggacagcaaggagcctgtgtgcatcgccgcctgtggcggcgtcatcagaaatgccaccaccggccgcatcgtgtccccaggcttccctggcaactacagcaacaacctgacctgccactggctgctggaggcccctgagggccagaggctgcacctgcactttgagaaggtgtccctggccgaggatgatgacaggctcatcatcagaaatggagacaacgtggaggcccctcctgtgtatgacagctatgaggtggagtacctgcccatcgagggcctgctgagcagcggcaagcacttctttgtggagctgagcacagacagcagcggggctgctgctggcatggccctgcgctatgaggccttccagcagggccactgctatgagccctttgtgaagtatggcaacttcagcagcagcacccccacctaccctgtgggcaccaccgtggagttcagctgtgaccccggctacaccctggagcagggcagcatcatcattgaatgtgtggacccccatgacccccagtggaatgaaacagagcccgcctgcagagctgtgtgcagcggggagatcacagacagcgctggggtggtgctgagccccaactggccagagccctacggccggggccaggactgcatctggggcgtgcacgtggaggaggacaagaggatcatgctggacatccgggtgctgcgcatcggccctggagatgtgctgaccttctatgatggagatgacctgacagcccgggtgctgggccagtacagcggccccaggagccacttcaagctgttcacctccatggctgatgtgaccatccagttccagagcgaccccggcacctctgtgctgggctaccagcagggctttgtgatccacttctttgaggtgcccagaaatgacacctgcccagagctgcctgagatccccaacggctggaagagccccagccagcctgagctggtgcacggcaccgtggtgacctaccagtgctacccaggctaccaggtggtgggcagctctgtgctgatgtgccagtgggacctgacctggagcgaggacctgcccagctgccagagggtgaccagctgccacgaccctggagatgtggagcacagcagaagactcatcagcagccccaagtttcctgtgggcgccaccgtgcagtacatctgtgaccagggctttgtgctgatgggcagcagcatcctgacctgccacgaccggcaggccggcagccccaagtggagcgaccgggcccccaagtgcctgctggagcagctgaagccctgccacggcctgagcgccccagaaaatggagcccggagccctgagaagcagctgcaccctgctggggccaccatccacttcagctgtgcccctggctacgtgctgaagggccaggccagcatcaagtgtgtgcccggccaccccagccactggagcgaccccccacccatctgcagagctgccagcctggatggcttctacaacagccgcagcctggatgtggccaaggccccagctgccagcagcaccctggatgctgcccacatcgccgccgccatcttcctgcccctggtggccatggtgctgctggtgggcggcgtgtacttctacttcagccggctgcagggcaagagcagcctgcagctgccccggccccggccccggccctacaaccgcatcaccatcgagagcgcctttgacaaccccacctatgaaacaggcagcctgagctttgctggagatgagcgcatctag

SEQ ID NO: 254478 - DNA, 2985 bp, Artificial Sequence
  derived and/or modified sequence
atgcggcccgtggccctgctgctgctgcccagcctgctggccctgttagcgcacggattgagtctggaagctccaacggtaggaaaaggccaagctcccggaatcgaggagaccgacggcgaattaacagctgcacccacgccagagcaacccgagaggggagtccactttgtgacaacagcccccaccttgaaacttctgaatcatcaccccctcctggaagagttcctccaggagggtttggagaagggggacgaagagcttagacccgcattgccttttcagccggacccacctgctccctttaccccgtctccactgcctagactggccaatcaagactcccggccagtttttacgagtcccacccctgccatggccgcagtgcctactcagccgcagtcaaaggaaggtccttggagcccagagtctgagtctcctatgctgaggattacagccccgttgccccctgggccatcaatggcagtgccaacactcggcccaggagagatcgccagcaccacccccccttccagagcgtggactcctacacaagagggcccgggtgacatggggcgaccctgggtggccgaggtagtgtcacagggcgcaggaatcggcattcagggcactatcactagcagcaccgcatccggcgacgatgaggagacaacaaccacaacaacgatcataaccaccaccattacgaccgtgcagacacctggaccttgtagctggaacttttcaggacccgagggctcccttgatagccccactgacctttcatcgcctactgacgtgggcctcgactgctttttttatatttccgtgtatccgggctatggggtcgaaatcaaggtgcaaaacatcagcttgcgggagggagaaaccgtaaccgttgaggggctgggcggccctgatccactccccctagcaaatcaatcgtttcttctccgtgggcaggtgattcgcagtcctacgcatcaggccgccctccgtttccagagtctgcctcctccagcggggcccggaacctttcactttcactatcaggcgtatttgctgagctgtcattttccacggagaccagcctatggggatgtgaccgtaacctcccttcaccccgggggatctgcacgttttcactgcgccacgggctaccagttgaagggagcgagacacctgacttgtctgaatgcgacacagcccttctgggatagcaaagagcccgtgtgcatcgctgcctgtggtggagtaattcggaatgcgaccacaggccgaattgttagtccaggcttcccgggcaattactcaaacaacctcacttgccactggctgcttgaggctccggaaggacaaaggctccacctccactttgagaaggtcagtctcgccgaagacgatgatcgcttaattatccgcaatggcgacaacgtggaggctcctccagtctatgactcgtacgaagtagaatacctgcctatcgagggcttgcttagctcggggaaacacttttttgttgaattatccactgatagttctggggctgcagccggaatggcattaaggtacgaggcatttcagcaggggcattgctatgagccctttgtgaagtacgggaattttagctcaagtacaccaacttaccccgtggggaccaccgtggaattctcttgtgaccccgggtatacacttgaacaagggtctatcatcatcgagtgcgtagacccacacgatcctcagtggaatgaaaccgagcccgcctgtcgggcagtgtgttcaggagagatcactgacagtgccggcgtggttctgtcccctaactggcctgaaccctatggccgaggtcaggactgcatctggggggtacatgtggaggaggataaacgaatcatgctggatatcagggtgcttcgaatcgggccaggtgatgttctgaccttctatgacggagatgacttaaccgctagagtccttggtcagtattccggccctagatcacattttaaactgttcacttccatggccgacgttaccattcagtttcagtcagatccaggaacatctgtgcttggttatcagcaggggttcgtcatccatttttttgaggtccctcggaatgatacctgtccagaattgcccgagattccaaacgggtggaagtcaccatcgcagccagaactcgttcacggaacagtggtgacgtatcagtgctatccgggctatcaggtagtgggatccagcgtcctgatgtgccaatgggatctaacctggtcagaagacctgccctcgtgtcagcgcgtgacttcttgccatgatcccggagatgtcgagcactctagaagactgatttctagcccaaaatttccagttggcgccaccgtccagtacatctgcgaccagggttttgtccttatgggcagctctatactgacatgccatgatagacaggcaggcagtcctaagtggagcgaccgcgctcccaagtgcctgctagaacaactgaaaccgtgtcatgggctgagtgccccagaaaacggggctcgatctcctgagaagcagctccaccctgcgggtgctaccatacacttctcatgcgcccccggctacgtcctgaaaggccaagccagcatcaaatgcgttccaggtcatccatcccactggtctgatccaccgcctatctgcagagctgcttccctcgacggattttacaactccaggagcttggacgtggccaaagccccagcggccagcagtactcttgatgcagcccacatagcggccgctatatttctcccacttgtggccatggtgttgctcgtgggcggcgtgtacttctacttctccaggctgcagggcaaatcaagcctgcaactgccgagacctcgaccgcgtccttacaataggatcactattgaatcggctttcgataacccaacctatgagactggctcactgagttttgctggcgatgagcgcatttag

SEQ ID NO: 254479 - DNA, 2985 bp, Artificial Sequence
  derived and/or modified sequence
atgcgcccagtggcattactgcttctgccttctcttttagcgttgctggctcacggactcagccttgaggccccaactgtggggaagggtcaagccccaggcattgaagagactgacggagaactgaccgctgcacctacccccgagcagcctgagaggggggtccacttcgttactacggcccctacacttaaactgctaaaccatcatccgttgcttgaggagttcctccaggagggcctggaaaaaggtgatgaagagctgaggcctgccctgccatttcagcccgatcctcccgcacccttcacaccctctcccctacccagactggccaaccaggactctcgacccgtgtttacatcacctactccggctatggcagccgtgccgacacaaccccagagcaaggagggaccctggagccccgagtccgagagccctatgctgaggattactgctcccctgccgccaggaccctctatggcagtgccaaccttgggacccggtgagattgcctctaccacccccccatctagagcatggaccccgactcaggaaggccctggcgatatgggtcggccatgggtagctgaggtggtgtcacagggtgccggaattggtatccagggaacaatcacctccagcaccgcctcgggagatgatgaggagactacaaccaccactacgattatcaccacaacaattacgactgtgcaaacacccggaccttgtagttggaacttctctggtcctgagggttcactcgactctcctacagatttgtcttctcccactgatgtaggattggactgctttttctacatcagcgtctatcccggatacggcgtggaaatcaaagtgcagaacatatctcttagagagggcgagactgtgactgttgagggcttgggaggccctgatccacttccattagccaatcagagtttcctcttgcgcggacaggtaataaggagcccaacgcaccaggccgcacttagatttcaatcacttcctccacccgcaggccctggcacttttcacttccactatcaggcctacctcctgagctgtcactttccaagaagacccgcttacggtgatgtgaccgtcacatctctccaccccggaggttcagctcgctttcattgtgctactggctatcagctaaagggcgctagacatctgacttgtctgaatgccacacaacccttttgggactctaaggaacccgtatgcatcgctgcctgcggcggagtgatccggaatgccaccactggtcggatcgtcagcccaggatttcccggtaattactctaataacctgacgtgtcactggttgctggaagccccagaaggacaacgcctccacctgcactttgagaaggtctcattggccgaggacgatgacagattgattatacgtaacggtgacaatgtggaggcccctcccgtgtacgactcttatgaagtggagtatctgcccatcgagggtctgctgtcatctggaaaacattttttcgttgagctgtcaacagacagcagcggggctgctgctgggatggctcttaggtacgaggcttttcagcagggacactgctacgagccatttgtgaagtacggcaactttagctcatccacgcccacctacccagtcgggacaacagttgaattttcctgcgatccagggtatactctcgagcaggggtcaattatcatcgagtgcgtggacccgcatgatccacagtggaacgagacggagcccgcttgcagagccgtttgttccggggaaatcactgactccgctggcgtcgtgttaagcccaaattggcctgaaccttacggcagaggccaggattgcatctggggagtacatgtggaagaagataaacgcatcatgctggacattcgggtgctccgaatcggacctggcgacgtactgacattttacgacggggatgatctgacagctcgggttctgggccagtacagcggcccaagatcacatttcaagcttttcacaagcatggctgacgtgacgattcagtttcagagcgatcccggtacaagcgtgctgggttaccagcagggctttgttatccattttttcgaagtaccccgaaatgacacttgtcccgagttacccgaaatccctaacgggtggaagtctccctcacaacctgagctggtacatggcactgtggtgacctaccagtgctatcctggatatcaagtagtgggaagcagtgttctgatgtgccaatgggatctcacgtggtcggaggacttgccatcctgtcaaagagtgacatcttgccacgatccgggagacgtggagcactccaggcgcttaatctcttcaccaaagttccccgtgggtgccaccgtgcagtacatatgtgaccagggattcgtgttaatgggtagcagcatcctgacttgccacgatcggcaggctggttcccccaaatggtcagaccgggctccaaagtgccttttagaacaactcaaaccttgccacgggctgagcgccccagaaaacggcgctcgttcaccagagaagcaattgcacccggcaggcgctaccatccatttctcttgtgccccaggatatgtcctgaaaggtcaggcgagtattaagtgcgtgccgggacatccaagccactggtcagaccccccacccatttgcagggcggcatcactggatggcttttacaactccaggtctctcgatgtagcgaaggccccagcggcttcgtccaccctcgatgctgcacacattgccgctgccatctttctgcctctggtggcgatggtgctgctcgtcggcggagtttacttttacttcagtcggctgcagggaaaatcttctctgcagctccctcggccaaggccacgcccttataataggatcaccattgagtccgcttttgataatccaacctacgagacagggtccttgtctttcgccggtgatgaaaggatctag

SEQ ID NO: 254480 - DNA, 3677 bp, Artificial Sequence
  derived and/or modified sequence
aagacggaactgccacaagggcacgcgggcctcaccagctgcctcactctcggatgtcttcccaggtcacccttgacgccctcaggactctctttagaggccccaaccgtggggaaaggacaagccccaggcatcgaggagacagatggcgagctgacagcagcccccacacctgagcagccagaacgaggcgtccactttgtcacaacagcccccaccttgaagctgctcaaccaccacccgctgcttgaggaattcctacaagaggggctggaaaagggagatgaggagctgaggccagcactgcccttccagcctgacccacctgcacccttcaccccaagtccccttccccgcctggccaaccaggacagccgccctgtctttaccagccccactccagccatggctgcggtacccactcagccccagtccaaggagggaccctggagtccggagtcagagtcccctatgcttcgaatcacagctcccctacctccagggcccagcatggcagtgcccaccctaggcccaggggagatagccagcactacaccccccagcagagcctggacaccaacccaagagggtcctggagacatgggaaggccgtgggttgcagaggttgtgtcccagggcgcagggatcgggatccaggggaccatcacctcctccacagcttcaggagatgatgaggagaccaccactaccaccaccatcatcaccaccaccatcaccacagtccagacaccaggcccttgtagctggaatttctcaggcccagagggctctctggactcccctacagacctcagctcccccactgatgttggcctggactgcttcttctacatctctgtctaccctggctatggcgtggaaatcaaggtccagaatatcagcctccgggaaggggagacagtgactgtggaaggcctgggggggcctgacccactgcccctggccaaccagtctttcctgctgcggggccaagtcatccgcagccccacccaccaagcggccctgaggttccagagcctcccgccaccggctggccctggcaccttccatttccattaccaagcctatctcctgagctgccactttccccgtcgtccagcttatggagatgtgactgtcaccagcctccacccagggggtagtgcccgcttccattgtgccactggctaccagctgaagggcgccaggcatctcacctgtctcaatgccacccagcccttctgggattcaaaggagcccgtctgcatcgctgcttgcggcggagtgatccgcaatgccaccaccggccgcatcgtctctccaggcttcccgggcaactacagcaacaacctcacctgtcactggctgcttgaggctcctgagggccagcggctacacctgcactttgagaaggtttccctggcagaggatgatgacaggctcatcattcgcaatggggacaacgtggaggccccaccagtgtatgattcctatgaggtggaatacctgcccattgagggcctgctcagctctggcaaacacttctttgttgagctcagtactgacagcagcggggcagctgcaggcatggccctgcgctatgaggccttccagcagggccattgctatgagccctttgtcaaatacggtaacttcagcagcagcacacccacctaccctgtgggtaccactgtggagttcagctgcgaccctggctacaccctggagcagggctccatcatcatcgagtgtgttgacccccacgacccccagtggaatgagacagagccagcctgccgagccgtgtgcagcggggagatcacagactcggctggcgtggtactctctcccaactggccagagccctacggtcgtgggcaggattgtatctggggtgtgcatgtggaagaggacaagcgcatcatgctggacatccgagtgctgcgcataggccctggtgatgtgcttaccttctatgatggggatgacctgacggcccgggttctgggccagtactcagggccccgtagccacttcaagctctttacctccatggctgatgtcaccattcagttccagtcggaccccgggacctcagtgctgggctaccagcagggcttcgtcatccacttctttgaggtgccccgcaatgacacatgtccggagctgcctgagatccccaatggctggaagagcccatcgcagcctgagctagtgcacggcaccgtggtcacttaccagtgctaccctggctaccaggtagtgggatccagtgtcctcatgtgccagtgggacctaacttggagtgaggacctgccctcatgccagagggtgacttcctgccacgatcctggagatgtggagcacagccgacgcctcatatccagccccaagtttcccgtgggggccaccgtgcaatatatctgtgaccagggttttgtgctgatgggcagctccatcctcacctgccatgatcgccaggctggcagccccaagtggagtgaccgggcccctaaatgtctcctggaacagctcaagccatgccatggtctcagtgcccctgagaatggtgcccgaagtcctgagaagcagctacacccagcaggggccaccatccacttctcgtgtgcccctggctatgtgctgaagggccaggccagcatcaagtgtgtgcctgggcacccctcgcattggagtgaccccccacccatctgtagggctgcctctctggatgggttctacaacagtcgcagcctggatgttgccaaggcacctgctgcctccagcaccctggatgctgcccacattgcagctgccatcttcttgccactggtggcgatggtgttgttggtaggaggtgtatacttctacttctccaggctccagggaaaaagctccctgcagctgccccgcccccgcccccgcccctacaaccgcattaccatagagtcagcgtttgacaatccaacttacgagactggatctctttcctttgcaggagacgagagaatatgaagtctccatctaggtgggggcagtctagggaagtcaactcagacttgcaccacagtccagcagcaaggctccttgcttcctgctgtccctccacctcctgtatataccacctaggaggagatgccaccaagccctcaagaagttgtgcccttccccgcctgcgatgcccaccatggcctattttcttggtgtcattgcccacttggggcccttcattgggcccatgtcagggggcatctacctgtgggaagaacatagctggagcacaagcatcaacagccagcatcctgagcctcctcatgccctggaccagcctggaacacactagcagagcaggagtacctttctccacatgaccaccatcccgccctggcatggcaacctgcagcaggattaacttgaccatggtgggaactgcaccagggtactcctcacagcgccatcaccaatggccaaaactcctctcaacggtgacctctgggtagtcctggcatgccaacatcagcctcttgggaggtctctagttctctaaagttctggacagttctgcctcctgccctgtcccagtggaggcagtaattctaggagatcctaaggggttcagggggaccctacccccacctcaggttgggcttccctgggcactcatgctccacaccaaa

SEQ ID NO: 254481 - DNA, 4198 bp, Artificial Sequence
  derived and/or modified sequence
gattctgtcaggcgctggcggcggcagcggcggtgacggctgcggccccgctccctctacccggccggacccggctctgcccccgcgcccaagccccaccaagccccccgccctcccgccgcggtcccagcccagggcgcggccgcaaccagcaccatgcgcccggtagccctgctgctcctgccctcgctgctggcgctcctggctcacggactctctttagaggccccaaccgtggggaaaggacaagccccaggcatcgaggagacagatggcgagctgacagcagcccccacacctgagcagccagaacgaggcgtccactttgtcacaacagcccccaccttgaagctgctcaaccaccacccgctgcttgaggaattcctacaagaggggctggaaaagggagatgaggagctgaggccagcactgcccttccagcctgacccacctgcacccttcaccccaagtccccttccccgcctggccaaccaggacagccgccctgtctttaccagccccactccagccatggctgcggtacccactcagccccagtccaaggagggaccctggagtccggagtcagagtcccctatgcttcgaatcacagctcccctacctccagggcccagcatggcagtgcccaccctaggcccaggggagatagccagcactacaccccccagcagagcctggacaccaacccaagagggtcctggagacatgggaaggccgtgggttgcagaggttgtgtcccagggcgcagggatcgggatccaggggaccatcacctcctccacagcttcaggagatgatgaggagaccaccactaccaccaccatcatcaccaccaccatcaccacagtccagacaccaggcccttgtagctggaatttctcaggcccagagggctctctggactcccctacagacctcagctcccccactgatgttggcctggactgcttcttctacatctctgtctaccctggctatggcgtggaaatcaaggtccagaatatcagcctccgggaaggggagacagtgactgtggaaggcctgggggggcctgacccactgcccctggccaaccagtctttcctgctgcggggccaagtcatccgcagccccacccaccaagcggccctgaggttccagagcctcccgccaccggctggccctggcaccttccatttccattaccaagcctatctcctgagctgccactttccccgtcgtccagcttatggagatgtgactgtcaccagcctccacccagggggtagtgcccgcttccattgtgccactggctaccagctgaagggcgccaggcatctcacctgtctcaatgccacccagcccttctgggattcaaaggagcccgtctgcatcgctgcttgcggcggagtgatccgcaatgccaccaccggccgcatcgtctctccaggcttcccgggcaactacagcaacaacctcacctgtcactggctgcttgaggctcctgagggccagcggctacacctgcactttgagaaggtttccctggcagaggatgatgacaggctcatcattcgcaatggggacaacgtggaggccccaccagtgtatgattcctatgaggtggaatacctgcccattgagggcctgctcagctctggcaaacacttctttgttgagctcagtactgacagcagcggggcagctgcaggcatggccctgcgctatgaggccttccagcagggccattgctatgagccctttgtcaaatacggtaacttcagcagcagcacacccacctaccctgtgggtaccactgtggagttcagctgcgaccctggctacaccctggagcagggctccatcatcatcgagtgtgttgacccccacgacccccagtggaatgagacagagccagcctgccgagccgtgtgcagcggggagatcacagactcggctggcgtggtactctctcccaactggccagagccctacggtcgtgggcaggattgtatctggggtgtgcatgtggaagaggacaagcgcatcatgctggacatccgagtgctgcgcataggccctggtgatgtgcttaccttctatgatggggatgacctgacggcccgggttctgggccagtactcagggccccgtagccacttcaagctctttacctccatggctgatgtcaccattcagttccagtcggaccccgggacctcagtgctgggctaccagcagggcttcgtcatccacttctttgaggtgccccgcaatgacacatgtccggagctgcctgagatccccaatggctggaagagcccatcgcagcctgagctagtgcacggcaccgtggtcacttaccagtgctaccctggctaccaggtagtgggatccagtgtcctcatgtgccagtgggacctaacttggagtgaggacctgccctcatgccagagggtgacttcctgccacgatcctggagatgtggagcacagccgacgcctcatatccagccccaagtttcccgtgggggccaccgtgcaatatatctgtgaccagggttttgtgctgatgggcagctccatcctcacctgccatgatcgccaggctggcagccccaagtggagtgaccgggcccctaaatgtctcctggaacagctcaagccatgccatggtctcagtgcccctgagaatggtgcccgaagtcctgagaagcagctacacccagcaggggccaccatccacttctcgtgtgcccctggctatgtgctgaagggccaggccagcatcaagtgtgtgcctgggcacccctcgcattggagtgaccccccacccatctgtagggctgcctctctggatgggttctacaacagtcgcagcctggatgttgccaaggcacctgctgcctccagcaccctggatgctgcccacattgcagctgccatcttcttgccactggtggcgatggtgttgttggtaggaggtgtatacttctacttctccaggctccagggaaaaagctccctgcagctgccccgcccccgcccccgcccctacaaccgcattaccatagagtcagcgtttgacaatccaacttacgagactggatctctttcctttgcaggagacgagagaatatgaagtctccatctaggtgggggcagtctagggaagtcaactcagacttgcaccacagtccagcagcaaggctccttgcttcctgctgtccctccacctcctgtatataccacctaggaggagatgccaccaagccctcaagaagttgtgcccttccccgcctgcgatgcccaccatggcctattttcttggtgtcattgcccacttggggcccttcattgggcccatgtcagggggcatctacctgtgggaagaacatagctggagcacaagcatcaacagccagcatcctgagcctcctcatgccctggaccagcctggaacacactagcagagcaggagtacctttctccacatgaccaccatcccgccctggcatggcaacctgcagcaggattaacttgaccatggtgggaactgcaccagggtactcctcacagcgccatcaccaatggccaaaactcctctcaacggtgacctctgggtagtcctggcatgccaacatcagcctcttgggaggtctctagttctctaaagttctggacagttctgcctcctgccctgtcccagtggaggcagtaattctaggagatcctaaggggttcagggggaccctacccccacctcaggttgggcttccctgggcactcatgctccacaccaaagcaggacacgccattttccactgaccaccctataccctgaggaaagggagactttcctccgatgtttatttagctgttgcaaacatcttcaccctaatagtccctcctccaattccagccacttgtcaggctctcctcttgaccactgtgttatgggataaggggagggggtgggcatattctggagaggagcagaggtccaaggacccaggaatttggcatggaacaggtggtaggagagccccagggagacgcccaggagctggctgaaagccactttgtacatgtaatgtattatatggggtctgggctccagccagagaacaatcttttatttctgttgtttccttattaaaatggtgtttttggaaaaaaaaaaaaaaaaaaaaaaaaaa

SEQ ID NO: 254482 - protein, 826 aa, Artificial Sequence
  derived and/or modified sequence
MAEPSAPESKHKSSLNSSPWSGLMALGNSRHGHHGPGAQCAHKAAGGAAPPKPAPAGLSGGLSQPAGWQSLLSFTILFLAWLAGFSSRLFAVIRFESIIHEFDPWFNYRSTHHLASHGFYEFLNWFDERAWYPLGRIVGGTVYPGLMITAGLIHWILNTLNITVHIRDVCVFLAPTFSGLTSISTFLLTRELWNQGAGLLAACFIAIVPGYISRSVAGSFDNEGIAIFALQFTYYLWVKSVKTGSVFWTMCCCLSYFYMVSAWGGYVFIINLIPLHVFVLLLMQRYSKRVYIAYSTFYIVGLILSMQIPFVGFQPIRTSEHMAAAGVFALLQAYAFLQYLRDRLTKQEFQTLFFLGVSLAAGAVFLSVIYLTYTGYIAPWSGRFYSLWDTGYAKIHIPIIASVSEHQPTTWVSFFFDLHILVCTFPAGLWFCIKNINDERVFVALYAISAVYFAGVMVRLMLTLTPVVCMLSAIAFSNVFEHYLGDDMKRENPPVEDSSDEDDKRNQGNLYDKAGKVRKHATEQEKTEEGLGPNIKSIVTMLMLMLLMMFAVHCTWVTSNAYSSPSVVLASYNHDGTRNILDDFREAYFWLRQNTDEHARVMSWWDYGYQIAGMANRTTLVDNNTWNNSHIALVGKAMSSNETAAYKIMRTLDVDYVLVIFGGVIGYSGDDINKFLWMVRIAEGEHPKDIRESDYFTPQGEFRVDKAGSPTLLNCLMYKMSYYRFGEMQLDFRTPPGFDRTRNAEIGNKDIKFKHLEEAFTSEHWLVRIYKVKAPDNRETLDHKPRVTNIFPKQKYLSKKTTKRKRGYIKNKLVFKKGKKISKKTV

SEQ ID NO: 254483 - DNA, 2481 bp, Artificial Sequence
  derived and/or modified sequence
atggccgagcccagcgcccccgagagcaagcacaagagcagcctgaacagcagcccctggagcggcctgatggccctgggcaacagcagacacggccaccacggccccggcgcccagtgcgcccacaaggccgccggcggcgccgccccccccaagcccgcccccgccggcctgagcggcggcctgagccagcccgccggctggcagagcctgctgagcttcaccatcctgttcctggcctggctggccggcttcagcagcagactgttcgccgtgatcagattcgagagcatcatccacgagttcgacccctggttcaactacagaagcacccaccacctggccagccacggcttctacgagttcctgaactggttcgacgagagagcctggtaccccctgggcagaatcgtgggcggcaccgtgtaccccggcctgatgatcaccgccggcctgatccactggatcctgaacaccctgaacatcaccgtgcacatcagagacgtgtgcgtgttcctggcccccaccttcagcggcctgaccagcatcagcaccttcctgctgaccagagagctgtggaaccagggcgccggcctgctggccgcctgcttcatcgccatcgtgcccggctacatcagcagaagcgtggccggcagcttcgacaacgagggcatcgccatcttcgccctgcagttcacctactacctgtgggtgaagagcgtgaagaccggcagcgtgttctggaccatgtgctgctgcctgagctacttctacatggtgagcgcctggggcggctacgtgttcatcatcaacctgatccccctgcacgtgttcgtgctgctgctgatgcagagatacagcaagagagtgtacatcgcctacagcaccttctacatcgtgggcctgatcctgagcatgcagatccccttcgtgggcttccagcccatcagaaccagcgagcacatggccgccgccggcgtgttcgccctgctgcaggcctacgccttcctgcagtacctgagagacagactgaccaagcaggagttccagaccctgttcttcctgggcgtgagcctggccgccggcgccgtgttcctgagcgtgatctacctgacctacaccggctacatcgccccctggagcggcagattctacagcctgtgggacaccggctacgccaagatccacatccccatcatcgccagcgtgagcgagcaccagcccaccacctgggtgagcttcttcttcgacctgcacatcctggtgtgcaccttccccgccggcctgtggttctgcatcaagaacatcaacgacgagagagtgttcgtggccctgtacgccatcagcgccgtgtacttcgccggcgtgatggtgagactgatgctgaccctgacccccgtggtgtgcatgctgagcgccatcgccttcagcaacgtgttcgagcactacctgggcgacgacatgaagagagagaacccccccgtggaggacagcagcgacgaggacgacaagagaaaccagggcaacctgtacgacaaggccggcaaggtgagaaagcacgccaccgagcaggagaagaccgaggagggcctgggccccaacatcaagagcatcgtgaccatgctgatgctgatgctgctgatgatgttcgccgtgcactgcacctgggtgaccagcaacgcctacagcagccccagcgtggtgctggccagctacaaccacgacggcaccagaaacatcctggacgacttcagagaggcctacttctggctgagacagaacaccgacgagcacgccagagtgatgagctggtgggactacggctaccagatcgccggcatggccaacagaaccaccctggtggacaacaacacctggaacaacagccacatcgccctggtgggcaaggccatgagcagcaacgagaccgccgcctacaagatcatgagaaccctggacgtggactacgtgctggtgatcttcggcggcgtgatcggctacagcggcgacgacatcaacaagttcctgtggatggtgagaatcgccgagggcgagcaccccaaggacatcagagagagcgactacttcaccccccagggcgagttcagagtggacaaggccggcagccccaccctgctgaactgcctgatgtacaagatgagctactacagattcggcgagatgcagctggacttcagaaccccccccggcttcgacagaaccagaaacgccgagatcggcaacaaggacatcaagttcaagcacctggaggaggccttcaccagcgagcactggctggtgagaatctacaaggtgaaggcccccgacaacagagagaccctggaccacaagcccagagtgaccaacatcttccccaagcagaagtacctgagcaagaagaccaccaagagaaagagaggctacatcaagaacaagctggtgttcaagaagggcaagaagatcagcaagaagaccgtgtag

SEQ ID NO: 254484 - DNA, 2481 bp, Artificial Sequence
  derived and/or modified sequence
atggcggagccttctgcacctgaatctaaacataagtccagcttaaattcctccccttggtccggcctgatggcgctaggcaactccagacacggacaccacggccccggcgctcagtgtgcacacaaggccgccggcggcgccgcgccgcctaagccagctcccgccgggctgtccggcgggttgagtcagcccgccggatggcaaagcctactgagcttcaccatactctttctggcgtggctggccgggttcagcagcagactattcgccgtgattagatttgagagtatcattcacgagttcgatccctggttcaattatcgcagcactcatcacctcgccagccacggcttctatgagttcctaaattggtttgatgaacgcgcatggtacccactagggcgaattgtggggggcacggtttatccagggctgatgataaccgccgggctgatacattggatcctgaataccctaaatatcaccgtgcacattcgggacgtctgtgtgttcctagcaccaaccttctccggtcttacgtccatctccacgttcctgctcacgagagagctgtggaaccagggagctggcctgcttgccgcgtgtttcattgccattgtaccaggctacatctccaggagcgtggctggctcatttgacaatgagggcatagccatcttcgcactccagttcacttactatctgtgggtgaaaagcgtgaagaccgggagcgtattttggacgatgtgctgctgcctgtcttatttttatatggtcagtgcgtggggcggttacgtttttatcattaatttgattccgttgcacgtattcgtgctgctattgatgcagagatatagtaagagagtctacatcgcgtacagcaccttttacattgtcggtctcatactctcaatgcagatccctttcgtgggatttcagccaatccgaacaagtgagcacatggctgccgctggcgtgttcgcattgctgcaggcttacgcttttctccagtacctacgggaccgcctaacaaagcaagagtttcaaacactgttcttcctcggcgtgtcactggccgccggcgccgtgttcctttccgtgatctatctgacttacacaggctatatagccccctggagcggtcgattttattctctgtgggatacagggtatgcgaagatccacattcctatcatcgccagcgtctctgagcatcagcccaccacctgggtatcatttttttttgacctccacatcctggtgtgtaccttccctgccggattgtggttctgtatcaagaacattaatgacgagcgggttttcgtggccctgtacgccatatccgccgtttactttgccggagtcatggtcaggttaatgttaaccctgacccctgtcgtgtgcatgcttagcgcaattgctttcagcaacgtcttcgagcactatctgggcgatgatatgaaacgggagaaccctcctgtggaggacagttctgatgaagatgataagcgcaatcagggaaatctgtacgacaaggccggtaaggtcagaaaacatgcaaccgaacaggaaaagactgaggaggggttaggacctaacattaagtctatagtgaccatgctgatgctgatgctgctgatgatgtttgccgtacattgcacttgggtgacatctaacgcatattcttcgccttctgtcgtactcgcatcatacaaccacgatggtacccggaatattttagacgattttcgggaagcttatttttggctgcgtcaaaacactgatgagcacgccagggtcatgagctggtgggattatggctatcagatcgccgggatggccaacaggacaaccctggtagataataacacctggaataattcccacatcgcactcgtgggcaaggccatgtctagcaacgagaccgccgcttataaaattatgagaactctcgatgtcgattacgtgctagtgatattcggaggcgtgataggatactcaggggacgatattaataagttcctctggatggtgcgtatcgccgagggcgaacaccccaaggatattagagaatccgattatttcacaccccagggagagttccgtgtggataaggctgggagtcctaccctgttaaactgccttatgtacaagatgagttattaccggttcggcgagatgcagcttgacttcagaactccgccgggattcgatcgaacaaggaatgctgagatcggcaataaagacatcaagtttaaacacctggaagaggcctttacatccgaacactggctggtgcgaatttacaaggtgaaagcacctgacaaccgcgaaacactggaccacaaaccccgtgtcacgaacatctttcctaaacaaaagtatctttccaagaagactactaagaggaaaagagggtacattaaaaataagctcgtcttcaaaaaaggaaaaaagatctctaagaagaccgtttag

SEQ ID NO: 254485 - DNA, 2481 bp, Artificial Sequence
  derived and/or modified sequence
atggccgagcccagcgcccctgagagcaagcacaagagcagcctgaacagcagcccctggagcggcctgatggccctgggcaacagcagacatggccaccacggccctggggcccagtgtgcccacaaggctgctggaggagctgccccacccaagccagccccagctggcctgagcggcggcctgagccagcctgctggctggcagagcctgctgtccttcaccatcctcttcctggcctggctggccggcttcagcagccggctgtttgctgtgatccgctttgagagcatcatccacgagtttgacccctggttcaactaccgcagcacccaccacctggccagccacggcttctatgagttcctgaactggtttgatgagcgggcctggtaccccctgggcagaattgtgggcggcaccgtgtacccaggcctgatgatcacagctggcctcatccactggatcctgaacaccctgaacatcaccgtgcacatcagagatgtgtgtgtgttcctggcccccaccttcagcggcctgaccagcatcagcaccttcctgctgacccgggagctgtggaaccagggcgccggcctgctggccgcctgcttcatcgccatcgtgcccggctacatcagccgctctgtggccggcagctttgacaatgaaggaattgccatctttgccctgcagttcacctactacctgtgggtgaagtctgtgaagacaggctctgtgttctggaccatgtgctgctgcctgagctacttctacatggtgtctgcctggggcggctacgtgttcatcatcaacctgatccccctgcacgtgtttgtgctgctgctgatgcagcgctacagcaagagggtgtacatcgcctacagcaccttctacatcgtgggcctcatcctgtccatgcagatcccctttgtgggcttccagcccatccgcaccagcgagcacatggctgctgctggggtgtttgccctgctgcaggcctatgccttcctgcagtacctgcgggaccggctgaccaagcaggagttccagaccctcttcttcctgggcgtgtccctggccgccggggctgtgttcctgagcgtcatctacctgacctacacaggctacatcgccccctggagcggccgcttctacagcctgtgggacaccggctacgccaagatccacatccccatcatcgcctctgtgtctgagcaccagcccaccacctgggtgtccttcttctttgacctgcacatcctggtgtgcaccttccctgctggcctgtggttctgcatcaagaacatcaatgatgagcgggtgtttgtggccctgtatgccatctctgctgtgtactttgctggggtgatggtgcggctgatgctgaccctgacccctgtggtgtgcatgctgagcgccatcgccttcagcaatgtgtttgagcactacctgggagatgacatgaagagagaaaatcctcctgtggaggacagcagtgatgaagatgacaagaggaaccagggcaacctgtatgacaaggccggcaaggtgaggaagcacgccacagagcaggagaagacagaggagggcctgggccccaacatcaagagcatcgtgaccatgctgatgctgatgctgctgatgatgtttgctgtgcactgcacctgggtgaccagcaatgcctacagcagccccagcgtggtgctggccagctacaaccatgatggcaccaggaacatcctggatgacttccgggaggcctacttctggctgcggcagaacacagatgagcacgcccgggtgatgtcctggtgggactatggctaccagattgctggcatggccaacagaaccaccctggtggacaacaacacctggaacaacagccacatcgccctggtgggcaaggccatgagcagcaatgaaacagctgcctacaagatcatgaggaccctggatgtggactatgtgctggtgatctttggaggagtgattggctacagcggagatgacatcaacaagttcctgtggatggtgagaattgctgagggggagcaccccaaggacatccgggagagtgactacttcaccccccagggcgagttccgggtggacaaggccggcagccccaccctgctgaactgcctgatgtacaagatgagctactacagatttggagagatgcagctggacttccgcaccccacctggctttgacaggaccagaaatgctgagatcggcaacaaggacatcaagttcaagcacctggaggaggccttcaccagcgagcactggctggtgcgcatctacaaggtgaaggccccagacaaccgggagaccctggaccacaagccccgggtgaccaacatcttccccaagcagaagtacctgagcaagaagaccaccaagaggaagaggggctacatcaagaacaagctggtgttcaagaagggcaagaagatcagcaagaagacagtgtag

SEQ ID NO: 254486 - DNA, 2481 bp, Artificial Sequence
  derived and/or modified sequence
atggccgagcccagcgcccccgagagcaagcacaagagcagcctgaacagctctccatggtccggccttatggcactcggcaacagccggcacgggcatcacggccccggtgctcagtgtgctcacaaggcagctgggggcgccgcccctcctaagcccgcaccggctggtctgtctggcgggctgtcacagccagcagggtggcaaagccttctaagcttcactattctcttcctggcctggctggccggctttagttcaagactttttgccgtgattcggttcgagtccattatccacgagttcgacccgtggtttaactaccgttcgactcatcacctggctagccatggcttctacgaatttctgaattggtttgacgagcgagcttggtacccactgggtcgaatagtaggtggcacagtgtaccctggacttatgatcacagcaggattaattcactggatacttaacaccctgaacattacagtgcacattcgggatgtttgcgtctttctagcacccacattttccggcctgacaagtatctctacttttctgctgactcgcgagctgtggaatcagggcgctggcctgttggcagcatgcttcatcgccatcgttccagggtatatcagccgctccgtcgctgggtctttcgacaacgaggggatcgctatcttcgcactacagttcacctattatctgtgggttaagtcagtcaagaccggcagcgtgttctggactatgtgctgctgtctgtcgtatttctacatggtgagcgcttggggaggttacgtcttcattataaacctgattccccttcacgtgtttgtgctattgctcatgcagcgctatagcaagcgggtgtatatcgcctatagcacgttctatatcgttgggctgattctctccatgcagattccgtttgtaggctttcaaccgattagaacatccgaacacatggctgcagcaggcgtcttcgcattattgcaggcatacgctttcctccagtatttgagggaccgtttgactaagcaggagttccagaccctgttttttctgggggtcagcctggccgcaggtgccgtgtttctgtcggttatctacttgacatacaccggatatattgcaccgtggtctgggcgcttctattccttgtgggatacggggtacgcaaagatccacattcccatcatcgccagcgtctcagaacatcaacctacaacctgggtgtcatttttcttcgatctgcacatcttagtctgtaccttcccagcgggcttgtggttctgcatcaaaaatatcaatgacgagagggtatttgtcgctctgtacgccattagcgccgtgtattttgccggcgtgatggttcggctcatgctgacactgacgcccgtggtgtgcatgctgagtgcaattgcatttagcaacgtatttgagcactatctaggcgatgacatgaaaagggagaaccctccagtggaagatagctccgacgaagatgataaacgcaaccaggggaatttatacgataaagccgggaaagtccgcaagcacgctacagaacaggagaaaaccgaagaaggcctgggcccgaacatcaagagtatcgtaactatgctgatgctgatgctgctgatgatgttcgcggtgcattgcacctgggttacttccaatgcatattcgtcgcccagtgttgtgttagcttcttataaccacgacggcacacggaatattcttgatgactttagagaggcctacttttggctacggcagaatacggacgagcatgccagggtgatgtcgtggtgggattacggataccagatcgctggaatggctaataggaccactctggtggacaacaatacatggaataactctcacattgcccttgtgggaaaagcaatgtcatccaacgaaacagctgcctacaaaataatgaggacattggatgtggactatgtcttagtgatcttcggaggcgttatcggctacagtggagatgacatcaacaaatttctctggatggttcgtatagccgagggtgaacaccctaaggatattagggaatctgattatttcacccctcaaggagaattcagagtggataaagccgggtcccccactctcctgaattgcctcatgtacaagatgtcctactaccggtttggcgaaatgcagctcgatttcaggacccccccgggcttcgaccggacaagaaacgctgagattggtaacaaagacatcaaatttaagcatctggaagaggccttcacctcagaacattggcttgtaaggatctacaaggtgaaggctcccgataatcgcgagacactggaccacaagcctcgcgtgaccaatatttttccaaagcaaaaatacctcagcaagaagaccacaaagcggaaacgcgggtatattaaaaacaaactcgttttcaagaaaggaaaaaaaatttcaaagaagaccgtgtag

SEQ ID NO: 254487 - DNA, 2481 bp, Artificial Sequence
  derived and/or modified sequence
atggccgagccttcagcgccagagagtaagcacaagtcgtccctgaattcatctccttggtctggtctgatggcattgggaaattctagacacgggcaccacggtccaggggcacaatgtgcccacaaagccgcaggcggagcggctccacccaagccagcccctgctggactttctggtggcctgagtcaacctgccggatggcagtctttgctttctttcactattctcttccttgcatggcttgctggtttcagcagccggctcttcgccgtgattcgtttcgagagcattattcatgagttcgacccctggttcaattaccggagtactcaccacctggcctctcatggattctatgagttcctaaattggttcgacgagcgagcctggtatcctctgggtaggatcgtgggtggcaccgtctatcctggattgatgataaccgctggccttatacactggatactcaacacactgaacatcacggttcacattcgagatgtctgcgtatttcttgcccctacctttagtggcctgacctcaattagtacatttctgttgacacgcgagctctggaatcagggagccggtctgctggccgcttgtttcatcgctatcgtgcctggatacatatctcggtctgtcgcagggagtttcgataatgaaggcatcgcaatctttgctctacagtttacatattacttatgggtgaaatctgtcaaaactgggtcagtgttctggactatgtgctgctgtttatcatacttctatatggtgagcgcctgggggggatacgttttcattattaatctgatccccctgcacgtattcgttctgctgctgatgcagcggtactccaaaagagtgtacattgcatatagcacgttctacatagtgggcctgatcctttcgatgcagattccattcgtgggctttcagccaatccggacgtcagaacatatggcagctgctggtgtgtttgctctgctgcaagcctatgccttcttgcagtacctccgggataggctaactaagcaggagttccagacgctgttctttctcggtgtgtccttagccgcaggcgctgtttttctatccgttatttacctgacttacactggctatatcgccccttggagcggacgtttctactctctgtgggacaccggatacgcaaagattcatattcctatcatcgcatccgtctccgaacaccagcctacaacctgggtgtcgttttttttcgacctgcacatcctggtgtgcacctttcctgcaggtttgtggttctgcataaagaacataaacgatgaacgggtctttgtggcattatacgctatcagcgcagtatatttcgccggagtgatggtgcggttaatgctcacgttaaccccggtcgtctgtatgctgagcgccatagcgtttagcaacgtattcgagcactaccttggcgacgacatgaagcgggagaatcctccagtcgaggactcttcagatgaggatgacaagcggaatcaaggcaacctctacgataaagccggaaaggtgagaaagcatgcaacagagcaggaaaagactgaagaagggcttggccctaatatcaaaagcatcgttaccatgctaatgcttatgttgttgatgatgttcgccgtgcattgcacctgggtaaccagtaacgcctactccagcccatcagtggtcctggcttcatacaaccatgacgggaccagaaatatcctggacgattttcgagaggcttatttctggctaagacagaatacagatgaacacgctcgggtgatgagctggtgggactacggatatcagatcgcaggcatggccaacaggactacgctggtcgacaacaatacttggaataactcacacatcgcactggtaggcaaagctatgtcatcaaacgagaccgccgcatacaagatcatgcggaccttggatgtggactatgtgctggtgatctttgggggtgtgataggctattctggagacgacataaacaagtttctatggatggtgaggatcgccgagggcgagcatcctaaagatatccgtgagagtgactacttcacaccgcagggcgagttcagagtcgacaaggcaggctcccccaccctgctgaactgtcttatgtacaaaatgtcgtactaccgctttggagaaatgcagctggatttcaggaccccacctggcttcgaccgaacccggaacgccgagataggcaataaggacatcaagttcaagcacttggaggaagccttcacctccgagcactggttggtgaggatctataaggttaaggcacccgataatagggagacactggatcacaaacctagggtgaccaacatcttcccgaagcaaaaatatctgtccaaaaaaactacaaagcgaaaacgaggctatattaaaaataaactggtcttcaagaagggcaaaaaaatcagtaagaagaccgtgtag

SEQ ID NO: 254488 - DNA, 4246 bp, Artificial Sequence
  derived and/or modified sequence
gcggccgctgctgaggcggagactccccgccgccgcttcctccacccccagtccgccggcctcgcggcgctgagggcgggagcgcgcagagctcttccctcctcctttttcttcctcctcctcctcctcctccgggtccccgcccagcacccctcgcaccaggcggcggcggcggaggaggagagctagacccgccgccggggcacaacatggcggagccctcggccccggagagcaagcacaagtcgtccctcaactcgtccccgtggagtggcctcatggccctgggaaacagccggcacggccaccacgggcccggggcccagtgcgcgcacaaggcggcgggcggcgcggcgccgccgaagccggccccggcggggctgtccggggggctgtcgcagccggctgggtggcagtcgcttctctccttcaccatcctcttcctggcctggcttgccggcttcagctcgcgcctcttcgccgtcatccgcttcgaaagcatcatccacgagttcgacccgtggtttaactatagatcaacacatcatcttgcatctcatgggttctatgaatttttaaattggtttgatgaaagagcatggtatccactaggaagaatagtaggtggtactgtttacccagggttgatgataaccgctggccttattcattggattttaaatacattgaacataactgttcacataagagacgtatgtgtgttccttgcaccaacttttagcggccttacatctatatctactttcctgcttacaagagaactttggaaccaaggagcaggacttttagctgcttgttttattgctattgtaccaggctacatatctcggtcagtagctggatcctttgataatgaaggcattgctatttttgcacttcagttcacatactatttatgggtaaaatctgtaaaaactgggtcagttttttggacaatgtgctgctgcttatcctatttctatatggtctctgcttggggtggttatgtatttatcatcaatcttattccactgcatgtatttgtgttgttactgatgcagagatacagcaaaagagtctacatagcatatagcactttctacattgtgggtttaatattatcaatgcagataccttttgtgggattccagccaatcagaacaagtgaacacatggcagctgcaggtgtctttgcattgctgcaagcttatgctttcttgcagtatctgagagaccgattaacaaaacaagagttccagacccttttctttttgggtgtatcactagctgcaggtgctgtgttccttagtgtcatctatttgacttatacaggttacattgcaccatggagtggcaggttttattcattgtgggatactgggtatgcaaaaatacacattccaattattgcatcagtgtctgagcatcaacctacgacttgggtgtctttcttctttgatctacatattcttgtatgtaccttcccagcaggcctttggttctgcatcaaaaatatcaacgatgaaagagtatttgttgctctatatgcaatcagtgctgtctactttgctggagtgatggtgcgactgatgttgactttgactccagtcgtgtgtatgctgtctgcaattgccttttcaaatgtttttgagcactatttgggggatgacatgaaaagggaaaatccacctgtggaggacagcagtgatgaggatgacaaaagaaaccaaggaaatttgtatgataaggcaggtaaagtgaggaaacatgcaactgaacaggaaaaaactgaagagggattaggccctaatataaaaagcattgtcaccatgttgatgctgatgctattgatgatgtttgctgtccactgtacctgggtcacaagcaatgcctactctagtccaagtgtagtcctggcctcatacaatcatgatggcaccaggaatatcttagatgattttagagaagcttacttttggctaaggcaaaatacagatgaacatgcacgagtaatgtcttggtgggattatggctatcagatagctggaatggctaatagaactacgttggtggataataacacctggaataacagccacatagcactggtgggaaaagctatgtcttctaatgaaacagcagcctataaaatcatgaggactctagatgtagattatgttttggttatttttggaggggttattggctattctggtgatgatatcaacaaatttctctggatggttaggatagctgaaggagaacatcccaaagacattcgggaaagtgactattttaccccacagggagaattccgtgtagacaaagcaggatcccctactttgttgaattgccttatgtataaaatgtcatactacagatttggagaaatgcagctggattttcgtacacccccaggttttgaccgaacacgtaatgctgagattggaaataaggacattaaattcaaacatttggaagaagcctttacatcagaacactggcttgttaggatatataaagtaaaagcacctgataacagggagacattagatcacaaacctcgagtcaccaacattttcccaaaacagaagtatttgtcaaagaagactaccaaaaggaagcgtggctacattaaaaataagctggtttttaagaaaggcaagaaaatatctaagaagactgtttaaatgcactgttctggttcctaacttgaagcagttgtccttgtgagaaccggtctttgcctttagctcatgtcgtgtttcacagcaaagagggtacagaaccatcactggtccaggttaatgtacaaaattttctggcaatgcctgattaaaaaaataaaattggcttgttgagaacagctgttttcgatttctaatgtgaagcaagacagagcactgctgtaaatgtctagcagcagattttttttttattggtacatattatccttcaaatctgagaatttggactaactgcaccaaagaaccctctaatttggtccctggcacatgcatacttgtcaatgtttttattcttttacaagacctgcattttatttgaattacccgaatagcaatatgtaaaatacaagtgacaaaatgtgatgagagcttcttgaaccggtaaactagtacaggtctgagaaagacatattagaagaatcattatacttccttgaattatatttattttcatgtttctctaatgcaaagaatgtttcatcaaatgtatattttctgttgcttactgtttgctctgagaagaagctgctgtttcaaagatggacctctgagtagctaattgattcaagtagtttttttatgttgacacattattactgctgttagcagtcgttttcaccaggtacttacagagcagatttcatacatcattcattcaagggctaaatttatattttttggaaatcatggcaactacacaggatgttgcttaccaggacggagttttggtatcttagtactgaagttagcactatgtttacatgcaaaagattaaggaaaaaacccttaaagtggacaggtatccaaagttcattttctgtgactcatcaaagtgacaaaagacttgtaacaactttgcctggacttttttcattttacaacagttcatccattcacaatgattttgttctctgctccatattttttaatcccttaagcatttgatgaaacactctttagtgctatatgcattttcttacttttgttaaaaatgtgacagttgtcaaaaaatgcactaaaatgtaaatggagattgaacaagttcactttccagcttataggcaactttatacagacttgaacattttctccagttgtttagtaaaagtgaaagagaaagggtttttcctgccacaggatataacttttttttatataacaagcataacacaccactgcttttggtggaaaagtgcagaatagtatgtaccttttatgaagaaaaatgtaatttacaatattcagtgagaatgttactgctgattttcttttccaaggtgtagaatattctttgatttatagaattcatttttgacccagatgatggttcctttacagaacaataaaatggctgaacattttcacaaatagagtgtaacgaagtctggatttctgataccttgtcatttgggggattttattttactttgttgctttaaaattcaatgcagagaagttgttgactgtaggggaaataaagttaattcaaattttgtgtt

SEQ ID NO: 254489 - protein, 329 aa, Artificial Sequence
  derived and/or modified sequence
MSAEASGPAAAAAPSLEAPKPSGLEPGPAAYGLKPLTPNSKYVKLNVGGSLHYTTLRTLTGQDTMLKAMFSGRVEVLTDAGGWVLIDRSGRHFGTILNYLRDGSVPLPESTRELGELLGEARYYLVQGLIEDCQLALQQKRETLSPLCLIPMVTSPREEQQLLASTSKPVVKLLHNRSNNKYSYTSTSDDNLLKNIELFDKLALRFHGRLLFLKDVLGDEICCWSFYGQGRKIAEVCCTSIVYATEKKQTKVEFPEARIFEETLNILIYETPRGPDPALLEATGGAAGAGGAGRGEDEENREHRVRRIHVRRHITHDERPHGQQIVFKD

SEQ ID NO: 254490 - DNA, 990 bp, Artificial Sequence
  derived and/or modified sequence
atgtccgctgaggcttctggaccagccgctgccgcagcccccagcttagaggccccgaaaccctcgggtttggagcccggccctgctgcatacggactcaagccactgacccccaacagcaaatacgtgaaattgaatgtgggcgggtccctccactataccaccctgaggacgttgactggacaggatacaatgctgaaagccatgtttagtggaagagttgaagtgctcaccgacgctggaggttgggttcttattgaccgtagtggccggcatttcggtacaattctgaactacttgcgggacggatctgtccccctacctgagtccacacgcgagttaggtgaactgcttggcgaggcaagatactacctggtgcagggcctgatcgaagactgccagttagcacttcagcagaaacgggagactctctcccccctttgtctcattcccatggtaacctcccctagagaggagcagcagctgctagcctctacatccaaacctgttgtgaagctgctccacaaccgctcaaataacaagtactcgtacacttctacctctgatgataacctgcttaagaatatcgaactattcgacaaacttgcactccggttccatgggagattactctttcttaaagatgttttaggtgatgagatctgttgttggtccttctacggacaggggcggaagattgcagaagtgtgctgcacaagtatcgtgtacgctaccgagaagaagcagacaaaagttgagttccctgaggccaggatcttcgaggagaccctgaatatactgatttacgaaacaccacggggcccagatcctgcgttgctcgaggctaccggcggcgcagccggcgccggaggggccggcaggggtgaggacgaggagaatagagaacatcgggtgcgacgcatccacgtgcggaggcatataactcatgacgaaaggcctcatggccagcaaatcgtatttaaagactag

SEQ ID NO: 254491 - DNA, 990 bp, Artificial Sequence
  derived and/or modified sequence
atgagcgccgaggccagcggcccagcggctgctgctgccccaagcctcgaagcccccaagcctagcggcttggagcccggccccgcagcttacggacttaaacccctgactcccaatagcaagtatgtgaagctgaacgtaggcgggtctttgcactatactaccctgaggacattgaccggccaggacactatgctgaaggcaatgttttccggcagagtggaggttcttacggacgccggggggtgggtcctgattgatcgctccggcaggcacttcggcaccattctcaactacctccgcgatggaagcgtgccactgcccgaatcgactcgcgaactgggggagttgctaggagaggcccggtattatctcgttcaaggtctgatcgaggactgccaattggcacttcagcagaaacgggaaactctttctcctctgtgtctgattcctatggtgacctcaccccgggaagaacagcaacttctagccagcacatcaaagccagtggtcaagctgctgcataatagatcaaacaacaaatactcttacacctcaacttccgatgacaacctactcaagaacatcgaacttttcgacaagcttgccttgcgatttcatggccggctcctttttctcaaagatgtgttaggcgacgagatatgctgctggtccttctacgggcagggtcgcaagatcgcagaggtttgttgtacatccatcgtgtacgctacagagaagaagcaaacgaaagtagaatttccggaagcaagaatttttgaggaaaccctgaacatcctgatttacgagacaccacggggtcctgaccctgccttactggaggcaactgggggcgccgccggagctgggggggccggtaggggcgaagatgaagagaaccgggaacatcgggtgagaagaatacacgtcagacggcacatcacccatgacgaaaggcctcacggacagcaaattgtcttcaaggactag

SEQ ID NO: 254492 - DNA, 990 bp, Artificial Sequence
  derived and/or modified sequence
atgtctgctgaggccagcggccctgctgctgctgctgcccccagcctggaggcccccaagcccagcggcctggagcccggccctgctgcctacggcctgaagcccctgacccccaacagcaaatatgtgaagctgaatgtgggcggcagcctgcactacaccaccctgcggaccctgaccggccaggacaccatgctgaaggccatgttttctggccgggtggaggtgctgacagatgctgggggctgggtgctgattgacagaagtggccgccacttcggcaccatcctgaactacctgagagatggctctgtgcccctgcctgagagcacccgggagctgggggagctgctgggggaggcccgctactacctggtgcagggcctgattgaggactgccagctggccctgcagcagaagcgggagaccctgagccccctgtgcctgatccccatggtgaccagcccccgggaggagcagcagctgctggccagcaccagcaagcctgtggtgaagctgctgcacaacagaagcaacaacaagtacagctacaccagcaccagtgatgacaacctgctgaagaacatcgagctgtttgacaagctggccctgcgcttccacggccgcctgctcttcctgaaggatgtgctgggagatgagatctgctgctggagcttctacggccagggcaggaagattgctgaggtgtgctgcaccagcatcgtgtatgccacagagaagaagcagaccaaggtggagttccctgaggcccgcatctttgaggagaccctgaacatcctgatctatgagaccccccggggccctgaccctgccctgctggaggccactggaggagctgctggagctggaggagctggccgcggggaggatgaagaaaatcgggagcaccgggtgcggcgcatccacgtgagaagacacatcacccatgatgagcggccccacggccagcagatcgtgttcaaggactag

SEQ ID NO: 254493 - DNA, 990 bp, Artificial Sequence
  derived and/or modified sequence
atgagcgccgaggccagcggccccgccgccgccgccgcccccagcttggaggcccccaaaccatcaggcctggaacctgggcctgctgcttatggtcttaaacctctcacaccaaattctaagtatgtgaaactgaatgtaggggggtctctgcattacaccacgttgagaacactgactggacaggacaccatgctgaaggccatgttttccggacgagtggaagtattgacagacgctggcggttgggtgcttattgaccgctctgggcggcatttcgggaccatcctcaactacctccgagatggttcagtacctctgcccgaaagcaccagggaactaggggagttgctcggagaagctagatattatttggtccagggccttattgaagactgccaactggccctacagcaaaagagagaaaccctatctcccctgtgccttatccctatggtcaccagccctagagaagagcaacagctgttggcctccaccagcaaacccgttgtgaagctgctccataataggtcaaacaataagtattcatatacatcaacatctgacgacaacttactgaaaaatatcgagctcttcgacaaactcgctctccggttccacggaagactcttgttcctgaaggacgtgttaggagacgaaatttgctgttggagtttctatggccaggggaggaagatcgccgaggtgtgctgcacatccatcgtgtacgccacggagaagaaacagacaaaggtcgaatttccagaggctcgaatctttgaagagacgctcaacatcttaatttatgaaacccccagagggccggaccccgctctgctcgaggccactgggggagcagccggagctggaggcgctggacggggtgaagacgaagaaaaccgcgagcatagggtccgccggatacacgtaaggcgccacattacccacgatgaaagaccccatggccagcagatagtgtttaaagattag

SEQ ID NO: 254494 - DNA, 990 bp, Artificial Sequence
  derived and/or modified sequence
atgagcgccgaggccagcggccccgccgccgccgccgcccccagcctcgaagctcccaaaccctccggcctcgagccaggccccgcagcatatggcttaaaacctctgaccccaaactctaagtatgttaagctaaacgttggtggaagcctgcattacactaccttacggaccttgacaggacaggatactatgcttaaagccatgttttctggtagagtggaggttcttactgatgccggtggctgggtgctcattgacaggagcgggcgacacttcggtacaatccttaactacctccgtgatggtagcgtgcccctacccgagtccacccgggaactgggtgagctccttggcgaagcgcggtattatctggtgcagggtttgatcgaggattgccagctggctctgcagcaaaaaagagagacgctcagtccactatgcttaatccccatggtgacctctcctcgtgaggaacagcaactactggcctctacttccaagcctgtggtaaaactgctgcacaaccgctctaataacaagtactcatacaccagcacaagtgacgacaatctcctcaagaacatcgagttgtttgacaagctagcactgcgcttccatggcagactgctgttcctgaaagacgtactgggagacgaaatctgttgctggtccttctacggccaggggcgtaagatcgccgaagtgtgttgcacaagcattgtgtacgcgaccgagaagaaacagaccaaagtggagttccccgaggcgagaatttttgaagagactctgaacattctcatctacgaaactccccggggtcccgatccggcactgctggaagctactggcggggccgccggcgccggaggtgccggtcggggagaggatgaagaaaatcgtgaacaccgcgttaggcgaatccatgttcggcgccacattactcacgatgagcgaccccatggccaacagatcgtgtttaaggactag

SEQ ID NO: 254495 - DNA, 1721 bp, Artificial Sequence
  derived and/or modified sequence
gcagctgcccggcgccggcttccgggtggtgcgagcgagatggggcggagggccggtcttgcagagtagctgcggtgagtgggcgtgtgcgccgagcggtctggcccaagggctgggggccggccgagggtcttcgggagcaggccgcagggcgcggagagatcctgggatcgccgtccgccgctgctacccggcatgtcggcggaggcctcgggcccggctgccgccgcggccccgtccctggaagcccccaagccctcgggtctcgagcctggccccgccgcctacggtctcaagccgctgaccccgaacagcaaatacgtgaagctgaacgtgggcggctcgttgcactacaccacgctgcgcaccctcacgggacaggacaccatgctcaaagccatgttcagcggccgcgtggaggtgctgaccgatgccggaggttgggtgctgattgaccggagcggccgtcactttggtacaatcctcaattacctgcgggatgggtctgtgccactgccggagagtacgagagaactgggggagctgctgggcgaagcacgctactacctggtgcagggcctgattgaggactgccagctggcgctgcagcaaaaaagggagacgctgtccccgctgtgcctcatccccatggtgacatctccccgggaggagcagcagctcctggccagcacctccaagcccgtggtgaagctcctgcacaaccgcagtaacaacaagtactcctacaccagcacttcagatgacaacctacttaagaacatcgagctgttcgacaagctggccctgcgcttccacgggcggctactcttcctcaaggatgtcctgggggacgagatctgctgctggtctttctacgggcagggccgcaaaatcgccgaggtgtgctgcacctccattgtctatgctacggagaagaagcagaccaaggtggaatttccagaggcccggatcttcgaggagaccctgaacatcctcatctacgagactccccggggcccagacccagccctcctggaggccacagggggagcagctggagctggtggggctggccgcggggaggatgaagagaaccgagagcaccgtgtccgcaggatccatgtccggcgccatatcacccacgacgagcgtcctcatggccaacaaattgtcttcaaggactgacctctgaccctccccctgccttcctcttgccttgggacccagtccctctctctttccctccccttcccagacttttgccccggctctgctggccaagtcgtgggtcctcctctgtcccttcattgcatggcacagctcactttggcccttctccacccatcccaaccccattgctaacaacatggtacattccggccccaccactcagagccttccgaagccaacacttgtccccaccctggccctgcgtccttccctctccagctggttaagagggatttagaattccctttctctttttttagtgcatcgtccatgccaaagtgtgcggcccttcctgacatcaccacagtctgagcagcctcccgcgtcctgcagggtagtccgccccctcctccccaccatcctccctacctccttaactttgtactagactggcctgggcctgcccagctcagcgttatcagtctgtttcatattatttattattttaattttctattaaattattgaaataaagttaagttgagaaactg

SEQ ID NO: 254496 - DNA, 2528 bp, Artificial Sequence
  derived and/or modified sequence
gggattgggtgctaggtcccacgacattagctgggattctaagacctttgctcagctgctgcggccaccactgacacgccctctgctcctcaaatacggagaacagttcagtgttcctgcctgaggatctctgcatttgccttccctctgcctggaactcttccctcacatccgcttcccagcttcagctcggcatcacctcctcagagaggccttccatccttggtgcccgggcaccactgctacccgttttggcctctgttttttttttttttttcaaaggacgttatgttgcccaggctagagtgcaacggtccgatcacggattactgcagcttccaactcctggcttcaagcgctccttctgcctcggcctcccgagtagctaggcttacaggctggggttacaggtgtgagccacagcgcccggccgctttggcctcctttaagagcttccctccgcgctttgttcgcagttctggtcacagtctgttcagtgcgcggggctgggaggcgggaaactgcccaatgcccagacctctctgtctgtttcccctcaagctcgtgaagctctctgacagcagagacccaatcacgaggtggagacttcgctttccacatcgggcagggggtcggccgcatcctcgatctggtcctggtgactcgagaccagagaggagcgcacgtcgacccgcccggggaacccgcaggccacacgccaaacctctacgggatcccccagcgaggccactgcgcatgctccatactcgcagccccgcccccattcaggggcggggccgcgcctgcgcagctgcccggcgccggcttccgggtggtgcgagcgagatggggcggagggccggtcttgcagagtagctgcggtgagtgggcgtgtgcgccgagcggtctggcccaagggctgggggccggccgagggtcttcgggagcaggccgcagggcgcggagagatcctgggatcgccgtccgccgctgctacccggcatgtcggcggaggcctcgggcccggctgccgccgcggccccgtccctggaagcccccaagccctcgggtctcgagcctggccccgccgcctacggtctcaagccgctgaccccgaacagcaaatacgtgaagctgaacgtgggcggctcgttgcactacaccacgctgcgcaccctcacgggacaggacaccatgctcaaagccatgttcagcggccgcgtggaggtgctgaccgatgccggaggttgggtgctgattgaccggagcggccgtcactttggtacaatcctcaattacctgcgggatgggtctgtgccactgccggagagtacgagagaactgggggagctgctgggcgaagcacgctactacctggtgcagggcctgattgaggactgccagctggcgctgcagcaaaaaagggagacgctgtccccgctgtgcctcatccccatggtgacatctccccgggaggagcagcagctcctggccagcacctccaagcccgtggtgaagctcctgcacaaccgcagtaacaacaagtactcctacaccagcacttcagatgacaacctacttaagaacatcgagctgttcgacaagctggccctgcgcttccacgggcggctactcttcctcaaggatgtcctgggggacgagatctgctgctggtctttctacgggcagggccgcaaaatcgccgaggtgtgctgcacctccattgtctatgctacggagaagaagcagaccaaggtggaatttccagaggcccggatcttcgaggagaccctgaacatcctcatctacgagactccccggggcccagacccagccctcctggaggccacagggggagcagctggagctggtggggctggccgcggggaggatgaagagaaccgagagcaccgtgtccgcaggatccatgtccggcgccatatcacccacgacgagcgtcctcatggccaacaaattgtcttcaaggactgacctctgaccctccccctgccttcctcttgccttgggacccagtccctctctctttccctccccttcccagacttttgccccggctctgctggccaagtcgtgggtcctcctctgtcccttcattgcatggcacagctcactttggcccttctccacccatcccaaccccattgctaacaacatggtacattccggccccaccactcagagccttccgaagccaacacttgtccccaccctggccctgcgtccttccctctccagctggttaagagggatttagaattccctttctctttttttagtgcatcgtccatgccaaagtgtgcggcccttcctgacatcaccacagtctgagcagcctcccgcgtcctgcagggtagtccgccccctcctccccaccatcctccctacctccttaactttgtactagactggcctgggcctgcccagctcagcgttatcagtctgtttcatattatttattattttaattttctattaaattattgaaataaagttaagttgagaaactg

SEQ ID NO: 254497 - DNA, 990 bp, Artificial Sequence
  derived and/or modified sequence
atgtctgccgaggcatcagggccagcagctgctgcagccccttccctggaggctcccaagcctagtggtctggagcctggacctgccgcatatggtctgaagccattaacaccgaacagtaagtatgtgaagctcaacgttggaggcagtttacattacactacactcaggactctaaccggacaggacacaatgctgaaggcaatgtttagcggtcgcgttgaggtcctgactgacgcaggaggctgggtcctgatcgaccggagcggccgacactttggtacaatccttaactatcttcgggacggcagtgtgcctctgcccgaaagcactagagaactgggtgagttgctgggcgaggcccgttactatttagtccagggactgattgaagattgccagttggctctccaacagaagcgcgagaccttgtcaccactgtgtctgattcccatggttacaagtccaagggaggagcagcaactgttagcatccacctccaaacctgtagttaagctgctacataatcgctctaacaacaagtattcttacactagcacttccgacgacaacctactaaaaaacatcgagctttttgataagttagcgttgagatttcatgggagactactgtttctaaaggatgtgctcggtgacgagatctgttgttggtccttttacggccaagggaggaagatcgccgaggtgtgctgtacctctatcgtctatgcgactgagaagaagcaaacaaaggtagagttccccgaagcgcgtatctttgaagaaactcttaatatccttatatatgagacacctagaggccctgacccagcccttcttgaagcaacaggaggagcagcgggagctggtggagccggtcgtggggaagatgaggagaatcgagagcacagggtgcgcaggattcacgttagacggcacatcacacacgacgagcggcctcacggacagcagatcgtcttcaaggactag

SEQ ID NO: 254498 - DNA, 990 bp, Artificial Sequence
  derived and/or modified sequence
atgagcgccgaggcttccggacccgctgccgctgctgcaccaagcctggaggcacccaaaccatccggccttgaacccggaccagctgcttacgggctgaagcccttgacaccgaattccaaatacgttaagttgaacgtggggggatctcttcattacaccacactgagaaccttgaccggccaggataccatgttgaaagccatgttctcgggacgtgtcgaagtgctcacagatgcgggagggtgggtactcatcgatcggagcggccgacacttcggcactattctgaattatctccgtgatggtagcgtgccgctgcctgagagcactcgcgagctgggcgaactactgggtgaggccagatattatctggtacaggggctgatcgaagactgccagctggcactccagcagaagcgggaaacattaagtccactgtgtttgattccaatggttactagccctcgggaagaacaacagttacttgccagcacaagcaaaccagtggtcaagctcttacataatcgctctaacaataagtactcctataccagtacatcagatgacaatctgttgaagaatatcgagctcttcgataagttggcattgaggttccatgggcgactgctctttttgaaagatgtcctgggagacgaaatttgctgctggtctttttacggccaggggaggaaaatcgctgaagtgtgctgcacatcaatcgtgtacgcaaccgagaaaaagcaaacaaaggttgagttccctgaggccaggatcttcgaagagaccttgaacatcctgatctacgaaacacccagaggtcctgatcccgcactactggaagcaaccggcggagctgctggcgcagggggtgccggaagaggtgaggatgaggagaatcgggagcaccgcgtccgcagaatacatgtccgtcgccacattacgcacgacgagcgcccacacggacagcagatagtgtttaaggactag

SEQ ID NO: 254499 - DNA, 990 bp, Artificial Sequence
  derived and/or modified sequence
atgagcgccgaggccagcggccccgccgccgccgccgcccccagcctggaggcccccaagcccagcggcctggagcccggccccgccgcctacggcctgaagcccctgacccccaacagcaagtacgtgaagctgaacgtgggcggcagcctgcactacaccaccctgagaaccctgaccggccaggacaccatgctgaaggccatgttcagcggcagagtggaggtgctgaccgacgccggcggctgggtgctgatcgacagaagcggcagacacttcggcaccatcctgaactacctgagagacggcagcgtgcccctgcccgagagcaccagagagctgggcgagctgctgggcgaggccagatactacctggtgcagggcctgatcgaggactgccagctggccctgcagcagaagagagagaccctgagccccctgtgcctgatccccatggtgaccagccccagagaggagcagcagctgctggccagcaccagcaagcccgtggtgaagctgctgcacaacagaagcaacaacaagtacagctacaccagcaccagcgacgacaacctgctgaagaacatcgagctgttcgacaagctggccctgagattccacggcagactgctgttcctgaaggacgtgctgggcgacgagatctgctgctggagcttctacggccagggcagaaagatcgccgaggtgtgctgcaccagcatcgtgtacgccaccgagaagaagcagaccaaggtggagttccccgaggccagaatcttcgaggagaccctgaacatcctgatctacgagacccccagaggccccgaccccgccctgctggaggccaccggcggcgccgccggcgccggcggcgccggcagaggcgaggacgaggagaacagagagcacagagtgagaagaatccacgtgagaagacacatcacccacgacgagagaccccacggccagcagatcgtgttcaaggactag

SEQ ID NO: 254500 - protein, 802 aa, Artificial Sequence
  derived and/or modified sequence
MYRSTKGASKARRDQINAEIRNLKELLPLAEADKVRLSYLHIMSLACIYTRKGVFFAGGTPLAGPTGLLSAQELEDIVAALPGFLLVFTAEGKLLYLSESVSEHLGHSMVDLVAQGDSIYDIIDPADHLTVRQQLTLPSALDTDRLFRCRFNTSKSLRRQSAGNKLVLIRGRFHAHPPGAYWAGNPVFTAFCAPLEPRPRPGPGPGPGPASLFLAMFQSRHAKDLALLDISESVLIYLGFERSELLCKSWYGLLHPEDLAHASAQHYRLLAESGDIQAEMVVRLQAKTGGWAWIYCLLYSEGPEGPITANNYPISDMEAWSLRQQLNSEDTQAAYVLGTPTMLPSFPENILSQEECSSTNPLFTAALGAPRSTSFPSAPELSVVSASEELPRPSKELDFSYLTFPSGPEPSLQAELSKDLVCTPPYTPHQPGGCAFLFSLHEPFQTHLPTPSSTLQEQLTPSTATFSDQLTPSSATFPDPLTSPLQGQLTETSVRSYEDQLTPCTSTFPDQLLPSTATFPEPLGSPAHEQLTPPSTAFQAHLDSPSQTFPEQLSPNPTKTYFAQEGCSFLYEKLPPSPSSPGNGDCTLLALAQLRGPLSVDVPLVPEGLLTPEASPVKQSFFHYSEKEQNEIDRLIQQISQLAQGMDRPFSAEAGTGGLEPLGGLEPLDSNLSLSGAGPPVLSLDLKPWKCQELDFLADPDNMFLEETPVEDIFMDLSTPDPSEEWGSGDPEAEGPGGAPSPCNNLSPEDHSFLEDLATYETAFETGVSAFPYDGFTDELHQLQSQVQDSFHEDGSGGEPTF

SEQ ID NO: 254501 - protein, 234 aa, Artificial Sequence
  derived and/or modified sequence
MYRSTKGASKARRDQINAEIRNLKELLPLAEADKVRLSYLHIMSLACIYTRKGVFFAGGTPLAGPTGLLSAQELEDIVAALPGFLLVFTAEGKLLYLSESVSEHLGHSMVDLVAQGDSIYDIIDPADHLTVRQQLTLPSALDTDRLFRCRFNTSKSLRRQSAGNKLVLIRGRFHAHPPGAYWAGNPVFTAFCAPLEPRPRPGPGPGPGPASLFLAMFQSRHAKDLALLDISESG

SEQ ID NO: 254502 - DNA, 2409 bp, Artificial Sequence
  derived and/or modified sequence
atgtataggtcaaccaaaggggcgtccaaggcaaggagagaccagatcaacgctgagattcgcaatctgaaagaacttctaccactggcagaagcagacaaagtcaggttaagttacctgcacataatgtcactcgcctgtatttacaccagaaagggagtgttcttcgcgggggggacgcctttagccggacctactggccttctgtctgctcaggagctggaagatattgtggctgctctcccgggcttcttgctagtgttcaccgccgaagggaaacttttatatctgtcagaatccgtgagtgagcacctggggcactctatggtggacttggtggcccaaggcgactccatctacgacattatcgatcctgccgaccatctcacagtgaggcagcagttgacactgcctagcgcactggataccgaccgactctttcggtgtagatttaacacttccaaatctcttcgcaggcagtctgcggggaataagctagtcttgatccgcggccggtttcacgcccaccctcccggggcctattgggcaggaaacccagtttttacggccttctgcgcacctctcgaacccaggcctcgccccggacccggtccgggaccagggcccgcgagtcttttcttggctatgtttcaaagcagacacgctaaggatttggcactgctggatatcagcgagtctgtgcttatctacctgggtttcgaacgaagtgaactgctttgtaagagctggtacggattgcttcatccggaagacttggcccatgcaagtgcacagcattataggttgctggctgagtctggagacatccaggctgagatggtcgttcggctgcaggcaaagacggggggctgggcctggatttactgcttactgtatagtgaaggaccagaagggcctatcacggccaacaattaccctatctcagatatggaagcgtggtccctgcggcaacagttgaattctgaagatactcaagcagcatacgtgctggggacacctaccatgctgccttcattcccggagaacatcctgtctcaggaggaatgctcctccacaaaccccctcttcacagccgccctcggagcgccaaggtccacttcttttccttccgccccagagctcagtgtggtgtcagccagtgaggagctgccacggccctccaaagaactcgatttcagttacctaacattcccgtcgggacccgaaccaagcctgcaggccgaactgtcaaaagacttagtgtgtacgccaccctatacaccgcatcagcccggtggctgtgcgtttctcttctcactgcatgagccctttcagacacatctccctactccctcatcaactctccaagagcaactgaccccttctactgccaccttttcggatcagctgacccccagctcagcaactttccccgatcctctgacctccccacttcagggacagctcacggagaccagcgtgcgttcctatgaggatcaattgaccccttgtacctcaacctttccagatcagctgctgccttcaactgcaacattcccagagccgctgggatctcctgcccacgaacagctcaccccaccttccaccgccttccaggcacaccttgactctccaagccaaaccttcccagagcagttatctcctaatcccaccaaaacttactttgcccaggaaggttgttcatttctctacgaaaagctcccaccatctccatccagccctggcaatggtgactgcactctgctagctctcgcccaactgagagggccgttgtccgtcgacgtacctctcgttcctgagggcctgctgacgcccgaggcaagtcccgtcaagcagagcttcttccactattcggagaaggagcaaaatgagatagatcgcttaattcagcagatttcacagctggcccagggcatggaccgcccctttagtgccgaggccggaaccggcggcctcgagcccctggggggactggaaccactagactcgaacctatcactgtcaggcgccggtccacctgtactgtccttggacttgaagccctggaagtgtcaagagctggacttcttggccgacccggataatatgtttctagaagagacacctgtcgaggacatttttatggatctgagcactccagacccctccgaagagtggggcagtggggatccagaggcagaagggccaggcggcgccccaagcccttgtaacaatttgagtcccgaggaccattcctttctggaggacctggccacttacgagaccgccttcgagacaggagtcagcgctttcccctacgatgggttcacagacgagcttcaccaactgcaaagccaggtccaggatagctttcacgaagacggcagtggcggcgaaccgactttctag

SEQ ID NO: 254503 - DNA, 705 bp, Artificial Sequence
  derived and/or modified sequence
atgtaccgcagtactaaaggcgcaagtaaggccaggcgggaccagattaatgccgagatcaggaatctaaaggagttgttgcccctagccgaagccgataaagtgcgactgtcatacttacacatcatgagcctggcatgcatttacacaaggaagggcgtgttcttcgcaggcggcaccccactggccggtccaaccgggcttctgagcgcacaagagctcgaggacattgtggctgccttgcccggcttcctgctggtctttacagcagagggcaagttgctttatttgagcgagagtgtcagtgagcatttgggccactctatggttgatctggtagcgcagggcgactccatctatgatatcattgatccagcggatcacctcactgtgaggcagcaattgaccctcccgagcgcactggatacagaccgcctgtttcgatgtagatttaacacttccaagagtctcagacgccaaagcgcgggcaataaactggtcctgattcgcgggagatttcacgcacaccctcccggagcctattgggccggtaatcctgtgtttacggctttctgcgcaccactggagccaaggccaagaccgggccctggacctggtcccggtccagcaagcctgttccttgccatgtttcagagccgccatgccaaggatctcgcgctgctggacatttccgaaagcgggtag

SEQ ID NO: 254504 - DNA, 2409 bp, Artificial Sequence
  derived and/or modified sequence
atgtaccgcagcaccaagggggccagcaaggcccggcgggaccagatcaatgctgagatccggaacctgaaggagctgctgcccctggccgaggccgacaaggtgcggctgagctacctgcacatcatgagcctggcctgcatctacaccaggaagggcgtcttctttgctgggggcacccccctggccggccccaccggcctgctgagcgcccaggagctggaggacatcgtggccgccctgcccggcttcctgctggtgttcaccgctgagggcaagctgctgtacctgtctgagagcgtgtctgagcacctgggccacagcatggtggacctggtggcccagggcgacagcatctatgacatcattgatcctgctgaccacctgactgtgcggcagcagctgaccctgcccagcgccctggacacagacaggctcttccgctgccgcttcaacaccagcaagagcctgcggcggcagagcgctggcaacaagctggtgctgatccggggccgcttccacgcccaccccccaggggcctactgggccggcaaccctgtgttcaccgccttctgtgcccccctggagccccggcccaggcctggccctggccctggccctggccctgccagcctcttcctggccatgttccagagcagacatgccaaggacctggccctgctggacatcagcgagagcgtgctgatctacctgggctttgagaggtctgagctgctgtgcaagtcctggtacggcctgctgcaccctgaggacctggcccacgccagcgcccagcactaccgcctgctggccgagagcggggacatccaggccgagatggtggtgcggctgcaggccaagacaggaggctgggcctggatctactgcctgctgtacagcgagggccctgagggccccatcacagccaacaactaccccatcagtgacatggaggcctggagcctgcggcagcagctgaacagcgaggacacccaggccgcctacgtgctgggcacccccaccatgctgcccagcttccctgagaacatcctgagccaggaggagtgcagcagcaccaaccccctcttcaccgctgccctgggcgcccccaggagcaccagcttccccagcgcccctgagctgtctgtggtgtctgccagcgaggagctgccccggcccagcaaggagctggacttctcctacctgaccttccccagcggccctgagcccagcctgcaggccgagctgagcaaggacctggtgtgcaccccaccctacaccccccaccagcccggcggctgtgccttcctgttcagcctgcacgagcccttccagacccacctgcccacccccagcagcaccctgcaggagcagctgacccccagcacagccaccttcagtgaccagctgacccccagcagcgccaccttcccagaccccctgaccagccccctgcagggccagctgacagagacctctgtgcgctcctatgaggaccagctgaccccctgcaccagcaccttcccagaccagctgctgcccagcacagccaccttccctgagcccctgggcagccctgcccacgagcagctgaccccacccagcacagccttccaggcccacctggacagccccagccagaccttccctgagcagctgagccccaaccccaccaagacctactttgcccaggagggctgcagcttcctgtatgagaagctgccccccagccccagcagccctggaaatggagactgcaccctgctggccctggcccagctgcggggccccctgtctgtggatgtgcccctggtgcctgagggcctgctgaccccagaggccagccctgtgaagcagagcttcttccactacagcgagaaggagcagaatgaaattgacaggctcatccagcagatcagccagctggcccagggcatggaccggcccttctctgctgaggccggcaccggcggcctggagcccctgggcggcctggagcccctggacagcaacctgagcctgtctggagctggcccccctgtgctgagcctggacctgaagccctggaagtgccaggagctggacttcctggccgaccctgacaacatgttcctggaggagacccctgtggaggacatcttcatggacctgagcaccccagaccccagcgaggagtggggcagcggggaccctgaggccgagggccctgggggcgcccccagcccctgcaacaacctgagccctgaggaccacagcttcctggaggacctggccacctatgaaacagcctttgagaccggggtgtctgccttcccctatgatggcttcacagatgagctgcaccagctgcagagccaggtgcaggacagcttccatgaagatggcagcggcggggagcccaccttctag

SEQ ID NO: 254505 - DNA, 705 bp, Artificial Sequence
  derived and/or modified sequence
atgtaccgcagcaccaagggggccagcaaggcccggcgggaccagatcaatgctgagatccggaacctgaaggagctgctgcccctggccgaggccgacaaggtgcggctgagctacctgcacatcatgagcctggcctgcatctacaccaggaagggcgtcttctttgctgggggcacccccctggccggccccaccggcctgctgagcgcccaggagctggaggacatcgtggccgccctgcccggcttcctgctggtgttcaccgctgagggcaagctgctgtacctgtctgagagcgtgtctgagcacctgggccacagcatggtggacctggtggcccagggcgacagcatctatgacatcattgatcctgctgaccacctgactgtgcggcagcagctgaccctgcccagcgccctggacacagacaggctcttccgctgccgcttcaacaccagcaagagcctgcggcggcagagcgctggcaacaagctggtgctgatccggggccgcttccacgcccaccccccaggggcctactgggccggcaaccctgtgttcaccgccttctgtgcccccctggagccccggcccaggcctggccctggccctggccctggccctgccagcctcttcctggccatgttccagagcagacatgccaaggacctggccctgctggacatcagcgagagcggctag

SEQ ID NO: 254506 - DNA, 2409 bp, Artificial Sequence
  derived and/or modified sequence
atgtaccggagcaccaagggcgccagcaaggcccggcgggaccagattaatgcagagattcggaatttaaaggaattactacccctcgcggaggcggacaaagtccggttgagctacctgcatatcatgagccttgcttgcatctataccaggaagggggtgttctttgctggggggaccccactcgccgggcccacagggctcttgagcgctcaggaactggaagatatcgttgctgccttgcccggtttcctgctggtatttaccgcagagggtaagttgctgtatctcagcgagagcgtcagtgagcaccttggacactcaatggtggatctagtcgcccagggggatagcatctacgatattatcgacccagctgaccacctgaccgtccgacagcagctgacactcccttctgccctcgatactgatcggctatttcgatgccggttcaacacttctaagagccttcggagacagtccgcgggcaacaagctggtgctgattagggggcggttccacgcccacccaccaggggcttattgggctgggaatccggtctttaccgccttctgcgctcctctggagccaaggcccaggcccggacccggccctggaccaggccctgcatccctattcctcgccatgttccagagtcgacacgcaaaggacttggctctgctggacatcagcgagagtgtcctgatctatcttggattcgagcgcagcgagctcctgtgcaaaagttggtacgggctccttcatccagaggacttggcacacgcgtctgctcagcattatcgtcttctggctgagtccggagacattcaggctgagatggtcgtgcggctacaagccaaaaccggcggctgggcgtggatctattgtttactgtatagtgagggccccgaagggccaattaccgcaaataactatcctatttcggacatggaagcctggagcttgagacagcaacttaattccgaggacacccaagcagcctatgtgctcggcactcctaccatgcttccctctttccccgagaacattctttctcaagaggagtgctcatccacaaaccctctgtttaccgctgctctcggggcgcctcgctccactagctttccatccgcaccagaactctccgtggtgtccgccagtgaggaattgcctaggccctcaaaggagctggacttttcatacttgacctttcctagtggaccggagccatccctgcaggcagagctctcgaaggacctagtctgcacacctccgtacacacctcaccaacctggaggttgtgcttttctgttctctctccacgaacctttccagacccaccttcctacaccaagtagcaccctccaggagcaactgactccctctacagcgacttttagtgaccagcttacaccgagctcagccaccttcccagatcctctgacaagtccactgcagggacagctaacggagacctccgtacggtcttacgaagaccagctcaccccctgcacaagtactttccctgaccagttactcccatcaacggctactttcccagaaccgctggggtccccagctcacgaacagctgacccctccttctaccgcgtttcaagcacacctggatagcccctcacagacctttcccgagcaactgagcccaaaccccactaaaacctacttcgctcaggagggctgctcgtttctgtatgagaagctgccaccttccccctcctccccggggaacggagattgcaccctgttagcgctcgctcagctcagaggcccattgtcggtcgatgtgccccttgtgccagagggcctccttacccctgaggcatcacccgtaaagcagagtttctttcactacagcgagaaggagcaaaatgagatcgacaggcttatccaacaaatctcgcaacttgcacagggaatggaccgaccattttccgctgaggccggcactggaggcctcgaaccactagggggcctagagccactggacagtaatctgtcgctgagcggagccggcccacctgtcttgagccttgacttaaaaccctggaaatgtcaagaactggatttcctcgccgacccggataacatgttccttgaagaaacaccagttgaagacattttcatggatctgtccacgcccgatccatccgaggaatggggaagtggcgatcccgaagcggagggacctggcggggcaccaagtccgtgtaataacttatctccggaggatcactctttccttgaagatctggccacctatgagacggccttcgagaccggggtgtcggctttcccatacgacggttttactgacgagctccaccagctgcagagccaagtccaggacagcttccacgaagatggctccgggggagaacccacattctag

SEQ ID NO: 254507 - DNA, 705 bp, Artificial Sequence
  derived and/or modified sequence
atgtaccggagcaccaagggcgccagcaaggcccggcgggaccagatcaatgccgagattagaaatctcaaagaactgctgcccctggccgaagcggataaagtgcgcctgtcctatctgcacattatgagcctggcgtgcatttatacccggaagggagtattctttgctggtggtactcctttagcggggcctaccggccttttatccgcccaagaactggaggatatcgtggccgccctgcctgggtttctcctagtgtttactgctgaaggcaagttactgtacctgagcgagagcgtctcagagcatctcggccactcaatggtcgacctggttgcgcagggggattcaatttacgacattatagatccagccgatcacttgacagtgaggcaacaacttactctcccttcggctctggacaccgatcggctgttcaggtgtaggttcaatacatctaagtccttacgtaggcagtccgccgggaataagctcgtgttgataaggggccgcttccacgcgcatccccccggagcctactgggcggggaaccccgtcttcactgctttttgcgcgcctttggaaccccgacctaggccagggcccggaccaggcccggggcccgcctccctcttcttggctatgtttcagtcccggcatgcaaaggacctcgcactgttagatatctccgagtcaggatag

SEQ ID NO: 254508 - DNA, 3303 bp, Artificial Sequence
  derived and/or modified sequence
gctatataaggcggcgtgaggcaggcgaggggggcagcgcagccgagcggagcccaggagagcagagagcgagcctgagcgagagacggggaagcacggaggaggaagccgccggtgcgtcgggacgggagcgcaggtgctcgggcacccgagctggagctccgcagccgccggtcatgtaccgctccaccaagggcgcctccaaggcgcgccgggaccagatcaacgccgagatccggaacctcaaggagctgctgccgctggccgaagcggacaaggtccggctgtcctacctgcacatcatgagcctcgcctgcatctacactcgcaagggcgtcttcttcgctggtggcactcctctggcgggccccacggggcttctctcagctcaagagcttgaggacatcgtagcggcactacccggctttctgcttgtgttcacagccgaggggaaattgctctacctgtctgagagtgtgagcgagcatctgggccactccatggtggacctggttgcccagggtgacagcatctacgacatcattgacccagctgaccacctcactgtgcgccagcaactcaccctgccctctgccctggacactgatcgcctcttccgctgccgcttcaacacctccaagtccctcaggcgccagagtgcaggcaacaaactcgtgcttattcgaggccgattccatgctcacccacctggagcctactgggcaggaaatcccgtgttcacagctttctgtgcccctctggagccgagaccccgcccaggtcctggccctggccctggccctgcctcgctcttcctggccatgttccagagccgccatgctaaagacctggctctactggacatctccgagagtgtcctaatctacctgggctttgagcgcagtgaactgctttgtaaatcatggtatggactgctgcaccccgaggacctggcccacgcttctgctcaacactaccgcctgttggctgagagtggagatattcaggcagagatggtggtgaggctacaggccaagactggaggctgggcatggatttactgcctgttatactcagaaggtccagagggacccattactgccaataactacccaatcagtgacatggaagcctggagcctccgccagcagttgaactctgaagacacccaggcagcttatgtcctgggcactccgaccatgctgccctcattccctgaaaacattctttcccaggaagagtgctccagcactaacccactcttcaccgcagcactgggggctcccagaagcaccagcttccccagtgctcctgaactgagtgttgtctctgcatcagaagagcttccccgaccctccaaagaactggacttcagttacctgacattcccttctgggcctgagccttctctccaagcagaactaagcaaggatcttgtgtgcactccaccttacacgccccatcagccaggaggctgtgccttcctcttcagcctccatgagcccttccagacccatttgcccaccccatccagcactcttcaagaacagctgactccaagcactgcgaccttctctgatcagttgacgcccagcagtgcaaccttcccagatccactaactagcccactgcaaggccagttgactgaaacctcggtcagaagctatgaagaccagttgactccctgcacctccaccttcccagaccagctgcttcccagcacagccaccttcccagagcctctgggcagccctgcccatgaacagctgactcctcccagcacagcattccaagcacacctggacagccccagccaaaccttcccagagcaactgagccccaaccctaccaagacttactttgcccaggagggatgcagttttctctatgagaagttgcccccaagtcctagcagccctggtaatggggactgcacgctcttggccctagcccagctccggggccccctctctgtggatgtccccctggtgcccgaaggcctgctcacacctgaggcctctccagtcaagcagagtttcttccactactctgaaaaggagcagaatgagatagaccgtctcatccagcagattagccaattggctcagggcatggacagacccttctcagctgaggctggcactggcggactagagccacttggaggactggagcccctggactccaacctgtccctgtcaggggcaggcccccctgtgctcagcctggacctgaaaccctggaaatgccaggagctggacttcctggctgaccctgataacatgttcctggaagagacgcccgtggaagacatcttcatggatctctctaccccagatcccagtgaggaatggggctcaggggatcctgaggcagagggcccaggaggggccccatcgccttgcaacaacctgtccccagaagaccacagcttcctggaggacctggccacatatgaaaccgcctttgagacaggtgtctcagcattcccctatgatgggtttactgatgagttgcatcaactccagagccaagttcaagacagcttccatgaagatggaagtggaggggaaccaacgttttgaataagtctgtgacttaacgtcgtcaagtatggcatattgtcatcaagacgtggagccgctctccacccccccgggactgttggggggattctgagggccagagggggatatatatgattccccaggccctgcaggattttggggggggggaggtgggagggcaagggaggggagcttctttttaaaatcaagagacttcgagcgatcccagtttccatttcaatctgtattcactcgtagtgagtttccttgaatgggatttcaagcggagaatgggggagtctcacttccccgccgccttgccccattggcctgggccagttctccactcctaggggccaagccacccctagccttggtgggggaaaggcagggcccacccgggccagcccgtgccctgaggggctcttgacacccacgtagaattctctacacaccagtaacgggatttcaattccgatggactctgccgccctggcggcccttcctgtgacttttgcgccccgcgcctggggtggggggtgcgaagagacgctacgttcctttccgatggaggaaggcagacctgccgtcacacgtgtgcttgcacgagtgcgtgtacctggtgcgggactcacccggccgccagactgcctgggcctgcccagatggccacctcgtggtgctgcggtgactttgtagccaactttataataaagtccagtttgcctttttggta

SEQ ID NO: 254509 - DNA, 2409 bp, Artificial Sequence
  derived and/or modified sequence
atgtaccgcagcaccaagggggctagtaaagctcggagggatcagatcaatgcagagattagaaatctcaaggaactactgcctctcgccgaagcagataaggtgaggctctcatacctgcacattatgagcctcgcgtgcatttacacgaggaaaggagtgttcttcgcagggggaacgcctctggccggacccactggcctcctgtccgcccaggagctcgaggacatcgtcgctgcgctgccaggctttcttctcgtgtttactgcagagggcaagctgctttacctgagcgaaagcgtcagtgaacacctcggtcacagtatggtggatttggtggctcagggagactcaatatacgatattatcgatccagccgatcacttgacagtgcgacagcagttgactcttccatctgcattggataccgatagactcttccggtgtaggttcaatacctctaagtccctaaggcgacagagcgccggtaataagctggtgcttattcggggacggttccatgcgcacccgccaggtgcgtattgggccggtaatcctgtgttcactgctttttgcgcgcctctcgaacctcgtccacggccaggccctggcccagggccaggaccagcctcgctgttccttgcaatgttccagagcaggcatgcaaaggacttagctttactggacatttcagaaagcgtcttgatctacctggggttcgagagaagcgagttactctgcaaatcatggtatggcctgcttcaccctgaggatctggcccacgcttccgcacagcattacaggctattagcagagtccggcgatatacaggcagagatggttgtgcgcctgcaggccaaaactggcggttgggcctggatatattgtttgttgtactcagagggccctgaaggacccattaccgccaacaattacccaatatccgatatggaagcttggtccctcaggcaacagctcaactcagaggacacacaggcagcatatgtgctcggcaccccaacaatgttgccctcgtttcccgaaaatatactatcgcaggaggagtgctcatcaacaaatccgctattcaccgccgcactgggggctccgagatcgactagcttcccctccgcgcctgagttaagcgtggtgagtgccagcgaggaactaccacgacccagtaaggaactggatttctcctatctaaccttcccatccggaccagagccctcacttcaagctgagctgagcaaggacctggtgtgtacacccccttacaccccacaccagcctggtggatgcgcctttcttttcagtctgcatgagcccttccagacacatcttcccacaccaagttccacactgcaggaacagcttaccccttctactgctacattctccgaccagctgactccctccagcgctactttcccagatccgctgaccagccccctgcagggccagctcaccgaaaccagtgtgcgctcctacgaagaccagctgactccctgtaccagcacttttcccgaccagctcctaccatctactgctacctttcctgaacctctgggttctcccgctcatgaacagctgacacctccatctacggctttccaggcacatcttgactcccctagccagacatttccggaacagctgtctcctaaccccactaagacatatttcgcacaagaggggtgctcttttctgtacgagaaactgccgcctagcccatcttcacccggaaatggcgactgcacactattagctttagctcagctgaggggtcctctctcagtcgacgttcctctggtgcctgaggggctgcttacgcctgaggcttcccctgtgaagcagtcctttttccactacagcgagaaagagcagaatgaaattgacagactcattcagcagatctcacagctggcacaagggatggacaggcctttctccgcagaggcaggcactggaggcctagagcccctcgggggactggaaccgctggattccaacttatctctgagcggggcagggccacccgtgctatctctggacctgaagccgtggaaatgtcaggagctggatttcctggccgatcccgataacatgtttttggaagaaactccagtggaagacattttcatggatctgagcacacccgatccttccgaagaatggggcagcggggaccccgaggctgagggtcctggcggtgccccatcaccctgcaataacttgtcaccagaagaccactcattcctcgaggatcttgcgacatatgaaactgcctttgagacgggcgtgtctgccttcccgtacgacggcttcacagatgagctgcatcagctccagagccaggttcaagactccttccatgaggacggctcaggaggtgagcccaccttttag

SEQ ID NO: 254510 - DNA, 705 bp, Artificial Sequence
  derived and/or modified sequence
atgtaccgtagcactaaaggcgctagtaaagcgaggcgggaccagattaatgccgagataaggaacttgaaggagctgctcccactggccgaggcagacaaggtaagactcagctatctccacataatgtctctggcctgtatttacacccgcaaaggcgttttctttgcgggaggtacccccctcgcaggtccgactggactcctgtctgcccaggagctagaagatattgtggctgcgttgcctggctttctgcttgtatttacagcagaaggcaagctgttgtacctctcagagtccgtgtctgagcacctgggacattcaatggtggacttggtggcccagggagacagcatttatgacatcattgaccccgcagaccatctgactgtacgccagcagttaactctgccttctgctctcgacaccgaccgcctgttccggtgccggtttaatacaagcaaatcccttcgcagacaatccgccggaaataagctggtactcattcgagggcgttttcacgctcatccgccaggcgcatactgggccggaaacccagtgtttacggcattctgcgccccacttgaacctagaccacggccaggtccgggacccggacccggaccagcatctctgttcctggcgatgttccagagcaggcacgcaaaagacctcgccttgctggacatcagcgagagcggatag

SEQ ID NO: 254511 - DNA, 2409 bp, Artificial Sequence
  derived and/or modified sequence
atgtacagaagcaccaagggcgccagcaaggccagaagagaccagatcaacgccgagatcagaaacctgaaggagctgctgcccctggccgaggccgacaaggtgagactgagctacctgcacatcatgagcctggcctgcatctacaccagaaagggcgtgttcttcgccggcggcacccccctggccggccccaccggcctgctgagcgcccaggagctggaggacatcgtggccgccctgcccggcttcctgctggtgttcaccgccgagggcaagctgctgtacctgagcgagagcgtgagcgagcacctgggccacagcatggtggacctggtggcccagggcgacagcatctacgacatcatcgaccccgccgaccacctgaccgtgagacagcagctgaccctgcccagcgccctggacaccgacagactgttcagatgcagattcaacaccagcaagagcctgagaagacagagcgccggcaacaagctggtgctgatcagaggcagattccacgcccacccccccggcgcctactgggccggcaaccccgtgttcaccgccttctgcgcccccctggagcccagacccagacccggccccggccccggccccggccccgccagcctgttcctggccatgttccagagcagacacgccaaggacctggccctgctggacatcagcgagagcgtgctgatctacctgggcttcgagagaagcgagctgctgtgcaagagctggtacggcctgctgcaccccgaggacctggcccacgccagcgcccagcactacagactgctggccgagagcggcgacatccaggccgagatggtggtgagactgcaggccaagaccggcggctgggcctggatctactgcctgctgtacagcgagggccccgagggccccatcaccgccaacaactaccccatcagcgacatggaggcctggagcctgagacagcagctgaacagcgaggacacccaggccgcctacgtgctgggcacccccaccatgctgcccagcttccccgagaacatcctgagccaggaggagtgcagcagcaccaaccccctgttcaccgccgccctgggcgcccccagaagcaccagcttccccagcgcccccgagctgagcgtggtgagcgccagcgaggagctgcccagacccagcaaggagctggacttcagctacctgaccttccccagcggccccgagcccagcctgcaggccgagctgagcaaggacctggtgtgcacccccccctacaccccccaccagcccggcggctgcgccttcctgttcagcctgcacgagcccttccagacccacctgcccacccccagcagcaccctgcaggagcagctgacccccagcaccgccaccttcagcgaccagctgacccccagcagcgccaccttccccgaccccctgaccagccccctgcagggccagctgaccgagaccagcgtgagaagctacgaggaccagctgaccccctgcaccagcaccttccccgaccagctgctgcccagcaccgccaccttccccgagcccctgggcagccccgcccacgagcagctgaccccccccagcaccgccttccaggcccacctggacagccccagccagaccttccccgagcagctgagccccaaccccaccaagacctacttcgcccaggagggctgcagcttcctgtacgagaagctgccccccagccccagcagccccggcaacggcgactgcaccctgctggccctggcccagctgagaggccccctgagcgtggacgtgcccctggtgcccgagggcctgctgacccccgaggccagccccgtgaagcagagcttcttccactacagcgagaaggagcagaacgagatcgacagactgatccagcagatcagccagctggcccagggcatggacagacccttcagcgccgaggccggcaccggcggcctggagcccctgggcggcctggagcccctggacagcaacctgagcctgagcggcgccggcccccccgtgctgagcctggacctgaagccctggaagtgccaggagctggacttcctggccgaccccgacaacatgttcctggaggagacccccgtggaggacatcttcatggacctgagcacccccgaccccagcgaggagtggggcagcggcgaccccgaggccgagggccccggcggcgcccccagcccctgcaacaacctgagccccgaggaccacagcttcctggaggacctggccacctacgagaccgccttcgagaccggcgtgagcgccttcccctacgacggcttcaccgacgagctgcaccagctgcagagccaggtgcaggacagcttccacgaggacggcagcggcggcgagcccaccttctag

SEQ ID NO: 254512 - DNA, 705 bp, Artificial Sequence
  derived and/or modified sequence
atgtacagaagcaccaagggcgccagcaaggccagaagagaccagatcaacgccgagatcagaaacctgaaggagctgctgcccctggccgaggccgacaaggtgagactgagctacctgcacatcatgagcctggcctgcatctacaccagaaagggcgtgttcttcgccggcggcacccccctggccggccccaccggcctgctgagcgcccaggagctggaggacatcgtggccgccctgcccggcttcctgctggtgttcaccgccgagggcaagctgctgtacctgagcgagagcgtgagcgagcacctgggccacagcatggtggacctggtggcccagggcgacagcatctacgacatcatcgaccccgccgaccacctgaccgtgagacagcagctgaccctgcccagcgccctggacaccgacagactgttcagatgcagattcaacaccagcaagagcctgagaagacagagcgccggcaacaagctggtgctgatcagaggcagattccacgcccacccccccggcgcctactgggccggcaaccccgtgttcaccgccttctgcgcccccctggagcccagacccagacccggccccggccccggccccggccccgccagcctgttcctggccatgttccagagcagacacgccaaggacctggccctgctggacatcagcgagagcggctag

SEQ ID NO: 254513 - protein, 173 aa, Artificial Sequence
  derived and/or modified sequence
MEEPQRARSHTVTTTASSFAENFSTSSSSFAYDREFLRTLPGFLIVAEIVLGLLVWTLIAGTEYFRVPAFGWVMFVAVFYWVLTVFFLIIYITMTYTRIPQVPWTTVGLCFNGSAFVLYLSAAVVDASSVSPERDSHNFNSWAASSFFAFLVTICYAGNTYFSFIAWRSRTIQ

SEQ ID NO: 254514 - DNA, 522 bp, Artificial Sequence
  derived and/or modified sequence
atggaggagccccagagggctcgctctcatactgttaccaccactgcatcatctttcgcagagaatttttctacttcctctagcagctttgcttatgatcgagaattcttacgaactttgcctggattcctgattgtagcagagatcgtactgggcttgctggtgtggactctgatcgcgggaaccgaatacttccgagtccccgcattcggttgggtgatgtttgtggccgttttttactgggtattaaccgtgtttttccttatcatatatatcactatgacatacacgagaatcccacaggtcccgtggacgactgtagggctttgctttaatggttctgcattcgttctgtacctttccgccgcagtcgtcgatgcttcttccgtatctcccgagcgcgatagccacaactttaactcctgggcagcaagttccttttttgcctttctggtgaccatttgttacgccggcaacacctatttttccttcatcgcctggcgaagccggacaattcagtag

SEQ ID NO: 254515 - DNA, 522 bp, Artificial Sequence
  derived and/or modified sequence
atggaggagccccagagggcccggagccacacagtgaccaccacagccagcagctttgctgagaacttcagcaccagcagcagcagctttgcctatgaccgggagttcctgcggaccctgcccggcttcctgattgtggccgagatcgtgctgggcctgctggtgtggaccctgattgctggaacagagtacttccgggtgcctgccttcggctgggtgatgtttgtggccgtgttctactgggtgctgaccgtcttcttcctgatcatctacatcaccatgacctacacccgcatcccccaggtgccctggaccaccgtgggcctgtgcttcaacggcagcgcctttgtgctgtacctgtctgctgctgtggtggatgccagctctgtgtccccagagcgggacagccacaacttcaacagctgggccgccagcagcttctttgccttcctggtgaccatctgctacgccggcaacacctacttctccttcatcgcctggaggagcaggaccatccagtag

SEQ ID NO: 254516 - DNA, 522 bp, Artificial Sequence
  derived and/or modified sequence
atggaggagccccagcgggcccggagccacaccgtgaccaccaccgcctccagcttcgctgaaaactttagtacatcttctagctctttcgcatacgaccgggaatttctacggaccttacccggatttctgatagtagccgaaattgttctggggctcttggtatggacgttgatcgccggaaccgaatactttcgtgtccccgccttcggatgggtaatgttcgtggccgttttttactgggtcctcacagtgttttttcttatcatctacatcacaatgacctatacacgcatcccccaagttccgtggacgactgtaggtctctgtttcaatggctccgctttcgtgctgtatctttccgctgctgtggtggacgcgtcttcagtctctccagagagggactcccacaatttcaatagttgggcagcttcatcattcttcgccttcctcgtgacgatatgctatgcaggcaatacatacttttcatttatcgcttggcggtcccgaacaatacagtag

SEQ ID NO: 254517 - DNA, 522 bp, Artificial Sequence
  derived and/or modified sequence
atggaggaaccgcagagggccagatctcacactgtcacgaccaccgcttcttctttcgccgaaaatttctcaactagttcgagctcctttgcttatgatcgggaattccttagaaccctcccaggatttctgatcgtggcagaaattgtcctgggtctcctggtgtggacactgatcgcaggcacagagtactttagagtaccagccttcggctgggtgatgttcgtcgcagtcttttattgggttctcaccgtgttctttctgattatttacatcactatgacctacacaagaattccgcaggtgccatggacaacagtgggattgtgcttcaatggctctgcttttgtcttgtatctgagcgctgcagtggtagacgcctccagtgtgtctcccgagcgtgactcccacaatttcaactcatgggccgctagctcatttttcgcctttttggtcaccatctgctatgcaggcaacacctactttagttttatagcctggagatcccgtacaattcaatag

SEQ ID NO: 254518 - DNA, 1174 bp, Artificial Sequence
  derived and/or modified sequence
ggcctccaccgccttccccggctgcccggcagcctcccctcgctcgctctcctcttcctctagggccccagcgcagctcgggagcccgcgcaccgaggcgctaggggcaccgcgcactagagggacacccgccgcgcctggacagcccccggcgggcgcccccctcgcacctcctgccccgcgcgggccgcgctcccctcccccgcgcctgtgtccccagggcgcagggccgcgcgtccagccccagacccgccggggtccctggggacgcgccagcccggcagtggctcgacgatggaggagccgcagcgcgcccgctcgcacacagtcaccaccaccgccagctccttcgcagagaacttctccaccagcagcagcagcttcgcctacgaccgggagttcctccgcaccctgcccggcttcctcatcgtggccgagatcgttctggggctgctggtatggacgcttattgctggaactgagtacttccgggtccccgcatttggctgggtcatgtttgtagctgtattttactgggtcctcaccgtcttcttcctcattatctacataacaatgacctacaccaggattccccaggtgccctggacaacagtgggcctgtgctttaacggcagtgccttcgtcttgtacctctctgccgctgttgtagatgcatcttccgtctcccctgagagggacagtcacaacttcaacagctgggcggcctcatcgttctttgccttcctggtcaccatctgctacgctggaaatacatatttcagttttatagcatggagatccaggaccatacagtgatttaccattttgataattaaaaggaaaaaaaaaggaagactctcactgtaaaaacagctgtaggtataatgtatattcccagagaattgtatttaactaattaatgttttttatattcttaaatttgctcacaaattgtggtttgttacaattaaactggatacttatttgcaaagtgttgtagcttataatgaactcttaagtatcttattaatgtattaatgtcttcatagatcatattttcttagacaatgtttaaatagataaattgctaatattgagaatgtgtcaagtttgtaaacctaacttttaagatgccagattcttttttgattaaatgttgcaaaatcccaagtaa

SEQ ID NO: 254519 - DNA, 522 bp, Artificial Sequence
  derived and/or modified sequence
atggaggagccccagagagccagaagccacaccgtgaccaccaccgccagcagcttcgccgagaacttcagcaccagcagcagcagcttcgcctacgacagagagttcctgagaaccctgcccggcttcctgatcgtggccgagatcgtgctgggcctgctggtgtggaccctgatcgccggcaccgagtacttcagagtgcccgccttcggctgggtgatgttcgtggccgtgttctactgggtgctgaccgtgttcttcctgatcatctacatcaccatgacctacaccagaatcccccaggtgccctggaccaccgtgggcctgtgcttcaacggcagcgccttcgtgctgtacctgagcgccgccgtggtggacgccagcagcgtgagccccgagagagacagccacaacttcaacagctgggccgccagcagcttcttcgccttcctggtgaccatctgctacgccggcaacacctacttcagcttcatcgcctggagaagcagaaccatccagtag

SEQ ID NO: 254520 - protein, 570 aa, Artificial Sequence
  derived and/or modified sequence
MPYKLKKEKEPPKVAKCTAKPSSSGKDGGGENTEEAQPQPQPQPQPQAQSQPPSSNKRPSNSTPPPTQLSKIKYSGGPQIVKKELFIQKLRQCCVLFDFVSDPLSDLKFKEVKRAGLNEMVEYITHSRDVVTEAIYPEAVTMFSVNLFRTLPPSSNPTGAEFDPEEDEPTLEAAWPHLQLVYEFFLRFLESPDFQPNIAKKYIDQKFVLALLDLFDSEDPRERDFLKTILHRIYGKFLGLRAYIRRQINHIFYRFIYETEHHNGIAELLEILGSIINGFALPLKEEHKMFLIRVLLPLHKVKSLSVYHPQLAYCVVQFLEKESSLTEPVIVGLLKFWPKTHSPKEVMFLNELEEILDVIEPSEFSKVMEPLFRQLAKCVSSPHFQVAERALYYWNNEYIMSLISDNAARVLPIMFPALYRNSKSHWNKTIHGLIYNALKLFMEMNQKLFDDCTQQYKAEKQKGRFRMKEREEMWQKIEELARLNPQYPMFRAPPPLPPVYSMETETPTAEDIQLLKRTVETEAVQMLKDIKKEKVLLRRKSELPQDVYTIKALEAHKRAEEFLTASQEAL

SEQ ID NO: 254521 - DNA, 1713 bp, Artificial Sequence
  derived and/or modified sequence
atgccctacaagttaaagaaggaaaaggagcctccaaaagtggctaagtgtacagctaagccctcttccagcggcaaagatggtggcggggagaacaccgaggaagcccaaccgcagccacagccacagcctcaaccacaggcgcagagccagcctccctcttcaaacaagagaccaagcaattctacacccccacctactcaactgtctaaaataaaatattcaggaggtcctcagatagttaaaaaggagcttttcatccagaaattgcgacagtgttgcgtactcttcgacttcgtgtccgatcccctgagtgacttaaagttcaaagaagtaaagcgagctggactgaatgagatggtagagtatattacacactcacgggacgtggttactgaagccatataccctgaagccgtgaccatgttttcagttaacttgtttaggacacttcctccatcctctaacccaactggtgcagaattcgatccagaagaagatgaacccactctcgaagcagcctggccccacctgcagctggtgtatgagtttttcttgcggtttctggaaagtccagactttcagcccaacatagctaaaaagtacatagatcagaaatttgtgcttgccctcctagatttgttcgatagtgaagatccacgtgaaagagatttccttaagactatcctccatcgaatctacgggaaattcctgggactccgcgcctacattagacgtcagatcaatcatatcttttatagattcatatatgagaccgaacaccataatgggatcgccgagctcctggagatactgggaagcatcatcaatggctttgctctgcctttaaaggaggagcacaaaatgttcctaatccgggttctgcttcctctgcataaggtgaagtctctgtccgtctatcacccgcagctggcctattgcgtggttcagttcctagagaaggagagcagtcttactgagcccgtaatcgtgggactgcttaagttttggcctaaaacccattcgccgaaggaggttatgttcctgaacgaactcgaggagatacttgatgtgatcgagccgagcgagttctctaaggtgatggaaccgctgtttcgccaacttgctaagtgcgttagctccccgcacttccaggttgcagaacgggcgctgtactactggaacaatgaatatatcatgagcttaatttcggataatgcagctagagtgctgccaatcatgtttcctgctctctataggaacagcaaaagccactggaataagactatccatggccttatctataatgctttgaagttattcatggaaatgaaccagaagctgttcgatgactgcacgcagcagtacaaagctgagaaacagaagggaaggtttcgcatgaaggagcgggaagagatgtggcagaagattgaagagctggcgcgcttgaaccctcagtaccccatgttccgagcaccacctccccttccccctgtgtatagtatggaaactgagactcccaccgccgaggacatccagttactcaaacggacagtagaaacagaggcagtgcagatgctcaaagatattaaaaaagagaaggtgctgctgcgaagaaaatcggagctcccccaagatgtctataccatcaaagcacttgaggcccacaagcgggctgaggaatttctgactgccagccaggaggccctatag

SEQ ID NO: 254522 - DNA, 1713 bp, Artificial Sequence
  derived and/or modified sequence
atgccctacaagctgaagaaggagaaggagccccccaaggtggccaagtgcacagccaagcccagcagcagcggcaaggatggcggcggagaaaatacagaggaggcccagccccagccccagccccagccccagccccaggcccagagccagccccccagcagcaacaagaggcccagcaacagcaccccaccacccacccagctgagcaagatcaagtacagcggcggcccccagatcgtgaagaaggagctgttcatccagaagctgcggcagtgctgcgtgctgtttgattttgtgtctgaccccctgagtgacctgaagttcaaggaggtgaagagagctggcctgaatgagatggtggagtacatcacccacagcagagatgtggtgacagaggccatctacccagaggccgtgaccatgttttctgtgaacctcttccgcaccctgccccccagcagcaaccccaccggggctgagtttgatcctgaggaggatgagcccaccctggaggccgcctggccccacctgcagctggtgtatgagttcttcctgcgcttcctggagagcccagacttccagcccaacatcgccaagaagtacatcgaccagaagtttgtgctggccctgctggacctgtttgattctgaggacccccgggagcgggacttcctgaagaccatcctgcaccgcatctacggcaagttcctgggcctgcgggcctacatccggcggcagatcaaccacatcttctaccgcttcatctatgaaacagagcaccacaatggaattgctgagctgctggagatcctgggcagcatcatcaatggatttgccctgcccctgaaggaggagcacaagatgttcctgatccgggtgctgctgcccctgcacaaggtgaagagcctgtctgtgtaccacccccagctggcctactgtgtggtgcagttcctggagaaggagagcagcctgacagagcccgtcatcgtgggcctgctgaagttctggcccaagacccacagccccaaggaggtgatgttcctgaatgagctggaggagatcctggatgtgattgagcccagcgagttcagcaaggtgatggagcccctcttccggcagctggccaagtgtgtgagcagcccccacttccaggtggccgagcgggccctgtactactggaacaatgagtacatcatgagcctcatcagtgacaatgctgcccgggtgctgcccatcatgtttcctgccctgtacagaaacagcaagagccactggaacaagaccatccacggcctcatctacaatgccctgaagctgttcatggagatgaaccagaagctgtttgatgactgcacccagcagtacaaggccgagaagcagaagggccgcttcaggatgaaggagcgggaggagatgtggcagaagattgaggagctggcccggctgaacccccagtaccccatgttccgggcccccccacccctgccccctgtgtacagcatggagacagagacccccacagctgaggacatccagctgctgaagaggacagtggagacagaagctgtgcagatgctgaaggacatcaagaaggagaaggtgctgctgcggaggaagtctgagctgccccaggatgtgtacaccatcaaggccctggaggcccacaagagagctgaggagttcctgacagccagccaggaggccctgtag

SEQ ID NO: 254523 - DNA, 1713 bp, Artificial Sequence
  derived and/or modified sequence
atgccctacaagctgaagaaggagaaggagccccccaaggtggccaaatgcacggccaagccttcatccagtggaaaagacggcggcggggaaaataccgaggaagcccagccccagccccagccccaaccacaaccccaggcacagtctcaaccacctagctctaacaagcgacccagcaattccaccccaccgcctactcagctgtctaagataaaatattccgggggaccacagatcgtcaagaaggagctgtttatacagaagctccggcagtgctgcgtgttgtttgattttgtctcagatcccttgtccgacctgaaatttaaagaggtgaagcgggcagggcttaacgagatggtggagtacatcacccattcgcgggacgtcgtcactgaggctatctatcctgaagccgtgaccatgttcagtgtgaacttatttcgcaccctgcctcctagctccaacccaaccggagccgaattcgaccctgaagaggatgaaccgacactggaagctgcgtggcctcaccttcagctggtgtacgaatttttcctccggtttttggaaagccccgactttcagccgaacatcgctaagaagtacattgaccagaaatttgtgctagccttgctggatttgttcgacagcgaagatccccgggagagggactttctaaagaccatactgcaccgtatatatggcaaatttttgggcttgagagcatatatcagaaggcagatcaatcatatcttttatcgtttcatctacgagaccgagcatcataatggcatcgccgagctgctggagatcctgggcagcatcatcaacggctttgcccttccactcaaagaggagcataagatgtttcttattcgagtgttactgccactgcataaagttaagtccttaagtgtctaccaccctcagctggcctattgcgtggtgcagttcctggaaaaggaatcaagccttacagagcctgtgattgtgggactgctgaagttttggccaaaaacccattctcctaaagaagtcatgtttctgaacgagctcgaagaaatacttgacgtaattgaacccagcgagttttctaaggtaatggaacctctcttcagacaactcgccaaatgtgtcagctcgccacattttcaggtggccgagcgagcactgtactactggaacaacgagtacataatgtccctcatctcagataatgccgcacgggtcctgccgataatgttccccgccttgtatcggaattcaaaatcgcattggaataagacaatccacggcctgatctacaacgcactgaagctgtttatggaaatgaaccagaagttgttcgatgattgtactcaacagtataaggccgaaaagcagaagggaaggttccggatgaaggagagggaggaaatgtggcaaaaaattgaggagctggctcgcctgaaccctcagtatcctatgtttagggccccacctcctcttcctccagtgtactccatggagaccgagacccccacagccgaagatattcagctgctcaagcgaaccgtggaaaccgaggctgtccaaatgttaaaggacatcaagaaggaaaaggtcctgctccgccggaagtctgagctcccccaggatgtgtacactatcaaggccctcgaggcacacaagagggctgaggagttcctgaccgcttcacaggaggccctgtag

SEQ ID NO: 254524 - DNA, 1713 bp, Artificial Sequence
  derived and/or modified sequence
atgccttacaaactcaagaaagagaaggagcctccgaaggttgccaaatgcactgctaaaccgagtagctcagggaaggatggcggtggagaaaatactgaggaggcacagcctcaaccacagccgcagccacagccccaggctcagagccaaccccctagcagcaacaagcgcccttcaaattccacaccacctcctacacagctctcaaaaatcaaatactctggtggccctcagattgtcaaaaaggagctgtttattcagaaattgcgtcagtgctgtgtgctgttcgactttgtgagcgatccgctgagtgatctgaaatttaaagaggtcaagcgtgccggtctgaatgaaatggtcgagtacataacacattcccgcgacgttgtgacagaggccatatatcccgaagcagtgaccatgttcagtgtcaacttatttagaacgctgcccccaagctccaaccccacaggcgctgagtttgatccagaagaggatgagcccactctcgaggccgcttggccacacctccagttggtgtacgaattcttcttaaggttcctggagtcgcccgattttcagccaaacatcgcaaagaaatacattgatcagaagttcgtcctggctctgctggacctctttgattccgaggatccacgagagagggactttctcaaaacaattctgcaccgaatctatgggaagttcctcgggctgcgggcttacattagaaggcagatcaatcatattttctataggttcatctatgaaaccgagcatcataacggtatcgcagagctcctagagatcctgggatcaataataaacggcttcgcactgcctcttaaagaggagcataagatgtttctgattcgcgtcttactccctctacataaagtgaagtccctgagtgtataccatcctcagctggcctactgtgtcgtgcagttcctcgagaaagagagttccctcactgagcctgtcattgtgggcctactgaagttttggcccaaaacacatagcccaaaagaggtcatgtttctgaacgaactggaggaaatcctggacgtcatcgagccttccgagttcagcaaagtcatggagccgctgttcagacagctggcaaagtgcgtgagctcaccccatttccaagtggccgaaagggccctctactactggaacaatgaatacatcatgagcctgatctctgataatgctgctcgcgtgcttcctattatgttcccagccctgtatagaaattcgaaatcacactggaacaagaccattcacggcctgatatacaacgcgctaaagctgttcatggaaatgaatcagaagctgtttgacgattgtacacagcagtacaaggcagagaagcagaagggtcgatttcgcatgaaggagagggaagagatgtggcagaagatcgaagagttggcacgcctgaatcctcagtaccctatgttccgcgctccgcctccactgcccccagtatatagcatggagacagaaacccctaccgctgaagatattcaactgttgaagaggaccgtggaaaccgaagctgtccagatgctcaaggatatcaagaaagaaaaggttttgctccgcaggaagagtgagctgccacaggatgtctacactatcaaagctctagaggctcataagcgtgccgaagagtttctaacggcaagtcaggaagcattatag

SEQ ID NO: 254525 - DNA, 2894 bp, Artificial Sequence
  derived and/or modified sequence
caccgctcgacccgggcgcagcgcgcaggcggtggcgaagagacgccgagcgggccgagtgcggccgagcaaagccggagccggagcggggccgcaggagacgggccgggtccggacgggccgagatgccctataaactgaaaaaggagaaggagccccccaaggttgccaaatgcacagccaagcctagcagctcgggcaaggatggtggaggcgagaacactgaggaggcccagccgcagccccagccccagccccagccccaagcccagtctcagccaccgtcatccaacaagcgtcccagcaatagcacgccgccccccacgcagctcagcaaaatcaagtactcaggggggccccagattgtcaagaaggagctgtttatccagaagctacgccagtgctgtgtcctctttgacttcgtgtcagacccactcagtgacctcaaattcaaggaggtgaagcgggcaggactcaacgagatggtggagtacatcacccatagccgtgatgttgtcactgaggccatttaccctgaggctgtcaccatgttttcagtgaacctcttccggacgctgccaccttcatcgaatcccacaggggctgagtttgacccagaggaagatgagcccaccctggaagctgcttggccacatctccagctcgtgtatgagttcttcttacgtttccttgagtctcctgatttccagccaaacatagccaagaagtacatcgaccagaagtttgtacttgctctcctagacctatttgacagtgaggatcctcgagagcgggacttcctcaagaccattttgcatcgcatctatggcaagtttttggggctccgggcttatatccgtaggcagatcaaccacatcttctacaggttcatctacgagacggagcatcacaacgggattgctgagctcctggagatcctgggcagcatcatcaatggctttgccctgccccttaaagaagagcacaagatgttcctcatccgtgtcctacttccccttcacaaggtcaagtccctgagtgtctaccaccctcagctggcatactgtgtggtacaattcctggagaaggagagcagtctgactgagccggtaattgtgggacttctcaagttttggcccaagacccacagccccaaggaggtgatgttcttgaatgagctggaggagattctggacgtcattgaaccttctgagttcagcaaagtgatggaacccctcttccgccagctggccaagtgtgtctctagcccccatttccaggtggcagagcgtgctctctattactggaacaatgagtacatcatgagcctgataagtgacaatgctgcccgagtcctccccatcatgttccctgcactctacaggaactccaagagccactggaacaagacaatccatggactgatctataatgccctgaagttgtttatggaaatgaatcagaagctgtttgatgactgcacacaacaatacaaggcagagaagcagaagggccggttccgaatgaaggaaagggaagagatgtggcaaaaaatcgaggagctggcccggcttaatccccagtatcccatgttccgagcccctccaccactgccccctgtgtactcgatggagacagagacccccacagctgaggacatccagcttctgaagaggactgtggagactgaggctgttcagatgctaaaagacatcaagaaggagaaagtgctgctgcggaggaagtcggagctgccccaggacgtgtacaccatcaaggcactggaggcgcacaagcgggcggaagagttcctaactgccagccaggaggctctctgacccctcacgttcctaccacagggccacagcccacacagccctgggacactgccctggccctccatactctgctccctactggctgtcttgggggaaggcagcgcctctctagctactcaagggagggggatgtgggcacttgaagcagggacacccacagaatggtccctcttctccccaaaaggtgttcatgcctccctgtggctagtacaggctgagcactaagatgcttagtgctcagacaacctggggatgcctgtcccctacctgctcctcacccacagctacctgaggctgctctgagaagtacacacaggaatacatacgctcctctattcttcccttcatcctcatttgaacgccaggtatctcccctcctctctctcccctgcagaggcatgtagggaacagcaggagattattctcaccaaagttatgtcaagccccattggtcccagagtagctgaagggaagccaacccccctgcagcacaaataggccccccagtcccagccgtgtgctggcagatagggttgtattatttcttcttaccccatgcctgaccaagggaggtcaaaaggagaaaagtataggctgtggacaataactgatgaatatagggcccagatggaccaagtggggccggggagggatgaataaacaccctaccccgtgccctgtctttggtgagcagcagccctggggtcacagacatggaagggaccaccctggggctgactgcttttctgtgctgttggttcccaaaactagaaagaaggaagcagggagcggtgccccaagcatggctcctgccaacacctatttatttccttgtttgtgctatgctgggcaggccttctcttgtcccttataggtaccttggaggggccaggggctgaggaaggccggacccaggttccaggggcgcaggcagtgcggcttttggctgtgtacatagggtgctttattctccacagagtgatacatgctaaggtgggttgggcttggaccgatgtccccatatgtacagaactgaataaagtgggtctctgagaa

SEQ ID NO: 254526 - DNA, 1713 bp, Artificial Sequence
  derived and/or modified sequence
atgccctacaagctgaagaaggagaaggagccccccaaggtggccaagtgcaccgccaagcccagcagcagcggcaaggacggcggcggcgagaacaccgaggaggcccagccccagccccagccccagccccagccccaggcccagagccagccccccagcagcaacaagagacccagcaacagcacccccccccccacccagctgagcaagatcaagtacagcggcggcccccagatcgtgaagaaggagctgttcatccagaagctgagacagtgctgcgtgctgttcgacttcgtgagcgaccccctgagcgacctgaagttcaaggaggtgaagagagccggcctgaacgagatggtggagtacatcacccacagcagagacgtggtgaccgaggccatctaccccgaggccgtgaccatgttcagcgtgaacctgttcagaaccctgccccccagcagcaaccccaccggcgccgagttcgaccccgaggaggacgagcccaccctggaggccgcctggccccacctgcagctggtgtacgagttcttcctgagattcctggagagccccgacttccagcccaacatcgccaagaagtacatcgaccagaagttcgtgctggccctgctggacctgttcgacagcgaggaccccagagagagagacttcctgaagaccatcctgcacagaatctacggcaagttcctgggcctgagagcctacatcagaagacagatcaaccacatcttctacagattcatctacgagaccgagcaccacaacggcatcgccgagctgctggagatcctgggcagcatcatcaacggcttcgccctgcccctgaaggaggagcacaagatgttcctgatcagagtgctgctgcccctgcacaaggtgaagagcctgagcgtgtaccacccccagctggcctactgcgtggtgcagttcctggagaaggagagcagcctgaccgagcccgtgatcgtgggcctgctgaagttctggcccaagacccacagccccaaggaggtgatgttcctgaacgagctggaggagatcctggacgtgatcgagcccagcgagttcagcaaggtgatggagcccctgttcagacagctggccaagtgcgtgagcagcccccacttccaggtggccgagagagccctgtactactggaacaacgagtacatcatgagcctgatcagcgacaacgccgccagagtgctgcccatcatgttccccgccctgtacagaaacagcaagagccactggaacaagaccatccacggcctgatctacaacgccctgaagctgttcatggagatgaaccagaagctgttcgacgactgcacccagcagtacaaggccgagaagcagaagggcagattcagaatgaaggagagagaggagatgtggcagaagatcgaggagctggccagactgaacccccagtaccccatgttcagagcccccccccccctgccccccgtgtacagcatggagaccgagacccccaccgccgaggacatccagctgctgaagagaaccgtggagaccgaggccgtgcagatgctgaaggacatcaagaaggagaaggtgctgctgagaagaaagagcgagctgccccaggacgtgtacaccatcaaggccctggaggcccacaagagagccgaggagttcctgaccgccagccaggaggccctgtag

SEQ ID NO: 254527 - protein, 496 aa, Artificial Sequence
  derived and/or modified sequence
MPYKLKKEKELFIQKLRQCCVLFDFVSDPLSDLKFKEVKRAGLNEMVEYITHSRDVVTEAIYPEAVTMFSVNLFRTLPPSSNPTGAEFDPEEDEPTLEAAWPHLQLVYEFFLRFLESPDFQPNIAKKYIDQKFVLALLDLFDSEDPRERDFLKTILHRIYGKFLGLRAYIRRQINHIFYRFIYETEHHNGIAELLEILGSIINGFALPLKEEHKMFLIRVLLPLHKVKSLSVYHPQLAYCVVQFLEKESSLTEPVIVGLLKFWPKTHSPKEVMFLNELEEILDVIEPSEFSKVMEPLFRQLAKCVSSPHFQVAERALYYWNNEYIMSLISDNAARVLPIMFPALYRNSKSHWNKTIHGLIYNALKLFMEMNQKLFDDCTQQYKAEKQKGRFRMKEREEMWQKIEELARLNPQYPMFRAPPPLPPVYSMETETPTAEDIQLLKRTVETEAVQMLKDIKKEKVLLRRKSELPQDVYTIKALEAHKRAEEFLTASQEAL

SEQ ID NO: 254528 - DNA, 1491 bp, Artificial Sequence
  derived and/or modified sequence
atgccctacaagcttaaaaaggaaaaggaactcttcattcagaagcttagacagtgttgtgtactctttgattttgtttccgatcccctcagcgacttaaagtttaaggaggtgaagagggcaggtcttaacgaaatggtggaatatataacgcactcacgtgatgtagtgacagaagccatctatcctgaagccgtgacgatgttttccgtgaaccttttcagaaccctgcctccgagctcaaacccaaccggagccgagttcgacccagaggaggacgaaccaactctcgaggcagcatggcctcacctgcaacttgtctacgaattctttctgcgctttctagagtctcctgattttcaaccaaatattgctaaaaagtatattgatcagaagtttgttcttgctcttcttgatttgttcgattctgaagatccgagggagagggacttcttgaaaactatcctacatcggatctacggcaagttcctgggtctgcgagcgtacataaggagacagataaaccatatattctacagatttatttatgaaaccgagcaccacaacgggatcgcggaattactcgagatactcggtagcattattaatggtttcgctctacccctgaaagaggagcacaagatgtttctgatacgtgtgctgctgcctttacacaaagttaagagtctaagtgtgtatcatccgcaactggcatactgcgtagtccagtttctggagaaagagtcaagtctgaccgaacccgtaatcgtcggcctgctgaagttctggcctaagacacacagccctaaagaggtgatgtttttgaacgagcttgaggagatactggacgtgatcgagccgtccgagttttctaaggtgatggagcccttatttcgccagctggcaaaatgtgtgtcctcacctcattttcaggtggctgagcgcgccctctactactggaataatgaatatattatgagcttgatatccgacaacgctgcccgagtactgcctatcatgttccctgcactctaccggaatagtaagtctcactggaacaaaacaatacatggcttgatctacaatgcgctcaagttgtttatggaaatgaatcaaaagcttttcgatgactgtactcagcagtataaggctgaaaagcagaaaggaagatttagaatgaaagagagggaggaaatgtggcagaaaatcgaggagttggcacgattaaatccccaatatcctatgtttcgcgccccgccccctcttcctcctgtgtattccatggaaaccgagactcctacagcggaagatatccaattactgaagagaaccgtcgaaacggaagcagttcaaatgctgaaagacattaagaaggagaaggtactgctccgcaggaagagtgagctcccccaggacgtgtatacaattaaggctctcgaggcccacaaacgggctgaagaattcctaactgcctctcaagaggctctctag

SEQ ID NO: 254529 - DNA, 1491 bp, Artificial Sequence
  derived and/or modified sequence
atgccctacaagctgaagaaggagaaggagctgttcatccagaagctgcggcagtgctgcgtgctgtttgattttgtgtctgaccccctgagtgacctgaagttcaaggaggtgaagagagctggcctgaatgagatggtggagtacatcacccacagcagagatgtggtgacagaggccatctacccagaggccgtgaccatgttttctgtgaacctcttccgcaccctgccccccagcagcaaccccaccggggctgagtttgatcctgaggaggatgagcccaccctggaggccgcctggccccacctgcagctggtgtatgagttcttcctgcgcttcctggagagcccagacttccagcccaacatcgccaagaagtacatcgaccagaagtttgtgctggccctgctggacctgtttgattctgaggacccccgggagcgggacttcctgaagaccatcctgcaccgcatctacggcaagttcctgggcctgcgggcctacatccggcggcagatcaaccacatcttctaccgcttcatctatgaaacagagcaccacaatggaattgctgagctgctggagatcctgggcagcatcatcaatggatttgccctgcccctgaaggaggagcacaagatgttcctgatccgggtgctgctgcccctgcacaaggtgaagagcctgtctgtgtaccacccccagctggcctactgtgtggtgcagttcctggagaaggagagcagcctgacagagcccgtcatcgtgggcctgctgaagttctggcccaagacccacagccccaaggaggtgatgttcctgaatgagctggaggagatcctggatgtgattgagcccagcgagttcagcaaggtgatggagcccctcttccggcagctggccaagtgtgtgagcagcccccacttccaggtggccgagcgggccctgtactactggaacaatgagtacatcatgagcctcatcagtgacaatgctgcccgggtgctgcccatcatgtttcctgccctgtacagaaacagcaagagccactggaacaagaccatccacggcctcatctacaatgccctgaagctgttcatggagatgaaccagaagctgtttgatgactgcacccagcagtacaaggccgagaagcagaagggccgcttcaggatgaaggagcgggaggagatgtggcagaagattgaggagctggcccggctgaacccccagtaccccatgttccgggcccccccacccctgccccctgtgtacagcatggagacagagacccccacagctgaggacatccagctgctgaagaggacagtggagacagaagctgtgcagatgctgaaggacatcaagaaggagaaggtgctgctgcggaggaagtctgagctgccccaggatgtgtacaccatcaaggccctggaggcccacaagagagctgaggagttcctgacagccagccaggaggccctgtag

SEQ ID NO: 254530 - DNA, 1491 bp, Artificial Sequence
  derived and/or modified sequence
atgccctacaagctgaagaaggagaaggagctgttcatccagaagttgagacagtgctgtgtgctgtttgattttgtgtctgacccactgtcagatctgaagtttaaggaggtcaagagggcagggttgaacgaaatggtggagtacatcactcatagccgcgatgtggtgacagaagcaatctatcccgaagccgtaaccatgttttcagttaatctgttcagaacactaccgcccagttccaatcccacaggagcagagttcgaccctgaggaagatgaaccaacgctggaagcagcatggccccatcttcagctggtgtatgagttttttctgagatttctcgagagtccggatttccagcctaatatcgcaaagaagtacattgatcagaaattcgtattagctctgctggacctgttcgattccgaggaccctcgagaacgagactttttaaagacgatcttacatcgcatttacgggaaattcctgggcttgcgagcctacataagacggcagatcaaccatatattctacagattcatctatgagaccgaacaccacaacggtatcgctgaactgcttgagatcctagggagtatcataaatggtttcgccctccctctcaaagaagagcacaagatgttcttaattcgggtgctgctgccgcttcataaagtgaagtccttaagcgtgtaccaccctcagttggcctattgtgtcgtgcaatttttagaaaaggagagctctcttacagagccagtcatcgtggggctgctgaaattttggcccaagacccatagtcccaaagaagtgatgtttttgaatgagcttgaggagattcttgacgtaatcgaaccatccgaattcagcaaggtgatggaacctctgtttaggcaactggccaaatgtgtctcctcacctcactttcaggtggcagagagggccttatactattggaacaatgaatatattatgagtctgatttccgacaacgccgctagagtgttacccattatgtttccggcactgtaccgcaatagcaagagtcattggaacaaaactatccacggtctcatatataacgcactcaagcttttcatggagatgaatcaaaaactgtttgatgactgcactcagcaatacaaagcagagaaacagaagggccgctttaggatgaaagagagggaggaaatgtggcaaaaaatcgaagagttagctcgcctgaatccgcagtaccccatgtttcgcgcccctcccccattgcctccggtgtacagtatggagaccgagactcctacagcagaggatattcagcttctcaagagaactgtggagaccgaagcagtgcaaatgctgaaggacatcaagaaagagaaagtgctccttaggcgcaagagcgagctgccccaggacgtttatactatcaaagccctggaagcccacaagagggctgaggagttcttaacagcaagtcaagaagccttatag

SEQ ID NO: 254531 - DNA, 1491 bp, Artificial Sequence
  derived and/or modified sequence
atgccatacaagttgaaaaaggaaaaggagctgttcatccagaaacttagacagtgttgcgtgctgtttgactttgtgagcgatcccctgtctgacctgaagttcaaggaggtgaagagagccggactgaatgaaatggtggagtacatcactcactccagagacgtagtgacagaggcaatctaccccgaggccgttactatgttctccgtaaatctctttagaacgttgccgccttctagcaatcccaccggagctgagtttgaccctgaggaggacgaacctacattagaagctgcgtggcctcacctgcagctcgtgtatgagttcttcctccgatttctggaatcgcccgacttccaacccaacattgctaaaaagtatatcgaccagaagtttgtgcttgctctacttgatctatttgactcggaagaccctcgtgaaagagatttcttgaaaactatactccatcgcatttatgggaaattcctgggactgcgggcttatatccgaagacagataaaccacatattctaccgcttcatttacgaaactgaacaccacaatggcattgcagagctgctggagattctcggaagtatcatcaatgggtttgccctccctttgaaggaggaacataaaatgtttttgatacgagtgctgctcccgttgcataaggtcaagagcctgagtgtttatcatccacagttggcatattgtgtggtacagtttcttgaaaaagagtcctcattgaccgagccagtgattgtgggtttgctcaagttttggccaaagactcactcgccaaaggaggtaatgttcctgaacgagctggaggaaattctggacgtgatagagcccagtgaatttagcaaagtgatggaacccttattcaggcagcttgccaaatgcgttagctctcctcatttccaggtggccgagcgcgcactctattattggaacaacgaatatatcatgtcacttataagtgacaacgccgcaagggtcctgccaattatgtttcctgctctctaccgcaattccaagtctcattggaacaaaactattcatggactcatttacaatgcccttaaactgtttatggaaatgaaccagaaactgtttgacgactgtacccaacaatataaagccgagaagcagaagggtaggtttaggatgaaggagcgggaggaaatgtggcagaagatagaggaactggccagactgaacccgcagtaccccatgttccgcgcaccccctcccttacctccagtctacagcatggagacagagaccccaacagcagaggatattcagctgctcaaaagaaccgttgagactgaggctgtgcaaatgctgaaagatataaagaaagagaaagttctgctcagaagaaagtcagagctgccacaggatgtttatactatcaaggcactggaggctcataaaagggccgaggagttcctgaccgccagtcaggaagccttatag

SEQ ID NO: 254532 - DNA, 1558 bp, Artificial Sequence
  derived and/or modified sequence
gacgggccgggtccggacgggccgagatgccctataaactgaaaaaggagaaggagctgtttatccagaagctacgccagtgctgtgtcctctttgacttcgtgtcagacccactcagtgacctcaaattcaaggaggtgaagcgggcaggactcaacgagatggtggagtacatcacccatagccgtgatgttgtcactgaggccatttaccctgaggctgtcaccatgttttcagtgaacctcttccggacgctgccaccttcatcgaatcccacaggggctgagtttgacccagaggaagatgagcccaccctggaagctgcttggccacatctccagctcgtgtatgagttcttcttacgtttccttgagtctcctgatttccagccaaacatagccaagaagtacatcgaccagaagtttgtacttgctctcctagacctatttgacagtgaggatcctcgagagcgggacttcctcaagaccattttgcatcgcatctatggcaagtttttggggctccgggcttatatccgtaggcagatcaaccacatcttctacaggttcatctacgagacggagcatcacaacgggattgctgagctcctggagatcctgggcagcatcatcaatggctttgccctgccccttaaagaagagcacaagatgttcctcatccgtgtcctacttccccttcacaaggtcaagtccctgagtgtctaccaccctcagctggcatactgtgtggtacaattcctggagaaggagagcagtctgactgagccggtaattgtgggacttctcaagttttggcccaagacccacagccccaaggaggtgatgttcttgaatgagctggaggagattctggacgtcattgaaccttctgagttcagcaaagtgatggaacccctcttccgccagctggccaagtgtgtctctagcccccatttccaggtggcagagcgtgctctctattactggaacaatgagtacatcatgagcctgataagtgacaatgctgcccgagtcctccccatcatgttccctgcactctacaggaactccaagagccactggaacaagacaatccatggactgatctataatgccctgaagttgtttatggaaatgaatcagaagctgtttgatgactgcacacaacaatacaaggcagagaagcagaagggccggttccgaatgaaggaaagggaagagatgtggcaaaaaatcgaggagctggcccggcttaatccccagtatcccatgttccgagcccctccaccactgccccctgtgtactcgatggagacagagacccccacagctgaggacatccagcttctgaagaggactgtggagactgaggctgttcagatgctaaaagacatcaagaaggagaaagtgctgctgcggaggaagtcggagctgccccaggacgtgtacaccatcaaggcactggaggcgcacaagcgggcggaagagttcctaactgccagccaggaggctctctgacccctcacgttcctaccacagggccacagcccacacagccc

SEQ ID NO: 254533 - DNA, 1491 bp, Artificial Sequence
  derived and/or modified sequence
atgccctacaagctgaagaaggagaaggagctgttcatccagaagctgagacagtgctgcgtgctgttcgacttcgtgagcgaccccctgagcgacctgaagttcaaggaggtgaagagagccggcctgaacgagatggtggagtacatcacccacagcagagacgtggtgaccgaggccatctaccccgaggccgtgaccatgttcagcgtgaacctgttcagaaccctgccccccagcagcaaccccaccggcgccgagttcgaccccgaggaggacgagcccaccctggaggccgcctggccccacctgcagctggtgtacgagttcttcctgagattcctggagagccccgacttccagcccaacatcgccaagaagtacatcgaccagaagttcgtgctggccctgctggacctgttcgacagcgaggaccccagagagagagacttcctgaagaccatcctgcacagaatctacggcaagttcctgggcctgagagcctacatcagaagacagatcaaccacatcttctacagattcatctacgagaccgagcaccacaacggcatcgccgagctgctggagatcctgggcagcatcatcaacggcttcgccctgcccctgaaggaggagcacaagatgttcctgatcagagtgctgctgcccctgcacaaggtgaagagcctgagcgtgtaccacccccagctggcctactgcgtggtgcagttcctggagaaggagagcagcctgaccgagcccgtgatcgtgggcctgctgaagttctggcccaagacccacagccccaaggaggtgatgttcctgaacgagctggaggagatcctggacgtgatcgagcccagcgagttcagcaaggtgatggagcccctgttcagacagctggccaagtgcgtgagcagcccccacttccaggtggccgagagagccctgtactactggaacaacgagtacatcatgagcctgatcagcgacaacgccgccagagtgctgcccatcatgttccccgccctgtacagaaacagcaagagccactggaacaagaccatccacggcctgatctacaacgccctgaagctgttcatggagatgaaccagaagctgttcgacgactgcacccagcagtacaaggccgagaagcagaagggcagattcagaatgaaggagagagaggagatgtggcagaagatcgaggagctggccagactgaacccccagtaccccatgttcagagcccccccccccctgccccccgtgtacagcatggagaccgagacccccaccgccgaggacatccagctgctgaagagaaccgtggagaccgaggccgtgcagatgctgaaggacatcaagaaggagaaggtgctgctgagaagaaagagcgagctgccccaggacgtgtacaccatcaaggccctggaggcccacaagagagccgaggagttcctgaccgccagccaggaggccctgtag

SEQ ID NO: 254534 - protein, 122 aa, Artificial Sequence
  derived and/or modified sequence
MAALGTVLFSVRRLHCSVAAWAGGQWRLQQGLAANPSGYGPLTELPDWSYADGRPAPPMKGQLRRKAERETFARRVVLLSQEMDAGLQAWQLRQQKLQEEQRKQENALKPKGASLKSPLPSQ

SEQ ID NO: 254535 - DNA, 369 bp, Artificial Sequence
  derived and/or modified sequence
atggcggcgctagggacagtgctgttctccgtaaggaggctgcattgttcagttgcagcctgggcaggtggccagtggcgcttacagcaaggactggccgccaacccttccgggtacgggcctctcaccgagctccccgattggtcatacgccgacgggcgtccagcccctcctatgaaaggccagctgcgccgcaaagcggaacgggagacattcgcgcgaagagtggtccttttgagccaagagatggacgctgggctacaggcctggcagctgagacaacagaagctgcaagaggagcagcggaagcaggagaacgctcttaagccaaaaggggcctccttgaaatctccgctccccagtcaatag

SEQ ID NO: 254536 - DNA, 369 bp, Artificial Sequence
  derived and/or modified sequence
atggccgccctgggcaccgtgctcttctctgtgcggcggctgcactgcagcgtggccgcctgggccggcggccagtggaggctgcagcagggcctggccgccaaccccagcggctacggccccctgacagagctgcctgactggagctatgcagatggccgcccagccccacccatgaagggccagctgcggaggaaggccgagcgggagacctttgcccggcgggtggtgctgctgagccaggagatggatgctggcctgcaggcctggcagctgcggcagcagaagctgcaggaggagcagaggaagcaggagaatgccctgaagcccaagggggccagcctgaagagccccctgcccagccagtag

SEQ ID NO: 254537 - DNA, 1111 bp, Artificial Sequence
  derived and/or modified sequence
ggctaccccggctactcctgctcagcatggctgctttagggactgttctcttcagtgtccggaggctgcactgcagcgtagccgcttgggcgggcggccagtggcgactacagcagggactggctgccaacccctccggctacgggccccttaccgagctcccagactggtcatatgcggatggccgccctgctcccccaatgaaaggccagcttcgaagaaaagctgaaagggagacgtttgcaagacgagttgtactgctgtcacaggaaatggacgctggattacaagcatggcagctcaggcagcagaagttgcaggaagaacaaaggaagcaggaaaatgctcttaaacccaaaggggcttcactgaagagcccacttccaagtcaataaaaagcaactcctgcctcccttcctcaccctgtctctggatttcttttctatcacctagatgcttcatccagccagaagatagccttcacgttccccatctgtcttcagagaaaaagagctgggacaccaagaacaagctgttagatcactgcctgggaggcttggcttagtactctcatctctggttccattccagttcagctaagtcttgctttaaaatttttacctcctagctgggtgcggtggctcacgcctgtaatcccagcactttgggaggctgaggcgggcagatcacaagatcaggagttcgagaccagcctggccaacccagcctggtcaacatggtgaaaccctgtccctactaaagatacaaacaattagccgggcgtggtggggtgcgcttgtaatcccagctactcaggaggctgaggcaggagaatcgcttaaactcgggaggtagaggttgcagtgagccaaggtcacaccattgcactccaacctgggcgacagggcgagactccgtctcaaaaaaaaaaaaaaatttacctcctttgcaggccataggactagcccaactatgagaaatagctgttctgtgaacgtgaaaaggggacagcagttttcccagttttggccaggcagtcaagcctttaacagctcatgcacagtttaggccatgtacagctggcatctaataaatgttttcatgaaaaaga

SEQ ID NO: 254538 - DNA, 369 bp, Artificial Sequence
  derived and/or modified sequence
atggccgccctgggcaccgtgctgttcagcgtgcggcggctgcactgttcagtggccgcctgggcagggggtcagtggcgattgcagcaggggttggcagcgaacccttcaggatacgggccactcaccgagctccctgattggtcctacgccgacggccggccagcccctcccatgaagggacaattgcgccgtaaggctgagagagaaaccttcgccaggagggtggtgcttttatcccaggagatggacgccggtctacaggcttggcaattgaggcagcagaaactgcaggaagagcagcggaagcaggagaacgcattaaaaccgaagggggcatcacttaagagccccctgcctagtcagtag

SEQ ID NO: 254539 - DNA, 369 bp, Artificial Sequence
  derived and/or modified sequence
atggccgcactcggaaccgttctgttttctgtgaggcgcctgcactgcagtgtagccgcttgggctggcggtcagtggaggctccagcagggcctcgccgcaaatcccagcggttacggccctctgactgagttaccagattggagctacgccgacggacgacccgctccaccgatgaaaggacaactcagacggaaagcagaaagggaaaccttcgcccgaagagtagtattgctcagccaggagatggatgccggtctccaggcatggcagctgcgtcaacagaagttacaggaagaacagcgtaaacaggagaacgcgctgaagcccaaaggcgcatctctgaaatctccattgcctagccagtag

SEQ ID NO: 254540 - DNA, 369 bp, Artificial Sequence
  derived and/or modified sequence
atggccgccctgggcaccgtgctgttcagcgtgagaagactgcactgcagcgtggccgcctgggccggcggccagtggagactgcagcagggcctggccgccaaccccagcggctacggccccctgaccgagctgcccgactggagctacgccgacggcagacccgccccccccatgaagggccagctgagaagaaaggccgagagagagaccttcgccagaagagtggtgctgctgagccaggagatggacgccggcctgcaggcctggcagctgagacagcagaagctgcaggaggagcagagaaagcaggagaacgccctgaagcccaagggcgccagcctgaagagccccctgcccagccagtag

SEQ ID NO: 254541 - protein, 440 aa, Artificial Sequence
  derived and/or modified sequence
MGGLRLLAVALTCCWWPQGSQGKTLRGSFSSTAAQDAQGQRIGHFEFHGDHALLCVRINNIAVAVGKEAKLYLFQAQEWLKLQQSSHGYSCSEKLSKAQLTMTMNQTEHNLTVSQIPSPQTWHVFYADKYTCQDDKENSQVEDIPFEMVLLNPDAEGNPFDHFSAGESGLHEFFFLLVLVYFVIACIYAQSLWQAIKKGGPMHMILKVLTTALLLQAGSALANYIHFSSYSKDGIGVPFMGSLAEFFDIASQIQMLYLLLSLCMGWTIVRMKKSQSRPLQWDSTPASTGIAVFIVMTQSVLLLWEQFEDISHHSYHSHHNLAGILLIVLRICLALSLGCGLYQIITVERSTLKREFYITFAKGCILWFLCHPVLACISVIFSDYQRDKVITIGVILCQSVSMVILYRLFLSHSLYWEVSSLSSVTLPLTISSGHKSRPHF

SEQ ID NO: 254542 - DNA, 1323 bp, Artificial Sequence
  derived and/or modified sequence
atgggcggcctgagactgctggccgtggccctgacctgctgctggtggccccagggcagccagggcaagaccctgagaggcagcttcagcagcaccgccgcccaggacgcccagggccagagaatcggccacttcgagttccacggcgaccacgccctgctgtgcgtgagaatcaacaacatcgccgtggccgtgggcaaggaggccaagctgtacctgttccaggcccaggagtggctgaagctgcagcagagcagccacggctacagctgcagcgagaagctgagcaaggcccagctgaccatgaccatgaaccagaccgagcacaacctgaccgtgagccagatccccagcccccagacctggcacgtgttctacgccgacaagtacacctgccaggacgacaaggagaacagccaggtggaggacatccccttcgagatggtgctgctgaaccccgacgccgagggcaaccccttcgaccacttcagcgccggcgagagcggcctgcacgagttcttcttcctgctggtgctggtgtacttcgtgatcgcctgcatctacgcccagagcctgtggcaggccatcaagaagggcggccccatgcacatgatcctgaaggtgctgaccaccgccctgctgctgcaggccggcagcgccctggccaactacatccacttcagcagctacagcaaggacggcatcggcgtgcccttcatgggcagcctggccgagttcttcgacatcgccagccagatccagatgctgtacctgctgctgagcctgtgcatgggctggaccatcgtgagaatgaagaagagccagagcagacccctgcagtgggacagcacccccgccagcaccggcatcgccgtgttcatcgtgatgacccagagcgtgctgctgctgtgggagcagttcgaggacatcagccaccacagctaccacagccaccacaacctggccggcatcctgctgatcgtgctgagaatctgcctggccctgagcctgggctgcggcctgtaccagatcatcaccgtggagagaagcaccctgaagagagagttctacatcaccttcgccaagggctgcatcctgtggttcctgtgccaccccgtgctggcctgcatcagcgtgatcttcagcgactaccagagagacaaggtgatcaccatcggcgtgatcctgtgccagagcgtgagcatggtgatcctgtacagactgttcctgagccacagcctgtactgggaggtgagcagcctgagcagcgtgaccctgcccctgaccatcagcagcggccacaagagcagaccccacttctag

SEQ ID NO: 254543 - DNA, 1621 bp, Artificial Sequence
  derived and/or modified sequence
cgtcggtgcagacctggagacgggcatgggggggctgcggctgctggctgtggccctcacgtgctgctggtggccgcagggcagccagggtaagaccctgcggggcagcttcagcagcaccgcggcccaggacgcccagggccagcgcatcggccacttcgagttccatggtgaccatgctcttctgtgtgtcagaatcaacaacatagcagtagctgttggaaaagaagctaaactctacctgttccaagcccaggaatggctaaagctacagcaaagcagtcatggttatagctgtagtgaaaaattatccaaagctcagttgacaatgaccatgaaccagaccgaacataatctgacagtgtcccagattccgtctccacaaacgtggcatgtgttttatgcagacaagtatacatgccaagatgacaaggagaattctcaggtggaagatatcccatttgaaatggtgttactaaacccagatgccgaagggaatccatttgatcattttagtgctggagaatctgggttacatgagttctttttcctcctagtcctagtgtactttgtgattgcttgcatttatgctcaatcattgtggcaggctattaagaaaggcggacccatgcacatgattttaaaggttctgacaactgcattgctgttacaagctggttcagctttagctaattacattcatttctccagttactccaaagatggaataggggtaccatttatgggaagtttggcagaattttttgacatcgcttcccaaattcagatgttatacttacttttgagtctatgcatgggttggacaatagtcagaatgaagaagtctcaaagcagacctctccagtgggattctacgcctgcatccactggcattgcagtattcattgtcatgacacagagtgttttgctactttgggaacagtttgaagatatcagtcatcatagctaccattcacaccacaacttagcagggatcctcctaattgttctaagaatttgcctagcattgtcattaggctgtggactctatcagatcatcacagtggagagaagtacactcaaaagggagttctacatcacatttgccaaaggctgtatcttgtggtttttatgccatccagttcttgcatgcatttctgtcatttttagcgactaccaaagagacaaggttattacaataggtgttatcctttgccagtctgtttccatggttattctctacagactctttctgtctcacagtctatactgggaagtttcttcactttcttcagtaacactaccactgaccatatcatctggacacaaaagtcgccctcatttctgatacttgatttttgttgagaggaaaagtgaattggttaaaagagtgcaataaggatccaaatacagtgacttttttttcatacatttagtatgaaaacttgaacagcgaaagcagagcatgttatttatataactgcatttaagcagtaccaagactgaaaaaaaaggtaataaatgaaatgttttgaaatatacttaaacaacaaactttgaagaaagtgttgttataaaattattgaagcgatttctatgtggaaataaatgtgaaaaataa

SEQ ID NO: 254544 - DNA, 1323 bp, Artificial Sequence
  derived and/or modified sequence
atgggggggttgaggctactggcagtggccctgacctgctgctggtggccacagggcagccaggggaaaacactgcggggtagtttcagcagtaccgccgctcaggatgcccaaggtcagcgtatcggacactttgaattccacggcgatcatgcactgttgtgtgtccgaatcaacaatattgctgttgcggtcggcaaggaggcgaaattatatttgtttcaggcacaggagtggttgaaactgcagcagagctcacatggatatagttgcagcgagaagctgagcaaggcacaactgactatgacaatgaatcagactgaacataacctaacagtaagccagattccgagcccacagacctggcatgttttttacgcggataagtatacgtgccaggatgacaaagaaaactcccaagttgaggacattccctttgagatggtgcttctgaatcccgatgccgagggtaacccctttgaccacttcagcgcaggtgaatctggactgcacgaattctttttcttgctggtgctggtctacttcgttatcgcctgcatctacgcccagtctctctggcaagcgatcaaaaagggcgggcctatgcatatgatactcaaggtgttaacaacagctctgctgttgcaggcagggtctgcgctggccaactacatacacttcagctcctactcaaaggacgggattggggttcctttcatgggcagcttggccgaatttttcgacattgccagccagattcaaatgttatacctgctgttgagtttatgtatgggctggactatcgtgcggatgaagaaatcccagagtaggcccctccagtgggattccacccccgccagcacaggcatagctgtatttatcgttatgactcagagcgtcctgctgctgtgggagcagtttgaggacatctcccatcactcatatcactcacatcataacctcgccggtatcctgctgattgtgctacgaatttgcctggcactcagcctcggatgcggtctctaccagataatcaccgtggaacgcagcactcttaaacgcgagttttacatcacctttgcgaagggttgcatcctctggtttctgtgccacccagtgctcgcctgcatatctgtgatatttagcgactaccagcgcgataaggttattactatcggtgtcattctctgtcagtcagtgtcgatggtcattctgtaccgactgtttctttctcattcactttactgggaagtgagctccctgagcagtgtaacactgccactcacaatatcctctgggcacaagagccgacctcatttctag

SEQ ID NO: 254545 - DNA, 1323 bp, Artificial Sequence
  derived and/or modified sequence
atgggcggcctgcggctgctggccgtggccctgacctgctgctggtggccccagggcagccagggcaagaccctgcggggcagcttcagcagcacagctgcccaggatgcccagggccagagaattggccactttgagttccacggggaccacgccctgctgtgtgtgcgcatcaacaacattgctgtggccgtgggcaaggaggccaagctgtacctgttccaggcccaggagtggctgaagctgcagcagagcagccacggctacagctgcagcgagaagctgagcaaggcccagctgaccatgaccatgaaccagacagagcacaacctgactgtgtcccagatccccagcccccagacctggcacgtgttctatgctgacaagtacacctgccaggatgacaaggagaacagccaggtggaggacatcccctttgagatggtgctgctgaacccagatgctgagggcaacccctttgaccacttctctgctggggagagcggcctgcacgagttcttcttcctgctggtgctggtgtacttcgtcatcgcctgcatctatgcccagagcctgtggcaggccatcaagaagggcggccccatgcacatgatcctgaaggtgctgaccacagccctgctgctgcaggccggcagcgccctggccaactacatccacttcagcagctacagcaaggatggcattggagtgcccttcatgggcagcctggccgagttctttgatattgccagccagatccagatgctgtacctgctgctgagcctgtgcatgggctggaccatcgtgaggatgaagaagagccagagccggcccctgcagtgggacagcaccccagccagcactggaattgctgtgttcatcgtgatgacccagagcgtgctgctgctgtgggagcagtttgaggacatcagccaccacagctaccacagccaccacaacctggccggcatcctgctgattgtgctgcgcatctgcctggccctgagcctgggctgcggcctgtaccagatcatcaccgtggagaggagcaccctgaagcgggagttctacatcacctttgccaagggctgcatcctgtggttcctgtgccaccctgtgctggcctgcatcagcgtcatcttcagtgactaccagagggacaaggtgatcaccatcggggtcatcctgtgccagagcgtgtccatggtgatcctgtaccgcctcttcctgagccacagcctgtactgggaggtgagcagcctgagctctgtgaccctgcccctgaccatcagcagcggccacaagagccggccccacttctag

SEQ ID NO: 254546 - DNA, 1323 bp, Artificial Sequence
  derived and/or modified sequence
atgggcggcctgcggctgctggccgtggccctgacctgctgctggtggcctcaggggagccagggaaaaacccttagaggaagcttctcctcaaccgcagcccaggacgcgcaggggcagcggattgggcacttcgagttccacggcgatcacgctctgctctgtgttcggattaataacatcgctgtcgcggtagggaaggaagcaaagctgtacctctttcaggcccaggagtggcttaagctccagcaatcttcccacgggtatagctgcagtgaaaagctgtcaaaggcacagctgacaatgaccatgaaccagaccgagcacaacctcactgttagccagattccctcgccccagacctggcacgtgttctacgccgacaaatacacgtgtcaggatgacaaggagaactcacaggtggaggatattccctttgaaatggtactgcttaatcctgacgcagaagggaatcctttcgaccacttctcagccggcgagagcggacttcacgaattctttttcctccttgtgctggtgtactttgtgatcgcatgtatttacgcacagtctctctggcaggctatcaaaaaaggcgggccaatgcatatgattctgaaggtgctgacaacagctctgctgttacaagccgggtcagccctggccaattacatccactttagcagctattctaaagacggcattggagttccgttcatggggtccctggcagaattcttcgatattgcaagccagattcagatgttatacttgctattgtccttgtgcatggggtggacgattgtgaggatgaaaaaaagccagtctcgtcctctccagtgggactcgacccctgcttcaacaggcatcgccgtttttattgtaatgactcagagcgtcctgctgctgtgggagcagtttgaagatatatctcaccacagctatcactctcatcacaacctcgctggcatcctcttaattgtactaaggatttgcctggccctgtctctgggctgcgggttgtatcaaatcattaccgtcgaacgcagtactttgaagagggaattctatattacattcgctaagggctgtattctgtggttcttatgtcatccagtgctggcttgtatctcggtcatcttctcggactatcagcgggataaggtgattaccatcggcgttatcctgtgtcagtccgtgagtatggtgatactctaccgtttattcttgagtcattcactgtattgggaagtttcgtctctgtcttcagtgacactccctctgaccatcagctctggccacaagtcaaggcctcacttctag

SEQ ID NO: 254547 - DNA, 1323 bp, Artificial Sequence
  derived and/or modified sequence
atgggcggactcaggttactggctgtggctctgacctgttgctggtggcctcagggctcccagggtaaaaccttgaggggctcttttagtagtaccgctgcccaggatgcccaggggcagagaattggacacttcgaatttcacggagaccacgccctcctctgcgtaagaatcaacaatatagccgttgcagtcggtaaggaggctaagctgtacctgttccaggctcaggaatggctgaagctccaacagagctcccacggatattcttgtagcgagaagttgtccaaagcacagcttaccatgaccatgaaccagacagaacataatttaaccgtctctcagataccctcaccacaaacgtggcacgttttttacgctgataaatacacctgccaggacgacaaagaaaactctcaagtagaggatatcccctttgaaatggttctgcttaatccggatgccgagggaaatcccttcgaccacttctccgcaggcgaaagtggcttacacgaattcttcttcctgctggtccttgtatacttcgtaatcgcctgtatctatgcccagtccctgtggcaggccatcaagaagggcggacccatgcacatgatactgaaagtgctcaccaccgcactgctgctgcaggccggaagtgctcttgctaactacattcactttagcagttattcaaaggatggcatcggagtgccgtttatggggtccttggccgagttctttgacatcgcgagtcagatccagatgctttacctcttgctctccctgtgcatgggctggacaatcgtgcgaatgaagaagagccagagtagaccactgcagtgggacagcaccccggcatcaaccggaatagccgtttttatcgttatgacacagtctgtactgctcctgtgggagcagttcgaggacatctctcatcattcataccacagccaccacaatctggccggtatactgttgattgtgctgagaatctgcctggcactcagtttgggatgcggcctttaccaaataattacggtcgagaggtctacacttaaacgcgagttttatatcacctttgctaaggggtgcatcttgtggtttctctgccatccggtgcttgcttgtatatctgttatcttttccgattaccaaagagacaaggtgattaccattggtgttatattgtgccaatccgtttctatggtaatcctctatagactcttcctgagccacagcctctactgggaggtctctagcctctcttctgttactctgccactgacaattagtagcggacataaatcaaggccccacttttag

SEQ ID NO: 254548 - protein, 412 aa, Artificial Sequence
  derived and/or modified sequence
MMALWSLLHLTFLGFSITLLLVHGQGFQGTAAIWPSLFNVNLSKKVQESIQIPNNGSAPLLVDVRVFVSNVFNVDILRYTMSSMLLLRLSWLDTRLAWNTSAHPRHAITLPWESLWTPRLTILEALWVDWRDQSPQARVDQDGHVKLNLALATETNCNFELLHFPRDHSNCSLSFYALSNTAMELEFQAHVVNEIVSVKREYVVYDLKTQVPPQQLVPCFQVTLRLKNTALKSIIALLVPAEALLLADVCGGLLPLRAIERIGYKVTLLLSYLVLHSSLVQALPSSSSCNPLLIYYFTILLLLLFLSTIETVLLAGLLARGNLGAKSGPSPAPRGEQREHGNPGPHPAEEPSRGVKGSQRSWPETADRIFFLVYVVGVLCTQFVFAGIWMWAACKSDAAPGEAAPHGRRPRL

SEQ ID NO: 254549 - protein, 126 aa, Artificial Sequence
  derived and/or modified sequence
MMALWSLLHLTFLGFSITLLLVHGQGFQGTAAIWPSLFNVNLSKKVQESIQIPNNGSAPLLVDVRVFVSNVFNVSSVLPRATALHSHGDCSGSAPCSKARGSGCHGLTPGNHLKVQPPCINPSGDI

SEQ ID NO: 254550 - DNA, 1239 bp, Artificial Sequence
  derived and/or modified sequence
atgatggccctgtggagcctgctgcacctgaccttcctgggcttcagcatcaccctgctgctggtgcacggccagggcttccagggcaccgccgccatctggcccagcctgttcaacgtgaacctgagcaagaaggtgcaggagagcatccagatccccaacaacggcagcgcccccctgctggtggacgtgagagtgttcgtgagcaacgtgttcaacgtggacatcctgagatacaccatgagcagcatgctgctgctgagactgagctggctggacaccagactggcctggaacaccagcgcccaccccagacacgccatcaccctgccctgggagagcctgtggacccccagactgaccatcctggaggccctgtgggtggactggagagaccagagcccccaggccagagtggaccaggacggccacgtgaagctgaacctggccctggccaccgagaccaactgcaacttcgagctgctgcacttccccagagaccacagcaactgcagcctgagcttctacgccctgagcaacaccgccatggagctggagttccaggcccacgtggtgaacgagatcgtgagcgtgaagagagagtacgtggtgtacgacctgaagacccaggtgcccccccagcagctggtgccctgcttccaggtgaccctgagactgaagaacaccgccctgaagagcatcatcgccctgctggtgcccgccgaggccctgctgctggccgacgtgtgcggcggcctgctgcccctgagagccatcgagagaatcggctacaaggtgaccctgctgctgagctacctggtgctgcacagcagcctggtgcaggccctgcccagcagcagcagctgcaaccccctgctgatctactacttcaccatcctgctgctgctgctgttcctgagcaccatcgagaccgtgctgctggccggcctgctggccagaggcaacctgggcgccaagagcggccccagccccgcccccagaggcgagcagagagagcacggcaaccccggcccccaccccgccgaggagcccagcagaggcgtgaagggcagccagagaagctggcccgagaccgccgacagaatcttcttcctggtgtacgtggtgggcgtgctgtgcacccagttcgtgttcgccggcatctggatgtgggccgcctgcaagagcgacgccgcccccggcgaggccgccccccacggcagaagacccagactgtag

SEQ ID NO: 254551 - DNA, 381 bp, Artificial Sequence
  derived and/or modified sequence
atgatggccctgtggagcctgctgcacctgaccttcctgggcttcagcatcaccctgctgctggtgcacggccagggcttccagggcaccgccgccatctggcccagcctgttcaacgtgaacctgagcaagaaggtgcaggagagcatccagatccccaacaacggcagcgcccccctgctggtggacgtgagagtgttcgtgagcaacgtgttcaacgtgagcagcgtgctgcccagagccaccgccctgcacagccacggcgactgcagcggcagcgccccctgcagcaaggccagaggcagcggctgccacggcctgacccccggcaaccacctgaaggtgcagcccccctgcatcaaccccagcggcgacatctag

SEQ ID NO: 254552 - DNA, 1239 bp, Artificial Sequence
  derived and/or modified sequence
atgatggctctctggtccctgctgcacctgacgttcttaggctttagcataacactgctgctggtgcatggccagggattccagggcaccgcagctatctggcctagtttgtttaatgttaatctgtctaagaaagtgcaggagagcatccagattccaaacaacgggtccgccccgctccttgtcgatgtacgtgtgtttgtctccaacgtcttcaacgtcgacattctgaggtatactatgtcttcaatgttgctgttgcgcttaagctggcttgataccaggctggcctggaatacatcggctcaccccaggcatgccattacgttaccctgggaatccctgtggacaccccgccttacgatcttagaggccctgtgggtcgactggcgcgaccagtctcctcaagctagagttgaccaggatggacatgtgaaactgaatttagcattagccacagagacaaattgcaacttcgaacttctgcactttcctcgagatcactccaactgcagcctgtctttttacgcactgagtaacaccgctatggaactggaattccaggctcacgttgtcaacgagatcgtcagcgtgaagcgcgaatatgtcgtctatgacttaaaaacccaggtcccacctcaacagctggtaccttgtttccaggttacactccggctcaagaacacggcgctgaaatccattattgccctgctggtgccggccgaggccctgctgctcgctgacgtgtgtggaggcctcctccccctacgcgctatcgagcgaatcggctacaaagttacacttctgctgtcctacctagtgttacattcctccctggtccaggctcttccatccagctctagctgtaatccactactgatatactattttacaatcctgctgctgcttctgtttctttctactattgagacagtattgttagccggattgctggcaaggggcaacctgggagctaaaagcggtcccagcccagcccctcgaggcgaacaaagggaacacggcaaccccggtccccaccccgctgaggaaccctcaagaggagtgaaaggctcacaacggtcatggcctgaaacggccgacagaattttttttcttgtttatgtggtgggagtgctgtgtacccagtttgtgtttgcaggcatctggatgtgggctgcttgtaaaagtgacgccgcacctggagaagccgccccccacggacgccggcctcggctttag

SEQ ID NO: 254553 - DNA, 381 bp, Artificial Sequence
  derived and/or modified sequence
atgatggccctctggagccttctccacctgaccttcttaggatttagtatcacgctgctcctcgtccatgggcagggatttcaaggtactgccgcaatctggcctagcttatttaacgtgaacttatcaaagaaggttcaggagtcaatacaaattcccaataatggatctgcgcctctcctcgtcgatgtgcgcgtattcgtgtctaacgtgtttaacgtgagttcagtgctccccagagcaactgctctacattcacatggcgactgtagcggcagtgctccctgcagtaaagcccgggggtccggctgtcacggactcacacctgggaaccacctgaaagtgcagcctccttgcattaacccatcaggggacatctag

SEQ ID NO: 254554 - DNA, 1239 bp, Artificial Sequence
  derived and/or modified sequence
atgatggccctgtggagcctgctgcacctgaccttcctgggcttcagcatcaccctgctgctggtgcacggccagggcttccagggcacagctgccatctggcccagcctcttcaacgtgaacctgagcaagaaggtgcaggagagcatccagatccccaacaatggaagtgcccccctgctggtggatgtgcgggtgtttgtgtccaatgtgttcaacgtggacatcctgcgctacaccatgagctccatgctgctgctgcggctgtcctggctggacacccggctggcctggaacaccagcgcccaccccaggcatgccatcaccctgccctgggagagcctgtggaccccccggctgaccatcctggaggccctgtgggtggactggagggaccagagcccccaggcccgggtggaccaggacggccacgtgaagctgaacctggccctggccacagagaccaactgcaactttgagctgctgcacttcccccgggaccacagcaactgcagcctgtccttctacgccctgagcaacacagccatggagctggagttccaggcccacgtggtgaatgaaattgtgtctgtgaagcgggagtatgtggtgtatgacctgaagacccaggtgcccccccagcagctggtgccctgcttccaggtgaccctgcggctgaagaacacagccctgaagagcatcatcgccctgctggtgcctgctgaggccctgctgctggctgatgtgtgtggcggcctgctgcccctgcgggccatcgagcgcatcggctacaaggtgaccctgctgctgagctacctggtgctgcacagcagcctggtgcaggccctgcccagcagcagcagctgcaaccccctgctgatctactacttcaccatcctgctgctgctgctcttcctgagcaccattgaaacagtgctgctggccggcctgctggcccggggcaacctgggcgccaagagcggccccagccctgcccccagaggagagcagcgggagcacggcaaccctggcccccaccctgctgaggagcccagccggggcgtgaagggcagccagaggtcctggccagagacagctgaccgcatcttcttcctggtgtatgtggtgggcgtgctgtgcacccagtttgtgtttgctggcatctggatgtgggccgcctgcaagagtgatgctgcccctggagaggccgccccccacggccggcggccccggctgtag

SEQ ID NO: 254555 - DNA, 381 bp, Artificial Sequence
  derived and/or modified sequence
atgatggccctgtggagcctgctgcacctgaccttcctgggcttcagcatcaccctgctgctggtgcacggccagggcttccagggcacagctgccatctggcccagcctcttcaacgtgaacctgagcaagaaggtgcaggagagcatccagatccccaacaatggaagtgcccccctgctggtggatgtgcgggtgtttgtgtccaatgtgttcaacgtgtcctctgtgctgccccgggccacagccctgcacagccatggagactgcagcggcagcgccccctgcagcaaggcccggggcagcggctgccacggcctgaccccaggcaaccacctgaaggtgcagcccccctgcatcaaccccagcggggacatctag

SEQ ID NO: 254556 - DNA, 1239 bp, Artificial Sequence
  derived and/or modified sequence
atgatggccctgtggagcctgctgcacctgaccttcctgggcttcagtattactctgctgctggtgcacggccagggatttcagggcactgccgcgatctggccttcacttttcaatgtcaatttgtcgaagaaggtccaggagtccatccaaatccccaataacgggagtgctcccttactagtggacgtacgggttttcgtgtcaaatgtatttaatgtggatattctgaggtacacaatgtcatccatgcttttgttgagacttagttggctggacacacggttagcatggaacacctccgcccatccacggcacgccatcaccctcccatgggaatctctgtggacaccaagactcaccatcctggaagcactgtgggtggattggcgcgatcaaagccctcaggcccgggttgatcaggatggccacgtcaaactgaaccttgctctggccaccgagaccaactgtaatttcgagcttcttcactttcccagagatcattccaactgcagcttgtctttttatgccctctctaataccgcaatggagttagaatttcaggcccacgtggttaatgaaatcgttagtgtcaaacgcgagtacgttgtctacgatctgaagacacaagtccccccccagcagctcgtgccatgttttcaggtcactttacggctgaaaaatactgccctgaagtcgatcatcgccttactagttccagcagaagctttgttgctggctgacgtttgtggcggtttgcttccactgcgtgccatcgaacgtatcggctataaggtgactctgctcctgagctatctcgtcctccacagctccttggtgcaagcacttccgtcgtcttcatcatgcaatccactcctaatttattacttcactatcctgctactgctgctctttttgtctacaatcgaaacggtgctactggctggcttgctagccagaggcaacttaggggcaaagtccggacctagtcctgcccctcgcggagaacagcgagagcacggcaacccaggccctcatcctgcggaagaacctagtaggggtgtgaagggatcgcagaggtcctggccggaaactgctgaccggatttttttcctggtttacgtggtcggagtgctttgcactcagttcgtgtttgctggaatctggatgtgggcggcctgtaagtccgatgcagctcctggcgaagctgcaccgcatggccggagacccaggctttag

SEQ ID NO: 254557 - DNA, 381 bp, Artificial Sequence
  derived and/or modified sequence
atgatggccctgtggagcctgctgcacctgaccttcctgggcttctctatcacactcctcttggttcacggccagggtttccaggggaccgccgcgatctggccaagcctctttaatgtaaacctctcgaaaaaggtccaggagagcatacagatccccaacaacggttccgcccccctactggtcgatgttcgggtatttgtttctaacgttttcaacgtgagctcggtgctacctcgggccacagctttacacagtcacggcgactgtagcgggagcgccccttgttcaaaggcacgtggatccgggtgtcacgggctcactcccggtaaccatttgaaagtccaacctccatgcatcaacccttccggagacatttag

SEQ ID NO: 254558 - DNA, 1239 bp, Artificial Sequence
  derived and/or modified sequence
atgatggccttgtggtctctgctgcatctcaccttcctgggcttttcaatcactctcctgctcgtgcacggacagggattccagggaacagcggctatctggccctccttgttcaatgtgaatttgtctaagaaagtgcaggagtctatccagataccaaacaatggatctgcaccacttcttgtggatgtgcgcgtatttgtgagtaacgtcttcaacgtggatattctgaggtacacaatgtcaagtatgttacttctgcgtttaagttggttggacactagactcgcttggaatactagcgcccatcctaggcacgccatcactctgccttgggaatccctgtggacacccagactcaccatccttgaggcattgtgggttgactggagagaccagagcccacaggccagggtggaccaagatggtcacgtcaagttgaaccttgctcttgccacagagacgaattgcaacttcgagctgctgcattttcccagggaccattccaactgctccctgtcattctacgccctttctaacaccgctatggagctcgagttccaagcccatgtggttaatgagatcgtttctgtgaagagagaatacgttgtgtacgacctgaagactcaggtgcctccccagcagctcgtcccatgctttcaggttactttgcgccttaagaacaccgcccttaagtctatcattgcccttctcgtcccggctgaggcattactgctggcagacgtgtgcgggggactcttgccgttgcgggcaatcgagcgaattggttacaaagtcaccctgttgctgagctatctagtgcttcacagctctttggtccaagccctgccaagctccagttcttgtaaccctctgctgatttactacttcacaattctgttgctgctgctctttctctcaaccatagaaacggtcctgttagccggattgttggctcgcggtaacctgggcgctaaaagcggtccatctcccgcacccagaggggagcagagggaacacggtaaccccggaccacatccggcagaagaaccctcccgaggcgtgaaagggagtcaacgtagctggccggagaccgcagaccggatctttttcctcgtatatgtggtcggcgtgctgtgtacccagttcgttttcgccggtatctggatgtgggctgcctgcaaaagtgatgccgctccaggagaagcagccccacatggccgaagacccaggttgtag

SEQ ID NO: 254559 - DNA, 381 bp, Artificial Sequence
  derived and/or modified sequence
atgatggccttgtggtccctgttgcacctgaccttcttaggcttttctatcactctgctgctcgtccacggccagggttttcagggaacggcagcgatctggcccagtttgttcaacgtcaacctctctaaaaaggtacaggaaagcatccagattcctaataatgggagtgccccattgctggtggacgtgcgggtgttcgtcagcaacgtttttaacgttagctcagtgttacccagggctaccgcactgcattcccatggggactgctccggcagcgcgccttgctcgaaagccaggggcagtggttgccatggactaacacctggcaatcatctaaaagttcagccgccatgcattaatccatcaggggatatctag

SEQ ID NO: 254560 - DNA, 1335 bp, Artificial Sequence
  derived and/or modified sequence
aattgctcagctgccagagaagtgactggaatagaggttgtagcttaggcaccgctgctccctccagtccctccgtgcagccgatgatggccctatggtccctgctccatctcaccttcctggggttcagcattaccttgctgttggtccacgggcagggcttccaagggacagcagccatctggccatccctcttcaacgtcaacttgtccaagaaggttcaggaaagcatccagatcccgaacaatgggagtgcgcccctgctcgtggatgtgcgggtgtttgtctccaacgtgtttaatgtggacatcctgcgatacacaatgtcctccatgctgctgcttaggctgtcctggctggacactcgcctggcctggaacactagtgcacacccgcggcacgccatcacgctgccctgggagtctctctggacaccaaggctcaccatcctggaggcgctctgggtggactggagggaccagagcccccaggctcgagtagaccaggacggccacgtgaagctcaacctggccctcgccacggagaccaactgcaactttgagctcctccacttcccccgggaccacagcaactgcagcctcagcttctacgctctcagcaacacggcgatggagttagagttccaggcccacgtggtgaacgagattgtgagtgtcaagagggaatacgtagtttatgatctgaagacccaagtcccaccccagcagctggtgccctgcttccaggtgacgctgaggctgaagaacacggcgctcaagtccatcatcgctctcttggtgcctgcagaggcactgctgttggctgacgtgtgcggggggttgctgcccctccgggccattgagcgcataggctacaaggtgacattgctgctgagttacctcgtcctccactcctccctggtgcaggccctgcccagctcctcctcctgcaacccactgctcatttactacttcaccatcctgctgctgctgctcttcctcagcaccatagagactgtgctgctggctgggctgctggcccggggcaaccttggggccaagagcggccccagcccagccccgagaggggaacagcgagagcacggcaacccagggcctcatcctgctgaagagccctccagaggagtaaaggggtcacagagaagctggcctgagactgctgaccgcatcttcttcctcgtgtatgtggttggggtgctgtgcacccaattcgtctttgcaggaatctggatgtgggcagcgtgcaagtctgacgcagcccctggagaggctgcaccccatggcaggcggcctagactgtaaaggggcagggcct

SEQ ID NO: 254561 - DNA, 464 bp, Artificial Sequence
  derived and/or modified sequence
aattgctcagctgccagagaagtgactggaatagaggttgtagcttaggcaccgctgctccctccagtccctccgtgcagccgatgatggccctatggtccctgctccatctcaccttcctggggttcagcattaccttgctgttggtccacgggcagggcttccaagggacagcagccatctggccatccctcttcaacgtcaacttgtccaagaaggttcaggaaagcatccagatcccgaacaatgggagtgcgcccctgctcgtggatgtgcgggtgtttgtctccaacgtgtttaatgtgtcttctgtcctccccagagcaactgccctccacagccatggcgactgcagtggctcggccccttgcagcaaggccagaggctcaggttgccatggcctcactcctggaaaccacctgaaggtgcagccaccctgtataaacccatcaggtgacatctaa

SEQ ID NO: 254562 - protein, 724 aa, Artificial Sequence
  derived and/or modified sequence
MKSAKGIENLAFVPSSPDILRRLSASPSQIEVSALSSDPQRENSQPQELQKPQEPQKSPEPSLPSAPPNVSEEKLRSLSLSEFEEGSYGWRNFHPQCLQRCNTPGGFLLHYCLLAVTQGIVVNGLVNISISTVEKRYEMKSSLTGLISSSYDISFCLLSLFVSFFGERGHKPRWLAFAAFMIGLGALVFSLPQFFSGEYKLGSLFEDTCVTTRNSTSCTSSTSSLSNYLYVFILGQLLLGAGGTPLYTLGTAFLDDSVPTHKSSLYIGTGYAMSILGPAIGYVLGGQLLTIYIDVAMGESTDVTEDDPRWLGAWWIGFLLSWIFAWSLIIPFSCFPKHLPGTAEIQAGKTSQAHQSNSNADVKFGKSIKDFPAALKNLMKNAVFMCLVLSTSSEALITTGFATFLPKFIENQFGLTSSFAATLGGAVLIPGAALGQILGGFLVSKFRMTCKNTMKFALFTSGVALTLSFVFMYAKCENEPFAGVSESYNGTGELGNLIAPCNANCNCSRSYYYPVCGDGVQYFSPCFAGCSNPVAHRKPKVYYNCSCIERKTEITSTAETFGFEAKAGKCETHCAKLPIFLCIFFIVIIFTFMAGTPITVSILRCVNHRQRSLALGIQFMVLRLLGTIPGPIIFGFTIDSTCILWDINDCGIKGACWIYDNIKMAHMLVAISVTCKVITMFFNGFAIFLYKPPPSATDVSFHKENAVVTNVLAEQDLNKIVKEG

SEQ ID NO: 254563 - DNA, 2175 bp, Artificial Sequence
  derived and/or modified sequence
atgaagagcgccaagggcatcgagaacctggccttcgtgcccagcagccccgacatcctgagaagactgagcgccagccccagccagatcgaggtgagcgccctgagcagcgacccccagagagagaacagccagccccaggagctgcagaagccccaggagccccagaagagccccgagcccagcctgcccagcgccccccccaacgtgagcgaggagaagctgagaagcctgagcctgagcgagttcgaggagggcagctacggctggagaaacttccacccccagtgcctgcagagatgcaacacccccggcggcttcctgctgcactactgcctgctggccgtgacccagggcatcgtggtgaacggcctggtgaacatcagcatcagcaccgtggagaagagatacgagatgaagagcagcctgaccggcctgatcagcagcagctacgacatcagcttctgcctgctgagcctgttcgtgagcttcttcggcgagagaggccacaagcccagatggctggccttcgccgccttcatgatcggcctgggcgccctggtgttcagcctgccccagttcttcagcggcgagtacaagctgggcagcctgttcgaggacacctgcgtgaccaccagaaacagcaccagctgcaccagcagcaccagcagcctgagcaactacctgtacgtgttcatcctgggccagctgctgctgggcgccggcggcacccccctgtacaccctgggcaccgccttcctggacgacagcgtgcccacccacaagagcagcctgtacatcggcaccggctacgccatgagcatcctgggccccgccatcggctacgtgctgggcggccagctgctgaccatctacatcgacgtggccatgggcgagagcaccgacgtgaccgaggacgaccccagatggctgggcgcctggtggatcggcttcctgctgagctggatcttcgcctggagcctgatcatccccttcagctgcttccccaagcacctgcccggcaccgccgagatccaggccggcaagaccagccaggcccaccagagcaacagcaacgccgacgtgaagttcggcaagagcatcaaggacttccccgccgccctgaagaacctgatgaagaacgccgtgttcatgtgcctggtgctgagcaccagcagcgaggccctgatcaccaccggcttcgccaccttcctgcccaagttcatcgagaaccagttcggcctgaccagcagcttcgccgccaccctgggcggcgccgtgctgatccccggcgccgccctgggccagatcctgggcggcttcctggtgagcaagttcagaatgacctgcaagaacaccatgaagttcgccctgttcaccagcggcgtggccctgaccctgagcttcgtgttcatgtacgccaagtgcgagaacgagcccttcgccggcgtgagcgagagctacaacggcaccggcgagctgggcaacctgatcgccccctgcaacgccaactgcaactgcagcagaagctactactaccccgtgtgcggcgacggcgtgcagtacttcagcccctgcttcgccggctgcagcaaccccgtggcccacagaaagcccaaggtgtactacaactgcagctgcatcgagagaaagaccgagatcaccagcaccgccgagaccttcggcttcgaggccaaggccggcaagtgcgagacccactgcgccaagctgcccatcttcctgtgcatcttcttcatcgtgatcatcttcaccttcatggccggcacccccatcaccgtgagcatcctgagatgcgtgaaccacagacagagaagcctggccctgggcatccagttcatggtgctgagactgctgggcaccatccccggccccatcatcttcggcttcaccatcgacagcacctgcatcctgtgggacatcaacgactgcggcatcaagggcgcctgctggatctacgacaacatcaagatggcccacatgctggtggccatcagcgtgacctgcaaggtgatcaccatgttcttcaacggcttcgccatcttcctgtacaagcccccccccagcgccaccgacgtgagcttccacaaggagaacgccgtggtgaccaacgtgctggccgagcaggacctgaacaagatcgtgaaggagggctag

SEQ ID NO: 254564 - DNA, 2175 bp, Artificial Sequence
  derived and/or modified sequence
atgaaatctgcaaagggaattgagaacctcgcctttgttccctcctcccccgacatacttcgtagactgagtgccagcccatctcagatagaggtatcagctctctcatcggacccccaacgagaaaatagtcagcctcaggagctgcagaagcctcaggaacctcaaaagagcccagaaccgtcactcccatccgcaccacccaacgtgtcagaggagaaactaaggtctctctccctgagcgaatttgaagagggctcatacggatggcgcaacttccacccacagtgtctacagaggtgcaatactccgggcgggtttctactgcactactgtctgctcgccgtgacccaaggaatcgtggtcaatggattggttaacatatctatttctaccgtagaaaaaaggtacgagatgaagagttcccttacaggactgatctctagctcctatgatatttccttctgtctgctctcactcttcgtgagtttctttggagagcgagggcacaaacctaggtggttagctttcgcagccttcatgatcggactgggcgccctggtgttctcgttacctcagttcttttccggcgagtataaacttggtagcctgttcgaagacacctgtgtgaccacaaggaacagtacaagctgtacttccagtacctcctccctgagtaactacctttacgtgttcatcttaggccagctgctgttgggggccggcgggacacctctctatacactgggtacggctttcttagacgattctgtgccaacccacaaaagctcattgtatattgggaccggctacgctatgtccatccttggccccgccattggctacgtgctcggcgggcagctcctgaccatatacatcgatgtcgccatgggggaatcgaccgacgtgaccgaggacgatccacgatggctgggggcctggtggattggattcctgctcagttggattttcgcgtggtcccttataatccctttttcatgttttcccaaacacctgccaggaactgcagagatccaagctggaaagacatcacaagcccatcagtccaacagcaacgcagacgttaaatttggcaaatctattaaagacttccctgccgctcttaaaaatctcatgaagaacgcagtttttatgtgtttagtgctgtccacttcaagtgaggccctgatcacaacagggtttgccaccttcttacccaaattcattgaaaaccaattcggtttgactagcagcttcgcagccacactcggaggagccgtgctcatccccggggctgcactgggccagatcctgggcggatttctagtgagcaaattccggatgacctgcaaaaataccatgaagttcgctctttttacgtcgggcgtagcactgaccctgtccttcgtttttatgtatgccaagtgcgagaatgagccattcgctggcgtgtcagagtcctacaatggaactggagaacttgggaacctgatcgcaccttgcaatgccaactgtaactgcagcagatcctattactatccagtgtgtggggacggagtccaatatttctccccatgtttcgccggatgctcaaaccccgtcgcgcatcgtaaaccgaaggtatattacaattgttcttgcatcgagagaaagaccgagatcacatcgaccgcggagacatttggcttcgaagctaaggctggaaaatgcgagacccattgcgcaaagctgccgatattcctgtgcatattttttattgtcatcattttcacttttatggctggcacccctattactgtgtccatactccggtgcgtgaatcacagacagcgcagccttgctctcgggattcaattcatggtactcagactgttaggaaccataccaggaccaattatctttggcttcaccattgattccacttgcatcctctgggacatcaacgactgcggaattaagggggcatgctggatctatgacaatattaaaatggctcatatgctggtggcaatctcagtgacatgtaaggtcataactatgttctttaacggattcgccattttcctctataagcccccgccgtcagccacagatgtgtccttccataaagaaaacgctgtggtaaccaacgtattggctgagcaagacctgaacaaaatcgtaaaagagggttag

SEQ ID NO: 254565 - DNA, 2175 bp, Artificial Sequence
  derived and/or modified sequence
atgaagagcgccaagggcatcgagaacctggcctttgtgcccagcagcccagacatcctgcggcggctgagcgccagccccagccagatcgaggtgtctgccctgagcagtgacccccagcgggagaacagccagccccaggagctgcagaagccccaggagccccagaagagccctgagcccagcctgcccagcgcccccccaaatgtgtctgaggagaagctgcggagcctgagcctgtctgaatttgaggagggcagctatggctggaggaacttccacccccagtgcctgcagcgctgcaacacccctgggggcttcctgctgcactactgcctgctggccgtgacccagggcatcgtggtgaatggcctggtgaacatcagcatcagcacagtggagaagagatatgagatgaagagcagcctgaccggcctcatcagcagcagctatgacatctccttctgcctgctgagcctgtttgtgtccttctttggagagcggggccacaagccccgctggctggcctttgctgccttcatgattggcctgggcgccctggtgttcagcctgccccagttcttcagcggggagtacaagctgggcagcctgtttgaggacacctgtgtgaccaccaggaacagcaccagctgcaccagcagcaccagcagcctgagcaactacctgtatgtgttcatcctgggccagctgctgctgggcgccggcggcacccccctgtacaccctgggcacagccttcctggatgattctgtgcccacccacaagagcagcctgtacatcggcaccggctacgccatgagcatcctgggccctgccatcggctacgtgctgggcggccagctgctgaccatctacattgatgtggccatgggagagagcacagatgtgacagaagatgacccccgctggctgggcgcctggtggattggcttcctgctgtcctggatctttgcctggagcctcatcatccccttcagctgcttccccaagcacctgcccggcacagctgagatccaggccggcaagaccagccaggcccaccagagcaacagcaatgctgatgtgaagtttgggaagagcatcaaggacttccctgctgccctgaagaacctgatgaagaatgctgtgttcatgtgcctggtgctgagcaccagcagcgaggccctgatcaccactggatttgccaccttcctgcccaagttcatcgagaaccagtttggcctgaccagcagctttgctgccaccctgggcggcgctgtgctgatccctggggccgccctgggccagatcctgggcggcttcctggtgtccaagttcaggatgacctgcaagaacaccatgaagtttgccctcttcaccagcggcgtggccctgaccctgagctttgtgttcatgtatgccaagtgtgaaaatgagccctttgctggggtgtctgagagctacaatggaactggagagctgggcaacctgattgccccctgcaatgccaactgcaactgcagccgcagctactactaccctgtgtgtggagatggagtgcagtacttcagcccctgctttgctggctgcagcaaccctgtggcccacaggaagcccaaggtgtactacaactgcagctgcatcgagaggaagacagagatcaccagcacagctgagacctttggatttgaggccaaggccgggaaatgtgagacccactgtgccaagctgcccatcttcctgtgcatcttcttcatcgtcatcatcttcaccttcatggccggcacccccatcaccgtgtccatcctgcgctgtgtgaaccaccggcagaggagcctggccctgggcatccagttcatggtgctgcggctgctgggcaccatccctggccccatcatcttcggcttcaccatcgacagcacctgcatcctgtgggacatcaatgactgtggcatcaagggggcctgctggatctatgacaacatcaagatggcccacatgctggtggccatctctgtgacctgcaaggtgatcaccatgttcttcaatggatttgccatcttcctgtacaagcccccaccttctgccacagatgtgtccttccacaaggaaaatgctgtggtgaccaacgtgctggccgagcaggacctgaacaagatcgtgaaggagggctag

SEQ ID NO: 254566 - DNA, 2175 bp, Artificial Sequence
  derived and/or modified sequence
atgaagagcgccaagggcatcgagaacctggccttcgtgcccagctcccccgatatcttaaggaggctcagcgccagccctagtcaaattgaagtgagcgccctgtcatcggatcctcaaagggaaaatagccagccacaagagctgcaaaaaccacaggagccacagaagagccctgagccatcacttcccagcgcacccccgaatgtatctgaagaaaagttgcgttcacttagcctgtcagagtttgaagaaggttcgtacggctggagaaacttccacccccaatgtctgcagcggtgtaacacaccaggcgggttcctactgcattattgcctcctcgccgtgactcaagggatcgttgtgaacggcctggtgaatatctccatatccaccgtcgagaaaaggtacgagatgaagtcttccctgacaggacttatctcctcttcttatgacattagcttctgcttactgagcctgttcgtctcattttttggagagcggggtcacaaaccgcgctggcttgcattcgcagctttcatgatcggcctgggagctctggtatttagcctacctcagttcttctccggagagtacaagctgggaagtttgttcgaggatacctgtgtcactaccagaaactcgactagttgtacttcgtctacatccagtctaagcaactatttgtacgtgtttatcctgggtcagctgcttctcggggcgggggggacacccctgtacactctcggcaccgctttcttggatgattctgttccgacccataaaagtagcctgtacatagggacaggttatgctatgtcaattcttggccctgccatcgggtacgttttgggtggacagttactgacaatctacatagacgtcgctatgggagagtctactgacgtcacagaagacgatccacgctggcttggcgcttggtggataggcttcctgctgtcttggatttttgcttggtcacttattatccccttttcatgtttccctaagcacctgccaggcactgctgaaatacaggccggtaagaccagccaggctcaccaatcgaacagcaacgcggatgttaaatttggaaagagtatcaaggatttccctgccgcgctgaagaacctgatgaaaaacgcggtgttcatgtgtctggtgttatcaacctcatccgaggccctcattaccacgggcttcgctaccttcctccctaaattcatcgagaatcagtttggtttgacttctagctttgctgccactctcggcggagcggtcttgataccaggcgctgccctgggacagatcctgggtggcttcttggtttctaaatttaggatgacatgtaaaaacacaatgaaattcgctctgtttactagtggtgtcgcccttacattatcctttgttttcatgtacgcaaagtgtgaaaacgaaccgttcgccggggtgagcgaatcgtataacggcacaggcgagctggggaatctgatagctccttgtaatgctaactgcaactgctccaggtcttactactatcctgtgtgcggcgacggcgtccagtacttttcaccatgctttgctggctgttctaaccccgtggcccacaggaagccaaaggtgtattacaattgctcctgcatcgaaagaaagacagaaatcacgagtaccgcagaaacctttggattcgaagccaaagccggaaagtgcgaaacacactgcgcgaaattacctattttcctgtgcatcttcttcatcgttatcatcttcacgtttatggccgggaccccaataactgtttccatcctgcgttgtgtgaatcacagacagcggtccctcgccctggggattcagtttatggttctgcggctcctaggcaccatccctggccctatcattttcgggtttaccatcgatagcacttgtattctatgggacatcaacgattgtggcatcaagggagcctgctggatttatgataatatcaaaatggcgcatatgcttgtagccattagtgtcacttgtaaggtaatcacaatgttctttaacggctttgccatatttctatataaaccaccacctagcgccacggatgtgtctttccacaaagagaatgccgttgtgaccaacgtcctcgccgaacaggatctgaacaaaatcgtcaaggagggttag

SEQ ID NO: 254567 - DNA, 2175 bp, Artificial Sequence
  derived and/or modified sequence
atgaaaagtgccaaaggcattgagaatcttgctttcgttccatcctctcccgatatcctgaggcggctttcagcatcccccagtcagatagaggtttcggcgctttcctctgacccccagagggagaacagccaaccccaggagttgcagaagccccaggagccacaaaaaagcccagaacctagcctacccagtgcgcctccaaacgtgtccgaagagaaactacgcagcctatccctcagcgagtttgaagaggggagctatggatggagaaacttccacccacagtgtctgcaacgttgcaacacaccagggggatttctactgcactactgtttgcttgctgtgacccagggcatagtggtgaatggcctcgtgaatatcagcatcagtaccgtggagaagagatatgagatgaaaagttccctgactggcctgatcagttcatcctatgatatcagtttttgtctgctgtcattgttcgtgagtttcttcggcgaaaggggacacaagccgagatggctggcatttgccgcattcatgatcggccttggtgctctagtattcagtctcccccagttcttctcaggggaatacaaactcggaagcctcttcgaggacacctgtgtgactaccaggaattccacatcatgtacatcttccactagcagcctgagtaactacctttatgtatttattctcggacaactgctcctgggcgcaggtggcactccactgtacactctagggacagcgtttctagatgactcagtgccgacccacaagtcctcactctatatcggaactgggtatgccatgtcaatactaggcccagccatcggctacgtcctgggaggacagctgcttacaatctacatcgatgtcgctatgggggagtctaccgatgtgaccgaagatgaccctaggtggctgggtgcctggtggatcgggttccttctgagttggatcttcgcatggagcttgatcatccctttttcttgtttccctaaacatctgccaggtacggcagagatccaagccggtaagactagtcaagcccatcagtccaattccaacgctgacgtaaaattcggcaagtcaatcaaagacttccccgcagcgcttaaaaacctgatgaagaacgcagtgtttatgtgccttgtcctgagtacaagctcggaggctttgatcacaaccggcttcgccacctttcttcccaagtttatcgaaaaccagtttggactgacaagttctttcgcagctacactggggggtgccgtgttgatcccaggtgctgctctgggccaaattttaggaggatttctcgtctctaagtttcgcatgacctgcaagaacactatgaagtttgctctcttcacaagcggagtggcgttaactctgagctttgtgtttatgtatgccaagtgtgaaaacgaacccttcgccggtgtgagtgagtcatacaacgggactggggaactgggtaacctgatcgcaccctgcaatgccaactgtaactgttcccgctcttactactatcctgtgtgcggcgacggtgtgcagtacttttcaccctgttttgcgggatgctctaatcctgttgctcatcgaaagcctaaggtctactacaattgctcatgcatcgagcgaaaaacagagattacaagcaccgctgaaaccttcgggttcgaagctaaagcgggaaagtgtgaaacacactgtgctaagttgccaatatttctctgtatctttttcatagttatcatttttactttcatggcgggtacgcctatcacggtctccatcttacgctgcgtcaaccacaggcagcggagcctggctctaggaattcaatttatggtgctgcgactccttgggaccattcccggacctatcatcttcggtttcacaatagatagcacttgcattttgtgggacatcaacgattgtggaatcaagggagcatgctggatatatgacaatattaaaatggcacacatgctggtggccatttctgtgacatgcaaggtgatcacgatgttctttaacggttttgccatcttcctgtacaagcctcccccaagtgctacagacgtgtccttccacaaagagaacgctgtggtgactaacgtactggcggagcaggatctgaacaaaattgtgaaggagggatag

SEQ ID NO: 254568 - DNA, 5334 bp, Artificial Sequence
  derived and/or modified sequence
cccacgccgcgccttccggttggtccttgaggcgacgggtgaggcacagctgagcgccaaagccacaggctggggcgctaacgcccccgctcagcgctctgcgctccagacagctgcgagctggagtaggaaggttcaggcggtggcggagagtgcgctggaggctggagggccaggaggcgggaagcttcccgcacgggggcgctgtcacctgcctgtgggaggagccagagagggacctggctctgctgctctgaagcaccggagtcgggagaacccatccagacatgaagagcgccaaaggtattgagaacttggcttttgtcccctccagcccagacatcctgcgccgcttgtctgcgtcgccctcccaaatcgaagtctctgccttgtcctctgacccccaaagagagaattctcagccacaggagcttcagaagccccaggagccccagaagtcaccagagccatctctgccttcagcccctcccaatgtctccgaagagaagctccggtcactgtcgctgtccgagtttgaggaggggtcttacggctggaggaacttccatcctcaatgtctccagcgctgcaacacacctggaggctttctgcttcactactgcctcttggccgtcacgcaaggtattgtagttaatggcctagtaaatattagcatttccactgttgagaagcgttatgaaatgaagagttccctgactggcctgatttcatcaagctacgatatttcattctgtttgttgtctttatttgtatcattctttggtgaaagaggacataagccgagatggcttgcatttgcagcctttatgattggactgggagcacttgtattctcattgccacaatttttcagtggagaatataaattggggtctctttttgaagacacttgtgtaacaacaaggaatagcaccagttgtacatcttcaacttcttcactttctaactacttgtatgtcttcatcttgggacaactattgctgggggcaggaggaactcctctttatactctgggaacagcctttcttgatgattctgtgcccacacacaagtcttctctctatataggaaccggttatgctatgtcaatcttaggccctgctattggctatgtattgggaggacaactgctaaccatatacattgatgttgctatgggagaaagcactgatgtcactgaggatgatccgcgatggttgggagcttggtggattgggtttcttctatcatggatctttgcttggtctttaataatacctttttcttgctttccaaaacatttaccaggtacagcagaaattcaagctggaaaaacttcccaggctcatcagagtaatagtaatgcagatgtgaaatttggaaaaagtattaaagattttccagctgctctaaagaatttgatgaagaatgctgtctttatgtgtttagttctatcaacttcttcagaagccttaattactactggatttgctacatttttacctaaatttatagaaaatcaattcggattgacatccagcttcgcagctactcttggaggggctgttttaattcctggagctgctctcggtcaaattttaggtggcttccttgtttcaaaattcagaatgacatgtaaaaacacaatgaagtttgcactgttcacatctggagttgcacttacgctgagttttgtatttatgtatgccaaatgtgaaaatgagccatttgctggtgtatctgaatcatataatgggactggagaattgggaaacttgatagccccttgtaatgccaattgtaactgttcgcgatcatattattatcctgtctgtggagatggagtccaatatttttctccctgctttgcaggctgttcaaacccagttgcacacaggaagccaaaggtatattacaactgttcctgtattgaaaggaaaacagaaataacatccactgcagaaacttttggttttgaagctaaagctggaaaatgtgaaactcattgtgcgaaactgcccatattcctttgcattttctttattgtaattatttttacctttatggccggtactcctataactgtgtctatcctaaggtgtgttaatcacagacaacggtccctagccttgggaatacaatttatggtccttcgattattagggacaattcctggaccaattatatttggtttcacaatagacagcacatgtattctttgggatataaatgattgtggaattaaaggagcttgctggatttatgataacatcaagatggcccatatgctagtagccataagtgttacttgtaaagttatcaccatgttcttcaatggatttgcaatctttttgtataaaccacctccatcagccacagatgtgtcatttcataaagagaatgcagttgtgactaatgttttagcagaacaggatctcaacaaaatagtaaaagaagggtgaaatgggaaaagagaagactgttttacacctggaaaatttacctcgatttttaagaacacacattgccatggcaggattatctatccaatatggacaatcatatttacaaaattgatgtttttataatcaaatgtatttttttacttatgtagtttttgttttatgcaagaaacagacctgtgccttcaaagcccacgtaaagcctcaaaacacagcacacacacacacgagcacacacacacacacacacacgaacacacacacacacacacacacgcacacatacacacttatttcctattcccattgtctaggtatgaaatcctcaagcaataacaagaaaaaaggcccacaattagaaaaatttacatttaaaaaaaatgttgtttctatccccattacaacttgtttaattttaattttcattgtcaatattttgagcttagaacatttatggtataaaaatttaaactaatcaaagttgtgtgatgatttccgggaattattattgaaagcctatgaatttaaaaccaggtttaccatgtaatttgtttttaaatttatgtatactagcctggcctttctccaagcaaattattgaactattagaatatgttagttatcatccttgtgtcttagtatatagtgaatacagaaacatcagcattgtatacacatattttcactttaactcaagaattccaggaggtaatttgttgatattacaatttttaacacatttatgattctgtgataatattattcaattgcatatatttcagaggaaagtaccagtcagtaaagaaaaatgccaactaaacatgaaactattgatcaatacttatatacctttaatttttcctatttgaaaagccaaccacttaacacattactcatagcacctaagacagtgccttgcatagtgtagtcatctattattattgtttaattagaatattaaaccctaccctttaactcagcagtccccaaccttttttgcatcagggaccatttttgtggaagacaatttttccatgggggaagaaggtatggttttgagatgaaactgctccacctcagaccatcaggcattagttagattctcataaggagagtgcaacctagatcccttgcatgtgcagttcccaatggagtgtgcactcctatgagaatctaatgccactactgatctaacaagaggtggagctcaggcagtaatgctcactcacctgcctctcagctcaccaactgtgtggcccgattcctaacaggccacacacagcccagggctggggacccctgctttaactgatgcattgatttgataaagtattttacaagcctgataatgttataaccctgtttattcaggtcagatttatgccaactttgctgagaatatggagggtatagatgagtgaacatcaacaaacataacttctaccatggttaagaattttacttaggaaaagtattgaagttcaaatccagatagtattacatttgaaattgttataagggttattaatttaataaaattcatcatcaggtttcccctataagctttctcctaggttaattttccacaagcattgttttatatacactgtaatcaggataacacaagcttagtgttagatcttgtaggaaaccaagattagaaacattagaaatttgcagaatttaagaaattatgttttgtggtaatctatggccaacgatgttagaacctagcgcaattgtaaagtgaaattcaaggagaaggaatgaggagttagggaagcagcatacttgaatattagagaaggagaggagctgtgggtcaggaatcagagagacctgctaaaaccagacagatataaacaccaaagacggaagccaaataggtagccaaaaatccagatatttgagaagcaggaaatttatagcaaccaaagaaatagggcaagagaggcaggtgaacacacatgatacctcaattgacaatcttcctcccaccaagccagacacgttgtaaatgctgcttcctattggagcccagaaaaaaggaaaaggaaagtttaggctttctttgtcctttgtgtggaagcagggaattggattgaagactttcatagttgtaacataaaggcaaatcctgaggaactcactgatggagatgtgaaatggcagtaaggaagaaaacagaataactgaacaaatatattagtctagggccacttaatttagaggaagaaaaaaaatcaacccatccatagaaatagtttgataaacaggtcactaaatcattggcgtttataaagattcttagctatcaagggctgcattgtattttatatactcagttttataaggtgatactttttaaataagcgctttaatgaaaatggttagactgaaaataattttggtccttaaaaggagtcaggagcttttatatataaggtacatattttaaaagaatacctcctttataacagggttttacagacactaccataatttataatcattattttttacttttgggttcacctagatcatatgagttgatgtgatacttctagaacaaaattattcatagtgcgttttttgtaatttatgattgttaagtaagcttgacttataaattgacattgtaattgtgtacataattggatatatgtgttaaaatttaacatttagatttacttaattgtagaaaatacaaatgtaaaacttacacatggaaagaactgtatgcagttgactttactatgtaaattggagggaaacaaagttttagatccattttctttcaaaattttctttattgtaaagtatgcaaaatatatattcataccatttattaaatcagaatgtttatacaaaa

SEQ ID NO: 254569 - protein, 826 aa, Artificial Sequence
  derived and/or modified sequence
MNIQEQGFPLDLGASFTEDAPRPPVPGEEGELVSTDPRPASYSFCSGKGVGIKGETSTATPRRSDLDLGYEPEGSASPTPPYLKWAESLHSLLDDQDGISLFRTFLKQEGCADLLDFWFACTGFRKLEPCDSNEEKRLKLARAIYRKYILDNNGIVSRQTKPATKSFIKGCIMKQLIDPAMFDQAQTEIQATMEENTYPSFLKSDIYLEYTRTGSESPKVCSDQSSGSGTGKGISGYLPTLNEDEEWKCDQDMDEDDGRDAAPPGRLPQKLLLETAAPRVSSSRRYSEGREFRYGSWREPVNPYYVNAGYALAPATSANDSEQQSLSSDADTLSLTDSSVDGIPPYRIRKQHRREMQESVQVNGRVPLPHIPRTYRVPKEVRVEPQKFAEELIHRLEAVQRTREAEEKLEERLKRVRMEEEGEDGDPSSGPPGPCHKLPPAPAWHHFPPRCVDMGCAGLRDAHEENPESILDEHVQRVLRTPGRQSPGPGHRSPDSGHVAKMPVALGGAASGHGKHVPKSGAKLDAAGLHHHRHVHHHVHHSTARPKEQVEAEATRRAQSSFAWGLEPHSHGARSRGYSESVGAAPNASDGLAHSGKVGVACKRNAKKAESGKSASTEVPGASEDAEKNQKIMQWIIEGEKEISRHRRTGHGSSGTRKPQPHENSRPLSLEHPWAGPQLRTSVQPSHLFIQDPTMPPHPAPNPLTQLEEARRRLEEEEKRASRAPSKQRTRSQRKVGGGSAQPCDSIVVAYYFCGEPIPYRTLVRGRAVTLGQFKELLTKKGSYRYYFKKVSDEFDCGVVFEEVREDEAVLPVFEEKIIGKVEKVD

SEQ ID NO: 254570 - DNA, 2481 bp, Artificial Sequence
  derived and/or modified sequence
atgaatatccaagaacagggctttcctcttgacttaggcgcctctttcacagaggacgctcctaggccgcctgtgcccggcgaagagggagagctggtgtccaccgaccctcggcccgcctcatactctttctgcagcggtaagggcgttggtataaaaggcgagacaagtacagctacacctcgtcgatctgacctggaccttgggtacgagccagagggaagtgcctcaccaacaccgccttatctcaaatgggctgagagtctgcatagcctgctagatgaccaggatgggatttcactgtttcggacgtttttgaagcaggaagggtgtgccgatctcttggatttctggttcgcgtgtacagggtttcgcaagttggaaccgtgcgattctaatgaagagaaaagactcaaattggccagagcgatttatagaaagtacatcctggacaacaacggcatagtgagccggcagaccaaacctgccacaaaaagcttcatcaaagggtgtattatgaagcaattgattgacccagctatgttcgatcaggctcagactgagattcaggcaaccatggaagaaaatacataccctagctttctgaagtccgacatctacctggagtacacgcgcactggcagcgagagccctaaagtctgctctgaccagtctagcggctcgggtactggaaaaggcatctcaggttacctccccaccttgaatgaagatgaagaatggaagtgtgaccaggatatggatgaggacgacggcagagacgctgccccccccgggaggctcccgcagaaactgcttctggagacagccgccccccgagtgagctcaagccgtagatatagcgaaggaagggagtttcgctatggctcctggcgtgaacctgtaaatccttattacgtgaatgcaggatacgcgctcgcgccagcaacttctgcaaacgactcagaacagcaatcattgtcttcggatgccgacacactgtctctaaccgactcaagcgtggacgggatccctccatacaggatcagaaagcagcacagacgggaaatgcaagagtcggtacaggtgaatgggagagtgccgctgcctcatattccaaggacctacagggtccccaaggaggtacgcgtcgagcctcagaaattcgccgaggaattgatccatcgtctagaggccgttcagcgtacaagagaagctgaggagaagctggaggaaaggcttaaaagggtgcggatggaggaggaaggcgaggacggggacccaagcagtggtccaccaggcccctgccataagctgcctcccgcacccgcttggcaccacttcccgccaagatgtgtggatatgggatgcgccggactccgcgacgcgcacgaggaaaatcctgaaagcatcctggatgaacacgtgcagcgtgtccttcggacccctggacggcaatctccagggccaggccatcgcagccctgactctggacatgtggcaaaaatgccagtggcactgggcggagccgcctccggccatgggaagcatgttccgaaaagcggcgcaaagctggacgccgccggtcttcatcaccaccggcatgtccaccaccacgtccatcattccacagccagacctaaagaacaggttgaagctgaggcaacaaggagggcccagtcctcttttgcctggggccttgagcctcacagccatggtgccagatcccgtggctacagcgagagcgtgggggctgctcctaatgcatcagacgggctggcccactctggcaaagtcggagtggcctgcaaaaggaatgctaagaaagcagagtcaggaaagtcagccagcaccgaagtccctggtgcaagcgaagatgcagagaagaaccagaaaatcatgcagtggatcattgagggcgaaaaggagatctctcgtcaccgacgcaccggacatggcagtagcgggacaaggaagccacagcctcacgagaattcccggcccctgtcattagaacacccgtgggcaggcccacagctcagaacctctgttcagcccagccacttgtttattcaagatccaacaatgccaccccacccggccccaaaccctcttactcaactggaagaagctaggcgaaggcttgaggaagaggaaaaacgcgcctcgagggctccgagcaaacagcgcactcgttcccagcgaaaagtgggtggtgggtctgcccagccatgcgacagcatcgtcgtggcctactacttttgtggggaacccatcccatatagaactctggtgcggggaagggccgtcacacttggacagtttaaagagctgctgactaagaagggctcgtaccgctattatttcaaaaaggtatcagatgagtttgattgcggggtcgtcttcgaagaggtgcgtgaagacgaggcagtgctgccggtattcgaagagaaaatcatcggtaaggtagagaaagtcgactag

SEQ ID NO: 254571 - DNA, 2481 bp, Artificial Sequence
  derived and/or modified sequence
atgaacatccaggagcagggcttccccctggacctgggcgccagcttcacagaagatgcccccaggcctcctgtgcctggagaggagggggagctggtgtccacagaccccaggcctgccagctacagcttctgcagcggcaagggcgtgggcatcaagggggagaccagcacagccaccccccggcggagtgacctggacctgggctatgagcctgagggcagcgccagccccaccccaccctacctgaagtgggccgagagcctgcacagcctgctggatgaccaggacggcatcagcctcttccgcaccttcctgaagcaggagggctgtgccgacctgctggacttctggtttgcctgcaccggcttcaggaagctggagccctgtgacagcaatgaggagaagaggctgaagctggcccgggccatctacaggaagtacatcctggacaacaatggaattgtgtcccggcagaccaagccagccaccaagagcttcatcaagggctgcatcatgaagcagctgattgatcctgccatgtttgaccaggcccagacagagatccaggccaccatggaggagaacacctaccccagcttcctgaagagtgacatctacctggagtacaccaggactggaagtgagagccccaaggtgtgcagcgaccagagcagcggcagcggcaccgggaagggcatcagcggctacctgcccaccctgaatgaagatgaggagtggaagtgtgaccaggacatggatgaagatgatggaagagatgctgcccctcctggccgcctgccccagaagctgctgctggagacagctgccccccgggtgagcagcagccgccgctacagcgagggccgggagttccgctatggctcctggagggagcctgtgaacccctactacgtgaatgccggctacgccctggccccagccaccagcgccaatgattctgagcagcagagcctgagcagtgatgctgacaccctgagcctgacagacagctctgtggatggcatccccccctaccgcatcaggaagcagcacagaagagagatgcaggagagcgtgcaggtgaatggccgggtgcccctgccccacatccccaggacctacagagtgcccaaggaggtgcgggtggagccccagaagtttgctgaggagctgatccaccggctggaggccgtgcagaggacccgggaggccgaggagaagctggaggagcggctgaagagggtgaggatggaggaggagggagaagatggagaccccagcagcggccccccaggcccctgccacaagctgcccccagccccagcctggcaccacttccccccaagatgtgtggacatgggctgtgccggcctgagagatgcccatgaagaaaatcctgagagcatcctggatgagcacgtgcagagggtgctgcggaccccaggccggcagagccctggccctggccacaggagcccagacagcggccacgtggccaagatgcctgtggccctgggcggggccgccagcggccacggcaagcacgtgcccaagagcggggccaagctggatgctgctggcctgcaccaccaccgccacgtgcaccaccacgtgcaccacagcacagcccggcccaaggagcaggtggaggccgaggccacccggcgggcccagagcagctttgcctggggcctggagccccacagccatggagcccggagccggggctacagcgagagcgtgggcgccgccccaaatgccagtgatggcctggcccacagcggcaaggtgggcgtggcctgcaagagaaatgccaagaaggccgagagcggcaagagcgccagcacagaggtgcctggggcctctgaagatgctgagaagaaccagaagatcatgcagtggatcattgaaggagagaaggagatcagccgccacagaagaactggacatggcagcagcggcaccaggaagccccagccccatgagaacagccggcccctgagcctggagcacccctgggccggcccccagctgcggacctctgtgcagcccagccacctgttcatccaggaccccaccatgccaccccacccagcccccaaccccctgacccagctggaggaggcccggcggcggctggaggaggaggagaagagggccagccgggcccccagcaagcagaggaccaggagccagaggaaggtgggcggcggcagcgcccagccctgtgacagcatcgtggtggcctactacttctgtggggagcccatcccctaccgcaccctggtgcggggccgggctgtgaccctgggccagttcaaggagctgctgaccaagaagggcagctaccgctactacttcaagaaggtgtctgatgaatttgactgtggggtggtgtttgaggaggtgcgggaggatgaagctgtgctgcctgtgtttgaggagaagatcatcggcaaggtggagaaggtggactag

SEQ ID NO: 254572 - DNA, 2481 bp, Artificial Sequence
  derived and/or modified sequence
atgaacatccaggagcagggcttccccctggacctgggcgccagcttcacggaggatgcacccaggccaccagtccccggagaagaaggtgagctcgtgtccactgaccctcggccagcctcttattctttctgttctggcaagggggtgggcatcaagggggaaacttccacagcaacaccccgccgctccgatctggatctgggatatgaacctgaaggaagtgcctcacccactccaccatacctcaaatgggcagaaagccttcattccctgttggacgaccaggacggtatctctctcttcaggacattcctgaaacaggaaggttgcgcagatcttctcgacttctggttcgcttgtacaggatttcggaagctcgaaccctgcgattcgaatgaggagaagcggctgaagctcgctcgggccatctatagaaaatacatcctggacaataatgggatcgtgtcccggcaaaccaagcccgccaccaaaagctttatcaaggggtgcattatgaagcagctcatcgaccccgccatgtttgatcaggcacaaacagagattcaagcaactatggaagagaatacatatcctagcttcctcaaatccgatatctacctggagtacacccggactgggtccgaatcacctaaagtgtgttctgaccagtcctctggttccggcacaggtaaggggatatcagggtacctgcccacccttaacgaggatgaggagtggaagtgtgatcaggatatggatgaggatgacggcagagatgctgcacccccgggcaggttgccgcagaagcttctgctcgagacagccgccccccgagtttccagcagcaggaggtatagtgagggcagggagttcaggtatgggagctggcgtgaacccgtgaatccttattatgtgaatgccggatatgctctggccccagccacaagtgccaacgactccgaacagcaaagtctgtcgtccgatgcagatacactcagcctcaccgattccagcgtggacgggatcccaccatacaggattcgtaaacagcacaggagggaaatgcaagagagcgttcaggtgaacggtagggtccccctccctcacattccgcgaacataccgggtgccaaaggaggtgagagtggaaccccaaaaattcgccgaggagctgattcatcggctggaggctgtgcagcggactcgggaggctgaggaaaaactggaggagagactcaagcgcgtgagaatggaagaggagggcgaggacggagacccctcctctggccctcccggtccctgccacaagctccctcccgcgcctgcttggcaccacttccccccaagatgcgtggacatgggatgcgccggcctgcgagacgcccacgaggagaacccagaatcaatcttggacgaacacgttcaaagggtgcttcggacacctgggagacagagccccggaccagggcacaggtcaccggactctgggcatgtggctaaaatgcctgttgcactgggtggcgcggcctctggccatggtaaacacgttcccaagagtggtgcaaaactcgacgccgccgggttgcaccatcatcgccatgttcatcatcatgtccaccacagcaccgcccgacctaaggagcaggttgaggccgaagcgacccggcgagcccagtccagtttcgcttggggccttgagccacattcacacggtgcacggagtagaggctattcagagagcgtgggggccgccccaaacgcttccgatggccttgcacactccggtaaagtcggcgtcgcatgcaaacggaatgctaaaaaggcggagagcgggaagagcgcatccacagaggtgccgggcgcctctgaagacgccgagaagaatcagaaaatcatgcagtggataattgagggagagaaggagataagtcgccacaggaggaccggccatgggagcagcggaactcgtaagcctcaaccccacgagaatagccgccctctgtccctggagcacccctgggctggaccccaactgagaacatccgtccagcctagtcacctctttatccaggatcctaccatgccaccccatcccgcacccaacccgttaacacagttagaggaggctcgacgtcggctggaggaggaagagaagagagcatcccgagccccttcaaaacagcgcactaggtctcaacgaaaagtcggaggtgggtcagcccagccatgcgacagtattgtggtggcgtattacttttgcggggagcctattccttacagaaccttagtgcgcggcagggccgtgacactgggacagttcaaggaattgctgacgaagaagggatcctaccgctactactttaagaaggtgagcgatgaattcgactgtggcgttgtgttcgaagaggtgcgtgaagacgaggccgtgctgccagtattcgaagagaagatcattgggaaggttgaaaaagttgattag

SEQ ID NO: 254573 - DNA, 2481 bp, Artificial Sequence
  derived and/or modified sequence
atgaatattcaggaacagggatttcctctggacctgggagcatcattcaccgaagacgcgccacgacctcccgtgccgggagaagagggagagctggtaagtactgaccccagaccagccagctattccttctgtagcggcaagggcgttggcatcaaaggggaaacttcaaccgcaacccccagacgctctgatctggatttgggctacgagccggaaggcagcgcatcgcccacacctccatatctcaaatgggctgaatccctccattcactgctcgacgatcaggatggaatctccctcttccggacgtttctcaagcaggagggctgtgctgacctgctcgacttctggttcgcctgtactggttttaggaagttagagccctgcgacagtaatgaggaaaagaggctcaagctggcccgagctatctatcgaaaatatatactggataataacggcattgtgtctaggcaaacaaagccagcgaccaagtctttcatcaaaggctgcattatgaagcagttaattgatcctgccatgtttgaccaagcccaaactgagatccaggccacaatggaggagaatacctaccccagctttctgaaatccgacatatacctggagtacacaaggactggcagcgagagtccgaaggtgtgcagtgaccagtcgtccggctctggaacaggaaaaggtatctcaggatatctgcctacattgaatgaggatgaagaatggaaatgcgaccaggacatggacgaggatgacgggagggatgcagcccctcccggacggctaccccagaaactactgctggagaccgcagctcctagagtttccagctcgcgacggtattctgaggggcgagagtttaggtatggaagttggcgggaaccagtgaatccctactacgtaaacgccggttatgctctggctcctgctaccagcgctaatgatagtgagcaacagagcctttccagtgacgcagacacactgagtctcacagatagttccgtggacggcatccctccctatcggatcagaaaacagcaccgacgggaaatgcaggagagcgtgcaggtgaatggcagagttcctctgccccatatacctcgtacctaccgggtccctaaggaggtgagagtggagccccagaagttcgccgaggagctgattcaccgactggaggccgtgcagcgaacacgcgaggccgaggaaaagttggaagagcgtctgaaacgtgtacggatggaggaagagggcgaagacggggatccttcgagtggacctcccggtccgtgccacaaactccctcctgctcccgcttggcaccacttcccaccacgctgtgtggatatgggatgtgcgggattgcgcgacgcccatgaggaaaaccccgagtccattctggacgagcatgtgcaaagagttctgcgaactccgggtcgccagtctcctggtccaggccataggtcccccgattcagggcacgttgccaagatgccagtcgcactgggtggcgcagctagcggccacgggaaacacgtccctaaatcgggggctaaactggacgccgcaggattgcaccaccaccgccacgttcatcatcacgttcaccatagtaccgcccgtcccaaagagcaggtagaagcagaagccacccgtcgagcacagagcagtttcgcttggggattggagccccatagccatggagcccgaagccggggatacagtgagtcagttggagccgcaccaaatgcgtccgacgggttggcccattccggtaaagtgggcgtcgcctgtaaacgcaatgctaaaaaggccgaatccgggaaatcagcttccaccgaagttccaggcgcatctgaggatgccgagaaaaaccagaagattatgcagtggatcatcgaaggcgaaaaagaaattagccgccatcggcgaaccgggcatggatcctctggaaccagaaagccccagccccatgagaactccagacccctgtcgctggaacatccttgggcaggccctcaactcaggacaagtgtgcaaccatcccacctgttcatccaggatcctactatgccgccacatccggctcccaaccccctgacacagttagaagaggcccgtagaagactcgaggaggaggaaaaacgtgcatcacgcgctcccagcaagcagcggactagaagccagcggaaagtcgggggaggttctgcccagccctgcgacagtatcgtcgttgcctactacttttgcggcgaaccaatcccgtaccgcaccctggtccgtggcagagccgttaccctggggcagttcaaggagctgctaacgaagaaggggtcttatagatactactttaagaaggtctcagacgaatttgattgcggagtcgtctttgaagaagtaagggaagacgaagcagtactcccagtgtttgaggagaagataattgggaaagtagagaaagtggactag

SEQ ID NO: 254574 - DNA, 2481 bp, Artificial Sequence
  derived and/or modified sequence
atgaacatccaggagcagggcttccccctggacctgggcgccagcttcaccgaggacgcccccagaccccccgtgcccggcgaggagggcgagctggtgagcaccgaccccagacccgccagctacagcttctgcagcggcaagggcgtgggcatcaagggcgagaccagcaccgccacccccagaagaagcgacctggacctgggctacgagcccgagggcagcgccagccccacccccccctacctgaagtgggccgagagcctgcacagcctgctggacgaccaggacggcatcagcctgttcagaaccttcctgaagcaggagggctgcgccgacctgctggacttctggttcgcctgcaccggcttcagaaagctggagccctgcgacagcaacgaggagaagagactgaagctggccagagccatctacagaaagtacatcctggacaacaacggcatcgtgagcagacagaccaagcccgccaccaagagcttcatcaagggctgcatcatgaagcagctgatcgaccccgccatgttcgaccaggcccagaccgagatccaggccaccatggaggagaacacctaccccagcttcctgaagagcgacatctacctggagtacaccagaaccggcagcgagagccccaaggtgtgcagcgaccagagcagcggcagcggcaccggcaagggcatcagcggctacctgcccaccctgaacgaggacgaggagtggaagtgcgaccaggacatggacgaggacgacggcagagacgccgccccccccggcagactgccccagaagctgctgctggagaccgccgcccccagagtgagcagcagcagaagatacagcgagggcagagagttcagatacggcagctggagagagcccgtgaacccctactacgtgaacgccggctacgccctggcccccgccaccagcgccaacgacagcgagcagcagagcctgagcagcgacgccgacaccctgagcctgaccgacagcagcgtggacggcatccccccctacagaatcagaaagcagcacagaagagagatgcaggagagcgtgcaggtgaacggcagagtgcccctgccccacatccccagaacctacagagtgcccaaggaggtgagagtggagccccagaagttcgccgaggagctgatccacagactggaggccgtgcagagaaccagagaggccgaggagaagctggaggagagactgaagagagtgagaatggaggaggagggcgaggacggcgaccccagcagcggcccccccggcccctgccacaagctgccccccgcccccgcctggcaccacttcccccccagatgcgtggacatgggctgcgccggcctgagagacgcccacgaggagaaccccgagagcatcctggacgagcacgtgcagagagtgctgagaacccccggcagacagagccccggccccggccacagaagccccgacagcggccacgtggccaagatgcccgtggccctgggcggcgccgccagcggccacggcaagcacgtgcccaagagcggcgccaagctggacgccgccggcctgcaccaccacagacacgtgcaccaccacgtgcaccacagcaccgccagacccaaggagcaggtggaggccgaggccaccagaagagcccagagcagcttcgcctggggcctggagccccacagccacggcgccagaagcagaggctacagcgagagcgtgggcgccgcccccaacgccagcgacggcctggcccacagcggcaaggtgggcgtggcctgcaagagaaacgccaagaaggccgagagcggcaagagcgccagcaccgaggtgcccggcgccagcgaggacgccgagaagaaccagaagatcatgcagtggatcatcgagggcgagaaggagatcagcagacacagaagaaccggccacggcagcagcggcaccagaaagccccagccccacgagaacagcagacccctgagcctggagcacccctgggccggcccccagctgagaaccagcgtgcagcccagccacctgttcatccaggaccccaccatgcccccccaccccgcccccaaccccctgacccagctggaggaggccagaagaagactggaggaggaggagaagagagccagcagagcccccagcaagcagagaaccagaagccagagaaaggtgggcggcggcagcgcccagccctgcgacagcatcgtggtggcctactacttctgcggcgagcccatcccctacagaaccctggtgagaggcagagccgtgaccctgggccagttcaaggagctgctgaccaagaagggcagctacagatactacttcaagaaggtgagcgacgagttcgactgcggcgtggtgttcgaggaggtgagagaggacgaggccgtgctgcccgtgttcgaggagaagatcatcggcaaggtggagaaggtggactag

SEQ ID NO: 254575 - protein, 735 aa, Artificial Sequence
  derived and/or modified sequence
MEGAGGANDKKKISSERRKEKSRDAARSRRSKESEVFYELAHQLPLPHNVSSHLDKASVMRLTISYLRVRKLLDAGDLDIEDDMKAQMNCFYLKALDGFVMVLTDDGDMIYISDNVNKYMGLTQFELTGHSVFDFTHPCDHEEMREMLTHRNGLVKKGKEQNTQRSFFLRMKCTLTSRGRTMNIKSATWKVLHCTGHIHVYDTNSNQPQCGYKKPPMTCLVLICEPIPHPSNIEIPLDSKTFLSRHSLDMKFSYCDERITELMGYEPEELLGRSIYEYYHALDSDHLTKTHHDMFTKGQVTTGQYRMLAKRGGYVWVETQATVIYNTKNSQPQCIVCVNYVVSGIIQHDLIFSLQQTECVLKPVESSDMKMTQLFTKVESEDTSSLFDKLKKEPDALTLLAPAAGDTIISLDFGSNDTETDDQQLEEVPLYNDVMLPSPNEKLQNINLAMSPLPTAETPKPLRSSADPALNQEVALKLEPNPESLELSFTMPQIQDQTPSPSDGSTRQSSPEPNSPSEYCFYVDSDMVNEFKLELVEKLFAEDTEAKNPFSTQDTDLDLEMLAPYIPMDDDFQLRSFDQLSPLESSSASPESASPQSTVTVFQQTQIQEPTANATTTTATTDELKTVTKDRMEDIKILIASPSPTHIHKETTSATSSPYRDTQSRTASPNRAGKGVIEQTEKSHPRSPNVLSVALSQRTTVPEEELNPKILALQNAQRKRKMEHDGSLFQAVGII

SEQ ID NO: 254576 - DNA, 2208 bp, Artificial Sequence
  derived and/or modified sequence
atggagggcgccggcggcgccaacgacaagaagaagatcagcagcgagagaagaaaggagaagagcagagacgccgccagaagcagaagaagcaaggagagcgaggtgttctacgagctggcccaccagctgcccctgccccacaacgtgagcagccacctggacaaggccagcgtgatgagactgaccatcagctacctgagagtgagaaagctgctggacgccggcgacctggacatcgaggacgacatgaaggcccagatgaactgcttctacctgaaggccctggacggcttcgtgatggtgctgaccgacgacggcgacatgatctacatcagcgacaacgtgaacaagtacatgggcctgacccagttcgagctgaccggccacagcgtgttcgacttcacccacccctgcgaccacgaggagatgagagagatgctgacccacagaaacggcctggtgaagaagggcaaggagcagaacacccagagaagcttcttcctgagaatgaagtgcaccctgaccagcagaggcagaaccatgaacatcaagagcgccacctggaaggtgctgcactgcaccggccacatccacgtgtacgacaccaacagcaaccagccccagtgcggctacaagaagccccccatgacctgcctggtgctgatctgcgagcccatcccccaccccagcaacatcgagatccccctggacagcaagaccttcctgagcagacacagcctggacatgaagttcagctactgcgacgagagaatcaccgagctgatgggctacgagcccgaggagctgctgggcagaagcatctacgagtactaccacgccctggacagcgaccacctgaccaagacccaccacgacatgttcaccaagggccaggtgaccaccggccagtacagaatgctggccaagagaggcggctacgtgtgggtggagacccaggccaccgtgatctacaacaccaagaacagccagccccagtgcatcgtgtgcgtgaactacgtggtgagcggcatcatccagcacgacctgatcttcagcctgcagcagaccgagtgcgtgctgaagcccgtggagagcagcgacatgaagatgacccagctgttcaccaaggtggagagcgaggacaccagcagcctgttcgacaagctgaagaaggagcccgacgccctgaccctgctggcccccgccgccggcgacaccatcatcagcctggacttcggcagcaacgacaccgagaccgacgaccagcagctggaggaggtgcccctgtacaacgacgtgatgctgcccagccccaacgagaagctgcagaacatcaacctggccatgagccccctgcccaccgccgagacccccaagcccctgagaagcagcgccgaccccgccctgaaccaggaggtggccctgaagctggagcccaaccccgagagcctggagctgagcttcaccatgccccagatccaggaccagacccccagccccagcgacggcagcaccagacagagcagccccgagcccaacagccccagcgagtactgcttctacgtggacagcgacatggtgaacgagttcaagctggagctggtggagaagctgttcgccgaggacaccgaggccaagaaccccttcagcacccaggacaccgacctggacctggagatgctggccccctacatccccatggacgacgacttccagctgagaagcttcgaccagctgagccccctggagagcagcagcgccagccccgagagcgccagcccccagagcaccgtgaccgtgttccagcagacccagatccaggagcccaccgccaacgccaccaccaccaccgccaccaccgacgagctgaagaccgtgaccaaggacagaatggaggacatcaagatcctgatcgccagccccagccccacccacatccacaaggagaccaccagcgccaccagcagcccctacagagacacccagagcagaaccgccagccccaacagagccggcaagggcgtgatcgagcagaccgagaagagccaccccagaagccccaacgtgctgagcgtggccctgagccagagaaccaccgtgcccgaggaggagctgaaccccaagatcctggccctgcagaacgcccagagaaagagaaagatggagcacgacggcagcctgttccaggccgtgggcatcatctag

SEQ ID NO: 254577 - DNA, 2208 bp, Artificial Sequence
  derived and/or modified sequence
atggagggggctgggggtgcaaatgacaagaaaaaaatttccagcgagagaaggaaggagaaatccagggatgcagctcgtagtcgaagatctaaagagtccgaggtgttttacgaactggcacatcagctgcctttgccacacaacgtgtctagccatctggacaaggcctcagtaatgcggctgacgattagctatttacgcgttaggaaactgctagacgcaggtgatttagatattgaggatgacatgaaggcccagatgaactgcttctatctgaaggccctcgacggcttcgttatggttctcacagacgacggagacatgatttacatttccgacaacgtcaacaagtacatgggactgactcagtttgagctgacagggcattcagtcttcgattttacccacccatgcgaccacgaggagatgagagaaatgctgacacatcgaaacggcttagtgaaaaaaggtaaagagcagaatacacagagaagcttctttcttagaatgaaatgcactctgaccagtcgcggacgaacaatgaatatcaaatctgcaacttggaaggtgctccactgcaccggccacatacatgtgtacgacaccaactcgaatcagccacagtgcggttacaaaaagccgccaatgacctgtttagttctgatctgcgaaccaatccctcacccaagtaatatcgagatacctctggactcgaaaaccttcttatcaaggcactcactggacatgaaattctcatactgcgacgaacggatcacggaattgatgggatatgagcccgaggaacttttgggcaggagcatttatgaatactatcacgcgctcgactcggatcatctgaccaagacccatcacgatatgttcaccaaaggtcaggtgacaacagggcagtatcgaatgttagccaaacgcggcggttacgtctgggtagaaacacaggcgacagtgatttacaacaccaaaaactctcagcctcagtgtatagtgtgcgtgaactacgtggtgtccggcataattcagcacgatctgattttcagtctgcagcagacggagtgtgtccttaaaccagtggaatcttctgacatgaagatgactcagctctttactaaggtggaaagcgaagatacatcttcactgttcgacaaactgaaaaaagagcctgatgcactgactctcctggcaccggcagccggcgatacaatcatctccctcgactttggaagtaatgatacagagactgacgaccagcaattagaggaagtcccactttacaatgacgtgatgctaccttcccccaatgagaaacttcagaatatcaacttagctatgtcccccctacccactgccgagacgcctaagccactgcgatcctctgccgaccccgcattgaatcaggaagtcgctttaaagcttgagccaaaccccgaatctctggagctgagcttcacgatgcctcaaattcaagaccaaaccccaagcccttctgacggctccacccgacagagttcccctgagcctaatagtcccagtgaatactgtttctacgtcgactcagacatggtcaacgaatttaaattggagttggtggaaaagctttttgcagaggacaccgaggccaagaatccgttctcgacacaggataccgacctcgacctggagatgctggccccttacatccctatggatgatgactttcagttgcggtcgtttgatcagctgtctcctctagaatcttcaagtgccagtcccgaaagtgcatccccccaaagtactgtgaccgtgtttcagcaaactcagatacaggaacccactgctaatgccacgactactaccgcaactactgacgagctaaaaacagtaacaaaggaccgtatggaggacatcaaaatacttatcgctagccccagcccgacgcacatccacaaagaaacaacttcagccacttcctcgccttaccgggacactcaaagtcgaacagcctcaccaaatagagcaggaaagggcgtgatcgaacagacagagaagtcccatccccgcagtcctaacgttctctctgttgctctttcccagcgcacaacagttccggaggaagagctgaatcctaaaatcttagctctccagaatgcccaacgaaaacggaagatggagcacgacggtagcctgttccaggctgttggcatcatctag

SEQ ID NO: 254578 - DNA, 3555 bp, Artificial Sequence
  derived and/or modified sequence
gtgaagacatcgcggggaccgattcaccatggagggcgccggcggcgcgaacgacaagaaaaagataagttctgaacgtcgaaaagaaaagtctcgagatgcagccagatctcggcgaagtaaagaatctgaagttttttatgagcttgctcatcagttgccacttccacataatgtgagttcgcatcttgataaggcctctgtgatgaggcttaccatcagctatttgcgtgtgaggaaacttctggatgctggtgatttggatattgaagatgacatgaaagcacagatgaattgcttttatttgaaagccttggatggttttgttatggttctcacagatgatggtgacatgatttacatttctgataatgtgaacaaatacatgggattaactcagtttgaactaactggacacagtgtgtttgattttactcatccatgtgaccatgaggaaatgagagaaatgcttacacacagaaatggccttgtgaaaaagggtaaagaacaaaacacacagcgaagcttttttctcagaatgaagtgtaccctaactagccgaggaagaactatgaacataaagtctgcaacatggaaggtattgcactgcacaggccacattcacgtatatgataccaacagtaaccaacctcagtgtgggtataagaaaccacctatgacctgcttggtgctgatttgtgaacccattcctcacccatcaaatattgaaattcctttagatagcaagactttcctcagtcgacacagcctggatatgaaattttcttattgtgatgaaagaattaccgaattgatgggatatgagccagaagaacttttaggccgctcaatttatgaatattatcatgctttggactctgatcatctgaccaaaactcatcatgatatgtttactaaaggacaagtcaccacaggacagtacaggatgcttgccaaaagaggtggatatgtctgggttgaaactcaagcaactgtcatatataacaccaagaattctcaaccacagtgcattgtatgtgtgaattacgttgtgagtggtattattcagcacgacttgattttctcccttcaacaaacagaatgtgtccttaaaccggttgaatcttcagatatgaaaatgactcagctattcaccaaagttgaatcagaagatacaagtagcctctttgacaaacttaagaaggaacctgatgctttaactttgctggccccagccgctggagacacaatcatatctttagattttggcagcaacgacacagaaactgatgaccagcaacttgaggaagtaccattatataatgatgtaatgctcccctcacccaacgaaaaattacagaatataaatttggcaatgtctccattacccaccgctgaaacgccaaagccacttcgaagtagtgctgaccctgcactcaatcaagaagttgcattaaaattagaaccaaatccagagtcactggaactttcttttaccatgccccagattcaggatcagacacctagtccttccgatggaagcactagacaaagttcacctgagcctaatagtcccagtgaatattgtttttatgtggatagtgatatggtcaatgaattcaagttggaattggtagaaaaactttttgctgaagacacagaagcaaagaacccattttctactcaggacacagatttagacttggagatgttagctccctatatcccaatggatgatgacttccagttacgttccttcgatcagttgtcaccattagaaagcagttccgcaagccctgaaagcgcaagtcctcaaagcacagttacagtattccagcagactcaaatacaagaacctactgctaatgccaccactaccactgccaccactgatgaattaaaaacagtgacaaaagaccgtatggaagacattaaaatattgattgcatctccatctcctacccacatacataaagaaactactagtgccacatcatcaccatatagagatactcaaagtcggacagcctcaccaaacagagcaggaaaaggagtcatagaacagacagaaaaatctcatccaagaagccctaacgtgttatctgtcgctttgagtcaaagaactacagttcctgaggaagaactaaatccaaagatactagctttgcagaatgctcagagaaagcgaaaaatggaacatgatggttcactttttcaagcagtaggaattatttagcatgtagactgctggggcaatcaatggatgaaagtggattaccacagctgaccagttatgattgtgaagttaatgctcctatacaaggcagcagaaacctactgcagggtgaagaattactcagagctttggatcaagttaactgagctttttcttaatttcattcctttttttggacactggtggctcattacctaaagcagtctatttatattttctacatctaattttagaagcctggctacaatactgcacaaacttggttagttcaattttgatcccctttctacttaatttacattaatgctcttttttagtatgttctttaatgctggatcacagacagctcattttctcagttttttggtatttaaaccattgcattgcagtagcatcattttaaaaaatgcacctttttatttatttatttttggctagggagtttatccctttttcgaattatttttaagaagatgccaatataatttttgtaagaaggcagtaacctttcatcatgatcataggcagttgaaaaatttttacaccttttttttcacattttacataaataataatgctttgccagcagtacgtggtagccacaattgcacaatatattttcttaaaaaataccagcagttactcatggaatatattctgcgtttataaaactagtttttaagaagaaattttttttggcctatgaaattgttaaacctggaacatgacattgttaatcatataataatgattcttaaatgctgtatggtttattatttaaatgggtaaagccatttacataatatagaaagatatgcatatatctagaaggtatgtggcatttatttggataaaattctcaattcagagaaatcatctgatgtttctatagtcactttgccagctcaaaagaaaacaataccctatgtagttgtggaagtttatgctaatattgtgtaactgatattaaacctaaatgttctgcctaccctgttggtataaagatattttgagcagactgtaaacaagaaaaaaaaaatcatgcattcttagcaaaattgcctagtatgttaatttgctcaaaatacaatgtttgattttatgcactttgtcgctattaacatcctttttttcatgtagatttcaataattgagtaattttagaagcattattttaggaatatatagttgtcacagtaaatatcttgttttttctatgtacattgtacaaatttttcattccttttgctctttgtggttggatctaacactaactgtattgttttgttacatcaaataaacatcttctgtggaccagg

SEQ ID NO: 254579 - DNA, 2208 bp, Artificial Sequence
  derived and/or modified sequence
atggagggcgctgggggcgccaatgacaagaagaagatcagcagcgagaggaggaaggagaagagcagagatgctgcccggagcagaagaagcaaggagagcgaggtgttctatgagctggcccaccagctgcccctgccccacaacgtgagcagccacctggacaaggcctctgtgatgaggctgaccatctcctacctgcgggtgaggaagctgctggatgctggggacctggacattgaagatgacatgaaggcccagatgaactgcttctacctgaaggccctggatggctttgtgatggtgctgacagatgatggagacatgatctacatcagtgacaacgtgaacaagtacatgggcctgacccagtttgagctgaccggccacagcgtgtttgacttcacccacccctgtgaccacgaggagatgagggagatgctgacccacagaaatggcctggtgaagaagggcaaggagcagaacacccagaggagcttcttcctgaggatgaagtgcaccctgaccagccggggccgcaccatgaacatcaagagcgccacctggaaggtgctgcactgcaccggccacatccacgtgtatgacaccaacagcaaccagccccagtgtggctacaagaagccacccatgacctgcctggtgctgatctgtgagcccatcccccaccccagcaacatcgagatccccctggacagcaagaccttcctgagccgccacagcctggacatgaagttctcctactgtgatgagcgcatcacagagctgatgggctatgagcctgaggagctgctgggccgcagcatctatgagtactaccacgccctggacagcgaccacctgaccaagacccaccacgacatgttcaccaagggccaggtgaccaccggccagtacaggatgctggccaagaggggcggctacgtgtgggtggagacccaggccaccgtcatctacaacaccaagaacagccagccccagtgcatcgtgtgtgtgaactacgtggtgtctggcatcatccagcacgacctgatcttcagcctgcagcagacagaatgtgtgctgaagcctgtggagagcagtgacatgaagatgacccagctgttcaccaaggtggagagcgaggacaccagcagcctgtttgacaagctgaagaaggagccagatgccctgaccctgctggccccagctgctggggacaccatcatcagcctggactttggcagcaatgacacagaaacagatgaccagcagctggaggaggtgcccctgtacaatgatgtgatgctgcccagccccaatgagaagctgcagaacatcaacctggccatgagccccctgcccacagctgagacccccaagcccctgcggagcagcgctgaccctgccctgaaccaggaggtggccctgaagctggagcccaaccctgagagcctggagctgtccttcaccatgccccagatccaggaccagacccccagccccagtgatggcagcacccggcagagcagccctgagcccaacagccccagcgagtactgcttctacgtggacagcgacatggtgaatgagttcaagctggagctggtggagaagctgtttgctgaggacacagaggccaagaaccccttcagcacccaggacacagacctggacctggagatgctggccccctacatccccatggatgatgacttccagctgcggagctttgaccagctgagccccctggagagcagcagcgccagccctgagagcgccagcccccagagcacagtgaccgtcttccagcagacccagatccaggagcccacagccaatgccaccaccaccacagccaccacagatgagctgaagacagtgaccaaggacaggatggaggacatcaagatcctgattgccagccccagccccacccacatccacaaggagaccaccagcgccaccagcagcccctacagagacacccagagcaggacagccagccccaacagagctgggaagggcgtgattgagcagacagagaagagccaccccaggagccccaacgtgctgtctgtggccctgagccagaggaccaccgtgcctgaggaggagctgaaccccaagatcctggccctgcagaatgcccagaggaagaggaagatggagcatgatggcagcctcttccaggccgtgggcatcatctag

SEQ ID NO: 254580 - DNA, 2208 bp, Artificial Sequence
  derived and/or modified sequence
atggagggcgccggcggcgccaacgacaagaagaagatcagcagcgagaggcggaaagagaaatctagagatgccgctaggagccgtaggtctaaagagtccgaggtgttttacgaactggcccaccagctcccccttccacataacgtgtcctcccatcttgacaaggcttctgtcatgagactgaccataagctatctccgtgtccgcaagctgctggatgcaggtgatttagacattgaagatgatatgaaagcccagatgaactgcttttacttaaaagccctcgatggtttcgtgatggtgctgactgatgacggcgacatgatttacatcagcgacaacgtgaacaagtacatgggcctgacccagttcgagttgaccggtcattccgtttttgatttcacacacccctgcgatcacgaggagatgcgcgagatgcttacccatcgaaatggactggtgaagaagggtaaggagcagaacacacagcgcagcttcttcctgcgcatgaagtgcacattgacctccagggggagaaccatgaatattaagtctgccacttggaaggtcctccactgcacaggacatattcacgtctacgacactaactctaaccagccacagtgcggctataagaagccaccgatgacctgcctggtcttaatctgcgagccaataccccatccaagcaatatagaaatccccctagacagcaagactttcctatcccgtcactccctagatatgaagttctcgtactgtgatgagagaatcaccgagctgatgggctatgaacctgaggagctactaggtagatccatttacgagtattaccatgcccttgactctgatcaccttaccaagactcatcatgacatgtttaccaaggggcaggtgaccacaggccagtacagaatgctggccaagaggggaggttacgtgtgggttgagacacaggcaactgtcatttacaacaccaaaaactctcagccccagtgcattgtgtgtgttaattatgtagtcagcgggataatacagcatgatctcatctttagcctgcaacagacggagtgtgtgttgaaacctgtagaatccagcgatatgaaaatgacacagttattcaccaaggtggaaagcgaagatacctccagcctgttcgacaaactcaaaaaggagcctgatgccctgactcttttggcacccgcagctggcgataccattatctccctcgattttggctccaatgacacagagactgatgaccagcagctggaggaggttcctctgtataacgacgtcatgctgccatcacctaatgaaaaacttcagaatatcaacctcgccatgagtcctctgcctaccgcagaaacaccaaaacccctgcgcagttcagccgaccctgcactgaatcaggaggttgctctgaagctggagcctaatccggaatccctggagctgagcttcacgatgcctcaaatccaggatcagacccctagtcccagcgacgggagcaccaggcagagttcgccagaacccaattccccttccgaatactgcttctacgtggattctgacatggtgaacgaattcaaattagagctggttgagaagctgttcgccgaggatacggaggccaagaatccttttagcacccaggataccgatctcgacctggagatgctggcaccctacatacctatggacgatgacttccaactccgctccttcgaccaactctctccgctggaatcgtcctctgccagtcctgagagtgctagcccgcaatccacagtcaccgtgtttcagcagacccagatacaggaacctactgccaacgcgacaaccaccaccgctaccaccgacgagttaaagacggtcaccaaagatcgcatggaagacattaagattctgatcgcaagtccctcccccacacacattcacaaggagacaacttctgcgacgtccagtccttatcgcgatactcagtctaggacagcttcacccaacagggccggtaaaggggtaatagagcagactgaaaaatcacatcctagaagcccgaatgtgctgtccgttgccctgagtcagagaacaacggtgcccgaggaagaactgaatcctaaaatcctagcactccagaacgcacagcgcaagcgcaagatggaacacgatggctctctcttccaggctgtcggcatcatttag

SEQ ID NO: 254581 - DNA, 2208 bp, Artificial Sequence
  derived and/or modified sequence
atggagggcgctggcggagcaaacgataagaagaaaatttcatccgaacgacggaaagaaaagtcccgcgacgcagcgaggagccggaggtcaaaggagtcggaagtcttctatgaactggctcaccagctgcccctgcctcataacgtgagcagccatcttgacaaagctagcgtgatgcgattaaccatttcctatttacgcgtacgaaaactgttagacgccggagatctggacatcgaagacgacatgaaagcccagatgaattgtttttacctgaaagccctcgacggattcgtgatggttctgacagacgatggggatatgatttatatttctgacaacgtcaacaaatatatgggcctcacacagttcgagctgactggtcattctgtgttcgactttacacatccctgcgatcatgaggaaatgcgcgagatgctcacccaccgcaatggtctggtgaaaaaaggtaaagaacagaatacccagaggtcattctttctgagaatgaagtgcactttaacctcacgtggtcgtaccatgaacatcaagagtgctacctggaaggtgctccattgcaccggacacattcacgtgtacgatacaaactccaatcagccacaatgcggttataaaaagccacccatgacttgccttgtccttatttgcgagccaataccacacccatccaacatcgagattcctctcgattcgaaaacgtttctgtcacgacacagtctggacatgaaatttagctactgtgacgagcgcatcaccgaactcatgggatatgaacccgaagagctgttggggcgaagcatctacgaatattatcatgcactggactcagatcaccttactaagactcatcatgacatgttcactaaaggacaggtgacaacagggcagtatagaatgctggccaagcgtggtggatacgtgtgggtagagacacaagcaaccgtcatctacaacaccaaaaattctcagcctcaatgcatagtgtgtgtaaactatgtggtttcaggtattattcaacatgacctgatctttagcctgcagcagacagagtgcgtcctgaagccggtcgagtctagcgatatgaagatgacacaactgttcacgaaggtggagagcgaggacacttccagcttgtttgataagctaaagaaagaaccagacgccctcacactcctggcccctgccgcaggcgatacaattatcagcctggattttggatcaaatgatactgaaacggatgaccagcagctggaggaggtccccctgtataatgacgtgatgttaccttcaccaaacgagaagctgcaaaacatcaatctcgcaatgtcgccacttcctacagcagaaacgccaaagcccctgcgcagtagtgcagatccggctcttaatcaggaggtggcactgaagcttgaaccaaatcctgaaagcctggagctcagtttcaccatgccgcagatacaagaccaaactccttccccttctgacgggagcacaagacaaagctccccagagccaaactcaccaagcgagtactgtttctatgtagactccgatatggtgaatgaatttaagctggagctggtggagaagctctttgcagaggataccgaggccaagaaccccttctctacacaggatacggacctggatctggagatgctggccccttatatacccatggatgatgattttcagttgcgctcgtttgatcaattgtcaccccttgaatctagctccgcttcacccgagagcgcttccccacagagcacagtcaccgtgtttcagcagacacaaatccaagagccaactgctaatgccacaacaactactgctaccaccgatgaactgaagactgtgactaaagaccgcatggaggatatcaaaatcctgattgcgtctccttcacccacacatattcataaagaaacaacatccgcaacgtcctcaccatatcgggatacgcagtccagaacggcatccccgaaccgcgcagggaagggcgtgatcgagcagacagagaaatctcatcctcgctcccccaatgtgttgtccgtcgctttgtcccaacggaccaccgttccagaagaggagctgaaccctaagattctggcactgcagaacgcacaacggaagcgcaagatggagcatgatggtagcctgtttcaagccgtgggaatcatttag

SEQ ID NO: 254582 - protein, 742 aa, Artificial Sequence
  derived and/or modified sequence
MGSENSALKSYTLREPPFTLPSGLAVYPAVLQDGKFASVFVYKRENEDKVNKAAKHLKTLRHPCLLRFLSCTVEADGIHLVTERVQPLEVALETLSSAEVCAGIYDILLALIFLHDRGHLTHNNVCLSSVFVSEDGHWKLGGMETVCKVSQATPEFLRSIQSIRDPASIPPEEMSPEFTTLPECHGHARDAFSFGTLVESLLTILNEQVSADVLSSFQQTLHSTLLNPIPKCRPALCTLLSHDFFRNDFLEVVNFLKSLTLKSEEEKTEFFKFLLDRVSCLSEELIASRLVPLLLNQLVFAEPVAVKSFLPYLLGPKKDHAQGETPCLLSPALFQSRVIPVLLQLFEVHEEHVRMVLLSHIEAYVEHFTQEQLKKVILPQVLLGLRDTSDSIVAITLHSLAVLVSLLGPEVVVGGERTKIFKRTAPSFTKNTDLSLEDSPMCVVCSHHSQISPILENPFSSIFPKCFFSGSTPINSKKHIQRDYYNTLLQTGDPFSQPIKFPINGLSDVKNTSEDSENFPSSSKKSEEWPDWSEPEEPENQTVNIQIWPREPCDDVKSQCTTLDVEESSWDDCEPSSLDTKVNPGGGITATKPVTSGEQKPIPALLSLTEESMPWKSSLPQKISLVQRGDDADQIEPPKVSSQERPLKVPSELGLGEEFTIQVKKKPVKDPEMDWFADMIPEIKPSAAFLILPELRTEMVPKKDDVSPVMQFSSKFAAAEITEGEAEGWEEEGELNWEDNNW

SEQ ID NO: 254583 - DNA, 2229 bp, Artificial Sequence
  derived and/or modified sequence
atgggcagcgagaacagcgccctgaagagctacaccctgagagagccccccttcaccctgcccagcggcctggccgtgtaccccgccgtgctgcaggacggcaagttcgccagcgtgttcgtgtacaagagagagaacgaggacaaggtgaacaaggccgccaagcacctgaagaccctgagacacccctgcctgctgagattcctgagctgcaccgtggaggccgacggcatccacctggtgaccgagagagtgcagcccctggaggtggccctggagaccctgagcagcgccgaggtgtgcgccggcatctacgacatcctgctggccctgatcttcctgcacgacagaggccacctgacccacaacaacgtgtgcctgagcagcgtgttcgtgagcgaggacggccactggaagctgggcggcatggagaccgtgtgcaaggtgagccaggccacccccgagttcctgagaagcatccagagcatcagagaccccgccagcatcccccccgaggagatgagccccgagttcaccaccctgcccgagtgccacggccacgccagagacgccttcagcttcggcaccctggtggagagcctgctgaccatcctgaacgagcaggtgagcgccgacgtgctgagcagcttccagcagaccctgcacagcaccctgctgaaccccatccccaagtgcagacccgccctgtgcaccctgctgagccacgacttcttcagaaacgacttcctggaggtggtgaacttcctgaagagcctgaccctgaagagcgaggaggagaagaccgagttcttcaagttcctgctggacagagtgagctgcctgagcgaggagctgatcgccagcagactggtgcccctgctgctgaaccagctggtgttcgccgagcccgtggccgtgaagagcttcctgccctacctgctgggccccaagaaggaccacgcccagggcgagaccccctgcctgctgagccccgccctgttccagagcagagtgatccccgtgctgctgcagctgttcgaggtgcacgaggagcacgtgagaatggtgctgctgagccacatcgaggcctacgtggagcacttcacccaggagcagctgaagaaggtgatcctgccccaggtgctgctgggcctgagagacaccagcgacagcatcgtggccatcaccctgcacagcctggccgtgctggtgagcctgctgggccccgaggtggtggtgggcggcgagagaaccaagatcttcaagagaaccgcccccagcttcaccaagaacaccgacctgagcctggaggacagccccatgtgcgtggtgtgcagccaccacagccagatcagccccatcctggagaaccccttcagcagcatcttccccaagtgcttcttcagcggcagcacccccatcaacagcaagaagcacatccagagagactactacaacaccctgctgcagaccggcgaccccttcagccagcccatcaagttccccatcaacggcctgagcgacgtgaagaacaccagcgaggacagcgagaacttccccagcagcagcaagaagagcgaggagtggcccgactggagcgagcccgaggagcccgagaaccagaccgtgaacatccagatctggcccagagagccctgcgacgacgtgaagagccagtgcaccaccctggacgtggaggagagcagctgggacgactgcgagcccagcagcctggacaccaaggtgaaccccggcggcggcatcaccgccaccaagcccgtgaccagcggcgagcagaagcccatccccgccctgctgagcctgaccgaggagagcatgccctggaagagcagcctgccccagaagatcagcctggtgcagagaggcgacgacgccgaccagatcgagccccccaaggtgagcagccaggagagacccctgaaggtgcccagcgagctgggcctgggcgaggagttcaccatccaggtgaagaagaagcccgtgaaggaccccgagatggactggttcgccgacatgatccccgagatcaagcccagcgccgccttcctgatcctgcccgagctgagaaccgagatggtgcccaagaaggacgacgtgagccccgtgatgcagttcagcagcaagttcgccgccgccgagatcaccgagggcgaggccgagggctgggaggaggagggcgagctgaactgggaggacaacaactggtag

SEQ ID NO: 254584 - DNA, 2229 bp, Artificial Sequence
  derived and/or modified sequence
atgggatctgagaacagtgctctgaaaagctatacactcagagaacctccttttactctgccttcagggctggctgtgtaccctgccgtgttgcaagacggaaagttcgcgtcagtgttcgtctacaagcgtgaaaacgaggataaggtcaataaggccgcaaagcatctgaagactctgagacacccttgccttctaagattcctgtcttgcacagtggaggctgacggaattcatctggtcaccgagcgagtgcagccactggaagtagcactagagaccctatccagcgccgaggtttgcgctggaatctatgacatcttgttggccctgatcttcctccacgaccgcggacatcttactcataacaatgtctgtctgtccagtgtattcgtttctgaagacggtcattggaaattgggcggaatggagacggtgtgcaaagtgtcacaagccactccagaattcctgcgatctattcaaagtatccgcgacccagcctcaattcccccagaggaaatgagtcccgagttcactactcttccggaatgccacgggcacgctagagacgcattcagcttcggaacccttgtcgagtcactccttactattttaaatgagcaggtttcggctgacgtgctcagttcattccagcagacgctccattccacgttgctgaatccgattcccaaatgccgccctgcactgtgcactttgctcagccacgacttcttcagaaacgactttctggaggtcgttaactttctaaagagcctcaccctcaagtctgaggaggaaaaaaccgagttcttcaagttcctgctagatcgtgtgtcctgcctgagcgaggagttgatcgcttccagactcgtcccactgctgctgaatcagctcgtgttcgccgaaccggttgcagtgaaaagcttccttccctacttacttggaccaaagaaagatcatgcacaaggggaaacaccctgtctgttgtcaccagccttgtttcagtcccgggtgataccagtcctcttacagttgtttgaggtgcacgaggaacacgtgagaatggtgctactgtcacatattgaagcctacgtggagcactttactcaggaacagctcaagaaggtgatccttcctcaggtgttgctgggtttgagagatacatccgacagcatagtagcaatcacccttcacagtttggccgtgttagtgtcacttctcggtcccgaagtggttgtaggcggagagcgcacgaagatcttcaaaaggaccgctccaagtttcacgaagaacacggatcttagcctggaagatagcccgatgtgcgtggtctgttcacatcattcacagattagccccatcctagaaaaccctttctccagcatctttccaaagtgctttttcagcggctccaccccgatcaatagcaagaagcacatccagagggattattacaacacgctgctacagaccggtgaccccttctcacagccgatcaaatttccaataaatgggctcagtgacgtcaagaacacttccgaggatagtgaaaatttcccttctagttccaaaaaaagtgaagaatggcccgattggtcggagccagaggaaccagagaatcagacagtgaatattcaaatttggcctcgtgaaccgtgtgacgatgtgaagtctcagtgcaccaccctggacgtagaggagagctcctgggatgactgcgaaccgtcgtcactggataccaaggttaatcccggggggggcatcacagccacaaaacccgtaactagcggcgagcaaaagcctattcccgcattgctcagcttgaccgaggaatctatgccctggaagtcctcgttgccacagaagatttccctggtgcagaggggagatgacgccgaccaaatcgagccccctaaggtctcatcccaggagagaccgctgaaagtaccatccgaattggggttaggcgaagaattcaccatacaggtgaaaaagaagccagttaaggatcccgagatggactggtttgccgatatgatccctgaaattaaaccctctgctgcctttctcattctgcctgagctccgaacagaaatggttcctaagaaagacgacgtgtcccctgtgatgcagttctcctccaagttcgcggcggcagaaatcactgagggtgaagctgaagggtgggaggaagaaggagagttgaactgggaggataacaactggtag

SEQ ID NO: 254585 - DNA, 2229 bp, Artificial Sequence
  derived and/or modified sequence
atggggtctgagaactccgcccttaaaagctatacactgcgagagccaccattcaccctgccctcgggcctggctgtttacccggctgttcttcaggatggaaagtttgcgagtgtcttcgtgtataaacgggagaatgaagacaaggttaataaagccgccaagcacttaaagaccttgagacacccttgtctgctgcggtttctcagctgcacagttgaagccgacggtatccatctggttacagaaagggtgcagcccttggaggttgccttggagaccctgtcctctgccgaggtctgtgcgggtatctacgacatactacttgctctcatctttttgcacgaccgtggtcacctcactcacaataacgtgtgtctgtccagtgttttcgtgagcgaagacggccactggaagctgggcggaatggagacagtgtgtaaggtctctcaagccacaccagaattcctacgctccattcagagtattagagatcccgctagtatccctcccgaggaaatgagccccgagtttacaacactaccagagtgccacggacatgcaagggatgcgttcagtttcggcaccctggtggaaagtctgttaaccatcttaaacgaacaggtgtctgctgatgtgttgtcttcgtttcagcagactctccactcgacacttttaaaccctatccctaaatgtaggcctgctctatgcacactcttgtcacacgatttcttcagaaatgattttctggaagtggtgaatttcctgaaatctctaaccttgaagtccgaggaggagaagaccgaattcttcaagtttctgctcgatcgggtgtcctgcctgtcggaggaactgatcgcatcaaggcttgtaccacttcttctcaatcaattggtgttcgctgagccagtggcagttaagtctttcctcccttacctgctgggacctaaaaaagatcacgctcagggagagactccttgcctcctttccccggcgcttttccagtcgcgagtgattcccgtgctcctgcagctttttgaagtccatgaagaacacgttaggatggtgttattgtcacacatagaggcatatgtggaacacttcacacaggagcaactaaagaaagtgattctgccccaagtattactggggctgagagacacatccgatagtatcgttgccatcaccctgcattccctcgcagttctcgtcagtcttctgggcccagaggtggtagtcggtggggaaagaactaaaatctttaaacgcactgctcctagtttcacgaagaatacagatctgagcttggaagactcacctatgtgcgtggtatgcagtcaccacagccagatcagtcccatccttgaaaatccctttagcagtatatttcctaagtgtttcttttcaggcagcacacccatcaactcaaaaaagcatatacagagggactactacaataccctgctgcaaacaggggaccccttttcgcagcctattaaattcccaatcaatggcctgagcgatgtgaaaaatacatcagaggactcagagaatttcccaagctccagtaagaaatctgaggagtggcctgattggtccgaaccagaagagcctgagaatcagacggtaaacatccaaatttggccacgcgaaccatgcgacgacgtgaagagtcaatgcactactctggacgtggaggaatcaagctgggacgattgtgagcccagctctttggacaccaaggtaaacccgggcggaggcataaccgcaacgaagccagtgacctctggagaacagaagcccatccctgcgctgctgtcgctgaccgaggagtccatgccatggaaatcttcgctaccccagaaaataagcctcgtacaaaggggagatgacgccgatcagatcgaaccccccaaagtcagttcccaggagagaccccttaaggtgccatctgagttgggcctcggggaggagttcacgatacaagtaaagaaaaaacctgtcaaggaccccgaaatggattggttcgcggatatgattccagaaatcaaaccgagcgcagccttcctgatcctgccggagctccgcactgaaatggtgcccaagaaggacgacgtctccccagtgatgcagttttcaagtaaatttgcggccgctgaaattactgaaggagaggcggaagggtgggaggaggaaggcgaactgaactgggaggacaacaactggtag

SEQ ID NO: 254586 - DNA, 2229 bp, Artificial Sequence
  derived and/or modified sequence
atgggcagcgagaacagcgccctgaagagctacaccctgcgggagccccccttcaccctgcccagcggcctggccgtgtacccagctgtgctgcaggacggcaagtttgcctctgtgtttgtgtacaagagagaaaatgaagacaaggtgaacaaggccgccaagcacctgaagaccctgcggcacccctgcctgctgcgcttcctgagctgcaccgtggaggctgatggcatccacctggtgacagagcgggtgcagcccctggaggtggccctggagaccctgagcagcgctgaggtgtgtgccggcatctatgacatcctgctggccctgatcttcctgcatgaccggggccacctgacccacaacaacgtgtgcctgagctctgtgtttgtgtctgaagatggccactggaagctgggcggcatggagaccgtgtgcaaggtgtcccaggccaccccagagttcctgcggagcatccagagcatccgggaccctgccagcatccccccagaggagatgagccctgagttcaccaccctgcctgaatgtcatggccacgccagagatgccttctcctttggcaccctggtggagagcctgctgaccatcctgaatgagcaggtgtctgcagatgtgctgagcagcttccagcagaccctgcacagcaccctgctgaaccccatccccaagtgcaggcctgccctgtgcaccctgctgagccatgacttcttcagaaatgacttcctggaggtggtgaacttcctgaagagcctgaccctgaagtctgaggaggagaagacagagttcttcaagttcctgctggacagagtgtcctgcctgtctgaggagctgattgccagccggctggtgcccctgctgctgaaccagctggtgtttgctgagcctgtggccgtgaagagcttcctgccctacctgctgggccccaagaaggaccacgcccagggcgagaccccctgcctgctgagccctgccctcttccagagcagggtcatccctgtgctgctgcagctgtttgaggtgcatgaggagcacgtgaggatggtgctgctgagccacatcgaggcctacgtggagcacttcacccaggagcagctgaagaaggtgatcctgccccaggtgctgctgggcctgcgggacaccagtgacagcatcgtggccatcaccctgcacagcctggccgtgctggtgtccctgctgggccctgaggtggtggtgggcggggagaggaccaagatcttcaagaggacagcccccagcttcaccaagaacacagacctgagcctggaggacagccccatgtgtgtggtgtgcagccaccacagccagatcagccccatcctggagaaccccttcagcagcatcttccccaagtgcttcttcagcggcagcacccccatcaacagcaagaagcacatccagagggactactacaacaccctgctgcagacaggagaccccttcagccagcccatcaagttccccatcaatggcctgagtgatgtgaagaacaccagcgaggacagcgagaacttccccagcagcagcaagaagtctgaggagtggccagactggagcgagcctgaggagcctgagaaccagacagtgaacatccagatctggccccgggagccctgtgatgatgtgaagagccagtgcaccaccctggatgtggaggagagctcctgggatgactgtgagcccagcagcctggacaccaaggtgaaccctgggggcggcatcacagccaccaagcctgtgaccagcggggagcagaagcccatcccagccctgctgagcctgacagaggagagcatgccctggaagagcagcctgccccagaagatcagcctggtgcagagaggagatgatgctgaccagatcgagccccccaaggtgagcagccaggagcggcccctgaaggtgcccagcgagctgggcctgggggaggagttcaccatccaggtgaagaagaagcctgtgaaggaccctgagatggactggtttgctgacatgatccctgagatcaagcccagcgctgccttcctgatcctgcctgagctgaggacagagatggtgcccaagaaggatgatgtgtcccctgtgatgcagttcagcagcaagtttgctgctgctgagatcacagaaggagaggccgagggctgggaggaggagggggagctgaactgggaggacaacaactggtag

SEQ ID NO: 254587 - DNA, 2229 bp, Artificial Sequence
  derived and/or modified sequence
atgggcagcgagaacagcgccctgaagagctacaccctgcgggagccgcctttcaccctacccagcggtctggccgtctatcccgctgttctgcaggacggcaagttcgcctctgttttcgtgtacaagcgcgaaaatgaggataaggtcaataaagcggccaagcatctgaaaacgttgcgacacccctgcctcctgagattcctgagctgcaccgtcgaggcggatggcatccatctggtaacggaaagggttcaacccctggaggtggcactagagactctctcaagtgctgaggtgtgtgcagggatctacgacattctcttagccctgatctttctgcacgatcgaggccatctgacgcacaataacgtatgcctcagctctgtcttcgtcagtgaagatggccactggaagctgggcggaatggagaccgtgtgtaaggtgtctcaggcaacgcccgagttccttcgctctatccagtctattcgggatccggcctctatcccccctgaagagatgagcccagagttcacgacgctgcctgagtgtcatgggcacgcgcgcgacgccttctccttcgggacgctcgtcgaaagcctcctgacaatccttaacgaacaagtttctgcggacgtgctttctagtttccaacagactttgcattctaccctcctgaatcccatcccgaaatgccgacctgccctttgcacccttctgtcccatgacttcttccgcaacgatttcctggaggtggtgaacttcctgaagtcattgacactgaaaagtgaggaggaaaaaaccgagttttttaagttcctgctggatcgggtatcttgtctttctgaagaactgattgcgtcccggctggttcccctcttgttgaaccaattagtctttgccgagcctgtggccgtgaagagttttttgccttacctgctcggccctaagaaggaccacgctcaaggcgagacaccctgtctgctgagccccgccctatttcagtcaagagtgattccagtcttacttcagctgttcgaagtccacgaagaacatgttcgcatggtcctcctctctcacatcgaagcctatgtcgaacatttcacccaggagcaactcaagaaggttatcttgccccaggttcttctgggactgagggacaccagcgactccatcgtggcaatcaccctgcatagcctagctgttctggtttcattgttaggaccagaggtggttgtggggggggagcggaccaagatcttcaagcggaccgcaccctcctttactaagaatactgatttgtcattggaggactccccaatgtgtgtcgtgtgcagtcaccattcccagatcagtccgatactcgagaacccattttctagcatctttcccaagtgcttctttagcggttctacacccatcaacagcaaaaaacacatccagagggactactataatactttactgcagacgggagaccctttctcccagcccatcaagtttcctatcaatggactctccgatgttaaaaacacctcagaagacagcgaaaactttccatcctcctctaaaaaaagcgaggaatggcctgactggtccgagccggaagaacctgaaaaccagactgtgaatattcagatttggccgagagaaccatgcgatgacgtgaaatcccagtgtacaacattggatgtagaggaaagctcctgggacgactgtgaaccttccagtttggacacgaaggtcaaccctggcggcgggatcactgccacaaagcctgtcaccagtggagaacagaagccgatacctgcactcctaagcttaacggaagaatcaatgccctggaaatcgtccctgccgcagaaaatttcgctggttcagcgtggcgatgatgcagatcaaattgagccgcccaaagtaagctcgcaggagcgccctctgaaggtgccaagtgagcttggactgggtgaagagttcaccattcaggttaagaagaagcctgtcaaggaccccgagatggactggtttgccgacatgatccccgaaatcaagccaagcgctgccttcctgattcttcctgaattgaggaccgaaatggttccaaagaaggatgacgtttccccggtgatgcaattcagttccaaatttgctgctgccgaaatcactgagggtgaggccgaaggatgggaggaagagggcgaactgaattgggaagataataattggtag

SEQ ID NO: 254588 - DNA, 2229 bp, Artificial Sequence
  derived and/or modified sequence
atgggcagcgagaacagcgccctgaagagctacaccctgcgggagcctcctttcaccctccccagtgggttggccgtgtatcctgcggttttgcaggacggcaaatttgcctctgtctttgtgtataagagggagaatgaagataaggtgaataaggcagccaagcatcttaaaacgctgaggcatccctgtttattgcgtttcctttcctgcactgtcgaagcagatggtattcatctggtgactgaacgggtgcaacccctggaggtagctctggagaccctaagtagcgctgaagtgtgcgctgggatctatgatattctgctggccttgatctttttgcacgacagaggtcacctcacacacaacaatgtgtgcctctctagtgtcttcgtgtctgaggacggtcactggaaactcggaggcatggaaacagtgtgtaaagtgtcacaggctactcccgaattcctgaggagtattcagtcaattcgcgatcccgcttcgattccacctgaggaaatgtcccctgagttcacgaccctgcccgaatgtcacggacacgccagggatgcatttagttttggcacattggttgaatccttgttgactatcctgaacgaacaggtgtccgcagacgtgcttagcagtttccaacaaactctacattctacactccttaacccaattccaaaatgccggccggcgctctgtaccttactgtcgcacgatttttttcgcaacgatttcttagaagttgtcaacttcctgaaatccctgacgttgaagtccgaagaagagaaaaccgagttcttcaaatttctgctggatcgagttagctgccttagtgaagagctcatcgcttctcggctggtgcccctcctgctcaatcagcttgtgttcgccgaaccagtagcagtgaaatcttttctgccgtatctactcggccctaaaaaggaccacgcgcagggggagacgccctgtctgttgagcccagccctatttcagtcacgtgtgatccctgtactcctgcagctgttcgaggttcacgaagaacatgtacggatggtattgctttcacacattgaggcttatgtcgaacattttactcaggaacaactcaaaaaggtcatcctgccccaagtcctgctcggcctccgcgacacatcagacagcatcgttgccatcaccttgcactctttagccgttttggttagcttgcttggacctgaggtagtggtgggcggcgaacgcacaaaaattttcaagcggaccgcacctagcttcaccaaaaacaccgatttatcccttgaagattcgcctatgtgtgtggtctgtagccaccattcccaaatttctccgatcttggaaaacccgtttagcagtatattccccaaatgtttttttagtggaagtacacccatcaactccaagaagcatatccaaagagactattataacaccctgctgcagacaggagacccgttcagtcaaccaataaagttccctatcaacggtctttccgatgtgaaaaatactagcgaagattccgagaacttccccagctcctcgaagaagagcgaggaatggccagactggtcggaaccagaggaacctgaaaaccagaccgtgaatatccagatttggcccagggaaccttgcgatgatgttaaatcccagtgtaccactctagacgtagaggagtcctcctgggatgactgcgagccctccagcttagacacgaaagttaatcccggaggcggaatcacggcgacgaaaccggtcacttctggagaacaaaaacctattcccgctctcctcagtctcaccgaagagagtatgccttggaagagctcgctgcctcagaagataagtctggtgcagagaggggatgacgctgatcagatcgaaccgcctaaggtgtcatcacaggagaggcccttgaaggtccctagcgaacttgggctgggtgaggaattcaccatacaagtgaagaagaagccggtcaaagacccagaaatggactggttcgccgatatgatccccgaaatcaagccaagtgcggcttttcttatcctgccagagctaaggactgagatggtacctaagaaagatgacgtaagcccggtgatgcaattttccagcaagttcgcagctgccgagattaccgaaggagaggccgaaggatgggaggaggaaggcgagctcaattgggaggataacaactggtag

SEQ ID NO: 254589 - DNA, 2229 bp, Artificial Sequence
  derived and/or modified sequence
atggggagtgaaaattctgcactcaaatcctatacattacgtgagccaccgttcacacttccctctggtttagccgtgtaccctgcagtcttacaggacggcaagtttgcgtcggtctttgtctacaagagggagaacgaggataaggtgaacaaagcagcaaagcacttgaaaactctaaggcacccttgccttctgaggttcctttcctgtaccgtggaggccgacggaatccacctggtgactgaacgggtacagcccctggaagtggcactcgaaacactcagctcggctgaagtgtgtgccggtatttacgacattcttctggccttaatttttctgcatgataggggccaccttactcacaataacgtatgtctgtcttccgtgtttgtgtccgaagacggccattggaagctggggggaatggagacagtgtgcaaagtcagccaggccacacccgagtttctgaggtccattcagtctatccgggacccagcttcaatcccacccgaagagatgtcacctgagttcaccactctgcccgagtgtcacggccacgcgagagacgctttttcctttgggactctggtggagagcctgttaacaattctgaatgagcaagttagcgccgacgttctcagttcttttcaacagacccttcactctaccctcctgaacccaatccctaagtgtcgtcctgcgctgtgcacgttgctttctcacgacttctttcgcaacgacttcttagaagtggtgaacttcctgaagagcctgactctgaagtccgaagaggaaaaaacagagttcttcaagtttttgttagatcgtgtgtcttgcctctcagaggagttgatcgccagcaggcttgtgcctttactcctgaatcaattggtgttcgccgagccagtcgccgttaagagttttctcccctacctgttggggccaaagaaagatcacgcccagggcgaaacaccttgtctgcttagcccagctctcttccagtcgagggtgatccctgtgctcttgcagctgttcgaggtgcacgaggagcacgtacggatggttctactgagccatatcgaagcctacgtagagcattttacccaggagcagctaaagaaggttatcctcccacaggtcctcctcggcttaagggacacgagcgatagtatcgtagccattacccttcacagcctcgcggtgctggtgtctttgctgggcccagaagtcgtggttggaggggagcgtacgaagatttttaagcgcacggcgcctagttttactaagaatactgatttaagtctcgaagacagtccaatgtgcgtggtgtgctcgcatcactcacagatttctcctatcctggaaaacccttttagtagcatcttcccaaaatgtttcttctccgggtcaacccccattaattcaaagaagcacattcaaagggattactacaacaccttgttgcagacaggagatccttttagccaaccaatcaagttcccaattaacgggctgtctgacgtgaagaatacttcagaggattcagagaattttccttccagctctaagaagtccgaagagtggcctgattggtcagaacccgaggagcctgaaaatcagactgttaatatccagatttggcctcgagaaccttgtgatgatgtgaaatctcaatgcactacactggacgtcgaggagtcgtcatgggacgattgcgagccaagttccctagacacaaaggttaatccaggaggcggtatcactgccacgaaaccggtgacgtccggcgagcaaaagcctatcccagccctcctaagtttgactgaagaatccatgccgtggaagtcgtccctgccccagaagatctctctggttcagaggggtgacgatgcagaccagatagaaccacccaaagtttccagccaggagcgccctttgaaagtcccgtcagaactgggcctgggtgaggagttcacaatccaggttaagaaaaagccagttaaggatcccgaaatggattggtttgcagacatgattcctgagattaaaccctccgccgcatttttgattttacctgagctcagaactgagatggtgcctaagaaggacgatgtgagtccagtgatgcaattttcttctaagtttgccgcagccgagataactgaaggcgaagccgagggatgggaggaggagggcgaattgaattgggaggacaacaactggtag

SEQ ID NO: 254590 - DNA, 2229 bp, Artificial Sequence
  derived and/or modified sequence
atggggagcgagaacagcgctctgaagagctatactttacgggaacccccttttaccctgccttctggactggccgtctaccccgctgtgcttcaggacggtaagttcgcctcggtctttgtttacaaaagagaaaacgaagacaaggtgaacaaagcagccaagcacctaaaaaccctgagacacccctgcttgctccgcttcctttcctgcactgttgaagcagatggtatacacctcgttactgagcgggtgcagcccctggaagtcgctctcgagacactctcaagtgcggaagtgtgtgcgggtatttacgatattctgcttgccctgatattcttgcacgaccgtggccacctgactcataataatgtgtgcctttcatctgtgtttgtttctgaggacgggcattggaagctcggcggaatggagacagtctgtaaggtgtctcaggccactcctgaatttcttaggtcaatccagtcaataagagatcccgctagcatcccgcctgaagaaatgagcccagagttcactacactccctgagtgccatggccacgccagagacgctttcagtttcggaactctggtagagagtctactgacaattctcaatgagcaggtgtccgcggatgtgctgtcttccttccaacagactctgcacagtaccctgctgaacccaatacccaagtgccggccagcactctgtaccctgctctcacacgatttcttcaggaatgactttctcgaggtcgtgaatttcttgaaatctctcacgctcaagtcagaagaggagaaaacggagtttttcaagtttctgctggatagagtcagttgcttgagcgaggagctgattgcgtcaaggcttgtgcctttgctgctgaatcagctagtttttgccgagcccgtggccgtcaaatcgttcctgccttatctgctgggaccaaaaaaagatcacgctcaaggcgaaaccccatgcctgctgtccccggctctttttcaaagcagagtgattcccgtcctactgcaactgtttgaggtacatgaggagcacgttcgaatggtgctgcttagtcatatagaggcctacgtagagcactttactcaggagcaactgaagaaagtgatcttgcctcaggtcctcctgggattaagggatacgtctgactcaattgtcgccatcactctgcacagcctggccgtgctggtgagcctgctgggacccgaggttgtggtgggtggggaacgcaccaaaattttcaaacgtaccgccccaagcttcacaaaaaacactgacctgtctctggaagacagccctatgtgtgtcgtgtgtagccaccattcgcagatctccccaattcttgagaaccctttttcatctattttccctaagtgttttttctccgggtctacccccataaactctaagaaacatatccagagggactactacaacactttacttcagaccggagacccgtttagccagccaattaagttccctatcaatggcctctcagatgtcaagaatacatcagaggatagcgagaattttcctagctcatccaagaagagtgaggaatggcctgactggtccgagcccgaagagcctgagaaccagacagtgaacatccagatatggcctcgtgaaccatgcgacgacgtgaaaagccagtgtaccactctggacgtcgaagaatcctcttgggatgactgcgaaccttcctcgctggatacaaaggtgaaccctggaggtggcattacagctactaagccggtgactagtggcgaacaaaagcccattccagccttgcttagtctcaccgaggaatccatgccctggaagtctagcctgccgcagaagatcagcctggtgcagaggggcgatgacgccgaccagatcgaaccaccaaaggtttcttcccaggaaagacctctgaaggtgccaagcgagctgggcctgggggaggagtttaccattcaggtgaagaagaagcctgtgaaagacccagagatggattggtttgccgacatgatacctgagattaagccttcagccgctttcttgatccttccagagttgcgtaccgaaatggtacccaagaaagatgatgtgtctcctgtgatgcaattctcttctaaattcgctgccgcagaaatcaccgaaggggaggccgaaggttgggaggaagagggtgagcttaattgggaagacaacaactggtag

SEQ ID NO: 254591 - DNA, 2916 bp, Artificial Sequence
  derived and/or modified sequence
ctgcttggctttgaggaagagtggcagtactgcctcactgcataagggatgggatcagagaacagtgctttaaagagctatacactgagagaaccaccatttaccttaccctctggacttgctgtttatcccgctgtactgcaagatggcaaatttgcttcagtttttgtgtataagagagaaaatgaagacaaggttaataaagctgccaagcatttgaagacacttcgtcacccttgcttgctaagatttttatcttgtactgtggaagcggatggcattcatcttgtcactgagcgagtacagcccctggaagtggctttggaaacattgtcttctgcagaggtctgtgctgggatctatgacatattgctggctcttatcttccttcatgacagaggacacctaacacacaataatgtctgtttatcatctgtgtttgtgagtgaagatggacactggaagctaggaggaatggaaactgtttgtaaagtttctcaggccacaccagagtttctgaggagtattcagtcaataagagacccagcatctatccctcctgaagagatgtctccagaattcacaactctcccagagtgtcatggacatgcccgggatgccttttcatttggaacattggtggaaagtttgctcacaatcttaaatgaacaggtttcagcggatgttctctccagctttcaacagaccttgcactcaactttgctgaatcccattccaaaatgtcggccagcgctctgcaccttactatctcatgacttcttcagaaatgattttctggaagttgtgaatttcttgaaaagtttaacattgaagagtgaagaggagaaaacggaattctttaaatttctgctggacagagtcagctgcttgtcagaggaattgatagcttcaaggttggtgcctcttctgcttaatcagttggtgtttgcagagccagtggctgttaagagttttcttccttatctgcttggccccaaaaaagatcatgcgcagggagaaactccttgcttgctctcaccagccctgttccagtcacgggtgatccccgtgcttctccagttgtttgaagttcatgaagagcatgtgcggatggtgctgctgtctcacatcgaggcctacgtggagcacttcactcaggagcagctgaagaaagtcatcttgccacaggttttgctgggcctgcgtgatactagcgattccattgtggcaattactctgcatagcctagcagtgctggtctctctgcttggaccagaggtggttgtgggaggagaacgaaccaagatcttcaaacgcactgccccaagttttactaaaaatactgacctttctctagaagattctcctatgtgtgtcgtctgcagccatcacagtcagatctcgccaatcttggagaaccccttctctagcatattccctaaatgtttcttttctggcagcacgcccatcaacagcaagaagcacatacagcgagattactacaatactcttttacagacaggcgatccattttctcagcctattaaatttcccataaatggactctcagatgtaaaaaatacttcggaggacagtgaaaacttcccatcaagttctaaaaagtctgaggagtggcctgactggagtgaacctgaggagcctgaaaatcaaactgtcaacatacagatttggcctagagaaccttgtgatgatgtcaagtcccagtgcactaccttggatgtggaagagtcatcttgggatgactgcgagcccagcagcttagatactaaagtaaacccaggaggtggaatcactgctacaaaacctgttacctcaggggagcagaagcctattcctgctttgctttcactcactgaagagtctatgccttggaaatcaagcttaccccaaaagattagccttgtacaaaggggggatgacgcagaccaaatcgagccgccaaaagtgtcatcacaagaaaggccccttaaggttccatcagaacttggtttaggagaggaattcaccattcaagtaaaaaagaagccagtaaaagatcctgagatggattggtttgctgatatgatcccagaaattaagccttctgctgcttttcttatattacctgaactgaggacagaaatggtcccaaaaaaggatgatgtctccccagtgatgcagttttcctcaaaatttgctgcagcagaaattactgagggagaggctgaaggctgggaagaagaaggggagctgaactgggaagataataactggtgacaatagatgtgagttaaactttaggaaaaaggattccctttttttaaaaaaaatcaatacctcaaaagcaggctttgggacaagaaaaccccaaagtggcctgcttttcccatcccaggagctcattatccagtctgtgccaactgaagtaggagactgactgtgagtgctggctaaaagccctgggtggtgaggctcacagtactggtttccaggaggaagagcctttgtgcatttgactgaggccagtttctatgaagagcaagtagctgaggagaggtcgaatttactgctttttccaggacaattctggaagtaaagaaaatgtaattcaagctggttagcttaattttgtgccattctttaacataagagtaagctctattatgaaatacaactttaaaaaattttagctataaattatataaatgattttaaattgctgaggtttccttaggcagcttatttatttgtttacagttagactatctgagtaaatggttctttgtggacctaggcagttcctgactgttccacatgtagtacattgtaccaaagttcttaataagaatattccccacaatcctgttctctaaatgtcaaataaagattattttcactagattcaactttacaaaa

SEQ ID NO: 254592 - DNA, 3477 bp, Artificial Sequence
  derived and/or modified sequence
atggtgtaggagaaacccggcccccagaagattgtgggtgtagtggccacagccttacaggcaggcaggggtggttggtgtcaacaggggggccaacagggtaccagagccaagaccctcggcctcctcccccgccgccttcctgcagatctgcttggctttgaggaagagtggcagtactgcctcactgcataagggatgggatcagagaacagtgctttaaagagctatacactgagagaaccaccatttaccttaccctctggacttgctgtttatcccgctgtactgcaagatggcaaatttgcttcagtttttgtgtataagagagaaaatgaagacaaggttaataaagctgccaagcatttgaagacacttcgtcacccttgcttgctaagatttttatcttgtactgtggaagcggatggcattcatcttgtcactgagcgagtacagcccctggaagtggctttggaaacattgtcttctgcagaggtctgtgctgggatctatgacatattgctggctcttatcttccttcatgacagaggacacctaacacacaataatgtctgtttatcatctgtgtttgtgagtgaagatggacactggaagctaggaggaatggaaactgtttgtaaagtttctcaggccacaccagagtttctgaggagtattcagtcaataagagacccagcatctatccctcctgaagagatgtctccagaattcacaactctcccagagtgtcatggacatgcccgggatgccttttcatttggaacattggtggaaagtttgctcacaatcttaaatgaacaggtttcagcggatgttctctccagctttcaacagaccttgcactcaactttgctgaatcccattccaaaatgtcggccagcgctctgcaccttactatctcatgacttcttcagaaatgattttctggaagttgtgaatttcttgaaaagtttaacattgaagagtgaagaggagaaaacggaattctttaaatttctgctggacagagtcagctgcttgtcagaggaattgatagcttcaaggttggtgcctcttctgcttaatcagttggtgtttgcagagccagtggctgttaagagttttcttccttatctgcttggccccaaaaaagatcatgcgcagggagaaactccttgcttgctctcaccagccctgttccagtcacgggtgatccccgtgcttctccagttgtttgaagttcatgaagagcatgtgcggatggtgctgctgtctcacatcgaggcctacgtggagcacttcactcaggagcagctgaagaaagtcatcttgccacaggttttgctgggcctgcgtgatactagcgattccattgtggcaattactctgcatagcctagcagtgctggtctctctgcttggaccagaggtggttgtgggaggagaacgaaccaagatcttcaaacgcactgccccaagttttactaaaaatactgacctttctctagaagattctcctatgtgtgtcgtctgcagccatcacagtcagatctcgccaatcttggagaaccccttctctagcatattccctaaatgtttcttttctggcagcacgcccatcaacagcaagaagcacatacagcgagattactacaatactcttttacagacaggcgatccattttctcagcctattaaatttcccataaatggactctcagatgtaaaaaatacttcggaggacagtgaaaacttcccatcaagttctaaaaagtctgaggagtggcctgactggagtgaacctgaggagcctgaaaatcaaactgtcaacatacagatttggcctagagaaccttgtgatgatgtcaagtcccagtgcactaccttggatgtggaagagtcatcttgggatgactgcgagcccagcagcttagatactaaagtaaacccaggaggtggaatcactgctacaaaacctgttacctcaggggagcagaagcctattcctgctttgctttcactcactgaagagtctatgccttggaaatcaagcttaccccaaaagattagccttgtacaaaggggggatgacgcagaccaaatcgagccgccaaaagtgtcatcacaagaaaggccccttaaggttccatcagaacttggtttaggagaggaattcaccattcaagtaaaaaagaagccagtaaaagatcctgagatggattggtttgctgatatgatcccagaaattaagccttctgctgcttttcttatattacctgaactgaggacagaaatggtcccaaaaaaggatgatgtctccccagtgatgcagttttcctcaaaatttgctgcagcagaaattactgagggagaggctgaaggctgggaagaagaaggggagctgaactgggaagataataactggtgacaatagatgtgagttaaactttaggaaaaaggattccctttttttaaaaaaaatcaatacctcaaaagcaggctttgggacaagaaaaccccaaagtggcctgcttttcccatcccaggagctcattatccagtctgtgccaactgaagtaggagactgactgtgagtgctggctaaaagccctgggtggtgaggctcacagtactggtttccaggaggaagagcctttgtgcatttgactgaggccagtttctatgaagagcaagtagctgaggagaggtcgaatttactgctttttccaggacaattctggaagtaaagaaaatgtaattcaagctggttagcttaattttgtgccattctttaacataagagtaagctctattatgaaatacaactttaaaaaattttagctataaattatataaatgattttaaattgctgaggtttccttaggcagcttatttatttgtttacagttagactatctgagtaaatggttctttgtggacctaggcagttcctgactgttccacatgtagtacattgtaccaaagttcttaataagaatattccccacaatcctgttctctaaatgtcaaataaagattattttcactagattcaactttacaaaatttgttttatatctgttagaaaatgtacagacataagtattttcagttgacaaagcatcaaacccagttctgcctagtgataagtttcaccctagagtatgtatgtaacgttttagcttatccatcctttcttggagcgcctccatttccattgaaagccaggctggagcaggacccttttggagtagtgactcagttgcttccaaagcccctgctattgtatgcagcgctgacctgtactcttcttcccaggggaactcctgacgagctctttttgcataaggctggaaaaaaaacataagtaatatcacaatatccattctaaatataaagaaccttccttttggactggagtaaagcttacatgcaaattttattctagtcattggatcacaagggtaggaggatgca

SEQ ID NO: 254593 - protein, 1283 aa, Artificial Sequence
  derived and/or modified sequence
MSQVRQVGLLAAGCQPWNKDVCAASGDRFAYCATLAIYIYQLDHRYNEFKLHAIMSEHKKTITAISWCPHNPDLFASGSTDNLVIIWNVAEQKVIAKLDSTKGIPASLSWCWNAEDVVAFVSHRGPLFIWTISGPDSGVIVHKDAHSFLSDICMFRWHTHQKGKVVFGHIDGSLSIFHPGNKNQKHVLRPESLEGTDEEDPVTALEWDPLSTDYLLVVNLHYGIRLVDSESLSCITTFNLPSAAASVQCLAWVPSAPGMFITGDSQVGVLRIWNVSRTTPIDNLKLKKTGFHCLHVLNSPPRKKFSVQSPTKNHYTSSTSEAVPPPTLTQNQAFSLPPGHAVCCFLDGGVGLYDMGAKKWDFLRDLGHVETIFDCKFKPDDPNLLATASFDGTIKVWDINTLTAVYTSPGNEGVIYSLSWAPGGLNCIAGGTSRNGAFIWNVQKGKIIQRFNEHGTNGIFCIAWSHKDSKRIATCSSDGFCIIRTIDGKVLHKYKHPAAVFGCDWSQNNKDMIATGCEDTNVRVYYVATSSDQPLKVFSGHTAKVFHVKWSPLREGILCSGSDDGTVRIWDYTQDACINILNGHTAPVRGLMWNTEIPYLLISGSWDYTIKVWDTREGTCVDTVYDHGADVYGLTCHPSRPFTMASCSRDSTVRLWSLTALVTPVQINILADRSWEEIIGNTDYAIEPGTPPLLCGKVSRDIRQEIEKLTANSQVKKLRWFSECLSPPGGSDNLWNLVAVIKGQDDSLLPQNYCKGIMHLKHLIKFRTSEAQELTTVKMSKFGGGIGVPAKEERLKEAAEIHLRLGQIQRYCELMVELGEWDKALSIAPGVSVKYWKKLMQRRADQLIQEDKDDVIPYCIAIGDVKKLVHFFMSRGQLKEALLVAQAACEGNMQPLHVSVPKGASYSDDIYKEDFNELLHKVSKELAEWYFQDGRAVLAACCHLAIDNIELAMAYLIRGNELELAVCVGTVLGESAAPATHYALELLARKCMMISVWNLAADLLLMIPDNELHLIKLCAFYPGCTEEINDLHDKCKLPTVEECMQLAETARADDNIFETVKYYLLSQEPEKALPIGISFVKEYISSSDWTLDTIYPVLDLLSYIRTEKLLLHTCTEARNELLILCGYIGALLAIRRQYQSIVPALYEYTSQLLKRREVSVPLKIEYLSEELDAWRACTQSTNRSLEDSPYTPPSDSQRMIYATLLKRLKEESLKGIIGPDYVTGSNLPSHSDIHISCLTGLKIQGPVFFLEDGKSAISLNDALMWAKVNPFSPLGTGIRLNPF

SEQ ID NO: 254594 - protein, 581 aa, Artificial Sequence
  derived and/or modified sequence
MATEGGGKEMNEIKTQFTTREGLYKLLPHSEYSRPNRVPFNSQGSNPVRVSFVNLNDQSGNGDRLCFNVGRELYFYIYKGVRKAADLSKPIDKRIYKGTQPTCHDFNHLTATAESVSLLVGFSAGQVQLIDPIKKETSKLFNEERLIDKSRVTCVKWVPGSESLFLVAHSSGNMYLYNVEHTCGTTAPHYQLLKQGESFAVHTCKSKSTRNPLLKWTVGEGALNEFAFSPDGKFLACVSQDGFLRVFNFDSVELHGTMKSYFGGLLCVCWSPDGKYIVTGGEDDLVTVWSFVDCRVIARGHGHKSWVSVVAFDPYTTSVEEGDPMEFSGSDEDFQDLLHFGRDRANSTQSRLSKRNSTDSRPVSVTYRFGSVGQDTQLCLWDLTEDILFPHQPLSRARTHTNVMNATSPPAGSNGNSVTTPGNSVPPPLPRSNSLPHSAVSNAGSKSSVMDGAIASGVSKFATLSLHDRKERHHEKDHKRNHSMGHISSKSSDKLNLVTKTKTDPAKTLGTPLCPRMEDVPLLEPLICKKIAHERLTVLIFLEDCIVTACQEGFICTWGRPGKVGSLSSPSQASSPGGTVV

SEQ ID NO: 254595 - DNA, 1746 bp, Artificial Sequence
  derived and/or modified sequence
atggccaccgagggcggcggcaaggagatgaacgagatcaagacccagttcaccaccagagagggcctgtacaagctgctgccccacagcgagtacagcagacccaacagagtgcccttcaacagccagggcagcaaccccgtgagagtgagcttcgtgaacctgaacgaccagagcggcaacggcgacagactgtgcttcaacgtgggcagagagctgtacttctacatctacaagggcgtgagaaaggccgccgacctgagcaagcccatcgacaagagaatctacaagggcacccagcccacctgccacgacttcaaccacctgaccgccaccgccgagagcgtgagcctgctggtgggcttcagcgccggccaggtgcagctgatcgaccccatcaagaaggagaccagcaagctgttcaacgaggagagactgatcgacaagagcagagtgacctgcgtgaagtgggtgcccggcagcgagagcctgttcctggtggcccacagcagcggcaacatgtacctgtacaacgtggagcacacctgcggcaccaccgccccccactaccagctgctgaagcagggcgagagcttcgccgtgcacacctgcaagagcaagagcaccagaaaccccctgctgaagtggaccgtgggcgagggcgccctgaacgagttcgccttcagccccgacggcaagttcctggcctgcgtgagccaggacggcttcctgagagtgttcaacttcgacagcgtggagctgcacggcaccatgaagagctacttcggcggcctgctgtgcgtgtgctggagccccgacggcaagtacatcgtgaccggcggcgaggacgacctggtgaccgtgtggagcttcgtggactgcagagtgatcgccagaggccacggccacaagagctgggtgagcgtggtggccttcgacccctacaccaccagcgtggaggagggcgaccccatggagttcagcggcagcgacgaggacttccaggacctgctgcacttcggcagagacagagccaacagcacccagagcagactgagcaagagaaacagcaccgacagcagacccgtgagcgtgacctacagattcggcagcgtgggccaggacacccagctgtgcctgtgggacctgaccgaggacatcctgttcccccaccagcccctgagcagagccagaacccacaccaacgtgatgaacgccaccagcccccccgccggcagcaacggcaacagcgtgaccacccccggcaacagcgtgcccccccccctgcccagaagcaacagcctgccccacagcgccgtgagcaacgccggcagcaagagcagcgtgatggacggcgccatcgccagcggcgtgagcaagttcgccaccctgagcctgcacgacagaaaggagagacaccacgagaaggaccacaagagaaaccacagcatgggccacatcagcagcaagagcagcgacaagctgaacctggtgaccaagaccaagaccgaccccgccaagaccctgggcacccccctgtgccccagaatggaggacgtgcccctgctggagcccctgatctgcaagaagatcgcccacgagagactgaccgtgctgatcttcctggaggactgcatcgtgaccgcctgccaggagggcttcatctgcacctggggcagacccggcaaggtgggcagcctgagcagccccagccaggccagcagccccggcggcaccgtggtgtag

SEQ ID NO: 254596 - DNA, 1746 bp, Artificial Sequence
  derived and/or modified sequence
atggctacggaggggggcggcaaggagatgaacgagattaagacccagttcaccaccagggaaggcctttataaactcctaccccacagcgagtacagcaggccaaacagggttcccttcaattctcagggtagtaaccccgtgcgtgtgtccttcgtcaatctgaatgaccagtcgggaaatggtgaccgcctgtgtttcaatgtcgggagggagctgtatttctacatttataagggagtaaggaaagccgcagatctgtccaagccaattgataaacgcatctacaagggaacccagcccacctgccatgattttaatcatctgactgctacagcagaatctgtaagtctcctggtgggcttctccgccggacaggtgcagctcatagaccctatcaagaaggaaaccagcaaattattcaatgaagagaggcttatagataagtcacgagtgacgtgcgtgaagtgggttccagggagtgagtccttatttctggtagcgcatagtagcggcaacatgtacctgtataatgtagagcacacctgtggtactacagcccctcactatcagctgctgaagcagggcgagtctttcgccgtgcacacatgtaagtcgaagtctactcggaatcctcttctaaaatggacggtaggggagggggctctaaatgagttcgctttcagccccgacggcaaatttctcgcttgcgtcagccaggacggctttctcagagtgttcaacttcgacagtgtcgagctgcacgggactatgaaatcatactttggtgggctgctgtgcgtttgctggtcgcccgacggcaagtatatcgttactggaggggaggacgatttagtaacagtgtggagttttgtcgattgcagagttatagcgcgaggacacggacataaatcttgggtttcggtagtcgctttcgacccttatacgacctctgttgaagagggcgaccccatggagtttagcgggtcggacgaagactttcaagatctcttgcactttgggcgcgaccgcgccaattccacacaatccaggttatctaagaggaacagtaccgattccagacctgtatccgtgacctataggtttggcagtgtggggcaggatacgcagctctgcctctgggatctgaccgaggacatcctgttcccacaccagcccctcagtcgcgctcgaacccatacaaatgtcatgaacgccacctctccccccgcaggctcaaatgggaacagcgtgacaacccccggcaatagcgtgcctccacctcttcccaggagtaatagtctcccccactctgcagtctctaacgccggttctaaatccagtgttatggacggcgctatagccagcggtgttagcaaatttgctacactgtctttgcacgatcgcaaagaacgccatcacgaaaaagatcacaagagaaatcactccatgggacacatctctagcaagtcttctgacaaattgaatctcgtcactaagacaaagacagaccccgccaagaccctgggcacacctctgtgcccaagaatggaagacgtgccactgctagaacccttgatatgcaagaaaattgcgcacgagcggcttactgtgctgatttttttggaggactgcattgtgactgcctgccaggagggctttatctgtacttggggcagaccaggtaaggtgggctctctcagctctcccagccaagcctcctcacccggaggcacagtagtctag

SEQ ID NO: 254597 - DNA, 1746 bp, Artificial Sequence
  derived and/or modified sequence
atggccacagaaggaggcggcaaggagatgaatgagatcaagacccagttcaccacccgggagggcctgtacaagctgctgccccacagcgagtacagccggcccaacagagtgcccttcaacagccagggcagcaaccctgtgcgggtgtcctttgtgaacctgaatgaccagagcggaaatggagaccggctgtgcttcaacgtgggccgggagctgtacttctacatctacaagggcgtgaggaaggctgctgacctgagcaagcccatcgacaagaggatctacaagggcacccagcccacctgccacgacttcaaccacctgacagccacagctgagagcgtgtccctgctggtgggcttctctgctggccaggtgcagctgattgaccccatcaagaaggagaccagcaagctgttcaatgaggagcggctgattgacaagagccgggtgacctgtgtgaagtgggtgcccggcagcgagagcctcttcctggtggcccacagcagcggcaacatgtacctgtacaacgtggagcacacctgtggcaccacagccccccactaccagctgctgaagcagggcgagagctttgctgtgcacacctgcaagagcaagagcaccaggaaccccctgctgaagtggacagtgggggagggcgccctgaatgaatttgccttctccccagatggcaagttcctggcctgtgtgtcccaggacggcttcctgcgggtcttcaactttgattctgtggagctgcacggcaccatgaagagctactttggaggcctgctgtgtgtgtgctggagcccagatggcaagtacatcgtgactggaggagaagatgacctggtgacagtgtggagctttgtggactgccgggtgattgcccggggccacggccacaagtcctgggtgtctgtggtggcctttgacccctacaccacctctgtggaggagggggaccccatggagttcagcggcagtgatgaggacttccaggacctgctgcacttcggccgggaccgggccaacagcacccagagccggctgagcaagaggaacagcacagacagcaggcctgtgtctgtgacctacagatttggatctgtgggccaggacacccagctgtgcctgtgggacctgacagaggacatcctcttcccccaccagcccctgagccgggcccggacccacaccaacgtgatgaatgccaccagccccccagctggcagcaatggaaattctgtgaccaccccaggcaacagcgtgcccccacccctgcccaggagcaacagcctgccccacagcgctgtgtccaatgccggcagcaagagctctgtgatggatggagccatcgccagcggcgtgtccaagtttgccaccctgagcctgcatgacaggaaggagcggcaccacgagaaggaccacaagaggaaccacagcatgggccacatcagcagcaagagcagtgacaagctgaacctggtgaccaagaccaagacagatcctgccaagaccctgggcacccccctgtgccccaggatggaggatgtgcccctgctggagcccctcatctgcaagaagatcgcccacgagcggctgactgtgctgatcttcctggaggactgcatcgtgacagcctgccaggagggcttcatctgcacctggggccggcctgggaaggtgggcagcctgagcagccccagccaggccagcagccctgggggcaccgtggtgtag

SEQ ID NO: 254598 - DNA, 1746 bp, Artificial Sequence
  derived and/or modified sequence
atggccaccgagggcggcggcaaggagatgaacgagatcaagacccagttcaccactagagagggtctctataagctgctgccacactccgaatatagtcgtcctaatagggtgcctttcaattctcaggggtcaaatcccgtgcgggtctcttttgtgaacctcaatgaccagtctggaaacggagataggctttgctttaatgtggggagggagctctatttctatatatacaaaggagttaggaaagcagccgatttgagcaaaccaatcgataagcgaatttacaaaggtacccagcctacatgccacgacttcaaccatcttacggcgacagccgagtctgtttccctcctggtcggcttttccgccgggcaggttcagctgattgaccccataaagaaggagaccagcaaactgttcaatgaagagcgtctcattgataagtcccgcgtgacctgcgttaagtgggtgcccggcagcgagtccctgttccttgtggctcactcatccggaaacatgtatctttacaatgttgaacacacttgtgggaccacagctccacactaccagttgctgaagcagggcgagtctttcgctgtccacacatgcaagagcaagtccacccggaatccactgctgaagtggaccgtgggcgagggggctctgaacgagtttgccttttccccagacggaaagtttctggcatgtgtctctcaggacgggtttctgagagtgttcaattttgactccgtggagttgcacggcaccatgaagtcttatttcggaggcctgctgtgcgtgtgttggagtccggacggcaagtatatcgtgaccgggggcgaagacgacctcgttaccgtgtggtcctttgttgactgcagggtgattgcccgaggacatggccacaagtcttgggttagcgttgtggctttcgacccctataccaccagcgtggaagaaggggaccccatggagttctcgggttcagacgaggacttccaggatttgctgcacttcgggcgagacagagccaactctacccaaagtagactgtctaagcgtaattctactgactcccgacctgttagtgtgacctaccggttcgggagcgtggggcaggacacacaactgtgcctctgggatcttacggaggatatcctgttcccccaccagccactgagccgggctcgaacccacaccaacgtgatgaacgcgacaagcccaccagccgggtctaacggaaattccgtgacgactccgggaaactcagtcccaccacccctgccccgatccaactcgctgccacacagcgctgtctccaacgccggatcaaaaagttccgtgatggacggggcgatcgcatcaggcgtaagcaaatttgctacactgagcctgcatgatcgcaaggaacgacatcacgagaaagaccataaacgaaaccactctatgggtcatatctctagcaagtcttctgacaagctgaaccttgtgacgaagacgaaaacagacccagcgaaaactttgggaactcctctgtgtccaagaatggaggatgtgcccctgctcgaaccactcatctgtaagaagatagcgcacgagcggttgactgtgctcatcttcctcgaggactgtatagttactgcttgtcaggagggtttcatttgtacctgggggcgcccaggaaaggtgggatctcttagttccccgtcccaggcatcgtcccctggtggtactgtggtctag

SEQ ID NO: 254599 - DNA, 1746 bp, Artificial Sequence
  derived and/or modified sequence
atggcaaccgaaggcggagggaaggagatgaacgagatcaagactcagttcactacaagggaaggcctctacaaactgttgccgcactcagagtacagtcgcccaaacagggtaccttttaacagtcaaggaagcaatccagtacgcgtcagcttcgttaatctgaacgatcagtcgggtaacggtgaccggctttgcttcaacgtgggacgagaattatacttctacatttacaagggcgtccggaaggcagcagacctttcaaaacccattgataagcggatttataaaggcacgcagcctacatgccatgacttcaatcacctgacagctaccgctgagagtgtgtctctcctggtgggattttctgctggtcaggtacagctgattgatccaattaagaaagagacatctaagctatttaacgaggaaagactgattgataaaagcagagtcacatgtgtgaaatgggtacccggtagcgaaagcctgttcctggttgcccattcatctgggaatatgtacctttataatgtggagcacacttgtggcacaaccgccccacattatcagctcctaaaacagggtgagagcttcgcggtgcatacatgtaagtcaaaaagcacacgcaatccactccttaaatggactgtgggggagggtgcgttaaacgagttcgcatttagcccggacggcaaatttctggcttgcgtttctcaggacggtttcttacgcgttttcaactttgattccgttgagctgcatgggactatgaaatcctatttcgggggacttctgtgcgtttgctggtctcctgatggaaaatatatcgtgaccgggggtgaggacgatctcgtaacagtgtggtcttttgttgattgcagagtaattgcaagagggcatggccataagagctgggtcagtgtggtggcatttgatccttacacgacatcagtcgaggagggagatcccatggaattcagcggaagtgatgaggattttcaggatctgcttcattttgggagggacagagccaattctactcaaagccgattgtccaagcgcaattccacagactcccgacccgtgagcgtcacgtaccgattcggttcagtcgggcaggacactcaactgtgcctctgggacctgaccgaggacatcctctttcctcatcagcccctgagcagagcgcgtacgcacaccaacgtgatgaatgcaaccagtccccctgccggaagtaatgggaactccgtgactacccctggaaactccgtcccacctccactacctagatctaatagcctgccccacagtgcagtgagcaatgctggttcaaaatcatcagtaatggatggagccattgcatctggggtgtcaaaatttgcgactctgagcctgcacgaccgcaaagaaagacatcacgagaaggaccataaaagaaatcactctatgggacacattagctccaagtctagtgataaactgaacctagtgaccaagactaagaccgatccagctaagactctggggactcctctgtgcccaaggatggaggacgttcccctcttagagccactcatctgcaaaaaaatcgcacatgagaggttaactgtgctgatattccttgaagattgtatagtgactgcctgtcaagagggcttcatctgcacctggggacgcccaggcaaagtgggatcgctctcgtctccatcccaagcgtcttcgcccggaggcaccgtggtttag

SEQ ID NO: 254600 - DNA, 2616 bp, Artificial Sequence
  derived and/or modified sequence
gaagagggagcaccaggaacagcgcctgcgcggtgggcgtgatccgggcacttagggcaggatgaacgctgctttccaagatggcgacggagggaggagggaaggagatgaacgagattaagacccaattcaccacccgggaaggtctgtacaagctgctgccgcactcggagtacagccggcccaaccgggtgcccttcaactcgcagggatccaaccctgtccgcgtctccttcgtaaacctcaacgaccagtctggcaacggcgaccgcctctgcttcaatgtgggccgggagctgtacttctatatctacaagggggtccgcaaggctgctgacttgagtaaaccaatagataaaaggatatacaaaggaacacagcctacttgtcatgacttcaaccacctaacagccacagcagaaagtgtctctctcctagtgggcttttccgcaggccaagtccagcttatagacccaatcaaaaaagaaactagcaaactttttaatgaggaaagactaatagacaagtcacgagttacctgtgtcaaatgggttcccggttcggaaagccttttcctagtagcccactcgagtgggaacatgtacttatataatgtggagcacacttgtggcaccacagccccccactaccagcttctgaagcagggagagagctttgccgtgcacacttgcaagagcaaatccacgaggaaccctctccttaagtggacggtgggcgagggggccctcaacgagtttgctttctccccagatggcaagttcttagcgtgcgtgagccaggacgggtttctgcgggtgttcaactttgactcagtggagctgcacggtacgatgaaaagctactttgggggcttgctgtgtgtgtgctggagcccggatggcaagtacatcgtgacaggtggggaggacgacttggtgacagtctggtcctttgtagactgccgagtaatagccagaggccacgggcacaagtcctgggtcagtgttgtagcgtttgacccttataccactagtgtagaagaaggtgaccctatggagtttagtggcagcgatgaggacttccaagaccttcttcattttggcagagatcgagcaaatagtacacagtccaggctctccaaacggaactctacagacagccgccccgtaagtgtcacgtatcggtttggttccgtgggccaggacacacagctctgtttatgggaccttacagaagatatccttttccctcaccaacccctctcaagagcaaggacacacacaaatgtcatgaatgccacgagtcctcctgctggaagcaatgggaacagtgttacaacacccgggaactctgtgccgcctcctctgccacggtccaacagccttccacattcagcagtctcaaatgctggcagcaaaagcagtgtcatggacggggccattgcttctggggtcagcaaatttgcaacactttcactacatgaccggaaggagaggcaccacgagaaagatcacaagcgaaatcatagcatgggacacatttctagcaagagcagtgacaaactgaatctagttaccaaaaccaaaacggaccctgctaaaactctgggaacgcccctgtgtcctcgaatggaagatgttcccttgttagagccgctgatatgtaaaaagatagcacatgagagactgactgtactaatatttcttgaagactgtatagtcactgcttgtcaggagggatttatttgcacatggggaaggcctggtaaagtgggctcattgtcatccccaagccaggccagttctccaggtggaactgtagtgtagcgacctcactgctgcgcgcacagtctcccgggacttggactcgagggagtgacgaggaggagctccgagctgcgcctgagccgtgccagccggcggacctcaggcggtggacgtcggcgatagccgtgtggacggtgaccggctcactctgcggcgccgtgctcccgctgctcacccaaagaagttgtttccattttaaaccggtcttttggggctgcagtaaaaaataagaaatggagttttcttgctttttactctaaaattcaatgtaattaaatttcatatatatataatatatacatatatacatagtgtaaaataaaatgtttcttggacaagaaatcccctgaaattcagctgttatagtgcttcactgtttttgcactgatttttctataccttaggtggtcagaagacaaccttgaatgcactcatagagaaaactgttactttctgacgtaatgtaattcaggaagacagacgctgcaatcacagattttaaaaaattgtttgcacttaaaaatagttgaatgctggtggaaagttactttgcagatgggtgtaaggactcatggccctctgaggtgcggcgtgaagatgccctttttacccgttgacgtttattttacgtaaaataaactgttgtttccaatgcaatcaactctgtattatatgtataaatattgtaattctgcaattggggaaaatagttacttcactagtaattttcatcatttaagagtgatatttctaattcacaaaagttaatattaaaactatcttgaatata

SEQ ID NO: 254601 - protein, 848 aa, Artificial Sequence
  derived and/or modified sequence
MWLRLGPPSLSLSPKPTVGRSLCLTLWFLSLALRASTQAPAPTVNTHFGKLRGARVPLPSEILGPVDQYLGVPYAAPPIGEKRFLPPEPPPSWSGIRNATHFPPVCPQNIHTAVPEVMLPVWFTANLDIVATYIQEPNEDCLYLNVYVPTEDVKRISKECARKPNKKICRKGGSGAKKQGEDLADNDGDEDEDIRDSGAKPVMVYIHGGSYMEGTGNMIDGSILASYGNVIVITLNYRVGVLGFLSTGDQAAKGNYGLLDQIQALRWVSENIAFFGGDPRRITVFGSGIGASCVSLLTLSHHSEGLFQRAIIQSGSALSSWAVNYQPVKYTSLLADKVGCNVLDTVDMVDCLRQKSAKELVEQDIQPARYHVAFGPVIDGDVIPDDPEILMEQGEFLNYDIMLGVNQGEGLKFVEGVVDPEDGVSGTDFDYSVSNFVDNLYGYPEGKDTLRETIKFMYTDWADRDNPETRRKTLVALFTDHQWVEPSVVTADLHARYGSPTYFYAFYHHCQSLMKPAWSDAAHGDEVPYVFGVPMVGPTDLFPCNFSKNDVMLSAVVMTYWTNFAKTGDPNKPVPQDTKFIHTKANRFEEVAWSKYNPRDQLYLHIGLKPRVRDHYRATKVAFWKHLVPHLYNLHDMFHYTSTTTKVPPPDTTHSSHITRRPNGKTWSTKRPAISPAYSNENAQGSWNGDQDAGPLLVENPRDYSTELSVTIAVGASLLFLNVLAFAALYYRKDKRRQEPLRQPSPQRGAGAPELGAAPEEELAALQLGPTHHECEAGPPHDTLRLTALPDYTLTLRRSPDDIPLMTPNTITMIPNSLVGLQTLHPYNTFAAGFNSTGLPHSHSTTRV

SEQ ID NO: 254602 - DNA, 2547 bp, Artificial Sequence
  derived and/or modified sequence
atgtggcttcgcctcggcccaccctcactgagcctgagccctaagcctacggtggggagatctctgtgcctgactttatggttcctcagcttagccctgcgtgctagtacacaagctcccgctccaacagtgaatacacattttggaaaactgcgcggtgcaagagtgcccctcccctcagaaatcctcggccccgtggaccagtatctcggggtgccttacgccgcccctcctattggggaaaaaaggttcctgccacctgaaccacccccctcctggtccggtatccggaacgcgacacattttccaccggtgtgtcctcagaatatacacaccgcggtgcccgaggtcatgctccccgtctggttcacggccaacctcgatatcgtggcgacttacatacaggagcccaatgaagactgcctctatctcaatgtgtatgtacctaccgaggacgtgaagcggattagtaaagagtgcgccagaaaacctaacaaaaaaatttgtaggaagggaggtagcggcgccaagaagcaaggggaagacctggctgacaacgacggagacgaagatgaggatatacgagacagcggcgcaaaaccagtcatggtctacatccacggcgggagctacatggagggaaccggcaacatgatcgatgggtctattttagcaagctacggaaatgtgatcgtcatcaccctgaactacagagtcggggttctgggtttcctgagcacaggcgaccaagccgcaaagggcaattacggcctcctcgatcagatccaggcactcagatgggtgtccgagaatatcgcattctttggaggcgatccacgaaggattaccgtttttggcagtggaattggcgcttcttgtgtaagcctgctgaccctgtcccatcattccgagggattatttcagcgtgctattatccagagcggcagcgccttaagctcctgggccgttaactaccaaccagtgaagtatacaagtctgttggcggacaaggtgggatgtaacgttctagacacagttgatatggtggactgcctgcgccagaagagcgcgaaggaactggtggaacaagatattcagccagctaggtatcacgtcgcttttggtccggtaatcgacggcgacgtaattccagacgacccagaaatcctgatggagcagggggagttcctgaattacgacattatgctgggagttaatcagggagagggcctgaagtttgttgaaggcgtggttgaccccgaggatggagtgtctggaacagacttcgactatagcgtgtccaactttgtggacaatttatacggttatcctgaagggaaagacacactccgcgaaactataaaattcatgtataccgactgggcagatagagataatcccgagactaggagaaaaaccctcgtggctctttttactgatcaccagtgggttgagccatccgtggtcactgctgacctacacgcaagatacgggtcccccacctatttctacgccttctatcatcactgccagtccctgatgaaacccgcctggtctgatgctgctcatggggacgaagtgccctacgtgtttggggttcctatggtcgggcctaccgacttgttcccttgcaacttctctaagaacgatgtgatgctcagcgccgttgttatgacctactggacaaattttgctaaaacgggggacccaaacaagcctgtaccccaggacaccaagttcatacacactaaggctaaccggttcgaggaagtggcctggagcaaatacaatcctcgcgaccagttatatctccacatcggactgaagccgagagtgcgcgaccactaccgggccaccaaagtcgctttttggaagcatctggtgccccacctgtataacctacacgacatgtttcactacacctcgactactaccaaggttcccccacccgataccacccattcttcacatatcactagacgccctaatggcaagacctggtcaacaaagagacccgctatctccccagcctactcaaacgagaacgctcaaggatcatggaacggcgaccaggatgctggacccctgctggtagagaaccctagggattattccactgaactgtctgtcaccattgccgtgggcgccagtttacttttcttaaatgttctggcctttgccgccttatactaccgcaaagacaaacgcaggcaagagccactgagacagcccagtccacaacgtggtgctggtgcacccgaattaggcgcagctcctgaagaagaacttgcagcactgcagctcggaccaacacaccacgagtgtgaagctggacccccacatgataccctgcgccttaccgctctgcccgactacacactgacgctacgccggtctccagatgatatcccacttatgactcccaacacaattacaatgatcccaaactccctagtgggtctgcaaactctgcatccatataacaccttcgcggcaggattcaattctaccggattaccccatagccactctactaccagagtgtag

SEQ ID NO: 254603 - DNA, 2547 bp, Artificial Sequence
  derived and/or modified sequence
atgtggctgcggctgggcccccccagcctgagcctgagccccaagcccaccgtgggccgcagcctgtgcctgaccctgtggttcctgagcctggccctgcgggccagcacccaggccccagcccccaccgtgaacacccactttgggaagctgcggggggcccgggtgcccctgcccagcgagatcctgggccctgtggaccagtacctgggcgtgccctatgctgccccacccatcggggagaagcgcttcctgcccccagagcccccacccagctggagcggcatcagaaatgccacccacttcccccctgtgtgcccccagaacatccacacagctgtgcctgaggtgatgctgcctgtgtggttcaccgccaacctggacatcgtggccacctacatccaggagcccaatgaagactgcctgtacctgaatgtgtatgtgcccacagaagatgtgaagaggatcagcaaagaatgtgccaggaagcccaacaagaagatctgcaggaaaggaggcagcggggccaagaagcagggcgaggacctggccgacaatgatggagatgaagatgaggacatccgggacagcggggccaagcctgtgatggtgtacatccatggaggcagctacatggagggcactggaaacatgattgatggcagcatcctggccagctatggaaatgtgattgtcatcaccctgaactacagagtgggcgtgctgggcttcctgagcactggagaccaggccgccaagggcaactacggcctgctggaccagatccaggccctgcgctgggtgtctgagaacatcgccttctttggaggagacccccggcgcatcaccgtgtttggaagtggcattggagccagctgtgtgtccctgctgaccctgagccaccacagcgagggcctcttccagagggccatcatccagagcggcagcgccctgagctcctgggccgtgaactaccagcctgtgaagtacaccagcctgctggccgacaaggtgggctgcaatgtgctggacacagtggacatggtggactgcctgcggcagaagagcgccaaggagctggtggagcaggacatccagcctgcccgctaccacgtggccttcggccctgtgattgatggagatgtgatcccagatgatcctgagatcctgatggagcagggcgagttcctgaactatgacatcatgctgggcgtgaaccagggcgagggcctgaagtttgtggagggcgtggtggaccctgaagatggagtgtctggaacagactttgactacagcgtgagcaactttgtggacaacctgtatggctacccagagggcaaggacaccctgcgggagaccatcaagttcatgtacacagactgggccgaccgggacaaccctgagaccaggaggaagaccctggtggccctcttcacagaccaccagtgggtggagcccagcgtggtgacagctgacctgcacgcccgctatggcagccccacctacttctacgccttctaccaccactgccagagcctgatgaagccagcctggagcgatgctgcccatggagatgaggtgccctacgtgtttggagtgcccatggtgggccccacagacctcttcccctgcaacttcagcaagaatgatgtgatgctgtctgctgtggtgatgacctactggaccaactttgccaagacaggagaccccaacaagcctgtgccccaggacaccaagttcatccacaccaaggccaacagatttgaggaggtggcctggagcaagtacaacccccgggaccagctgtacctgcacatcggcctgaagccccgggtgcgggaccactaccgggccaccaaggtggccttctggaagcacctggtgccccacctgtacaacctgcatgacatgttccactacaccagcaccaccaccaaggtgcccccaccagacaccacccacagcagccacatcacccggcggcccaacgggaagacctggagcaccaagaggcctgccatcagccctgcctacagcaatgaaaatgcccagggctcctggaatggagaccaggatgctggccccctgctggtggagaacccccgggactacagcacagagctgtctgtgaccatcgctgtgggcgccagcctgctcttcctgaatgtgctggcctttgctgccctgtactacaggaaggacaagaggcggcaggagcccctgcggcagcccagcccccagagaggagctggggcccctgagctgggcgccgcccctgaggaggagctggccgccctgcagctgggccccacccaccatgaatgtgaggccggcccccctcatgacaccctgcggctgacagccctgcctgactacaccctgaccctgcggcgcagcccagatgacatccccctgatgacccccaacaccatcaccatgatccccaacagcctggtgggcctgcagaccctgcacccctacaacacctttgctgctggcttcaacagcacaggcctgccccacagccacagcaccaccagggtgtag

SEQ ID NO: 254604 - DNA, 2547 bp, Artificial Sequence
  derived and/or modified sequence
atgtggctgcggctgggcccccccagcctgagcctgagccccaagccgacagtcggccggagtttgtgcctgaccttgtggtttctgagcctagccctgcgtgcctcaacccaagcaccagcgccaacagtcaacacacactttgggaagttgcggggcgcccgggttcctttaccaagcgagattctaggccctgtggatcaatacctgggcgtcccctatgccgcgccccccattggggagaaacgcttcctcccgccagagcctcccccttcatggagcggcatccgcaacgccacccacttcccccccgtttgcccccagaacatccacactgcagtgcccgaggttatgcttccggtgtggtttaccgctaacctggatatcgtcgccacatatatccaggaaccaaacgaggattgtctgtatctaaacgtgtacgtgccaacagaggatgtgaaacgtatctctaaggagtgcgcccgcaagcccaataaaaaaatttgcaggaaaggcggatcaggggccaaaaaacaaggtgaggatctcgcagataacgatggcgacgaggacgaggatattcgagacagcggcgccaagccagtcatggtgtacatccatggtggaagctatatggagggaactgggaacatgatcgacgggtcaatcctggcctcttatgggaacgttatagttatcactctcaactaccgagtgggggtgttgggattcctttctacaggcgaccaagccgcgaaaggaaattacggcctgttggaccaaatccaagccctcaggtgggttagcgaaaacatcgcttttttcggcggggatccacggcgtattacggtctttggatcaggcataggagcatcttgcgtgagcctgcttacgctgtctcatcatagtgaagggttgttccaacgcgccatcattcagtctggaagtgcactgagttcttgggcggttaactaccagccggtgaaatatacctccctgttggcggacaaggtgggatgcaatgttctggacacagtggatatggtggactgcctccgccagaagtccgccaaagaattggttgagcaggacattcagccagccagatatcacgtcgccttcgggcccgtgatagatggggacgttattccggacgaccccgagatcctcatggagcagggggagttcctcaactacgacatcatgctgggcgttaatcagggagagggtttaaaattcgtggagggtgtggtcgatccagaagacggagtgtccggtacagactttgattacagcgtgtccaattttgtcgataacttgtatggctatcctgaaggcaaggatacccttcgtgagaccattaaattcatgtacacagattgggccgatcgtgataaccctgaaacccggagaaagacattggtagccctgttcactgatcatcaatgggtggaaccaagtgttgtcacagcagatcttcatgcacgctacggctctcccacatatttctacgccttctaccatcattgccaaagccttatgaaaccagcttggtctgatgcagcccacggagacgaggtgccctacgtctttggggtacccatggtcgggcccactgatctgttcccatgcaattttagcaagaacgacgtgatgctcagcgccgtggtgatgacctactggaccaacttcgccaaaacaggggatccaaacaaaccagtgcctcaggacacaaagtttatccatacaaaggccaaccgctttgaagaggtcgcctggtctaagtataatccaagagatcagctgtacctgcacattggcctgaagccacgcgtgcgcgatcattaccgtgccaccaaggtcgcattttggaaacacctcgtcccccacttgtataacctacacgacatgttccactatacctccacaaccacaaaggtccctcctcctgataccactcattcatctcacatcactaggcgaccaaacggaaagacatggagcactaagcggccagctatatcccccgcatattctaatgagaatgcacagggaagctggaatggtgaccaagatgcgggccccctcctggttgaaaaccccagggattattctacagagctctcagtgacgattgctgtgggggcctctcttctatttctgaacgtcctcgccttcgctgctctatactaccggaaggacaagaggcggcaggaacccctgcgtcagccttctccacaaaggggtgcaggggctccagagcttggtgctgccccagaagaagagcttgctgctctgcagctcgggccaacgcatcacgagtgtgaggccggcccgccccatgacaccctgcgtttgactgccctgccagactacacactgaccttgcgacgaagcccagacgacattcccctaatgacccctaacacgataactatgatccccaactctctcgtagggctgcagaccttgcacccttacaatactttcgctgccggatttaattctaccggtctcccacacagtcattcaaccacaagagtgtag

SEQ ID NO: 254605 - DNA, 3046 bp, Artificial Sequence
  derived and/or modified sequence
ccggagagctgatctcggggattcgggtgcggagcccttggcctggaggcgatatgggtggtccgtggcccggttcagtcgcttgcagcagcccggggaacaggcctgtctggccctgagggagtcccctttctgaagctgtggtgcttggacgacctgctctctacattgctgggcacctgtaggtgtccctcgagagctcagttttgaggttcaagtcagtgtggccatgaaggggctgcctattgggctgatgctgtgaccctggagtctgcctctcctgccagtccccctgcccggaacatgtggctgcggcttggcccgccctcgctgtccctgagccccaagcccacggttggcaggagcctgtgcctcaccctgtggttcctcagtttggcgctgagggccagtacccaggccccagcacccacagtcaacactcactttgggaagctaaggggtgcccgagtaccactgcccagtgagatcctggggcctgtggaccaatacctgggggtgccctacgcagctcccccgatcggcgagaaacgtttcctgccccctgaaccacccccatcctggtcgggcatccggaacgccacacactttcccccagtgtgcccccagaacatccacacagctgtgcccgaagtcatgctgccggtctggttcactgccaacttggatatcgtcgctacttacatccaggagcccaacgaagactgtctctacctgaacgtctatgtgccgacggaggatgtaaagcggatttccaaggaatgcgcccgaaagcccaacaagaaaatttgtaggaaaggaggatccggcgctaagaaacagggcgaggacttagcggataatgacggggatgaagatgaagacatccgggacagtggtgctaaacccgtcatggtctacatccacggaggctcttacatggaagggacaggcaacatgattgatggcagcatcctcgccagttatggcaatgtcatcgtcatcaccctcaactatcgggttggagtgctaggtttcctgagtactggagatcaggctgccaagggcaactatgggctccttgaccagatccaggccctccgctgggtgagcgagaatattgccttcttcgggggagacccccgccggatcactgtctttggctcgggcattggtgcatcctgcgtcagcctcctcacgttgtcacatcactcagagggacttttccagagagccatcatccaaagtggctctgctctgtccagctgggctgtgaactaccaaccagtgaagtacaccagcctgctggcagacaaagtgggctgtaatgtgctggacaccgtggatatggtggactgtcttcggcaaaagagtgccaaggagctggtagagcaggacatccagccagcccgctaccacgtggcctttggccctgtgattgatggtgatgtcattcctgatgaccctgagatcctcatggagcagggcgagttcctcaactatgacatcatgctaggtgtcaaccagggcgagggtctcaagtttgtggaaggggtggtggaccctgaggatggtgtctctggcactgactttgactattccgtctccaattttgtggacaatctgtatggctatcctgagggtaaggacaccctgcgagagaccatcaagttcatgtatacagactgggcagaccgtgacaaccctgagacccgccgtaaaacactggtggcactcttcactgaccaccagtgggtggagccctcagtggtgacagccgatctgcatgcccgctacggctcgcctacctacttctacgccttctatcatcactgccagagcctcatgaagcctgcttggtcagatgcagctcatggggatgaagtaccctatgtttttggggttcctatggtaggccccactgaccttttcccctgcaacttctccaagaatgatgttatgctcagtgctgtcgtcatgacctattggaccaactttgccaagactggggatcccaacaagccggtcccccaggacaccaagttcattcacaccaaggccaaccgctttgaggaagtggcctggtccaaatacaatccccgagaccagctctaccttcacatcgggctgaaaccaagggtccgagatcattaccgggccactaaggtggccttttggaaacatctggtgccccacctatacaacctgcatgacatgttccactatacgtccaccaccaccaaagtgccgcctccggataccacccacagctcccacatcacccgcaggcccaatggcaagacctggagcaccaagcggccagccatctcacctgcctacagcaacgagaatgcccaggggtcctggaacggggaccaggatgcagggccactcctggtggagaaccctcgtgactactccactgaattaagtgtcaccatcgccgtgggggcctccctcctgttccttaacgttctggccttcgctgccctctactaccgtaaggacaaacggcgccaggagcccctgcggcagcctagccctcagcggggagccggggccccggagttgggagctgctccagaggaggagctggcagcattacaactgggccccacccaccacgagtgtgaggccggtcccccccatgacacgctgcgcctcactgcattgcccgactacaccctgaccctgcggcgctccccggatgacatcccactcatgacccccaacaccatcactatgatccccaactccctggtagggctgcagacattgcacccctataacacctttgccgcagggttcaacagtaccgggctgccccactcacactccactacccgggtatagctccaactcagagcacagccaatctccaggctccctccctcccagatccaggaacacatgcacacacacacacacacacacgcagacacacacacacacacacatatatgtatacgcacgcacccacaccctacagcagatccacctgcacaaacatagacagatgtggacatgcacccgcatgtacaaaaacaca

SEQ ID NO: 254606 - DNA, 2547 bp, Artificial Sequence
  derived and/or modified sequence
atgtggctgagactgggaccgccttctctaagtctgagcccaaagcctacagtgggtcgatcactgtgtttaaccttatggtttttaagtctcgccctgagggccagcacgcaagcgccagctccaaccgtcaacacccattttggcaaacttcgcggagctcgagtacccctgccctccgagatcctgggcccagtggaccagtatctcggggtgccgtacgccgctccccctattggcgagaaacggttcctgccacccgaaccacccccatcatggtcgggtattagaaacgcaacacactttcccccagtgtgtccgcagaacatccacactgctgtccctgaggtgatgttgcccgtgtggtttaccgcaaacctcgacatcgtggctacttacatacaggagcccaacgaggattgcctatacctcaacgtgtacgtgcctacagaagatgtcaaacgcatctccaaggagtgtgccaggaagcctaacaagaaaatatgccggaaaggtggcagcggcgctaagaaacagggagaggatctagctgacaacgacggagatgaagacgaggatatcagggacagtggggcaaagcccgtgatggtctacatccacgggggatcatatatggagggaacaggcaacatgattgacggctccatcttggccagttatggcaacgtcatcgtgatcaccctgaactatagagtgggggttctgggcttcctaagcacgggggaccaggcggcaaaaggaaactacggactgctcgaccagattcaggcattgcgctgggtgtctgagaatatagccttttttggaggcgaccccaggcggatcactgtttttggctctggcattggagcctcctgtgtcagccttctcaccctgtctcaccatagcgagggcttattccaacgggctataattcagtccggtagcgcactgtcctcttgggccgtgaattatcagccagtcaaatacacaagcctgttggccgacaaagttggctgtaatgtgcttgacaccgtggatatggtggattgcctccgccaaaaaagcgcaaaggaactggtagagcaggacattcaaccagccagataccacgtcgcattcgggccagtcatcgacggcgacgtgatccccgacgatcctgaaattctgatggaacaaggggagttcctgaactacgacattatgttgggcgtgaatcagggagagggcctgaaatttgtagagggggttgttgaccctgaggacggagtgtctggtactgactttgattactcagtgagtaatttcgtagacaacctgtatgggtaccctgagggaaaggacacgctacgagaaacgataaagttcatgtacactgactgggcagatcgagacaatcccgaaaccagaaggaagacacttgtggccctgttcaccgatcatcagtgggtggaaccctccgtcgtgacggcggacctgcacgcacggtatgggagtcctacatacttttacgctttttatcaccactgtcagagtttgatgaaacccgcttggtccgacgcggctcatggcgacgaggtgccttatgtgtttggtgtgcccatggtcggtccaaccgaccttttcccttgtaactttagcaagaacgacgtcatgctgtccgcagtggtaatgacttactggaccaatttcgcaaaaacgggcgatccaaataagcctgtgccgcaagacactaaatttattcacacaaaagccaatcgatttgaggaagtggcctggagtaagtataatcctcgcgaccaactttatttgcacatcggcctcaaacctcgggtgcgcgaccactatagagcaactaaagttgccttctggaagcacttagtgccgcacctctataatctccacgacatgtttcattatacttccacaaccacaaaggtgcccccacctgacacaacccattcatcacatatcacgaggcgccctaacggcaagacctggagcacaaaacgacccgcaatctcgcccgcttacagcaatgagaacgcacaagggtcatggaatggtgatcaggatgcagggcctctactagtagaaaaccctagagattacagcactgagttgtcagtcacaatcgccgtcggagcctccctgttattcttgaacgtgttagccttcgcagccttatactaccgcaaagacaagaggcgccaggaaccgctcagacagccctcaccgcaacgaggcgctggggctcctgagctgggcgctgcccctgaggaggaactcgccgctctgcagcttgggcctacccatcacgagtgtgaagccggtcctcctcacgacacactgcgtctgacagccctccccgactacacactgacacttaggagaagtcctgatgacattcccctcatgacacccaacacaatcacaatgatccccaattccctcgtgggattgcagaccctccatccatataacaccttcgctgcagggtttaactccaccgggttgccgcatagtcacagcactactcgcgtgtag

SEQ ID NO: 254607 - DNA, 2547 bp, Artificial Sequence
  derived and/or modified sequence
atgtggctgagactgggcccccccagcctgagcctgagccccaagcccaccgtgggcagaagcctgtgcctgaccctgtggttcctgagcctggccctgagagccagcacccaggcccccgcccccaccgtgaacacccacttcggcaagctgagaggcgccagagtgcccctgcccagcgagatcctgggccccgtggaccagtacctgggcgtgccctacgccgccccccccatcggcgagaagagattcctgccccccgagcccccccccagctggagcggcatcagaaacgccacccacttcccccccgtgtgcccccagaacatccacaccgccgtgcccgaggtgatgctgcccgtgtggttcaccgccaacctggacatcgtggccacctacatccaggagcccaacgaggactgcctgtacctgaacgtgtacgtgcccaccgaggacgtgaagagaatcagcaaggagtgcgccagaaagcccaacaagaagatctgcagaaagggcggcagcggcgccaagaagcagggcgaggacctggccgacaacgacggcgacgaggacgaggacatcagagacagcggcgccaagcccgtgatggtgtacatccacggcggcagctacatggagggcaccggcaacatgatcgacggcagcatcctggccagctacggcaacgtgatcgtgatcaccctgaactacagagtgggcgtgctgggcttcctgagcaccggcgaccaggccgccaagggcaactacggcctgctggaccagatccaggccctgagatgggtgagcgagaacatcgccttcttcggcggcgaccccagaagaatcaccgtgttcggcagcggcatcggcgccagctgcgtgagcctgctgaccctgagccaccacagcgagggcctgttccagagagccatcatccagagcggcagcgccctgagcagctgggccgtgaactaccagcccgtgaagtacaccagcctgctggccgacaaggtgggctgcaacgtgctggacaccgtggacatggtggactgcctgagacagaagagcgccaaggagctggtggagcaggacatccagcccgccagataccacgtggccttcggccccgtgatcgacggcgacgtgatccccgacgaccccgagatcctgatggagcagggcgagttcctgaactacgacatcatgctgggcgtgaaccagggcgagggcctgaagttcgtggagggcgtggtggaccccgaggacggcgtgagcggcaccgacttcgactacagcgtgagcaacttcgtggacaacctgtacggctaccccgagggcaaggacaccctgagagagaccatcaagttcatgtacaccgactgggccgacagagacaaccccgagaccagaagaaagaccctggtggccctgttcaccgaccaccagtgggtggagcccagcgtggtgaccgccgacctgcacgccagatacggcagccccacctacttctacgccttctaccaccactgccagagcctgatgaagcccgcctggagcgacgccgcccacggcgacgaggtgccctacgtgttcggcgtgcccatggtgggccccaccgacctgttcccctgcaacttcagcaagaacgacgtgatgctgagcgccgtggtgatgacctactggaccaacttcgccaagaccggcgaccccaacaagcccgtgccccaggacaccaagttcatccacaccaaggccaacagattcgaggaggtggcctggagcaagtacaaccccagagaccagctgtacctgcacatcggcctgaagcccagagtgagagaccactacagagccaccaaggtggccttctggaagcacctggtgccccacctgtacaacctgcacgacatgttccactacaccagcaccaccaccaaggtgcccccccccgacaccacccacagcagccacatcaccagaagacccaacggcaagacctggagcaccaagagacccgccatcagccccgcctacagcaacgagaacgcccagggcagctggaacggcgaccaggacgccggccccctgctggtggagaaccccagagactacagcaccgagctgagcgtgaccatcgccgtgggcgccagcctgctgttcctgaacgtgctggccttcgccgccctgtactacagaaaggacaagagaagacaggagcccctgagacagcccagcccccagagaggcgccggcgcccccgagctgggcgccgcccccgaggaggagctggccgccctgcagctgggccccacccaccacgagtgcgaggccggccccccccacgacaccctgagactgaccgccctgcccgactacaccctgaccctgagaagaagccccgacgacatccccctgatgacccccaacaccatcaccatgatccccaacagcctggtgggcctgcagaccctgcacccctacaacaccttcgccgccggcttcaacagcaccggcctgccccacagccacagcaccaccagagtgtag

SEQ ID NO: 254608 - protein, 87 aa, Artificial Sequence
  derived and/or modified sequence
MAALGTVLFTGVRRLHCSVAAWAGGQWRLQQGLAANPSGYGPLTELPDWSYAETSCTAVTGNGRWITSMAAQAAEVAGRTKEAGKCS

SEQ ID NO: 254609 - DNA, 264 bp, Artificial Sequence
  derived and/or modified sequence
atggctgccctcggcactgtgctttttaccggggtgcgcagattgcattgttctgtggcagcatgggctggaggacagtggcgcttgcagcagggcctcgctgcgaacccttccggctatggtcctttgactgagctgcctgactggtcttacgcagaaacgtcatgcacagccgtgaccggaaacggcaggtggatcacttccatggctgcccaggctgccgaggtggccggacgcaccaaagaagccggaaagtgtagttag

SEQ ID NO: 254610 - DNA, 264 bp, Artificial Sequence
  derived and/or modified sequence
atggccgccctgggcaccgtgctcttcaccggggtgcggcggctgcactgcagcgtggccgcctgggccggcggccagtggaggctgcagcagggcctggccgccaaccccagcggctacggccccctgacagagctgcctgactggagctatgcagagaccagctgcacagctgtgactggaaatggccgctggatcacctccatggccgcccaggccgctgaggtggccggccgcaccaaggaggccggcaagtgcagctag

SEQ ID NO: 254611 - DNA, 333 bp, Artificial Sequence
  derived and/or modified sequence
atggctgctttagggactgttctcttcacaggtgtccggaggctgcactgcagcgtagccgcttgggcgggcggccagtggcgactacagcagggactggctgccaacccctccggctacgggccccttaccgagctcccagactggtcatatgcggagacgagttgtactgctgtcacaggaaatggacgctggattacaagcatggcagctcaggcagcagaagttgcaggaagaacaaaggaagcaggaaaatgctcttaaacccaaaggggcttcactgaagagcccacttccaagtcaataaaaagcaactcctgcctcccttcctca

SEQ ID NO: 254612 - DNA, 264 bp, Artificial Sequence
  derived and/or modified sequence
atggccgccctgggcaccgtgctgttcaccggcgtgcggcggctgcactgctccgtggctgcctgggcagggggccagtggcgcctacagcaaggcttagccgcaaacccctccggttacggccctctgacagaacttccagactggagttacgccgagacatcctgcactgcagtgaccggaaatggccgctggattacctctatggccgcccaggcagccgaggtcgctggccgcactaaggaagctggtaagtgtagctag

SEQ ID NO: 254613 - DNA, 264 bp, Artificial Sequence
  derived and/or modified sequence
atggctgcattagggaccgtcctttttaccggcgtgagacgtctgcactgcagcgttgccgcttgggccggtggccagtggcggttgcagcagggactggctgccaacccttccgggtacgggcctttgacagagctccctgattggtcttacgccgaaacatcttgtactgccgtgactggcaacggtcgttggatcacttcaatggccgcacaggctgctgaagtagccggaagaaccaaggaagccggtaagtgttcctag

SEQ ID NO: 254614 - DNA, 264 bp, Artificial Sequence
  derived and/or modified sequence
atggccgccctgggcaccgtgctgttcaccggcgtgagaagactgcactgcagcgtggccgcctgggccggcggccagtggagactgcagcagggcctggccgccaaccccagcggctacggccccctgaccgagctgcccgactggagctacgccgagaccagctgcaccgccgtgaccggcaacggcagatggatcaccagcatggccgcccaggccgccgaggtggccggcagaaccaaggaggccggcaagtgcagctag

SEQ ID NO: 254615 - protein, 508 aa, Artificial Sequence
  derived and/or modified sequence
MATEGGGKEMNEIKTQFTTREGLYKLLPHSEYSRPNRVPFNSQGSNPVRVSFVNLNDQSGNGDRLCFNVGRELYFYIYKGVRKRLIDKSRVTCVKWVPGSESLFLVAHSSGNMYLYNVEHTCGTTAPHYQLLKQGESFAVHTCKSKSTRNPLLKWTVGEGALNEFAFSPDGKFLACVSQDGFLRVFNFDSVELHGTMKSYFGGLLCVCWSPDGKYIVTGGEDDLVTVWSFVDCRVIARGHGHKSWVSVVAFDPYTTSVEEGDPMEFSGSDEDFQDLLHFGRDRANSTQSRLSKRNSTDSRPVSVTYRFGSVGQDTQLCLWDLTEDILFPHQPLSRARTHTNVMNATSPPAGSNGNSVTTPGNSVPPPLPRSNSLPHSAVSNAGSKSSVMDGAIASGVSKFATLSLHDRKERHHEKDHKRNHSMGHISSKSSDKLNLVTKTKTDPAKTLGTPLCPRMEDVPLLEPLICKKIAHERLTVLIFLEDCIVTACQEGFICTWGRPGKVVSFNP

SEQ ID NO: 254616 - DNA, 1536 bp, Artificial Sequence
  derived and/or modified sequence
atgaacgagatcaagacccagttcaccaccagagagggcctgtacaagctgctgccccacagcgagtacagcagacccaacagagtgcccttcaacagccagggcagcaaccccgtgagagtgagcttcgtgaacctgaacgaccagagcggcaacggcgacagactgtgcttcaacgtgggcagagagctgtacttctacatctacaagggcgtgagaaagagactgatcgacaagagcagagtgacctgcgtgaagtgggtgcccggcagcgagagcctgttcctggtggcccacagcagcggcaacatgtacctgtacaacgtggagcacacctgcggcaccaccgccccccactaccagctgctgaagcagggcgagagcttcgccgtgcacacctgcaagagcaagagcaccagaaaccccctgctgaagtggaccgtgggcgagggcgccctgaacgagttcgccttcagccccgacggcaagttcctggcctgcgtgagccaggacggcttcctgagagtgttcaacttcgacagcgtggagctgcacggcaccatgaagagctacttcggcggcctgctgtgcgtgtgctggagccccgacggcaagtacatcgtgaccggcggcgaggacgacctggtgaccgtgtggagcttcgtggactgcagagtgatcgccagaggccacggccacaagagctgggtgagcgtggtggccttcgacccctacaccaccagcgtggaggagggcgaccccatggagttcagcggcagcgacgaggacttccaggacctgctgcacttcggcagagacagagccaacagcacccagagcagactgagcaagagaaacagcaccgacagcagacccgtgagcgtgacctacagattcggcagcgtgggccaggacacccagctgtgcctgtgggacctgaccgaggacatcctgttcccccaccagcccctgagcagagccagaacccacaccaacgtgatgaacgccaccagcccccccgccggcagcaacggcaacagcgtgaccacccccggcaacagcgtgcccccccccctgcccagaagcaacagcctgccccacagcgccgtgagcaacgccggcagcaagagcagcgtgatggacggcgccatcgccagcggcgtgagcaagttcgccaccctgagcctgcacgacagaaaggagagacaccacgagaaggaccacaagagaaaccacagcatgggccacatcagcagcaagagcagcgacaagctgaacctggtgaccaagaccaagaccgaccccgccaagaccctgggcacccccctgtgccccagaatggaggacgtgcccctgctggagcccctgatctgcaagaagatcgcccacgagagactgaccgtgctgatcttcctggaggactgcatcgtgaccgcctgccaggagggcttcatctgcacctggggcagacccggcaaggtgggcagcctgagcagccccagccaggccagcagccccggcggcaccgtggtgtag

SEQ ID NO: 254617 - DNA, 939 bp, Artificial Sequence
  derived and/or modified sequence
atgaagagctacttcggcggcctgctgtgcgtgtgctggagccccgacggcaagtacatcgtgaccggcggcgaggacgacctggtgaccgtgtggagcttcgtggactgcagagtgatcgccagaggccacggccacaagagctgggtgagcgtggtggccttcgacccctacaccaccagcgtggaggagggcgaccccatggagttcagcggcagcgacgaggacttccaggacctgctgcacttcggcagagacagagccaacagcacccagagcagactgagcaagagaaacagcaccgacagcagacccgtgagcgtgacctacagattcggcagcgtgggccaggacacccagctgtgcctgtgggacctgaccgaggacatcctgttcccccaccagcccctgagcagagccagaacccacaccaacgtgatgaacgccaccagcccccccgccggcagcaacggcaacagcgtgaccacccccggcaacagcgtgcccccccccctgcccagaagcaacagcctgccccacagcgccgtgagcaacgccggcagcaagagcagcgtgatggacggcgccatcgccagcggcgtgagcaagttcgccaccctgagcctgcacgacagaaaggagagacaccacgagaaggaccacaagagaaaccacagcatgggccacatcagcagcaagagcagcgacaagctgaacctggtgaccaagaccaagaccgaccccgccaagaccctgggcacccccctgtgccccagaatggaggacgtgcccctgctggagcccctgatctgcaagaagatcgcccacgagagactgaccgtgctgatcttcctggaggactgcatcgtgaccgcctgccaggagggcttcatctgcacctggggcagacccggcaaggtggtgagcttcaacccctag

SEQ ID NO: 254618 - DNA, 1191 bp, Artificial Sequence
  derived and/or modified sequence
atgtacctgtacaacgtggagcacacctgcggcaccaccgccccccactaccagctgctgaagcagggcgagagcttcgccgtgcacacctgcaagagcaagagcaccagaaaccccctgctgaagtggaccgtgggcgagggcgccctgaacgagttcgccttcagccccgacggcaagttcctggcctgcgtgagccaggacggcttcctgagagtgttcaacttcgacagcgtggagctgcacggcaccatgaagagctacttcggcggcctgctgtgcgtgtgctggagccccgacggcaagtacatcgtgaccggcggcgaggacgacctggtgaccgtgtggagcttcgtggactgcagagtgatcgccagaggccacggccacaagagctgggtgagcgtggtggccttcgacccctacaccaccagcgtggaggagggcgaccccatggagttcagcggcagcgacgaggacttccaggacctgctgcacttcggcagagacagagccaacagcacccagagcagactgagcaagagaaacagcaccgacagcagacccgtgagcgtgacctacagattcggcagcgtgggccaggacacccagctgtgcctgtgggacctgaccgaggacatcctgttcccccaccagcccctgagcagagccagaacccacaccaacgtgatgaacgccaccagcccccccgccggcagcaacggcaacagcgtgaccacccccggcaacagcgtgcccccccccctgcccagaagcaacagcctgccccacagcgccgtgagcaacgccggcagcaagagcagcgtgatggacggcgccatcgccagcggcgtgagcaagttcgccaccctgagcctgcacgacagaaaggagagacaccacgagaaggaccacaagagaaaccacagcatgggccacatcagcagcaagagcagcgacaagctgaacctggtgaccaagaccaagaccgaccccgccaagaccctgggcacccccctgtgccccagaatggaggacgtgcccctgctggagcccctgatctgcaagaagatcgcccacgagagactgaccgtgctgatcttcctggaggactgcatcgtgaccgcctgccaggagggcttcatctgcacctggggcagacccggcaaggtggtgagcttcaacccctag

SEQ ID NO: 254619 - DNA, 1527 bp, Artificial Sequence
  derived and/or modified sequence
atggccaccgagggcggcggcaaggagatgaacgagatcaagacccagttcaccaccagagagggcctgtacaagctgctgccccacagcgagtacagcagacccaacagagtgcccttcaacagccagggcagcaaccccgtgagagtgagcttcgtgaacctgaacgaccagagcggcaacggcgacagactgtgcttcaacgtgggcagagagctgtacttctacatctacaagggcgtgagaaagagactgatcgacaagagcagagtgacctgcgtgaagtgggtgcccggcagcgagagcctgttcctggtggcccacagcagcggcaacatgtacctgtacaacgtggagcacacctgcggcaccaccgccccccactaccagctgctgaagcagggcgagagcttcgccgtgcacacctgcaagagcaagagcaccagaaaccccctgctgaagtggaccgtgggcgagggcgccctgaacgagttcgccttcagccccgacggcaagttcctggcctgcgtgagccaggacggcttcctgagagtgttcaacttcgacagcgtggagctgcacggcaccatgaagagctacttcggcggcctgctgtgcgtgtgctggagccccgacggcaagtacatcgtgaccggcggcgaggacgacctggtgaccgtgtggagcttcgtggactgcagagtgatcgccagaggccacggccacaagagctgggtgagcgtggtggccttcgacccctacaccaccagcgtggaggagggcgaccccatggagttcagcggcagcgacgaggacttccaggacctgctgcacttcggcagagacagagccaacagcacccagagcagactgagcaagagaaacagcaccgacagcagacccgtgagcgtgacctacagattcggcagcgtgggccaggacacccagctgtgcctgtgggacctgaccgaggacatcctgttcccccaccagcccctgagcagagccagaacccacaccaacgtgatgaacgccaccagcccccccgccggcagcaacggcaacagcgtgaccacccccggcaacagcgtgcccccccccctgcccagaagcaacagcctgccccacagcgccgtgagcaacgccggcagcaagagcagcgtgatggacggcgccatcgccagcggcgtgagcaagttcgccaccctgagcctgcacgacagaaaggagagacaccacgagaaggaccacaagagaaaccacagcatgggccacatcagcagcaagagcagcgacaagctgaacctggtgaccaagaccaagaccgaccccgccaagaccctgggcacccccctgtgccccagaatggaggacgtgcccctgctggagcccctgatctgcaagaagatcgcccacgagagactgaccgtgctgatcttcctggaggactgcatcgtgaccgcctgccaggagggcttcatctgcacctggggcagacccggcaaggtggtgagcttcaacccctag

SEQ ID NO: 254620 - DNA, 1563 bp, Artificial Sequence
  derived and/or modified sequence
atggccaccgagggcggcggcaaggagatgaacgagatcaagacccagttcaccaccagagagggcctgtacaagctgctgccccacagcgagtacagcagacccaacagagtgcccttcaacagccagggcagcaaccccgtgagagtgagcttcgtgaacctgaacgaccagagcggcaacggcgacagactgtgcttcaacgtgggcagagagctgtacttctacatctacaagggcgtgagaaagagactgatcgacaagagcagagtgacctgcgtgaagtgggtgcccggcagcgagagcctgttcctggtggcccacagcagcggcaacatgtacctgtacaacgtggagcacacctgcggcaccaccgccccccactaccagctgctgaagcagggcgagagcttcgccgtgcacacctgcaagagcaagagcaccagaaaccccctgctgaagtggaccgtgggcgagggcgccctgaacgagttcgccttcagccccgacggcaagttcctggcctgcgtgagccaggacggcttcctgagagtgttcaacttcgacagcgtggagctgcacggcaccatgaagagctacttcggcggcctgctgtgcgtgtgctggagccccgacggcaagtacatcgtgaccggcggcgaggacgacctggtgaccgtgtggagcttcgtggactgcagagtgatcgccagaggccacggccacaagagctgggtgagcgtggtggccttcgacccctacaccaccagcgtggaggagggcgaccccatggagttcagcggcagcgacgaggacttccaggacctgctgcacttcggcagagacagagccaacagcacccagagcagactgagcaagagaaacagcaccgacagcagacccgtgagcgtgacctacagattcggcagcgtgggccaggacacccagctgtgcctgtgggacctgaccgaggacatcctgttcccccaccagcccctgagcagagccagaacccacaccaacgtgatgaacgccaccagcccccccgccggcagcaacggcaacagcgtgaccacccccggcaacagcgtgcccccccccctgcccagaagcaacagcctgccccacagcgccgtgagcaacgccggcagcaagagcagcgtgatggacggcgccatcgccagcggcgtgagcaagttcgccaccctgagcctgcacgacagaaaggagagacaccacgagaaggaccacaagagaaaccacagcatgggccacatcagcagcaagagcagcgacaagctgaacctggtgaccaagaccaagaccgaccccgccaagaccctgggcacccccctgtgccccagaatggaggacgtgcccctgctggagcccctgatctgcaagaagatcgcccacgagagactgaccgtgctgatcttcctggaggactgcatcgtgaccgcctgccaggagggcttcatctgcacctggggcagacccggcaaggtgggcagcctgagcagccccagccaggccagcagccccggcggcaccgtggtgtag

SEQ ID NO: 254621 - DNA, 1536 bp, Artificial Sequence
  derived and/or modified sequence
atgaatgagattaagacccagtttacaacccgcgaaggcctgtacaagctgctcccccactctgaatactcccgcccaaaccgagtgccctttaacagccaggggagcaatccagtgagggttagtttcgtcaatcttaacgaccagtccggcaatggggatagactctgcttcaatgtgggacgggaattgtacttttacatctacaagggagtgcgcaaaaggctgattgataagtccagggtgacctgcgtgaaatgggttcccggcagcgaaagcctcttcttggtcgctcactctagcggtaatatgtatctgtataacgtggagcacacttgcggaacgaccgctccccactatcagttgttgaagcagggtgagtctttcgcggtccacacctgtaaaagtaaatccacccgcaatcctctgcttaaatggaccgtgggcgaaggagctctcaacgaattcgcatttagtcctgacgggaagtttctcgcctgcgtgtcacaggacggtttcctccgggtttttaatttcgattccgttgagctccatgggacgatgaaatcctattttggcggtctcctgtgtgtgtgctggtcacctgatggcaagtacattgtgaccggtggggaagacgacctcgtcacagtgtggtccttcgtagactgtagagtcattgcacggggccacgggcataagtcttgggtaagcgtcgtcgcgttcgacccttacacaaccagtgtcgaggaaggtgatcctatggaattcagtggctccgatgaggatttccaggacctgctgcacttcggtcgtgatagggccaatagcactcagtcgcgcttgtcaaagagaaattctactgactctagacccgtttcggtcacctatcgttttggctccgtcggacaagacactcagctctgtttatgggatctgaccgaggatatactttttcctcaccagccactgagtcgggccaggacccacacgaacgtcatgaatgccacctctcctccggccgggtctaacggcaatagtgtgaccacccctggtaattccgtccctcctccccttcctagaagcaactcgctacctcattcagcggtatctaatgcggggtccaagagttccgtgatggatggcgcaatcgcctccggtgtatcaaaattcgccactttgtcattgcatgaccggaaggagcggcatcacgagaaagaccataaaagaaaccatagtatgggccacatcagctcaaaatcgtccgacaagctgaatctcgtgaccaagacaaaaacagacccggcgaaaacactgggcacaccactgtgcccacgcatggaggatgttcctctgctggaaccccttatctgcaaaaagattgcccacgaacgtttaaccgttctgattttcctggaagactgtatcgtgaccgcgtgccaagaggggttcatctgcacatggggtcggcctgggaaagttggatccttaagcagcccgagtcaggccagctctccaggtggcacagtggtgtag

SEQ ID NO: 254622 - DNA, 939 bp, Artificial Sequence
  derived and/or modified sequence
atgaagagttatttcggaggattgctgtgcgtgtgctggtctccggatggtaaatatattgtgacaggaggcgaagacgatctcgttactgtttggagtttcgtggactgccgggtgatcgctcgaggtcacggccacaaaagttgggtcagtgttgtagcattcgacccgtacacaaccagtgttgaggaaggagaccctatggaattctcgggttcggatgaagatttccaggaccttctccactttggaagagatcgtgccaactccacacaaagcaggctgtcgaaaagaaactcgactgacagtcggcctgtttctgtgacctaccgcttcggctctgtgggacaagacactcagttatgcctttgggacctgacggaggatatcctgtttccacaccagccgttgtctcgcgctagaacgcataccaacgtgatgaacgcaacgtctccgccagccggtagcaacggtaactctgtgacaaccccaggaaacagcgtgcccccccctctcccccgatccaattccctgccacactctgctgtgtcaaatgcagggagcaagagttccgtgatggacggagccattgcaagcggcgtcagcaaatttgccacattgtcattacatgatcgtaaggagaggcaccacgagaaagatcacaaacgtaatcactcaatgggccacatctcctcgaagtcatccgataagttgaacttggttacaaagacgaagaccgaccccgcaaaaacattgggaacacctctctgcccacgcatggaggacgtgcccttgcttgaaccactgatttgtaagaagattgcacacgaacggttgaccgtgcttattttccttgaggattgtattgttactgcatgccaggaaggatttatttgtacctggggaagaccaggtaaggtggtgagctttaatccttag

SEQ ID NO: 254623 - DNA, 1191 bp, Artificial Sequence
  derived and/or modified sequence
atgtacctttacaacgtggagcacacatgtggtacgaccgcgccccattaccagcttctgaagcagggcgaatccttcgccgtgcacacgtgtaaatccaagagcacaagaaacccactgttgaagtggactgtgggagaaggagcgcttaacgaattcgcgttctctcctgacggtaaattcctagcatgtgtgtctcaggatgggttcctgcgggtattcaattttgacagtgttgagcttcacggcactatgaaaagttacttcggggggctcctgtgcgtctgttggagcccagacggcaaatatatcgttacaggaggcgaagacgacctcgtgaccgtttggtcatttgtggattgcagggtgatagcaagggggcatgggcataaatcatgggtgtctgtggtcgcttttgacccttacactaccagtgttgaggaaggggatcccatggagtttagcggttcagatgaagattttcaagatcttctgcattttggaagagatcgggcgaatagcacacagagcaggctgtccaagcggaattctactgatagcagaccagtcagtgtgacctacagattcggctccgtcggccaggatacccagctgtgcctgtgggatctcaccgaggacattttgttcccacatcagccgctgtcccgggcaaggacacacacaaatgttatgaacgctacttcgccccctgcggggagcaatggcaattctgtgacgaccccagggaacagcgtgcctccaccactgcctcgaagcaacagcttgcctcacagtgccgtgagcaacgcgggatccaagtcatctgtgatggacggagcaattgcttccggcgtatccaaatttgctacactaagcctgcacgacagaaaggaacggcatcacgaaaaagatcataaaaggaatcactccatgggacacatcagctctaaaagcagtgataaactgaacttagtcactaaaactaagactgacccagccaaaactctggggacgccattatgtccacggatggaggatgtacctctcctcgagcctctgatttgcaagaaaattgcacatgagcggctgaccgtcctgattttcctcgaagactgtatagtcaccgcgtgtcaagaaggtttcatttgcacatggggcagaccaggcaaagtcgtgtccttcaatccatag

SEQ ID NO: 254624 - DNA, 1527 bp, Artificial Sequence
  derived and/or modified sequence
atggccaccgagggaggcggtaaagagatgaacgaaattaaaacccagttcaccacacgcgagggcctctacaaactgctaccccactcagagtactccagacctaacagggttccgttcaacagtcagggcagcaatcctgtgagagtttcctttgtgaatctgaatgatcagagcggcaatggagacagactttgtttcaatgtgggacgagagctgtatttctatatctataagggcgtacgcaaacgcctcatcgataaatctagagtcacttgcgtgaaatgggtacctggctccgagagtctgtttctggtagcccattcctcggggaatatgtacctgtacaatgtggaacatacttgtggaactaccgccccccactaccagctcctcaaacagggcgagtcattcgccgtccatacttgtaaatccaaatcaacaagaaaccccttgctaaaatggacggttggtgagggggccctcaacgagttcgcgtttagtcccgacggcaaatttttggcttgcgtatctcaggatgggtttctccgcgtttttaattttgactcagtagagcttcacggcacgatgaaaagctattttggtgggctgctgtgcgtttgctggagccctgacggcaaatacatcgtgacagggggagaagatgacttagtgactgtgtggagctttgtagactgccgggtgatcgcacgcggccacggccataagtcatgggtgtctgtggtagccttcgacccctatactacctcagtcgaagaaggagaccctatggaattctccggctcggacgaggatttccaggatcttttgcacttcggacgggatcgggccaattcgacgcagtcgcggctcagtaagaggaattccactgacagccgaccagtgagtgtcacctacagatttggtagcgtgggacaggatacccagttgtgcctttgggatcttacggaggacatcttgttcccccaccagccgctttcacgagcccgcacgcacacaaacgtgatgaatgcaacaagccctccagccgggtccaatggcaattcggtgacgacccctggcaactccgttcctccaccgttgccacgttcaaattcactgccccacagcgctgtctccaatgcaggcagcaaaagctcagtcatggacggggccatcgcctctggcgtgagtaaattcgcgacactctcacttcacgacagaaaggagcgtcatcacgagaaggaccacaaaagaaatcattctatgggtcacatttcaagcaagagttctgataaacttaaccttgtcacaaagactaaaacggatcccgctaagacccttgggacacctttgtgcccacgcatggaggatgttccattgctggaacccctgatctgtaagaaaatagcacacgaaaggctgacagttcttattttcctggaagactgcattgtcacagcctgccaggaagggtttatctgtacctggggaaggcctggcaaggtggtgagcttcaacccatag

SEQ ID NO: 254625 - DNA, 1563 bp, Artificial Sequence
  derived and/or modified sequence
atggctactgaggggggcggcaaggaaatgaacgaaatcaagacacagttcaccaccagagagggattgtataaacttcttccacattccgagtatagccgaccaaacagagttccctttaactcgcagggcagcaatcctgtacgcgtctcattcgttaacctcaacgaccagtcaggtaacggcgaccgactctgtttcaacgtgggtcgggagctgtatttctatatatacaagggcgttcgcaagagacttatcgataagagcagggtcacatgtgtcaaatgggttcctggaagcgaatccctgttcctggtggctcacagctctggaaatatgtatctgtacaacgtagagcatacatgcgggacaacggcacctcactatcagcttctgaaacaaggggaaagctttgccgtgcatacctgtaagagcaagagcacccgcaaccccttgctgaaatggactgtgggtgaaggtgctttgaacgaattcgcgttctcacccgacggaaagttccttgcgtgcgtttctcaggacggcttcctgagagtatttaactttgacagcgttgaacttcacggtactatgaaatcgtatttcggggggctgctatgtgtttgctggtctccagatggcaaatatatcgtgacaggaggagaggatgacctggttacagtctggtctttcgtggattgcagagtgattgctagaggtcatggacacaaaagctgggtttccgtggtagccttcgacccgtatacaactagtgtggaggagggcgatccaatggagttcagcggatcggacgaggacttccaggatctcctccactttggcagagatagggctaatagcacccagagtcgactgagcaagcgaaattccactgacagccgcccagtgtcggttacttacaggtttggaagcgttggacaggatacccagctttgtttgtgggatctaacggaagacattttatttccccaccaacccttatctagggctaggacacatacgaacgtaatgaatgccacctctccacccgccggaagcaacggcaattccgtgacaacaccagggaacagcgtgcccccgcccttgccacgatctaattctctgccacacagtgccgtgtccaatgctgggagcaaatcttctgtaatggacggcgccatcgcaagtggcgtgagtaagttcgccacactctctcttcacgaccggaaggagaggcaccacgagaaagaccataagcggaatcatagtatgggtcatatcagtagtaagtcttccgacaaacttaacctggtcacaaaaacaaaaacagatcccgctaagaccctgggaactcctctgtgcccaagaatggaagatgtccctctacttgaaccactgatctgtaagaaaattgcacacgagaggctgactgtgctgatctttttggaagactgcatagttacagcatgccaggaaggctttatatgtacatgggggagacctgggaaggtaggatcactttcctctcctagtcaggctagcagtcctggaggaacagtggtgtag

SEQ ID NO: 254626 - DNA, 1536 bp, Artificial Sequence
  derived and/or modified sequence
atgaatgagatcaagacccagttcaccacccgggagggcctgtacaagctgctgccccacagcgagtacagccggcccaacagagtgcccttcaacagccagggcagcaaccctgtgcgggtgtcctttgtgaacctgaatgaccagagcggaaatggagaccggctgtgcttcaacgtgggccgggagctgtacttctacatctacaagggcgtgaggaagaggctgattgacaagagccgggtgacctgtgtgaagtgggtgcccggcagcgagagcctcttcctggtggcccacagcagcggcaacatgtacctgtacaacgtggagcacacctgtggcaccacagccccccactaccagctgctgaagcagggcgagagctttgctgtgcacacctgcaagagcaagagcaccaggaaccccctgctgaagtggacagtgggggagggcgccctgaatgaatttgccttctccccagatggcaagttcctggcctgtgtgtcccaggacggcttcctgcgggtcttcaactttgattctgtggagctgcacggcaccatgaagagctactttggaggcctgctgtgtgtgtgctggagcccagatggcaagtacatcgtgactggaggagaagatgacctggtgacagtgtggagctttgtggactgccgggtgattgcccggggccacggccacaagtcctgggtgtctgtggtggcctttgacccctacaccacctctgtggaggagggggaccccatggagttcagcggcagtgatgaggacttccaggacctgctgcacttcggccgggaccgggccaacagcacccagagccggctgagcaagaggaacagcacagacagcaggcctgtgtctgtgacctacagatttggatctgtgggccaggacacccagctgtgcctgtgggacctgacagaggacatcctcttcccccaccagcccctgagccgggcccggacccacaccaacgtgatgaatgccaccagccccccagctggcagcaatggaaattctgtgaccaccccaggcaacagcgtgcccccacccctgcccaggagcaacagcctgccccacagcgctgtgtccaatgccggcagcaagagctctgtgatggatggagccatcgccagcggcgtgtccaagtttgccaccctgagcctgcatgacaggaaggagcggcaccacgagaaggaccacaagaggaaccacagcatgggccacatcagcagcaagagcagtgacaagctgaacctggtgaccaagaccaagacagatcctgccaagaccctgggcacccccctgtgccccaggatggaggatgtgcccctgctggagcccctcatctgcaagaagatcgcccacgagcggctgactgtgctgatcttcctggaggactgcatcgtgacagcctgccaggagggcttcatctgcacctggggccggcctgggaaggtgggcagcctgagcagccccagccaggccagcagccctgggggcaccgtggtgtag

SEQ ID NO: 254627 - DNA, 939 bp, Artificial Sequence
  derived and/or modified sequence
atgaagagctactttggaggcctgctgtgtgtgtgctggagcccagatggcaagtacatcgtgactggaggagaagatgacctggtgacagtgtggagctttgtggactgcagggtcatcgcccggggccacggccacaagtcctgggtgtctgtggtggcctttgacccctacaccacctctgtggaggagggggaccccatggagttcagcggcagtgatgaggacttccaggacctgctgcacttcggccgggaccgggccaacagcacccagagccggctgagcaagaggaacagcacagacagcaggcctgtgtctgtgacctaccgcttcggctctgtgggccaggacacccagctgtgcctgtgggacctgacagaggacatcctcttcccccaccagcccctgagccgggcccggacccacaccaacgtgatgaatgccaccagccccccagctggcagcaatggaaacagcgtgaccaccccaggcaacagcgtgcccccacccctgcccaggagcaacagcctgccccacagcgctgtgtccaatgccggcagcaagagctctgtgatggatggagccatcgccagcggcgtgtccaagtttgccaccctgagcctgcatgacaggaaggagcggcaccacgagaaggaccacaagaggaaccacagcatgggccacatcagcagcaagagcagtgacaagctgaacctggtgaccaagaccaagacagatcctgccaagaccctgggcacccccctgtgccccaggatggaggatgtgcccctgctggagcccctcatctgcaagaagatcgcccacgagcggctgactgtgctgatcttcctggaggactgcatcgtgacagcctgccaggagggcttcatctgcacctggggccggcctgggaaggtggtgtccttcaacccctag

SEQ ID NO: 254628 - DNA, 1191 bp, Artificial Sequence
  derived and/or modified sequence
atgtacctgtacaacgtggagcacacctgtggcaccacagccccccactaccagctgctgaagcagggcgagagctttgctgtgcacacctgcaagagcaagagcaccaggaaccccctgctgaagtggacagtgggggagggcgccctgaatgaatttgccttctccccagatggcaagttcctggcctgtgtgtcccaggacggcttcctgcgggtcttcaactttgacagcgtggagctgcacggcaccatgaagagctactttggaggcctgctgtgtgtgtgctggagcccagatggcaagtacatcgtgactggaggagaagatgacctggtgacagtgtggagctttgtggactgcagggtcatcgcccggggccacggccacaagtcctgggtgtctgtggtggcctttgacccctacaccacctctgtggaggagggggaccccatggagttcagcggcagtgatgaggacttccaggacctgctgcacttcggccgggaccgggccaacagcacccagagccggctgagcaagaggaacagcacagacagcaggcctgtgtctgtgacctaccgcttcggctctgtgggccaggacacccagctgtgcctgtgggacctgacagaggacatcctcttcccccaccagcccctgagccgggcccggacccacaccaacgtgatgaatgccaccagccccccagctggcagcaatggaaacagcgtgaccaccccaggcaacagcgtgcccccacccctgcccaggagcaacagcctgccccacagcgctgtgtccaatgccggcagcaagagctctgtgatggatggagccatcgccagcggcgtgtccaagtttgccaccctgagcctgcatgacaggaaggagcggcaccacgagaaggaccacaagaggaaccacagcatgggccacatcagcagcaagagcagtgacaagctgaacctggtgaccaagaccaagacagatcctgccaagaccctgggcacccccctgtgccccaggatggaggatgtgcccctgctggagcccctcatctgcaagaagatcgcccacgagcggctgactgtgctgatcttcctggaggactgcatcgtgacagcctgccaggagggcttcatctgcacctggggccggcctgggaaggtggtgtccttcaacccctag

SEQ ID NO: 254629 - DNA, 1527 bp, Artificial Sequence
  derived and/or modified sequence
atggccacagaaggaggcggcaaggagatgaatgagatcaagacccagttcaccacccgggagggcctgtacaagctgctgccccacagcgagtacagccggcccaacagagtgcccttcaacagccagggcagcaaccctgtgcgggtgtcctttgtgaacctgaatgaccagagcggaaatggagaccggctgtgcttcaacgtgggccgggagctgtacttctacatctacaagggcgtgaggaagaggctgattgacaagagccgggtgacctgtgtgaagtgggtgcccggcagcgagagcctcttcctggtggcccacagcagcggcaacatgtacctgtacaacgtggagcacacctgtggcaccacagccccccactaccagctgctgaagcagggcgagagctttgctgtgcacacctgcaagagcaagagcaccaggaaccccctgctgaagtggacagtgggggagggcgccctgaatgaatttgccttctccccagatggcaagttcctggcctgtgtgtcccaggacggcttcctgcgggtcttcaactttgacagcgtggagctgcacggcaccatgaagagctactttggaggcctgctgtgtgtgtgctggagcccagatggcaagtacatcgtgactggaggagaagatgacctggtgacagtgtggagctttgtggactgcagggtcatcgcccggggccacggccacaagtcctgggtgtctgtggtggcctttgacccctacaccacctctgtggaggagggggaccccatggagttcagcggcagtgatgaggacttccaggacctgctgcacttcggccgggaccgggccaacagcacccagagccggctgagcaagaggaacagcacagacagcaggcctgtgtctgtgacctaccgcttcggctctgtgggccaggacacccagctgtgcctgtgggacctgacagaggacatcctcttcccccaccagcccctgagccgggcccggacccacaccaacgtgatgaatgccaccagccccccagctggcagcaatggaaacagcgtgaccaccccaggcaacagcgtgcccccacccctgcccaggagcaacagcctgccccacagcgctgtgtccaatgccggcagcaagagctctgtgatggatggagccatcgccagcggcgtgtccaagtttgccaccctgagcctgcatgacaggaaggagcggcaccacgagaaggaccacaagaggaaccacagcatgggccacatcagcagcaagagcagtgacaagctgaacctggtgaccaagaccaagacagatcctgccaagaccctgggcacccccctgtgccccaggatggaggatgtgcccctgctggagcccctcatctgcaagaagatcgcccacgagcggctgactgtgctgatcttcctggaggactgcatcgtgacagcctgccaggagggcttcatctgcacctggggccggcctgggaaggtggtgtccttcaacccctag

SEQ ID NO: 254630 - DNA, 1563 bp, Artificial Sequence
  derived and/or modified sequence
atggccacagaaggaggcggcaaggagatgaatgagatcaagacccagttcaccacccgggagggcctgtacaagctgctgccccacagcgagtacagccggcccaacagagtgcccttcaacagccagggcagcaaccctgtgcgggtgtcctttgtgaacctgaatgaccagagcggaaatggagaccggctgtgcttcaacgtgggccgggagctgtacttctacatctacaagggcgtgaggaagaggctgattgacaagagccgggtgacctgtgtgaagtgggtgcccggcagcgagagcctcttcctggtggcccacagcagcggcaacatgtacctgtacaacgtggagcacacctgtggcaccacagccccccactaccagctgctgaagcagggcgagagctttgctgtgcacacctgcaagagcaagagcaccaggaaccccctgctgaagtggacagtgggggagggcgccctgaatgaatttgccttctccccagatggcaagttcctggcctgtgtgtcccaggacggcttcctgcgggtcttcaactttgacagcgtggagctgcacggcaccatgaagagctactttggaggcctgctgtgtgtgtgctggagcccagatggcaagtacatcgtgactggaggagaagatgacctggtgacagtgtggagctttgtggactgcagggtcatcgcccggggccacggccacaagtcctgggtgtctgtggtggcctttgacccctacaccacctctgtggaggagggggaccccatggagttcagcggcagtgatgaggacttccaggacctgctgcacttcggccgggaccgggccaacagcacccagagccggctgagcaagaggaacagcacagacagcaggcctgtgtctgtgacctaccgcttcggctctgtgggccaggacacccagctgtgcctgtgggacctgacagaggacatcctcttcccccaccagcccctgagccgggcccggacccacaccaacgtgatgaatgccaccagccccccagctggcagcaatggaaacagcgtgaccaccccaggcaacagcgtgcccccacccctgcccaggagcaacagcctgccccacagcgctgtgtccaatgccggcagcaagagctctgtgatggatggagccatcgccagcggcgtgtccaagtttgccaccctgagcctgcatgacaggaaggagcggcaccacgagaaggaccacaagaggaaccacagcatgggccacatcagcagcaagagcagtgacaagctgaacctggtgaccaagaccaagacagatcctgccaagaccctgggcacccccctgtgccccaggatggaggatgtgcccctgctggagcccctcatctgcaagaagatcgcccacgagcggctgactgtgctgatcttcctggaggactgcatcgtgacagcctgccaggagggcttcatctgcacctggggccggcctgggaaggtgggcagcctgagcagccccagccaggccagcagccctgggggcaccgtggtgtag

SEQ ID NO: 254631 - DNA, 1536 bp, Artificial Sequence
  derived and/or modified sequence
atgaacgagatcaagacccagttcaccacccgggagggcctgtacaaactcttgccccattctgaatatagtaggcccaacagagttcccttcaattcccaggggtcgaatcctgtacgagtgtctttcgtgaatctgaacgatcagtctggcaatggagataggctctgttttaatgtgggccgggaactgtacttttacatctacaagggcgtgaggaagcggctgattgacaagtcccgggtgacttgtgtcaagtgggtgcctggtagcgagtccctgttcctagtggcacactcctctgggaacatgtatctttataacgtggaacatacttgcggaactacagcaccgcattatcaactactgaaacaaggagagtcctttgccgtgcacacttgcaagagcaaaagcactcgcaaccctttgttaaaatggactgttggggagggagctctgaatgagtttgcgttttccccggacgggaagtttctggcctgtgtaagccaagacggattcttgcgagtgttcaacttcgacagtgtagagctgcacgggactatgaaatcttactttgggggtctgctctgcgtttgctggagtcccgatggaaaatacattgtcactggtggcgaggatgacctcgtgactgtatggagtttcgtggactgccgggttatcgcccgtggacacggccataaatcttgggtgtccgtggttgccttcgatccttacaccacttccgtagaagaaggcgatccaatggaattcagtggcagcgacgaggatttccaggatttgctgcattttggccgggacagggctaattctacacaatcacggctgtccaaacggaactccacagatagcaggcccgtgtccgtaacgtataggttcgggtctgtgggtcaggatacccagctttgcctttgggacctgacggaagacatcctattcccgcaccaacctttatcccgggcgcgcacgcacaccaacgttatgaatgccacgtccccaccggcaggatccaacgggaactctgtgaccacacctgggaacagcgtacctcctccattacccaggtccaattccctcccacattctgcagtcagcaacgcaggctccaaatcttccgtgatggacggcgcaattgcatcgggtgtttcaaagttcgcgactctgtctttacatgacaggaaagagcgtcatcacgaaaaagaccacaagcggaatcactcgatgggccacatcagtagcaagtccagtgataagcttaatttggtgaccaaaacaaaaactgaccccgctaagaccctcggaacaccactttgccctagaatggaagatgtacccctgctggagccactgatttgtaaaaaaattgcgcacgagcgactgaccgtcctaattttcctagaggactgtattgtcaccgcttgccaggagggcttcatctgcacgtggggcaggccaggcaaagttggatctcttagttctccctctcaagcatcttctcctggcggcaccgtagtgtag

SEQ ID NO: 254632 - DNA, 939 bp, Artificial Sequence
  derived and/or modified sequence
atgaagagctacttcggcggcctgctgtgcgtgtgctggagccccgatgggaaatatatcgtcacgggaggggaggatgacctggtcactgtgtggtcttttgtggactgtcgagtaatcgcccggggccacggccacaagtcatgggtgtctgtagtggcctttgatccctatactacctctgtcgaagaaggtgaccccatggaattctcagggagcgacgaggacttccaggatctgctgcactttggcagagacagggctaactccacccagagtcgcttatcgaagcggaattccaccgattcacgcccagtgtcggtcacttatcggtttggcagcgtagggcaggatacacagctttgtctgtgggacctgacagaagatatcctcttcccgcatcaacccctctctcgcgctagaacccacaccaatgtgatgaatgctacgtcccctcctgcaggctctaatggtaattccgttaccactcccggcaactctgtgccgccacctctgccacgcagtaactctttgccacattctgctgtttcaaatgctggatctaagagcagcgtgatggacggggcaattgctagcggagttagcaagttcgcgactctcagtctgcacgacagaaaagagcggcatcacgaaaaggaccacaagcgtaaccattccatggggcacatctcaagcaaaagttccgataaattgaacttagttactaagactaagacagacccagccaagaccctcgggacaccattgtgtccaagaatggaggatgtgccactgctggagcctttgatctgcaagaaaattgcccatgaaaggctcactgtgctgatctttctggaggattgtattgtaacggcctgtcaggaaggattcatctgtacgtggggcaggcctggaaaggtggtgagttttaacccatag

SEQ ID NO: 254633 - DNA, 1191 bp, Artificial Sequence
  derived and/or modified sequence
atgtacctgtacaacgtggagcacacctgcggcaccaccgccccccactatcagctgttaaaacagggggagtcttttgcagtccacacatgtaaaagtaagtcaactaggaacccccttctgaaatggaccgtcggtgagggggccttaaacgagttcgcttttagcccagatggcaagttcctggcttgtgtgagccaggatggatttctccgagtgtttaactttgacagtgtggaacttcacggaactatgaagtcctattttggtggcttactgtgcgtgtgttggagccctgatggaaagtatatcgtgactggcggagaagacgacttagtgacggtctggagcttcgtagactgtcgtgtgattgcgaggggacatgggcacaaatcatgggtatcagtggtggcgttcgatccatacactacatccgtggaggagggggaccccatggagttcagcgggtccgatgaagattttcaggatctgttgcactttggacgcgacagagccaattccacgcaaagtaggctgtcaaagagaaattcaaccgatagccgtcccgtgagcgtcacttatcgcttcgggtccgtgggtcaggatacacaactctgtctctgggacctcactgaagatatactcttccctcaccaaccactgtcacgcgcgagaacacacaccaatgtcatgaacgcgacctctccgcctgccggcagcaacgggaactctgtcaccacacctggcaactccgttccaccccccctgcctcgatctaactcgctccctcacagtgccgtctccaatgcaggttctaaatcgagcgtgatggatggggctattgccagcggcgtctctaaattcgccactctgtctcttcacgacaggaaggagcggcatcacgagaaggatcataagcgtaatcattcgatgggtcatatcagcagtaagagttccgataaactgaacctggtgacgaaaaccaagacggacccagctaagacattagggacaccattgtgcccacggatggaggacgttcccttgctggaaccactgatctgcaaaaagatcgctcatgaacggttaaccgtcctaatctttctcgaggattgcatcgtgacggcatgccaagaagggtttatttgcacgtgggggcgcccaggtaaagtggtgagctttaatccctag

SEQ ID NO: 254634 - DNA, 1527 bp, Artificial Sequence
  derived and/or modified sequence
atggccaccgagggcggcggcaaggagatgaacgagatcaagacccagttcactactcgcgaggggctctataaactgttaccacactctgagtactcccgtccaaatcgagtgccctttaactcccagggtagcaaccccgtgagagtctcattcgtcaaccttaacgatcagagcggaaatggggatcggttatgcttcaatgttggtagagaactgtacttctatatctataagggtgtgaggaaaagactgattgataaatctagggtgacatgtgtcaaatgggtcccaggcagtgagagtctttttttagtagcccactcctccggtaacatgtatctctataacgtggagcacacttgtggaaccacagctccccattatcagttgttaaagcagggggaatcatttgccgtgcatacatgcaagagcaaatctaccagaaatccgctgctcaaatggaccgttggggagggcgcattgaacgaatttgccttctctcccgacggcaaatttttggcctgcgtatcacaggacggctttctgagggtcttcaacttcgattccgtcgagctccatggaactatgaagtcttactttggtggtctcctgtgcgtttgttggtctcccgacggtaagtacatcgtcactggaggtgaggacgacctcgtgaccgtctggagctttgtagactgccgtgtgattgcaagaggacacggtcataagtcttgggtaagcgtggtggcttttgacccttacaccacttctgtcgaagagggggatcctatggaattctccggcagtgacgaggacttccaagatctgttgcatttcggtagggatcgagcaaactctacccagtcacggctgtcaaagcgaaattctaccgattcacgacctgttagtgtaacatacagattcggttccgtcgggcaggacacccagctttgtctttgggaccttacagaagatatcttattcccccatcagcccctgtcacgggcacggacccacactaacgtaatgaacgcgaccagcccccccgctggatctaacgggaactccgtaactactcctgggaactcggtgcctccccccctcccaagatcaaacagtttacctcactctgcggtctccaacgctggctcaaaaagcagtgtaatggatggagctattgcgtcgggagtgtctaaatttgctacattgtctctccacgatcgcaaggaacggcaccacgaaaaagaccataagagaaaccactctatgggccacatctccagcaagtcctccgataagttgaaccttgtgaccaaaacaaaaactgatcctgccaaaacgctcggaactcctctctgcccccgaatggaggacgtcccgctacttgagcccctgatctgcaagaagattgcgcatgaaaggctcacagtgttaatcttcctggaggactgtatcgtaaccgcatgtcaggagggttttatctgcacctgggggcgtccgggtaaggtcgtatcctttaacccatag

SEQ ID NO: 254635 - DNA, 1563 bp, Artificial Sequence
  derived and/or modified sequence
atggccaccgagggcggcggcaaggagatgaacgagatcaagacccagttcactactcgcgaaggactgtacaagctgctgcctcactccgaatattcaagaccaaatagggtgccatttaacagtcaagggtccaacccggttagagtgagctttgtgaacctcaatgatcaaagcgggaacggtgaccgcttgtgcttcaacgttgggagagaactctatttctatatctataagggggtccgcaaaagactgatcgacaagtccagagtgacgtgtgtgaagtgggtgccgggttctgagtccctcttcctggtcgcacactccagtggcaacatgtacctctataatgtggagcacacctgcggaaccactgcccctcactatcagctgctgaaacagggtgagtcttttgccgttcacacatgcaagagcaagtccacacgaaatccactgctcaagtggactgtaggagagggagcactgaacgagttcgcgttttcccctgatggcaaattcctggcatgtgtctcgcaggatggattcctcagggtgtttaacttcgactctgtcgaacttcacggcacaatgaagagctactttgggggactgctgtgtgtgtgttggtcaccagatggcaaatacattgtgactggaggggaagatgacctggtcactgtgtggtccttcgtggattgtcgcgtaattgcgcgcggccacgggcacaagagctgggtgtctgtcgttgcctttgatccctatactacatctgtggaagagggcgaccccatggagttctctggtagcgacgaggacttccaagatttgctgcattttggtagagaccgagccaacagtacccagtctcgcctttctaagcggaatagtacggactcacgcccagtgtcagtgacctatagatttggctcagtcggccaggacacccagctatgcttgtgggacctcacagaggacattctgtttcctcaccaaccacttagccgggccaggacacataccaatgtaatgaacgcaacaagccccccagcaggtagtaacggcaactccgtgacaacacctgggaattccgtccccccaccccttccacgctccaatagtcttccccatagcgcagtgagcaatgcagggtcgaaaagctccgttatggacggtgccattgcttctggagttagtaaatttgccactctcagtctacatgacagaaaagaaagacatcatgaaaaggaccataagagaaatcactctatgggacacatctctagcaaatcgagtgacaaactgaatctcgtgacaaaaacgaaaacagatccagccaagaccctgggcacccctctgtgccctaggatggaagatgttcctctgctggagcccttaatttgcaagaaaatagctcatgagaggctgacagtgttaatctttttagaagattgtatcgtgacggcttgccaagagggcttcatttgcacctggggccgaccgggaaaggtcggatcactgtcatcacctagccaggcaagctcccctggagggactgtcgtatag

SEQ ID NO: 254636 - DNA, 1536 bp, Artificial Sequence
  derived and/or modified sequence
atgaacgaaattaagacccagtttactacgagggaagggctttacaaattgctgccacatagcgagtacagcaggcctaatcgggtacccttcaattctcagggctcaaatcccgtccgggtgtctttcgtaaacttaaacgaccagtctggcaatggggaccgtttatgttttaacgtggggagagagctttatttttatatctacaaaggagtgcggaagcgtctgatcgataagagcagggtaacttgtgtgaagtgggtccctggctcagaaagcctgttcctggtggcccattcctccggtaacatgtacttatataatgtggaacacacttgtggcacaacagcgccacattaccagcttctcaaacagggcgagtcctttgcagtgcatacttgtaagagcaaatctacccggaacccccttttaaagtggacagtgggcgaaggagccctgaacgaatttgcctttagtccagacggcaagtttttggcctgcgtgagccaggatggctttctccgggtctttaactttgactctgtcgagttgcacggaaccatgaagtcttactttggaggcctcctgtgcgtgtgctggagccctgacggcaagtatattgtgactggtggggaggatgacctggtgacagtatggtcgtttgtggactgtagagtgatcgcgcgaggacacggacacaagtcctgggtctcagtggtggcctttgatccatatactaccagcgtggaggaaggagatcccatggagttctccgggagcgatgaagacttccaggacctgctgcacttcggcagagatagggcgaattctacacagtcccgattgtccaaacgtaattcaaccgatagtaggccagtgtctgtgacataccggtttgggtctgtcggacaggatacacagctttgtctttgggatctcactgaggacattctgttcccgcaccagccgctctcacgtgcccgtacacacaccaatgtgatgaatgcaacgagcccaccagccggttccaatgggaatagtgtgaccactcctggcaattccgtgcccccacctctgcctcgaagcaatagcctcccccatagtgccgtgagcaatgccggtagtaagagttcggtcatggacggagccatagcaagtggtgtatcaaagtttgcgacgttgagtctccatgaccggaaggagcgccatcacgagaaagatcacaaaagaaaccattcaatgggacacatctcatctaagtcttctgataaactaaatctggtgaccaaaacaaaaacagaccctgctaaaactctgggaactccactttgcccacgaatggaagacgtcccccttctggagccactaatctgtaagaagatcgctcacgagcgcctcacagttctgatctttctggaagattgcattgtgaccgcctgccaggagggatttatttgtacatgggggaggcctggaaaagttgggagtctgtcttctccatctcaagctagttcacctggcggaacagtggtgtag

SEQ ID NO: 254637 - DNA, 939 bp, Artificial Sequence
  derived and/or modified sequence
atgaaaagttactttggagggctgctgtgcgtgtgctggtctccagatggcaagtatatagtgaccggcggagaggatgaccttgtaaccgtatggagtttcgtggactgtcgggtgatagcacgcggacatggtcataagtcttgggtgtccgttgtggcattcgacccttatacaacttccgtcgaggaaggcgaccccatggaattcagtgggtctgatgaggacttccaggacttgctacattttgggcgagaccgcgctaattctacccagagccgcctgagcaagagaaacagtactgatagccggcctgtgagcgtcacataccgatttgggtccgtaggccaggacacccaactgtgcctgtgggatcttacggaggacattttgtttccacaccagcctctgagccgtgcacgaacccacactaatgtcatgaatgcaacaagccctcctgccggtagcaacgggaactccgtgaccacgccgggaaactcggttcccccaccactgccacgctcaaatagtttgccgcatagcgcagtgtccaacgccggtagtaagtctagtgttatggacggagcgatagccagtggtgttagcaagtttgccaccttaagcctccacgacagaaaggaacgccatcatgagaaagatcataagaggaaccattcaatggggcacataagctctaagagttcagacaaactcaatctcgttaccaaaaccaaaacggaccccgcaaagaccctgggtactccactgtgcccgaggatggaggatgttccacttctggaaccactcatctgtaaaaaaattgcccacgaaaggctaaccgtgcttatttttctggaagactgcatcgtgacagcctgtcaggaagggttcatctgtacctgggggcgaccgggtaaggtagtgagttttaatccatag

SEQ ID NO: 254638 - DNA, 1191 bp, Artificial Sequence
  derived and/or modified sequence
atgtacctgtacaatgtggagcacacttgtgggacaacggccccacactatcagctcttgaagcagggtgagtcattcgctgtccacacatgcaagtccaagtccaccaggaatccccttctcaagtggactgtgggagagggggcactgaatgagtttgccttcagtcctgatgggaagtttctagcatgtgttagtcaggacggcttcctgagagtgttcaactttgacagtgtggagctgcacggcacgatgaagtcctattttgggggtctcctctgtgtgtgctggagccccgacggaaagtatattgtgaccggtggggaggacgatctcgttacggtatggtcattcgtcgattgccgcgtaatcgcgagggggcatgggcataaaagttgggtgtcagtagtagccttcgatccttataccacgtccgtggaagagggcgacccaatggagttttctggctctgacgaggatttccaggacttactgcactttggtagggaccgggcaaattctacccagagccgactctcaaaacgcaacagcactgactcacgaccggtctcggtgacttatcgtttcggcagcgtcggtcaggatacacagctgtgcctatgggatttaaccgaagacattctctttccacaccagcccctgagtcgagccaggactcacacaaacgttatgaacgccacctctcctcccgctgggtcgaatggaaactcagtgacaactcccggaaacagtgtcccaccacccctgcctaggagcaactcgctaccccattccgctgtgtccaatgcaggatcaaagtccagcgtgatggatggtgccattgccagcggcgtgtccaaatttgcgacgctgtccctgcatgacagaaaagagcgacaccatgaaaaagaccacaagagaaaccactccatggggcacatctcttccaaatcaagtgataagttaaacctagttacgaagacaaaaactgacccggctaagacactcggaacgccactctgtccacgaatggaagatgttccgcttctcgagcccctaatctgcaaaaagatcgcccatgagcgcctcactgtgcttatctttctggaggattgtattgtgaccgcctgccaggagggcttcatctgtacgtggggacgtcctggcaaggttgtcagtttcaatccatag

SEQ ID NO: 254639 - DNA, 1527 bp, Artificial Sequence
  derived and/or modified sequence
atggccaccgaagggggaggaaaggagatgaacgaaatcaaaactcagttcaccacacgggaaggtctgtacaaattactcccacactccgaatatagcagacccaaccgagtgcccttcaactctcagggctccaatcctgtaagagtctcttttgtgaacttgaatgaccagtcaggtaacggtgaccgactttgttttaacgtcgggagggaactgtacttttacatttacaagggagtcaggaagcgcctgattgacaagtcacgggttacttgcgttaaatgggtcccaggttctgagagccttttcctggtggctcacagcagcggcaacatgtacctttacaatgttgagcatacctgtggaaccactgccccacattaccagttgctgaaacagggcgagagctttgcggtgcatacttgcaaaagcaagtccaccaggaaccccctgctcaaatggacggtgggagaaggggcactcaacgaatttgcattctcccctgacggtaagtttttggcctgcgtttcacaggacggtttcctgcgggtgtttaatttcgatagcgttgagttgcatggcacgatgaagtcatactttggaggtctgctttgtgtgtgctggagccccgatgggaagtatatcgtcacagggggtgaggatgatttggtaacagtgtggagcttcgtcgactgcagagtgattgccagaggtcacggacacaagtcctgggtgagtgtagtggcgtttgacccttatactacctcggtggaggaaggggatccaatggagtttagcgggagtgatgaggacttccaagacctgctccacttcgggagggatcgcgcaaacagcactcaaagcaggctttctaaacgtaattccaccgatagccgaccagtatctgtgacctatcgttttggcagtgtgggtcaagatacacagttatgtctctgggacctcacagaagatatcctctttcctcaccagcccctctcccgtgcgcgaacccacaccaacgtgatgaatgctacttcccccccagctggcagtaacgggaactctgtaaccacgcctggcaatagcgtacccccacccctgcctcgcagcaactctctgccccattcagctgtgagcaatgccggaagtaagagtagtgtcatggacggggcaatcgcttccggtgtgtctaaattcgccactctctccttacacgataggaaggaaagacaccacgaaaaggatcacaagcgcaaccactcaatgggacacatatcgtctaaatcatccgacaagctaaaccttgtgacaaagaccaaaactgacccagccaagacattgggcaccccactctgccctaggatggaagacgttccattactggagcccctgatctgtaagaaaattgcacatgagcggctaaccgtgctgattttcttggaagactgtattgtgactgcatgccaggaaggttttatctgcacatgggggagaccaggtaaggtggttagtttcaatccatag

SEQ ID NO: 254640 - DNA, 1563 bp, Artificial Sequence
  derived and/or modified sequence
atggccacggagggcggaggaaaagaaatgaacgaaattaaaacacagtttaccactagggagggcctgtacaaacttctgccgcatagcgagtattctagacctaaccgggtgcccttcaacagtcagggctccaacccagttagggtctcattcgtgaaccttaatgaccagagtggtaacggcgacagattatgtttcaatgtgggcagagagctatatttctatatctacaagggggtcagaaagagactgatcgacaaatccagggtgacctgcgtgaaatgggtgcccggttccgaaagtctattcctcgttgcacactccagcgggaacatgtatctctataacgtggaacatacctgcgggacaaccgctccacactatcagttattgaaacagggagagtcatttgccgtgcacacatgcaaaagtaagtcgaccaggaatcctctgttgaagtggacagtgggagagggagcactgaatgaatttgcattctcgccagatggcaagttcctggcatgcgtgtcacaagacggtttcttgcgggtgttcaattttgattcagttgagctgcatgggacaatgaagagttatttcggcggtttgctgtgtgtgtgttggtcacctgatggcaagtacattgtcactgggggtgaagacgacctcgtgaccgtgtggtccttcgtcgactgcagggtgatcgctcggggtcacggtcacaagtcctgggtgagtgttgtcgcctttgatccatacaccaccagcgtcgaagagggggatccaatggagttctctggatcagatgaagatttccaggacctgctccatttcggacgggatcgggcaaactcgacacagagcagactgtccaaaaggaattccacagacagccgccctgtgtcagtcacctaccgattcgggagtgttggacaggatacccaactgtgcctttgggatctgaccgaggatattttgttcccgcatcagcctctctcgcgtgcacgcacgcacaccaacgtcatgaacgccacttccccgccagcgggaagcaacggcaattctgttacaacccctggaaactccgttccgccacccttaccacggtccaactccctgccacactcggccgtgtcaaatgccggaagcaagagcagcgtgatggacggcgctatagcatcaggagtgagtaagttcgcgaccctgtcactgcatgataggaaggagagacatcacgaaaaagaccacaagcgaaaccattccatgggccacatctcaagcaagtctagtgataagctgaatctggtcacaaaaactaagaccgatccagccaaaacgctagggaccccactctgtccccgaatggaggatgtacctttactggagccccttatttgtaagaagattgctcatgagagattaaccgttttgatatttctggaggactgtatcgttacagcctgtcaggaaggctttatttgcacttggggcaggcctggaaaggtagggagtctttcctcacccagccaggcatcgtctcccggaggcactgtcgtgtag

SEQ ID NO: 254641 - DNA, 2347 bp, Artificial Sequence
  derived and/or modified sequence
gcgacggagggaggagggaaggagatgaacgagattaagacccaattcaccacccgggaaggtctgtacaagctgctgccgcactcggagtacagccggcccaaccgggtgcccttcaactcgcagggatccaaccctgtccgcgtctccttcgtaaacctcaacgaccagtctggcaacggcgaccgcctctgcttcaatgtgggccgggagctgtacttctatatctacaagggggtccgcaagagactaatagacaagtcacgagttacctgtgtcaaatgggttcccggttcggaaagccttttcctagtagcccactcgagtgggaacatgtacttatataatgtggagcacacttgtggcaccacagccccccactaccagcttctgaagcagggagagagctttgccgtgcacacttgcaagagcaaatccacgaggaaccctctccttaagtggacggtgggcgagggggccctcaacgagtttgctttctccccagatggcaagttcttagcgtgcgtgagccaggacgggtttctgcgggtgttcaactttgactcagtggagctgcacggtacgatgaaaagctactttgggggcttgctgtgtgtgtgctggagcccggatggcaagtacatcgtgacaggtggggaggacgacttggtgacagtctggtcctttgtagactgccgagtaatagccagaggccacgggcacaagtcctgggtcagtgttgtagcgtttgacccttataccactagtgtagaagaaggtgaccctatggagtttagtggcagcgatgaggacttccaagaccttcttcattttggcagagatcgagcaaatagtacacagtccaggctctccaaacggaactctacagacagccgccccgtaagtgtcacgtatcggtttggttccgtgggccaggacacacagctctgtttatgggaccttacagaagatatccttttccctcaccaacccctctcaagagcaaggacacacacaaatgtcatgaatgccacgagtcctcctgctggaagcaatgggaacagtgttacaacacccgggaactctgtgccgcctcctctgccacggtccaacagccttccacattcagcagtctcaaatgctggcagcaaaagcagtgtcatggacggggccattgcttctggggtcagcaaatttgcaacactttcactacatgaccggaaggagaggcaccacgagaaagatcacaagcgaaatcatagcatgggacacatttctagcaagagcagtgacaaactgaatctagttaccaaaaccaaaacggaccctgctaaaactctgggaacgcccctgtgtcctcgaatggaagatgttcccttgttagagccgctgatatgtaaaaagatagcacatgagagactgactgtactaatatttcttgaagactgtatagtcactgcttgtcaggagggatttatttgcacatggggaaggcctggtaaagtgggctcattgtcatccccaagccaggccagttctccaggtggaactgtagtgtagcgacctcactgctgcgcgcacagtctcccgggacttggactcgagggagtgacgaggaggagctccgagctgcgcctgagccgtgccagccggcggacctcaggcggtggacgtcggcgatagccgtgtggacggtgaccggctcactctgcggcgccgtgctcccgctgctcacccaaagaagttgtttccattttaaaccggtcttttggggctgcagtaaaaaataagaaatggagttttcttgctttttactctaaaattcaatgtaattaaatttcatatatatataatatatacatatatacatagtgtaaaataaaatgtttcttggacaagaaatcccctgaaattcagctgttatagtgcttcactgtttttgcactgatttttctataccttaggtggtcagaagacaaccttgaatgcactcatagagaaaactgttactttctgacgtaatgtaattcaggaagacagacgctgcaatcacagattttaaaaaattgtttgcacttaaaaatagttgaatgctggtggaaagttactttgcagatgggtgtaaggactcatggccctctgaggtgcggcgtgaagatgccctttttacccgttgacgtttattttacgtaaaataaactgttgtttccaatgcaatcaactctgtattatatgtataaatattgtaattctgcaattggggaaaatagttacttcactagtaattttcatcatttaagagtgatatttctaattcacaaaagttaatattaaaactatcttgaat

SEQ ID NO: 254642 - DNA, 2175 bp, Artificial Sequence
  derived and/or modified sequence
acttagggcaggatgaacgctgctttccaagatggcgacggagggaggagggaaggagatgaacgagattaagacccaattcaccacccgggaaggtctgtacaagctgctgccgcactcggagtacagccggcccaaccgggtgcccttcaactcgcagggatccaaccctgtccgcgtctccttcgtaaacctcaacgaccagtctggcaacggcgaccgcctctgcttcaatgtgggccgggagctgtacttctatatctacaagggggtccgcaagacaatcccatgaggttggtagaacagagattctcatctccgttttaactgaggctgctgacttgagtaaaccaatagataaaaggatatacaaaggaacacagcctacttgtcatgacttcaaccacctaacagccacagcagaaagtgtctctctcctagtgggcttttccgcaggccaagtccagcttatagacccaatcaaaaaagaaactagcaaactttttaatgaggaaatggcaagttcttagcgtgcgtgagccaggacgggtttctgcgggtgttcaactttgactcagtggagctgcacggtacgatgaaaagctactttgggggcttgctgtgtgtgtgctggagcccggatggcaagtacatcgtgacaggtggggaggacgacttggtgacagtctggtcctttgtagactgccgagtaatagccagaggccacgggcacaagtcctgggtcagtgttgtagcgtttgacccttataccactagtgtagaagaaggtgaccctatggagtttagtggcagcgatgaggacttccaagaccttcttcattttggcagagatcgagcaaatagtacacagtccaggctctccaaacggaactctacagacagccgccccgtaagtgtcacgtatcggtttggttccgtgggccaggacacacagctctgtttatgggaccttacagaagatatccttttccctcaccaacccctctcaagagcaaggacacacacaaatgtcatgaatgccacgagtcctcctgctggaagcaatgggaacagtgttacaacacccgggaactctgtgccgcctcctctgccacggtccaacagccttccacattcagcagtctcaaatgctggcagcaaaagcagtgtcatggacggggccattgcttctggggtcagcaaatttgcaacactttcactacatgaccggaaggagaggcaccacgagaaagatcacaagcgaaatcatagcatgggacacatttctagcaagagcagtgacaaactgaatctagttaccaaaaccaaaacggaccctgctaaaactctgggaacgcccctgtgtcctcgaatggaagatgttcccttgttagagccgctgatatgtaaaaagatagcacatgagagactgactgtactaatatttcttgaagactgtatagtcactgcttgtcaggagggatttatttgcacatggggaaggcctggtaaagtggtaagttttaatccttaatgctgcaccagatctagaacttgaataggtagtgacttttttctttttcgtgggaggggtggggtgtacaatgaatgtgaatgacacttcttattcttaatgtaaatctcaatgcatcagagccataattttggatactgcatgccatgtaattctgaatcatttgataatttaccttagagcatttaaaaaaatataatcaaactaattgccagccaagtcagtcatcctcctgggagtatatagagtcccaaggttagcgctcctgtattagactatttcaattttaggaaaatcatgaccatgtggggaaacaatgactttaaaatgctgaaattaaaatttatgctttaactggaatattttttgcttaactactcaattagaatattgtacacctgatcaatgtgtgttcagcacagatggccatgaattgtcatttatagtccaattttttatcttaatcataaaatgtttaggaatctatgaaatttaactttaggaacaaaacgtttagcagggttgattgatattatttttacattgttctggcaatccacagaaagagaagagccttaatttttaaaacccattttagtcattttatgacaattaaagttgtttaataaacatcttttttc

SEQ ID NO: 254643 - DNA, 2117 bp, Artificial Sequence
  derived and/or modified sequence
atggcgacggagggaggagggaaggagatgaacgagattaagacccaattcaccacccgggaaggtctgtacaagctgctgccgcactcggagtacagccggcccaaccgggtgcccttcaactcgcagggatccaaccctgtccgcgtctccttcgtaaacctcaacgaccagtctggcaacggcgaccgcctctgcttcaatgtgggccgggagctgtacttctatatctacaagggggtccgcaagagactaatagacaagtcacgagttacctgtgtcaaatgggttcccggttcggaaagccttttcctagtagcccactcgagtgggaacatgtacttatataatgtggagcacacttgtggcaccacagccccccactaccagcttctgaagcagggagagagctttgccgtgcacacttgcaagagcaaatccacgaggaaccctctccttaagtggacggtgggcgagggggccctcaacgagtttgctttctccccagatggcaagttcttagcgtgcgtgagccaggacgggtttctgcgggtgttcaactttgactcagtggagctgcacggtacgatgaaaagctactttgggggcttgctgtgtgtgtgctggagcccggatggcaagtacatcgtgacaggtggggaggacgacttggtgacagtctggtcctttgtagactgccgagtaatagccagaggccacgggcacaagtcctgggtcagtgttgtagcgtttgacccttataccactagtgtagaagaaggtgaccctatggagtttagtggcagcgatgaggacttccaagaccttcttcattttggcagagatcgagcaaatagtacacagtccaggctctccaaacggaactctacagacagccgccccgtaagtgtcacgtatcggtttggttccgtgggccaggacacacagctctgtttatgggaccttacagaagatatccttttccctcaccaacccctctcaagagcaaggacacacacaaatgtcatgaatgccacgagtcctcctgctggaagcaatgggaacagtgttacaacacccgggaactctgtgccgcctcctctgccacggtccaacagccttccacattcagcagtctcaaatgctggcagcaaaagcagtgtcatggacggggccattgcttctggggtcagcaaatttgcaacactttcactacatgaccggaaggagaggcaccacgagaaagatcacaagcgaaatcatagcatgggacacatttctagcaagagcagtgacaaactgaatctagttaccaaaaccaaaacggaccctgctaaaactctgggaacgcccctgtgtcctcgaatggaagatgttcccttgttagagccgctgatatgtaaaaagatagcacatgagagactgactgtactaatatttcttgaagactgtatagtcactgcttgtcaggagggatttatttgcacatggggaaggcctggtaaagtggtaagttttaatccttaatgctgcaccagatctagaacttgaataggtagtgacttttttctttttcgtgggaggggtggggtgtacaatgaatgtgaatgacacttcttattcttaatgtaaatctcaatgcatcagagccataattttggatactgcatgccatgtaattctgaatcatttgataatttaccttagagcatttaaaaaaatataatcaaactaattgccagccaagtcagtcatcctcctgggagtatatagagtcccaaggttagcgctcctgtattagactatttcaattttaggaaaatcatgaccatgtggggaaacaatgactttaaaatgctgaaattaaaatttatgctttaactggaatattttttgcttaactactcaattagaatattgtacacctgatcaatgtgtgttcagcacagatggccatgaattgtcatttatagtccaattttttatcttaatcataaaatgtttaggaatctatgaaatttaactttaggaacaaaacgtttagcagggttgattgatattatttttacattgttctggcaatccacagaaagagaagagccttaatttttaaaacc

SEQ ID NO: 254644 - DNA, 2382 bp, Artificial Sequence
  derived and/or modified sequence
acttagggcaggatgaacgctgctttccaagatggcgacggagggaggagggaaggagatgaacgagattaagacccaattcaccacccgggaaggtctgtacaagctgctgccgcactcggagtacagccggcccaaccgggtgcccttcaactcgcagggatccaaccctgtccgcgtctccttcgtaaacctcaacgaccagtctggcaacggcgaccgcctctgcttcaatgtgggccgggagctgtacttctatatctacaagggggtccgcaagagactaatagacaagtcacgagttacctgtgtcaaatgggttcccggttcggaaagccttttcctagtagcccactcgagtgggaacatgtacttatataatgtggagcacacttgtggcaccacagccccccactaccagcttctgaagcagggagagagctttgccgtgcacacttgcaagagcaaatccacgaggaaccctctccttaagtggacggtgggcgagggggccctcaacgagtttgctttctccccagatggcaagttcttagcgtgcgtgagccaggacgggtttctgcgggtgttcaactttgactcagtggagctgcacggtacgatgaaaagctactttgggggcttgctgtgtgtgtgctggagcccggatggcaagtacatcgtgacaggtggggaggacgacttggtgacagtctggtcctttgtagactgccgagtaatagccagaggccacgggcacaagtcctgggtcagtgttgtagcgtttgacccttataccactagtgtagaagaaggtgaccctatggagtttagtggcagcgatgaggacttccaagaccttcttcattttggcagagatcgagcaaatagtacacagtccaggctctccaaacggaactctacagacagccgccccgtaagtgtcacgtatcggtttggttccgtgggccaggacacacagctctgtttatgggaccttacagaagatatccttttccctcaccaacccctctcaagagcaaggacacacacaaatgtcatgaatgccacgagtcctcctgctggaagcaatgggaacagtgttacaacacccgggaactctgtgccgcctcctctgccacggtccaacagccttccacattcagcagtctcaaatgctggcagcaaaagcagtgtcatggacggggccattgcttctggggtcagcaaatttgcaacactttcactacatgaccggaaggagaggcaccacgagaaagatcacaagcgaaatcatagcatgggacacatttctagcaagagcagtgacaaactgaatctagttaccaaaaccaaaacggaccctgctaaaactctgggaacgcccctgtgtcctcgaatggaagatgttcccttgttagagccgctgatatgtaaaaagatagcacatgagagactgactgtactaatatttcttgaagactgtatagtcactgcttgtcaggagggatttatttgcacatggggaaggcctggtaaagtgggctcattgtcatccccaagccaggccagttctccaggtggaactgtagtgtagcgacctcactgctgcgcgcacagtctcccgggacttggactcgagggagtgacgaggaggagctccgagctgcgcctgagccgtgccagccggcggacctcaggcggtggacgtcggcgatagccgtgtggacggtgaccggctcactctgcggcgccgtgctcccgctgctcacccaaagaagttgtttccattttaaaccggtcttttggggctgcagtaaaaaataagaaatggagttttcttgctttttactctaaaattcaatgtaattaaatttcatatatatataatatatacatatatacatagtgtaaaataaaatgtttcttggacaagaaatcccctgaaattcagctgttatagtgcttcactgtttttgcactgatttttctataccttaggtggtcagaagacaaccttgaatgcactcatagagaaaactgttactttctgacgtaatgtaattcaggaagacagacgctgcaatcacagattttaaaaaattgtttgcacttaaaaatagttgaatgctggtggaaagttactttgcagatgggtgtaaggactcatggccctctgaggtgcggcgtgaagatgccctttttacccgttgacgtttattttacgtaaaataaactgttgtttccaatgcaatcaactctgtattatatgtataaatattgtaattctgcaattggggaaaatagttacttcactagtaattttcatcatttaagagtgatatttctaattcacaaaagttaatattaaaactatcttgaata

SEQ ID NO: 254645 - protein, 231 aa, Artificial Sequence
  derived and/or modified sequence
MMPKHCFLGFLISFFLTGVAGTQSTHESLKPQRVQFQSRNFHNILQWQPGRALTGNSSVYFVQYKIYGQRQWKNKEDCWGTQELSCDLTSETSDIQEPYYGRVRAASAGSYSEWSMTPRFTPWWETKIDPPVMNITQVNGSLLVILHAPNLPYRYQKEKNVSIEDYYELLYRVFIINNSLEKEQKVYEGAHRAVEIEALTPHSSYCVVAEIYQPMLDRRSQRSEERCVEIP

SEQ ID NO: 254646 - DNA, 696 bp, Artificial Sequence
  derived and/or modified sequence
atgatgccaaaacattgttttctcggcttcttgatcagcttttttctaactggggtcgcaggcactcagtccactcacgaatcactgaaaccgcaacgcgtgcaatttcagtcccgcaactttcataacattcttcaatggcagccagggagggctctcacaggaaatagctctgtttatttcgtgcaatataaaatatatggccaacgacagtggaagaataaggaggattgttggggaactcaagaactttcctgtgacctcacctccgaaacatcagatatccaggagccgtattatgggcgtgtgagagctgctagcgcaggaagttactcggaatggtccatgacaccacggtttaccccctggtgggagaccaaaattgacccgccagtgatgaatatcacacaggttaacggcagcctgctggtgatcctgcacgccccaaacctcccttaccgctaccagaaggaaaagaacgtgagtatcgaggattattatgagcttctgtaccgggtttttataatcaacaactctctcgagaaggaacaaaaggtttacgagggcgcccatcgtgcagtcgaaatagaggcactcaccccgcatagcagttattgtgtagtcgctgaaatctatcaaccaatgctcgacaggcgctctcagaggtcagaagagaggtgtgtagagattccttag

SEQ ID NO: 254647 - DNA, 2790 bp, Artificial Sequence
  derived and/or modified sequence
ctcactttaccactactcgctatagagccctggtcaagttctctccacctctctatctatgtctcagtttcttcatctgtaacatcaaatgaataataataccaatctcctagacttcataagaggattaacaaagacaaaatatgggaaaaacataacatggcgtcccataattattagatcttattattgacactaaaatggcattaaaattaccaaaaggaagacagcatctgtttcctctttggtcctgagctggttaaaaggaacactggttgcctgaacagtcacacttgcaaccatgatgcctaaacattgctttctaggcttcctcatcagtttcttccttactggtgtagcaggaactcagtcaacgcatgagtctctgaagcctcagagggtacaatttcagtcccgaaattttcacaacattttgcaatggcagcctgggagggcacttactggcaacagcagtgtctattttgtgcagtacaaaatatatggacagagacaatggaaaaataaagaagactgttggggtactcaagaactctcttgtgaccttaccagtgaaacctcagacatacaggaaccttattacgggagggtgagggcggcctcggctgggagctactcagaatggagcatgacgccgcggttcactccctggtgggaaacaaaaatagatcctccagtcatgaatataacccaagtcaatggctctttgttggtaattctccatgctccaaatttaccatatagataccaaaaggaaaaaaatgtatctatagaagattactatgaactactataccgagtttttataattaacaattcactagaaaaggagcaaaaggtttatgaaggggctcacagagcggttgaaattgaagctctaacaccacactccagctactgtgtagtggctgaaatatatcagcccatgttagacagaagaagtcagagaagtgaagagagatgtgtggaaattccatgacttgtggaatttggcattcagcaatgtggaaattctaaagctccctgagaacaggatgactcgtgtttgaaggatcttatttaaaattgtttttgtattttcttaaagcaatattcactgttacaccttggggacttctttgtttatccattcttttatcctttatatttcatttgtaaactatatttgaacgacattccccccgaaaaattgaaatgtaaagatgaggcagagaataaagtgttctatgaaattcagaactttatttctgaatgtaacatccctaataacaaccttcattcttctaatacagcaaaataaaaatttaacaaccaaggaatagtatttaagaaaatgttgaaataatttttttaaaatagcattacagactgaggcggtcctgaagcaatggtttttcactctcttattgagccaattaaattgacattgctttgacaatttaaaacttctataaaggtgaatatttttcatacatttctattttatatgaatatactttttatatatttattattattaaatatttctacttaatgaatcaaaattttgttttaaagtctactttatgtaaataagaacaggttttggggaaaaaaatcttatgatttctggattgatatctgaattaaaactatcaacaacaaggaagtctgctctgtacaattgtccctcatttaaaagatatattaagcttttcttttctgtttgtttttgttttgtttagtttttaatcctgtcttagaagaacttatctttattctcaaaattaaatgtaatttttttagtgacaaagaagaaaggaaacctcattactcaatccttctggccaagagtgtcttgcttgtggcgccttcctcatctctatataggaggatcccatgaatgatggtttattgggaactgctggggtcgaccccatacagagaactcagcttgaagctggaagcacacagtgggtagcaggagaaggaccggtgttggtaggtgcctacagagactatagagctagacaaagccctccaaactggcccctcctgctcactgcctctcctgagtagaaatctggtgacctaaggctcagtgtggtcaacagaaagctgccttcttcacttgaggctaagtcttcatatatgtttaaggttgtctttctagtgaggagatacatatcagagaacatttgtacaattccccatgaaaattgctccaaagttgataacaatatagtcggtgcttctagttatatgcaagtactcagtgataaatggattaaaaaatattcagaaatgtattggggggtggaggagaataagaggcagagcaagagctagagaattggtttccttgcttccctgtatgctcagaaaacattgatttgagcatagacgcagagactgaaaaaaaaatttactttgatctctgtttttgaattcttattatttatattttgcttactaccttttttgccttttgtccttttgtggagagggcgatgaattaagagtagtggggtgggtggcgagtaagtaaaatttcaaatagcattttagtgaatgcaattcagtagtcctgaagcctgacttaataaaacaaaattcatttatggttgtttcatgaaagttattagataggatcaagttttgtttgtatattgtttgccttgctctgtttttgcttttgtgcttaggcaagtgcaaaatactctatggaaatcataattgtcatcttcttcatggtgttagggatatattgtcacatgatttcaataaatcctt

SEQ ID NO: 254648 - DNA, 696 bp, Artificial Sequence
  derived and/or modified sequence
atgatgcccaagcactgcttcctgggcttcctgatctccttcttcctgactggagtggccggcacccagagcacccatgagagcctgaagccccagagggtgcagttccagagcaggaacttccacaacatcctgcagtggcagcccggccgggccctgaccggcaacagctctgtgtactttgtgcagtacaagatctacggccagaggcagtggaagaacaaggaggactgctggggcacccaggagctgagctgtgacctgaccagcgagaccagtgacatccaggagccctactacggccgggtgcgggccgccagcgctggcagctacagcgagtggagcatgaccccccgcttcaccccctggtgggagaccaagattgacccccctgtgatgaacatcacccaggtgaatggcagcctgctggtgatcctgcacgcccccaacctgccctaccgctaccagaaggagaagaatgtgtccattgaggactactatgagctgctgtacagagtcttcatcatcaacaacagcctggagaaggagcagaaggtgtatgaaggagcccacagagctgtggagattgaggccctgaccccccacagcagctactgtgtggtggccgagatctaccagcccatgctggaccggcgcagccagaggtctgaggagcgctgtgtggagatcccctag

SEQ ID NO: 254649 - DNA, 696 bp, Artificial Sequence
  derived and/or modified sequence
atgatgcccaagcactgcttcctgggcttcctgatcagcttcttcttaaccggtgtggcggggacccagtccacccatgagtcccttaaacctcagagggtgcagttccagtcccgcaacttccataatattctccagtggcaaccaggccgagcactaacaggaaactcttccgtatattttgtccagtataagatctacggccagagacaatggaagaataaggaggactgttgggggactcaggaactgagttgtgacctgacatctgaaacttccgacattcaagaaccatactacggtcgtgtgagagcagcgtctgcggggagttattccgaatggtccatgaccccaaggtttaccccgtggtgggagacaaagatcgatcctcccgtcatgaatattacacaggtgaatggatctcttttggtgatcttgcacgcgcccaacctgccctaccgctatcagaaggaaaagaatgtctcgatcgaggactactacgagttgctataccgggtgttcatcattaacaactccctcgagaaagaacagaaggtgtacgagggcgcccaccgtgccgttgaaatagaggccctgacaccccactctagttactgcgtcgttgctgagatttaccaaccgatgttggaccgccgatcccagaggagcgaggaacgatgtgtggaaatcccatag

SEQ ID NO: 254650 - DNA, 696 bp, Artificial Sequence
  derived and/or modified sequence
atgatgcctaagcattgcttcctcggtttcttaatcagtttttttttgacaggagtggccggaacccagtccacccacgagtctctaaaacctcaacgagtccagttccagagcaggaactttcacaacattctgcagtggcagcccggaagggcattgaccggaaacagttccgtatattttgtgcagtataagatctatggccagcgtcagtggaagaacaaagaagactgttgggggactcaagagctgtcttgtgacctgacttctgagacttccgacattcaggagccttattatggcagggttcgggcagcctctgcgggttcatacagcgagtggagcatgactccgcgtttcacaccctggtgggagacgaagattgaccccccagtcatgaacatcacacaggtcaacggctcactccttgtcattctccatgccccaaacctgccttaccggtaccagaaagagaaaaacgtttccatcgaggactactatgagctactttatagagttttcataatcaataattcgcttgagaaagagcagaaagtctacgaaggagcacatagggcggtagagatagaggcactgactccacacagcagctactgtgtggtggcagagatttaccagcctatgttggatcgtagaagtcagagaagtgaagagcgctgtgtggagattccatag

SEQ ID NO: 254651 - DNA, 696 bp, Artificial Sequence
  derived and/or modified sequence
atgatgcccaagcactgcttcctgggcttcctgatcagcttcttcctgaccggcgtggccggcacccagagcacccacgagagcctgaagccccagagagtgcagttccagagcagaaacttccacaacatcctgcagtggcagcccggcagagccctgaccggcaacagcagcgtgtacttcgtgcagtacaagatctacggccagagacagtggaagaacaaggaggactgctggggcacccaggagctgagctgcgacctgaccagcgagaccagcgacatccaggagccctactacggcagagtgagagccgccagcgccggcagctacagcgagtggagcatgacccccagattcaccccctggtgggagaccaagatcgacccccccgtgatgaacatcacccaggtgaacggcagcctgctggtgatcctgcacgcccccaacctgccctacagataccagaaggagaagaacgtgagcatcgaggactactacgagctgctgtacagagtgttcatcatcaacaacagcctggagaaggagcagaaggtgtacgagggcgcccacagagccgtggagatcgaggccctgaccccccacagcagctactgcgtggtggccgagatctaccagcccatgctggacagaagaagccagagaagcgaggagagatgcgtggagatcccctag

SEQ ID NO: 254652 - protein, 130 aa, Artificial Sequence
  derived and/or modified sequence
MMPKHCFLGFLISFFLTGVAGTQSTHESLKPQRVQFQSRNFHNILQWQPGRALTGNSSVYFVQYKIYGQRQWKNKEDCWGTQELSCDLTSETSDIQEPYYGRVRAASAGSYSEWSMTPRFTPWWERAKGL

SEQ ID NO: 254653 - DNA, 393 bp, Artificial Sequence
  derived and/or modified sequence
atgatgcccaaacattgcttcttgggtttcctaatcagcttttttctcaccggcgtggctgggacccagagtacccacgaaagcctgaaaccccaacgcgtgcagtttcaatcgcgcaacttccacaacattttgcagtggcagccaggtagagcccttactggcaactcatccgtctatttcgtccagtacaaaatatacgggcagagacaatggaagaataaggaggattgctggggcacacaggaactgtcttgcgacctgacttcggagacctctgatattcaggagccgtactacggccgagttagggccgcaagtgctgggtcatattcagagtggtccatgacacctcggtttacaccttggtgggagagggcaaagggtctctag

SEQ ID NO: 254654 - DNA, 2620 bp, Artificial Sequence
  derived and/or modified sequence
ctcactttaccactactcgctatagagccctggtcaagttctctccacctctctatctatgtctcagtttcttcatctgtaacatcaaatgaataataataccaatctcctagacttcataagaggattaacaaagacaaaatatgggaaaaacataacatggcgtcccataattattagatcttattattgacactaaaatggcattaaaattaccaaaaggaagacagcatctgtttcctctttggtcctgagctggttaaaaggaacactggttgcctgaacagtcacacttgcaaccatgatgcctaaacattgctttctaggcttcctcatcagtttcttccttactggtgtagcaggaactcagtcaacgcatgagtctctgaagcctcagagggtacaatttcagtcccgaaattttcacaacattttgcaatggcagcctgggagggcacttactggcaacagcagtgtctattttgtgcagtacaaaatatatggacagagacaatggaaaaataaagaagactgttggggtactcaagaactctcttgtgaccttaccagtgaaacctcagacatacaggaaccttattacgggagggtgagggcggcctcggctgggagctactcagaatggagcatgacgccgcggttcactccctggtgggaaagagcaaaaggtttatgaaggggctcacagagcggttgaaattgaagctctaacaccacactccagctactgtgtagtggctgaaatatatcagcccatgttagacagaagaagtcagagaagtgaagagagatgtgtggaaattccatgacttgtggaatttggcattcagcaatgtggaaattctaaagctccctgagaacaggatgactcgtgtttgaaggatcttatttaaaattgtttttgtattttcttaaagcaatattcactgttacaccttggggacttctttgtttatccattcttttatcctttatatttcatttgtaaactatatttgaacgacattccccccgaaaaattgaaatgtaaagatgaggcagagaataaagtgttctatgaaattcagaactttatttctgaatgtaacatccctaataacaaccttcattcttctaatacagcaaaataaaaatttaacaaccaaggaatagtatttaagaaaatgttgaaataatttttttaaaatagcattacagactgaggcggtcctgaagcaatggtttttcactctcttattgagccaattaaattgacattgctttgacaatttaaaacttctataaaggtgaatatttttcatacatttctattttatatgaatatactttttatatatttattattattaaatatttctacttaatgaatcaaaattttgttttaaagtctactttatgtaaataagaacaggttttggggaaaaaaatcttatgatttctggattgatatctgaattaaaactatcaacaacaaggaagtctgctctgtacaattgtccctcatttaaaagatatattaagcttttcttttctgtttgtttttgttttgtttagtttttaatcctgtcttagaagaacttatctttattctcaaaattaaatgtaatttttttagtgacaaagaagaaaggaaacctcattactcaatccttctggccaagagtgtcttgcttgtggcgccttcctcatctctatataggaggatcccatgaatgatggtttattgggaactgctggggtcgaccccatacagagaactcagcttgaagctggaagcacacagtgggtagcaggagaaggaccggtgttggtaggtgcctacagagactatagagctagacaaagccctccaaactggcccctcctgctcactgcctctcctgagtagaaatctggtgacctaaggctcagtgtggtcaacagaaagctgccttcttcacttgaggctaagtcttcatatatgtttaaggttgtctttctagtgaggagatacatatcagagaacatttgtacaattccccatgaaaattgctccaaagttgataacaatatagtcggtgcttctagttatatgcaagtactcagtgataaatggattaaaaaatattcagaaatgtattggggggtggaggagaataagaggcagagcaagagctagagaattggtttccttgcttccctgtatgctcagaaaacattgatttgagcatagacgcagagactgaaaaaaaaatttactttgatctctgtttttgaattcttattatttatattttgcttactaccttttttgccttttgtccttttgtggagagggcgatgaattaagagtagtggggtgggtggcgagtaagtaaaatttcaaatagcattttagtgaatgcaattcagtagtcctgaagcctgacttaataaaacaaaattcatttatggttgtttcatgaaagttattagataggatcaagttttgtttgtatattgtttgccttgctctgtttttgcttttgtgcttaggcaagtgcaaaatactctatggaaatcataattgtcatcttcttcatggtgttagggatatattgtcacatgatttcaataaatcctt

SEQ ID NO: 254655 - DNA, 393 bp, Artificial Sequence
  derived and/or modified sequence
atgatgcccaagcactgcttcctgggcttcctgatctccttcttcctgactggagtggccggcacccagagcacccatgagagcctgaagccccagagggtgcagttccagagcaggaacttccacaacatcctgcagtggcagcccggccgggccctgaccggcaacagctctgtgtactttgtgcagtacaagatctacggccagaggcagtggaagaacaaggaggactgctggggcacccaggagctgagctgtgacctgaccagcgagaccagtgacatccaggagccctactacggccgggtgcgggccgccagcgctggcagctacagcgagtggagcatgaccccccgcttcaccccctggtgggagcgggccaagggcctgtag

SEQ ID NO: 254656 - DNA, 393 bp, Artificial Sequence
  derived and/or modified sequence
atgatgcccaagcactgcttcctgggcttcctgatcagcttcttccttacgggggtagcgggcacccagagcacccatgaaagtctgaaacctcagagagtgcagtttcagtcacgcaacttccacaatatattgcagtggcagcctggtcgagccttgacaggaaattcctctgtatactttgtgcagtacaaaatttacggtcaaaggcagtggaagaacaaggaagattgttggggaacccaggagctgtcctgcgatctgacctccgagacctctgatattcaggagccgtactacggccgggtgagagcggcttctgcagggtcttattctgagtggtccatgaccccgcggtttaccccttggtgggaacgggccaaggggctttag

SEQ ID NO: 254657 - DNA, 393 bp, Artificial Sequence
  derived and/or modified sequence
atgatgccaaaacactgctttctcggatttctgatcagctttttcctgactggggtggccggaactcagagtacccatgaatccctcaagccccagcgcgtacaattccagtcccggaactttcacaatatattacagtggcagcccggtcgcgcactcacaggaaactcctccgtctacttcgttcaatacaagatttacggacagagacagtggaagaacaaggaggattgctggggcacccaggagctgtcatgcgacctgacttctgagacatccgacatccaagagccttactatggaagagtgcgcgcagctagcgccggatcttattccgaatggagtatgacgccgaggttcaccccatggtgggaaagggctaaggggctctag

SEQ ID NO: 254658 - DNA, 393 bp, Artificial Sequence
  derived and/or modified sequence
atgatgcccaagcactgcttcctgggcttcctgatcagcttcttcctgaccggcgtggccggcacccagagcacccacgagagcctgaagccccagagagtgcagttccagagcagaaacttccacaacatcctgcagtggcagcccggcagagccctgaccggcaacagcagcgtgtacttcgtgcagtacaagatctacggccagagacagtggaagaacaaggaggactgctggggcacccaggagctgagctgcgacctgaccagcgagaccagcgacatccaggagccctactacggcagagtgagagccgccagcgccggcagctacagcgagtggagcatgacccccagattcaccccctggtgggagagagccaagggcctgtag

SEQ ID NO: 254659 - protein, 262 aa, Artificial Sequence
  derived and/or modified sequence
MPLHVKWPFPAVPPLTWTLASSVVMGLVGTYSCFWTKYMNHLTVHNREVLYELIEKRGPATPLITVSNHQSCMDDPHLWGILKLRHIWNLKLMRWTPAAADICFTKELHSHFFSLGKCVPVCRGDGVYQKGMDFILEKLNHGDWVHIFPEGKVNMSSEFLRFKWGIGRLIAECHLNPIILPLWHVGMNDVLPNSPPYFPRFGQKITVLIGKPFSALPVLERLRAENKSAVEMRKALTDFIQEEFQHLKTQAEQLHNHLQPGR

SEQ ID NO: 254660 - DNA, 789 bp, Artificial Sequence
  derived and/or modified sequence
atgcccctgcacgtgaagtggcccttccccgccgtgccccccctgacctggaccctggccagcagcgtggtgatgggcctggtgggcacctacagctgcttctggaccaagtacatgaaccacctgaccgtgcacaacagagaggtgctgtacgagctgatcgagaagagaggccccgccacccccctgatcaccgtgagcaaccaccagagctgcatggacgacccccacctgtggggcatcctgaagctgagacacatctggaacctgaagctgatgagatggacccccgccgccgccgacatctgcttcaccaaggagctgcacagccacttcttcagcctgggcaagtgcgtgcccgtgtgcagaggcgacggcgtgtaccagaagggcatggacttcatcctggagaagctgaaccacggcgactgggtgcacatcttccccgagggcaaggtgaacatgagcagcgagttcctgagattcaagtggggcatcggcagactgatcgccgagtgccacctgaaccccatcatcctgcccctgtggcacgtgggcatgaacgacgtgctgcccaacagccccccctacttccccagattcggccagaagatcaccgtgctgatcggcaagcccttcagcgccctgcccgtgctggagagactgagagccgagaacaagagcgccgtggagatgagaaaggccctgaccgacttcatccaggaggagttccagcacctgaagacccaggccgagcagctgcacaaccacctgcagcccggcagatag

SEQ ID NO: 254661 - DNA, 789 bp, Artificial Sequence
  derived and/or modified sequence
atgccacttcacgtcaaatggccctttcccgccgtgccccctctcacatggacactcgcaagctcagtggtgatgggccttgtaggcacctacagctgcttttggacaaaatacatgaatcatcttactgtacacaatcgcgaggtgttgtatgaactgatagaaaagcgggggcccgcaaccccacttatcacggttagtaaccatcagtcatgtatggatgacccccatctctggggtattctaaaacttcggcacatttggaacctgaagctcatgagatggactcctgcagctgctgacatctgcttcactaaagagctacactcacattttttcagcctggggaaatgtgtgcccgtgtgcagaggcgacggtgtctatcagaagggtatggacttcatcctcgagaagttgaatcatggggactgggtgcatatctttcccgagggcaaagtcaacatgtcctccgaattcctgcgctttaaatgggggatcggtcgcttaatcgctgagtgccacctcaacccaatcattctccccctgtggcatgttgggatgaacgacgtactccctaactcccccccttactttcccaggttcggccagaagattaccgtgctgatcgggaaaccattttccgctctccccgtcctggagcgcctccgagccgaaaataagagtgccgtggaaatgcggaaagctctgacagatttcattcaagaggagttccaacatctcaaaacacaggcagaacaactgcataaccacctgcagccaggcagatag

SEQ ID NO: 254662 - DNA, 789 bp, Artificial Sequence
  derived and/or modified sequence
atgcccctgcacgtgaagtggcccttccctgctgtgccccccctgacctggaccctggccagctctgtggtgatgggcctggtgggcacctacagctgcttctggaccaagtacatgaaccacctgactgtgcacaaccgggaggtgctgtatgagctgattgagaagaggggccctgccacccccctcatcaccgtgagcaaccaccagagctgcatggatgacccccacctgtggggcatcctgaagctgcggcacatctggaacctgaagctgatgcgctggaccccagctgctgctgacatctgcttcaccaaggagctgcacagccacttcttcagcctgggcaaatgtgtgcctgtgtgcagaggagatggagtgtaccagaagggcatggacttcatcctggagaagctgaaccacggggactgggtgcacatcttccctgagggcaaggtgaacatgagcagcgagttcctgcgcttcaagtggggcatcggccgcctgattgctgagtgccacctgaaccccatcatcctgcccctgtggcacgtgggcatgaatgatgtgctgcccaacagccccccctacttccccaggtttggccagaagatcaccgtgctgattggcaagcccttcagcgccctgcctgtgctggagcggctgcgggcagagaacaagtctgctgtggagatgaggaaggccctgacagacttcatccaggaggagttccagcacctgaagacccaggccgagcagctgcacaaccacctgcagcccggccgctag

SEQ ID NO: 254663 - DNA, 789 bp, Artificial Sequence
  derived and/or modified sequence
atgcccctgcacgtgaagtggcccttccccgccgtgccccccctgacatggaccctggccagcagtgtggtcatgggcctcgttgggacatattcctgtttctggacaaagtacatgaaccaccttaccgtacacaatcgagaagttctttacgaactgatcgagaagagaggacctgcaactcctctgatcaccgtgagcaatcaccagtcttgtatggacgatccccatttgtgggggatcttgaaactgcgtcacatttggaatcttaaactgatgcggtggactcccgcagcggccgatatatgtttcaccaaggaactccacagtcacttcttttccctcggtaaatgtgtgcccgtgtgcagaggcgacggagtgtaccagaagggtatggacttcatcctggagaaacttaaccatggcgactgggtgcacattttcccagaagggaaggtcaacatgtcgagtgagttcctgcgttttaaatggggaattggcagactgattgctgaatgtcacctgaatcctatcattcttcccctgtggcacgtcggcatgaatgatgtgctcccaaatagccccccctattttcctaggttcggtcagaagatcaccgtcctgattggcaagcccttctccgccctgcctgtcctcgaacgacttagggccgagaataaatcagccgtcgaaatgagaaaagcattaaccgacttcattcaggaggagttccagcacttgaagacacaagccgaacagctgcacaatcacctgcaacctggcagatag

SEQ ID NO: 254664 - DNA, 789 bp, Artificial Sequence
  derived and/or modified sequence
atgccgctgcacgtgaagtggcccttcccagctgtgcccccactcacatggactctggcctcttcagttgttatgggcctcgtcggcacatactcctgtttctggaccaagtacatgaatcacctcaccgtccataacagggaagtgctatatgaactgatagagaaacggggtccagccactcctcttatcaccgtgtcaaatcaccagtcttgcatggatgatcctcacttgtggggaattcttaaactaagacatatctggaacttgaaactaatgcgatggacaccggctgccgcagacatctgtttcacgaaggaactgcacagtcacttcttctcactgggtaagtgtgttcccgtatgccggggtgatggtgtgtaccagaaggggatggacttcattctggaaaagctcaaccacggtgattgggtgcacatatttcccgaaggaaaagtgaatatgtcaagcgagtttctcagattcaaatggggcatcggcagactcattgccgagtgccacttgaatccgataatccttccgttatggcacgtcggcatgaatgacgtcttgcctaatagtccaccttacttcccccgtttcggacaaaaaatcaccgttctcataggaaaaccattcagcgcactacctgtgttagaaagacttcgtgccgaaaataagtccgctgtagagatgagaaaagctctgacggactttattcaggaagagtttcagcacctgaagacacaggcagagcagctgcacaatcacctccaacccggaaggtag

SEQ ID NO: 254665 - DNA, 1794 bp, Artificial Sequence
  derived and/or modified sequence
ccgggccggggtgccagcgcccgccttcccgtttcctcccgttccgcagcgcgcccacggcctgtgaccccggcgaccgctccccagtgacgagagagcggggccgggcgctgctccggcctgacctgcgaagggacctcggtccagtcccctgttgcgccgcgccccctgtccgtccgtgcgcgggccagtcaggggccagtgtctcgagcggtcgaggtcgcagacctagaggcgccccacaggccggcccggggcgctgggagcgccggccgcgggccgggtggggatgcctctgcacgtgaagtggccgttccccgcggtgccgccgctcacctggaccctggccagcagcgtcgtcatgggcttggtgggcacctacagctgcttctggaccaagtacatgaaccacctgaccgtgcacaacagggaggtgctgtacgagctcatcgagaagcgaggcccggccacgcccctcatcaccgtgtccaatcaccagtcctgcatggacgaccctcatctctgggggatcctgaaactccgccacatctggaacctgaagttgatgcgttggacccctgcagctgcagacatctgcttcaccaaggagctacactcccacttcttcagcttgggcaagtgtgtgcctgtgtgccgaggagatggcgtctaccagaaggggatggacttcattttggagaagctcaaccatggggactgggtgcatatcttcccagaagggaaagtgaacatgagttccgaattcctgcgtttcaagtggggaatcgggcgcctgattgctgagtgtcatctcaaccccatcatcctgcccctgtggcatgtcggaatgaatgacgtccttcctaacagtccgccctacttcccccgctttggacagaaaatcactgtgctgatcgggaagcccttcagtgccctgcctgtactcgagcggctccgggcggagaacaagtcggctgtggagatgcggaaagccctgacggacttcattcaagaggaattccagcatctgaagactcaggcagagcagctccacaaccacctccagcctgggagataggccttgcttgctgccttctggattcttggcccgcacagagctggggctgagggatggactgatgcttttagctcaaacgtggcttttagacagatttgttcatagaccctctcaagtgccctctccgagctggtaggcattccagctcctccgtgcttcctcagttacacaaaggacctcagctgcttctcccacttggccaagcagggaggaagaagcttaggcagggctctctttccttcttgccttcagatgttctctcccaggggctggcttcaggagggagcatagaaggcaggtgagcaaccagttggctaggggagcagggggcccaccagagctgtggagaggggaccctaagactcctcggcctggctcctacccaccgcccttgccgaaccaggagctgctcactacctcctcagggatggccgttggccacgtcttccttctgcctgagcttccccccgaccacaggccctttcctcaggcaaggtctggcctcaggtgggccgcaggcgggaaaagcagcccttggccagaagtcaagcccagccacgtggagcctagagtgagggcctgaggtctggctgcttgcccccatgctggcgccaacaacttctccatcctttctgcctctcaacatcacttgaatcctagggcctgggttttcatgtttttgaaacagaaccataaagcatatgtgttggcttgtt

SEQ ID NO: 254666 - protein, 278 aa, Artificial Sequence
  derived and/or modified sequence
MPLHVKWPFPAVPPLTWTLASSVVMGLVGTYSCFWTKYMNHLTVHNREVLYELIEKRGPATPLITVSNHQSCMDDPHLWGILKLRHIWNLKLMRWTPAAADICFTKELHSHFFSLGKCVPVCRGAEFFQAENEGKGVLDTGRHMPGAGKRREKGDGVYQKGMDFILEKLNHGDWVHIFPEGIGRLIAECHLNPIILPLWHVGMNDVLPNSPPYFPRFGQKITVLIGKPFSALPVLERLRAENKSAVEMRKALTDFIQEEFQHLKTQAEQLHNHLQPGR

SEQ ID NO: 254667 - DNA, 837 bp, Artificial Sequence
  derived and/or modified sequence
atgcccctgcacgtgaagtggcccttccccgccgtgccccccctgacctggaccctggccagcagcgtggtgatgggcctggtgggcacctacagctgcttctggaccaagtacatgaaccacctgaccgtgcacaacagagaggtgctgtacgagctgatcgagaagagaggccccgccacccccctgatcaccgtgagcaaccaccagagctgcatggacgacccccacctgtggggcatcctgaagctgagacacatctggaacctgaagctgatgagatggacccccgccgccgccgacatctgcttcaccaaggagctgcacagccacttcttcagcctgggcaagtgcgtgcccgtgtgcagaggcgccgagttcttccaggccgagaacgagggcaagggcgtgctggacaccggcagacacatgcccggcgccggcaagagaagagagaagggcgacggcgtgtaccagaagggcatggacttcatcctggagaagctgaaccacggcgactgggtgcacatcttccccgagggcatcggcagactgatcgccgagtgccacctgaaccccatcatcctgcccctgtggcacgtgggcatgaacgacgtgctgcccaacagccccccctacttccccagattcggccagaagatcaccgtgctgatcggcaagcccttcagcgccctgcccgtgctggagagactgagagccgagaacaagagcgccgtggagatgagaaaggccctgaccgacttcatccaggaggagttccagcacctgaagacccaggccgagcagctgcacaaccacctgcagcccggcagatag

SEQ ID NO: 254668 - DNA, 837 bp, Artificial Sequence
  derived and/or modified sequence
atgccactccacgtgaaatggccctttccagccgtgcctcccctgacgtggacactggcctcatctgtcgtgatgggacttgtcgggacgtattcctgcttttggaccaagtacatgaaccaccttaccgtacataaccgcgaagttctgtacgagctgattgagaagaggggcccagccacaccactaatcacagttagcaaccaccagtcctgcatggatgaccctcacctgtggggcatcttaaaactgcggcacatctggaatttaaagctgatgcggtggacaccagccgcggccgatatctgtttcactaaggagcttcattcgcacttcttcagcctcgggaagtgcgtacccgtgtgcaggggcgctgagtttttccaggccgagaacgaagggaagggcgtgctcgacaccggcaggcatatgccaggggctggcaaaagaagggaaaaaggcgacggggtataccaaaaagggatggattttatcctcgaaaagctgaatcacggcgattgggtacacatttttccggaaggaatcggccggctcatcgccgaatgtcatcttaaccccataattctgcctctgtggcatgtgggaatgaatgatgtactcccaaatagtcctccgtacttccccaggtttgggcaaaagatcactgttctgataggcaagcctttctccgctcttcctgtattggaaagattacgggctgaaaacaaaagcgccgtcgagatgagaaaagcactcaccgactttatccaggaggagttccagcacctcaaaacccaggccgagcagctgcataaccacctgcagcccgggaggtag

SEQ ID NO: 254669 - DNA, 837 bp, Artificial Sequence
  derived and/or modified sequence
atgcccctgcacgtgaagtggcccttccctgctgtgccccccctgacctggaccctggccagctctgtggtgatgggcctggtgggcacctacagctgcttctggaccaagtacatgaaccacctgactgtgcacaaccgggaggtgctgtatgagctgattgagaagaggggccctgccacccccctcatcaccgtgagcaaccaccagagctgcatggatgacccccacctgtggggcatcctgaagctgcggcacatctggaacctgaagctgatgcgctggaccccagctgctgctgacatctgcttcaccaaggagctgcacagccacttcttcagcctgggcaaatgtgtgcctgtgtgcagaggagctgagttcttccaggctgaaaatgaaggaaaaggagtgctggacaccggccgccacatgcctggagctgggaagaggcgggagaagggagatggagtgtaccagaagggcatggacttcatcctggagaagctgaaccacggggactgggtgcacatcttccctgagggcatcggccgcctgattgctgagtgccacctgaaccccatcatcctgcccctgtggcacgtgggcatgaatgatgtgctgcccaacagccccccctacttccccaggtttggccagaagatcaccgtgctgattggcaagcccttcagcgccctgcctgtgctggagcggctgcgggcagagaacaagtctgctgtggagatgaggaaggccctgacagacttcatccaggaggagttccagcacctgaagacccaggccgagcagctgcacaaccacctgcagcccggccgctag

SEQ ID NO: 254670 - DNA, 837 bp, Artificial Sequence
  derived and/or modified sequence
atgcccctgcacgtgaagtggcccttccccgccgtgccccccctgacatggaccctggcctcttctgttgtgatgggattggtcggaacttattcctgtttctggacaaaatacatgaatcatctcactgtgcacaacagggaggtgctgtacgaattgatagagaaacgtgggcccgcgactcccctgatcactgtctccaaccaccagtcctgcatggacgatccccatctgtggggcattctcaagctccgccacatctggaatttaaagctgatgcgctggacacccgcagccgccgatatctgttttaccaaagaactacactctcattttttctccctcgggaagtgcgtgcctgtgtgcaggggggctgagttcttccaggccgaaaacgaaggtaaaggagtgctggataccggacggcacatgccgggcgctgggaaaagacgagaaaagggcgatggggtctaccaaaagggcatggactttatcctcgagaagctgaaccacggggactgggtgcacattttccccgaaggcattggacgccttattgctgaatgccatctgaaccctatcatcctccctctctggcacgtggggatgaatgatgtcttaccgaattcaccaccctatttccccagattcgggcagaaaatcaccgtgctcattggcaaaccattctccgcgctccctgtgctggagagactgagagctgaaaataaaagcgctgtggagatgcgtaaggcactgacagactttatccaagaagagtttcaacacttgaaaacacaagctgaacagctgcacaaccatctccaacctggcaggtag

SEQ ID NO: 254671 - DNA, 837 bp, Artificial Sequence
  derived and/or modified sequence
atgccattgcacgtaaaatggccatttcctgcagtcccccctctgacttggacccttgcctcctcggtcgtgatgggcctggttgggacttattcttgtttctggaccaaatacatgaaccacctgacagtgcataatcgggaggtgctttacgaactcatcgagaagaggggtccagcgacacctcttataactgtcagtaaccaccaatcctgcatggatgacccacatctctggggaattctgaagcttcgccacatttggaatttaaagttaatgagatggacgcccgcagccgctgatatctgcttcaccaaggaactccactctcactttttctctctcggaaagtgtgttcccgtgtgccgcggtgctgaatttttccaagctgaaaatgaagggaaaggcgttctggatacagggagacacatgccgggtgccggaaagcgaagagagaagggagatggcgtttaccagaagggcatggactttatcctggaaaagcttaaccacggcgactgggtccacatttttccggaaggaataggaaggctcattgcggaatgccatctgaaccctatcatactgcccctttggcacgtcggcatgaatgacgtactccctaatagtccaccctatttcccccgattcgggcagaaaattacagtgctaataggaaaaccatttagcgccttgcccgtgctggaacgcctgagggctgagaataagtctgccgttgagatgcggaaggccctcactgacttcatccaagaggaatttcagcatcttaagacccaagccgaacagctgcataatcatttgcagccagggaggtag

SEQ ID NO: 254672 - DNA, 1793 bp, Artificial Sequence
  derived and/or modified sequence
cgcgcccacggcctgtgaccccggcgaccgctccccagtgacgagagagcggggccgggcgctgctccggcctgacctgcgaagggacctcggtccagtcccctgttgcgccgcgccccctgtccgtccgtgcgcgggccagtcaggggccagtgtctcgagcggtcgaggtcgcagacctagaggcgccccacaggccggcccggggcgctgggagcgccggccgcgggccgggtggggatgcctctgcacgtgaagtggccgttccccgcggtgccgccgctcacctggaccctggccagcagcgtcgtcatgggcttggtgggcacctacagctgcttctggaccaagtacatgaaccacctgaccgtgcacaacagggaggtgctgtacgagctcatcgagaagcgaggcccggccacgcccctcatcaccgtgtccaatcaccagtcctgcatggacgaccctcatctctgggggatcctgaaactccgccacatctggaacctgaagttgatgcgttggacccctgcagctgcagacatctgcttcaccaaggagctacactcccacttcttcagcttgggcaagtgtgtgcctgtgtgccgaggagcagaatttttccaagcagagaatgaggggaaaggtgttctagacacaggcaggcacatgccaggtgctggaaaaagaagagagaaaggagatggcgtctaccagaaggggatggacttcattttggagaagctcaaccatggggactgggtgcatatcttcccagaaggaatcgggcgcctgattgctgagtgtcatctcaaccccatcatcctgcccctgtggcatgtcggaatgaatgacgtccttcctaacagtccgccctacttcccccgctttggacagaaaatcactgtgctgatcgggaagcccttcagtgccctgcctgtactcgagcggctccgggcggagaacaagtcggctgtggagatgcggaaagccctgacggacttcattcaagaggaattccagcatctgaagactcaggcagagcagctccacaaccacctccagcctgggagataggccttgcttgctgccttctggattcttggcccgcacagagctggggctgagggatggactgatgcttttagctcaaacgtggcttttagacagatttgttcatagaccctctcaagtgccctctccgagctggtaggcattccagctcctccgtgcttcctcagttacacaaaggacctcagctgcttctcccacttggccaagcagggaggaagaagcttaggcagggctctctttccttcttgccttcagatgttctctcccaggggctggcttcaggagggagcatagaaggcaggtgagcaaccagttggctaggggagcagggggcccaccagagctgtggagaggggaccctaagactcctcggcctggctcctacccaccgcccttgccgaaccaggagctgctcactacctcctcagggatggccgttggccacgtcttccttctgcctgagcttccccccgaccacaggccctttcctcaggcaaggtctggcctcaggtgggccgcaggcgggaaaagcagcccttggccagaagtcaagcccagccacgtggagcctagagtgagggcctgaggtctggctgcttgcccccatgctggcgccaacaacttctccatcctttctgcctctcaacatcacttgaatcctagggcctgggttttcatgtttttgaaacagaaccataaagcatatgtgttggcttgtt

SEQ ID NO: 254673 - protein, 248 aa, Artificial Sequence
  derived and/or modified sequence
MPLHVKWPFPAVPPLTWTLASSVVMGLVGTYSCFWTKYMNHLTVHNREVLYELIEKRGPATPLITVSNHQSCMDDPHLWGILKLRHIWNLKLMRWTPAAADICFTKELHSHFFSLGKCVPVCRGDGVYQKGMDFILEKLNHGDWVHIFPEGIGRLIAECHLNPIILPLWHVGMNDVLPNSPPYFPRFGQKITVLIGKPFSALPVLERLRAENKSAVEMRKALTDFIQEEFQHLKTQAEQLHNHLQPGR

SEQ ID NO: 254674 - DNA, 747 bp, Artificial Sequence
  derived and/or modified sequence
atgcccctgcacgtgaagtggcccttccccgccgtgccccccctgacctggaccctggccagcagcgtggtgatgggcctggtgggcacctacagctgcttctggaccaagtacatgaaccacctgaccgtgcacaacagagaggtgctgtacgagctgatcgagaagagaggccccgccacccccctgatcaccgtgagcaaccaccagagctgcatggacgacccccacctgtggggcatcctgaagctgagacacatctggaacctgaagctgatgagatggacccccgccgccgccgacatctgcttcaccaaggagctgcacagccacttcttcagcctgggcaagtgcgtgcccgtgtgcagaggcgacggcgtgtaccagaagggcatggacttcatcctggagaagctgaaccacggcgactgggtgcacatcttccccgagggcatcggcagactgatcgccgagtgccacctgaaccccatcatcctgcccctgtggcacgtgggcatgaacgacgtgctgcccaacagccccccctacttccccagattcggccagaagatcaccgtgctgatcggcaagcccttcagcgccctgcccgtgctggagagactgagagccgagaacaagagcgccgtggagatgagaaaggccctgaccgacttcatccaggaggagttccagcacctgaagacccaggccgagcagctgcacaaccacctgcagcccggcagatag

SEQ ID NO: 254675 - DNA, 747 bp, Artificial Sequence
  derived and/or modified sequence
atgccgcttcacgtgaagtggccatttccagctgtgcccccccttacatggacgctcgcctcgtcagtcgttatggggcttgttgggacttatagctgtttttggacaaagtacatgaaccacctgaccgtgcataatcgcgaggtgctctatgagctcattgagaaacggggacccgctacacccctaatcactgtatcaaaccaccaatcatgtatggacgatccgcacttgtggggcatactaaagttgaggcacatctggaatcttaaacttatgcgttggactcccgcagcagccgacatctgcttcacaaaggaacttcactcgcatttcttctccctggggaagtgcgtgccagtgtgcaggggggacggggtgtatcagaagggcatggatttcattctggagaaactcaaccacggagactgggtgcatattttccccgaaggtatcggccgcctgattgcagagtgtcacctcaaccccataatcttgcctttatggcatgtgggtatgaatgatgtcctgccaaacagccccccatattttccacggtttggacaaaaaattacagtcttgatcggaaaaccgttctctgccctgcccgttttggagcgtcttcgggcagagaataaatctgctgtggaaatgaggaaggcgctgactgatttcattcaggaagaattccagcacctaaagactcaggctgaacagctgcacaaccacttgcaacctggtcgttag

SEQ ID NO: 254676 - DNA, 747 bp, Artificial Sequence
  derived and/or modified sequence
atgcccctgcacgtgaagtggcccttccctgctgtgccccccctgacctggaccctggccagctctgtggtgatgggcctggtgggcacctacagctgcttctggaccaagtacatgaaccacctgactgtgcacaaccgggaggtgctgtatgagctgattgagaagaggggccctgccacccccctcatcaccgtgagcaaccaccagagctgcatggatgacccccacctgtggggcatcctgaagctgcggcacatctggaacctgaagctgatgcgctggaccccagctgctgctgacatctgcttcaccaaggagctgcacagccacttcttcagcctgggcaaatgtgtgcctgtgtgcagaggagatggagtgtaccagaagggcatggacttcatcctggagaagctgaaccacggggactgggtgcacatcttccctgagggcatcggccgcctgattgctgagtgccacctgaaccccatcatcctgcccctgtggcacgtgggcatgaatgatgtgctgcccaacagccccccctacttccccaggtttggccagaagatcaccgtgctgattggcaagcccttcagcgccctgcctgtgctggagcggctgcgggcagagaacaagtctgctgtggagatgaggaaggccctgacagacttcatccaggaggagttccagcacctgaagacccaggccgagcagctgcacaaccacctgcagcccggccgctag

SEQ ID NO: 254677 - DNA, 747 bp, Artificial Sequence
  derived and/or modified sequence
atgcccctgcacgtgaagtggcccttccccgccgtgccccccctgacctggactcttgcgtcttctgtggtcatgggcctggtgggtacatactcatgcttttggacaaagtacatgaatcatctgactgtccataacagagaggtcctttacgagcttatcgagaaacgcgggccagcaaccccattaataaccgttagcaaccaccagagttgtatggatgatcctcacctgtggggaatactgaaattgaggcatatttggaatctgaaactgatgagatggacccccgccgccgccgacatctgctttacaaaggagcttcattcacatttttttagtctcggaaagtgtgttccagtgtgcagaggcgacggcgtttaccagaagggcatggattttatactcgagaagcttaaccacggagattgggtgcatatctttccagagggcattggtaggctgatagcagagtgtcacctgaacccaattatcttgcctctctggcacgttggaatgaatgacgtgctgcctaacagtccaccctatttcccacggtttgggcagaagatcacagtgttgatagggaagcccttcagtgccctaccagtattagaacggctccgagccgagaataagagtgcagtggaaatgcgaaaagctcttaccgacttcatacaggaggagttccagcacctcaagacacaggcagaacagctgcacaatcaccttcaaccagggcgctag

SEQ ID NO: 254678 - DNA, 747 bp, Artificial Sequence
  derived and/or modified sequence
atgcccctgcacgtgaaatggccttttcccgcagttcctccacttacatggactttggcgtcctccgtcgtgatggggttagtgggaacctactcctgtttctggaccaaatacatgaatcatctcaccgtccacaaccgggaagtgctctacgaacttatcgagaagaggggacccgctaccccgctgatcacagtatcgaatcatcagagctgcatggacgatccacacctatgggggatccttaaactgcgtcacatctggaaccttaaactgatgagatggaccccagcagctgcagatatatgctttacgaaagaactgcactcgcattttttctctctcgggaaatgtgtccccgtttgccgcggagatggagtctatcagaagggcatggactttatccttgaaaaactgaatcacggggactgggtacatatctttcccgagggaatcgggaggctaatcgcagagtgtcatcttaacccgatcattctgcccttatggcacgtcggcatgaatgatgttctgccgaattcaccgccttattttcctaggttcggtcaaaagattaccgtgttgatcggaaagccattctcagcacttcccgtcctcgagcggctccgggcagagaacaagagtgcagtggagatgaggaaagcgttgacagactttatacaggaagagttccagcacttgaaaacacaggcagagcaactgcacaaccacttgcaacccggaagatag

SEQ ID NO: 254679 - DNA, 1740 bp, Artificial Sequence
  derived and/or modified sequence
tttccggcggttgcaccgggccggggtgccagcgcccgccttcccgtttcctcccgttccgcagcgcgcccacggcctgtgaccccggcgaccgctccccagtgacgagagagcggggccgggcgctgctccggcctgacctgcgaagggacctcggtccagtcccctgttgcgccgcgccccctgtccgtccgtgcgcgggccagtcaggggccagtgtctcgagcggtcgaggtcgcagacctagaggcgccccacaggccggcccggggcgctgggagcgccggccgcgggccgggtggggatgcctctgcacgtgaagtggccgttccccgcggtgccgccgctcacctggaccctggccagcagcgtcgtcatgggcttggtgggcacctacagctgcttctggaccaagtacatgaaccacctgaccgtgcacaacagggaggtgctgtacgagctcatcgagaagcgaggcccggccacgcccctcatcaccgtgtccaatcaccagtcctgcatggacgaccctcatctctgggggatcctgaaactccgccacatctggaacctgaagttgatgcgttggacccctgcagctgcagacatctgcttcaccaaggagctacactcccacttcttcagcttgggcaagtgtgtgcctgtgtgccgaggagatggcgtctaccagaaggggatggacttcattttggagaagctcaaccatggggactgggtgcatatcttcccagaaggaatcgggcgcctgattgctgagtgtcatctcaaccccatcatcctgcccctgtggcatgtcggaatgaatgacgtccttcctaacagtccgccctacttcccccgctttggacagaaaatcactgtgctgatcgggaagcccttcagtgccctgcctgtactcgagcggctccgggcggagaacaagtcggctgtggagatgcggaaagccctgacggacttcattcaagaggaattccagcatctgaagactcaggcagagcagctccacaaccacctccagcctgggagataggccttgcttgctgccttctggattcttggcccgcacagagctggggctgagggatggactgatgcttttagctcaaacgtggcttttagacagatttgttcatagaccctctcaagtgccctctccgagctggtaggcattccagctcctccgtgcttcctcagttacacaaaggacctcagctgcttctcccacttggccaagcagggaggaagaagcttaggcagggctctctttccttcttgccttcagatgttctctcccaggggctggcttcaggagggagcatagaaggcaggtgagcaaccagttggctaggggagcagggggcccaccagagctgtggagaggggaccctaagactcctcggcctggctcctacccaccgcccttgccgaaccaggagctgctcactacctcctcagggatggccgttggccacgtcttccttctgcctgagcttccccccgaccacaggccctttcctcaggcaaggtctggcctcaggtgggccgcaggcgggaaaagcagcccttggccagaagtcaagcccagccacgtggagcctagagtgagggcctgaggtctggctgcttgcccccatgctggcgccaacaacttctccatcctttctgcctctcaacatcacttgaatcctagggcctgggttttcatgtttttgaaacaga

SEQ ID NO: 254680 - protein, 388 aa, Artificial Sequence
  derived and/or modified sequence
MRTLRRLKFMSSPSLSDLGKREPAAAADERGTQQRRACANATWNSIHNGVIAVFQRKGLPDQELFSLNEGVRQLLKTELGSFFTEYLQNQLLTKGMVILRDKIRFYEGQKLLDSLAETWDFFFSDVLPMLQAIFYPVQGKEPSVRQLALLHFRNAITLSVKLEDALARAHARVPPAIVQMLLVLQGVHESRGVTEDYLRLETLVQKVVSPYLGTYGLHSSEGPFTHSCILEKRLLRRSRSGDVLAKNPVVRSKSYNTPLLNPVQEHEAEGAAAGGTSIRRHSVSEMTSCPEPQGFSDPPGQGPTGTFRSSPAPHSGPCPSRLYPTTQPPEQGLDPTRSSLPRSSPENLVDQILESVDSDSEGIFIDFGRGRGSGMSDLEGSGGRQSVV

SEQ ID NO: 254681 - DNA, 1167 bp, Artificial Sequence
  derived and/or modified sequence
atgagaaccctgagaagactgaagttcatgagcagccccagcctgagcgacctgggcaagagagagcccgccgccgccgccgacgagagaggcacccagcagagaagagcctgcgccaacgccacctggaacagcatccacaacggcgtgatcgccgtgttccagagaaagggcctgcccgaccaggagctgttcagcctgaacgagggcgtgagacagctgctgaagaccgagctgggcagcttcttcaccgagtacctgcagaaccagctgctgaccaagggcatggtgatcctgagagacaagatcagattctacgagggccagaagctgctggacagcctggccgagacctgggacttcttcttcagcgacgtgctgcccatgctgcaggccatcttctaccccgtgcagggcaaggagcccagcgtgagacagctggccctgctgcacttcagaaacgccatcaccctgagcgtgaagctggaggacgccctggccagagcccacgccagagtgccccccgccatcgtgcagatgctgctggtgctgcagggcgtgcacgagagcagaggcgtgaccgaggactacctgagactggagaccctggtgcagaaggtggtgagcccctacctgggcacctacggcctgcacagcagcgagggccccttcacccacagctgcatcctggagaagagactgctgagaagaagcagaagcggcgacgtgctggccaagaaccccgtggtgagaagcaagagctacaacacccccctgctgaaccccgtgcaggagcacgaggccgagggcgccgccgccggcggcaccagcatcagaagacacagcgtgagcgagatgaccagctgccccgagccccagggcttcagcgacccccccggccagggccccaccggcaccttcagaagcagccccgccccccacagcggcccctgccccagcagactgtaccccaccacccagccccccgagcagggcctggaccccaccagaagcagcctgcccagaagcagccccgagaacctggtggaccagatcctggagagcgtggacagcgacagcgagggcatcttcatcgacttcggcagaggcagaggcagcggcatgagcgacctggagggcagcggcggcagacagagcgtggtgtag

SEQ ID NO: 254682 - DNA, 1167 bp, Artificial Sequence
  derived and/or modified sequence
atgagaacacttcggagactcaagtttatgtcatctccaagcctgtccgacctgggcaaaagagagcccgcagctgcagcggatgaacgcggcactcaacagcgccgggcatgtgctaatgctacttggaattctatccacaacggcgtgatcgctgtatttcagagaaagggcctgcccgatcaggagctattctctctgaacgaaggcgtcaggcagctactgaaaaccgagctgggatctttctttaccgaatacctccagaatcagctccttactaagggcatggtcatccttagagacaaaatcagattctacgagggccagaaactgctcgactccctcgccgagacatgggatttctttttctcagatgttttgcctatgctgcaagccatcttttaccccgtgcaaggcaaagaaccatccgtgaggcagctcgccctgctccatttcagaaacgcaatcactctgagtgtaaaactagaggacgcactggcaagggcccatgccagggtgccccccgctattgtgcaaatgctgctggttctgcagggagtccacgaatcgcggggcgtgaccgaagactacttgcggctggagaccttagtacagaaggttgtgtccccatacctaggcacttatgggctccatagcagcgaaggcccattcactcatagctgtattctcgagaagaggctacttaggaggtcaagatccggcgatgtgctggcaaaaaaccctgtagtgcgttcaaaaagctacaacacacccctactaaacccggttcaggagcacgaagccgaaggtgccgccgccgggggcacatcaataagacgccattcagtcagcgagatgaccagctgcccagagcctcaggggtttagcgaccctcccggacagggtcccactggaacatttaggagcagccctgcccctcactccggtccttgtccctcccgtctctacccaacaactcagcctccggagcagggacttgatccgaccagatcctccttgccgcgctctagccctgagaaccttgtcgatcaaatcctggagagcgtggactcagactccgagggcatatttatagacttcggtcgcggcagagggagtggaatgagcgatttagaggggtctggagggagacaatctgttgtgtag

SEQ ID NO: 254683 - DNA, 1167 bp, Artificial Sequence
  derived and/or modified sequence
atgaggaccctgcggcggctgaagttcatgagcagccccagcctgagtgacctgggcaagcgggagcctgctgctgctgctgatgagcggggcacccagcagaggcgggcctgtgccaatgccacctggaacagcatccacaacggggtgattgctgtgttccagaggaagggcctgcctgaccaggagctgttcagcctgaatgaaggagtgcggcagctgctgaagacagagctgggcagcttcttcacagagtacctgcagaaccagctgctgaccaagggcatggtgatcctgcgggacaagatccgcttctatgagggccagaagctgctggacagcctggccgagacctgggacttcttcttcagtgatgtgctgcccatgctgcaggccatcttctaccctgtgcagggcaaggagcccagcgtgcggcagctggccctgctgcacttcagaaatgccatcaccctgtctgtgaagctggaggatgccctggcccgggcccacgcccgggtgcccccagccatcgtgcagatgctgctggtgctgcagggcgtgcatgagagccggggcgtgacagaggactacctgcggctggagaccctggtgcagaaggtggtgagcccctacctgggcacctacggcctgcacagcagcgagggccccttcacccacagctgcatcctggagaagaggctgctgcggcgcagccgctctggagatgtgctggccaagaaccctgtggtgcgcagcaagagctacaacacccccctgctgaaccctgtgcaggagcacgaggccgagggcgctgctgctgggggcaccagcatcagaagacacagcgtgtctgagatgaccagctgcccagagccccagggcttcagtgaccccccaggccagggccccaccggcaccttccgcagcagccctgccccccacagcggcccctgccccagccggctgtaccccaccacccagcccccagagcagggcctggaccccaccaggagcagcctgcccaggagcagccctgagaacctggtggaccagatcctggagagcgtggacagcgacagcgagggcatcttcatcgactttggccggggccggggcagcggcatgtctgacctggagggcagcggcggccggcagagcgtggtgtag

SEQ ID NO: 254684 - DNA, 1167 bp, Artificial Sequence
  derived and/or modified sequence
atgcggaccctgcggcggctgaagttcatgagcagccccagcctgtctgatcttggtaagcgagagccggcagctgctgccgacgagagagggacccagcagcgcagagcttgcgctaacgctacctggaattccattcacaacggggtgatcgcagtgttccagcggaagggcctgcccgatcaggagctcttttcgctgaacgagggagtcagacaacttttgaaaaccgaactgggatcgttctttacggaatacctgcaaaatcagctcctgaccaaaggtatggtcattctccgcgacaaaatccggttctacgaaggacagaagcttttagatagtctggccgagacttgggacttcttttttagcgatgtgctaccaatgctgcaggccatcttttaccctgtgcaggggaaagagcccagcgtgcggcagctcgctcttctgcattttcgaaacgctatcactctgtctgtgaagctcgaagatgcccttgctcgcgctcacgcccgtgtccctcctgccatcgttcagatgttgttagttctacagggagtgcacgaaagcagaggtgtgactgaagactacctgaggttggaaaccctagttcagaaggtggtcagcccttatttaggaacctacggcctccattccagcgagggaccattcacccattcttgtatcctggaaaagaggttattacgtagatcaagaagcggagacgtgctggccaaaaaccccgtcgtcaggtcgaagtcttataatactccactcctcaaccctgtgcaagaacacgaagcagaaggggctgccgctggaggcacgtcaatcagacgtcactccgtcagcgagatgacctcgtgtcctgaacctcagggcttcagcgacccaccagggcaaggaccaactggcacattccgatcttcacccgcaccgcatagcggaccttgccccagcagactgtatcccaccactcagcctcctgagcagggcctggacccgacgaggtccagccttccccggtcgtccccagagaacttagtggaccagattctagaatccgtcgactcagattctgagggcatctttatcgactttggtagaggaagggggtcaggaatgtctgatctcgagggcagtggcgggaggcaaagcgtggtttag

SEQ ID NO: 254685 - DNA, 1167 bp, Artificial Sequence
  derived and/or modified sequence
atgagaactctcagacgcctgaaattcatgagtagcccttccctgtcggatttgggtaagcgtgagcctgctgcggcagcagacgagcggggtacgcagcagcggagggcttgtgcaaatgcaacctggaattctattcacaatggggtcattgcagtgtttcaaagaaaaggattgcctgatcaagagcttttttcgctcaacgagggagttcgtcaactgttaaaaactgagcttgggtccttttttactgaatatctgcagaaccagctgctgacaaaaggcatggtcatcctgagggataaaattcgtttttacgaggggcaaaaactgctggactcactggcggagacatgggatttcttcttcagtgacgtcctgcccatgttgcaggccatcttctaccccgtgcagggcaaggaacctagtgtacgccaactggcccttcttcatttcagaaatgcgataacactgagtgtgaaactggaagatgctctggcacgcgctcacgcacgagtgccaccggcaatcgtccagatgctgttggtgctccagggagttcacgaatcacgcggagttacggaagattacctcaggctggagactctggtgcagaaagtggtgtccccctatctgggcacctacggattacattcatctgaggggccttttacccactcttgtatcctcgagaaacgtctcctgagaaggtcccgatccggagacgtgttagctaagaacccagttgtgcggagtaaatcttacaatactcccctgctcaatccagtgcaagaacatgaagctgaaggtgcagctgctggtggcacttccatccggagacattctgtaagtgagatgacatcctgccccgaacctcaaggtttttcggacccacctggccaaggcccaacgggcactttccgctcgtccccggctccacacagcggaccttgcccgtcaaggctctaccctactacccagccccctgagcaagggctggaccctactcgcagtagcttgcccagatcttctccggagaatctcgtggatcagatcctggaatctgtagactctgattctgagggcattttcatcgactttggcaggggcaggggtagtggcatgtccgatctggagggctccggcggtagacagtcagtcgtgtag

SEQ ID NO: 254686 - DNA, 1767 bp, Artificial Sequence
  derived and/or modified sequence
attcggctgcccccaaggccaggcatccagtgtgcttagtgctgagcagggtttcagagctcacccccaggagggtgcagacctcagccaaggtcgcagagcagaggagacccgtgggctgggattccacctgtgcccaccctggcagcatcccacctcctgagtcctctcggcacccagcaaggttgaagttcatgagttcgcccagcctcagtgacctgggcaagagagagccggccgccgccgcggacgagcggggcacgcagcagcgccgggcctgcgccaacgccacctggaacagcatccacaacggggtgatcgccgtcttccagcgcaaggggctgcccgaccaggagctcttcagcctcaacgagggcgtccggcagctgttgaagacagagctggggtccttcttcacggagtacctgcagaaccagctgctgacaaaaggcatggtgatccttcgggacaagattcgcttctatgagggacagaagctgctggactcactggcagagacctgggacttcttcttcagtgacgtgctgcccatgctgcaggccatcttctacccggtgcagggcaaggagccatcggtgcgccagctggccctgctgcacttccggaatgccatcaccctcagtgtgaagctagaggatgcgctggcccgggcccatgcccgtgtgccccctgccatcgtgcagatgctgctggtgctgcagggggtacatgagtccaggggcgtgactgaggactacctgcgcctggagacgctggtccagaaggtggtgtcgccatacctgggcacctacggcctccactccagcgaggggcccttcacccattcctgcatcctggaaaagcgcctcctccgccgctcccgctcgggggacgtgctggccaagaaccctgtggtgcgctccaagagctacaacacgcctctgctgaaccccgtgcaggagcacgaggcggagggcgcggcggccggcggtaccagcatccgcaggcactctgtgtcggagatgacgtcctgccccgagcctcagggcttctccgacccgcccggccagggccccaccgggaccttcaggtcctccccggcgccccactcagggccctgccccagcagactgtaccccacgacccagccccctgagcagggcttggatcccacccgcagctccctgccccgctccagcccggagaacctggtggaccagatcctggagtccgtggactcggattctgaagggattttcattgactttggccggggccggggctctggcatgtccgacttggagggctctgggggccggcagagtgtcgtgtgaggcctcacagctggccttgagtttttactgacacgtccctgtgtgcgggggtgtccatgtggcgtgtgtgtgagtgagacttttttactgcgtcccgtcccgccagccctatcggcctcgtcactggccttggtcactttgtatttctgtcttggttggaaataccatcagccttccttgctcggcccaggtctgtttcaggcatctgagtcggcgtttacccaggggccgggccagagacgggggtcggccgctcgctcccacgctcctcctgccccagccctctggtgtccacacctgcccacagagaatgtaaacccagtgggctctgcccacgccgggccccaaagtgaccagactccagcacacctgtctcctcctgcctggggtggccatggggatggaagggggtggaataaaacctgtcaacctg

SEQ ID NO: 254687 - DNA, 1878 bp, Artificial Sequence
  derived and/or modified sequence
gcccccggcctccgtttgcgccgggtctgtgctggccgcgcgcctggcgctccacgctgagcctctccgtgcaatgattaacccggcggggcggccggcgcgggacccgagacggaggcgcggggccggggcgggaccccgcaggaccgctcggcttcctgctctcgccggagtttccgcgtagagggcgcatcgccggcccggggcccttggtgcggcgtggcgcagggcgcggcgtggggcgcgcgtgggcgcggcgcaggcggcccgggtcaccatgaggactctccgcaggttgaagttcatgagttcgcccagcctcagtgacctgggcaagagagagccggccgccgccgcggacgagcggggcacgcagcagcgccgggcctgcgccaacgccacctggaacagcatccacaacggggtgatcgccgtcttccagcgcaaggggctgcccgaccaggagctcttcagcctcaacgagggcgtccggcagctgttgaagacagagctggggtccttcttcacggagtacctgcagaaccagctgctgacaaaaggcatggtgatccttcgggacaagattcgcttctatgagggacagaagctgctggactcactggcagagacctgggacttcttcttcagtgacgtgctgcccatgctgcaggccatcttctacccggtgcagggcaaggagccatcggtgcgccagctggccctgctgcacttccggaatgccatcaccctcagtgtgaagctagaggatgcgctggcccgggcccatgcccgtgtgccccctgccatcgtgcagatgctgctggtgctgcagggggtacatgagtccaggggcgtgactgaggactacctgcgcctggagacgctggtccagaaggtggtgtcgccatacctgggcacctacggcctccactccagcgaggggcccttcacccattcctgcatcctggaaaagcgcctcctccgccgctcccgctcgggggacgtgctggccaagaaccctgtggtgcgctccaagagctacaacacgcctctgctgaaccccgtgcaggagcacgaggcggagggcgcggcggccggcggtaccagcatccgcaggcactctgtgtcggagatgacgtcctgccccgagcctcagggcttctccgacccgcccggccagggccccaccgggaccttcaggtcctccccggcgccccactcagggccctgccccagcagactgtaccccacgacccagccccctgagcagggcttggatcccacccgcagctccctgccccgctccagcccggagaacctggtggaccagatcctggagtccgtggactcggattctgaagggattttcattgactttggccggggccggggctctggcatgtccgacttggagggctctgggggccggcagagtgtcgtgtgaggcctcacagctggccttgagtttttactgacacgtccctgtgtgcgggggtgtccatgtggcgtgtgtgtgagtgagacttttttactgcgtcccgtcccgccagccctatcggcctcgtcactggccttggtcactttgtatttctgtcttggttggaaataccatcagccttccttgctcggcccaggtctgtttcaggcatctgagtcggcgtttacccaggggccgggccagagacgggggtcggccgctcgctcccacgctcctcctgccccagccctctggtgtccacacctgcccacagagaatgtaaacccagtgggctctgcccacgccgggccccaaagtgaccagactccagcacacctgtctcctcctgcctggggtggccatggggatggaagggggtggaataaaacctgtcaacctgg

SEQ ID NO: 254688 - DNA, 905 bp, Artificial Sequence
  derived and/or modified sequence
ctccgcggccccctcccccggccccgggctccggctccggctccggctctggctctgcgcggtggcagcggcggcggcggcgcggggaccgaggttgaagttcatgagttcgcccagcctcagtgacctgggcaagagagagccggccgccgccgcggacgagcggggcacgcagcagcgccgggcctgcgccaacgccacctggaacagcatccacaacggggtgatcgccgtcttccagcgcaaggggctgcccgaccaggagctcttcagcctcaacgagggcgtccggcagctgttgaagacagagctggggtccttcttcacggagtacctgcagaaccagctgctgacaaaaggcatggtgatccttcgggacaagattcgcttctatgagggacagaagctgctggactcactggcagagacctgggacttcttcttcagtgacgtgctgcccatgctgcaggccatcttctacccggtgcagggcaaggagccatcggtgcgccagctggccctgctgcacttccggaatgccatcaccctcagtgtgaagctagaggatgcgctggcccgggcccatgcccgtgtgccccctgccatcgtgcagatgctgctggtgctgcagggggtacatgagtccaggggcgtgactgaggactacctgcgcctggagacgctggtccagaaggtggtgtcgccatacctgggcacctacggcctccactccagcgaggggcccttcacccattcctgcatcctggaaaagcgcctcctccgccgctcccgctcgggggacgtgctggccaagaaccctgtggtgcgctccaagagctacaacacgcctctgctgaaccccgtgcaggagcacgaggcggagggcgcggcggccggcggtacca

SEQ ID NO: 254689 - DNA, 881 bp, Artificial Sequence
  derived and/or modified sequence
ccgggtctgtgctggccgcgcgcctggcgctccacgctgagcctctccgtgcaatgattaacccggcggggcggccggcgcgggacccgagacggaggcgcggggccggggcgggaccccgcaggaccgctcggcttcctgctctcgccggagtttccgcgtagagggcgcatcgccggcccggggcccttggttgaagttcatgagttcgcccagcctcagtgacctgggcaagagagagccggccgccgccgcggacgagcggggcacgcagcagcgccgggcctgcgccaacgccacctggaacagcatccacaacggggtgatcgccgtcttccagcgcaaggggctgcccgaccaggagctcttcagcctcaacgagggcgtccggcagctgttgaagacagagctggggtccttcttcacggagtacctgcagaaccagctgctgacaaaaggcatggtgatccttcgggacaagattcgcttctatgagggacagaagctgctggactcactggcagagacctgggacttcttcttcagtgacgtgctgcccatgctgcaggccatcttctacccggtgcagggcaaggagccatcggtgcgccagctggccctgctgcacttccggaatgccatcaccctcagtgtgaagctagaggatgcgctggcccgggcccatgcccgtgtgccccctgccatcgtgcagatgctgctggtgctgcagggggtacatgagtccaggggcgtgactgaggactacctgcgcctggagacgctggtccagaaggtggtgtcgccatacctgggcacctacggcctccactccagcgaggggcccttcacccattcctgcatcctggaaaagcgcctcctcc

SEQ ID NO: 254690 - protein, 503 aa, Artificial Sequence
  derived and/or modified sequence
MAGLSDLELRRELQALGFQPGPITDTTRDVYRNKLRRLRGEARLRDEERLREEARPRGEERLREEARLREDAPLRARPAAASPRAEPWLSQPASGSAYATPGAYGDIRPSAASWVGSRGLAYPARPAQLRRRASVRGSSEEDEDARTPDRATQGPGLAARRWWAASPAPARLPSSLLGPDPRPGLRATRAGPAGAARARPEVGRRLERWLSRLLLWASLGLLLVFLGILWVKMGKPSAPQEAEDNMKLLPVDCERKTDEFCQAKQKAALLELLHELYNFLAIQAGNFECGNPENLKSKCIPVMEAQEYIANVTSSSSAKFEAALTWILSSNKDVGIWLKGEDQSELVTTVDKVVCLESAHPRMGVGCRLSRALLTAVTNVLIFFWCLAFLWGLLILLKYRWRKLEEEEQAMYEMVKKIIDVVQDHYVDWEQDMERYPYVGILHVRDSLIPPQSRRRMKRVWDRAVEFLASNESRIQTESHRVAGEDMLVWRWTKPSSFSDSER

SEQ ID NO: 254691 - protein, 201 aa, Artificial Sequence
  derived and/or modified sequence
MEAQEYIANVTSSSSAKFEAALTWILSSNKDVGIWLKGEDQSELVTTVDKVVCLESAHPRMGVGCRLSRALLTAVTNVLIFFWCLAFLWGLLILLKYRWRKLEEEEQAMYEMVKKIIDVVQDHYVDWEQDMERYPYVGILHVRDSLIPPQSRRRMKRVWDRAVEFLASNESRIQTESHRVAGEDMLVWRWTKPSSFSDSER

SEQ ID NO: 254692 - protein, 54 aa, Artificial Sequence
  derived and/or modified sequence
MEAQEYIANVTSSSSAKFEAALTWILSSNKDVGIWLKGEDQSELVTTVDKVVCL

SEQ ID NO: 254693 - DNA, 1512 bp, Artificial Sequence
  derived and/or modified sequence
atggccggcctgagcgacctggagctgagaagagagctgcaggccctgggcttccagcccggccccatcaccgacaccaccagagacgtgtacagaaacaagctgagaagactgagaggcgaggccagactgagagacgaggagagactgagagaggaggccagacccagaggcgaggagagactgagagaggaggccagactgagagaggacgcccccctgagagccagacccgccgccgccagccccagagccgagccctggctgagccagcccgccagcggcagcgcctacgccacccccggcgcctacggcgacatcagacccagcgccgccagctgggtgggcagcagaggcctggcctaccccgccagacccgcccagctgagaagaagagccagcgtgagaggcagcagcgaggaggacgaggacgccagaacccccgacagagccacccagggccccggcctggccgccagaagatggtgggccgccagccccgcccccgccagactgcccagcagcctgctgggccccgaccccagacccggcctgagagccaccagagccggccccgccggcgccgccagagccagacccgaggtgggcagaagactggagagatggctgagcagactgctgctgtgggccagcctgggcctgctgctggtgttcctgggcatcctgtgggtgaagatgggcaagcccagcgccccccaggaggccgaggacaacatgaagctgctgcccgtggactgcgagagaaagaccgacgagttctgccaggccaagcagaaggccgccctgctggagctgctgcacgagctgtacaacttcctggccatccaggccggcaacttcgagtgcggcaaccccgagaacctgaagagcaagtgcatccccgtgatggaggcccaggagtacatcgccaacgtgaccagcagcagcagcgccaagttcgaggccgccctgacctggatcctgagcagcaacaaggacgtgggcatctggctgaagggcgaggaccagagcgagctggtgaccaccgtggacaaggtggtgtgcctggagagcgcccaccccagaatgggcgtgggctgcagactgagcagagccctgctgaccgccgtgaccaacgtgctgatcttcttctggtgcctggccttcctgtggggcctgctgatcctgctgaagtacagatggagaaagctggaggaggaggagcaggccatgtacgagatggtgaagaagatcatcgacgtggtgcaggaccactacgtggactgggagcaggacatggagagatacccctacgtgggcatcctgcacgtgagagacagcctgatccccccccagagcagaagaagaatgaagagagtgtgggacagagccgtggagttcctggccagcaacgagagcagaatccagaccgagagccacagagtggccggcgaggacatgctggtgtggagatggaccaagcccagcagcttcagcgacagcgagagatag

SEQ ID NO: 254694 - DNA, 1512 bp, Artificial Sequence
  derived and/or modified sequence
atggccggcctgtcggatctcgagttgaggagggagcttcaggcactaggtttccagcccggacctattaccgataccacgagggacgtttaccgcaataagctgagaagactgcgaggcgaggcgaggctgagggacgaggaacgtctgcgggaggaggcaagaccccggggggaagagcgcctgagggaagaggcccggttacgtgaagatgctccactgcgcgcgcgtcccgctgctgcttcaccccgggccgagccttggctcagtcaacccgcttctggcagcgcttatgctacccctggagcctatggcgacataaggccttcagctgcatcttgggtaggatctaggggccttgcataccccgcacgccctgctcaattgcgccggcgggccagcgtaagagggagtagcgaggaagacgaagatgcccgcactccagacagggcaacgcagggaccaggcttggctgcccggagatggtgggccgcctcgcccgcgcctgcgcgcctcccctccagccttctgggtcccgatccacgcccaggcctccgggcaactcgggcgggtcctgccggagcagctagggcacgacccgaggttggccgcagactcgaacgttggctgtcccgcctgttgctgtgggcaagtctgggcctgctgctcgtgtttctgggcatcttatgggtgaaaatggggaagccctcagccccgcaggaggcagaggataatatgaagctgttaccagtggattgtgaacgcaaaacagacgaattttgccaggccaaacagaaggcagccctgctggagttactgcatgagctctataattttctcgcgatacaggcaggcaattttgagtgcggcaacccagaaaacctgaaaagtaaatgtattcctgttatggaagcccaggagtacatagccaacgtgaccagctcttcctcagccaaatttgaagccgcccttacttggattctctcgagtaacaaagacgtgggcatatggctgaaaggcgaggaccagagtgagttagtgacaacggtcgataaggtagtgtgtttggagagcgcccatccacgaatgggagtgggctgcaggctatcacgcgcgctgttaaccgccgtcaccaacgtgctgatctttttctggtgcttggccttcctttgggggctcctcatcctactgaaataccggtggaggaaactggaggaggaagaacaagctatgtatgagatggtgaaaaagatcatcgatgtggtacaggaccattacgttgactgggaacaagatatggagcgatacccctacgtcgggatcttgcacgtgcgggattcactgataccccctcaaagtagacgaaggatgaaacgggtgtgggatagagctgtagagtttcttgcctcgaatgagtcccggatccagaccgaatcccacagggtcgcgggggaggacatgctggtgtggcggtggacaaaaccaagttctttttctgattccgaacggtag

SEQ ID NO: 254695 - DNA, 2958 bp, Artificial Sequence
  derived and/or modified sequence
cggggggcggcgtcctggccatggccggcctgtcggacctggaactgcggcgggagctgcaggccctgggcttccagccaggacccatcaccgacaccacccgggatgtctaccgcaacaagctgcgccgcctgcggggcgaggcccggctgcgcgacgaggagcggctgcgggaggaggcccggccgcggggcgaggagcggttacgggaagaggcccggttacgcgaggatgcgccgctgcgcgcccggcccgccgcggcctctccgcgggcggagccctggctctcccagccggcctcgggctcggcctacgcgacccctggggcctacggtgatatccggccctccgcggcttcctgggtagggagccgcggcctcgcctatcctgcccgcccggcgcaactcaggcgccgcgcctcggtccggggcagctccgaggaggacgaggacgcccggacgcccgacagggccacgcagggcccgggtctcgcggcccgccgctggtgggcagcgtctcccgccccggcgcggctgccttcctccctcctcggtcccgacccgcgcccgggcctgcgggcgactcgagcgggccctgctggcgcggcgagggcccggcctgaggtggggcgccggctggagcgctggctctctcggcttctgctctgggccagcctagggctactgctcgtcttcctgggcatcctttgggtgaagatgggcaagccctcagcgccgcaggaggcggaggacaacatgaagttattgccagtggactgtgagagaaaaacagatgagttctgtcaggccaagcagaaggcagccttgctggagctgctgcatgaactctacaatttcctggccatccaagctggtaattttgagtgtggaaatccagagaatctaaaaagcaaatgcattcctgttatggaagcccaagaatatatagccaatgtgaccagcagctcctccgccaagtttgaagccgcactgacctggatactgagcagtaacaaggacgtgggcatctggttgaaaggagaagaccagtctgaattggtgacgactgtggacaaggtggtctgcctggaatctgcccacccccgcatgggtgttggctgccgcctgagccgggccttgctcactgctgtcaccaacgtgctcatcttcttctggtgcttggcttttttgtgggggctcctaattctcctaaaatatcggtggcgaaagttagaagaggaggaacaagccatgtatgagatggtgaagaagattatagacgtggtccaggaccattacgtggactgggagcaggacatggagcgctatccatatgtaggcatcctgcacgtgcgcgacagcttgatccctccacagagccggaggcgcatgaagcgtgtctgggaccgagctgtggagttcctggcctccaacgaatcccggatccagacggagtcccaccgcgttgcaggagaggacatgctggtgtggagatggactaagccctcttccttctctgactcagagcgataagccccgggcggggacttgttcccggtcagcctgtcccaggacagcccactccagaggcacaggagggtcaccaggcctgcggtgctgaattcacacttgccttgactttcagtctcgtcctgacacgattccaaaggtctgccatactcttcagaggagttcggctcgcaggaaaatgtgggcttcctttaaagggagggggagaagccagggtgatagcccagactctgccctgttgtgctggcagaaacggggagaagggttgagttttcatgaatagaaaacaagagcagcagctgtcaggcccagctgacaagcgtggggctggtgggctggggcatggccacgccagggagtctgtcacctgggaggtggggcagggatggtgtttcgggtggcgggatggggagcagcttggtccatgtgccttcagggggttgttacttgagagctccagggtgaagggagaaagcctgtgctctggctggctgggcctctatcctgaagagggaaggtgctagaaattagaacaagtgactgtaggggggaccgtctagaaacaccaggcccagacacacggtccctcaggtcaggaggagtgagcagccggcacagcctcctgggaggatcccgaagtagggactggggctgagagcagagaggagggtcgggcagccccagggcgggcgggcccgcctcagtgttgcttctcacagaagctgcgactctagaccaggcctgcagccagaacgccgattccgggagcttgggagccctgcgtcagggcccagagcctcgcacttgctgtgtgcgaagatcgccttgctttactgtgaccacagccccgacgcggggctgtttaacaagaacttcagcgcagccggcgtttctgttaccccggccgcggctcttggcggcgggagaggcgcagtggctgcaggctgccccctgccggccacaagggagcagcgtccgcgccgccgcccaccggccctcccgccagctcctcagcctgctccctgggaggcaggctccagaagcaccccgacggggggccttattaagtgcgagaagcctctccagcgagtcttccccgtgtgtcctcatctgcggcaggcaggagagggggagcaaacaggaaattccacagctgcctccagaaacattaaccacccctctctagtcttactggtattttttgtttccttaataaagctccagtctccctcatttgagcaatactctcatttcctctgatgtctggatgatcggcagggcaggaatctgagcgctggccccgtggtgaggccatgttctcataatcaggctccagccagaaaaataagaaacaccgcaacaggcttcagtatcagggctgaaactgctggatgaataaactatttattaaaaacggatgtttcttgcc

SEQ ID NO: 254696 - DNA, 1306 bp, Artificial Sequence
  derived and/or modified sequence
ttcagctgggacaaggacccagctatcgtaattcctaatccaggatttggatacccttacattttgctgtctgcattttaaaagtgccttccttagatgacatctttctaatccccacccttggcttggtaatgctttactccctccaaatgttgtgagtagtctctttttgtattcctttctcaacccacacttaatttcctctgtgtttcttttcttggtctcagtgaagttattgccagtggactgtgagagaaaaacagatgagttctgtcaggccaagcagaaggcagccttgctggagctgctgcatgaactctacaatttcctggccatccaagctggtaattttgagtgtggaaatccagagaatctaaaaagcaaatgcattcctgttatggaagcccaagaatatatagccaatgtgaccagcagctcctccgccaagtttgaagccgcactgacctggatactgagcagtaacaaggacgtgggcatctggttgaaaggagaagaccagtctgaattggtgacgactgtggacaaggtggtctgcctggaatctgcccacccccgcatgggtgttggctgccgcctgagccgggccttgctcactgctgtcaccaacgtgctcatcttcttctggtgcttggcttttttgtgggggctcctaattctcctaaaatatcggtggcgaaagttagaagaggaggaacaagccatgtatgagatggtgaagaagattatagacgtggtccaggaccattacgtggactgggagcaggacatggagcgctatccatatgtaggcatcctgcacgtgcgcgacagcttgatccctccacagagccggaggcgcatgaagcgtgtctgggaccgagctgtggagttcctggcctccaacgaatcccggatccagacggagtcccaccgcgttgcaggagaggacatgctggtgtggagatggactaagccctcttccttctctgactcagagcgataagccccgggcggggacttgttcccggtcagcctgtcccaggacagcccactccagaggcacaggagggtcaccaggcctgcggtgctgaattcacacttgccttgactttcagtctcgtcctgacacgattccaaaggtctgccatactcttcagaggagttcggctcgcaggaaaatgtgggcttcctttaaagggagggggagaagccagggtgatagcccagactctgccctgttgtgctggcagaaacggggagaagggttgagttttcatgaatagaaaacaagagcagcagctgtcag

SEQ ID NO: 254697 - DNA, 555 bp, Artificial Sequence
  derived and/or modified sequence
gagttaagcagggaaggcccatttgatcccgttttacagacgaggagacagaggttcagagtggttgagttgcccaagaaacttgagctaatcattttcagctgggacaaggacccagctatcgtaattcctaatccaggatttggatacccttacattttgctgtctgcattttaaaagtgccttccttagatgacatctttctaatccccacccttggcttgtgaagttattgccagtggactgtgagagaaaaacagatgagttctgtcaggccaagcagaaggcagccttgctggagctgctgcatgaactctacaatttcctggccatccaagctggtaattttgagtgtggaaatccagagaatctaaaaagcaaatgcattcctgttatggaagcccaagaatatatagccaatgtgaccagcagctcctccgccaagtttgaagccgcactgacctggatactgagcagtaacaaggacgtgggcatctggttgaaaggagaagaccagtctgaattggtgacgactgtggacaaggtggtctgcct

SEQ ID NO: 254698 - DNA, 1512 bp, Artificial Sequence
  derived and/or modified sequence
atggccggcctgagtgacctggagctgcggcgggagctgcaggccctgggcttccagcccggccccatcacagacaccaccagagatgtgtacagaaacaagctgcggcggctgcggggggaggcccggctgagagatgaggagcggctgcgggaggaggcccggcccagaggagaggagcggctgcgggaggaggcccggctgcgggaggatgcccccctgcgggcccggcctgctgctgccagccccagggctgagccctggctgagccagcctgccagcggcagcgcctatgccacccctggggcctacggggacatccggcccagcgctgcctcctgggtgggcagccggggcctggcctacccagcccggcctgcccagctgcggcggcgggcctctgtgcggggcagcagtgaagaagatgaagatgcccggaccccagaccgggccacccagggccctggcctggccgcccggcgctggtgggccgccagccctgccccagcccggctgcccagcagcctgctgggccctgaccccaggcctggcctgcgggccacccgggccggccctgctggagctgcccgggcccggcctgaggtgggccggcggctggagcgctggctgagccggctgctgctgtgggccagcctgggcctgctgctggtgttcctgggcatcctgtgggtgaagatgggcaagcccagcgccccccaggaggccgaggacaacatgaagctgctgcctgtggactgtgagaggaagacagatgagttctgccaggccaagcagaaggccgccctgctggagctgctgcacgagctgtacaacttcctggccatccaggccggcaactttgaatgtggcaaccctgagaacctgaagagcaagtgcatccctgtgatggaggcccaggagtacatcgccaacgtgaccagcagcagcagcgccaagtttgaggccgccctgacctggatcctgagcagcaacaaggatgtgggcatctggctgaagggggaggaccagagcgagctggtgaccaccgtggacaaggtggtgtgcctggagagcgcccaccccaggatgggcgtgggctgccgcctgagccgggccctgctgacagctgtgaccaacgtgctgatcttcttctggtgcctggccttcctgtggggcctgctgatcctgctgaagtaccgctggaggaagctggaggaggaggagcaggccatgtatgagatggtgaagaagatcattgatgtggtgcaggaccactacgtggactgggagcaggacatggagcgctacccctacgtgggcatcctgcacgtgcgggacagcctcatccccccccagagcagaagaaggatgaagagggtgtgggacagagctgtggagttcctggccagcaatgaaagccgcatccagacagagagccaccgggtggccggggaggacatgctggtgtggcgctggaccaagcccagcagcttcagtgacagcgagaggtag

SEQ ID NO: 254699 - DNA, 1512 bp, Artificial Sequence
  derived and/or modified sequence
atggccggcctgagcgacctggagctgcggcgggagctgcaggcccttggttttcagcccgggcccatcaccgatacgacacgggatgtctaccggaacaagctaaggcgacttcggggggaggcgcgattgcgggatgaagaaagactgagagaagaggcccggccccgcggcgaagagcgcttacgcgaggaggcccgtcttcgggaagatgctccgctgcgggctcgacccgcggccgcaagtccgcgcgccgagccttggctcagccaacctgcaagcgggagcgcttacgctactcctggggcctatggagatataagaccttctgccgccagctgggtgggtagtagggggctcgcctacccggcccggcccgctcagcttagacgacgcgctagcgtccgcggatcatctgaggaggatgaagatgcccggaccccggatcgggccactcagggccccggattggccgcaaggaggtggtgggcagcctcccctgctccagcccgactcccatcctcacttctcggcccagatccgcggcccggcctgcgagccaccagggccggaccggccggggctgcaagagcacgcccagaagtgggtcgacggctcgaaaggtggctgtccaggctcctgctttgggcaagccttggcctgttgctggtatttctcggaattctttgggttaagatgggaaagccttcggctccacaagaagccgaagacaatatgaagctcctgcccgtggactgtgaacgcaagaccgacgaattctgtcaggctaaacagaaagccgccttactagaattgctgcacgagctgtataactttctagctattcaagccggcaatttcgagtgcggcaacccagaaaatctgaaatccaaatgtattccagtaatggaggcccaggaatatatcgctaacgtgacttcgagttccagtgcaaagtttgaagccgccctgacttggatcctgtcgtcaaacaaagatgtgggtatttggctcaaaggcgaagaccagtcagagctggtgaccacagtggacaaggtagtctgtctggaaagtgcccatcctcggatgggagttgggtgtaggctgagccgggcgcttctgactgccgtgaccaacgtccttatttttttttggtgcctggcgttcctttggggtctacttatcctactgaagtaccgctggcgtaagctggaagaagaggagcaggcgatgtatgagatggttaaaaagatcattgatgtggtccaggaccactacgtagattgggagcaggacatggagcgctacccttatgtcggcatacttcacgtgagagattcactcatccctccccagagtcgaagaagaatgaagagggtctgggacagggccgtcgaattcctcgcatccaacgagagccgcattcaaactgagtctcatcgcgtagccggtgaggatatgctggtatggagatggaccaagccatcaagcttttctgattctgagagatag

SEQ ID NO: 254700 - DNA, 1512 bp, Artificial Sequence
  derived and/or modified sequence
atggctggcttgagtgacctggaactgcgcagggagctacaagcattaggtttccaacccggacctattacagacaccacgagagacgtctaccgcaacaaacttcgcaggcttcgaggggaggctagactgagagatgaggagaggctgagggaagaagctcgaccaagaggtgaggaaagattgcgtgaagaggctagactgagagaagatgccccactccgagccaggcccgcagcagcgtcaccaagagctgagccttggctgtcccagccagcatccgggtcggcgtatgctacacctggggcatatggcgacattagaccctcggcagcatcctgggtggggagtcgtggtctggcttaccccgcacgtccggctcagctgcgaagacgggcttccgtgagaggatcttccgaggaggatgaagatgccagaacccccgacagagcgactcaaggccctggcctggccgcacgacgttggtgggcagcatcaccggctccggctagattgccttcaagcttgcttggaccagatccgcgaccaggcctgagagccacgcgggcaggcccagccggtgccgctcgcgctcggcctgaggtcggcaggcgactggaacgctggcttagcaggcttctcctgtgggctagccttgggttactgttggtgttcctcggcattctctgggtcaaaatggggaagccatcggctccacaagaagccgaagacaatatgaaactgctcccggtggattgtgagcgcaaaacagacgaattttgccaggccaagcagaaagcagctctcctggaacttttgcacgagctgtacaatttcctcgccattcaggctggaaacttcgagtgcggcaacccagagaatctgaaaagtaaatgtatcccagtgatggaggcccaagagtacatcgcaaatgtcactagtagttcctccgccaagtttgaggccgctctgacatggatcctttcctctaacaaggacgtcggaatctggctcaaaggcgaggaccagagtgagctggtcactacagtcgacaaggtcgtttgcctcgagagtgcccatcctcgcatgggggtcgggtgtcgattgtctagagctttgttgacggccgtgactaatgtcttgatctttttctggtgcctcgccttcttgtggggattgctaatcctgctgaagtacagatggcggaaattagaggaagaggagcaagccatgtatgagatggtcaaaaagatcattgatgttgtgcaagatcactacgtggactgggaacaggacatggagcggtacccttatgttggtatcctgcatgttcgcgacagcctcatccccccacagagtcgccgtaggatgaagagggtctgggatagagcagtggagttcctggcctccaacgaaagtcggatccagacagagtcgcaccgcgtagcgggtgaggacatgcttgtgtggcgctggacaaagccatcctcattcagtgacagcgagaggtag

SEQ ID NO: 254701 - protein, 395 aa, Artificial Sequence
  derived and/or modified sequence
MESKRLRLLQEEDRRKKIARMGFNASSMLRKSQLGFLNVTNYCHLAHELRLSCMERKKVQIRSMDPSALASDRFNLILADTNSDRLFTVNDVKVGGSKYGIINLQSLKTPTLKVFMHENLYFTNRKVNSVCWASLNHLDSHILLCLMGLAETPGCATLLPASLFVNSHPGIDRPGMLCSFRIPGAWSCAWSLNIQANNCFSTGLSRRVLLTNVVTGHRQSFGTNSDVLAQQFALMAPLLFNGCRSGEIFAIDLRCGNQGKGWKATRLFHDSAVTSVRILQDEQYLMASDMAGKIKLWDLRTTKCVRQYEGHVNEYAYLPLHVHEEEGILVAVGQDCYTRIWSLHDARLLRTIPSPYPASKADIPSVAFSSRLGGSRGAPGLLMAVGQDLYCYSYS

SEQ ID NO: 254702 - DNA, 1188 bp, Artificial Sequence
  derived and/or modified sequence
atggagagcaagagactgagactgctgcaggaggaggacagaagaaagaagatcgccagaatgggcttcaacgccagcagcatgctgagaaagagccagctgggcttcctgaacgtgaccaactactgccacctggcccacgagctgagactgagctgcatggagagaaagaaggtgcagatcagaagcatggaccccagcgccctggccagcgacagattcaacctgatcctggccgacaccaacagcgacagactgttcaccgtgaacgacgtgaaggtgggcggcagcaagtacggcatcatcaacctgcagagcctgaagacccccaccctgaaggtgttcatgcacgagaacctgtacttcaccaacagaaaggtgaacagcgtgtgctgggccagcctgaaccacctggacagccacatcctgctgtgcctgatgggcctggccgagacccccggctgcgccaccctgctgcccgccagcctgttcgtgaacagccaccccggcatcgacagacccggcatgctgtgcagcttcagaatccccggcgcctggagctgcgcctggagcctgaacatccaggccaacaactgcttcagcaccggcctgagcagaagagtgctgctgaccaacgtggtgaccggccacagacagagcttcggcaccaacagcgacgtgctggcccagcagttcgccctgatggcccccctgctgttcaacggctgcagaagcggcgagatcttcgccatcgacctgagatgcggcaaccagggcaagggctggaaggccaccagactgttccacgacagcgccgtgaccagcgtgagaatcctgcaggacgagcagtacctgatggccagcgacatggccggcaagatcaagctgtgggacctgagaaccaccaagtgcgtgagacagtacgagggccacgtgaacgagtacgcctacctgcccctgcacgtgcacgaggaggagggcatcctggtggccgtgggccaggactgctacaccagaatctggagcctgcacgacgccagactgctgagaaccatccccagcccctaccccgccagcaaggccgacatccccagcgtggccttcagcagcagactgggcggcagcagaggcgcccccggcctgctgatggccgtgggccaggacctgtactgctacagctacagctag

SEQ ID NO: 254703 - DNA, 1188 bp, Artificial Sequence
  derived and/or modified sequence
atggagtctaagcgcctgcggctgctgcaggaagaggaccggaggaagaaaatcgcacggatggggttcaatgcttcctcaatgctcaggaagagtcagcttggctttttaaatgttacaaattactgccacctcgcacacgaactccgactctcctgtatggaacgcaaaaaggtccagatccgctctatggacccatcagccctggcctcagaccggtttaatcttattctggctgacacaaattcggataggctgtttactgtgaacgacgtgaaagtagggggatccaaatacggcattataaacttgcagagcctcaaaacgcctacactcaaggtgttcatgcacgaaaatctttactttactaatcgaaaggtcaatagtgtgtgctgggcctccctaaatcacctcgactcccacattctcctatgtctgatgggactggcagaaacacccggatgtgccacactgttgcctgcttccttgtttgtgaatagccatccgggcattgacagacccggcatgctatgctcttttagaatcccaggggcatggtcttgtgcttggtcattgaacattcaagccaacaactgtttttctacagggctcagtcgacgagttctgctcactaatgtggtgactggccacagacaaagcttcggcaccaatagcgatgtgttggcccagcagtttgcccttatggctccccttctctttaatggatgtaggtcgggggagatctttgctatagatctgcgctgcggaaatcaggggaagggttggaaagccacacgtctctttcacgactctgctgtaacaagcgtgagaatattacaggacgagcagtacctgatggctagcgatatggctggaaagatcaagctgtgggacctgcgaaccactaagtgtgtccggcaatatgagggccacgtcaatgaatacgcatatttgcccctgcacgtgcatgaggaagaagggatccttgtggcagtgggtcaggactgctacaccagaatttggagcctgcacgacgccagactgctgcgcaccattcccagtccttaccctgcttccaaggccgacattccaagcgttgcctttagctctagactgggggggtctaggggtgctccggggctgctgatggccgtgggccaggatttgtactgctactcgtactcctag

SEQ ID NO: 254704 - DNA, 1188 bp, Artificial Sequence
  derived and/or modified sequence
atggagagcaagaggctgcggctgctgcaggaggaggacaggaggaagaagatcgccaggatgggcttcaatgccagctccatgctgaggaagagccagctgggcttcctgaatgtgaccaactactgccacctggcccacgagctgcggctgagctgcatggagaggaagaaggtgcagatccgctccatggaccccagcgccctggccagtgaccgcttcaacctgatcctggccgacaccaacagcgacaggctcttcaccgtgaatgatgtgaaggtgggcggcagcaaatatggcatcatcaacctgcagagcctgaagacccccaccctgaaggtgttcatgcatgagaacctgtacttcaccaacaggaaggtgaacagcgtgtgctgggccagcctgaaccacctggacagccacatcctgctgtgcctgatgggcctggccgagaccccaggctgtgccaccctgctgcctgccagcctgtttgtgaacagccaccctggcatcgaccggcccggcatgctgtgcagcttccgcatccctggggcctggagctgtgcctggagcctgaacatccaggccaacaactgcttcagcacaggcctgagccggcgggtgctgctgaccaacgtggtgacaggccaccggcagagctttggcaccaacagtgatgtgctggcccagcagtttgccctgatggcccccctgctcttcaacggctgccgctctggagagatctttgccatcgacctgcgctgtggcaaccagggcaagggctggaaggccaccaggctcttccatgattctgctgtgacctctgtgcgcatcctgcaggatgagcagtacctgatggccagtgacatggccggcaagatcaagctgtgggacctgcggaccaccaagtgtgtgcggcagtatgagggccacgtgaatgaatatgcctacctgcccctgcacgtgcatgaggaggagggcatcctggtggccgtgggccaggactgctacacccgcatctggagcctgcatgatgcccggctgctgcggaccatccccagcccctacccagccagcaaggctgacatccccagcgtggccttcagcagccggctgggcggcagcagaggagcccctggcctgctgatggctgtgggccaggacctgtactgctacagctacagctag

SEQ ID NO: 254705 - DNA, 1188 bp, Artificial Sequence
  derived and/or modified sequence
atggagagcaagcggctgcggctgctgcaggaggaggaccggcggaagaaaattgctcggatgggattcaatgccagtagtatgctccgcaaaagtcagctgggctttttgaacgtgacaaactactgccaccttgctcacgagcttcggctgtcctgtatggaacgaaagaaggtgcagatccggagcatggatccatcagctttggccagtgaccgtttcaatctcatacttgccgacaccaactcagacagactgttcacggtaaacgatgtgaaagtaggcgggtctaaatacggcatcatcaatctgcagtcgctgaagactccaactctcaaggtgtttatgcacgagaacctatacttcaccaatcgaaaggtgaatagcgtgtgttgggcctctctcaaccatctggattctcacattcttttgtgcttaatgggccttgctgagactcctgggtgcgctacgctgctgcctgcatcactgtttgtgaactcccacccaggtattgatcggcccgggatgttgtgctccttccgtatcccaggggcatggagctgtgcttggagtttaaacatacaggcaaataattgtttctccacggggctgagccgcagagtgctcctgacgaatgtggtgaccggccaccggcagtccttcggaactaactccgatgtgttagctcagcaattcgctcttatggctccccttcttttcaacggatgccgaagcggggagattttcgccatcgaccttcgttgtgggaatcaaggtaagggctggaaagccacaagactcttccacgactccgctgttacctccgtgaggatactgcaggacgaacagtatctcatggccagcgatatggccggcaagataaagctctgggatcttcgaactacaaaatgtgtacgccaatacgagggccatgtgaacgagtacgcctacctcccccttcatgttcacgaggaggaaggcattctcgttgcggtggggcaagactgttacacaaggatttggtccctgcatgacgcgaggctcttgcgcacgataccgagcccataccccgctagcaaagccgacatcccgagcgtcgcattctcatcccgcctggggggcagcagaggagcacctgggctactgatggccgtgggacaggatctttattgctattcctatagttag

SEQ ID NO: 254706 - DNA, 1188 bp, Artificial Sequence
  derived and/or modified sequence
atggagtccaaaaggctaagactgctccaggaagaggatagacgtaaaaagattgcccgtatgggattcaacgcgtcatctatgctgagaaaaagtcagctcggctttttgaacgtcaccaactattgtcacctcgctcatgagcttcgtctttcatgtatggagagaaaaaaggtgcaaataaggagtatggatccctccgcactagcatctgaccgattcaatctgattctcgcagatacgaatagcgatcgtctgttcaccgtgaatgatgttaaggtcgggggatctaagtacggaatcatcaatctgcaaagtctgaaaactccaactttgaaagtgttcatgcacgagaacttatatttcactaatcgcaaggtaaattccgtatgttgggctagcttgaaccacctagactcccatatcctcttatgccttatgggcctggctgagacgccagggtgtgcaactctgctgcctgctagcttgtttgtgaacagtcaccccggaatcgataggccaggaatgctgtgctcttttcggatacctggggcatggagttgcgcctggtctctgaacatccaggcgaataactgtttctcaacagggttaagccgacgtgttctcctcacaaacgtcgttacgggccatcgacagtccttcggcacgaatagtgatgtgctagctcaacagttcgcactcatggccccactgctgttcaacggatgcaggtcaggggagatatttgctattgacttacgatgcggcaaccagggcaaggggtggaaagccacacgactgttccatgatagcgccgttacttcagtccgaattctccaggatgaacaataccttatggcctcagatatggccggaaaaatcaagttatgggacctgcggacaactaaatgtgtgagacaatatgaaggccacgtcaacgagtatgcatatcttcctctgcacgtgcacgaggaggaagggatactggtcgccgtcggacaggattgttacactcgcatctggtccttgcatgatgcacgtcttttaaggactatacctagcccctacccagcctccaaagccgacatcccgagtgtggcttttagcagccgcctcggaggcagccggggagcccctgggctgcttatggctgtcggccaggacctctactgctactcctactcatag

SEQ ID NO: 254707 - protein, 435 aa, Artificial Sequence
  derived and/or modified sequence
MNKSRWQSRRRHGRRSHQQNPWFRLRDSEDRSDSRAAQPAHDSGHGDDESPSTSSGTAGTSSVPELPGFYFDPEKKRYFRLLPGHNNCNPLTKESIRQKEMESKRLRLLQEEDRRKKADTNSDRLFTVNDVKVGGSKYGIINLQSLKTPTLKVFMHENLYFTNRKVNSVCWASLNHLDSHILLCLMGLAETPGCATLLPASLFVNSHPAGIDRPGMLCSFRIPGAWSCAWSLNIQANNCFSTGLSRRVLLTNVVTGHRQSFGTNSDVLAQQFALMAPLLFNGCRSGEIFAIDLRCGNQGKGWKATRLFHDSAVTSVRILQDEQYLMASDMAGKIKLWDLRTTKCVRQYEGHVNEYAYLPLHVHEEEGILVAVGQDCYTRIWSLHDARLLRTIPSPYPASKADIPSVAFSSRLGGSRGAPGLLMAVGQDLYCYSYS

SEQ ID NO: 254708 - DNA, 1308 bp, Artificial Sequence
  derived and/or modified sequence
atgaacaagagcagatggcagagcagaagaagacacggcagaagaagccaccagcagaacccctggttcagactgagagacagcgaggacagaagcgacagcagagccgcccagcccgcccacgacagcggccacggcgacgacgagagccccagcaccagcagcggcaccgccggcaccagcagcgtgcccgagctgcccggcttctacttcgaccccgagaagaagagatacttcagactgctgcccggccacaacaactgcaaccccctgaccaaggagagcatcagacagaaggagatggagagcaagagactgagactgctgcaggaggaggacagaagaaagaaggccgacaccaacagcgacagactgttcaccgtgaacgacgtgaaggtgggcggcagcaagtacggcatcatcaacctgcagagcctgaagacccccaccctgaaggtgttcatgcacgagaacctgtacttcaccaacagaaaggtgaacagcgtgtgctgggccagcctgaaccacctggacagccacatcctgctgtgcctgatgggcctggccgagacccccggctgcgccaccctgctgcccgccagcctgttcgtgaacagccaccccgccggcatcgacagacccggcatgctgtgcagcttcagaatccccggcgcctggagctgcgcctggagcctgaacatccaggccaacaactgcttcagcaccggcctgagcagaagagtgctgctgaccaacgtggtgaccggccacagacagagcttcggcaccaacagcgacgtgctggcccagcagttcgccctgatggcccccctgctgttcaacggctgcagaagcggcgagatcttcgccatcgacctgagatgcggcaaccagggcaagggctggaaggccaccagactgttccacgacagcgccgtgaccagcgtgagaatcctgcaggacgagcagtacctgatggccagcgacatggccggcaagatcaagctgtgggacctgagaaccaccaagtgcgtgagacagtacgagggccacgtgaacgagtacgcctacctgcccctgcacgtgcacgaggaggagggcatcctggtggccgtgggccaggactgctacaccagaatctggagcctgcacgacgccagactgctgagaaccatccccagcccctaccccgccagcaaggccgacatccccagcgtggccttcagcagcagactgggcggcagcagaggcgcccccggcctgctgatggccgtgggccaggacctgtactgctacagctacagctag

SEQ ID NO: 254709 - DNA, 1521 bp, Artificial Sequence
  derived and/or modified sequence
acgcttcgctccaactcctgcagagctgagccggaggggaatccggaagggacacgctgaacaggaacagaaatgaataaaagtcgctggcagagtagaagacgacatgggagaagaagccaccagcagaacccttggttcagactccgtgattctgaagacaggtctgactcccgggcagcacagcccgctcacgattccggccacggtgatgacgagtctccgtcaacctcgtctggcacagctgggacctcctctgtgccagagctacctgggttttactttgaccctgaaaagaaacgctacttccgcttgctccctggacataacaactgcaaccccctgacgaaagagagcatccggcagaaggagatggagagcaagagactgcggctgctccaggaagaagacagacggaaaaaggcagataccaacagtgaccggctcttcacagtgaacgatgttaaagttggaggctccaagtatggtatcatcaacctgcaaagtctgaagacccctacgctcaaggtgttcatgcacgaaaacctctacttcaccaaccggaaggtgaattcggtgtgctgggcctcgctgaatcacttggattcccacattctgctatgcctcatgggactcgcagagactccaggctgtgccaccctgctcccagcatcactgttcgtcaatagtcacccagcaggaatagaccggcctggcatgctctgcagtttccggatccctggtgcctggtcctgtgcctggtccctgaatatccaagcaaataactgcttcagtacaggcttgtctcggcgggtcctgttgaccaacgtggtgacgggacaccggcagtcctttgggaccaacagtgatgtcttggcccagcagtttgctctcatggctcctctgctgtttaatggctgccgctctggggaaatctttgccattgatctgcgttgtggaaatcaaggcaagggatggaaggccacccgcctgtttcatgattcagcagtgacctctgtgcggatcctccaagatgagcaatacctgatggcttcagacatggctggaaagatcaagctgtgggacctgaggaccacgaagtgcgtaaggcagtacgaaggccacgtgaatgagtacgcctacctgcccctgcatgtgcacgaggaagaaggaatcctggtggcagtgggccaggactgctacacgagaatctggagcctccacgatgcccgcctactgagaaccataccctccccgtaccctgcctccaaggccgacattcccagtgtggccttctcgtcgcggctggggggctcccggggcgcgccggggctgctcatggctgtcgggcaggacctttactgttactcctacagctaattctgcagggcacagcccagagccatgtggatttgacttacgggagtaaagcgtaactttttactgcatctaatgagggtgttttaagtgacactcagtgtacacagatcccatcctctggctgctaggagagaagtgctg

SEQ ID NO: 254710 - DNA, 1308 bp, Artificial Sequence
  derived and/or modified sequence
atgaacaagtcacggtggcagagccgtcggcggcacggccgcagaagccatcaacaaaacccatggtttaggttacgggattcagaagatcggagcgacagccgagctgctcaacccgcccacgatagcggacacggggacgatgagtccccttccactagtagtgggacagctggaacctcgagtgtgccggagcttcccggcttttatttcgaccccgaaaagaagaggtattttcggttactgccaggccacaacaattgtaatccacttacaaaggaatccataaggcagaaggagatggagtctaagcgcttgcgtctgctgcaggaggaagatcgccgcaaaaaagccgatacgaactccgaccgcctcttcacagtgaatgacgtgaaggtgggaggctcgaagtatggaattattaacctccagtcgctgaagactccaactttaaaagtgttcatgcatgagaatctttattttacaaaccgcaaggtaaatagtgtttgctgggcttcacttaatcatctcgacagccacatactgctttgtctgatggggctcgccgagacacccggctgtgctacactgttgcccgcctcccttttcgtgaactcgcatcctgctggaattgatagaccaggtatgttatgcagcttccggataccgggagcgtggagctgcgcatggagcttaaatattcaggccaacaattgctttagcaccggcctgagtcgccgagttctcttgactaacgttgtgaccggccacaggcaaagcttcggcacaaattcagacgtgctggcacaacagtttgctctcatggcccccctgctgtttaatggatgccgttctggcgagatctttgcgatagatctgagatgtgggaaccagggcaagggctggaaagccactagactatttcacgactctgctgtgacctcagtccggatcctgcaggatgaacaatacctcatggcctcagacatggctggcaaaatcaagctttgggatcttaggaccaccaaatgcgtcagacagtacgagggtcatgtcaatgaatatgcctacttgcctttacatgttcacgaggaagagggcatactagtggctgttgggcaagactgctatacacgcatttggtcactgcacgatgctcgcctcctcaggacgatccctagcccataccctgcttccaaggctgacatcccttccgtggcctttagctctaggctggggggcagccgcggggcacccgggttactcatggctgtaggtcaagatctatactgctactcctatagttag

SEQ ID NO: 254711 - DNA, 1308 bp, Artificial Sequence
  derived and/or modified sequence
atgaacaagagccgctggcagagcagaagaagacatggccgccgcagccaccagcagaacccctggttccggctgcgggacagtgaagatagaagtgacagccgggccgcccagcctgcccatgattctggccatggagatgatgagagccccagcaccagcagcggcacagctggcaccagctctgtgcctgagctgcccggcttctactttgatcctgagaagaagcgctacttccggctgctgcccggccacaacaactgcaaccccctgaccaaggagagcatccggcagaaggagatggagagcaagaggctgcggctgctgcaggaggaggacaggaggaagaaggctgacaccaacagcgacaggctcttcaccgtgaatgatgtgaaggtgggcggcagcaaatatggcatcatcaacctgcagagcctgaagacccccaccctgaaggtgttcatgcatgaaaatctctacttcaccaacaggaaggtgaacagcgtgtgctgggccagcctgaaccacctggacagccacatcctgctgtgcctgatgggcctggccgagaccccaggctgtgccaccctgctgcctgccagcctgtttgtgaacagccaccctgctggcatcgaccggcccggcatgctgtgcagcttccgcatccctggggcctggagctgtgcctggagcctgaacatccaggccaacaactgcttcagcacaggcctgagccggcgggtgctgctgaccaacgtggtgacaggccaccggcagagctttggcaccaacagtgatgtgctggcccagcagtttgccctgatggcccccctgctcttcaacggctgccgctctggagagatctttgccatcgacctgcgctgtggcaaccagggcaagggctggaaggccaccaggctcttccatgattctgctgtgacctctgtgcgcatcctgcaggatgagcagtacctgatggccagtgacatggccggcaagatcaagctgtgggacctgcggaccaccaagtgtgtgcggcagtatgagggccacgtgaatgaatatgcctacctgcccctgcacgtgcatgaggaggagggcatcctggtggccgtgggccaggactgctacacccgcatctggagcctgcatgatgcccggctgctgcggaccatccccagcccctacccagccagcaaggctgacatccccagcgtggccttcagcagccggctgggcggcagcagaggagcccctggcctgctgatggctgtgggccaggacctgtactgctacagctacagctag

SEQ ID NO: 254712 - DNA, 1308 bp, Artificial Sequence
  derived and/or modified sequence
atgaacaagagccggtggcagagccggcggcggcacggccggcggtctcaccagcaaaacccatggttccggttgagagacagcgaggacaggagcgattccagggcagcccagcccgcccacgactccggccatggcgatgacgaatcaccgtcaacttcctcaggcacagctgggacaagcagtgtcccggagctgcccggcttctatttcgacccggagaaaaaacggtacttccgccttctgcccggccataacaattgcaatccactcactaaagaatccattagacaaaaagagatggaatccaaaaggctgagactgcttcaggaagaagatcgtaggaagaaggccgacactaatagtgaccgcctcttcaccgtgaatgatgtcaaggttggtggttctaagtacgggatcatcaacctgcagagcttgaagaccccgacgctgaaggtgtttatgcatgagaatctttattttaccaaccggaaggtgaattctgtgtgttgggcctctcttaaccatctggattctcacatcctcctctgcctcatgggcctggccgaaactccggggtgcgccacactgctgccagccagcctcttcgtgaactcacatcctgccggtattgatcggccagggatgctgtgtagcttccgcatcccgggtgcatggagttgtgcgtggtccctcaatattcaggcgaacaattgcttctccacaggactaagtcgcagggtgctgctgacaaacgtcgtgaccggccaccggcagagctttggcaccaattccgatgtgctcgcacagcagtttgccctcatggcccctttattgtttaacggttgcagaagtggcgaaatttttgctatagatcttagatgcggcaaccagggcaagggctggaaagccacccgattgtttcacgatagcgccgtaacatccgttcgaattctgcaggacgaacagtacctaatggcgtctgatatggccggcaagattaaattgtgggacctgagaacgacgaaatgcgtgaggcagtatgaaggtcacgtgaatgagtacgcttacttgcctttacatgttcatgaggaagagggaattctggtcgcggtcggccaggactgttatacccgtatctggagtcttcatgacgccaggctgttaaggacgatccccagcccatatccagcttctaaagccgatattcctagtgttgcattttcgtctaggctgggaggatctcggggcgcgcccggcctcttgatggcagtagggcaagatttgtattgctactcttattcttag

SEQ ID NO: 254713 - DNA, 1308 bp, Artificial Sequence
  derived and/or modified sequence
atgaataaatcaagatggcagagcaggcggcgacacggtcggcgtagccatcagcagaacccttggttccgactcagagattcagaggaccgcagtgacagcagagccgctcagcccgcacatgactccggccatggggacgatgaaagtccctctacctcttccgggaccgcgggaactagcagtgtccctgaattgcctggattctacttcgatcccgagaaaaagagatattttaggctactcccaggccacaacaattgcaacccccttacaaaggagagtattcggcagaaggaaatggagtctaagcggcttaggttgttacaggaggaagaccgccgtaaaaaagctgatactaactctgataggctgttcacagtcaatgacgtgaaagtcgggggaagcaaatatggtattatcaacctgcaatccctcaaaacaccaacactgaaggtctttatgcatgaaaacctctactttactaatcgtaaagtgaatagtgtttgttgggcctcattaaatcacctggattctcacatcctgctatgcctgatgggtttggcggaaacccccggttgtgccaccctgcttcctgcctcattgttcgtgaactcccaccccgctggcattgacagacctggaatgctgtgcagtttccgtatcccaggggcatggtcatgcgcctggagccttaacatccaggcgaacaactgcttcagcaccggcctgtcccgcagagtgttactcactaacgtggtcacggggcatcgccagagcttcgggactaattccgacgtgctggcccagcagttcgccctgatggccccactgcttttcaacggctgtcgtagtggtgaaatttttgccatagatctgcgttgcggcaatcaaggcaagggctggaaggccacgcgtctttttcatgactctgctgtgaccagcgtgagaatcctgcaagacgaacagtatctcatggcatcagacatggccggaaaaataaaactctgggacctgaggactactaagtgcgtgcgacagtatgaaggccacgttaatgaatacgcatacctgccattgcacgtgcacgaggaggagggtatcctcgtcgctgtgggacaggactgttacactagaatttggtcactccacgacgccagactgcttaggaccattccgtcaccttacccggcaagcaaggccgacattccgtctgtggccttttctagcaggctgggcggttcgaggggtgccccaggcctgctgatggccgttgggcaggacttgtactgctattcatacagttag

SEQ ID NO: 254714 - protein, 257 aa, Artificial Sequence
  derived and/or modified sequence
MPKTMHFLFRFIVFFYLWGLFTAQRQKKEESTEEVKIEVLHRPENCSKTSKKGDLLNAHYDGYLAKDGSKFYCSRTQNEGHPKWFVLGVGQVIKGLDIAMTDMCPGEKRKVVIPPSFAYGKEGYGILEEVFLLQNILVSCHRTTLHVLKCMLLVNNNTCAEGKIPPDATLIFEIELYAVTKGPRSIETFKQIDMDNDRQLSKAEINLYLQREFEKDEKPRDKSYQDAVLEDIFKKNDHDGDGFISPKEYNVYQHDEL

SEQ ID NO: 254715 - protein, 222 aa, Artificial Sequence
  derived and/or modified sequence
MPKTMHFLFRFIVFFYLWGLFTAQRQKKEESTEEVKIEVLHRPENCSKTSKKGDLLNAHYDGYLAKDGSKFYCSRTQNEGHPKWFVLGVGQVIKGLDIAMTDMCPGEKRKVVIPPSFAYGKEGYAEGKIPPDATLIFEIELYAVTKGPRSIETFKQIDMDNDRQLSKAEINLYLQREFEKDEKPRDKSYQDAVLEDIFKKNDHDGDGFISPKEYNVYQHDEL

SEQ ID NO: 254716 - DNA, 774 bp, Artificial Sequence
  derived and/or modified sequence
atgcccaagaccatgcacttcctgttcagattcatcgtgttcttctacctgtggggcctgttcaccgcccagagacagaagaaggaggagagcaccgaggaggtgaagatcgaggtgctgcacagacccgagaactgcagcaagaccagcaagaagggcgacctgctgaacgcccactacgacggctacctggccaaggacggcagcaagttctactgcagcagaacccagaacgagggccaccccaagtggttcgtgctgggcgtgggccaggtgatcaagggcctggacatcgccatgaccgacatgtgccccggcgagaagagaaaggtggtgatcccccccagcttcgcctacggcaaggagggctacggcatcctggaggaggtgttcctgctgcagaacatcctggtgagctgccacagaaccaccctgcacgtgctgaagtgcatgctgctggtgaacaacaacacctgcgccgagggcaagatcccccccgacgccaccctgatcttcgagatcgagctgtacgccgtgaccaagggccccagaagcatcgagaccttcaagcagatcgacatggacaacgacagacagctgagcaaggccgagatcaacctgtacctgcagagagagttcgagaaggacgagaagcccagagacaagagctaccaggacgccgtgctggaggacatcttcaagaagaacgaccacgacggcgacggcttcatcagccccaaggagtacaacgtgtaccagcacgacgagctgtag

SEQ ID NO: 254717 - DNA, 669 bp, Artificial Sequence
  derived and/or modified sequence
atgcccaagaccatgcacttcctgttcagattcatcgtgttcttctacctgtggggcctgttcaccgcccagagacagaagaaggaggagagcaccgaggaggtgaagatcgaggtgctgcacagacccgagaactgcagcaagaccagcaagaagggcgacctgctgaacgcccactacgacggctacctggccaaggacggcagcaagttctactgcagcagaacccagaacgagggccaccccaagtggttcgtgctgggcgtgggccaggtgatcaagggcctggacatcgccatgaccgacatgtgccccggcgagaagagaaaggtggtgatcccccccagcttcgcctacggcaaggagggctacgccgagggcaagatcccccccgacgccaccctgatcttcgagatcgagctgtacgccgtgaccaagggccccagaagcatcgagaccttcaagcagatcgacatggacaacgacagacagctgagcaaggccgagatcaacctgtacctgcagagagagttcgagaaggacgagaagcccagagacaagagctaccaggacgccgtgctggaggacatcttcaagaagaacgaccacgacggcgacggcttcatcagccccaaggagtacaacgtgtaccagcacgacgagctgtag

SEQ ID NO: 254718 - DNA, 774 bp, Artificial Sequence
  derived and/or modified sequence
atgccaaaaaccatgcactttctctttaggttcatcgtattcttttatttgtggggcctgttcacagcgcagcggcaaaagaaggaggagtctaccgaggaggtaaaaatagaggtgttgcaccggcctgagaactgctccaagacttccaagaagggtgacctacttaatgcacattacgacggttacctggctaaggacggaagtaagttttactgttctcggacgcagaacgaagggcatcccaagtggttcgtactgggggtgggccaggtcataaaaggcctggatattgccatgacggacatgtgcccaggcgaaaagagaaaggtagtgattccccctagtttcgcctacggcaaggaaggctacggcattcttgaagaagtcttcctcctccagaatatcttagtgtcttgtcatcgaaccacattgcatgttctgaaatgcatgttgcttgtgaataacaacacctgcgccgaagggaagattccacccgacgctaccctgattttcgaaatcgaactatatgccgtgactaagggaccaagaagtatcgaaacgtttaaacagattgatatggataacgaccgtcaactatccaaggccgagattaacctgtatcttcagcgggagtttgagaaggacgagaaaccacgcgataagagctatcaggacgcggtccttgaagatatcttcaagaaaaacgaccatgacggagacggctttatttcgcccaaagaatacaatgtgtatcagcacgatgaactgtag

SEQ ID NO: 254719 - DNA, 669 bp, Artificial Sequence
  derived and/or modified sequence
atgcccaaaaccatgcatttcctgttccggttcatcgttttcttctatttatggggcttgttcaccgcacaacgacagaaaaaggaagagagtaccgaagaagtgaagattgaggtcctccaccgtcccgagaattgttcaaagacaagcaagaagggcgatttgctaaacgctcattacgatgggtacctagcaaaggacggtagcaaattctattgctctaggacccagaatgagggccacccaaaatggttcgtactgggcgtcggccaggttatcaaaggactggatatagctatgactgacatgtgccctggagagaagaggaaagtggtaattcctccttcctttgcatacggcaaggagggatacgcggagggcaagattccaccggatgccacactcatctttgaaatagagctgtatgcggttaccaaaggtccccgctccattgagactttcaagcagattgacatggacaatgacagacagctctcaaaagctgagataaatttgtacctccagcgcgagttcgagaaggatgaaaagcctagagataagagttatcaggacgcagtattagaagacatctttaaaaaaaacgaccacgatggcgacggttttataagtcccaaggagtataacgtttatcagcacgatgagctgtag

SEQ ID NO: 254720 - DNA, 994 bp, Artificial Sequence
  derived and/or modified sequence
cacggggcgcgagtgacacgcgggagggagagcagtgttctgctggagccgatgccaaaaaccatgcatttcttattcagattcattgttttcttttatctgtggggcctttttactgctcagagacaaaagaaagaggagagcaccgaagaagtgaaaatagaagttttgcatcgtccagaaaactgctctaagacaagcaagaagggagacctactaaatgcccattatgacggctacctggctaaagacggctcgaaattctactgcagccggacacaaaatgaaggccaccccaaatggtttgttcttggtgttgggcaagtcataaaaggcctagacattgctatgacagatatgtgccctggagaaaagcgaaaagtagttatacccccttcatttgcatacggaaaggaaggctatggtatacttgaagaagtctttcttctgcaaaatatccttgtctcatgtcacagaacaaccctgcatgtcttgaaatgcatgttgttagtgaataacaatacatgcgcagaaggcaagattccaccggatgctacattgatttttgagattgaactttatgctgtgaccaaaggaccacggagcattgagacatttaaacaaatagacatggacaatgacaggcagctctctaaagccgagataaacctctacttgcaaagggaatttgaaaaagatgagaagccacgtgacaagtcatatcaggatgcagttttagaagatatttttaagaagaatgaccatgatggtgatggcttcatttctcccaaggaatacaatgtataccaacacgatgaactatagcatatttgtatttctactttttttttttagctatttactgtactttatgtataaaacaaagtcacttttctccaagttgtatttgctatttttcccctatgagaagatattttgatctccccaatacattgattttggtataataaatgtgaggctgttttgcaaactt

SEQ ID NO: 254721 - DNA, 2834 bp, Artificial Sequence
  derived and/or modified sequence
gggacatccacggggcgcgagtgacacgcgggagggagagcagtgttctgctggagccgatgccaaaaaccatgcatttcttattcagattcattgttttcttttatctgtggggcctttttactgctcagagacaaaagaaagaggagagcaccgaagaagtgaaaatagaagttttgcatcgtccagaaaactgctctaagacaagcaagaagggagacctactaaatgcccattatgacggctacctggctaaagacggctcgaaattctactgcagccggacacaaaatgaaggccaccccaaatggtttgttcttggtgttgggcaagtcataaaaggcctagacattgctatgacagatatgtgccctggagaaaagcgaaaagtagttatacccccttcatttgcatacggaaaggaaggctatgcagaaggcaagattccaccggatgctacattgatttttgagattgaactttatgctgtgaccaaaggaccacggagcattgagacatttaaacaaatagacatggacaatgacaggcagctctctaaagccgagataaacctctacttgcaaagggaatttgaaaaagatgagaagccacgtgacaagtcatatcaggatgcagttttagaagatatttttaagaagaatgaccatgatggtgatggcttcatttctcccaaggaatacaatgtataccaacacgatgaactatagcatatttgtatttctactttttttttttagctatttactgtactttatgtataaaacaaagtcacttttctccaagttgtatttgctatttttcccctatgagaagatattttgatctccccaatacattgattttggtataataaatgtgaggctgttttgcaaacttaacttgcaggaatggtatgactgtgtttcctactgctttattctgtaaacaagaattgtagcaccatgaaacagacctctgggtcccagtgggcattttttcccctttcaggatgtaggaggacatgtatagtatgtcaaaaactgcaagcttttcccaactttaaccttaccagcatgttaatatccagtttttttatagtttaaaagttaaagtgcctcatattttgaaaatatccattaaggacccaggaattagcatttcacttgtttatacatttttataacattatgaagacgatataaaaatcctagaactgaagagtcttcctttggtatatgtgcaggaagatagttgtatatctctgttccacaaagaacgcaacacagtctctaaactttttggtgtaagcttctagccttgggtattttccagtggggaatgtttaaaaatatttgaccaaaccaaagactttttgcctcttatagcaagcataaagactgtactgcctggcttttgtattccttcagacattattgtaaatgtgcaactcctcttccctcttgtaaacctttataagatgtctgccaccccaagcttttgtcttgatagttttaaattgatgccatgaaatttcttagttttcgttccctttctctagttatctctttccttatgtcacctcatttcccatcattcttgtcactaatgatgaatgatcattacaaattggtatgctgtcaaattttgataaatgtgccaaacaaaggaggatatacagtgccatggcaattttgtgtcatggtcaagttatgatatcatatgacttgagaatagtatgtaagagatgctgtagaagatcacgttggtaccaaagaaagggcacatgtctatcggaacatagattttgcatactgcatggtatggtcaggctttgtgtccacacccaaatctcatcttgaaattataatccccataatttccataatccccacatgtcaatggagagaccaggtggaggtaactgaatcatgggggtggttttccccgtgctgttctcatgcaatctgatggttttataagtgtttggtagttcctcttgcattcattctcccacccgccaccttgtgaagaaagtccttgcttccccgccttccaccatgattgtaagcttcctgaggcctccccagccatggggaaccatgagtcaatttaacctctttcctttacaaattacccagtctggggcagttctttatagcagtgtgaaaatggactactacactgcatatataggaaagtatggtcagacagtaaatagctctgttcaaaataattgagttccaaacaagtaaagttttttctaccttctgaaacttgctctttccaaaccattgttcatcctttaacttctttacactatcaaaaattctatttaaaaatagagggctttcagatgagtacatacaaaaacaaacaaaagtatacataggggtaacacaaccatgagattagtaaataatacatatggctagcacataatttgacaccttataaaacaagaatctgtactatcttttccttcctcccaatatttcttcatttctatgctcaattttctaatactttttcacatgcttaatcatttactctttcatcgccttccctcaaaaaaacctgctccgttgaagtaaactaagtaactcaatattctttattttggtttggaacctgtctcaattttttgtatccatattaagaagtcaccctataatctaaactttgtaattctaatttttttgtcccattatcatacaaagtgcttttaaacttgtttttaaaaaatgacagataatgccacatgaataggaagatgattcattctaaaacttgtatttacataattaaaaataaatttataatcattctacatacaa

SEQ ID NO: 254722 - DNA, 774 bp, Artificial Sequence
  derived and/or modified sequence
atgcccaagaccatgcacttcctgttccgcttcatcgtgttcttctacctgtggggcctcttcaccgcccagaggcagaagaaggaggagagcacagaggaggtgaagattgaggtgctgcacaggcctgagaactgcagcaagaccagcaagaagggggacctgctgaatgcccactatgatggctacctggccaaggatggcagcaagttctactgcagcaggacccagaatgaaggccaccccaagtggtttgtgctgggcgtgggccaggtgatcaagggcctggacatcgccatgacagacatgtgccctggagagaagaggaaggtggtgatcccccccagctttgcctacggcaaggagggctacggcatcctggaggaggtgttcctgctgcagaacatcctggtgtcctgccacaggaccaccctgcacgtgctgaagtgcatgctgctggtgaacaacaacacctgtgccgagggcaagatccccccagatgccaccctcatctttgaaattgagctgtatgctgtgaccaagggccccaggagcattgagaccttcaagcagattgacatggacaatgaccggcagctgagcaaggccgagatcaacctgtacctgcagcgggagtttgagaaggatgagaagccccgggacaagagctaccaggatgctgtgctggaggacatcttcaagaagaatgaccatgatggagatggcttcatcagccccaaggagtacaacgtgtaccagcatgatgagctgtag

SEQ ID NO: 254723 - DNA, 669 bp, Artificial Sequence
  derived and/or modified sequence
atgcccaagaccatgcacttcctgttccgcttcatcgtgttcttctacctgtggggcctcttcaccgcccagaggcagaagaaggaggagagcacagaggaggtgaagattgaggtgctgcacaggcctgagaactgcagcaagaccagcaagaagggggacctgctgaatgcccactatgatggctacctggccaaggatggcagcaagttctactgcagcaggacccagaatgaaggccaccccaagtggtttgtgctgggcgtgggccaggtgatcaagggcctggacatcgccatgacagacatgtgccctggagagaagaggaaggtggtgatcccccccagctttgcctacggcaaggagggctatgcagagggcaagatccccccagatgccaccctcatctttgaaattgagctgtatgctgtgaccaagggccccaggagcattgagaccttcaagcagattgacatggacaatgaccggcagctgagcaaggccgagatcaacctgtacctgcagcgggagtttgagaaggatgagaagccccgggacaagagctaccaggatgctgtgctggaggacatcttcaagaagaatgaccatgatggagatggcttcatcagccccaaggagtacaacgtgtaccagcatgatgagctgtag

SEQ ID NO: 254724 - DNA, 774 bp, Artificial Sequence
  derived and/or modified sequence
atgcccaagaccatgcacttcctgttccggttcatcgtgttcttctatctgtgggggttgttcacagcacagcgccaaaagaaagaggaatccactgaagaggtgaaaattgaggtgctccatagacccgagaactgcagcaagacctccaagaaaggcgacctccttaatgcacactatgatggttatctggcgaaagacggcagcaaattctactgctcgaggactcaaaatgaagggcaccctaagtggttcgttctcggagttggccaggtgatcaaaggactggacattgctatgaccgatatgtgtccaggcgagaaacggaaggtggtgatacccccatccttcgcctatggaaaagaggggtatggcattctcgaagaggtgtttctgctgcagaacatcctggtctcatgtcatcggaccactctgcatgttctcaagtgtatgctgttggtcaataacaacacctgtgctgaggggaagattcccccggatgccacactgatctttgaaatagaactttacgctgtgacaaaagggcctaggtcaatcgagacctttaagcagatcgacatggacaacgaccggcagcttagtaaagctgaaatcaacttatacctccaaagagagttcgaaaaggacgaaaaaccgcgggataaatcttaccaggatgccgtactggaggacattttcaaaaagaatgatcacgacggggatgggttcatcagtcccaaggagtacaacgtctatcagcacgatgagctgtag

SEQ ID NO: 254725 - DNA, 669 bp, Artificial Sequence
  derived and/or modified sequence
atgcccaagaccatgcacttcctgttccggttcatcgtgttcttctacctgtggggcttgttcaccgcccaaagacagaagaaggaagaatcgaccgaggaagtaaagattgaagttctccacagaccagaaaattgcagcaagacctcaaaaaagggcgacctgctcaatgcacactacgacggatacctggccaaagacggctccaagttttattgttccagaacgcagaatgagggacatcccaagtggttcgtgctcggtgtgggccaagtgattaagggactggacatcgccatgaccgatatgtgccccggagagaaacgaaaagtcgttatacccccaagctttgcttatggcaaggaggggtacgcagaagggaagataccacccgacgccacactaatttttgagatcgaactctatgcggttaccaaggggcctagatcaatagagacttttaaacaaattgatatggataacgatcgacagttgagcaaggcagaaatcaacctctatttgcaacgcgagttcgagaaagacgagaagccgagagacaaaagctatcaggacgccgtgcttgaggatattttcaagaaaaatgatcacgacggcgacggctttatcagtcccaaagagtacaatgtatatcaacacgacgagctctag

SEQ ID NO: 254726 - DNA, 774 bp, Artificial Sequence
  derived and/or modified sequence
atgcccaaaaccatgcactttctattcagatttatcgtcttcttttacctatggggcctgttcacagcgcaacgccaaaagaaagaagaatccactgaggaggtcaagattgaggttctacataggccagaaaattgcagcaaaacatccaagaaaggggatttgctcaatgctcattacgacggctacctcgcgaaggatgggtcaaaattctattgtagccggacccagaacgaaggtcaccccaaatggtttgtgctgggcgtggggcaggtaataaaaggcttggatattgctatgacggacatgtgcccgggtgagaaacggaaagtggtaattccaccttcatttgcatatggaaaagaggggtatggcattctcgaagaagtctttctactgcaaaatatcctggtcagctgccaccgtacgaccctccacgtgcttaagtgcatgctgctggtgaataacaacacttgcgccgaaggcaaaattccgcctgatgccactttgatctttgaaatcgaactatatgctgtgacaaaaggcccacgttcaatcgagacgttcaagcaaattgatatggacaatgataggcagttatccaaagcagaaattaatctgtacttgcagcgagaattcgagaaagacgaaaaaccccgagataagagttatcaggacgccgtgctggaggacatattcaaaaagaatgaccacgacggcgacggttttatatcgcccaaggaatacaatgtgtaccaacacgatgaactttag

SEQ ID NO: 254727 - DNA, 669 bp, Artificial Sequence
  derived and/or modified sequence
atgcccaagaccatgcattttctgtttagattcattgtgttcttctacctgtggggcctgtttaccgctcaaaggcaaaaaaaggaagaatccaccgaggaagttaagattgaagttctgcatcgacccgagaattgcagcaaaacctccaaaaaaggagaccttctgaacgcgcattacgacggatatctggctaaagacggcagcaagttctattgcagccgcacccagaatgaaggtcaccccaagtggttcgtcctaggcgtgggacaggtaattaagggtctggatattgcaatgaccgatatgtgtccaggtgaaaaacgcaaagtcgttatcccaccttcttttgcctatgggaaagaaggttacgctgagggaaagattcccccagatgctaccttgattttcgagatcgagctctatgcagtgacgaaaggacccaggtccattgaaacatttaaacagattgacatggacaatgatcgtcagctgagcaaagcagagatcaatttgtatctgcagcgggaattcgagaaggatgagaagccgcgagataagtcctaccaggacgcagttctggaggatatctttaaaaaaaatgatcacgacggcgacggcttcatttcgccaaaggagtacaatgtctatcagcatgacgaattgtag

SEQ ID NO: 254728 - protein, 731 aa, Artificial Sequence
  derived and/or modified sequence
MSNPGTRRNGSSIKIRLTVLCAKNLAKKDFFRLPDPFAKIVVDGSGQCHSTDTVKNTLDPKWNQHYDLYVGKTDSITISVWNHKKIHKKQGAGFLGCVRLLSNAISRLKDTGYQRLDLCKLNPSDTDAVRGQIVVSLQTRDRIGTGGSVVDCRGLLENEGTVYEDSGPGRPLSCFMEEPAPYTDSTGAAAGGGNCRFVESPSQDQRLQAQRLRNPDVRGSLQTPQNRPHGHQSPELPEGYEQRTTVQGQVYFLHTQTGVSTWHDPRIPRDLNSVNCDELGPLPPGWEVRSTVSGRIYFVDHNNRTTQFTDPRLHHIMNHQCQLKEPSQPLPLPSEGSLEDEELPAQRYERDLVQKLKVLRHELSLQQPQAGHCRIEVSREEIFEESYRQIMKMRPKDLKKRLMVKFRGEEGLDYGGVAREWLYLLCHEMLNPYYGLFQYSTDNIYMLQINPDSSINPDHLSYFHFVGRIMGLAVFHGHYINGGFTVPFYKQLLGKPIQLSDLESVDPELHKSLVWILENDITPVLDHTFCVEHNAFGRILQHELKPNGRNVPVTEENKKEYVRLYVNWRFMRGIEAQFLALQKGFNELIPQHLLKPFDQKELELIIGGLDKIDLNDWKSNTRLKHCVADSNIVRWFWQAVETFDEERRARLLQFVTGSTRVPLQGFKALQGSTGAAGPRLFTIHLIDANTDNLPKAHTCFNRIDIPPYESYEKLYEKLLTAVEETCGFAVE

SEQ ID NO: 254729 - DNA, 2196 bp, Artificial Sequence
  derived and/or modified sequence
atgtccaaccccggcacgcgccgaaacgggagctcgattaaaattagactgaccgtgctgtgtgccaaaaatctggccaagaaggactttttcaggctgcctgatcctttcgccaagattgtcgtggacggttccggacagtgccacagtactgacactgtgaaaaataccctcgatccaaaatggaaccaacattacgacctctatgtaggcaagacagactcgataaccatttcagtctggaatcataagaagattcacaagaagcagggggcaggcttcctcggttgtgtcagactgcttagcaacgccatcagtcggctcaaagacacaggatatcagcgcctggatctttgtaaactcaatccttcagatacagacgccgtgcgcgggcagatcgtggtgagtctccaaacacgcgacaggattggcacaggggggtcagtcgtggattgtcgtgggctgctggagaacgagggaactgtatatgaagactcaggcccaggacgtcccttgtcctgctttatggaggagccggctccctatacagacagtaccggcgcagctgcaggcggaggcaattgccgctttgtggaatccccttcccaggaccagcggctgcaggctcagagactgaggaatcctgacgtgagaggatctttgcaaacaccacagaatcgccctcatggacatcaaagcccggagctgccagaaggctacgagcaacggacgaccgttcaggggcaagtatacttccttcatacacaaacaggcgtctcaacttggcatgacccacggatacctagagatctaaactcagtaaactgcgacgagctcggacccctgccgccagggtgggaggtccggtctaccgtctctggaagaatctacttcgtggaccataacaacaggacaacacaatttacggaccctagactgcatcacatcatgaaccatcagtgtcaactcaaagagcctagccagccgctgccactgccttccgaaggctccttagaggacgaagaactgcctgcccagcggtacgaaagagatctggtccagaagctcaaagtacttagacacgagctgtcactccagcagcctcaggctggtcactgcagaattgaggtatcccgggaagaaatcttcgaagaatcgtatcgtcaaattatgaagatgagacctaaagacctgaagaagcggcttatggtgaaattccggggcgaagaaggtctggactacggcggagttgcccgcgaatggctctacctgctctgccacgagatgctcaacccttactacggtctctttcagtatagcaccgataacatctacatgctgcaaatcaaccctgactccagcatcaatcctgaccatctgtcgtacttccacttcgtggggagaattatgggactggctgttttccatggacactacataaacggcggtttcactgttcccttctataagcagttgctgggaaagcccatacagctcagcgacttggaaagcgtggatcccgaactccataagagcctagtgtggatacttgagaatgatataacgccagtgctcgatcataccttttgcgtggagcacaacgcattcggacggatcctgcagcatgaactgaagcctaacggacgaaatgtgcccgtgacggaagagaacaaaaaggagtacgtccgcctgtacgttaactggcggttcatgaggggcattgaagctcagttcctggcactacagaagggtttcaatgagctgatacctcaacacctgctgaaacccttcgaccaaaaagagctagaacttatcatagggggcctggacaaaatcgatttaaatgactggaaaagcaacactcggctgaagcactgcgtggcagattctaatattgtcagatggttttggcaggcagtggagacttttgatgaggagagaagggctcgcttactgcagtttgtcacaggctctactcgtgttccgctccagggatttaaggccctccagggctccacgggcgccgccggacctcgcctctttaccatccacttgatcgatgcgaacaccgacaacttgcccaaagcacacacatgcttcaaccggatagacatccctccttacgagtcatacgaaaagttgtatgaaaaactccttacagcagtggaagaaacatgtgggttcgcagtagaatag

SEQ ID NO: 254730 - DNA, 2196 bp, Artificial Sequence
  derived and/or modified sequence
atgagcaaccctggcaccaggagaaatggcagcagcatcaagatccggctgactgtgctgtgtgccaagaacctggccaagaaggacttcttccggctgcctgacccctttgccaagatcgtggtggatggcagcggccagtgccacagcacagacacagtgaagaacaccctggaccccaagtggaaccagcactatgacctgtatgtgggcaagacagacagcatcaccatctctgtgtggaaccacaagaagatccacaagaagcagggcgccggcttcctgggctgtgtgcggctgctgagcaatgccatcagccggctgaaggacaccggctaccagaggctggacctgtgcaagctgaaccccagcgacacagatgctgtgcggggccagatcgtggtgtccctgcagacccgggacagaattggaactggaggctctgtggtggactgccggggcctgctggagaatgaaggaacagtgtatgaggacagcggccctggccggcccctgagctgcttcatggaggagcccgccccctacacagacagcactggagctgctgctgggggcggcaactgccgctttgtggagagccccagccaggaccagaggctgcaggcccagaggctgagaaatccagatgtgcggggcagcctgcagaccccccagaaccggccccacggccaccagagccctgagctgcctgagggctatgagcagaggaccaccgtgcagggccaggtgtacttcctgcacacccagacaggagtgtccacctggcatgacccccgcatcccccgggacctgaacagcgtgaactgtgatgagctgggccccctgcccccaggctgggaggtgcgcagcacagtgtctggccgcatctactttgtggaccacaacaacagaaccacccagttcacagacccccggctgcaccacatcatgaaccaccagtgccagctgaaggagcccagccagcccctgcccctgcccagcgagggcagcctggaggatgaggagctgcctgcccagagatatgaaagagacctggtgcagaagctgaaggtgctgcggcatgagctgagcctgcagcagccccaggccggccactgcagaattgaggtgtcccgggaggagatctttgaggagagctaccggcagatcatgaagatgaggcccaaggacctgaagaagaggctgatggtgaagttccggggggaggagggcctggactatggaggagtggcccgggagtggctgtacctgctgtgccacgagatgctgaacccctactacggcctcttccagtacagcacagacaacatctacatgctgcagatcaacccagacagcagcatcaacccagaccacctgagctacttccactttgtgggccgcatcatgggcctggccgtgttccacggccactacatcaatggaggcttcaccgtgcccttctacaagcagctgctgggcaagcccatccagctgagtgacctggagagcgtggaccctgagctgcacaagagcctggtgtggatcctggagaatgacatcacccctgtgctggaccacaccttctgtgtggagcacaatgccttcggccgcatcctgcagcacgagctgaagcccaatggaagaaatgtgcctgtgacagaggagaacaagaaggagtatgtgcggctgtatgtgaactggaggttcatgaggggcatcgaggcccagttcctggccctgcagaagggcttcaatgagctgatcccccagcacctgctgaagccctttgaccagaaggagctggagctgatcatcggcggcctggacaagattgacctgaatgactggaagagcaacacccggctgaagcactgtgtggccgacagcaacatcgtgcgctggttctggcaggccgtggagacctttgatgaggagcggcgggcccggctgctgcagtttgtgacaggcagcaccagggtgcccctgcagggcttcaaggccctgcagggcagcactggagctgctggccccaggctcttcaccatccacctgattgatgccaacacagacaacctgcccaaggcccacacctgcttcaacagaattgacatccccccctatgagagctatgagaagctgtatgagaagctgctgacagctgtggaggagacctgtggctttgctgtggagtag

SEQ ID NO: 254731 - DNA, 2196 bp, Artificial Sequence
  derived and/or modified sequence
atgagcaaccccggcacccggcggaacggcagcagcatcaagatccggctgaccgtgctatgcgctaaaaatctggcgaagaaagacttttttaggttaccggaccctttcgcgaaaatcgtagttgatgggtctggtcaatgccattccacagatacggtgaaaaacacactcgatcccaaatggaaccagcactatgacctctacgtcggcaaaaccgacagcatcacgatctccgtttggaaccataaaaaaattcacaagaagcaaggtgccggctttttaggttgcgttaggttgctgagcaatgccatttcccgcttgaaggacactggctatcagaggctggatttgtgtaagctcaatccatcagacactgatgcagttcgaggccagatcgtggtctccttgcaaacacgcgaccgcatcggaacaggcggttcggtggtggactgtaggggactcctcgaaaatgagggcactgtatacgaggacagcggtcccgggcgcccactctcctgtttcatggaagagcctgctccttacactgattctactggcgctgcagctggcggtgggaactgccgtttcgttgaatccccttcacaggatcagcgtctccaggcacagcggctgcgcaacccagatgtgagggggagcctgcagactccgcagaacagacctcacggccaccagtccccggagctgcctgagggttacgagcagagaaccaccgttcagggacaggtctactttcttcatacacagaccggagtgtctacatggcacgacccaagaataccgagggatctgaatagcgttaactgtgatgagctgggtccactgccccccggttgggaggtccgctccacagtatctggtcggatctatttcgtggatcataataacagaacaacccagtttacagaccctagactccatcacatcatgaaccatcagtgccaactcaaggagcctagccagccactgccacttcctagtgaggggagcctggaggacgaagagctcccagcccagagatatgaacgagatcttgtccaaaagctcaaggtactgcgccatgaattatccctgcagcagccccaggcgggacattgccggattgaagtcagccgagaagaaattttcgaggagtcataccgccaaatcatgaagatgagacctaaggacctgaaaaaacggctgatggtcaagtttcgcggggaggaggggctggactatggtggcgtagcaagggaatggctttacttgctatgtcatgagatgttgaacccatattatggcttatttcagtacagtacagataacatctacatgctccagattaaccccgacagttctattaaccccgaccacttgagttacttccacttcgtagggagaatcatgggcctggcagtgtttcatggccactacataaatggcggcttcacagtacccttttacaagcaactgctgggtaagccgatccaattgtccgatctggaatccgtagaccccgagctgcataagagtctcgtctggatcttagagaacgacattacccccgtcctagatcacaccttttgcgtggaacataatgcatttgggaggatcctgcagcacgaacttaaacccaacggtaggaacgtccccgtcactgaagaaaacaagaaagagtatgtcaggctttacgtgaactggaggttcatgagaggaattgaagcacagtttctcgccctgcagaaaggctttaatgagctgattccacagcatctgctgaagccctttgatcagaaagagctagagctgatcattggcggtttagacaagatcgacctgaatgactggaagagcaacactcggctgaaacactgcgttgctgattccaatatagtgcggtggttctggcaggctgtggagacctttgacgaagagaggcgtgcgcgcctgctgcagttcgttactggctcaacccgggtcccactgcaggggtttaaggccctacaggggtctactggtgctgctgggcctcggttgttcacgattcacctcatcgatgccaatacagataacctgccgaaggcccacacctgcttcaacagaatcgacatccccccctatgagtcctacgagaagctgtacgagaagttattgacggccgtggaagaaacctgcgggtttgccgtggaatag

SEQ ID NO: 254732 - DNA, 2196 bp, Artificial Sequence
  derived and/or modified sequence
atgtcaaatccaggcaccaggaggaatggctccagcattaaaataagactgactgtgttatgcgcgaagaatctggccaagaaagatttctttaggttacctgatcctttcgctaagattgtggtagacgggtccggccagtgtcactccacggacaccgtgaagaatacactcgaccccaagtggaatcaacactacgacttatacgttggtaaaacagattcaataacaatcagcgtgtggaaccacaagaagatacataaaaaacagggcgctggcttcttgggatgtgttagactgttgtcaaacgcaatcagtagactgaaggacacaggctaccagcggctggatctttgcaaactaaacccttcagatacagatgccgtgcgagggcagatcgttgtcagtttgcagacaagagatcggattgggacgggaggctccgtggtggattgcagggggcttttggaaaacgaggggaccgtatatgaagactcaggtccaggccgtcctctgtcgtgttttatggaagaaccggctccgtataccgatagcactggtgctgcggcaggagggggaaactgccggttcgtggaaagcccatcacaggaccagcgcctccaagcacagcgattgaggaatcccgacgtacgtggcagtctgcagaccccacagaatcgccctcatggacaccaatcgccagaactacctgaggggtacgagcagagaaccacagtccaggggcaggtgtactttctacacacccagacaggtgtatctacgtggcatgatccccgtatacccagagatcttaattccgtgaactgtgatgagctgggaccactccctccgggttgggaggttcgaagtaccgtgagcggaagaatctacttcgtggaccacaacaatagaaccacacagtttactgatcctagactgcaccacattatgaaccatcagtgccagctaaaagagccgtcgcaacccctcccacttcccagcgaaggttctctggaggacgaggaattgccggctcagcgctacgagcgtgacctcgtgcaaaagctgaaggtcctgcgccacgaactgtccttgcagcagccgcaggcgggacattgtagaatcgaggtatctcgggaagagatcttcgaagagagctaccgacagattatgaagatgaggcccaaggatctcaaaaaaaggcttatggtgaagtttaggggcgaagaaggtcttgattatggtggggtggcaagagaatggttgtacctgctgtgtcacgagatgctgaatccatattacgggctttttcagtatagcaccgacaacatctacatgctgcagattaaccctgactcctctattaacccggaccatctgtcttactttcattttgtcggcaggattatgggtttggccgtcttccacggccactatatcaatggcggattcacagtgccgttctataaacaactgttaggcaagcctatacagcttagtgacctggagtctgtcgaccccgagctccacaaaagcctggtttggattctcgaaaatgatatcactccggttctggaccatacattctgtgtggagcataacgctttcggaaggatcctgcaacatgaactcaaaccaaacgggagaaacgtgcctgtgacagaggaaaataaaaaagagtacgtgcgcctgtacgtgaactggcgttttatgcgcggaattgaggcccaatttttggcgctccaaaagggtttcaatgagctgatccctcagcacctgcttaagcccttcgaccagaaggagttggagctcatcatcggaggattggacaaaatagacctgaatgattggaagtctaatacacgcctgaagcactgcgtggcagattccaacatcgttaggtggttttggcaggccgtggagacctttgatgaggaaaggagagcacgcctgctgcaatttgtgaccggaagcacacgggtaccacttcagggttttaaagcattgcagggatctactggtgcagctgggccacgtttattcacaatccatctcatcgatgccaatacagataacctccctaaggcacacacatgttttaaccgaatcgacatcccaccatatgagagctacgagaaactctacgaaaaactgctgacggccgtggaggaaacttgcggcttcgctgttgaatag

SEQ ID NO: 254733 - DNA, 5581 bp, Artificial Sequence
  derived and/or modified sequence
cggctcgggactgggctcggctggaagcagcgagggtcagagcgccgcagcaagcgccgatctcccggctcgaccatccgcctgccgcccggacgcctgggccgcggagtttgtgtcccggctcggaccccggcgcccagcccggagccgtaaccttgaggcggcggcggcggggccgggccgggccgggctggggggcggtggcgctggatccgcggctgcccgatcgttggcgggagatgtcgaaccccgggacacgcaggaacggctccagcatcaagatccgtctgacagtgttatgtgccaagaaccttgcaaagaaagacttcttcaggctccctgacccttttgcaaagattgtcgtggatgggtctgggcagtgccactcaaccgacactgtgaaaaacacattggacccaaagtggaaccagcactatgatctatatgttgggaaaacggattcgataaccattagcgtgtggaaccataagaaaattcacaagaaacagggagctggcttcctgggctgtgtgcggctgctctccaatgccatcagcagattaaaagataccggataccagcgtttggatctatgcaaactaaacccctcagatactgatgcagttcgtggccagatagtggtcagtttacagacacgagacagaataggaaccggcggctcggtggtggactgcagaggactgttagaaaatgaaggaacggtgtatgaagactccgggcctgggaggccgctcagctgcttcatggaggaaccagccccttacacagatagcaccggtgctgctgctggaggagggaattgcaggttcgtggagtccccaagtcaagatcaaagacttcaggcacagcggcttcgaaaccctgatgtgcgaggttcactacagacgccccagaaccgaccacacggccaccagtccccggaactgcccgaaggctacgaacaaagaacaacagtccagggccaagtttactttttgcatacacagactggagttagcacgtggcacgaccccaggataccaagagaccttaacagtgtgaactgtgatgaacttggaccactgccgccaggctgggaagtcagaagtacagtttctgggaggatatattttgtagatcataataaccgaacaacccagtttacagacccaaggttacaccacatcatgaatcaccagtgccaactcaaggagcccagccagccgctgccactgcccagtgagggctctctggaggacgaggagcttcctgcccagagatacgaaagagatctagtccagaagctgaaagtcctcagacacgaactgtcgcttcagcagccccaagctggtcattgccgcatcgaagtgtccagagaagaaatctttgaggagtcttaccgccagataatgaagatgcgaccgaaagacttgaaaaaacggctgatggtgaaattccgtggggaagaaggtttggattacggtggtgtggccagggagtggctttacttgctgtgccatgaaatgctgaatccttattacgggctcttccagtattctacggacaatatttacatgttgcaaataaatccggattcttcaatcaaccccgaccacttgtcttatttccactttgtggggcggatcatggggctggctgtgttccatggacactacatcaacgggggcttcacagtgcccttctacaagcagctgctggggaagcccatccagctctcagatctggaatctgtggacccagagctgcataagagcttggtgtggatcctagagaacgacatcacgcctgtactggaccacaccttctgcgtggaacacaacgccttcgggcggatcctgcagcatgaactgaaacccaatggcagaaatgtgccagtcacagaggagaataagaaagaatacgtccggttgtatgtaaactggaggtttatgagaggaatcgaagcccagttcttagctctgcagaaggggttcaatgagctcatccctcaacatctgctgaagccttttgaccagaaggaactggagctgatcataggcggcctggataaaatagacttgaacgactggaagtcgaacacgcggctgaagcactgtgtggccgacagcaacatcgtgcggtggttctggcaagcggtggagacgttcgatgaagaaaggagggccaggctcctgcagtttgtgactgggtccacgcgagtcccgctccaaggcttcaaggctttgcaaggttctacaggcgcggcagggccccggctgttcaccatccacctgatagacgcgaacacagacaaccttccgaaggcccatacctgctttaaccggatcgacattccaccatatgagtcctatgagaagctctacgagaagctgctgacagccgtggaggagacctgcgggtttgctgtggagtgaaaagcaaccaaaggcaacagagtctagctcatggccaccagaccaaaagcatccagcttctgtgcacctcctgcaaagctggcagaggccctggaattccagatcacctgaggggaaagggttgtctctctcctttctgttgggggagggggatgggggacttttgttggtggctcccacccatatatccctcctttaccatagtactcccacccacttccatcacccatccaataaaatgcagccaggtttagcctttggctttggtcacacaggatattctgctgtgttgcaacccatgtggtgataaggctcacagccctgagctctttacgggagcatcaactcacagttaggggactgggcgtggctgattgagggtttggaactggtggctatgccagctattccatctcaaaacagccttgaggccccttttcaatttgagcagctgctagatatcttatcagagctcagattccagatttcacatcccagcagccggttctgggtagcagatcaatttccaactggaaaataactatataatgtatgcttattggaattctgccacagcaggaagcttgagtcaaaatgtgtttcccctttgaaaggagaaggaattggagcagcttttcctggaggcccaggatatttcttttctgggtatcttggctgaaaattttgttttacatagagaaaaacgatcttttaagggtcccttttgctgcattatctgtccagtttgacttttttttcagtgaaaacaccatgtcatggagtgtaggaaagagcagaccaaaatcagccctagagccaaccagtcagtcccaaagctgtgacctctgtgccactgttgtccatagaagagcatcgactgtgtcacttaaaatattagtaaaccatgatgcagcaactgctaagagctaaactaacaaaattgtgtcatcatagctgctggcttggtgtgaactcgcttaaaagcaatggtgaaaggataacctcgatgatgtaaatccacccaaagatactgttctacaaaaagtagggtgtggacgcaaacctgtgacagcagagggggacgacttcacactcactgcctcatgtggcccctttcccagtggcagctggtgacactaacgattgctactcggttcacttgcccagatgtcttcatatgatgagcaaggccagaagcaaggctagattcgaagtttctgacaccatttccagtttgcacaaaagtcagtattttatcttaaagtggcttgatttccaatagctgaacttgggcagaaaacagcaggccaatgttcctatgtggtttctttgttgttgtttttgtttggggtgggggcaagtacagggtaattcatgagcaagacatttcactgctgtcgaagtctctgggatcccgctgtgggtctgagatggcctgggaaggaccttgtggacaatggttttatctgttctttttgtcactgttaatttctgggctgctgaggttctagaatagaagggctgccaaatgaggtttgctgcaggaggaaagtttaatcccccattccaaaagtccaggccaaatggtgggcttagcctctttgaaaagttctgccttgcccccacaggtgggcacatcctgtgtctcattcaccatgatgcttcctgagggtgttctagaagcccgttccccagtggctgtatccagcctttccttgcatcatcttcctcttgaaggtgaggaagtgaaaactacagacctcccccggacagcccactctctatcacgagcctaacccgcgggaggcggaagagacatccattcgagaactgaagcggcctccgggatgaggtcagaggccccacctgattttcctggtggtggtatccaaaatcttcagtaactaggaaggaaaccagggtctcatggtttaaaagactttgaagcaggaatgttgcatttgacgcctttaaaactacctttttgctgttgggaggagtcgggggcgagccttagcagctgcaccgccatccccatgctggttggtgctgccctgcctctcgtgccgggtgttgcttcagcccagagccagagggctgggtcccgggtcctccacaggtgaccccggtggacacacgcgttcccatcctggcctccgtctctgcttttccacttctacctgcgtgtgggtttgccgccttgtcatcggttgtgtgagtgtcgcagacctttccagagctccggttcactctttccaaacaggcctccctgtcggtggcactgcactcctagaaccttcagtttctacgatggtttgtttggtccttttgaaccaccccaaagaactcaacatggcaaagcaaatggtaaaagcttcccgactgttctactttgggtccgcgcgaagcccactcacgtgtgatctgtgttgcccctctcggtggtcccaggcgatccagccatgccccctgcccctctgcccagatgcttcaggggcccggcttttcaggcttgccctcaccagcggccgtcagccgacactcagggatgtagctaacaccactccgccagtgctttcagtaggaagagctgaggctgcctgggaggcccggggcgaccggaaaagggctctctcaagttctgaaaagagaatctgccaccagatcgaatttcgacccctgagcttgttcggacgtatggtccaaattcagattaaggtggtcacccaacccgagatgtcaggaaaggccttctgcagagaaaatgtccccccacccgccatctgcagccaggtgtgtgccacacggcagccttcccgaaacatagtatggattttaaaaatgtgtttatttttgtttctcaaccactttataacgtattttttaatttattttgtaatgtcttgttttgaagtattgctgctatccttgttatccttcccactgtttttatcactgatttattttgtgaaagttgtacactaatgttctatgtcaaaatcaaaagtatttaatgaaatactagttctatttaatgtggttatggaaccagctggaaacacaaaacaaacagtgattgtacagcaggctgggcccaggaggtcaggttcattttgttacatatgcaataaactcacgactttaca

SEQ ID NO: 254734 - DNA, 2196 bp, Artificial Sequence
  derived and/or modified sequence
atgagcaaccccggcaccagaagaaacggcagcagcatcaagatcagactgaccgtgctgtgcgccaagaacctggccaagaaggacttcttcagactgcccgaccccttcgccaagatcgtggtggacggcagcggccagtgccacagcaccgacaccgtgaagaacaccctggaccccaagtggaaccagcactacgacctgtacgtgggcaagaccgacagcatcaccatcagcgtgtggaaccacaagaagatccacaagaagcagggcgccggcttcctgggctgcgtgagactgctgagcaacgccatcagcagactgaaggacaccggctaccagagactggacctgtgcaagctgaaccccagcgacaccgacgccgtgagaggccagatcgtggtgagcctgcagaccagagacagaatcggcaccggcggcagcgtggtggactgcagaggcctgctggagaacgagggcaccgtgtacgaggacagcggccccggcagacccctgagctgcttcatggaggagcccgccccctacaccgacagcaccggcgccgccgccggcggcggcaactgcagattcgtggagagccccagccaggaccagagactgcaggcccagagactgagaaaccccgacgtgagaggcagcctgcagaccccccagaacagaccccacggccaccagagccccgagctgcccgagggctacgagcagagaaccaccgtgcagggccaggtgtacttcctgcacacccagaccggcgtgagcacctggcacgaccccagaatccccagagacctgaacagcgtgaactgcgacgagctgggccccctgccccccggctgggaggtgagaagcaccgtgagcggcagaatctacttcgtggaccacaacaacagaaccacccagttcaccgaccccagactgcaccacatcatgaaccaccagtgccagctgaaggagcccagccagcccctgcccctgcccagcgagggcagcctggaggacgaggagctgcccgcccagagatacgagagagacctggtgcagaagctgaaggtgctgagacacgagctgagcctgcagcagccccaggccggccactgcagaatcgaggtgagcagagaggagatcttcgaggagagctacagacagatcatgaagatgagacccaaggacctgaagaagagactgatggtgaagttcagaggcgaggagggcctggactacggcggcgtggccagagagtggctgtacctgctgtgccacgagatgctgaacccctactacggcctgttccagtacagcaccgacaacatctacatgctgcagatcaaccccgacagcagcatcaaccccgaccacctgagctacttccacttcgtgggcagaatcatgggcctggccgtgttccacggccactacatcaacggcggcttcaccgtgcccttctacaagcagctgctgggcaagcccatccagctgagcgacctggagagcgtggaccccgagctgcacaagagcctggtgtggatcctggagaacgacatcacccccgtgctggaccacaccttctgcgtggagcacaacgccttcggcagaatcctgcagcacgagctgaagcccaacggcagaaacgtgcccgtgaccgaggagaacaagaaggagtacgtgagactgtacgtgaactggagattcatgagaggcatcgaggcccagttcctggccctgcagaagggcttcaacgagctgatcccccagcacctgctgaagcccttcgaccagaaggagctggagctgatcatcggcggcctggacaagatcgacctgaacgactggaagagcaacaccagactgaagcactgcgtggccgacagcaacatcgtgagatggttctggcaggccgtggagaccttcgacgaggagagaagagccagactgctgcagttcgtgaccggcagcaccagagtgcccctgcagggcttcaaggccctgcagggcagcaccggcgccgccggccccagactgttcaccatccacctgatcgacgccaacaccgacaacctgcccaaggcccacacctgcttcaacagaatcgacatccccccctacgagagctacgagaagctgtacgagaagctgctgaccgccgtggaggagacctgcggcttcgccgtggagtag

SEQ ID NO: 254735 - protein, 848 aa, Artificial Sequence
  derived and/or modified sequence
LFCFVFSVSLQVDIVPSQGEISVGESKFFLCQVAGDAKDKDISWFSPNGEKLTPNQQRISVVWNDDSSSTLTIYNANIDDAGIYKCVVTGEDGSESEATVNVKIFQKLMFKNAPTPQEFREGEDAVIVCDVVSSLPPTIIWKHKGRDVILKKDVRFIVLSNNYLQIRGIKKTDEGTYRCEGRILARGEINFKDIQVIVNVPPTIQARQNIVNATANLGQSVTLVCDAEGFPEPTMSWTKDGEQIEQEEDDEKYIFSDDSSQLTIKKVDKNDEAEYICIAENKAGEQDATIHLKVFAKPKITYVENQTAMELEEQVTLTCEASGDPIPSITWRTSTRNISSEEKASWTRPEKQETLDGHMVVRSHARVSSLTLKSIQYTDAGEYICTASNTIGQDSQSMYLEVQYAPKLQGPVAVYTWEGNQVNITCEVFAYPSATISWFRDGQLLPSSNYSNIKIYNTPSASYLEVTPDSENDFGNYNCTAVNRIGQESLEFILVQADTPSSPSIDQVEPYSSTAQVQFDEPEATGGVPILKYKAEWRAVGEEVWHSKWYDAKEASMEGIVTIVGLKPETTYAVRLAALNGKGLGEISAASEFKTQPVPGEPSAPKLEGQMGEDGNSIKVNLIKQDDGGSPIRHYLVRYRALSSEWKPEIRLPSGSDHVMLKSLDWNAEYEVYVVAENQQGKSKAAHFVFRTSAQPTAIPANGSPTSGLSTGAIVGILIVIFVLLLVVVDITCYFLNKCGLFMCIAVNLCGKAGPGAKGKDMEEGKAAFSKDESKEPIVEVRTEEERTPNHDGGKHTEPNETTPLTEPEKGPVEAKPECQETETKPAPAEVKTVPNDATQTKENESKA

SEQ ID NO: 254736 - protein, 664 aa, Artificial Sequence
  derived and/or modified sequence
ITIRDEIWVLFCFVFSVSLQVDIVPSQGEISVGESKFFLCQVAGDAKDKDISWFSPNGEKLTPNQQRISVVWNDDSSSTLTIYNANIDDAGIYKCVVTGEDGSESEATVNVKIFQKLMFKNAPTPQEFREGEDAVIVCDVVSSLPPTIIWKHKGRDVILKKDVRFIVLSNNYLQIRGIKKTDEGTYRCEGRILARGEINFKDIQVIVNVPPTIQARQNIVNATANLGQSVTLVCDAEGFPEPTMSWTKDGEQIEQEEDDEKYIFSDDSSQLTIKKVDKNDEAEYICIAENKAGEQDATIHLKVFAKPKITYVENQTAMELEEQVTLTCEASGDPIPSITWRTSTRNISSEEKASWTRPEKQETLDGHMVVRSHARVSSLTLKSIQYTDAGEYICTASNTIGQDSQSMYLEVQYAPKLQGPVAVYTWEGNQVNITCEVFAYPSATISWFRDGQLLPSSNYSNIKIYNTPSASYLEVTPDSENDFGNYNCTAVNRIGQESLEFILVQADTPSSPSIDQVEPYSSTAQVQFDEPEATGGVPILKYKAEWRAVGEEVWHSKWYDAKEASMEGIVTIVGLKPETTYAVRLAALNGKGLGEISAASEFKTQPVQAPPPTASASSSTPVPLSPPDTTWPLPALATTEPAKNIAQNHCCNMFQAGLHNALMK

SEQ ID NO: 254737 - protein, 858 aa, Artificial Sequence
  derived and/or modified sequence
MLQTKDLIWTLFFLGTAVSLQVDIVPSQGEISVGESKFFLCQVAGDAKDKDISWFSPNGEKLTPNQQRISVVWNDDSSSTLTIYNANIDDAGIYKCVVTGEDGSESEATVNVKIFQKLMFKNAPTPQEFREGEDAVIVCDVVSSLPPTIIWKHKGRDVILKKDVRFIVLSNNYLQIRGIKKTDEGTYRCEGRILARGEINFKDIQVIVNVPPTIQARQNIVNATANLGQSVTLVCDAEGFPEPTMSWTKDGEQIEQEEDDEKYIFSDDSSQLTIKKVDKNDEAEYICIAENKAGEQDATIHLKVFAKPKITYVENQTAMELEEQVTLTCEASGDPIPSITWRTSTRNISSEEKASWTRPEKQETLDGHMVVRSHARVSSLTLKSIQYTDAGEYICTASNTIGQDSQSMYLEVQYAPKLQGPVAVYTWEGNQVNITCEVFAYPSATISWFRDGQLLPSSNYSNIKIYNTPSASYLEVTPDSENDFGNYNCTAVNRIGQESLEFILVQADTPSSPSIDQVEPYSSTAQVQFDEPEATGGVPILKYKAEWRAVGEEVWHSKWYDAKEASMEGIVTIVGLKPETTYAVRLAALNGKGLGEISAASEFKTQPVQGEPSAPKLEGQMGEDGNSIKVNLIKQDDGGSPIRHYLVRYRALSSEWKPEIRLPSGSDHVMLKSLDWNAEYEVYVVAENQQGKSKAAHFVFRTSAQPTAIPANGSPTSGLSTGAIVGILIVIFVLLLVVVDITCYFLNKCGLFMCIAVNLCGKAGPGAKGKDMEEGKAAFSKDESKEPIVEVRTEEERTPNHDGGKHTEPNETTPLTEPEKGPVEAKPECQETETKPAPAEVKTVPNDATQTKENESKA

SEQ ID NO: 254738 - DNA, 2547 bp, Artificial Sequence
  derived and/or modified sequence
ctgttctgcttcgtgttcagcgtgagcctgcaggtggacatcgtgcccagccagggcgagatcagcgtgggcgagagcaagttcttcctgtgccaggtggccggcgacgccaaggacaaggacatcagctggttcagccccaacggcgagaagctgacccccaaccagcagagaatcagcgtggtgtggaacgacgacagcagcagcaccctgaccatctacaacgccaacatcgacgacgccggcatctacaagtgcgtggtgaccggcgaggacggcagcgagagcgaggccaccgtgaacgtgaagatcttccagaagctgatgttcaagaacgcccccaccccccaggagttcagagagggcgaggacgccgtgatcgtgtgcgacgtggtgagcagcctgccccccaccatcatctggaagcacaagggcagagacgtgatcctgaagaaggacgtgagattcatcgtgctgagcaacaactacctgcagatcagaggcatcaagaagaccgacgagggcacctacagatgcgagggcagaatcctggccagaggcgagatcaacttcaaggacatccaggtgatcgtgaacgtgccccccaccatccaggccagacagaacatcgtgaacgccaccgccaacctgggccagagcgtgaccctggtgtgcgacgccgagggcttccccgagcccaccatgagctggaccaaggacggcgagcagatcgagcaggaggaggacgacgagaagtacatcttcagcgacgacagcagccagctgaccatcaagaaggtggacaagaacgacgaggccgagtacatctgcatcgccgagaacaaggccggcgagcaggacgccaccatccacctgaaggtgttcgccaagcccaagatcacctacgtggagaaccagaccgccatggagctggaggagcaggtgaccctgacctgcgaggccagcggcgaccccatccccagcatcacctggagaaccagcaccagaaacatcagcagcgaggagaaggccagctggaccagacccgagaagcaggagaccctggacggccacatggtggtgagaagccacgccagagtgagcagcctgaccctgaagagcatccagtacaccgacgccggcgagtacatctgcaccgccagcaacaccatcggccaggacagccagagcatgtacctggaggtgcagtacgcccccaagctgcagggccccgtggccgtgtacacctgggagggcaaccaggtgaacatcacctgcgaggtgttcgcctaccccagcgccaccatcagctggttcagagacggccagctgctgcccagcagcaactacagcaacatcaagatctacaacacccccagcgccagctacctggaggtgacccccgacagcgagaacgacttcggcaactacaactgcaccgccgtgaacagaatcggccaggagagcctggagttcatcctggtgcaggccgacacccccagcagccccagcatcgaccaggtggagccctacagcagcaccgcccaggtgcagttcgacgagcccgaggccaccggcggcgtgcccatcctgaagtacaaggccgagtggagagccgtgggcgaggaggtgtggcacagcaagtggtacgacgccaaggaggccagcatggagggcatcgtgaccatcgtgggcctgaagcccgagaccacctacgccgtgagactggccgccctgaacggcaagggcctgggcgagatcagcgccgccagcgagttcaagacccagcccgtgcccggcgagcccagcgcccccaagctggagggccagatgggcgaggacggcaacagcatcaaggtgaacctgatcaagcaggacgacggcggcagccccatcagacactacctggtgagatacagagccctgagcagcgagtggaagcccgagatcagactgcccagcggcagcgaccacgtgatgctgaagagcctggactggaacgccgagtacgaggtgtacgtggtggccgagaaccagcagggcaagagcaaggccgcccacttcgtgttcagaaccagcgcccagcccaccgccatccccgccaacggcagccccaccagcggcctgagcaccggcgccatcgtgggcatcctgatcgtgatcttcgtgctgctgctggtggtggtggacatcacctgctacttcctgaacaagtgcggcctgttcatgtgcatcgccgtgaacctgtgcggcaaggccggccccggcgccaagggcaaggacatggaggagggcaaggccgccttcagcaaggacgagagcaaggagcccatcgtggaggtgagaaccgaggaggagagaacccccaaccacgacggcggcaagcacaccgagcccaacgagaccacccccctgaccgagcccgagaagggccccgtggaggccaagcccgagtgccaggagaccgagaccaagcccgcccccgccgaggtgaagaccgtgcccaacgacgccacccagaccaaggagaacgagagcaaggcctag

SEQ ID NO: 254739 - DNA, 1995 bp, Artificial Sequence
  derived and/or modified sequence
atcaccatcagagacgagatctgggtgctgttctgcttcgtgttcagcgtgagcctgcaggtggacatcgtgcccagccagggcgagatcagcgtgggcgagagcaagttcttcctgtgccaggtggccggcgacgccaaggacaaggacatcagctggttcagccccaacggcgagaagctgacccccaaccagcagagaatcagcgtggtgtggaacgacgacagcagcagcaccctgaccatctacaacgccaacatcgacgacgccggcatctacaagtgcgtggtgaccggcgaggacggcagcgagagcgaggccaccgtgaacgtgaagatcttccagaagctgatgttcaagaacgcccccaccccccaggagttcagagagggcgaggacgccgtgatcgtgtgcgacgtggtgagcagcctgccccccaccatcatctggaagcacaagggcagagacgtgatcctgaagaaggacgtgagattcatcgtgctgagcaacaactacctgcagatcagaggcatcaagaagaccgacgagggcacctacagatgcgagggcagaatcctggccagaggcgagatcaacttcaaggacatccaggtgatcgtgaacgtgccccccaccatccaggccagacagaacatcgtgaacgccaccgccaacctgggccagagcgtgaccctggtgtgcgacgccgagggcttccccgagcccaccatgagctggaccaaggacggcgagcagatcgagcaggaggaggacgacgagaagtacatcttcagcgacgacagcagccagctgaccatcaagaaggtggacaagaacgacgaggccgagtacatctgcatcgccgagaacaaggccggcgagcaggacgccaccatccacctgaaggtgttcgccaagcccaagatcacctacgtggagaaccagaccgccatggagctggaggagcaggtgaccctgacctgcgaggccagcggcgaccccatccccagcatcacctggagaaccagcaccagaaacatcagcagcgaggagaaggccagctggaccagacccgagaagcaggagaccctggacggccacatggtggtgagaagccacgccagagtgagcagcctgaccctgaagagcatccagtacaccgacgccggcgagtacatctgcaccgccagcaacaccatcggccaggacagccagagcatgtacctggaggtgcagtacgcccccaagctgcagggccccgtggccgtgtacacctgggagggcaaccaggtgaacatcacctgcgaggtgttcgcctaccccagcgccaccatcagctggttcagagacggccagctgctgcccagcagcaactacagcaacatcaagatctacaacacccccagcgccagctacctggaggtgacccccgacagcgagaacgacttcggcaactacaactgcaccgccgtgaacagaatcggccaggagagcctggagttcatcctggtgcaggccgacacccccagcagccccagcatcgaccaggtggagccctacagcagcaccgcccaggtgcagttcgacgagcccgaggccaccggcggcgtgcccatcctgaagtacaaggccgagtggagagccgtgggcgaggaggtgtggcacagcaagtggtacgacgccaaggaggccagcatggagggcatcgtgaccatcgtgggcctgaagcccgagaccacctacgccgtgagactggccgccctgaacggcaagggcctgggcgagatcagcgccgccagcgagttcaagacccagcccgtgcaggcccccccccccaccgccagcgccagcagcagcacccccgtgcccctgagcccccccgacaccacctggcccctgcccgccctggccaccaccgagcccgccaagaacatcgcccagaaccactgctgcaacatgttccaggccggcctgcacaacgccctgatgaagtag

SEQ ID NO: 254740 - DNA, 2547 bp, Artificial Sequence
  derived and/or modified sequence
ctcttctgtttcgtcttcagcgtaagtctgcaggttgacatcgtgccttctcagggtgagatctcagtcggagagagcaaattttttttgtgtcaggtggctggagatgcaaaggacaaggatatcagttggttcagtcccaacggcgagaagctaacgcctaaccaacagaggattagtgtggtttggaatgacgattcgtcctctacactcaccatttacaacgcaaacattgacgacgcaggcatttacaaatgcgtggttaccggggaggatgggagcgagagtgaggctactgtgaacgtgaagatctttcaaaagcttatgttcaagaatgcacccaccccccaggagtttagagagggtgaagatgcagtgatcgtgtgtgatgtggtgtcttctctcccaccgacaataatatggaagcataagggtagggatgtgatcctgaaaaaagacgtgaggttcatcgtcctctctaacaattatttgcagattagagggattaagaagactgacgagggaacttaccgctgcgaaggccggatccttgccagaggcgagattaatttcaaagatatacaagtcatcgttaacgtccctcctaccattcaggcccggcaaaatattgtgaacgccacagcgaatctcggccagagcgtaactcttgtatgtgacgcagaagggtttcccgaaccaaccatgagctggacaaaggacggcgagcaaatcgagcaggaagaagatgatgagaagtatattttctcagacgatagctctcagctcaccatcaagaaggtcgacaagaatgacgaggcagagtacatttgtattgccgagaacaaagcaggggaacaagacgctactatccatttgaaggtctttgccaagccgaaaataacttacgtggagaaccagactgcgatggagctggaggaacaggtgacacttacatgtgaagcgagcggagatcctatcccaagcatcacgtggcgcacctccacccggaatattagcagcgaggagaaagctagctggacgcgtccagaaaaacaggaaacccttgatggacatatggtggttaggagtcacgccagagtgtccagcctcaccctcaagtctattcaatacacagacgccggcgaatacatctgtactgcctctaacaccatcggtcaggacagtcagtcaatgtatctagaggtccagtacgcacctaagctgcagggaccagttgcggtctacacgtgggaaggtaatcaggttaatattacctgtgaggtctttgcctacccctctgctaccatatcttggtttagggatggccagcttttgccgtcttcgaattattccaacattaagatctataacaccccctcagccagctacctggaggtgacaccagacagcgaaaacgattttggaaattacaattgcacagccgtcaatcgcataggacaggagagtcttgaattcatcctggtacaggctgacacacccagcagtcccagcatcgaccaggtggaaccctactcctccaccgcccaggttcagtttgatgaacctgaagctaccggtggcgtaccaattcttaagtataaggctgagtggcgtgccgttggagaggaagtgtggcacagtaaatggtatgacgcaaaagaagcatcaatggaaggcatcgtgacaatagtcgggcttaagccagaaactacctacgctgtgagactggcagcactcaacgggaaagggctgggcgagatttccgcagcttccgagtttaagacccagcccgttccgggcgagccttctgctccaaaactcgagggacagatgggcgaagacggaaattcaataaaggttaatctgattaagcaggacgatggagggtccccgatacggcactatttggtgcgatatcgggcattatcaagcgaatggaagccagagatccggctccccagcggaagtgatcacgtgatgctgaagtctctcgactggaacgcggagtatgaggtgtatgttgtggccgaaaaccaacagggaaaatctaaggctgcacattttgtgtttagaaccagcgcccagccgacagctattcccgccaatggcagccctacctcagggctttccaccggggccatcgtggggattctcatcgttatattcgtcctactgctggtggtcgttgacattacatgttactttttgaataagtgtgggctgtttatgtgtatcgctgtaaacctatgtggtaaggctggccccggtgctaaaggaaaggacatggaagaaggcaaagcggctttttcaaaagacgagtccaaggagcctatcgtggaggtccgaacagaagaagaaagaacccccaatcacgatggcggcaagcataccgagccgaacgagactaccccacttaccgagccagagaagggtcctgtggaagctaagcctgagtgtcaggagaccgaaaccaaacctgcccccgctgaggtgaagacagtacctaatgacgctacccagacaaaggaaaacgagagcaaagcctag

SEQ ID NO: 254741 - DNA, 1995 bp, Artificial Sequence
  derived and/or modified sequence
attactatcagggatgaaatttgggtgctgttctgttttgtcttcagcgtgtctctgcaggtggatatcgtgccaagtcagggagaaatctccgtaggggagtctaaattctttctgtgccaggtggccggggatgccaaagacaaggatatcagctggttttctcccaacggggagaagttaacaccgaaccagcaacggatttccgtagtgtggaacgatgacagttccagcaccctgacaatttataacgccaatatcgatgacgctggcatctataaatgcgtggtgaccggcgaggacggcagcgagagtgaagccacggtgaatgtaaaaatattccaaaaactgatgttcaaaaacgcacctacccctcaggagttccgagagggcgaggacgcggtcattgtctgtgacgtggtgagctccctgccgcctacaataatttggaaacataaagggcgtgacgtgattctgaagaaggacgttagatttattgtgctcagcaataattacctgcagatccgcggaatcaaaaagaccgacgaggggacttacagatgtgagggccggattctggcacgaggagaaattaatttcaaggacattcaagtgatcgtcaatgtgccacccacaatccaggctcgacaaaacattgtgaatgcaacagccaatctagggcagagtgtcaccctggtctgtgacgccgaggggttccctgaacctaccatgtcatggacgaaggatggcgagcagatcgagcaggaagaggatgatgagaaatatatcttttccgatgatagtagccagcttactatcaaaaaagtcgacaagaatgacgaggcagagtacatatgtattgccgagaacaaagccggggagcaggatgccaccattcacctcaaggtgttcgctaaacctaaaattacctatgtggagaaccagaccgctatggagcttgaagagcaggtcacactcacatgtgaagcgagtggcgatccaatcccatcaattacttggcggaccagcacgaggaacatcagctcagaggagaaagctagttggactaggcccgagaaacaggagacactggatggtcacatggtcgtgagatctcatgccagggtgtcgtctctgaccctgaagagcatccagtacacagacgctggagaatacatttgtaccgcatctaacaccatcgggcaggattcccagtccatgtacctcgaggtacagtatgcgcccaagctccaggggccagtggctgtgtacacgtgggaaggcaaccaggtgaatatcacttgtgaggtcttcgcctacccatcagcgaccatctcttggttccgtgacggccaactactgccttcctccaattacagcaacattaagatctacaataccccatccgcctcctatctggaagtcacccccgattcagaaaacgactttggcaattacaactgcaccgcagtgaaccgcattggacaggagtccctcgagtttatccttgttcaagcagacactccatcttcgccctccatcgaccaggtggagccctattcttccacagcccaagtgcagttcgatgagccagaggcgacaggtggcgtgcctatattaaaatacaaagcagaatggagggctgtgggggaagaggtgtggcacagcaaatggtatgacgcaaaagaggcttcgatggaggggatcgtgactattgtgggtttgaaacctgaaaccacctatgccgtgaggctggccgccctaaacgggaagggcttgggcgagatttctgcggcttccgagttcaaaactcagcccgtgcaagcgcctcctccaacagcttctgcctctagttctacgcccgttcccctgtcccctccagacacaacatggccactccccgccctcgctacaaccgagcccgccaagaatattgcccagaatcactgctgcaatatgttccaggccggactacacaacgcgctgatgaaatag

SEQ ID NO: 254742 - DNA, 2547 bp, Artificial Sequence
  derived and/or modified sequence
ctcttctgctttgtgttttctgtgtccctgcaggtggacatcgtgcccagccagggcgagatctctgtgggggagagcaagttcttcctgtgccaggtggccggagatgccaaggacaaggacatctcctggttcagccccaacggggagaagctgacccccaaccagcagaggatctctgtggtgtggaatgatgacagcagcagcaccctgaccatctacaatgccaacattgatgatgctggcatctacaagtgtgtggtgactggagaagatggcagcgagagcgaggccaccgtgaatgtgaagatcttccagaagctgatgttcaagaatgcccccaccccccaggagttccgggagggagaagatgctgtgattgtgtgtgatgtggtgagcagcctgccccccaccatcatctggaagcacaagggcagagatgtgatcctgaagaaggatgtgcgcttcatcgtgctgagcaacaactacctgcagatccggggcatcaagaagacagatgagggcacctaccgctgtgagggccgcatcctggcccggggggagatcaacttcaaggacatccaggtgattgtgaatgtgccccccaccatccaggcccggcagaacatcgtgaatgccacagccaacctgggccagagcgtgaccctggtgtgtgatgctgagggcttccctgagcccaccatgtcctggaccaaggatggagagcagatcgagcaggaggaggatgatgagaagtacatcttcagtgatgacagcagccagctgaccatcaagaaggtggacaagaatgatgaagctgagtacatctgcatcgccgagaacaaggccggggagcaggatgccaccatccacctgaaggtgtttgccaagcccaagatcacctacgtggagaaccagacagccatggagctggaggagcaggtgaccctgacctgtgaggccagcggggaccccatccccagcatcacctggaggaccagcaccaggaacatcagcagcgaggagaaggcctcctggaccaggcctgagaagcaggagaccctggatggccacatggtggtgcgcagccacgcccgggtgagcagcctgaccctgaagagcatccagtacacagatgctggggagtacatctgcacagccagcaacaccatcggccaggacagccagagcatgtacctggaggtgcagtatgcccccaagctgcagggccctgtggccgtgtacacctgggagggcaaccaggtgaacatcacctgtgaggtgtttgcctaccccagcgccaccatctcctggttcagagatggccagctgctgcccagcagcaactacagcaacatcaagatctacaacacccccagcgccagctacctggaggtgaccccagacagtgaaaatgactttggaaactacaactgcacagctgtgaacagaattggccaggagagcctggagttcatcctggtgcaggccgacacccccagcagccccagcattgaccaggtggagccctacagcagcacagcccaggtgcagtttgatgagcctgaggccactggaggagtgcccatcctgaagtacaaggccgagtggagggctgtgggggaggaggtgtggcacagcaagtggtatgatgccaaggaggcctccatggagggcatcgtgaccatcgtgggcctgaagccagagaccacctatgctgtgcggctggccgccctgaatggcaagggcctgggggagatctctgctgccagcgagttcaagacccagcctgtgcctggagagcccagcgcccccaagctggagggccagatgggagaagatggcaacagcatcaaggtgaacctgatcaagcaggatgatggcggcagccccatccgccactacctggtgcgctaccgggccctgagcagcgagtggaagccagagatccggctgcccagcggcagtgaccacgtgatgctgaagagcctggactggaatgcagaatatgaggtgtatgtggtggccgagaaccagcagggcaagagcaaggccgcccactttgtgttccgcaccagcgcccagcccacagccatcccagccaacggcagccccaccagcggcctgagcactggagccatcgtgggcatcctgattgtcatctttgtgctgctgctggtggtggtggacatcacctgctacttcctgaacaagtgtggcctcttcatgtgcatcgctgtgaacctgtgtgggaaggccggccctggggccaagggcaaggacatggaggagggcaaggccgccttcagcaaggatgagagcaaggagcccatcgtggaggtgaggacagaggaggagaggacccccaaccatgatggcggcaagcacacagagcccaatgagaccacccccctgacagagcctgagaagggccctgtggaggccaagccagagtgccaggagacagagaccaagccagccccagctgaggtgaagacagtgcccaatgatgccacccagaccaaggaaaatgaaagcaaggcctag

SEQ ID NO: 254743 - DNA, 1995 bp, Artificial Sequence
  derived and/or modified sequence
atcaccatcagagatgagatctgggtgctcttctgctttgtgttttctgtgtccctgcaggtggacatcgtgcccagccagggcgagatctctgtgggggagagcaagttcttcctgtgccaggtggccggagatgccaaggacaaggacatctcctggttcagccccaatggagagaagctgacccccaaccagcagaggatctctgtggtgtggaatgatgacagcagcagcaccctgaccatctacaatgccaacattgatgatgctggcatctacaagtgtgtggtgactggagaagatggcagcgagagcgaggccaccgtgaatgtgaagatcttccagaagctgatgttcaagaatgcccccaccccccaggagttccgggagggggaggatgctgtgattgtgtgtgatgtggtgagcagcctgccccccaccatcatctggaagcacaagggcagagatgtgatcctgaagaaggatgtgcgcttcatcgtgctgagcaacaactacctgcagatccggggcatcaagaagacagatgagggcacctaccgctgtgagggccgcatcctggcccggggggagatcaacttcaaggacatccaggtgattgtgaatgtgccccccaccatccaggcccggcagaacatcgtgaatgccacagccaacctgggccagagcgtgaccctggtgtgtgatgctgagggcttccctgagcccaccatgtcctggaccaaggatggagagcagatcgagcaggaggaggatgatgagaagtacatcttcagtgatgacagcagccagctgaccatcaagaaggtggacaagaatgatgaggccgagtacatctgcatcgccgagaacaaggccggggagcaggatgccaccatccacctgaaggtgtttgccaagcccaagatcacctacgtggagaaccagacagccatggagctggaggagcaggtgaccctgacctgtgaggccagcggggaccccatccccagcatcacctggaggaccagcaccaggaacatcagcagcgaggagaaggcctcctggaccaggcctgagaagcaggagaccctggatggccacatggtggtgcgcagccacgcccgggtgagcagcctgaccctgaagagcatccagtacacagatgctggggagtacatctgcacagccagcaacaccatcggccaggacagccagagcatgtacctggaggtgcagtatgcccccaagctgcagggccctgtggccgtgtacacctgggagggcaaccaggtgaacatcacctgtgaggtgtttgcctaccccagcgccaccatctcctggttcagagatggccagctgctgcccagcagcaactacagcaacatcaagatctacaacaccccatctgccagctacctggaggtgaccccagattctgaaaatgactttggaaactacaactgcacagctgtgaaccgcatcggccaggagagcctggagttcatcctggtgcaggccgacacccccagcagccccagcattgaccaggtggagccctacagcagcacagcccaggtgcagtttgatgagcctgaggccaccggcggcgtgcccatcctgaagtacaaggccgagtggagggctgtgggggaggaggtgtggcacagcaagtggtatgatgccaaggaggcctccatggagggcatcgtgaccatcgtgggcctgaagccagagaccacctatgctgtgcggctggccgccctgaatggcaagggcctgggggagatctctgctgccagcgagttcaagacccagcctgtgcaggcccccccacccacagccagcgccagcagcagcacccctgtgcccctgagccccccagacaccacctggcccctgcctgccctggccaccacagagcccgccaagaacatcgcccagaaccactgctgcaacatgttccaggccggcctgcacaatgccctgatgaagtag

SEQ ID NO: 254744 - DNA, 2547 bp, Artificial Sequence
  derived and/or modified sequence
ctgttctgcttcgtgttcagcgtgagcctgcaggtggacatcgtgcctagtcagggagagatcagcgtgggggagtccaaatttttcctctgtcaggtagccggggacgccaaagataaggatatctcctggttcagccctaatggcgagaagctgacaccaaatcagcaacggatcagcgtcgtgtggaatgatgatagtagttctaccctgacaatctataatgcgaatatcgacgatgcaggcatttataaatgtgttgtgacaggcgaggatggctctgagtcggaagcgactgtgaatgtcaaaatttttcagaagctgatgttcaaaaacgcccctactcctcaggagttccgcgagggagaggacgccgtcatcgtttgcgacgtggtgtccagcctcccacccactattatttggaaacacaagggaagagacgtgatactcaaaaaggacgttcgtttcatcgtcctgagtaataactatttgcagattaggggcattaaaaagaccgacgagggcacatacagatgtgagggtcgaattctggctcgcggtgagattaattttaaggacatccaagtgatcgtgaacgtcccaccaacaatccaggcccgccagaacatagtgaatgcaacggccaatctcggtcagagcgtcacattagtgtgtgatgccgagggattcccagagccaacaatgtcatggacaaaggatggggagcagattgaacaggaggaggatgacgagaaatacattttttctgatgactcttcccaactcacaatcaagaaggttgacaagaatgacgaagcagaatacatctgtattgccgagaacaaggctggggagcaggatgcaacaatccatctgaaagtcttcgccaaacctaaaatcacctacgtggagaatcaaacggccatggagctcgaagaacaggtcacactcacgtgcgaggcaagtggagaccccatcccctcaattacctggcgtacttctaccaggaacatcagcagtgaggagaaagcaagctggacccggcccgagaagcaggagactcttgacggccacatggttgtcaggtcacatgcacgagtgtcatctctcactctgaagtccatccaatatactgatgccggcgaatacatctgcaccgcctctaatacaatcggccaggactcgcaaagcatgtacctggaggtccagtacgcccccaaattgcagggacctgtggctgtgtacacttgggaggggaatcaggtgaacataacctgtgaggtgttcgcgtatcctagcgccactatctcctggtttcgcgacggacagttgttgccctcctccaattactcaaatataaaaatttacaatacaccctctgccagttacctggaggtcactcctgactccgagaacgacttcgggaattacaattgtactgcagtgaataggataggacaagagagtctcgagtttatacttgtgcaggccgacacaccaagcagccccagcatcgatcaggttgaaccttactcctctactgcccaggttcagtttgatgaacccgaggccacgggcggtgtgcctattctaaagtataaggcggaatggagagccgttggtgaagaagtatggcactcaaaatggtatgacgctaaagaggcttcaatggagggtatcgtaaccatcgttggacttaagcccgagacaacctacgcagttcgcttggctgccttgaatggtaaaggcttgggcgagatttcagctgccagcgagtttaaaactcagcccgtgcccggagagccctcggctcccaaactggagggccaaatgggagaagatggaaactccatcaaggtgaaccttattaagcaggacgatggaggcagcccaatccgccactacctggtccggtacagggccctgagctccgaatggaagccagagatccggttgccctccgggagtgaccacgtgatgctcaaaagcctggattggaatgccgaatatgaagtctacgtcgtggccgaaaatcagcagggcaagagcaaagctgctcattttgtctttcgtacctctgcacagccaaccgccatacccgctaacggttctcccactagtggactgtctaccggcgcaattgtcggaatcttaatagtgattttcgtattattgcttgtcgtggttgatattacttgctactttctaaataagtgtggcctgttcatgtgtattgctgtgaacctatgtggcaaagccgggcccggggctaagggtaaggacatggaagaaggcaaagccgctttcagtaaagacgagagtaaggagcccatagtggaggtgcggacggaagaggaaagaacccccaaccatgatggtggcaaacacacagaaccgaatgagacaaccccactgactgaaccagagaagggtcccgtagaagcgaagccagaatgccaggagaccgaaacaaaacccgctccagcggaagtgaagacagtgccaaacgacgcgactcagaccaaagagaatgaatccaaagcgtag

SEQ ID NO: 254745 - DNA, 1995 bp, Artificial Sequence
  derived and/or modified sequence
atcaccatccgggacgagatctgggtgctgttctgcttcgtgttctcggtctctctccaagtagacattgttccctctcagggtgaaatctcagtgggcgaatcaaagttcttcttgtgtcaggtcgctggagatgcgaaagacaaagacatttcctggttttctccaaacggcgagaagcttacccccaatcagcagcgcatctcagtggtgtggaatgatgattcatcctctaccctgacaatttacaatgctaatattgatgacgccggcatttacaagtgtgtggttaccggcgaggacgggtccgagtccgaagctactgtaaatgtgaagatattccagaagctgatgttcaagaacgctcccactccccaggaatttagggagggagaggatgccgtgatcgtctgcgatgttgtgtctagtcttcccccaactatcatctggaagcataaaggccgggatgtcattctgaaaaaagatgtcaggttcatcgttctatcgaacaattacctgcagatcagagggattaagaagactgacgagggcacataccgctgcgagggtcgcatcctcgccaggggagaaattaatttcaaggacatccaggttatagtgaatgtgccaccaacaatccaggcaaggcaaaacatcgtcaatgcgaccgctaatttgggccagtcagtcactttggtttgcgacgccgaaggttttcccgagccaaccatgtcatggaccaaagacggggaacagatagaacaagaggaggacgatgaaaagtacatcttttcagacgacagcagccagctgactattaagaaggttgacaaaaatgacgaagcggaatatatctgtatagctgagaataaagctggcgagcaggacgcgacgatccacctgaaagtctttgcaaagccaaagatcacttatgtggagaatcagacagctatggaactggaggagcaggtgactctgacttgtgaggccagcggtgatcccatcccttcaattacgtggcggacgtccactagaaacatctcaagtgaagagaaggccagttggacacggcctgagaaacaagaaacactcgacggtcacatggtggtgaggtcccacgcaagggtctcttcactgaccttaaaatccattcaatatactgacgcgggtgaatatatctgcaccgctagtaatacaatcggtcaagactctcagtcaatgtacctggaggtgcagtacgctcctaaactccagggtcccgtggccgtgtatacttgggaggggaatcaggtcaatattacatgtgaagttttcgcatacccaagcgccaccatttcatggtttagagacggccagctcctgccctcctctaattatagtaacataaaaatttacaacactccgtcggctagctacttagaagtaacccctgacagtgaaaatgatttcggtaactacaactgcacagccgtgaatcgaattgggcaggagtccctggagttcatcctggtgcaggccgatacccccagcagccctagcatcgatcaggtggaaccttactccagtaccgctcaggtgcaatttgacgagcccgaagcaaccggaggcgtccccatcctgaaatacaaagcggagtggagggccgtcggagaagaggtgtggcacagcaaatggtacgatgcaaaagaggcgtctatggagggcatcgtcaccatagtgggacttaagccagagactacctacgcagtacgcctagcggctttaaacggaaagggcctcggagagatctctgccgcaagcgagttcaagacacagcccgtgcaggccccgccaccaacggcctctgcatccagcagcacgccagtgcccctgagccccccagacaccacatggcctctccctgccctcgcaaccaccgaaccagcaaaaaacattgcccagaaccattgttgcaacatgttccaagctggactccataacgcgctgatgaaatag

SEQ ID NO: 254746 - DNA, 5571 bp, Artificial Sequence
  derived and/or modified sequence
ttgttttgttttgttttttcagtttctctgcaggtggatattgttcccagccagggggagatcagcgttggagagtccaaattcttcttatgccaagtggcaggagatgccaaagataaagacatctcctggttctcccccaatggagaaaagctcaccccaaaccagcagcggatctcagtggtgtggaatgatgattcctcctccaccctcaccatctataacgccaacatcgacgacgccggcatttacaagtgtgtggttacaggcgaggatggcagtgagtcagaggccaccgtcaacgtgaagatctttcagaagctcatgttcaagaatgcgccaaccccacaggagttccgggagggggaagatgccgtgattgtgtgtgatgtggtcagctccctcccaccaaccatcatctggaaacacaaaggccgagatgtcatcctgaaaaaagatgtccgattcatagtcctgtccaacaactacctgcagatccggggcatcaagaaaacagatgagggcacttatcgctgtgagggcagaatcctggcacggggggagatcaacttcaaggacattcaggtcattgtgaatgtgccacctaccatccaggccaggcagaatattgtgaatgccaccgccaacctcggccagtccgtcaccctggtgtgcgatgccgaaggcttcccagagcccaccatgagctggacaaaggatggggaacagatagagcaagaggaagacgatgagaagtacatcttcagcgacgatagttcccagctgaccatcaaaaaggtggataagaacgacgaggctgagtacatctgcattgctgagaacaaggctggcgagcaggatgcgaccatccacctcaaagtctttgcaaaacccaaaatcacatatgtagagaaccagactgccatggaattagaggagcaggtcactcttacctgtgaagcctccggagaccccattccctccatcacctggaggacttctacccggaacatcagcagcgaagaaaaggcttcgtggactcgaccagagaagcaagagactctggatgggcacatggtggtgcgtagccatgcccgtgtgtcgtcgctgaccctgaagagcatccagtacactgatgccggagagtacatctgcaccgccagcaacaccatcggccaggactcccagtccatgtaccttgaagtgcaatatgccccaaagctacagggccctgtggctgtgtacacttgggaggggaaccaggtgaacatcacctgcgaggtatttgcctatcccagtgccacgatctcatggtttcgggatggccagctgctgccaagctccaattacagcaatatcaagatctacaacaccccctctgccagctatctggaggtgaccccagactctgagaatgattttgggaactacaactgtactgcagtgaaccgcattgggcaggagtccttggaattcatccttgttcaagcagacaccccctcttcaccatccatcgaccaggtggagccatactccagcacagcccaggtgcagtttgatgaaccagaggccacaggtggggtgcccatcctcaaatacaaagctgagtggagagcagttggtgaagaagtatggcattccaagtggtatgatgccaaggaagccagcatggagggcatcgtcaccatcgtgggcctgaagcccgaaacaacgtacgccgtaaggctggcggcgctcaatggcaaagggctgggtgagatcagcgcggcctccgagttcaagacgcagccagtcccaggggaacccagtgcacctaagctcgaagggcagatgggagaggatggaaactctattaaagtgaacctgatcaagcaggatgacggcggctcccccatcagacactatctggtcaggtaccgagcgctctcctccgagtggaaaccagagatcaggctcccgtctggcagtgaccacgtcatgctgaagtccctggactggaatgctgagtatgaggtctacgtggtggctgagaaccagcaaggaaaatccaaggcggctcattttgtgttcaggacctcggcccagcccacagccatcccagccaacggcagccccacctcaggcctgagcaccggggccatcgtgggcatcctcatcgtcatcttcgtcctgctcctggtggttgtggacatcacctgctacttcctgaacaagtgtggcctgttcatgtgcattgcggtcaacctgtgtggaaaagccgggcccggggccaagggcaaggacatggaggagggcaaggccgccttctcgaaagatgagtccaaggagcccatcgtggaggttcgaacggaggaggagaggaccccaaaccatgatggagggaaacacacagagcccaacgagaccacgccactgacggagcccgagaagggccccgtagaagcaaagccagagtgccaggagacagaaacgaagccagcgccagccgaagtcaagacggtccccaatgacgccacacagacaaaggagaacgagagcaaagcatgatgggtgaagagaaccgagcaaagatcaaaataaaaagtgacacagcagcttcaccagagcatttccaacaccacagacacacacacgcacgcacacacacaaacacacatgcacacacacacatctcatttctctagtgtcttttgcctttaaaaaaaactaaacagataaaacatgggaatctcctttttgtaggtttatagaaagggtccctttgttgcacactcacttgtaagaaaatgagacaaaaaggttaaacccacagccaaactaggacactccgttccctgaaaccgttaaaaaatcaaacaaaaggaccccaaattaagaatctaggaagctcagaaacgaaatctaggttcaggaagaccacacttggtgttacccgattggcacagaccagtttcagagaaatactttcaggcactaagactaatcgaatgaacaaagtccacagtttatttttatactttcagtcaagtttgaactctgtaaaacctcataaataagttataatttctgttcactttgtatttgttcagtatgcaaagtgtgtcaccctttctagctgaattcaattcccacgtagactcttattttataggacgaatgccaaattgcagcttctgggggtagatctcaatttgcagtattcagacttctttttctttcttttacattcttttttctttctttctttctgccaactttgttttccagtgtttacaaggtgacaaatgtttgactttggttgtgtttaaatgtccgtgtaaaatagctgccttttattttttaaggtaacaaataccacctagaggtaggtaggatcatcccacgcttgctttagcacaggacaactttacaaaacatgattgtttacagctgctcttcccctcttttctgatctgcagtttttgcctgggtcccactcaggtgaaaatccatctcattctggaatggttttgcttttgaatttttggttatttttgtgtttctttgggggttagaccactttctgattagccgccacctgcctgcatctgtgaaaagggatctgctcccaggcgttctcacccttcttttgaaggactccttaggctttgttgaatgaagcagagaagattgtatagttggggctggtcttggtgaacacacattattaccccacacatcccctttgtgtagaaagccaaataaaatctatacataccatttccttttgagcccagaatctagatttgagcggaagagcatgtgtgcttcagggaattagtgtctttttttggaaatctgttgaagtaaagtaacatcggccttctgttcacttaggcagcatttatagaaacaaaagaagaaagaaacaacctactgtctggagtcataacacaactttcctggattggaaaccaagtgggggaaaaaatacagaaactttaagggggatgggaggggggggagaagggaaaagccagccctttgtatagaaattttgcttttttttccctcattctactttagaactgcaagcttgtgcactgtggatgcgtgaatattttagtgtgaaacgtgtttttgtcatagtattgaaataaaacttcaacatagtttggttgtggaaggtatagcagatagttcagaaaaaatattcaggaaacaaaaatcactcaaacggaatcgaagccttttaacaaagaaaatgaaatacagatgatgatgatgatgatgaagatgatgctaagtaaacagaaatcagtactccgcatgcgctcctctcctaaggtacaaagcagcaagaggttagggtggcaaggctgcctctgggtccattctgtgggccactctccccaacgttctgacacttctgcagtctgatcagtggcgatgctagattataatttcaaactgtgaagaataatggtcttgtcatttgctcaatgtggggttatgttgcattttctcagctcctggggatggaaatggaggatcccagaacacacagccctggcccctttgattctagggcctgcacagatctctggttcaaatgcacaggccctcagaatagaggaacatgaagagagatcttagagcacacagtagaatgtgagagcctgggtgtctgagaccgggagggcccagcagtgaggggcaggctcttctggtcaccaggctgttcagtggactcagttcttcatcttgtaatgtcgatggctttgccacaccaggccaagcccatgccataccttgtcaagactgtcaaagtggttgtggttaggtcaaactggttttggttctgatggttaggaagaaacaggtcagccctcagatcacctggcccgggacagctgaccccctagaaccctggctctgccattagctaggacctaagactctgcccacattttggtctgttctctcccattacacataggtttgtctcagcatgcaagagtttttcctttaaaaaaaaaaaaaaaaaaaaaaaaaaagcaatgctttctctaaaatcaaagagggagtcattttattccaagatgttttatcttttatgttaagagatcaaagcttataattttcttttttaatttttgaaggagggatcaactccagtttccaatgtctatgtgtctatgtgtgtatgtgccatacatatgtattcacatgaagaccggcatggccaagttctgctggaggagcactcaagtgtgacgagcagggccactggaccctgcagggctgtggtgtatatagtgcagctttggaggtggaactctattttcacacttttctatggagccttccgagtcccaggttttcacttgaggctgtctgtctggatggcggttttcagacctccattaacatccctacccagcattctgtacttcgggggccttctctcttgttataaaactttttaccaagtgaaacatcgataccacctttgtttccattctcactggtgtaaatactgagtactaactgagaattttgactttgcattctgtcggaatacttgtgttc

SEQ ID NO: 254747 - DNA, 1995 bp, Artificial Sequence
  derived and/or modified sequence
attacaattcgtgatgagatttgggttttgttttgttttgttttttcagtttctctgcaggtggatattgttcccagccagggggagatcagcgttggagagtccaaattcttcttatgccaagtggcaggagatgccaaagataaagacatctcctggttctcccccaatggagaaaagctcaccccaaaccagcagcggatctcagtggtgtggaatgatgattcctcctccaccctcaccatctataacgccaacatcgacgacgccggcatttacaagtgtgtggttacaggcgaggatggcagtgagtcagaggccaccgtcaacgtgaagatctttcagaagctcatgttcaagaatgcgccaaccccacaggagttccgggagggggaagatgccgtgattgtgtgtgatgtggtcagctccctcccaccaaccatcatctggaaacacaaaggccgagatgtcatcctgaaaaaagatgtccgattcatagtcctgtccaacaactacctgcagatccggggcatcaagaaaacagatgagggcacttatcgctgtgagggcagaatcctggcacggggggagatcaacttcaaggacattcaggtcattgtgaatgtgccacctaccatccaggccaggcagaatattgtgaatgccaccgccaacctcggccagtccgtcaccctggtgtgcgatgccgaaggcttcccagagcccaccatgagctggacaaaggatggggaacagatagagcaagaggaagacgatgagaagtacatcttcagcgacgatagttcccagctgaccatcaaaaaggtggataagaacgacgaggctgagtacatctgcattgctgagaacaaggctggcgagcaggatgcgaccatccacctcaaagtctttgcaaaacccaaaatcacatatgtagagaaccagactgccatggaattagaggagcaggtcactcttacctgtgaagcctccggagaccccattccctccatcacctggaggacttctacccggaacatcagcagcgaagaaaaggcttcgtggactcgaccagagaagcaagagactctggatgggcacatggtggtgcgtagccatgcccgtgtgtcgtcgctgaccctgaagagcatccagtacactgatgccggagagtacatctgcaccgccagcaacaccatcggccaggactcccagtccatgtaccttgaagtgcaatatgccccaaagctacagggccctgtggctgtgtacacttgggaggggaaccaggtgaacatcacctgcgaggtatttgcctatcccagtgccacgatctcatggtttcgggatggccagctgctgccaagctccaattacagcaatatcaagatctacaacaccccctctgccagctatctggaggtgaccccagactctgagaatgattttgggaactacaactgtactgcagtgaaccgcattgggcaggagtccttggaattcatccttgttcaagcagacaccccctcttcaccatccatcgaccaggtggagccatactccagcacagcccaggtgcagtttgatgaaccagaggccacaggtggggtgcccatcctcaaatacaaagctgagtggagagcagttggtgaagaagtatggcattccaagtggtatgatgccaaggaagccagcatggagggcatcgtcaccatcgtgggcctgaagcccgaaacaacgtacgccgtaaggctggcggcgctcaatggcaaagggctgggtgagatcagcgcggcctccgagttcaagacgcagccagtccaggccccacctcctacggcatctgctagctcgtctacccctgttccattgtctccaccagatacaacttggcctcttcctgcccttgcaaccacagaaccagctaaaaacattgcacagaatcactgctgtaacatgttccaagctggtcttcataatgctctaatgaagtaa

SEQ ID NO: 254748 - DNA, 2547 bp, Artificial Sequence
  derived and/or modified sequence
ctcttttgcttcgtcttctcagtctctcttcaggtggatatagtgccgtcacagggagaaatctccgtgggagagtcgaaattctttctctgccaagtggccggagacgcaaaggataaagacatttcttggttctcacccaacggcgaaaagctgaccccgaaccaacagaggatctctgtggtctggaatgacgattccagtagtactctcaccatttataacgcaaatattgatgacgcaggcatttacaaatgcgtcgtcaccggggaggatggcagtgaatctgaggccactgttaacgtgaagatattccagaaattgatgttcaagaatgctccgaccccacaagagtttagagaaggcgaggatgccgttatcgtctgtgacgttgtctcatcattgccccctactattatttggaagcataagggcagggacgtgatcttgaagaaagatgtacgctttattgtgctgagcaataactatctgcaaattcgagggatcaagaaaacagacgagggaacataccgctgcgaggggcgtatcctggcaagaggggaaattaatttcaaagatattcaggtgatcgtcaatgtacctcccacaatacaagctagacaaaacattgttaatgccacagctaacctggggcagagcgttaccctcgtctgcgatgctgaaggctttcccgagccaactatgtcctggaccaaagatggagagcagatcgagcaggaagaagacgatgagaaatacattttcagcgatgattcctcccaactgacaataaagaaagttgacaagaatgatgaggctgaatacatctgtatcgcggagaataaagccggtgagcaagacgcaaccattcatttgaaagtctttgcgaaacccaaaatcacctacgtggagaaccagaccgctatggagctggaagaacaagtgaccttaacctgtgaggcgtcgggcgaccccatcccctctatcacctggcgaacctccacacgcaatatttctagcgaagaaaaggcatcttggaccagacccgagaagcaggagaccttagatgggcacatggtggtcagatctcatgccagagtgagttctctaacactgaaatcaatccaatatactgacgccggagaatatatttgcactgcaagcaataccataggtcaggacagccagtctatgtatctcgaggttcagtatgcgcctaagctgcagggccctgtcgctgtgtatacctgggaagggaatcaggtgaacatcacgtgtgaagtgtttgcttatccttctgcaaccatcagctggttccgtgacggccaactgctgccatcttccaactactctaacatcaaaatctacaataccccctctgcgagttatctggaggtgacccctgactcagagaatgatttcggaaactacaattgcaccgcggtgaatcgtatcggccaggaatctctggagttcattctggttcaggccgacacccccagctcaccttccattgaccaggtggagccatattcgtcaaccgcccaagtgcaatttgatgagccagaggcgacagggggagtgcccattctaaagtacaaggctgagtggagagccgtgggggaggaggtctggcacagcaagtggtacgatgccaaggaggcctccatggaagggatcgtgactattgtgggacttaagccagaaacaacctatgcggtgcgcctcgccgctcttaacggcaaagggcttggagagatttcagccgcttctgaatttaagactcagccagtccctggtgaacccagtgcgcctaagctggagggacagatgggcgaagatgggaatagcatcaaagtgaacctgatcaaacaggatgacggaggatctcctataagacactacctcgtgcggtatcgtgctctctcgagtgagtggaaaccggagataaggttaccttctggatccgatcacgttatgctgaaaagcttggactggaatgccgagtatgaggtgtacgtagtggccgaaaaccaacagggcaagtccaaggcagctcacttcgttttccggacttcagctcagccaactgcgatccccgcaaacgggtctccaacttctgggcttagtacgggtgccatcgtgggaatactcatcgtcatctttgtacttcttctggtcgtggtggacataacatgctatttcctgaacaaatgcggactctttatgtgcattgcagtgaacttatgtggtaaagcaggacctggagctaaaggaaaggacatggaagagggtaaggccgcattcagcaaggatgagagcaaagaacccatcgtagaagtgcggaccgaagaggagagaactcccaaccatgatggcggaaaacatacagagccaaacgagacgaccccgttgacagagcccgaaaagggtcctgtggaggctaaaccagagtgccaggagactgaaaccaagccggcaccggctgaggtgaaaaccgtccctaatgatgctactcaaaccaaggagaatgaatctaaggcatag

SEQ ID NO: 254749 - DNA, 1995 bp, Artificial Sequence
  derived and/or modified sequence
ataacaatccgagatgaaatctgggtgcttttctgtttcgtattcagcgtgtccttgcaagtggacatcgtgccatcccagggggagataagcgttggagaatctaagtttttcttgtgccaggtggcaggggatgccaaggacaaggacattagctggttttctccaaacggagagaagctgacgcctaaccagcagagaatctctgtggtttggaatgatgactcctcatccactctgacaatttataacgccaatatagatgacgcgggtatttacaagtgtgtagttaccggtgaggacggctccgagtccgaggcaactgtgaacgttaagatttttcagaagctgatgttcaagaatgcaccaactccccaagaattccgggaaggcgaggatgccgtgattgtttgcgacgtcgtttcttctcttccgcctacaattatctggaagcataaaggtagagatgttattcttaagaaggacgtccgattcatcgtgttgtctaataattacctacaaataaggggcatcaaaaaaactgatgaaggcacttacaggtgtgagggaaggattctggcccgaggagagattaatttcaaagatatacaggttatagtcaatgtcccacctacgatacaggctcggcagaacattgttaacgccacggctaacctgggacagtctgtgactcttgtgtgcgacgctgaaggtttccctgagccaaccatgagctggacaaaagatggagagcaaattgagcaggaggaggatgatgaaaagtacatcttctccgacgactcttcccagctgaccattaagaaagtcgacaagaatgacgaggccgaatacatttgtattgccgagaacaaggcaggcgagcaggatgcaaccatccacctaaaggttttcgccaaaccaaaaatcacatacgtggaaaaccaaacggctatggagctcgaggaacaggtcactctaacgtgtgaggcatctggcgatcccattcccagcataacttggagaacttccacacgcaatatttcatccgaagagaaggcctcctggacgagacctgagaaacaggaaacgctagacggccacatggtggtacggagccacgcccgagtatcttctttaacactcaaaagcattcagtatacggacgccggtgagtacatctgcaccgcatctaatacaataggccaagattcccaatccatgtatttggaagttcagtacgcccctaaactgcaaggcccagtcgccgtgtacacttgggagggcaatcaggttaatataacctgtgaggtcttcgcatacccatcagccactatttcttggttcagggatggtcagttgctgccctcatcgaattacagcaacattaaaatatacaacacccccagcgcctcgtatctggaagtaacgcccgacagcgagaacgactttggcaactacaactgcaccgccgtgaaccgcatagggcaagagagtctggagttcatactcgtgcaagctgatactccgagctcgcctagcattgatcaagtggagccttattcttccacagcccaggtccagtttgacgagccggaggccacgggtggagtccctatcctcaaatataaagcagagtggagagccgttggcgaggaggtttggcattccaaatggtacgacgctaaggaggcaagtatggaggggatcgtcactattgtgggccttaagccggaaaccacctatgccgtgagattggctgccctaaacggcaaggggttgggcgagatttccgcagctagcgagtttaaaacccagccagtccaggctccccctcctactgctagcgcctctagttccacccccgtgccacttagtcctccagatactacctggccattgccggcactcgcaactacagaacccgctaaaaatatcgcacagaatcactgctgtaacatgttccaggcaggccttcacaatgctctcatgaagtag

SEQ ID NO: 254750 - DNA, 2577 bp, Artificial Sequence
  derived and/or modified sequence
atgctgcagaccaaggacctgatctggaccctgttcttcctgggcaccgccgtgagcctgcaggtggacatcgtgcccagccagggcgagatcagcgtgggcgagagcaagttcttcctgtgccaggtggccggcgacgccaaggacaaggacatcagctggttcagccccaacggcgagaagctgacccccaaccagcagagaatcagcgtggtgtggaacgacgacagcagcagcaccctgaccatctacaacgccaacatcgacgacgccggcatctacaagtgcgtggtgaccggcgaggacggcagcgagagcgaggccaccgtgaacgtgaagatcttccagaagctgatgttcaagaacgcccccaccccccaggagttcagagagggcgaggacgccgtgatcgtgtgcgacgtggtgagcagcctgccccccaccatcatctggaagcacaagggcagagacgtgatcctgaagaaggacgtgagattcatcgtgctgagcaacaactacctgcagatcagaggcatcaagaagaccgacgagggcacctacagatgcgagggcagaatcctggccagaggcgagatcaacttcaaggacatccaggtgatcgtgaacgtgccccccaccatccaggccagacagaacatcgtgaacgccaccgccaacctgggccagagcgtgaccctggtgtgcgacgccgagggcttccccgagcccaccatgagctggaccaaggacggcgagcagatcgagcaggaggaggacgacgagaagtacatcttcagcgacgacagcagccagctgaccatcaagaaggtggacaagaacgacgaggccgagtacatctgcatcgccgagaacaaggccggcgagcaggacgccaccatccacctgaaggtgttcgccaagcccaagatcacctacgtggagaaccagaccgccatggagctggaggagcaggtgaccctgacctgcgaggccagcggcgaccccatccccagcatcacctggagaaccagcaccagaaacatcagcagcgaggagaaggccagctggaccagacccgagaagcaggagaccctggacggccacatggtggtgagaagccacgccagagtgagcagcctgaccctgaagagcatccagtacaccgacgccggcgagtacatctgcaccgccagcaacaccatcggccaggacagccagagcatgtacctggaggtgcagtacgcccccaagctgcagggccccgtggccgtgtacacctgggagggcaaccaggtgaacatcacctgcgaggtgttcgcctaccccagcgccaccatcagctggttcagagacggccagctgctgcccagcagcaactacagcaacatcaagatctacaacacccccagcgccagctacctggaggtgacccccgacagcgagaacgacttcggcaactacaactgcaccgccgtgaacagaatcggccaggagagcctggagttcatcctggtgcaggccgacacccccagcagccccagcatcgaccaggtggagccctacagcagcaccgcccaggtgcagttcgacgagcccgaggccaccggcggcgtgcccatcctgaagtacaaggccgagtggagagccgtgggcgaggaggtgtggcacagcaagtggtacgacgccaaggaggccagcatggagggcatcgtgaccatcgtgggcctgaagcccgagaccacctacgccgtgagactggccgccctgaacggcaagggcctgggcgagatcagcgccgccagcgagttcaagacccagcccgtgcagggcgagcccagcgcccccaagctggagggccagatgggcgaggacggcaacagcatcaaggtgaacctgatcaagcaggacgacggcggcagccccatcagacactacctggtgagatacagagccctgagcagcgagtggaagcccgagatcagactgcccagcggcagcgaccacgtgatgctgaagagcctggactggaacgccgagtacgaggtgtacgtggtggccgagaaccagcagggcaagagcaaggccgcccacttcgtgttcagaaccagcgcccagcccaccgccatccccgccaacggcagccccaccagcggcctgagcaccggcgccatcgtgggcatcctgatcgtgatcttcgtgctgctgctggtggtggtggacatcacctgctacttcctgaacaagtgcggcctgttcatgtgcatcgccgtgaacctgtgcggcaaggccggccccggcgccaagggcaaggacatggaggagggcaaggccgccttcagcaaggacgagagcaaggagcccatcgtggaggtgagaaccgaggaggagagaacccccaaccacgacggcggcaagcacaccgagcccaacgagaccacccccctgaccgagcccgagaagggccccgtggaggccaagcccgagtgccaggagaccgagaccaagcccgcccccgccgaggtgaagaccgtgcccaacgacgccacccagaccaaggagaacgagagcaaggcctag

SEQ ID NO: 254751 - DNA, 2577 bp, Artificial Sequence
  derived and/or modified sequence
atgctacagactaaggacctcatttggacgctgtttttcctggggacagctgtctctctgcaagttgatattgtgccttcccagggcgagatcagtgtcggggaaagcaaattcttcctctgtcaggtggcgggtgatgccaaggataaggatatttcctggttttcccccaacggagaaaaactaactcctaaccagcagaggatctctgttgtttggaacgacgatagctcctccaccttgacaatctataacgctaatattgatgacgccggaatttacaagtgtgttgtgaccggcgaggatgggagcgaaagcgaagccaccgtgaacgtgaaaattttccagaagctcatgttcaagaacgctcccacaccacaggagttcagggaaggcgaagacgctgtgatcgtgtgcgatgtggtgagctcgctgcccccaactatcatctggaagcacaaagggcgcgatgtcatactgaaaaaagatgtcaggtttattgtcttaagtaataattatctgcagattcgagggatcaaaaagactgacgagggtacatatagatgcgagggacggatcttagccagaggcgaaatcaactttaaggacatccaggtaatagttaacgtcccgcctacaatccaggctcgccagaacatcgtgaatgccacagctaatttggggcagagtgtcaccttagtctgcgacgccgagggatttccggagcccactatgtcctggaccaaagacggggaacagatcgagcaagaagaagatgacgagaaatacattttctcagatgacagcagccagctgaccattaagaaagtcgataaaaatgacgaggctgagtatatctgtatcgccgagaacaaggccggggagcaggatgcgacaattcacctgaaagtgtttgccaagccaaaaattacttatgtggagaaccagacagcgatggaactggaagagcaagtgacgctgacatgcgaagcatctggagacccaatcccttcaattacatggcgcacttctactaggaacataagttcagaagagaaggcttcctggactcgacccgaaaaacaggagacactcgacgggcatatggtggtgcgctctcacgcacgagtgtctagtctgaccctaaagtctatacagtatacagacgccggggaatacatctgtacagcatctaacacaatcggtcaggattcccagagtatgtacctagaagttcagtacgcaccgaagctccaaggacccgtggcagtgtatacttgggagggtaaccaggtgaacattacgtgtgaagttttcgcataccctagtgccaccatatcctggtttagagacggccagctcctccccagtagcaattactctaacattaagatctacaataccccatccgctagctaccttgaagtcacaccagacagcgagaacgatttcggcaactacaactgcacagccgttaatagaattggacaagaatccctggaattcatcttggtacaagccgacactccatccagcccttcaattgatcaggtcgaaccgtattccagtaccgctcaggtgcagtttgatgagcccgaggcgaccgggggcgtgcccattctcaaatacaaagcagagtggagggcggtgggagaagaggtgtggcactcaaaatggtacgacgcgaaggaggcctccatggagggcatcgtaactattgtgggactgaagccagaaaccacctatgcagtcaggctggccgccctgaatggtaagggcctgggcgagattagcgcggcaagcgagtttaagacacaacccgtccagggtgagccctctgctcctaagcttgaggggcagatgggagaggatggaaactccattaaggtcaacctcataaaacaagatgacggcggatctccgatacgccactatctggtcagatatagggccctgagcagcgaatggaagcctgagattcggctaccaagcgggtctgaccacgtcatgctcaagtctctcgattggaacgcagagtatgaggtgtatgtcgttgccgagaaccagcagggtaaaagcaaggcagcacattttgtgtttagaacctctgcgcaacccaccgctatccccgcgaacggtagtccgacctcaggcttgtcaactggagcaattgtggggattctgatcgtgatcttcgtgctcctcctagtggtcgtagatattacctgttattttctgaataagtgcggtctgtttatgtgcattgctgtgaatttgtgtggcaaggccggccctggcgccaaaggtaaggatatggaagaagggaaggctgccttcagtaaggacgagtccaaggagccaattgtggaagtgagaactgaggaagagcgcacacccaatcatgatggcggaaagcatacagagcccaatgagaccacaccacttacagaacccgaaaaggggcctgtcgaggctaagcctgagtgtcaggaaactgaaaccaagcccgctcccgccgaagtgaaaaccgtcccgaacgacgctacgcagactaaggagaatgaaagtaaagcatag

SEQ ID NO: 254752 - DNA, 2577 bp, Artificial Sequence
  derived and/or modified sequence
atgctgcagaccaaggacctgatctggaccctcttcttcctgggcacagctgtgtccctgcaggtggacatcgtgcccagccagggcgagatctctgtgggggagagcaagttcttcctgtgccaggtggccggagatgccaaggacaaggacatctcctggttcagccccaacggggagaagctgacccccaaccagcagaggatctctgtggtgtggaatgatgacagcagcagcaccctgaccatctacaatgccaacattgatgatgctggcatctacaagtgtgtggtgactggagaagatggcagcgagagcgaggccaccgtgaatgtgaagatcttccagaagctgatgttcaagaatgcccccaccccccaggagttccgggagggagaagatgctgtgattgtgtgtgatgtggtgagcagcctgccccccaccatcatctggaagcacaagggcagagatgtgatcctgaagaaggatgtgcgcttcatcgtgctgagcaacaactacctgcagatccggggcatcaagaagacagatgagggcacctaccgctgtgagggccgcatcctggcccggggggagatcaacttcaaggacatccaggtgattgtgaatgtgccccccaccatccaggcccggcagaacatcgtgaatgccacagccaacctgggccagagcgtgaccctggtgtgtgatgctgagggcttccctgagcccaccatgtcctggaccaaggatggagagcagatcgagcaggaggaggatgatgagaagtacatcttcagtgatgacagcagccagctgaccatcaagaaggtggacaagaatgatgaagctgagtacatctgcatcgccgagaacaaggccggggagcaggatgccaccatccacctgaaggtgtttgccaagcccaagatcacctacgtggagaaccagacagccatggagctggaggagcaggtgaccctgacctgtgaggccagcggggaccccatccccagcatcacctggaggaccagcaccaggaacatcagcagcgaggagaaggcctcctggaccaggcctgagaagcaggagaccctggatggccacatggtggtgcgcagccacgcccgggtgagcagcctgaccctgaagagcatccagtacacagatgctggggagtacatctgcacagccagcaacaccatcggccaggacagccagagcatgtacctggaggtgcagtatgcccccaagctgcagggccctgtggccgtgtacacctgggagggcaaccaggtgaacatcacctgtgaggtgtttgcctaccccagcgccaccatctcctggttcagagatggccagctgctgcccagcagcaactacagcaacatcaagatctacaacacccccagcgccagctacctggaggtgaccccagacagtgaaaatgactttggaaactacaactgcacagctgtgaacagaattggccaggagagcctggagttcatcctggtgcaggccgacacccccagcagccccagcattgaccaggtggagccctacagcagcacagcccaggtgcagtttgatgagcctgaggccactggaggagtgcccatcctgaagtacaaggccgagtggagggctgtgggggaggaggtgtggcacagcaagtggtatgatgccaaggaggcctccatggagggcatcgtgaccatcgtgggcctgaagccagagaccacctatgctgtgcggctggccgccctgaatggcaagggcctgggggagatctctgctgccagcgagttcaagacccagcctgtgcagggcgagcccagcgcccccaagctggagggccagatgggagaagatggcaacagcatcaaggtgaacctgatcaagcaggatgatggcggcagccccatccgccactacctggtgcgctaccgggccctgagcagcgagtggaagccagagatccggctgcccagcggcagtgaccacgtgatgctgaagagcctggactggaatgcagaatatgaggtgtatgtggtggccgagaaccagcagggcaagagcaaggccgcccactttgtgttccgcaccagcgcccagcccacagccatcccagccaacggcagccccaccagcggcctgagcactggagccatcgtgggcatcctgattgtcatctttgtgctgctgctggtggtggtggacatcacctgctacttcctgaacaagtgtggcctcttcatgtgcatcgctgtgaacctgtgtgggaaggccggccctggggccaagggcaaggacatggaggagggcaaggccgccttcagcaaggatgagagcaaggagcccatcgtggaggtgaggacagaggaggagaggacccccaaccatgatggcggcaagcacacagagcccaatgagaccacccccctgacagagcctgagaagggccctgtggaggccaagccagagtgccaggagacagagaccaagccagccccagctgaggtgaagacagtgcccaatgatgccacccagaccaaggaaaatgaaagcaaggcctag

SEQ ID NO: 254753 - DNA, 2577 bp, Artificial Sequence
  derived and/or modified sequence
atgctgcagaccaaggacctgatctggaccctgttcttcctgggcactgctgtgtcgctgcaggttgatatcgtcccctctcagggcgagatttctgttggcgagagcaagttttttttgtgtcaggtggctggggacgccaaggataaggacatatcctggttctctcctaatggcgagaagttgaccccaaaccagcagagaatcagcgtagtctggaacgacgactccagtagcactttgacgatatacaacgccaatatcgatgacgcggggatctacaagtgtgtggtgacgggggaagacgggtctgagagcgaggctaccgtgaacgtcaaaatatttcaaaagctaatgttcaagaacgctcccacccctcaggagtttcgcgaaggcgaggacgccgttatcgtctgtgatgtcgtctcgtccctgccccctactattatctggaagcacaaaggcagagacgtcatcctcaaaaaagacgtgcggttcatcgttttgtcaaataattacttgcaaattcgggggataaagaagactgatgagggaacctatcggtgcgaaggccggatccttgcacggggagagatcaattttaaagacattcaagtgatagtcaacgtcccacctacaattcaggctagacagaacatcgtcaatgcgaccgcaaacctgggccagagtgtaacactggtctgcgatgccgaaggctttcctgagccgaccatgtcatggactaaagatggggaacagatagagcaggaggaggacgacgaaaaatatatcttctccgacgacagcagccagctaactataaagaaggtggacaagaacgatgaggctgagtatatttgcatcgcggagaacaaagcaggcgagcaggacgccaccattcacttaaaagtctttgcgaagccaaagataacctacgtggagaaccagaccgctatggaactcgaggagcaggtcacccttacatgtgaggcttcaggcgatcctattcccagcataacctggaggaccagcacgaggaacatctcttctgaggagaaggctagctggacaaggccagaaaaacaagagactctcgatggtcatatggtggtgcgcagtcacgcccgagtgagttcgcttacccttaaaagcattcaatataccgacgcaggggaatacatatgcaccgctagcaacaccatcggccaggatagtcagtctatgtatctagaggtgcaatatgcaccaaaattacagggcccagtagccgtgtacacttgggaaggaaatcaggtcaatatcacgtgcgaggtcttcgcctacccttctgctaccatctcatggttccgggacggccagcttctgcccagctcgaattattctaatatcaagatctataatactcccagtgcaagctacctggaagtgaccccagattccgagaacgattttggtaactataactgcactgccgtcaatcggatcggacaagaatcactggaatttatcctagtccaggccgataccccctccagcccgagcatagaccaggtggagccctacagcagcacggcacaggtgcagttcgatgagcctgaagccacagggggggttccgattttaaagtacaaggccgagtggcgcgcagttggagaggaggtatggcattcaaagtggtatgacgcaaaggaagcatccatggaaggcatcgtcaccatcgtcggacttaagccggagacaacttacgctgttaggctggccgctctaaacgggaagggactaggggagatctccgctgctagtgagttcaagacacagcccgtgcagggggaacccagcgcccccaaactggaaggccaaatgggcgaggatggaaatagtatcaaggtcaacctgattaagcaggacgacggcggttcacccatcaggcattacttggtgaggtaccgggcgctaagtagcgagtggaagcctgagattcgactgccaagcggcagcgaccacgtgatgctcaagagcctcgactggaatgccgagtatgaagtgtacgtggtggcagaaaatcaacagggcaagagtaaggcagcacacttcgtgttccggacctctgctcaaccaaccgctattcccgccaatggcagtccaaccagcggcctaagtactggggcgatcgtgggcatactgattgtgatatttgttttattactagtggtcgtcgacatcacatgttacttccttaataagtgcggcctgtttatgtgcatcgccgtgaacctttgcgggaaggcaggcccaggagcaaagggaaaagacatggaggagggcaaggccgccttttctaaggatgagtcaaaggagcctatcgtcgaagtccgcacagaagaagaacgcacacccaatcatgacggcgggaagcatacggaacctaatgaaacaacgcccttgactgagcccgagaagggaccagtggaagcaaagcctgaatgccaggagacggagacaaagcccgctccagctgaggtgaaaacagtgcctaatgatgccacacagacgaaagagaacgaaagcaaagcctag

SEQ ID NO: 254754 - DNA, 5837 bp, Artificial Sequence
  derived and/or modified sequence
gctgaggctgggactgtcactcattctccgatcagcgcgtgaacgcagctcggctgccgctggcaggaaacaattctgcaaaaataatcatactcagcctggcaattgtctgcccctaggtctgtcgctcagccgccgtccacactcgctgcaggggggggggcacagaatttaccgcggcaagaacatccctcccagccagcagattacaatgctgcaaactaaggatctcatctggactttgtttttcctgggaactgcagtttctctgcaggtggatattgttcccagccagggggagatcagcgttggagagtccaaattcttcttatgccaagtggcaggagatgccaaagataaagacatctcctggttctcccccaatggagaaaagctcaccccaaaccagcagcggatctcagtggtgtggaatgatgattcctcctccaccctcaccatctataacgccaacatcgacgacgccggcatttacaagtgtgtggttacaggcgaggatggcagtgagtcagaggccaccgtcaacgtgaagatctttcagaagctcatgttcaagaatgcgccaaccccacaggagttccgggagggggaagatgccgtgattgtgtgtgatgtggtcagctccctcccaccaaccatcatctggaaacacaaaggccgagatgtcatcctgaaaaaagatgtccgattcatagtcctgtccaacaactacctgcagatccggggcatcaagaaaacagatgagggcacttatcgctgtgagggcagaatcctggcacggggggagatcaacttcaaggacattcaggtcattgtgaatgtgccacctaccatccaggccaggcagaatattgtgaatgccaccgccaacctcggccagtccgtcaccctggtgtgcgatgccgaaggcttcccagagcccaccatgagctggacaaaggatggggaacagatagagcaagaggaagacgatgagaagtacatcttcagcgacgatagttcccagctgaccatcaaaaaggtggataagaacgacgaggctgagtacatctgcattgctgagaacaaggctggcgagcaggatgcgaccatccacctcaaagtctttgcaaaacccaaaatcacatatgtagagaaccagactgccatggaattagaggagcaggtcactcttacctgtgaagcctccggagaccccattccctccatcacctggaggacttctacccggaacatcagcagcgaagaaaaggcttcgtggactcgaccagagaagcaagagactctggatgggcacatggtggtgcgtagccatgcccgtgtgtcgtcgctgaccctgaagagcatccagtacactgatgccggagagtacatctgcaccgccagcaacaccatcggccaggactcccagtccatgtaccttgaagtgcaatatgccccaaagctacagggccctgtggctgtgtacacttgggaggggaaccaggtgaacatcacctgcgaggtatttgcctatcccagtgccacgatctcatggtttcgggatggccagctgctgccaagctccaattacagcaatatcaagatctacaacaccccctctgccagctatctggaggtgaccccagactctgagaatgattttgggaactacaactgtactgcagtgaaccgcattgggcaggagtccttggaattcatccttgttcaagcagacaccccctcttcaccatccatcgaccaggtggagccatactccagcacagcccaggtgcagtttgatgaaccagaggccacaggtggggtgcccatcctcaaatacaaagctgagtggagagcagttggtgaagaagtatggcattccaagtggtatgatgccaaggaagccagcatggagggcatcgtcaccatcgtgggcctgaagcccgaaacaacgtacgccgtaaggctggcggcgctcaatggcaaagggctgggtgagatcagcgcggcctccgagttcaagacgcagccagtccaaggggaacccagtgcacctaagctcgaagggcagatgggagaggatggaaactctattaaagtgaacctgatcaagcaggatgacggcggctcccccatcagacactatctggtcaggtaccgagcgctctcctccgagtggaaaccagagatcaggctcccgtctggcagtgaccacgtcatgctgaagtccctggactggaatgctgagtatgaggtctacgtggtggctgagaaccagcaaggaaaatccaaggcggctcattttgtgttcaggacctcggcccagcccacagccatcccagccaacggcagccccacctcaggcctgagcaccggggccatcgtgggcatcctcatcgtcatcttcgtcctgctcctggtggttgtggacatcacctgctacttcctgaacaagtgtggcctgttcatgtgcattgcggtcaacctgtgtggaaaagccgggcccggggccaagggcaaggacatggaggagggcaaggccgccttctcgaaagatgagtccaaggagcccatcgtggaggttcgaacggaggaggagaggaccccaaaccatgatggagggaaacacacagagcccaacgagaccacgccactgacggagcccgagaagggccccgtagaagcaaagccagagtgccaggagacagaaacgaagccagcgccagccgaagtcaagacggtccccaatgacgccacacagacaaaggagaacgagagcaaagcatgatgggtgaagagaaccgagcaaagatcaaaataaaaagtgacacagcagcttcaccagagcatttccaacaccacagacacacacacgcacgcacacacacaaacacacatgcacacacacacatctcatttctctagtgtcttttgcctttaaaaaaaactaaacagataaaacatgggaatctcctttttgtaggtttatagaaagggtccctttgttgcacactcacttgtaagaaaatgagacaaaaaggttaaacccacagccaaactaggacactccgttccctgaaaccgttaaaaaatcaaacaaaaggaccccaaattaagaatctaggaagctcagaaacgaaatctaggttcaggaagaccacacttggtgttacccgattggcacagaccagtttcagagaaatactttcaggcactaagactaatcgaatgaacaaagtccacagtttatttttatactttcagtcaagtttgaactctgtaaaacctcataaataagttataatttctgttcactttgtatttgttcagtatgcaaagtgtgtcaccctttctagctgaattcaattcccacgtagactcttattttataggacgaatgccaaattgcagcttctgggggtagatctcaatttgcagtattcagacttctttttctttcttttacattcttttttctttctttctttctgccaactttgttttccagtgtttacaaggtgacaaatgtttgactttggttgtgtttaaatgtccgtgtaaaatagctgccttttattttttaaggtaacaaataccacctagaggtaggtaggatcatcccacgcttgctttagcacaggacaactttacaaaacatgattgtttacagctgctcttcccctcttttctgatctgcagtttttgcctgggtcccactcaggtgaaaatccatctcattctggaatggttttgcttttgaatttttggttatttttgtgtttctttgggggttagaccactttctgattagccgccacctgcctgcatctgtgaaaagggatctgctcccaggcgttctcacccttcttttgaaggactccttaggctttgttgaatgaagcagagaagattgtatagttggggctggtcttggtgaacacacattattaccccacacatcccctttgtgtagaaagccaaataaaatctatacataccatttccttttgagcccagaatctagatttgagcggaagagcatgtgtgcttcagggaattagtgtctttttttggaaatctgttgaagtaaagtaacatcggccttctgttcacttaggcagcatttatagaaacaaaagaagaaagaaacaacctactgtctggagtcataacacaactttcctggattggaaaccaagtgggggaaaaaatacagaaactttaagggggatgggaggggggggagaagggaaaagccagccctttgtatagaaattttgcttttttttccctcattctactttagaactgcaagcttgtgcactgtggatgcgtgaatattttagtgtgaaacgtgtttttgtcatagtattgaaataaaacttcaacatagtttggttgtggaaggtatagcagatagttcagaaaaaatattcaggaaacaaaaatcactcaaacggaatcgaagccttttaacaaagaaaatgaaatacagatgatgatgatgatgatgaagatgatgctaagtaaacagaaatcagtactccgcatgcgctcctctcctaaggtacaaagcagcaagaggttagggtggcaaggctgcctctgggtccattctgtgggccactctccccaacgttctgacacttctgcagtctgatcagtggcgatgctagattataatttcaaactgtgaagaataatggtcttgtcatttgctcaatgtggggttatgttgcattttctcagctcctggggatggaaatggaggatcccagaacacacagccctggcccctttgattctagggcctgcacagatctctggttcaaatgcacaggccctcagaatagaggaacatgaagagagatcttagagcacacagtagaatgtgagagcctgggtgtctgagaccgggagggcccagcagtgaggggcaggctcttctggtcaccaggctgttcagtggactcagttcttcatcttgtaatgtcgatggctttgccacaccaggccaagcccatgccataccttgtcaagactgtcaaagtggttgtggttaggtcaaactggttttggttctgatggttaggaagaaacaggtcagccctcagatcacctggcccgggacagctgaccccctagaaccctggctctgccattagctaggacctaagactctgcccacattttggtctgttctctcccattacacataggtttgtctcagcatgcaagagtttttcctttaaaaaaaaaaaaaaaaaaaaaaaaaaagcaatgctttctctaaaatcaaagagggagtcattttattccaagatgttttatcttttatgttaagagatcaaagcttataattttcttttttaatttttgaaggagggatcaactccagtttccaatgtctatgtgtctatgtgtgtatgtgccatacatatgtattcacatgaagaccggcatggccaagttctgctggaggagcactcaagtgtgacgagcagggccactggaccctgcagggctgtggtgtatatagtgcagctttggaggtggaactctattttcacacttttctatggagccttccgagtcccaggttttcacttgaggctgtctgtctggatggcggttttcagacctccattaacatccctacccagcattctgtacttcgggggccttctctcttgttataaaactttttaccaagtgaaacatcgataccacctttgtttccattctcactggtgtaaatactgagtactaactgagaattttgactttgcattctgtcggaatacttgtgttcaataaaaattgaaagaaaaaagcta

SEQ ID NO: 254755 - DNA, 2577 bp, Artificial Sequence
  derived and/or modified sequence
atgctccaaacaaaggacttaatctggaccctgtttttccttggaacggccgtgagcctgcaggtggatattgtcccaagtcagggggagattagcgttggtgagagcaagttcttcttatgtcaggtggcaggagacgctaaagataaggatatctcatggttttcacctaatggcgaaaagctcactccaaaccaacaacggatcagcgtagtttggaacgatgactccagctccacccttacgatttacaacgccaacattgatgatgccggtatatataagtgtgtagtgaccggcgaggatggatctgaaagtgaagctacagtcaacgtgaaaatattccagaaacttatgttcaaaaatgcgcctaccccgcaagaattcagggaaggcgaggatgcagtgatcgtgtgcgatgtggtgagcagccttccacctaccatcatttggaagcataaagggagagatgttattttgaaaaaagacgtcaggttcatcgtgctttcgaataattatctgcagatccggggtattaagaaaaccgacgagggtacctatcgctgcgagggtcgcatattagccagaggcgaaatcaatttcaaagacattcaggttatagtgaatgtgcctcccaccatccaggctagacaaaacattgttaatgccactgccaatctcgggcagtcagtgacgttggtatgtgatgctgagggctttccagagcccacaatgtcatggacaaaagacggcgaacagattgagcaggaggaagacgacgaaaagtacattttcagtgacgatagcagtcagcttaccattaaaaaggttgacaaaaacgatgaggctgagtatatctgcatagctgagaacaaagccggtgagcaggacgccacaatacatctgaaggtgttcgcaaaacctaagataacatatgtcgagaatcagactgccatggaactcgaggagcaggtaaccttgacatgcgaagccagcggtgatccaattccaagtatcacttggaggacttccacccgcaatatatccagcgaggagaaggcttcttggacgcgaccggagaagcaagagaccttagacggacatatggtggtgcggtcccatgcacgcgtcagctcgctgactctgaaaagtattcaatacaccgacgctggggaatatatttgcacggcctccaatacaattggccaggatagtcaatctatgtaccttgaagtccagtacgcacccaagttgcagggtcctgtcgccgtgtatacttgggaagggaatcaggtgaatatcacctgtgaagtgtttgcctacccttcagccaccattagctggttccgtgacggacagctgttaccaagctccaactactcaaacattaagatttacaataccccatccgcctcttatctggaggtcactcccgactccgaaaacgatttcgggaactataattgtacagccgtcaatcgaattggacaagaatctctcgagtttatcttagttcaagccgacactcctagttccccaagcatcgatcaagtggaaccttattcttcaactgcacaggtccaattcgatgagccagaggccactgggggagtccccattttaaagtataaagccgagtggcgtgctgtcggcgaggaagtttggcactcaaaatggtatgatgccaaggaggcctccatggaagggatcgtgactattgtggggctgaaaccggagactacatacgccgtgaggctggccgcactgaatggcaaaggtcttggagagatctctgcagcatccgaatttaaaacacagccagtgcagggggaaccgagtgcacccaagctggaaggacagatgggcgaagacgggaattcaatcaaggtcaacctcattaagcaagacgacggcggatctcctatacgtcactacctagtgcggtatagagctctgtccagtgaatggaagcccgagataaggctgccaagtgggagtgaccatgtgatgctaaagtctctggattggaatgccgagtacgaggtgtacgtcgtggccgaaaaccagcagggaaagagtaaagcggctcactttgtgttcaggaccagtgctcaaccaaccgccatccccgcaaatggatcccccaccagtggtctatctactggagccatcgttgggattttaatcgttatctttgtgcttctgctggtggtggtagacattacgtgctactttttaaataagtgcgggcttttcatgtgcattgcagtgaatttatgtgggaaggctggccctggcgctaagggaaaggacatggaggaaggaaaggctgccttctctaaagacgagtctaaagagcctatcgtcgaagtacgaaccgaggaggagagaaccccaaaccacgacggcggtaagcatactgagccaaatgaaaccacacccctgaccgaaccagagaaagggcctgtggaggccaagcctgagtgccaagaaactgaaaccaagcccgctccagctgaagtgaaaacggtccctaatgacgccactcagaccaaggaaaatgagtccaaagcgtag

SEQ ID NO: 254756 - protein, 1278 aa, Artificial Sequence
  derived and/or modified sequence
MHQDQRFRMDSLEEPQKKVFKARKTMRVSDRQQLEAVYKVKEELLKTDVKLLNGNHENGDLDPTSPLENMDYIKDKEEVNGIEEICFDPEGSKAEWKETPCILSVNVKNKQDDDLNCEPLSPHNITPEPVSKLPAEPVSGDPAPGDLDAGDPASGVLASGDSTSGDPTSSEPSSSDAASGDATSGDAPSGDVSPGDATSGDATADDLSSGDPTSSDPIPGEPVPVEPISGDCAADDIASSEITSVDLASGAPASTDPASDDLASGDLSSSELASDDLATGELASDELTSESTFDRTFEPKSVPVCEPVPEIDNIEPSSNKDDDFLEKNGADEKLEQIQSKDSLDEKNKADNNIDANEETLETDDTTICSDRPPENEKKVEEDIITELALGEDAISSSMEIDQGEKNEDETSADLVETINENVIEDNKSENILENTDSMETDEIIPILEKLAPSEDELTCFSKTSLLPIDETNPDLEEKMESSFGSPSKQESSESLPKEAFLVLSDEEDISGEKDESEVISQNETCSPAEVESNEKDNKPEEEEQVIHEDDERPSEKNEFSRRKRSKSEDMDNVQSKRRRYMEEEYEAEFQVKITAKGDINQKLQKVIQWLLEEKLCALQCAVFDKTLAELKTRVEKIECNKRHKTVLTELQAKIARLTKRFEAAKEDLKKRHEHPPNPPVSPGKTVNDVNSNNNMSYRNAGTVRQMLESKRNVSESAPPSFQTPVNTVSSTNLVTPPAVVSSQPKLQTPVTSGSLTATSVLPAPNTATVVATTQVPSGNPQPTISLQPLPVILHVPVAVSSQPQLLQSHPGTLVTNQPSGNVEFISVQSPPTVSGLTKNPVSLPSLPNPTKPNNVPSVPSPSIQRNPTASAAPLGTTLAVQAVPTAHSIVQATRTSLPTVGPSGLYSPSTNRGPIQMKIPISAFSTSSAAEQNSNTTPRIENQTNKTIDASVSKKAADSTSQCGKATGSDSSGVIDLTMDDEESGASQDPKKLNHTPVSTMSSSQPVSRPLQPIQPAPPLQPSGVPTSGPSQTTIHLLPTAPTTVNVTHRPVTQVTTRLPVPRAPANHQVVYTTLPAPPAQAPLRGTVMQAPAVRQVNPQNSVTVRVPQTTTYVVNNGLTLGSTGPQLTVHHRPPQVHTEPPRPVHPAPLPEAPQPQRLPPEAASTSLPQKPHLKLARVQSQNGIVLSWSVLEVDRSCATVDSYHLYAYHEEPSATVPSQWKKIGEVKALPLPMACTLTQFVSGSKYYFAVRAKDIYGRFGPFCDPQSTDVISSTQSS

SEQ ID NO: 254757 - DNA, 99 bp, Artificial Sequence
  derived and/or modified sequence
atggacagtctcgaggaacctcaaaagaaggtcttcaaagccaggaagacaatgagggtcagcgaccgccagcaactggaggcagtctataaggtgtag

SEQ ID NO: 254758 - DNA, 3837 bp, Artificial Sequence
  derived and/or modified sequence
atgcatcaggaccagagattcaggatggacagcttagaagagccgcagaagaaagtttttaaggccagaaaaactatgagggtatctgaccgacagcagctggaagctgtgtacaaagttaaggaggaactgcttaaaactgacgtcaagttgctgaacggaaaccacgagaacggagatctcgatcccacctctccactcgagaacatggattatatcaaggataaagaagaggtgaatggtatcgaagagatttgtttcgatcctgagggctcaaaagcggagtggaaagagacaccatgcattctttcagtgaacgtgaagaacaagcaggatgacgacctaaattgcgagcccctgagtccacataacattactccggaacccgtatctaagctccccgctgagcccgtgtcaggagatcctgcaccaggagatctagatgctggagatcccgcttccggagtcctggcttctggtgatagcacctcaggcgatccgaccagctccgaaccgtcaagctctgatgcagcttcaggtgatgccacgtccggggatgcgccttcgggagatgttagccccggggacgctaccagcggcgacgccaccgcagatgatttgtcatctggcgatcctacatcctctgatcccattccaggggaacccgtgcccgtcgagccaatctcaggggattgtgccgcagacgatatcgccagttccgagattacatcagtcgacctcgccagtggggcgcctgcctccacagaccctgcctctgatgacctcgcctccggcgatttaagctcctcggagctggccagtgatgacctggcaacaggcgagttagcatccgatgagctcaccagcgaaagtaccttcgatagaacattcgaaccaaagtctgtgcctgtttgcgagccggtgcctgagatcgataatatagagcctagttctaacaaggatgacgatttcttggaaaagaatggcgcggacgagaaactggagcagattcaatccaaggattccctcgacgagaaaaataaggccgacaacaatattgatgctaacgaggagactttggagaccgatgatacgacaatttgctccgatcggcctcctgagaatgaaaagaaggtggaagaggacattattactgagttagcccttggcgaagacgccataagctcctccatggaaattgaccagggagaaaaaaatgaggacgagacctctgccgacttagtggaaacaattaacgagaacgtaatcgaggacaataagagcgagaacatcctggagaacactgacagcatggagacagacgaaattataccaatcctggaaaaacttgcaccatccgaagatgagttgacatgtttttctaaaaccagtcttctgcctattgacgaaacaaatccagatctggaggagaaaatggagtcatcctttggtagcccatcgaagcaggaaagctcagagagcctacctaaggaggctttcctggtgttgtcagatgaggaggacatctcaggcgaaaaggatgaaagtgaggtgatatctcagaacgagacctgctcccctgctgaagttgaatccaacgagaaagacaataagcccgaagaggaggagcaagtcatccatgaagacgatgagcggcctagcgaaaaaaatgagttttcacgaagaaaacgctctaaaagtgaggacatggacaacgttcaaagcaaaagacgccggtacatggaggaagagtatgaagcggaatttcaggtcaagataactgctaagggcgatattaatcaaaagctgcaaaaagtgatacagtggcttctggaagaaaagctgtgcgcccttcagtgtgctgtctttgataagaccctggccgagttgaagacccgcgtggaaaagattgaatgtaacaagaggcacaagacagtgctgaccgagctgcaggcaaaaattgcccgcttgacaaagagatttgaggcggccaaagaagaccttaagaaacgccacgaacatccaccaaacccaccggttagtcccgggaagaccgtgaacgacgtgaacagtaacaacaatatgtcttaccgcaatgccgggacggtccgccaaatgcttgagtctaaacgtaatgtgagtgaatcagcccctccctctttccagacgcccgtgaataccgtctcgtccaccaaccttgtaacaccccccgcagttgtgagctcccaaccaaagctgcagaccccagtgacaagtggctccctcacagcgacgtccgtgctccccgcacccaacacggccacggtagtagcaacaactcaggtccccagtggaaatcctcagccaacaataagtctccagccgctgcccgtgatcctccatgttccggtagcggtctcaagccagccccagctgctgcagagccacccagggactctggtaacaaatcagccttctgggaacgtggagttcatctccgtgcaatcaccacctactgtgtcagggctgactaagaaccctgtgagcctcccgagtttgccgaacccaacgaagccaaacaacgtgccgagcgttcccagcccctccattcagcgcaaccctactgcatccgcagccccgctgggaacaactctggcagtgcaggcagtgccaaccgctcactccatcgtacaagccaccagaacaagcctcccgaccgtgggacccagtgggctttatagtccctccactaatagaggccccatccagatgaagattccaatcagtgcattcagtacttccagtgccgcggagcagaattcaaacacaacgccaaggattgaaaaccagacgaataagaccatcgatgcttctgtaagcaagaaggcggctgattcaacatcccagtgtggcaaggccacgggcagcgactcttccggtgtcatagacttaaccatggacgatgaggagagtggcgcctctcaggatcccaagaagttaaatcacaccccggtgtccaccatgtcctcttcccagccagtctcacggcctcttcagccaatacagcctgccccaccgttgcaaccgagcggcgtgcctacatccggaccatcccaaacaactattcatctccttcctactgccccgactaccgtaaacgtgacgcaccggcctgtcacccaggtgactacccggcttccagtaccgcgtgcccccgccaaccaccaagtcgtgtatacaaccctgccagctcctcctgcacaggcgcctctgcgggggactgttatgcaggccccagccgtcagacaggtgaatccgcagaattcagtcacagtcagagttccccagacaaccacctacgttgtcaataacggacttacattggggagcaccggcccccagcttactgtgcatcacagacctccacaggtccacaccgaacctccccgccctgtccatcccgcaccgctgccggaagccccccaaccgcagagactccctcctgaggctgcctctacttccctcccccagaagccccacctcaaattggctcgtgtgcagagccaaaatgggattgtgctgtcttggtcagtgctcgaggttgataggtcctgtgccaccgttgactcctatcacctctacgcttatcacgaagagccgtcagcaacggtaccttctcagtggaaaaagattggggaagtcaaagcactaccgctccccatggcgtgtacactgactcagtttgtctctggcagcaagtactacttcgctgtgagggcaaaggatatctatgggaggttcggccctttttgtgaccctcagtccaccgacgtgatttctagcacacagtccagttag

SEQ ID NO: 254759 - DNA, 99 bp, Artificial Sequence
  derived and/or modified sequence
atggacagcctggaggagccccagaagaaggtgttcaaggccaggaagaccatgagggtgtctgaccggcagcagctggaggccgtgtacaaggtgtag

SEQ ID NO: 254760 - DNA, 3837 bp, Artificial Sequence
  derived and/or modified sequence
atgcaccaggaccagcgcttcaggatggacagcctggaggagccccagaagaaggtgttcaaggccaggaagaccatgagggtgtctgaccggcagcagctggaggccgtgtacaaggtgaaggaggagctgctgaagacagatgtgaagctgctgaatggaaatcatgaaaatggagacctggaccccaccagccccctggagaacatggactacatcaaggacaaggaggaggtgaatggcatcgaggagatctgctttgatcctgagggcagcaaggccgagtggaaggagaccccctgcatcctgtctgtgaatgtgaagaacaagcaggatgatgacctgaactgtgagcccctgagcccccacaacatcaccccagagcctgtgtccaagctgcctgctgagcctgtgtctggggaccctgcccctggggacctggatgctggggaccctgccagcggcgtgctggccagcggggacagcaccagcggggaccccaccagcagcgagcccagcagcagtgatgctgccagcggagatgccaccagcggagatgcccccagcggagatgtgtccccaggagatgccaccagcggagatgccacagcagatgacctgagcagcggggaccccaccagcagtgaccccatccctggagagcctgtgcctgtggagcccatcagcggggactgtgccgcagatgacatcgccagcagcgagatcacctctgtggacctggccagcggggccccagccagcacagatcctgccagtgatgacctggccagcggggacctgagcagcagcgagctggccagtgatgacctggccactggagagctggccagtgatgagctgaccagcgagagcacctttgacaggacctttgagcccaagtctgtgcctgtgtgtgagcctgtgcctgagattgacaacatcgagcccagcagcaacaaggatgatgacttcctggagaagaatggagcagatgagaagctggagcagatccagagcaaggacagcctggatgagaagaacaaggctgacaacaacattgatgccaatgaggagaccctggagacagatgacaccaccatctgcagcgaccggcccccagaaaatgagaagaaggtggaggaggacatcatcacagagctggccctgggagaagatgccatcagcagctccatggagattgaccagggcgagaagaatgaagatgagaccagcgctgacctggtggagaccatcaatgaaaatgtgattgaggacaacaagtctgagaacatcctggagaacacagacagcatggagacagatgagatcatccccatcctggagaagctggcccccagtgaagatgagctgacctgcttcagcaagaccagcctgctgcccattgatgagaccaacccagacctggaggagaagatggagagcagctttggcagccccagcaagcaggagagcagcgagagcctgcccaaggaggccttcctggtgctgagtgatgaggaggacatcagcggggagaaggatgagagcgaggtgatcagccagaatgagacctgcagccctgctgaggtggagagcaatgagaaggacaacaagccagaggaggaggagcaggtgattcatgaagatgatgagcggcccagcgagaagaatgagttcagcaggaggaagaggagcaagtctgaggacatggacaacgtgcagagcaagagaagacgctacatggaggaggagtatgaagctgagttccaggtgaagatcacagccaagggggacatcaaccagaagctgcagaaggtgatccagtggctgctggaggagaagctgtgtgccctgcagtgtgctgtgtttgacaagaccctggccgagctgaagaccagggtggagaagattgagtgcaacaagaggcacaagacagtgctgacagagctgcaggccaagatcgcccggctgaccaagagatttgaagctgccaaggaggacctgaagaagagacatgagcacccccccaacccccctgtgtcccctgggaagacagtgaatgatgtgaacagcaacaacaacatgagctacagaaatgccggcaccgtgcggcagatgctggagagcaagagaaatgtgtctgagagcgccccacccagcttccagacccctgtgaacacagtgagcagcaccaacctggtgaccccacctgctgtggtgagcagccagcccaagctgcagacccctgtgaccagcggcagcctgacagccacctctgtgctgcctgcccccaacacagccaccgtggtggccaccacccaggtgcccagcggcaacccccagcccaccatcagcctgcagcccctgcccgtcatcctgcacgtgcctgtggccgtgagcagccagccccagctgctgcagagccaccctggcaccctggtgaccaaccagcccagcggaaatgtggagttcatctctgtgcagagcccccccaccgtgtctggcctgaccaagaaccctgtgtccctgcccagcctgcccaaccccaccaagcccaacaacgtgcccagcgtgcccagccccagcatccagaggaaccccacagccagcgctgcccccctgggcaccaccctggccgtgcaggccgtgcccacagcccacagcatcgtgcaggccaccaggaccagcctgcccaccgtgggccccagcggcctgtacagccccagcaccaacagaggccccatccagatgaagatccccatcagcgccttcagcaccagcagcgctgctgagcagaacagcaacaccaccccaagaattgagaaccagaccaacaagaccattgatgcctctgtgtccaagaaggctgctgacagcaccagccagtgtgggaaggccactggaagtgacagcagcggcgtgattgacctgaccatggatgatgaggagagcggggccagccaggaccccaagaagctgaaccacacccctgtgtccaccatgagcagcagccagcctgtgtcccggcccctgcagcccatccagcctgccccacccctgcagcccagcggcgtgcccaccagcggccccagccagaccaccatccacctgctgcccacagcccccaccaccgtgaatgtgacccacaggcctgtgacccaggtgaccacccggctgcctgtgccccgggccccagccaaccaccaggtggtgtacaccaccctgcctgcccccccagcccaggcccccctgcggggcaccgtgatgcaggccccagctgtgcggcaggtgaacccccagaacagcgtgacagtgcgggtgccccagaccaccacctacgtggtgaacaacggcctgaccctgggcagcacaggcccccagctgactgtgcaccaccggcccccccaggtgcacacagagccccccaggcctgtgcacccagcccccctgcctgaggccccccagccccagaggctgcccccagaggccgccagcaccagcctgccccagaagccccacctgaagctggcccgggtgcagagccagaatggaattgtgctgtcctggagcgtgctggaggtggacaggagctgtgccaccgtggacagctaccacctgtatgcctaccacgaggagcccagcgccaccgtgcccagccagtggaagaagatcggggaggtgaaggccctgcccctgcccatggcctgcaccctgacccagtttgtgtctggcagcaagtactactttgctgtgcgggccaaggacatctacggccgcttcggccccttctgtgacccccagagcacagatgtgatcagcagcacccagagcagctag

SEQ ID NO: 254761 - DNA, 99 bp, Artificial Sequence
  derived and/or modified sequence
atggacagcctggaggagccccagaagaaggtgttcaaggcccggaaaacaatgagagtaagtgataggcagcagctagaggctgtgtacaaggtgtag

SEQ ID NO: 254762 - DNA, 3837 bp, Artificial Sequence
  derived and/or modified sequence
atgcaccaggaccagcggttccggatggacagcctggaggagccccagaagaaggttttcaaagcccgtaagaccatgcgtgtgagtgatagacaacagctagaagccgtttataaggttaaagaagagcttcttaagactgatgtgaagctcctcaatgggaaccacgaaaacggagacctggatccaacgagccctttagagaatatggactatataaaagataaggaagaggtcaatggcatcgaagaaatatgcttcgaccccgagggttccaaggctgagtggaaagagacaccctgcatcctgtccgtgaacgtgaagaacaaacaggacgatgacctgaactgtgagcccttgtctccacataacattacccccgagcccgtgtcaaagctgccagcagagcctgtgtcaggagacccagctcctggggacctggacgcgggtgatccagcctcaggtgtgcttgcatcaggcgactctaccagtggcgacccaacttcatcagagcccagcagcagcgatgcggcgtctggtgacgcaacttcgggcgacgccccatccggtgacgtgagcccaggggacgcaacaagtggcgacgcaaccgcagacgatctcagttccggtgatcccacttcttctgatcccatccccggtgagccagttcccgtcgagccaattagtggtgactgtgcagccgacgatatcgcaagctctgaaatcacgagtgtagaccttgcttccggggctcccgcatccacagatcccgccagtgatgaccttgcatcaggggacttatcttcaagtgagttggcctctgatgatctagctacaggggagctagcatctgatgagctgacgagcgaatcaaccttcgatagaacttttgagcctaagtccgtgccagtttgtgaacctgtaccagaaatcgacaacatagagccttcttcaaataaagacgatgattttctcgagaaaaacggtgccgacgagaagcttgagcaaattcagtccaaagactcccttgacgagaagaacaaggctgataacaacatcgatgccaacgaggagaccctggagacagatgacacgaccatctgtagcgacagaccacccgagaacgagaaaaaggtcgaggaagatatcatcaccgagctggctctaggcgaggacgctatttcatcatctatggagatcgaccaaggggagaaaaacgaagacgaaacatctgccgacctagtggaaaccattaatgaaaacgtgattgaagataacaagagtgaaaacattctggagaatacagattccatggaaacggatgagattatccccatattagagaaactggccccttccgaagacgaactcacttgtttcagcaagaccagtttactgcctatagatgagacaaaccccgatctcgaggagaaaatggagtctagttttggctcccccagcaaacaagaatcatccgagagcctgcccaaggaggcattcctggttttaagtgacgaagaggacatctcgggcgagaaagacgagagtgaagtgatcagtcagaatgagacttgtagtcccgcggaggtggagtcgaatgaaaaggacaacaaaccagaagaggaggagcaggtgattcatgaagacgacgaacgtccatctgaaaaaaacgaatttagccggaggaagaggagcaagtcagaagatatggataatgtccagtcaaagcgccgcaggtacatggaagaagaatatgaggctgaattccaggtgaagatcactgccaaaggcgacatcaatcagaaactgcagaaagtgatacaatggttgcttgaggagaaactgtgcgcacttcagtgtgccgtctttgacaagactctcgcagaactgaaaactcgtgtggagaaaatagaatgcaataagagacataagactgtgttaaccgagctgcaggcaaaaatcgcccgtctcacaaagcgtttcgaggctgcaaaagaagacttgaagaaaagacatgagcatccccctaacccacctgtatccccagggaaaacagtgaacgacgttaatagtaataataatatgagctaccgtaatgctggaaccgtgcggcaaatgctcgaatctaaacgaaacgtgtcagagtcggccccaccatcatttcagacaccagtgaatacggtcagctctacaaatctcgttaccccccctgccgtcgtctcgtcacaacccaaactccagacccccgtcacctccggaagcctcaccgctacatctgtgctgccagcacccaacacagctaccgtcgtggccacgactcaggtcccaagtgggaatcctcagcccaccatctccctgcagccattgcccgtcatactccacgttcccgtcgccgtctccagtcagcctcagttactccagtcacacccaggtacacttgttacaaatcagccatccgggaacgtagagttcatctctgtgcagtcccctcccacagtgagcggcttgacaaaaaatcctgtgtccttaccgagcttgccaaaccccactaaacctaataatgtcccctccgttccctcaccctcgattcagcgcaatccaaccgcctctgccgcacctctcggcactaccctggctgtgcaagcggtccccaccgctcactccattgtccaggcaacacgcacatctttaccaacagtcggcccgtctggcctctatagtccgtctaccaatcgcgggcccatccagatgaagatccctatttcggcgttttcaacctcctctgccgccgaacaaaattctaataccaccccacgaatcgagaatcagaccaataagacaatcgacgcaagcgtgtccaagaaagctgctgactccactagccagtgcggcaaagcgactggttctgactccagcggtgttatcgatctcaccatggatgacgaggagagtggcgcttcgcaagatccaaagaagctgaatcacacccctgtgtcaacaatgagtagcagccagccagtgagccgcccacttcagcctatccagcccgctccacctctacaaccttccggagtcccaaccagtggaccctcgcagactacaatccatttactcccaaccgcacccacaaccgtgaatgtcactcatcggcccgtcacccaggtgacgacaagactgcctgtgcccagagctcctgccaaccatcaagtggtctacaccacactgcccgcccctcctgcacaagcccccctacgcggtaccgtcatgcaggcgcccgcggtgcgccaggtaaacccgcaaaactcagtgaccgttcgagtgcctcagacgacaacatatgtggtgaataatggactgaccctgggctcaaccggcccccaactgactgtccaccaccgcccacctcaggtacacaccgagcccccacggcctgttcaccctgccccactgccagaagcaccacagccacagagattaccgccggaagctgcctctacctctctaccccagaaaccccacctgaagcttgcccgggtacaatcccagaacggaattgtgctgtcatggtcagtgctggaggtggacaggagctgcgcgacagtggactcctaccacttgtatgcataccacgaggagcctagtgcgacggtccctagtcagtggaaaaagatcggcgaagttaaagccctgccactaccaatggcctgtacactgactcagttcgtgagcggatccaagtactattttgcggtccgcgcaaaagacatctatggtcgctttggccctttctgtgacccccagagcacagacgtgatatcttcaactcagtccagctag

SEQ ID NO: 254763 - DNA, 99 bp, Artificial Sequence
  derived and/or modified sequence
atggactcgctagaggagccgcagaaaaaagtattcaaggctcgaaagaccatgagagtcagcgataggcaacaactggaggcagtgtacaaggtgtag

SEQ ID NO: 254764 - DNA, 3837 bp, Artificial Sequence
  derived and/or modified sequence
atgcaccaggatcaaagatttaggatggattccctggaggagccccaaaaaaaagtctttaaagccaggaaaaccatgcgggtctcggatcgtcagcagctcgaggcagtgtataaagtcaaagaggaactcctaaagactgatgtgaaattgctcaatggaaatcacgagaacggcgacctggacccaacctcgcccctcgagaatatggactatatcaaagataaagaggaggtgaatggcatagaagaaatatgtttcgatcctgaaggcagcaaagcggaatggaaagaaaccccgtgtattcttagcgtcaacgtgaagaacaagcaggatgatgatctaaattgcgaacctctctctccacacaatatcacccccgagcccgtatctaagctgccggctgaaccagtgagcggcgatcccgcacccggagaccttgatgctggagaccccgcttctggagtcctcgcaagcggtgactctacctccggcgatcctacttcttctgagccttcaagttcagacgccgcaagcggcgatgccacatctggagacgcccctagcggagacgtgtcgcctggagacgcgacaagcggagatgccacagcagacgacctctcctccggtgacccaacttcctctgatcccattccaggcgaacccgtacctgtcgagcctatcagtggggattgcgcagcggatgatatcgcatcctcggaaattactagcgtggacctagctagcggcgcacctgcgagtaccgacccagcatcagacgacctcgcgtctggagatctgtcctcatccgagttggcttctgacgatttggccacaggcgagcttgcctctgatgagctgaccagcgaatcaaccttcgatcgcactttcgagcccaagtctgtgcctgtctgcgagccagtgcccgagattgataacattgaacctagttctaacaaagatgatgacttcctagagaaaaacggagcagacgagaaactcgagcaaattcaaagcaaagattccctggacgagaaaaataaggccgacaacaacattgacgctaatgaggaaacccttgagacagacgacactactatttgtagcgacaggccccctgaaaacgaaaaaaaagttgaggaggatattatcacagaactagctctaggcgaggacgctataagctccagcatggaaattgaccagggggaaaaaaatgaagatgaaacttctgccgacctggttgagacgatcaatgagaacgtaatcgaggataataagtctgagaatattctggagaataccgactccatggagactgatgagatcatcccgatcttggagaaactcgcgccaagcgaggacgaactcacgtgtttttccaagacgtcgctgttgcctattgatgaaacgaatccagacctggaagagaagatggaatcatcgttcggttctccttctaaacaggaatcatcagaatccctcccaaaagaggcatttctcgtgctgagcgatgaggaagatatatcgggcgagaaggacgaatctgaggtgattagccagaacgaaacgtgttcccccgctgaggttgaatccaacgagaaggataacaaacccgaggaggaggagcaggtgattcacgaagacgatgagcggccttcagagaagaacgagttcagcagacggaagaggtcaaaatctgaggatatggataacgtccaaagtaaacggcgacgatatatggaagaggaatatgaggccgaattccaggtgaagatcactgcaaaaggcgacatcaatcaaaaactccaaaaagttatccagtggcttttggaagagaaattgtgtgccttgcaatgcgcggtgtttgacaagacgttagcagaacttaagacaagagtcgaaaagatagagtgtaacaaacgacacaagaccgtcctcactgaactccaggcaaagatcgctcgactgacaaaaagattcgaagcggctaaggaggacctcaaaaaaaggcacgagcaccctcccaatccacccgtgagtcccggtaagacagttaatgatgtaaattccaacaacaatatgtcttatcggaacgccggaaccgtccgtcagatgcttgagtctaagcggaatgtgtccgaaagcgctcctccttctttccagaccccagtgaatactgtcagttccacaaacctggtcactccccctgccgttgtgtcaagccaacccaaactccagactcctgtgacttctggaagtctaactgccactagcgtgctcccagccccaaatacggccaccgtcgtggccaccactcaggttcccagcggtaacccacaaccgacaatcagcctacagcccctgcctgtcattttacatgtgcctgttgccgtctcgtctcaaccccagttgctgcagagccatcctgggacactcgtcaccaatcagccttctggcaatgtagagtttatcagcgttcaaagtcccccaaccgtctcaggactgaccaaaaatcccgtgtccctgccaagtctgcctaaccctacaaagccgaacaacgtgccaagcgtgccatccccttcgatccagagaaacccgactgcttccgccgctcctctaggcactactctggctgtccaggccgtgccgacagcccacagcatcgttcaggccacccgtacttcactccctacggtgggtcctagcgggctgtactcaccctccaccaacaggggacctatccagatgaaaattccaatttccgcttttagcaccagttcggccgctgagcagaatagcaacacaactccgaggattgagaaccagaccaacaagacaatcgacgcttcagtctctaagaaggctgccgactcgacgtcacagtgtggaaaagcaacgggaagtgacagcagtggtgtgattgacttgacgatggacgacgaagagagtggggcatctcaggacccgaaaaagctgaaccatactccggtctcgacgatgagttccagtcagccagtgtcccgtcccttgcaaccaattcaacccgcaccccctttacagccttccggagtccctacctctggtccgtcccaaactactattcatctgctgcccacggcacccactaccgttaacgtcactcatcggccagttacccaggtcactaccaggttacccgtcccccgagctcctgccaatcaccaagtggtgtacactacacttcctgcgcctccagcccaagctccactccgcggtacagtgatgcaggccccagctgttagacaagtgaatccccagaattccgtgactgtgagggtgccccaaacgacgacatacgtggtcaacaacggtttgactctcgggtccactggtccccaactgactgttcatcatcgtccaccacaggtacacaccgagcctcctaggccagtccatcccgctcctctgcctgaggccccacaacctcagcggctcccgccagaagcagctagcacatcactgccccagaagcctcacttgaagctggcgagagttcaatctcagaatggaattgtactgtcctggtcagtcctggaggtagataggagttgcgctaccgtcgactcctatcacctgtatgcctaccatgaggagccatccgccacggtaccctcccagtggaagaaaattggcgaagtgaaagccctccccctccccatggcttgtacgctgactcaattcgtgagcgggtcaaagtattactttgcggtcagggcaaaagatatttacggcagattcgggccattttgtgatcctcagtcaaccgacgtaatctccagcacccagagcagttag

SEQ ID NO: 254765 - DNA, 99 bp, Artificial Sequence
  derived and/or modified sequence
atggacagcctggaggagccccagaagaaggtgttcaaggccagaaagaccatgagagtgagcgacagacagcagctggaggccgtgtacaaggtgtag

SEQ ID NO: 254766 - DNA, 3837 bp, Artificial Sequence
  derived and/or modified sequence
atgcaccaggaccagagattcagaatggacagcctggaggagccccagaagaaggtgttcaaggccagaaagaccatgagagtgagcgacagacagcagctggaggccgtgtacaaggtgaaggaggagctgctgaagaccgacgtgaagctgctgaacggcaaccacgagaacggcgacctggaccccaccagccccctggagaacatggactacatcaaggacaaggaggaggtgaacggcatcgaggagatctgcttcgaccccgagggcagcaaggccgagtggaaggagaccccctgcatcctgagcgtgaacgtgaagaacaagcaggacgacgacctgaactgcgagcccctgagcccccacaacatcacccccgagcccgtgagcaagctgcccgccgagcccgtgagcggcgaccccgcccccggcgacctggacgccggcgaccccgccagcggcgtgctggccagcggcgacagcaccagcggcgaccccaccagcagcgagcccagcagcagcgacgccgccagcggcgacgccaccagcggcgacgcccccagcggcgacgtgagccccggcgacgccaccagcggcgacgccaccgccgacgacctgagcagcggcgaccccaccagcagcgaccccatccccggcgagcccgtgcccgtggagcccatcagcggcgactgcgccgccgacgacatcgccagcagcgagatcaccagcgtggacctggccagcggcgcccccgccagcaccgaccccgccagcgacgacctggccagcggcgacctgagcagcagcgagctggccagcgacgacctggccaccggcgagctggccagcgacgagctgaccagcgagagcaccttcgacagaaccttcgagcccaagagcgtgcccgtgtgcgagcccgtgcccgagatcgacaacatcgagcccagcagcaacaaggacgacgacttcctggagaagaacggcgccgacgagaagctggagcagatccagagcaaggacagcctggacgagaagaacaaggccgacaacaacatcgacgccaacgaggagaccctggagaccgacgacaccaccatctgcagcgacagaccccccgagaacgagaagaaggtggaggaggacatcatcaccgagctggccctgggcgaggacgccatcagcagcagcatggagatcgaccagggcgagaagaacgaggacgagaccagcgccgacctggtggagaccatcaacgagaacgtgatcgaggacaacaagagcgagaacatcctggagaacaccgacagcatggagaccgacgagatcatccccatcctggagaagctggcccccagcgaggacgagctgacctgcttcagcaagaccagcctgctgcccatcgacgagaccaaccccgacctggaggagaagatggagagcagcttcggcagccccagcaagcaggagagcagcgagagcctgcccaaggaggccttcctggtgctgagcgacgaggaggacatcagcggcgagaaggacgagagcgaggtgatcagccagaacgagacctgcagccccgccgaggtggagagcaacgagaaggacaacaagcccgaggaggaggagcaggtgatccacgaggacgacgagagacccagcgagaagaacgagttcagcagaagaaagagaagcaagagcgaggacatggacaacgtgcagagcaagagaagaagatacatggaggaggagtacgaggccgagttccaggtgaagatcaccgccaagggcgacatcaaccagaagctgcagaaggtgatccagtggctgctggaggagaagctgtgcgccctgcagtgcgccgtgttcgacaagaccctggccgagctgaagaccagagtggagaagatcgagtgcaacaagagacacaagaccgtgctgaccgagctgcaggccaagatcgccagactgaccaagagattcgaggccgccaaggaggacctgaagaagagacacgagcacccccccaacccccccgtgagccccggcaagaccgtgaacgacgtgaacagcaacaacaacatgagctacagaaacgccggcaccgtgagacagatgctggagagcaagagaaacgtgagcgagagcgccccccccagcttccagacccccgtgaacaccgtgagcagcaccaacctggtgaccccccccgccgtggtgagcagccagcccaagctgcagacccccgtgaccagcggcagcctgaccgccaccagcgtgctgcccgcccccaacaccgccaccgtggtggccaccacccaggtgcccagcggcaacccccagcccaccatcagcctgcagcccctgcccgtgatcctgcacgtgcccgtggccgtgagcagccagccccagctgctgcagagccaccccggcaccctggtgaccaaccagcccagcggcaacgtggagttcatcagcgtgcagagcccccccaccgtgagcggcctgaccaagaaccccgtgagcctgcccagcctgcccaaccccaccaagcccaacaacgtgcccagcgtgcccagccccagcatccagagaaaccccaccgccagcgccgcccccctgggcaccaccctggccgtgcaggccgtgcccaccgcccacagcatcgtgcaggccaccagaaccagcctgcccaccgtgggccccagcggcctgtacagccccagcaccaacagaggccccatccagatgaagatccccatcagcgccttcagcaccagcagcgccgccgagcagaacagcaacaccacccccagaatcgagaaccagaccaacaagaccatcgacgccagcgtgagcaagaaggccgccgacagcaccagccagtgcggcaaggccaccggcagcgacagcagcggcgtgatcgacctgaccatggacgacgaggagagcggcgccagccaggaccccaagaagctgaaccacacccccgtgagcaccatgagcagcagccagcccgtgagcagacccctgcagcccatccagcccgccccccccctgcagcccagcggcgtgcccaccagcggccccagccagaccaccatccacctgctgcccaccgcccccaccaccgtgaacgtgacccacagacccgtgacccaggtgaccaccagactgcccgtgcccagagcccccgccaaccaccaggtggtgtacaccaccctgcccgccccccccgcccaggcccccctgagaggcaccgtgatgcaggcccccgccgtgagacaggtgaacccccagaacagcgtgaccgtgagagtgccccagaccaccacctacgtggtgaacaacggcctgaccctgggcagcaccggcccccagctgaccgtgcaccacagacccccccaggtgcacaccgagccccccagacccgtgcaccccgcccccctgcccgaggccccccagccccagagactgccccccgaggccgccagcaccagcctgccccagaagccccacctgaagctggccagagtgcagagccagaacggcatcgtgctgagctggagcgtgctggaggtggacagaagctgcgccaccgtggacagctaccacctgtacgcctaccacgaggagcccagcgccaccgtgcccagccagtggaagaagatcggcgaggtgaaggccctgcccctgcccatggcctgcaccctgacccagttcgtgagcggcagcaagtactacttcgccgtgagagccaaggacatctacggcagattcggccccttctgcgacccccagagcaccgacgtgatcagcagcacccagagcagctag

SEQ ID NO: 254767 - DNA, 4656 bp, Artificial Sequence
  derived and/or modified sequence
gaatctgcggaggcggcggcggtggcagcggcggcgcggcgactgaagcgcgcgaaaagctgaggcggcaacgtcggggacggctgcgcgggacggctctgtaggaaggaacttggttccccctccctcagcttccgccccaaaagattcagaatggacagtttagaagaacctcagaaaaaagtctttaaggctcgaaaaacgatgagagtgagtgatcgtcagcaacttgaagcagtgtacaaggtcaaagaagaactgttgaaaactgatgtcaagctgttaaatggcaaccatgaaaatggagatttggacccaacctcacctttggaaaacatggattacattaaagacaaggaagaggtgaatggcattgaagagatttgttttgatcctgaaggaagtaaagcagaatggaaggaaacaccctgtatcctaagtgttaatgtaaaaaacaagcaggatgatgatttaaattgtgaacctttgtctccccataatataactccagaaccagtctctaaactgcctgctgaaccagtttctggtgatccagcccctggtgatctggatgccggagatccagcctccggagtactggcctctggtgattccacctctggtgatcccacctctagcgagccctcctctagtgatgctgcctctggtgatgcaacctctggtgatgccccttctggtgatgtgtcccctggtgatgccacctctggtgatgccactgctgatgatctctcctctggtgatcccacctctagtgatcccatcccaggtgaaccggtccctgttgaacccatttctggtgattgtgccgctgatgatatagcctctagtgaaataacttctgttgatctggcttctggagcaccagcttccactgatccagcctctgatgatctggcctctggtgatctatcctctagtgaactggcctctgatgatctggccactggtgaactggcctctgatgagctgacttctgaatcaacctttgatcgtacctttgaaccaaagtctgtaccagtttgtgaaccagttcctgaaattgacaatatagaaccaagtagcaataaagatgatgattttcttgaaaaaaatggagctgatgaaaaattagagcaaattcagagtaaagactcattggatgagaaaaataaagctgataataatattgatgctaatgaagaaactctagaaacagatgatacaactatttgttcagatcgacctcctgaaaatgaaaagaaggtagaggaagatattatcacagagcttgctcttggagaagatgctatatctagcagtatggaaattgaccaaggtgaaaagaatgaagatgaaacttctgcagatcttgtagaaacgattaatgaaaatgttattgaagataacaaaagtgagaatatcttagaaaatacagactctatggagacagatgaaatcattcctattttggaaaagcttgcaccttctgaggatgaacttacttgcttttctaaaacatctctccttccaatcgatgagacaaatccagatttggaagagaaaatggaaagttcttttggttcaccatctaaacaagaaagtagtgagagtttgccaaaagaagcctttctggtcctctctgatgaagaggatatttcgggtgaaaaagatgagtctgaagttatatcgcaaaatgaaacgtgctctccagcagaagtagaaagtaatgaaaaggacaacaaacctgaggaagaagagcaagtaatacatgaagatgatgaaagaccttctgagaaaaatgaattttctagacgaaaacgttctaaatcagaagacatggacaatgtacagtctaaacgtcgtcgatatatggaagaagaatatgaggcagaatttcaagtaaagattacagccaaaggagacattaaccagaaacttcaaaaggttatacagtggttgctggaagaaaaattgtgtgcgctgcagtgtgctgtatttgataagactttggcagaattgaaaacacgagtggaaaagattgaatgtaacaagaggcataaaacagttctcactgaactacaggccaagatagccaggttaaccaaacgctttgaagcagccaaagaagatcttaagaaaagacatgaacatccacccaacccaccagtatcaccaggaaaaactgtaaatgatgtcaacagcaataataacatgtcttacagaaatgcaggcacagtgagacagatgctggagtccaaaagaaatgtaagcgagagtgcaccaccatcctttcaaactcctgtgaatacagtatcttcaaccaatcttgtcactcctccagcagttgtcagtagtcaacctaaattgcagactccagtgacttcgggttccctcacagcaacgtcagttcttcctgcacccaatacagctactgtagttgctactactcaggtgcctagtggaaatccccagcctacaatctctttacagcctttgccagtgattttgcatgtacctgttgcagtatcctcccagcctcagcttctacagagccatccagggactttggtgactaatcaaccatctggcaatgttgaattcatttctgtgcaaagcccacctacagtgagtggtcttaccaaaaatccagtatccttgccatccttgccaaatcccactaaaccaaacaacgttccttctgtgcccagtcctagtattcaaaggaaccctactgccagtgctgcaccattgggaacaacacttgctgtgcaggctgttccaacagcacactctattgtacaagccacaaggacttctttacccacagtgggcccatcaggactctatagtccatcaactaatcgaggtcctatacagatgaaaattccaatttctgcatttagtacttcgtctgctgcagaacagaacagcaataccaccccaagaattgaaaaccagacaaacaaaacaatagatgcttctgtcagtaagaaagcagctgatagcacatcacagtgtggaaaagccactggcagtgattcaagtggtgtcattgatctcacaatggatgatgaagagagtggagcttcacaagaccccaaaaaactaaatcacactcctgtatcaaccatgagttcttctcagcctgtgtcacgaccattgcaacccatacaaccagcaccgcctcttcaaccatctggggtgccaacaagtggaccatctcagaccaccatacacttactacctacagctccaactaccgtgaatgtaacacatcgtccagtaactcaggtgaccacaagactccctgtaccaagagctcctgcaaaccaccaggtggtttatacaactcttcctgcaccaccagctcaggctcccttgcgaggaactgttatgcaggctcctgctgttcggcaggtcaatccccaaaatagtgttacagttcgagtgcctcaaacaaccacatatgttgtaaacaatggactaaccctgggatcaacaggacctcagctcacagtgcatcaccgaccaccacaagtgcatactgagcccccacgccccgtgcacccagcacccttaccagaagctccacaaccacagcgtctgcccccagaagctgccagcacatctctgcctcagaagccacacttgaagttagcacgcgttcagagtcaaaatggcatagtactgtcatggagtgtcctggaggtggatcgaagctgtgccactgttgatagctaccatctctatgcttaccatgaggaacccagtgccactgtgccctcacaatggaaaaagattggggaagtcaaggcacttcccttgcccatggcatgtactctcacccagtttgtatctggtagcaaatactactttgcagtacgagccaaggatatttatggacgttttgggcctttctgtgatcctcagtcaacagatgtgatctcttctacccagagcagttaaaccttggagcctttatattttcctcttttaaaatttccaccttttggtcttgtttttaatcttgtgcatgataccccatgtaaaatccaccttgtgcaagatttcttggacagatgtgtgtatacactacatttgtttataaccagaagcaaaataaactcagcccacaaagctagaatcttttcctggacagtttaggctttggggtttggaaatgtaaatgtgtaccttgctttagttttgaggctggggaatatgtgtgggtgtttatgtgtgtttttccttatgtaggtgttattgcattggagtctcccattttcattctcaaatttacctcttaaagtacgaagtaagtagatcaaaggatttgagatgtgtaactggcatgattctgcttttgaaggatctatagtatcattttagttaagtgggtcaaacagaatcaaaacaaaacccaaagaaataaataaaaaacaaaatggctaaatagtttaaaataggttaattcgaacacaggaaaggatctatttgttgtttcttttgtctggtctcctgagttgttaattaggtgaaaaaagatctgcaatggccccctccctttcctaatctggcttttacatttattttgtgccttaaagattaactacaaagataaacatggccaaaaataaataaataaatatggccata

SEQ ID NO: 254768 - DNA, 4847 bp, Artificial Sequence
  derived and/or modified sequence
gacgggattcacaggcattatgttacaaaactggcttgctgccttctgttttctttttctgtgtcctgtgtagctgcattgtttgttgcagtatatgcattagctgttgtctatgttcagtttcctgcaggctgacaaagtgggaggggctttgtttgttacatagctgagttttcactgtgtgagttcttgagtgcacattgcagccatcttaattacacttttgtgcaactgagactgtgcagctgtctcaaaatggctgctaacctagtctttgtagctgcttaggcagcaagtatgtcagtgaggagacttgtcacatgcatcaggaccagagattcagaatggacagtttagaagaacctcagaaaaaagtctttaaggctcgaaaaacgatgagagtgagtgatcgtcagcaacttgaagcagtgtacaaggtcaaagaagaactgttgaaaactgatgtcaagctgttaaatggcaaccatgaaaatggagatttggacccaacctcacctttggaaaacatggattacattaaagacaaggaagaggtgaatggcattgaagagatttgttttgatcctgaaggaagtaaagcagaatggaaggaaacaccctgtatcctaagtgttaatgtaaaaaacaagcaggatgatgatttaaattgtgaacctttgtctccccataatataactccagaaccagtctctaaactgcctgctgaaccagtttctggtgatccagcccctggtgatctggatgccggagatccagcctccggagtactggcctctggtgattccacctctggtgatcccacctctagcgagccctcctctagtgatgctgcctctggtgatgcaacctctggtgatgccccttctggtgatgtgtcccctggtgatgccacctctggtgatgccactgctgatgatctctcctctggtgatcccacctctagtgatcccatcccaggtgaaccggtccctgttgaacccatttctggtgattgtgccgctgatgatatagcctctagtgaaataacttctgttgatctggcttctggagcaccagcttccactgatccagcctctgatgatctggcctctggtgatctatcctctagtgaactggcctctgatgatctggccactggtgaactggcctctgatgagctgacttctgaatcaacctttgatcgtacctttgaaccaaagtctgtaccagtttgtgaaccagttcctgaaattgacaatatagaaccaagtagcaataaagatgatgattttcttgaaaaaaatggagctgatgaaaaattagagcaaattcagagtaaagactcattggatgagaaaaataaagctgataataatattgatgctaatgaagaaactctagaaacagatgatacaactatttgttcagatcgacctcctgaaaatgaaaagaaggtagaggaagatattatcacagagcttgctcttggagaagatgctatatctagcagtatggaaattgaccaaggtgaaaagaatgaagatgaaacttctgcagatcttgtagaaacgattaatgaaaatgttattgaagataacaaaagtgagaatatcttagaaaatacagactctatggagacagatgaaatcattcctattttggaaaagcttgcaccttctgaggatgaacttacttgcttttctaaaacatctctccttccaatcgatgagacaaatccagatttggaagagaaaatggaaagttcttttggttcaccatctaaacaagaaagtagtgagagtttgccaaaagaagcctttctggtcctctctgatgaagaggatatttcgggtgaaaaagatgagtctgaagttatatcgcaaaatgaaacgtgctctccagcagaagtagaaagtaatgaaaaggacaacaaacctgaggaagaagagcaagtaatacatgaagatgatgaaagaccttctgagaaaaatgaattttctagacgaaaacgttctaaatcagaagacatggacaatgtacagtctaaacgtcgtcgatatatggaagaagaatatgaggcagaatttcaagtaaagattacagccaaaggagacattaaccagaaacttcaaaaggttatacagtggttgctggaagaaaaattgtgtgcgctgcagtgtgctgtatttgataagactttggcagaattgaaaacacgagtggaaaagattgaatgtaacaagaggcataaaacagttctcactgaactacaggccaagatagccaggttaaccaaacgctttgaagcagccaaagaagatcttaagaaaagacatgaacatccacccaacccaccagtatcaccaggaaaaactgtaaatgatgtcaacagcaataataacatgtcttacagaaatgcaggcacagtgagacagatgctggagtccaaaagaaatgtaagcgagagtgcaccaccatcctttcaaactcctgtgaatacagtatcttcaaccaatcttgtcactcctccagcagttgtcagtagtcaacctaaattgcagactccagtgacttcgggttccctcacagcaacgtcagttcttcctgcacccaatacagctactgtagttgctactactcaggtgcctagtggaaatccccagcctacaatctctttacagcctttgccagtgattttgcatgtacctgttgcagtatcctcccagcctcagcttctacagagccatccagggactttggtgactaatcaaccatctggcaatgttgaattcatttctgtgcaaagcccacctacagtgagtggtcttaccaaaaatccagtatccttgccatccttgccaaatcccactaaaccaaacaacgttccttctgtgcccagtcctagtattcaaaggaaccctactgccagtgctgcaccattgggaacaacacttgctgtgcaggctgttccaacagcacactctattgtacaagccacaaggacttctttacccacagtgggcccatcaggactctatagtccatcaactaatcgaggtcctatacagatgaaaattccaatttctgcatttagtacttcgtctgctgcagaacagaacagcaataccaccccaagaattgaaaaccagacaaacaaaacaatagatgcttctgtcagtaagaaagcagctgatagcacatcacagtgtggaaaagccactggcagtgattcaagtggtgtcattgatctcacaatggatgatgaagagagtggagcttcacaagaccccaaaaaactaaatcacactcctgtatcaaccatgagttcttctcagcctgtgtcacgaccattgcaacccatacaaccagcaccgcctcttcaaccatctggggtgccaacaagtggaccatctcagaccaccatacacttactacctacagctccaactaccgtgaatgtaacacatcgtccagtaactcaggtgaccacaagactccctgtaccaagagctcctgcaaaccaccaggtggtttatacaactcttcctgcaccaccagctcaggctcccttgcgaggaactgttatgcaggctcctgctgttcggcaggtcaatccccaaaatagtgttacagttcgagtgcctcaaacaaccacatatgttgtaaacaatggactaaccctgggatcaacaggacctcagctcacagtgcatcaccgaccaccacaagtgcatactgagcccccacgccccgtgcacccagcacccttaccagaagctccacaaccacagcgtctgcccccagaagctgccagcacatctctgcctcagaagccacacttgaagttagcacgcgttcagagtcaaaatggcatagtactgtcatggagtgtcctggaggtggatcgaagctgtgccactgttgatagctaccatctctatgcttaccatgaggaacccagtgccactgtgccctcacaatggaaaaagattggggaagtcaaggcacttcccttgcccatggcatgtactctcacccagtttgtatctggtagcaaatactactttgcagtacgagccaaggatatttatggacgttttgggcctttctgtgatcctcagtcaacagatgtgatctcttctacccagagcagttaaaccttggagcctttatattttcctcttttaaaatttccaccttttggtcttgtttttaatcttgtgcatgataccccatgtaaaatccaccttgtgcaagatttcttggacagatgtgtgtatacactacatttgtttataaccagaagcaaaataaactcagcccacaaagctagaatcttttcctggacagtttaggctttggggtttggaaatgtaaatgtgtaccttgctttagttttgaggctggggaatatgtgtgggtgtttatgtgtgtttttccttatgtaggtgttattgcattggagtctcccattttcattctcaaatttacctcttaaagtacgaagtaagtagatcaaaggatttgagatgtgtaactggcatgattctgcttttgaaggatctatagtatcattttagttaagtgggtcaaacagaatcaaaacaaaacccaaagaaataaataaaaaacaaaatggctaaatagtttaaaataggttaattcgaacacaggaaaggatctatttgttgtttcttttgtctggtctcctgagttgttaattaggtgaaaaaagatctgcaatggccccctccctttcctaatctggcttttacatttattttgtgccttaaagattaactacaaagataaacatggccaaaaataaataaataaatatggccata

SEQ ID NO: 254769 - protein, 149 aa, Artificial Sequence
  derived and/or modified sequence
MKVASGSTATAAAGPSCALKAGKTASGAGEVVRCLSEQSVAISRCAGGAGARLPALLDEQQVNVLLYDMNGCYSRLKELVPTLPQNRKVSKVEILQHVIDYIRDLQLELNSESEVGTPGGRGLPVRAPLSTLNGEISALTAEVRSRSDH

SEQ ID NO: 254770 - DNA, 450 bp, Artificial Sequence
  derived and/or modified sequence
atgaaggtggccagcggcagcaccgccaccgccgccgccggccccagctgcgccctgaaggccggcaagaccgccagcggcgccggcgaggtggtgagatgcctgagcgagcagagcgtggccatcagcagatgcgccggcggcgccggcgccagactgcccgccctgctggacgagcagcaggtgaacgtgctgctgtacgacatgaacggctgctacagcagactgaaggagctggtgcccaccctgccccagaacagaaaggtgagcaaggtggagatcctgcagcacgtgatcgactacatcagagacctgcagctggagctgaacagcgagagcgaggtgggcacccccggcggcagaggcctgcccgtgagagcccccctgagcaccctgaacggcgagatcagcgccctgaccgccgaggtgagaagcagaagcgaccactag

SEQ ID NO: 254771 - DNA, 450 bp, Artificial Sequence
  derived and/or modified sequence
atgaaagtcgcctccggttctacggccacggctgctgccggtccctcctgcgcgttgaaagcgggaaaaaccgcgtctggggctggcgaggtggtgagatgcctgagcgaacagagcgtcgcgatctctcggtgtgctggcggcgccggcgcgcgtctgcccgctctgctggacgagcaacaggtaaacgtccttttgtatgacatgaacgggtgttacagtcggctaaaagagctcgtccccaccctgcctcaaaaccggaaggtttcaaaagttgagatcctgcaacacgtcatcgactatatcagggaccttcagctggaattgaatagcgaatccgaggtggggacccctggcggacgtggcctcccagtccgggctccactaagcacactaaacggtgaaattagcgcgctgactgccgaagtccgtagtagatccgaccactag

SEQ ID NO: 254772 - DNA, 450 bp, Artificial Sequence
  derived and/or modified sequence
atgaaggtggccagcggcagcacagccacagctgctgctggccccagctgtgccctgaaggccggcaagacagccagcggggccggggaggtggtgcgctgcctgtctgagcagagcgtggccatcagccgctgtgccggcggggccggggcccggctgcctgccctgctggatgagcagcaggtgaatgtgctgctgtatgacatgaatggctgctacagccggctgaaggagctggtgcccaccctgccccagaacaggaaggtgtccaaggtggagatcctgcagcacgtgattgactacatccgggacctgcagctggagctgaacagcgagagcgaggtgggcacccctgggggccggggcctgcctgtgcgggcccccctgagcaccctgaatggagagatcagcgccctgacagctgaggtgcgcagcagaagtgaccactag

SEQ ID NO: 254773 - DNA, 1222 bp, Artificial Sequence
  derived and/or modified sequence
attccacgttcttaactgttccattttccgtatctgcttcgggcttccacctcatttttttcgctttgcccattctgtttcagccagtcgccaagaatcatgaaagtcgccagtggcagcaccgccaccgccgccgcgggccccagctgcgcgctgaaggccggcaagacagcgagcggtgcgggcgaggtggtgcgctgtctgtctgagcagagcgtggccatctcgcgctgcgccgggggcgccggggcgcgcctgcctgccctgctggacgagcagcaggtaaacgtgctgctctacgacatgaacggctgttactcacgcctcaaggagctggtgcccaccctgccccagaaccgcaaggtgagcaaggtggagattctccagcacgtcatcgactacatcagggaccttcagttggagctgaactcggaatccgaagttggaacccccgggggccgagggctgccggtccgggctccgctcagcaccctcaacggcgagatcagcgccctgacggccgaggtgagatccagatccgaccactagatcatccttataccgacggggaaacggaggccagagagggcgtgggcgcttgcaccacttccgtcccatccttgcgggtacctggctatgcgggggtgcctaaggagcctggaaaaagcgctcccccgtcgtgcttcctggggaagggggcgttcgctgcgctcggagcggcgtcccttccaacccgccggtctcatttcttctcgttttcacaggcggcatgcgttcctgcggacgatcgcatcttgtgtcgctgaagcgcctcccccagggaccggcggaccccagccatccagggggcaagaggaattacgtgctctgtgggtctcccccaacgcgcctcgccggatctgagggagaacaagaccgatcggcggccactgcgcccttaactgcatccagcctggggctgaggctgaggcactggcgaggagagggcgctcctctctgcacacctactagtcaccagagactttagggggtgggattccactcgtgtgtttctattttttgaaaagcagacattttaaaaaatggtcacgtttggtgcttctcagatttctgaggaaattgctttgtattgtatattacaatgatcaccgactgaaaatattgttttacaatagttctgtggggctgtttttttgttattaaacaaataatttagatggtg

SEQ ID NO: 254774 - DNA, 450 bp, Artificial Sequence
  derived and/or modified sequence
atgaaggtggccagcggcagcaccgccaccgccgccgccggccccagctgtgccctgaaagcaggcaaaacagcaagcggcgccggtgaggtggtccgctgcctgagtgagcaaagtgtggctatctcccggtgcgctgggggtgccggagcacgcttgccagccctgcttgacgaacagcaggtgaacgttttactatatgatatgaacggatgttactcgcgactgaaagaactggtgccaactcttccccagaacaggaaagtttctaaagtagaaatcctacagcatgtgatcgattacattcgcgatcttcaactggagcttaacagcgaatcagaagtcgggaccccaggtggacgggggctgcctgtgcgcgctcccctcagcactcttaacggagagatatccgctttgactgcagaggtgaggagtagaagcgaccactag

SEQ ID NO: 254775 - DNA, 450 bp, Artificial Sequence
  derived and/or modified sequence
atgaaagtggcctccggttccactgctacagcagccgctggacccagctgtgcgcttaaagctggcaagactgccagtggcgcaggcgaggtagtgaggtgcctgtcagaacagtccgttgccatctcacgctgcgctggcggtgctggcgctcgtctcccagctctcctggacgaacaacaggtcaatgtactgctttatgatatgaacggatgttatagccgcttaaaggaactggtgcctacgctaccacaaaaccgaaaggtatccaaggtcgagatcctgcagcacgtgattgactatatccgcgatcttcagttggaattgaattccgaatcggaggttgggacccctggcggaaggggtctgccggtcagggccccactgtcgacgcttaacggggagattagtgccctaacagcggaagttaggagccgtagcgaccactag

SEQ ID NO: 254776 - protein, 839 aa, Artificial Sequence
  derived and/or modified sequence
MDYLTTFTEKSGRLLRGTANRLLGFGGGGEARQVRFEDYLREPAQGDLGCGSPPHRPPAPSSPEGPDTGQKKTLDKKDGRRMSFQKPKGTIEYTVESRDSLNSIALKFDTTPNELVQLNKLFSRAVVTGQVLYVPDPEYVSSVESSPSLSPVSPLSPTSSEAEFDKTTNPDVHPTEATPSSTFTGIRPARVVSSTSEEEEAFTEKFLKINCKYITSGKGTVSGVLLVTPNNIMFDPHKNDPLVQENGCEEYGIMCPMEEVMSAAMYKEILDSKIKESLPIDIDQLSGRDFCHSKKMTGSNTEEIDSRIRDAGNDSASTAPRSTEESLSEDVFTESELSPIREELVSSDELRQDKSSGASSESVQTVNQAEVESLTVKSESTGTPGHLRSDTEHSTNEVGTLCHKTDLNNLEMAIKEDQIADNFQGISGPKEDSTSIKGNSDQDSFLHENSLHQEESQKENMPCGETAEFKQKQSVNKGKQGKEQNQDSQTEAEELRKLWKTHTMQQTKQQRENIQQVSQKEAKHKITSADGHIESSALLKEKQRHRLHKFLCLRVGKPMRKTFVSQASATMQQYAQRDKKHEYWFAVPQERTDHLYAFFIQWSPEIYAEDTGEYTREPGFIVVKKIEESETIEDSSNQAAAREWEITTREDINSKQVATVKADLESESFRPNLSDPSELLLPDQIEKLTKHLPPRTIGYPWTLVYGTGKHGTSLKTLYRTMTGLDTPVLMVIKDSDGQVFGALASEPLKVSDGFYGTGETFVFTFCPEFEVFKWTGDNMFFIKGDMDSLAFGGGGGEFALWLDGDLYHGRSHSCKTFGNRTLSKKEDFFIQDIEIWAFE

SEQ ID NO: 254777 - DNA, 2520 bp, Artificial Sequence
  derived and/or modified sequence
atggactatcttaccacctttaccgagaaaagtgggcggctcttgcgcggtactgccaaccgcctattgggttttggcggcggaggcgaagcacggcaggttaggtttgaggattatctaagggagccagctcaaggggacctgggctgtggatctcccccgcacagacctcccgctccatcttctcccgaaggtcccgacactggccagaaaaagaccctcgacaaaaaagacggtcgtaggatgtcttttcaaaaacccaagggtaccatcgaatatactgtggagagcagagacagccttaacagcatcgccctcaagttcgacactaccccaaacgagcttgtgcagttgaacaagctcttctcgagggccgtagtcacaggacaagtcctctatgtaccagatcctgagtatgtgtcaagcgtcgaatcgtccccatcactctcccccgtctccccactgtcccctacatcttctgaagcagagtttgacaaaactactaatcccgacgtccatcctaccgaagcaacaccgtcctctacttttacgggcattaggcctgcccgagtggtgagcagtacatctgaggaggaggaggcattcactgagaaatttttaaaaatcaactgcaagtacataacctcaggcaaaggtaccgtttcgggagtgcttctcgtcacccctaacaacattatgttcgaccctcacaagaatgatccactggtgcaggagaacgggtgcgaagaatatggcatcatgtgtcctatggaagaggtaatgtccgctgccatgtacaaagaaattcttgacagcaagatcaaggaatctctgcccatcgacattgatcagctgtccggtagggacttttgtcattcgaagaagatgaccggatcgaacaccgaagagatcgacagccggatcagagacgctgggaatgattctgccagtaccgctcctcgcagcaccgaagagtcgctcagtgaggacgtcttcactgaatccgaacttagtcccatcagagaggagctggtgtccagcgatgagcttcgacaagacaagtcttccggcgcttcttccgagagtgtgcagacggttaaccaagctgaagtcgaaagcctgacagtaaagtctgagtccactggcactcccggccacctgcgtagcgataccgaacactctaccaacgaggtgggtaccctctgtcacaaaactgatcttaataatcttgaaatggccattaaggaagatcagattgccgacaactttcaaggaatctcaggacctaaggaagattccacctctataaaggggaactccgaccaggattcctttctgcacgaaaatagtctgcaccaggaagaatcacagaaagaaaatatgccgtgcggtgagaccgcggagtttaagcagaaacagtccgtcaacaaggggaaacaaggaaaggagcagaatcaggactcccagaccgaggccgaggaactgagaaagctgtggaaaactcatacaatgcagcagactaaacagcaacgggagaacatccagcaggtgtcacaaaaggaggccaaacacaaaattacatccgcagacggtcatattgagtcatcggcactcctcaaggagaagcagcgacacagactccacaagttcctctgtctgcgggtagggaaaccaatgagaaaaacatttgtgtctcaggcatcagcaacgatgcaacagtacgcacagcgcgataaaaagcatgaatactggtttgccgttcctcaggaacgcactgaccacctgtacgcctttttcatccagtggtctccagagatctacgccgaagacaccggggagtacacgcgcgagcctggatttattgttgtgaagaaaattgaggaatctgagaccatcgaggatagtagtaatcaggcagcagcacgggagtgggaaataaccacacgggaggacattaatagcaaacaggtggccaccgtgaaggccgacttggagagcgaatccttccgccccaatctgtctgatccaagcgagctgttgctgcccgatcagattgagaaattgaccaaacacctgccacctcggactattggatatccttggacacttgtatatgggaccggaaagcacggcacgtccctgaagaccctgtatcgcactatgactgggctcgatactcctgtgctgatggttatcaaggactcagatggccaggtttttggtgccctggcctctgagcctctgaaggtctccgatggcttctacggaaccggggaaacatttgtcttcacattttgtcccgaatttgaagtgtttaaatggacaggggataacatgtttttcattaagggagatatggactctctggctttcggcggcgggggtggagagtttgcattgtggcttgatggagatctctaccatggcaggagccacagctgcaaaacattcggaaatcgcactctctccaagaaggaggactttttcattcaggacatagaaatctgggcattcgagtag

SEQ ID NO: 254778 - DNA, 885 bp, Artificial Sequence
  derived and/or modified sequence
atgcagcagactaaacagcagcgcgagaacatccagcaggtgtctcagaaggaggccaagcataaaatcacctcggcagatggtcacatcgaaagctctgcacttttgaaggagaagcagaggcaccggttgcacaagttcctgtgcctgcgagtggggaagccaatgcgaaaaacgttcgtatcacaagcatcggccactatgcagcagtacgcccagcgagacaagaagcacgaatattggttcgctgttccccaagaacggactgatcacctgtatgctttttttattcagtggtcgccggaaatctacgccgaggatacgggggagtacacaagagagcccggatttatcgtagtgaagaagatcgaagagagtgaaactatcgaagattcgtcgaatcaggcggcagcacgagagtgggaactcactaagcacctgccaccacggacaatcggttacccatggaccctggtgtacgggacgggaaaacatggtacgtccctcaaaaccctatacagaaccatgaccggcctggacacacctgtgttaatggtgattaaggatagcgacgggcaggtctttggcgcgttagcttcggaacctttgaaggtatctgatggattttacgggacgggtgagactttcgtctttaccttctgcccagagtttgaggtttttaagtggaccggtgataacatgttcttcatcaagggagacatggattccttagcctttggtggcgggggaggcgaatttgcactttggctggacggcgacttgtaccatggccgttcacacagttgtaagaccttcgggaaccgcacgctgagcaaaaaggaggactttttcatccaagatattgaaatttgggcttttgaatag

SEQ ID NO: 254779 - DNA, 2520 bp, Artificial Sequence
  derived and/or modified sequence
atggactacctgaccaccttcacagagaagagcggccgcctgctgcggggcacagccaaccggctgctgggctttggaggcggcggggaggcccggcaggtgcgctttgaggactacctgcgggagcccgcccagggcgacctgggctgcggcagccccccccaccggcccccagcccccagcagccctgagggccctgacaccggccagaagaagaccctggacaagaaggatggccgcaggatgtccttccagaagcccaagggcaccatcgagtacacagtggagagccgggacagcctgaacagcatcgccctgaagtttgacaccaccccaaatgagctggtgcagctgaacaagctgttcagcagagctgtggtgacaggccaggtgctgtatgtgcctgaccctgaatatgtgtcctctgtggagagcagccccagcctgagccctgtgagccccctgagccccaccagcagcgaggccgagtttgacaagaccaccaacccagatgtgcaccccacagaggccacccccagcagcaccttcaccggcatccggcctgcccgggtggtgagcagcaccagcgaggaggaggaggccttcacagagaagttcctgaagatcaactgcaagtacatcaccagcggcaagggcaccgtgtctggagtgctgctggtgacccccaacaacatcatgtttgacccccacaagaatgaccccctggtgcaggagaatggctgtgaggagtatggcatcatgtgccccatggaggaggtgatgtctgctgccatgtacaaggagatcctggacagcaagatcaaggagagcctgcccatcgacatcgaccagctgagcggccgggacttctgccacagcaagaagatgacaggcagcaacacagaggagattgacagccgcatcagagatgctggaaatgattctgccagcacagcccccaggagcacagaggagagcctgtctgaagatgtgttcacagaaagtgagctgagccccatccgggaggagctggtgtccagtgatgagctgcggcaggacaagagcagcggggccagcagcgagagcgtgcagacagtgaaccaggccgaggtggagagcctgactgtgaagtctgagagcacaggcaccccaggccacctgcggagtgacacagagcacagcaccaatgaggtgggcaccctgtgccacaagacagacctgaacaacctggagatggccatcaaggaggaccagattgctgacaacttccagggcatcagcggccccaaggaggacagcaccagcatcaagggcaacagcgaccaggacagcttcctgcacgagaacagcctgcaccaggaggagagccagaaggagaacatgccctgtggggagacagctgagttcaagcagaagcagagcgtgaacaagggcaagcagggcaaggagcagaaccaggacagccagacagaggccgaggagctgaggaagctgtggaagacccacaccatgcagcagaccaagcagcagcgggagaacatccagcaggtgtcccagaaggaggccaagcacaagatcaccagcgcagatggccacatcgagagcagcgccctgctgaaggagaagcagaggcaccggctgcacaagttcctgtgcctgcgggtgggcaagcccatgaggaagacctttgtgtcccaggccagcgccaccatgcagcagtatgcccagagggacaagaagcatgagtactggtttgctgtgccccaggagaggacagaccacctgtatgccttcttcatccagtggagccctgagatctatgcagaagatactggagagtacacccgggagcccggcttcatcgtggtgaagaagattgaggagagcgagaccatcgaggacagcagcaaccaggccgccgcccgggagtgggagatcaccacccgggaggacatcaacagcaagcaggtggccaccgtgaaggctgacctggagagcgagagcttccggcccaacctgagtgaccccagcgagctgctgctgcctgaccagatcgagaagctgaccaagcacctgccccccaggaccatcggctacccctggaccctggtgtatggaacaggcaagcacggcaccagcctgaagaccctgtaccgcaccatgacaggcctggacacccctgtgctgatggtgatcaaggacagtgatggccaggtgtttggagccctggccagcgagcccctgaaggtgtctgatggcttctatggaactggagagacctttgtgttcaccttctgcccagagtttgaggtgttcaagtggacaggagacaacatgttcttcatcaagggggacatggacagcctggcctttggaggcggcggcggggagtttgccctgtggctggatggagacctgtaccacggccgcagccacagctgcaagacctttggaaacagaaccctgagcaagaaggaggacttcttcatccaggacatcgagatctgggcctttgaatag

SEQ ID NO: 254780 - DNA, 885 bp, Artificial Sequence
  derived and/or modified sequence
atgcagcagaccaagcagcagcgggagaacatccagcaggtgtcccagaaggaggccaagcacaagatcaccagcgcagatggccacatcgagagcagcgccctgctgaaggagaagcagaggcaccggctgcacaagttcctgtgcctgcgggtgggcaagcccatgaggaagacctttgtgtcccaggccagcgccaccatgcagcagtatgcccagagggacaagaagcatgagtactggtttgctgtgccccaggagaggacagaccacctgtatgccttcttcatccagtggagccctgagatctatgcagaggacaccggggagtacacccgggagcccggcttcatcgtggtgaagaagattgaggagagcgagaccatcgaggacagcagcaaccaggccgccgcccgggagtgggagctgaccaagcacctgccccccaggaccatcggctacccctggaccctggtgtatggcaccgggaagcacggcaccagcctgaagaccctgtaccgcaccatgacaggcctggacacccctgtgctgatggtgatcaaggacagtgatggccaggtgtttggagccctggccagcgagcccctgaaggtgtctgatggcttctacggcaccggggagacctttgtgttcaccttctgcccagagtttgaggtgttcaagtggacaggagacaacatgttcttcatcaagggggacatggacagcctggccttcggcggcggcggcggggagtttgccctgtggctggatggagacctgtaccacggccgcagccacagctgcaagaccttcggcaacagaaccctgagcaagaaggaggacttcttcatccaggacatcgagatctgggcctttgaatag

SEQ ID NO: 254781 - DNA, 2520 bp, Artificial Sequence
  derived and/or modified sequence
atggactacctgaccaccttcaccgagaagagcggccggctgctgcgggggacggccaatcgcttacttggattcggtggaggtggggaagcccggcaggtgcgctttgaagactacctccgagagcctgcacagggtgatttagggtgcggctccccaccccaccggccacctgcccccagttcgccggaaggtccagataccggccagaagaaaacattggataaaaaagacggacgacgcatgagctttcagaagcccaagggcactatcgagtacaccgtcgagtctagggactcactaaatagcattgcactgaaattcgatacaacacctaatgagcttgtccagctcaacaaactgttttctagggctgtggttacagggcaggtcctctacgtgcccgacccagaatatgtgtcctcggtagaatcttccccctcgctcagcccagtgtcccctctgtctcccaccagcagcgaagccgaatttgacaaaactactaaccccgacgtgcaccccactgaggccaccccctcatccacttttaccgggattcggcctgcccgggtggtatcctctacaagtgaagaggaggaagcatttaccgagaagtttctcaaaatcaattgtaagtacattacgtctggcaagggaacagtgtccggagtcctgttagttactcccaacaatataatgtttgatccccacaagaacgacccattagtacaggagaacggatgtgaagagtatgggatcatgtgtcccatggaagaggtgatgtcagccgctatgtacaaggagattctggatagcaaaatcaaggaatccttaccgatcgatatcgaccagctgagcggaagagacttttgccacagtaaaaagatgacaggctctaacacagaagagatagactcccgcattcgcgacgctgggaacgatagtgcctctaccgcacccaggagtacggaggagtccctgagtgaggatgtgtttacagaatcagaactctctcccatacgcgaagagctggtatccagtgatgagttgaggcaagataaatcttcgggcgctagctcggaatccgtgcaaaccgtcaatcaggccgaagtggagtctttgaccgtgaagtcagaaagcactggcacacctggccacctgcgcagcgatacagagcactccaccaacgaggtcgggacgctgtgccacaagactgatttgaacaacctggaaatggctataaaggaagaccagattgccgataacttccagggcattagtggacctaaggaagacagcactagcattaagggtaatagcgatcaggactccttcctgcacgagaactctctgcatcaggaggaatcccagaaagagaacatgccttgcggcgaaaccgctgaatttaaacagaaacagtctgtgaataaaggaaagcagggaaaagagcagaatcaagactctcagactgaagcagaggagttacggaaactatggaagacacataccatgcagcagacgaaacagcaacgagaaaacattcaacaggtatctcaaaaggaggcgaaacacaaaattacatccgccgacggacatatcgaatcatctgcgcttttgaaagagaaacaacgccatcggctgcataaattcttgtgtctgagggtgggtaaaccgatgcgaaagaccttcgtttcccaggcttccgccacgatgcagcagtacgcacagcgtgacaaaaaacacgaatattggttcgccgttccccaggaacgtaccgaccatctatacgcattttttattcagtggagtcccgagatatatgccgaggatactggggaatacactcgcgagcccggtttcattgtggtcaaaaagattgaagaaagcgagactatagaggactctagcaaccaggcggccgcccgggagtgggaaatcacgactcgcgaagacatcaacagcaagcaagtggccactgttaaggcagatttagaaagtgaatctttccgacctaatttgtccgatccgtccgagctcctgctgcctgaccagattgagaagttaacaaagcatctgcccccacggaccatcggctatccctggacactggtgtacggaaccggaaaacacggcaccagcctcaagactctgtaccgcacaatgacagggcttgataccccagtactcatggtgataaaagactcagatgggcaggtgtttggggctttggcaagcgagccccttaaagtgtctgatggattctatggcaccggggaaacatttgtgtttaccttttgtcccgaatttgaggtattcaagtggactggggataacatgttcttcattaagggcgacatggacagcctggcatttggaggcggcggcggggaatttgccctgtggctggacggggacctgtatcatggcaggtctcatagttgtaagacctttggcaatcggactcttagtaagaaagaagacttctttatccaggatatcgagatatgggcatttgagtag

SEQ ID NO: 254782 - DNA, 885 bp, Artificial Sequence
  derived and/or modified sequence
atgcagcagaccaagcagcagcgggagaacatccagcaggtgagccagaaggaggccaagcacaaaatcaccagtgctgatggccacatcgaaagtagtgccctactgaaggagaagcagcgccacaggctgcataagttcttgtgcttacgagtgggcaagccaatgagaaagaccttcgtttctcaagcttcagccactatgcagcaatacgcccagcgtgacaagaagcacgaatactggttcgccgtgccgcaagaaaggacagaccacctgtatgccttctttatccagtggtcaccggagatttacgctgaagataccggcgagtacacacgggaaccgggcttcatagtcgtgaaaaagattgaggaaagcgagactattgaagactcaagtaaccaggctgctgctcgggaatgggagctgacaaaacatctcccacctcggactatcggctatccttggactctggtctacggcaccgggaagcacggaaccagccttaagacactttatcgtacgatgaccggactggacacccctgtactgatggtgattaaggattctgatggacaagtctttggcgccctcgcaagcgaaccactgaaagtctccgacgggttctatgggacgggcgaaactttcgtgttcacattttgccctgaatttgaggtctttaagtggactggggacaacatgttttttataaaaggtgatatggactcgttggcctttggtggcggtggaggtgaatttgctctttggctggacggagatctttaccacgggagaagtcacagttgcaagacctttggcaaccggactctatccaagaaggaggatttcttcatacaggatattgaaatttgggcgtttgaatag

SEQ ID NO: 254783 - DNA, 4406 bp, Artificial Sequence
  derived and/or modified sequence
gcctcttgtgaggcgcgcggagccgcctcccctgggtcaggtctgatgggccggtgggcgcgctagtggtggccgccaccgccgaaaccgtcgacctcctgggccccagttccgcgtccagccccgcggcagcatggactacctgacgacgttcaccgagaagagtgggcgccttctgcggggcacggccaaccgcctgttggggttcgggggcggcggcgaagcccggcaggtgcgcttcgaagattacctgagggagccagcccagggggacctcgggtgcgggtccccgccccaccggcccccggcgccgtccagcccggagggacctgacactggccaaaagaagaccctagacaagaaagatggaagacgaatgtcttttcagaaacctaaagggactattgagtatactgttgaatcaagggattctttgaatagcatagccctgaagtttgatacaacacctaacgaacttgttcaattaaataagttattctcccgagcagttgttactggacaggttctgtatgttcctgatcctgaatatgtctccagtgttgagagctctccatctctaagccccgtaagtcctctgtcaccaacatcatctgaggctgaatttgataagaccactaatcctgatgtccatccaacagaagcaactccctcatctactttcactggtattcgacctgcacgagttgtatcttcaacttctgaggaggaggaagcatttactgagaaatttcttaaaattaattgcaaatatattaccagtggcaagggcacagtcagtggtgtgctgctagttacaccaaataatataatgtttgatccacataaaaatgaccctttggttcaagagaatggctgtgaggaatatggcatcatgtgtccaatggaagaggtgatgtcagctgcaatgtacaaagaaattttggatagcaaaataaaggaatctttacccatagatatagatcagctatcaggaagggacttctgccattcaaagaaaatgacaggaagtaacactgaggaaatagactcaagaatccgagatgcaggtaatgatagtgccagcactgctcctaggagcactgaggagtctctttctgaagatgtgttcacagaatcagaactttcccctatacgagaggagcttgtatcttcagatgaactgcgacaagataaatcttctggtgcgtcatcagaatctgtgcaaactgtcaatcaggctgaagtagaaagtctgacagtcaaatcagaatctactggtactcctggtcacttaagatctgatactgaacattctacaaatgaagttgggactttatgtcataaaactgatttaaataatcttgaaatggccattaaggaagatcagattgcagataactttcaaggaatatcaggtcctaaagaagacagcacaagtataaaaggtaattcagaccaggattcttttcttcatgagaattcgttacaccaagaagagagtcaaaaagaaaatatgccttgtggggaaacagcagaatttaaacaaaagcaaagtgttaacaaaggaaaacaaggaaaggagcaaaatcaggactcacagacagaggcagaagagctacgcaaactttggaaaacccatactatgcaacaaactaaacagcaaagggaaaatattcaacaagtgtcacaaaaagaagctaagcataaaattacatctgctgatggacacatagaaagttctgcacttttaaaagaaaagcaaaggcatcgattacataagttcttgtgtctcagagttggaaaaccaatgaggaaaacgtttgtatctcaagcaagtgctacaatgcaacagtatgcacagagagataagaaacatgaatattggtttgctgtgccacaagaaaggacagatcacttgtatgccttcttcattcagtggagtccagaaatatatgcagaagatactggcgaatataccagagaacctggatttatagtagtaaaaaagattgaggagtctgaaacaattgaggattctagtaatcaagcagcagccagagaatgggagattactacaagggaagacataaattcaaagcaggttgctacagtgaaagcagacctggagtctgaatcttttcgaccaaacctaagtgatcccagtgaacttttactgccagatcaaattgaaaagcttaccaagcatcttccaccaagaacaattggctatccatggactcttgtttatggtactggaaaacatggcacaagcttgaaaactctttatcgaacaatgacaggtttagacaccccagtgctgatggtgattaaagacagtgatggacaggtttttggtgcgttagcatctgagccactgaaagtgagtgatggcttttatggtactggagagacctttgtttttacattctgtccggagtttgaggtctttaagtggacaggagataatatgttttttatcaaaggagacatggattcactagctttcggtggtggaggaggagaatttgcgctttggcttgatggagatctctaccatggaagaagccattcttgtaaaacgtttgggaatcgtacactttctaagaaggaagatttctttatccaagatattgaaatctgggcttttgaataaataaaatgctctctgtcttagcaggagaatggcccaaacctgacatggacaagcattgtttggaaagttcaagaagcaatacagtgtaacatgtcacttgtgctttaaaattagtctgtatcaccatttattacagttataattttggagtttatttttcaaatcatgttcttgtcccagagttctttaggttaacactagggactgcgtccatgtactagtataacagcttgggtttgttagaatttgggcaacattttgattataatgacaacttcattttcacatgttactcagttccctaataggatggtgctcttttgttgaacctgtattgatttttttttttttaactatattgattcgtttactagaacagtctaattggggcattgaggaaatgaagactggatacttctgtatctgtgaagttggcacaggtaacatttggacatgttcatcttattcttaggaaggaaaaaatcacttgccaaaataatacatacttcatagaccactgagttctagtttttattcacactacaacattctctttaacgatgttgcaggtattctcaatttccttttaagaaaaatgaaatgtgaggagaattctggttgtaatagatgacagtacatatgatctgcaggtttgggcatatgctttcatcattaaattatctgataaagttacaagtcacaaaggagaatgagaacttaatgattctattggatttaatatattagcaagaaaacatactatttacatatgtgtagcttagtaaggcattaacataagtacaaaaactatgaaacagatgcatatttcctcaacatactgtgtcaggtatactgttttataatttggttgttttagccttattgcacaccaactcccaaaatataggttactcttgttcaaaaggaaaaaaaaaattgtgattttctttgagtggtatatgttattaattaccattagcatttgctcttataaagggcaatgattatagtagacaatattgtaactcagtagacttgttgaatatgcaaacttactgtcaagtgacctcaaaaaaaaaatgaaaagatagaatacactagtagttcttatcctcttttgtaggaaaccaataatagccattgtggcaataattcatcagttgattttaaagcttcatgttatgcaaaaaagaatcctgctgttatacatgtgacagtgactttgtgctgaaatttcagctattccagataaacattgtatatcttgtaaattaatgtttaaaggtgtagttttgttcttacagaaagtgttgattgccaggttgcttatagcactttaagttattctaaaaatgaaattataagccaaatatttggcttaagtagatttagttgtatagcacttacatatttagttcttttgaaagtttagataattatttaaagaaagcataatgctaatggaaaagaaaatctgatgttctattataatatgctattgctgaatatgaatagaaatacagggcatcatttccttgtctcattataagttagtaacaatatatagattaaatgtttacaatatagggaattgtaaataaatatatcagtttttttccccttcggtcttccacagcagtattattgtctttgtggagttgactaatgataatttaaaaatcctgtaatggatttctactaaaataaggtcatagtggcatataccaaataaaatcaaatacagaaatacaaa

SEQ ID NO: 254784 - DNA, 2520 bp, Artificial Sequence
  derived and/or modified sequence
atggattacctgaccacatttacggaaaaaagtggacggctcctcagaggcacagcgaatcggctgctggggttcgggggtggaggcgaagccaggcaggtacgcttcgaagattacctgcgggagccggcacaaggagatctgggctgtggaagtcctccccatagaccacctgcaccttctagtcccgaggggccagacacagggcagaaaaagactctggacaagaaggacgggaggaggatgtcattccaaaagcccaagggcaccatcgaatatacagtcgagagcagggactcactgaactccatcgccttaaaattcgatacaactcccaacgagctggtgcagctcaataagctgttttctcgggcagtcgtgacaggtcaggtcttatacgtgcctgaccccgagtatgtgagctctgttgaaagctccccgagcctgagtcctgtatctcccttgtccccaacgtcttcggaggccgaattcgacaagacaaccaaccctgacgtgcacccaactgaggctacgccatcctcaacgtttaccggcatacgccctgctagagttgtttctagtacgtccgaagaggaagaagcttttacagagaagttcctgaaaatcaattgcaaatacatcacgtctgggaaaggaaccgtgtccggtgtgttacttgtgacgcccaataacatcatgttcgatccacataagaacgatcctttggtgcaggaaaatggctgcgaagaatatggtatcatgtgccccatggaggaggtcatgagcgccgctatgtacaaagagattctggatagcaagattaaggaatctctacctatcgatatcgaccaactgagcggtcgagatttttgtcacagcaagaagatgactggcagtaacacggaagaaatcgactcccggatccgagatgccggtaatgactccgcatctaccgccccacgttccactgaagagtctctgagcgaggacgtgtttaccgaaagtgagttgtcccccattcgagaggagctcgtgagctccgacgaattaagacaggacaagagttcaggcgctagctccgaatccgtacaaacagtaaaccaggctgaagtcgaatccctcactgtaaagtccgagtccaccggtacacctggccacctccgctcggataccgaacacagcactaatgaagtcggaacactgtgtcacaagactgatctcaataatctggagatggccattaaagaagatcagattgctgataatttccagggcatatccggcccaaaggaagactcaacatctatcaaggggaacagtgaccaagattcttttctccacgagaactcactgcatcaagaggagagccagaaagaaaacatgccctgcggagagacagccgagttcaaacaaaaacagagcgtgaataaagggaaacaaggtaaagagcagaaccaagatagccagactgaggcagaagaactgaggaagctatggaagacacacactatgcagcagaccaagcagcaaagagagaacatacagcaagtgtctcagaaggaggcgaaacacaaaatcacatctgctgatggccacatagaatcctccgccctcttgaaagagaaacagcgtcaccgtctacataagttcctctgtctccgcgtgggcaaacccatgcgaaaaacgttcgtttcacaggcctctgccactatgcagcagtacgcacaaagagacaaaaagcacgagtactggttcgcagtgcctcaggagcgcacagaccatctgtacgcgtttttcatccagtggtcccccgagatttacgcagaggacactggggaatacactagggagcccggattcatcgtggtaaaaaagatagaagaaagcgaaacaattgaggacagctcgaaccaggccgctgcacgtgagtgggaaattacaactcgcgaagacatcaatagtaagcaggtagccacagtgaaggccgatctggagagcgagtcctttcgtcctaatctttccgaccctagcgaactgctattgcccgatcagattgaaaaactgacaaaacatctgcccccaaggacaatcggctacccgtggacactagtgtacggaacgggcaaacatgggacgagtcttaaaacgttgtacagaaccatgaccgggctggatacccctgtactgatggtaataaaggactccgacggccaggtctttggggcactggcgagtgaacctctgaaagtatcggatggtttctatggcacaggtgagacatttgtcttcacattctgtcccgagtttgaggtgttcaaatggaccggggacaacatgttcttcataaagggcgacatggatagtttggcattcgggggtgggggaggagagttcgctctttggctggatggtgatctttaccatggcagatctcacagctgtaagacgtttggcaaccggacattgagcaagaaggaggatttctttatccaagatatagagatctgggccttcgagtag

SEQ ID NO: 254785 - DNA, 885 bp, Artificial Sequence
  derived and/or modified sequence
atgcagcagacgaagcagcagcgggagaacatccagcaggtctcccagaaggaagctaaacataagatcacgtcagcagatggacacatagaaagtagcgcccttctcaaagaaaagcaacgccaccgcctgcacaaatttctgtgtctgcgcgtcggaaaacccatgcgcaagaccttcgtctcacaggctagcgccaccatgcagcagtatgcccagagggacaagaaacatgagtactggtttgccgtgccccaggagcgcaccgatcacctctatgcctttttcatccaatggagtccggagatctacgcagaggacactggcgaatacactagggaaccagggttcatcgttgtgaagaagattgaggagagtgagaccatcgaagactcttcgaatcaagccgctgccagagaatgggagttaacaaaacacctgccccctcgcactattgggtacccatggacattagtctatgggacgggcaagcatgggaccagtctaaagactctgtacagaaccatgactgggcttgacacgcctgtgctgatggtgattaaagactctgatggccaagtgttcggcgctttggccagcgaacccctgaaagtgagcgatggtttctacggaacgggcgagacttttgtgtttacattttgccctgagtttgaggtgtttaaatggacaggagacaatatgtttttcatcaaaggagatatggactctctcgcctttggaggaggaggcggtgagttcgcattgtggttagatggagacctataccacggccgatcacacagctgtaagacctttggaaatcggaccttgtctaagaaggaggatttcttcatacaggacattgagatatgggcgttcgagtag

SEQ ID NO: 254786 - DNA, 2520 bp, Artificial Sequence
  derived and/or modified sequence
atggactacctgaccaccttcaccgagaagagcggcagactgctgagaggcaccgccaacagactgctgggcttcggcggcggcggcgaggccagacaggtgagattcgaggactacctgagagagcccgcccagggcgacctgggctgcggcagccccccccacagaccccccgcccccagcagccccgagggccccgacaccggccagaagaagaccctggacaagaaggacggcagaagaatgagcttccagaagcccaagggcaccatcgagtacaccgtggagagcagagacagcctgaacagcatcgccctgaagttcgacaccacccccaacgagctggtgcagctgaacaagctgttcagcagagccgtggtgaccggccaggtgctgtacgtgcccgaccccgagtacgtgagcagcgtggagagcagccccagcctgagccccgtgagccccctgagccccaccagcagcgaggccgagttcgacaagaccaccaaccccgacgtgcaccccaccgaggccacccccagcagcaccttcaccggcatcagacccgccagagtggtgagcagcaccagcgaggaggaggaggccttcaccgagaagttcctgaagatcaactgcaagtacatcaccagcggcaagggcaccgtgagcggcgtgctgctggtgacccccaacaacatcatgttcgacccccacaagaacgaccccctggtgcaggagaacggctgcgaggagtacggcatcatgtgccccatggaggaggtgatgagcgccgccatgtacaaggagatcctggacagcaagatcaaggagagcctgcccatcgacatcgaccagctgagcggcagagacttctgccacagcaagaagatgaccggcagcaacaccgaggagatcgacagcagaatcagagacgccggcaacgacagcgccagcaccgcccccagaagcaccgaggagagcctgagcgaggacgtgttcaccgagagcgagctgagccccatcagagaggagctggtgagcagcgacgagctgagacaggacaagagcagcggcgccagcagcgagagcgtgcagaccgtgaaccaggccgaggtggagagcctgaccgtgaagagcgagagcaccggcacccccggccacctgagaagcgacaccgagcacagcaccaacgaggtgggcaccctgtgccacaagaccgacctgaacaacctggagatggccatcaaggaggaccagatcgccgacaacttccagggcatcagcggccccaaggaggacagcaccagcatcaagggcaacagcgaccaggacagcttcctgcacgagaacagcctgcaccaggaggagagccagaaggagaacatgccctgcggcgagaccgccgagttcaagcagaagcagagcgtgaacaagggcaagcagggcaaggagcagaaccaggacagccagaccgaggccgaggagctgagaaagctgtggaagacccacaccatgcagcagaccaagcagcagagagagaacatccagcaggtgagccagaaggaggccaagcacaagatcaccagcgccgacggccacatcgagagcagcgccctgctgaaggagaagcagagacacagactgcacaagttcctgtgcctgagagtgggcaagcccatgagaaagaccttcgtgagccaggccagcgccaccatgcagcagtacgcccagagagacaagaagcacgagtactggttcgccgtgccccaggagagaaccgaccacctgtacgccttcttcatccagtggagccccgagatctacgccgaggacaccggcgagtacaccagagagcccggcttcatcgtggtgaagaagatcgaggagagcgagaccatcgaggacagcagcaaccaggccgccgccagagagtgggagatcaccaccagagaggacatcaacagcaagcaggtggccaccgtgaaggccgacctggagagcgagagcttcagacccaacctgagcgaccccagcgagctgctgctgcccgaccagatcgagaagctgaccaagcacctgccccccagaaccatcggctacccctggaccctggtgtacggcaccggcaagcacggcaccagcctgaagaccctgtacagaaccatgaccggcctggacacccccgtgctgatggtgatcaaggacagcgacggccaggtgttcggcgccctggccagcgagcccctgaaggtgagcgacggcttctacggcaccggcgagaccttcgtgttcaccttctgccccgagttcgaggtgttcaagtggaccggcgacaacatgttcttcatcaagggcgacatggacagcctggccttcggcggcggcggcggcgagttcgccctgtggctggacggcgacctgtaccacggcagaagccacagctgcaagaccttcggcaacagaaccctgagcaagaaggaggacttcttcatccaggacatcgagatctgggccttcgagtag

SEQ ID NO: 254787 - DNA, 885 bp, Artificial Sequence
  derived and/or modified sequence
atgcagcagaccaagcagcagagagagaacatccagcaggtgagccagaaggaggccaagcacaagatcaccagcgccgacggccacatcgagagcagcgccctgctgaaggagaagcagagacacagactgcacaagttcctgtgcctgagagtgggcaagcccatgagaaagaccttcgtgagccaggccagcgccaccatgcagcagtacgcccagagagacaagaagcacgagtactggttcgccgtgccccaggagagaaccgaccacctgtacgccttcttcatccagtggagccccgagatctacgccgaggacaccggcgagtacaccagagagcccggcttcatcgtggtgaagaagatcgaggagagcgagaccatcgaggacagcagcaaccaggccgccgccagagagtgggagctgaccaagcacctgccccccagaaccatcggctacccctggaccctggtgtacggcaccggcaagcacggcaccagcctgaagaccctgtacagaaccatgaccggcctggacacccccgtgctgatggtgatcaaggacagcgacggccaggtgttcggcgccctggccagcgagcccctgaaggtgagcgacggcttctacggcaccggcgagaccttcgtgttcaccttctgccccgagttcgaggtgttcaagtggaccggcgacaacatgttcttcatcaagggcgacatggacagcctggccttcggcggcggcggcggcgagttcgccctgtggctggacggcgacctgtaccacggcagaagccacagctgcaagaccttcggcaacagaaccctgagcaagaaggaggacttcttcatccaggacatcgagatctgggccttcgagtag

SEQ ID NO: 254788 - protein, 328 aa, Artificial Sequence
  derived and/or modified sequence
MVVFGTTFFNFDSFIGKTDSIEIIGKSVFPYCYHNILPLLNDSGRYSLGDARRPLHETAVLVEDVVHTQLINLLQQAAEVSQLRGARVITPEDLLFLMRKDKKKLRRLLKYMFIRDYKSKIVKGIDEDDLLEDKLSGSNNANKRQKIAQDFLNSIDQTGELLAMFEDDEIDEVKQERMERAERQTRIMDSAQYAEFCESRQLSFSKKASKFRDWLDCSSMEIKPNVVAMEILAYLAYETVAQLVDLALLVRQDMVTKAGDPFSHAISATFIQYHNSAESTAACGVEAHSDAIQPCHIREAIRRYSHRIGPLSPFTNAYRRNGMAFLAC

SEQ ID NO: 254789 - DNA, 987 bp, Artificial Sequence
  derived and/or modified sequence
atggtggtcttcggcaccactttcttcaactttgattcgtttatcgggaagacagactcgattgagataatcgggaaatctgtgtttccatactgttaccacaatattctccccctgctcaatgacagcggtaggtactctcttggagacgctcgcaggcctctgcatgagaccgcagttctcgtggaagacgtagtccatacccagctgatcaacctgcttcagcaggccgctgaggtgtcccagttgcggggcgcccgtgttattacccccgaagacctgctgtttcttatgcgcaaggataaaaagaagctccgccgactcctcaaatacatgtttatcagagactataagtcaaagatagtcaaaggcatcgacgaggatgatttgctggaggataagctgtcggggagcaataacgctaacaaacgccaaaagatcgcacaggattttttaaacagtattgatcagacaggtgagctgcttgccatgtttgaagacgatgagatcgatgaagtgaagcaggaacgcatggagcgagccgaacgacaaactaggattatggactccgcccaatacgccgaattttgcgagagccgtcagctatcttttagcaaaaaggcctctaaattcagggattggctggattgcagcagcatggaaatcaagccgaatgttgttgcgatggaaatcctcgcatacctcgcctatgagacagtcgcccagctggtggatctagcgctccttgtccgccaagatatggttaccaaggccggcgaccctttttctcatgccatcagcgctacttttattcagtaccacaacagcgccgagtctaccgccgcgtgcggagtggaggcccatagcgacgctattcaaccctgtcacattcgtgaagctataagaaggtacagccatagaattggtcctttgagcccattcaccaacgcatataggcgcaacggaatggccttcctggcttgctag

SEQ ID NO: 254790 - DNA, 987 bp, Artificial Sequence
  derived and/or modified sequence
atggtcgtatttggtaccacttttttcaatttcgactcattcatcggaaagaccgatagcattgaaatcattggaaagtcggtcttcccatactgctatcacaatatccttcctctcctcaacgattcaggccgatatagcctgggagacgctagacggccattgcacgaaacagcagttctcgtggaggatgtagttcatactcagctgattaatttgctgcaacaagcggcagaagtgagccaactgaggggggctagagttatcacccctgaggacctgctctttttgatgaggaaggacaaaaaaaagttgcgtcgattattaaaatacatgtttatacgtgattataaaagcaaaatcgttaagggcatcgatgaggatgacctgctcgaggacaaactttctggatcaaacaatgccaataagcggcagaagatcgcccaggactttctgaatagcattgaccagactggagaactgttggctatgtttgaggacgacgagatcgatgaggttaaacaggaaagaatggaaagagcggagcgacaaacacgcattatggacagtgctcagtacgccgaattttgcgagtccaggcaactgtccttttctaaaaaggcctctaagttcagggattggctggactgcagttccatggagattaagcccaacgtggtggcgatggaaattctggcctatctagcttacgagacggtggcacagttagtggatttggctctattggtacgacaggatatggtcaccaaggccggcgatcctttctcgcacgccatctctgctacatttatacagtaccacaacagcgccgaatctacagctgcatgcggtgtcgaagcccacagcgacgctattcaaccttgccatatccgcgaggccattagaagatattcacaccgcataggtcccctgtctccctttacaaatgcataccgacgaaacggtatggcattccttgcatgctag

SEQ ID NO: 254791 - DNA, 987 bp, Artificial Sequence
  derived and/or modified sequence
atggtggtgtttggcaccaccttcttcaactttgacagcttcatcggcaagacagacagcattgagatcatcggcaagtctgtgttcccctactgctaccacaacatcctgcccctgctgaatgattctggccgctacagcctgggagatgcccggcggcccctgcacgagacagctgtgctggtggaggatgtggtgcacacccagctgatcaacctgctgcagcaggccgctgaggtgtcccagctgcggggggcccgggtcatcaccccagaggacctgctcttcctgatgaggaaggacaagaagaagctgcggcggctgctgaagtacatgttcatccgggactacaagagcaagatcgtgaagggcattgatgaagatgacctgctggaggacaagctgagcggcagcaacaatgccaacaagaggcagaagatcgcccaggacttcctgaacagcattgaccagacaggagagctgctggccatgtttgaagatgatgaaattgatgaggtgaagcaggagaggatggagagagctgagcggcagacccgcatcatggacagcgcccagtatgcagagttctgtgagagccggcagctgtccttcagcaagaaggccagcaagttccgggactggctggactgcagctccatggagatcaagcccaacgtggtggccatggagatcctggcctacctggcctatgaaacagtggcccagctggtggacctggccctgctggtgcggcaggacatggtgaccaaggccggggaccccttcagccacgccatcagcgccaccttcatccagtaccacaacagcgctgagagcacagctgcctgtggggtggaggcccacagtgatgccatccagccctgccacatccgggaggccatccgccgctacagccaccgcatcggccccctgagccccttcaccaatgcctacagaagaaatggcatggccttcctggcctgctag

SEQ ID NO: 254792 - DNA, 987 bp, Artificial Sequence
  derived and/or modified sequence
atggtggtgttcggcaccaccttcttcaacttcgacagcttcatcgggaaaactgactccatcgagatcataggcaagagcgtgttcccctactgttaccacaacatccttccccttctgaacgattcgggccggtacagtctgggcgatgccaggaggcctcttcacgagaccgccgtgctggtggaggacgtcgtccacacccagttgattaaccttcttcaacaggcagccgaggtatctcagctgcgaggtgcacgggtgattaccccagaagacttacttttcctcatgcggaaggataaaaagaagctgcgcaggctactgaagtacatgttcatccgggactataagtctaaaatcgtaaaggggattgatgaggatgatctcttggaggataagctgtccgggagcaacaatgccaacaagagacagaaaatagctcaagatttcctcaactcaatcgaccagactggagaactgcttgcgatgttcgaggatgacgaaattgatgaggtgaagcaggagagaatggaacgggccgagagacagactagaataatggacagtgcccagtatgctgaattctgcgagtccaggcagctgagtttctccaagaaggccagtaagtttcgcgattggctggactgctcatctatggaaatcaaaccgaatgttgtcgcaatggagatcctggcctaccttgcatatgagaccgtggcacagcttgtggatctggccctcttggttcggcaggatatggtcacaaaggccggcgatcctttctctcatgcgatttcagccacttttattcaatatcataattccgccgaatcaacagccgcctgtggggtggaagcacactcggacgccattcaaccctgtcacattagagaggcaattagaagatacagccatagaattggccccctgtcaccctttacaaacgcctataggagaaacggtatggccttcctggcttgctag

SEQ ID NO: 254793 - DNA, 987 bp, Artificial Sequence
  derived and/or modified sequence
atggtggtgttcggcaccaccttcttcaacttcgacagcttcatcggcaagactgattccattgagattatcggcaagtccgtgtttccctactgttatcataacatcctgcccttacttaacgatagcggccgttatagtcttggcgacgccagaaggcctcttcacgaaacggcggtgctcgtagaggacgtggtccatacacaactgatcaacctgttgcagcaggcggcagaggtctcccagcttcggggcgcacgggtgatcaccccggaggacctgttgttccttatgcgaaaggacaagaagaagttgaggcgactgttaaagtacatgttcatcagggattacaagagcaagattgtgaagggcatcgacgaagatgatcttctggaagataagctgtcagggtccaacaatgctaataagcggcagaaaatcgcccaggatttcctgaactctatagatcagacgggcgaattgctggcgatgtttgaggacgacgagattgatgaggtaaagcaggaacgaatggagagggctgagagacagactagaattatggactcagcgcagtacgctgagttttgcgaatcccgacagctgagttttagtaagaaagctagtaaattcagagactggctcgattgctccagcatggaaatcaagcctaatgtggtggccatggaaatcctggcttatcttgcctatgaaacagtggcacaattagtggacctcgccctgctcgttcgccaggacatggtgactaaggcaggcgaccctttctcacatgccatctccgccacttttattcagtaccacaattcagccgagtcaactgcagcctgcggcgtggaggcccactcagatgctatacaaccctgccacatccgtgaggcgatcaggcggtacagtcaccggattggtcctctgagcccttttaccaacgcctataggagaaatggtatggctttcctggcatgctag

SEQ ID NO: 254794 - DNA, 2389 bp, Artificial Sequence
  derived and/or modified sequence
cacagccgagtcaccttttccctttctacactccacactctcagtcccccaccccgcccctttccaagcgtgtcccgggccgcagcagcagaaaccgcaccatctccacccccacattctcctcgcgggaagcgcagcagtgcctccaagggttcttaaagcagagatgaataatacggcagctagtccaatgtctactgcaacttcaagtagtggaaggagtacagggaagtctataagctttgcaacagaattacagagtatgataaactgcttatcaataacagctgtagcactgtggcttttctccatggactcatggtggtctttggaacaacgttcttcaactttgacagcttcatagggaaaacagattctatagaaataattggaaaatcagtttttccctattgttatcacaatatccttccactgctgaatgattctggcaggtattctttaggtgatgctagaaggcctcttcatgaaacagcagttttggtagaagatgtggtacacactcagttaattaatctgttacagcaagctgctgaagtttctcagctgcggggagcaagggtaatcactcctgaagatcttctgtttttgatgcgcaaagataagaaaaaacttagaagactgctaaaatacatgtttatccgagactacaaatcaaagattgtcaaaggcatcgatgaggatgatcttctcgaagacaaattgagtggcagcaataatgcgaacaaaagacaaaagattgctcaggacttcctcaactctattgaccagacaggagaacttttagcaatgtttgaagatgacgaaattgatgaagttaaacaagaaagaatggagagagcagaaagacaaactcgaattatggattcagctcaatatgcagaattctgtgaaagtcgacaattaagtttctccaaaaaagcttccaaatttcgagactggttggactgcagcagtatggagataaaacccaatgttgtcgcaatggaaatcttagcatatttagcgtatgaaactgtggcacagttagtggatctggctcttcttgtgaggcaagacatggtaaccaaggcaggggaccccttcagccatgccatttctgcaaccttcattcagtatcacaactctgctgagagcactgcagcctgtggtgttgaggctcacagcgatgccatccagccctgccacatcagagaggccattcgacgctacagccacaggattggcccactttccccattcacaaatgcctaccgcaggaatgggatggcttttctagcctgctgatgtgacaactgtgatgtgcctgcaacaacaggaaaggcaatgttatattaaggtgatttcttgtgaacaaaataaaatacaaatttacctttcttttatctgagggagtgggctggtctgttgtgactttcaacttgctgactcctcctcttttccagcccctcaaccatcggtcttgtttactagatgggctgttcagctaattaatggcaggatgtttaggatagtctgtaggtggacaagaatgcagatcacacagttttgaaattttaatttgagtagatttactgccctcagctcacataccttaaaagcagtggttgcccccgtccagcgttttgtctgcattttatttgatatattttataatccaggtttggaacaaggaaacaaaattaaaaggacagtgagttttcgccttcccttacaccaccaactttactttccaacatttgttgacatgtgttttagtgacagctatccattttataaacttacagtaatcaaagatctaacagacctgataaatcacctgttcccacctcctttccccttcactccacttatagtatgtgtcattttcaatgcctgcttcccaacttcctgccatctgcctttcatgtgtgtttttcctcacacagaacctcttcctccatcttcatttccctccttttcctgttcctccaatccccagatccaccactcctgcacatgccatacacatttagaagccaagtattcagaatcagtagaaggggagcagagtgatttcttgcttcctcccttcaaagcactaccacacctagactggaaatgtgggctgggtaatttcttgctgttagcagccgagctacccttctggcatctatactttctccagtaaatgaggaaccgtaactctttggaacaaaccaaaatatagcagatgtaattgtacagttcctgattaaacttcagttgcaaaaaagaaagttatttctttaattctgtgggagttttgtataattttacttttatggtttttacacatacttgaaacactctttctaaagaattaataaaaacagaaatgagaaacatgaaa

SEQ ID NO: 254795 - DNA, 987 bp, Artificial Sequence
  derived and/or modified sequence
atggtggtctttggaacaacgttcttcaactttgacagcttcatagggaaaacagattctatagaaataattggaaaatcagtttttccctattgttatcacaatatccttccactgctgaatgattctggcaggtattctttaggtgatgctagaaggcctcttcatgaaacagcagttttggtagaagatgtggtacacactcagttaattaatctgttacagcaagctgctgaagtttctcagctgcggggagcaagggtaatcactcctgaagatcttctgtttttgatgcgcaaagataagaaaaaacttagaagactgctaaaatacatgtttatccgagactacaaatcaaagattgtcaaaggcatcgatgaggatgatcttctcgaagacaaattgagtggcagcaataatgcgaacaaaagacaaaagattgctcaggacttcctcaactctattgaccagacaggagaacttttagcaatgtttgaagatgacgaaattgatgaagttaaacaagaaagaatggagagagcagaaagacaaactcgaattatggattcagctcaatatgcagaattctgtgaaagtcgacaattaagtttctccaaaaaagcttccaaatttcgagactggttggactgcagcagtatggagataaaacccaatgttgtcgcaatggaaatcttagcatatttagcgtatgaaactgtggcacagttagtggatctggctcttcttgtgaggcaagacatggtaaccaaggcaggggaccccttcagccatgccatttctgcaaccttcattcagtatcacaactctgctgagagcactgcagcctgtggtgttgaggctcacagcgatgccatccagccctgccacatcagagaggccattcgacgctacagccacaggattggcccactttccccattcacaaatgcctaccgcaggaatgggatggcttttctagcctgctga

SEQ ID NO: 254796 - DNA, 987 bp, Artificial Sequence
  derived and/or modified sequence
atggtggttttcggtaccacgtttttcaattttgattcatttattggcaagacggacagtatcgagattatcgggaagtccgtgtttccttactgttatcacaatatcctcccactcctaaacgactcaggtcgttactcactgggggatgctcgtagacctctgcacgagaccgccgtgctggtcgaggacgtcgtccatacacagttgattaacctcctccagcaggcagccgaggtcagccagctccgcggtgcccgagtaatcacacccgaagatctgctgtttttgatgcgaaaggacaagaagaaattgagacggcttctaaaatacatgtttatccgagactacaaatctaagattgttaaaggaatagacgaggacgatctgctggaggacaaattatccggctctaacaacgcaaataagcgccagaagatagcacaggattttctcaatagcattgatcaaactggagagctcctggctatgttcgaagatgatgagatagatgaggtgaaacaggagcggatggaacgggctgaacggcaaaccaggatcatggattctgcccagtacgcagagttttgcgagtcaagacagctctctttctccaaaaaagctagtaagtttagggactggttagactgcagttccatggagattaagccaaatgtagtagctatggaaatattagcatacttggcttatgaaacagtagctcagctcgtcgacttggccctgctggtgaggcaagacatggtgactaaggcaggggatcctttctctcatgccatctccgctaccttcatccagtatcataacagtgctgagagtaccgccgcatgcggcgtcgaggctcactcagatgctatccagccatgtcacatccgggaagccatccggcgttactctcacaggattggcccactgtcaccctttactaatgcttacagaaggaacggtatggcctttttagcatgttag

SEQ ID NO: 254797 - DNA, 987 bp, Artificial Sequence
  derived and/or modified sequence
atggtggtatttggcaccacctttttcaattttgactccttcattgggaagaccgacagcattgagattattgggaaatcagtctttccctattgttaccacaatatcctgcctctgctgaacgacagcggccgatacagtttgggggacgcccgtagaccactccacgagactgcagtgctcgttgaagatgtcgttcatactcagctgatcaacctcctgcagcaagcggcagaagtgtcacagctgcggggtgcacgcgtgataacgcctgaagacttgcttttcctgatgcgaaaagacaaaaagaaactccgacgcctgcttaagtacatgttcatccgcgactataaatcaaagattgtcaagggcatcgatgaggacgatctgttggaggataagctcagtggatcaaacaacgccaacaaaaggcaaaaaatagcacaggattttctgaacagcatcgaccaaacaggagaacttcttgccatgttcgaagatgacgagattgatgaggtcaagcaagagaggatggaaagagcggagcggcagacacggatcatggacagtgcccagtacgctgagttctgcgagagcagacagctatcatttagtaaaaaggctagcaaattccgggattggctggactgctcctctatggagatcaagcccaacgtggttgcgatggagatcctggcctatttggcatatgaaaccgttgcgcaactcgtagatctggcactgttggtcaggcaggacatggtgacaaaggccggtgatcccttttctcacgctatcagtgcgaccttcatacagtatcataactctgctgaatcgactgccgcttgcggtgttgaagcacattccgacgccatacagccttgtcacatcagggaagccataagaaggtacagtcaccgtatcggcccactgtcccccttcaccaatgcttatcgccgaaatgggatggcttttttagcctgttag

SEQ ID NO: 254798 - DNA, 987 bp, Artificial Sequence
  derived and/or modified sequence
atggtggtgttcggcaccaccttcttcaacttcgacagcttcatcggcaagaccgacagcatcgagatcatcggcaagagcgtgttcccctactgctaccacaacatcctgcccctgctgaacgacagcggcagatacagcctgggcgacgccagaagacccctgcacgagaccgccgtgctggtggaggacgtggtgcacacccagctgatcaacctgctgcagcaggccgccgaggtgagccagctgagaggcgccagagtgatcacccccgaggacctgctgttcctgatgagaaaggacaagaagaagctgagaagactgctgaagtacatgttcatcagagactacaagagcaagatcgtgaagggcatcgacgaggacgacctgctggaggacaagctgagcggcagcaacaacgccaacaagagacagaagatcgcccaggacttcctgaacagcatcgaccagaccggcgagctgctggccatgttcgaggacgacgagatcgacgaggtgaagcaggagagaatggagagagccgagagacagaccagaatcatggacagcgcccagtacgccgagttctgcgagagcagacagctgagcttcagcaagaaggccagcaagttcagagactggctggactgcagcagcatggagatcaagcccaacgtggtggccatggagatcctggcctacctggcctacgagaccgtggcccagctggtggacctggccctgctggtgagacaggacatggtgaccaaggccggcgaccccttcagccacgccatcagcgccaccttcatccagtaccacaacagcgccgagagcaccgccgcctgcggcgtggaggcccacagcgacgccatccagccctgccacatcagagaggccatcagaagatacagccacagaatcggccccctgagccccttcaccaacgcctacagaagaaacggcatggccttcctggcctgctag

SEQ ID NO: 254799 - protein, 365 aa, Artificial Sequence [sequence omitted]

SEQ ID NO: 254800 - DNA, 1098 bp, Artificial Sequence
  derived and/or modified sequence
atgctggctgttggctgtgccctactggcagctttgctggctgctccaggagccgcactggcccctcgcaggtgccctgcccaggaggtggcccgaggcgtccttacctcgctccctggcgattctgtgactcttacctgcccgggggtggagccagaggacaatgccacagtacattgggtcctgcgcaaacccgccgctggatctcacccatctaggtgggcagggatggggcgaaggctcctgctaaggtcagtacagctgcacgacagtggaaattactcctgctaccgcgccggccggcctgctgggacagtgcaccttttggtggacgttcctcccgaggagccacaactgagttgtttcaggaagtctccccttagtaatgttgtgtgtgaatggggacctcgctccaccccttccttgactacgaaggccgtgctgctggtgcgcaagtttcagaattcacctgccgaggactttcaggagccttgtcagtactcacaggagagccagaagttcagttgtcaactggctgttccagaaggagacagttctttctatattgtgagcatgtgcgtcgcctctagtgtgggttcgaagtttagtaaaacgcaaaccttccagggatgcggcatactacagcccgatccaccagcgaatattacagtgaccgccgtggctcgcaatccaaggtggctctctgtgacgtggcaagatccccactcctggaactctagcttttataggctccgctttgaattacggtacagggctgagagatctaagacatttacaacctggatggttaaggatcttcagcaccactgtgtcatccacgatgcttggagtggactccgccatgtagttcaactcagggcccaggaggagttcggacaaggcgagtggtcggagtggtccccagaagctatgggtaccccttggacagagtctagatcgcctccagctgaaaatgaagtcagtactcccatgcaggcattgaccaccaataaagacgatgacaatatcttattcagagattcagctaacgctacttcgttacctggaagtagaaggagaggtagttgtggcctttag

SEQ ID NO: 254801 - DNA, 3217 bp, Artificial Sequence
  derived and/or modified sequence
ggcgctgtggcaggaagccaccccctcggtcggccggtgcgcggggctgttgcgccatccgctccggctttcgtaaccgcaccctgggacggcccagagacgctccagcgcgagttcctcaaatgttttcctgcgttgccaggaccgtccgccgctctgagtcatgtgcgagtgggaagtcgcactgacactgagccgggccagagggagaggagccgagcgcggcgcggggccgagggactcgcagtgtgtgtagagagccgggctcctgcggatgggggctgcccccggggcctgagcccgcctgcccgcccaccgccccgccccgcccctgccacccctgccgcccggttcccattagcctgtccgcctctgcgggaccatggagtggtagccgaggaggaagcatgctggccgtcggctgcgcgctgctggctgccctgctggccgcgccgggagcggcgctggccccaaggcgctgccctgcgcaggaggtggcgagaggcgtgctgaccagtctgccaggagacagcgtgactctgacctgcccgggggtagagccggaagacaatgccactgttcactgggtgctcaggaagccggctgcaggctcccaccccagcagatgggctggcatgggaaggaggctgctgctgaggtcggtgcagctccacgactctggaaactattcatgctaccgggccggccgcccagctgggactgtgcacttgctggtggatgttccccccgaggagccccagctctcctgcttccggaagagccccctcagcaatgttgtttgtgagtggggtcctcggagcaccccatccctgacgacaaaggctgtgctcttggtgaggaagtttcagaacagtccggccgaagacttccaggagccgtgccagtattcccaggagtcccagaagttctcctgccagttagcagtcccggagggagacagctctttctacatagtgtccatgtgcgtcgccagtagtgtcgggagcaagttcagcaaaactcaaacctttcagggttgtggaatcttgcagcctgatccgcctgccaacatcacagtcactgccgtggccagaaacccccgctggctcagtgtcacctggcaagacccccactcctggaactcatctttctacagactacggtttgagctcagatatcgggctgaacggtcaaagacattcacaacatggatggtcaaggacctccagcatcactgtgtcatccacgacgcctggagcggcctgaggcacgtggtgcagcttcgtgcccaggaggagttcgggcaaggcgagtggagcgagtggagcccggaggccatgggcacgccttggacagaatccaggagtcctccagctgagaacgaggtgtccacccccatgcaggcacttactactaataaagacgatgataatattctcttcagagattctgcaaatgcgacaagcctcccaggttcaagaagacgtggaagctgcgggctctgaaggaaggcaagacaagcatgcatccgccgtactctttggggcagctggtcccggagaggcctcgacccaccccagtgcttgttcctctcatctccccaccggtgtcccccagcagcctggggtctgacaatacctcgagccacaaccgaccagatgccagggacccacggagcccttatgacatcagcaatacagactacttcttccccagatagctggctgggtggcaccagcagcctggaccctgtggatgataaaacacaaacgggctcagcaaaagatgcttctcactgccatgccagcttatctcaggggtgtgcggcctttggcttcacggaagagccttgcggaaggttctacgccaggggaaaatcagcctgctccagctgttcagctggttgaggtttcaaacctccctttccaaatgcccagcttaaaggggctagagtgaacttgggccactgtgaagagaaccatatcaagactctttggacactcacacggacactcaaaagctgggcaggttggtgggggcctcggtgtggagaagcggctggcagcccacccctcaacacctctgcacaagctgcaccctcaggcaggtgggatggatttccagccaaagcctcctccagccgccatgctcctggcccactgcatcgtttcatcttccaactcaaactcttaaaacccaagtgccttagcaaattctgtttttctaggcctggggacggcttttacttaaaccgccaaggctgggggaagaagctctctcctccctttcttccctacagttgaaaaacagctgagggtgagtgggtgaataatacagtatctcagggcctggtcgttttcaacagaattataattagttcctcattagcattttgctaaatgtgaatgatgatcctaggcatttgctgaatacagaggcaactgcattggctttgggttgcaggacctcaggtgagaagcagaggaaggagaggagaggggcacagggtctctaccatcccctgtagagtgggagctgagtgggggatcacagcctctgaaaaccaatgttctctcttctccacctcccacaaaggagagctagcagcagggagggcttctgccatttctgagatcaaaacggttttactgcagctttgtttgttgtcagctgaacctgggtaactagggaagataatattaaggaagacaatgtgaaaagaaaaatgagcctggcaagaatgtgtttaaacttggtttttaaaaaactgctgactgttttctcttgagagggtggaatatccaatattcgctgtgtcagcatagaagtaacttacttaggtgtgggggaagcaccataactttgtttagcccaaaaccaagtcaagtgaaaaaggaggaagagaaaaaatattttcctgccaggcatggtggcccacgcacttcgggaggtcgaggcaggaggatcacttgagtccagaagtttgagatcagcctgggcaatgtgataaaaccccatctctacaaaaagcataaaaattagccaagtgtggtagagtgtgcctgaagtcccagatacttggggggctgaggtgggaggatctcttgagcctgggaggtcaaggctgcagtgagccgagattgcaccactgcactccagcctgggtgacagagcaagtgagaccctgtctcaaaaaaagaaaaagaaaaagaaaaaa

SEQ ID NO: 254802 - DNA, 1098 bp, Artificial Sequence
  derived and/or modified sequence
atgctggccgtgggctgtgccctgctggccgccctgctggccgcccctggggccgccctggccccccggcgctgcccagcccaggaggtggcccggggcgtgctgaccagcctgcccggggacagcgtgaccctgacctgccctggggtggagccagaagataatgccaccgtgcactgggtgctgaggaagccagctgctggcagccaccccagccgctgggccggcatgggccgccgcctgctgctgcggtctgtgcagctgcatgattctggcaactacagctgctacagagctggccggcctgctggcaccgtgcacctgctggtggatgtgcccccagaggagccccagctgagctgcttcaggaagagccccctgagcaatgtggtgtgtgagtggggccccaggagcacccccagcctgaccaccaaggctgtgctgctggtgaggaagttccagaacagccctgctgaggacttccaggagccctgccagtacagccaggagagccagaagttcagctgccagctggccgtgcctgagggggacagcagcttctacatcgtgtccatgtgtgtggccagctctgtgggcagcaagttcagcaagacccagaccttccagggctgcggcatcctgcagcctgaccccccagccaacatcaccgtgacagctgtggccaggaacccccgctggctgtctgtgacctggcaggacccccacagctggaacagcagcttctaccgcctgcgctttgagctgcgctacagagctgagaggagcaagaccttcaccacctggatggtgaaggacctgcagcaccactgtgtgattcatgatgcctggagcggcctgcggcacgtggtgcagctgcgggcccaggaggagtttggccagggcgagtggagcgagtggagccctgaggccatgggcaccccctggacagagagccgcagccccccagcagaaaatgaggtgtccacccccatgcaggccctgaccaccaacaaggatgatgacaacatcctcttccgggacagcgccaatgccaccagcctgcccggcagcagaagaagaggcagctgtggcctgtag

SEQ ID NO: 254803 - DNA, 1098 bp, Artificial Sequence
  derived and/or modified sequence
atgctggccgtgggctgcgccctgctggccgccctgctggccgcccccggggcggctctagccccacgaagatgccccgcccaggaggtagccagaggggtgctcactagcctgcctggggactccgtgacactcacttgtccaggcgttgagccggaggataatgccacggttcattgggtccttagaaagccagccgctggctcacatcctagtaggtgggcagggatgggtaggaggctgttgctccgtagcgtgcagctgcatgattccggaaattacagctgctatagggcaggccgtccggctggtaccgtccacctcctggtggacgttccccctgaagaaccccagctttcctgcttccggaagagcccgttatctaatgtggtttgcgagtggggtccgcggtcaacccccagcctgaccactaaggcggttttgctcgttcggaaattccaaaacagcccggctgaggactttcaagagccctgccagtactcccaagaatcacagaagttttcttgtcaactggctgtccccgagggggactctagcttctatatcgtgtccatgtgtgtcgcctccagcgtaggctctaagttttctaaaacacagaccttccagggctgtggcattcttcagcctgacccacccgcgaacattactgtgaccgctgtcgcacggaatccacgttggctgtcagtcacatggcaggacccacatagttggaattccagtttctataggctccggtttgagcttaggtacagggctgagcgaagcaaaacgttcacaacctggatggtgaaagacctgcagcatcattgtgtgatccacgacgcctggtcagggcttaggcacgtagtgcagttacgcgcccaggaggaattcggccagggagaatggtctgagtggagcccagaagccatggggaccccgtggaccgaaagtaggagccccccagcagaaaatgaggtgtccacccccatgcaggcccttactactaataaggacgacgataatatcttgtttagggattctgcaaatgctacttctctccctggtagcaggcgaagaggcagctgtgggctgtag

SEQ ID NO: 254804 - DNA, 1098 bp, Artificial Sequence
  derived and/or modified sequence
atgttggctgtcggctgtgcgttactggcggctctcttggccgcaccaggagcggctctggccccaagaaggtgcccagcacaggaagtagcgagaggggtgctaaccagtttaccaggcgattcagtgaccttaacttgtcctggcgtggaaccagaagataacgccactgtgcattgggtgcttagaaagcccgctgcaggatcccaccctagccgatgggccggaatggggagaaggctgctcctgagatccgttcagctacatgattccgggaactatagctgctacagggccggaaggcccgctggtacagttcatctgttagttgacgtaccccctgaagaacctcagctgtcttgctttagaaaatccccattgagtaatgtagtgtgcgagtgggggcctagaagcacccctagtctaacaaccaaggctgtgcttcttgtgagaaagtttcaaaatagcccggctgaggactttcaggaaccatgtcagtacagtcaggaatcccagaaatttagctgtcaactggccgttccagaaggtgattcgagcttttatattgtcagcatgtgtgtggccagcagcgtcgggagtaagttcagcaagacacagacctttcagggttgcggtatcctacagcctgatccccctgccaacattactgtgacagcagtcgctcggaatccaagatggctctcagtgacctggcaggatccccactcatggaatagctcattctatcgcctgcgatttgagctgaggtaccgcgctgaaaggtctaagacctttacgacctggatggtgaaagatctgcagcatcattgcgtcattcatgatgcctggtccggcttaaggcacgtagtccagttgagagcgcaggaggaattcggccagggtgaatggtcagagtggtcaccagaagcaatggggactccgtggacagaatcccggtctcctccagccgagaatgaagtctccaccccaatgcaggccttaaccaccaacaaggatgacgacaatatcctatttcgggattctgcaaacgcaaccagcttgcctggtagtcggagacggggaagttgtgggttatag

SEQ ID NO: 254805 - DNA, 1098 bp, Artificial Sequence
  derived and/or modified sequence
atgctggccgtgggctgcgccctgctggccgccctgctggccgcccccggcgccgccctggcccccagaagatgccccgcccaggaggtggccagaggcgtgctgaccagcctgcccggcgacagcgtgaccctgacctgccccggcgtggagcccgaggacaacgccaccgtgcactgggtgctgagaaagcccgccgccggcagccaccccagcagatgggccggcatgggcagaagactgctgctgagaagcgtgcagctgcacgacagcggcaactacagctgctacagagccggcagacccgccggcaccgtgcacctgctggtggacgtgccccccgaggagccccagctgagctgcttcagaaagagccccctgagcaacgtggtgtgcgagtggggccccagaagcacccccagcctgaccaccaaggccgtgctgctggtgagaaagttccagaacagccccgccgaggacttccaggagccctgccagtacagccaggagagccagaagttcagctgccagctggccgtgcccgagggcgacagcagcttctacatcgtgagcatgtgcgtggccagcagcgtgggcagcaagttcagcaagacccagaccttccagggctgcggcatcctgcagcccgacccccccgccaacatcaccgtgaccgccgtggccagaaaccccagatggctgagcgtgacctggcaggacccccacagctggaacagcagcttctacagactgagattcgagctgagatacagagccgagagaagcaagaccttcaccacctggatggtgaaggacctgcagcaccactgcgtgatccacgacgcctggagcggcctgagacacgtggtgcagctgagagcccaggaggagttcggccagggcgagtggagcgagtggagccccgaggccatgggcaccccctggaccgagagcagaagcccccccgccgagaacgaggtgagcacccccatgcaggccctgaccaccaacaaggacgacgacaacatcctgttcagagacagcgccaacgccaccagcctgcccggcagcagaagaagaggcagctgcggcctgtag

SEQ ID NO: 254806 - protein, 196 aa, Artificial Sequence
  derived and/or modified sequence
MWTLGRRAVAGLLASPSPAQAQTLTRVPRPAELAPLCGRRGLRTDIDATCTPRRASSNQRGLNQIWNVKKQSVYLMNLRKSGTLGHPGSLDETTYERLAEETLDSLAEFFEDLADKPYTFEDYDVSFGSGVLTVKLGGDLGTYVINKQTPNKQIWLSSPSRYVVDLSVMTGLGKTGCTPTTACPSMSCWPQSSLKP

SEQ ID NO: 254807 - DNA, 922 bp, Artificial Sequence
  derived and/or modified sequence
gggcggcagacccggagcagcatgtggactctcgggcgccgcgcagtagccggcctcctggcgtcacccagcccagcccaggcccagaccctcacccgggtcccgcggccggcagagttggccccactctgcggccgccgtggcctgcgcaccgacatcgatgcgacctgcacgccccgccgcgcaagttcgaaccaacgtggcctcaaccagatttggaatgtcaaaaagcagagtgtctatttgatgaatttgaggaaatctggaactttgggccacccaggctctctagatgagaccacctatgaaagactagcagaggaaacgctggactctttagcagagttttttgaagaccttgcagacaagccatacacgtttgaggactatgatgtctcctttgggagtggtgtcttaactgtcaaactgggtggagatctaggaacctatgtgatcaacaagcagacgccaaacaagcaaatctggctatcttctccatccaggtatgtagtggacctaagcgttatgactggactgggaaaaactgggtgtactcccacgacggcgtgtccctccatgagctgctggccgcagagctcactaaagccttaaaaaccaaactggacttgtcttccttggcctattccggaaaagatgcttgatgcccagccccgttttaaggacattaaaagctatcaggccaagaccccagcttcattatgcagctgaggtctgttttttgttgttgttgttgtttattttttttattcctgcttttgaggacagttgggctatgtgtcacagctctgtagaaagaatgtgttgcctcctaccttgcccccaagttctgatttttaatttctatggaagattttttggattgtcggatttcctccctcacatgataccccttatcttttat

SEQ ID NO: 254808 - DNA, 591 bp, Artificial Sequence
  derived and/or modified sequence
atgtggacccttgggagacgagcagttgctggcttgttagctagtccaagccctgcccaggcgcagacactgacacgtgttccgcgcccagcagaattagctcccctctgcggccgcagagggttgagaaccgatattgatgccacttgcaccccacgccgagcaagttctaatcagaggggactgaatcagatctggaatgtcaagaagcagtcggtttatctaatgaacctgagaaagagcggtacattaggccatcccggaagtctcgacgaaaccacctacgaaaggctcgcagaggaaacactcgacagtctggcggagtttttcgaggaccttgctgataaaccttatacctttgaggactacgatgtaagttttggctctggagtcctgaccgtcaagctcgggggggacctgggaacatacgttattaacaagcagacaccaaataagcagatttggctgagtagcccaagccggtacgtggttgatctttctgtaatgacaggtcttggcaaaactggatgtacgcccaccactgcttgcccatccatgtcctgttggccccaaagttctctgaagccctag

SEQ ID NO: 254809 - DNA, 591 bp, Artificial Sequence
  derived and/or modified sequence
atgtggaccctgggccggcgggctgtggccggcctgctggccagccccagccctgcccaggcccagaccctgaccagggtgcccaggcctgctgagctggcccccctgtgtggcagaagaggcctgaggacagacattgatgccacctgcaccccaagaagagccagcagcaaccagaggggcctgaaccagatctggaatgtgaagaagcagagcgtgtacctgatgaacctgaggaagagcggcaccctgggccaccctggcagcctggatgagaccacctatgagcggctggccgaggagaccctggacagcctggccgagttctttgaggacctggccgacaagccctacacctttgaagattatgatgtgtcctttggaagtggagtgctgactgtgaagctgggcggggacctgggcacctacgtgatcaacaagcagacccccaacaagcagatctggctgagcagccccagccgctacgtggtggacctgtctgtgatgacaggcctgggcaagacaggctgcacccccaccacagcctgccccagcatgagctgctggccccagagcagcctgaagccctag

SEQ ID NO: 254810 - DNA, 591 bp, Artificial Sequence
  derived and/or modified sequence
atgtggaccctgggccggcgggccgtggccggcctgctggccagcccttccccagctcaagcacagactctgaccagggtgcctagacccgctgaacttgccccactatgtggtcggcggggacttaggactgacatcgacgctacctgcactccacgccgcgcttcttctaaccagcgcggactgaatcaaatctggaacgtgaagaaacagagcgtgtatctgatgaatctgagaaaaagcggcaccctgggtcacccgggaagcctggatgaaaccacttatgagagactggctgaagagacgctggattccctcgctgagtttttcgaagacctggccgacaagccttatacatttgaagattacgacgtcagtttcggctctggtgtgctcacagtgaaactcggaggcgaccttggaacctacgtcatcaataagcagacaccaaacaagcaaatatggctatccagccctagccggtacgtagtagatcttagtgtcatgactgggctgggcaaaaccggttgtaccccaacaaccgcgtgcccaagtatgtcttgctggccacagtctagcctgaaaccctag

SEQ ID NO: 254811 - DNA, 591 bp, Artificial Sequence
  derived and/or modified sequence
atgtggaccctcggacggcgagccgttgccggactgcttgcttctccatcccccgctcaggcccagacactgaccagagtgcctcggcctgcggaactggcccctctctgcggtaggaggggtcttagaacagatattgatgctacatgcacaccacggagggcctcctctaatcagcgcggactgaatcagatttggaacgtgaaaaagcagtccgtgtatctcatgaacctgaggaaaagcggcacactgggacatcccggatccctcgatgaaaccacctacgaacgcctcgccgaagagactctagatagcttagccgagttttttgaagacttggcggataagccatacaccttcgaagactacgacgtatcctttggatctggcgtgttgactgttaagctcggcggagatctgggtacctacgtgatcaacaagcagacaccgaacaagcaaatctggcttagctcaccatcacgatatgtggtcgacctcagcgtgatgacaggactgggaaaaaccggctgcactccaaccaccgcctgtccatctatgtcctgttggccacagtcgtcccttaaaccatag

SEQ ID NO: 254812 - DNA, 591 bp, Artificial Sequence
  derived and/or modified sequence
atgtggaccctgggcagaagagccgtggccggcctgctggccagccccagccccgcccaggcccagaccctgaccagagtgcccagacccgccgagctggcccccctgtgcggcagaagaggcctgagaaccgacatcgacgccacctgcacccccagaagagccagcagcaaccagagaggcctgaaccagatctggaacgtgaagaagcagagcgtgtacctgatgaacctgagaaagagcggcaccctgggccaccccggcagcctggacgagaccacctacgagagactggccgaggagaccctggacagcctggccgagttcttcgaggacctggccgacaagccctacaccttcgaggactacgacgtgagcttcggcagcggcgtgctgaccgtgaagctgggcggcgacctgggcacctacgtgatcaacaagcagacccccaacaagcagatctggctgagcagccccagcagatacgtggtggacctgagcgtgatgaccggcctgggcaagaccggctgcacccccaccaccgcctgccccagcatgagctgctggccccagagcagcctgaagccctag

SEQ ID NO: 254813 - protein, 755 aa, Artificial Sequence
  derived and/or modified sequence
MEYIFPNTGVLWSWLINILCNRRIVWFTSSQLPRGPPASSGGHSFHTLRERSESRLFVESYAAAWQPPGTSGGASCCSSLSAQVMSSEFLAELHWEDGFAIPVANEENKLLEDQLSKLKDERASLQDELREYEERINSMTSHFKNVKQELSITQSLCKARERETESEEHFKAIAQRELGRVKDEIQRLENEMASILEKKSDKENGIFKATQKLDGLKCQMNWDQQALEAWLEESAHKDSDALTLQKYAQQDDNKIRALTLQLERLTLECNQKRKILDNELTETISAQLELDKAAQDFRKIHNERQELIKQWENTIEQMQKRDGDIDNCALELARIKQETREKENLVKEKIKFLESEIGNNTEFEKRISVADRKLLKCRTAYQDHETSRIQLKGELDSLKATVNRTSSDLEALRKNISKIKKDIHEETARLQKTKNHNEIIQTKLKEITEKTMSVEEKATNLEDMLKEEEKDVKEVDVQLNLIKGVLFKKAQELQTETMKEKAVLSEIEGTRSSLKHLNHQLQKLDFETLKQQEIMYSQDFHIQQVERRMSRLKGEINSEEKQALEAKIVELRKSLEEKKSTCGLLETQIKKLHNDLYFIKKAHSKNSDEKQSLMTKINELNLFIDRSEKELDKAKGFKQDLMIEDNLLKLEVKRTREMLHSKAEEVLSLEKRKQQLYTAMEERTEEIKVHKTMLASQIRYVDQERENISTEFRERLSKIEKLKNRYEILTVVMLPPEGEEEKTQAYYVIKVMSMS

SEQ ID NO: 254814 - protein, 941 aa, Artificial Sequence
  derived and/or modified sequence
MSSEFLAELHWEDGFAIPVANEENKLLEDQLSKLKDERASLQDELREYEERINSMTSHFKNVKQELSITQSLCKARERETESEEHFKAIAQRELGRVKDEIQRLENEMASILEKKSDKENGIFKATQKLDGLKCQMNWDQQALEAWLEESAHKDSDALTLQKYAQQDDNKIRALTLQLERLTLECNQKRKILDNELTETISAQLELDKAAQDFRKIHNERQELIKQWENTIEQMQKRDGDIDNCALELARIKQETREKENLVKEKIKFLESEIGNNTEFEKRISVADRKLLKCRTAYQDHETSRIQLKGELDSLKATVNRTSSDLEALRKNISKIKKDIHEETARLQKTKNHNEIIQTKLKEITEKTMSVEEKATNLEDMLKEEEKDVKEVDVQLNLIKGVLFKKAQELQTETMKEKAVLSEIEGTRSSLKHLNHQLQKLDFETLKQQEIMYSQDFHIQQVERRMSRLKGEINSEEKQALEAKIVELRKSLEEKKSTCGLLETQIKKLHNDLYFIKKAHSKNSDEKQSLMTKINELNLFIDRSEKELDKAKGFKQDLMIEDNLLKLEVKRTREMLHSKAEEVLSLEKRKQQLYTAMEERTEEIKVHKTMLASQIRYVDQERENISTEFRERLSKIEKLKNRYEILTVVMLPPEGEEEKTQAYYVIKAAQEKEELQREGDCLDAKINKAEKEIYALENTLQVLNSCNNNYKQSFKKVTPSSDEYELKIQLEEQKRAVDEKYRYKQRQIRELQEDIQSMENTLDVIEHLANNVKEKLSEKQAYSFQLSKETEEQKPKLERVTKQCAKLTKEIRLLKDTKDETMEEQDIKLREMKQFHKVIDEMLVDIIEENTEIRIILQTYFQQSGLELPTASTKGSRQSSRSPSHTSLSARSSRSTSTSTSQSSIKVLELKFPASSSLVGSPSRPSSASSSSSNVKSKKSSK

SEQ ID NO: 254815 - DNA, 2268 bp, Artificial Sequence
  derived and/or modified sequence
atggaatacatcttcccaaacaccggcgtgctttggagttggcttattaacattttgtgcaatcggcgcatcgtctggttcacctccagccaactgcctagaggcccacctgcttcgagcggaggacatagctttcacacgctgcgggaaagatccgagagtcgactgttcgtggagtcctacgctgctgcctggcagcctcctggcacctctggcggcgcctcttgttgttccagccttagcgcccaagtgatgtccagcgagttcctagctgagctgcactgggaggacggcttcgccatccctgtggcaaacgaagaaaacaagctgttggaagatcaactttctaaattgaaggacgagcgcgccagcctgcaggacgaactccgcgagtatgaggagagaattaattccatgacctctcactttaaaaatgtcaagcaagaactgagtattacccagtctttgtgtaaagcacgtgaacgcgagacagaatccgaggagcacttcaaagccattgcccaacgcgaattgggacgtgttaaggatgaaattcaaagactggaaaacgaaatggcatcgattctggaaaaaaagagcgacaaagaaaacggcatcttcaaagccactcaaaagttagacgggctgaagtgtcagatgaactgggatcagcaggctctcgaagcatggctggaagaatcagctcacaaagactcagacgcactgacgctgcagaaatacgcccagcaggacgacaacaagatcagagcgctgacactacagctggaaagactcacccttgagtgcaaccaaaaaaggaagatactggacaatgagctcactgaaactatatctgctcagctcgagctggataaagccgctcaagacttccgcaagatccacaacgaacgacaggagctgataaagcagtgggaaaacaccattgagcagatgcagaaaagggacggagacatagacaattgcgccctcgagttggcccgaattaagcaggaaactcgggaaaaggagaatttggttaaggaaaagatcaagttcttagaaagcgagatcgggaataatacggagttcgaaaagcggataagtgtcgcagacaggaaactcctgaagtgtcggaccgcatatcaggatcatgaaacttcacggattcagcttaagggagaactggattctctgaaagccactgtgaaccggacttcctccgatctggaagccctccggaagaatatcagtaagatcaagaaagatatccacgaggagaccgccaggctccagaagacgaagaaccacaacgagattatccagacaaaactcaaagagattacagagaagactatgtcagtcgaagagaaggcaactaacctggaggatatgttaaaagaagaggaaaaggatgtgaaagaggtcgatgtgcagctgaacctaattaagggtgtgctgttcaaaaaggcacaggaactgcaaacagagaccatgaaggagaaggccgtgctttctgagattgagggcacgagatcctctctgaaacacctgaaccaccagttgcagaaactcgactttgagacacttaagcagcaagagatcatgtattcccaggactttcatattcaacaagttgagaggaggatgagtcggttgaagggcgaaattaacagtgaggagaagcaagctctggaggctaagattgtagagctgcgcaaaagcctggaggagaaaaagagcacatgcggattgctggagacgcagatcaaaaaactgcataatgatctttatttcattaaaaaggcacacagcaagaattcagacgaaaaacagtccttgatgactaagattaacgagttaaacctgttcatcgatcgatccgaaaaagagctcgataaagcgaaaggcttcaagcaggacctgatgattgaggataacctcctgaagttagaagtcaaacgcaccagagagatgctacactctaaagccgaggaggtcctctcccttgaaaagaggaagcagcaactctacaccgcaatggaggaaaggacagaggagatcaaggtacataaaaccatgttggcgagccagatacggtacgtggaccaggaacgggagaacatttctacagaattcagggaacggctctcaaaaattgagaagctgaagaatcggtacgaaatcctgactgttgtgatgctgccccctgagggggaggaggagaaaacgcaggcctactacgtgattaaagtgatgagtatgtcctag

SEQ ID NO: 254816 - DNA, 2826 bp, Artificial Sequence
  derived and/or modified sequence
atgtccagcgaatttctggcggaattgcattgggaggatggcttcgctatcccggtcgccaacgaggagaataaactgctcgaagaccaattgagcaagctgaaggatgagcgagcgtcattgcaagatgagcttagggagtatgaagagcgtataaacagcatgacgtcccattttaaaaacgtgaagcaggaactatccatcacacagagcctgtgcaaggcgcgggaacgagagaccgagtctgaagaacactttaaggctatcgcccaaagagagctcggacgcgtgaaggacgaaatccagcgattagagaatgagatggcatcgatactggagaagaagagcgataaagaaaatggcatcttcaaggctacgcagaagctggatgggctaaagtgtcaaatgaattgggaccagcaggcgctggaggcatggctggaggagagcgcccacaaagacagtgacgcactcacactgcagaaatacgctcagcaagatgacaataaaatcagggccctgaccctgcaactcgagcgtctgactttggagtgtaatcaaaaaaggaagattctggacaatgaactgactgaaactatatcagcacaattggagttagataaggccgcgcaggatttcaggaagatccataatgagcggcaggaactgattaaacagtgggaaaacaccatagaacagatgcaaaaacgggatggcgatatcgataattgcgccctggagctggcaagaatcaaacaagaaacacgggagaaggagaatcttgtgaaggagaagattaaatttcttgaatcagagatcggcaataacacagagttcgagaagaggattagcgtggccgaccgtaagttactgaagtgccgcacagcctatcaagaccatgaaacttctcggattcagctgaagggcgagttagactcactgaaagccaccgtgaatcgcacaagctccgacctggaggctttgagaaagaatatttctaagatcaagaaagatatccatgaggagaccgccaggttacaaaaaactaagaaccacaacgaaattatacaaaccaaactgaaagagatcaccgaaaagaccatgtcggtcgaagaaaaggctactaatctggaagatatgctgaaagaggaagaaaaagacgtgaaggaggttgatgttcagttgaacctgattaaaggtgtgttatttaagaaggcacaggagctgcaaaccgaaacaatgaaggaaaaggcagtccttagcgagatagagggtacaaggtcctcactcaaacacctgaaccaccagttgcagaaactggatttcgagacgctaaagcagcaggagattatgtattctcaagacttccacatccagcaagttgaacgccggatgagcaggctgaaaggagagatcaattccgaggaaaaacaggctcttgaggctaagatagttgaactacgaaaatccctcgaggagaaaaagtcaacctgcggactactggagacacaaatcaaaaaactccataatgatttgtactttatcaagaaagcacattcaaaaaatagtgacgagaagcagtcattaatgacaaagatcaacgagctgaacctgttcattgaccgaagcgaaaaagaattggacaaagccaaaggattcaagcaagatttgatgatagaggacaacctcctcaaactagaagtaaaacggacccgagaaatgctgcacagtaaagcggaagaggtgttgtctttggaaaaacgcaagcagcagctatataccgcaatggaggagcgcactgaagagataaaggtgcacaaaaccatgctggcctcccagattaggtacgtcgaccaggagcgagaaaacatctcaactgagtttcgggagaggctcagtaagatcgaaaaactgaaaaaccgttacgaaatcctgactgtcgtgatgctccccccagaaggagaagaagaaaaaacccaggcttattacgtgattaaagctgctcaggagaaggaggagctccagcgcgagggcgattgtctggacgccaaaattaacaaggcagaaaaggagatttatgcactcgagaacaccttacaggtgctgaattcttgtaacaataattataaacagtcgtttaaaaaagtaactcccagttcggacgagtacgagctgaagattcagctcgaggaacaaaagagggccgtagacgagaagtatcgctacaagcagagacagatcagagagttgcaggaggatattcaatccatggagaataccctagacgtcatcgagcacttagctaacaacgtgaaagaaaagctctcagagaaacaggcttatagcttccaactgtccaaagagaccgaggagcaaaagcccaagctggagcgagtgaccaaacagtgcgctaagctgacaaaggaaataaggctactgaaggatactaaggacgaaaccatggaggagcaggacattaaactgcgggagatgaagcagttccacaaggtcatcgatgagatgctggtggacattatcgaagaaaatactgagatcagaataatcttgcagacgtactttcaacagtctgggctggaattaccaacagcctccacaaagggaagtcggcaatcctctagatccccatcccacacatccctgtccgctcggtcatcaagaagcacgtccacttctacctcccagtcctctataaaggtgttggagctaaagtttcccgcctctagctcgctagtgggtagtccttcgcgtccttcatccgcctcttctagctcttctaacgtcaaatccaagaaatcctcaaaatag

SEQ ID NO: 254817 - DNA, 2268 bp, Artificial Sequence
  derived and/or modified sequence
atggagtacatcttccccaacacaggagtgctgtggagctggctgatcaacatcctgtgcaacagacgcatcgtgtggttcaccagcagccagctgccccggggccccccagccagcagcggcggccacagcttccacaccctgcgggagaggtctgagagccggctgtttgtggagagctatgctgctgcctggcagcccccaggcaccagcggcggggccagctgctgcagcagcctgagcgcccaggtgatgagcagcgagttcctggccgagctgcactgggaggatggctttgccatccctgtggccaatgaggagaacaagctgctggaggaccagctgagcaagctgaaggatgagcgggccagcctgcaggatgagctgcgggagtatgaggagcgcatcaacagcatgaccagccacttcaagaatgtgaagcaggagctgagcatcacccagagcctgtgcaaggcccgggagcgggagacagagagcgaggagcacttcaaggccatcgcccagcgggagctgggccgggtgaaggatgagatccagaggctggagaatgagatggccagcatcctggagaagaagagtgacaaggaaaatggcatcttcaaggccacccagaagctggatggcctgaagtgccagatgaactgggaccagcaggccctggaggcctggctggaggagagcgcccacaaggacagtgatgccctgaccctgcagaagtatgcccagcaggatgacaacaagatccgggccctgaccctgcagctggagcggctgaccctggagtgcaaccagaagaggaagatcctggacaatgagctgacagagaccatcagcgcccagctggagctggacaaggccgcccaggacttcaggaagatccacaatgaaaggcaggagctgatcaagcagtgggagaacaccatcgagcagatgcagaagagagatggagacatcgacaactgtgccctggagctggcccgcatcaagcaggagacccgggagaaggagaacctggtgaaggagaagatcaagttcctggagagcgagatcggcaacaacacagaatttgagaagaggatctctgtggccgacaggaagctgctgaagtgcaggacagcctaccaggaccacgagaccagccgcatccagctgaagggggagctggacagcctgaaggccaccgtgaacagaaccagcagtgacctggaggccctgaggaagaacatcagcaagatcaagaaggacatccacgaggagacagcccggctgcagaagaccaagaaccacaatgagatcatccagaccaagctgaaggagatcacagagaagaccatgtctgtggaggagaaggccaccaacctggaggacatgctgaaggaggaggagaaggatgtgaaggaggtggatgtgcagctgaacctgatcaagggcgtgctcttcaagaaggcccaggagctgcagacagagaccatgaaggagaaggctgtgctgtctgaaattgagggcaccaggagcagcctgaagcacctgaaccaccagctgcagaagctggactttgagaccctgaagcagcaggagatcatgtacagccaggacttccacatccagcaggtggagaggaggatgagccggctgaagggggagatcaacagcgaggagaagcaggccctggaggccaagatcgtggagctgaggaagagcctggaggagaagaagagcacctgtggcctgctggagacccagatcaagaagctgcacaatgacctgtacttcatcaagaaggcccacagcaagaacagtgatgagaagcagagcctgatgaccaagatcaatgagctgaacctcttcatcgacagaagtgagaaggagctggacaaggccaagggcttcaagcaggacctgatgattgaggacaacctgctgaagctggaggtgaagaggacccgggagatgctgcacagcaaggccgaggaggtgctgagcctggagaagaggaagcagcagctgtacacagccatggaggagaggacagaggagatcaaggtgcacaagaccatgctggccagccagatccgctacgtggaccaggagcgggagaacatcagcacagagttccgggagcggctgagcaagattgagaagctgaagaacagatatgagatcctgactgtggtgatgctgcccccagagggggaggaggagaagacccaggcctactacgtgatcaaggtgatgtccatgtcctag

SEQ ID NO: 254818 - DNA, 2826 bp, Artificial Sequence
  derived and/or modified sequence
atgagcagcgagttcctggccgagctgcactgggaggatggctttgccatccctgtggccaatgaggagaacaagctgctggaggaccagctgagcaagctgaaggatgagcgggccagcctgcaggatgagctgcgggagtatgaggagcgcatcaacagcatgaccagccacttcaagaatgtgaagcaggagctgagcatcacccagagcctgtgcaaggcccgggagcgggagacagagagcgaggagcacttcaaggccatcgcccagcgggagctgggccgggtgaaggatgagatccagaggctggagaatgagatggccagcatcctggagaagaagagtgacaaggaaaatggcatcttcaaggccacccagaagctggatggcctgaagtgccagatgaactgggaccagcaggccctggaggcctggctggaggagagcgcccacaaggacagtgatgccctgaccctgcagaagtatgcccagcaggatgacaacaagatccgggccctgaccctgcagctggagcggctgaccctggagtgcaaccagaagaggaagatcctggacaatgagctgacagagaccatcagcgcccagctggagctggacaaggccgcccaggacttcaggaagatccacaatgaaaggcaggagctgatcaagcagtgggagaacaccatcgagcagatgcagaagagagatggagacatcgacaactgtgccctggagctggcccgcatcaagcaggagacccgggagaaggagaacctggtgaaggagaagatcaagttcctggagagcgagatcggcaacaacacagaatttgagaagaggatctctgtggccgacaggaagctgctgaagtgcaggacagcctaccaggaccacgagaccagccgcatccagctgaagggggagctggacagcctgaaggccaccgtgaacagaaccagcagtgacctggaggccctgaggaagaacatcagcaagatcaagaaggacatccacgaggagacagcccggctgcagaagaccaagaaccacaatgagatcatccagaccaagctgaaggagatcacagagaagaccatgtctgtggaggagaaggccaccaacctggaggacatgctgaaggaggaggagaaggatgtgaaggaggtggatgtgcagctgaacctgatcaagggcgtgctcttcaagaaggcccaggagctgcagacagagaccatgaaggagaaggctgtgctgtctgaaattgagggcaccaggagcagcctgaagcacctgaaccaccagctgcagaagctggactttgagaccctgaagcagcaggagatcatgtacagccaggacttccacatccagcaggtggagaggaggatgagccggctgaagggggagatcaacagcgaggagaagcaggccctggaggccaagatcgtggagctgaggaagagcctggaggagaagaagagcacctgtggcctgctggagacccagatcaagaagctgcacaatgacctgtacttcatcaagaaggcccacagcaagaacagtgatgagaagcagagcctgatgaccaagatcaatgagctgaacctcttcatcgacagaagtgagaaggagctggacaaggccaagggcttcaagcaggacctgatgattgaggacaacctgctgaagctggaggtgaagaggacccgggagatgctgcacagcaaggccgaggaggtgctgagcctggagaagaggaagcagcagctgtacacagccatggaggagaggacagaggagatcaaggtgcacaagaccatgctggccagccagatccgctacgtggaccaggagcgggagaacatcagcacagagttccgggagcggctgagcaagattgagaagctgaagaacagatatgagatcctgactgtggtgatgctgcccccagagggggaggaggagaagacccaggcctactacgtgatcaaggccgcccaggagaaggaggagctgcagcgggagggggactgcctggatgccaagatcaacaaggccgagaaggagatctatgccctggagaacaccctgcaggtgctgaacagctgcaacaacaactacaagcagagcttcaagaaggtgacccccagcagtgatgaatatgagctgaagatccagctggaggagcagaagagagctgtggatgagaagtaccgctacaagcagaggcagatccgggagctgcaggaggacatccagagcatggagaacaccctggatgtgattgagcacctggccaacaacgtgaaggagaagctgtctgagaagcaggcctacagcttccagctgagcaaggagacagaggagcagaagcccaagctggagcgggtgaccaagcagtgtgccaagctgaccaaggagatccggctgctgaaggacaccaaggatgagaccatggaggagcaggacatcaagctgcgggagatgaagcagttccacaaggtgattgatgagatgctggtggacatcatcgaggagaacacagagatccgcatcatcctgcagacctacttccagcagagcggcctggagctgcccacagccagcaccaagggcagccggcagagcagccgcagccccagccacaccagcctgagcgcccggagcagccgcagcaccagcaccagcaccagccagagcagcatcaaggtgctggagctgaagtttcctgccagcagcagcctggtgggcagccccagccggcccagcagcgccagcagcagcagcagcaatgtgaagagcaagaagagcagcaagtag

SEQ ID NO: 254819 - DNA, 2268 bp, Artificial Sequence
  derived and/or modified sequence
atggagtacatcttccccaacaccggcgtgctgtggagctggctgatcaacatcctatgtaaccgccgcatagtgtggttcacaagttcccagctgcccagaggtccaccagcttccagtgggggtcacagctttcatacactgagagaaaggtccgagagtcgcctgtttgtggagtcctatgccgctgcatggcagccgcctggtacttcaggcggtgctagctgctgcagtagcctgagtgctcaggttatgagcagtgaattcctcgcagagctgcattgggaggacggctttgccattccagtggctaatgaggaaaacaaactccttgaggaccagctgtccaagcttaaggatgagcgcgcatccctacaggacgagctgcgagaatacgaggagagaattaattccatgaccagccattttaagaacgtgaagcaggagttgtcaatcacccagagcctgtgcaaagctagggaaagggagaccgaatccgaagaacatttcaaggctatcgcccagcgggaactcggacgtgtgaaggacgagatccagagacttgaaaatgaaatggctagtatcctcgagaaaaagagcgacaaggagaacggtatctttaaggcgacacagaaactggatggcttgaaatgtcagatgaattgggatcagcaggccctcgaagcatggctggaggagtctgcccataaagacagcgatgcactcaccctccagaaatacgcccagcaggacgacaacaaaattcgggcactgacactgcaattggagaggctaacgctcgaatgtaaccaaaagcgtaaaatcctggacaatgaactcaccgaaaccatctcggcccagctggaacttgataaagcagctcaagatttccgcaaaatccacaacgaaaggcaggaacttatcaagcagtgggaaaataccattgaacagatgcaaaagcgcgatggggacatagataattgtgccctggagctcgctaggatcaaacaggaaacgagggagaaagaaaatctagttaaggagaaaattaagttcctggaatctgagataggtaataacacagaatttgagaagcgcatttctgtggcagatcgcaagctgctgaagtgccggacggcctatcaggaccatgagacctcaagaatacagctgaagggcgaactggactcacttaaggctacagtaaacaggacttcctctgatcttgaggctttgagaaagaatataagcaaaattaaaaaagatatccacgaagagacagcacgattgcaaaaaaccaaaaaccataacgagattattcaaaccaaactgaaggagatcacagaaaaaacaatgtccgtggaggaaaaggcaactaatctcgaagacatgctcaaggaagaggagaaggacgtcaaagaggtggacgtccagctcaacctcattaagggtgtcctttttaaaaaggcccaggagttacagactgagaccatgaaggagaaggctgtgctgagtgagatcgaagggacgcggtcgagccttaagcatttgaaccaccagcttcagaagttagatttcgagactctgaagcaacaggaaatcatgtacagtcaggattttcacattcaacaggttgagcgcagaatgtcacggctgaaaggggaaatcaactccgaagagaaacaggctctggaagcaaagattgtcgaattgaggaagtctctggaggagaaaaagagcacatgtggactgctggagacccagattaaaaagttgcacaacgacctttattttatcaaaaaagctcactccaaaaattctgacgaaaagcagtctttaatgactaagatcaacgaactgaacctgttcattgacaggtcagaaaaggaactggacaaggccaagggcttcaagcaagatctgatgatcgaggataatctgttaaaattggaagttaaacgaacccgcgaaatgcttcactcaaaggctgaggaggtgctaagtctggaaaagaggaaacagcagctttacacggcgatggaagagaggaccgaggagatcaaggtgcataaaaccatgctcgccagccagataagatatgtagatcaagagagagaaaacatttcaactgagttcagagagaggctgtcgaaaatcgaaaaattgaaaaaccgctacgaaattttaacagtggtgatgttgccccctgaaggcgaagaggaaaaaactcaggcttactatgtaatcaaagtcatgagcatgagctag

SEQ ID NO: 254820 - DNA, 2826 bp, Artificial Sequence
  derived and/or modified sequence
atgagcagcgagttcctggccgagctgcactgggaggacggcttcgcaattcccgtggctaatgaggaaaacaagctgcttgaggaccagctgtctaagttgaaggatgaacgcgcttccctgcaggatgagctgcgcgaatatgaggagaggatcaattccatgacgagtcatttcaagaacgtgaagcaagagctgtctataacccagtctctgtgtaaggcacgagagagggaaacagaatccgaagaacacttcaaggccatagctcagcgcgaactggggagagtgaaggatgaaattcaacggctcgaaaacgagatggctagcatcttggaaaagaagtcagataaagaaaacggcatcttcaaggccacacagaagctcgatgggcttaagtgtcagatgaactgggaccagcaagccctggaagcatggcttgaagaatctgcccataaggactctgacgccctgactctgcagaagtacgcgcagcaggacgacaataagatccgagctttaacactccagctggagaggcttactctcgaatgcaatcaaaaacgaaagatactggataacgaactaaccgagaccataagcgcacaactggagttggacaaggcggcccaagactttcggaaaattcacaacgagcgccaggaacttatcaagcagtgggagaatactatcgagcaaatgcagaagcgagatggcgacatcgacaactgcgccctggaactggcgaggatcaagcaggagactagggagaaggagaacctggtgaaggaaaaaatcaaattcctagaatcggaaatcggtaataatacagaattcgaaaagcggatttcagtggcggaccgcaagctgctgaagtgcagaaccgcataccaagatcacgaaacatcacgcattcaactcaagggggaacttgactccctgaaggcgacggtcaaccggacctcctctgacctagaggccctgcgtaaaaacatttcaaaaataaagaaggacatacacgaggagacagcacggctccagaaaactaaaaatcataatgaaatcattcaaaccaagctgaaggaaattacagaaaagacaatgtctgtcgaggagaaggctaccaacctggaggatatgctgaaggaggaggagaaggacgtgaaggaagtggacgtgcaacttaatttgataaaaggcgtgctttttaaaaaagcccaggagctgcagactgagactatgaaggaaaaagcggtgctttctgagatcgagggcactcggagttctctgaaacacctgaaccaccagctgcaaaaactggacttcgagacgctgaagcaacaggagattatgtatagtcaggacttccacatacagcaggtcgagcggagaatgtcacggttaaagggcgaaatcaatagcgaagagaaacaggcccttgaagctaagattgtcgagctaaggaaatccttagaggaaaaaaagtctacttgtggcctcctggaaactcagattaaaaagctgcataatgacttgtactttatcaaaaaggcccacagcaagaattcagacgaaaagcaatccctgatgactaagattaatgagctaaatctgttcattgaccggtcagaaaaagagttagacaaagctaaggggttcaaacaggatctgatgatcgaggacaacctgctgaaacttgaggtgaaacggactcgcgaaatgctgcatagcaaagctgaggaagtgctgtccttggagaagcgaaaacagcagctctataccgccatggaagagcgaactgaggaaataaaggtccacaagacgatgctcgcttcacagatccgttacgtcgatcaggagcgggagaacatctcaaccgaatttagagaaaggctgtccaaaatcgagaagctgaagaacaggtacgaaatcttgacagttgtgatgcttcccccagaaggggaggaagagaagacacaggcttattacgtcattaaagccgcacaggagaaagaagaacttcagcgggagggagattgcctcgacgctaaaattaataaggcagagaaggaaatctatgccctggaaaatacacttcaggtactgaatagttgcaacaacaactataaacagtcattcaagaaggtaacgccctcgagcgatgagtacgagttgaagatccagttagaagagcagaagagagccgttgacgagaagtatagatataaacaaaggcagatcagagaactgcaggaagacatccaaagcatggaaaatacccttgacgtcattgagcacttagcgaacaacgtcaaggagaaactgagtgagaaacaggcctacagcttccagctctcaaaggagactgaagaacagaagcccaagcttgaaagagtcaccaaacagtgcgccaagttgacgaaggagattcggttgctgaaggataccaaagacgaaaccatggaagaacaagacatcaagctccgtgagatgaagcaatttcacaaagttatcgatgagatgctggtcgacattatagaagagaatacagaaattcgaatcatcttgcagacgtactttcaacagtcaggactggagttacctaccgccagcactaaaggaagtcgccaaagctcccgctctcctagccatacatccctcagtgccaggtcttcaagaagtaccagcacctccacctcacagtccagtataaaagttctggaactgaagttccctgcaagtagctcactcgtgggatcccccagccgcccatcctcagcatcctcgtcgagctcaaatgtgaagtctaagaagtcgagtaagtag

SEQ ID NO: 254821 - DNA, 2268 bp, Artificial Sequence
  derived and/or modified sequence
atggagtacatctttcccaacaccggagtcctgtggagctggttaatcaacattctgtgcaatagacgcatcgtctggtttacgagtagccagcttcccaggggaccgccagccagttcagggggacactcgtttcacactctgcgggaacgcagcgagagtcggttgttcgtcgagtcttacgccgcagcctggcagcctcccggaacatcgggcggagcctcttgttgtagcagcctgtccgcccaggtgatgtcatctgaatttctggctgaactccactgggaggacggatttgctattcccgttgcaaatgaagagaacaagctcctagaggaccaactatccaaattaaaggatgagagagctagcctgcaagatgagctgcgggaatatgaggaaaggattaactcaatgacctctcattttaagaatgtgaaacaggagctctctattacccagtcgctctgcaaagctcgagaacgggagacagaatctgaagaacattttaaggccatcgcccagcgcgagctgggaagggtgaaagatgaaattcagcgcttggagaacgagatggcctctatcctggagaagaagtccgacaaggagaacgggatcttcaaggccacgcaaaagttggacggcctcaaatgccaaatgaactgggaccagcaggccctggaggcctggttagaggagagtgcccataaggactccgacgccctgacacttcaaaagtacgcacagcaggatgacaacaaaatccgggcactgaccctccaactggaacggctaacactggaatgcaaccaaaagcgaaaaatccttgacaacgagcttaccgagactatcagcgcccagctcgagctggacaaggcagctcaggattttcgcaaaattcacaatgagcggcaagaacttataaaacagtgggagaataccatagagcagatgcagaagagggatggcgacatcgacaactgcgccctcgagctagctcggataaagcaagaaacacgcgagaaggaaaacctggtgaaagaaaaaattaagttcctagaatcagaaatcggtaataacacagagtttgaaaagaggatctcagtcgcagaccgcaaactgttaaaatgtcgtacggcctatcaggatcatgagacatcacggattcagctgaagggcgaactcgattccctgaaggctactgtgaaccggacatcctccgaccttgaagcccttcgcaagaacataagtaaaatcaagaaggacatacatgaagagactgcaaggctgcagaagaccaaaaaccacaatgagattattcagaccaagctaaaagagatcactgagaaaaccatgagtgttgaagaaaaggcaacgaatctggaagatatgctgaaggaggaggagaaagatgttaaggaggtagatgtgcaactcaatctcatcaagggtgtacttttcaagaaggcacaagaactgcaaaccgagaccatgaaggagaaggcagtcctgtccgagattgaaggaacccggtccagcctgaagcatctcaatcatcagttgcagaaattggactttgagacactgaagcagcaggagattatgtactcccaggatttccacatccagcaggtggagcggaggatgtcccggctgaagggcgagatcaacagcgaggaaaaacaggccctcgaagctaaaatagtggagctgaggaagagtttagaagaaaagaagtctacatgtggccttctggagacacaaatcaagaaactgcataacgatttgtacttcattaagaaagcccattccaagaactccgatgaaaagcagtctttgatgactaaaattaacgaactgaatctcttcatagacagaagcgagaaagagcttgacaaggccaagggatttaagcaggaccttatgattgaggacaaccttctgaagcttgaggtaaaacgtacccgcgagatgttacattctaaggccgaagaagtcctcagcttggaaaagcggaagcagcagttgtataccgctatggaggagcggaccgaggagatcaaggtgcataaaaccatgttggcctctcaaatacggtacgtggatcaggagcgggaaaatattagcacagaattccgcgagcgtctttcgaagatagagaaactgaagaatcggtacgagattcttacagtagtgatgctgccaccagagggggaggaagaaaagacacaagcttactatgtaatcaaggtcatgtctatgtcctag

SEQ ID NO: 254822 - DNA, 2826 bp, Artificial Sequence
  derived and/or modified sequence
atgagctccgagttcctcgccgaattacattgggaggatggatttgccattcccgtggccaacgaagagaataaacttctagaggaccagctctctaagctgaaggacgagcgcgcatcgcttcaggatgaactacgtgaatacgaggagagaattaactcgatgacgtcacacttcaagaacgtgaaacaagagctctctattacacagtcactttgtaaggcacgggaacgagagacggagagtgaagaacacttcaaagccatcgctcagcgcgaactgggtcgggtcaaggacgagattcaaagactggagaacgagatggcctctattctggagaaaaagtcagacaaagaaaacggtatcttcaaggccactcagaagctcgacgggctcaaatgtcagatgaattgggatcaacaggctctggaggcctggctggaggaatccgcccataaggacagtgacgccctgacgctccagaaatatgctcaacaagacgataataagatacgggctttaacattgcagctggagcgcctgacgttggagtgcaaccagaaaaggaagatcctcgacaatgaactcacagaaaccatctctgcacagttggagcttgacaaagccgcacaggattttcggaaaattcataacgaaagacaggagctgatcaaacaatgggaaaatactatcgagcagatgcagaaaagggacggagatatagacaactgcgccctggaacttgctcgcataaagcaagagacacgcgaaaaagaaaacctagtgaaggaaaagataaagttcctggagagcgagataggtaataacaccgaattcgaaaagcgaatttctgtggctgatcgtaaactcctgaaatgtcggaccgcctaccaagaccacgagacctcacgcatccagctcaaaggcgaactcgacagcctgaaagccacagttaatcgcacttctagcgaccttgaagccctccggaagaatatcagcaagattaaaaaagacatccacgaggagaccgctaggttacagaagacgaagaaccacaatgagatcattcagacaaagctgaaggaaataactgaaaagaccatgtcagtggaggagaaagctaccaatctggaggatatgctgaaggaagaggagaaggatgtgaaggaggtcgatgtccagttgaacctgatcaaaggtgtgctgtttaagaaggcccaggaactccagaccgaaaccatgaaggagaaagcagtgctctcggagatcgaggggactaggagtagcctcaaacaccttaaccaccagcttcaaaagcttgactttgaaactctgaagcagcaggagatcatgtattctcaggatttccacatccaacaggtcgagaggcgcatgtctcgcttaaaaggggaaatcaattccgaagagaagcaagcactcgaggccaaaatagtcgagttgcgtaagagcctagaggagaagaagtcgacgtgcgggctcttggagacccaaatcaagaaacttcataacgatctctattttatcaagaaagcccattccaagaactccgacgagaagcagtccctgatgaccaagattaatgagctcaacctgttcattgataggtcagagaaagagctggacaaagctaagggttttaagcaagatctgatgatcgaggataaccttctgaaactcgaggtaaaaagaactagagaaatgctccactctaaagcagaggaagtgctttcactggaaaaacggaaacaacagttgtacacagccatggaggagcgtacagaggaaataaaggttcacaagactatgctagcttcccagatacgatatgtggaccaggagcgcgagaacatcagcactgaatttagggagcgcttgagcaaaatcgaaaaactgaaaaatcggtacgaaatactcacagtggtgatgctaccacctgaaggagaagaagaaaagactcaggcttattacgtgatcaaggccgcacaagagaaggaggaactgcagcgggagggggattgtctggatgccaagatcaataaagcggagaaggaaatctacgccctagagaacacgctgcaagtactgaactcatgtaataacaattataagcagtcctttaagaaagtcacaccgtcttccgacgaatacgagctgaagattcagcttgaagagcaaaagcgggctgtggatgagaaatatcgatataaacagcgacaaatacgtgagttacaggaggatattcagtcgatggagaacacattagatgtcatcgagcacctggctaacaacgtgaaagagaagctaagcgagaagcaagcttacagtttccagctctctaaggaaacggaggagcaaaagcccaaattggaacgagtaaccaaacagtgtgctaagttaaccaaggagattaggttactgaaggacaccaaggacgagactatggaggagcaggacattaagctgagggagatgaagcaattccacaaagttatcgatgaaatgctcgtcgacatcatcgaggagaataccgaaatacggatcattttgcagacttactttcaacagagcggtttggagttgccaacagcatccacaaaaggaagcaggcaatcaagccggagtccatcacacacctctctatcagctcggagctcaaggtcgacgtctacatccacaagtcagtcctctatcaaagtcctcgagctgaaatttcctgcgtccagttccctggtgggatccccatctagaccatctagtgctagttcaagctcgagcaatgtgaaaagtaaaaaaagttctaaatag

SEQ ID NO: 254823 - DNA, 4450 bp, Artificial Sequence
  derived and/or modified sequence
tctttatacttttgtattgtttaattttttttaacagttgtcttgttttttcttctgcagtgaaaataatggtgacaagaagcccactgcctgattcacataagcaaggcatgctgcagggaagacagggttcttattaatatttcctttcatgtgcttacatatgagttacagttgctaatcctttcccacagtttagcacctagttaaaagaaagggcttcggaatcaggtaagtgtagattaaagttataacggcaaattgctgaacctttggaagcctcggtttttccacctggaaaatggatttttatcttacaggactgtcgtgaggattgatgagctaacattcctaaatcagggagtttgaagtctggcccagggtattttcctcctttcctgaaataatgtgtagttctgaccaagtgagaagaatcataagaatatgggattttgaaaaacatgaaaacatcctaagaaataccaggaaggagtcccacagtgaagcacaaatgaaactcaagatgactgcctaaaataagaaatcatggatcttaggagaaagggggcaaggaagtaaatcaaaggacaaagctgaagaccaagtggaccgaaaagaagatggaatacattttcccaaacactggtgttctctggagttggcttatcaacatcttgtgcaatcggaggatcgtgtggtttacttccagccagctgccccgtggtcctccagccagctccgggggccacagttttcacacgctccgggagcgatccgagagccgccttttcgtggaaagttacgctgccgcctggcaacccccgggaacgtcgggaggggcaagttgctgctcatccctcagtgctcaagtcatgagtagcgaattcctggctgagctgcactgggaggatgggttcgccatcccggtggcgaacgaggagaacaagctactggaagatcagttgtcaaagctgaaggatgaaagagcaagcttgcaagatgagttacgtgagtatgaagagcgaattaattctatgacttctcacttcaaaaatgttaagcaagagctctcaattacacagtctctttgcaaagcaagggagcgtgagactgaaagtgaagaacattttaaggccattgctcaaagagaattgggacgagtgaaagatgaaattcaacggctggaaaatgagatggcttcaatactggaaaagaaaagtgataaagaaaatggcatatttaaagccactcaaaaattggatggtttgaaatgtcaaatgaactgggaccagcaagcattggaggcctggttagaagaatcagctcataaagatagtgatgctctcactctccagaagtatgcacaacaagatgataataaaatcagggcactgactctgcaattagaaagactaactttggaatgtaatcagaaaagaaagatacttgacaacgaacttacagagactataagcgcacagttagaattggataaagcagcacaagattttcgtaagattcataatgaaagacaagaactcattaaacaatgggagaacacaatagaacagatgcagaagagggatggagacatagataactgtgctttggaattagcaaggataaagcaggaaacgagagaaaaagaaaatttggttaaagaaaagatcaagtttttggaaagtgagattgggaataacacagagtttgagaaaagaatttctgtggctgatcgtaaacttttaaaatgtagaacggcatatcaggaccatgaaactagtagaattcagctgaagggtgagctggattctttaaaagccactgtgaatagaacttccagtgatttagaagctctgaggaaaaatatttccaagataaagaaggacattcatgaagaaacagcaaggttacaaaaaactaaaaatcataatgagataatacaaacaaaattaaaggagataactgagaaaaccatgtctgtagaagagaaagctactaatttggaagatatgctaaaggaggaggaaaaagatgtgaaggaagtagatgttcaactgaacctcataaaaggtgtgctgtttaagaaagctcaggagttacagactgagacaatgaaagaaaaagctgttttatcagaaattgaaggaactcgttcctctctgaaacatctcaaccatcagttacaaaaactggattttgaaaccttgaagcagcaagaaattatgtacagccaggattttcacattcaacaagtggaacggagaatgtcacggttaaagggagaaattaattcagaagaaaaacaagcgcttgaagcaaaaattgttgaacttaggaagtctttggaagagaaaaaatctacatgtggccttttggaaacacagatcaagaagcttcataatgatctttattttatcaagaaggcacatagtaaaaacagtgatgaaaaacagtcccttatgaccaaaataaatgaactaaaccttttcatcgacagatcagagaaagaacttgataaagccaaaggttttaagcaggatttgatgatagaggacaatcttttaaaacttgaagttaagcgtactcgagaaatgcttcacagtaaggcagaagaagttctttccctagaaaaaagaaaacagcaattatacacagcaatggaagagcgaactgaagaaatcaaggttcataaaacaatgcttgcgtcacaaataagatatgttgatcaagaacgggaaaacataagcactgagtttcgcgagcggctaagtaaaattgagaagctgaagaatagatatgaaattctgactgttgttatgctgcctcctgaaggagaagaggagaaaacacaggcctattatgtaataaaggtgatgagtatgagctaaaaattcaactagaagaacaaaaaagagctgttgatgaaaaatacagatacaaacaaagacaaatcagagaacttcaagaagacatccagagcatggaaaatacattagatgttatagaacatttggcaaataatgttaaagaaaagttatcagagaagcaggcttattcatttcaactaagtaaagaaacggaggagcagaagccaaaattagaaagagtgaccaaacagtgtgcaaaactcacaaaggaaatccgtcttttgaaagacacaaaagatgaaacaatggaagaacaagacatcaaacttcgtgaaatgaaacagtttcacaaagttattgatgaaatgttagttgatatcatagaagaaaatactgagatccgtattatccttcaaacatactttcaacagagtgggttagaactacctacagctagcacaaaaggcagtcgtcagagctctagatctccttcacatacttcactatcagcaaggtcatctaggagtacaagtacatctacttctcagtcttcaattaaagtactggagcttaaattcccggcctcctcttcactagtaggcagcccttctaggccatctagtgctagtagtagctctagtaatgttaagagcaaaaagagcagcaaataaacattttaatctcttctgaaaaagttgtaaacacaaaaacaaaaatatactttaaaatacaaaacgacccaacacattttatctagtggaaagtgtaaaaacttagtggtaagtgtaaaaactgatagttttaaaaaaaaaggaacgttctcattttctctactgttttcttcatactgaagaaattaatagcagattcttgacaaggctacatgttatacaagcataggaaaaatgctgtatttcactgtaattctgatgttcgtagtgttagaaaatagtttgcttcattatttcacgaaactacactcacttctaatgtaacaatctttcaagaagaaatttctaaagatttactgtactattatgagcgtattgcaatgtgaaaatctcatttaccctacaagacaccaaaattaggttttctttattcaaagtaactatttctcagacttttggggagaaaaattgttaaaggcagtttcttcttttgctataatttttaaccaaaaaatagcatcaacccctacccaccccacccccccaaaaaaaaaccggtaagagaaacactgtatatcaattttaaaatgcagcataaatttagaaaaatcacttctgaccttgaaataaatcacttctgaccttgaaataaacgcattaaagatttgctttcagatacagccaaccaagtataaacaattttgaaattttcttgatttaataaacgatttaatgaaagctaggtatgacttgatttgcaatagaaatttcatttacagttggaggtagactgccaaatgtagtagtttttccagttaacacttcattataacatgtgcccaacactttgtactcttggaatagagtgtggaatattataaaactggattttaaataaatgtattagaattc

SEQ ID NO: 254824 - DNA, 3279 bp, Artificial Sequence
  derived and/or modified sequence
agggctcccccggcaattgccgcggcactgtgcaggtgcctgggcttgacgcgggtgctgctcacccgctgtacaagaaggcggatctttgctctgtatcttctctatccgtttgcagtcatgagtagcgaattcctggctgagctgcactgggaggatgggttcgccatcccggtggcgaacgaggagaacaagctactggaagatcagttgtcaaagctgaaggatgaaagagcaagcttgcaagatgagttacgtgagtatgaagagcgaattaattctatgacttctcacttcaaaaatgttaagcaagagctctcaattacacagtctctttgcaaagcaagggagcgtgagactgaaagtgaagaacattttaaggccattgctcaaagagaattgggacgagtgaaagatgaaattcaacggctggaaaatgagatggcttcaatactggaaaagaaaagtgataaagaaaatggcatatttaaagccactcaaaaattggatggtttgaaatgtcaaatgaactgggaccagcaagcattggaggcctggttagaagaatcagctcataaagatagtgatgctctcactctccagaagtatgcacaacaagatgataataaaatcagggcactgactctgcaattagaaagactaactttggaatgtaatcagaaaagaaagatacttgacaacgaacttacagagactataagcgcacagttagaattggataaagcagcacaagattttcgtaagattcataatgaaagacaagaactcattaaacaatgggagaacacaatagaacagatgcagaagagggatggagacatagataactgtgctttggaattagcaaggataaagcaggaaacgagagaaaaagaaaatttggttaaagaaaagatcaagtttttggaaagtgagattgggaataacacagagtttgagaaaagaatttctgtggctgatcgtaaacttttaaaatgtagaacggcatatcaggaccatgaaactagtagaattcagctgaagggtgagctggattctttaaaagccactgtgaatagaacttccagtgatttagaagctctgaggaaaaatatttccaagataaagaaggacattcatgaagaaacagcaaggttacaaaaaactaaaaatcataatgagataatacaaacaaaattaaaggagataactgagaaaaccatgtctgtagaagagaaagctactaatttggaagatatgctaaaggaggaggaaaaagatgtgaaggaagtagatgttcaactgaacctcataaaaggtgtgctgtttaagaaagctcaggagttacagactgagacaatgaaagaaaaagctgttttatcagaaattgaaggaactcgttcctctctgaaacatctcaaccatcagttacaaaaactggattttgaaaccttgaagcagcaagaaattatgtacagccaggattttcacattcaacaagtggaacggagaatgtcacggttaaagggagaaattaattcagaagaaaaacaagcgcttgaagcaaaaattgttgaacttaggaagtctttggaagagaaaaaatctacatgtggccttttggaaacacagatcaagaagcttcataatgatctttattttatcaagaaggcacatagtaaaaacagtgatgaaaaacagtcccttatgaccaaaataaatgaactaaaccttttcatcgacagatcagagaaagaacttgataaagccaaaggttttaagcaggatttgatgatagaggacaatcttttaaaacttgaagttaagcgtactcgagaaatgcttcacagtaaggcagaagaagttctttccctagaaaaaagaaaacagcaattatacacagcaatggaagagcgaactgaagaaatcaaggttcataaaacaatgcttgcgtcacaaataagatatgttgatcaagaacgggaaaacataagcactgagtttcgcgagcggctaagtaaaattgagaagctgaagaatagatatgaaattctgactgttgttatgctgcctcctgaaggagaagaggagaaaacacaggcctattatgtaataaaggctgctcaagaaaaagaagaacttcaaagggaaggtgactgtttggatgccaagatcaacaaagctgaaaaagaaatctacgctctagaaaatacccttcaagtgctgaacagctgtaacaacaattataagcaatcttttaaaaaagtgactccatctagtgatgagtatgagctaaaaattcaactagaagaacaaaaaagagctgttgatgaaaaatacagatacaaacaaagacaaatcagagaacttcaagaagacatccagagcatggaaaatacattagatgttatagaacatttggcaaataatgttaaagaaaagttatcagagaagcaggcttattcatttcaactaagtaaagaaacggaggagcagaagccaaaattagaaagagtgaccaaacagtgtgcaaaactcacaaaggaaatccgtcttttgaaagacacaaaagatgaaacaatggaagaacaagacatcaaacttcgtgaaatgaaacagtttcacaaagttattgatgaaatgttagttgatatcatagaagaaaatactgagatccgtattatccttcaaacatactttcaacagagtgggttagaactacctacagctagcacaaaaggcagtcgtcagagctctagatctccttcacatacttcactatcagcaaggtcatctaggagtacaagtacatctacttctcagtcttcaattaaagtactggagcttaaattcccggcctcctcttcactagtaggcagcccttctaggccatctagtgctagtagtagctctagtaatgttaagagcaaaaagagcagcaaataaacattttaatctcttctgaaaaagttgtaaacacaaaaacaaaaatatactttaaaatacaaaacgacccaacacattttatctagtggaaagtgtaaaaacttagtggtaagtgtaaaaactgatagttttaaaaaaaaaggaacgttctcattttctctactgttttcttcatactgaagaaattaatagcagattcttgacaaggctacatgttatacaagcataggaaaaatgctgtatttcactgtaattctgatgttcgtagtgttagaaaatagtttgcttcattatttcacgaaactacactcacttctaatgtaacaatctttc

SEQ ID NO: 254825 - DNA, 2268 bp, Artificial Sequence
  derived and/or modified sequence
atggagtacatcttccccaacaccggcgtgctgtggagctggctgatcaacatcctgtgcaacagaagaatcgtgtggttcaccagcagccagctgcccagaggcccccccgccagcagcggcggccacagcttccacaccctgagagagagaagcgagagcagactgttcgtggagagctacgccgccgcctggcagccccccggcaccagcggcggcgccagctgctgcagcagcctgagcgcccaggtgatgagcagcgagttcctggccgagctgcactgggaggacggcttcgccatccccgtggccaacgaggagaacaagctgctggaggaccagctgagcaagctgaaggacgagagagccagcctgcaggacgagctgagagagtacgaggagagaatcaacagcatgaccagccacttcaagaacgtgaagcaggagctgagcatcacccagagcctgtgcaaggccagagagagagagaccgagagcgaggagcacttcaaggccatcgcccagagagagctgggcagagtgaaggacgagatccagagactggagaacgagatggccagcatcctggagaagaagagcgacaaggagaacggcatcttcaaggccacccagaagctggacggcctgaagtgccagatgaactgggaccagcaggccctggaggcctggctggaggagagcgcccacaaggacagcgacgccctgaccctgcagaagtacgcccagcaggacgacaacaagatcagagccctgaccctgcagctggagagactgaccctggagtgcaaccagaagagaaagatcctggacaacgagctgaccgagaccatcagcgcccagctggagctggacaaggccgcccaggacttcagaaagatccacaacgagagacaggagctgatcaagcagtgggagaacaccatcgagcagatgcagaagagagacggcgacatcgacaactgcgccctggagctggccagaatcaagcaggagaccagagagaaggagaacctggtgaaggagaagatcaagttcctggagagcgagatcggcaacaacaccgagttcgagaagagaatcagcgtggccgacagaaagctgctgaagtgcagaaccgcctaccaggaccacgagaccagcagaatccagctgaagggcgagctggacagcctgaaggccaccgtgaacagaaccagcagcgacctggaggccctgagaaagaacatcagcaagatcaagaaggacatccacgaggagaccgccagactgcagaagaccaagaaccacaacgagatcatccagaccaagctgaaggagatcaccgagaagaccatgagcgtggaggagaaggccaccaacctggaggacatgctgaaggaggaggagaaggacgtgaaggaggtggacgtgcagctgaacctgatcaagggcgtgctgttcaagaaggcccaggagctgcagaccgagaccatgaaggagaaggccgtgctgagcgagatcgagggcaccagaagcagcctgaagcacctgaaccaccagctgcagaagctggacttcgagaccctgaagcagcaggagatcatgtacagccaggacttccacatccagcaggtggagagaagaatgagcagactgaagggcgagatcaacagcgaggagaagcaggccctggaggccaagatcgtggagctgagaaagagcctggaggagaagaagagcacctgcggcctgctggagacccagatcaagaagctgcacaacgacctgtacttcatcaagaaggcccacagcaagaacagcgacgagaagcagagcctgatgaccaagatcaacgagctgaacctgttcatcgacagaagcgagaaggagctggacaaggccaagggcttcaagcaggacctgatgatcgaggacaacctgctgaagctggaggtgaagagaaccagagagatgctgcacagcaaggccgaggaggtgctgagcctggagaagagaaagcagcagctgtacaccgccatggaggagagaaccgaggagatcaaggtgcacaagaccatgctggccagccagatcagatacgtggaccaggagagagagaacatcagcaccgagttcagagagagactgagcaagatcgagaagctgaagaacagatacgagatcctgaccgtggtgatgctgccccccgagggcgaggaggagaagacccaggcctactacgtgatcaaggtgatgagcatgagctag

SEQ ID NO: 254826 - DNA, 2826 bp, Artificial Sequence
  derived and/or modified sequence
atgagcagcgagttcctggccgagctgcactgggaggacggcttcgccatccccgtggccaacgaggagaacaagctgctggaggaccagctgagcaagctgaaggacgagagagccagcctgcaggacgagctgagagagtacgaggagagaatcaacagcatgaccagccacttcaagaacgtgaagcaggagctgagcatcacccagagcctgtgcaaggccagagagagagagaccgagagcgaggagcacttcaaggccatcgcccagagagagctgggcagagtgaaggacgagatccagagactggagaacgagatggccagcatcctggagaagaagagcgacaaggagaacggcatcttcaaggccacccagaagctggacggcctgaagtgccagatgaactgggaccagcaggccctggaggcctggctggaggagagcgcccacaaggacagcgacgccctgaccctgcagaagtacgcccagcaggacgacaacaagatcagagccctgaccctgcagctggagagactgaccctggagtgcaaccagaagagaaagatcctggacaacgagctgaccgagaccatcagcgcccagctggagctggacaaggccgcccaggacttcagaaagatccacaacgagagacaggagctgatcaagcagtgggagaacaccatcgagcagatgcagaagagagacggcgacatcgacaactgcgccctggagctggccagaatcaagcaggagaccagagagaaggagaacctggtgaaggagaagatcaagttcctggagagcgagatcggcaacaacaccgagttcgagaagagaatcagcgtggccgacagaaagctgctgaagtgcagaaccgcctaccaggaccacgagaccagcagaatccagctgaagggcgagctggacagcctgaaggccaccgtgaacagaaccagcagcgacctggaggccctgagaaagaacatcagcaagatcaagaaggacatccacgaggagaccgccagactgcagaagaccaagaaccacaacgagatcatccagaccaagctgaaggagatcaccgagaagaccatgagcgtggaggagaaggccaccaacctggaggacatgctgaaggaggaggagaaggacgtgaaggaggtggacgtgcagctgaacctgatcaagggcgtgctgttcaagaaggcccaggagctgcagaccgagaccatgaaggagaaggccgtgctgagcgagatcgagggcaccagaagcagcctgaagcacctgaaccaccagctgcagaagctggacttcgagaccctgaagcagcaggagatcatgtacagccaggacttccacatccagcaggtggagagaagaatgagcagactgaagggcgagatcaacagcgaggagaagcaggccctggaggccaagatcgtggagctgagaaagagcctggaggagaagaagagcacctgcggcctgctggagacccagatcaagaagctgcacaacgacctgtacttcatcaagaaggcccacagcaagaacagcgacgagaagcagagcctgatgaccaagatcaacgagctgaacctgttcatcgacagaagcgagaaggagctggacaaggccaagggcttcaagcaggacctgatgatcgaggacaacctgctgaagctggaggtgaagagaaccagagagatgctgcacagcaaggccgaggaggtgctgagcctggagaagagaaagcagcagctgtacaccgccatggaggagagaaccgaggagatcaaggtgcacaagaccatgctggccagccagatcagatacgtggaccaggagagagagaacatcagcaccgagttcagagagagactgagcaagatcgagaagctgaagaacagatacgagatcctgaccgtggtgatgctgccccccgagggcgaggaggagaagacccaggcctactacgtgatcaaggccgcccaggagaaggaggagctgcagagagagggcgactgcctggacgccaagatcaacaaggccgagaaggagatctacgccctggagaacaccctgcaggtgctgaacagctgcaacaacaactacaagcagagcttcaagaaggtgacccccagcagcgacgagtacgagctgaagatccagctggaggagcagaagagagccgtggacgagaagtacagatacaagcagagacagatcagagagctgcaggaggacatccagagcatggagaacaccctggacgtgatcgagcacctggccaacaacgtgaaggagaagctgagcgagaagcaggcctacagcttccagctgagcaaggagaccgaggagcagaagcccaagctggagagagtgaccaagcagtgcgccaagctgaccaaggagatcagactgctgaaggacaccaaggacgagaccatggaggagcaggacatcaagctgagagagatgaagcagttccacaaggtgatcgacgagatgctggtggacatcatcgaggagaacaccgagatcagaatcatcctgcagacctacttccagcagagcggcctggagctgcccaccgccagcaccaagggcagcagacagagcagcagaagccccagccacaccagcctgagcgccagaagcagcagaagcaccagcaccagcaccagccagagcagcatcaaggtgctggagctgaagttccccgccagcagcagcctggtgggcagccccagcagacccagcagcgccagcagcagcagcagcaacgtgaagagcaagaagagcagcaagtag

SEQ ID NO: 254827 - protein, 348 aa, Artificial Sequence
  derived and/or modified sequence
MSLVDLGKKLLEAARAGQDDEVRILMANGAPFTTDWLGTSPLHLAAQYGHYSTTEVLLRAGVSRDARTKVDRTPLHMAASEGHASIVEVLLKHGADVNAKDMLKMTALHWATEHNHQEVVELLIKYGADVHTQSKFCKTAFDISIDNGNEDLAEILQIAMQNQINTNPESPDTVTIHAATPQFIIGPGGVVNLTDETGVSAVQFGNSSTSVLATLAALAEASAPLSNSSETPVVATEEVVTAESVDGAIQQVVSSGGQQVITIVTDGIQLGNLHSIPTSGIGQPIIVTMPDGQQVLTVPATDIAEETVISEEPPAKRQCIEIIENRVESAEIEVRSLLPGVLCRSHPK

SEQ ID NO: 254828 - DNA, 1622 bp, Artificial Sequence
  derived and/or modified sequence
gctttctttgtgtggctgaagcgctagaaatggcatattttctttcccttcgttaaaaaatcagaccctctttcccctctctccccgcgggaacacagctagggagtgggtaggagcaggatctgccgacgagggcagaggcggaaaatcctcgggcgatgagctgaagagggccgggtccgggagggatgctgggagcttgactcactcgcacaccatgtgtccctccgcgcgcagcacgggggacttttcggtggggattttgggcgccgaccagacgcggcattttcggaaaatagcgccctgtgcagctgaagcgctttgtgtgtagcggggccgcgtcagcccggccgggtacgaggcgcctcgggtccccgcaccacctcctgctgccttcccgtcgccgctcccgaagcttttccagatgtccctggtagatttgggaaagaagcttttagaagcggcacgagcaggtcaagatgatgaagttcgtattttgatggcaaatggagctccctttactacagactggctgggaacttctccacttcatctagcagcacagtatggtcattattccaccacagaggtactgctgcgagctggtgtgagcagagatgccagaaccaaagtggaccgaacaccattacatatggcagcttctgagggccatgccagcatagtagaggttttacttaagcatggtgctgatgtcaatgcaaaggacatgttaaagatgacagctctccattgggccacagaacacaatcatcaagaggtggtggaacttttaatcaaatatggtgctgatgtacacacgcaaagtaaattttgtaaaactgcatttgatatttcaatagacaatggaaatgaagatttagcagagatattacagattgctatgcagaaccaaatcaacacaaacccagagagtcctgacactgtgacaatacatgctgcaacaccacagtttatcattggacctggaggggtggtgaacctaacagatgaaacgggtgtatctgctgttcagtttggaaactcttctacatcagtattagctacattagctgccttagctgaagcatctgctccattgtccaattcttcagaaactccagtagtggccacagaagaagtagttactgcagaatctgtggatggtgccattcagcaagtagttagttcagggggtcagcaagtcatcacaatagttacagatggaattcagcttggaaatttgcactctattccaaccagtggaattggtcagcccatcattgtgaccatgccagatggacaacaagtattaacagtaccagcaacagacattgctgaagaaactgttataagtgaagaaccaccagctaagagacaatgtatcgaaataattgaaaaccgggtggaatctgcagaaatagaagtaaggagtcttttacccggtgtgctttgccgcagtcatccaaaataaattcaattttttttgtcttttatatttattactgacagtattgttttgatacagaatgaaagtgcgtagtattttcattttgtttatttttgccttatacatatagcaagccctcaataaataaatattgaatgaatgaaaaaaaaaaaaa

SEQ ID NO: 254829 - DNA, 1633 bp, Artificial Sequence
  derived and/or modified sequence
gctttctttgtgtggctgaagcgctagaaatggcatattttctttcccttcgttaaaaaatcagaccctctttcccctctctccccgcgggaacacagctagggagtgggtaggagcaggatctgccgacgagggcagaggcggaaaatcctcgggcgatgagctgaagagggccgggtccgggagggatgctgggagcttgactcactcgcacaccatgtgtccctccgcgcgcagcacgggggacttttcggtggggattttgggcgccgaccagacgcggcattttcggaaaatagcgccctgtgcagctgaagcgctttgtgtgtagcggggccgcgtcagcccggccgggtacgaggcgcctcgggtccccgcaccacctcctgctgccttcccgtcgccgctcccgaagcttttccaggtcacagcatatttgtggaggaagatgtccctggtagatttgggaaagaagcttttagaagcggcacgagcaggtcaagatgatgaagttcgtattttgatggcaaatggagctccctttactacagactggctgggaacttctccacttcatctagcagcacagtatggtcattattccaccacagaggtactgctgcgagctggtgtgagcagagatgccagaaccaaagtggaccgaacaccattacatatggcagcttctgagggccatgccagcatagtagaggttttacttaagcatggtgctgatgtcaatgcaaaggacatgttaaagatgacagctctccattgggccacagaacacaatcatcaagaggtggtggaacttttaatcaaatatggtgctgatgtacacacgcaaagtaaattttgtaaaactgcatttgatatttcaatagacaatggaaatgaagatttagcagagatattacagattgctatgcagaaccaaatcaacacaaacccagagagtcctgacactgtgacaatacatgctgcaacaccacagtttatcattggacctggaggggtggtgaacctaacagatgaaacgggtgtatctgctgttcagtttggaaactcttctacatcagtattagctacattagctgccttagctgaagcatctgctccattgtccaattcttcagaaactccagtagtggccacagaagaagtagttactgcagaatctgtggatggtgccattcagcaagtagttagttcagggggtcagcaagtcatcacaatagttacagatggaattcagcttggaaatttgcactctattccaaccagtggaattggtcagcccatcattgtgaccatgccagatggacaacaagtattaacagtaccagcaacagacattgctgaagaaactgttataagtgaagaaccaccagctaagagacaatgtatcgaaataattgaaaaccgggtggaatctgcagaaatagaagtaaggagtcttttacccggtgtgctttgccgcagtcatccaaaataaattcaattttttttgtcttttatatttattactgacagtattgttttgatacagaatgaaagtgcgtagtattttcattttgtttatttttgccttatacatatagcaagccctcaataaataaatattgaatgaatg

SEQ ID NO: 254830 - DNA, 1401 bp, Artificial Sequence
  derived and/or modified sequence
gcacaccatgtgtccctccgcgcgcagcacgggggacttttcggtggggattttgggcgccgaccagacgcggcattttcggaaaatagcgccctgtgcagctgaagcgctttgtgtgtagcggggccgcgtcagcccggccgggtacgaggcgcctcgggtccccgcaccacctcctgctgccttcccgtcgccgctcccgaagcttttccagatgtccctggtagatttgggaaagaagcttttagaagcggcacgagcaggtcaagatgatgaagttcgtattttgatggcaaatggagctccctttactacagactggctgggaacttctccacttcatctagcagcacagtatggtcattattccaccacagaggtactgctgcgagctggtgtgagcagagatgccagaaccaaagtggaccgaacaccattacatatggcagcttctgagggccatgccagcatagtagaggttttacttaagcatggtgctgatgtcaatgcaaaggacatgttaaagatgacagctctccattgggccacagaacacaatcatcaagaggtggtggaacttttaatcaaatatggtgctgatgtacacacgcaaagtaaattttgtaaaactgcatttgatatttcaatagacaatggaaatgaagatttagcagagatattacagattgctatgcagaaccaaatcaacacaaacccagagagtcctgacactgtgacaatacatgctgcaacaccacagtttatcattggacctggaggggtggtgaacctaacagatgaaacgggtgtatctgctgttcagtttggaaactcttctacatcagtattagctacattagctgccttagctgaagcatctgctccattgtccaattcttcagaaactccagtagtggccacagaagaagtagttactgcagaatctgtggatggtgccattcagcaagtagttagttcagggggtcagcaagtcatcacaatagttacagatggaattcagcttggaaatttgcactctattccaaccagtggaattggtcagcccatcattgtgaccatgccagatggacaacaagtattaacagtaccagcaacagacattgctgaagaaactgttataagtgaagaaccaccagctaagagacaatgtatcgaaataattgaaaaccgggtggaatctgcagaaatagaagtaaggagtcttttacccggtgtgctttgccgcagtcatccaaaataaattcaattttttttgtcttttatatttattactgacagtattgttttgatacagaatgaaagtgcgtagtattttcattttgtttatttttgccttatacatatagcaagccctcaataaataaatattgaatgaatgaa

SEQ ID NO: 254831 - DNA, 1047 bp, Artificial Sequence
  derived and/or modified sequence
atgtccttggtcgaccttgggaagaagctgttggaggctgcgcgcgctggacaggacgacgaggtcaggatccttatggccaacggggcaccatttacaaccgattggctgggaacaagcccactgcacctggcggcccagtacgggcactactcaactaccgaagtgttattacgcgccggcgtgtcccgggatgccagaaccaaagtggacaggacgcctctgcacatggccgcttccgaagggcacgcttccatagtggaagtgctccttaagcacggtgcggacgtgaatgctaaagatatgctgaaaatgaccgcactgcactgggctacggaacacaaccaccaggaggtggtggaattgcttattaagtatggcgccgatgtgcacacgcagtccaagttttgcaagactgcattcgatatcagcattgacaatggaaacgaagacctcgcggagatcttgcaaatcgcaatgcagaatcagattaacacaaaccctgagtcaccagatactgtcacgatacatgccgccacccctcagttcattattgggcctggtggagtcgtcaatctgacagacgaaacaggcgtatccgccgttcaatttggcaattccagtacttcggtgttagcaaccttggctgctttagccgaggctagtgcccctttgtcaaatagttccgagactcctgtcgtggccacagaggaagtagttactgctgagagtgtggatggggctatccagcaggtggtttcttcagggggtcagcaggtgataaccattgtcaccgatggaattcaactaggaaaccttcattcaattcctaccagcggcatcggccaacctattatagtcacgatgcccgacggacagcaggttctcacagtcccagccacggacattgctgaggagactgtgatttcagaggagccgcccgcgaagagacagtgcatcgaaatcatcgaaaaccgcgtggaatccgcagaaatcgaagtacggtcactcctgcccggagtattgtgccggagtcaccccaaatag

SEQ ID NO: 254832 - DNA, 1047 bp, Artificial Sequence
  derived and/or modified sequence
atgtccctagtagacctgggcaaaaaattattagaagccgcgagggcaggacaggacgacgaagtcagaatactcatggctaatggcgcccccttcacgacagactggctgggaacctcccccctacaccttgctgctcagtatgggcactacagcactacagaagtcttgctgcgggccggtgtgagtcgtgatgctcgtactaaagtggaccgaactcccctccatatggctgcctccgaggggcacgccagtatagttgaagtgttacttaagcatggcgccgatgtaaacgccaaggatatgttgaagatgactgccctgcattgggccaccgaacacaatcatcaggaagtggttgaattgctgataaaatatggagccgatgtacatacacagtccaaattttgcaagacagcgtttgatatttcaatcgacaatggtaatgaggatctcgctgagatactgcagattgcaatgcaaaaccagatcaatacaaatccagagtctcccgacacagtcaccattcacgcggcaacccctcagtttataatcggacctggcggggtggtgaatctgacggacgaaacaggcgtgtcggcagtccaattcggcaattcatccaccagtgtgctcgccactctcgctgccctggccgaggcctccgctcctctgagtaacagcagcgagacaccagttgtcgctactgaggaggtagtcaccgctgagtcagtcgatggtgctatccagcaggttgtttcgtcgggaggacagcaggtgatcaccattgtcacggacggaatccaactgggaaatcttcactccattcccacgtcaggtattggacaacccattatcgtgacgatgccagacggtcagcaggtgcttaccgtccccgccaccgatattgccgaggaaacagtcataagcgaagagccacctgcgaaacgccagtgcatagagataattgagaatcgtgttgaaagcgctgaaattgaagtaaggagtttgcttccgggagtgctatgccgttcacacccaaagtag

SEQ ID NO: 254833 - DNA, 1047 bp, Artificial Sequence
  derived and/or modified sequence
atgagcctggtggacctgggcaagaagctgctggaggccgcccgggccggccaggatgatgaggtgcgcatcctgatggccaacggggcccccttcaccacagactggctgggcaccagccccctgcacctggccgcccagtatggccactacagcaccacagaggtgctgctgcgggccggcgtgtccagagatgcccggaccaaggtggacaggacccccctgcacatggccgccagcgagggccacgccagcatcgtggaggtgctgctgaagcatggagcagatgtgaatgccaaggacatgctgaagatgacagccctgcactgggccacagagcacaaccaccaggaggtggtggagctgctgatcaagtacggggctgatgtgcacacccagagcaagttctgcaagacagcctttgacatcagcattgacaatggaaatgaagacctggccgagatcctgcagatcgccatgcagaaccagatcaacaccaaccctgagagcccagacacagtgaccatccacgccgccaccccccagttcatcatcggccctggaggagtggtgaacctgacagatgaaacaggagtgtctgctgtgcagtttggaaacagcagcacctctgtgctggccaccctggccgccctggccgaggccagcgcccccctgagcaacagcagcgagacccctgtggtggccacagaggaggtggtgacagctgagagcgtggatggagccatccagcaggtggtgtcctctgggggccagcaggtgatcaccatcgtgacagatggcatccagctgggcaacctgcacagcatccccaccagcggcatcggccagcccatcatcgtgaccatgccagatggccagcaggtgctgactgtgcctgccacagacattgctgaggagaccgtcatcagcgaggagcccccagccaagaggcagtgcatcgagatcatcgagaacagagtggagagcgctgagattgaggtgcgcagcctgctgcccggggtgctgtgccgcagccaccccaagtag

SEQ ID NO: 254834 - DNA, 1047 bp, Artificial Sequence
  derived and/or modified sequence
atgagcctggtggacctgggcaagaagctgctggaggccgcccgggcagggcaggacgatgaggttcgcatcctcatggccaacggagccccctttacaacagattggctgggaacgagccctctgcacctggcagcacagtatggacactactccactaccgaagtcctgctccgcgccggagtttcccgagacgccagaactaaggtggaccggacccccctgcacatggcagcctctgagggccatgcatcgatcgtcgaagtgctgctaaaacacggtgctgatgttaatgccaaagacatgctcaaaatgaccgcactgcattgggctactgaacataatcaccaggaggtggttgagctgctgataaaatacggggccgacgtgcatacccaaagcaagttctgcaaaaccgctttcgacatttctattgataacggcaatgaagatttggcagagattctgcagatagctatgcagaaccagattaacaccaacccggaaagtcctgacacagtgacaatccacgccgctaccccccagtttattatcggccccggtggggtcgtcaacctgaccgacgaaacgggcgtgagcgctgtccagtttggcaactcgtcaacctccgtactagcgacacttgctgcacttgccgaggccagcgcccctttatctaacagctctgaaacaccagttgtcgcgaccgaagaggtagtgaccgccgagtcggtggacggggccatccagcaggttgtctcctccggggggcaacaggtgatcacaatagtcacagacgggatccagctcggcaatcttcatagtatccccaccagtggaatagggcaacctattatcgtgactatgccagatggccagcaagttctgactgtccccgccaccgatatcgccgaggagacggtcatcagcgaggagcctcccgccaaacgccagtgcattgagataatcgagaacagagttgagtctgcggaaattgaggtaaggtcccttctccccggagtactgtgccgcagtcatcccaagtag

SEQ ID NO: 254835 - DNA, 1047 bp, Artificial Sequence
  derived and/or modified sequence
atgagcctggtggacctgggcaagaagctgctggaggccgcccgggccggccaggatgacgaggtgagaattctgatggccaatggtgcgcccttcaccactgactggttgggcacaagtcccctgcacctggccgcacagtacgggcattattctacaaccgaagtactcttgcgtgctggggtctccagagacgccaggacgaaagttgatcgcaccccactgcacatggcggccagtgaaggtcacgccagcattgtggaagtgctgctgaaacatggtgcagatgtcaacgcaaaggatatgctcaagatgaccgccctgcactgggccacagagcataaccatcaggaggtcgtggagctgcttataaagtacggagcggacgtccacacgcagagcaagttttgtaagaccgcctttgacattagtattgacaatggcaatgaggatcttgctgagattctccagattgcaatgcagaatcagataaacaccaacccggaaagtcccgatactgtgactattcatgcggccacccctcagtttatcatcggaccaggcggagttgtgaacctgacggatgagaccggtgtatctgcggtgcagttcggaaacagcagtacatctgtgctcgccacactcgcagcacttgctgaagcgtctgcaccactgtctaattcaagcgaaactcctgtggtggcaacggaggaggttgtcaccgccgaaagcgtcgatggcgcaatacagcaggtagtatctagtggaggacagcaagtaatcaccatcgtgacggatgggatacagttgggaaacctgcattctatccctacctcgggaattggccagcctataatcgtgactatgcctgatgggcagcaagtgctcacggtccccgccacggatatagctgaagagaccgtgataagcgaagaacctcccgccaagcgacagtgcatcgagatcatcgagaatagggtggaatcagcagaaattgaagttaggtctttactgccgggggtgctgtgcaggtcccatcccaaatag

SEQ ID NO: 254836 - DNA, 1047 bp, Artificial Sequence
  derived and/or modified sequence
atgtctcttgtcgacctcgggaagaagttgctcgaggccgctcgggctggtcaggatgacgaagtgagaattttgatggctaatggggcacccttcacaaccgattggctgggaacttccccattgcacctagccgcacaatatgggcattactcgactactgaggtgctgctgagggcaggagtatcgcgggatgcccgaactaaagtggaccggactccactccacatggcggcaagcgagggccacgctagcattgtggaagtcttgctgaagcatggggcagatgtgaacgcaaaggatatgctgaaaatgactgcgctccattgggctactgagcataatcaccaggaggtagttgagctcctgatcaagtatggagccgatgtgcacacccagtccaagttttgcaaaactgctttcgacatttccattgataacggcaacgaggatctggcagaaattctccagattgcaatgcagaatcaaataaatacaaacccggagtcccctgacacagttaccattcacgctgccaccccccagttcatcatcgggccaggcggagtcgtgaacctgaccgacgagacaggcgtgagtgccgtgcagtttggcaactcctcaacttccgtactggccacattagctgccttggccgaggcttcggcaccgctcagcaactctagcgagacaccggttgtggccacggaagaggtggtcactgcggaatcagttgatggagcaatacaacaggttgtttcctcaggcggacagcaggtgattaccattgttaccgacggaatccagctgggcaacttacatagcatccctaccagcggaattggccaaccaatcattgtgacaatgcctgatggacagcaggtgcttacggtgccggcaactgatatcgcggaagagactgttataagcgaggaaccccctgcaaagcgtcagtgcatagaaatcatagagaacagagttgaatccgctgagattgaggttaggagcctcctcccaggcgtcttgtgcaggagccacccaaaatag

SEQ ID NO: 254837 - DNA, 1047 bp, Artificial Sequence
  derived and/or modified sequence
atgtcattagtggacttgggaaagaagctgctcgaagccgcacgggctggccaggacgatgaagtgcgtatcctcatggctaacggcgcaccgtttaccactgactggctcgggacgagtccactgcatctcgccgcacagtatgggcactactccaccaccgaggtgctgctccgggcaggagtatcgagggacgctcgaacaaaggtcgacagaacccctcttcatatggctgccagcgaaggccacgcaagcattgtggaagttctcctcaaacacggagcagacgtcaatgccaaggatatgctgaagatgaccgcactccattgggcgactgagcacaaccaccaggaagttgtggagttactgatcaaatacggggctgatgtacacacacaatccaaattctgcaaaacagcctttgacatctcgattgacaatggaaacgaggatctcgcagaaatcctacagatagcaatgcagaaccagatcaataccaacccagagtctcccgatactgtgactattcacgccgctactccccagtttattattggcccagggggagtagtgaatctaacagatgaaacaggagtgtcagcggtccaatttggcaatagcagcacctcagtcttagctaccctggctgccttggccgaggcgtcggcccctctttcaaacagctccgagacaccagtggttgcaaccgaggaggtggtgaccgccgagagtgtggacggtgccatacagcaagtggtctccagcgggggacagcaagtgattacaatcgtaaccgatgggatccagttggggaatctccactccatcccgacgagtggtatcgggcagccaattatcgtgactatgcccgacggacagcaagtattaacggtgcctgcgacagatatagccgaggaaaccgtaattagcgaggagccaccagctaaaagacagtgcattgagataatcgaaaatagggtggagagtgctgaaattgaagtgcggagcctgcttccaggagtcttgtgtcgcagccatccaaaatag

SEQ ID NO: 254838 - DNA, 1047 bp, Artificial Sequence
  derived and/or modified sequence
atgagcctggtggacctgggcaagaagctgctggaggccgccagagccggccaggacgacgaggtgagaatcctgatggccaacggcgcccccttcaccaccgactggctgggcaccagccccctgcacctggccgcccagtacggccactacagcaccaccgaggtgctgctgagagccggcgtgagcagagacgccagaaccaaggtggacagaacccccctgcacatggccgccagcgagggccacgccagcatcgtggaggtgctgctgaagcacggcgccgacgtgaacgccaaggacatgctgaagatgaccgccctgcactgggccaccgagcacaaccaccaggaggtggtggagctgctgatcaagtacggcgccgacgtgcacacccagagcaagttctgcaagaccgccttcgacatcagcatcgacaacggcaacgaggacctggccgagatcctgcagatcgccatgcagaaccagatcaacaccaaccccgagagccccgacaccgtgaccatccacgccgccaccccccagttcatcatcggccccggcggcgtggtgaacctgaccgacgagaccggcgtgagcgccgtgcagttcggcaacagcagcaccagcgtgctggccaccctggccgccctggccgaggccagcgcccccctgagcaacagcagcgagacccccgtggtggccaccgaggaggtggtgaccgccgagagcgtggacggcgccatccagcaggtggtgagcagcggcggccagcaggtgatcaccatcgtgaccgacggcatccagctgggcaacctgcacagcatccccaccagcggcatcggccagcccatcatcgtgaccatgcccgacggccagcaggtgctgaccgtgcccgccaccgacatcgccgaggagaccgtgatcagcgaggagccccccgccaagagacagtgcatcgagatcatcgagaacagagtggagagcgccgagatcgaggtgagaagcctgctgcccggcgtgctgtgcagaagccaccccaagtag

SEQ ID NO: 254839 - protein, 319 aa, Artificial Sequence
  derived and/or modified sequence
MLWRQLIYWQLLALFFLPFCLCQDEYMEVSGRTNKVVARIVQSHQQTGRSGSRREKVRERSHPKTGTVDNNTSTDLKSLRPDELPHPEVDDLAQITTFWGQSPQTGGLPPDCSKCCHGDYSFRGYQGPPGPPGPPGIPGNHGNNGNNGATGHEGAKGEKGDKGDLGPRGERGQHGPKGEKGYPGIPPELQIAFMASLATHFSNQNSGIIFSSVETNIGNFFDVMTGRFGAPVSGVYFFTFSMMKHEDVEEVYVYLMHNGNTVFSMYSYEMKGKSDTSSNHAVLKLAKGDEVWLRMGNGALHGDHQRFSTFAGFLLFETK

SEQ ID NO: 254840 - protein, 284 aa, Artificial Sequence
  derived and/or modified sequence
MTKSSLRPLQKQSPQTGGLPPDCSKCCHGDYSFRGYQGPPGPPGPPGIPGNHGNNGNNGATGHEGAKGEKGDKGDLGPRGERGQHGPKGEKGYPGIPPELQIAFMASLATHFSNQNSGIIFSSVETNIGNFFDVMTGRFGAPVSGVYFFTFSMMKHEDVEEVYVYLMHNGNTVFSMYSYEMKGKSDTSSNHAVLKLAKGDEVWLRMGNGALHGDHQRFSTFAGFLLFETKCHGETPAGPRDSAAGKSKAYLCQAEWIWPVRKLLPVSWPRYQLFGFVRWKEQHI

SEQ ID NO: 254841 - DNA, 960 bp, Artificial Sequence
  derived and/or modified sequence
atgctatggcgacagctgatttactggcaacttttggctctgttttttctgccattttgtttgtgccaggatgagtatatggaggtctctggcagaacaaacaaagttgtggccaggatcgtccagagccaccagcagacgggacgaagcggctcccggcgagaaaaggtgcgcgaacggtctcatcccaagaccgggaccgtggacaacaatacctccacagaccttaagtcactccgccctgatgagctgcctcaccccgaagtcgacgatttagcacagataaccactttctggggccaatcgcctcagacaggtggcctgccacctgactgctcaaagtgctgccacggcgattattccttccggggataccagggacctcctggccctcccggaccgcctggaatccccggaaaccacggaaacaatggtaacaacggggcaaccggccacgaaggggctaagggggagaagggggacaagggggacctgggcccacgtggcgagagaggtcagcacggcccaaagggagagaagggctaccctgggattccgcctgaattacagattgcttttatggcgagcctagccacccatttttccaaccagaattccggcatcattttctccagtgttgaaacgaacattggcaatttctttgacgtcatgactggcagattcggcgctcctgtctccggtgtttacttttttactttttcaatgatgaagcatgaggacgtggaagaagtgtatgtttatctcatgcataatgggaatacggtcttcagcatgtattcctatgagatgaaaggcaagtctgacacatcgtccaatcatgccgtgctgaagctggcgaagggcgatgaggtctggctgagaatggggaatggcgctctgcacggagatcaccaacgtttttctacttttgccggttttctattattcgaaaccaagtag

SEQ ID NO: 254842 - DNA, 960 bp, Artificial Sequence
  derived and/or modified sequence
atgctctggcgccaactcatctattggcagctactggcccttttctttctgccattctgcctgtgtcaggacgaatacatggaagtgtcaggaagaactaacaaagtcgtggccaggatcgttcagagccaccagcagacgggtaggtctggttctaggagagagaaggtgcgggaacggtcccacccgaagaccggcacagtcgataacaacacctctactgatcttaaatccctcaggcctgatgagctgccccaccccgaggtcgatgatctcgcacaaatcaccacattttggggacagagcccccagacagggggattgcctccggactgttctaagtgctgtcatggggattattcgtttaggggctatcagggcccacctggaccgcctggaccacctgggatccctgggaatcatggcaacaacggtaataatggagccacgggacatgaaggtgcaaagggagaaaagggggataaaggggacttgggacccagaggagagagaggacaacatggcccaaaaggcgagaaagggtaccccgggatccccccagaactgcaaattgcctttatggctagcctggctacacatttttccaatcagaactccgggattatattttcttccgtagaaaccaacattggcaactttttcgatgtgatgacgggcagattcggcgcccctgtgtctggcgtgtattttttcaccttttccatgatgaagcacgaggacgttgaggaagtctacgtgtatctgatgcataacggcaacacagtctttagcatgtattcatacgagatgaaaggcaagtccgatacatcatcaaatcatgctgtcctgaaactggccaagggtgatgaggtttggctgagaatgggcaacggggctcttcacggggatcaccaaaggttctctacatttgcaggttttttactgttcgagacaaagtag

SEQ ID NO: 254843 - DNA, 960 bp, Artificial Sequence
  derived and/or modified sequence
atgttgtggcgccagctcatatactggcagctgctagccctcttttttctccccttttgcctctgccaagacgagtatatggaagtgagcggcagaactaataaagtcgtcgccaggattgtccagagccaccagcagaccggccgatccggctctagacgggaaaaagtgagagagcggtcccacccaaagaccggaaccgtcgataacaatacttccaccgacctaaaaagcctgagacccgatgaactccctcacccagaggttgatgatctcgcccaaatcaccacattttggggacaatctcctcagaccggagggcttcctcccgattgcagtaagtgctgtcacggtgattatagtttcaggggctatcaaggtccaccaggtccgcccggccctccggggatcccgggcaaccacggcaataatggcaacaatggcgcgactggccacgagggcgcaaagggggagaaaggcgacaaaggagatctcggacctcggggcgagagaggacaacacggcccaaagggcgaaaaaggctacccaggaatccctcccgagctacagatcgcgtttatggcgtctctggcgactcatttctccaatcagaacagcggtatcatcttctcatcagtggaaactaacataggaaatttctttgacgtcatgaccggcagattcggcgccccagtcagcggagtttacttctttacattttcaatgatgaaacacgaagacgtcgaagaggtgtatgtctacttgatgcacaatggtaatacagtgtttagtatgtattcttacgagatgaaaggcaagagcgatacctcctccaaccatgctgtgctgaaattggcaaaaggcgacgaagtgtggctgcgaatgggtaatggggcactgcatggagaccaccagcgcttttcaacttttgcaggcttccttctttttgagacaaaatag

SEQ ID NO: 254844 - DNA, 960 bp, Artificial Sequence
  derived and/or modified sequence
atgctgtggagacagctgatctactggcagctgctggccctgttcttcctgcccttctgcctgtgccaggacgagtacatggaggtgagcggcagaaccaacaaggtggtggccagaatcgtgcagagccaccagcagaccggcagaagcggcagcagaagagagaaggtgagagagagaagccaccccaagaccggcaccgtggacaacaacaccagcaccgacctgaagagcctgagacccgacgagctgccccaccccgaggtggacgacctggcccagatcaccaccttctggggccagagcccccagaccggcggcctgccccccgactgcagcaagtgctgccacggcgactacagcttcagaggctaccagggcccccccggcccccccggcccccccggcatccccggcaaccacggcaacaacggcaacaacggcgccaccggccacgagggcgccaagggcgagaagggcgacaagggcgacctgggccccagaggcgagagaggccagcacggccccaagggcgagaagggctaccccggcatcccccccgagctgcagatcgccttcatggccagcctggccacccacttcagcaaccagaacagcggcatcatcttcagcagcgtggagaccaacatcggcaacttcttcgacgtgatgaccggcagattcggcgcccccgtgagcggcgtgtacttcttcaccttcagcatgatgaagcacgaggacgtggaggaggtgtacgtgtacctgatgcacaacggcaacaccgtgttcagcatgtacagctacgagatgaagggcaagagcgacaccagcagcaaccacgccgtgctgaagctggccaagggcgacgaggtgtggctgagaatgggcaacggcgccctgcacggcgaccaccagagattcagcaccttcgccggcttcctgctgttcgagaccaagtag

SEQ ID NO: 254845 - DNA, 960 bp, Artificial Sequence
  derived and/or modified sequence
atgctgtggcgccaactgatctactggcagctccttgccttgttttttctgcccttttgcctctgccaggatgagtatatggaggtctccggtcgaacaaataaggtagtagcccgcattgtccaaagtcaccaacagacaggacgttccgggtcccgtcgtgagaaggtgagggagaggagccatcccaagactggtaccgtcgacaataatacaagcacagatctgaaaagcctcagaccagatgagctacctcacccagaggtcgatgatctggcgcagatcacgacattctggggccaaagtccacagaccggcggactgccacctgattgctccaaatgctgtcacggtgactacagttttagaggctaccagggtcctccagggccacctgggccacccggcattcctggcaatcatgggaataacgggaacaacggagcaacaggtcacgagggagctaaaggagaaaagggagacaaaggagatcttgggccaaggggagagcggggccagcatggacccaagggcgaaaaaggataccctggaattcctccagaattgcagatcgccttcatggctagcttagcaacacacttcagcaaccagaacagtggaatcatctttagcagtgttgaaacaaacatcggaaatttctttgatgtcatgacaggccgtttcggcgcgcccgtctctggggtttattttttcacgtttagcatgatgaaacatgaagacgtggaagaggtttacgtgtacttgatgcataatggtaacaccgtgttcagtatgtactcctatgagatgaagggcaagtctgatacctcatcaaatcatgcagtactgaagctggcaaagggagacgaggtttggcttcggatgggtaacggcgctcttcatggggatcatcagaggttcagcacctttgctgggttccttctgtttgagactaaatag

SEQ ID NO: 254846 - DNA, 960 bp, Artificial Sequence
  derived and/or modified sequence
atgctgtggaggcagctgatctactggcagctgctggccctcttcttcctgcccttctgcctgtgccaggatgagtacatggaggtgtctggccgcaccaacaaggtggtggcccgcatcgtgcagagccaccagcagacaggccgcagcggcagcagaagagagaaggtgcgggagaggagccaccccaagacaggaacagtggacaacaacaccagcacagacctgaagagcctgcggccagatgagctgccccaccctgaggtggatgacctggcccagatcaccaccttctggggccagagcccccagacaggaggcctgcccccagactgcagcaagtgctgccacggggactacagcttccggggctaccagggccccccaggccccccaggccccccaggcatccctggcaaccacggcaacaacggcaacaatggagccaccggccacgagggcgccaagggggagaagggggacaagggggacctgggccccagaggagagcggggccagcacggccccaagggggagaagggctacccaggcatccccccagagctgcagatcgccttcatggccagcctggccacccacttcagcaaccagaacagcggcatcatcttcagctctgtggagaccaacatcggcaacttctttgatgtgatgacaggccgctttggagcccctgtgtctggagtgtacttcttcaccttctccatgatgaagcatgaagatgtggaggaggtgtatgtgtacctgatgcacaacggcaacacagtgttctccatgtacagctatgagatgaagggcaagagtgacaccagcagcaaccacgctgtgctgaagctggccaagggagatgaggtgtggctgaggatgggaaatggagccctgcatggagaccaccagcgcttcagcacctttgctggcttcctgctgtttgagaccaagtag

SEQ ID NO: 254847 - DNA, 2802 bp, Artificial Sequence
  derived and/or modified sequence
ttttggcttttgggaagtcatggggaaaagaagtaaagctgagggtggcgaaatacctttgctaaacccagagacactgcacctgaatcctgctcagtgttttgtaggcaaccaactgccttctgccactggtatccggaaggggaaatgagttaccttaagtgggccaaagtggggaaatactaacagtacagctagaaaccaagagctgtcgtgaaagccctgaatgggttcccactgctatttcagacaaaactgatgcagttaagcctgaatttcctggcaagcacaagggtagatttttccaaaaggctttttagactgcaaatacacagcctttccatgtctaatcacaaaagcaaactgctggacacatgctctctgttcccagctggttgtgtatgttttcttcacacttcaacagaaacgtgccaaggtgtgacatttatgaatttcgccaactgggaactgtgcacacaaatcgttcttgcttgtggtgtgggaaaatgatgaatgggggctgttctgcctggggaggagggctgctgtcactctggcatgcctacagccttatttattacacaccaaagtataaaaccactccgccgctgcagctctcagctccagtcctggcatctgcccgaggagaccacgctcctggagctctgctgtcttctcagggagactctgaggctctgttgagaatcatgctttggaggcagctcatctattggcaactgctggctttgtttttcctccctttttgcctgtgtcaagatgaatacatggaggtgagcggaagaactaataaagtggtggcaagaatagtgcaaagccaccagcagactggccgtagcggctccaggagggagaaagtgagagagcggagccatcctaaaactgggactgtggataataacacttctacagacctaaaatccctgagaccagatgagctaccgcaccccgaggtagatgacctagcccagatcaccacattctggggccagtctccacaaaccggaggactacccccagactgcagtaagtgttgtcatggagactacagctttcgaggctaccaaggcccccctgggccaccgggccctcctggcattccaggaaaccatggaaacaatggcaacaatggagccactggtcatgaaggagccaaaggtgagaagggcgacaaaggtgacctggggcctcgaggggagcgggggcagcatggccccaaaggagagaagggctacccggggattccaccagaacttcagattgcattcatggcttctctggcaacccacttcagcaatcagaacagtgggattatcttcagcagtgttgagaccaacattggaaacttctttgatgtcatgactggtagatttggggccccagtatcaggtgtgtatttcttcaccttcagcatgatgaagcatgaggatgttgaggaagtgtatgtgtaccttatgcacaatggcaacacagtcttcagcatgtacagctatgaaatgaagggcaaatcagatacatccagcaatcatgctgtgctgaagctagccaaaggggatgaggtttggctgcgaatgggcaatggcgctctccatggggaccaccaacgcttctccacctttgcaggattcctgctctttgaaactaagtaaatatatgactagaatagctccactttggggaagacttgtagctgagctgatttgttacgatctgaggaacattaaagttgagggttttacattgctgtattcaaaaaattattggttgcaatgttgttcacgctacaggtacaccaataatgttggacaattcaggggctcagaagaatcaaccacaaaatagtcttctcagatgaccttgactaatatactcagcatctttatcactctttccttggcacctaaaagataattctcctctgacgcaggttggaaatatttttttctatcacagaagtcatttgcaaagaattttgactactctgcttttaatttaataccagttttcaggaacccctgaagttttaagttcattattctttataacatttgagagaatcggatgtagtgatatgacagggctggggcaagaacaggggcactagctgccttattagctaatttagtgccctccgtgttcagcttagcctttgaccctttccttttgatccacaaaatacattaaaactctgaattcacatacaatgctattttaaagtcaatagattttagctataaagtgcttgaccagtaatgtggttgtaattttgtgtatgttcccccacatcgcccccaacttcggatgtggggtcaggaggttgaggttcactattaacaaatgtcataaatatctcatagaggtacagtgccaatagatattcaaatgttgcatgttgaccagagggattttatatctgaagaacatacactattaataaataccttagagaaagattttgacctggctttagataaaactgtggcaagaaaaatgtaatgagcaatatatggaaataaacacacctttgttaaagatactttctaaacttgtgtttaataaactttaatagtcatagaattgtaaatcactatggttaacagaaagtgaaaatattttcatgcagatgatgtgaacagccatgtgaataggtgacttgggcacacagcagggtcatatgacttcagaaaacttcgcttttcagttattccattgttataatgtcaaccctttaagacattgatgtttagagggctcacaaataaaatctgaatacctgtaaggaaa

SEQ ID NO: 254848 - DNA, 960 bp, Artificial Sequence
  derived and/or modified sequence
atgctgtggcggcagctgatctactggcagctgctggccctgttctttctgcccttctgtctgtgccaggatgagtatatggaggtgtccgggcggacaaacaaggtcgtcgcaaggatagtgcagagccatcagcagactggacggtccggcagcaggagggagaaagtcagggagcggagtcaccccaaaactggtactgtcgacaacaacactagcacagacttgaaaagtttacggcctgacgaactccctcatcctgaagtcgacgatctagcgcaaattaccacgttctggggccagtcaccccagacaggtgggctgccaccggattgctccaaatgttgtcatggtgattacagcttccggggttatcagggtcccccagggccacccggaccaccagggattcctggcaatcatgggaacaacggcaataacggcgctaccggccatgagggtgcaaagggtgagaagggcgataaaggggacttgggtcctaggggcgaacgaggacagcatgggcccaaaggcgaaaagggatatccgggaatcccaccagaactgcagattgccttcatggcctcactggcgacacattttagcaaccagaattccggcattatcttttcctctgtggagactaacataggcaatttctttgatgtcatgacaggccgattcggagcaccagtgagcggggtctacttcttcactttctcaatgatgaagcatgaggatgtagaagaagtgtacgtgtatcttatgcataatggaaataccgtattctcaatgtattcctatgaaatgaaaggtaagagcgacaccagctccaatcacgcggtgctgaaactggctaagggggatgaagtctggttgaggatgggcaacggcgcgctgcacggtgaccatcagagatttagtacctttgcaggctttcttctgttcgagacaaagtag

SEQ ID NO: 254849 - RNA, 960 nt, Artificial Sequence
  derived and/or modified sequence
augcucuggcgccaacucaucuauuggcagcuacuggcccuuuucuuucugccauucugccugugucaggacgaauacauggaagugucaggaagaacuaacaaagucguggccaggaucguucagagccaccagcagacggguaggucugguucuaggagagagaaggugcgggaacggucccacccgaagaccggcacagucgauaacaacaccucuacugaucuuaaaucccucaggccugaugagcugccccaccccgaggucgaugaucucgcacaaaucaccacauuuuggggacagagcccccagacagggggauugccuccggacuguucuaagugcugucauggggauuauucguuuaggggcuaucagggcccaccuggaccgccuggaccaccugggaucccugggaaucauggcaacaacgguaauaauggagccacgggacaugaaggugcaaagggagaaaagggggauaaaggggacuugggacccagaggagagagaggacaacauggcccaaaaggcgagaaaggguaccccgggauccccccagaacugcaaauugccuuuauggcuagccuggcuacacauuuuuccaaucagaacuccgggauuauauuuucuuccguagaaaccaacauuggcaacuuuuucgaugugaugacgggcagauucggcgccccugugucuggcguguauuuuuucaccuuuuccaugaugaagcacgaggacguugaggaagucuacguguaucugaugcauaacggcaacacagucuuuagcauguauucauacgagaugaaaggcaaguccgauacaucaucaaaucaugcuguccugaaacuggccaagggugaugagguuuggcugagaaugggcaacggggcucuucacggggaucaccaaagguucucuacauuugcagguuuuuuacuguucgagacaaaguag

SEQ ID NO: 254850 - RNA, 960 nt, Artificial Sequence
  derived and/or modified sequence
auguuguggcgccagcucauauacuggcagcugcuagcccucuuuuuucuccccuuuugccucugccaagacgaguauauggaagugagcggcagaacuaauaaagucgucgccaggauuguccagagccaccagcagaccggccgauccggcucuagacgggaaaaagugagagagcggucccacccaaagaccggaaccgucgauaacaauacuuccaccgaccuaaaaagccugagacccgaugaacucccucacccagagguugaugaucucgcccaaaucaccacauuuuggggacaaucuccucagaccggagggcuuccucccgauugcaguaagugcugucacggugauuauaguuucaggggcuaucaagguccaccagguccgcccggcccuccggggaucccgggcaaccacggcaauaauggcaacaauggcgcgacuggccacgagggcgcaaagggggagaaaggcgacaaaggagaucucggaccucggggcgagagaggacaacacggcccaaagggcgaaaaaggcuacccaggaaucccucccgagcuacagaucgcguuuauggcgucucuggcgacucauuucuccaaucagaacagcgguaucaucuucucaucaguggaaacuaacauaggaaauuucuuugacgucaugaccggcagauucggcgccccagucagcggaguuuacuucuuuacauuuucaaugaugaaacacgaagacgucgaagagguguaugucuacuugaugcacaaugguaauacaguguuuaguauguauucuuacgagaugaaaggcaagagcgauaccuccuccaaccaugcugugcugaaauuggcaaaaggcgacgaaguguggcugcgaauggguaauggggcacugcauggagaccaccagcgcuuuucaacuuuugcaggcuuccuucuuuuugagacaaaauag

SEQ ID NO: 254851 - protein, 461 aa, Artificial Sequence
  derived and/or modified sequence
MAADIFPRKKPANSSSTSVQQYHQQNLSNNNLIPAPNWQGLYPTIRERNAMMFNNDLMADVHFVVGPPGGTQRLPGHKYVLAVGSSVFHAMFYGELAEDKDEIRIPDVEPAAFLAMLKYIYCDEIDLAADTVLATLYAAKKYIVPHLARACVNFLETSLSAKNACVLLSQSCLFEEPDLTQRCWEVIDAQAELALKSEGFCDIDFQTLESILRRETLNAKEIVVFEAALNWAEVECQRQDLALSIENKRKVLGKALYLIRIPTMALDDFANGAAQSGVLTLNETNDIFLWYTAAKKPELQFVSKARKGLVPQRCHRFQSCAYRSNQWRYRGRCDSIQFAVDKRVFIAGFGLYGSSCGSAEYSAKIELKRQGVVLGQNLSKYFSDGSSNTFPVWFEYPVQIEPDTFYTASVILDGNELSYFGQEGMTEVQCGKVTVQFQCSSDSTNGTGVQGGQIPELIFYA

SEQ ID NO: 254852 - DNA, 4686 bp, Artificial Sequence
  derived and/or modified sequence
attgcgcatgccccgtatccaaggccgcctccgggagcacctcccatgccgctccgctccctcccggtgaccgggcacgcgcgctcgctcccgcagagcgtgccctgcgtgcgggtgcccgccgagcccgccgggcgctggatctccgagtgccccggccggggcctgaggagcgggcacagggcaaggcggcggacggctgcgtcgcccgaggcgaggaggagcgctggcgagacggtaaagaacaggtccaagaaaagctcaaagaaagcaaataccagcagcagcagtagcaacagcagcaagttgccaccagtttgttatgaaataattaccttgaagactaaaaagaagaagatggctgctgatatattcccccgtaaaaagccagccaactccagcagcaccagcgtccagcagtaccaccagcagaatctcagtaacaacaaccttatcccggccccaaactggcagggtctttatcccaccattagagagagaaatgcgatgatgttcaataatgatttgatggcagatgtacattttgtggttgggccaccaggtgggactcaacggttgccaggacacaaatatgttttagctgttgggagctctgtgttccatgcgatgttttacggagaacttgcagaggacaaagatgaaatccgtataccagatgtcgaacctgctgcttttctcgctatgctgaaatatatctattgtgatgaaattgacttggctgctgacacagtgctggccacactttatgctgccaaaaagtacattgtccctcaccttgccagagcctgtgttaatttcctggagaccagcctgagtgccaagaatgcctgtgtgctcctctcccagagctgcctgttcgaggagccagacctgacccagcgttgctgggaggtgattgatgcccaggctgagttagctctcaagtctgagggattctgcgatattgacttccagacactagaaagtattctccgtagggaaactctgaatgccaaagaaattgtggtttttgaggcagctctcaactgggctgaagtagaatgccaacgacaagatctggcgttgagcattgaaaataaacgcaaggttctaggaaaggcactttacttgatccgcatacccacaatggccctcgatgattttgcaaatggtgctgcacagtccggggtattaactctcaatgagaccaacgacatcttcctctggtatactgcagccaaaaagcctgagcttcagtttgtgagtaaagcccgtaagggccttgtcccccagcgctgtcaccgtttccagtcgtgtgcctatcgaagcaaccaatggcgctatcgtggtcgctgtgacagcatccagtttgcagttgataaaagagtgttcattgctggctttgggctgtatggctccagctgtggttctgcagaatacagtgccaagattgaacttaagcggcagggcgttgtcctggggcagaacttgagcaagtacttctcagatgggtccagcaatacctttcccgtatggtttgaatacccagtgcagatcgagccagacaccttctacacagccagtgtgatactggatggcaatgaactcagctactttggacaagaaggcatgacagaagttcagtgtggcaaagtgactgtccagtttcagtgctcctcagatagcaccaatggcactggggtacagggagggcagatccctgaacttatattctatgcttgaaaactcacttcctgaagcagcttgagctccaaagtgcacatctggttccaacttgcctgatgcttagctcatctgcaaatatgtgatcagtgccggtaatttgtaatgaatgaagcggtaggcaggttctaatttcttttaaccttttaattatgtacaggcaaaaatgcagcattccgcttttaactatctgcttaaaagagctaacgttcttattaaggctttgtggtttttagagttgcatctatgaacctggggagattatgtgctttcccaagcgttccaccaccctctcagttttgtccctctgaagataattttggatcaccttgaatttccttttggacgttatttgatgaacagaaataaagtgataacaagagttatttttaaacagaactcctcttaccccccaaaacagataaacctcagtgtacaattttgaaagaagttttgccttgtaatgagtaataatttagaaagtagacagtggttgtgtttggctctcgttttattccttttacatttgttgcttctgggatttaaaaaattactaaattcataagatagttaggtattaaacacttcagaatatcaatgtaaaattggaaaataaggaactgggggcatttgtttaggccatgacttctacaagcagatttcttttcttttagtttagaagacaaaaaatttcaatacagatacttcttttagaagtaaatttttagattttattgtcagtagaaaaaagttaaactcctactaatttaaactaagacagtttaaaaaggaagcctgaaaaagactcatactacaaataatttaattgatggcatataagaatatgcagtttgaaaaagccaaactcttctctccacttagcttttgatccccactgtttgcttatttgtataagtcatactgtgtagaatttctattttctttttccccattaaaagaggaccaaacaattctttatacaaatggagtagcaactagttttgtagcactacatttaatgtaatgagatacctttgttcatttttttaaatttgaaatatactttacctgatccactttgattgtatactatattctttgttaattttaattttgtcctgttcctagactgctagaatctggcccctggccatcttaaagtgccaacatatgcctgcagggtttataaaaaatggcctggagtgacacattttattatacctaatattcactgcatcagtatcacatctagctcccttacttgtccacagataatgtaaacaaaggagggaaaaacttattaaattctccttcgctgctggcttgtgctggtttagtgcctgtgtccctggcagtgtccagtgtgttcacttccagttgaagtatccatgtgtttctgggcagcttttctgctcagtgtgatcctgagatggcttccccgccgccacccagagtgtggtccttggccgcctcctgctcctgctctgcaagcctgaaactggcttgtctggagccaggagttagtcctggggtgtgtgtgtgcctgcgcacccatgcgcatgcaagtgtgtttgccagctcaggagctgtctcctctctacctggctagtaagaggtgggacagtaatggtcctcctgctggccccagcaaggcccatgagtgactgccctgacgtattcactgtgcctctgggccacttcttcccctgtagatgtgggcttgttgccttcagccggcttccctgagggaggagaacactggattattggaaatgttttaatcactcttgccattacctacatctattagcatagatgatgaaaagctgttactggtgattatagatgagtatttccaggacaacgttctaaaagtacaattatttcttattggggagattacaggtagtttggcaaagcattgaagtacaaaggtacattttcaattaaaaagcacacttctacaaaagatttggtttttaaattatggttacacatttcagtaactcatagctgctgtgcaaattggtagaccttataagaaggcacttgtttgtaagccagagaagaaactttaattgcatcctatcagattgttgaggtgggtgtgatagtcttcaggtgcagtgcgttcattcactaacgctcactgtcagtgcccatgtttgctagctgcctccatgtgactagtgagctgctggtgaaagtcgtgtgaaatcctgtacactgtgtatagaataatgtaattttatgttaattgttattactttaaaacatatctaccatctgattggctggtaccgagagctgtgggtaaaatttgaaaattgtatttagaataagaaattttacattttaaaccctattgtcctttatgcattttcaatgaaatggaatgaaggctaatatgcttgctttatttacttttgtaatcttggattttgtagcttttaaaactagaaaccattgttctaacaaagcaggcaactttattctataaacacaactttattaagcagaatacactgtagatgcttttccccaacgtatctggctggcagtctttgtcgttgttcattctggggataaaggggaactaggctagcagttctaatgtgacattctttaagcatatcttaaaatagtatttaagtaaatggtctaatttctacataattattgcactgaacttttttgtttattaaggtgtttaaataagctcagctaattcaagacactgtagccacttgtgcatcagtgtgcttgaatttagtagcttacagcattatttatgaaggaaaaaatacataaatatgaagtacctcatgttgaatgttattgtactgtatttttaatgtaacagtgcagatcttgttagacacatgaatgtgtataatcatgttaaatgcaaataaaactagttcatagatttgttttccttta

SEQ ID NO: 254853 - protein, 669 aa, Artificial Sequence
  derived and/or modified sequence
MALLLVSLLAFLSLGSGCHHRICHCSNRVFLCQESKVTEIPSDLPRNAIELRFVLTKLRVIQKGAFSGFGDLEKIEISQNDVLEVIEADVFSNLPKLHEIRIEKANNLLYINPEAFQNLPNLQYLLISNTGIKHLPDVHKIHSLQKVLLWLNKNGIQEIHNCAFNGTQLDELNLSDNNNLEELPNDVFHGASGPVILDISRTRIHSLPSYGLENLKKLRARSTYNLKKLPTLEKLVALMEASLTYPSHCCAFANWRRQISELHPICNKSILRQEVDYMTQARGQRSSLAEDNESSYSRGFDMTYTEFDYDLCNEVVDVTCSPKPDAFNPCEDIMGYNILRVLIWFISILAITGNIIVLVILTTSQYKLTVPRFLMCNLAFADLCIGIYLLLIASVDIHTKSQYHNYAIDWQTGAGCDAAGFFTVFASELSVYTLTAITLERWHTITHAMQLDCKVQLRHAASVMVMGWIFAFAAALFPIFGISSYMKVSICLPMDIDSPLSQLYVMSLLVLNVLAFVVICGCYIHIYLTVRNPNIVSSSSDTRIAKRMAMLIFTDFLCMAPISFFAISASLKVPLITVSKAKILLVLFHPINSCANPFLYAIFTKNFRRDFFILLSKCGCYEMQAQIYRTETSSTVHNTHPRNGHCSSAPRVTSGSTYILVPLSHLAQN

SEQ ID NO: 254854 - DNA, 2176 bp, Artificial Sequence
  derived and/or modified sequence
ctgagatctgtggaggtttttctctgcaaatgcaggaagaaatcaggtggatggatgcataattatggccctgctcctggtctctttgctggcattcctgagcttgggctcaggatgtcatcatcggatctgtcactgctctaacagggtttttctctgccaagagagcaaggtgacagagattccttctgacctcccgaggaatgccattgaactgaggtttgtcctcaccaagcttcgagtcatccaaaaaggtgcattttcaggatttggggacctggagaaaatagagatctctcagaatgatgtcttggaggtgatagaggcagatgtgttctccaaccttcccaaattacatgaaattagaattgaaaaggccaacaacctgctctacatcaaccctgaggccttccagaaccttcccaaccttcaatatctgttaatatccaacacaggtattaagcaccttccagatgttcacaagattcattctctccaaaaagttttactatggctgaataagaatgggattcaagaaatacacaactgtgcattcaatggaacccaactagatgagctgaatctaagcgataataataatttagaagaattgcctaatgatgttttccacggagcctctggaccagtcattctagatatttcaagaacaaggatccattccctgcctagctatggcttagaaaatcttaagaagctgagggccaggtcgacttacaacttaaaaaagctgcctactctggaaaagcttgtcgccctcatggaagccagcctcacctatcccagccattgctgtgcctttgcaaactggagacggcaaatctctgagcttcatccaatttgcaacaaatctattttaaggcaagaagttgattatatgactcaggctaggggtcagagatcctctctggcagaagacaatgagtccagctacagcagaggatttgacatgacgtacactgagtttgactatgacttatgcaatgaagtggttgacgtgacctgctcccctaagccagatgcattcaacccatgtgaagatatcatggggtacaacatcctcagagtcctgatatggtttatcagcatcctggccatcactgggaacatcatagtgctagtgatcctaactaccagccaatataaactcacagtccccaggttccttatgtgcaacctggcctttgctgatctctgcattggaatctacctgctgctcattgcatcagttgatatccataccaagagccaatatcacaactatgccattgactggcaaactggggcaggctgtgatgctgctggctttttcactgtctttgccagtgagctgtcagtctacactctgacagctatcaccttggaaagatggcataccatcacgcatgccatgcagctggactgcaaggtgcagctccgccatgctgccagtgtcatggtgatgggctggatttttgcttttgcagctgccctctttcccatctttggcatcagcagctacatgaaggtgagcatctgcctgcccatggatattgacagccctttgtcacagctgtatgtcatgtccctccttgtgctcaatgtcctggcctttgtggtcatctgtggctgctatatccacatctacctcacagtgcggaaccccaacatcgtgtcctcctctagtgacaccaggatcgccaagcgcatggccatgctcatcttcactgacttcctctgcatggcacccatttctttctttgccatttctgcctccctcaaggtgcccctcatcactgtgtccaaagcaaagattctgctggttctgtttcaccccatcaactcctgtgccaaccccttcctctatgccatctttaccaaaaactttcgcagagatttcttcattctgctgagcaagtgtggctgctatgaaatgcaagcccaaatttataggacagaaacttcatccactgtccacaacacccatccaaggaatggccactgctcttcagctcccagagtcaccagtggttccacttacatacttgtccctctaagtcatttagcccaaaactaaaacacaatgtgaaaatgtatctgagtattgaatgataattcagtcttgcctttgaagggtatgtcacaaagagctgacagtgcttctacacatttcatctaa

SEQ ID NO: 254855 - DNA, 2588 bp, Artificial Sequence
  derived and/or modified sequence
agttctcaagtcagatctcttctcataagggcactgtgtggagcttctgagatctgtggaggtttttctctgcaaatgcaggaagaaatcaggtggatggatgcataattatggccctgctcctggtctctttgctggcattcctgagcttgggctcaggatgtcatcatcggatctgtcactgctctaacagggtttttctctgccaagagagcaaggtgacagagattccttctgacctcccgaggaatgccattgaactgaggtttgtcctcaccaagcttcgagtcatccaaaaaggtgcattttcaggatttggggacctggagaaaatagagatctctcagaatgatgtcttggaggtgatagaggcagatgtgttctccaaccttcccaaattacatgaaattagaattgaaaaggccaacaacctgctctacatcaaccctgaggccttccagaaccttcccaaccttcaatatctgttaatatccaacacaggtattaagcaccttccagatgttcacaagattcattctctccaaaaagttttacttgacattcaagataacataaacatccacacaattgaaagaaattctttcgtggggctgagctttgaaagtgtgattctatggctgaataagaatgggattcaagaaatacacaactgtgcattcaatggaacccaactagatgagctgaatctaagcgataataataatttagaagaattgcctaatgatgttttccacggagcctctggaccagtcattctctctgagcttcatccaatttgcaacaaatctattttaaggcaagaagttgattatatgactcaggctaggggtcagagatcctctctggcagaagacaatgagtccagctacagcagaggatttgacatgacgtacactgagtttgactatgacttatgcaatgaagtggttgacgtgacctgctcccctaagccagatgcattcaacccatgtgaagatatcatggggtacaacatcctcagagtcctgatatggtttatcagcatcctggccatcactgggaacatcatagtgctagtgatcctaactaccagccaatataaactcacagtccccaggttccttatgtgcaacctggcctttgctgatctctgcattggaatctacctgctgctcattgcatcagttgatatccataccaagagccaatatcacaactatgccattgactggcaaactggggcaggctgtgatgctgctggctttttcactgtctttgccagtgagctgtcagtctacactctgacagctatcaccttggaaagatggcataccatcacgcatgccatgcagctggactgcaaggtgcagctccgccatgctgccagtgtcatggtgatgggctggatttttgcttttgcagctgccctctttcccatctttggcatcagcagctacatgaaggtgagcatctgcctgcccatggatattgacagccctttgtcacagctgtatgtcatgtccctccttgtgctcaatgtcctggcctttgtggtcatctgtggctgctatatccacatctacctcacagtgcggaaccccaacatcgtgtcctcctctagtgacaccaggatcgccaagcgcatggccatgctcatcttcactgacttcctctgcatggcacccatttctttctttgccatttctgcctccctcaaggtgcccctcatcactgtgtccaaagcaaagattctgctggttctgtttcaccccatcaactcctgtgccaaccccttcctctatgccatctttaccaaaaactttcgcagagatttcttcattctgctgagcaagtgtggctgctatgaaatgcaagcccaaatttataggacagaaacttcatccactgtccacaacacccatccaaggaatggccactgctcttcagctcccagagtcaccagtggttccacttacatacttgtccctctaagtcatttagcccaaaactaaaacacaatgtgaaaatgtatctgagtattgaatgataattcagtcttgcctttgaagggtatgtcacaaagagctgacagtgcttctacacatttcatctaatttaatattcctggcatacctttaaggtaaattggtcaggaactattaattccatgtgatacattaggaagctgaattattagtaacaacaataataattaaagaatgcaatactgtattacatattttatccttatatatgttatttttgcacgttatgttcaaagtgcttttgttcagatatctcaagtgatccctgttaaataagcaggacagggattattcttggagttttacaaatgaggaaaccacgactcaaagagttaagtgacttgttcaaaattgtttagtttgtaagaggcagagccaggattaggtattccgactcccagagaatttcccagagaagcaccatggtattcattcattcattcattcaacaaatattaattgaacacccatctgaagcctttgtaatgcgtcagtgtggataggctgaaatacatttcccagatttcccttcctcatgtgttt

SEQ ID NO: 254856 - DNA, 2010 bp, Artificial Sequence
  derived and/or modified sequence
atggcactgcttctggtaagcttactggctttcttgagcctaggatctggttgtcaccatcggatctgccactgcagtaaccgcgtgtttctttgtcaggagtccaaagttacagagattccgtcagacctgccccgcaatgcgatcgagctgcggtttgttctgaccaaactgcgggttatccagaaaggcgctttttcaggatttggcgatctggagaaaatcgagatcagccaaaacgatgtgcttgaagtgatcgaggcagacgtgtttagcaaccttccaaagctgcacgaaatcaggattgaaaaggctaataacctgttgtatataaaccctgaagctttccagaacttgcctaacttgcagtacctcctgatatcaaataccggtattaagcacctgccggacgtacataaaattcattcgctacaaaaggtgctgctgtggttgaacaagaatggaattcaggagattcacaactgcgcatttaatggtacccaactcgatgaactgaatttgagcgataataacaacctagaagagctccccaatgatgtatttcacggcgccagtggcccggttatattggatatttcccggacaaggatccatagcctgcctagctacgggcttgaaaacttgaagaaactacgggcgcgtagcacctacaatctgaagaagttgcccacccttgagaaattggtcgctttgatggaagccagcctgacctacccaagtcactgctgcgcttttgcgaattggcgacgtcagatcagtgaactgcacccaatctgcaacaagtcgatactccgccaagaggttgattacatgactcaggctaggggccagcggtcaagcttagcggaggataacgagagttcctactcacgcggattcgacatgacctacaccgagtttgattatgatctctgcaacgaggtggtggacgtgacctgctcccccaagcctgacgccttcaacccttgtgaggacatcatggggtataacatcctgcgagtactgatctggtttatatccatattggcaattaccggcaatataatcgttctagtaatccttacaacatctcagtataaactgacagtcccgcgcttccttatgtgtaacctggctttcgctgatctctgtatcggaatttatctcctgctgatagcctcagtcgatatccacacaaagagccagtaccacaattacgctatagattggcagacgggagcaggctgcgacgctgccggcttttttacagtcttcgcgtcagaactgagcgtgtacaccctgacagcaatcaccctggaaagatggcatacaatcacacatgccatgcagctggattgcaaggtgcagttgaggcatgcagcttccgtgatggtcatgggttggatctttgccttcgcagcagctttatttcccatctttggcatctcatcatatatgaaggtgtctatctgtctgcccatggacatagactcacccttgtcccagctttacgtgatgtcactgctggtcctcaacgtgctcgccttcgtggtgatttgcggatgttacatccatatatatctcaccgtgagaaatccgaatattgtgtctagctcctcagacacacgaatcgctaaaagaatggctatgctgatattcacggacttcctctgcatggctcctataagctttttcgcgatctccgcaagcctaaaggtgcccttgattacagtgagtaaggctaagatcctgttagttttgtttcaccccatcaattcttgcgccaacccatttctgtacgctattttcactaagaatttcagacgcgattttttcatcctcctgagcaagtgtggctgttatgagatgcaggcccaaatttataggacagaaacttcatcaacagtccataacacccacccgcgaaatggccattgttcgagtgcccctcgcgtaactagcggtagcacgtacatactcgtgcccctctcgcacctggctcagaattag

SEQ ID NO: 254857 - DNA, 1902 bp, Artificial Sequence
  derived and/or modified sequence
atggcccttctgctggtcagtctgcttgcctttctgagtctgggctctggctgccaccacagaatttgtcattgctctaaccgagtgttcctttgccaggaatcaaaagtgactgaaatccctagtgatctgcccagaaatgcaattgagctacggttcgttctgaccaaattgcgcgtcatccagaagggtgccttttccgggttcggtgacctggaaaagattgagatttcacagaatgacgtgctcgaggtgatagaggccgacgtctttagcaatcttcccaagcttcacgaaattcgcattgaaaaggccaataatcttttgtacattaatcccgaagcctttcagaatctgcccaacctacaataccttctcatcagcaacaccggcatcaagcatctgcccgacgtgcataaaattcactcattacaaaaagtgctactggatatccaggacaatatcaatatccacaccattgagcgaaattcctttgtcggcctttccttcgaaagcgttattctatggctaaacaagaacggcattcaagaaatccacaattgtgctttcaatggaacccagctggacgagctgaatctgtcggataataataacttggaagaactgcctaatgacgtttttcacggagcctccggccccgtgattttgtcagagttacatccaatctgcaacaagagtattctcagacaggaagtcgactacatgacccaagcacggggccagcgatctagtctcgctgaagacaatgagtcctcgtactcccggggattcgatatgacatacactgaatttgactacgatttgtgcaatgaggtggtggacgtcacctgcagtccgaagcctgatgctttcaacccctgcgaagatattatggggtataacatcctacgtgttctgatttggtttattagtatcttggccattaccggcaacatcattgtcctcgtaatcctcactacttcccagtacaaactaacagtgccccggttcctgatgtgcaatttggctttcgccgatttatgtatcggcatctacctcttgttaattgcgagtgtggacatccatacaaaatcccaatatcacaattatgctatcgactggcagactggcgctggatgcgatgctgccggcttctttacggtatttgcttccgagctctcagtctacacattgactgccattaccctagaacgttggcacacaattacacacgccatgcagttggactgtaaggttcagctgcgacatgccgcttccgtgatggtcatgggatggatttttgccttcgcagccgccctatttcccattttcggaatttccagttacatgaaggtttccatctgtctcccgatggatattgactctcccctgagtcaactgtatgtcatgagcctcctggttcttaacgttcttgctttcgttgtaatttgcggatgttacattcatatatacctcactgttcgtaatcccaatatcgtgtcttcgagctctgacactcgcatcgcaaagcgaatggccatgctgatcttcactgattttttatgtatggctccaataagctttttcgccatctctgcaagtctgaaggtgccattgataacagtctcaaaggccaagattttgttggtcctgtttcaccccatcaacagttgcgccaacccgttcctgtacgcgattttcaccaagaactttagaagggattttttcatcctgctgagcaaatgcggctgttacgaaatgcaggcccagatctatcgcacagagacatcgtcgacagtgcataatactcaccccagaaacgggcattgcagctcagcccccagggtcactagcggctcaacttacattctcgtgcctttatcccacctcgcacagaattag

SEQ ID NO: 254858 - DNA, 2010 bp, Artificial Sequence
  derived and/or modified sequence
atggccctgctgctggtgtccctgctggccttcctgagcctgggcagcggctgccaccaccgcatctgccactgcagcaacagagtcttcctgtgccaggagagcaaggtgacagagatccccagcgacctgcccagaaatgccatcgagctgcgctttgtgctgaccaagctgcgggtcatccagaagggggccttcagcggctttggagacctggagaagattgagatcagccagaatgatgtgctggaggtgattgaagcagatgtgttcagcaacctgcccaagctgcacgagatccgcatcgagaaggccaacaacctgctgtacatcaaccctgaggccttccagaacctgcccaacctgcagtacctgctgatcagcaacacaggcatcaagcacctgcctgatgtgcacaagatccacagcctgcagaaggtgctgctgtggctgaacaagaatggcatccaggagatccacaactgtgccttcaacggcacccagctggatgagctgaacctgagtgacaacaacaacctggaggagctgcccaatgatgtgttccatggagccagcggccctgtgatcctggacatcagcaggacccgcatccacagcctgcccagctatggcctggagaacctgaagaagctgcgggcccggagcacctacaacctgaagaagctgcccaccctggagaagctggtggccctgatggaggccagcctgacctaccccagccactgctgtgcctttgccaactggaggcggcagatcagcgagctgcaccccatctgcaacaagagcatcctgcggcaggaggtggactacatgacccaggcccggggccagaggagcagcctggccgaggacaatgaaagcagctacagccggggctttgacatgacctacacagaatttgattatgacctgtgcaatgaggtggtggatgtgacctgcagccccaagccagatgccttcaacccctgtgaggacatcatgggctacaacatcctgcgggtgctgatctggttcatcagcatcctggccatcaccggcaacatcatcgtgctggtgatcctgaccaccagccagtacaagctgactgtgccccgcttcctgatgtgcaacctggcctttgctgacctgtgcatcggcatctacctgctgctgattgcctctgtggacatccacaccaagagccagtaccacaactatgccatcgactggcagacaggagctggctgtgatgctgctggcttcttcaccgtgtttgccagcgagctgtctgtgtacaccctgacagccatcaccctggagcgctggcacaccatcacccacgccatgcagctggactgcaaggtgcagctgcggcatgctgcctctgtgatggtgatgggctggatctttgcctttgctgctgccctcttccccatcttcggcatcagcagctacatgaaggtgtccatctgcctgcccatggacatcgacagccccctgagccagctgtatgtgatgagcctgctggtgctgaatgtgctggcctttgtggtgatctgtggctgctacatccacatctacctgactgtgaggaaccccaacatcgtgagcagcagcagtgacacccgcatcgccaagaggatggccatgctgatcttcacagacttcctgtgcatggcccccatctccttctttgccatcagcgccagcctgaaggtgcccctcatcaccgtgtccaaggccaagatcctgctggtgctcttccaccccatcaacagctgtgccaaccccttcctgtatgccatcttcaccaagaacttccggcgggacttcttcatcctgctgagcaaatgtggctgctatgagatgcaggcccagatctacagaacagagaccagcagcacagtgcacaacacccaccccagaaatggccactgcagcagcgccccccgggtgaccagcggcagcacctacatcctggtgcccctgagccacctggcccagaactag

SEQ ID NO: 254859 - DNA, 1902 bp, Artificial Sequence
  derived and/or modified sequence
atggccctgctgctggtgtccctgctggccttcctgagcctgggcagcggctgccaccaccgcatctgccactgcagcaacagagtcttcctgtgccaggagagcaaggtgacagagatccccagcgacctgcccagaaatgccatcgagctgcgctttgtgctgaccaagctgcgggtcatccagaagggggccttcagcggctttggagacctggagaagattgagatcagccagaatgatgtgctggaggtgattgaagcagatgtgttcagcaacctgcccaagctgcacgagatccgcatcgagaaggccaacaacctgctgtacatcaaccctgaggccttccagaacctgcccaacctgcagtacctgctgatcagcaacacaggcatcaagcacctgcctgatgtgcacaagatccacagcctgcagaaggtgctgctggacatccaggacaacatcaacatccacaccatcgagaggaacagctttgtgggcctgagctttgagagcgtcatcctgtggctgaacaagaatggcatccaggagatccacaactgtgccttcaacggcacccagctggatgagctgaacctgagtgacaacaacaacctggaggagctgcccaatgatgtgttccatggagccagcggccctgtgatcctgtctgagctgcaccccatctgcaacaagagcatcctgcggcaggaggtggactacatgacccaggcccggggccagaggagcagcctggccgaggacaatgaaagcagctacagccggggctttgacatgacctacacagaatttgattatgacctgtgcaatgaggtggtggatgtgacctgcagccccaagccagatgccttcaacccctgtgaggacatcatgggctacaacatcctgcgggtgctgatctggttcatcagcatcctggccatcaccggcaacatcatcgtgctggtgatcctgaccaccagccagtacaagctgactgtgccccgcttcctgatgtgcaacctggcctttgctgacctgtgcatcggcatctacctgctgctgattgcctctgtggacatccacaccaagagccagtaccacaactatgccatcgactggcagacaggagctggctgtgatgctgctggcttcttcaccgtgtttgccagcgagctgtctgtgtacaccctgacagccatcaccctggagcgctggcacaccatcacccacgccatgcagctggactgcaaggtgcagctgcggcatgctgcctctgtgatggtgatgggctggatctttgcctttgctgctgccctcttccccatcttcggcatcagcagctacatgaaggtgtccatctgcctgcccatggacatcgacagccccctgagccagctgtatgtgatgagcctgctggtgctgaatgtgctggcctttgtggtgatctgtggctgctacatccacatctacctgactgtgaggaaccccaacatcgtgagcagcagcagtgacacccgcatcgccaagaggatggccatgctgatcttcacagacttcctgtgcatggcccccatctccttctttgccatcagcgccagcctgaaggtgcccctcatcaccgtgtccaaggccaagatcctgctggtgctcttccaccccatcaacagctgtgccaaccccttcctgtatgccatcttcaccaagaacttccggcgggacttcttcatcctgctgagcaaatgtggctgctatgagatgcaggcccagatctacagaacagagaccagcagcacagtgcacaacacccaccccagaaatggccactgcagcagcgccccccgggtgaccagcggcagcacctacatcctggtgcccctgagccacctggcccagaactag

SEQ ID NO: 254860 - DNA, 2010 bp, Artificial Sequence
  derived and/or modified sequence
atggccctgctgctggtgagcctgctggccttcctgagcctgggctctgggtgtcatcatcgtatttgtcactgttccaaccgggttttcctgtgccaggaatcaaaggtgaccgaaattcccagcgatctaccacggaacgctatcgagctacgctttgttcttacaaagctgcgtgtcattcagaaaggagccttcagcggtttcggtgacctggagaaaattgaaatcagtcaaaacgatgtattagaggtgatagaagcagatgtgtttagcaatctgcctaaattgcacgagattagaatcgagaaagctaacaacctcctatacatcaaccccgaagcttttcagaatttacccaatttgcagtacctcctcatcagcaacaccggcatcaagcatctgcccgatgtgcacaagatccattctctccaaaaagtgcttctctggctcaacaagaacgggatccaggagatccataactgtgcctttaacgggacccagctggatgaactgaacctctcagacaataacaacctcgaagaactccctaatgacgtatttcatggtgcctcagggccggttatactcgacatctcaagaactcgcattcactccctcccaagctacggcttggagaaccttaaaaaactcagagcgcggagcacctataatttaaaaaagctcccaacattagagaaattggtcgccctgatggaggcctcactgacatatccctctcactgctgcgcctttgccaattggcggaggcagatctcagagcttcatcccatctgcaacaaatcaatcctgaggcaggaagtggactatatgacccaggcccggggccagcgatcctctttggcagaggacaacgaatcatcttattcccgcgggttcgatatgacatacacggagttcgactatgacctttgtaatgaggtggtcgacgtgacatgttctccgaagccggatgctttcaatccatgtgaggatatcatggggtacaatattttacgcgtcctgatatggtttatatctatactcgcaataacaggtaatatcattgtgctagttatacttaccacatcccagtacaaacttaccgttccacgatttctaatgtgtaatctcgcattcgcggacctatgcatcggaatttacctgctgctgatcgcgtctgtggatattcacaccaagtcccaatatcacaactatgcaatagactggcagacaggcgccggctgtgacgcagcaggcttcttcacagtattcgcctcagaactgtccgtgtacaccctgaccgctattacgctcgaacgttggcacaccattactcacgccatgcagctcgattgcaaagtccagctgcgtcacgctgcttccgtgatggtcatggggtggatcttcgcatttgccgcagctctcttcccgatcttcggaattagttcctatatgaaggtgtccatatgcctgcccatggatatagatagccccctgtctcagctctatgtgatgagcctgctggtgctgaatgtccttgccttcgtcgttatctgcggatgttacatccacatttatctaaccgttagaaaccctaacattgtatcttcatcatccgatacaagaatcgccaagagaatggcaatgttgatcttcacagacttcctatgcatggcccctatatctttctttgccatatccgcttctcttaaggtgcccctcatcactgtgagcaaggccaaaattctcctcgtgttatttcaccccattaatagttgtgccaacccctttttgtacgccatctttacaaagaattttaggcgggactttttcatcctgctcagcaaatgtggctgttatgagatgcaagctcaaatctacagaacagagacaagctctactgtccataatacccacccacgtaacggccactgcagttcggcgccaagggtaacttcaggctctacgtatatcctcgtgccactgtcccatctcgcacagaactag

SEQ ID NO: 254861 - DNA, 1902 bp, Artificial Sequence
  derived and/or modified sequence
atggccctgctgctggtgagcctgctggccttcctgagcctgggcagcggctgccatcatagaatatgtcattgctctaatcgtgtgttcctgtgccaggagtccaaggtcaccgagattccttcggatctccccagaaacgctattgaattgcggttcgtactcactaagttgagggtaatccagaagggggcattttctggattcggggatcttgagaagattgagatatcacagaatgatgtgctggaggtgattgaagcagatgtgttctccaacctaccaaagctccacgaaattcgcatcgagaaggctaacaatctgctgtatatcaaccctgaagcgtttcaaaacttgcctaatctgcagtatctgctgatttcaaataccggtatcaagcatctcccagatgtccacaagattcactctctgcagaaagttctgcttgacatccaggacaacatcaacattcacactatcgagcgtaattcctttgtaggtctctcctttgaatcagtcattttgtggttgaacaagaacggaattcaggagatccataattgtgcattcaatggcacccaattggatgaattgaatttgtctgataacaacaaccttgaagaactgccgaatgatgtgtttcatggggcctctggtcctgtaatactgagcgagttgcaccccatctgcaataagtcaatactgagacaggaggtggactatatgacccaggctcgggggcagagaagcagcctggctgaagacaatgaatcgtcatatagccgggggtttgacatgacgtacactgaattcgattatgatctgtgtaacgaggtagtggacgtaacgtgtagccccaaaccagatgcgttcaacccttgtgaagatataatggggtataatatcttgcgggttttaatttggttcatttcaatcctcgctataaccgggaatataattgtccttgttatcttgactacttcccagtacaaactgactgtgcctcggttcctgatgtgtaacttggcctttgcggatctgtgcatcgggatatacctgctgctgatcgcgtcagtggatatacatactaaaagccagtaccacaactatgcgattgactggcagactggtgcaggatgtgacgcagctggatttttcacagtattcgcctccgagttatctgtgtatactttaacggcaatcacactggagcggtggcatacaatcacacacgcaatgcagttagactgtaaagtgcagctccgacacgctgcttccgtcatggttatgggctggatcttcgcctttgcagctgccctatttccaatcttcgggatcagcagctacatgaaggtatccatctgtcttccaatggacattgattcgcctctgagtcagctgtatgtgatgagcttactggttctgaacgttctggcttttgtggtgatatgcggatgctacattcacatctacctgaccgtgcgcaatccaaacatcgtgtcatccagttccgatacaaggattgctaagcgcatggcaatgctgatctttactgattttctttgcatggcgcctatctcattttttgcaatcagcgcaagtctgaaggtgcctttaattaccgtcagcaaggcaaagattctgctggtactgtttcaccccatcaattcgtgtgccaacccttttctttacgctatttttaccaaaaatttccgtcgcgatttctttattctgctcagcaaatgcggctgttacgagatgcaggcacagatctaccggacggaaacctcttcgacagtacataacactcatccccggaatgggcattgttcatcagccccgagagtgacttcaggttctacatacatactggtgcccctctcacatctcgcgcaaaactag

SEQ ID NO: 254862 - DNA, 2010 bp, Artificial Sequence
  derived and/or modified sequence
atggcacttctcctcgtttccttgttagccttcctctcccttggcagtggctgccaccataggatttgtcactgttctaaccgcgtgtttttatgtcaagaatctaaggtcactgaaattccttctgatctgccaagaaatgcgattgagctgcgctttgtgcttactaaactccgtgtcattcagaagggagctttctcaggctttggagacctggagaagatcgaaatcagtcaaaatgatgtgctcgaggtcatcgaggccgatgtgttctctaatctgccaaagctgcatgagattagaattgagaaggccaataacctcctgtacatcaaccccgaggcctttcagaatcttcctaacttgcagtacctattgatttcgaacacaggaatcaagcatctgcccgacgtccacaaaatccactccttacagaaggttttgctgtggctgaataagaacggtatacaggagatccataactgtgcgtttaatggcacacaactggatgagttaaatctctccgataataacaacctggaggaactgcccaacgatgtgttccatggtgcctcagggcctgtgatactggacatctctcgtacccggattcatagtctcccttcttacggcttggaaaaccttaaaaagctgcgggcacgcagcacatataacttgaaaaaactgcctaccctggaaaaattggtggccctgatggaagcctctctgacgtacccaagccattgctgtgcctttgcaaattggcggagacagatatcggaacttcatcccatttgcaataagagtatcttacgacaggaggtggactacatgacccaggccagaggccaacgatcctccttggcagaagacaatgaatcaagctactccaggggattcgacatgacttacaccgaatttgattatgatctgtgtaacgaagtagttgatgtgacctgttcccctaaacctgacgcattcaacccctgcgaagacatcatgggttacaacatactgagagtgcttatctggtttattagtatcttagctattaccggaaacataattgttctggttatcttaaccacgtctcagtataagctcaccgtgcccaggtttctgatgtgcaacttggctttcgcggacttatgtatcgggatctatctgctcttgattgcctcagtcgacattcatactaagagccagtatcacaactacgctattgattggcagacaggggctggttgtgatgccgcaggattctttacagtctttgcctctgagctctccgtatacactctgactgccatcaccctggagaggtggcatacaatcacacatgccatgcaactggattgcaaggttcagttgagacatgctgcatcagtgatggtgatggggtggattttcgcgtttgctgctgccctgtttccaatattcggtatttctagctacatgaaagtgagcatctgcttaccaatggacattgatagccctctgagtcaactgtatgtgatgtctttgttggtcctgaatgtcttggcattcgtcgtcatttgcggctgctacattcacatctacctgactgtaaggaatcccaacattgtgagcagctcgagcgacactcggattgccaagcggatggccatgctaatttttacggatttcttgtgtatggcacccatttcgttcttcgctatttctgcctctctcaaagtgcctttaattaccgtgagtaaggctaagatcctgctggtgctgttccacccaatcaactcatgcgcaaaccccttcctatatgcaattttcacgaagaatttcagacgtgactttttcattctgctttctaagtgcggatgttatgaaatgcaggcccagatctacagaactgaaaccagctccacagtgcacaacactcatcctagaaacggacactgttcttcagcccctcgggtcacctcagggtcgacctacattctcgtacctctcagtcatctggcacagaattag

SEQ ID NO: 254863 - DNA, 1902 bp, Artificial Sequence
  derived and/or modified sequence
atggcgttgttactcgtatcattgttagctttcctctccctcggaagtgggtgccatcacaggatttgtcactgctctaatcgtgtattcctgtgtcaggagtcaaaggtgaccgagatcccaagcgacctcccgaggaatgctatcgagctgcggtttgtgctcaccaagctccgagttattcaaaaaggtgctttcagcggattcggcgaccttgaaaaaattgagatcagccagaatgacgtccttgaggttatagaagctgacgtgttttcaaatctgccaaagctgcatgagattcggattgaaaaagccaataaccttctgtacattaatcccgaggcgttccaaaatctgccgaatttgcagtatctccttatctccaacacaggtatcaagcacctccccgacgttcacaagatacatagcctccaaaaagtgctgttagatattcaggacaacattaacatccatacgatcgaaagaaacagctttgtgggcttatccttcgagagcgtgattctatggctgaataagaacgggatccaggaaattcataattgtgccttcaatggcactcagttagatgaattaaacctgtctgacaataataatcttgaagagttgcccaatgatgtcttccatggggcatccggcccagtcattctctctgagctgcatccaatttgtaacaagtctatcctgcgccaggaagttgattatatgactcaggcaagagggcaacgatccagtttagcagaagataacgagagctcatatagcagagggtttgacatgacctatacagagttcgattatgatctctgcaatgaggttgtcgatgtgacatgtagccccaagcctgatgccttcaacccctgtgaggatatcatggggtataatatcctgagagtactcatatggttcatttctattctagccattaccggaaatattatcgttcttgtgatacttactacttcccaatacaaactcacagtccctaggttcctcatgtgtaatctcgcctttgcggacctgtgtatcggcatatacctgctgctgatcgcctcagtcgatatccataccaagagccaatatcataactatgccatcgattggcaaacaggtgccggatgtgacgctgcagggttcttcaccgtgttcgcatctgagttgtcagtgtatacactgaccgccataactctggaacgctggcatactattactcacgccatgcagcttgactgtaaggttcaactccgccatgctgcctccgtaatggttatgggctggatattcgcattcgctgctgcactcttccccatctttggtatctcctcctacatgaaggtgtcaatctgcctgcctatggacatcgactccccattaagccagctatatgtgatgtctttgctcgtgttgaacgtgctggccttcgtcgttatctgtgggtgttacatacacatctaccttaccgtgcgaaatcccaatatcgtttcaagtagctcagatactcggattgccaaaaggatggccatgttgatttttaccgactttttgtgtatggctccaatcagtttctttgcaatctctgcttcgctgaaagtacccctaataaccgtcagtaaagccaaaatcctgttggtactgtttcatcccatcaacagttgtgctaacccgtttctctacgcgatttttactaaaaacttccggagggatttcttcatcttgctctctaaatgcggttgctatgagatgcaggcccaaatttaccggactgagacctcttcgactgtgcataacactcaccccagaaacggacattgctcatccgctccgagggtcacatctggctccacctatatcctggtgccgctctcacacttggctcaaaactag
